United States Patent Application Publication US 2006/0257851 A1 - sequence listing, part 9

SEQ ID NO: 278977 - RNA, 32 nt, Homo Sapiens
cggccaaggggagugacaacagccagacauga

SEQ ID NO: 278978 - RNA, 32 nt, Homo Sapiens
ggcucggggcgccgaggcuuccgcgcccgcug

SEQ ID NO: 278979 - RNA, 31 nt, Homo Sapiens
cacuccccaaccaccaccuggucucccagcc

SEQ ID NO: 278980 - RNA, 32 nt, Homo Sapiens
uuucguuuucuucuucacaauugauggugcuu

SEQ ID NO: 278981 - RNA, 32 nt, Homo Sapiens
uaaaguaaaaacuacaugauuuauuuucgggc

SEQ ID NO: 278982 - RNA, 32 nt, Homo Sapiens
uuaauuaagauaugaagugcucauuuuuuuuu

SEQ ID NO: 278983 - RNA, 32 nt, Homo Sapiens
ucacgcgagcccggcgucccgccgcgugcgcc

SEQ ID NO: 278984 - RNA, 32 nt, Homo Sapiens
uaaagaggcagguggaaugagaaggacucugu

SEQ ID NO: 278985 - RNA, 32 nt, Homo Sapiens
gaacauggucugaugcaaaggucuucuaccga

SEQ ID NO: 278986 - RNA, 32 nt, Homo Sapiens
aauaugugcagggagauuccuccccacagagu

SEQ ID NO: 278987 - RNA, 32 nt, Homo Sapiens
uuugaguauguacaggcugaauguugagugau

SEQ ID NO: 278988 - RNA, 32 nt, Homo Sapiens
auucagccggugcgcgcggcggcgggaggcag

SEQ ID NO: 278989 - RNA, 32 nt, Homo Sapiens
gacacguggggugugcugcugcugcuccccag

SEQ ID NO: 278990 - RNA, 32 nt, Homo Sapiens
uugcucgcuucccccgggccuggaguggcucc

SEQ ID NO: 278991 - RNA, 32 nt, Homo Sapiens
ccucuugccaccaaauaccacacacacuucag

SEQ ID NO: 278992 - RNA, 32 nt, Homo Sapiens
ggaaauggaagcuacagacaucugaagcaucu

SEQ ID NO: 278993 - RNA, 32 nt, Homo Sapiens
aguggaaaucucuauagaucgucagcucauuu

SEQ ID NO: 278994 - RNA, 32 nt, Homo Sapiens
agaucaucgccuggggggccuuugccaacgug

SEQ ID NO: 278995 - RNA, 30 nt, Homo Sapiens
ggcuggcuagucaugggggagcccaguaga

SEQ ID NO: 278996 - RNA, 32 nt, Homo Sapiens
aacuaggagaucaagagauaauaaucucuccc

SEQ ID NO: 278997 - RNA, 32 nt, Homo Sapiens
gaaaacacccucaaaggaacaaauaugaaaca

SEQ ID NO: 278998 - RNA, 32 nt, Homo Sapiens
aaagaacaugaacucaucauuuuuuauggcug

SEQ ID NO: 278999 - RNA, 32 nt, Homo Sapiens
aggaggcgcuccccgggccgcugcugagccgg

SEQ ID NO: 279000 - RNA, 32 nt, Homo Sapiens
gcugcuuugggaacugaagguuuuucuguugg

SEQ ID NO: 279001 - RNA, 32 nt, Homo Sapiens
uaggcuggcaucaaagagcuuuccaagaaaug

SEQ ID NO: 279002 - RNA, 32 nt, Homo Sapiens
ggauggccaucccacauuccuuuaacggaggu

SEQ ID NO: 279003 - RNA, 32 nt, Homo Sapiens
auguaugcugaagacugguaaauauuaaacau

SEQ ID NO: 279004 - RNA, 32 nt, Homo Sapiens
aggaggaggggagggugggagcgccucucuuu

SEQ ID NO: 279005 - RNA, 32 nt, Homo Sapiens
gacccagcaccaacauuagcacuugaagaacu

SEQ ID NO: 279006 - RNA, 32 nt, Homo Sapiens
ggcaccaagccacucuacguggcacuggccca

SEQ ID NO: 279007 - RNA, 32 nt, Homo Sapiens
gugcccccugauggcucuggcuguccugaucc

SEQ ID NO: 279008 - RNA, 32 nt, Homo Sapiens
ucuaccaaaaauacaggaaauuaucugggcau

SEQ ID NO: 279009 - RNA, 32 nt, Homo Sapiens
agauggcguggccuuccaaacauacaaacaua

SEQ ID NO: 279010 - RNA, 32 nt, Homo Sapiens
aguugaaguaucacagaguaaauacaaugcuc

SEQ ID NO: 279011 - RNA, 32 nt, Homo Sapiens
aaaaaaagaaaauaaauacauaaaaaagggac

SEQ ID NO: 279012 - RNA, 32 nt, Homo Sapiens
agagggcugagccauggggguuuggggcuaag

SEQ ID NO: 279013 - RNA, 32 nt, Homo Sapiens
uuucugcucccucucuuuccaucuguuuggcu

SEQ ID NO: 279014 - RNA, 32 nt, Homo Sapiens
acugugccuucaaaaugaaauuuuuaaaaggg

SEQ ID NO: 279015 - RNA, 32 nt, Homo Sapiens
uaacaauaaaaaguaagguaaauacacaaacc

SEQ ID NO: 279016 - RNA, 32 nt, Homo Sapiens
caggaauucagaggcuggccuugugcccuggc

SEQ ID NO: 279017 - RNA, 29 nt, Homo Sapiens
cuaucaucucaguucagaggcaacgaaac

SEQ ID NO: 279018 - RNA, 32 nt, Homo Sapiens
uucucuuuaauaaaaauccuuuuuguaaguuc

SEQ ID NO: 279019 - RNA, 32 nt, Homo Sapiens
cgaggcucccguccucucucgguccugaugca

SEQ ID NO: 279020 - RNA, 32 nt, Homo Sapiens
uguuacuuucuuaaaugaaaaugaagguaaca

SEQ ID NO: 279021 - RNA, 32 nt, Homo Sapiens
ggacugugcagguagaagcccugccagcagag

SEQ ID NO: 279022 - RNA, 32 nt, Homo Sapiens
augugggcaggacccaccugguggccucugcc

SEQ ID NO: 279023 - RNA, 32 nt, Homo Sapiens
cuuguacacacacacacacacacacacaaaca

SEQ ID NO: 279024 - RNA, 32 nt, Homo Sapiens
aaugggauggaaaguuuacugaaaauaccugu

SEQ ID NO: 279025 - RNA, 32 nt, Homo Sapiens
gcccuucccggcccuggcggggugcuggacac

SEQ ID NO: 279026 - RNA, 32 nt, Homo Sapiens
auucagcagacaccgaggccugcugcacccuu

SEQ ID NO: 279027 - RNA, 32 nt, Homo Sapiens
cucccaccaucauuuuaaccuuccucagguuu

SEQ ID NO: 279028 - RNA, 32 nt, Homo Sapiens
acagcuacagagccaccuccucacuaguggcc

SEQ ID NO: 279029 - RNA, 32 nt, Homo Sapiens
uugcaagacaccuguuuaucaccuuguuuaaa

SEQ ID NO: 279030 - RNA, 32 nt, Homo Sapiens
cggggccagcacuguggagacacaccaggggu

SEQ ID NO: 279031 - RNA, 32 nt, Homo Sapiens
uagucaaaugaaauggaaauugguaaauggac

SEQ ID NO: 279032 - RNA, 32 nt, Homo Sapiens
acuccugcuggggcuccuccaggacaagggca

SEQ ID NO: 279033 - RNA, 32 nt, Homo Sapiens
gcauucuguagaauuauacaugucuaguuugu

SEQ ID NO: 279034 - RNA, 32 nt, Homo Sapiens
uuacuuaaauguuuuaauuggacuguaguuua

SEQ ID NO: 279035 - RNA, 32 nt, Homo Sapiens
cugcugcccucuugcgcgcgggaagcagcacc

SEQ ID NO: 279036 - RNA, 32 nt, Homo Sapiens
ggauauauuuuuaaauucuuugaaacacauaa

SEQ ID NO: 279037 - RNA, 32 nt, Homo Sapiens
ucucuccccuggaagcacuggguugaacuugc

SEQ ID NO: 279038 - RNA, 32 nt, Homo Sapiens
acuccugaucuaaacacccauccuccaacucc

SEQ ID NO: 279039 - RNA, 32 nt, Homo Sapiens
cccugaauuuccacauuggacaauggugcaug

SEQ ID NO: 279040 - RNA, 32 nt, Homo Sapiens
uggucagucaggcuuccauuuagcauggcguu

SEQ ID NO: 279041 - RNA, 32 nt, Homo Sapiens
uucaucauaaaauccaaauaaucuuguaaccu

SEQ ID NO: 279042 - RNA, 32 nt, Homo Sapiens
gcggcuggaccuucgagacaaugggcucugug

SEQ ID NO: 279043 - RNA, 32 nt, Homo Sapiens
auucagacugguuucuguuuuuugguuauuaa

SEQ ID NO: 279044 - RNA, 32 nt, Homo Sapiens
gucgcucgccugggugccuggagcugagcugc

SEQ ID NO: 279045 - RNA, 32 nt, Homo Sapiens
cccaucuuuaccaaaaauaagcuggguguggu

SEQ ID NO: 279046 - RNA, 32 nt, Homo Sapiens
ugagucuguggaggcaccgacuucuccuguaa

SEQ ID NO: 279047 - RNA, 32 nt, Homo Sapiens
ugagaguaauugcuugacaacaaccuaugcac

SEQ ID NO: 279048 - RNA, 32 nt, Homo Sapiens
gcuauauagaaaguuuaguugacugcuggacc

SEQ ID NO: 279049 - RNA, 32 nt, Homo Sapiens
uugcuucugcggcuucgguggagacaguuaug

SEQ ID NO: 279050 - RNA, 32 nt, Homo Sapiens
aaaugugaucccaauguuggaaguggggccug

SEQ ID NO: 279051 - RNA, 32 nt, Homo Sapiens
auauggaauaagcagguauaaaaaauauuuua

SEQ ID NO: 279052 - RNA, 32 nt, Homo Sapiens
aaauacuuugucagaaauagugccaaguuuuc

SEQ ID NO: 279053 - RNA, 32 nt, Homo Sapiens
cccacgucauggcgccugaggagaacgcgggu

SEQ ID NO: 279054 - RNA, 28 nt, Homo Sapiens
agcggggccgccccgccgagguuuguag

SEQ ID NO: 279055 - RNA, 32 nt, Homo Sapiens
ugaccuggcuagguagggagggggugguuauc

SEQ ID NO: 279056 - RNA, 32 nt, Homo Sapiens
uuugacugcauaaguauuauuuuaggucauaa

SEQ ID NO: 279057 - RNA, 32 nt, Homo Sapiens
ccuuacaaagauuucugcagugauuuguguga

SEQ ID NO: 279058 - RNA, 32 nt, Homo Sapiens
gauugagagcagccucuugaaugcuuaaauga

SEQ ID NO: 279059 - RNA, 32 nt, Homo Sapiens
uuaagaauuuuggggcuauugggauggaaugg

SEQ ID NO: 279060 - RNA, 29 nt, Homo Sapiens
caagauggcggcagcugcggcuucgcuuc

SEQ ID NO: 279061 - RNA, 32 nt, Homo Sapiens
uugaguugacuucugaccaaaggugguaaauu

SEQ ID NO: 279062 - RNA, 32 nt, Homo Sapiens
acagacugcagcugcguuacugugcugagagg

SEQ ID NO: 279063 - RNA, 30 nt, Homo Sapiens
gggggcgucugugcagagaagcgggggagu

SEQ ID NO: 279064 - RNA, 32 nt, Homo Sapiens
gauccagguuuuagcugugcugcccgcuggug

SEQ ID NO: 279065 - RNA, 32 nt, Homo Sapiens
ugcucuuaguagguuuuuuucuuguaguggaa

SEQ ID NO: 279066 - RNA, 32 nt, Homo Sapiens
gcauugucguucuugugucaguagcaaguuuc

SEQ ID NO: 279067 - RNA, 32 nt, Homo Sapiens
uaaguggaaaauucaaugucuuaaauacaacu

SEQ ID NO: 279068 - RNA, 32 nt, Homo Sapiens
gaacuuuuauauauuugacaguguaggaaauu

SEQ ID NO: 279069 - RNA, 32 nt, Homo Sapiens
uuaagacccagcuuaugggccacauggcaccc

SEQ ID NO: 279070 - RNA, 32 nt, Homo Sapiens
auuauaugaugacuauugauuuccuggagagg

SEQ ID NO: 279071 - RNA, 32 nt, Homo Sapiens
cugaggacaaucccccaucuccccucacccuu

SEQ ID NO: 279072 - RNA, 32 nt, Homo Sapiens
agcagcagcgggaggaggagccgugugcccug

SEQ ID NO: 279073 - RNA, 32 nt, Homo Sapiens
aagagaaauggcauuugcauguuccagaguca

SEQ ID NO: 279074 - RNA, 32 nt, Homo Sapiens
augucauauguaaaauggaauagaaucccugc

SEQ ID NO: 279075 - RNA, 32 nt, Homo Sapiens
ggcuggaccugccacccagagccccaugaagc

SEQ ID NO: 279076 - RNA, 32 nt, Homo Sapiens
gcugaggaggucgggcggggcagaggggcuuc

SEQ ID NO: 279077 - RNA, 28 nt, Homo Sapiens
cggauggggcggcuggccgggcagaggg

SEQ ID NO: 279078 - RNA, 32 nt, Homo Sapiens
gaccccuuuggccuuacccccagcccuggcuc

SEQ ID NO: 279079 - RNA, 29 nt, Homo Sapiens
uggugugggggacaggggagucacagcca

SEQ ID NO: 279080 - RNA, 32 nt, Homo Sapiens
gaaaccccaucuccacuaaaaauagaaaaauu

SEQ ID NO: 279081 - RNA, 32 nt, Homo Sapiens
ugucucccccuugucaccuaccucugauagaa

SEQ ID NO: 279082 - RNA, 32 nt, Homo Sapiens
cauucucagauucacaccccaucccaaauaaa

SEQ ID NO: 279083 - RNA, 32 nt, Homo Sapiens
uccaggaggcgaagguugcagugagcugagau

SEQ ID NO: 279084 - RNA, 32 nt, Homo Sapiens
agccgaggcugcagcccggcccagggcggcuc

SEQ ID NO: 279085 - RNA, 32 nt, Homo Sapiens
aguggugguucuuuuccauguuuguuuugcac

SEQ ID NO: 279086 - RNA, 32 nt, Homo Sapiens
ucucccgaggcccccaugugcugcugaguggc

SEQ ID NO: 279087 - RNA, 32 nt, Homo Sapiens
cucagccaagguggccuguccaguccuggugc

SEQ ID NO: 279088 - RNA, 32 nt, Homo Sapiens
guuuacagaaaagaagauggagagaccaccuu

SEQ ID NO: 279089 - RNA, 32 nt, Homo Sapiens
ucacccgcgguuugauguucagagcacacagc

SEQ ID NO: 279090 - RNA, 28 nt, Homo Sapiens
auuggagcauuugcgaugaccuuccugc

SEQ ID NO: 279091 - RNA, 32 nt, Homo Sapiens
gggcuaggggcugggagcugcagauucugacc

SEQ ID NO: 279092 - RNA, 32 nt, Homo Sapiens
acccuccgcaugcaccuggccggccaccugcc

SEQ ID NO: 279093 - RNA, 32 nt, Homo Sapiens
cucugcgguuuuggggacccagggcgggaacc

SEQ ID NO: 279094 - RNA, 32 nt, Homo Sapiens
cggagaggucaacauggcaagcacuggaggug

SEQ ID NO: 279095 - RNA, 30 nt, Homo Sapiens
gagcggucgccgcugccgccgcagcucggg

SEQ ID NO: 279096 - RNA, 32 nt, Homo Sapiens
gaaaguauauugcaaauacauguuuccucaug

SEQ ID NO: 279097 - RNA, 32 nt, Homo Sapiens
ccacagacucacacuauauuacagaaugaugu

SEQ ID NO: 279098 - RNA, 32 nt, Homo Sapiens
acaaaagagcugcuaggcagguauuuuauucu

SEQ ID NO: 279099 - RNA, 30 nt, Homo Sapiens
aaguaauuaagauagaccuauaggauuguu

SEQ ID NO: 279100 - RNA, 32 nt, Homo Sapiens
uguccccaguguuccuagcagagguaugcuua

SEQ ID NO: 279101 - RNA, 32 nt, Homo Sapiens
guauuuguggcuugugugguagccucagaagc

SEQ ID NO: 279102 - RNA, 32 nt, Homo Sapiens
ggaggaguucccugcagccugcggggccaaga

SEQ ID NO: 279103 - RNA, 32 nt, Homo Sapiens
ccuuagcugacccugcagggccaggcacaggu

SEQ ID NO: 279104 - RNA, 32 nt, Homo Sapiens
cugagacccuaugguaggcagaauaauggccu

SEQ ID NO: 279105 - RNA, 32 nt, Homo Sapiens
aacccgggaggcagagguugugagcugagauc

SEQ ID NO: 279106 - RNA, 32 nt, Homo Sapiens
ugguaucaauaaagucucuauaguguguggca

SEQ ID NO: 279107 - RNA, 32 nt, Homo Sapiens
cagaaacgggggcagugacaguggagucagcu

SEQ ID NO: 279108 - RNA, 32 nt, Homo Sapiens
acccgucagucucuccggcgcgagccgccgcc

SEQ ID NO: 279109 - RNA, 32 nt, Homo Sapiens
ucuggaaaagggggcgcugggagcgcauugcg

SEQ ID NO: 279110 - RNA, 32 nt, Homo Sapiens
gggagcggauggcggcggccguagcggcucca

SEQ ID NO: 279111 - RNA, 32 nt, Homo Sapiens
aggaagacauaaaacuuuaaaaggcaacucaa

SEQ ID NO: 279112 - RNA, 32 nt, Homo Sapiens
auaccagaggggcucaggaugcuguugcuggg

SEQ ID NO: 279113 - RNA, 32 nt, Homo Sapiens
aguauauugcccaacucuauguuucuuugauu

SEQ ID NO: 279114 - RNA, 32 nt, Homo Sapiens
caaagauuuuuggcacuuuguuuucaagaugg

SEQ ID NO: 279115 - RNA, 32 nt, Homo Sapiens
ggcuugggggcugaggcccagcggcccgagac

SEQ ID NO: 279116 - RNA, 32 nt, Homo Sapiens
uccacuuaaaagaucucuguaucuuguucugu

SEQ ID NO: 279117 - RNA, 32 nt, Homo Sapiens
ggcuugucccggccucuggacaaaagaauguu

SEQ ID NO: 279118 - RNA, 32 nt, Homo Sapiens
uuccucugcuauucccauucucuuuuacaaaa

SEQ ID NO: 279119 - RNA, 32 nt, Homo Sapiens
uauuacacuugaugaaggaauaugguaagagg

SEQ ID NO: 279120 - RNA, 27 nt, Homo Sapiens
cuaguccccauuuucugguaagguuuc

SEQ ID NO: 279121 - RNA, 32 nt, Homo Sapiens
augaguuucuaaaaauggaugugagcaccaau

SEQ ID NO: 279122 - RNA, 32 nt, Homo Sapiens
ccuccuuccacccucuuugguuuuguaaaggu

SEQ ID NO: 279123 - RNA, 32 nt, Homo Sapiens
cgucuggggcucuucugggagcacggagcauc

SEQ ID NO: 279124 - RNA, 32 nt, Homo Sapiens
ggggagaaagacuguuaagaggaggcuauuug

SEQ ID NO: 279125 - RNA, 32 nt, Homo Sapiens
augagggaauacugaguacauccugccacauc

SEQ ID NO: 279126 - RNA, 32 nt, Homo Sapiens
gacucugcauuugaccacggacuccagucugu

SEQ ID NO: 279127 - RNA, 31 nt, Homo Sapiens
cugcaccuuguaaaugcucuaacuggacaug

SEQ ID NO: 279128 - RNA, 32 nt, Homo Sapiens
uagaaugugaaugagauaaaaagugaacuauc

SEQ ID NO: 279129 - RNA, 32 nt, Homo Sapiens
acuugugauaucagccuucucugggccuugug

SEQ ID NO: 279130 - RNA, 32 nt, Homo Sapiens
aggcugugaaaaucaaaucacuacucaguuug

SEQ ID NO: 279131 - RNA, 32 nt, Homo Sapiens
gauucccacagaacuuggauagccucacccuc

SEQ ID NO: 279132 - RNA, 32 nt, Homo Sapiens
ccccugguggagguggacgacaugaugaucau

SEQ ID NO: 279133 - RNA, 32 nt, Homo Sapiens
aggaauuccaaaaaugauuacccauuaaaagg

SEQ ID NO: 279134 - RNA, 32 nt, Homo Sapiens
gcaucugcugggugccaaaaauucuuauaaau

SEQ ID NO: 279135 - RNA, 32 nt, Homo Sapiens
gcaucuuuuugugaaauguggggacagagcca

SEQ ID NO: 279136 - RNA, 32 nt, Homo Sapiens
gcucuuugggguuguaauuacccuuaauccuc

SEQ ID NO: 279137 - RNA, 32 nt, Homo Sapiens
uggggacccaaccaccaccgaaguacccuagg

SEQ ID NO: 279138 - RNA, 32 nt, Homo Sapiens
ucggugcaccccagccucccccacucggguuc

SEQ ID NO: 279139 - RNA, 32 nt, Homo Sapiens
gucauucggcuggccugcgcagagauuggcug

SEQ ID NO: 279140 - RNA, 32 nt, Homo Sapiens
uuuugaaaaucagaucugaggccuagaagaga

SEQ ID NO: 279141 - RNA, 32 nt, Homo Sapiens
uuugucaucggcuucaucgaggaggcaugcaa

SEQ ID NO: 279142 - RNA, 32 nt, Homo Sapiens
cagggccccuggaaaguuucucaaaauaagag

SEQ ID NO: 279143 - RNA, 32 nt, Homo Sapiens
aaugcaugaaauguaauugauuuauuuguaau

SEQ ID NO: 279144 - RNA, 32 nt, Homo Sapiens
gaaacuccuguuucuccuuaguuggcuggaaa

SEQ ID NO: 279145 - RNA, 32 nt, Homo Sapiens
gacugggagguagguugggauguuacaggcug

SEQ ID NO: 279146 - RNA, 32 nt, Homo Sapiens
cauggcgugucuggccaaaucuucccgacagc

SEQ ID NO: 279147 - RNA, 32 nt, Homo Sapiens
uaagguauuguaaaaugucauuaauucagaaa

SEQ ID NO: 279148 - RNA, 32 nt, Homo Sapiens
agcuuugucccaucgugcuuccauucccagga

SEQ ID NO: 279149 - RNA, 28 nt, Homo Sapiens
gucagugguggcaccaggauggaagggc

SEQ ID NO: 279150 - RNA, 32 nt, Homo Sapiens
auuaacucuccauuuuagccagaagauaccug

SEQ ID NO: 279151 - RNA, 32 nt, Homo Sapiens
aacauuuauuuuaaacuuauuaaauugacucu

SEQ ID NO: 279152 - RNA, 28 nt, Homo Sapiens
cagucggggcggcggcugcgggcgcaga

SEQ ID NO: 279153 - RNA, 32 nt, Homo Sapiens
ucagccccaccucagcaggucuccaggaugcc

SEQ ID NO: 279154 - RNA, 32 nt, Homo Sapiens
auucaaaguauguuuuauguuuuugccaaaua

SEQ ID NO: 279155 - RNA, 32 nt, Homo Sapiens
uacagacaauaggaaucuuuuacaaacuccua

SEQ ID NO: 279156 - RNA, 32 nt, Homo Sapiens
cgggcgccgggcggagcugcugcggaucagga

SEQ ID NO: 279157 - RNA, 32 nt, Homo Sapiens
aguccauacuuuaaaacaaaaugaagaaagua

SEQ ID NO: 279158 - RNA, 32 nt, Homo Sapiens
cacaguggcugccugccuccgggagggaagga

SEQ ID NO: 279159 - RNA, 32 nt, Homo Sapiens
uauuuaagauguaauaaagcaguuugacauga

SEQ ID NO: 279160 - RNA, 32 nt, Homo Sapiens
gucucuuaagggugggagcuggggcagggacu

SEQ ID NO: 279161 - RNA, 32 nt, Homo Sapiens
cgaacgaugccggcccggcagcuucggcaacg

SEQ ID NO: 279162 - RNA, 32 nt, Homo Sapiens
auauaaagggaagcuugaggaggaauuucaca

SEQ ID NO: 279163 - RNA, 32 nt, Homo Sapiens
cacuccuggauucugcccugaccuccauccug

SEQ ID NO: 279164 - RNA, 32 nt, Homo Sapiens
cucauuuugaaggaauuuaauauuuuaagcaa

SEQ ID NO: 279165 - RNA, 32 nt, Homo Sapiens
aguaccccaagcaugugcauacaggucaggug

SEQ ID NO: 279166 - RNA, 32 nt, Homo Sapiens
ccugaacucugcagcucaucggcuguaggauu

SEQ ID NO: 279167 - RNA, 32 nt, Homo Sapiens
uagcugaguuguaguguauuuuauaaauggaa

SEQ ID NO: 279168 - RNA, 32 nt, Homo Sapiens
cccagcaccuucugcccuucccagcaccuugu

SEQ ID NO: 279169 - RNA, 32 nt, Homo Sapiens
guucuauaaaauguauuaucuauagaucagua

SEQ ID NO: 279170 - RNA, 32 nt, Homo Sapiens
gccuggucuugaacuccugaccucaagugauc

SEQ ID NO: 279171 - RNA, 32 nt, Homo Sapiens
aaaccuuaucuaagguuuuccaggauuuaaac

SEQ ID NO: 279172 - RNA, 32 nt, Homo Sapiens
cagucaugugacacaaaauaucauucuucuuu

SEQ ID NO: 279173 - RNA, 32 nt, Homo Sapiens
accacugcacucaagccugggcgacagaggga

SEQ ID NO: 279174 - RNA, 32 nt, Homo Sapiens
uaauauuuccaagucagacuuucuuacauucc

SEQ ID NO: 279175 - RNA, 32 nt, Homo Sapiens
aaaaucuacagaacuacauauuugugccuccu

SEQ ID NO: 279176 - RNA, 32 nt, Homo Sapiens
uagagaggacauugcaccuuugcugcugcugc

SEQ ID NO: 279177 - RNA, 32 nt, Homo Sapiens
cgcccugugaaccugaugggaaccucucugug

SEQ ID NO: 279178 - RNA, 32 nt, Homo Sapiens
aagaaugcauuggagaucuuugcuaaaguuga

SEQ ID NO: 279179 - RNA, 32 nt, Homo Sapiens
caggcuggcccccggcucccggcccaggcucc

SEQ ID NO: 279180 - RNA, 32 nt, Homo Sapiens
ugucuaccagagcagagccucccucuccaagg

SEQ ID NO: 279181 - RNA, 32 nt, Homo Sapiens
uguuuccugaaaggcuagaauaugugugagua

SEQ ID NO: 279182 - RNA, 32 nt, Homo Sapiens
guaucuaagaccugccagggaauaccaagagu

SEQ ID NO: 279183 - RNA, 32 nt, Homo Sapiens
ucagcacgucuacagcucugcagcaguaccag

SEQ ID NO: 279184 - RNA, 32 nt, Homo Sapiens
gggagggacaggggcggggacgaggcucgggc

SEQ ID NO: 279185 - RNA, 32 nt, Homo Sapiens
aaagcuuaccaugacacagucuagcgaugaac

SEQ ID NO: 279186 - RNA, 32 nt, Homo Sapiens
uuaaccuggcccuucccuccccaucuccccua

SEQ ID NO: 279187 - RNA, 32 nt, Homo Sapiens
aaauggccauucagucccuauguucucuuaag

SEQ ID NO: 279188 - RNA, 32 nt, Homo Sapiens
cagagagagcccacaagaucaacccgacagac

SEQ ID NO: 279189 - RNA, 32 nt, Homo Sapiens
agccgcccagucccggccccucucccgcccca

SEQ ID NO: 279190 - RNA, 32 nt, Homo Sapiens
ucccaggggaugcugaugcugcuggcccuggg

SEQ ID NO: 279191 - RNA, 32 nt, Homo Sapiens
caaauuccaguucuccuacuuaucucuugggg

SEQ ID NO: 279192 - RNA, 30 nt, Homo Sapiens
acgggguuuccccguguuagccaggauggu

SEQ ID NO: 279193 - RNA, 32 nt, Homo Sapiens
uuaucagcuacaauguggguccucuuuugaag

SEQ ID NO: 279194 - RNA, 32 nt, Homo Sapiens
uggcaaaggaugaguguguaaaaaauaaaugc

SEQ ID NO: 279195 - RNA, 32 nt, Homo Sapiens
accugacgcucugcuuuccccugaccuccacu

SEQ ID NO: 279196 - RNA, 32 nt, Homo Sapiens
gccgccucggaacugcggucuccugccugugc

SEQ ID NO: 279197 - RNA, 32 nt, Homo Sapiens
ccacuguuacucaaggaaugaacugauuggca

SEQ ID NO: 279198 - RNA, 32 nt, Homo Sapiens
ucaagcaguuccccccaccucagccuccuaaa

SEQ ID NO: 279199 - RNA, 32 nt, Homo Sapiens
auguauauccaaagcuucuccuuuucagacag

SEQ ID NO: 279200 - RNA, 32 nt, Homo Sapiens
uucgaaccccgccggcggcccgggcuggggcg

SEQ ID NO: 279201 - RNA, 32 nt, Homo Sapiens
uuccuaugcgucacuagaggauacuucugaca

SEQ ID NO: 279202 - RNA, 32 nt, Homo Sapiens
cuguaucuuuuaugguuuuuccugcuucugag

SEQ ID NO: 279203 - RNA, 32 nt, Homo Sapiens
uccccucauccccuggccuccucccacuuacu

SEQ ID NO: 279204 - RNA, 32 nt, Homo Sapiens
ugguauuuaagcucaggccuagcagaugcaaa

SEQ ID NO: 279205 - RNA, 32 nt, Homo Sapiens
aaauacacagggaccuucuuucccuccauugu

SEQ ID NO: 279206 - RNA, 32 nt, Homo Sapiens
cacgucaaaaauaugaauguguagacaacugu

SEQ ID NO: 279207 - RNA, 32 nt, Homo Sapiens
aagaaccuaugcggcccggcaugguggcucac

SEQ ID NO: 279208 - RNA, 32 nt, Homo Sapiens
cuccagcauggccuucuguuugccccgcagua

SEQ ID NO: 279209 - RNA, 32 nt, Homo Sapiens
guucugggcgaccucuggcccuggccaucucu

SEQ ID NO: 279210 - RNA, 32 nt, Homo Sapiens
agacccucguggccuuccccagccucuucuag

SEQ ID NO: 279211 - RNA, 32 nt, Homo Sapiens
cgagcaucacguguggcuccagcccuuauuuc

SEQ ID NO: 279212 - RNA, 30 nt, Homo Sapiens
auucaaucacuugccuuucucauucucucc

SEQ ID NO: 279213 - RNA, 32 nt, Homo Sapiens
gaaacguccauuccucauuucuuauauauccu

SEQ ID NO: 279214 - RNA, 32 nt, Homo Sapiens
ggcuaggcgugguggcucacgccuguaauccc

SEQ ID NO: 279215 - RNA, 32 nt, Homo Sapiens
ggccaggcgugguggcucaugccuguaauccc

SEQ ID NO: 279216 - RNA, 32 nt, Homo Sapiens
ugucuucccucccagcucuguuuuaauuggcu

SEQ ID NO: 279217 - RNA, 32 nt, Homo Sapiens
aguaacucucagauuaaucucugucauccauc

SEQ ID NO: 279218 - RNA, 32 nt, Homo Sapiens
ucugugaggcgagggacagaaguaacgugaug

SEQ ID NO: 279219 - RNA, 32 nt, Homo Sapiens
aaaaaaucucaaagcgauuggaccuagcagcu

SEQ ID NO: 279220 - RNA, 32 nt, Homo Sapiens
ugaguacagcagagaccuuccugcuuuuuacu

SEQ ID NO: 279221 - RNA, 32 nt, Homo Sapiens
gaauagaauauacuuuggaagcccuuaacuaa

SEQ ID NO: 279222 - RNA, 32 nt, Homo Sapiens
ccuaggcgguggcgauggggaccgcccggauc

SEQ ID NO: 279223 - RNA, 32 nt, Homo Sapiens
aaaaguaaacaaaauucuucaaauaugcccua

SEQ ID NO: 279224 - RNA, 32 nt, Homo Sapiens
auccuuagguagucugggggcucagacuuuaa

SEQ ID NO: 279225 - RNA, 29 nt, Homo Sapiens
ucauuuucguguuuuaagugcagagaaua

SEQ ID NO: 279226 - RNA, 32 nt, Homo Sapiens
gcccccguuccagcugacaucuugcacgguga

SEQ ID NO: 279227 - RNA, 32 nt, Homo Sapiens
gcagcggcacggccggcagggucgggguccac

SEQ ID NO: 279228 - RNA, 32 nt, Homo Sapiens
auuagucauggauugcaaaggcuuaguaacuu

SEQ ID NO: 279229 - RNA, 32 nt, Homo Sapiens
cuggaaucaaugaaauucuuggucauccagag

SEQ ID NO: 279230 - RNA, 32 nt, Homo Sapiens
aauagcugcccccauagcaaucacccaaacuc

SEQ ID NO: 279231 - RNA, 32 nt, Homo Sapiens
caaaaacaugauuacagagacaucucaggcug

SEQ ID NO: 279232 - RNA, 32 nt, Homo Sapiens
accuccuucgcuggaaggucuuugacggcacc

SEQ ID NO: 279233 - RNA, 32 nt, Homo Sapiens
aaugaagccuacacaucccaauagaagccccu

SEQ ID NO: 279234 - RNA, 32 nt, Homo Sapiens
cucgcuucccccagccccugcgcccggcccga

SEQ ID NO: 279235 - RNA, 32 nt, Homo Sapiens
aaccagagccuggccugggagccaggauggcc

SEQ ID NO: 279236 - RNA, 32 nt, Homo Sapiens
guggaagauauuaagcaaaauguuuaaagaca

SEQ ID NO: 279237 - RNA, 32 nt, Homo Sapiens
ggaucuauggcccuuggcccagccccaccucc

SEQ ID NO: 279238 - RNA, 32 nt, Homo Sapiens
aaccaaugcgguguuucuuaauguuugcacaa

SEQ ID NO: 279239 - RNA, 29 nt, Homo Sapiens
aggucacagcgugacugaaagcugauuuc

SEQ ID NO: 279240 - RNA, 32 nt, Homo Sapiens
ugcugacuagcggggagggagugggcagcgau

SEQ ID NO: 279241 - RNA, 32 nt, Homo Sapiens
cccucagucugaaucuucucauugucuuauag

SEQ ID NO: 279242 - RNA, 32 nt, Homo Sapiens
cuggguuaaguacuacaauguaaucuguuucc

SEQ ID NO: 279243 - RNA, 32 nt, Homo Sapiens
gagccugcccaaugaaacuugaucuugggacu

SEQ ID NO: 279244 - RNA, 32 nt, Homo Sapiens
ugggagaggcccgggucagagcccugggggug

SEQ ID NO: 279245 - RNA, 32 nt, Homo Sapiens
ggcuaggaaaggaaaaggcuaggugcucccug

SEQ ID NO: 279246 - RNA, 32 nt, Homo Sapiens
uaaugagccaguuuuuaccauccauauuagau

SEQ ID NO: 279247 - RNA, 32 nt, Homo Sapiens
cugaagauggcgugcacaggacacagcguggg

SEQ ID NO: 279248 - RNA, 32 nt, Homo Sapiens
cuugguaauuguacuaaagccaaacauauaua

SEQ ID NO: 279249 - RNA, 32 nt, Homo Sapiens
ccaauuagggaaauaaauuuguuaauaaaauu

SEQ ID NO: 279250 - RNA, 32 nt, Homo Sapiens
auuacuuuaaucaacuaacaagcaauaauaaa

SEQ ID NO: 279251 - RNA, 32 nt, Homo Sapiens
ugcaccaacguccuccucucccucccacugca

SEQ ID NO: 279252 - RNA, 32 nt, Homo Sapiens
gcaggccucggccccaggggcgacccuuccac

SEQ ID NO: 279253 - RNA, 32 nt, Homo Sapiens
gaaauguauaaaauaccacauaguauaaaauu

SEQ ID NO: 279254 - RNA, 30 nt, Homo Sapiens
ccggggcagcggcgcgcgcuuucccccaag

SEQ ID NO: 279255 - RNA, 32 nt, Homo Sapiens
aggagaacccuccuggggaccuggacaccccu

SEQ ID NO: 279256 - RNA, 32 nt, Homo Sapiens
ccaaaagaugacucaggaaaacaguccaacau

SEQ ID NO: 279257 - RNA, 32 nt, Homo Sapiens
ugaauaaauagaugaagugagauacaaagcug

SEQ ID NO: 279258 - RNA, 30 nt, Homo Sapiens
gcaggggauaucccuggccggagcgaaugg

SEQ ID NO: 279259 - RNA, 31 nt, Homo Sapiens
gucuggggcuagaaacaggugugggggucaa

SEQ ID NO: 279260 - RNA, 32 nt, Homo Sapiens
agaagggaauggggaagauaagcccagcauua

SEQ ID NO: 279261 - RNA, 32 nt, Homo Sapiens
agauccagugauugacuuggcaugaaaaugag

SEQ ID NO: 279262 - RNA, 32 nt, Homo Sapiens
ccucuccgguggaaccagugucacaugccugu

SEQ ID NO: 279263 - RNA, 32 nt, Homo Sapiens
cccccuccccgcaagaggucuuuucaggaaua

SEQ ID NO: 279264 - RNA, 32 nt, Homo Sapiens
cacaaguugcgcgcucucuuucugcugcuccc

SEQ ID NO: 279265 - RNA, 32 nt, Homo Sapiens
ccuccggccagcagcccuacccggggcucaac

SEQ ID NO: 279266 - RNA, 32 nt, Homo Sapiens
aacugaaguguuacuuuuuuuaaagcugcuga

SEQ ID NO: 279267 - RNA, 32 nt, Homo Sapiens
gucuccuugggccaugcuggucugacuuaugc

SEQ ID NO: 279268 - RNA, 32 nt, Homo Sapiens
uccggccacacauccugcugggcccccuaccc

SEQ ID NO: 279269 - RNA, 32 nt, Homo Sapiens
ugccaaauuugaugaagugcaaaguucaggcg

SEQ ID NO: 279270 - RNA, 32 nt, Homo Sapiens
gaagaguugcuguuucuuacugacaauaaaaa

SEQ ID NO: 279271 - RNA, 32 nt, Homo Sapiens
cucaauucuuugacccccucgggucguaagca

SEQ ID NO: 279272 - RNA, 27 nt, Homo Sapiens
uagcagucuuucuucagcucacuuggc

SEQ ID NO: 279273 - RNA, 32 nt, Homo Sapiens
agcugaccccuacugcagauccgcauguggac

SEQ ID NO: 279274 - RNA, 32 nt, Homo Sapiens
caucugaagcaucuuaccuaagaauucaguaa

SEQ ID NO: 279275 - RNA, 32 nt, Homo Sapiens
aaagguaguaggggcggggguggugaccuuua

SEQ ID NO: 279276 - RNA, 28 nt, Homo Sapiens
ugcuggugacaacucaggaugaccaagg

SEQ ID NO: 279277 - RNA, 32 nt, Homo Sapiens
cugugagggccccagcuccacccaggcuuugg

SEQ ID NO: 279278 - RNA, 32 nt, Homo Sapiens
aggcauuuucuuuuuagaguuagguguagugc

SEQ ID NO: 279279 - RNA, 32 nt, Homo Sapiens
ucugucugcugcgccuacugggugggagcccu

SEQ ID NO: 279280 - RNA, 32 nt, Homo Sapiens
uucuaccuuucugcucccggccaugagaaacu

SEQ ID NO: 279281 - RNA, 32 nt, Homo Sapiens
cuuuggauucuacuuuuuuccauaacucuaaa

SEQ ID NO: 279282 - RNA, 32 nt, Homo Sapiens
aaaaaauacucuuugaauaaagugaacagagg

SEQ ID NO: 279283 - RNA, 32 nt, Homo Sapiens
cccgaccgcgcgcucgccccgccgcuccugcu

SEQ ID NO: 279284 - RNA, 32 nt, Homo Sapiens
gugagugaaacuuggggugcugccugcuggga

SEQ ID NO: 279285 - RNA, 32 nt, Homo Sapiens
uguaccugcccccaauccaugaaccaagacca

SEQ ID NO: 279286 - RNA, 32 nt, Homo Sapiens
caccugccgaaauugaccagagauaugugaac

SEQ ID NO: 279287 - RNA, 32 nt, Homo Sapiens
uuccacuccuugucugagcucccuuugucauu

SEQ ID NO: 279288 - RNA, 32 nt, Homo Sapiens
gugaacacagacacugcagagccugggagcag

SEQ ID NO: 279289 - RNA, 32 nt, Homo Sapiens
cccuggccgcuggcccgggaccgaagccacuu

SEQ ID NO: 279290 - RNA, 32 nt, Homo Sapiens
ucuucauggccugcugugcugaaacagaacag

SEQ ID NO: 279291 - RNA, 32 nt, Homo Sapiens
ggaacugcugcagcugcugccgccgccggagg

SEQ ID NO: 279292 - RNA, 32 nt, Homo Sapiens
ucuggacuguucucaggcaagccggggaguaa

SEQ ID NO: 279293 - RNA, 32 nt, Homo Sapiens
ucacagcaguuauaaugcuauuuguacauuac

SEQ ID NO: 279294 - RNA, 32 nt, Homo Sapiens
agauaacuauacauggagaaauccauuuuguu

SEQ ID NO: 279295 - RNA, 29 nt, Homo Sapiens
cagguuagaugacagcacauugccauaaa

SEQ ID NO: 279296 - RNA, 32 nt, Homo Sapiens
guaggcacuuaauaaacuccugcugcaugaac

SEQ ID NO: 279297 - RNA, 32 nt, Homo Sapiens
gguucuucucccagguauucucuucccaggcc

SEQ ID NO: 279298 - RNA, 32 nt, Homo Sapiens
agauacuagucaugaaaagugauucauucuuu

SEQ ID NO: 279299 - RNA, 32 nt, Homo Sapiens
agugcgcggccgcggugcucuaccggcguguc

SEQ ID NO: 279300 - RNA, 32 nt, Homo Sapiens
guugcagugagccacugcacuccagccugaug

SEQ ID NO: 279301 - RNA, 32 nt, Homo Sapiens
gauacugguaauuuauaauaauucgugaucau

SEQ ID NO: 279302 - RNA, 32 nt, Homo Sapiens
gugggaauuauuuccuccucccuccaggcaga

SEQ ID NO: 279303 - RNA, 32 nt, Homo Sapiens
ugggagugugugcuccuuugccucgggaccgg

SEQ ID NO: 279304 - RNA, 31 nt, Homo Sapiens
gaguaaauaaagaaaacguuuguuaaggggg

SEQ ID NO: 279305 - RNA, 32 nt, Homo Sapiens
ucaccuuucccucucucuuugauggcuacaga

SEQ ID NO: 279306 - RNA, 32 nt, Homo Sapiens
caccgucuccaucccggccccagcccagucga

SEQ ID NO: 279307 - RNA, 32 nt, Homo Sapiens
ucacaacgugggaaggaaucucugccacggga

SEQ ID NO: 279308 - RNA, 32 nt, Homo Sapiens
aaauuauacauauuuauuagcaucauauuguc

SEQ ID NO: 279309 - RNA, 32 nt, Homo Sapiens
auauacauuucccuauuacucucaucagcuga

SEQ ID NO: 279310 - RNA, 31 nt, Homo Sapiens
ggagcggagcgcagccuggccuggggcccgg

SEQ ID NO: 279311 - RNA, 32 nt, Homo Sapiens
uuguagccagcuuucccgggggcuggccagga

SEQ ID NO: 279312 - RNA, 32 nt, Homo Sapiens
aaaagcgauggauacauaaugauuugaucuga

SEQ ID NO: 279313 - RNA, 32 nt, Homo Sapiens
gaaguggggagagcaggcucucccuggcaccg

SEQ ID NO: 279314 - RNA, 32 nt, Homo Sapiens
auugaagcuaguucaguaaucacacacauucc

SEQ ID NO: 279315 - RNA, 32 nt, Homo Sapiens
agcugguguucgcuguccccugugcacuucuc

SEQ ID NO: 279316 - RNA, 32 nt, Homo Sapiens
cagguggcucugcuggcaucggagcccacaga

SEQ ID NO: 279317 - RNA, 32 nt, Homo Sapiens
ccaccugccucggccucccaaagugggaaaug

SEQ ID NO: 279318 - RNA, 32 nt, Homo Sapiens
agcaaguccuauucagaauccggagcaguaag

SEQ ID NO: 279319 - RNA, 32 nt, Homo Sapiens
acauggaaagcucuuuuaaauuuaacuuccgc

SEQ ID NO: 279320 - RNA, 32 nt, Homo Sapiens
ccagauucauacacaaaauguaagauaauuua

SEQ ID NO: 279321 - RNA, 32 nt, Homo Sapiens
cccucagcuggccaggacaguacucugcucuc

SEQ ID NO: 279322 - RNA, 32 nt, Homo Sapiens
uugauccuauuaugugagagauuuuccugaua

SEQ ID NO: 279323 - RNA, 32 nt, Homo Sapiens
cuucuugauaggaaacaaaggugugaaacagc

SEQ ID NO: 279324 - RNA, 32 nt, Homo Sapiens
cuggcacaugaauaaacuuugcugugguuuac

SEQ ID NO: 279325 - RNA, 32 nt, Homo Sapiens
auuauuaguuuggauuaauuagacuuaagaaa

SEQ ID NO: 279326 - RNA, 32 nt, Homo Sapiens
gugugggccgcgugcgucucugucguggacac

SEQ ID NO: 279327 - RNA, 32 nt, Homo Sapiens
cgcugcggacggguccuuugguacaugcaguc

SEQ ID NO: 279328 - RNA, 32 nt, Homo Sapiens
agcucugccgccucuugggacugggggugacg

SEQ ID NO: 279329 - RNA, 32 nt, Homo Sapiens
aauugugcaaagcauagguaaauauuuuucuu

SEQ ID NO: 279330 - RNA, 32 nt, Homo Sapiens
gcacagugaucaccagcgugagugguggagga

SEQ ID NO: 279331 - RNA, 32 nt, Homo Sapiens
cugccuaaauguuccuaugauacuucucccag

SEQ ID NO: 279332 - RNA, 32 nt, Homo Sapiens
gccggcuucauuuauuccugcugauggcugag

SEQ ID NO: 279333 - RNA, 32 nt, Homo Sapiens
cugucaggguggcagugcccaucauguggcua

SEQ ID NO: 279334 - RNA, 32 nt, Homo Sapiens
cgugcgugaacagguguggaccgcaggaucuc

SEQ ID NO: 279335 - RNA, 32 nt, Homo Sapiens
agaccuugcuuuaacauuaucuccaguuaauu

SEQ ID NO: 279336 - RNA, 32 nt, Homo Sapiens
gccugagaccccagcccuggccuccccacucu

SEQ ID NO: 279337 - RNA, 32 nt, Homo Sapiens
gaucaaggagaugcuuuguagaugaacagaug

SEQ ID NO: 279338 - RNA, 32 nt, Homo Sapiens
agccuggggagaaauguuugaauguuccagcu

SEQ ID NO: 279339 - RNA, 27 nt, Homo Sapiens
auagauaauuaaaauucauacuguaug

SEQ ID NO: 279340 - RNA, 32 nt, Homo Sapiens
ugucaaggagcagcaguucugcucuccccauc

SEQ ID NO: 279341 - RNA, 32 nt, Homo Sapiens
acuaggaaaauauuauuaaauuuauaucccua

SEQ ID NO: 279342 - RNA, 32 nt, Homo Sapiens
agaacaaggggaggaggaagcuauggauacag

SEQ ID NO: 279343 - RNA, 32 nt, Homo Sapiens
uuugcggagcagcuagcuacucggcgggaucu

SEQ ID NO: 279344 - RNA, 32 nt, Homo Sapiens
ccagccgagugggcgcugcagcugccggacuc

SEQ ID NO: 279345 - RNA, 32 nt, Homo Sapiens
gagccgaacgcgggagucgcugcccgagcgga

SEQ ID NO: 279346 - RNA, 27 nt, Homo Sapiens
uccuggccuuucuucaguccccacgug

SEQ ID NO: 279347 - RNA, 32 nt, Homo Sapiens
auacuuaaacacaccaauuguagaaagcaacc

SEQ ID NO: 279348 - RNA, 32 nt, Homo Sapiens
auugacuuuaaugaguuuuuaaaggcuuucua

SEQ ID NO: 279349 - RNA, 32 nt, Homo Sapiens
agaaugucugaguauuaagauacagauuaauu

SEQ ID NO: 279350 - RNA, 32 nt, Homo Sapiens
ccggcgcagccgggcgcauugggccgcgaugc

SEQ ID NO: 279351 - RNA, 32 nt, Homo Sapiens
cccaugcaucuuccacuggaacguuucacugc

SEQ ID NO: 279352 - RNA, 32 nt, Homo Sapiens
cuaaguacuaacuaccucaucaccuuuugugc

SEQ ID NO: 279353 - RNA, 32 nt, Homo Sapiens
guccucgcccggacgcgccgcgcccccucgga

SEQ ID NO: 279354 - RNA, 32 nt, Homo Sapiens
ucaaacacaauuuuuuaaaagcacuuugcuuu

SEQ ID NO: 279355 - RNA, 29 nt, Homo Sapiens
aagaagccgguccggaguucuggccgaca

SEQ ID NO: 279356 - RNA, 32 nt, Homo Sapiens
gcccuugcuggcgcuccugguggcgcccagga

SEQ ID NO: 279357 - RNA, 32 nt, Homo Sapiens
ccacucccucccacccagucccucccucuggu

SEQ ID NO: 279358 - RNA, 32 nt, Homo Sapiens
ccucucccgcuauguaccgaccgcgagcccgg

SEQ ID NO: 279359 - RNA, 30 nt, Homo Sapiens
uaaugggcuuugaugggggaagaggguggu

SEQ ID NO: 279360 - RNA, 32 nt, Homo Sapiens
uuuaauauuauuaguucuuaaguguuacagcc

SEQ ID NO: 279361 - RNA, 32 nt, Homo Sapiens
caauuauccaaaauuugauguuugucauuccu

SEQ ID NO: 279362 - RNA, 32 nt, Homo Sapiens
gggcuccugcccaguuuggguacugugcugau

SEQ ID NO: 279363 - RNA, 32 nt, Homo Sapiens
ggaacaguugucacugcccccggggagagggg

SEQ ID NO: 279364 - RNA, 32 nt, Homo Sapiens
gcgggguagccgcggggcgcgcagccagcuuu

SEQ ID NO: 279365 - RNA, 32 nt, Homo Sapiens
uuccagguggaggugcggcuucagugcgccuu

SEQ ID NO: 279366 - RNA, 32 nt, Homo Sapiens
aagccuccaguggagaacugggcuugcucaga

SEQ ID NO: 279367 - RNA, 32 nt, Homo Sapiens
auauuggggaugauguccuguauuuuucuugg

SEQ ID NO: 279368 - RNA, 32 nt, Homo Sapiens
ugauuuucuuuaggaaguaggauuauauuuag

SEQ ID NO: 279369 - RNA, 32 nt, Homo Sapiens
ugugacaagaaucuugggcgugauucacaccu

SEQ ID NO: 279370 - RNA, 32 nt, Homo Sapiens
ccggggaagggaagagcaggucaguacagagg

SEQ ID NO: 279371 - RNA, 32 nt, Homo Sapiens
uaauaagucuggaagagcaaaagggaguuacu

SEQ ID NO: 279372 - RNA, 32 nt, Homo Sapiens
uuugggaggccaaggcgggcggauugccugag

SEQ ID NO: 279373 - RNA, 32 nt, Homo Sapiens
uuuugucuccugcuuggaaagucucucuucug

SEQ ID NO: 279374 - RNA, 32 nt, Homo Sapiens
auguuagguauuuaaauucuuaaagauguugg

SEQ ID NO: 279375 - RNA, 32 nt, Homo Sapiens
accccaacagcacccucuccagaugggagugc

SEQ ID NO: 279376 - RNA, 32 nt, Homo Sapiens
ugauagaaaaaauaugacuuuuuuacaccauc

SEQ ID NO: 279377 - RNA, 32 nt, Homo Sapiens
agaggcccugggcacgggaggggguggggcug

SEQ ID NO: 279378 - RNA, 32 nt, Homo Sapiens
ggggaggccugugcugcccccugguggcgcuu

SEQ ID NO: 279379 - RNA, 32 nt, Homo Sapiens
gcuaggagggaagaguggagaggaccggcgag

SEQ ID NO: 279380 - RNA, 32 nt, Homo Sapiens
gugcccgggggugcugccccauggagcgggga

SEQ ID NO: 279381 - RNA, 32 nt, Homo Sapiens
agugcuuaaaauuuaagguuguuuuagagugg

SEQ ID NO: 279382 - RNA, 32 nt, Homo Sapiens
ugucccugugucuauguagaaagggaagacau

SEQ ID NO: 279383 - RNA, 32 nt, Homo Sapiens
uauuuaaaauaguuuaagucuagagagcuuau

SEQ ID NO: 279384 - RNA, 32 nt, Homo Sapiens
uauguaaaugguuuuuauaaauuucucaauuu

SEQ ID NO: 279385 - RNA, 32 nt, Homo Sapiens
ugguuggagacgggaguggcccuucggcuccc

SEQ ID NO: 279386 - RNA, 32 nt, Homo Sapiens
ucauacuuccugccucuccccucccccaguuu

SEQ ID NO: 279387 - RNA, 32 nt, Homo Sapiens
ugauucuccaaauaugccuagauuuaaagcug

SEQ ID NO: 279388 - RNA, 32 nt, Homo Sapiens
cccaguccagcccucucccuuccacuggugcc

SEQ ID NO: 279389 - RNA, 32 nt, Homo Sapiens
ucugauggacuucagcuguuggccuugcaugg

SEQ ID NO: 279390 - RNA, 32 nt, Homo Sapiens
cuacuccccuggacuagggcuccacugugccc

SEQ ID NO: 279391 - RNA, 29 nt, Homo Sapiens
auccauggcuaaccuugacaaauacacug

SEQ ID NO: 279392 - RNA, 32 nt, Homo Sapiens
ugauuucaagguggcacccagcauccugaagc

SEQ ID NO: 279393 - RNA, 32 nt, Homo Sapiens
ccacguugauucagccaagcaccuccaggagg

SEQ ID NO: 279394 - RNA, 32 nt, Homo Sapiens
uuuaauuuguuuacaaaaauguuuauugucuu

SEQ ID NO: 279395 - RNA, 32 nt, Homo Sapiens
acaguauagauauagauuauaaauauuacaaa

SEQ ID NO: 279396 - RNA, 32 nt, Homo Sapiens
uauacugccaacaaagaagacucaacuucuca

SEQ ID NO: 279397 - RNA, 32 nt, Homo Sapiens
gcagaaagucaaacuuacaaaaacuguuguga

SEQ ID NO: 279398 - RNA, 32 nt, Homo Sapiens
ccuuggugacucggggggaggggggagacauu

SEQ ID NO: 279399 - RNA, 32 nt, Homo Sapiens
agaacagugagagguccgugcauauucuauuu

SEQ ID NO: 279400 - RNA, 32 nt, Homo Sapiens
ggcagaacguuaucuucaguuucuuuuggggg

SEQ ID NO: 279401 - RNA, 32 nt, Homo Sapiens
guguuuuuucaaagaauuuguuuacuucuaaa

SEQ ID NO: 279402 - RNA, 29 nt, Homo Sapiens
gcauuuaaauacaucuuuuguaagguuuu

SEQ ID NO: 279403 - RNA, 32 nt, Homo Sapiens
cucagauggggagggacagggucggccuguac

SEQ ID NO: 279404 - RNA, 32 nt, Homo Sapiens
gggaggcagcgggggcuucagccauguccuag

SEQ ID NO: 279405 - RNA, 32 nt, Homo Sapiens
uuuaguuuuuaaacguuaguauaaucugaaua

SEQ ID NO: 279406 - RNA, 32 nt, Homo Sapiens
agccaccaggaacagaaggucuggccacccug

SEQ ID NO: 279407 - RNA, 32 nt, Homo Sapiens
cuuuucaagcauauuucauacaguguucuugu

SEQ ID NO: 279408 - RNA, 32 nt, Homo Sapiens
gaauaggaggcuauuguuuuuauauuguguaa

SEQ ID NO: 279409 - RNA, 32 nt, Homo Sapiens
gacccuaacguuaccuuucugugcagugaagg

SEQ ID NO: 279410 - RNA, 32 nt, Homo Sapiens
ugcauguguaaauuauguuagauauauaucau

SEQ ID NO: 279411 - RNA, 32 nt, Homo Sapiens
cuuugucuucgucauugcuguggggaucuggu

SEQ ID NO: 279412 - RNA, 32 nt, Homo Sapiens
aacugaauuguaccuuuguccuguccuuuccc

SEQ ID NO: 279413 - RNA, 32 nt, Homo Sapiens
gagaaccaaguaaaacaaaaccacugggagga

SEQ ID NO: 279414 - RNA, 32 nt, Homo Sapiens
agccucuuggcugagggugaaggugggacggg

SEQ ID NO: 279415 - RNA, 32 nt, Homo Sapiens
aauggaaaguacauugggcugaacuaauccaa

SEQ ID NO: 279416 - RNA, 32 nt, Homo Sapiens
ggcugcuaccuccucagaguuucagaagcccc

SEQ ID NO: 279417 - RNA, 32 nt, Homo Sapiens
gauucacccaaguauaggccaaaaucgcgggc

SEQ ID NO: 279418 - RNA, 32 nt, Homo Sapiens
cacccagccgcuugcuuuaguuuucuuuguca

SEQ ID NO: 279419 - RNA, 32 nt, Homo Sapiens
cccggggauccucucgcgcccgcgggcuccaa

SEQ ID NO: 279420 - RNA, 32 nt, Homo Sapiens
uagcauauagauguaauuuauagauagaucag

SEQ ID NO: 279421 - RNA, 32 nt, Homo Sapiens
ggcugaguuuguauuauuacugauaugaagaa

SEQ ID NO: 279422 - RNA, 32 nt, Homo Sapiens
uucuuuuagcaaauuaaugacucucaggcaca

SEQ ID NO: 279423 - RNA, 32 nt, Homo Sapiens
ggguuucguuuuuguucugcuucauuaagacu

SEQ ID NO: 279424 - RNA, 30 nt, Homo Sapiens
gcuuuuuugcuaaugagugggcugguuguu

SEQ ID NO: 279425 - RNA, 32 nt, Homo Sapiens
gguuagaaggaaugcaggauauuuuuaacaca

SEQ ID NO: 279426 - RNA, 32 nt, Homo Sapiens
acuuuucgagaccgaguagagacggacaguga

SEQ ID NO: 279427 - RNA, 32 nt, Homo Sapiens
aacauaaauaauccaagcuugcaccacauuca

SEQ ID NO: 279428 - RNA, 32 nt, Homo Sapiens
uuaagugucaggcugcacuuugcuccauauaa

SEQ ID NO: 279429 - RNA, 32 nt, Homo Sapiens
ugccgcguccacuacuaggacagccaauugga

SEQ ID NO: 279430 - RNA, 32 nt, Homo Sapiens
gaugcccuuuugcuggggcugccaucuugaaa

SEQ ID NO: 279431 - RNA, 32 nt, Homo Sapiens
ugugggugggugggcccggccagggccucucc

SEQ ID NO: 279432 - RNA, 32 nt, Homo Sapiens
ucugccucucugaaccucgguuucuucaucua

SEQ ID NO: 279433 - RNA, 32 nt, Homo Sapiens
guaauuggaagacacaugaguguccugcuuac

SEQ ID NO: 279434 - RNA, 32 nt, Homo Sapiens
agcucuguucuucacacucaucugguucacac

SEQ ID NO: 279435 - RNA, 32 nt, Homo Sapiens
uggcuaauuuuuguauuaguagagaugagguu

SEQ ID NO: 279436 - RNA, 32 nt, Homo Sapiens
acugugugggguucagucagccugcugaaauu

SEQ ID NO: 279437 - RNA, 32 nt, Homo Sapiens
caguccuugaaucaccugugggacuugaggac

SEQ ID NO: 279438 - RNA, 32 nt, Homo Sapiens
ggagagaacauucagcagcaggugcuuuuuua

SEQ ID NO: 279439 - RNA, 32 nt, Homo Sapiens
uggccucagcccagcccacccucaccugcuuu

SEQ ID NO: 279440 - RNA, 32 nt, Homo Sapiens
uccccggagcaucuuaagagcugagcgcagcu

SEQ ID NO: 279441 - RNA, 32 nt, Homo Sapiens
ucugugccccccaagcccugggcccccugcgg

SEQ ID NO: 279442 - RNA, 32 nt, Homo Sapiens
acauuucuaagagcuugguguagggcaauugg

SEQ ID NO: 279443 - RNA, 32 nt, Homo Sapiens
agguccggcuccuggaggacagcgggauggga

SEQ ID NO: 279444 - RNA, 32 nt, Homo Sapiens
ucuuuuucuacauagcagaaauugauuuuuuu

SEQ ID NO: 279445 - RNA, 32 nt, Homo Sapiens
auugcuuuaacccggaagguggaguuugcagu

SEQ ID NO: 279446 - RNA, 32 nt, Homo Sapiens
gggacaucaaacaaaagucucuucguguauau

SEQ ID NO: 279447 - RNA, 32 nt, Homo Sapiens
uguuuauacacagauuuuaaguuuacuccuac

SEQ ID NO: 279448 - RNA, 32 nt, Homo Sapiens
caucuguaaucccagcacuuugggagacuaag

SEQ ID NO: 279449 - RNA, 32 nt, Homo Sapiens
uaccauuauuugcggucugauaaaaggguccu

SEQ ID NO: 279450 - RNA, 32 nt, Homo Sapiens
cacugaggccccacaaggccucaucuccuuaa

SEQ ID NO: 279451 - RNA, 32 nt, Homo Sapiens
guacuuaaagcaccuguggagugcggucgcuc

SEQ ID NO: 279452 - RNA, 32 nt, Homo Sapiens
cucugcccuuccuccauucauccacccauccc

SEQ ID NO: 279453 - RNA, 32 nt, Homo Sapiens
cuuuuuagaauguuaaaugaagacacuguuuc

SEQ ID NO: 279454 - RNA, 32 nt, Homo Sapiens
agccuuuggggagggaggggaaauguaauacu

SEQ ID NO: 279455 - RNA, 32 nt, Homo Sapiens
gaaggggcugcggaagacgggggcaguccugg

SEQ ID NO: 279456 - RNA, 32 nt, Homo Sapiens
cucuguuuuuugcugccuuuaucugcaccccu

SEQ ID NO: 279457 - RNA, 32 nt, Homo Sapiens
augcuuuaucccaaaacaaagcagauaacguu

SEQ ID NO: 279458 - RNA, 32 nt, Homo Sapiens
ccgagagauacauaaagguggaaacuaggauu

SEQ ID NO: 279459 - RNA, 32 nt, Homo Sapiens
uccgccuccuccccgccccgagccccagucag

SEQ ID NO: 279460 - RNA, 32 nt, Homo Sapiens
auguauuauuauucugugaguauaaaguucua

SEQ ID NO: 279461 - RNA, 32 nt, Homo Sapiens
cuccaccaaaagacauaagauucuuaccucua

SEQ ID NO: 279462 - RNA, 32 nt, Homo Sapiens
acuuuggagaacuguuauaaaaaaugguugcu

SEQ ID NO: 279463 - RNA, 32 nt, Homo Sapiens
ggacaguucaagucaucuuuguccucuacuuu

SEQ ID NO: 279464 - RNA, 32 nt, Homo Sapiens
guccguguggccgcauuuggaagccugggcgg

SEQ ID NO: 279465 - RNA, 32 nt, Homo Sapiens
gucagggaaguaguccaggccauggguaagaa

SEQ ID NO: 279466 - RNA, 32 nt, Homo Sapiens
cuugauaaggauuuuuaagauacucuauaaau

SEQ ID NO: 279467 - RNA, 32 nt, Homo Sapiens
guguuuucuuugauguccaggaggagaaaggc

SEQ ID NO: 279468 - RNA, 32 nt, Homo Sapiens
uccacuacugguuuuuuuuuguuguuguugag

SEQ ID NO: 279469 - RNA, 32 nt, Homo Sapiens
cgccucuggcaucgccuccgguugccuuacac

SEQ ID NO: 279470 - RNA, 32 nt, Homo Sapiens
ugggacagcaugccacugagcaaggagagaug

SEQ ID NO: 279471 - RNA, 32 nt, Homo Sapiens
acgugguagccacuggcagccuugacugaaag

SEQ ID NO: 279472 - RNA, 32 nt, Homo Sapiens
agcccgggaagcugcugcgggggcgauggcug

SEQ ID NO: 279473 - RNA, 32 nt, Homo Sapiens
gcacuuugacagagcagaggcagaguauuugu

SEQ ID NO: 279474 - RNA, 32 nt, Homo Sapiens
caaagcaauuaaaugauauugggguagggaau

SEQ ID NO: 279475 - RNA, 31 nt, Homo Sapiens
uuggagugggauggcaggacggccucauccc

SEQ ID NO: 279476 - RNA, 32 nt, Homo Sapiens
ccuguucccgcagcugcggcccgggccuggcc

SEQ ID NO: 279477 - RNA, 32 nt, Homo Sapiens
auaauccaggagaacaaugaugaggccuggau

SEQ ID NO: 279478 - RNA, 32 nt, Homo Sapiens
agauggauuaaagacuuacauguuagaacuaa

SEQ ID NO: 279479 - RNA, 32 nt, Homo Sapiens
cagcauggacuuuggaaccagauagaccuaga

SEQ ID NO: 279480 - RNA, 32 nt, Homo Sapiens
gggagggcgcaugcgcauguggcuccugggac

SEQ ID NO: 279481 - RNA, 32 nt, Homo Sapiens
ccuucuucaauuaguuugaaauccagaccuga

SEQ ID NO: 279482 - RNA, 32 nt, Homo Sapiens
guaaguacaguuauaacagauuuuaaaucaau

SEQ ID NO: 279483 - RNA, 32 nt, Homo Sapiens
gguuuuuuuccugugcccacuccggcuugucc

SEQ ID NO: 279484 - RNA, 32 nt, Homo Sapiens
uauaauuaaaucaauuacauuuaaaacaaagg

SEQ ID NO: 279485 - RNA, 32 nt, Homo Sapiens
guggcagugggaggggcuguauggagaggagc

SEQ ID NO: 279486 - RNA, 32 nt, Homo Sapiens
agcggacuggcgcugccgcgggagcgcagccu

SEQ ID NO: 279487 - RNA, 32 nt, Homo Sapiens
ugcccuugacuucugaucuuugucuacuucau

SEQ ID NO: 279488 - RNA, 32 nt, Homo Sapiens
gccagugaagcaagcacaaucagcaaaucuag

SEQ ID NO: 279489 - RNA, 32 nt, Homo Sapiens
cccggacggggcggcuggccagacggggggcu

SEQ ID NO: 279490 - RNA, 32 nt, Homo Sapiens
gucaagauagagugaauggaacaaagauuugu

SEQ ID NO: 279491 - RNA, 32 nt, Homo Sapiens
uagugaugugugaccaguggcucccagauucc

SEQ ID NO: 279492 - RNA, 32 nt, Homo Sapiens
aauauuuguuuuauuugccuuauagauaugcu

SEQ ID NO: 279493 - RNA, 32 nt, Homo Sapiens
ucauagugugagaucaacccacaggaauaucc

SEQ ID NO: 279494 - RNA, 32 nt, Homo Sapiens
aaacaucagaguauuuuaaaaaacaguucucu

SEQ ID NO: 279495 - RNA, 32 nt, Homo Sapiens
ccaauugauugugacgugcuuguggucugugc

SEQ ID NO: 279496 - RNA, 32 nt, Homo Sapiens
cccccgaggggaggggucuuguacauacugua

SEQ ID NO: 279497 - RNA, 32 nt, Homo Sapiens
uccacuucucacucuuauggucucaaagcuug

SEQ ID NO: 279498 - RNA, 32 nt, Homo Sapiens
acagggcgccacuuacuagcucugaaagucua

SEQ ID NO: 279499 - RNA, 32 nt, Homo Sapiens
guauuaaguaugacuucuuuuagaagguuaca

SEQ ID NO: 279500 - RNA, 32 nt, Homo Sapiens
aagcaaauggauggggauaagaauaggucauu

SEQ ID NO: 279501 - RNA, 32 nt, Homo Sapiens
uguaucacuuuucaaaaagagguuacacagac

SEQ ID NO: 279502 - RNA, 32 nt, Homo Sapiens
cuugugauauugugaaguuuucauacagcaaa

SEQ ID NO: 279503 - RNA, 32 nt, Homo Sapiens
caaaaaggaaaaugaaaccaaaauauaaaugu

SEQ ID NO: 279504 - RNA, 32 nt, Homo Sapiens
cagccagccugccugcugggagccaggagagu

SEQ ID NO: 279505 - RNA, 32 nt, Homo Sapiens
gacucugcuccuauccuccccaccuucccccu

SEQ ID NO: 279506 - RNA, 32 nt, Homo Sapiens
cgcccuacugagcgagcggcccggggcgccga

SEQ ID NO: 279507 - RNA, 32 nt, Homo Sapiens
ugucauaguuuauuauggugcuauauaaacca

SEQ ID NO: 279508 - RNA, 32 nt, Homo Sapiens
ccuucagagcaaacagcagggagaugccggcc

SEQ ID NO: 279509 - RNA, 32 nt, Homo Sapiens
cugcuacccagcugucaaugaagacuccauca

SEQ ID NO: 279510 - RNA, 32 nt, Homo Sapiens
gcgcagccauccuggggcuguacuggcgccau

SEQ ID NO: 279511 - RNA, 32 nt, Homo Sapiens
uaggggagaagcugcagcuggagcugaaggcu

SEQ ID NO: 279512 - RNA, 32 nt, Homo Sapiens
aaauaguuguacagauaguuuauaagcacaau

SEQ ID NO: 279513 - RNA, 32 nt, Homo Sapiens
ccuaaggacccacaaagaaguagaguggcuca

SEQ ID NO: 279514 - RNA, 32 nt, Homo Sapiens
ucacuaccaauauaauggauuuuauauaucag

SEQ ID NO: 279515 - RNA, 32 nt, Homo Sapiens
uauaauacugagugccagagaagugguuuagg

SEQ ID NO: 279516 - RNA, 32 nt, Homo Sapiens
ucgcccaggcagaagcacaaaggugcaguauu

SEQ ID NO: 279517 - RNA, 31 nt, Homo Sapiens
aaaccagccagcugggcuccauagacccucc

SEQ ID NO: 279518 - RNA, 32 nt, Homo Sapiens
uucucuuuguuaugaaaagaaaugauuuugag

SEQ ID NO: 279519 - RNA, 32 nt, Homo Sapiens
guaacuuauauugaagacaauuugauacauaa

SEQ ID NO: 279520 - RNA, 32 nt, Homo Sapiens
uguucaauaucagcuuugauaauuguguaccu

SEQ ID NO: 279521 - RNA, 32 nt, Homo Sapiens
aaaucaugaugaugaguauuugggggugggug

SEQ ID NO: 279522 - RNA, 32 nt, Homo Sapiens
aacucaccuuuggaaucagagaacuuacaggu

SEQ ID NO: 279523 - RNA, 32 nt, Homo Sapiens
accugagccccgaggugaagcagggccucagg

SEQ ID NO: 279524 - RNA, 32 nt, Homo Sapiens
aaguuguuuuucuggcagccugagacuucgcu

SEQ ID NO: 279525 - RNA, 32 nt, Homo Sapiens
uuuuccaauggcaaacugcccuuucuggaaug

SEQ ID NO: 279526 - RNA, 32 nt, Homo Sapiens
ggguugguggacaaaguucuagcugauuaaau

SEQ ID NO: 279527 - RNA, 32 nt, Homo Sapiens
gugagucaguccucaccaaguuuuccagauca

SEQ ID NO: 279528 - RNA, 32 nt, Homo Sapiens
aggcggccgcgguucuaggaacuugacgugau

SEQ ID NO: 279529 - RNA, 32 nt, Homo Sapiens
ggauccuguccuguuuguacaacuuggauccc

SEQ ID NO: 279530 - RNA, 32 nt, Homo Sapiens
agguuugaaauuauggguauguuuucuuguca

SEQ ID NO: 279531 - RNA, 32 nt, Homo Sapiens
ggaaauuacauaccuuuuuuuuuuuuuuuuaa

SEQ ID NO: 279532 - RNA, 32 nt, Homo Sapiens
acuggacuguaguagaggcauuuggaauacuu

SEQ ID NO: 279533 - RNA, 32 nt, Homo Sapiens
aaaucaaaaacacagaauaaggaacauauuua

SEQ ID NO: 279534 - RNA, 32 nt, Homo Sapiens
ccuggagccaagggaugagguuguccaggcug

SEQ ID NO: 279535 - RNA, 32 nt, Homo Sapiens
ugcuuuuauaaaaacaaacaaacaaacaaaaa

SEQ ID NO: 279536 - RNA, 32 nt, Homo Sapiens
aauuuaaaaaauauguaacugcuguuuauaca

SEQ ID NO: 279537 - RNA, 32 nt, Homo Sapiens
caucugcgcugccggcccggcgcgggguccgg

SEQ ID NO: 279538 - RNA, 32 nt, Homo Sapiens
aaguaauggguaacuaaaauggacuuccauag

SEQ ID NO: 279539 - RNA, 32 nt, Homo Sapiens
aacauuuuuugcauauaaaccaaaaaauaacu

SEQ ID NO: 279540 - RNA, 29 nt, Homo Sapiens
auguaugccuaagggaggagcucccccau

SEQ ID NO: 279541 - RNA, 32 nt, Homo Sapiens
uccuguggugacccccaccucacuuacaaaaa

SEQ ID NO: 279542 - RNA, 31 nt, Homo Sapiens
auaaagcugugcugccugcccucuaguaagu

SEQ ID NO: 279543 - RNA, 32 nt, Homo Sapiens
aggacucuuuugccgcggacucaagccggaag

SEQ ID NO: 279544 - RNA, 32 nt, Homo Sapiens
gagcgacaucuuccugagcuccuguccaugcc

SEQ ID NO: 279545 - RNA, 32 nt, Homo Sapiens
gacauucagguggugccuaguucuuucccugu

SEQ ID NO: 279546 - RNA, 32 nt, Homo Sapiens
cacuucuccagauagcugaaugagucugcuuu

SEQ ID NO: 279547 - RNA, 32 nt, Homo Sapiens
cauuggggcacuuuuuaauauuuugcaagguc

SEQ ID NO: 279548 - RNA, 32 nt, Homo Sapiens
aauccguguugcauguuugguagcucucugag

SEQ ID NO: 279549 - RNA, 32 nt, Homo Sapiens
gagggguuucugcuuggcguguggguucuaag

SEQ ID NO: 279550 - RNA, 32 nt, Homo Sapiens
gggugcugugagaaggcugugcccaugugggg

SEQ ID NO: 279551 - RNA, 32 nt, Homo Sapiens
uccgggagucccucagcuucuacaucagccug

SEQ ID NO: 279552 - RNA, 32 nt, Homo Sapiens
auaaacuguagagauagcauuggcaagacauu

SEQ ID NO: 279553 - RNA, 32 nt, Homo Sapiens
agccaggaauuccacacccuuguguugcgccc

SEQ ID NO: 279554 - RNA, 32 nt, Homo Sapiens
cugcaaaggacucagcuggggcggcuccacaa

SEQ ID NO: 279555 - RNA, 32 nt, Homo Sapiens
augcaaacugggggacucuccucccuucucuc

SEQ ID NO: 279556 - RNA, 32 nt, Homo Sapiens
ugcauccauuuucuuuaguugaauauguuugu

SEQ ID NO: 279557 - RNA, 32 nt, Homo Sapiens
accgugguuacuguauuuuuuauauaacuuca

SEQ ID NO: 279558 - RNA, 32 nt, Homo Sapiens
uguuaugaaaauacaagauaaaugaucucagu

SEQ ID NO: 279559 - RNA, 32 nt, Homo Sapiens
caggccaacagggcuuccugggauacaagagc

SEQ ID NO: 279560 - RNA, 32 nt, Homo Sapiens
acuuacauuuuuguuacuucuaaaaaguauau

SEQ ID NO: 279561 - RNA, 32 nt, Homo Sapiens
uucuauagagaagaagcacaauggggaagaua

SEQ ID NO: 279562 - RNA, 32 nt, Homo Sapiens
cuuucuggaacaaggagaaugccugugcaggu

SEQ ID NO: 279563 - RNA, 32 nt, Homo Sapiens
gggucgaggcggacgcgcggcugcgucaggua

SEQ ID NO: 279564 - RNA, 32 nt, Homo Sapiens
caccuguaaucccagcacuuugggaggucgag

SEQ ID NO: 279565 - RNA, 32 nt, Homo Sapiens
cgcuuguaaucccagcacuuugggaagccgag

SEQ ID NO: 279566 - RNA, 32 nt, Homo Sapiens
caccuguaaucccagcacuuuaggaggucaag

SEQ ID NO: 279567 - RNA, 32 nt, Homo Sapiens
cacuuguaaucccagcacuuugggaggccgag

SEQ ID NO: 279568 - RNA, 32 nt, Homo Sapiens
gagggcauggcggccucacugagugccgccaa

SEQ ID NO: 279569 - RNA, 32 nt, Homo Sapiens
uguauuugguccuugagaagugggagcacccu

SEQ ID NO: 279570 - RNA, 32 nt, Homo Sapiens
cuuagagaaaaaagcccgggagggguggggag

SEQ ID NO: 279571 - RNA, 32 nt, Homo Sapiens
cuccuucacuguucccucuggcuucccauagu

SEQ ID NO: 279572 - RNA, 32 nt, Homo Sapiens
aaucauucucgacaauccucccugccccgaaa

SEQ ID NO: 279573 - RNA, 31 nt, Homo Sapiens
cggccaugccacugccuugcucugggccugu

SEQ ID NO: 279574 - RNA, 32 nt, Homo Sapiens
guugaaggccuaacaccucguaccucaguauu

SEQ ID NO: 279575 - RNA, 32 nt, Homo Sapiens
ucaauaccaaaauaagaagucucugaaaauaa

SEQ ID NO: 279576 - RNA, 32 nt, Homo Sapiens
ggacggcugcccguggacaccagguggacugg

SEQ ID NO: 279577 - RNA, 32 nt, Homo Sapiens
gaggucugucugcagaggcccgggccugggca

SEQ ID NO: 279578 - RNA, 29 nt, Homo Sapiens
cugguuacugguuuccugcugggucuacc

SEQ ID NO: 279579 - RNA, 32 nt, Homo Sapiens
gagcuugcccucagugaccaaauaauuuucuc

SEQ ID NO: 279580 - RNA, 32 nt, Homo Sapiens
auccaggaggcagaagugaggacccuggcgcc

SEQ ID NO: 279581 - RNA, 32 nt, Homo Sapiens
agccugugggagucuauuauauauuauuuugc

SEQ ID NO: 279582 - RNA, 32 nt, Homo Sapiens
ugggcccugggggcugggcuguagaagaguug

SEQ ID NO: 279583 - RNA, 32 nt, Homo Sapiens
cugggaaucccucucggaguuuuuccaggccc

SEQ ID NO: 279584 - RNA, 32 nt, Homo Sapiens
ucccuacaaaaaguacaaaaauuagccgggug

SEQ ID NO: 279585 - RNA, 32 nt, Homo Sapiens
gagaaauguauuauuuccaugaucaaauguag

SEQ ID NO: 279586 - RNA, 32 nt, Homo Sapiens
cuguuuucuuagcuauuacuccaaauaaaguu

SEQ ID NO: 279587 - RNA, 32 nt, Homo Sapiens
cccaggcagcugguggugggcgcuaauccucc

SEQ ID NO: 279588 - RNA, 32 nt, Homo Sapiens
uucuaaaaguuuucuaauuugcacuaaugugg

SEQ ID NO: 279589 - RNA, 32 nt, Homo Sapiens
gucucgguucaaauuccaaaccuaccaucuuc

SEQ ID NO: 279590 - RNA, 32 nt, Homo Sapiens
aauagugagguaguaguuagucgucuuuccua

SEQ ID NO: 279591 - RNA, 32 nt, Homo Sapiens
uccugugguuuuauuacaaaugcaaauuucua

SEQ ID NO: 279592 - RNA, 32 nt, Homo Sapiens
guuauugcaauaaaguauaauguuuauuaaau

SEQ ID NO: 279593 - RNA, 32 nt, Homo Sapiens
gucuccccaguuccacagcagugucacagacg

SEQ ID NO: 279594 - RNA, 32 nt, Homo Sapiens
cuuccucacccuuccccuccccgcaccgcccg

SEQ ID NO: 279595 - RNA, 32 nt, Homo Sapiens
gaaauguacagagggaagaagcgucaugagau

SEQ ID NO: 279596 - RNA, 32 nt, Homo Sapiens
gaagcauauggaauaaaacuaaagaucagugu

SEQ ID NO: 279597 - RNA, 32 nt, Homo Sapiens
cacgagggcuguuugaaaggacuuuaucgauc

SEQ ID NO: 279598 - RNA, 32 nt, Homo Sapiens
agcagagaagaaaaaaucaaagaaaucugucu

SEQ ID NO: 279599 - RNA, 32 nt, Homo Sapiens
uucuccgcaccucgguugugugcuuccgaaug

SEQ ID NO: 279600 - RNA, 31 nt, Homo Sapiens
gguggccggcgcggccugcccuuugugaccg

SEQ ID NO: 279601 - RNA, 32 nt, Homo Sapiens
acgguauauuccagaggugggaggugggaggg

SEQ ID NO: 279602 - RNA, 32 nt, Homo Sapiens
agccgcguccugcugugccccggcgccuacgc

SEQ ID NO: 279603 - RNA, 32 nt, Homo Sapiens
gaggugucaagcuccugaaacaagcucauuuc

SEQ ID NO: 279604 - RNA, 32 nt, Homo Sapiens
gcccugcccucccgaaggccgcagcucccggg

SEQ ID NO: 279605 - RNA, 32 nt, Homo Sapiens
aguggaagccccauggaagacagugcucccag

SEQ ID NO: 279606 - RNA, 32 nt, Homo Sapiens
accacugaaccagacagcgaagccaagaucau

SEQ ID NO: 279607 - RNA, 32 nt, Homo Sapiens
ccccaggugcaguggcucuuguuccuggaugc

SEQ ID NO: 279608 - RNA, 32 nt, Homo Sapiens
gagcacaggaggaucaagaggaucugcacggg

SEQ ID NO: 279609 - RNA, 32 nt, Homo Sapiens
aaccugggaaugugacuuuaauuuggaaauag

SEQ ID NO: 279610 - RNA, 32 nt, Homo Sapiens
gucaugacuuugaugauauuucuguuauauua

SEQ ID NO: 279611 - RNA, 32 nt, Homo Sapiens
accccugcgccgggcgccuggaggugaccugg

SEQ ID NO: 279612 - RNA, 32 nt, Homo Sapiens
uggcggacgcagagggcaaggaacuggauugc

SEQ ID NO: 279613 - RNA, 32 nt, Homo Sapiens
ccucagagcucccagcccuucuccuccugcua

SEQ ID NO: 279614 - RNA, 31 nt, Homo Sapiens
gagcuuugcuuguucuucagaaagacuugcc

SEQ ID NO: 279615 - RNA, 32 nt, Homo Sapiens
cucugcggacucugcagcuccgcggccccggc

SEQ ID NO: 279616 - RNA, 32 nt, Homo Sapiens
guggguuaaacacaaauagaacauuccauuug

SEQ ID NO: 279617 - RNA, 32 nt, Homo Sapiens
ccaguugguucucaagcccuggcgauuuuacg

SEQ ID NO: 279618 - RNA, 32 nt, Homo Sapiens
uaaaacagucaacuuuaccauuuccguauucu

SEQ ID NO: 279619 - RNA, 32 nt, Homo Sapiens
aaguaugguauuacaaaacaaacaaacaaaca

SEQ ID NO: 279620 - RNA, 32 nt, Homo Sapiens
ccaaucagaucgcugcuucuaguugcacugcu

SEQ ID NO: 279621 - RNA, 32 nt, Homo Sapiens
ccugauuacuugagauuagggauuggugauga

SEQ ID NO: 279622 - RNA, 30 nt, Homo Sapiens
caacauguuuuugcugcagauaaucggcca

SEQ ID NO: 279623 - RNA, 32 nt, Homo Sapiens
uggacaaaugcuaauauuuuuaucuagaaaga

SEQ ID NO: 279624 - RNA, 32 nt, Homo Sapiens
agaauuuucuuugcucugucuagcuuaaacua

SEQ ID NO: 279625 - RNA, 32 nt, Homo Sapiens
cucacugccagugaaauugcuuuccuauggua

SEQ ID NO: 279626 - RNA, 32 nt, Homo Sapiens
auauauauaaaauuauuuuaaugcauuguagu

SEQ ID NO: 279627 - RNA, 32 nt, Homo Sapiens
cgcaaugaaaacugacuugaaauaaugcuugu

SEQ ID NO: 279628 - RNA, 32 nt, Homo Sapiens
cagccuccugaguagcugggauuaccagugca

SEQ ID NO: 279629 - RNA, 32 nt, Homo Sapiens
cuguuuuaugcagaauaauccaggcgugagag

SEQ ID NO: 279630 - RNA, 32 nt, Homo Sapiens
guucgccgccgccgcugcuucagcuuauuccu

SEQ ID NO: 279631 - RNA, 32 nt, Homo Sapiens
aaagccagccccagcugggcccccggggccca

SEQ ID NO: 279632 - RNA, 32 nt, Homo Sapiens
ucccauuuuccacagcagcuacaccauuuuau

SEQ ID NO: 279633 - RNA, 32 nt, Homo Sapiens
cucaucuucuaaacuggcgagcccuauaguuc

SEQ ID NO: 279634 - RNA, 32 nt, Homo Sapiens
ggaagggggaguaucugugggcaacuugguuu

SEQ ID NO: 279635 - RNA, 32 nt, Homo Sapiens
uugagcaccuacuuuauauaaaacaugacaaa

SEQ ID NO: 279636 - RNA, 32 nt, Homo Sapiens
uuccaagucuuagguaugucuuuaucagcagg

SEQ ID NO: 279637 - RNA, 32 nt, Homo Sapiens
cuuggggaccgcccggcgccugaccgcccgcc

SEQ ID NO: 279638 - RNA, 32 nt, Homo Sapiens
uggucuaacauuuaggaagccuugcuuugacu

SEQ ID NO: 279639 - RNA, 30 nt, Homo Sapiens
ccugggugagacugcggcggcggcagggcg

SEQ ID NO: 279640 - RNA, 32 nt, Homo Sapiens
acacaugcggcggcggccgcgcggcaggacca

SEQ ID NO: 279641 - RNA, 32 nt, Homo Sapiens
ccucgaugaugaugaugaugaugaugaugucg

SEQ ID NO: 279642 - RNA, 32 nt, Homo Sapiens
uaaagagcacuaguugugaauuuaggguguua

SEQ ID NO: 279643 - RNA, 30 nt, Homo Sapiens
acgguguggggcggucccggccccgcagau

SEQ ID NO: 279644 - RNA, 32 nt, Homo Sapiens
ucaacaggaaccugccugaggacacccuucua

SEQ ID NO: 279645 - RNA, 32 nt, Homo Sapiens
cggcccccggccaaggacccaggcgcugcaua

SEQ ID NO: 279646 - RNA, 32 nt, Homo Sapiens
ccucucucgcacccacccacccccucaccccc

SEQ ID NO: 279647 - RNA, 32 nt, Homo Sapiens
cuccucccugcagcugcaguguggcuuagggc

SEQ ID NO: 279648 - RNA, 32 nt, Homo Sapiens
uucuaaaaucaaucuauuagauaauugugcca

SEQ ID NO: 279649 - RNA, 32 nt, Homo Sapiens
agaacaggcgauuauuuauuuguuuuuaauuu

SEQ ID NO: 279650 - RNA, 32 nt, Homo Sapiens
ggccagggcuccuguggcagcugccccuggca

SEQ ID NO: 279651 - RNA, 32 nt, Homo Sapiens
ccaucugccgguuucacauccuccucagauug

SEQ ID NO: 279652 - RNA, 32 nt, Homo Sapiens
ugccuugaaaauuuaugguuuugguauuuuuu

SEQ ID NO: 279653 - RNA, 32 nt, Homo Sapiens
ugaauaaagaaauaaacuucaacuagaaaucc

SEQ ID NO: 279654 - RNA, 32 nt, Homo Sapiens
uucagaagcugaacuucugaccaagacucucc

SEQ ID NO: 279655 - RNA, 32 nt, Homo Sapiens
uuaaaauaucuuuuugccgauuuuuaucuaug

SEQ ID NO: 279656 - RNA, 31 nt, Homo Sapiens
cuuuccccauggagaaaggacucacuuugcc

SEQ ID NO: 279657 - RNA, 32 nt, Homo Sapiens
agauaagggcuuuuucuccccgcaaacacccc

SEQ ID NO: 279658 - RNA, 32 nt, Homo Sapiens
uuuaccacuucuaagagugacugacgacgggc

SEQ ID NO: 279659 - RNA, 32 nt, Homo Sapiens
gguguggcguccgugcccucgcaguggagggc

SEQ ID NO: 279660 - RNA, 32 nt, Homo Sapiens
uguuucuuuauuuggacuuaacggccacucau

SEQ ID NO: 279661 - RNA, 32 nt, Homo Sapiens
auugucuuucccugcauuugaagucuuuuaca

SEQ ID NO: 279662 - RNA, 32 nt, Homo Sapiens
caucugcuuggagguagcuucucuguuuugca

SEQ ID NO: 279663 - RNA, 32 nt, Homo Sapiens
ugguauuucuuaccauuuuaucuuccucaugc

SEQ ID NO: 279664 - RNA, 32 nt, Homo Sapiens
uguccugcucacugcagugcugauguauuuca

SEQ ID NO: 279665 - RNA, 32 nt, Homo Sapiens
gggggcagcacagguucugggauugugaggcu

SEQ ID NO: 279666 - RNA, 32 nt, Homo Sapiens
uagcauggcaauaaauauucuagcaucccuaa

SEQ ID NO: 279667 - RNA, 32 nt, Homo Sapiens
uuuaucugggauuaugguuuugugauguuugu

SEQ ID NO: 279668 - RNA, 32 nt, Homo Sapiens
gauaaauaaacacuccuagaaacaaguuaaaa

SEQ ID NO: 279669 - RNA, 32 nt, Homo Sapiens
cccugcccaugccccaggguguugcccaaacu

SEQ ID NO: 279670 - RNA, 32 nt, Homo Sapiens
auuggaauuccaccuuguccagcccuccccag

SEQ ID NO: 279671 - RNA, 32 nt, Homo Sapiens
gccagccccgcaccccaacagcuugcgcugga

SEQ ID NO: 279672 - RNA, 32 nt, Homo Sapiens
gcgcgggaaggggauuuggauuguugcgccuc

SEQ ID NO: 279673 - RNA, 32 nt, Homo Sapiens
cgcacgucuggaagaggcgccgcauccucucc

SEQ ID NO: 279674 - RNA, 32 nt, Homo Sapiens
uguugugaggacuuaaauuuuguguuaccucc

SEQ ID NO: 279675 - RNA, 32 nt, Homo Sapiens
auccaaggaugcaaugaaaaagaaauuucaag

SEQ ID NO: 279676 - RNA, 32 nt, Homo Sapiens
agaaagggggacaaacagaacugguaaagagg

SEQ ID NO: 279677 - RNA, 32 nt, Homo Sapiens
gguagcggcagcagcagcggcggugcggagag

SEQ ID NO: 279678 - RNA, 32 nt, Homo Sapiens
agguuuuaugaguagacaguguucauuugauu

SEQ ID NO: 279679 - RNA, 29 nt, Homo Sapiens
gcccuucuuugguuuaauuuucuaugugc

SEQ ID NO: 279680 - RNA, 32 nt, Homo Sapiens
cauuuuggugugccuaucucugauggaugauu

SEQ ID NO: 279681 - RNA, 32 nt, Homo Sapiens
ucucucaggagcuucugagucagacgccucug

SEQ ID NO: 279682 - RNA, 32 nt, Homo Sapiens
gucaccaagaaccagcaucucuggagaaacag

SEQ ID NO: 279683 - RNA, 32 nt, Homo Sapiens
auuuguauuuguuuuucuuacuuagugaaggu

SEQ ID NO: 279684 - RNA, 32 nt, Homo Sapiens
agaaagggaugguggagugagagccuuugccu

SEQ ID NO: 279685 - RNA, 32 nt, Homo Sapiens
ccugagagcuaaaaaacugaaaggaauuuuuc

SEQ ID NO: 279686 - RNA, 32 nt, Homo Sapiens
cagauucaaacacaguuuuaucucacacugca

SEQ ID NO: 279687 - RNA, 32 nt, Homo Sapiens
aagauauuaaaaacagaagcaaauuauuugaa

SEQ ID NO: 279688 - RNA, 32 nt, Homo Sapiens
ccucagccccacugacacccaguguccuucca

SEQ ID NO: 279689 - RNA, 32 nt, Homo Sapiens
uggcccggcaggggcggggugcgagugggugg

SEQ ID NO: 279690 - RNA, 32 nt, Homo Sapiens
aaaaugggagucuacagguaauuuaagacuua

SEQ ID NO: 279691 - RNA, 32 nt, Homo Sapiens
uuuuguuccucuuuuccaaaagccccagguuu

SEQ ID NO: 279692 - RNA, 30 nt, Homo Sapiens
gagcugcuguggcggcggcaacauggcgga

SEQ ID NO: 279693 - RNA, 32 nt, Homo Sapiens
auuaacuugucauuuucaguacauauuuuacu

SEQ ID NO: 279694 - RNA, 32 nt, Homo Sapiens
ccaccggguaagagugguuacccacgaggcaa

SEQ ID NO: 279695 - RNA, 32 nt, Homo Sapiens
uggccuuggcuucaggaaaggagcauucagac

SEQ ID NO: 279696 - RNA, 32 nt, Homo Sapiens
ucugggcacugacuuaacggcaccucccuaga

SEQ ID NO: 279697 - RNA, 32 nt, Homo Sapiens
ccuuuuggaaaauaguucccuuugccaacaga

SEQ ID NO: 279698 - RNA, 32 nt, Homo Sapiens
caugugucaagcggcuggcucagcccagaguc

SEQ ID NO: 279699 - RNA, 32 nt, Homo Sapiens
uuucauugaucuaauuacggcucuuugacaca

SEQ ID NO: 279700 - RNA, 32 nt, Homo Sapiens
uggcuaauuuuuguauuuuuaguggagauggu

SEQ ID NO: 279701 - RNA, 32 nt, Homo Sapiens
agugcaggaggugugagggcucccucgaacac

SEQ ID NO: 279702 - RNA, 32 nt, Homo Sapiens
uugaucuggggauagucuuggggcaaagaaag

SEQ ID NO: 279703 - RNA, 30 nt, Homo Sapiens
ccaagcucacaguuccucgcccugggucua

SEQ ID NO: 279704 - RNA, 32 nt, Homo Sapiens
ugugaugccuucugucaauaaaagcacuuuac

SEQ ID NO: 279705 - RNA, 32 nt, Homo Sapiens
ggugcuucuucuucugguggcgucuuuggauu

SEQ ID NO: 279706 - RNA, 32 nt, Homo Sapiens
uucugggcagcaggaaggaaaagcugaugcga

SEQ ID NO: 279707 - RNA, 32 nt, Homo Sapiens
aaacuggcuuagaggagcuccaaauaugugga

SEQ ID NO: 279708 - RNA, 32 nt, Homo Sapiens
gaagcauuucucaucaucaucaucucugcuac

SEQ ID NO: 279709 - RNA, 32 nt, Homo Sapiens
ggguccugugagggcgagcggaggcggagaaa

SEQ ID NO: 279710 - RNA, 32 nt, Homo Sapiens
aauagauuuuuggaaacaagacuuuauugaga

SEQ ID NO: 279711 - RNA, 32 nt, Homo Sapiens
ccccacucuuagaaauugaggaucucaaagag

SEQ ID NO: 279712 - RNA, 32 nt, Homo Sapiens
aauuacuauuggcauagguauguguauacaca

SEQ ID NO: 279713 - RNA, 32 nt, Homo Sapiens
gccccggccccggcaccaugucggagaaaagc

SEQ ID NO: 279714 - RNA, 32 nt, Homo Sapiens
ucuuugaaaugaggucauuaaaaggaaacaga

SEQ ID NO: 279715 - RNA, 32 nt, Homo Sapiens
cgggcuuaagggugacaucugcgcuuuaaagg

SEQ ID NO: 279716 - RNA, 32 nt, Homo Sapiens
cagguugucugggguagggggaggcguuuuuu

SEQ ID NO: 279717 - RNA, 32 nt, Homo Sapiens
gcggcaccccagcguuuaggcgcggaggcagc

SEQ ID NO: 279718 - RNA, 32 nt, Homo Sapiens
gacaucuaaaggucaacaaacauuuuauacca

SEQ ID NO: 279719 - RNA, 32 nt, Homo Sapiens
ugucaguggccaguagcucugccgccuuuccc

SEQ ID NO: 279720 - RNA, 32 nt, Homo Sapiens
uugaaguuguuggagcaaugcauuguauucag

SEQ ID NO: 279721 - RNA, 32 nt, Homo Sapiens
gcaacaaaggauuugaaaacuuugguguguuc

SEQ ID NO: 279722 - RNA, 32 nt, Homo Sapiens
uuacugguagagaggagacgagaggcuuuuuc

SEQ ID NO: 279723 - RNA, 32 nt, Homo Sapiens
uuggacgggagacagagugacgcacugacuca

SEQ ID NO: 279724 - RNA, 32 nt, Homo Sapiens
ugccacugcacuccagccugggcaauggagag

SEQ ID NO: 279725 - RNA, 32 nt, Homo Sapiens
cucaaaaaaagguuuaugaaugcugaaccuca

SEQ ID NO: 279726 - RNA, 32 nt, Homo Sapiens
uagauuaauuuaauaacuuuuugaaauugcag

SEQ ID NO: 279727 - RNA, 32 nt, Homo Sapiens
agacacagccuggccuccucagggcugaagau

SEQ ID NO: 279728 - RNA, 32 nt, Homo Sapiens
ugugaauagcacgauuaaaauccaguuguaua

SEQ ID NO: 279729 - RNA, 32 nt, Homo Sapiens
gaucuaagaacaaguacuugcuggaaaauuag

SEQ ID NO: 279730 - RNA, 32 nt, Homo Sapiens
agcaaagcagugcuccugucuuuaugguucuu

SEQ ID NO: 279731 - RNA, 32 nt, Homo Sapiens
guuagaauaaaucccggggccugggcuucucu

SEQ ID NO: 279732 - RNA, 32 nt, Homo Sapiens
augccgccgggaacugccguccguccugcccc

SEQ ID NO: 279733 - RNA, 32 nt, Homo Sapiens
auacugcuauaaauauaauaaaggguuaugua

SEQ ID NO: 279734 - RNA, 32 nt, Homo Sapiens
guccagcguggccuacacggauauggggagcc

SEQ ID NO: 279735 - RNA, 32 nt, Homo Sapiens
caguggcagcacgucuuccucaugagccgagc

SEQ ID NO: 279736 - RNA, 32 nt, Homo Sapiens
augcugucacuuaauaaucaaccugggguucg

SEQ ID NO: 279737 - RNA, 32 nt, Homo Sapiens
cccuggacguuucugccgcagugucccccuca

SEQ ID NO: 279738 - RNA, 32 nt, Homo Sapiens
guuuucaaacacacauaagaaugcacucugga

SEQ ID NO: 279739 - RNA, 32 nt, Homo Sapiens
caaucuccaaacuucaugugguguuaucaagg

SEQ ID NO: 279740 - RNA, 32 nt, Homo Sapiens
ggggagugcagggcaccaccugggcgaacacc

SEQ ID NO: 279741 - RNA, 32 nt, Homo Sapiens
guucgcccuggucguugcacuccagccugucg

SEQ ID NO: 279742 - RNA, 32 nt, Homo Sapiens
gauugaggcucuuuuuagaauugaauuuacuc

SEQ ID NO: 279743 - RNA, 32 nt, Homo Sapiens
cugcgauggagccuccauaagaaugccuggac

SEQ ID NO: 279744 - RNA, 32 nt, Homo Sapiens
uuuuucuuucccuuuuuuguuccuccaaacaa

SEQ ID NO: 279745 - RNA, 32 nt, Homo Sapiens
uccaguacaguagccaguggccacauaaaccu

SEQ ID NO: 279746 - RNA, 32 nt, Homo Sapiens
cugcccagcuggaaaccacagggaggggaagg

SEQ ID NO: 279747 - RNA, 32 nt, Homo Sapiens
uuuccugaagucuggaacuaauuuugagaagu

SEQ ID NO: 279748 - RNA, 32 nt, Homo Sapiens
augcagguggccucgcuuugccggguccgaga

SEQ ID NO: 279749 - RNA, 32 nt, Homo Sapiens
acagaucaggagaaccucagucugacgacauu

SEQ ID NO: 279750 - RNA, 32 nt, Homo Sapiens
uuucuuuuuuguaagauaugugaaugaagugu

SEQ ID NO: 279751 - RNA, 32 nt, Homo Sapiens
gcguccgcccggcgagcaggacaggcugcuuu

SEQ ID NO: 279752 - RNA, 28 nt, Homo Sapiens
cacaugcccugggaagaaccagcaggug

SEQ ID NO: 279753 - RNA, 32 nt, Homo Sapiens
agugucggcugccggugccgcggccuuugucu

SEQ ID NO: 279754 - RNA, 32 nt, Homo Sapiens
ugccuuggucagcauccaugcugcugggcagg

SEQ ID NO: 279755 - RNA, 32 nt, Homo Sapiens
uugcugggggaugggguuggggccuuauauac

SEQ ID NO: 279756 - RNA, 32 nt, Homo Sapiens
gcucagcuccgucucgcucggucccucgcuuc

SEQ ID NO: 279757 - RNA, 32 nt, Homo Sapiens
cuuuaaaucuucagaaugauuuuauugaagag

SEQ ID NO: 279758 - RNA, 32 nt, Homo Sapiens
gcaggacccucccacacaccugcacccuagcu

SEQ ID NO: 279759 - RNA, 32 nt, Homo Sapiens
ugcgaccgcgcgcgugcgcaguaccggguccg

SEQ ID NO: 279760 - RNA, 32 nt, Homo Sapiens
ccauugggugccaugaaaaaacaugaagcaac

SEQ ID NO: 279761 - RNA, 32 nt, Homo Sapiens
uguguuuacaugucucuuucuaugauaagagg

SEQ ID NO: 279762 - RNA, 32 nt, Homo Sapiens
gaggcugcagugagcccagaucgagccacugc

SEQ ID NO: 279763 - RNA, 32 nt, Homo Sapiens
gaaccacccuccuuccugaggcaaauuuggga

SEQ ID NO: 279764 - RNA, 32 nt, Homo Sapiens
gagaggguugggcuccgccccggcgccgcagc

SEQ ID NO: 279765 - RNA, 32 nt, Homo Sapiens
cauaguugggcccauucguccuggaaagggac

SEQ ID NO: 279766 - RNA, 32 nt, Homo Sapiens
aaguacauaaaguggagguuuauuuaucauac

SEQ ID NO: 279767 - RNA, 32 nt, Homo Sapiens
gcugggcgugguggcgagcaccuguaaucuca

SEQ ID NO: 279768 - RNA, 32 nt, Homo Sapiens
agcggaaagaucugcucgaggccugggugcuu

SEQ ID NO: 279769 - RNA, 32 nt, Homo Sapiens
cccagggacuucaccagugcugccaugcuggc

SEQ ID NO: 279770 - RNA, 32 nt, Homo Sapiens
aguuugguuuaaaagaacuauaucuauaugua

SEQ ID NO: 279771 - RNA, 32 nt, Homo Sapiens
ucuuccuuguuaagaagaaaauuaaagauuaa

SEQ ID NO: 279772 - RNA, 28 nt, Homo Sapiens
auuugucuuucaaauaugugucucuuaa

SEQ ID NO: 279773 - RNA, 32 nt, Homo Sapiens
agcacuucaccaguuggaaaucucuggaaauu

SEQ ID NO: 279774 - RNA, 32 nt, Homo Sapiens
gcauguuuguuaaaaaaacaaacacauguuuu

SEQ ID NO: 279775 - RNA, 32 nt, Homo Sapiens
ugcagcggcgccuggugccgcgcaaggccaag

SEQ ID NO: 279776 - RNA, 32 nt, Homo Sapiens
gcuuugugucccauuccaucucuugaaaaaau

SEQ ID NO: 279777 - RNA, 32 nt, Homo Sapiens
uguaccuagcucuagccuguaccaguuaguuc

SEQ ID NO: 279778 - RNA, 30 nt, Homo Sapiens
aaaaaauaaaugaacaagucaguuccaaug

SEQ ID NO: 279779 - RNA, 32 nt, Homo Sapiens
uggaagagucugacuccauguguuaugccuag

SEQ ID NO: 279780 - RNA, 32 nt, Homo Sapiens
cccagcuuuccacaggcaucacaggcaucuuc

SEQ ID NO: 279781 - RNA, 32 nt, Homo Sapiens
uugugugccauccuguauuaaacaauguaugg

SEQ ID NO: 279782 - RNA, 32 nt, Homo Sapiens
ccccuggggccugggcugcugcugguucuuca

SEQ ID NO: 279783 - RNA, 32 nt, Homo Sapiens
aaacagaaggcacagcuaacggccaguagcug

SEQ ID NO: 279784 - RNA, 32 nt, Homo Sapiens
ucuaaucucauguuuuuuccuuuucacauuuu

SEQ ID NO: 279785 - RNA, 32 nt, Homo Sapiens
auggagaucugccugcaugucugcugcagggc

SEQ ID NO: 279786 - RNA, 32 nt, Homo Sapiens
acugcccacugaccagagcccgggccagucca

SEQ ID NO: 279787 - RNA, 32 nt, Homo Sapiens
cauugcuagagaaugaucuuuacugaauuugc

SEQ ID NO: 279788 - RNA, 32 nt, Homo Sapiens
ccagaaggagcugcccugaggaccaucuuagc

SEQ ID NO: 279789 - RNA, 32 nt, Homo Sapiens
aggcgggaggaucaccugagguuaggaguuca

SEQ ID NO: 279790 - RNA, 32 nt, Homo Sapiens
uacagaaaugacaccauccagcccugggagug

SEQ ID NO: 279791 - RNA, 32 nt, Homo Sapiens
aacugagauaauuuagaaaacaggugcuuaau

SEQ ID NO: 279792 - RNA, 32 nt, Homo Sapiens
guggccggcaccucugcuccucacgugggucg

SEQ ID NO: 279793 - RNA, 32 nt, Homo Sapiens
ccuccagcuguucuuagugacacacacugucu

SEQ ID NO: 279794 - RNA, 32 nt, Homo Sapiens
gcccauggccccagcuggcugggucgccccuc

SEQ ID NO: 279795 - RNA, 29 nt, Homo Sapiens
guuuauauauguauguaaaaagggaacca

SEQ ID NO: 279796 - RNA, 32 nt, Homo Sapiens
acaccuacccuugacgcucccuggacagugcg

SEQ ID NO: 279797 - RNA, 32 nt, Homo Sapiens
cgcccaagccccaccaagccccccgcccuccc

SEQ ID NO: 279798 - RNA, 32 nt, Homo Sapiens
gauacuagugagugcugcuuuuuuguauacuc

SEQ ID NO: 279799 - RNA, 32 nt, Homo Sapiens
gucuguccacuacugggcuucugggcuauuug

SEQ ID NO: 279800 - RNA, 32 nt, Homo Sapiens
agauuucuaaaccuauaguuagugugaucaug

SEQ ID NO: 279801 - RNA, 32 nt, Homo Sapiens
cgcaaccccgcggcggccggaagaacagccug

SEQ ID NO: 279802 - RNA, 32 nt, Homo Sapiens
agcuggugccuggccuucggcuccugcguccc

SEQ ID NO: 279803 - RNA, 32 nt, Homo Sapiens
uaccucugaagcgcccuccugggcccugcugu

SEQ ID NO: 279804 - RNA, 32 nt, Homo Sapiens
ucacuuuguaauuuuucuuaguauauagucag

SEQ ID NO: 279805 - RNA, 32 nt, Homo Sapiens
ccacacuuuaauauuaaauauucauaaggucu

SEQ ID NO: 279806 - RNA, 32 nt, Homo Sapiens
agggucccauccgagcguggacuggcggcagg

SEQ ID NO: 279807 - RNA, 32 nt, Homo Sapiens
uaugaacuuuuguauuuuguauuuuauuaggu

SEQ ID NO: 279808 - RNA, 32 nt, Homo Sapiens
cuuugcugcccccaagaguauacuccaccgag

SEQ ID NO: 279809 - RNA, 32 nt, Homo Sapiens
uaacugguuucauguccuaguaggaagugcau

SEQ ID NO: 279810 - RNA, 32 nt, Homo Sapiens
ugcgcugaucggguccgccgcgcgccagagcc

SEQ ID NO: 279811 - RNA, 32 nt, Homo Sapiens
aaagagcggaaaccggccgggcgguuuccagg

SEQ ID NO: 279812 - RNA, 32 nt, Homo Sapiens
uuaaaaaggaugccucuuguuuuuugcugcug

SEQ ID NO: 279813 - RNA, 32 nt, Homo Sapiens
acugcuuccgccucagaggcgucccggcugcg

SEQ ID NO: 279814 - RNA, 32 nt, Homo Sapiens
cgguucaagcaauucgcccaccuuggccuccc

SEQ ID NO: 279815 - RNA, 32 nt, Homo Sapiens
uuugucuucuauuguguggcuuucugaguauu

SEQ ID NO: 279816 - RNA, 32 nt, Homo Sapiens
cuuuucuccaugacacgaggccaguccccagg

SEQ ID NO: 279817 - RNA, 32 nt, Homo Sapiens
gcggcucugcacccgcgccgccggaccugaaa

SEQ ID NO: 279818 - RNA, 32 nt, Homo Sapiens
uaauuuggagucaugaucucagcuuugucuca

SEQ ID NO: 279819 - RNA, 32 nt, Homo Sapiens
ggggcauguagaguauaugaggaggcaguaug

SEQ ID NO: 279820 - RNA, 32 nt, Homo Sapiens
uacuugacaagguggauguaacauuucaaacu

SEQ ID NO: 279821 - RNA, 32 nt, Homo Sapiens
aagggcuguccgcuccugcccaggccucaccu

SEQ ID NO: 279822 - RNA, 32 nt, Homo Sapiens
ccucaauaaaauuuauuuuaaaaaauagcaca

SEQ ID NO: 279823 - RNA, 32 nt, Homo Sapiens
gccccaccaaccccaaaccaugcggagaauua

SEQ ID NO: 279824 - RNA, 32 nt, Homo Sapiens
cuaagauguauuaaccuaccugugaaucauau

SEQ ID NO: 279825 - RNA, 32 nt, Homo Sapiens
aggccaacugaauauguauuagcuauguuuac

SEQ ID NO: 279826 - RNA, 32 nt, Homo Sapiens
ccgcccggccccacaguugucuuugccggagc

SEQ ID NO: 279827 - RNA, 32 nt, Homo Sapiens
ugugagacugguuccauggccucuucagaucu

SEQ ID NO: 279828 - RNA, 31 nt, Homo Sapiens
ccaggaauggcguuaaagacuucuuugggca

SEQ ID NO: 279829 - RNA, 32 nt, Homo Sapiens
uccauauuucuacuaacagucuguuuaaggca

SEQ ID NO: 279830 - RNA, 32 nt, Homo Sapiens
gcccuagcugggccaccuccccgggcugccgg

SEQ ID NO: 279831 - RNA, 32 nt, Homo Sapiens
cuacauugauucagcaaauauuuauugagcug

SEQ ID NO: 279832 - RNA, 32 nt, Homo Sapiens
caggcccggcgcccgccugcccgcacccucgu

SEQ ID NO: 279833 - RNA, 32 nt, Homo Sapiens
cucagacauauuucaguauaaaacaguuggaa

SEQ ID NO: 279834 - RNA, 32 nt, Homo Sapiens
uauuuaacuagaagauacauguacuauagauc

SEQ ID NO: 279835 - RNA, 32 nt, Homo Sapiens
ugcugccagugccccagacaguucuuuucuac

SEQ ID NO: 279836 - RNA, 32 nt, Homo Sapiens
gcuucagacccaggcagcccagcccuuuccau

SEQ ID NO: 279837 - RNA, 32 nt, Homo Sapiens
guuucugggguggaaggcagggaggugcaacu

SEQ ID NO: 279838 - RNA, 32 nt, Homo Sapiens
uucacaacccccacccucccccgcccccgccu

SEQ ID NO: 279839 - RNA, 32 nt, Homo Sapiens
cuccggccuucccugcccugaccuggaaccuc

SEQ ID NO: 279840 - RNA, 32 nt, Homo Sapiens
ugacggagccgcccggccgacagccccgagac

SEQ ID NO: 279841 - RNA, 32 nt, Homo Sapiens
cagggauucacgggcgcacacacacacacuca

SEQ ID NO: 279842 - RNA, 32 nt, Homo Sapiens
gguuggaagcauauguggggaggcuggcuggu

SEQ ID NO: 279843 - RNA, 32 nt, Homo Sapiens
gcgcucuugucaccccugcugcuggagugcaa

SEQ ID NO: 279844 - RNA, 32 nt, Homo Sapiens
uauugugggacauuuuuauauauugaaucugg

SEQ ID NO: 279845 - RNA, 32 nt, Homo Sapiens
uccucguaaccaaaacccucacugcucccagg

SEQ ID NO: 279846 - RNA, 32 nt, Homo Sapiens
uuaugauaaggaugauaaaagcacuuacuucg

SEQ ID NO: 279847 - RNA, 32 nt, Homo Sapiens
ucccagggccgccugcccuccucaaggguggg

SEQ ID NO: 279848 - RNA, 32 nt, Homo Sapiens
agcaucuuuuccauccugaggugccucccagu

SEQ ID NO: 279849 - RNA, 32 nt, Homo Sapiens
ccuccaggagacggaucucucuccgaccugcc

SEQ ID NO: 279850 - RNA, 32 nt, Homo Sapiens
uguguggcuuccagcccucccuuuaccaaaag

SEQ ID NO: 279851 - RNA, 32 nt, Homo Sapiens
ccucuacaaaaaguacaaaaauuagucgggcg

SEQ ID NO: 279852 - RNA, 32 nt, Homo Sapiens
ggucgggaggcguccccacgccgcccggggag

SEQ ID NO: 279853 - RNA, 32 nt, Homo Sapiens
gcgagucggcggggcuggcggcagcggcggag

SEQ ID NO: 279854 - RNA, 32 nt, Homo Sapiens
cuccuuaccucccuucagccaagccccaccug

SEQ ID NO: 279855 - RNA, 32 nt, Homo Sapiens
cugaccugcagcccaaaccgaccaguccaaag

SEQ ID NO: 279856 - RNA, 32 nt, Homo Sapiens
uuuggcgccuucccuuugccguacugggaguc

SEQ ID NO: 279857 - RNA, 32 nt, Homo Sapiens
ugggagguggagguugcagugagucgagauca

SEQ ID NO: 279858 - RNA, 32 nt, Homo Sapiens
gggggcgggaugcgcuccccggccccucuagc

SEQ ID NO: 279859 - RNA, 32 nt, Homo Sapiens
uucaucacauaaaaaccuaaaauauucaugaa

SEQ ID NO: 279860 - RNA, 32 nt, Homo Sapiens
caaaacaaaacaaacaaacaaacaaaaaagua

SEQ ID NO: 279861 - RNA, 32 nt, Homo Sapiens
ccagagaaaaggaagcuguuuggauauuuagc

SEQ ID NO: 279862 - RNA, 32 nt, Homo Sapiens
auaugcauugcuaguauggaauuuaagauacc

SEQ ID NO: 279863 - RNA, 32 nt, Homo Sapiens
aucuucacagacuguaggagaauucaacauau

SEQ ID NO: 279864 - RNA, 32 nt, Homo Sapiens
ggcuagucucaaacuccugaccucaggugauc

SEQ ID NO: 279865 - RNA, 32 nt, Homo Sapiens
uagguugcaugggaaagacgugacccagcuga

SEQ ID NO: 279866 - RNA, 32 nt, Homo Sapiens
gacuagucucaaacuccugaccucaagugauc

SEQ ID NO: 279867 - RNA, 32 nt, Homo Sapiens
ggcuggucucaaacuccugaccucagguaauc

SEQ ID NO: 279868 - RNA, 32 nt, Homo Sapiens
guuaccaaagacagcagccguuauuuuaauaa

SEQ ID NO: 279869 - RNA, 32 nt, Homo Sapiens
ccuacccaccucuguccagucuacacacccag

SEQ ID NO: 279870 - RNA, 32 nt, Homo Sapiens
ggccaggaacgaggagugucaugaccgagaau

SEQ ID NO: 279871 - RNA, 32 nt, Homo Sapiens
gaaaccugcuccacuugucagggucucuucgg

SEQ ID NO: 279872 - RNA, 32 nt, Homo Sapiens
cuaauagaaagccccugaagcuggacugaugu

SEQ ID NO: 279873 - RNA, 32 nt, Homo Sapiens
gcacgcgguccgcgccggcgucagucugggau

SEQ ID NO: 279874 - RNA, 31 nt, Homo Sapiens
uuuauucaagccaccagaguaagaauuuggg

SEQ ID NO: 279875 - RNA, 32 nt, Homo Sapiens
gucccuggucuccuccucccccucccccuuag

SEQ ID NO: 279876 - RNA, 32 nt, Homo Sapiens
gcgggcagugccggcguccgcggcuggaaugg

SEQ ID NO: 279877 - RNA, 32 nt, Homo Sapiens
auuauuuuaaacaaaauagaagcuguaguagc

SEQ ID NO: 279878 - RNA, 32 nt, Homo Sapiens
agccuuaggaagugccagguuuucacugucag

SEQ ID NO: 279879 - RNA, 32 nt, Homo Sapiens
cccuguuugcaauuucuuucuguuuguaggau

SEQ ID NO: 279880 - RNA, 30 nt, Homo Sapiens
gagauuggaggccgcgcgggucccuggucu

SEQ ID NO: 279881 - RNA, 32 nt, Homo Sapiens
gaagagagaggguuuuaccauccugagaagaa

SEQ ID NO: 279882 - RNA, 32 nt, Homo Sapiens
aggcacauuaaauuauuguaaacugaaguaaa

SEQ ID NO: 279883 - RNA, 32 nt, Homo Sapiens
aaccucaucucuacuaaaaauagaaaaauuag

SEQ ID NO: 279884 - RNA, 32 nt, Homo Sapiens
gagggcgcggcggggcugcgcgcacgaugggg

SEQ ID NO: 279885 - RNA, 32 nt, Homo Sapiens
gguguugggaagaauaaaugucuguaugcccu

SEQ ID NO: 279886 - RNA, 32 nt, Homo Sapiens
aggaggaggaagaggaggagcgcagucggagc

SEQ ID NO: 279887 - RNA, 32 nt, Homo Sapiens
gagggugugcaccucuuccucacugcacggaa

SEQ ID NO: 279888 - RNA, 32 nt, Homo Sapiens
gggcccuggacugccccuuccucccccaucgc

SEQ ID NO: 279889 - RNA, 32 nt, Homo Sapiens
gucauaaaaaaguaaacaggauauuuuauuuc

SEQ ID NO: 279890 - RNA, 32 nt, Homo Sapiens
acucugcaaagacaaugucuagcacuuauauc

SEQ ID NO: 279891 - RNA, 32 nt, Homo Sapiens
uacuaggaggagauggaguguauuuuauggga

SEQ ID NO: 279892 - RNA, 32 nt, Homo Sapiens
cuggaccaacgcggguucuggggugcacagcg

SEQ ID NO: 279893 - RNA, 32 nt, Homo Sapiens
aaaaaacaaaacaaaacaaaauuuguguuugg

SEQ ID NO: 279894 - RNA, 32 nt, Homo Sapiens
agaaggaggaauggagggucagggcuaggcgg

SEQ ID NO: 279895 - RNA, 32 nt, Homo Sapiens
gcaucuuaauaaaucacuucccgagucacucc

SEQ ID NO: 279896 - RNA, 32 nt, Homo Sapiens
gaaggggcugcuugcuuuugccucugcccaac

SEQ ID NO: 279897 - RNA, 32 nt, Homo Sapiens
uuggcguguuuuuauuugauggugucagcaaa

SEQ ID NO: 279898 - RNA, 32 nt, Homo Sapiens
uccaccguucagagccgagacaccgcauuccu

SEQ ID NO: 279899 - RNA, 32 nt, Homo Sapiens
uagugggugggaagaggcccugaugcuggucu

SEQ ID NO: 279900 - RNA, 32 nt, Homo Sapiens
ggcuuccgagagggguucgggccgcguagggg

SEQ ID NO: 279901 - RNA, 32 nt, Homo Sapiens
aagauacaauuuuauuugauaucaaugaacgc

SEQ ID NO: 279902 - RNA, 32 nt, Homo Sapiens
ccucucgggccccguagguaccaagagacugu

SEQ ID NO: 279903 - RNA, 32 nt, Homo Sapiens
caaaucuguuuguuuacauugcucacgauuuu

SEQ ID NO: 279904 - RNA, 32 nt, Homo Sapiens
uaacugauaaaaccugucagcauuccaucauu

SEQ ID NO: 279905 - RNA, 32 nt, Homo Sapiens
uuauuuauuugugaauaaacuguacugguguc

SEQ ID NO: 279906 - RNA, 32 nt, Homo Sapiens
ggugaauugaaugcuccugacaucucaguucu

SEQ ID NO: 279907 - RNA, 32 nt, Homo Sapiens
guucuuuagcuauuugacuacauauuguugac

SEQ ID NO: 279908 - RNA, 32 nt, Homo Sapiens
cagcaaagucuacuaucagaagacacguuuuu

SEQ ID NO: 279909 - RNA, 32 nt, Homo Sapiens
cggucgccgccgcagucgcccgggccgggaaa

SEQ ID NO: 279910 - RNA, 32 nt, Homo Sapiens
auuuuacaugaaccuugaucuauguucuguuu

SEQ ID NO: 279911 - RNA, 32 nt, Homo Sapiens
uaguauaccuguacauacuuguuucaggcagc

SEQ ID NO: 279912 - RNA, 32 nt, Homo Sapiens
aaugcuuuuucuuuuucuuaaagucagcccua

SEQ ID NO: 279913 - RNA, 32 nt, Homo Sapiens
uaccaguucugucaucacugugaucuuuaaaa

SEQ ID NO: 279914 - RNA, 32 nt, Homo Sapiens
accuauggguggcaccauguggacuuuucugu

SEQ ID NO: 279915 - RNA, 32 nt, Homo Sapiens
cucuucuagugggaggggcagcaggcccaaac

SEQ ID NO: 279916 - RNA, 32 nt, Homo Sapiens
ggcugggcacagugacucacaccuguaaucuc

SEQ ID NO: 279917 - RNA, 32 nt, Homo Sapiens
aggucugaugacccuggagcucuuggcuucca

SEQ ID NO: 279918 - RNA, 32 nt, Homo Sapiens
ccagccugggcaacauaaugagacccuguuuc

SEQ ID NO: 279919 - RNA, 32 nt, Homo Sapiens
guuuucccugagagcccccucaucucugcgcu

SEQ ID NO: 279920 - RNA, 32 nt, Homo Sapiens
cucggggcagccgggggcgcaggcggagagcg

SEQ ID NO: 279921 - RNA, 32 nt, Homo Sapiens
cagccccaaagccccagggcuggcccguuugg

SEQ ID NO: 279922 - RNA, 32 nt, Homo Sapiens
aaucaccaaauauuuugcaacuuuauuucuuc

SEQ ID NO: 279923 - RNA, 32 nt, Homo Sapiens
uucacuggaaaccuggcaaggauccaauuucc

SEQ ID NO: 279924 - RNA, 32 nt, Homo Sapiens
cuggguggcaggcaagccuugaaaucaagugc

SEQ ID NO: 279925 - RNA, 32 nt, Homo Sapiens
auguagccauauaaaggaaaugauccaguguu

SEQ ID NO: 279926 - RNA, 32 nt, Homo Sapiens
uuagaguauuucugauacaaaaugagggccuc

SEQ ID NO: 279927 - RNA, 32 nt, Homo Sapiens
uggacgugacaucucgugccugcccggugcgg

SEQ ID NO: 279928 - RNA, 32 nt, Homo Sapiens
ucaaaggggugucaaggcaggauggaaaaggg

SEQ ID NO: 279929 - RNA, 32 nt, Homo Sapiens
caccacaugcccgguguggccgagggcacaca

SEQ ID NO: 279930 - RNA, 32 nt, Homo Sapiens
cugcccucggcggcgagcagggcgccgcgacc

SEQ ID NO: 279931 - RNA, 32 nt, Homo Sapiens
cacacuaacaucccuuucuuccccccaccagc

SEQ ID NO: 279932 - RNA, 32 nt, Homo Sapiens
gaagaguaaguuugaauaauuaacugguuuuu

SEQ ID NO: 279933 - RNA, 32 nt, Homo Sapiens
auaccugguaguaaaauaaaugcugaaaauuu

SEQ ID NO: 279934 - RNA, 32 nt, Homo Sapiens
aaaaauggguucagggucuuguccuuagcuac

SEQ ID NO: 279935 - RNA, 32 nt, Homo Sapiens
uauuucaucuucauggcugcuauuuauucaua

SEQ ID NO: 279936 - RNA, 32 nt, Homo Sapiens
gaccaagcucacgcugcacggccugcagcagu

SEQ ID NO: 279937 - RNA, 32 nt, Homo Sapiens
ggugaaauccauguuaaugaugcuuaagaaac

SEQ ID NO: 279938 - RNA, 32 nt, Homo Sapiens
cgaucucggcguuuccgcccccgcccccgccc

SEQ ID NO: 279939 - RNA, 32 nt, Homo Sapiens
uuaaccucucugagcuucaguuucugaucugu

SEQ ID NO: 279940 - RNA, 32 nt, Homo Sapiens
cuuaaucuagugagaagaaaagucacaggaga

SEQ ID NO: 279941 - RNA, 32 nt, Homo Sapiens
cucugcggacggggcugugagucucagaggcu

SEQ ID NO: 279942 - RNA, 32 nt, Homo Sapiens
gaucaucuccucuguccagaggucuucaacag

SEQ ID NO: 279943 - RNA, 29 nt, Homo Sapiens
gcuauucuggaugucaguuuaauaauuca

SEQ ID NO: 279944 - RNA, 32 nt, Homo Sapiens
gggaggaccaaagggaugguauugagaagaga

SEQ ID NO: 279945 - RNA, 32 nt, Homo Sapiens
ugugauuugucugagcaaaucauuccuguguu

SEQ ID NO: 279946 - RNA, 32 nt, Homo Sapiens
gagacaugagagauacgcacagugaagagacc

SEQ ID NO: 279947 - RNA, 32 nt, Homo Sapiens
agcggucuccuccucucuauauaaaguugcug

SEQ ID NO: 279948 - RNA, 32 nt, Homo Sapiens
gggggaaaggggugggcggggagggguugugg

SEQ ID NO: 279949 - RNA, 32 nt, Homo Sapiens
ucugguuuguacuguuauuaaaagcauauugu

SEQ ID NO: 279950 - RNA, 31 nt, Homo Sapiens
ugauagccaaggucccuucugguccaguuuu

SEQ ID NO: 279951 - RNA, 32 nt, Homo Sapiens
ugcacccaccuacuuagauauuucaugugcua

SEQ ID NO: 279952 - RNA, 32 nt, Homo Sapiens
ugggacaaaauuuaaaaauucaguaacauuua

SEQ ID NO: 279953 - RNA, 32 nt, Homo Sapiens
aaauauguacaacauacuaacaggauugaaaa

SEQ ID NO: 279954 - RNA, 32 nt, Homo Sapiens
cccccaaugucuguugaacagcuaucacguug

SEQ ID NO: 279955 - RNA, 32 nt, Homo Sapiens
agauccggagauucagcaguguguggaagagc

SEQ ID NO: 279956 - RNA, 32 nt, Homo Sapiens
ggcacucuccuagguggcccgacgagacccag

SEQ ID NO: 279957 - RNA, 32 nt, Homo Sapiens
accagcucuccucccccuccuccuaccugaca

SEQ ID NO: 279958 - RNA, 32 nt, Homo Sapiens
ugcaaaggggcaucagcccaccccaccggaua

SEQ ID NO: 279959 - RNA, 32 nt, Homo Sapiens
ccuugcaaaugggaaaucacauagcaguuacc

SEQ ID NO: 279960 - RNA, 32 nt, Homo Sapiens
uaacccuccuguuucuuacauccaccaguccc

SEQ ID NO: 279961 - RNA, 30 nt, Homo Sapiens
agcagggccuguguugcagaagauuccucu

SEQ ID NO: 279962 - RNA, 32 nt, Homo Sapiens
uuuuuaaacauuuuuauaaaucuuaaaauuga

SEQ ID NO: 279963 - RNA, 32 nt, Homo Sapiens
ggacggcgagcgccuggugcuggggaguggag

SEQ ID NO: 279964 - RNA, 32 nt, Homo Sapiens
ccaggauacaucuauuuuuauauauuaaauuu

SEQ ID NO: 279965 - RNA, 32 nt, Homo Sapiens
uaaauauuguaaaauugcacuauauuagguua

SEQ ID NO: 279966 - RNA, 32 nt, Homo Sapiens
caugaccugcccagccccauccaggccccgca

SEQ ID NO: 279967 - RNA, 32 nt, Homo Sapiens
cuuccauuguguuuuucuuuauggacaggagc

SEQ ID NO: 279968 - RNA, 32 nt, Homo Sapiens
cuccuuccacccugcuggcugggcggcugcac

SEQ ID NO: 279969 - RNA, 32 nt, Homo Sapiens
gcaguacgucaugggugaucuaauacuucccc

SEQ ID NO: 279970 - RNA, 32 nt, Homo Sapiens
ccgccccccucccaggccccagcgucuucucc

SEQ ID NO: 279971 - RNA, 32 nt, Homo Sapiens
caggccuggacagccaggggcuccucgggccc

SEQ ID NO: 279972 - RNA, 32 nt, Homo Sapiens
gcucaucaggacacuauagaaagaagcagcuc

SEQ ID NO: 279973 - RNA, 32 nt, Homo Sapiens
cuaaagaaucaucaguguauagauuagaagug

SEQ ID NO: 279974 - RNA, 32 nt, Homo Sapiens
aagcuaaugcuguuuaccguguuuuggucaaa

SEQ ID NO: 279975 - RNA, 32 nt, Homo Sapiens
ucacaggccugguucuggcaguucuuugcgga

SEQ ID NO: 279976 - RNA, 32 nt, Homo Sapiens
uguugauuuuggagccucuuagugaccugguu

SEQ ID NO: 279977 - RNA, 32 nt, Homo Sapiens
gccgagcaguauggcuaaauccauuuauucca

SEQ ID NO: 279978 - RNA, 32 nt, Homo Sapiens
cgcccccuccccgcaauccccccgcagcgucc

SEQ ID NO: 279979 - RNA, 32 nt, Homo Sapiens
cccggaggagaugccgauugcccuuggcuugu

SEQ ID NO: 279980 - RNA, 32 nt, Homo Sapiens
ggcuccacaacacucccaugcuugccccagcc

SEQ ID NO: 279981 - RNA, 32 nt, Homo Sapiens
augaaauauaaaagguaucuggaauaaauuca

SEQ ID NO: 279982 - RNA, 32 nt, Homo Sapiens
agaugcaauuuggucauuaauaccaugacauc

SEQ ID NO: 279983 - RNA, 32 nt, Homo Sapiens
aguuaaugcaaaugacugucaguugccaaaua

SEQ ID NO: 279984 - RNA, 32 nt, Homo Sapiens
gcuuugaauuucuggugacuacuuugaaauaa

SEQ ID NO: 279985 - RNA, 32 nt, Homo Sapiens
guuacugcaguaguaaucuuaugcacacggug

SEQ ID NO: 279986 - RNA, 32 nt, Homo Sapiens
auguuuuauuaaggcauguaauaaacuauucu

SEQ ID NO: 279987 - RNA, 32 nt, Homo Sapiens
aaaacugguguuucuuuuuauaaccccuugaa

SEQ ID NO: 279988 - RNA, 32 nt, Homo Sapiens
cacuuaugcugccauccuuuuugcaugucaaa

SEQ ID NO: 279989 - RNA, 32 nt, Homo Sapiens
caaaaagccccauugggcaugauaagccgagg

SEQ ID NO: 279990 - RNA, 32 nt, Homo Sapiens
ugauuuacuuuuuguuugaauuuaccuauggc

SEQ ID NO: 279991 - RNA, 32 nt, Homo Sapiens
uacugaaguugggauuacggaauagagggaga

SEQ ID NO: 279992 - RNA, 32 nt, Homo Sapiens
aucaguauuuaguggcaaacgauuugaguugu

SEQ ID NO: 279993 - RNA, 32 nt, Homo Sapiens
accagcucugggaaacaaauguccagaugcca

SEQ ID NO: 279994 - RNA, 32 nt, Homo Sapiens
uaauaaaaagcaauucuuacuguaauauuuuu

SEQ ID NO: 279995 - RNA, 32 nt, Homo Sapiens
gcggcgggagggagccgagagacccgagugca

SEQ ID NO: 279996 - RNA, 32 nt, Homo Sapiens
uggaauacagaaaacaacaaaaaacuuaagcu

SEQ ID NO: 279997 - RNA, 32 nt, Homo Sapiens
cuucuuccagggugggguggccuggugucccc

SEQ ID NO: 279998 - RNA, 32 nt, Homo Sapiens
cuggggcagggccuuaugucuucuccuaguac

SEQ ID NO: 279999 - RNA, 32 nt, Homo Sapiens
auuuuauguuuuuucuuaacuguuauaugauu

SEQ ID NO: 280000 - RNA, 32 nt, Homo Sapiens
uggucgaccccuccgguggccgggccacucug

SEQ ID NO: 280001 - RNA, 32 nt, Homo Sapiens
gccaaggaagacgaagagacaguuggagacca

SEQ ID NO: 280002 - RNA, 29 nt, Homo Sapiens
uacuagucauaugcauguagcuuucuguu

SEQ ID NO: 280003 - RNA, 32 nt, Homo Sapiens
ggauuuuuaaaaagaaugacuccauuuuaggu

SEQ ID NO: 280004 - RNA, 32 nt, Homo Sapiens
ucccauuuaauaacuauaauaaaggccaccau

SEQ ID NO: 280005 - RNA, 32 nt, Homo Sapiens
gggcucuaggaucagacugccuuaguucaacu

SEQ ID NO: 280006 - RNA, 30 nt, Homo Sapiens
acuagggaacaauuguugauaugcauagca

SEQ ID NO: 280007 - RNA, 32 nt, Homo Sapiens
ugccgggcaacgcgccuucuaaaccugaggga

SEQ ID NO: 280008 - RNA, 32 nt, Homo Sapiens
gccuccuccugagggagggaagguaccaggga

SEQ ID NO: 280009 - RNA, 32 nt, Homo Sapiens
ggcaugggccgggggcaguucucuccucacuu

SEQ ID NO: 280010 - RNA, 32 nt, Homo Sapiens
cagacacaauguuggcacucuugguucuggug

SEQ ID NO: 280011 - RNA, 32 nt, Homo Sapiens
cuaccucacuucaaauuauguuuggacuugac

SEQ ID NO: 280012 - RNA, 32 nt, Homo Sapiens
gugacccggugugcguggggucgaggcgccgg

SEQ ID NO: 280013 - RNA, 32 nt, Homo Sapiens
uuuaaugcuugguaucucuggucuuccuaaua

SEQ ID NO: 280014 - RNA, 32 nt, Homo Sapiens
ucccaggccccgggcacgggguccccuccacu

SEQ ID NO: 280015 - RNA, 32 nt, Homo Sapiens
cugaggucaggaguucaaaaccagccuggcca

SEQ ID NO: 280016 - RNA, 32 nt, Homo Sapiens
gacuucagcggcggcggcggcgcuagacgcag

SEQ ID NO: 280017 - RNA, 32 nt, Homo Sapiens
agugaaaauuuaugcuuuauuaauauuugauu

SEQ ID NO: 280018 - RNA, 32 nt, Homo Sapiens
ggacuacgugugcagggcccaaggcugggccu

SEQ ID NO: 280019 - RNA, 32 nt, Homo Sapiens
cuggccugaggguggguggggaggggcaguuc

SEQ ID NO: 280020 - RNA, 32 nt, Homo Sapiens
gcacccuuccucgccuguuggugcuggcccuu

SEQ ID NO: 280021 - RNA, 32 nt, Homo Sapiens
agugugacuugggaagcuuucagugcugcugu

SEQ ID NO: 280022 - RNA, 32 nt, Homo Sapiens
ggcugugccgucuucuccugcucuggaaucaa

SEQ ID NO: 280023 - RNA, 30 nt, Homo Sapiens
gugaguuggggcgacugugaaacuggaaug

SEQ ID NO: 280024 - RNA, 32 nt, Homo Sapiens
gcccgcccacuuugccuuaacuacccgcccgu

SEQ ID NO: 280025 - RNA, 32 nt, Homo Sapiens
gcugacccaucccagaaacacaaucucaggga

SEQ ID NO: 280026 - RNA, 32 nt, Homo Sapiens
ggccaaggucauuuuuggagggagaacuggac

SEQ ID NO: 280027 - RNA, 32 nt, Homo Sapiens
uuauauuacauuucauaugcuauauguuauag

SEQ ID NO: 280028 - RNA, 32 nt, Homo Sapiens
ggaccacacccuggagcccggugcuggggacc

SEQ ID NO: 280029 - RNA, 32 nt, Homo Sapiens
uaauguguaugaaagcacuguaaaacauaaga

SEQ ID NO: 280030 - RNA, 32 nt, Homo Sapiens
cuuuuuaaaaauuuuuauaacucagaauguaa

SEQ ID NO: 280031 - RNA, 32 nt, Homo Sapiens
guggcccugggaccagagcuggucccagcaug

SEQ ID NO: 280032 - RNA, 32 nt, Homo Sapiens
ugagggauuucuuaggaauuauagaaauguuc

SEQ ID NO: 280033 - RNA, 30 nt, Homo Sapiens
ccggaagccaggcgcggggagccucccccu

SEQ ID NO: 280034 - RNA, 32 nt, Homo Sapiens
gaguaacaugaaauaaacauucuuucacaugg

SEQ ID NO: 280035 - RNA, 32 nt, Homo Sapiens
gcccccagccccacaaacuuccugcagccugc

SEQ ID NO: 280036 - RNA, 32 nt, Homo Sapiens
ggcuggccaaaauaagucuuaaaacugcuuau

SEQ ID NO: 280037 - RNA, 32 nt, Homo Sapiens
ccccaaaucccauccuucuccuuccaacuugg

SEQ ID NO: 280038 - RNA, 32 nt, Homo Sapiens
acuucacaagagacaagguccuuggcugggca

SEQ ID NO: 280039 - RNA, 32 nt, Homo Sapiens
uaaaucaagagcuuacauaauuuuaaccaguu

SEQ ID NO: 280040 - RNA, 32 nt, Homo Sapiens
ucacaccugcuucccaaugagcacucagcagc

SEQ ID NO: 280041 - RNA, 32 nt, Homo Sapiens
gacuugcaguaguaaguaacugagagcauaaa

SEQ ID NO: 280042 - RNA, 32 nt, Homo Sapiens
aagugcauauaaaauaugcaacucuuaguuaa

SEQ ID NO: 280043 - RNA, 32 nt, Homo Sapiens
uggagagcagugcuggcccagccccugcggcu

SEQ ID NO: 280044 - RNA, 32 nt, Homo Sapiens
ucccuguacagccuacagaagcauggccaguu

SEQ ID NO: 280045 - RNA, 32 nt, Homo Sapiens
gagcucugggugggaggccgccgcccgccuuc

SEQ ID NO: 280046 - RNA, 32 nt, Homo Sapiens
aacaaggggagacaacuuuuauagaaauacaa

SEQ ID NO: 280047 - RNA, 32 nt, Homo Sapiens
guugaugauccaugagcaggaccgccuccaug

SEQ ID NO: 280048 - RNA, 32 nt, Homo Sapiens
ucagugguggggguggccgcccgcccccuugu

SEQ ID NO: 280049 - RNA, 32 nt, Homo Sapiens
ugggaaaugcaaagaggacugagaauacuuug

SEQ ID NO: 280050 - RNA, 31 nt, Homo Sapiens
ggccuugugaacuugagcucaguguaugcua

SEQ ID NO: 280051 - RNA, 32 nt, Homo Sapiens
gguguguaaauuugcaaauuguuuccuuuaua

SEQ ID NO: 280052 - RNA, 32 nt, Homo Sapiens
uggacccaggacuuaauuacccagugcccagu

SEQ ID NO: 280053 - RNA, 32 nt, Homo Sapiens
ucuuccugucagucggagguggcaugcaagau

SEQ ID NO: 280054 - RNA, 32 nt, Homo Sapiens
accagggaaggggucacugugcugggagcagc

SEQ ID NO: 280055 - RNA, 32 nt, Homo Sapiens
uucccaaagagauccaggucuuugcguuucca

SEQ ID NO: 280056 - RNA, 32 nt, Homo Sapiens
uugcaccuaaacauuccaacccuuaaagcuaa

SEQ ID NO: 280057 - RNA, 32 nt, Homo Sapiens
agguagcugaaagcaggcagccaggcagccga

SEQ ID NO: 280058 - RNA, 32 nt, Homo Sapiens
cccuccuuccgccuccucuccuucuacuacag

SEQ ID NO: 280059 - RNA, 32 nt, Homo Sapiens
uucucccaccccacccugcuuuuuuguuuguu

SEQ ID NO: 280060 - RNA, 32 nt, Homo Sapiens
cuggauugggucacgugaagcgggaaacugaa

SEQ ID NO: 280061 - RNA, 32 nt, Homo Sapiens
ccuccgcgugguccggccgcugcgccacgccc

SEQ ID NO: 280062 - RNA, 32 nt, Homo Sapiens
uugugagauaaaaacugauuaaaccuuugugg

SEQ ID NO: 280063 - RNA, 32 nt, Homo Sapiens
uucccgcaugguuuuuauaauauucauacaac

SEQ ID NO: 280064 - RNA, 32 nt, Homo Sapiens
auuuccauagcuuuuggcugggggcgggggac

SEQ ID NO: 280065 - RNA, 32 nt, Homo Sapiens
guuaaguucaucauuguugcaauuagagaagu

SEQ ID NO: 280066 - RNA, 32 nt, Homo Sapiens
gaggaggggcgggacgccguggagcacggcga

SEQ ID NO: 280067 - RNA, 32 nt, Homo Sapiens
gccuccgccucccggguuccagugauucuccu

SEQ ID NO: 280068 - RNA, 32 nt, Homo Sapiens
agcccagagcccagcucuucccacucccggag

SEQ ID NO: 280069 - RNA, 32 nt, Homo Sapiens
ucuauucugcaaauacacugaauauguuuauu

SEQ ID NO: 280070 - RNA, 32 nt, Homo Sapiens
cgguauggaauauguuuccaugucugagucuu

SEQ ID NO: 280071 - RNA, 32 nt, Homo Sapiens
caaguuccugaacaugaugaccuaaggcccga

SEQ ID NO: 280072 - RNA, 32 nt, Homo Sapiens
uggauuuuguauuuuuugauaaagauauauuc

SEQ ID NO: 280073 - RNA, 32 nt, Homo Sapiens
accagagccuuaccuuucccagucugcaaucu

SEQ ID NO: 280074 - RNA, 32 nt, Homo Sapiens
cugggucuuccauagcucccagucugagaaaa

SEQ ID NO: 280075 - RNA, 32 nt, Homo Sapiens
aggagguagagggggcggcggcggcggcggcg

SEQ ID NO: 280076 - RNA, 32 nt, Homo Sapiens
aaaaucuucaaaaacuauuaaauggauaucag

SEQ ID NO: 280077 - RNA, 32 nt, Homo Sapiens
gcuguucgugcaauaugcuggagcuccagaac

SEQ ID NO: 280078 - RNA, 32 nt, Homo Sapiens
aauucucugccagcugcugugcacugcuguca

SEQ ID NO: 280079 - RNA, 32 nt, Homo Sapiens
cuggaauaugaagagacaugagauggugguag

SEQ ID NO: 280080 - RNA, 32 nt, Homo Sapiens
agucacucuuaccucccugucugcuuacucac

SEQ ID NO: 280081 - RNA, 32 nt, Homo Sapiens
auguauuugucaaugcaucaauuuaccuacuc

SEQ ID NO: 280082 - RNA, 32 nt, Homo Sapiens
ccagugcguggcaugucuuugaagcaaagccu

SEQ ID NO: 280083 - RNA, 32 nt, Homo Sapiens
aguuaggggaagaugagggggaggcauggggc

SEQ ID NO: 280084 - RNA, 32 nt, Homo Sapiens
guggaugcagcuugcauggggccuagggaguu

SEQ ID NO: 280085 - RNA, 32 nt, Homo Sapiens
ucuuccccuaugccgaagagagccugagccug

SEQ ID NO: 280086 - RNA, 32 nt, Homo Sapiens
uccccaccccccaaaaaauaaaagggggcaua

SEQ ID NO: 280087 - RNA, 32 nt, Homo Sapiens
aauauuugauauccuuaacauaaauuuuaaaa

SEQ ID NO: 280088 - RNA, 31 nt, Homo Sapiens
uccgccggcgcccagaaccaggcuugccaca

SEQ ID NO: 280089 - RNA, 32 nt, Homo Sapiens
guaaaugugaaaguacaacgcauauuuaucuc

SEQ ID NO: 280090 - RNA, 32 nt, Homo Sapiens
agacguguccugcagcccucucuucuucagag

SEQ ID NO: 280091 - RNA, 32 nt, Homo Sapiens
agccgggcgcgguggcucacgccuguaauccc

SEQ ID NO: 280092 - RNA, 32 nt, Homo Sapiens
ggccgggcgcgguggcucacgccuauaauccc

SEQ ID NO: 280093 - RNA, 32 nt, Homo Sapiens
ggccgggcacgguggcucacgccuguaauccc

SEQ ID NO: 280094 - RNA, 32 nt, Homo Sapiens
gguuuuauuucauuauaaaauguaaugcugaa

SEQ ID NO: 280095 - RNA, 32 nt, Homo Sapiens
agcugggcgcgguggcucaugccuguaauccc

SEQ ID NO: 280096 - RNA, 32 nt, Homo Sapiens
cauguucuugucauaaaaugcauacuguugau

SEQ ID NO: 280097 - RNA, 32 nt, Homo Sapiens
aggaggaagaggaggagaaggcgaggccacuc

SEQ ID NO: 280098 - RNA, 32 nt, Homo Sapiens
ggcggucggagcccggcggggaggcgcgaggu

SEQ ID NO: 280099 - RNA, 32 nt, Homo Sapiens
cugggccgacagcagaauaaaggcaauaagau

SEQ ID NO: 280100 - RNA, 32 nt, Homo Sapiens
agacugaagauggaaaaaguauuuuaucugcc

SEQ ID NO: 280101 - RNA, 32 nt, Homo Sapiens
ggaagaaaugguucagaaaauauuuucagccu

SEQ ID NO: 280102 - RNA, 32 nt, Homo Sapiens
aaccaggagggagagugcagccaggcucaggg

SEQ ID NO: 280103 - RNA, 30 nt, Homo Sapiens
cucaggguguuucugggggaaauuagcauu

SEQ ID NO: 280104 - RNA, 32 nt, Homo Sapiens
uuuacgcgccccauccugugugucccagccuu

SEQ ID NO: 280105 - RNA, 31 nt, Homo Sapiens
uguacugaucaccagaaccaauaaagacaua

SEQ ID NO: 280106 - RNA, 32 nt, Homo Sapiens
aucucaaaaaucaugacuugaaugugaaauau

SEQ ID NO: 280107 - RNA, 29 nt, Homo Sapiens
guccuagagaacacauauuuucuguuucc

SEQ ID NO: 280108 - RNA, 32 nt, Homo Sapiens
uuuauauuaaauuuauuaaaauuaaaauccag

SEQ ID NO: 280109 - RNA, 32 nt, Homo Sapiens
cauagaccacugaguucuaguuuuuauucaca

SEQ ID NO: 280110 - RNA, 32 nt, Homo Sapiens
gccggggcgggggagcccggggcuuguuggug

SEQ ID NO: 280111 - RNA, 32 nt, Homo Sapiens
ugcgccccccgcccccgggcgccccgcagcag

SEQ ID NO: 280112 - RNA, 32 nt, Homo Sapiens
gcaagagccuggacaccuccagccuucaauaa

SEQ ID NO: 280113 - RNA, 32 nt, Homo Sapiens
ucaaucuucagcuacagggaaugaguaacuuu

SEQ ID NO: 280114 - RNA, 32 nt, Homo Sapiens
auaauuauauugccuaauuguugggucuuuuu

SEQ ID NO: 280115 - RNA, 32 nt, Homo Sapiens
agggacugagggcugauuguguuguggggaug

SEQ ID NO: 280116 - RNA, 32 nt, Homo Sapiens
ucgcuaucaguucccauccuuaaguuuugaua

SEQ ID NO: 280117 - RNA, 29 nt, Homo Sapiens
ugacccgguccgugugggccagcgggaag

SEQ ID NO: 280118 - RNA, 32 nt, Homo Sapiens
aggagagaaaucaaaguuuuucugauuugcuu

SEQ ID NO: 280119 - RNA, 32 nt, Homo Sapiens
auuauucagaugagaaaaguagaguggagaaa

SEQ ID NO: 280120 - RNA, 32 nt, Homo Sapiens
cagaaggaggguggaggaagugaucagaggga

SEQ ID NO: 280121 - RNA, 30 nt, Homo Sapiens
ugcacagcaaaauaaacuucagaucucaac

SEQ ID NO: 280122 - RNA, 32 nt, Homo Sapiens
cacgaugaacucugguguguggauggaugggu

SEQ ID NO: 280123 - RNA, 32 nt, Homo Sapiens
gagccaccacgcccggaccaugaugcagauuu

SEQ ID NO: 280124 - RNA, 32 nt, Homo Sapiens
ccacgguuauuuaagcauaaucugaaaacauc

SEQ ID NO: 280125 - RNA, 32 nt, Homo Sapiens
ggauggccgugggucuccgugaugggcaggcg

SEQ ID NO: 280126 - RNA, 32 nt, Homo Sapiens
ucaguauuaauguuuuugcauacucuccaucu

SEQ ID NO: 280127 - RNA, 32 nt, Homo Sapiens
gagaaaaauauguuuuauuuguuggcuuguaa

SEQ ID NO: 280128 - RNA, 32 nt, Homo Sapiens
uaguuuugcaaauuguacacaaacaaacaaaa

SEQ ID NO: 280129 - RNA, 32 nt, Homo Sapiens
ccccgccuagggaccccugcucccagccugcu

SEQ ID NO: 280130 - RNA, 32 nt, Homo Sapiens
acaggccagggccugugcugcagucggggaca

SEQ ID NO: 280131 - RNA, 32 nt, Homo Sapiens
agccccggccccauccccgcccagagccgggc

SEQ ID NO: 280132 - RNA, 32 nt, Homo Sapiens
ucaucauaggcacaaucuaauacaaaaauaua

SEQ ID NO: 280133 - RNA, 32 nt, Homo Sapiens
uaauugcaccaaaguacauuugaaaggaaggu

SEQ ID NO: 280134 - RNA, 32 nt, Homo Sapiens
ugucuccuggaaauguuaugcagcucagcaag

SEQ ID NO: 280135 - RNA, 32 nt, Homo Sapiens
uuccuugaagacuguaagauuuuuguauauuu

SEQ ID NO: 280136 - RNA, 32 nt, Homo Sapiens
gucaguaguuaaugaauuguggcaggacugag

SEQ ID NO: 280137 - RNA, 32 nt, Homo Sapiens
uaccaagagagaaaugcagaauuguguaccag

SEQ ID NO: 280138 - RNA, 32 nt, Homo Sapiens
gucacaucagaaacaagaaaacaaaugauaaa

SEQ ID NO: 280139 - RNA, 27 nt, Homo Sapiens
agaguuuccuucuucauucaccaucca

SEQ ID NO: 280140 - RNA, 30 nt, Homo Sapiens
ggccgaggugcugagccgccggugcguccc

SEQ ID NO: 280141 - RNA, 32 nt, Homo Sapiens
uaguugaugaauuguguuuuucaacgaauuug

SEQ ID NO: 280142 - RNA, 32 nt, Homo Sapiens
gaccuggagcuccccagccaggaggcaccguc

SEQ ID NO: 280143 - RNA, 32 nt, Homo Sapiens
guagcccgcugcccggcccccgcgauccugug

SEQ ID NO: 280144 - RNA, 32 nt, Homo Sapiens
cgccgccaccccgaccccgcugcgcacggccu

SEQ ID NO: 280145 - RNA, 32 nt, Homo Sapiens
ucccugcugcccccagcucgccggcggcuggg

SEQ ID NO: 280146 - RNA, 32 nt, Homo Sapiens
caccgcccuccuucccuucccagccgcgggcc

SEQ ID NO: 280147 - RNA, 32 nt, Homo Sapiens
uggaccgcagcgugugcucgggcgcuagcggu

SEQ ID NO: 280148 - RNA, 32 nt, Homo Sapiens
uggcauagugagcuuuuccacccaggugggcc

SEQ ID NO: 280149 - RNA, 32 nt, Homo Sapiens
gucccacacggccagcaccgcugcucacucgg

SEQ ID NO: 280150 - RNA, 32 nt, Homo Sapiens
uuucauuauuuuugccucugacacuaugggaa

SEQ ID NO: 280151 - RNA, 32 nt, Homo Sapiens
aaaaggcuggagcgggcgggguagguguggcu

SEQ ID NO: 280152 - RNA, 32 nt, Homo Sapiens
aggcagggucccuggggugaccccccagccug

SEQ ID NO: 280153 - RNA, 32 nt, Homo Sapiens
augcagaggcaggcauucugugagauacaagc

SEQ ID NO: 280154 - RNA, 32 nt, Homo Sapiens
aggcggugucugcggcagcgccucagaguggu

SEQ ID NO: 280155 - RNA, 32 nt, Homo Sapiens
cugauaaugaaauaaaucauguuaauccuaaa

SEQ ID NO: 280156 - RNA, 32 nt, Homo Sapiens
cuuccaugugccuuucuuugccucugcagucu

SEQ ID NO: 280157 - RNA, 32 nt, Homo Sapiens
ucacugacuugauaguuugguuaaccaauguu

SEQ ID NO: 280158 - RNA, 32 nt, Homo Sapiens
caggccucccccuggguccccaugaugagaga

SEQ ID NO: 280159 - RNA, 32 nt, Homo Sapiens
gggcgggcgcgcgggccaaugggugccgccuc

SEQ ID NO: 280160 - RNA, 32 nt, Homo Sapiens
accuuucaucacagagcuuugcuuggccucuc

SEQ ID NO: 280161 - RNA, 32 nt, Homo Sapiens
aaaggggcggguggagcguccaguggagaaga

SEQ ID NO: 280162 - RNA, 32 nt, Homo Sapiens
caguaagcacaccaacugccaaguuauuaguu

SEQ ID NO: 280163 - RNA, 32 nt, Homo Sapiens
uuauugcuauuuuuauuauuguuuuccucuug

SEQ ID NO: 280164 - RNA, 32 nt, Homo Sapiens
cacagaugcuggccucuuggcaccugccuagc

SEQ ID NO: 280165 - RNA, 32 nt, Homo Sapiens
uggggagaacuaaaacaccuucacuggugguu

SEQ ID NO: 280166 - RNA, 32 nt, Homo Sapiens
acuuucaggagcaaaguaugguugagaaauug

SEQ ID NO: 280167 - RNA, 32 nt, Homo Sapiens
uauuuuuauuuuuguuuuuguugguaggcguc

SEQ ID NO: 280168 - RNA, 32 nt, Homo Sapiens
cugcugcucaggugccaugcccugaagaggca

SEQ ID NO: 280169 - RNA, 32 nt, Homo Sapiens
aggggagggccucugucugcaacaucccucau

SEQ ID NO: 280170 - RNA, 32 nt, Homo Sapiens
aggaacgggcuuugggggcgucaggucuuucc

SEQ ID NO: 280171 - RNA, 32 nt, Homo Sapiens
cugggcagcuggaaguggcucugggguccuca

SEQ ID NO: 280172 - RNA, 32 nt, Homo Sapiens
cagccgcucccgcuccuucagcuccuccagcu

SEQ ID NO: 280173 - RNA, 32 nt, Homo Sapiens
cguacccaggugcuacagcaucagcuucccuu

SEQ ID NO: 280174 - RNA, 32 nt, Homo Sapiens
aggccuuucagagcccaagucuguggguuggc

SEQ ID NO: 280175 - RNA, 32 nt, Homo Sapiens
gcccaaggacuucuaacaauaaacucucuuuu

SEQ ID NO: 280176 - RNA, 32 nt, Homo Sapiens
ucaaaaacgaagacauuuuauuuuaauuuuua

SEQ ID NO: 280177 - RNA, 32 nt, Homo Sapiens
aauguucuugguuuuucuuuauauaacuugau

SEQ ID NO: 280178 - RNA, 32 nt, Homo Sapiens
gggcauuuccucuagcugaauucuucaugggu

SEQ ID NO: 280179 - RNA, 32 nt, Homo Sapiens
uuuggugagaaccaccuggaggugacuguggc

SEQ ID NO: 280180 - RNA, 32 nt, Homo Sapiens
cccauuuccuccaggaggaaaggcaagacacg

SEQ ID NO: 280181 - RNA, 32 nt, Homo Sapiens
cuaugccucacuuuuccuuauuguaaagugga

SEQ ID NO: 280182 - RNA, 32 nt, Homo Sapiens
gguucacccagcucgaggaucccaggugcaag

SEQ ID NO: 280183 - RNA, 32 nt, Homo Sapiens
ccucccucagcccccaggaucuggguuaggug

SEQ ID NO: 280184 - RNA, 32 nt, Homo Sapiens
gaagauccggauauuuucuacuuuacaccuuu

SEQ ID NO: 280185 - RNA, 32 nt, Homo Sapiens
gccugcguccgcugccgccgucccucaguuug

SEQ ID NO: 280186 - RNA, 32 nt, Homo Sapiens
gggugggggaggacgucccggcugggaugaag

SEQ ID NO: 280187 - RNA, 32 nt, Homo Sapiens
ucugaaacuccacuguaguuuacuuugccugu

SEQ ID NO: 280188 - RNA, 32 nt, Homo Sapiens
cauacccuuuucucuuuuuuuaguauuuuuuu

SEQ ID NO: 280189 - RNA, 32 nt, Homo Sapiens
ccggaucuuccucggccucgggcccccuucac

SEQ ID NO: 280190 - RNA, 32 nt, Homo Sapiens
cucccagggcuuugugcagacggccugagcuc

SEQ ID NO: 280191 - RNA, 32 nt, Homo Sapiens
gcagcacccgcacccucggcggccgcagccuc

SEQ ID NO: 280192 - RNA, 32 nt, Homo Sapiens
agccaugccuucucgcuggauguggccucggc

SEQ ID NO: 280193 - RNA, 32 nt, Homo Sapiens
uucagugucuuuucuauuuuuuccucucucgu

SEQ ID NO: 280194 - RNA, 32 nt, Homo Sapiens
gcacuuuugauauacacuguaaaauacacugu

SEQ ID NO: 280195 - RNA, 32 nt, Homo Sapiens
aguuugaucaacagcaaaauagaguucugaau

SEQ ID NO: 280196 - RNA, 32 nt, Homo Sapiens
cgaguuccgucgaguuccgucccggcccugcu

SEQ ID NO: 280197 - RNA, 32 nt, Homo Sapiens
auuaaauccuuugaggauucucuucucuuuua

SEQ ID NO: 280198 - RNA, 32 nt, Homo Sapiens
ugggguccacacuccuggacagggcucuggac

SEQ ID NO: 280199 - RNA, 32 nt, Homo Sapiens
ucagcugcccacaccucuucccggccccugaa

SEQ ID NO: 280200 - RNA, 32 nt, Homo Sapiens
auccggagcggagcugcagcagcgccgccuuu

SEQ ID NO: 280201 - RNA, 32 nt, Homo Sapiens
cucgcucauaaugacacccagcuccuuugaga

SEQ ID NO: 280202 - RNA, 32 nt, Homo Sapiens
ugugcauguugguaacaucaucuuucccaugu

SEQ ID NO: 280203 - RNA, 32 nt, Homo Sapiens
gaagggacucauuuuucuuugcuuucagccca

SEQ ID NO: 280204 - RNA, 32 nt, Homo Sapiens
gcuccaggaaaacacgcuugccuuccuucccg

SEQ ID NO: 280205 - RNA, 32 nt, Homo Sapiens
uuugcaucccuuccucauaauuaucagcacca

SEQ ID NO: 280206 - RNA, 32 nt, Homo Sapiens
ugaaggcuuggaaagaggcaugugaagagcuu

SEQ ID NO: 280207 - RNA, 32 nt, Homo Sapiens
auauagcacuguaacggaaaaugauucuguua

SEQ ID NO: 280208 - RNA, 32 nt, Homo Sapiens
auccccaccccucccccagcgugggcucacca

SEQ ID NO: 280209 - RNA, 32 nt, Homo Sapiens
cacccagagcagcugggucuccaggcugccug

SEQ ID NO: 280210 - RNA, 32 nt, Homo Sapiens
ccgccaccugccaccucugacggagugggaga

SEQ ID NO: 280211 - RNA, 32 nt, Homo Sapiens
ggccaggcgugguggcucacgccuguaaugcc

SEQ ID NO: 280212 - RNA, 32 nt, Homo Sapiens
cguguguguauuaccuuucaggauggaagccg

SEQ ID NO: 280213 - RNA, 32 nt, Homo Sapiens
gaagaauccggucacagccuccccucagagac

SEQ ID NO: 280214 - RNA, 32 nt, Homo Sapiens
acuucacgacuguggccagaucauguguggac

SEQ ID NO: 280215 - RNA, 32 nt, Homo Sapiens
agcucauggccggcugagcgggacgccgccuc

SEQ ID NO: 280216 - RNA, 32 nt, Homo Sapiens
accgggucaucugauugugacaucaguugcaa

SEQ ID NO: 280217 - RNA, 30 nt, Homo Sapiens
cuccggagacgcucugcggguccuggacac

SEQ ID NO: 280218 - RNA, 32 nt, Homo Sapiens
agagcaauaaauuauccaugaagugcucucgu

SEQ ID NO: 280219 - RNA, 32 nt, Homo Sapiens
cguuucuucugccugcuuaugggaaagucccc

SEQ ID NO: 280220 - RNA, 32 nt, Homo Sapiens
auugaaaaauuuggaugggaucaaaaaugaau

SEQ ID NO: 280221 - RNA, 32 nt, Homo Sapiens
gaauugcagcauaucguuuaauuuuaagaagg

SEQ ID NO: 280222 - RNA, 32 nt, Homo Sapiens
gccgggucuccacuucuuggccgcaccuucca

SEQ ID NO: 280223 - RNA, 32 nt, Homo Sapiens
uggugcuagggagaaggcaaccuucacugguu

SEQ ID NO: 280224 - RNA, 32 nt, Homo Sapiens
gcugcuggguggcaggggggcuguggggucgg

SEQ ID NO: 280225 - RNA, 32 nt, Homo Sapiens
uccuaacaucagaaggaacaaacuccggacac

SEQ ID NO: 280226 - RNA, 29 nt, Homo Sapiens
uccacugugacuuuuuaguugaagacuag

SEQ ID NO: 280227 - RNA, 32 nt, Homo Sapiens
aggccucaggcccagggcgcgccgucggggca

SEQ ID NO: 280228 - RNA, 32 nt, Homo Sapiens
agagagaaagagaacaauauuugggagagaag

SEQ ID NO: 280229 - RNA, 32 nt, Homo Sapiens
gcucccgccccgauugaaaaggcgcagugcau

SEQ ID NO: 280230 - RNA, 32 nt, Homo Sapiens
cagaagaugacagcauauuaaaguggugaccc

SEQ ID NO: 280231 - RNA, 32 nt, Homo Sapiens
aauagagaaauccuaacuauaucacacaaagg

SEQ ID NO: 280232 - RNA, 32 nt, Homo Sapiens
ccgggugcugaggcuuccugugaaaaaaagaa

SEQ ID NO: 280233 - RNA, 32 nt, Homo Sapiens
ugggggaggugggagaggcauaaucugggucu

SEQ ID NO: 280234 - RNA, 32 nt, Homo Sapiens
gacugagucuugcucuaucacccaggcuggag

SEQ ID NO: 280235 - RNA, 30 nt, Homo Sapiens
cugaggccacuugcaacuugauuuuuuaaa

SEQ ID NO: 280236 - RNA, 32 nt, Homo Sapiens
uuucucccuaaccacuaauguuagaauugauu

SEQ ID NO: 280237 - RNA, 32 nt, Homo Sapiens
cauggaaaacgcauugacuuggagcaccugga

SEQ ID NO: 280238 - RNA, 32 nt, Homo Sapiens
ggaaagaugagggguacccaccccugcccuuc

SEQ ID NO: 280239 - RNA, 32 nt, Homo Sapiens
gcgaccagcuacggcgcccggcuggucagcag

SEQ ID NO: 280240 - RNA, 32 nt, Homo Sapiens
uugauggcgagggggcgcggcgcgggcucugu

SEQ ID NO: 280241 - RNA, 32 nt, Homo Sapiens
uccuuauuacccaagagucauuauuauuuggg

SEQ ID NO: 280242 - RNA, 32 nt, Homo Sapiens
auauauuuaugaucuauucagcugcuuuuacu

SEQ ID NO: 280243 - RNA, 32 nt, Homo Sapiens
cguccucgcucccguccuaccccguuccgcgc

SEQ ID NO: 280244 - RNA, 32 nt, Homo Sapiens
aaggaugagagaauugccaaguuguacugaac

SEQ ID NO: 280245 - RNA, 32 nt, Homo Sapiens
aaccuagggagcugaggccuaggcgaggcgag

SEQ ID NO: 280246 - RNA, 32 nt, Homo Sapiens
cccgcccccguccccaagccuccgccccuuag

SEQ ID NO: 280247 - RNA, 30 nt, Homo Sapiens
aggauaggcaggcggcguccgaggaccaca

SEQ ID NO: 280248 - RNA, 32 nt, Homo Sapiens
uccuucuggggaaauaaaugagugucuguuuc

SEQ ID NO: 280249 - RNA, 32 nt, Homo Sapiens
uguguacaggguuggccucuuccuccuccccu

SEQ ID NO: 280250 - RNA, 32 nt, Homo Sapiens
cgaguggccgcgggcgccauggagggggugcu

SEQ ID NO: 280251 - RNA, 32 nt, Homo Sapiens
cagccggaagucuguucucaaagcagaagugg

SEQ ID NO: 280252 - RNA, 29 nt, Homo Sapiens
caguaaacagugauguuaaaauaaaacaa

SEQ ID NO: 280253 - RNA, 29 nt, Homo Sapiens
ugguccuaaguuaaggauuuucuaaaugg

SEQ ID NO: 280254 - RNA, 32 nt, Homo Sapiens
gacaugugaagcuauuugauaugcaccagguc

SEQ ID NO: 280255 - RNA, 32 nt, Homo Sapiens
ggauggauggauggauggauaguuagauagau

SEQ ID NO: 280256 - RNA, 30 nt, Homo Sapiens
cucggccacugagccacccagccuuggugu

SEQ ID NO: 280257 - RNA, 32 nt, Homo Sapiens
agauuguggaagaauuuuugcaaccagcaggg

SEQ ID NO: 280258 - RNA, 32 nt, Homo Sapiens
gggccaggaggaacaugaggugaggcagggcc

SEQ ID NO: 280259 - RNA, 32 nt, Homo Sapiens
ccacucuggcccagcccccucugcacacagcu

SEQ ID NO: 280260 - RNA, 32 nt, Homo Sapiens
uaaaaauguaaauauaaauuugguugagaucu

SEQ ID NO: 280261 - RNA, 32 nt, Homo Sapiens
gaucagacagagauuggagagaagggcauuaa

SEQ ID NO: 280262 - RNA, 32 nt, Homo Sapiens
ucuggaucaaggugcuggccaugucccagcug

SEQ ID NO: 280263 - RNA, 32 nt, Homo Sapiens
agcuaggugugguggcucguaucuguaauccc

SEQ ID NO: 280264 - RNA, 32 nt, Homo Sapiens
auauauauauauauuuauuuuuucauguagag

SEQ ID NO: 280265 - RNA, 32 nt, Homo Sapiens
ccccugaaauacugacuucaggucgaauuaua

SEQ ID NO: 280266 - RNA, 32 nt, Homo Sapiens
gaauuuagcuaaugagacuggauuuuuguuuu

SEQ ID NO: 280267 - RNA, 32 nt, Homo Sapiens
cauucaccccaguuuuuccuccagguuguuac

SEQ ID NO: 280268 - RNA, 32 nt, Homo Sapiens
augugcaguauuuuauauaugaucacaaauau

SEQ ID NO: 280269 - RNA, 32 nt, Homo Sapiens
gaaucagacaaaagcaagcagugcacuuauuc

SEQ ID NO: 280270 - RNA, 32 nt, Homo Sapiens
cuccagagccaucucugagacuccguacuacu

SEQ ID NO: 280271 - RNA, 32 nt, Homo Sapiens
ggggcgugaagaacagaagacaggaagcguuu

SEQ ID NO: 280272 - RNA, 32 nt, Homo Sapiens
gcucuagcccucagagcguccggagcagcagg

SEQ ID NO: 280273 - RNA, 32 nt, Homo Sapiens
cucuuuggauuugauucagaugaugaaagugc

SEQ ID NO: 280274 - RNA, 32 nt, Homo Sapiens
caagugauucuauuugcaugaauaauuuugug

SEQ ID NO: 280275 - RNA, 32 nt, Homo Sapiens
cucuuaugcgccuggguuucuucacuggacac

SEQ ID NO: 280276 - RNA, 32 nt, Homo Sapiens
gguaaaaggagcaaagcgaggaccuggagaua

SEQ ID NO: 280277 - RNA, 32 nt, Homo Sapiens
cacucucggcaccuccucugccugggcuccca

SEQ ID NO: 280278 - RNA, 32 nt, Homo Sapiens
ugggagccucggggaccgcccagccuugcucc

SEQ ID NO: 280279 - RNA, 32 nt, Homo Sapiens
uuucaaaaauggcccaaaauaguucuccccca

SEQ ID NO: 280280 - RNA, 32 nt, Homo Sapiens
gagaggcuuuggaguuccuugacuucucugaa

SEQ ID NO: 280281 - RNA, 32 nt, Homo Sapiens
uuugugcuuggaaagaucauggccugguucuu

SEQ ID NO: 280282 - RNA, 32 nt, Homo Sapiens
cuguguuaaauggauauucugauaaaauauuu

SEQ ID NO: 280283 - RNA, 32 nt, Homo Sapiens
gucgccucauuuccugcuacacugaagggguc

SEQ ID NO: 280284 - RNA, 30 nt, Homo Sapiens
cccgccauuuucggcggggcugggagacug

SEQ ID NO: 280285 - RNA, 32 nt, Homo Sapiens
guucuagaugucauccuaaaaaacacuucaua

SEQ ID NO: 280286 - RNA, 32 nt, Homo Sapiens
aauuugcaaccuccggcaugaaugacuuaagg

SEQ ID NO: 280287 - RNA, 32 nt, Homo Sapiens
auucuauaauuuccauuuacuuaagacuuaau

SEQ ID NO: 280288 - RNA, 32 nt, Homo Sapiens
cuguaucuauuauggagaaagaugagacuaau

SEQ ID NO: 280289 - RNA, 29 nt, Homo Sapiens
cagaaguaaaguuuauuucauggauuauu

SEQ ID NO: 280290 - RNA, 32 nt, Homo Sapiens
uuggguuaucagauuccaaucacguuucuuag

SEQ ID NO: 280291 - RNA, 32 nt, Homo Sapiens
aaacagauuugugaaggagauucaggcagacu

SEQ ID NO: 280292 - RNA, 31 nt, Homo Sapiens
cuuuaccaagccaauucacucaaguugucuc

SEQ ID NO: 280293 - RNA, 32 nt, Homo Sapiens
uauuguaaauggaagcgcuuaccagcccagcu

SEQ ID NO: 280294 - RNA, 32 nt, Homo Sapiens
uuuuaauagaaagugguguuaacuuuaaugag

SEQ ID NO: 280295 - RNA, 32 nt, Homo Sapiens
uuucagcucccucacuuccggggcuguguggc

SEQ ID NO: 280296 - RNA, 31 nt, Homo Sapiens
ucagugacauugucaacaggaguccaauuau

SEQ ID NO: 280297 - RNA, 32 nt, Homo Sapiens
uuugaguuauuuacaagccaacuccaaccaac

SEQ ID NO: 280298 - RNA, 30 nt, Homo Sapiens
agaguuuuugugaugggggagagggugaag

SEQ ID NO: 280299 - RNA, 32 nt, Homo Sapiens
ggaagcuuaaaacaaaagauauuuuuaaccca

SEQ ID NO: 280300 - RNA, 32 nt, Homo Sapiens
cacucgcuuggccuugccauuuccccuccuuc

SEQ ID NO: 280301 - RNA, 32 nt, Homo Sapiens
cagccuggccaacaugcaaaaccccgucucca

SEQ ID NO: 280302 - RNA, 32 nt, Homo Sapiens
uccugucagaaccucggugacgguuggccagu

SEQ ID NO: 280303 - RNA, 31 nt, Homo Sapiens
uggccgcaggacugccugggcccugcuaggc

SEQ ID NO: 280304 - RNA, 32 nt, Homo Sapiens
cuacacauuacuguaagcacuaaccauuauaa

SEQ ID NO: 280305 - RNA, 32 nt, Homo Sapiens
aaucuccaccucacgcuucucuaucaaacuug

SEQ ID NO: 280306 - RNA, 32 nt, Homo Sapiens
ccucccagcuccgcucacagggcucucauuuc

SEQ ID NO: 280307 - RNA, 32 nt, Homo Sapiens
gucaguggagaagggauucagaaaaugacaca

SEQ ID NO: 280308 - RNA, 32 nt, Homo Sapiens
uccccggcagccgcgcuuccccuuugauguuu

SEQ ID NO: 280309 - RNA, 32 nt, Homo Sapiens
cccaggcuggggcugugcugcaggcuccgagc

SEQ ID NO: 280310 - RNA, 32 nt, Homo Sapiens
aaugugcuuaggaauauaaucuuuuauuggau

SEQ ID NO: 280311 - RNA, 32 nt, Homo Sapiens
gcuccuccuggcuuuccucccucccccaaucu

SEQ ID NO: 280312 - RNA, 32 nt, Homo Sapiens
guuaauccugccagucuuucucuucaagccag

SEQ ID NO: 280313 - RNA, 32 nt, Homo Sapiens
cccacgcguccggggccggcgcacgaaaccug

SEQ ID NO: 280314 - RNA, 32 nt, Homo Sapiens
ccuuguucuuuauugccuaaguauugcccucc

SEQ ID NO: 280315 - RNA, 32 nt, Homo Sapiens
caauauuugugaugauaaugagguacugaacc

SEQ ID NO: 280316 - RNA, 32 nt, Homo Sapiens
gagaacugggcguggaaaagauaccccagucu

SEQ ID NO: 280317 - RNA, 32 nt, Homo Sapiens
cggcgggggaggcagaggcggaggcggaguca

SEQ ID NO: 280318 - RNA, 32 nt, Homo Sapiens
ccuccgcgggugccgcccucgcgcgggcuagg

SEQ ID NO: 280319 - RNA, 32 nt, Homo Sapiens
auucaauccaugacagaauccaaagguuuacu

SEQ ID NO: 280320 - RNA, 32 nt, Homo Sapiens
cagcucugccagcagcugaguaccccugaaca

SEQ ID NO: 280321 - RNA, 32 nt, Homo Sapiens
cgccgcgggcacggcugcugcagucucuuccc

SEQ ID NO: 280322 - RNA, 32 nt, Homo Sapiens
gggcagaaaucgagagugugcucuccccggca

SEQ ID NO: 280323 - RNA, 32 nt, Homo Sapiens
uggucaccguugcauuuguuauagaaauggcc

SEQ ID NO: 280324 - RNA, 32 nt, Homo Sapiens
augugggguccgaggcuagaggucuugagacg

SEQ ID NO: 280325 - RNA, 32 nt, Homo Sapiens
cucuuucgccgccgccgccgccgccccgggca

SEQ ID NO: 280326 - RNA, 32 nt, Homo Sapiens
uguccugcccagccuuccugguucucuggggu

SEQ ID NO: 280327 - RNA, 32 nt, Homo Sapiens
ucgguuggggcgugggggcggagaggauggag

SEQ ID NO: 280328 - RNA, 32 nt, Homo Sapiens
cgcgcccgcucccacgcccgcguagcugagga

SEQ ID NO: 280329 - RNA, 32 nt, Homo Sapiens
gagaccuaugauccucauggaacuuaauuuuu

SEQ ID NO: 280330 - RNA, 32 nt, Homo Sapiens
aguuuagguucaauuucuuuuacgucuccccg

SEQ ID NO: 280331 - RNA, 32 nt, Homo Sapiens
ugaaacaauuuaauaauguauuacauuauagu

SEQ ID NO: 280332 - RNA, 32 nt, Homo Sapiens
uaccuuuuacugacaaugugaaacucgaagaa

SEQ ID NO: 280333 - RNA, 32 nt, Homo Sapiens
ugucaccacccacaucaauaccuuucaaauca

SEQ ID NO: 280334 - RNA, 32 nt, Homo Sapiens
ucaaguccagcauucucaacuauaucaaguua

SEQ ID NO: 280335 - RNA, 32 nt, Homo Sapiens
uaccuggcccgggaugcugggcggcgucaggu

SEQ ID NO: 280336 - RNA, 32 nt, Homo Sapiens
cuaaaugccuugguuucuuuuaaaaguucaug

SEQ ID NO: 280337 - RNA, 32 nt, Homo Sapiens
ccgcucuggucgcccgcgagugucgguggccc

SEQ ID NO: 280338 - RNA, 32 nt, Homo Sapiens
ucaacucaucauuuucuacuuguuuucaaugu

SEQ ID NO: 280339 - RNA, 32 nt, Homo Sapiens
uauucccaaaaauuacuuuggggcuaauuuaa

SEQ ID NO: 280340 - RNA, 32 nt, Homo Sapiens
aagaggaaaaggaagaagcuauuucagcugcc

SEQ ID NO: 280341 - RNA, 32 nt, Homo Sapiens
aagaugaacuucagaguauauuaaauuaccuu

SEQ ID NO: 280342 - RNA, 32 nt, Homo Sapiens
caggacuugggguugaggugagucauggccuc

SEQ ID NO: 280343 - RNA, 32 nt, Homo Sapiens
gucuuaaaauuguuucuccuuaucuuugguuu

SEQ ID NO: 280344 - RNA, 32 nt, Homo Sapiens
ccccagaugauuucuuuuuccuccucugcccc

SEQ ID NO: 280345 - RNA, 32 nt, Homo Sapiens
cggccgucggcggcccggcggcccgagauguu

SEQ ID NO: 280346 - RNA, 32 nt, Homo Sapiens
acaucuuacacuugcucgacacugccaccugc

SEQ ID NO: 280347 - RNA, 32 nt, Homo Sapiens
acuaucuuaauagaauaguacaauaaaacaca

SEQ ID NO: 280348 - RNA, 32 nt, Homo Sapiens
guauuaucuauuuuuauuuucuguauggguau

SEQ ID NO: 280349 - RNA, 32 nt, Homo Sapiens
cacggacgcuggggcgggacugggagaaagcg

SEQ ID NO: 280350 - RNA, 32 nt, Homo Sapiens
guugcauccccacuucccucuuuccaucuaac

SEQ ID NO: 280351 - RNA, 32 nt, Homo Sapiens
gugccuuucuucauugcugauuuuaaucugua

SEQ ID NO: 280352 - RNA, 32 nt, Homo Sapiens
uccccuucaagcccccggccuuguggggaagg

SEQ ID NO: 280353 - RNA, 32 nt, Homo Sapiens
uguucucacuacaggcaauuucugggcuaagu

SEQ ID NO: 280354 - RNA, 32 nt, Homo Sapiens
agccuggccaacauagugaaaccccgugucua

SEQ ID NO: 280355 - RNA, 32 nt, Homo Sapiens
agccugaccaacauggugaaaccccgugucua

SEQ ID NO: 280356 - RNA, 32 nt, Homo Sapiens
uuuuaagugaguuugucucuauuguucauugc

SEQ ID NO: 280357 - RNA, 32 nt, Homo Sapiens
cccggccuccucaccccacgcgggaagcauga

SEQ ID NO: 280358 - RNA, 32 nt, Homo Sapiens
ugagacccaaccccuagcugggccaacuccag

SEQ ID NO: 280359 - RNA, 32 nt, Homo Sapiens
cgggcggggcgggucuccgggauuccaagggc

SEQ ID NO: 280360 - RNA, 32 nt, Homo Sapiens
uccauauguguguuugucuucuuccagcugca

SEQ ID NO: 280361 - RNA, 32 nt, Homo Sapiens
ucugugacucccaguguucaccaccuuccuga

SEQ ID NO: 280362 - RNA, 32 nt, Homo Sapiens
gaggauugaggaggaucagaucaauaauggag

SEQ ID NO: 280363 - RNA, 32 nt, Homo Sapiens
gugguugccccggccugggaggcucuuggaca

SEQ ID NO: 280364 - RNA, 32 nt, Homo Sapiens
uugcuuugcugcugcugagcugccgggcaacc

SEQ ID NO: 280365 - RNA, 32 nt, Homo Sapiens
caucuuguucuucaauaucacggguuuuuguu

SEQ ID NO: 280366 - RNA, 32 nt, Homo Sapiens
cgcgccgagcccagguccuagagcagcuccag

SEQ ID NO: 280367 - RNA, 32 nt, Homo Sapiens
ccauggucuuacuuuccaacucuguacagauu

SEQ ID NO: 280368 - RNA, 32 nt, Homo Sapiens
uauauccucgauaaguaguaaaacaguauuug

SEQ ID NO: 280369 - RNA, 32 nt, Homo Sapiens
auuuguuuaaguggcuaacauccaaacgauug

SEQ ID NO: 280370 - RNA, 32 nt, Homo Sapiens
uccuaaagauuacaaaauaaaaauauagagag

SEQ ID NO: 280371 - RNA, 32 nt, Homo Sapiens
cagcucggaugccccaggcagcccgggcacag

SEQ ID NO: 280372 - RNA, 32 nt, Homo Sapiens
aaaugguggcuaaagaaaauagggacucugaa

SEQ ID NO: 280373 - RNA, 32 nt, Homo Sapiens
gccuugcccucccccucccagcccagggucca

SEQ ID NO: 280374 - RNA, 32 nt, Homo Sapiens
gggacaucaggagagaagaggaagucuggguu

SEQ ID NO: 280375 - RNA, 32 nt, Homo Sapiens
uaagcaaauuucaaaagacauguuguaaauua

SEQ ID NO: 280376 - RNA, 32 nt, Homo Sapiens
uugucuuugcucuuagguggguuauccuggag

SEQ ID NO: 280377 - RNA, 32 nt, Homo Sapiens
cagcauccuggcucagcccagcuguggaguag

SEQ ID NO: 280378 - RNA, 32 nt, Homo Sapiens
auccaggguaugaccuagggaaugaacuagcu

SEQ ID NO: 280379 - RNA, 32 nt, Homo Sapiens
uuacagaaacagucuguaaauaacauuuuaag

SEQ ID NO: 280380 - RNA, 32 nt, Homo Sapiens
acgucaucaaggauugaaacagcgcgcaaauc

SEQ ID NO: 280381 - RNA, 32 nt, Homo Sapiens
aauguuucguaaauauuuuauacuguuuaagu

SEQ ID NO: 280382 - RNA, 32 nt, Homo Sapiens
aggccagagcuuugggcuuuccugcucugcuu

SEQ ID NO: 280383 - RNA, 31 nt, Homo Sapiens
ugcugaacguggugguggacggccuguucau

SEQ ID NO: 280384 - RNA, 32 nt, Homo Sapiens
agcaccaucgcaccaacacuccaccgcgaucu

SEQ ID NO: 280385 - RNA, 32 nt, Homo Sapiens
aaaacaaaagcccauaaaguuggagauaggga

SEQ ID NO: 280386 - RNA, 32 nt, Homo Sapiens
ugcuugaauuuuuuuuuuuuuaauauuuuuau

SEQ ID NO: 280387 - RNA, 32 nt, Homo Sapiens
ggagaagaauaaacacuugcccagaccccuuu

SEQ ID NO: 280388 - RNA, 32 nt, Homo Sapiens
gaagggaggaggaggaggacgccggucugggc

SEQ ID NO: 280389 - RNA, 32 nt, Homo Sapiens
caaauuaaucacuauguuuauaagguaguauc

SEQ ID NO: 280390 - RNA, 32 nt, Homo Sapiens
augucuggguucaugaaaaaugcaaaauauag

SEQ ID NO: 280391 - RNA, 32 nt, Homo Sapiens
cagaaaauagauuuuucuuuucuguugcauca

SEQ ID NO: 280392 - RNA, 32 nt, Homo Sapiens
acagcaaaauuauuuuuguagcucaguuucau

SEQ ID NO: 280393 - RNA, 32 nt, Homo Sapiens
agcuccuaggcaggagagauccugugggcuga

SEQ ID NO: 280394 - RNA, 32 nt, Homo Sapiens
agggggaaucugccucuuguugccaugggcag

SEQ ID NO: 280395 - RNA, 32 nt, Homo Sapiens
uacaucccuugccccacccaucccaucuccaa

SEQ ID NO: 280396 - RNA, 32 nt, Homo Sapiens
ccugccuggaacuggcugugaagacccaggag

SEQ ID NO: 280397 - RNA, 31 nt, Homo Sapiens
uaagaaauaaaacuguuaaagucuccaaacu

SEQ ID NO: 280398 - RNA, 32 nt, Homo Sapiens
aauauuccagcauggcaggauuauacuuccau

SEQ ID NO: 280399 - RNA, 32 nt, Homo Sapiens
ucauguugccagccacucaaaggaggcagcac

SEQ ID NO: 280400 - RNA, 32 nt, Homo Sapiens
auagaacgaggccugcagcugcacagccagac

SEQ ID NO: 280401 - RNA, 32 nt, Homo Sapiens
ugggccugcggcuggaggagaagaucacagag

SEQ ID NO: 280402 - RNA, 32 nt, Homo Sapiens
gcucuggggcccagcccuccccggggcgcucu

SEQ ID NO: 280403 - RNA, 32 nt, Homo Sapiens
uuuucccuguguuugucucuaguguccuccua

SEQ ID NO: 280404 - RNA, 32 nt, Homo Sapiens
ccacuuuaaugauugaaaauauagguuaguaa

SEQ ID NO: 280405 - RNA, 32 nt, Homo Sapiens
acaccuaugggaucaauaagcaugucagacug

SEQ ID NO: 280406 - RNA, 32 nt, Homo Sapiens
cauuggugaaaauaaauguuaaugaauuacca

SEQ ID NO: 280407 - RNA, 32 nt, Homo Sapiens
agccugcaguugccuggcagacuggaaagccu

SEQ ID NO: 280408 - RNA, 32 nt, Homo Sapiens
acacugacugcacuuaccagucugauuuuauc

SEQ ID NO: 280409 - RNA, 32 nt, Homo Sapiens
cauguucuuuugccucccauagccucuugcuu

SEQ ID NO: 280410 - RNA, 32 nt, Homo Sapiens
cacuaucuaguucaaaaacauuugcuucaucu

SEQ ID NO: 280411 - RNA, 32 nt, Homo Sapiens
ccagauugugaacacggacccauauaucccua

SEQ ID NO: 280412 - RNA, 32 nt, Homo Sapiens
ggucuugacaaaacagaagaaaaacaagccuc

SEQ ID NO: 280413 - RNA, 32 nt, Homo Sapiens
guuaggucggggcugccccggcgaguggagca

SEQ ID NO: 280414 - RNA, 32 nt, Homo Sapiens
ccaccccgccugcuucauccacaucaggaggg

SEQ ID NO: 280415 - RNA, 32 nt, Homo Sapiens
ugucucugaggcaccugcguggaccgggucug

SEQ ID NO: 280416 - RNA, 32 nt, Homo Sapiens
gucucugggucgccagcgcgcgggcgcgcggc

SEQ ID NO: 280417 - RNA, 32 nt, Homo Sapiens
ccucuuuuucuggaggggaauguuagaagaga

SEQ ID NO: 280418 - RNA, 32 nt, Homo Sapiens
cgagcgcggcgguggggccgagaggacgcgca

SEQ ID NO: 280419 - RNA, 32 nt, Homo Sapiens
guaccuguaugaccagagacaccucaaauuca

SEQ ID NO: 280420 - RNA, 32 nt, Homo Sapiens
acuuacuguuucuaauuugaagagggaacauu

SEQ ID NO: 280421 - RNA, 28 nt, Homo Sapiens
uuuauaguuacaggacagaaagugaaaa

SEQ ID NO: 280422 - RNA, 32 nt, Homo Sapiens
agccuguaaucccagcacuuuggguggccgag

SEQ ID NO: 280423 - RNA, 32 nt, Homo Sapiens
ugccugugauccuagcacuuugggaggcugaa

SEQ ID NO: 280424 - RNA, 32 nt, Homo Sapiens
ugccuguaaucccagcacuuugggaggccgag

SEQ ID NO: 280425 - RNA, 32 nt, Homo Sapiens
ugccuauaaucccagcacuuugggaggccaag

SEQ ID NO: 280426 - RNA, 32 nt, Homo Sapiens
ugccuguaauccuagcacuuugggaggcugag

SEQ ID NO: 280427 - RNA, 32 nt, Homo Sapiens
aacaaaugacugguccuaaucuguaaaugaga

SEQ ID NO: 280428 - RNA, 32 nt, Homo Sapiens
agggugcagggugagucuccuuccagugcccc

SEQ ID NO: 280429 - RNA, 32 nt, Homo Sapiens
caaucgcagcgcgggaaggcggugggggcggg

SEQ ID NO: 280430 - RNA, 32 nt, Homo Sapiens
cuccccgagucgggcgggaggggagagcgggu

SEQ ID NO: 280431 - RNA, 32 nt, Homo Sapiens
agccaccgccgccgcucggugcggcucucgga

SEQ ID NO: 280432 - RNA, 32 nt, Homo Sapiens
aaaaacuacaccaguagguugauucaaucaag

SEQ ID NO: 280433 - RNA, 32 nt, Homo Sapiens
uucguuuacccagcaggccccuggaggugugu

SEQ ID NO: 280434 - RNA, 32 nt, Homo Sapiens
uuaugaaaauacaggagaaacagucucagugg

SEQ ID NO: 280435 - RNA, 32 nt, Homo Sapiens
gaaguuucaaagccagcuugaccugguugugg

SEQ ID NO: 280436 - RNA, 32 nt, Homo Sapiens
caggaacccagacaccaccuccaacucugagc

SEQ ID NO: 280437 - RNA, 32 nt, Homo Sapiens
cggaucccggaccauggcggcggccggggggc

SEQ ID NO: 280438 - RNA, 32 nt, Homo Sapiens
acugaauguuuacauuaacaaacaccagagag

SEQ ID NO: 280439 - RNA, 32 nt, Homo Sapiens
ucaucucaggacuuugguuauacucauggcac

SEQ ID NO: 280440 - RNA, 32 nt, Homo Sapiens
aaacauucuccagcucuggagccucccagcuc

SEQ ID NO: 280441 - RNA, 32 nt, Homo Sapiens
aagaaaauccugaauagcacagggaagcagac

SEQ ID NO: 280442 - RNA, 32 nt, Homo Sapiens
ccucggccacccaaagugcugggauuacaggc

SEQ ID NO: 280443 - RNA, 32 nt, Homo Sapiens
accuugguagagagggauggcuccccacccuc

SEQ ID NO: 280444 - RNA, 32 nt, Homo Sapiens
ccuuccagccaggccuggcagccagaggugcu

SEQ ID NO: 280445 - RNA, 32 nt, Homo Sapiens
aggcugugggcaggaaagaaaggcuccuguuu

SEQ ID NO: 280446 - RNA, 28 nt, Homo Sapiens
cuaaagaaagauuacguugaugaaaaag

SEQ ID NO: 280447 - RNA, 32 nt, Homo Sapiens
gaggaagcauuugggguuaaugacaggauaug

SEQ ID NO: 280448 - RNA, 32 nt, Homo Sapiens
ugggagaugggcggggggaggggggcgggcgg

SEQ ID NO: 280449 - RNA, 32 nt, Homo Sapiens
ugcugaaaaauauuugaaacuuguggucucug

SEQ ID NO: 280450 - RNA, 32 nt, Homo Sapiens
uguuuguugugauuaccgaguuaauacuuaca

SEQ ID NO: 280451 - RNA, 32 nt, Homo Sapiens
ggaaggucggcuucccggaaaagcagggccaa

SEQ ID NO: 280452 - RNA, 32 nt, Homo Sapiens
gcugcucuucccucccccgccauagcuaagau

SEQ ID NO: 280453 - RNA, 32 nt, Homo Sapiens
gaaaggaauuuuuucugaagagcauuagaaag

SEQ ID NO: 280454 - RNA, 32 nt, Homo Sapiens
ucugcagucauucaaauuguuguuucccugua

SEQ ID NO: 280455 - RNA, 32 nt, Homo Sapiens
agaugagcuccggaaggcagguggguaaugga

SEQ ID NO: 280456 - RNA, 32 nt, Homo Sapiens
auucgaguguugggagggacuggucagugcug

SEQ ID NO: 280457 - RNA, 32 nt, Homo Sapiens
aguuuuuccucuuuuuuggcccguuguuauua

SEQ ID NO: 280458 - RNA, 32 nt, Homo Sapiens
agauuuuaaguacagcaauucaagaagauuuc

SEQ ID NO: 280459 - RNA, 32 nt, Homo Sapiens
aaaacucgcucuuggcuuucggcuuggaggag

SEQ ID NO: 280460 - RNA, 32 nt, Homo Sapiens
uuuguuguuguugaugauacaaaaauaauuuc

SEQ ID NO: 280461 - RNA, 32 nt, Homo Sapiens
uuggagaggugauuagguuaugaggguggagc

SEQ ID NO: 280462 - RNA, 32 nt, Homo Sapiens
cggguauagggguggguggggaggcccuccuc

SEQ ID NO: 280463 - RNA, 32 nt, Homo Sapiens
cugccuagacauuguagggguuagucuuauug

SEQ ID NO: 280464 - RNA, 32 nt, Homo Sapiens
ccucugagcuccuggggguguuucucugaccu

SEQ ID NO: 280465 - RNA, 32 nt, Homo Sapiens
gagagauaaucaauaugcauuuccaagccuuu

SEQ ID NO: 280466 - RNA, 32 nt, Homo Sapiens
uugcccccgcggcgucagagggagggcgggcg

SEQ ID NO: 280467 - RNA, 32 nt, Homo Sapiens
cugugccccuagguggagacagcccucuuucu

SEQ ID NO: 280468 - RNA, 32 nt, Homo Sapiens
ugagcuggcagcgauucagagcccuggggcug

SEQ ID NO: 280469 - RNA, 32 nt, Homo Sapiens
ccccccgccccauuggccccaccgcccucgcc

SEQ ID NO: 280470 - RNA, 32 nt, Homo Sapiens
uugggcuguuucuauuugggacuguuggcauu

SEQ ID NO: 280471 - RNA, 32 nt, Homo Sapiens
gggccggcaggggcggugcgcgggaagggacc

SEQ ID NO: 280472 - RNA, 32 nt, Homo Sapiens
uguuguacaauauaugacacagugcacauuga

SEQ ID NO: 280473 - RNA, 32 nt, Homo Sapiens
gauguguuagagguugagcaucgccugugccc

SEQ ID NO: 280474 - RNA, 32 nt, Homo Sapiens
ugcccagagggcggcgggggugcggagagaca

SEQ ID NO: 280475 - RNA, 32 nt, Homo Sapiens
ccugcccugugcuguggagagcgcaggucgca

SEQ ID NO: 280476 - RNA, 32 nt, Homo Sapiens
cuguaugccauucucuuugccaaguaauagaa

SEQ ID NO: 280477 - RNA, 32 nt, Homo Sapiens
cccagccuggggagcuaggcaccucacucuug

SEQ ID NO: 280478 - RNA, 32 nt, Homo Sapiens
guuuuauuuuaaugaaacccugauugacgcac

SEQ ID NO: 280479 - RNA, 32 nt, Homo Sapiens
cucugcaguguuccuccaccccaggaccaaua

SEQ ID NO: 280480 - RNA, 32 nt, Homo Sapiens
acgggggcagugaaggugacuccagcucacag

SEQ ID NO: 280481 - RNA, 32 nt, Homo Sapiens
uaaaauccuuagguaaaaugggauaaacccac

SEQ ID NO: 280482 - RNA, 32 nt, Homo Sapiens
uugaugagauaaacuuaaugucauuggccaca

SEQ ID NO: 280483 - RNA, 32 nt, Homo Sapiens
uuguacauucuauuccuguaauuauugugccc

SEQ ID NO: 280484 - RNA, 32 nt, Homo Sapiens
gcauguugugagaauaaaugagguaacgugua

SEQ ID NO: 280485 - RNA, 32 nt, Homo Sapiens
uuuccaggaauuuauuugauauuaaugggcgu

SEQ ID NO: 280486 - RNA, 32 nt, Homo Sapiens
gcgagggauguuucugguuucauuucaaauaa

SEQ ID NO: 280487 - RNA, 32 nt, Homo Sapiens
gcccgcugcaguacucggccgacgccgccgcc

SEQ ID NO: 280488 - RNA, 32 nt, Homo Sapiens
aaauagaaugguuuuucucuaugaaugaauca

SEQ ID NO: 280489 - RNA, 32 nt, Homo Sapiens
guacaugugggaauuacagauaaacggaagcc

SEQ ID NO: 280490 - RNA, 32 nt, Homo Sapiens
gugaagccggacgaggaccuggcgagcaaggc

SEQ ID NO: 280491 - RNA, 32 nt, Homo Sapiens
agggcagaggcaagguuaccagggcaccaugc

SEQ ID NO: 280492 - RNA, 32 nt, Homo Sapiens
cccuccgcgcccucccucccccucgagccgcc

SEQ ID NO: 280493 - RNA, 32 nt, Homo Sapiens
ucuggaauauccauguuucagagguaauauuu

SEQ ID NO: 280494 - RNA, 32 nt, Homo Sapiens
cucaauacaauuuucuuggucuuugcacuugu

SEQ ID NO: 280495 - RNA, 32 nt, Homo Sapiens
cauccacuuuuguaguaagcauggaucucgga

SEQ ID NO: 280496 - RNA, 32 nt, Homo Sapiens
uggcacuccacccuuguuauaguggaggaagc

SEQ ID NO: 280497 - RNA, 32 nt, Homo Sapiens
ccuuuccccaguguggccccagcccgacaggc

SEQ ID NO: 280498 - RNA, 32 nt, Homo Sapiens
acagaaauccugaguucuucucauugguggac

SEQ ID NO: 280499 - RNA, 32 nt, Homo Sapiens
ggauucggggccccagaguccuggaagugcac

SEQ ID NO: 280500 - RNA, 32 nt, Homo Sapiens
aguauaccuccaaaagaggaaacuacaccuua

SEQ ID NO: 280501 - RNA, 32 nt, Homo Sapiens
gugguaccuuggcuuuagguuuucauucgcac

SEQ ID NO: 280502 - RNA, 32 nt, Homo Sapiens
ccacuuccacgggaucucugggagcuggaaac

SEQ ID NO: 280503 - RNA, 32 nt, Homo Sapiens
uggucccagaccagcccucuucucccugaaug

SEQ ID NO: 280504 - RNA, 32 nt, Homo Sapiens
cggggcugugaggggugucuccaggcacaaag

SEQ ID NO: 280505 - RNA, 32 nt, Homo Sapiens
cacugaugggcccucccaggcccgucaagccc

SEQ ID NO: 280506 - RNA, 32 nt, Homo Sapiens
gagcgcaucucugugccauucaucucuccauu

SEQ ID NO: 280507 - RNA, 32 nt, Homo Sapiens
gcuuuaucauauuguacuuggguguaggacuc

SEQ ID NO: 280508 - RNA, 32 nt, Homo Sapiens
uacccacccccggguuuccccaaacuagaccc

SEQ ID NO: 280509 - RNA, 32 nt, Homo Sapiens
cuggccaaaagagcuuguuugcugggaggugg

SEQ ID NO: 280510 - RNA, 32 nt, Homo Sapiens
ccagcgagggaagaaaagaguaauuuuuucaa

SEQ ID NO: 280511 - RNA, 32 nt, Homo Sapiens
gcgucuuucaugggguuaaucugcuugagucu

SEQ ID NO: 280512 - RNA, 32 nt, Homo Sapiens
agagguaauagagugacacaugauuuaacuua

SEQ ID NO: 280513 - RNA, 32 nt, Homo Sapiens
uuucuagaauccuggggugcucccgggccgcu

SEQ ID NO: 280514 - RNA, 32 nt, Homo Sapiens
ggugauggcugaugcuggcugugcuagauuuu

SEQ ID NO: 280515 - RNA, 32 nt, Homo Sapiens
cgccggccagaaauccgaccggaccgggcucg

SEQ ID NO: 280516 - RNA, 32 nt, Homo Sapiens
uuuuacuccaugaacaugggcuauuucuguau

SEQ ID NO: 280517 - RNA, 32 nt, Homo Sapiens
gagcauuuacacaauacacaagguguaaaaau

SEQ ID NO: 280518 - RNA, 32 nt, Homo Sapiens
aaaucgacugcugcggguccaguguccgccau

SEQ ID NO: 280519 - RNA, 32 nt, Homo Sapiens
ugggcagcauacugagacccugccuuuaaaaa

SEQ ID NO: 280520 - RNA, 32 nt, Homo Sapiens
uccacccccacuuucucuucuuccuugggaag

SEQ ID NO: 280521 - RNA, 32 nt, Homo Sapiens
uagacaguguaggaaugucacauggaauuggg

SEQ ID NO: 280522 - RNA, 32 nt, Homo Sapiens
gacgccugccccccaggccccacucggcuucg

SEQ ID NO: 280523 - RNA, 32 nt, Homo Sapiens
uucuugaggucuugagggaauagugaaacaca

SEQ ID NO: 280524 - RNA, 32 nt, Homo Sapiens
gccugggaagggagaagaauuaguguauuuuu

SEQ ID NO: 280525 - RNA, 30 nt, Homo Sapiens
aacuugggagguggaggccaagauuguacc

SEQ ID NO: 280526 - RNA, 32 nt, Homo Sapiens
cuucuccccucgcugcugcacccuggcuucca

SEQ ID NO: 280527 - RNA, 32 nt, Homo Sapiens
gcgcgcucugagccuucgcaacucgcgagcaa

SEQ ID NO: 280528 - RNA, 32 nt, Homo Sapiens
cuccuagcagugcgcgccccgccuguguuugc

SEQ ID NO: 280529 - RNA, 32 nt, Homo Sapiens
aggagccaggugaggaggagccaggaaggcag

SEQ ID NO: 280530 - RNA, 32 nt, Homo Sapiens
ccgccgacgaccucagaaaacccagaugggug

SEQ ID NO: 280531 - RNA, 32 nt, Homo Sapiens
ccccaaggguggcaagugccaccuucgcugug

SEQ ID NO: 280532 - RNA, 32 nt, Homo Sapiens
ggauuccccacuuaccuaauaaauaaaugucc

SEQ ID NO: 280533 - RNA, 32 nt, Homo Sapiens
gcugaaaaaaaguuggaaaaccacugacuaga

SEQ ID NO: 280534 - RNA, 32 nt, Homo Sapiens
cuaagcugcugggaacccaucugugcugaaau

SEQ ID NO: 280535 - RNA, 32 nt, Homo Sapiens
uguaauuauggagucauuuuuacaauguaauu

SEQ ID NO: 280536 - RNA, 32 nt, Homo Sapiens
uaaaacaguauuuuuuagaaguuguguuacaa

SEQ ID NO: 280537 - RNA, 32 nt, Homo Sapiens
uuugcguccgcgccaucaggcccgagauagcg

SEQ ID NO: 280538 - RNA, 31 nt, Homo Sapiens
ucucccugguccaccaccauguugaagcccu

SEQ ID NO: 280539 - RNA, 32 nt, Homo Sapiens
ugaaugggaauuaagcuuccccugccuucauc

SEQ ID NO: 280540 - RNA, 32 nt, Homo Sapiens
ugcucuaaugaggcaaugaugccaagaaaaag

SEQ ID NO: 280541 - RNA, 32 nt, Homo Sapiens
caaaauggaaaacgaaaucacaugacaacauc

SEQ ID NO: 280542 - RNA, 32 nt, Homo Sapiens
ccuccguggucccucccugggcuccaggggcc

SEQ ID NO: 280543 - RNA, 32 nt, Homo Sapiens
uggcgggagacgggaaggcagcgggcugcgua

SEQ ID NO: 280544 - RNA, 32 nt, Homo Sapiens
cuuacccccuuuuccuucucugaaguguuaau

SEQ ID NO: 280545 - RNA, 32 nt, Homo Sapiens
cacauuguggguggagagcgggaaagagaggg

SEQ ID NO: 280546 - RNA, 32 nt, Homo Sapiens
gcaaaguacuuugaaaaccauuauuaaauaga

SEQ ID NO: 280547 - RNA, 32 nt, Homo Sapiens
aggcccaguguggaagccggaacuugcauuug

SEQ ID NO: 280548 - RNA, 32 nt, Homo Sapiens
uuuugguguuuucuuuugacauuugaaaauuu

SEQ ID NO: 280549 - RNA, 32 nt, Homo Sapiens
uacaaaauuuuaaagaagaauauguaacaugc

SEQ ID NO: 280550 - RNA, 32 nt, Homo Sapiens
uggcuguccccucucccucaguccuuccugac

SEQ ID NO: 280551 - RNA, 32 nt, Homo Sapiens
ccuuuauuaauagaagaauacaugucaugcca

SEQ ID NO: 280552 - RNA, 32 nt, Homo Sapiens
gaacagugcuuagaaaagcaaaaacuaggugu

SEQ ID NO: 280553 - RNA, 32 nt, Homo Sapiens
auuuuuaccaaaaccacaagcaaaaaacaaaa

SEQ ID NO: 280554 - RNA, 32 nt, Homo Sapiens
ugcauuuguaaaaaugagacuuuuucagugga

SEQ ID NO: 280555 - RNA, 32 nt, Homo Sapiens
cucacuucuguuuuacguugagcauuacgaau

SEQ ID NO: 280556 - RNA, 32 nt, Homo Sapiens
uuuucuuguaaauuuauuuaaguucauuauag

SEQ ID NO: 280557 - RNA, 32 nt, Homo Sapiens
cagcugucauaagaucauaauuuuaugaacag

SEQ ID NO: 280558 - RNA, 31 nt, Homo Sapiens
cggcccuggcacugccucagcauggccaugu

SEQ ID NO: 280559 - RNA, 32 nt, Homo Sapiens
guuguacaauuauguuuuuaauacaguguggc

SEQ ID NO: 280560 - RNA, 32 nt, Homo Sapiens
gcacccuggguugggugcacagcccucauucu

SEQ ID NO: 280561 - RNA, 32 nt, Homo Sapiens
auccccgcccagagccgggcgucguguggguc

SEQ ID NO: 280562 - RNA, 32 nt, Homo Sapiens
cccugguaugcccacgugggacagaggacaca

SEQ ID NO: 280563 - RNA, 32 nt, Homo Sapiens
uuaucccuaccuuaguucuuucucucugacuc

SEQ ID NO: 280564 - RNA, 32 nt, Homo Sapiens
ucuuuaaaucagauaccaaauauuuuuuagga

SEQ ID NO: 280565 - RNA, 32 nt, Homo Sapiens
ccgaaguguugggauuacaggcacgagccacu

SEQ ID NO: 280566 - RNA, 32 nt, Homo Sapiens
uuugccauacccugauauucucuccuucuuuu

SEQ ID NO: 280567 - RNA, 28 nt, Homo Sapiens
uguguggggcggcagccccgggccucuc

SEQ ID NO: 280568 - RNA, 32 nt, Homo Sapiens
ggccggagcuggugguucgggggcggugcuag

SEQ ID NO: 280569 - RNA, 32 nt, Homo Sapiens
gcauacaaaaagacauuacuuuggaguuugga

SEQ ID NO: 280570 - RNA, 32 nt, Homo Sapiens
aggaaauccaugaagggcacagacagcggguc

SEQ ID NO: 280571 - RNA, 32 nt, Homo Sapiens
auaaagcccugcugaaggaaaagcaaccuaga

SEQ ID NO: 280572 - RNA, 30 nt, Homo Sapiens
cuccaggccgcggggccgccgggcgugguu

SEQ ID NO: 280573 - RNA, 32 nt, Homo Sapiens
auuucauuguauagcaguaguaucauaagaua

SEQ ID NO: 280574 - RNA, 32 nt, Homo Sapiens
cauuccagccuuucuauauaaauagcucuuuc

SEQ ID NO: 280575 - RNA, 32 nt, Homo Sapiens
aauuuaauguuauaacucaucuagugagacca

SEQ ID NO: 280576 - RNA, 32 nt, Homo Sapiens
accuuggggacggaggcccaggacagucccca

SEQ ID NO: 280577 - RNA, 32 nt, Homo Sapiens
caugaaagaagccauuugauagauuauucuaa

SEQ ID NO: 280578 - RNA, 32 nt, Homo Sapiens
ggcugguggggcgggggguggauucugguucu

SEQ ID NO: 280579 - RNA, 32 nt, Homo Sapiens
gcuuguuuuucaguuuccccaacacacagcag

SEQ ID NO: 280580 - RNA, 32 nt, Homo Sapiens
cuagccacuccagcugcagcuaaaggagccaa

SEQ ID NO: 280581 - RNA, 32 nt, Homo Sapiens
ccugaaggaugaugagguaucaggugggugga

SEQ ID NO: 280582 - RNA, 32 nt, Homo Sapiens
gccacagcauccuagucugggcgacagagcca

SEQ ID NO: 280583 - RNA, 32 nt, Homo Sapiens
gcagccgggagcgcugguuuugugccuuuugu

SEQ ID NO: 280584 - RNA, 32 nt, Homo Sapiens
cucuggauuuaaaauuauaaucucaucacauu

SEQ ID NO: 280585 - RNA, 32 nt, Homo Sapiens
cugcugcccuccccgccgagguucuacugcuc

SEQ ID NO: 280586 - RNA, 32 nt, Homo Sapiens
uguggccucacaggaaaaaugauccgaagacg

SEQ ID NO: 280587 - RNA, 32 nt, Homo Sapiens
uaaagcguuguaaauaaauuguucucgacaua

SEQ ID NO: 280588 - RNA, 32 nt, Homo Sapiens
ugguugacccucacauagaaaugauaccugga

SEQ ID NO: 280589 - RNA, 32 nt, Homo Sapiens
ccagcccugccagcuuucccagagacgcccag

SEQ ID NO: 280590 - RNA, 32 nt, Homo Sapiens
ggcggugggggaggacccccagccacaugugg

SEQ ID NO: 280591 - RNA, 32 nt, Homo Sapiens
uaaugugggaagaaacaaacccguuuuaugau

SEQ ID NO: 280592 - RNA, 32 nt, Homo Sapiens
aggggcucccuccagcacacagcccucacccc

SEQ ID NO: 280593 - RNA, 32 nt, Homo Sapiens
aagacuaaggcggcgccgggccccacagcagc

SEQ ID NO: 280594 - RNA, 32 nt, Homo Sapiens
aaaggagucagggauggcucuuccucagggac

SEQ ID NO: 280595 - RNA, 32 nt, Homo Sapiens
uuucugcccaaccgcauggugccuggaccuga

SEQ ID NO: 280596 - RNA, 32 nt, Homo Sapiens
uuuggccccuggacuauggugcuguauauaau

SEQ ID NO: 280597 - RNA, 32 nt, Homo Sapiens
gggccaccugccugcgucuuccgccccugccu

SEQ ID NO: 280598 - RNA, 32 nt, Homo Sapiens
aggcugagaaacacugauagaccaagaggugg

SEQ ID NO: 280599 - RNA, 32 nt, Homo Sapiens
uguuccugcggcggcaucugccgcccgagguc

SEQ ID NO: 280600 - RNA, 32 nt, Homo Sapiens
ccacuccgcgcgcggggcuagcgcggguuuca

SEQ ID NO: 280601 - RNA, 32 nt, Homo Sapiens
ccccuacggaacaccacuacuuuacccagacg

SEQ ID NO: 280602 - RNA, 32 nt, Homo Sapiens
ucuuagugcacaguaucacaacaaagaaaaag

SEQ ID NO: 280603 - RNA, 32 nt, Homo Sapiens
ccuagcagcuggauguggcagaggcaggccag

SEQ ID NO: 280604 - RNA, 32 nt, Homo Sapiens
gcaaauuaaaacaaucuuucuguucuauaguu

SEQ ID NO: 280605 - RNA, 32 nt, Homo Sapiens
uggaaaucugggauggagguguuggcagggcu

SEQ ID NO: 280606 - RNA, 29 nt, Homo Sapiens
uuggcucggggacgcgggcgggcgcuccg

SEQ ID NO: 280607 - RNA, 32 nt, Homo Sapiens
cugaugacggggaaacaaaauuauucucugag

SEQ ID NO: 280608 - RNA, 32 nt, Homo Sapiens
gguaaccuuccuuuccucuccagacugaggaa

SEQ ID NO: 280609 - RNA, 32 nt, Homo Sapiens
gaaugcagaaggagccuugucuggccauagcu

SEQ ID NO: 280610 - RNA, 32 nt, Homo Sapiens
uugcucuccagauugggugugagcuucucugu

SEQ ID NO: 280611 - RNA, 32 nt, Homo Sapiens
aauucuacugacagaaguguugccuucauaau

SEQ ID NO: 280612 - RNA, 29 nt, Homo Sapiens
auaaauguauaaauacugcuuuguaucug

SEQ ID NO: 280613 - RNA, 32 nt, Homo Sapiens
caacuucgggaucggcugggugaggcugggca

SEQ ID NO: 280614 - RNA, 32 nt, Homo Sapiens
acagagcccuugccccugcugcugccccgagg

SEQ ID NO: 280615 - RNA, 31 nt, Homo Sapiens
aaccuucauuugagucuuuccuuauaacauc

SEQ ID NO: 280616 - RNA, 32 nt, Homo Sapiens
cauuugugggcgcgcggcacgcagccgggagg

SEQ ID NO: 280617 - RNA, 31 nt, Homo Sapiens
uggacacagccccaggagcuggguaggacca

SEQ ID NO: 280618 - RNA, 32 nt, Homo Sapiens
aagaggaggaggagaaagaagcagcaacgauc

SEQ ID NO: 280619 - RNA, 32 nt, Homo Sapiens
uucccuacgaagggaauaaagccaugcugauc

SEQ ID NO: 280620 - RNA, 32 nt, Homo Sapiens
gugacuuugaaaaccacuggcuuacgcccacc

SEQ ID NO: 280621 - RNA, 32 nt, Homo Sapiens
uuuuuaaacacuugaaaaauuaaaggauuugu

SEQ ID NO: 280622 - RNA, 32 nt, Homo Sapiens
uauuauaaaacuggauuuuaaauaaauguauu

SEQ ID NO: 280623 - RNA, 32 nt, Homo Sapiens
cuacgacucccagcccuagcccgugcugccuc

SEQ ID NO: 280624 - RNA, 32 nt, Homo Sapiens
uuuaauaaaagcuuuuaauugagaaccuacua

SEQ ID NO: 280625 - RNA, 32 nt, Homo Sapiens
uuguacugagacagaagaagaggcugggaccc

SEQ ID NO: 280626 - RNA, 32 nt, Homo Sapiens
gcgcugagcaggcccggccgcgcagcgccuac

SEQ ID NO: 280627 - RNA, 29 nt, Homo Sapiens
ccagaugcagauguuggacaaauuuccca

SEQ ID NO: 280628 - RNA, 32 nt, Homo Sapiens
uagcccacaagaaucaugcacuuuuuaaaauu

SEQ ID NO: 280629 - RNA, 32 nt, Homo Sapiens
ugugcuaacugaauaucauugcagcaacuaga

SEQ ID NO: 280630 - RNA, 32 nt, Homo Sapiens
gaauagaugaugcagaggccccauuggagaca

SEQ ID NO: 280631 - RNA, 32 nt, Homo Sapiens
aaaaagccacuacuuccagaagcaucuccuca

SEQ ID NO: 280632 - RNA, 32 nt, Homo Sapiens
ccaucccccacccccaggagccuggcugucuc

SEQ ID NO: 280633 - RNA, 32 nt, Homo Sapiens
ccucucccacccaaggagaacguuugguacaa

SEQ ID NO: 280634 - RNA, 32 nt, Homo Sapiens
aacuuuuucuccgggggggacuugcggagcca

SEQ ID NO: 280635 - RNA, 32 nt, Homo Sapiens
agcucagauugugcaguccauccccagucaau

SEQ ID NO: 280636 - RNA, 32 nt, Homo Sapiens
gccacauguggauaagaaacuaagggccacag

SEQ ID NO: 280637 - RNA, 32 nt, Homo Sapiens
ucugcccacauccuuaugacgcagccaaucug

SEQ ID NO: 280638 - RNA, 32 nt, Homo Sapiens
gguagcagcuccagggccggcccgcgcgugcg

SEQ ID NO: 280639 - RNA, 32 nt, Homo Sapiens
caucuuucagcauagacuuaauccccuuaagc

SEQ ID NO: 280640 - RNA, 32 nt, Homo Sapiens
ugugccuccuagcccaggauuugucuccuuua

SEQ ID NO: 280641 - RNA, 32 nt, Homo Sapiens
uuuguaggcagacucaugagcaggugugugca

SEQ ID NO: 280642 - RNA, 32 nt, Homo Sapiens
ccaauauugguaguacuuuuuugccucuuaug

SEQ ID NO: 280643 - RNA, 32 nt, Homo Sapiens
auuggaagugauuuuuccucuuuuaaaaguaa

SEQ ID NO: 280644 - RNA, 32 nt, Homo Sapiens
cugcaguaaaaauaaacccagaugcuaaauca

SEQ ID NO: 280645 - RNA, 32 nt, Homo Sapiens
cauauguaauauuuuuguuacugguguguucu

SEQ ID NO: 280646 - RNA, 32 nt, Homo Sapiens
caugccucauugauuauuguuucuaggaagga

SEQ ID NO: 280647 - RNA, 32 nt, Homo Sapiens
guaggggcugcagggacaaacaucguuggggg

SEQ ID NO: 280648 - RNA, 32 nt, Homo Sapiens
ggggcuugagaaaugaaugcaauuggagaaac

SEQ ID NO: 280649 - RNA, 32 nt, Homo Sapiens
cccggaccagcucgugccccaaacgaaugcca

SEQ ID NO: 280650 - RNA, 32 nt, Homo Sapiens
cauccuaagaaacaccauuugaugcaccuuag

SEQ ID NO: 280651 - RNA, 32 nt, Homo Sapiens
uuuauauuuuucuuguuucuuauuuucuuaac

SEQ ID NO: 280652 - RNA, 32 nt, Homo Sapiens
aucuuugggggaagcccugcuuccugaaaacc

SEQ ID NO: 280653 - RNA, 32 nt, Homo Sapiens
aacagccccagcugugacccccaggcuuccac

SEQ ID NO: 280654 - RNA, 32 nt, Homo Sapiens
acauauuuauucuccucuuucuucccuuagaa

SEQ ID NO: 280655 - RNA, 32 nt, Homo Sapiens
cggauugccugagcucaggaguucaagaucag

SEQ ID NO: 280656 - RNA, 32 nt, Homo Sapiens
uuuuuugcacaaaauuucauuuuuaauaaaag

SEQ ID NO: 280657 - RNA, 32 nt, Homo Sapiens
cuuuuaaaauuugacuuuuaaaaaacaaaaga

SEQ ID NO: 280658 - RNA, 32 nt, Homo Sapiens
cgguggggcucagcgcuggcgccggcgaggac

SEQ ID NO: 280659 - RNA, 32 nt, Homo Sapiens
uaugcagagauuaaaugacaucauaauacugg

SEQ ID NO: 280660 - RNA, 32 nt, Homo Sapiens
ccacggccccuccccacccccacccggcucac

SEQ ID NO: 280661 - RNA, 32 nt, Homo Sapiens
acuagcggagcugcaucuccgcgcuucguugg

SEQ ID NO: 280662 - RNA, 32 nt, Homo Sapiens
uuggaaaguaauuuaaauguaccuuauuuuuu

SEQ ID NO: 280663 - RNA, 32 nt, Homo Sapiens
uguguuucaggagaggacugugcuggaucaug

SEQ ID NO: 280664 - RNA, 32 nt, Homo Sapiens
aaaacagacagcucccacuaagaucacguucu

SEQ ID NO: 280665 - RNA, 32 nt, Homo Sapiens
auuuagucuucagauauauuauuuuaaaggca

SEQ ID NO: 280666 - RNA, 32 nt, Homo Sapiens
auggguggggacggagccacauccaagucuag

SEQ ID NO: 280667 - RNA, 32 nt, Homo Sapiens
cgguaggccuggcccgcagagccugcgagucu

SEQ ID NO: 280668 - RNA, 32 nt, Homo Sapiens
augaggcuuggucuccuucccaggaucccaca

SEQ ID NO: 280669 - RNA, 32 nt, Homo Sapiens
uauuuaagaauguacaaugcauuuguguaauu

SEQ ID NO: 280670 - RNA, 32 nt, Homo Sapiens
gauguuguuucauaaagacucucagaccuuuu

SEQ ID NO: 280671 - RNA, 32 nt, Homo Sapiens
gagcuacaaccuggccuucagcacccgcccac

SEQ ID NO: 280672 - RNA, 32 nt, Homo Sapiens
gaaucauagugucagugaggucccgugagucu

SEQ ID NO: 280673 - RNA, 32 nt, Homo Sapiens
aaaugcuaugucugcaugauaauuuaaaaugg

SEQ ID NO: 280674 - RNA, 32 nt, Homo Sapiens
cugggcccggcgggcacuggugccccaacauc

SEQ ID NO: 280675 - RNA, 32 nt, Homo Sapiens
cagccccguggcgcccucucuggccgccgccc

SEQ ID NO: 280676 - RNA, 32 nt, Homo Sapiens
cugccuuccccucccucccacuggagaagccg

SEQ ID NO: 280677 - RNA, 32 nt, Homo Sapiens
caugagauucaggaagcaaaaaaggaauucau

SEQ ID NO: 280678 - RNA, 32 nt, Homo Sapiens
cggcggcggcagcggcggccaagcggccaggu

SEQ ID NO: 280679 - RNA, 32 nt, Homo Sapiens
gcuugguguauuacauuuuuuguuaauaugca

SEQ ID NO: 280680 - RNA, 32 nt, Homo Sapiens
cgaggguccggacgcgccccagcucgcgcccc

SEQ ID NO: 280681 - RNA, 32 nt, Homo Sapiens
ccaagggcugugcggagcuggugcugccugaa

SEQ ID NO: 280682 - RNA, 32 nt, Homo Sapiens
ccaugaggccccaacaaugucuuugcugaccc

SEQ ID NO: 280683 - RNA, 32 nt, Homo Sapiens
acuggggacuaguagaaagaucugaaacaguu

SEQ ID NO: 280684 - RNA, 32 nt, Homo Sapiens
uuacuugagcccaggaagucaaggcugcagug

SEQ ID NO: 280685 - RNA, 32 nt, Homo Sapiens
uggucccuccucucgugccccagcggccugcc

SEQ ID NO: 280686 - RNA, 32 nt, Homo Sapiens
ugcccucaggugguccaccagucucccccuuu

SEQ ID NO: 280687 - RNA, 32 nt, Homo Sapiens
agaccagccugggcagcauagcaagaucccca

SEQ ID NO: 280688 - RNA, 32 nt, Homo Sapiens
cccgugguugcuuuugauuacccuuaggaagu

SEQ ID NO: 280689 - RNA, 32 nt, Homo Sapiens
ugagcagcaugcuugcaucaccuagugcauga

SEQ ID NO: 280690 - RNA, 30 nt, Homo Sapiens
cuuugauucccaaugggggacucaggauca

SEQ ID NO: 280691 - RNA, 32 nt, Homo Sapiens
agggugcagcugaccucccuccccuugugcag

SEQ ID NO: 280692 - RNA, 32 nt, Homo Sapiens
uugaguucaggaguucaaaaccagccuggaca

SEQ ID NO: 280693 - RNA, 32 nt, Homo Sapiens
acguuaguucccuacuccauccuucccuggug

SEQ ID NO: 280694 - RNA, 32 nt, Homo Sapiens
uguuuccuccaagcuauucaauucuuuuaacu

SEQ ID NO: 280695 - RNA, 32 nt, Homo Sapiens
uugccaaaugaucaaaguguuaguccaauggu

SEQ ID NO: 280696 - RNA, 32 nt, Homo Sapiens
aauaaauuugaaauagaguauaacugaaugca

SEQ ID NO: 280697 - RNA, 32 nt, Homo Sapiens
gugaacccagugagccgagaucgugccacugc

SEQ ID NO: 280698 - RNA, 32 nt, Homo Sapiens
uggcacaggugggaugcagagguaacagaguu

SEQ ID NO: 280699 - RNA, 32 nt, Homo Sapiens
gcaccuggaagcaccugcccgcgugggagcac

SEQ ID NO: 280700 - RNA, 32 nt, Homo Sapiens
acauucuguguagggaggggaggcuuauucaa

SEQ ID NO: 280701 - RNA, 32 nt, Homo Sapiens
cuuggugccggggccuggggcucugagggaaa

SEQ ID NO: 280702 - RNA, 32 nt, Homo Sapiens
cuggggccugugucagccgccggcccuccgca

SEQ ID NO: 280703 - RNA, 32 nt, Homo Sapiens
uguguuuugcaaauucaaaaaauucgcaaugu

SEQ ID NO: 280704 - RNA, 32 nt, Homo Sapiens
uacaaucaugauggugagcauaucuaauacuc

SEQ ID NO: 280705 - RNA, 32 nt, Homo Sapiens
gccagaaaaucgaacaagugcaauuaacacac

SEQ ID NO: 280706 - RNA, 32 nt, Homo Sapiens
aagcacaugagaaaaagauauuguguuagugc

SEQ ID NO: 280707 - RNA, 32 nt, Homo Sapiens
aauuaguaggaugaaaauauuguagagacauc

SEQ ID NO: 280708 - RNA, 32 nt, Homo Sapiens
gacuuuuauuuuuucccccauggaagcacuug

SEQ ID NO: 280709 - RNA, 32 nt, Homo Sapiens
uguggccaugacugaggaaaggagcucacgcc

SEQ ID NO: 280710 - RNA, 32 nt, Homo Sapiens
acaguauuaguaaaaagaaaaauuguacacuu

SEQ ID NO: 280711 - RNA, 32 nt, Homo Sapiens
gguuaucugcaauguugaucuaaaauccuaaa

SEQ ID NO: 280712 - RNA, 32 nt, Homo Sapiens
uccacaguacuauuaagagaggcaugauaaug

SEQ ID NO: 280713 - RNA, 32 nt, Homo Sapiens
ccuucccaaaagacacuguguaaguccauuug

SEQ ID NO: 280714 - RNA, 32 nt, Homo Sapiens
auuauuuaaguuagguaacauuuuauauuacu

SEQ ID NO: 280715 - RNA, 32 nt, Homo Sapiens
ccccgggcggcaaggaggagcugguggcgguc

SEQ ID NO: 280716 - RNA, 32 nt, Homo Sapiens
guugaaggaggcacgugggggaggcgggagug

SEQ ID NO: 280717 - RNA, 32 nt, Homo Sapiens
acacccggggucugcuggucuccgcggauguc

SEQ ID NO: 280718 - RNA, 32 nt, Homo Sapiens
gucguggcccccugacgggccgcggccgccuc

SEQ ID NO: 280719 - RNA, 32 nt, Homo Sapiens
acccacguggugcaugcuucccuuaucuguga

SEQ ID NO: 280720 - RNA, 32 nt, Homo Sapiens
ggaaauuuacacacacacacacacacacacac

SEQ ID NO: 280721 - RNA, 32 nt, Homo Sapiens
ucgguuggcauuaagaguuuagcagauacuuu

SEQ ID NO: 280722 - RNA, 32 nt, Homo Sapiens
cugacugcccauuuccuguccuccucccggcu

SEQ ID NO: 280723 - RNA, 32 nt, Homo Sapiens
uugggagaaaucauccuguuuucucugugacc

SEQ ID NO: 280724 - RNA, 32 nt, Homo Sapiens
cuagaccgauucugugugaacaucaguuuugu

SEQ ID NO: 280725 - RNA, 32 nt, Homo Sapiens
gcaugcacauauauuaacuugugacuaaagac

SEQ ID NO: 280726 - RNA, 32 nt, Homo Sapiens
gccggggcgcgagcgucaacgcaaccucagcg

SEQ ID NO: 280727 - RNA, 32 nt, Homo Sapiens
gaucaguaaccaaaaucauaggcuuuuucugu

SEQ ID NO: 280728 - RNA, 32 nt, Homo Sapiens
uggugccagccccuucaccuccuuccagagcc

SEQ ID NO: 280729 - RNA, 32 nt, Homo Sapiens
ggggcacaagguggcaggaugucucaguggua

SEQ ID NO: 280730 - RNA, 32 nt, Homo Sapiens
cgagaugcccugcccagcgaggaggaaucuag

SEQ ID NO: 280731 - RNA, 32 nt, Homo Sapiens
guaauguauaauguacuauugacaugggcauc

SEQ ID NO: 280732 - RNA, 32 nt, Homo Sapiens
cucugguggcugucacgaagcagaguuggcac

SEQ ID NO: 280733 - RNA, 32 nt, Homo Sapiens
agauccaccugcaagucucuguuuccuuuuug

SEQ ID NO: 280734 - RNA, 32 nt, Homo Sapiens
gcaccagugucuauuccuguuaaauagcaacu

SEQ ID NO: 280735 - RNA, 32 nt, Homo Sapiens
gaugaacggacuugugaauuacggcauagaca

SEQ ID NO: 280736 - RNA, 32 nt, Homo Sapiens
ccgcugugccccccuccuccccgcgccccagu

SEQ ID NO: 280737 - RNA, 32 nt, Homo Sapiens
cagggccagcuggaaguguggagcacacaugc

SEQ ID NO: 280738 - RNA, 32 nt, Homo Sapiens
caucaccgcgcccuccccagaccaucagcuga

SEQ ID NO: 280739 - RNA, 32 nt, Homo Sapiens
ugcgcuuccagccgcccuugggugcugcgugc

SEQ ID NO: 280740 - RNA, 32 nt, Homo Sapiens
aaacuuguaucauuuuaacuugcacaaaggaa

SEQ ID NO: 280741 - RNA, 32 nt, Homo Sapiens
uuuuuguaaaauguauuugugacagugaaauc

SEQ ID NO: 280742 - RNA, 32 nt, Homo Sapiens
caaauugcaucauauucucucccuuuccccuc

SEQ ID NO: 280743 - RNA, 32 nt, Homo Sapiens
cuuugcauuguuaaggagguuuuuuguuuuua

SEQ ID NO: 280744 - RNA, 31 nt, Homo Sapiens
uagccgagggcggaggcgacacucucaggua

SEQ ID NO: 280745 - RNA, 32 nt, Homo Sapiens
gaugauacugcauuuuaagcauaagaacaauu

SEQ ID NO: 280746 - RNA, 32 nt, Homo Sapiens
gcaugaaaggauguucaacaucacuaauaacu

SEQ ID NO: 280747 - RNA, 32 nt, Homo Sapiens
uuugccuuguuuaaaugaaaugcauguuuagu

SEQ ID NO: 280748 - RNA, 32 nt, Homo Sapiens
auugauuuuuaaagcuuuugugauauuuuagc

SEQ ID NO: 280749 - RNA, 32 nt, Homo Sapiens
acuaaacccgcaccccagugcggacccuuccc

SEQ ID NO: 280750 - RNA, 32 nt, Homo Sapiens
ucuuucuguauauaaacucuuuaacugcuauu

SEQ ID NO: 280751 - RNA, 32 nt, Homo Sapiens
ucacuggaaaacaguggucugcugugaaaggc

SEQ ID NO: 280752 - RNA, 32 nt, Homo Sapiens
ggauacagaaacugagacacguggagacugga

SEQ ID NO: 280753 - RNA, 32 nt, Homo Sapiens
gccugugggguacguggacgguggguggggua

SEQ ID NO: 280754 - RNA, 32 nt, Homo Sapiens
cauacauaauuuccucaugcugagccagccug

SEQ ID NO: 280755 - RNA, 32 nt, Homo Sapiens
ccacccaccccauugggagaaaaacccagacg

SEQ ID NO: 280756 - RNA, 32 nt, Homo Sapiens
aggagguggcagcggcagcagcuguguuucug

SEQ ID NO: 280757 - RNA, 32 nt, Homo Sapiens
uagggacuucggguuccugaaugucaaaggcg

SEQ ID NO: 280758 - RNA, 32 nt, Homo Sapiens
acaguaaccucacccuuuccagacuuuagagc

SEQ ID NO: 280759 - RNA, 30 nt, Homo Sapiens
aaggcgcagcugcugccgccgcggcccauc

SEQ ID NO: 280760 - RNA, 32 nt, Homo Sapiens
cuaauuuguuuaucuuuuggguauaaauccca

SEQ ID NO: 280761 - RNA, 32 nt, Homo Sapiens
uuuuuucaagacaggaaucaaaguguuaggaa

SEQ ID NO: 280762 - RNA, 32 nt, Homo Sapiens
uagguauaucuagcugaacuuauuuuggcauu

SEQ ID NO: 280763 - RNA, 32 nt, Homo Sapiens
gguuaugacuuuuaaaguuuuauuuaaauaaa

SEQ ID NO: 280764 - RNA, 32 nt, Homo Sapiens
gucuucuuucugcugcagugcagccugcuccc

SEQ ID NO: 280765 - RNA, 32 nt, Homo Sapiens
uacaaucacaaggacauagauaccuaucagga

SEQ ID NO: 280766 - RNA, 31 nt, Homo Sapiens
uguggauuuaucugaucaccaaauaauaaau

SEQ ID NO: 280767 - RNA, 32 nt, Homo Sapiens
gcacauugcuaaaauaaaaaauacaccuuaau

SEQ ID NO: 280768 - RNA, 32 nt, Homo Sapiens
uacaagauaggaucaaauucuaauggaauuga

SEQ ID NO: 280769 - RNA, 32 nt, Homo Sapiens
gccacuuuaugaagaacaugcuccugaacucc

SEQ ID NO: 280770 - RNA, 32 nt, Homo Sapiens
acaaucuuuuuauuugcauuuuauugaugauu

SEQ ID NO: 280771 - RNA, 32 nt, Homo Sapiens
cggcagcagcagcagcagcagcaguuugugau

SEQ ID NO: 280772 - RNA, 32 nt, Homo Sapiens
ggauaaaauggaagaucaaaacauuauccagg

SEQ ID NO: 280773 - RNA, 32 nt, Homo Sapiens
uuuuacauggccuucccauggaugugcuguac

SEQ ID NO: 280774 - RNA, 32 nt, Homo Sapiens
uucccuuuagucucugguggcagcuucuaccu

SEQ ID NO: 280775 - RNA, 32 nt, Homo Sapiens
aaacuccggucgggcucucuccugggcucagc

SEQ ID NO: 280776 - RNA, 32 nt, Homo Sapiens
gccacacaagcagccguggacacaacgcccac

SEQ ID NO: 280777 - RNA, 32 nt, Homo Sapiens
auccuguucagauaucggggcuuucauacucc

SEQ ID NO: 280778 - RNA, 32 nt, Homo Sapiens
ugccaaauuugucuuauuaaauaaaaacaacg

SEQ ID NO: 280779 - RNA, 32 nt, Homo Sapiens
gaaggaaaaagagcaacagauccagggagcau

SEQ ID NO: 280780 - RNA, 32 nt, Homo Sapiens
ccuuuaaggcacgcuccuguccuccucauugc

SEQ ID NO: 280781 - RNA, 32 nt, Homo Sapiens
uuuuuuaucuacuguguaagaagacccuauaa

SEQ ID NO: 280782 - RNA, 32 nt, Homo Sapiens
ugagccaaaagagcuuguuugcugggaggcgg

SEQ ID NO: 280783 - RNA, 27 nt, Homo Sapiens
uaaaaguccuucuuaucuucuaacucc

SEQ ID NO: 280784 - RNA, 32 nt, Homo Sapiens
caggaaagacgggccugggggaggcgggacag

SEQ ID NO: 280785 - RNA, 32 nt, Homo Sapiens
caaagguggagacaggaugugccaaguucaug

SEQ ID NO: 280786 - RNA, 32 nt, Homo Sapiens
uccaugggauaaaggacacccuagguuuuucu

SEQ ID NO: 280787 - RNA, 32 nt, Homo Sapiens
acgggugucugucccccucguuuuguagcguu

SEQ ID NO: 280788 - RNA, 32 nt, Homo Sapiens
acaagccuggaaagauggugucacaaucuaca

SEQ ID NO: 280789 - RNA, 32 nt, Homo Sapiens
cagggcugcuuuuaacucugguaaaguggaua

SEQ ID NO: 280790 - RNA, 32 nt, Homo Sapiens
aauuaggggugcuaauaaaacaugcugagguu

SEQ ID NO: 280791 - RNA, 32 nt, Homo Sapiens
aagauugugugucaccccuguuuauucuugaa

SEQ ID NO: 280792 - RNA, 32 nt, Homo Sapiens
uccugccccuccccuuccuccagcuugucaag

SEQ ID NO: 280793 - RNA, 32 nt, Homo Sapiens
guucaaggagacgggggcgacgcggcugaggg

SEQ ID NO: 280794 - RNA, 32 nt, Homo Sapiens
cucagaagggaggggaggaaagagacugaggg

SEQ ID NO: 280795 - RNA, 32 nt, Homo Sapiens
cucccucacuuugagacuuuggcaacuccugg

SEQ ID NO: 280796 - RNA, 32 nt, Homo Sapiens
cauuagcucuuaaauuauucacagaagucacc

SEQ ID NO: 280797 - RNA, 32 nt, Homo Sapiens
uuuuuaagauggacucuugcucugucgcccag

SEQ ID NO: 280798 - RNA, 32 nt, Homo Sapiens
cacuugcuguuaaaauuguuaaaauuaaaggc

SEQ ID NO: 280799 - RNA, 32 nt, Homo Sapiens
aauuugaagcugguaucuccaagaaugggcaa

SEQ ID NO: 280800 - RNA, 32 nt, Homo Sapiens
ccuacgguuguuugaggaaguccccaacacag

SEQ ID NO: 280801 - RNA, 32 nt, Homo Sapiens
ucugcccuucacguuggggucuucccccaccu

SEQ ID NO: 280802 - RNA, 32 nt, Homo Sapiens
gcgggagggacuucugacacgcgccacuguuu

SEQ ID NO: 280803 - RNA, 31 nt, Homo Sapiens
agaagugcuccuacucucagggcucaguaaa

SEQ ID NO: 280804 - RNA, 31 nt, Homo Sapiens
aacgaaauguuaaaacagggucaauccauuu

SEQ ID NO: 280805 - RNA, 32 nt, Homo Sapiens
cuugacgucguuuuacaagaaaacaauggggc

SEQ ID NO: 280806 - RNA, 32 nt, Homo Sapiens
accaguauuuuuguuguuuauuuauaagguaa

SEQ ID NO: 280807 - RNA, 32 nt, Homo Sapiens
caacagcacccucuccuacuccaguccuagaa

SEQ ID NO: 280808 - RNA, 32 nt, Homo Sapiens
acaugaagaacuguuuuuugccugcugguaca

SEQ ID NO: 280809 - RNA, 32 nt, Homo Sapiens
aguuccugaaauuaaagaagugguggccacaa

SEQ ID NO: 280810 - RNA, 32 nt, Homo Sapiens
augugaaggcuagggcaguacuguauacuacu

SEQ ID NO: 280811 - RNA, 32 nt, Homo Sapiens
acauucugguggccaaaggaagucacaugucc

SEQ ID NO: 280812 - RNA, 32 nt, Homo Sapiens
uguauaaaaugguagggucagguugucauggg

SEQ ID NO: 280813 - RNA, 32 nt, Homo Sapiens
ccuguucgcacaaaggcaccacaggggcuaac

SEQ ID NO: 280814 - RNA, 32 nt, Homo Sapiens
ccucagacuuggauggaguuucugggagggua

SEQ ID NO: 280815 - RNA, 32 nt, Homo Sapiens
gaaaagcaagccgggggcgccaugguggagau

SEQ ID NO: 280816 - RNA, 32 nt, Homo Sapiens
uggggcuguaccuggugcccuguggcccccac

SEQ ID NO: 280817 - RNA, 32 nt, Homo Sapiens
gcugccucauggcccgcacgccgccucacggc

SEQ ID NO: 280818 - RNA, 32 nt, Homo Sapiens
aagccuguagccaccucuccucacgucgccuc

SEQ ID NO: 280819 - RNA, 32 nt, Homo Sapiens
ugauuauugcaaaauaaagcaaauuucagaac

SEQ ID NO: 280820 - RNA, 32 nt, Homo Sapiens
ugccugccgccgcagcgccgccgacaacgcgg

SEQ ID NO: 280821 - RNA, 32 nt, Homo Sapiens
aaacuuggcagagccagaguguacacauuccu

SEQ ID NO: 280822 - RNA, 32 nt, Homo Sapiens
ccaagggaccuggccuugccaagggccugggg

SEQ ID NO: 280823 - RNA, 32 nt, Homo Sapiens
agcuucuccccgaccagcccagccccaggaug

SEQ ID NO: 280824 - RNA, 32 nt, Homo Sapiens
uauaacuuacuuauuuuuaucuaauaauugua

SEQ ID NO: 280825 - RNA, 32 nt, Homo Sapiens
ugacgugccuuaagugccccuccagcuguggg

SEQ ID NO: 280826 - RNA, 32 nt, Homo Sapiens
ccucccugcccucccccagagugggcacugug

SEQ ID NO: 280827 - RNA, 32 nt, Homo Sapiens
cccccuuaaguggugacuuuuccccgggccag

SEQ ID NO: 280828 - RNA, 32 nt, Homo Sapiens
ccauaagacaccuauccugcucuguuauuucu

SEQ ID NO: 280829 - RNA, 32 nt, Homo Sapiens
gugcugggagccgcuuccuuccugcccugccc

SEQ ID NO: 280830 - RNA, 32 nt, Homo Sapiens
ggcggcccccagaaaucugacucgcgaggcca

SEQ ID NO: 280831 - RNA, 32 nt, Homo Sapiens
aaagaguaaaaugauaacuuaccuuagcauug

SEQ ID NO: 280832 - RNA, 32 nt, Homo Sapiens
auuuuaaauaauauuucuuaagagugauaaau

SEQ ID NO: 280833 - RNA, 32 nt, Homo Sapiens
caaaggccaacagcauuggccuggccagacca

SEQ ID NO: 280834 - RNA, 32 nt, Homo Sapiens
gcugcacuaugcggucaggauuccuugcugcu

SEQ ID NO: 280835 - RNA, 32 nt, Homo Sapiens
uggcccgguaugcagugugcgcugccggaauc

SEQ ID NO: 280836 - RNA, 32 nt, Homo Sapiens
ugcacugcgauauaauacauugccaagcagaa

SEQ ID NO: 280837 - RNA, 32 nt, Homo Sapiens
ugccccugcccccgcccauccgcccccacgcu

SEQ ID NO: 280838 - RNA, 32 nt, Homo Sapiens
uugugaauauuuuaauacaucuuuuucaauuu

SEQ ID NO: 280839 - RNA, 32 nt, Homo Sapiens
ccuccguccagcgcccuucccauggggccauc

SEQ ID NO: 280840 - RNA, 31 nt, Homo Sapiens
cagaccaguaggccggaaggaguccagugca

SEQ ID NO: 280841 - RNA, 32 nt, Homo Sapiens
ccgccugguuuccgcagccugaucaccauauc

SEQ ID NO: 280842 - RNA, 32 nt, Homo Sapiens
ugaaacaaaaauauaagaauuauuagcuacuu

SEQ ID NO: 280843 - RNA, 32 nt, Homo Sapiens
gcuaggagggaagaugaaggagauuugcagga

SEQ ID NO: 280844 - RNA, 32 nt, Homo Sapiens
agaacucagaacuggcaguuuucugaggugau

SEQ ID NO: 280845 - RNA, 32 nt, Homo Sapiens
gccaagcgcgguggcccacaccuguaauccca

SEQ ID NO: 280846 - RNA, 32 nt, Homo Sapiens
gaaauauuuucuuccuucucagcacuuuccca

SEQ ID NO: 280847 - RNA, 32 nt, Homo Sapiens
ucucuagcgucccagggccugguuucuguucc

SEQ ID NO: 280848 - RNA, 32 nt, Homo Sapiens
uuuucauugaagauuauaaauaaaugaagcuu

SEQ ID NO: 280849 - RNA, 32 nt, Homo Sapiens
ugggccuggcacacgccuguauucccacacca

SEQ ID NO: 280850 - RNA, 32 nt, Homo Sapiens
gaacuaguggcgggcugaggacgccguacccc

SEQ ID NO: 280851 - RNA, 32 nt, Homo Sapiens
ucaaaaggacaaagucuguagccuggaggggc

SEQ ID NO: 280852 - RNA, 32 nt, Homo Sapiens
gacgcaaggcacgaacagcacucgcgagcccg

SEQ ID NO: 280853 - RNA, 32 nt, Homo Sapiens
agugcgcgugaccaccugagcucugccuucug

SEQ ID NO: 280854 - RNA, 32 nt, Homo Sapiens
gccccacaagcuccuuuuccugaauuuccuac

SEQ ID NO: 280855 - RNA, 32 nt, Homo Sapiens
aaagacgaacuuuagaacacaguuggagguca

SEQ ID NO: 280856 - RNA, 32 nt, Homo Sapiens
cgggccaggaggagggggccuggcggacgccg

SEQ ID NO: 280857 - RNA, 32 nt, Homo Sapiens
ggccagaggagcuugucuuccuuguccucugu

SEQ ID NO: 280858 - RNA, 32 nt, Homo Sapiens
uauguauuauagaauugacuuuccaagucagu

SEQ ID NO: 280859 - RNA, 32 nt, Homo Sapiens
auuuuagguacaucgugagcaaggagccugca

SEQ ID NO: 280860 - RNA, 32 nt, Homo Sapiens
cccggccgcccgggccccgcgugcaugcuucg

SEQ ID NO: 280861 - RNA, 32 nt, Homo Sapiens
guacagacuggagggcucguccugcuacagac

SEQ ID NO: 280862 - RNA, 32 nt, Homo Sapiens
ucucugggcuugcccugaaauuacucgcugcu

SEQ ID NO: 280863 - RNA, 26 nt, Homo Sapiens
gaugcugcagcuuuucauugggacgg

SEQ ID NO: 280864 - RNA, 32 nt, Homo Sapiens
uagguucaggguggaccuuuaugucuugucaa

SEQ ID NO: 280865 - RNA, 32 nt, Homo Sapiens
cucaaggcccaucuuuugccucaugguagccu

SEQ ID NO: 280866 - RNA, 32 nt, Homo Sapiens
ucacuuugaacaaaccacuuugcccaaccuga

SEQ ID NO: 280867 - RNA, 32 nt, Homo Sapiens
augcaccuggaugcaugaaaagaugaauaagu

SEQ ID NO: 280868 - RNA, 32 nt, Homo Sapiens
uuguuuucuaccuccaaaaaauguagcuuauu

SEQ ID NO: 280869 - RNA, 32 nt, Homo Sapiens
cauugaaugaauuaauuauaggcgauaaaaau

SEQ ID NO: 280870 - RNA, 32 nt, Homo Sapiens
uuccuuguucuucccuucucuucacuagucua

SEQ ID NO: 280871 - RNA, 32 nt, Homo Sapiens
uuucauaaagauugcuuuuugcuauuuuugaa

SEQ ID NO: 280872 - RNA, 32 nt, Homo Sapiens
gguaaaucaaaaaggggaaaagagauuacaga

SEQ ID NO: 280873 - RNA, 32 nt, Homo Sapiens
gugccagcuccauagugacuucuccaccaagc

SEQ ID NO: 280874 - RNA, 32 nt, Homo Sapiens
ccugcugccccagcugacuguggcccccuccg

SEQ ID NO: 280875 - RNA, 32 nt, Homo Sapiens
ggaaugaggaaccucggucuuugaguuauggg

SEQ ID NO: 280876 - RNA, 32 nt, Homo Sapiens
uaaagaaagcaucuuguauauuaaaaaucaaa

SEQ ID NO: 280877 - RNA, 32 nt, Homo Sapiens
gagcgagacuccaucucaaaaaaaaaaaagag

SEQ ID NO: 280878 - RNA, 32 nt, Homo Sapiens
cuuucuuuuccuauuucuuuuuuuuaaggguu

SEQ ID NO: 280879 - RNA, 32 nt, Homo Sapiens
uuugaaacuauauuaguaaacaaacuaaagaa

SEQ ID NO: 280880 - RNA, 32 nt, Homo Sapiens
gggaaggccuccccggcucucggcaccugcuu

SEQ ID NO: 280881 - RNA, 32 nt, Homo Sapiens
aaaguugggcacucuuuuuuguaccgcguuug

SEQ ID NO: 280882 - RNA, 32 nt, Homo Sapiens
gcuucugaagccagugggggcuccucagauag

SEQ ID NO: 280883 - RNA, 32 nt, Homo Sapiens
cuguggccaccacuuccccaguccccaacccu

SEQ ID NO: 280884 - RNA, 32 nt, Homo Sapiens
agacuugccugggcaauguagcaagaccccau

SEQ ID NO: 280885 - RNA, 32 nt, Homo Sapiens
cgucuauauauucuaagaauguauguuuuucu

SEQ ID NO: 280886 - RNA, 32 nt, Homo Sapiens
gcgauggcaaaguggauaaagccuggucccug

SEQ ID NO: 280887 - RNA, 27 nt, Homo Sapiens
aaacugaaacaaaacagcagcaauaau

SEQ ID NO: 280888 - RNA, 32 nt, Homo Sapiens
uuuggugguacaaauuuaucggguggagggau

SEQ ID NO: 280889 - RNA, 32 nt, Homo Sapiens
uggucaaacugggucugcacuugaggguggag

SEQ ID NO: 280890 - RNA, 32 nt, Homo Sapiens
uuucauaaacuccccuaaaccacacacaggag

SEQ ID NO: 280891 - RNA, 32 nt, Homo Sapiens
ucuuuugaacauuuugccccacuacacuguuu

SEQ ID NO: 280892 - RNA, 32 nt, Homo Sapiens
gcccagaaagaaaagaggcucucagcagaaag

SEQ ID NO: 280893 - RNA, 32 nt, Homo Sapiens
ucuccaccccuacacaaggacagaacccucca

SEQ ID NO: 280894 - RNA, 32 nt, Homo Sapiens
cuccagcucgggguuuaggggcugggacacuc

SEQ ID NO: 280895 - RNA, 32 nt, Homo Sapiens
acauggagaaaguugggaagguuugugcugac

SEQ ID NO: 280896 - RNA, 32 nt, Homo Sapiens
caggccuguacuuugugaagcuuucagcuguc

SEQ ID NO: 280897 - RNA, 32 nt, Homo Sapiens
gguauuuuuggugcugauacaagagaaaugua

SEQ ID NO: 280898 - RNA, 32 nt, Homo Sapiens
gaggugagauauggcagcuguuuguaucugca

SEQ ID NO: 280899 - RNA, 32 nt, Homo Sapiens
aaagggcuccugaagcagcugcagccgagcgg

SEQ ID NO: 280900 - RNA, 32 nt, Homo Sapiens
ugagaaagugugugcauaaauauuuuaaggua

SEQ ID NO: 280901 - RNA, 32 nt, Homo Sapiens
aaccuguccugucugacacgucucacagccuu

SEQ ID NO: 280902 - RNA, 32 nt, Homo Sapiens
aagcuuuuuuuaucuucaguuccuaaaauaua

SEQ ID NO: 280903 - RNA, 32 nt, Homo Sapiens
agcugcccggccccccucuacuggccauuguc

SEQ ID NO: 280904 - RNA, 32 nt, Homo Sapiens
aacacaaagacaaagacaaaugguucuugggu

SEQ ID NO: 280905 - RNA, 32 nt, Homo Sapiens
ccauauuuuaaaucaacuacuccacguguuuu

SEQ ID NO: 280906 - RNA, 32 nt, Homo Sapiens
uuacuagauuggguuucuuuuaugugugggcu

SEQ ID NO: 280907 - RNA, 32 nt, Homo Sapiens
gguaaagauugugaguaaaugacauuuuuugg

SEQ ID NO: 280908 - RNA, 32 nt, Homo Sapiens
aaacagaaaaagacaaaguugauggaaaaaca

SEQ ID NO: 280909 - RNA, 32 nt, Homo Sapiens
acauuaaaaauaacccuagauauacuuuaaaa

SEQ ID NO: 280910 - RNA, 32 nt, Homo Sapiens
uuaguguuuaugccucuguaucuacaaccgga

SEQ ID NO: 280911 - RNA, 31 nt, Homo Sapiens
uggauguuugccugguccgugagaugccgcg

SEQ ID NO: 280912 - RNA, 32 nt, Homo Sapiens
ggcguucaagaccauggagaagacaacuccuc

SEQ ID NO: 280913 - RNA, 32 nt, Homo Sapiens
gcagcgcggcgcgacccggcgggcgggcucug

SEQ ID NO: 280914 - RNA, 32 nt, Homo Sapiens
aacauaaagguaaaacaaaacaaaacaacauu

SEQ ID NO: 280915 - RNA, 32 nt, Homo Sapiens
cauugccugcggucaaggccagcaagguggag

SEQ ID NO: 280916 - RNA, 32 nt, Homo Sapiens
ggcugggcgcgguggugcaugccugugauccc

SEQ ID NO: 280917 - RNA, 29 nt, Homo Sapiens
cacacauaaaguuuguuuccuguggcauu

SEQ ID NO: 280918 - RNA, 32 nt, Homo Sapiens
cccacugccccuuccccuuuucuggggagcac

SEQ ID NO: 280919 - RNA, 32 nt, Homo Sapiens
uagccgucuuguguuucuuguuuacuucacaa

SEQ ID NO: 280920 - RNA, 32 nt, Homo Sapiens
uuuaccaaaaauauccagagguuacuggaguu

SEQ ID NO: 280921 - RNA, 32 nt, Homo Sapiens
ugucaaaauaacaugaaaagguagauggaguu

SEQ ID NO: 280922 - RNA, 32 nt, Homo Sapiens
gcuggguccggcuuugccucauccccuguauc

SEQ ID NO: 280923 - RNA, 32 nt, Homo Sapiens
agcccccugccagcucaccgugcccagccucc

SEQ ID NO: 280924 - RNA, 32 nt, Homo Sapiens
uuuagagccauccuuguuuccaaauaugaccc

SEQ ID NO: 280925 - RNA, 32 nt, Homo Sapiens
aggccgcgcccuccccgcccugaggugggggc

SEQ ID NO: 280926 - RNA, 32 nt, Homo Sapiens
guccccuacccucuccauuccccaggcuccac

SEQ ID NO: 280927 - RNA, 32 nt, Homo Sapiens
cgucuucuaucuucuuuucuugccucccugac

SEQ ID NO: 280928 - RNA, 32 nt, Homo Sapiens
aaagggccuuguuuuccaaucaccgacugucc

SEQ ID NO: 280929 - RNA, 32 nt, Homo Sapiens
aagauauucucuauguuuuguaaguaaaaaca

SEQ ID NO: 280930 - RNA, 32 nt, Homo Sapiens
aagaggagccccagcgccccgguuugcaaagc

SEQ ID NO: 280931 - RNA, 29 nt, Homo Sapiens
cucugugucauggagugaaauucuuguuu

SEQ ID NO: 280932 - RNA, 32 nt, Homo Sapiens
ugggagucuucagacugguuugccugaaucuu

SEQ ID NO: 280933 - RNA, 32 nt, Homo Sapiens
guguggagggagggagggaggggagcauggug

SEQ ID NO: 280934 - RNA, 32 nt, Homo Sapiens
gaaggaaggggaggacagacguucacacugcc

SEQ ID NO: 280935 - RNA, 32 nt, Homo Sapiens
cuaccuuccuuccugccgcaccuucugcccca

SEQ ID NO: 280936 - RNA, 30 nt, Homo Sapiens
agccuagaucugaugggggaagccaccagg

SEQ ID NO: 280937 - RNA, 32 nt, Homo Sapiens
ugguuuugggucuggcuuuuagcagggccaau

SEQ ID NO: 280938 - RNA, 32 nt, Homo Sapiens
aggaggagcuaguaggaauguacaugaagcaa

SEQ ID NO: 280939 - RNA, 32 nt, Homo Sapiens
uaugcaggccucuggagcuaggaugaccgccu

SEQ ID NO: 280940 - RNA, 32 nt, Homo Sapiens
aucagacuccaccgugugcaugugcaucaaug

SEQ ID NO: 280941 - RNA, 32 nt, Homo Sapiens
acaaacaaaaucauuuaccuaacuuuagugcu

SEQ ID NO: 280942 - RNA, 32 nt, Homo Sapiens
gcucaguucuaccuuuuaucugacacauuauu

SEQ ID NO: 280943 - RNA, 32 nt, Homo Sapiens
aauuugacugaauaucuggauggcuaagaaca

SEQ ID NO: 280944 - RNA, 32 nt, Homo Sapiens
aucucccacucugcccuucucuggcaaaucga

SEQ ID NO: 280945 - RNA, 32 nt, Homo Sapiens
ccucuuuuccuuucuuuuucugugucuugucu

SEQ ID NO: 280946 - RNA, 32 nt, Homo Sapiens
cuggcguugagcucggccggcccggagcgcgg

SEQ ID NO: 280947 - RNA, 32 nt, Homo Sapiens
agaugagcugggcagggcagggguggguggag

SEQ ID NO: 280948 - RNA, 32 nt, Homo Sapiens
uaccugcccucccugccuuccccaggguuccu

SEQ ID NO: 280949 - RNA, 32 nt, Homo Sapiens
cgcgccgccccgagcuggagggccuggcuccc

SEQ ID NO: 280950 - RNA, 32 nt, Homo Sapiens
gggcgggaggauguucugggacacaguucaau

SEQ ID NO: 280951 - RNA, 32 nt, Homo Sapiens
uuugauuaccugauaaugauuauuuaaacauu

SEQ ID NO: 280952 - RNA, 29 nt, Homo Sapiens
ggaaugugauguauguagccaaggccgcc

SEQ ID NO: 280953 - RNA, 32 nt, Homo Sapiens
cccgcgcuugcguaguggcgccgcccugaugu

SEQ ID NO: 280954 - RNA, 32 nt, Homo Sapiens
aauguaucauauauuucaaaauuuugaaaaua

SEQ ID NO: 280955 - RNA, 32 nt, Homo Sapiens
agcccaggcuccagcccugagugcuuccgagc

SEQ ID NO: 280956 - RNA, 32 nt, Homo Sapiens
cacaguuaaucgggaagaaaagaaauauguac

SEQ ID NO: 280957 - RNA, 32 nt, Homo Sapiens
uuucuuuacuuugcuuauauucuuauaagcau

SEQ ID NO: 280958 - RNA, 32 nt, Homo Sapiens
ugggugcaagagugaaaggcgagaggggacug

SEQ ID NO: 280959 - RNA, 32 nt, Homo Sapiens
uaaauuuccagaauggagaucuccucucauca

SEQ ID NO: 280960 - RNA, 32 nt, Homo Sapiens
ugaaaggcaucacugcccuucaggaauccaac

SEQ ID NO: 280961 - RNA, 32 nt, Homo Sapiens
acagagggaaacugaggccagcagaaaggaug

SEQ ID NO: 280962 - RNA, 32 nt, Homo Sapiens
uauuucacgcaucaaccuuuggcacuuacaaa

SEQ ID NO: 280963 - RNA, 32 nt, Homo Sapiens
ggcauguagacuggcaccuugaagauucacca

SEQ ID NO: 280964 - RNA, 32 nt, Homo Sapiens
cccgcugucaucuggagccgcuccugccgccc

SEQ ID NO: 280965 - RNA, 32 nt, Homo Sapiens
uggcuccaaccaaccccuccccugccuccacc

SEQ ID NO: 280966 - RNA, 32 nt, Homo Sapiens
uauagaaagauuucugccuguuuggacaauag

SEQ ID NO: 280967 - RNA, 32 nt, Homo Sapiens
uaugaugacuggauuuugaauuuuguggaacg

SEQ ID NO: 280968 - RNA, 29 nt, Homo Sapiens
gcucaugugacuuggaggcaggauccagg

SEQ ID NO: 280969 - RNA, 32 nt, Homo Sapiens
caaaaauguaaaauaaaauuagccagguaugg

SEQ ID NO: 280970 - RNA, 32 nt, Homo Sapiens
cacaaacacagaucacaggggccuuacaaagu

SEQ ID NO: 280971 - RNA, 32 nt, Homo Sapiens
ucgucgaggagcugcgcucaccucaggggcgg

SEQ ID NO: 280972 - RNA, 32 nt, Homo Sapiens
ccaagugccaauauuucugauauaacaaacua

SEQ ID NO: 280973 - RNA, 31 nt, Homo Sapiens
aucagcucuugaccagcucaagauugagaau

SEQ ID NO: 280974 - RNA, 32 nt, Homo Sapiens
uauuagagcaccugguccuuaauacaauuuuc

SEQ ID NO: 280975 - RNA, 32 nt, Homo Sapiens
cccuggagaggccgaggcucuaggccgcgagg

SEQ ID NO: 280976 - RNA, 32 nt, Homo Sapiens
cacagcugacugcagccuugaccuccagggcu

SEQ ID NO: 280977 - RNA, 32 nt, Homo Sapiens
auuguagaugcugauuugauaauuguuuccua

SEQ ID NO: 280978 - RNA, 32 nt, Homo Sapiens
cuucauuuugucuauuugcuguugauuguacc

SEQ ID NO: 280979 - RNA, 32 nt, Homo Sapiens
cgagagagccgcgucgggagugcggucuccau

SEQ ID NO: 280980 - RNA, 32 nt, Homo Sapiens
gcccaaggucgcggcugggccagcgcugagcg

SEQ ID NO: 280981 - RNA, 32 nt, Homo Sapiens
ccacauacuuacugccuuuuguggaaauucac

SEQ ID NO: 280982 - RNA, 32 nt, Homo Sapiens
auuucucucccuccccuaauuucugagguugg

SEQ ID NO: 280983 - RNA, 30 nt, Homo Sapiens
cagagggucugugcuugggaggcugagcga

SEQ ID NO: 280984 - RNA, 32 nt, Homo Sapiens
aucuccaaugugcuuucuaaucuccugccagc

SEQ ID NO: 280985 - RNA, 32 nt, Homo Sapiens
aagcuugguuggugcuuucgcuuuugugcuac

SEQ ID NO: 280986 - RNA, 32 nt, Homo Sapiens
ucgccaauugguccaacuuuucccuccucccu

SEQ ID NO: 280987 - RNA, 32 nt, Homo Sapiens
gaaaacccacugacuuuggaaaucucaccucu

SEQ ID NO: 280988 - RNA, 32 nt, Homo Sapiens
acccuccaagguggacucaaguuuucagcucc

SEQ ID NO: 280989 - RNA, 32 nt, Homo Sapiens
agcucugggugggaggccgccgcccgccuucg

SEQ ID NO: 280990 - RNA, 32 nt, Homo Sapiens
accccagugucugugguuuccuucuuuguguu

SEQ ID NO: 280991 - RNA, 32 nt, Homo Sapiens
uacuggggaagggcugggcgcuuuuccuggaa

SEQ ID NO: 280992 - RNA, 32 nt, Homo Sapiens
uuuucaauuuccccucuucuccuuuauugauc

SEQ ID NO: 280993 - RNA, 32 nt, Homo Sapiens
ccaaagucugaccccugaggcugcccagaggg

SEQ ID NO: 280994 - RNA, 32 nt, Homo Sapiens
aaaugaguaagaauucaucauuuuuuccaucu

SEQ ID NO: 280995 - RNA, 32 nt, Homo Sapiens
gccccaggcagcgugugucggucgccuagucu

SEQ ID NO: 280996 - RNA, 32 nt, Homo Sapiens
aagcaggcuuuuaucuggcccgaggcucccag

SEQ ID NO: 280997 - RNA, 27 nt, Homo Sapiens
ccuucccacuucuucagcccaccugcc

SEQ ID NO: 280998 - RNA, 32 nt, Homo Sapiens
ucgcaccccagccgcccggcccgcgaccaggc

SEQ ID NO: 280999 - RNA, 32 nt, Homo Sapiens
cgugacccccgcggcccgggccgcucuuugca

SEQ ID NO: 281000 - RNA, 30 nt, Homo Sapiens
gguccgcucauggugccgccacgacgccau

SEQ ID NO: 281001 - RNA, 32 nt, Homo Sapiens
gcugccauuuggguaagccgguggcuggucuc

SEQ ID NO: 281002 - RNA, 32 nt, Homo Sapiens
aauuagccgggugugguggcgcgugccuauaa

SEQ ID NO: 281003 - RNA, 32 nt, Homo Sapiens
cuuuuuguucuucaucuaagccuucugguuuu

SEQ ID NO: 281004 - RNA, 32 nt, Homo Sapiens
gcuucaacaugggaaagggaaaugaagacccc

SEQ ID NO: 281005 - RNA, 32 nt, Homo Sapiens
uagaaguauuucugaacauaucaaauauaaau

SEQ ID NO: 281006 - RNA, 32 nt, Homo Sapiens
augggaaaugaaagaaagagauaugggaaacu

SEQ ID NO: 281007 - RNA, 32 nt, Homo Sapiens
ggccuuauuucugcaccaugaaauuaaaauca

SEQ ID NO: 281008 - RNA, 32 nt, Homo Sapiens
aggcaucccuucccuucccuggagcugcccug

SEQ ID NO: 281009 - RNA, 32 nt, Homo Sapiens
ugcgauuggcugagaggcucugacguccgugu

SEQ ID NO: 281010 - RNA, 32 nt, Homo Sapiens
gaauauaauauuugaagcagcucugccuucuu

SEQ ID NO: 281011 - RNA, 32 nt, Homo Sapiens
uaauuauaauuucuuacuaagcuaaguuguau

SEQ ID NO: 281012 - RNA, 32 nt, Homo Sapiens
aaaauaaaaaauuuaaaauucauagcaaaaaa

SEQ ID NO: 281013 - RNA, 28 nt, Homo Sapiens
ugauuguugucuaaucccuguaaacauu

SEQ ID NO: 281014 - RNA, 32 nt, Homo Sapiens
gcacaugcaaguauaccacccuuccauuuagu

SEQ ID NO: 281015 - RNA, 32 nt, Homo Sapiens
gucucaggaaguggggcccacccauucccaga

SEQ ID NO: 281016 - RNA, 32 nt, Homo Sapiens
ugcacacaaguaaaaagggaaaaaauauguac

SEQ ID NO: 281017 - RNA, 32 nt, Homo Sapiens
ccagccagccucagccuugagcuuuggaacca

SEQ ID NO: 281018 - RNA, 32 nt, Homo Sapiens
cgagcaugaauuaacucuucaauauaagcuau

SEQ ID NO: 281019 - RNA, 30 nt, Homo Sapiens
cucucauuggcuccuucccaucuuaguacc

SEQ ID NO: 281020 - RNA, 32 nt, Homo Sapiens
uuaguacaggaaccacguguguaauguuauac

SEQ ID NO: 281021 - RNA, 32 nt, Homo Sapiens
uuucaaauaauggaagagucuaaaaccuuaaa

SEQ ID NO: 281022 - RNA, 32 nt, Homo Sapiens
uaguggugguggccagcgugcagugagcuggc

SEQ ID NO: 281023 - RNA, 32 nt, Homo Sapiens
cuguuuuuaaacaaucguuuuugagcagauag

SEQ ID NO: 281024 - RNA, 32 nt, Homo Sapiens
auuuauggaaaucuauuuuaaaaauuuuaugu

SEQ ID NO: 281025 - RNA, 32 nt, Homo Sapiens
gcaguugcugugguaccugcgcugcccgagcg

SEQ ID NO: 281026 - RNA, 32 nt, Homo Sapiens
ggcucugggugcggagacccaggcggggcugg

SEQ ID NO: 281027 - RNA, 32 nt, Homo Sapiens
gcucccggggcguuugagcgggcucacccgag

SEQ ID NO: 281028 - RNA, 32 nt, Homo Sapiens
acaaugaagauaauucacaauucaaagaucac

SEQ ID NO: 281029 - RNA, 32 nt, Homo Sapiens
uaaaucaauuuaagccauuaauagguuuauaa

SEQ ID NO: 281030 - RNA, 29 nt, Homo Sapiens
ggaaguucugcugucagaggcaaaacauc

SEQ ID NO: 281031 - RNA, 32 nt, Homo Sapiens
gcuggggucgccccggccacacccuuggucuc

SEQ ID NO: 281032 - RNA, 32 nt, Homo Sapiens
uccaccugcagcagccgagauucccgacucgc

SEQ ID NO: 281033 - RNA, 32 nt, Homo Sapiens
uuguaacuauuucugcaagucuguaaagauuu

SEQ ID NO: 281034 - RNA, 28 nt, Homo Sapiens
cccauggcaaggaaacaaaauaggaauu

SEQ ID NO: 281035 - RNA, 32 nt, Homo Sapiens
ugcuuucugagaacucuaucaccagauggcag

SEQ ID NO: 281036 - RNA, 32 nt, Homo Sapiens
agcaagaagauaauuuuauagaagccaugccu

SEQ ID NO: 281037 - RNA, 32 nt, Homo Sapiens
caaccucagccccaccugggaauucgcuggaa

SEQ ID NO: 281038 - RNA, 32 nt, Homo Sapiens
gagcagcagcgggacuggccgccccgcgcccc

SEQ ID NO: 281039 - RNA, 32 nt, Homo Sapiens
auacuugaauucuggcugugguguaaacagcu

SEQ ID NO: 281040 - RNA, 32 nt, Homo Sapiens
cuaugaaagagaaaacacuaaucuuaaauuau

SEQ ID NO: 281041 - RNA, 32 nt, Homo Sapiens
acuagcgcgggcccguugcggcugcaggcacc

SEQ ID NO: 281042 - RNA, 32 nt, Homo Sapiens
cacccucgcucucacacccccuccagcuuucc

SEQ ID NO: 281043 - RNA, 32 nt, Homo Sapiens
ggcgcguggaggaggagaaggagcgcgcgcug

SEQ ID NO: 281044 - RNA, 32 nt, Homo Sapiens
acagauaaugaaaguuuaaccacaacucaaag

SEQ ID NO: 281045 - RNA, 32 nt, Homo Sapiens
uuucuuuggugcccuccccucaccccacugua

SEQ ID NO: 281046 - RNA, 32 nt, Homo Sapiens
cgccaagagcggcugcgccuggucucuggccc

SEQ ID NO: 281047 - RNA, 32 nt, Homo Sapiens
cuaggcuucagcauauuuauagcaauccaugu

SEQ ID NO: 281048 - RNA, 32 nt, Homo Sapiens
gaggcgugaaccgcggaccaugagcgugggcu

SEQ ID NO: 281049 - RNA, 32 nt, Homo Sapiens
aagcgauucuucugcuucagccucccgaguag

SEQ ID NO: 281050 - RNA, 32 nt, Homo Sapiens
agagugugcggcuccaggugggcucacgcggu

SEQ ID NO: 281051 - RNA, 32 nt, Homo Sapiens
cuucggaggcgcgggcccgacggaaaccaugu

SEQ ID NO: 281052 - RNA, 32 nt, Homo Sapiens
gaacacaggugucgugaaaacuaccccuaaaa

SEQ ID NO: 281053 - RNA, 32 nt, Homo Sapiens
uuuccuagcggcccccaccuccccacuucccg

SEQ ID NO: 281054 - RNA, 32 nt, Homo Sapiens
ucuggagauggcaaaauccucuaaaaugucga

SEQ ID NO: 281055 - RNA, 32 nt, Homo Sapiens
caugucucuguugagaaauuuauuuaauguaa

SEQ ID NO: 281056 - RNA, 32 nt, Homo Sapiens
ccccggccgccgcgaccaccagccgcgcuaac

SEQ ID NO: 281057 - RNA, 32 nt, Homo Sapiens
gauccgacgcgcccgggugaggucugccugua

SEQ ID NO: 281058 - RNA, 32 nt, Homo Sapiens
gccgcagagggcagccagggcuggggaacacu

SEQ ID NO: 281059 - RNA, 32 nt, Homo Sapiens
ggagggcgcggcagccccagcucuaccgcguc

SEQ ID NO: 281060 - RNA, 32 nt, Homo Sapiens
gugcagggccuggccagagcgggccuggccac

SEQ ID NO: 281061 - RNA, 32 nt, Homo Sapiens
cuuccagugcuaaaggcugccuaugauacuca

SEQ ID NO: 281062 - RNA, 32 nt, Homo Sapiens
gacaggggaaagggucugugcgugggcaaagc

SEQ ID NO: 281063 - RNA, 32 nt, Homo Sapiens
cuggcaggucucugccaccuccuucucuguga

SEQ ID NO: 281064 - RNA, 32 nt, Homo Sapiens
ucccucccgcggcgaccagggcccgagccgag

SEQ ID NO: 281065 - RNA, 32 nt, Homo Sapiens
ucagcccuguccuggccacgggccgcuggggc

SEQ ID NO: 281066 - RNA, 32 nt, Homo Sapiens
cggcugcugggcgaccuuucccgggaaggagg

SEQ ID NO: 281067 - RNA, 32 nt, Homo Sapiens
auuuuuaaaugauuuuuaaaguuuacacugua

SEQ ID NO: 281068 - RNA, 32 nt, Homo Sapiens
uuguuuuguguuauuguuuuuacaauuuuuau

SEQ ID NO: 281069 - RNA, 32 nt, Homo Sapiens
uguuuuacaaagaaacaaaauauaaaucacag

SEQ ID NO: 281070 - RNA, 32 nt, Homo Sapiens
gaaaugugugggaaaaagaaaacaaaaacuuu

SEQ ID NO: 281071 - RNA, 32 nt, Homo Sapiens
guggggcuggggugggcgggggaggcugggcc

SEQ ID NO: 281072 - RNA, 32 nt, Homo Sapiens
acauuguacuguaucugauuucugugccaguc

SEQ ID NO: 281073 - RNA, 32 nt, Homo Sapiens
ggcaaagcgggaggaggcacaucacauagcaa

SEQ ID NO: 281074 - RNA, 32 nt, Homo Sapiens
gucuaacgucucacaccacgacggacuccccu

SEQ ID NO: 281075 - RNA, 31 nt, Homo Sapiens
guaauuuauccggucgcuucgggcauuccuc

SEQ ID NO: 281076 - RNA, 32 nt, Homo Sapiens
cauguaauuaguuuacagauuguagggcauca

SEQ ID NO: 281077 - RNA, 32 nt, Homo Sapiens
ugcaaauacugauuuuuuacaaguugaagauu

SEQ ID NO: 281078 - RNA, 32 nt, Homo Sapiens
ccuucgccugcgccugcccuugccccacuccu

SEQ ID NO: 281079 - RNA, 32 nt, Homo Sapiens
uuuauauguauauagauauauuuggcuuauau

SEQ ID NO: 281080 - RNA, 32 nt, Homo Sapiens
ugccaaccuauuuauccucuccaugugucuuc

SEQ ID NO: 281081 - RNA, 32 nt, Homo Sapiens
guagucuguaccauuuuccagacccugaggaa

SEQ ID NO: 281082 - RNA, 32 nt, Homo Sapiens
uuggaaaaagcacgggguccugcuccagggaa

SEQ ID NO: 281083 - RNA, 32 nt, Homo Sapiens
cggguucuccugggcuggcccgggcugcccca

SEQ ID NO: 281084 - RNA, 32 nt, Homo Sapiens
cugugucuccgcccugcccccaggcgccccag

SEQ ID NO: 281085 - RNA, 32 nt, Homo Sapiens
cccaaggaauggggcugguccagguuuugaug

SEQ ID NO: 281086 - RNA, 32 nt, Homo Sapiens
uaccuuagagaaagauuuugaccuggcuuuag

SEQ ID NO: 281087 - RNA, 32 nt, Homo Sapiens
caucagccgacagcugcacgguccccgccucu

SEQ ID NO: 281088 - RNA, 32 nt, Homo Sapiens
auuuguaaacacaaugauaagcaaauucaaaa

SEQ ID NO: 281089 - RNA, 32 nt, Homo Sapiens
uagcugggcgugauggugggcgccuguagucc

SEQ ID NO: 281090 - RNA, 32 nt, Homo Sapiens
uagcugggcgugguggugggcgccuguaaucc

SEQ ID NO: 281091 - RNA, 32 nt, Homo Sapiens
ucaccaacagugccgacggcggugcuacugcc

SEQ ID NO: 281092 - RNA, 32 nt, Homo Sapiens
cccccagaucuucccucugugcucccugccac

SEQ ID NO: 281093 - RNA, 32 nt, Homo Sapiens
cauagaaguauuuacgaaauugcauuucauug

SEQ ID NO: 281094 - RNA, 32 nt, Homo Sapiens
auuaaguagauauaaagugauuuaaaagacag

SEQ ID NO: 281095 - RNA, 32 nt, Homo Sapiens
aaaacacaagauaaacagccccaggaaccugc

SEQ ID NO: 281096 - RNA, 32 nt, Homo Sapiens
gaaaccuuuuagguuaccuccagccgcugcca

SEQ ID NO: 281097 - RNA, 32 nt, Homo Sapiens
aucaauuuaaacaacuaucuaugcaugaaaau

SEQ ID NO: 281098 - RNA, 32 nt, Homo Sapiens
aucuuagggaaaagauguucucguccguggcg

SEQ ID NO: 281099 - RNA, 32 nt, Homo Sapiens
gaccgccgccgggaccccgagucgcgcacccc

SEQ ID NO: 281100 - RNA, 32 nt, Homo Sapiens
cggggcguaucgaggcugcugcuggcugugaa

SEQ ID NO: 281101 - RNA, 32 nt, Homo Sapiens
ucucaucauccuccagagagaaaauaggccgu

SEQ ID NO: 281102 - RNA, 32 nt, Homo Sapiens
uguggacuuaaaccuuggcacugguggggaau

SEQ ID NO: 281103 - RNA, 32 nt, Homo Sapiens
gcuggggcacggucccagggccccaccuaggu

SEQ ID NO: 281104 - RNA, 32 nt, Homo Sapiens
gaggaggcgcagcucccgcugcaccgcgaucg

SEQ ID NO: 281105 - RNA, 32 nt, Homo Sapiens
caaccuguguggggucuucuucgggccucccu

SEQ ID NO: 281106 - RNA, 32 nt, Homo Sapiens
gaaauuguugaaaauaaauguauuuuuguaca

SEQ ID NO: 281107 - RNA, 32 nt, Homo Sapiens
agccugaagaccuggugaaaguugucuuguga

SEQ ID NO: 281108 - RNA, 32 nt, Homo Sapiens
auauuaugauauagccauuuaauaacauugau

SEQ ID NO: 281109 - RNA, 32 nt, Homo Sapiens
acaguggcccucagcccuccaccuccggcggg

SEQ ID NO: 281110 - RNA, 32 nt, Homo Sapiens
cacuguccauucucuugucugcuaaauuaagc

SEQ ID NO: 281111 - RNA, 32 nt, Homo Sapiens
gccuacauggggucugucauuuuuuagcagau

SEQ ID NO: 281112 - RNA, 32 nt, Homo Sapiens
gaaagcugcccggcuccccacgguggcccugc

SEQ ID NO: 281113 - RNA, 32 nt, Homo Sapiens
gcccgcaaguugcaggucauggcgcuggcugc

SEQ ID NO: 281114 - RNA, 32 nt, Homo Sapiens
agaagauuuaggaugccuccuucuaagaacug

SEQ ID NO: 281115 - RNA, 32 nt, Homo Sapiens
cagacauccccagacuccacagauguaaugaa

SEQ ID NO: 281116 - RNA, 32 nt, Homo Sapiens
gacaguguagaaccugcggccucgauguccuu

SEQ ID NO: 281117 - RNA, 32 nt, Homo Sapiens
gccucuccucagcccacccccacccugugugg

SEQ ID NO: 281118 - RNA, 32 nt, Homo Sapiens
uuccucggauccacaauuaaagaauuaacagc

SEQ ID NO: 281119 - RNA, 32 nt, Homo Sapiens
auaaguauuggaaugcuuccuauuugcugaua

SEQ ID NO: 281120 - RNA, 32 nt, Homo Sapiens
aguggaagcuugcacggugggccacggccgug

SEQ ID NO: 281121 - RNA, 32 nt, Homo Sapiens
guauuuauuuuacagcucauuaaacuuuuuua

SEQ ID NO: 281122 - RNA, 32 nt, Homo Sapiens
uagauuuuaguggcuuuucuauucuugaucuc

SEQ ID NO: 281123 - RNA, 32 nt, Homo Sapiens
aaagaugauuuaaauaugaaucuuaugaguaa

SEQ ID NO: 281124 - RNA, 32 nt, Homo Sapiens
caccggccucucggcgucccaguccggucccg

SEQ ID NO: 281125 - RNA, 32 nt, Homo Sapiens
gagucugccgaagccggcuguugugugagggu

SEQ ID NO: 281126 - RNA, 32 nt, Homo Sapiens
aacagaagagauaaaaacuuuuccaugcaaau

SEQ ID NO: 281127 - RNA, 32 nt, Homo Sapiens
uuuaagcuauauaaaaaggugaggaagcaguu

SEQ ID NO: 281128 - RNA, 32 nt, Homo Sapiens
uaugacugguacauuuaugacuuuguaugaau

SEQ ID NO: 281129 - RNA, 29 nt, Homo Sapiens
agacucauagugagcacaaggaaaguuuu

SEQ ID NO: 281130 - RNA, 32 nt, Homo Sapiens
gucuccugguccggaaugguugauggagacuc

SEQ ID NO: 281131 - RNA, 32 nt, Homo Sapiens
aggccugggaggaggcaggggggcugggcgug

SEQ ID NO: 281132 - RNA, 32 nt, Homo Sapiens
gugcugagaucucuccuucucgaacccugcua

SEQ ID NO: 281133 - RNA, 32 nt, Homo Sapiens
gcaaggccacaugggcugaugcagcuuugagu

SEQ ID NO: 281134 - RNA, 32 nt, Homo Sapiens
uaugaguacgauuucaauagacuguucaguuu

SEQ ID NO: 281135 - RNA, 32 nt, Homo Sapiens
uuaacaauucaauugcauauaauagccuaacu

SEQ ID NO: 281136 - RNA, 32 nt, Homo Sapiens
agcuuccaguggcuucuuucugcggggcauca

SEQ ID NO: 281137 - RNA, 32 nt, Homo Sapiens
uuaagaguacaauugcaaaucuuaucuauaua

SEQ ID NO: 281138 - RNA, 32 nt, Homo Sapiens
acaagugacauaacagaagaaaaauaucauuc

SEQ ID NO: 281139 - RNA, 32 nt, Homo Sapiens
cccaggacugcugcuggagccuggacacgucc

SEQ ID NO: 281140 - RNA, 32 nt, Homo Sapiens
gccgccuccgccagcccucccucccacacugc

SEQ ID NO: 281141 - RNA, 32 nt, Homo Sapiens
cuuucucuugcuuuuucuuucuuucucuuucu

SEQ ID NO: 281142 - RNA, 32 nt, Homo Sapiens
acuuacguuaauguaauuauuaauauguuagg

SEQ ID NO: 281143 - RNA, 32 nt, Homo Sapiens
cugcaaaagagaacaagaguagucuuuaccuu

SEQ ID NO: 281144 - RNA, 32 nt, Homo Sapiens
gaaacaggucugggcuacaaaaguauggccgc

SEQ ID NO: 281145 - RNA, 32 nt, Homo Sapiens
cuuucccacagugcaaugugaugaaaaccaca

SEQ ID NO: 281146 - RNA, 32 nt, Homo Sapiens
caggauagcagauaaccugcuuugaaagaggg

SEQ ID NO: 281147 - RNA, 32 nt, Homo Sapiens
uucagacauuuguuucugcagaucucggaugc

SEQ ID NO: 281148 - RNA, 32 nt, Homo Sapiens
auaggacaacagaacucucaccaaaggaccag

SEQ ID NO: 281149 - RNA, 32 nt, Homo Sapiens
cgccucuuccuucagcgcgucccacaaauccc

SEQ ID NO: 281150 - RNA, 32 nt, Homo Sapiens
cauguuacacugaguucaugcuccuauuuacu

SEQ ID NO: 281151 - RNA, 32 nt, Homo Sapiens
gagacucgcccggcucaaccccgacguccgcg

SEQ ID NO: 281152 - RNA, 32 nt, Homo Sapiens
gggcuccugccaguuucaugugugccccugga

SEQ ID NO: 281153 - RNA, 32 nt, Homo Sapiens
ggagacagaaagaugcuuucugaagguauccc

SEQ ID NO: 281154 - RNA, 28 nt, Homo Sapiens
aauacuguuacaggauucaugaacuuga

SEQ ID NO: 281155 - RNA, 32 nt, Homo Sapiens
ucaugggagaaaauauaauaagguaaagaggu

SEQ ID NO: 281156 - RNA, 32 nt, Homo Sapiens
ccugauacaaguaguugacagauuucaacuau

SEQ ID NO: 281157 - RNA, 32 nt, Homo Sapiens
agagcagacauuaaacaucuuugugcuuugaa

SEQ ID NO: 281158 - RNA, 32 nt, Homo Sapiens
caaucauuuuuggaaaaguguacuuuaucauu

SEQ ID NO: 281159 - RNA, 32 nt, Homo Sapiens
ugccuugggaauaauggacaaagggaaauacu

SEQ ID NO: 281160 - RNA, 32 nt, Homo Sapiens
ccuauggcucugcgguuccaggagaacuguuu

SEQ ID NO: 281161 - RNA, 32 nt, Homo Sapiens
agaaaaugacauucaucuuuugaguccucauc

SEQ ID NO: 281162 - RNA, 32 nt, Homo Sapiens
ugcuguaguucuucuuuucuggauaugacugu

SEQ ID NO: 281163 - RNA, 32 nt, Homo Sapiens
cacuuucccagugaaaaugauuucauauacau

SEQ ID NO: 281164 - RNA, 32 nt, Homo Sapiens
ugccuguaaucccagcacuuugggaggcugaa

SEQ ID NO: 281165 - RNA, 32 nt, Homo Sapiens
ugccuguaaucccagcacuuuggaaggcugag

SEQ ID NO: 281166 - RNA, 32 nt, Homo Sapiens
guaaauuuuucuccucccuccuccuacaaggu

SEQ ID NO: 281167 - RNA, 31 nt, Homo Sapiens
ggcuucugaaacacuuagacucuggacccag

SEQ ID NO: 281168 - RNA, 32 nt, Homo Sapiens
gcaggggaucuggguuccaagaaggaguugug

SEQ ID NO: 281169 - RNA, 32 nt, Homo Sapiens
cuccgggcucagggcugcgcggcucuucccuu

SEQ ID NO: 281170 - RNA, 32 nt, Homo Sapiens
caaagugaaaauaagauacacaauaaucauug

SEQ ID NO: 281171 - RNA, 32 nt, Homo Sapiens
cuuucugagcacuguagaccaagcccuuggag

SEQ ID NO: 281172 - RNA, 32 nt, Homo Sapiens
gcacaguggccccaucauagccugcagccuca

SEQ ID NO: 281173 - RNA, 32 nt, Homo Sapiens
gugaugaaugcaaaacuuugugaaugugcuuu

SEQ ID NO: 281174 - RNA, 32 nt, Homo Sapiens
aagagauagugggagaggaagcccggucacug

SEQ ID NO: 281175 - RNA, 32 nt, Homo Sapiens
cauuuccugagccccagggcugaauccccccu

SEQ ID NO: 281176 - RNA, 32 nt, Homo Sapiens
gucuguggaagacauggcccgguggggcccca

SEQ ID NO: 281177 - RNA, 32 nt, Homo Sapiens
gcucccagccaucuccucccuguucuggaaga

SEQ ID NO: 281178 - RNA, 32 nt, Homo Sapiens
gcgcgcacucccucucuggcuccuccaguccg

SEQ ID NO: 281179 - RNA, 32 nt, Homo Sapiens
guaggucucagcaacagcgugucccgcugggu

SEQ ID NO: 281180 - RNA, 32 nt, Homo Sapiens
auucuccuucugcugcagacuuuaucuuucaa

SEQ ID NO: 281181 - RNA, 32 nt, Homo Sapiens
gacggaggcccguuuuacauugcauuucucag

SEQ ID NO: 281182 - RNA, 32 nt, Homo Sapiens
aacugugaacaaauaaaaauuuauuguuuugc

SEQ ID NO: 281183 - RNA, 32 nt, Homo Sapiens
ugguaugaugaaauauuccgcauuguaaacag

SEQ ID NO: 281184 - RNA, 32 nt, Homo Sapiens
uccuuuaagaggcccaaguccugggcgcuacu

SEQ ID NO: 281185 - RNA, 32 nt, Homo Sapiens
ggugguguccgggaccccggagaagauuuugg

SEQ ID NO: 281186 - RNA, 32 nt, Homo Sapiens
agcacccaccccacaagccgugcuucauucgu

SEQ ID NO: 281187 - RNA, 32 nt, Homo Sapiens
gucuccccagagcaaagcccaggcccuuggcc

SEQ ID NO: 281188 - RNA, 31 nt, Homo Sapiens
agaugggagcccccauacccaccaaucacaa

SEQ ID NO: 281189 - RNA, 32 nt, Homo Sapiens
uccagaaagcccagggcagagaaaacacaugg

SEQ ID NO: 281190 - RNA, 32 nt, Homo Sapiens
aaauuagcugggugugguggcgugugccugua

SEQ ID NO: 281191 - RNA, 32 nt, Homo Sapiens
cuaguagcccuucagcuggaaacaaagaauaa

SEQ ID NO: 281192 - RNA, 32 nt, Homo Sapiens
uuccucuuaacagauuuuucuaauauccaagg

SEQ ID NO: 281193 - RNA, 32 nt, Homo Sapiens
aguaccucacucaugaaccagaaugcccaacu

SEQ ID NO: 281194 - RNA, 32 nt, Homo Sapiens
cacuuaaaaauauguuuagauuuuucuuucuu

SEQ ID NO: 281195 - RNA, 32 nt, Homo Sapiens
gagaacucugguuucuaggagcuugaaauucc

SEQ ID NO: 281196 - RNA, 32 nt, Homo Sapiens
gcagcugcugucagcauggcccaggcuccugc

SEQ ID NO: 281197 - RNA, 32 nt, Homo Sapiens
gccccuccuccagcccccucugguggcaugcc

SEQ ID NO: 281198 - RNA, 32 nt, Homo Sapiens
agauucugauucaugaagaaaagcagauagaa

SEQ ID NO: 281199 - RNA, 32 nt, Homo Sapiens
ucaaggaaggauucugcuccacccgcugaggg

SEQ ID NO: 281200 - RNA, 30 nt, Homo Sapiens
auagagagaagucuugaugaaacaagauag

SEQ ID NO: 281201 - RNA, 32 nt, Homo Sapiens
aggcccggccggugcgcagagcauggcgggug

SEQ ID NO: 281202 - RNA, 32 nt, Homo Sapiens
ugugcgggagcugugacacggugccuuccccg

SEQ ID NO: 281203 - RNA, 30 nt, Homo Sapiens
uagguugagcugaugggggaaggacacgag

SEQ ID NO: 281204 - RNA, 32 nt, Homo Sapiens
acagcguucuugcgcuugagaccgcugugauu

SEQ ID NO: 281205 - RNA, 32 nt, Homo Sapiens
ccaugcccaagcaagggagauaccagccuggu

SEQ ID NO: 281206 - RNA, 32 nt, Homo Sapiens
gaccaagcauggacgccguggaugccaccaug

SEQ ID NO: 281207 - RNA, 32 nt, Homo Sapiens
cgggaccgaggguggucucuuggacaacccca

SEQ ID NO: 281208 - RNA, 32 nt, Homo Sapiens
cccuggagccugagucagugccaggcaccuug

SEQ ID NO: 281209 - RNA, 32 nt, Homo Sapiens
uccguccccgcggcuggcgcaggaccucacuc

SEQ ID NO: 281210 - RNA, 31 nt, Homo Sapiens
ugagggcuuggcugccugccaccgccaucug

SEQ ID NO: 281211 - RNA, 32 nt, Homo Sapiens
gggaguacgagucagcccuucuccuccccugg

SEQ ID NO: 281212 - RNA, 32 nt, Homo Sapiens
gagcgagggucucgcggcgcggggccuagcgg

SEQ ID NO: 281213 - RNA, 32 nt, Homo Sapiens
ggugccacugucagcuuuucuccaaaaagcag

SEQ ID NO: 281214 - RNA, 32 nt, Homo Sapiens
cgcgcggucccggccccuggcucccagcugcc

SEQ ID NO: 281215 - RNA, 32 nt, Homo Sapiens
gggaggagcagcucuguaaaucugugcacaug

SEQ ID NO: 281216 - RNA, 32 nt, Homo Sapiens
augaggagauccgcggccgccacugggcccca

SEQ ID NO: 281217 - RNA, 32 nt, Homo Sapiens
agccaauuggguccgcugacuccggccggguu

SEQ ID NO: 281218 - RNA, 32 nt, Homo Sapiens
gcccgcgccgacgcggggcccauggccaggac

SEQ ID NO: 281219 - RNA, 32 nt, Homo Sapiens
acgacagcacuacacagcaucuccaggugaug

SEQ ID NO: 281220 - RNA, 32 nt, Homo Sapiens
aggggccuuuguucuggggggacccagugcag

SEQ ID NO: 281221 - RNA, 32 nt, Homo Sapiens
gagguucugguggaguugauugaguccaggcu

SEQ ID NO: 281222 - RNA, 32 nt, Homo Sapiens
uaacuuagugcuagaagucucuccaggcuauu

SEQ ID NO: 281223 - RNA, 32 nt, Homo Sapiens
cugcuuugcucuacaaauaccuggggcagaaa

SEQ ID NO: 281224 - RNA, 32 nt, Homo Sapiens
agucacacaccaaguacagaggcuauguuggu

SEQ ID NO: 281225 - RNA, 32 nt, Homo Sapiens
aaguagacucuguugaaaagaaagaagcuaag

SEQ ID NO: 281226 - RNA, 32 nt, Homo Sapiens
ggaugcuuuccacaaaaugucaccucgcugca

SEQ ID NO: 281227 - RNA, 32 nt, Homo Sapiens
ucaguccccacagauaacugaaaauuauuuaa

SEQ ID NO: 281228 - RNA, 32 nt, Homo Sapiens
aauaaacaauuacauggaauuuucauaggcaa

SEQ ID NO: 281229 - RNA, 32 nt, Homo Sapiens
auagucaauuuuuaguuuuuuauuauacauuu

SEQ ID NO: 281230 - RNA, 32 nt, Homo Sapiens
caaaauaaauguuuaaaucgcuaaaggaaaau

SEQ ID NO: 281231 - RNA, 32 nt, Homo Sapiens
gcuuugugcauaaucauuucucagauucagau

SEQ ID NO: 281232 - RNA, 32 nt, Homo Sapiens
cagaguaauucaauaaauauuaacuaguaaua

SEQ ID NO: 281233 - RNA, 32 nt, Homo Sapiens
cccaugccgagacccaacaggccacagaggac

SEQ ID NO: 281234 - RNA, 32 nt, Homo Sapiens
gaagaugggaaggauguucuuuuuacguacca

SEQ ID NO: 281235 - RNA, 32 nt, Homo Sapiens
aaagcauuaagcauagcgccuggcaguaagug

SEQ ID NO: 281236 - RNA, 32 nt, Homo Sapiens
ugaauuuucuucaucucuguaaauaguucauc

SEQ ID NO: 281237 - RNA, 32 nt, Homo Sapiens
uguggaauugcuggacagugggcccccaagcc

SEQ ID NO: 281238 - RNA, 32 nt, Homo Sapiens
ugggaaaauggcaaaaaagcuucacauguguc

SEQ ID NO: 281239 - RNA, 32 nt, Homo Sapiens
ugcagaaacaguuucuccuccuccccucagcc

SEQ ID NO: 281240 - RNA, 32 nt, Homo Sapiens
uuucacuagagcauccugccugccuucuccac

SEQ ID NO: 281241 - RNA, 32 nt, Homo Sapiens
cucagguucuauuuucuuaaaccaaccuuuaa

SEQ ID NO: 281242 - RNA, 32 nt, Homo Sapiens
uccuacgugggacaccuggugugugcagauca

SEQ ID NO: 281243 - RNA, 32 nt, Homo Sapiens
cugggucugcugcagagcuccuuggcuaucag

SEQ ID NO: 281244 - RNA, 32 nt, Homo Sapiens
aagcaguggguuccugagcucaagacuuugaa

SEQ ID NO: 281245 - RNA, 32 nt, Homo Sapiens
gugcaaacucuccaaguaucuaauggagaagu

SEQ ID NO: 281246 - RNA, 32 nt, Homo Sapiens
ugucccccaucccaaaguauuccaucuacuuu

SEQ ID NO: 281247 - RNA, 32 nt, Homo Sapiens
gcaccccucccccaggcaccaaccccgccagg

SEQ ID NO: 281248 - RNA, 32 nt, Homo Sapiens
caaggaguggcacgcuucucuguuacaaauag

SEQ ID NO: 281249 - RNA, 28 nt, Homo Sapiens
agguguguuacaggacccagcuggccca

SEQ ID NO: 281250 - RNA, 32 nt, Homo Sapiens
gguggguggggguggggacggggguaacauuu

SEQ ID NO: 281251 - RNA, 32 nt, Homo Sapiens
aauuccaugggucucuaaggcuguguuuauuu

SEQ ID NO: 281252 - RNA, 32 nt, Homo Sapiens
uguuuuguuuuuucucuuuugagacagaguuu

SEQ ID NO: 281253 - RNA, 32 nt, Homo Sapiens
cagcacugcggaaggcgcggagggagcagcag

SEQ ID NO: 281254 - RNA, 32 nt, Homo Sapiens
uuuggggaaaggucuuuuuugcuuaauuuugu

SEQ ID NO: 281255 - RNA, 32 nt, Homo Sapiens
ugacuccuaguccaaugucuguuucgcaucac

SEQ ID NO: 281256 - RNA, 32 nt, Homo Sapiens
cuuugcccuuuacuugucuuucugggguuuuu

SEQ ID NO: 281257 - RNA, 32 nt, Homo Sapiens
caaaaagaaacuaguacauuugugaaaauugu

SEQ ID NO: 281258 - RNA, 32 nt, Homo Sapiens
agggguaggaggagccugcggcggcggcggug

SEQ ID NO: 281259 - RNA, 32 nt, Homo Sapiens
ucaaaggcacccccauccccgccccgcacaga

SEQ ID NO: 281260 - RNA, 32 nt, Homo Sapiens
ccaaaaccaaacagaagccagaccuggguugg

SEQ ID NO: 281261 - RNA, 32 nt, Homo Sapiens
gcuaucccugcagcugcagggcacuaaugacc

SEQ ID NO: 281262 - RNA, 32 nt, Homo Sapiens
acuuuucucauaccaaggcuaguucuuucuag

SEQ ID NO: 281263 - RNA, 32 nt, Homo Sapiens
aaacaagguucaaauugguuuccuucacagga

SEQ ID NO: 281264 - RNA, 32 nt, Homo Sapiens
uaauucgccuugauguucugccuuauaaaugc

SEQ ID NO: 281265 - RNA, 32 nt, Homo Sapiens
cagccugcagaaacucuucuccaggcauugug

SEQ ID NO: 281266 - RNA, 32 nt, Homo Sapiens
gcugcggagcuggucgacauaaucucuguauu

SEQ ID NO: 281267 - RNA, 32 nt, Homo Sapiens
ccccucagggaggccucagugauucggccaca

SEQ ID NO: 281268 - RNA, 32 nt, Homo Sapiens
uguaacuaaaagaaccauaguaccucacauca

SEQ ID NO: 281269 - RNA, 32 nt, Homo Sapiens
ggaggcaacaggagcucuguggugucuguggg

SEQ ID NO: 281270 - RNA, 32 nt, Homo Sapiens
acccuugaaggcuuacugcugcauggcugucu

SEQ ID NO: 281271 - RNA, 32 nt, Homo Sapiens
augcuaguggcgggucuggaagccuagagggg

SEQ ID NO: 281272 - RNA, 32 nt, Homo Sapiens
cuggauacugcggggcuuuuccgcggaggagc

SEQ ID NO: 281273 - RNA, 32 nt, Homo Sapiens
ccuugcccacaggugcgggaccaucugaugug

SEQ ID NO: 281274 - RNA, 32 nt, Homo Sapiens
cacccguucuacaugaauuaucaauauuuggu

SEQ ID NO: 281275 - RNA, 32 nt, Homo Sapiens
gccaaaucgcagugauaguugacuuuggauac

SEQ ID NO: 281276 - RNA, 32 nt, Homo Sapiens
ggucucaaacuccugaccucaggcgauccacc

SEQ ID NO: 281277 - RNA, 32 nt, Homo Sapiens
guucaugaaggccggcagcaucaaugucugga

SEQ ID NO: 281278 - RNA, 29 nt, Homo Sapiens
agaggcagcgagugaaggacgccgacggg

SEQ ID NO: 281279 - RNA, 32 nt, Homo Sapiens
aaguaauggaaauuguuaaaaguucugcucuc

SEQ ID NO: 281280 - RNA, 32 nt, Homo Sapiens
caugcggucgccaucuaguggccaaagguugu

SEQ ID NO: 281281 - RNA, 32 nt, Homo Sapiens
ccagccaauaaagcgucuguggcgauugguga

SEQ ID NO: 281282 - RNA, 32 nt, Homo Sapiens
ggaacuggcuaaaaaugucauuuacagguacc

SEQ ID NO: 281283 - RNA, 30 nt, Homo Sapiens
aucacugcagccccccucgcccugagccag

SEQ ID NO: 281284 - RNA, 32 nt, Homo Sapiens
agugcgcccagucuccggccccggccccucgg

SEQ ID NO: 281285 - RNA, 32 nt, Homo Sapiens
cggcuugaaucucagcugccugccacuuacug

SEQ ID NO: 281286 - RNA, 32 nt, Homo Sapiens
auauucaugcuucuuccuuacccugcgauuuu

SEQ ID NO: 281287 - RNA, 32 nt, Homo Sapiens
augugauagacuaucucugucacuaugcuguu

SEQ ID NO: 281288 - RNA, 32 nt, Homo Sapiens
gguaugauacuaguaaugaaggcaaaauggac

SEQ ID NO: 281289 - RNA, 32 nt, Homo Sapiens
cuauaaaauaccaucacaaguaaaugagcuug

SEQ ID NO: 281290 - RNA, 32 nt, Homo Sapiens
cagucgccuccuggucgcagggcccgcgacag

SEQ ID NO: 281291 - RNA, 32 nt, Homo Sapiens
auuuuaaaaaauagcaaaauuauucaucggcu

SEQ ID NO: 281292 - RNA, 32 nt, Homo Sapiens
cgguggcggcggaggugcgcgcggagccaugg

SEQ ID NO: 281293 - RNA, 32 nt, Homo Sapiens
ugacuugauagcucauuuuuuauugcugaaua

SEQ ID NO: 281294 - RNA, 32 nt, Homo Sapiens
aaaugaggauugcuccgaggccugcuccagua

SEQ ID NO: 281295 - RNA, 32 nt, Homo Sapiens
ccggcggcugcuugcgccccagcgcgcgccca

SEQ ID NO: 281296 - RNA, 32 nt, Homo Sapiens
cccacggccccacccacagggaccucaacuuc

SEQ ID NO: 281297 - RNA, 32 nt, Homo Sapiens
uaagaaagguaacauauaccauaauuuuacua

SEQ ID NO: 281298 - RNA, 32 nt, Homo Sapiens
ugucccacagaaacccaaacaagccagacaga

SEQ ID NO: 281299 - RNA, 32 nt, Homo Sapiens
agcccacccuccccgcaccuccaggucucugg

SEQ ID NO: 281300 - RNA, 32 nt, Homo Sapiens
ugugacugccuggccagacuuagggcucacgc

SEQ ID NO: 281301 - RNA, 32 nt, Homo Sapiens
cgacucggauccguuuauuccaaaugucccag

SEQ ID NO: 281302 - RNA, 32 nt, Homo Sapiens
gaacaaagcucugcuguuuagagcauuuaagu

SEQ ID NO: 281303 - RNA, 32 nt, Homo Sapiens
ugcugcccuggcgggggccaugggggugauga

SEQ ID NO: 281304 - RNA, 32 nt, Homo Sapiens
cugaaaagaaagauuaaaccuacuuucauaug

SEQ ID NO: 281305 - RNA, 32 nt, Homo Sapiens
ccauuccagaccaaaauugaaaaaaugguuga

SEQ ID NO: 281306 - RNA, 32 nt, Homo Sapiens
caugcggagcucugguuucagaugccagcagc

SEQ ID NO: 281307 - RNA, 32 nt, Homo Sapiens
ccauccacuuugguuuggaagccuccccagag

SEQ ID NO: 281308 - RNA, 32 nt, Homo Sapiens
ugggccaaucccauuccugccuuccagugccc

SEQ ID NO: 281309 - RNA, 32 nt, Homo Sapiens
uugcugcuggaaauaugacagaauaauguggu

SEQ ID NO: 281310 - RNA, 32 nt, Homo Sapiens
guuaacgggaccagcucugcggaaaccaacuu

SEQ ID NO: 281311 - RNA, 32 nt, Homo Sapiens
auugguuccaaauggguacugaaaauagauuc

SEQ ID NO: 281312 - RNA, 32 nt, Homo Sapiens
cccugcugugcagggagggcagccccgggcag

SEQ ID NO: 281313 - RNA, 32 nt, Homo Sapiens
agggcaauaggagagcagagaaugggggaacu

SEQ ID NO: 281314 - RNA, 27 nt, Homo Sapiens
gaauacuuuguuuccagcccccuuccc

SEQ ID NO: 281315 - RNA, 32 nt, Homo Sapiens
gcucaaucucaacacauugaaaacacaacuca

SEQ ID NO: 281316 - RNA, 32 nt, Homo Sapiens
ccucuucccacuccaaugaugaaaaugauuuu

SEQ ID NO: 281317 - RNA, 32 nt, Homo Sapiens
cucuucucauucaaagaggaauuauucaaaag

SEQ ID NO: 281318 - RNA, 32 nt, Homo Sapiens
aaggagaaaagcugcaggcaucugaggauaaa

SEQ ID NO: 281319 - RNA, 32 nt, Homo Sapiens
guguggggcggguggaggcggcuggcggaggu

SEQ ID NO: 281320 - RNA, 32 nt, Homo Sapiens
cucccacucagccccaggagagggucugaagg

SEQ ID NO: 281321 - RNA, 32 nt, Homo Sapiens
aagaaaucuuauauccucuauaccaaacuuug

SEQ ID NO: 281322 - RNA, 32 nt, Homo Sapiens
caguuguucaacagcggguuaagcucagcagu

SEQ ID NO: 281323 - RNA, 32 nt, Homo Sapiens
caaaaugucaauuuuuaacuuaucuccagcca

SEQ ID NO: 281324 - RNA, 32 nt, Homo Sapiens
ggcugcgugacgucaccuccggucgugucucu

SEQ ID NO: 281325 - RNA, 32 nt, Homo Sapiens
uggugguagagcucgcuucauuuauuuaugua

SEQ ID NO: 281326 - RNA, 32 nt, Homo Sapiens
gacagaacucucaagcaucauuagauuccuca

SEQ ID NO: 281327 - RNA, 32 nt, Homo Sapiens
aaaugaaaucauaauguacauugcuuuguagu

SEQ ID NO: 281328 - RNA, 32 nt, Homo Sapiens
cgggcggcggccuggccugcgcgccaggaugu

SEQ ID NO: 281329 - RNA, 32 nt, Homo Sapiens
agaagaaggaucugcaacagguccaggcugcu

SEQ ID NO: 281330 - RNA, 32 nt, Homo Sapiens
acuuggguuuuaucuuguuuuaauuguuuuug

SEQ ID NO: 281331 - RNA, 32 nt, Homo Sapiens
accuaggauuccuccugcuccaaacuuugccc

SEQ ID NO: 281332 - RNA, 32 nt, Homo Sapiens
caacaucuuuaauuaucagggacaugcagauu

SEQ ID NO: 281333 - RNA, 32 nt, Homo Sapiens
caucucaaaguuauauauacuggguauuaaaa

SEQ ID NO: 281334 - RNA, 32 nt, Homo Sapiens
uucauuugacuucaccauaagggaaagaagag

SEQ ID NO: 281335 - RNA, 32 nt, Homo Sapiens
caaguuauuguacagcuguuuaagaugggcag

SEQ ID NO: 281336 - RNA, 32 nt, Homo Sapiens
aaccuuuaaaacuaaucucagaaaaauuuuug

SEQ ID NO: 281337 - RNA, 32 nt, Homo Sapiens
ugacgccccucaggggacccugcaucgcucca

SEQ ID NO: 281338 - RNA, 32 nt, Homo Sapiens
uugcgcuucugucgggucugugccgcugggag

SEQ ID NO: 281339 - RNA, 32 nt, Homo Sapiens
ugccggccggcgcgcgggaggaggacgcgggu

SEQ ID NO: 281340 - RNA, 32 nt, Homo Sapiens
cauuguaauuuaauuuuauuuuacaagcggua

SEQ ID NO: 281341 - RNA, 32 nt, Homo Sapiens
ucuggccggacagaacuggugcucucuucucc

SEQ ID NO: 281342 - RNA, 32 nt, Homo Sapiens
ucucaccgccccaccacagaccgcguuccccg

SEQ ID NO: 281343 - RNA, 32 nt, Homo Sapiens
gaauucagucuacuggauuuaagggaauggcu

SEQ ID NO: 281344 - RNA, 32 nt, Homo Sapiens
gauggcauacucuggaggauacggaugugggg

SEQ ID NO: 281345 - RNA, 32 nt, Homo Sapiens
uccggcgggcggcgcgcacacugcucgcuggg

SEQ ID NO: 281346 - RNA, 32 nt, Homo Sapiens
gucauguuuuaacauuugcaacuagggauagu

SEQ ID NO: 281347 - RNA, 32 nt, Homo Sapiens
agauugcuggagggaaaggcucaacgucucuu

SEQ ID NO: 281348 - RNA, 32 nt, Homo Sapiens
gccgcccccucccccggcucccuggaacuucc

SEQ ID NO: 281349 - RNA, 32 nt, Homo Sapiens
ggccugcucccucucaucuagcccaccauuuc

SEQ ID NO: 281350 - RNA, 32 nt, Homo Sapiens
uuccuuuacaggaacgaaaaaauuacaaauca

SEQ ID NO: 281351 - RNA, 32 nt, Homo Sapiens
ugcagggccgcuccccucacccgcccccuucg

SEQ ID NO: 281352 - RNA, 32 nt, Homo Sapiens
ccugcaggcucccacaccccuccccagucuuc

SEQ ID NO: 281353 - RNA, 32 nt, Homo Sapiens
uaaagcuauuucagaucagggauugucauccu

SEQ ID NO: 281354 - RNA, 31 nt, Homo Sapiens
cccccguggugaguccugacggccucccacu

SEQ ID NO: 281355 - RNA, 32 nt, Homo Sapiens
uacauuucuugacuaggcccucucauuuccuc

SEQ ID NO: 281356 - RNA, 32 nt, Homo Sapiens
gggcuagagagggggccucccgggccagugcg

SEQ ID NO: 281357 - RNA, 32 nt, Homo Sapiens
uggaccaucaccuggugucuguagguggaccc

SEQ ID NO: 281358 - RNA, 32 nt, Homo Sapiens
uagcacaauauuucaacuauguccuuuaaaaa

SEQ ID NO: 281359 - RNA, 32 nt, Homo Sapiens
uucagugucuuacagucaugucuuaagcugca

SEQ ID NO: 281360 - RNA, 32 nt, Homo Sapiens
aucagaaagcuaccaaacacacugcucagaaa

SEQ ID NO: 281361 - RNA, 32 nt, Homo Sapiens
auacuuccugaacaucuuaggucuuuucaaca

SEQ ID NO: 281362 - RNA, 32 nt, Homo Sapiens
guuguuacuguuguuguuguuuuuuaaagaga

SEQ ID NO: 281363 - RNA, 32 nt, Homo Sapiens
augccuauuucugguuauauaauugcucucca

SEQ ID NO: 281364 - RNA, 32 nt, Homo Sapiens
acucagaaaaggaaaaagaagcaaaacuaaag

SEQ ID NO: 281365 - RNA, 32 nt, Homo Sapiens
uucuggauuucagaguagagauuucuguguug

SEQ ID NO: 281366 - RNA, 32 nt, Homo Sapiens
cccacuggcuccugauaucuugcuguauuuug

SEQ ID NO: 281367 - RNA, 32 nt, Homo Sapiens
uuuacaucguguuuuucuuacuauuuuuuaau

SEQ ID NO: 281368 - RNA, 32 nt, Homo Sapiens
cugacuccgccacuuuucccacuguaugaucu

SEQ ID NO: 281369 - RNA, 32 nt, Homo Sapiens
ggcugcuguauuaauccauuuucaugcugcug

SEQ ID NO: 281370 - RNA, 32 nt, Homo Sapiens
gaggcaccgcgcccggccccuccucccuuuca

SEQ ID NO: 281371 - RNA, 32 nt, Homo Sapiens
gcucgcgccucccgggcgggcuauguugauug

SEQ ID NO: 281372 - RNA, 32 nt, Homo Sapiens
uaugaaaauaaaauaaauguaugaaacaguau

SEQ ID NO: 281373 - RNA, 32 nt, Homo Sapiens
uugcagguguguaccaccacgcccggcuaauu

SEQ ID NO: 281374 - RNA, 32 nt, Homo Sapiens
cacuucccaagcagugagcgcacacccaaugg

SEQ ID NO: 281375 - RNA, 32 nt, Homo Sapiens
accaucaucucgaaaaccccagcccuucuccc

SEQ ID NO: 281376 - RNA, 32 nt, Homo Sapiens
aaucggcacccguggaggaaauaagcggaaau

SEQ ID NO: 281377 - RNA, 32 nt, Homo Sapiens
ccuacccccacuuuaccgaggccaacagccgc

SEQ ID NO: 281378 - RNA, 32 nt, Homo Sapiens
cuagccagcucuuucacugacuugcuucguca

SEQ ID NO: 281379 - RNA, 32 nt, Homo Sapiens
ccgcguugaccuggagacuguggccuuggagc

SEQ ID NO: 281380 - RNA, 32 nt, Homo Sapiens
aucauugaccaaacugaugacuucgaguaagc

SEQ ID NO: 281381 - RNA, 32 nt, Homo Sapiens
accccaugcucuggccuuggccccacagccca

SEQ ID NO: 281382 - RNA, 32 nt, Homo Sapiens
acacaguuggagaauaauuuguaaccauggca

SEQ ID NO: 281383 - RNA, 32 nt, Homo Sapiens
cuauguaguugagacaggauuugauaagucua

SEQ ID NO: 281384 - RNA, 28 nt, Homo Sapiens
gucauggccccauuggcccugcaccucc

SEQ ID NO: 281385 - RNA, 32 nt, Homo Sapiens
uggcagccgucucaggcaggacugggcaccaa

SEQ ID NO: 281386 - RNA, 32 nt, Homo Sapiens
gggaagagccaggcccugaggaacagccgcag

SEQ ID NO: 281387 - RNA, 32 nt, Homo Sapiens
gaaagugagaggagggaccguaggucuuuucg

SEQ ID NO: 281388 - RNA, 32 nt, Homo Sapiens
gagcuggcgggggcgcacgggcagcgcugcgg

SEQ ID NO: 281389 - RNA, 32 nt, Homo Sapiens
ccacaccuggcuauuuuuuuuauuuucuguag

SEQ ID NO: 281390 - RNA, 32 nt, Homo Sapiens
caccccaauggaugcagacagugauguugcau

SEQ ID NO: 281391 - RNA, 32 nt, Homo Sapiens
ugaagaguuuucugccaaugacgauguggccc

SEQ ID NO: 281392 - RNA, 32 nt, Homo Sapiens
cgacuuccgagccauggaaggguggauugaug

SEQ ID NO: 281393 - RNA, 32 nt, Homo Sapiens
uaaauuaauauuuggauguagacagcuuuuca

SEQ ID NO: 281394 - RNA, 32 nt, Homo Sapiens
ggacugugucauccucaccaagcucauuacau

SEQ ID NO: 281395 - RNA, 32 nt, Homo Sapiens
cccggcaggggaggaagggcagacccacaggu

SEQ ID NO: 281396 - RNA, 32 nt, Homo Sapiens
caaaguuuucuuuccaaaaucaggcuuugucu

SEQ ID NO: 281397 - RNA, 32 nt, Homo Sapiens
ggccgcccacccgcccgagggauggugccccu

SEQ ID NO: 281398 - RNA, 32 nt, Homo Sapiens
cagggcuccuucccgcccgccgccgccgagac

SEQ ID NO: 281399 - RNA, 32 nt, Homo Sapiens
uauuguccaagcauauaagguggcacagcaca

SEQ ID NO: 281400 - RNA, 32 nt, Homo Sapiens
gcaucagucugggccuggcccaggguccccgg

SEQ ID NO: 281401 - RNA, 32 nt, Homo Sapiens
gagcggcucgugcggcagguaccaugcggacg

SEQ ID NO: 281402 - RNA, 32 nt, Homo Sapiens
augaggcagaggucuuccuguccaccgggagc

SEQ ID NO: 281403 - RNA, 32 nt, Homo Sapiens
acuaggagcugagacuugggggguugccaggg

SEQ ID NO: 281404 - RNA, 32 nt, Homo Sapiens
aaaagcuacaccgacgcggaccgcggcggcgu

SEQ ID NO: 281405 - RNA, 32 nt, Homo Sapiens
aggcugccgagaccuauaaaggcgccagguuu

SEQ ID NO: 281406 - RNA, 32 nt, Homo Sapiens
uuaccuacacaccugcuaaacacacacacaca

SEQ ID NO: 281407 - RNA, 32 nt, Homo Sapiens
cuaggguuuguacagcucuccaguggaguuau

SEQ ID NO: 281408 - RNA, 32 nt, Homo Sapiens
gggaaguuuuccauacaggggaccauguagug

SEQ ID NO: 281409 - RNA, 32 nt, Homo Sapiens
aaaucagugucuggggcuuggccacccugccg

SEQ ID NO: 281410 - RNA, 32 nt, Homo Sapiens
gcgcuuccauugucagaauggcuguauccugg

SEQ ID NO: 281411 - RNA, 32 nt, Homo Sapiens
gacugaugaauccagacaggagggauugacuc

SEQ ID NO: 281412 - RNA, 30 nt, Homo Sapiens
gacucugcugugucgaucgccugaguccgu

SEQ ID NO: 281413 - RNA, 32 nt, Homo Sapiens
ggaagcuguauauauggcaauugcauucuccg

SEQ ID NO: 281414 - RNA, 32 nt, Homo Sapiens
caugacacuccuugcuuguuguguugcuuccu

SEQ ID NO: 281415 - RNA, 32 nt, Homo Sapiens
accucgccaaccgaggcggaccgcggagugug

SEQ ID NO: 281416 - RNA, 32 nt, Homo Sapiens
uuccuccccuccccgccgacuccaacucuucg

SEQ ID NO: 281417 - RNA, 29 nt, Homo Sapiens
guuuguuuuaaauaaauaaacaaaauguc

SEQ ID NO: 281418 - RNA, 30 nt, Homo Sapiens
cugauggccaggaggaccuagaagauuuag

SEQ ID NO: 281419 - RNA, 32 nt, Homo Sapiens
agagaauccaacaauguccugcuuccuugggg

SEQ ID NO: 281420 - RNA, 32 nt, Homo Sapiens
uucucagguccuuuccucuuugucaccaacac

SEQ ID NO: 281421 - RNA, 32 nt, Homo Sapiens
agcuucaguuuaaugaaagauucauaaugguu

SEQ ID NO: 281422 - RNA, 32 nt, Homo Sapiens
cacaggccggcccgggucuucgugcagaacca

SEQ ID NO: 281423 - RNA, 31 nt, Homo Sapiens
agugucaugcagaaaaaauguauucagaacu

SEQ ID NO: 281424 - RNA, 32 nt, Homo Sapiens
cauuuaacagagcaauucuaccucugagaauu

SEQ ID NO: 281425 - RNA, 32 nt, Homo Sapiens
guccaaccccucccccggggcuugcgcggcgg

SEQ ID NO: 281426 - RNA, 32 nt, Homo Sapiens
aaaggguaauuuccuuugcuucaaauucaagg

SEQ ID NO: 281427 - RNA, 32 nt, Homo Sapiens
gcugugcagacaccucuguggccccccaggag

SEQ ID NO: 281428 - RNA, 32 nt, Homo Sapiens
acagccccguccgccgcuucucuuccuaguuu

SEQ ID NO: 281429 - RNA, 32 nt, Homo Sapiens
uauggggcccugccaacaccacuuccucagca

SEQ ID NO: 281430 - RNA, 31 nt, Homo Sapiens
cggcccgcuugccgccugcccccugcccuag

SEQ ID NO: 281431 - RNA, 32 nt, Homo Sapiens
ccucauucuuuagucccugucaagguuaguaa

SEQ ID NO: 281432 - RNA, 32 nt, Homo Sapiens
agccuaagacuuuuuuccccuuuugcaaauug

SEQ ID NO: 281433 - RNA, 32 nt, Homo Sapiens
uaagaaaaugcuugacaaauauuuucauguau

SEQ ID NO: 281434 - RNA, 32 nt, Homo Sapiens
uguguuggagggcuucuuagcucuuuggugag

SEQ ID NO: 281435 - RNA, 32 nt, Homo Sapiens
gcauguguaauauggcucuauacaauauaaua

SEQ ID NO: 281436 - RNA, 31 nt, Homo Sapiens
ggugagcugggagguguucagaauagaagag

SEQ ID NO: 281437 - RNA, 32 nt, Homo Sapiens
cacaaacugacccauccugggccuuguucucc

SEQ ID NO: 281438 - RNA, 32 nt, Homo Sapiens
caccgggugcuuucugcccacccccugcucuu

SEQ ID NO: 281439 - RNA, 32 nt, Homo Sapiens
uuuuccugcucugcaccuggauuguaucuuca

SEQ ID NO: 281440 - RNA, 32 nt, Homo Sapiens
aaaccagaacugugucucccuccugcacgaau

SEQ ID NO: 281441 - RNA, 32 nt, Homo Sapiens
uucccuucucaguuccucucucgaaagucuua

SEQ ID NO: 281442 - RNA, 32 nt, Homo Sapiens
uccuaugauagcaacuuuuuagcuucugcaug

SEQ ID NO: 281443 - RNA, 32 nt, Homo Sapiens
cauggggucaggugcuucugugcuugcugucc

SEQ ID NO: 281444 - RNA, 32 nt, Homo Sapiens
ugcccccuuguacagaaucgaacucugcacuu

SEQ ID NO: 281445 - RNA, 31 nt, Homo Sapiens
cccaggcaucuuugccugcccugccuugcuu

SEQ ID NO: 281446 - RNA, 32 nt, Homo Sapiens
ccaccucugccucuugggucagcccuccuuga

SEQ ID NO: 281447 - RNA, 32 nt, Homo Sapiens
ugaaaaccaaaaugucagaacuaagacucugc

SEQ ID NO: 281448 - RNA, 32 nt, Homo Sapiens
uugccgcugcgcaccuggcucaggugagcugc

SEQ ID NO: 281449 - RNA, 32 nt, Homo Sapiens
gaugguaaacuuacuguaaggaucucauuugg

SEQ ID NO: 281450 - RNA, 32 nt, Homo Sapiens
gucuuaaggcuuuuugaagcuuauuuuacugu

SEQ ID NO: 281451 - RNA, 32 nt, Homo Sapiens
cagugcuguuucccggggaggaaacacuuuuu

SEQ ID NO: 281452 - RNA, 32 nt, Homo Sapiens
aagggggaaaagaucgacgaaguaagagcgaa

SEQ ID NO: 281453 - RNA, 32 nt, Homo Sapiens
ugaauaagccagugaggagauuuugaaaguag

SEQ ID NO: 281454 - RNA, 32 nt, Homo Sapiens
gcauaaugagagaucaaccgugguggggagug

SEQ ID NO: 281455 - RNA, 31 nt, Homo Sapiens
gguuagcagacucuggcuuaaaaguuuuggc

SEQ ID NO: 281456 - RNA, 32 nt, Homo Sapiens
acuggccugcccgugccugcccagcugggagg

SEQ ID NO: 281457 - RNA, 32 nt, Homo Sapiens
aaacgcccaucccugaaguucguuccagcucc

SEQ ID NO: 281458 - RNA, 32 nt, Homo Sapiens
agacaccacacuuuuacccaauucccacagcu

SEQ ID NO: 281459 - RNA, 32 nt, Homo Sapiens
cauuuccugugcuuuaaauaaacaaauguacc

SEQ ID NO: 281460 - RNA, 32 nt, Homo Sapiens
uuuuaguucuuaaauuuuaugcuuguauuuga

SEQ ID NO: 281461 - RNA, 32 nt, Homo Sapiens
ucacuaauauuuuaacaguuuuucuuauuuau

SEQ ID NO: 281462 - RNA, 32 nt, Homo Sapiens
gcaauuccaagcauaaccaccagauggcagag

SEQ ID NO: 281463 - RNA, 32 nt, Homo Sapiens
gguccugcccugcgaaccagcgcggcccccug

SEQ ID NO: 281464 - RNA, 32 nt, Homo Sapiens
aagcagauuuucagaagugucuggucaagaua

SEQ ID NO: 281465 - RNA, 32 nt, Homo Sapiens
cucgagggaaaggcugcugccuccugcucugu

SEQ ID NO: 281466 - RNA, 32 nt, Homo Sapiens
guuaucagaaaagagaugagaugagauaagac

SEQ ID NO: 281467 - RNA, 32 nt, Homo Sapiens
ugagagaggcuuugggcacagccugcugucuu

SEQ ID NO: 281468 - RNA, 32 nt, Homo Sapiens
aauuguugaacgucuguaaaugauuuuuuuuu

SEQ ID NO: 281469 - RNA, 32 nt, Homo Sapiens
uggcaccacagggagcucuuuuccugcccugc

SEQ ID NO: 281470 - RNA, 32 nt, Homo Sapiens
cauccacccuucccucccugucuucacccgug

SEQ ID NO: 281471 - RNA, 32 nt, Homo Sapiens
cuccuggacaggugcugugaccucgugcagcc

SEQ ID NO: 281472 - RNA, 32 nt, Homo Sapiens
cggcacgaggccauccuucucaaaagacuuau

SEQ ID NO: 281473 - RNA, 32 nt, Homo Sapiens
ggccugagaaaagaaugggagggggcuauuaa

SEQ ID NO: 281474 - RNA, 32 nt, Homo Sapiens
cuggcccaggacuugggacaguggccuugucu

SEQ ID NO: 281475 - RNA, 32 nt, Homo Sapiens
ugucuccauuuucuucucugugaaguagguau

SEQ ID NO: 281476 - RNA, 32 nt, Homo Sapiens
guucaagcgauuccuuuuuuuuuuuuuuuuuu

SEQ ID NO: 281477 - RNA, 31 nt, Homo Sapiens
cagcacaggugcugugugacggccucgggcc

SEQ ID NO: 281478 - RNA, 32 nt, Homo Sapiens
cacauuugugccuggugacuuccugucccugg

SEQ ID NO: 281479 - RNA, 32 nt, Homo Sapiens
cagaauuuaauagggaagaaagagacaguaua

SEQ ID NO: 281480 - RNA, 32 nt, Homo Sapiens
aaagccgacgaaccgacacgcggcagagucaa

SEQ ID NO: 281481 - RNA, 32 nt, Homo Sapiens
uuguaaggcugguguauucagagagcagaucu

SEQ ID NO: 281482 - RNA, 32 nt, Homo Sapiens
aggcacaaggcacaaggcacuguugcagcuua

SEQ ID NO: 281483 - RNA, 32 nt, Homo Sapiens
ugguuuacaugcacugucucauuuaaucugag

SEQ ID NO: 281484 - RNA, 32 nt, Homo Sapiens
ccggccaauacauuauuauuaacuuaaggcug

SEQ ID NO: 281485 - RNA, 32 nt, Homo Sapiens
guugguaguaucacaauucuuuggggcuccac

SEQ ID NO: 281486 - RNA, 32 nt, Homo Sapiens
ggccaguucuccucuucucucuaauccauccg

SEQ ID NO: 281487 - RNA, 32 nt, Homo Sapiens
guagaaagggaagacauaagagacuccauuuu

SEQ ID NO: 281488 - RNA, 32 nt, Homo Sapiens
agagaugauuauuguacugugggaggucagga

SEQ ID NO: 281489 - RNA, 32 nt, Homo Sapiens
ccagagggaggucaccugggggcagcuggugc

SEQ ID NO: 281490 - RNA, 32 nt, Homo Sapiens
ggaccuguuugcucuuuuuuuugugcccagag

SEQ ID NO: 281491 - RNA, 32 nt, Homo Sapiens
ucuacuaaaaauacaaaaacuaacugggcgug

SEQ ID NO: 281492 - RNA, 32 nt, Homo Sapiens
cccccgagccucuccgaacccccgccagcccu

SEQ ID NO: 281493 - RNA, 32 nt, Homo Sapiens
cuagggccuaaagaugcugaggucuguaugga

SEQ ID NO: 281494 - RNA, 32 nt, Homo Sapiens
ccaagaucgggccacugcacuccagcuugggu

SEQ ID NO: 281495 - RNA, 32 nt, Homo Sapiens
aaugugaaaaggagagauuggccuagccuccc

SEQ ID NO: 281496 - RNA, 32 nt, Homo Sapiens
accagcuuuuaaaaugacuguguauuuacauu

SEQ ID NO: 281497 - RNA, 32 nt, Homo Sapiens
guguguccuggcggccuggcccaggcugccgc

SEQ ID NO: 281498 - RNA, 32 nt, Homo Sapiens
ucagacauauccccacagaggaccucaccauc

SEQ ID NO: 281499 - RNA, 32 nt, Homo Sapiens
guuaaggcagaauaaugacuaaaauauguuca

SEQ ID NO: 281500 - RNA, 32 nt, Homo Sapiens
gccgcgcccccgcccgcggcgccgcgccuccc

SEQ ID NO: 281501 - RNA, 32 nt, Homo Sapiens
aacaggaggguggagaggccgggucucacaau

SEQ ID NO: 281502 - RNA, 32 nt, Homo Sapiens
auacaagaugacccucugagcuuuucauuuau

SEQ ID NO: 281503 - RNA, 32 nt, Homo Sapiens
uguaagugcugcagcugugcccggccccgccu

SEQ ID NO: 281504 - RNA, 32 nt, Homo Sapiens
ugcaaauagaaagaaaacaccaaaaauaaaga

SEQ ID NO: 281505 - RNA, 32 nt, Homo Sapiens
ccucucucuucuuuucuacugugcuauccuag

SEQ ID NO: 281506 - RNA, 32 nt, Homo Sapiens
ggaaggacaucacaacuccaggugcucagacu

SEQ ID NO: 281507 - RNA, 32 nt, Homo Sapiens
gcugagucucacugaacaggaagggaagcagc

SEQ ID NO: 281508 - RNA, 32 nt, Homo Sapiens
ggagaacuuguacauuuaugauaaugcagaau

SEQ ID NO: 281509 - RNA, 32 nt, Homo Sapiens
ccugccgcaguggagaggagcggccggagcga

SEQ ID NO: 281510 - RNA, 32 nt, Homo Sapiens
uuaagauuuuacuuuaacagucuaaaaauuga

SEQ ID NO: 281511 - RNA, 32 nt, Homo Sapiens
gccucauuuucagggcagaauauguguuugug

SEQ ID NO: 281512 - RNA, 32 nt, Homo Sapiens
uuaaauuacauagucuuaauauuucuguuccu

SEQ ID NO: 281513 - RNA, 32 nt, Homo Sapiens
cauuguaucaguucuuuuuuuuuuuuuuuuaa

SEQ ID NO: 281514 - RNA, 32 nt, Homo Sapiens
cagcacggguuccuguggcggcagcuuuuccu

SEQ ID NO: 281515 - RNA, 32 nt, Homo Sapiens
uuguccggagggggcgggcggggggcgccgac

SEQ ID NO: 281516 - RNA, 32 nt, Homo Sapiens
cuugguacuuggaauugauauauaccuuauua

SEQ ID NO: 281517 - RNA, 32 nt, Homo Sapiens
gaccucugccggguccucccagcccuugccac

SEQ ID NO: 281518 - RNA, 32 nt, Homo Sapiens
ucgguggaaaauuagagugaacaagaacaccc

SEQ ID NO: 281519 - RNA, 32 nt, Homo Sapiens
aggaagacgugggaaaguuuggagcuuccuag

SEQ ID NO: 281520 - RNA, 32 nt, Homo Sapiens
uaauauaucaacaacuaauggccaucuaaugc

SEQ ID NO: 281521 - RNA, 32 nt, Homo Sapiens
ugcaaacauuuuauucaguugucuuuagcuac

SEQ ID NO: 281522 - RNA, 32 nt, Homo Sapiens
ugaucagcaccaagcuccuuauggagaaagag

SEQ ID NO: 281523 - RNA, 32 nt, Homo Sapiens
cugcucauggcccuuccuggccgccugccaca

SEQ ID NO: 281524 - RNA, 32 nt, Homo Sapiens
uauuuuaaaaauuuauuuuugaauaaccaauu

SEQ ID NO: 281525 - RNA, 32 nt, Homo Sapiens
uuuaggcccagcugccagaccucagagaucuc

SEQ ID NO: 281526 - RNA, 31 nt, Homo Sapiens
cccgguggaguucuccagccccgcguaggcc

SEQ ID NO: 281527 - RNA, 32 nt, Homo Sapiens
auaguaguauuuugcuguggcuccauuaauua

SEQ ID NO: 281528 - RNA, 32 nt, Homo Sapiens
ggaguuccagaccagcccgggccuauggcgaa

SEQ ID NO: 281529 - RNA, 32 nt, Homo Sapiens
ucgcugcuuuuguagggacuucuuuccuugcu

SEQ ID NO: 281530 - RNA, 32 nt, Homo Sapiens
cagccaauaggagcccuugguuuccagaauuu

SEQ ID NO: 281531 - RNA, 32 nt, Homo Sapiens
ugccuuguagagaugcagccugcccagcugaa

SEQ ID NO: 281532 - RNA, 32 nt, Homo Sapiens
ugauuaaaaauaucuaaccuuaaaagacguaa

SEQ ID NO: 281533 - RNA, 32 nt, Homo Sapiens
ccgcugagggcuagcuacacacacgcccucac

SEQ ID NO: 281534 - RNA, 32 nt, Homo Sapiens
ccuccugcggauccuucacuccgggugggucg

SEQ ID NO: 281535 - RNA, 32 nt, Homo Sapiens
ggcacgcaggccgaccuguccucgagaucacg

SEQ ID NO: 281536 - RNA, 32 nt, Homo Sapiens
ucccagguugucacggugcggaacuggaggcc

SEQ ID NO: 281537 - RNA, 32 nt, Homo Sapiens
agggcacccagcuugcucggccuccuacaugu

SEQ ID NO: 281538 - RNA, 32 nt, Homo Sapiens
cucuucucuccccaggacccaggcuguggauc

SEQ ID NO: 281539 - RNA, 32 nt, Homo Sapiens
ccagugcaauggauagaaugggcuguguuucc

SEQ ID NO: 281540 - RNA, 32 nt, Homo Sapiens
ucgcgcaccccggccccgccucacacgcgcgc

SEQ ID NO: 281541 - RNA, 32 nt, Homo Sapiens
cgcagcuccuucccuaggcaccucugugcugc

SEQ ID NO: 281542 - RNA, 32 nt, Homo Sapiens
uaguuaaccuaugaaauaacauccucucaaau

SEQ ID NO: 281543 - RNA, 32 nt, Homo Sapiens
augugugaugugugugagcacacacacacagu

SEQ ID NO: 281544 - RNA, 32 nt, Homo Sapiens
ugcagaggaagccccagguagcaggcuucaga

SEQ ID NO: 281545 - RNA, 32 nt, Homo Sapiens
gggugcgcgggcgggcggcggcaccaugcagg

SEQ ID NO: 281546 - RNA, 32 nt, Homo Sapiens
gggcuccaggcacuggcuucucuucucugugu

SEQ ID NO: 281547 - RNA, 31 nt, Homo Sapiens
uuuugccuuauguugaguucaguguaagcau

SEQ ID NO: 281548 - RNA, 32 nt, Homo Sapiens
cugugaaguaggcaauacaguuguuaaagaag

SEQ ID NO: 281549 - RNA, 32 nt, Homo Sapiens
uugcuggauaaagcuuuuuuauuuaccucaau

SEQ ID NO: 281550 - RNA, 32 nt, Homo Sapiens
augcugugauuugggauuaagauacaagguga

SEQ ID NO: 281551 - RNA, 32 nt, Homo Sapiens
uuggcucagaucugaugcuucaagaggcugua

SEQ ID NO: 281552 - RNA, 32 nt, Homo Sapiens
cgaggucagaugcuuuccaacaugacaccuga

SEQ ID NO: 281553 - RNA, 32 nt, Homo Sapiens
agucuuccaccgaggaugacucaguggacucu

SEQ ID NO: 281554 - RNA, 30 nt, Homo Sapiens
gauucccauaucccuccucuucuuugcaua

SEQ ID NO: 281555 - RNA, 32 nt, Homo Sapiens
gaauuugacaccuauuuuuuagugaugaaauu

SEQ ID NO: 281556 - RNA, 32 nt, Homo Sapiens
aggacuggagcagucccuccucauggcggccu

SEQ ID NO: 281557 - RNA, 32 nt, Homo Sapiens
gcaucaguggguguugaugaagaaauuguuua

SEQ ID NO: 281558 - RNA, 32 nt, Homo Sapiens
cuggaaggccccagcccugcucccaccuggac

SEQ ID NO: 281559 - RNA, 32 nt, Homo Sapiens
gagggagaaggcagagaaaacacacgcuccuc

SEQ ID NO: 281560 - RNA, 32 nt, Homo Sapiens
gggcacagaggucaggaagcaggggugggggg

SEQ ID NO: 281561 - RNA, 32 nt, Homo Sapiens
cccugccugccagauggacagguacacccaag

SEQ ID NO: 281562 - RNA, 30 nt, Homo Sapiens
cuguggggaggugggacugaggagcgacug

SEQ ID NO: 281563 - RNA, 32 nt, Homo Sapiens
agccgcggccgcgggaaguucggcagccagaa

SEQ ID NO: 281564 - RNA, 32 nt, Homo Sapiens
ugcacacgaucucagggcuggugcugagcagc

SEQ ID NO: 281565 - RNA, 32 nt, Homo Sapiens
acuggaguuacugcuucacauaaaggacuauu

SEQ ID NO: 281566 - RNA, 32 nt, Homo Sapiens
caggugacaaaaugauaaaaccacugcugcuu

SEQ ID NO: 281567 - RNA, 32 nt, Homo Sapiens
aaaguggcagaaaaagaaaauagcagagaugg

SEQ ID NO: 281568 - RNA, 32 nt, Homo Sapiens
cccucgggcagcacagcggggcugggacucac

SEQ ID NO: 281569 - RNA, 30 nt, Homo Sapiens
gagaggggaggugggaggacaguuagaccc

SEQ ID NO: 281570 - RNA, 32 nt, Homo Sapiens
cacagguaaaaauuauuaacaauagaacuuca

SEQ ID NO: 281571 - RNA, 32 nt, Homo Sapiens
cuaucccuggacgcaugcagggcccccacagg

SEQ ID NO: 281572 - RNA, 31 nt, Homo Sapiens
agaaaauuuggcucaaguccauuuggcugua

SEQ ID NO: 281573 - RNA, 32 nt, Homo Sapiens
caguguugugcggcgccaugcaggucuccagc

SEQ ID NO: 281574 - RNA, 32 nt, Homo Sapiens
gcuggccgcgugccgccuccggagccggcagc

SEQ ID NO: 281575 - RNA, 32 nt, Homo Sapiens
uauaggcacaagcuaccaugccuggcuauucu

SEQ ID NO: 281576 - RNA, 32 nt, Homo Sapiens
cugagcggccgcggccauggcguacgccuauc

SEQ ID NO: 281577 - RNA, 32 nt, Homo Sapiens
augaaaguuucuuuauuuuuuauuaaaaaaaa

SEQ ID NO: 281578 - RNA, 32 nt, Homo Sapiens
cccugcccggugccugggcuguugauggccuc

SEQ ID NO: 281579 - RNA, 32 nt, Homo Sapiens
uuggcugaguugcagguuccaagcugcucucc

SEQ ID NO: 281580 - RNA, 32 nt, Homo Sapiens
aguguuagacgcguugugggucggggagaggg

SEQ ID NO: 281581 - RNA, 32 nt, Homo Sapiens
ggagcaugggacuguucuuuuacaagacagga

SEQ ID NO: 281582 - RNA, 32 nt, Homo Sapiens
ggauuguauggaaugaaaaauaaacauucuca

SEQ ID NO: 281583 - RNA, 32 nt, Homo Sapiens
aaaauuuccauugugacaucaauacgcaauau

SEQ ID NO: 281584 - RNA, 32 nt, Homo Sapiens
uaguuacaaaaauaguuacuaauguuguugag

SEQ ID NO: 281585 - RNA, 32 nt, Homo Sapiens
uccucacugucucuguuuggcuccucagguug

SEQ ID NO: 281586 - RNA, 32 nt, Homo Sapiens
aggcugaggugcagcaugucuagacugggagc

SEQ ID NO: 281587 - RNA, 32 nt, Homo Sapiens
gaagaguugucccagcucggcccgcgggggag

SEQ ID NO: 281588 - RNA, 32 nt, Homo Sapiens
agccuggccaacaugcugaaacccugucugua

SEQ ID NO: 281589 - RNA, 32 nt, Homo Sapiens
cuuccuucuaauaguuuuugcuuucuguuuug

SEQ ID NO: 281590 - RNA, 32 nt, Homo Sapiens
aauucaggaaacaaacaugguggcaauucuac

SEQ ID NO: 281591 - RNA, 32 nt, Homo Sapiens
caaccucaacccagccagaaaguacuuccccc

SEQ ID NO: 281592 - RNA, 32 nt, Homo Sapiens
acaaagcuugcuuuucugguauguucuaggug

SEQ ID NO: 281593 - RNA, 32 nt, Homo Sapiens
uugucauugccagcuguguugguagugcugug

SEQ ID NO: 281594 - RNA, 32 nt, Homo Sapiens
cuucugaucuucuguuuuucuguguucucaau

SEQ ID NO: 281595 - RNA, 32 nt, Homo Sapiens
gaacagucagccuaaauuuuggccguaauggc

SEQ ID NO: 281596 - RNA, 31 nt, Homo Sapiens
ucuagugaacguagggucagagccaucaguu

SEQ ID NO: 281597 - RNA, 32 nt, Homo Sapiens
gcgcuggcccagggucuucuccaggcucacau

SEQ ID NO: 281598 - RNA, 32 nt, Homo Sapiens
gaaauuucuuugagcugugagauggauuuauu

SEQ ID NO: 281599 - RNA, 32 nt, Homo Sapiens
uuuuauuaacuucuuuugagcuuucaauguug

SEQ ID NO: 281600 - RNA, 32 nt, Homo Sapiens
aaaauacaaaaauuagccggguguggugguag

SEQ ID NO: 281601 - RNA, 32 nt, Homo Sapiens
cugcagcccgaguucucuggcucccggguguc

SEQ ID NO: 281602 - RNA, 32 nt, Homo Sapiens
uuugaucgaauccuaaccacagugagcucuuc

SEQ ID NO: 281603 - RNA, 32 nt, Homo Sapiens
aagugauaaaauguuuguuaaagcuagauaga

SEQ ID NO: 281604 - RNA, 32 nt, Homo Sapiens
gcuuggagaagcugcuguuggugcaagggaga

SEQ ID NO: 281605 - RNA, 32 nt, Homo Sapiens
cuuagacaacuguguuucauuugcuguaauca

SEQ ID NO: 281606 - RNA, 32 nt, Homo Sapiens
agucccugcguucccuggcccgagcuggucug

SEQ ID NO: 281607 - RNA, 32 nt, Homo Sapiens
aagagugaacaaagccagagaaaagcaguuuc

SEQ ID NO: 281608 - RNA, 32 nt, Homo Sapiens
gcuaugauuguauuguacguuauuuaaugucu

SEQ ID NO: 281609 - RNA, 32 nt, Homo Sapiens
acacugucucaaaguauguaaagauacauagg

SEQ ID NO: 281610 - RNA, 32 nt, Homo Sapiens
ccccaggaauggggaacucucccucuggucua

SEQ ID NO: 281611 - RNA, 32 nt, Homo Sapiens
cugagaaagggagaagacagcagagggguugc

SEQ ID NO: 281612 - RNA, 32 nt, Homo Sapiens
gugcugcuugggcuugcuggccucaagugccg

SEQ ID NO: 281613 - RNA, 32 nt, Homo Sapiens
ugacauccugccaucuuuucucuucaauuuaa

SEQ ID NO: 281614 - RNA, 32 nt, Homo Sapiens
ggccaguggcagcagccuccucauccucucca

SEQ ID NO: 281615 - RNA, 32 nt, Homo Sapiens
aaugguauugagccuuccugugcugguucccc

SEQ ID NO: 281616 - RNA, 32 nt, Homo Sapiens
uucauucccugccagcaccugcucuccccguu

SEQ ID NO: 281617 - RNA, 32 nt, Homo Sapiens
ugggugcgccccugccacugcugcugauuagg

SEQ ID NO: 281618 - RNA, 32 nt, Homo Sapiens
uguugucaacugaauucacacacacacaaaua

SEQ ID NO: 281619 - RNA, 32 nt, Homo Sapiens
uugaaaccagccuggccaacguggugagaccc

SEQ ID NO: 281620 - RNA, 28 nt, Homo Sapiens
cuaaaggggaagaacauuauaaaaauau

SEQ ID NO: 281621 - RNA, 32 nt, Homo Sapiens
aagauauuugaaauuauguaauucuugaauaa

SEQ ID NO: 281622 - RNA, 32 nt, Homo Sapiens
ugaccggcgggggacgccggugguggcggcag

SEQ ID NO: 281623 - RNA, 32 nt, Homo Sapiens
gaugcuuuguagaggguagaguagacagcccc

SEQ ID NO: 281624 - RNA, 32 nt, Homo Sapiens
cccuucuaccggccucuggcuccggagcugcg

SEQ ID NO: 281625 - RNA, 32 nt, Homo Sapiens
aaaaugcauguuuagggauggcuaaaauucca

SEQ ID NO: 281626 - RNA, 32 nt, Homo Sapiens
ugauuuauuuuuguuuucugaaagaaaucuga

SEQ ID NO: 281627 - RNA, 32 nt, Homo Sapiens
cuagaguguccacagcaggccugugcugcccg

SEQ ID NO: 281628 - RNA, 32 nt, Homo Sapiens
gggguugggauggagcuuuaugcugaacaggu

SEQ ID NO: 281629 - RNA, 32 nt, Homo Sapiens
ccaucucacuaaccacccaccccuaccuggaa

SEQ ID NO: 281630 - RNA, 32 nt, Homo Sapiens
uucccuucaggagaccagcgagaggcccuggc

SEQ ID NO: 281631 - RNA, 32 nt, Homo Sapiens
acuaccccuaaauaaaccugaagcagguguuu

SEQ ID NO: 281632 - RNA, 32 nt, Homo Sapiens
gagcacugaggccccagguguccucccucccc

SEQ ID NO: 281633 - RNA, 32 nt, Homo Sapiens
uccucagcacuccacauucccaaaaaauccca

SEQ ID NO: 281634 - RNA, 32 nt, Homo Sapiens
uccagguauacuuauaaaugccugcagggauu

SEQ ID NO: 281635 - RNA, 32 nt, Homo Sapiens
cuuacguguucccuacccugccacccagccac

SEQ ID NO: 281636 - RNA, 32 nt, Homo Sapiens
cgcuucgccauugcgguauucuuugcgguauu

SEQ ID NO: 281637 - RNA, 32 nt, Homo Sapiens
uauuguuucugcauucauuuuuauagcaacaa

SEQ ID NO: 281638 - RNA, 32 nt, Homo Sapiens
gcgccgcagcgccagcgcucuccccggaucgu

SEQ ID NO: 281639 - RNA, 32 nt, Homo Sapiens
ccacaucguuuuugucgugauuaauuuaacuu

SEQ ID NO: 281640 - RNA, 32 nt, Homo Sapiens
aucaaccagcuaagaaaagauuuuaagucaag

SEQ ID NO: 281641 - RNA, 32 nt, Homo Sapiens
gaaaaauuguaucugccuauaagaaagacuaa

SEQ ID NO: 281642 - RNA, 32 nt, Homo Sapiens
uuugauauggagaaacaaaauccucaggaaau

SEQ ID NO: 281643 - RNA, 32 nt, Homo Sapiens
cauggauggacccuggggagcuaacauccauc

SEQ ID NO: 281644 - RNA, 32 nt, Homo Sapiens
gaguguuuacuuaaaaucaugcccucaaaaaa

SEQ ID NO: 281645 - RNA, 32 nt, Homo Sapiens
ucgguggccuccccaggccccuggacacgaca

SEQ ID NO: 281646 - RNA, 32 nt, Homo Sapiens
guaggaaagacauggaauaaaaaauuuagaua

SEQ ID NO: 281647 - RNA, 32 nt, Homo Sapiens
uuagcuggaaagacauacaaauuuagacucuc

SEQ ID NO: 281648 - RNA, 32 nt, Homo Sapiens
gcugaggcggguggauugcuugaggccaggag

SEQ ID NO: 281649 - RNA, 32 nt, Homo Sapiens
uaucacuuugauuuuucuuuuuccucccuuag

SEQ ID NO: 281650 - RNA, 30 nt, Homo Sapiens
ucggggccacggcugccgccggcaccugcc

SEQ ID NO: 281651 - RNA, 32 nt, Homo Sapiens
cgaacuccugcaaucaucuacucuguucacac

SEQ ID NO: 281652 - RNA, 32 nt, Homo Sapiens
ccaggcagacugccuucuuucacccuguccug

SEQ ID NO: 281653 - RNA, 32 nt, Homo Sapiens
ucuuguuuuugcuugucucauuugaaguucuu

SEQ ID NO: 281654 - RNA, 29 nt, Homo Sapiens
ggcggcucgggacggaggacgcgcuagug

SEQ ID NO: 281655 - RNA, 32 nt, Homo Sapiens
gcuggggagaggggagucuguccccaagacaa

SEQ ID NO: 281656 - RNA, 32 nt, Homo Sapiens
agaaguuaaaacuuaaauugggugauuugugg

SEQ ID NO: 281657 - RNA, 32 nt, Homo Sapiens
cugcaggugcucacccugcugcugaacaaauu

SEQ ID NO: 281658 - RNA, 32 nt, Homo Sapiens
aacacucugugacagagcugcagaccccugcc

SEQ ID NO: 281659 - RNA, 32 nt, Homo Sapiens
gagaagugggagcacaguacugagaaauggga

SEQ ID NO: 281660 - RNA, 31 nt, Homo Sapiens
auucgcagcauucaauaccaggcagccaaag

SEQ ID NO: 281661 - RNA, 32 nt, Homo Sapiens
aaaacuuggcagcuggugauucuccaucauga

SEQ ID NO: 281662 - RNA, 32 nt, Homo Sapiens
uccuucaacauccucacccccaucccugggca

SEQ ID NO: 281663 - RNA, 30 nt, Homo Sapiens
gaagaagaccucuaggaagagcuaguagga

SEQ ID NO: 281664 - RNA, 32 nt, Homo Sapiens
gccucaacaacccugacagagagacccugucu

SEQ ID NO: 281665 - RNA, 32 nt, Homo Sapiens
acuuugguggauuuaaauuucucguucuucaa

SEQ ID NO: 281666 - RNA, 32 nt, Homo Sapiens
uugucugccuguuuuucuuuguaauuuguaau

SEQ ID NO: 281667 - RNA, 32 nt, Homo Sapiens
cuaauauaaaauguuuugcuaaaucuuacaau

SEQ ID NO: 281668 - RNA, 32 nt, Homo Sapiens
ugggcucgggcuccggcuccgcgggcggaaga

SEQ ID NO: 281669 - RNA, 32 nt, Homo Sapiens
guugacacgaggcacagaaaacaaauaucaaa

SEQ ID NO: 281670 - RNA, 32 nt, Homo Sapiens
gguuuggagagccugaagaacugcaguucacg

SEQ ID NO: 281671 - RNA, 32 nt, Homo Sapiens
agagugaugaauuguuggaucauuugaauaaa

SEQ ID NO: 281672 - RNA, 32 nt, Homo Sapiens
ccccaacguacacuuaaaauuggugccgagca

SEQ ID NO: 281673 - RNA, 32 nt, Homo Sapiens
augugcgcgcgugcaugugugcgugcgugugu

SEQ ID NO: 281674 - RNA, 32 nt, Homo Sapiens
ugggggucaacacaagucaccucuuagcuuca

SEQ ID NO: 281675 - RNA, 31 nt, Homo Sapiens
gagcccgggcgggaguggccccgcgcaggca

SEQ ID NO: 281676 - RNA, 32 nt, Homo Sapiens
aaauaaguaaaacugaaauucagugcagagaa

SEQ ID NO: 281677 - RNA, 32 nt, Homo Sapiens
uaccagcuggagguugagcucuucuuaaagua

SEQ ID NO: 281678 - RNA, 32 nt, Homo Sapiens
uguuuuaaaaugccugacaauguagauaauuc

SEQ ID NO: 281679 - RNA, 32 nt, Homo Sapiens
ucuuucaaaaauaucaggcgugccaacucuug

SEQ ID NO: 281680 - RNA, 32 nt, Homo Sapiens
augauaaguaaucuggauaccuuuuucuuaua

SEQ ID NO: 281681 - RNA, 32 nt, Homo Sapiens
cugguggggagcugggggaggggaggucuguu

SEQ ID NO: 281682 - RNA, 32 nt, Homo Sapiens
ugaaugcguucacgccccaguacuggagcgaa

SEQ ID NO: 281683 - RNA, 32 nt, Homo Sapiens
caggagcuccggugcugcagccgccacgaaug

SEQ ID NO: 281684 - RNA, 32 nt, Homo Sapiens
cuguucugcaggcagcuucagaauugagguca

SEQ ID NO: 281685 - RNA, 32 nt, Homo Sapiens
ggcccacuucccuccuccccagggaugccaag

SEQ ID NO: 281686 - RNA, 32 nt, Homo Sapiens
uaacucuuaaaauuauuauguauguguaugug

SEQ ID NO: 281687 - RNA, 32 nt, Homo Sapiens
gcuugcaauggcaacuggccgcccgucugcgc

SEQ ID NO: 281688 - RNA, 32 nt, Homo Sapiens
gaccuagucuguaaguuuuucugucagaagag

SEQ ID NO: 281689 - RNA, 32 nt, Homo Sapiens
agagaaggaaggaagcugaggacuuagcaggg

SEQ ID NO: 281690 - RNA, 32 nt, Homo Sapiens
gguccagcagcuugcuguggggugcugacaug

SEQ ID NO: 281691 - RNA, 32 nt, Homo Sapiens
ugacagcuggaaccacaccugguugccccacu

SEQ ID NO: 281692 - RNA, 32 nt, Homo Sapiens
cgggaaaagguagucgcaaugucauugucaga

SEQ ID NO: 281693 - RNA, 32 nt, Homo Sapiens
caagggcuacucucuggcaucuccagguguuu

SEQ ID NO: 281694 - RNA, 32 nt, Homo Sapiens
aagcggggcuguuggcggcugccuggccaaag

SEQ ID NO: 281695 - RNA, 32 nt, Homo Sapiens
auauguuaaguggcagaauagccuuagugcua

SEQ ID NO: 281696 - RNA, 32 nt, Homo Sapiens
ucugcaaaauggggauuaagaauagaaucuug

SEQ ID NO: 281697 - RNA, 32 nt, Homo Sapiens
cguggaggccgcggugcugcguaggccgggcc

SEQ ID NO: 281698 - RNA, 32 nt, Homo Sapiens
ccgagaucauugcauugcacuccagcuugagc

SEQ ID NO: 281699 - RNA, 32 nt, Homo Sapiens
ucucuaccucauccguagguguggcccugaug

SEQ ID NO: 281700 - RNA, 32 nt, Homo Sapiens
ccugcuguuguccuaguggcuaucacaggccu

SEQ ID NO: 281701 - RNA, 32 nt, Homo Sapiens
gcaaauggagauaacagagucuggccuuucca

SEQ ID NO: 281702 - RNA, 32 nt, Homo Sapiens
ccccggcagcgggguaggauggcgcuaaagcg

SEQ ID NO: 281703 - RNA, 32 nt, Homo Sapiens
cauuugaauacaaaaaguugugccagauuguu

SEQ ID NO: 281704 - RNA, 32 nt, Homo Sapiens
acuuuaugaugauaaauuuguguuggucguaa

SEQ ID NO: 281705 - RNA, 32 nt, Homo Sapiens
ccccggguuccuuaaugccuccuucacugggc

SEQ ID NO: 281706 - RNA, 32 nt, Homo Sapiens
uuccacccauccccuuagccaaccucugucuu

SEQ ID NO: 281707 - RNA, 32 nt, Homo Sapiens
aggggggagaaagggauaccucgggugcuugg

SEQ ID NO: 281708 - RNA, 32 nt, Homo Sapiens
ggucuuggugccagcccugcugcccuggcuuu

SEQ ID NO: 281709 - RNA, 32 nt, Homo Sapiens
uauuuuacuuuuuaaaaugacauuccuacuga

SEQ ID NO: 281710 - RNA, 32 nt, Homo Sapiens
uguggcgauccgguugcacacuggccucugug

SEQ ID NO: 281711 - RNA, 32 nt, Homo Sapiens
guaggggagacgggugccaccaguauccagug

SEQ ID NO: 281712 - RNA, 32 nt, Homo Sapiens
gucuacauuuuggcaaaaugggcugcuuuuaa

SEQ ID NO: 281713 - RNA, 31 nt, Homo Sapiens
uaagaaaauugagccauuaaagccuuguuau

SEQ ID NO: 281714 - RNA, 32 nt, Homo Sapiens
ugagcugguggucuucaaggggcucaugagua

SEQ ID NO: 281715 - RNA, 32 nt, Homo Sapiens
gcacacacucuuccuuugucuuauugaauuca

SEQ ID NO: 281716 - RNA, 32 nt, Homo Sapiens
cggacgccucagucccccggcggcgccggagg

SEQ ID NO: 281717 - RNA, 32 nt, Homo Sapiens
gaccccacgcccagcccuucuggcaccccugg

SEQ ID NO: 281718 - RNA, 32 nt, Homo Sapiens
ggccucugaggggccaggcaccccccaccacu

SEQ ID NO: 281719 - RNA, 32 nt, Homo Sapiens
ccaguuuggacaauuugaaauuaccuauugcu

SEQ ID NO: 281720 - RNA, 32 nt, Homo Sapiens
cccucagagcagcccugaaaauauucccggcu

SEQ ID NO: 281721 - RNA, 32 nt, Homo Sapiens
uccccaugucuagagauuaaugguguagauag

SEQ ID NO: 281722 - RNA, 32 nt, Homo Sapiens
gaaggaggcggcgaggcugugcggcgggucgg

SEQ ID NO: 281723 - RNA, 32 nt, Homo Sapiens
ggagucgggacuggagcugcugccgcggcgac

SEQ ID NO: 281724 - RNA, 31 nt, Homo Sapiens
cccggaaugcuucaccuguccgcagcuccgc

SEQ ID NO: 281725 - RNA, 32 nt, Homo Sapiens
aagagauuggaagaaaaugaugaugaugccua

SEQ ID NO: 281726 - RNA, 32 nt, Homo Sapiens
agaagugcaggccccuucccccugccagcagc

SEQ ID NO: 281727 - RNA, 32 nt, Homo Sapiens
ugugagaauaccacaagaagacuguccucagc

SEQ ID NO: 281728 - RNA, 32 nt, Homo Sapiens
gugauucucugcccugagccaccacccuggac

SEQ ID NO: 281729 - RNA, 32 nt, Homo Sapiens
uacaaauuucccuccuaccacugcuuugacug

SEQ ID NO: 281730 - RNA, 32 nt, Homo Sapiens
aggaucuuaaaaugggcaggaggacugugaac

SEQ ID NO: 281731 - RNA, 30 nt, Homo Sapiens
guccaagucugugcccaaagcuuggucccc

SEQ ID NO: 281732 - RNA, 32 nt, Homo Sapiens
uugacaaagcucucagcuccaaugagguaacc

SEQ ID NO: 281733 - RNA, 32 nt, Homo Sapiens
cugugauagggagagugaaggagggauaugug

SEQ ID NO: 281734 - RNA, 32 nt, Homo Sapiens
uauugaagggaagagggaccagcacaugaggc

SEQ ID NO: 281735 - RNA, 32 nt, Homo Sapiens
uccacuuagcuugggugacuaauagugcuuuu

SEQ ID NO: 281736 - RNA, 32 nt, Homo Sapiens
ccuccccucacaguugagcaccuguuugccug

SEQ ID NO: 281737 - RNA, 32 nt, Homo Sapiens
cuagggcauuggcgcgcugcugggugacuucc

SEQ ID NO: 281738 - RNA, 32 nt, Homo Sapiens
ucugccugccagcggccugcccugcaccgcac

SEQ ID NO: 281739 - RNA, 32 nt, Homo Sapiens
ggugucuuaaacaacuaaaagcgaugaagguu

SEQ ID NO: 281740 - RNA, 32 nt, Homo Sapiens
cgugaggagaugcgucagucccggggcaauug

SEQ ID NO: 281741 - RNA, 32 nt, Homo Sapiens
accauucuauagaccccaagcugaccagggga

SEQ ID NO: 281742 - RNA, 32 nt, Homo Sapiens
ggaugguguuuaugaagugagccuggacaaca

SEQ ID NO: 281743 - RNA, 32 nt, Homo Sapiens
gauaguuuuagaggaauucuccugcuacuuag

SEQ ID NO: 281744 - RNA, 32 nt, Homo Sapiens
cauagguaaaaccagcaguuuccaguaauaua

SEQ ID NO: 281745 - RNA, 32 nt, Homo Sapiens
augaagaaaugggaguugucagagcauuaaaa

SEQ ID NO: 281746 - RNA, 32 nt, Homo Sapiens
ggcccucccuccccuuggccucuaggaggaaa

SEQ ID NO: 281747 - RNA, 32 nt, Homo Sapiens
ucgggccgggaagaggggaaggggagcgaggu

SEQ ID NO: 281748 - RNA, 32 nt, Homo Sapiens
gccagguugcgucaugacggaccuuccccagc

SEQ ID NO: 281749 - RNA, 32 nt, Homo Sapiens
cggcacugccccccauuauccaccaggagaag

SEQ ID NO: 281750 - RNA, 32 nt, Homo Sapiens
caguagaaauuuaagaaagaagauguaaaaaa

SEQ ID NO: 281751 - RNA, 32 nt, Homo Sapiens
aucuacagccugccucccagguuucuggcuug

SEQ ID NO: 281752 - RNA, 32 nt, Homo Sapiens
ucugucugacuuucuuuuuugauauagaagua

SEQ ID NO: 281753 - RNA, 32 nt, Homo Sapiens
aaacaaacaaacaaacaaaaaacucaaaaaaa

SEQ ID NO: 281754 - RNA, 32 nt, Homo Sapiens
uucucuuuuuuuuuuucuuuuuaaaucucucu

SEQ ID NO: 281755 - RNA, 31 nt, Homo Sapiens
aaauugugaaacaugaaauuucugcugacuu

SEQ ID NO: 281756 - RNA, 32 nt, Homo Sapiens
uaaagcuauuuaauauagaaauguuuuuagcc

SEQ ID NO: 281757 - RNA, 32 nt, Homo Sapiens
agcagcccucgcgaccgggauaagggugugcu

SEQ ID NO: 281758 - RNA, 32 nt, Homo Sapiens
ugcauuucauuuuuggggaacuucauuaaugu

SEQ ID NO: 281759 - RNA, 32 nt, Homo Sapiens
ggggaggcggcaagaggaccuguggcaggccc

SEQ ID NO: 281760 - RNA, 32 nt, Homo Sapiens
cuuccugaaaauuuccaaggggcaucaagugg

SEQ ID NO: 281761 - RNA, 32 nt, Homo Sapiens
ccggcggagggugugacccgucugcaccuugc

SEQ ID NO: 281762 - RNA, 32 nt, Homo Sapiens
aauuguauugggaugccuaugaucuuaucuag

SEQ ID NO: 281763 - RNA, 32 nt, Homo Sapiens
uggagguuuuuuuuuucuuuuugcuacuauga

SEQ ID NO: 281764 - RNA, 32 nt, Homo Sapiens
ggcaagaggaggggcgcgggguaaugguggcc

SEQ ID NO: 281765 - RNA, 32 nt, Homo Sapiens
uggagucugggcgggggccgggccggagcggg

SEQ ID NO: 281766 - RNA, 32 nt, Homo Sapiens
aggacucgcgugcaaagcccaggcccgggcgg

SEQ ID NO: 281767 - RNA, 30 nt, Homo Sapiens
aauuucagugguaguggggaaaccugaauu

SEQ ID NO: 281768 - RNA, 29 nt, Homo Sapiens
gacaaugcugguuuuuccuaugugcacca

SEQ ID NO: 281769 - RNA, 32 nt, Homo Sapiens
uggccuuucugccaauaaaguugcaugguaaa

SEQ ID NO: 281770 - RNA, 32 nt, Homo Sapiens
acccccagcuccgacuccagacucucugcauc

SEQ ID NO: 281771 - RNA, 32 nt, Homo Sapiens
cggaacucguagaggcggcccacgcgcuggaa

SEQ ID NO: 281772 - RNA, 32 nt, Homo Sapiens
aaaguuaagauugcugcauaauaauuccuuug

SEQ ID NO: 281773 - RNA, 32 nt, Homo Sapiens
guagauuaaaauuaagcuugcauaaagguugg

SEQ ID NO: 281774 - RNA, 32 nt, Homo Sapiens
aggcagcaucuagcagaaagccaggcauggag

SEQ ID NO: 281775 - RNA, 32 nt, Homo Sapiens
gccucugccucccagguucaagagauucuucu

SEQ ID NO: 281776 - RNA, 32 nt, Homo Sapiens
agcggcgguggcggcagguggggaagcgcggc

SEQ ID NO: 281777 - RNA, 32 nt, Homo Sapiens
gccuggaggaagguccuggggcgugcacucgc

SEQ ID NO: 281778 - RNA, 32 nt, Homo Sapiens
ccccagcucccucuuggguccugugccaaguc

SEQ ID NO: 281779 - RNA, 32 nt, Homo Sapiens
aagcccuucuccccgggucugcccuguggggg

SEQ ID NO: 281780 - RNA, 32 nt, Homo Sapiens
uuguaagucugauuacaucauuauuguuccaa

SEQ ID NO: 281781 - RNA, 32 nt, Homo Sapiens
gccagcucccuggccugcugcccgcacagugg

SEQ ID NO: 281782 - RNA, 32 nt, Homo Sapiens
gcucuccuguugcuaccacggaccccaucaca

SEQ ID NO: 281783 - RNA, 32 nt, Homo Sapiens
gaaagcaggacacacgugaguccagccaacuc

SEQ ID NO: 281784 - RNA, 32 nt, Homo Sapiens
augagguuucuuuuuucuuuuuccuuuuuuua

SEQ ID NO: 281785 - RNA, 32 nt, Homo Sapiens
ggaacauugugagaauggccagucuggaaagc

SEQ ID NO: 281786 - RNA, 32 nt, Homo Sapiens
cccugggaccuguucccugugcucccugccuc

SEQ ID NO: 281787 - RNA, 32 nt, Homo Sapiens
caagagcggcucugccucgaggaggaggauug

SEQ ID NO: 281788 - RNA, 32 nt, Homo Sapiens
uccuguaccugugcuuuccccuggcugcuucu

SEQ ID NO: 281789 - RNA, 32 nt, Homo Sapiens
agaaagcccaugaacuguuauguuaaaugguu

SEQ ID NO: 281790 - RNA, 32 nt, Homo Sapiens
uuuuucaaguccacuauaaaucuuaucaaacc

SEQ ID NO: 281791 - RNA, 32 nt, Homo Sapiens
uucuauauggacauagcacagaugaaccaaaa

SEQ ID NO: 281792 - RNA, 32 nt, Homo Sapiens
uucuaucaggaaaacaaaucacuguauuuauc

SEQ ID NO: 281793 - RNA, 32 nt, Homo Sapiens
ggugaguuuugaacaagaacuaccaucaugca

SEQ ID NO: 281794 - RNA, 32 nt, Homo Sapiens
uggugggccgagggcugcucggccgccgcagc

SEQ ID NO: 281795 - RNA, 32 nt, Homo Sapiens
uuucugauguucuugucucugucgcuuauguu

SEQ ID NO: 281796 - RNA, 32 nt, Homo Sapiens
aguucaagccgggccuggccuacguggggaag

SEQ ID NO: 281797 - RNA, 32 nt, Homo Sapiens
ccgcucagaggcuucagccugacuuccagcgg

SEQ ID NO: 281798 - RNA, 32 nt, Homo Sapiens
aguggaaggcaucagucccuauguauuugcag

SEQ ID NO: 281799 - RNA, 32 nt, Homo Sapiens
ccugacccacugaggguuuguugugagaauug

SEQ ID NO: 281800 - RNA, 32 nt, Homo Sapiens
cuacaggcgugagccaccacgcccggccagca

SEQ ID NO: 281801 - RNA, 32 nt, Homo Sapiens
uuccuaccagugcggcucaaugugcugcgccu

SEQ ID NO: 281802 - RNA, 31 nt, Homo Sapiens
guguggcaggagguuuuggacucgaugaguu

SEQ ID NO: 281803 - RNA, 32 nt, Homo Sapiens
aaaauaaaaguacuacauuucuaacguauucc

SEQ ID NO: 281804 - RNA, 32 nt, Homo Sapiens
guggggccgggcggcggcaaggcgacggaaug

SEQ ID NO: 281805 - RNA, 32 nt, Homo Sapiens
ggagggcggcaugcagcuccgcguugccuggc

SEQ ID NO: 281806 - RNA, 32 nt, Homo Sapiens
gcacacuauuaaaauauuaaguguaauuauuu

SEQ ID NO: 281807 - RNA, 31 nt, Homo Sapiens
gaguucuauugaguauuauaagauagcuuac

SEQ ID NO: 281808 - RNA, 32 nt, Homo Sapiens
uucaguuuugagccccguuaugcugccuguac

SEQ ID NO: 281809 - RNA, 32 nt, Homo Sapiens
gaauugagaagcauuucuccccugccccaccc

SEQ ID NO: 281810 - RNA, 32 nt, Homo Sapiens
cuucgucccuacugccugggcgcggggcggga

SEQ ID NO: 281811 - RNA, 32 nt, Homo Sapiens
cucaccccgcccucuccugggguggugguggg

SEQ ID NO: 281812 - RNA, 28 nt, Homo Sapiens
accuaccuugcaggaccacgacaggauu

SEQ ID NO: 281813 - RNA, 32 nt, Homo Sapiens
agauacgguccccugcccggugauggacccac

SEQ ID NO: 281814 - RNA, 32 nt, Homo Sapiens
cugccuggguccuggcccuccucccccaucug

SEQ ID NO: 281815 - RNA, 32 nt, Homo Sapiens
gagagaucaucauauauaucuccuuuguguuc

SEQ ID NO: 281816 - RNA, 32 nt, Homo Sapiens
auacauauauucaaauaucucauuguacccca

SEQ ID NO: 281817 - RNA, 32 nt, Homo Sapiens
auuggaagcagaaucugaaacuuucugaggag

SEQ ID NO: 281818 - RNA, 32 nt, Homo Sapiens
ugugugugagugugugugaacuucugaaagac

SEQ ID NO: 281819 - RNA, 32 nt, Homo Sapiens
uaaacaaauaaguaguaaaauaagguaagaag

SEQ ID NO: 281820 - RNA, 32 nt, Homo Sapiens
cgcuugccucugugagcuuucuaggccugggu

SEQ ID NO: 281821 - RNA, 32 nt, Homo Sapiens
aucaaagacauuccguaaguuggcaaaagaaa

SEQ ID NO: 281822 - RNA, 32 nt, Homo Sapiens
aaauggcuauagaaaaauuugucauaauaauu

SEQ ID NO: 281823 - RNA, 32 nt, Homo Sapiens
gaccuugcuguaaagauuuuguaauaaaaugg

SEQ ID NO: 281824 - RNA, 32 nt, Homo Sapiens
aggguuacuuggauggccaacuccgcuuccuu

SEQ ID NO: 281825 - RNA, 32 nt, Homo Sapiens
ucugagcccucccucuucccagcacaggcagg

SEQ ID NO: 281826 - RNA, 32 nt, Homo Sapiens
uggaaaguuugcugucacaucuccauuaugac

SEQ ID NO: 281827 - RNA, 32 nt, Homo Sapiens
uucagauuuuuccaugauagaaaguuaagcca

SEQ ID NO: 281828 - RNA, 32 nt, Homo Sapiens
agggauaaauuccacuugaucauuguggauaa

SEQ ID NO: 281829 - RNA, 32 nt, Homo Sapiens
aguauuuuucuaauauaccauagaagccagga

SEQ ID NO: 281830 - RNA, 32 nt, Homo Sapiens
uggagcugccagcagcaccccuuucgcacugc

SEQ ID NO: 281831 - RNA, 32 nt, Homo Sapiens
gugcgucugcgagcgcacacacaugcacaagu

SEQ ID NO: 281832 - RNA, 31 nt, Homo Sapiens
cuauggaaauaaaaauauuuguuagugaauu

SEQ ID NO: 281833 - RNA, 32 nt, Homo Sapiens
ccccgcuccccucucccccaccaggcgagcag

SEQ ID NO: 281834 - RNA, 32 nt, Homo Sapiens
cuuucgggggcguggggcgcgcugcggagcgg

SEQ ID NO: 281835 - RNA, 32 nt, Homo Sapiens
ucccuaacaacuguuucaguacugacugagug

SEQ ID NO: 281836 - RNA, 32 nt, Homo Sapiens
guguuguacauacagagguaacuaucaauauu

SEQ ID NO: 281837 - RNA, 32 nt, Homo Sapiens
uugcuguuuuaacuugcucugugagggaaauc

SEQ ID NO: 281838 - RNA, 32 nt, Homo Sapiens
agugauguauguuauuugaugacugaaaauga

SEQ ID NO: 281839 - RNA, 32 nt, Homo Sapiens
ucccucagaaaagagggacgugacagagcaag

SEQ ID NO: 281840 - RNA, 32 nt, Homo Sapiens
acccaucauauucagugucccuguuccucacu

SEQ ID NO: 281841 - RNA, 32 nt, Homo Sapiens
ugaugugugaaugacauugcagugagcuagau

SEQ ID NO: 281842 - RNA, 32 nt, Homo Sapiens
uaaauauucuggauaggaacuacuugaaauag

SEQ ID NO: 281843 - RNA, 32 nt, Homo Sapiens
aucugaaacugggguucucuaagaccuaagua

SEQ ID NO: 281844 - RNA, 32 nt, Homo Sapiens
aguugccugcagcauccuuguguguagauaaa

SEQ ID NO: 281845 - RNA, 32 nt, Homo Sapiens
aaagaguaacacugaggcgcucgcucccaugc

SEQ ID NO: 281846 - RNA, 32 nt, Homo Sapiens
ggccauguugcagcugcugaucagagcacauu

SEQ ID NO: 281847 - RNA, 32 nt, Homo Sapiens
uccuuaauaugccugacaggcaucugagcaaa

SEQ ID NO: 281848 - RNA, 29 nt, Homo Sapiens
gagggccgucugagccuggccgcggccgc

SEQ ID NO: 281849 - RNA, 32 nt, Homo Sapiens
ccacacccuuguguugcgcccggagcccgccc

SEQ ID NO: 281850 - RNA, 32 nt, Homo Sapiens
gcacaguuacacaugcuuucugaucucaguau

SEQ ID NO: 281851 - RNA, 32 nt, Homo Sapiens
caaaguggagucaugugugguuuaugggguag

SEQ ID NO: 281852 - RNA, 32 nt, Homo Sapiens
auguauucacugaccaaaaauucacugaccaa

SEQ ID NO: 281853 - RNA, 32 nt, Homo Sapiens
uagucaacaaaguuaaauccaaauucaaaauu

SEQ ID NO: 281854 - RNA, 32 nt, Homo Sapiens
ggcggagcuaggggcgggccccugcgucucug

SEQ ID NO: 281855 - RNA, 32 nt, Homo Sapiens
ccugcgcaggggcuuggccaguccuggucagc

SEQ ID NO: 281856 - RNA, 32 nt, Homo Sapiens
aaguuacagaaauuuuaacaaacauuuuucuu

SEQ ID NO: 281857 - RNA, 32 nt, Homo Sapiens
ccagacucaaaaaauaaaaauaaaaacccuga

SEQ ID NO: 281858 - RNA, 32 nt, Homo Sapiens
aaauaguagaggggaagaaauuauagaaaaca

SEQ ID NO: 281859 - RNA, 32 nt, Homo Sapiens
agaagcagcagugccucuguaggaggggugcu

SEQ ID NO: 281860 - RNA, 32 nt, Homo Sapiens
ucagcuaaaggaaugugagauuuuaaauuauu

SEQ ID NO: 281861 - RNA, 32 nt, Homo Sapiens
acuuuuagaauuugggcuggugagauuaauuu

SEQ ID NO: 281862 - RNA, 32 nt, Homo Sapiens
auuaauuuuuauuaugaaacuuuccuuuguca

SEQ ID NO: 281863 - RNA, 32 nt, Homo Sapiens
gaggaucggaagcuggucagcagcuguuggga

SEQ ID NO: 281864 - RNA, 32 nt, Homo Sapiens
gcuggaggccucuggagaagaccugggguggg

SEQ ID NO: 281865 - RNA, 32 nt, Homo Sapiens
gcuguuuugucaacucucauccacugguggcu

SEQ ID NO: 281866 - RNA, 32 nt, Homo Sapiens
acaaaaugaugauuagugugauaaugugcugc

SEQ ID NO: 281867 - RNA, 32 nt, Homo Sapiens
agaaauuucuuacauguauauuucuuauguua

SEQ ID NO: 281868 - RNA, 32 nt, Homo Sapiens
uuugauuugauuagguaucuuuuuacaccagu

SEQ ID NO: 281869 - RNA, 32 nt, Homo Sapiens
ggacccauccucuuggguggguuuuggguguu

SEQ ID NO: 281870 - RNA, 32 nt, Homo Sapiens
gcaaaacucuagugacuuugggcccgcccccg

SEQ ID NO: 281871 - RNA, 32 nt, Homo Sapiens
ccugccgcucccgccccgggcuggcgaugcug

SEQ ID NO: 281872 - RNA, 32 nt, Homo Sapiens
uuuuucuuaacgagauuugcuucugucuuagc

SEQ ID NO: 281873 - RNA, 32 nt, Homo Sapiens
cucaguguggagggacguaguaccccacacac

SEQ ID NO: 281874 - RNA, 32 nt, Homo Sapiens
accgcccagcacccggccccuaccuccuacca

SEQ ID NO: 281875 - RNA, 32 nt, Homo Sapiens
cccuguuaaggcuucagguaucuuucaaccaa

SEQ ID NO: 281876 - RNA, 32 nt, Homo Sapiens
aaucccgccaaauaugaagaaacuacaaucag

SEQ ID NO: 281877 - RNA, 32 nt, Homo Sapiens
cucuuagcccguccacuccccauccccacagu

SEQ ID NO: 281878 - RNA, 32 nt, Homo Sapiens
uuucuggcugggcccaguggcucacgccuaua

SEQ ID NO: 281879 - RNA, 32 nt, Homo Sapiens
cuuuugagggaagagggagacuggggagaagg

SEQ ID NO: 281880 - RNA, 32 nt, Homo Sapiens
gugagccaccgcgcccggccuaggucauuugu

SEQ ID NO: 281881 - RNA, 32 nt, Homo Sapiens
aacuguauauuuguaugauauuuuaaaaucuc

SEQ ID NO: 281882 - RNA, 31 nt, Homo Sapiens
uaaauauaagccaccagaguugccugcuuuu

SEQ ID NO: 281883 - RNA, 32 nt, Homo Sapiens
uccugucuguauguggaauggaaggaccgugc

SEQ ID NO: 281884 - RNA, 32 nt, Homo Sapiens
caugugggcucauucucuccaagcugcuuuuc

SEQ ID NO: 281885 - RNA, 32 nt, Homo Sapiens
cgguccggcagcagcccggcccccggacgcag

SEQ ID NO: 281886 - RNA, 30 nt, Homo Sapiens
agggccaggggacucugugagucuggcuca

SEQ ID NO: 281887 - RNA, 32 nt, Homo Sapiens
uccgcgcccagcugcaugugugcaacuacagu

SEQ ID NO: 281888 - RNA, 32 nt, Homo Sapiens
aguuacuuaaaaauacuuucugaggaagacaa

SEQ ID NO: 281889 - RNA, 27 nt, Homo Sapiens
agccuguucuucuucagucaguccggc

SEQ ID NO: 281890 - RNA, 32 nt, Homo Sapiens
ugcugagccugccugucgucuguggccaugcc

SEQ ID NO: 281891 - RNA, 32 nt, Homo Sapiens
ucauaccacgggaggagccgcagcugccgcag

SEQ ID NO: 281892 - RNA, 32 nt, Homo Sapiens
uucaggcauauuuuaacuccacugcuuaccua

SEQ ID NO: 281893 - RNA, 32 nt, Homo Sapiens
cccgggcugcgcggccggagcuggcacagagg

SEQ ID NO: 281894 - RNA, 32 nt, Homo Sapiens
ucuacaaaaaauauaaaaauuaacuagggguu

SEQ ID NO: 281895 - RNA, 32 nt, Homo Sapiens
ggagcaacaccugugccgcggccggaggaguu

SEQ ID NO: 281896 - RNA, 25 nt, Homo Sapiens
auggccuccuccgccgccuccucgg

SEQ ID NO: 281897 - RNA, 32 nt, Homo Sapiens
uuaucuugcugaagauggccaaggcuggccuc

SEQ ID NO: 281898 - RNA, 32 nt, Homo Sapiens
ccuaaaacguauucuguaaagcuuaaauuggu

SEQ ID NO: 281899 - RNA, 32 nt, Homo Sapiens
cuucggagagagaugcgcucucguguagccgu

SEQ ID NO: 281900 - RNA, 32 nt, Homo Sapiens
acagggugcagcugggagucuagccccuuccc

SEQ ID NO: 281901 - RNA, 32 nt, Homo Sapiens
uaccucuagcuaaacccagcuggacaaagaga

SEQ ID NO: 281902 - RNA, 32 nt, Homo Sapiens
ccaaggagauggggagggcgcuuuuguacguu

SEQ ID NO: 281903 - RNA, 32 nt, Homo Sapiens
uauaccaauuuaaaaauauaaauuuuugccac

SEQ ID NO: 281904 - RNA, 32 nt, Homo Sapiens
aguuguugauuaaugcuaaaaaccaaauuauc

SEQ ID NO: 281905 - RNA, 32 nt, Homo Sapiens
gcaauuucuugccucccuuccucccccaaauc

SEQ ID NO: 281906 - RNA, 32 nt, Homo Sapiens
ggggcgcuaugguuaagaguuuucauauucug

SEQ ID NO: 281907 - RNA, 32 nt, Homo Sapiens
gcacaaguaaaaguccaauguugugugcauga

SEQ ID NO: 281908 - RNA, 32 nt, Homo Sapiens
uugaugucgaaggauauauacaguguuagaaa

SEQ ID NO: 281909 - RNA, 32 nt, Homo Sapiens
aucgccaucuucuucccuuaacuccaagaacu

SEQ ID NO: 281910 - RNA, 32 nt, Homo Sapiens
acaggauguuuuacauucucuuggucuuauaa

SEQ ID NO: 281911 - RNA, 32 nt, Homo Sapiens
uuuucuuguauuuuuccaauuagcuccuccuu

SEQ ID NO: 281912 - RNA, 32 nt, Homo Sapiens
caacuguuuuuauuacuaauggcauuuaguaa

SEQ ID NO: 281913 - RNA, 32 nt, Homo Sapiens
uuuucuuucccuucuuuuucccuuuccuuucc

SEQ ID NO: 281914 - RNA, 32 nt, Homo Sapiens
gggacuuaaaacauuucuaaucuccuaguuua

SEQ ID NO: 281915 - RNA, 32 nt, Homo Sapiens
gcgauuuaccuguuuucgcaccuaccaucagg

SEQ ID NO: 281916 - RNA, 32 nt, Homo Sapiens
ggaagcggacauuugguucagaacgagcauuu

SEQ ID NO: 281917 - RNA, 32 nt, Homo Sapiens
ccccucagcucuuugccuuaucugugucacug

SEQ ID NO: 281918 - RNA, 32 nt, Homo Sapiens
gcccagaaguggaugaugugggaguugacagg

SEQ ID NO: 281919 - RNA, 32 nt, Homo Sapiens
gaaugugucccaugcauaacacacuacuggau

SEQ ID NO: 281920 - RNA, 32 nt, Homo Sapiens
ugcuagaauucaacugugacuccauccggucc

SEQ ID NO: 281921 - RNA, 32 nt, Homo Sapiens
ugaaauguuuaugaaagaaauuccuucaccuc

SEQ ID NO: 281922 - RNA, 30 nt, Homo Sapiens
guaccggcgcccgguggccgagcgcgccca

SEQ ID NO: 281923 - RNA, 32 nt, Homo Sapiens
uuugguguggaucgauucuguuugggacacac

SEQ ID NO: 281924 - RNA, 32 nt, Homo Sapiens
ccgaauuuuagcuccuccuuucaacauucaac

SEQ ID NO: 281925 - RNA, 31 nt, Homo Sapiens
cuguggaggcacugccugccucaccugccuc

SEQ ID NO: 281926 - RNA, 32 nt, Homo Sapiens
ccagccucgaucgcucgccgcggcgacucggc

SEQ ID NO: 281927 - RNA, 32 nt, Homo Sapiens
ugucuaugaaauucugugauaauuuuuuucaa

SEQ ID NO: 281928 - RNA, 32 nt, Homo Sapiens
uuuuguuuugguuuuucugcagguuccaugaa

SEQ ID NO: 281929 - RNA, 32 nt, Homo Sapiens
uguucuggguggcaguggagccuggcaaggug

SEQ ID NO: 281930 - RNA, 32 nt, Homo Sapiens
caaugggcccuccgucuggccucccuucccuu

SEQ ID NO: 281931 - RNA, 32 nt, Homo Sapiens
cacauggcucuuucuucuccgagaucccagga

SEQ ID NO: 281932 - RNA, 32 nt, Homo Sapiens
gcacccccgcggccacggcgccucugucccuc

SEQ ID NO: 281933 - RNA, 32 nt, Homo Sapiens
auccuugacccugggaagucuggagcacccug

SEQ ID NO: 281934 - RNA, 32 nt, Homo Sapiens
gugauauuuugcuuuugcaccuuuaaaacaau

SEQ ID NO: 281935 - RNA, 32 nt, Homo Sapiens
cugacuaacaaggcauuuaggugugcagcauc

SEQ ID NO: 281936 - RNA, 32 nt, Homo Sapiens
uccauacaaaauuguuuccuauaagcauuccu

SEQ ID NO: 281937 - RNA, 32 nt, Homo Sapiens
gggggccgagcggagggcucucgggugggaga

SEQ ID NO: 281938 - RNA, 32 nt, Homo Sapiens
accuccgccucccagguucaggcgauucuccu

SEQ ID NO: 281939 - RNA, 32 nt, Homo Sapiens
auucggugucauuuuuuuuucuuuuuugagac

SEQ ID NO: 281940 - RNA, 32 nt, Homo Sapiens
uuucaaccaaaaugaccucauuugaaaugccc

SEQ ID NO: 281941 - RNA, 32 nt, Homo Sapiens
gguacgggcugcggccggcgaaccccacggag

SEQ ID NO: 281942 - RNA, 32 nt, Homo Sapiens
gugugguucucauuuuaaaccuuggaagguga

SEQ ID NO: 281943 - RNA, 32 nt, Homo Sapiens
ggggcagaaacacguggaccagccaccaaccu

SEQ ID NO: 281944 - RNA, 32 nt, Homo Sapiens
gagcaggugauauccauguuucuucccuuucu

SEQ ID NO: 281945 - RNA, 32 nt, Homo Sapiens
cuaaagcagcugccuccuuuugcuggucugag

SEQ ID NO: 281946 - RNA, 32 nt, Homo Sapiens
ccgcgguguuuguuuugugaaagcuucugauu

SEQ ID NO: 281947 - RNA, 32 nt, Homo Sapiens
ccgcgucccccacgcgcccccggagacgcccu

SEQ ID NO: 281948 - RNA, 32 nt, Homo Sapiens
auagaaauuagggaaaguuugucaauuuguuu

SEQ ID NO: 281949 - RNA, 32 nt, Homo Sapiens
aaaacaaagcauuuuucuuauuuuccacaacu

SEQ ID NO: 281950 - RNA, 32 nt, Homo Sapiens
cuugauucacccuugaaguaauguagacagaa

SEQ ID NO: 281951 - RNA, 32 nt, Homo Sapiens
ggcacccaccccagccugucccccaacaaccc

SEQ ID NO: 281952 - RNA, 28 nt, Homo Sapiens
ggguggggggugccgccgagggagucgc

SEQ ID NO: 281953 - RNA, 32 nt, Homo Sapiens
acaugccccccgcgccggcuccuugcuggcgg

SEQ ID NO: 281954 - RNA, 30 nt, Homo Sapiens
acauuugucugugauauugacccuuuuuau

SEQ ID NO: 281955 - RNA, 32 nt, Homo Sapiens
ccacccugucuccaagcuucccagcagagccc

SEQ ID NO: 281956 - RNA, 32 nt, Homo Sapiens
aagaaaagguggcccugcagcugcuggagacg

SEQ ID NO: 281957 - RNA, 32 nt, Homo Sapiens
ccugcuucccccuguggccggcaugccccgau

SEQ ID NO: 281958 - RNA, 31 nt, Homo Sapiens
cgucagugaaacacuuagagcaguuucuggc

SEQ ID NO: 281959 - RNA, 31 nt, Homo Sapiens
aagugccucauuucugugccaaauguuugcc

SEQ ID NO: 281960 - RNA, 32 nt, Homo Sapiens
aacagggcaugucccgggaggacccugagugc

SEQ ID NO: 281961 - RNA, 32 nt, Homo Sapiens
ggcugcccuucccccacccccacggcucuccu

SEQ ID NO: 281962 - RNA, 32 nt, Homo Sapiens
guucuauagaucaauuacaugucacagggguu

SEQ ID NO: 281963 - RNA, 32 nt, Homo Sapiens
gccagcagccggaugcccgggcccacugggcg

SEQ ID NO: 281964 - RNA, 32 nt, Homo Sapiens
auuguuucuacugaaccuugguaaauguguga

SEQ ID NO: 281965 - RNA, 32 nt, Homo Sapiens
ggacaucaauguagaguccaucuuucaagcac

SEQ ID NO: 281966 - RNA, 32 nt, Homo Sapiens
ccguggucagagagggcgcgguggccuggcca

SEQ ID NO: 281967 - RNA, 32 nt, Homo Sapiens
ucccgcccaagccccucauucccuccuugcac

SEQ ID NO: 281968 - RNA, 32 nt, Homo Sapiens
auggugagggguuggggggcaguugggcacac

SEQ ID NO: 281969 - RNA, 32 nt, Homo Sapiens
gcugggucgcguuagagugcccgccccacucc

SEQ ID NO: 281970 - RNA, 32 nt, Homo Sapiens
acaaauaaagaaaaacaaaacugcgcccgucu

SEQ ID NO: 281971 - RNA, 32 nt, Homo Sapiens
augggcaucagaaagcacuguggacgcacaga

SEQ ID NO: 281972 - RNA, 32 nt, Homo Sapiens
ugcuagaagugguuccugaauuuuauaaaaug

SEQ ID NO: 281973 - RNA, 32 nt, Homo Sapiens
ccccggugccccugugucccacuacacacaga

SEQ ID NO: 281974 - RNA, 32 nt, Homo Sapiens
uucugucacuugucauggucuuucuugguauu

SEQ ID NO: 281975 - RNA, 32 nt, Homo Sapiens
gcaaaagcaaaacagacgugucagcugagccg

SEQ ID NO: 281976 - RNA, 32 nt, Homo Sapiens
gagcuaaaggaggauaacuuuuuggggaaguc

SEQ ID NO: 281977 - RNA, 32 nt, Homo Sapiens
uuuguaagaaugcuucugucuaguuuuuaugu

SEQ ID NO: 281978 - RNA, 32 nt, Homo Sapiens
acucaguacaagguauguagcccgagaaauga

SEQ ID NO: 281979 - RNA, 32 nt, Homo Sapiens
uuacagaucaaaugugaaauaaauaugaaugg

SEQ ID NO: 281980 - RNA, 32 nt, Homo Sapiens
acuuugcaggaugcaacccuggugaguguggc

SEQ ID NO: 281981 - RNA, 32 nt, Homo Sapiens
ccauaugcaauaaaauaaaguacauuauuuau

SEQ ID NO: 281982 - RNA, 31 nt, Homo Sapiens
cugccuggguucccagcauuggcaggacuuc

SEQ ID NO: 281983 - RNA, 32 nt, Homo Sapiens
uuguuuacaaaaacaggcggcaggcugggguu

SEQ ID NO: 281984 - RNA, 32 nt, Homo Sapiens
uuuaauuagugugaaaggaaacaaagaaugca

SEQ ID NO: 281985 - RNA, 32 nt, Homo Sapiens
gccgagcucuggccaacgggccccagguugaa

SEQ ID NO: 281986 - RNA, 32 nt, Homo Sapiens
cuaaccuuucagugaaauaaugucuaguggca

SEQ ID NO: 281987 - RNA, 32 nt, Homo Sapiens
uuuuuauaguauauuucuuguaugauauuuug

SEQ ID NO: 281988 - RNA, 32 nt, Homo Sapiens
guucugauugucaagcucccagaacuuucaga

SEQ ID NO: 281989 - RNA, 32 nt, Homo Sapiens
cuucauaaacacauuuaaaacaagauccuggg

SEQ ID NO: 281990 - RNA, 32 nt, Homo Sapiens
uuuuccacccucgggcuggcuggcucaguggg

SEQ ID NO: 281991 - RNA, 32 nt, Homo Sapiens
aggaggggaagugcaacaggacuuuauaagag

SEQ ID NO: 281992 - RNA, 32 nt, Homo Sapiens
aaguugucguucugugggcugcggaacgcaga

SEQ ID NO: 281993 - RNA, 32 nt, Homo Sapiens
aaguguuuuauuuuaacauuauuguuucaccu

SEQ ID NO: 281994 - RNA, 32 nt, Homo Sapiens
augaucauuucccuaagccauuuccagaaugg

SEQ ID NO: 281995 - RNA, 32 nt, Homo Sapiens
uauuauuucugugucagauuccaaucuggaua

SEQ ID NO: 281996 - RNA, 32 nt, Homo Sapiens
ugggguggggagaggaaagggagcacauauuu

SEQ ID NO: 281997 - RNA, 32 nt, Homo Sapiens
auuacuaaaugucaaaccaaacuuuuucucaa

SEQ ID NO: 281998 - RNA, 32 nt, Homo Sapiens
ccaccaggcaaccccugaggcugcgggguucu

SEQ ID NO: 281999 - RNA, 29 nt, Homo Sapiens
ccgccucggccccgauggacgccgcguuc

SEQ ID NO: 282000 - RNA, 31 nt, Homo Sapiens
ucauccgugaagaaaaaaucaauuaaaucau

SEQ ID NO: 282001 - RNA, 28 nt, Homo Sapiens
aaagccauucaucuuaaaagcugaacag

SEQ ID NO: 282002 - RNA, 32 nt, Homo Sapiens
agacuggucgccaucacguguaauaaagcacc

SEQ ID NO: 282003 - RNA, 32 nt, Homo Sapiens
cacccucuuuuuacuaacuccccucccccaca

SEQ ID NO: 282004 - RNA, 32 nt, Homo Sapiens
aaguauaugagccuuugaaaguucccugaagu

SEQ ID NO: 282005 - RNA, 30 nt, Homo Sapiens
cugaagaagcucuggggcggcaggaccagc

SEQ ID NO: 282006 - RNA, 32 nt, Homo Sapiens
uccauggcugggaggcagcuggccccacagca

SEQ ID NO: 282007 - RNA, 32 nt, Homo Sapiens
agccccggccccagccauggaagagcucacgg

SEQ ID NO: 282008 - RNA, 32 nt, Homo Sapiens
gccccugacccgcucccacuccgcugcagcgg

SEQ ID NO: 282009 - RNA, 32 nt, Homo Sapiens
agcgggggccccaggagaccugggcucccagc

SEQ ID NO: 282010 - RNA, 32 nt, Homo Sapiens
cggugcauggccggcguccacgcugugcuccc

SEQ ID NO: 282011 - RNA, 32 nt, Homo Sapiens
auaaguaguuaaucuuagauguaagguuccag

SEQ ID NO: 282012 - RNA, 32 nt, Homo Sapiens
uauaaaggcagacaauguaaguugaucauuag

SEQ ID NO: 282013 - RNA, 32 nt, Homo Sapiens
gagaaccgugaaauacagugugccgcuuugau

SEQ ID NO: 282014 - RNA, 32 nt, Homo Sapiens
gaggaggaaggaauucuuaaccagacccauuu

SEQ ID NO: 282015 - RNA, 32 nt, Homo Sapiens
agcuaugcugcuaaccagguauaggccagaaa

SEQ ID NO: 282016 - RNA, 32 nt, Homo Sapiens
guggcccugacugucagggagggccagggagg

SEQ ID NO: 282017 - RNA, 32 nt, Homo Sapiens
uucagcuacuagugacucaacaaaaucuaagg

SEQ ID NO: 282018 - RNA, 32 nt, Homo Sapiens
acagccugacuguguccuuggcucuggaucca

SEQ ID NO: 282019 - RNA, 32 nt, Homo Sapiens
cgggcacgauagcucacgccuauaaucccagc

SEQ ID NO: 282020 - RNA, 32 nt, Homo Sapiens
ugcauuuuuugcugcucuuccgagggcugcug

SEQ ID NO: 282021 - RNA, 32 nt, Homo Sapiens
uggugugcaccuguagucccagcuguuuggga

SEQ ID NO: 282022 - RNA, 31 nt, Homo Sapiens
uguucuuugugcuuguguaugaguaaguugc

SEQ ID NO: 282023 - RNA, 32 nt, Homo Sapiens
ggagugcucagguugggcccugacgagcugug

SEQ ID NO: 282024 - RNA, 32 nt, Homo Sapiens
uacagaaaccauccuauuucaggauuugaaug

SEQ ID NO: 282025 - RNA, 32 nt, Homo Sapiens
uacacagaguguggaggcagggaggucgaguc

SEQ ID NO: 282026 - RNA, 32 nt, Homo Sapiens
aucccuucacccuguuugguucugcaacgggg

SEQ ID NO: 282027 - RNA, 32 nt, Homo Sapiens
guaagcagaucacaccucuuucugccucuaca

SEQ ID NO: 282028 - RNA, 32 nt, Homo Sapiens
agacuucuucuauuuuugcugcuauggugguu

SEQ ID NO: 282029 - RNA, 32 nt, Homo Sapiens
acaagaugugauggcaucugcugcugaaaccc

SEQ ID NO: 282030 - RNA, 32 nt, Homo Sapiens
aagagguuaguaggaugaaacagcaaaacaau

SEQ ID NO: 282031 - RNA, 32 nt, Homo Sapiens
gaguccauacccaucuucaucauuggcauuug

SEQ ID NO: 282032 - RNA, 32 nt, Homo Sapiens
ggagcauuggaauggaaggggcuugggagaug

SEQ ID NO: 282033 - RNA, 32 nt, Homo Sapiens
aaugucuaaauaucuguucauaaaaauaaaag

SEQ ID NO: 282034 - RNA, 32 nt, Homo Sapiens
acuuaguuggguccucugcuucagggucucuu

SEQ ID NO: 282035 - RNA, 32 nt, Homo Sapiens
aauuagccgggcguaguggcgggagccuguag

SEQ ID NO: 282036 - RNA, 32 nt, Homo Sapiens
cagaguccccgugcucgcacagaugguguccu

SEQ ID NO: 282037 - RNA, 32 nt, Homo Sapiens
aagggugaaaaguaguucccauaauacacaug

SEQ ID NO: 282038 - RNA, 32 nt, Homo Sapiens
uggaaauuuauuauuucuugcaauucccguga

SEQ ID NO: 282039 - RNA, 32 nt, Homo Sapiens
uagaugaauuggaauaccgacaguggcagggc

SEQ ID NO: 282040 - RNA, 32 nt, Homo Sapiens
ccggagagacgcugcacguggagcccucgccg

SEQ ID NO: 282041 - RNA, 32 nt, Homo Sapiens
uuaauuuuguaucuacugauaacagaaucugg

SEQ ID NO: 282042 - RNA, 32 nt, Homo Sapiens
ccugcugggucucuuggcaagcauggagggag

SEQ ID NO: 282043 - RNA, 32 nt, Homo Sapiens
acuucaguuuuucauaagauuaaacuucuuac

SEQ ID NO: 282044 - RNA, 32 nt, Homo Sapiens
cgcgcgccggcuccgagacgagcgacgccugg

SEQ ID NO: 282045 - RNA, 32 nt, Homo Sapiens
uucaucggaaaacaggacaaagaugagcugcg

SEQ ID NO: 282046 - RNA, 32 nt, Homo Sapiens
ccuggacugcagagacccccgcccccgacccc

SEQ ID NO: 282047 - RNA, 32 nt, Homo Sapiens
aacuauaaacacacugcauacaauuuucuucu

SEQ ID NO: 282048 - RNA, 32 nt, Homo Sapiens
guggccuucgcuguccgcaauugagagacgug

SEQ ID NO: 282049 - RNA, 32 nt, Homo Sapiens
aauauggcuccuguuuuccugguuggacuccg

SEQ ID NO: 282050 - RNA, 32 nt, Homo Sapiens
aaaugauauaaaaacuauagucauaagaagag

SEQ ID NO: 282051 - RNA, 32 nt, Homo Sapiens
gagagugaagugggcgcgugguuagacgccag

SEQ ID NO: 282052 - RNA, 32 nt, Homo Sapiens
agaaaccaaagaauggcugaaaaacagaauua

SEQ ID NO: 282053 - RNA, 32 nt, Homo Sapiens
acucuccugagcucagccagaaucucgcaugu

SEQ ID NO: 282054 - RNA, 32 nt, Homo Sapiens
accuggggaggaaaggaagggcugggaaagac

SEQ ID NO: 282055 - RNA, 32 nt, Homo Sapiens
gggcugaggaggagaagcaggggcaggagcgg

SEQ ID NO: 282056 - RNA, 32 nt, Homo Sapiens
aauggcagucauaagucuuccuauaucaaaau

SEQ ID NO: 282057 - RNA, 32 nt, Homo Sapiens
cuuuucuccgcccccagcccccgcccccgucc

SEQ ID NO: 282058 - RNA, 32 nt, Homo Sapiens
gguggggacucgccccuccucucgucccugug

SEQ ID NO: 282059 - RNA, 32 nt, Homo Sapiens
aagaaaagcagucaucaauuauaauuaacuuu

SEQ ID NO: 282060 - RNA, 32 nt, Homo Sapiens
aagaaacgucagacuuuacuuuucucagcaac

SEQ ID NO: 282061 - RNA, 32 nt, Homo Sapiens
agcugagcccuugugugagccccgccccuccc

SEQ ID NO: 282062 - RNA, 32 nt, Homo Sapiens
ggcccccgccuggcgccgcgagccgagguguc

SEQ ID NO: 282063 - RNA, 32 nt, Homo Sapiens
guugcucccgcacuccaggccugugcuagacu

SEQ ID NO: 282064 - RNA, 32 nt, Homo Sapiens
agacuuguuauccauuuaaaaaugguagugga

SEQ ID NO: 282065 - RNA, 32 nt, Homo Sapiens
cacuaauguuuccaucuuaguauuugugcaca

SEQ ID NO: 282066 - RNA, 32 nt, Homo Sapiens
ccccacagaagcuugcuggcuggccauuuggg

SEQ ID NO: 282067 - RNA, 32 nt, Homo Sapiens
ccugguggagggcgacgagggcaggaugugca

SEQ ID NO: 282068 - RNA, 32 nt, Homo Sapiens
uguacaguaacgcgucaggcuugugacauuug

SEQ ID NO: 282069 - RNA, 32 nt, Homo Sapiens
ugcuagacucgggucuggccuacaucugcgag

SEQ ID NO: 282070 - RNA, 32 nt, Homo Sapiens
uagcugggcgugguggugggcgccuguagucc

SEQ ID NO: 282071 - RNA, 31 nt, Homo Sapiens
gcagugauucgguuucucagagucucauggc

SEQ ID NO: 282072 - RNA, 32 nt, Homo Sapiens
auaauguuauuuacuuauaaaauucaaauccg

SEQ ID NO: 282073 - RNA, 32 nt, Homo Sapiens
ccaccgucuguuccccugaggacccagcuuua

SEQ ID NO: 282074 - RNA, 32 nt, Homo Sapiens
ccuugcuagaaaaaaucggguaucuguuaagc

SEQ ID NO: 282075 - RNA, 32 nt, Homo Sapiens
aagcacuugacaaaggguauuugugcuuaaau

SEQ ID NO: 282076 - RNA, 32 nt, Homo Sapiens
aaagacccuaucucuucagugaucauaauaga

SEQ ID NO: 282077 - RNA, 32 nt, Homo Sapiens
aaaugcuaucaugggccuccuggucagaugug

SEQ ID NO: 282078 - RNA, 32 nt, Homo Sapiens
ccuacuaccuagagaaagccagcaaagaauga

SEQ ID NO: 282079 - RNA, 32 nt, Homo Sapiens
gagaugaagaucuugauacagacucauuggac

SEQ ID NO: 282080 - RNA, 32 nt, Homo Sapiens
gaggacuggggcccccagcggaccucaaagga

SEQ ID NO: 282081 - RNA, 32 nt, Homo Sapiens
acuugaaauaccagugaaccaaagagacugga

SEQ ID NO: 282082 - RNA, 32 nt, Homo Sapiens
uacuaggcucugcgguagguucugggaauaca

SEQ ID NO: 282083 - RNA, 30 nt, Homo Sapiens
ccggcaggcaggcgcucucccgccaguguc

SEQ ID NO: 282084 - RNA, 32 nt, Homo Sapiens
agagggagcggucccgcgcggcuggggcgcgg

SEQ ID NO: 282085 - RNA, 32 nt, Homo Sapiens
cacuuggggaauugaaucuuuaccagggcuuc

SEQ ID NO: 282086 - RNA, 32 nt, Homo Sapiens
uggcccuuggguuuccugguuccacugcuacu

SEQ ID NO: 282087 - RNA, 32 nt, Homo Sapiens
ccgcuggagucaggcgcuccccugccugugac

SEQ ID NO: 282088 - RNA, 32 nt, Homo Sapiens
gccggccucggccucccaggaagugcugggau

SEQ ID NO: 282089 - RNA, 32 nt, Homo Sapiens
ucgcgcccucaggucucccucccuuuuccagc

SEQ ID NO: 282090 - RNA, 32 nt, Homo Sapiens
gagagauguacaaggcuacagacuguaugauu

SEQ ID NO: 282091 - RNA, 32 nt, Homo Sapiens
ugucaccugccaggagagcggcuggcaguccu

SEQ ID NO: 282092 - RNA, 29 nt, Homo Sapiens
cuugaaugguauuuauauuggcugauauu

SEQ ID NO: 282093 - RNA, 32 nt, Homo Sapiens
ggaggaagaggagggacaaaugaggucaaguc

SEQ ID NO: 282094 - RNA, 32 nt, Homo Sapiens
agugggguacguuagacucagauggaaaagua

SEQ ID NO: 282095 - RNA, 27 nt, Homo Sapiens
ccagccuccuucuuuuguucaccagcc

SEQ ID NO: 282096 - RNA, 32 nt, Homo Sapiens
gaaacagaggaugauauugauagaauuaaggg

SEQ ID NO: 282097 - RNA, 32 nt, Homo Sapiens
aucuguagccccagccauccuugugccuucac

SEQ ID NO: 282098 - RNA, 32 nt, Homo Sapiens
ggccaggcguggacgccgccggaccgcugaga

SEQ ID NO: 282099 - RNA, 32 nt, Homo Sapiens
ugcucacggcccgacgauggcuuccccuucaa

SEQ ID NO: 282100 - RNA, 32 nt, Homo Sapiens
ugugggaggaaaacgccaggccugcuggggag

SEQ ID NO: 282101 - RNA, 32 nt, Homo Sapiens
aggguuuuuucuucuuucuuucuuuugcagga

SEQ ID NO: 282102 - RNA, 32 nt, Homo Sapiens
ggcccacaucugaccuggcagcccauguauuc

SEQ ID NO: 282103 - RNA, 32 nt, Homo Sapiens
ucuauuacuuuuuucuucuuaugaguauguuu

SEQ ID NO: 282104 - RNA, 32 nt, Homo Sapiens
acccagcuugguuuaaauuuuuuucucacuga

SEQ ID NO: 282105 - RNA, 32 nt, Homo Sapiens
agaaaauaggauuaauaaacuuugauuagacu

SEQ ID NO: 282106 - RNA, 32 nt, Homo Sapiens
uccaauuugccuuuuucuuuuucuugccuuau

SEQ ID NO: 282107 - RNA, 32 nt, Homo Sapiens
uggauggguucugccuuaaauugggaggacuc

SEQ ID NO: 282108 - RNA, 32 nt, Homo Sapiens
aaguucuugaaggaagcagaaagagggacucc

SEQ ID NO: 282109 - RNA, 32 nt, Homo Sapiens
ugagauaauuuaacccugccucucagaggguu

SEQ ID NO: 282110 - RNA, 32 nt, Homo Sapiens
cugaaaugauucaaauacacuaauuuuccaua

SEQ ID NO: 282111 - RNA, 32 nt, Homo Sapiens
cacugggucugcuuaugcuaguucaguauuug

SEQ ID NO: 282112 - RNA, 32 nt, Homo Sapiens
uaguuacccagcuguuuaauauuccagucuuc

SEQ ID NO: 282113 - RNA, 32 nt, Homo Sapiens
accaucuguagucagcagcauccuggugggac

SEQ ID NO: 282114 - RNA, 32 nt, Homo Sapiens
ugagcaaucuguguuggaaaagugugagauuu

SEQ ID NO: 282115 - RNA, 32 nt, Homo Sapiens
uauuaucuguguuauuucuggcuuucuuugag

SEQ ID NO: 282116 - RNA, 32 nt, Homo Sapiens
cauaucacagccucugcccccggcugugaugc

SEQ ID NO: 282117 - RNA, 32 nt, Homo Sapiens
agccuggaccccagccucugccaacggccccg

SEQ ID NO: 282118 - RNA, 32 nt, Homo Sapiens
cugugccuugacuguggcgaugauuacaugaa

SEQ ID NO: 282119 - RNA, 32 nt, Homo Sapiens
ugugaauagcacuguuuaggcuaacauuguaa

SEQ ID NO: 282120 - RNA, 32 nt, Homo Sapiens
ugcggcgucagggggauagcggguggugaggg

SEQ ID NO: 282121 - RNA, 32 nt, Homo Sapiens
cgcacauccuacaguuggaaauccauccagag

SEQ ID NO: 282122 - RNA, 32 nt, Homo Sapiens
ggaguccggcucugcuggccuagaagcagagu

SEQ ID NO: 282123 - RNA, 32 nt, Homo Sapiens
uuuuauguuuuguuuaaccuugaugaauugua

SEQ ID NO: 282124 - RNA, 32 nt, Homo Sapiens
ggguccuaguaagugccacuuccacuaagaau

SEQ ID NO: 282125 - RNA, 32 nt, Homo Sapiens
uguuuagcauauaaucaagaaauaaccaugaa

SEQ ID NO: 282126 - RNA, 32 nt, Homo Sapiens
auaaaucaguuauauauuccuuuacaucuugu

SEQ ID NO: 282127 - RNA, 32 nt, Homo Sapiens
acuccaucauaaauaaauaaauaaauaaaugg

SEQ ID NO: 282128 - RNA, 32 nt, Homo Sapiens
uuuuuucuaaucuuuaguagauuugauuaaau

SEQ ID NO: 282129 - RNA, 32 nt, Homo Sapiens
auggcaagcaugggggcgggguggguggggag

SEQ ID NO: 282130 - RNA, 32 nt, Homo Sapiens
uaguuuugacauuuuaugauagauuugcucuc

SEQ ID NO: 282131 - RNA, 32 nt, Homo Sapiens
cauaaauacugacaccagucuagaagacauuc

SEQ ID NO: 282132 - RNA, 32 nt, Homo Sapiens
ugggcgucugucuagacacguccuccaguggc

SEQ ID NO: 282133 - RNA, 32 nt, Homo Sapiens
gguuucaccauguuggccaggcuggucuuuaa

SEQ ID NO: 282134 - RNA, 32 nt, Homo Sapiens
gguuucaccaugugggccaggcuggucuugaa

SEQ ID NO: 282135 - RNA, 32 nt, Homo Sapiens
acccgucucaaauucuggucuuuuaaagcagc

SEQ ID NO: 282136 - RNA, 32 nt, Homo Sapiens
uaucguuucaggcuucauuuuagcuucaaaac

SEQ ID NO: 282137 - RNA, 32 nt, Homo Sapiens
cccgccaucgccaacccgaugauccugagcca

SEQ ID NO: 282138 - RNA, 32 nt, Homo Sapiens
aaaauuaugcugcauuuggcuggagcccggug

SEQ ID NO: 282139 - RNA, 32 nt, Homo Sapiens
ucccccuuaaagauuauauuugaaauguuuuc

SEQ ID NO: 282140 - RNA, 32 nt, Homo Sapiens
ggaagagcugucuggguggguuucgucuugcu

SEQ ID NO: 282141 - RNA, 32 nt, Homo Sapiens
gcucuaaaacaaacaaacuacagaaauguaaa

SEQ ID NO: 282142 - RNA, 32 nt, Homo Sapiens
guauuguggcugaagaaauuagaagcaggacu

SEQ ID NO: 282143 - RNA, 32 nt, Homo Sapiens
ccucuacagucuuuagcagagaagggcgacca

SEQ ID NO: 282144 - RNA, 31 nt, Homo Sapiens
gaugacauggaagcuuaccggacccagaacu

SEQ ID NO: 282145 - RNA, 30 nt, Homo Sapiens
caggccacaugagauggugagucuggagga

SEQ ID NO: 282146 - RNA, 32 nt, Homo Sapiens
uauguugaauuaacauaauauauguaaaguag

SEQ ID NO: 282147 - RNA, 32 nt, Homo Sapiens
cccaggccgccucagcucuccucugcgccggc

SEQ ID NO: 282148 - RNA, 32 nt, Homo Sapiens
ccacaccucaucugccuugcuccaccucccua

SEQ ID NO: 282149 - RNA, 32 nt, Homo Sapiens
uuaguaugauaguuuuuaaauuaauuuagagc

SEQ ID NO: 282150 - RNA, 32 nt, Homo Sapiens
uagaaugacaaagaagauguaaaccauuuuau

SEQ ID NO: 282151 - RNA, 32 nt, Homo Sapiens
uggagugaauuuuuaauacucuguguuaaaag

SEQ ID NO: 282152 - RNA, 32 nt, Homo Sapiens
uacuguaguggcuguaauacaugaugaugugg

SEQ ID NO: 282153 - RNA, 32 nt, Homo Sapiens
uuagaagucugcuaaagaucaaaugugaaagu

SEQ ID NO: 282154 - RNA, 32 nt, Homo Sapiens
guuugaauuucuauucaauuuauuuuccccug

SEQ ID NO: 282155 - RNA, 32 nt, Homo Sapiens
uguaaauagauaaaguaacauaauacauuaau

SEQ ID NO: 282156 - RNA, 32 nt, Homo Sapiens
aggacagaccucucuggaagcagcaagaggaa

SEQ ID NO: 282157 - RNA, 31 nt, Homo Sapiens
uuagcuacaaauaaaaugacagagugaagug

SEQ ID NO: 282158 - RNA, 32 nt, Homo Sapiens
auuuucauuuuccuuucagggauuugcggggu

SEQ ID NO: 282159 - RNA, 32 nt, Homo Sapiens
ucagccuccgccgccuccucagcccucggcgc

SEQ ID NO: 282160 - RNA, 32 nt, Homo Sapiens
aagaugccucaagugucccaggaggcaaaggg

SEQ ID NO: 282161 - RNA, 31 nt, Homo Sapiens
uggccggagccccacaaggaccaugagggcg

SEQ ID NO: 282162 - RNA, 30 nt, Homo Sapiens
gaagccuuuagugcugcacgggagcucgag

SEQ ID NO: 282163 - RNA, 32 nt, Homo Sapiens
aaaaaccaaccucauucacauauggcuuuuuu

SEQ ID NO: 282164 - RNA, 32 nt, Homo Sapiens
ggaacauaaaauggcuugguaaaaguaauaaa

SEQ ID NO: 282165 - RNA, 32 nt, Homo Sapiens
auacaaacauuuucuauaaaaggucagauggc

SEQ ID NO: 282166 - RNA, 32 nt, Homo Sapiens
uugucuaaucaaguugguuaugucucauguga

SEQ ID NO: 282167 - RNA, 32 nt, Homo Sapiens
ggugaaaacauuguacauguugugaagaaagu

SEQ ID NO: 282168 - RNA, 32 nt, Homo Sapiens
ccccgccucuuucguccgcgggccgguucaag

SEQ ID NO: 282169 - RNA, 32 nt, Homo Sapiens
uauggggcauuuuucuuuaacaaagaaugguu

SEQ ID NO: 282170 - RNA, 32 nt, Homo Sapiens
aguauauucagcaaauauuuauugagcccuua

SEQ ID NO: 282171 - RNA, 32 nt, Homo Sapiens
ucuccuuuugaaaagguaaggugaaagugaau

SEQ ID NO: 282172 - RNA, 32 nt, Homo Sapiens
auggcgggcgccucucccccagccucgcugcc

SEQ ID NO: 282173 - RNA, 32 nt, Homo Sapiens
aggcgcgaggagggaggcgccuggcguugccg

SEQ ID NO: 282174 - RNA, 32 nt, Homo Sapiens
gaggagguccuuggagugcugcagcuuuggga

SEQ ID NO: 282175 - RNA, 32 nt, Homo Sapiens
cugaaaugcaggaggggugcuugccuccaaau

SEQ ID NO: 282176 - RNA, 32 nt, Homo Sapiens
gucccaugacccaccccugugcuccgugccuc

SEQ ID NO: 282177 - RNA, 32 nt, Homo Sapiens
ucaggagaaagaugcuguuuugcacuaucuug

SEQ ID NO: 282178 - RNA, 32 nt, Homo Sapiens
uauuucagguauuuaauacgaaauguggaagg

SEQ ID NO: 282179 - RNA, 32 nt, Homo Sapiens
cuuuucuaaggauugaauaaauugagcuuuuc

SEQ ID NO: 282180 - RNA, 32 nt, Homo Sapiens
uggugauucgcuggauggaaaagggaguaaaa

SEQ ID NO: 282181 - RNA, 32 nt, Homo Sapiens
cugugcuggaagaugcuagaucugaaagacag

SEQ ID NO: 282182 - RNA, 32 nt, Homo Sapiens
cccgguccugccugucagcuccagguccugga

SEQ ID NO: 282183 - RNA, 32 nt, Homo Sapiens
uugugcauaguuuuuacaaaccuuggauuuac

SEQ ID NO: 282184 - RNA, 32 nt, Homo Sapiens
uuuuguuguaagucaggauuggaguaagcugg

SEQ ID NO: 282185 - RNA, 32 nt, Homo Sapiens
cggggagggggaggaggggcaggugcugcagg

SEQ ID NO: 282186 - RNA, 32 nt, Homo Sapiens
uccuguagugucagcaccagcaccaugggcuu

SEQ ID NO: 282187 - RNA, 32 nt, Homo Sapiens
ccgaggccugaaggguucugcuguggucccag

SEQ ID NO: 282188 - RNA, 32 nt, Homo Sapiens
gucucuuaaaauuuaucauucucuuaaaguau

SEQ ID NO: 282189 - RNA, 32 nt, Homo Sapiens
cacccagauuccagcccuccucccugaggaau

SEQ ID NO: 282190 - RNA, 32 nt, Homo Sapiens
gguuuuucugucauccucagaucccacaggca

SEQ ID NO: 282191 - RNA, 32 nt, Homo Sapiens
guguuccucucaaauucauaugcugaagucuc

SEQ ID NO: 282192 - RNA, 31 nt, Homo Sapiens
cccagguggagcugccugccuugcccucacu

SEQ ID NO: 282193 - RNA, 32 nt, Homo Sapiens
cuuuaaaaaugaaauaauuuuauuugacacau

SEQ ID NO: 282194 - RNA, 32 nt, Homo Sapiens
uagcagcuuuugcuccacccaccagagacugc

SEQ ID NO: 282195 - RNA, 32 nt, Homo Sapiens
caagacgucugcuuuugugacagucagaaaac

SEQ ID NO: 282196 - RNA, 32 nt, Homo Sapiens
ugugaccacaaauauuaugcaaugcaccauuu

SEQ ID NO: 282197 - RNA, 32 nt, Homo Sapiens
uggacgucaagaggaacacaccgguguaagag

SEQ ID NO: 282198 - RNA, 32 nt, Homo Sapiens
auaacacucaaauaguauucucuucuuuugaa

SEQ ID NO: 282199 - RNA, 32 nt, Homo Sapiens
aaagaggccccagccgacaagugucgcccaca

SEQ ID NO: 282200 - RNA, 32 nt, Homo Sapiens
augguuucuuuuggggaaauguuuauauuugg

SEQ ID NO: 282201 - RNA, 32 nt, Homo Sapiens
gaugaaggagagcgaguguucguggagcucuu

SEQ ID NO: 282202 - RNA, 32 nt, Homo Sapiens
aacagagccaucuuugagccaugggaagccuc

SEQ ID NO: 282203 - RNA, 32 nt, Homo Sapiens
gcaaaugugggaaagacuacagacaauaggaa

SEQ ID NO: 282204 - RNA, 32 nt, Homo Sapiens
gucuuucuggggaggagggaauguacauucag

SEQ ID NO: 282205 - RNA, 32 nt, Homo Sapiens
uggcaagaucacacugagaucgaugggugaga

SEQ ID NO: 282206 - RNA, 32 nt, Homo Sapiens
ggcucggcucugcgcugcuccggacggcugug

SEQ ID NO: 282207 - RNA, 32 nt, Homo Sapiens
uggcggcgggugccaugcgucuggagcuucac

SEQ ID NO: 282208 - RNA, 32 nt, Homo Sapiens
uggaagggagcgcggugacuguccuugagcgc

SEQ ID NO: 282209 - RNA, 32 nt, Homo Sapiens
uggaaaucuaauguggaagccauuguggcaag

SEQ ID NO: 282210 - RNA, 32 nt, Homo Sapiens
agugucccauucuacuccucucauucccucuu

SEQ ID NO: 282211 - RNA, 32 nt, Homo Sapiens
ccucaccgcaggcagcaguuugcguuuugaaa

SEQ ID NO: 282212 - RNA, 32 nt, Homo Sapiens
uuuccagauccuuuauuucagagcagcccauu

SEQ ID NO: 282213 - RNA, 32 nt, Homo Sapiens
gggacuacacaagcugacagcggaugguauga

SEQ ID NO: 282214 - RNA, 32 nt, Homo Sapiens
gggcaccacccuccccaggcuggguguggagg

SEQ ID NO: 282215 - RNA, 31 nt, Homo Sapiens
cgaaagaugccgguccgcaggggccacgucg

SEQ ID NO: 282216 - RNA, 32 nt, Homo Sapiens
ccaagcuaaaguuuuuuuuuuauuuuucauag

SEQ ID NO: 282217 - RNA, 32 nt, Homo Sapiens
uaugaguaauguuuaagaucuguuuuaaauuu

SEQ ID NO: 282218 - RNA, 32 nt, Homo Sapiens
gggauucacagccccagccccauggccccucu

SEQ ID NO: 282219 - RNA, 32 nt, Homo Sapiens
aucauguuauuugauccuuucauuuacuuuug

SEQ ID NO: 282220 - RNA, 32 nt, Homo Sapiens
ucugcccugccaguugucagucaggcagggag

SEQ ID NO: 282221 - RNA, 32 nt, Homo Sapiens
gaaucugguaccaucugugcuuucacaaaaaa

SEQ ID NO: 282222 - RNA, 32 nt, Homo Sapiens
gacuucuacauccauauucucaucuuucauac

SEQ ID NO: 282223 - RNA, 32 nt, Homo Sapiens
cuguguguccuuccucauggccugcagguuuc

SEQ ID NO: 282224 - RNA, 32 nt, Homo Sapiens
uacauguuguuaauaaaguugcaugcuaaaac

SEQ ID NO: 282225 - RNA, 32 nt, Homo Sapiens
cgagauuugggucucuuccuaagccggcgcuc

SEQ ID NO: 282226 - RNA, 32 nt, Homo Sapiens
gccauuauauuuggaagaaaccacugaacauu

SEQ ID NO: 282227 - RNA, 32 nt, Homo Sapiens
agacaccacauuuuaaaacuguaauucaguua

SEQ ID NO: 282228 - RNA, 32 nt, Homo Sapiens
ccacugagggagaugguggcagggccauucuu

SEQ ID NO: 282229 - RNA, 32 nt, Homo Sapiens
gagcccugaggguggguaucgccaauggcuuc

SEQ ID NO: 282230 - RNA, 32 nt, Homo Sapiens
guagugccugggcauccuggaacuuaugcaaa

SEQ ID NO: 282231 - RNA, 28 nt, Homo Sapiens
ccaguagggcggccgggcagaggcgccc

SEQ ID NO: 282232 - RNA, 32 nt, Homo Sapiens
uugugcuuucuaguuaaccugaugccaguaca

SEQ ID NO: 282233 - RNA, 32 nt, Homo Sapiens
acggggcacaucuggcugggaagucacaugga

SEQ ID NO: 282234 - RNA, 32 nt, Homo Sapiens
uucauuugcggguggcggggcucuggguuugg

SEQ ID NO: 282235 - RNA, 32 nt, Homo Sapiens
aagaaugauguggcuucuuauuuuggaggauc

SEQ ID NO: 282236 - RNA, 32 nt, Homo Sapiens
gcugcgauuucugcugaacuuggaggcauuuc

SEQ ID NO: 282237 - RNA, 32 nt, Homo Sapiens
auggaaauaaauguaucauagaaauguaacuu

SEQ ID NO: 282238 - RNA, 29 nt, Homo Sapiens
aagaagggacuuggcaguuuaaaagccac

SEQ ID NO: 282239 - RNA, 32 nt, Homo Sapiens
acagccacauaaauucccuaggaaguaaauuc

SEQ ID NO: 282240 - RNA, 32 nt, Homo Sapiens
uucuaaaauaacauuguaauaaaccauuuuua

SEQ ID NO: 282241 - RNA, 32 nt, Homo Sapiens
cucuuccuggccggcuggcccaccgacugaug

SEQ ID NO: 282242 - RNA, 32 nt, Homo Sapiens
uaggucgggcccgugcaggccggcgccuuggg

SEQ ID NO: 282243 - RNA, 32 nt, Homo Sapiens
ggugucgacagguggcucucgcuuggccuccu

SEQ ID NO: 282244 - RNA, 32 nt, Homo Sapiens
uuauuggguccuguuuuucgggaggguggggg

SEQ ID NO: 282245 - RNA, 32 nt, Homo Sapiens
gcuccuggccccaccccucgggccuuugggcu

SEQ ID NO: 282246 - RNA, 32 nt, Homo Sapiens
cccuaaaaauuccaccaggauuaaucucuaaa

SEQ ID NO: 282247 - RNA, 32 nt, Homo Sapiens
ccuagaugauaccccugaggauaaaaccucca

SEQ ID NO: 282248 - RNA, 32 nt, Homo Sapiens
ucacccagcuccggucacauuauucuagccuu

SEQ ID NO: 282249 - RNA, 32 nt, Homo Sapiens
uugccaguuugaaaggcaaaagcaaaacagac

SEQ ID NO: 282250 - RNA, 32 nt, Homo Sapiens
uuuucuccuuuaaaaucuaauaaaauauuuag

SEQ ID NO: 282251 - RNA, 32 nt, Homo Sapiens
uucaugcagaacaacuaucuuuguauuuuguu

SEQ ID NO: 282252 - RNA, 32 nt, Homo Sapiens
uauuuuacguugaguccauuuuuaauguucug

SEQ ID NO: 282253 - RNA, 32 nt, Homo Sapiens
aaaguaaaaaugucuauucugauuccauauug

SEQ ID NO: 282254 - RNA, 32 nt, Homo Sapiens
cccugcucuucugcacuccuggacacaaccag

SEQ ID NO: 282255 - RNA, 32 nt, Homo Sapiens
aaaucuuugugcaagaaauuugaaacuuauug

SEQ ID NO: 282256 - RNA, 32 nt, Homo Sapiens
ugaaauacuuuacuuuuucucauauccucuau

SEQ ID NO: 282257 - RNA, 32 nt, Homo Sapiens
ugcucugggaccugccccucacguucucuugg

SEQ ID NO: 282258 - RNA, 32 nt, Homo Sapiens
ggaauggcucauuuggggguggcuacuuggcu

SEQ ID NO: 282259 - RNA, 32 nt, Homo Sapiens
gacagccccgguucccccaacauguucccguu

SEQ ID NO: 282260 - RNA, 32 nt, Homo Sapiens
uuucucuacaguguuguuuuguuguuguuggu

SEQ ID NO: 282261 - RNA, 32 nt, Homo Sapiens
uaugggaagaacuuaagcauauacuguguaaa

SEQ ID NO: 282262 - RNA, 32 nt, Homo Sapiens
guuucccuggaggugaugcacagaugucacug

SEQ ID NO: 282263 - RNA, 32 nt, Homo Sapiens
uaaucucuguuguuuaugaauuacucagucua

SEQ ID NO: 282264 - RNA, 32 nt, Homo Sapiens
ugucuggcacguggguguguugguaaacaguu

SEQ ID NO: 282265 - RNA, 32 nt, Homo Sapiens
ccguccggcggcgggggucugcggcgacccac

SEQ ID NO: 282266 - RNA, 32 nt, Homo Sapiens
uuugcugccuucccuuugcaccagcccgaguc

SEQ ID NO: 282267 - RNA, 32 nt, Homo Sapiens
ggcgccgccccacucgccccagccgccgccau

SEQ ID NO: 282268 - RNA, 32 nt, Homo Sapiens
aaauaaagcauggacaucaugaaaauaacaga

SEQ ID NO: 282269 - RNA, 32 nt, Homo Sapiens
agaaaccagucaguaacuauauuguuaaucca

SEQ ID NO: 282270 - RNA, 32 nt, Homo Sapiens
ucagcauccaaguuuaugaaucguaguuaacg

SEQ ID NO: 282271 - RNA, 32 nt, Homo Sapiens
gguuccugcccccuuggagcuuacacuguagc

SEQ ID NO: 282272 - RNA, 32 nt, Homo Sapiens
uuuuuaaaauuagccacaccacaggaaaccca

SEQ ID NO: 282273 - RNA, 32 nt, Homo Sapiens
aggccuuauguuaaaaucaugcacuugaaaag

SEQ ID NO: 282274 - RNA, 32 nt, Homo Sapiens
cuccggggcugcggcggcugaggcgcggggau

SEQ ID NO: 282275 - RNA, 32 nt, Homo Sapiens
cuuggcugagcacuguuagacacacauagacc

SEQ ID NO: 282276 - RNA, 32 nt, Homo Sapiens
ccgugcgcccgucuguggccaagcagccagca

SEQ ID NO: 282277 - RNA, 32 nt, Homo Sapiens
uuuauagaauuuccuuucagucagcugcucag

SEQ ID NO: 282278 - RNA, 32 nt, Homo Sapiens
gaauauggaaucuauuucugucugcacuagag

SEQ ID NO: 282279 - RNA, 32 nt, Homo Sapiens
ggguguuugggguggcgcuggcggcgggagga

SEQ ID NO: 282280 - RNA, 32 nt, Homo Sapiens
gggccagggagggguuucugcuuagcaaggca

SEQ ID NO: 282281 - RNA, 32 nt, Homo Sapiens
guaaggaaaauggcugcacuuuagucaggaau

SEQ ID NO: 282282 - RNA, 32 nt, Homo Sapiens
gaccugccuagaaaaaggaaguggagcgggag

SEQ ID NO: 282283 - RNA, 32 nt, Homo Sapiens
acaguuggcgccgccgggagggagggcgggcg

SEQ ID NO: 282284 - RNA, 32 nt, Homo Sapiens
uggaagauauaaaaucauuaacugcucaugua

SEQ ID NO: 282285 - RNA, 32 nt, Homo Sapiens
guguguauauauacauauacauauacauauau

SEQ ID NO: 282286 - RNA, 32 nt, Homo Sapiens
aucugcccuguacagccauguaggcugugcgc

SEQ ID NO: 282287 - RNA, 32 nt, Homo Sapiens
aaaaauuguuaaaaucauuguguuaucuagua

SEQ ID NO: 282288 - RNA, 32 nt, Homo Sapiens
auguaguuauuuauuacaaaauuauauucacg

SEQ ID NO: 282289 - RNA, 32 nt, Homo Sapiens
agugugaaagucacuaaacuuuuacacacucc

SEQ ID NO: 282290 - RNA, 32 nt, Homo Sapiens
ugcccuaggaaaguacaaccagaauugaaaac

SEQ ID NO: 282291 - RNA, 32 nt, Homo Sapiens
aaguuacauguuugcaccuuucuaguugaaaa

SEQ ID NO: 282292 - RNA, 32 nt, Homo Sapiens
ggggcguggccaagcccuccucuucccagaau

SEQ ID NO: 282293 - RNA, 32 nt, Homo Sapiens
caauaugcauuacaaugagcuaaugcuccaga

SEQ ID NO: 282294 - RNA, 32 nt, Homo Sapiens
cagggacugauggugggagauguuguuacaga

SEQ ID NO: 282295 - RNA, 32 nt, Homo Sapiens
auugccaucuucaucaccaccaucaucaucau

SEQ ID NO: 282296 - RNA, 32 nt, Homo Sapiens
uuugcacguggaucgccguucgggugggcgag

SEQ ID NO: 282297 - RNA, 32 nt, Homo Sapiens
agcuagacgguuuccuuccuccccucucaaag

SEQ ID NO: 282298 - RNA, 32 nt, Homo Sapiens
caugucucuccucuccuuggccguggcuucug

SEQ ID NO: 282299 - RNA, 32 nt, Homo Sapiens
aaggcauuacaauuguguuuuagcagaugaga

SEQ ID NO: 282300 - RNA, 32 nt, Homo Sapiens
ggcucuuuuuaacuuucaacacuaguaguauu

SEQ ID NO: 282301 - RNA, 32 nt, Homo Sapiens
cgauggccggcgccgcgccgcggguccgcuac

SEQ ID NO: 282302 - RNA, 32 nt, Homo Sapiens
uuacauaaagaagcucuaguucuuauagaaau

SEQ ID NO: 282303 - RNA, 32 nt, Homo Sapiens
uugacuagaggaucauccauuauaucuucuaa

SEQ ID NO: 282304 - RNA, 32 nt, Homo Sapiens
ucacguguaacuucugcagaccuaccacaagu

SEQ ID NO: 282305 - RNA, 32 nt, Homo Sapiens
agcucccaagugccggccaccgcugucaggga

SEQ ID NO: 282306 - RNA, 32 nt, Homo Sapiens
uuaguaggcuuugguaaaugugagaaaacuuu

SEQ ID NO: 282307 - RNA, 32 nt, Homo Sapiens
caaucuuacuagauuuuaauucuuaaggauuu

SEQ ID NO: 282308 - RNA, 32 nt, Homo Sapiens
ggcagcaggugggaacccugggccuggaugug

SEQ ID NO: 282309 - RNA, 32 nt, Homo Sapiens
ucggcugagucugggcgggcgggaaaccuggg

SEQ ID NO: 282310 - RNA, 32 nt, Homo Sapiens
ccuguuuguaagguaauaaaaauacauaaaau

SEQ ID NO: 282311 - RNA, 32 nt, Homo Sapiens
guacaugccauugaaaauuauuaaucagaaga

SEQ ID NO: 282312 - RNA, 32 nt, Homo Sapiens
gggcaguggcuuaccagggacuguagcgcugg

SEQ ID NO: 282313 - RNA, 32 nt, Homo Sapiens
aagcaagcuaaaucauuuaaauguuuaaauug

SEQ ID NO: 282314 - RNA, 32 nt, Homo Sapiens
gggugggagggaggagggccgagacaggagca

SEQ ID NO: 282315 - RNA, 32 nt, Homo Sapiens
cacuauuuauaaugcauagguaaccauuaacu

SEQ ID NO: 282316 - RNA, 25 nt, Homo Sapiens
guaagaauaaaauuauuuugagaaa

SEQ ID NO: 282317 - RNA, 32 nt, Homo Sapiens
uggggagagaggaggaaagcgcugcgcucaac

SEQ ID NO: 282318 - RNA, 32 nt, Homo Sapiens
cucaacucggagauuccuguauggagagaauc

SEQ ID NO: 282319 - RNA, 32 nt, Homo Sapiens
aggauucaucuaauuucucaguuucuuuucug

SEQ ID NO: 282320 - RNA, 32 nt, Homo Sapiens
uguaaggucuguggagauaagacuacacacag

SEQ ID NO: 282321 - RNA, 32 nt, Homo Sapiens
guggacgauccucucucagcguccagccuaga

SEQ ID NO: 282322 - RNA, 32 nt, Homo Sapiens
cuagccacaagugcccaguccaggcaagugcu

SEQ ID NO: 282323 - RNA, 32 nt, Homo Sapiens
cuuuggaaacccuggggugaccaagguuugga

SEQ ID NO: 282324 - RNA, 32 nt, Homo Sapiens
uucgugguuguaaaagacaaacaaaacauggc

SEQ ID NO: 282325 - RNA, 32 nt, Homo Sapiens
uguuucuuucccuuugaauuucuuuuuacugu

SEQ ID NO: 282326 - RNA, 32 nt, Homo Sapiens
gcaaggccuggcaaccuacagcccuccgacca

SEQ ID NO: 282327 - RNA, 32 nt, Homo Sapiens
uauggcgacuggggaggggcggugucuguucu

SEQ ID NO: 282328 - RNA, 32 nt, Homo Sapiens
ucaccugccccguagagaauguguguagauac

SEQ ID NO: 282329 - RNA, 32 nt, Homo Sapiens
uccacuggagaagcccuggggguggcuggagc

SEQ ID NO: 282330 - RNA, 32 nt, Homo Sapiens
ugaaaaugagagacagaagccacaggggaagc

SEQ ID NO: 282331 - RNA, 32 nt, Homo Sapiens
caccacgcucuccagccccuccuuccacagcu

SEQ ID NO: 282332 - RNA, 32 nt, Homo Sapiens
aacugacaauuucugcagaaaucccccuuccu

SEQ ID NO: 282333 - RNA, 32 nt, Homo Sapiens
auggaacggugcaaaaguuuggccacuucccu

SEQ ID NO: 282334 - RNA, 32 nt, Homo Sapiens
caugagugcaggauuuggcugaugggcagucc

SEQ ID NO: 282335 - RNA, 32 nt, Homo Sapiens
cauuuuuuuuuuucuuuuuuuuauugguguag

SEQ ID NO: 282336 - RNA, 32 nt, Homo Sapiens
cuaugcaauuugauuggaaaaauguaugugca

SEQ ID NO: 282337 - RNA, 29 nt, Homo Sapiens
ccugguuugggacagaggggacaguugag

SEQ ID NO: 282338 - RNA, 32 nt, Homo Sapiens
ccugaggaccaguucuugggguuccaggccuc

SEQ ID NO: 282339 - RNA, 32 nt, Homo Sapiens
uuaggaaaauuaauuuguuaacucgucugugc

SEQ ID NO: 282340 - RNA, 32 nt, Homo Sapiens
uugaggaaccaaaaacaggaucaaauaugaaa

SEQ ID NO: 282341 - RNA, 32 nt, Homo Sapiens
cucgggugacgggcuuccaggauguucgggcg

SEQ ID NO: 282342 - RNA, 30 nt, Homo Sapiens
cugcugggagguggcuuggauggggaggac

SEQ ID NO: 282343 - RNA, 32 nt, Homo Sapiens
ccgacgggccagcgcccuccccaugucccugc

SEQ ID NO: 282344 - RNA, 32 nt, Homo Sapiens
auaaaugaagcugcuuuauggagcacgagcag

SEQ ID NO: 282345 - RNA, 32 nt, Homo Sapiens
ccaaccgugucugucuggcacguggguguguu

SEQ ID NO: 282346 - RNA, 32 nt, Homo Sapiens
cugugcacuguguacaggcgcugcuggcccug

SEQ ID NO: 282347 - RNA, 32 nt, Homo Sapiens
ccugacccugucaucccgauugacagcgccac

SEQ ID NO: 282348 - RNA, 32 nt, Homo Sapiens
ccucccugccccaccguccuccagagaaugcg

SEQ ID NO: 282349 - RNA, 32 nt, Homo Sapiens
cauuacccacugaaaucagggcauauagaauc

SEQ ID NO: 282350 - RNA, 32 nt, Homo Sapiens
gacgggcccuucucagcccguuuugaggacag

SEQ ID NO: 282351 - RNA, 32 nt, Homo Sapiens
ggaaguuccggggcuuuuggaccucugugauu

SEQ ID NO: 282352 - RNA, 32 nt, Homo Sapiens
aagauguauauuuuguuaagcauauucucuaa

SEQ ID NO: 282353 - RNA, 32 nt, Homo Sapiens
cacucacuuauuuuuccaauaauugauauugu

SEQ ID NO: 282354 - RNA, 32 nt, Homo Sapiens
aauuuuggccacuuuuuucagauuuuacauca

SEQ ID NO: 282355 - RNA, 32 nt, Homo Sapiens
accuucaaaaaugguacuuagaugggaacugg

SEQ ID NO: 282356 - RNA, 32 nt, Homo Sapiens
aaaagguucaacauugaguccacuuaacacuu

SEQ ID NO: 282357 - RNA, 32 nt, Homo Sapiens
uguugaacuggugucauagaagaaauugucua

SEQ ID NO: 282358 - RNA, 32 nt, Homo Sapiens
auaccaucuacacuaacauuugucccacagca

SEQ ID NO: 282359 - RNA, 32 nt, Homo Sapiens
uccuuuacuuucuuaauagacuugcuuucacu

SEQ ID NO: 282360 - RNA, 32 nt, Homo Sapiens
cagcccgaccacaggagcauggccgcugccag

SEQ ID NO: 282361 - RNA, 32 nt, Homo Sapiens
cccaugcagauuccaggauccacacaucagag

SEQ ID NO: 282362 - RNA, 32 nt, Homo Sapiens
gggguuucagaggugagcaagcaggcuuuuua

SEQ ID NO: 282363 - RNA, 32 nt, Homo Sapiens
augccuauucuauuuucugcaguuuacaauac

SEQ ID NO: 282364 - RNA, 32 nt, Homo Sapiens
gugucuauccugaaauaauaauggagaguaua

SEQ ID NO: 282365 - RNA, 32 nt, Homo Sapiens
cccacccccagccccagcccaguccuccuagg

SEQ ID NO: 282366 - RNA, 30 nt, Homo Sapiens
caaacuugugacugcaucccucuggagucu

SEQ ID NO: 282367 - RNA, 32 nt, Homo Sapiens
ucaggcugacuucuucucaaucccagaaauau

SEQ ID NO: 282368 - RNA, 32 nt, Homo Sapiens
cuuguucuuuucagaaggcuaaagucagagga

SEQ ID NO: 282369 - RNA, 32 nt, Homo Sapiens
cacaacauuauaaacaguugugagaaaauauu

SEQ ID NO: 282370 - RNA, 32 nt, Homo Sapiens
uucaaguggagaaugaugagaucuaaucuuaa

SEQ ID NO: 282371 - RNA, 32 nt, Homo Sapiens
ccuccuccuucuuugccaccgcccccagcucc

SEQ ID NO: 282372 - RNA, 32 nt, Homo Sapiens
gaagccagcuugcagagagagcaagaacagag

SEQ ID NO: 282373 - RNA, 32 nt, Homo Sapiens
ccacagcccuccccagcgcucuguaggcucuc

SEQ ID NO: 282374 - RNA, 32 nt, Homo Sapiens
uccuaaauagaaauaaaugaucccauuuuuug

SEQ ID NO: 282375 - RNA, 32 nt, Homo Sapiens
cucuaagccagaccagagggacucagacacca

SEQ ID NO: 282376 - RNA, 32 nt, Homo Sapiens
cccaucugaacacaaccagagguggcaggaga

SEQ ID NO: 282377 - RNA, 32 nt, Homo Sapiens
cucaaccgcuguaucuuggaagcuuuguuuug

SEQ ID NO: 282378 - RNA, 32 nt, Homo Sapiens
acaggagaggggcuucucuuccuggcuggggc

SEQ ID NO: 282379 - RNA, 31 nt, Homo Sapiens
guggcuacaagggacccacagaauuacaggg

SEQ ID NO: 282380 - RNA, 32 nt, Homo Sapiens
aucaacucaucugguucucaccaaagccccua

SEQ ID NO: 282381 - RNA, 32 nt, Homo Sapiens
gaaaggugcaaaccucuuuagaguagggucaa

SEQ ID NO: 282382 - RNA, 32 nt, Homo Sapiens
cggcuuccggugcugccugcgucaucuccgcg

SEQ ID NO: 282383 - RNA, 32 nt, Homo Sapiens
agucacuccugacuugccagugucucagaaac

SEQ ID NO: 282384 - RNA, 32 nt, Homo Sapiens
ucagacuuguuccauagcaguugaauuagggg

SEQ ID NO: 282385 - RNA, 32 nt, Homo Sapiens
acagacggacagccagcccucccgcgggacgc

SEQ ID NO: 282386 - RNA, 32 nt, Homo Sapiens
ccggggaacgugugaggcugggacgccuugca

SEQ ID NO: 282387 - RNA, 32 nt, Homo Sapiens
gccccgcccuccccaaagucccgccccgcccc

SEQ ID NO: 282388 - RNA, 30 nt, Homo Sapiens
acucacgcagcuccagcccaucuugcugac

SEQ ID NO: 282389 - RNA, 32 nt, Homo Sapiens
agauauaauuaagcuuacacaaugaaauggaa

SEQ ID NO: 282390 - RNA, 32 nt, Homo Sapiens
ggcccggcgcggugccucaugccuguaauccc

SEQ ID NO: 282391 - RNA, 32 nt, Homo Sapiens
gguuuucaccuggacaccguguagaaugcuug

SEQ ID NO: 282392 - RNA, 32 nt, Homo Sapiens
ggguggccuggcggccuggagccggacguguc

SEQ ID NO: 282393 - RNA, 32 nt, Homo Sapiens
ggccuuggauaccuggcccgggaugcugggcg

SEQ ID NO: 282394 - RNA, 32 nt, Homo Sapiens
cccgccgccucccccgcgagucccggcgaugc

SEQ ID NO: 282395 - RNA, 32 nt, Homo Sapiens
ccaaggaugcugucaagcaccugcaugugcug

SEQ ID NO: 282396 - RNA, 32 nt, Homo Sapiens
guggggcuccagcuugggucguugaagcuggg

SEQ ID NO: 282397 - RNA, 32 nt, Homo Sapiens
ggcaaauugucaacugcugaugguaaagcuuu

SEQ ID NO: 282398 - RNA, 28 nt, Homo Sapiens
uugguuaauaaauaaauguguuugugcu

SEQ ID NO: 282399 - RNA, 32 nt, Homo Sapiens
caaaacuccuucccuguaguccagcugaggga

SEQ ID NO: 282400 - RNA, 32 nt, Homo Sapiens
ucgggcgccuccccgcuccccccacucggagg

SEQ ID NO: 282401 - RNA, 32 nt, Homo Sapiens
gguucccucuccccggccccagcucuggacgc

SEQ ID NO: 282402 - RNA, 32 nt, Homo Sapiens
caccaucagacaccugacccucaucaagaaga

SEQ ID NO: 282403 - RNA, 32 nt, Homo Sapiens
agaagaaaacacacacagggaaaccgcuuuuu

SEQ ID NO: 282404 - RNA, 32 nt, Homo Sapiens
acugaugugugguguuuuuuucuuauaguguc

SEQ ID NO: 282405 - RNA, 32 nt, Homo Sapiens
uuuguauucuucaugaaauguguuuugucuuu

SEQ ID NO: 282406 - RNA, 32 nt, Homo Sapiens
ggacccuccugccuccucuccaggcccuuguu

SEQ ID NO: 282407 - RNA, 32 nt, Homo Sapiens
cauacccugccguacugcaucaucauuuguuu

SEQ ID NO: 282408 - RNA, 32 nt, Homo Sapiens
aaaguaccucauccucggccaccgaaaccacg

SEQ ID NO: 282409 - RNA, 32 nt, Homo Sapiens
uccucuuaguaauuuuguguccagugaccccu

SEQ ID NO: 282410 - RNA, 32 nt, Homo Sapiens
agaagccaagacugagccggcggccgcggcgc

SEQ ID NO: 282411 - RNA, 32 nt, Homo Sapiens
gaacuccgcccuguaggccggugcugguggcc

SEQ ID NO: 282412 - RNA, 32 nt, Homo Sapiens
ggauggccugugccgcccucgcuggcgaggcu

SEQ ID NO: 282413 - RNA, 32 nt, Homo Sapiens
gugucaguauuucaggguucuacauuuaucug

SEQ ID NO: 282414 - RNA, 32 nt, Homo Sapiens
gcgcuggggcuuucuuuuugaucgacuucuug

SEQ ID NO: 282415 - RNA, 32 nt, Homo Sapiens
ugcgggccgcugugcuggccugccaggccugc

SEQ ID NO: 282416 - RNA, 32 nt, Homo Sapiens
cauugccgcucccagucccgcgcucggcacga

SEQ ID NO: 282417 - RNA, 32 nt, Homo Sapiens
gggauccccacuugucuuuuuuguauuuuuua

SEQ ID NO: 282418 - RNA, 32 nt, Homo Sapiens
gcuggcugagggugggcacuaagcuggccacc

SEQ ID NO: 282419 - RNA, 32 nt, Homo Sapiens
aucuaggugggggccacucaccgacccgacac

SEQ ID NO: 282420 - RNA, 32 nt, Homo Sapiens
uugguuugcauaaucucaguguuuccuugagu

SEQ ID NO: 282421 - RNA, 32 nt, Homo Sapiens
acaguguuauuuauguuauuuauauuagcuaa

SEQ ID NO: 282422 - RNA, 32 nt, Homo Sapiens
uuauauuuguguuuugaaaaaauaaaagugcu

SEQ ID NO: 282423 - RNA, 32 nt, Homo Sapiens
guuaugaaaauaguugaaguugugcuuauugc

SEQ ID NO: 282424 - RNA, 32 nt, Homo Sapiens
caaauugauaaaauauuuagguacaaauaaca

SEQ ID NO: 282425 - RNA, 32 nt, Homo Sapiens
cggcucuccugaucacagcugcaugccgaccu

SEQ ID NO: 282426 - RNA, 32 nt, Homo Sapiens
cagcccucugugacugccccagccccauccua

SEQ ID NO: 282427 - RNA, 32 nt, Homo Sapiens
ugcugccacugacucucagagccacuuucaag

SEQ ID NO: 282428 - RNA, 32 nt, Homo Sapiens
aagcugagcgccuccgcccgccaggcgcgccg

SEQ ID NO: 282429 - RNA, 28 nt, Homo Sapiens
agcccggggcggcgcgucugggucuggc

SEQ ID NO: 282430 - RNA, 32 nt, Homo Sapiens
ucaucauaggagaaaagaagauagcuccacug

SEQ ID NO: 282431 - RNA, 32 nt, Homo Sapiens
aggacagcucuugauuuggguggaaaacaggg

SEQ ID NO: 282432 - RNA, 32 nt, Homo Sapiens
acagaauuauuaccagggaguaauuggguugc

SEQ ID NO: 282433 - RNA, 32 nt, Homo Sapiens
uaauaaaaguuguuuuuauuuuagucaaucuu

SEQ ID NO: 282434 - RNA, 32 nt, Homo Sapiens
agccaggugcgguggcucacgccugucaucuc

SEQ ID NO: 282435 - RNA, 32 nt, Homo Sapiens
guuauaaacaauuaaaagauacauaucaugua

SEQ ID NO: 282436 - RNA, 32 nt, Homo Sapiens
uaagccaacacuuugugauagguuuguacugu

SEQ ID NO: 282437 - RNA, 32 nt, Homo Sapiens
agcccauggaauuuaauuuuucauugugauca

SEQ ID NO: 282438 - RNA, 32 nt, Homo Sapiens
aucucugcuuugcaaugggcacaaucuugguc

SEQ ID NO: 282439 - RNA, 32 nt, Homo Sapiens
cuugggaacugccaacgcuucugcuugggaau

SEQ ID NO: 282440 - RNA, 32 nt, Homo Sapiens
aaugacuucuaaaaauguaacuaauugaauca

SEQ ID NO: 282441 - RNA, 32 nt, Homo Sapiens
uggagggcgugggagcgugggaggcgggagug

SEQ ID NO: 282442 - RNA, 32 nt, Homo Sapiens
augcauuuauucaguucacuuaccacauuauu

SEQ ID NO: 282443 - RNA, 31 nt, Homo Sapiens
gcuccuggccgcgggaccgugagacggguuc

SEQ ID NO: 282444 - RNA, 32 nt, Homo Sapiens
cuucugcccggcgcuucggcccgggccgcuca

SEQ ID NO: 282445 - RNA, 32 nt, Homo Sapiens
gaugaaggcagagcguguggcaucuccaccuc

SEQ ID NO: 282446 - RNA, 31 nt, Homo Sapiens
ugucuguauuuuguuaaagugcuaguucugc

SEQ ID NO: 282447 - RNA, 31 nt, Homo Sapiens
agauguagagcuggccaaccaggaggcgaug

SEQ ID NO: 282448 - RNA, 32 nt, Homo Sapiens
gccacccgccccacgcuugacuucuuaucacu

SEQ ID NO: 282449 - RNA, 32 nt, Homo Sapiens
cccccuuugacugaucagugugauaaggacuu

SEQ ID NO: 282450 - RNA, 32 nt, Homo Sapiens
aaaaaaaaaaaauuuuuuuuuaucuuaucgua

SEQ ID NO: 282451 - RNA, 32 nt, Homo Sapiens
uaggaguaaugauucauagaucuagauaggug

SEQ ID NO: 282452 - RNA, 32 nt, Homo Sapiens
auacccagagguugggcagaucagugucucua

SEQ ID NO: 282453 - RNA, 31 nt, Homo Sapiens
cggcaccagugccucgcuccauuggcaccaa

SEQ ID NO: 282454 - RNA, 32 nt, Homo Sapiens
uggaaggggggugaggguggggagguggggca

SEQ ID NO: 282455 - RNA, 32 nt, Homo Sapiens
ccgagggcguggggugccggccucccugaggc

SEQ ID NO: 282456 - RNA, 32 nt, Homo Sapiens
ggucgugucgaguugguggugauuuuggcauu

SEQ ID NO: 282457 - RNA, 32 nt, Homo Sapiens
gugucucugaccacccuggugugacugcugac

SEQ ID NO: 282458 - RNA, 32 nt, Homo Sapiens
ugguaauauuuuuuacaugugauggugauagu

SEQ ID NO: 282459 - RNA, 32 nt, Homo Sapiens
uggcucgagaugccgaagucgugcgcggcccg

SEQ ID NO: 282460 - RNA, 32 nt, Homo Sapiens
ucuguaaaacggggacagucccugccccuccc

SEQ ID NO: 282461 - RNA, 32 nt, Homo Sapiens
ccgcccacccgggggcgcucuccggaccccca

SEQ ID NO: 282462 - RNA, 32 nt, Homo Sapiens
gaacccgaaccuggugacuuugaaaggauaga

SEQ ID NO: 282463 - RNA, 32 nt, Homo Sapiens
uuacaugaaguagaagaaauccuugcaguggu

SEQ ID NO: 282464 - RNA, 32 nt, Homo Sapiens
cguuugggagaccccuggggguugccggggca

SEQ ID NO: 282465 - RNA, 32 nt, Homo Sapiens
uaagucuguggcugaaggccugagagacccug

SEQ ID NO: 282466 - RNA, 32 nt, Homo Sapiens
uuugugagacggcuggaaauucuuauuucccc

SEQ ID NO: 282467 - RNA, 32 nt, Homo Sapiens
aaacgugguuuaguuguaauucuuauuuucaa

SEQ ID NO: 282468 - RNA, 32 nt, Homo Sapiens
agcugcccaucccaugccaugcucuacccucu

SEQ ID NO: 282469 - RNA, 32 nt, Homo Sapiens
gaaaguggccugccuggcauccucugcuuauu

SEQ ID NO: 282470 - RNA, 32 nt, Homo Sapiens
agguggggccccagcagcucugguccuccuga

SEQ ID NO: 282471 - RNA, 32 nt, Homo Sapiens
acacucagaaaagaaguucaggggccaacuuc

SEQ ID NO: 282472 - RNA, 32 nt, Homo Sapiens
gcgcccuguggcugccaccggaggaaggggcu

SEQ ID NO: 282473 - RNA, 32 nt, Homo Sapiens
gauagcgcauauauuugcaguaugaacuauug

SEQ ID NO: 282474 - RNA, 32 nt, Homo Sapiens
gaguuggaaaagaugguaagcuuuugucaggg

SEQ ID NO: 282475 - RNA, 32 nt, Homo Sapiens
auuuguguucuucugaaugcuacuagcagcac

SEQ ID NO: 282476 - RNA, 32 nt, Homo Sapiens
cuuuuuauaaccucuugaauacaguucgcuag

SEQ ID NO: 282477 - RNA, 32 nt, Homo Sapiens
uguuucacccauugucuguguuuaguccuugu

SEQ ID NO: 282478 - RNA, 32 nt, Homo Sapiens
aaacaaaaaugaagcuaaaaugaaucaacggc

SEQ ID NO: 282479 - RNA, 32 nt, Homo Sapiens
cuacucuucuuuuaagcaauaugauguguaga

SEQ ID NO: 282480 - RNA, 32 nt, Homo Sapiens
gaagcauggcaccagcauccacuucuggagag

SEQ ID NO: 282481 - RNA, 32 nt, Homo Sapiens
gccccuggcccggccccacccagccgacaugu

SEQ ID NO: 282482 - RNA, 32 nt, Homo Sapiens
agaaaauuugaaaaaguaauuucuauucugcc

SEQ ID NO: 282483 - RNA, 32 nt, Homo Sapiens
agauguggaaagacuuuuuacguacacuucag

SEQ ID NO: 282484 - RNA, 30 nt, Homo Sapiens
acuuugaguuugcugggggaagcgggccgg

SEQ ID NO: 282485 - RNA, 32 nt, Homo Sapiens
ggugacagcagggcuguggccauaaugacacu

SEQ ID NO: 282486 - RNA, 32 nt, Homo Sapiens
gacucuuccacuuuuugaacugguguuuccca

SEQ ID NO: 282487 - RNA, 32 nt, Homo Sapiens
ccgcgggcggcgggcaguggugucccagucuc

SEQ ID NO: 282488 - RNA, 32 nt, Homo Sapiens
cccgccgcgcccgcuccgcuccgacugccguc

SEQ ID NO: 282489 - RNA, 32 nt, Homo Sapiens
gccugagcgaguuuguagugacucacugcaca

SEQ ID NO: 282490 - RNA, 32 nt, Homo Sapiens
gagacgccccuuuccucguccgcucuuuucuc

SEQ ID NO: 282491 - RNA, 32 nt, Homo Sapiens
ccccaaucccccagccccacugagcucuuaac

SEQ ID NO: 282492 - RNA, 32 nt, Homo Sapiens
augacuguuuuaaagcuaugugggcugggggc

SEQ ID NO: 282493 - RNA, 32 nt, Homo Sapiens
gugccauccacauuuuaacaguaccugugccu

SEQ ID NO: 282494 - RNA, 32 nt, Homo Sapiens
ucuguccgugaggcugcagaacacaaggcagc

SEQ ID NO: 282495 - RNA, 32 nt, Homo Sapiens
uccugcccacuggggccgcccgggggccacca

SEQ ID NO: 282496 - RNA, 32 nt, Homo Sapiens
cuuuguagguauccuuaguuaaguaguuuugc

SEQ ID NO: 282497 - RNA, 32 nt, Homo Sapiens
ugagggauuuguuuccuaacgccauuggaggc

SEQ ID NO: 282498 - RNA, 32 nt, Homo Sapiens
gccacuguguccagccuguaacuauuauuuuu

SEQ ID NO: 282499 - RNA, 32 nt, Homo Sapiens
uucauuuagugggaagagcagcagcccagcua

SEQ ID NO: 282500 - RNA, 32 nt, Homo Sapiens
augacauguaugagaaccaaaaaacagcuguc

SEQ ID NO: 282501 - RNA, 32 nt, Homo Sapiens
ugaucugcaugggaaacacccugaccuucuuc

SEQ ID NO: 282502 - RNA, 32 nt, Homo Sapiens
uuauauugaacauguugaucacaaugugugga

SEQ ID NO: 282503 - RNA, 32 nt, Homo Sapiens
ggagcggcggggggcaggggccccggauugag

SEQ ID NO: 282504 - RNA, 32 nt, Homo Sapiens
accugaaacugggcguggagagaagagccguu

SEQ ID NO: 282505 - RNA, 32 nt, Homo Sapiens
uaaacaccuccaaaugggagccaggugcgccc

SEQ ID NO: 282506 - RNA, 27 nt, Homo Sapiens
aaacacuccuucuuucagccccaccuc

SEQ ID NO: 282507 - RNA, 32 nt, Homo Sapiens
augggcccaagcccgguuuaggcuugcagcca

SEQ ID NO: 282508 - RNA, 32 nt, Homo Sapiens
ggagagcggcccggcuacccugcaccucugca

SEQ ID NO: 282509 - RNA, 32 nt, Homo Sapiens
cccaguacaccuguagauauuacuguacuuuu

SEQ ID NO: 282510 - RNA, 32 nt, Homo Sapiens
uuuugggaacucaucuuugauucaucauuguc

SEQ ID NO: 282511 - RNA, 32 nt, Homo Sapiens
cuaugauauuuuuuccuucuucguagggacuu

SEQ ID NO: 282512 - RNA, 32 nt, Homo Sapiens
ccauacuuauuauugaugauaagauuuaccuu

SEQ ID NO: 282513 - RNA, 32 nt, Homo Sapiens
aacuccauagagaggaaugacaggcugggccu

SEQ ID NO: 282514 - RNA, 32 nt, Homo Sapiens
cacuaccgcuguaucuguacauaauucuaacu

SEQ ID NO: 282515 - RNA, 32 nt, Homo Sapiens
uuuauguucuaaauaacuauuugugcaacucc

SEQ ID NO: 282516 - RNA, 32 nt, Homo Sapiens
agccgaaccgagccggggcgccgggagcuauu

SEQ ID NO: 282517 - RNA, 32 nt, Homo Sapiens
uguagagauaaugcucauaaugcaguaaauau

SEQ ID NO: 282518 - RNA, 32 nt, Homo Sapiens
ugcuuggguuccuggggguuuucugaucacug

SEQ ID NO: 282519 - RNA, 32 nt, Homo Sapiens
agcucagcugccuuccuggggcugguccuggg

SEQ ID NO: 282520 - RNA, 29 nt, Homo Sapiens
uaaaguuuuauccaauauucuaggaauuu

SEQ ID NO: 282521 - RNA, 32 nt, Homo Sapiens
uauauuaaccaccuugcauguauucaaaugug

SEQ ID NO: 282522 - RNA, 32 nt, Homo Sapiens
aagggaagaagggaaaaagagauuauuauguc

SEQ ID NO: 282523 - RNA, 32 nt, Homo Sapiens
aagcagcccucccucgauggccucuagcccag

SEQ ID NO: 282524 - RNA, 32 nt, Homo Sapiens
ccgagcacacauaaaagcacaaagacagagac

SEQ ID NO: 282525 - RNA, 32 nt, Homo Sapiens
ucuucccccuggaugguuguauuuuuccaguc

SEQ ID NO: 282526 - RNA, 32 nt, Homo Sapiens
ugaaggagaggacagugugucuggccagugag

SEQ ID NO: 282527 - RNA, 32 nt, Homo Sapiens
gccucaggcuccuggguggcugggacuacagg

SEQ ID NO: 282528 - RNA, 32 nt, Homo Sapiens
gcugcugcguccgcugcgccgacggugcgggg

SEQ ID NO: 282529 - RNA, 32 nt, Homo Sapiens
aggcccaugccccucacccccacgccccgccc

SEQ ID NO: 282530 - RNA, 32 nt, Homo Sapiens
aacucaguuuuucuaaacaacaaaauuccuuu

SEQ ID NO: 282531 - RNA, 32 nt, Homo Sapiens
uaaaaugcuaaauauugcaaauuuaagcuuug

SEQ ID NO: 282532 - RNA, 32 nt, Homo Sapiens
ugacugcuggccagaagcuagugguccugggg

SEQ ID NO: 282533 - RNA, 32 nt, Homo Sapiens
aacuggcugggcggggucccagcagccuagga

SEQ ID NO: 282534 - RNA, 32 nt, Homo Sapiens
agugcucuuucugcagcccaugccaccuguuu

SEQ ID NO: 282535 - RNA, 32 nt, Homo Sapiens
gcuuugcccuuaaaauaggguugcaauuaaaa

SEQ ID NO: 282536 - RNA, 32 nt, Homo Sapiens
ccucuggcuucagcugcagccuagccaggcug

SEQ ID NO: 282537 - RNA, 32 nt, Homo Sapiens
gaaaugggucgcccggcugucagagggaagca

SEQ ID NO: 282538 - RNA, 32 nt, Homo Sapiens
augccuuaaucccagcacuuugggaggucaag

SEQ ID NO: 282539 - RNA, 32 nt, Homo Sapiens
uaaucugacuaaaagauggcuuaugaaaaucg

SEQ ID NO: 282540 - RNA, 32 nt, Homo Sapiens
gacaaaaucuuuuuuuuuuuuaagacuuuuuu

SEQ ID NO: 282541 - RNA, 32 nt, Homo Sapiens
ccuguggacagcucaccuagcggcaauggcug

SEQ ID NO: 282542 - RNA, 30 nt, Homo Sapiens
acagguguguggucugcagaacucuauggc

SEQ ID NO: 282543 - RNA, 32 nt, Homo Sapiens
gccgggcagguuuugagcugcagagacccgug

SEQ ID NO: 282544 - RNA, 32 nt, Homo Sapiens
uuaaaauacaaaauuaaacaaacaaaaaaacu

SEQ ID NO: 282545 - RNA, 32 nt, Homo Sapiens
ccuugcugauaaaacagguugcaguaaagaag

SEQ ID NO: 282546 - RNA, 32 nt, Homo Sapiens
aauaagcacaggccuauuucuuucucaagacg

SEQ ID NO: 282547 - RNA, 32 nt, Homo Sapiens
auuacucuuauuauuucuauuguauguguuaa

SEQ ID NO: 282548 - RNA, 32 nt, Homo Sapiens
aaagaagcaguuccugauguuacaaaugaaca

SEQ ID NO: 282549 - RNA, 32 nt, Homo Sapiens
ucugcgugggccaccugcuaccuagugcuuuu

SEQ ID NO: 282550 - RNA, 32 nt, Homo Sapiens
ugcacagauauacuuugaaccaugugaugagu

SEQ ID NO: 282551 - RNA, 32 nt, Homo Sapiens
uauaggagcugccuauuucuguguaauuggcc

SEQ ID NO: 282552 - RNA, 32 nt, Homo Sapiens
gaggaaucgaacucccaaaauaguguguauau

SEQ ID NO: 282553 - RNA, 32 nt, Homo Sapiens
uugagagcuaaagcagcccacccagcucccag

SEQ ID NO: 282554 - RNA, 32 nt, Homo Sapiens
ugagaagagcaaacagaaacagucauuccacc

SEQ ID NO: 282555 - RNA, 32 nt, Homo Sapiens
cauaggaucuugcacuguucauuuucaguggg

SEQ ID NO: 282556 - RNA, 32 nt, Homo Sapiens
gugguuuuaucuuuuccagacuguauggaugu

SEQ ID NO: 282557 - RNA, 32 nt, Homo Sapiens
ggcuggagugcaguggcaugaucauagcucau

SEQ ID NO: 282558 - RNA, 32 nt, Homo Sapiens
uggggggaauggggggagcccaggugaucccc

SEQ ID NO: 282559 - RNA, 32 nt, Homo Sapiens
aacagacaaauguaaacuaaaauaucagcaau

SEQ ID NO: 282560 - RNA, 32 nt, Homo Sapiens
uuucauaucuuacauauuuauuugagcugagc

SEQ ID NO: 282561 - RNA, 32 nt, Homo Sapiens
aaaagagucugugaaggugaucaguguagcag

SEQ ID NO: 282562 - RNA, 32 nt, Homo Sapiens
ccuaguuccagaacgcuggacuuuaaugagau

SEQ ID NO: 282563 - RNA, 32 nt, Homo Sapiens
ugacauacuuggagagcaaauuauggaaaugu

SEQ ID NO: 282564 - RNA, 32 nt, Homo Sapiens
ucugguacacgacuuucuacugccuguuccag

SEQ ID NO: 282565 - RNA, 32 nt, Homo Sapiens
ggacucuggugucucacccauccaccaggcgg

SEQ ID NO: 282566 - RNA, 32 nt, Homo Sapiens
uaauccacaaucaacauuuugaugguagggaa

SEQ ID NO: 282567 - RNA, 32 nt, Homo Sapiens
uggcacugauggaggcugaacugcguaaaucc

SEQ ID NO: 282568 - RNA, 32 nt, Homo Sapiens
ccaugaauaugccagagcugcuggcuagugau

SEQ ID NO: 282569 - RNA, 32 nt, Homo Sapiens
gacuuuaaugacuuuuuuaauggggugguagu

SEQ ID NO: 282570 - RNA, 32 nt, Homo Sapiens
agggcagucacccggcaguucucaaacuuuag

SEQ ID NO: 282571 - RNA, 32 nt, Homo Sapiens
gagccggcgggcgccccggccccgcgucuagu

SEQ ID NO: 282572 - RNA, 32 nt, Homo Sapiens
gauacgccagcuuggcacgaggcugccucagg

SEQ ID NO: 282573 - RNA, 32 nt, Homo Sapiens
aguuacaagaauauggcauuuaugaucauguu

SEQ ID NO: 282574 - RNA, 32 nt, Homo Sapiens
ccugccccugucaccaccccgagcuguguggc

SEQ ID NO: 282575 - RNA, 32 nt, Homo Sapiens
guaagggcuugaaaaugauacuggcaagauac

SEQ ID NO: 282576 - RNA, 32 nt, Homo Sapiens
uaacuuuccuucccuccauugaguacgugcuu

SEQ ID NO: 282577 - RNA, 32 nt, Homo Sapiens
ucuuacgcuucgcuaccaccagcggccccgcc

SEQ ID NO: 282578 - RNA, 32 nt, Homo Sapiens
ccgcccggcuuggccgcugcugccgcgucugg

SEQ ID NO: 282579 - RNA, 32 nt, Homo Sapiens
cauaaaggaaaaguaacauaagcauguaaaug

SEQ ID NO: 282580 - RNA, 32 nt, Homo Sapiens
gcauccgucguuggcgcccagggugcgcgucg

SEQ ID NO: 282581 - RNA, 32 nt, Homo Sapiens
aagaaaaacuaaaaacagaaaugauauucuca

SEQ ID NO: 282582 - RNA, 32 nt, Homo Sapiens
gaguggaggaagacagcagggugggggugagc

SEQ ID NO: 282583 - RNA, 32 nt, Homo Sapiens
agcucaggcguucgggaccagccuggccaaca

SEQ ID NO: 282584 - RNA, 32 nt, Homo Sapiens
aaauguagguuuuagauguaucuuucagucag

SEQ ID NO: 282585 - RNA, 32 nt, Homo Sapiens
cugccuuggaagacauaagaagcagugauacu

SEQ ID NO: 282586 - RNA, 32 nt, Homo Sapiens
cuuccagaguuacaaaaggaaaaaauggcaaa

SEQ ID NO: 282587 - RNA, 32 nt, Homo Sapiens
cgccuuuccgcggagcccuuggccccucggac

SEQ ID NO: 282588 - RNA, 32 nt, Homo Sapiens
aauuggcaauggcacauaaaaauuaggaugga

SEQ ID NO: 282589 - RNA, 30 nt, Homo Sapiens
uccugggcgcccgcgggcccggcgagaaag

SEQ ID NO: 282590 - RNA, 32 nt, Homo Sapiens
agaguuguauaagauaaaaauaaauacaguac

SEQ ID NO: 282591 - RNA, 32 nt, Homo Sapiens
gcuaaugggaagagaauucugguuucaaaaga

SEQ ID NO: 282592 - RNA, 32 nt, Homo Sapiens
cggauggagacgggcgcuuuucgacgagauac

SEQ ID NO: 282593 - RNA, 32 nt, Homo Sapiens
gauaugauuuccuaucaguuuauauuucucua

SEQ ID NO: 282594 - RNA, 32 nt, Homo Sapiens
cucccuggcuggggcgucccggccaagguuug

SEQ ID NO: 282595 - RNA, 32 nt, Homo Sapiens
aacuucucuuccauuuuccccaauggcgcaug

SEQ ID NO: 282596 - RNA, 32 nt, Homo Sapiens
uggaagaaaaacaugugccuucugcuaacugu

SEQ ID NO: 282597 - RNA, 32 nt, Homo Sapiens
ccuuuugguaucuacuucuacauccaauguau

SEQ ID NO: 282598 - RNA, 32 nt, Homo Sapiens
uguagaguacaggaauggggcagacgcgauuc

SEQ ID NO: 282599 - RNA, 32 nt, Homo Sapiens
ccaggcccagcuccggccucucggcggccucu

SEQ ID NO: 282600 - RNA, 32 nt, Homo Sapiens
aucuuggucauaaguuggcauucucucacauu

SEQ ID NO: 282601 - RNA, 32 nt, Homo Sapiens
acacugggcucccagcuggggacugcuccaug

SEQ ID NO: 282602 - RNA, 32 nt, Homo Sapiens
cuguuccuccucuagcugggaguaaucacagu

SEQ ID NO: 282603 - RNA, 32 nt, Homo Sapiens
ccauuagucaguguuacagcuguguuggggau

SEQ ID NO: 282604 - RNA, 32 nt, Homo Sapiens
ccaucaccagccggggacccagugacucagag

SEQ ID NO: 282605 - RNA, 32 nt, Homo Sapiens
ugagugucaacaggccuguguuugaauccaag

SEQ ID NO: 282606 - RNA, 32 nt, Homo Sapiens
uuaacaaaaaauuuuuaggccaggcacagugg

SEQ ID NO: 282607 - RNA, 32 nt, Homo Sapiens
ucuggcugugugugaaggaugugugugagcag

SEQ ID NO: 282608 - RNA, 32 nt, Homo Sapiens
ucccugcggauccgcacccuccccugggccca

SEQ ID NO: 282609 - RNA, 32 nt, Homo Sapiens
agugaugcuccucuuuugugucucucugguug

SEQ ID NO: 282610 - RNA, 32 nt, Homo Sapiens
uaaaguggauaaaggcaaauuaagauauagga

SEQ ID NO: 282611 - RNA, 32 nt, Homo Sapiens
gcggaggcacagagaccaaggccgcuuaaccu

SEQ ID NO: 282612 - RNA, 32 nt, Homo Sapiens
ucagcuuuaugaaaaaauguuuguuuauuuca

SEQ ID NO: 282613 - RNA, 32 nt, Homo Sapiens
acagguggguauuuaaucuguauuauuccccg

SEQ ID NO: 282614 - RNA, 32 nt, Homo Sapiens
caugaccugugcuguuguuugggaaacaggga

SEQ ID NO: 282615 - RNA, 32 nt, Homo Sapiens
gugccggaccuucuggccgccguccuggugcc

SEQ ID NO: 282616 - RNA, 32 nt, Homo Sapiens
aacccacccacccuaacgaauaugaggcugcu

SEQ ID NO: 282617 - RNA, 32 nt, Homo Sapiens
ggcuggucgcaguggcuuacacuuguaacccu

SEQ ID NO: 282618 - RNA, 32 nt, Homo Sapiens
auguaacugaaaaucuaauuauaggagcauuu

SEQ ID NO: 282619 - RNA, 32 nt, Homo Sapiens
uuaguucuuauucauguuuaagaguuaguccu

SEQ ID NO: 282620 - RNA, 32 nt, Homo Sapiens
gaaugucuuuuuauuuuaaauuuuacauucau

SEQ ID NO: 282621 - RNA, 32 nt, Homo Sapiens
agcuccccccaccccacccccacucuagcguu

SEQ ID NO: 282622 - RNA, 32 nt, Homo Sapiens
uuuuuuaaugcuaaucuugugaaaauaauuga

SEQ ID NO: 282623 - RNA, 32 nt, Homo Sapiens
cccacucagugauggacuccagugccugcaag

SEQ ID NO: 282624 - RNA, 32 nt, Homo Sapiens
caaaaagcauauccguucaaaaauuuuuccac

SEQ ID NO: 282625 - RNA, 31 nt, Homo Sapiens
accucggagccccacgaccucagagcccagu

SEQ ID NO: 282626 - RNA, 32 nt, Homo Sapiens
uucuuccagggucagggaggaaagcuggcaac

SEQ ID NO: 282627 - RNA, 32 nt, Homo Sapiens
uccccuccccgcaggaagccccgcccucugcg

SEQ ID NO: 282628 - RNA, 32 nt, Homo Sapiens
ucccccaucaguugauuuuucuuauuuacaga

SEQ ID NO: 282629 - RNA, 32 nt, Homo Sapiens
agacagagaaaguagauuaggcuuuaagugaa

SEQ ID NO: 282630 - RNA, 30 nt, Homo Sapiens
gugaaaacagaauaaacuucacccagaaaa

SEQ ID NO: 282631 - RNA, 32 nt, Homo Sapiens
ccgugccaacuggucagcuguccuucacgcac

SEQ ID NO: 282632 - RNA, 32 nt, Homo Sapiens
accucugggcuuugauuccaucuccuugucuu

SEQ ID NO: 282633 - RNA, 32 nt, Homo Sapiens
ggcauucuaauaauagagacaccugggcgaac

SEQ ID NO: 282634 - RNA, 32 nt, Homo Sapiens
cgccugcggccgcgccaggugcucugugagaa

SEQ ID NO: 282635 - RNA, 32 nt, Homo Sapiens
uugccuacagaaaauuaaaaggcaaaacaaug

SEQ ID NO: 282636 - RNA, 27 nt, Homo Sapiens
aauguguccuucuuuguuuuuuaaaaa

SEQ ID NO: 282637 - RNA, 32 nt, Homo Sapiens
aggacuuuguccagacucuccuccucuuaccu

SEQ ID NO: 282638 - RNA, 32 nt, Homo Sapiens
cgccccccuggccuugucuaccucuugccccc

SEQ ID NO: 282639 - RNA, 32 nt, Homo Sapiens
aguauuacuaauggaauagaaauucauacuuu

SEQ ID NO: 282640 - RNA, 32 nt, Homo Sapiens
cucuggcccucccuuccuuaagcccaguccug

SEQ ID NO: 282641 - RNA, 32 nt, Homo Sapiens
ucuucgcggcgcucaccucggcuccuaggguu

SEQ ID NO: 282642 - RNA, 32 nt, Homo Sapiens
cacugcacuccagccugggugacacagcgaga

SEQ ID NO: 282643 - RNA, 30 nt, Homo Sapiens
ucucgccuaacacugggggaaaagugcuaa

SEQ ID NO: 282644 - RNA, 31 nt, Homo Sapiens
auauuguguaacaaugauacuggcuguaaga

SEQ ID NO: 282645 - RNA, 32 nt, Homo Sapiens
ucggauuuggaguguccguuauccugccugca

SEQ ID NO: 282646 - RNA, 32 nt, Homo Sapiens
ugugauucucagagggucugagguccgagcac

SEQ ID NO: 282647 - RNA, 32 nt, Homo Sapiens
ccaaccaccaccagccagacauuacagccaac

SEQ ID NO: 282648 - RNA, 32 nt, Homo Sapiens
aggcagugccauuugaccacaccgaucauguu

SEQ ID NO: 282649 - RNA, 32 nt, Homo Sapiens
uucucagcucugccuccccuggccagguuguc

SEQ ID NO: 282650 - RNA, 32 nt, Homo Sapiens
aagugccugggcucagccugguuucugggugc

SEQ ID NO: 282651 - RNA, 27 nt, Homo Sapiens
ucauaucuguucuucagcagccuguca

SEQ ID NO: 282652 - RNA, 32 nt, Homo Sapiens
cccugcagacgucuggcccuggcggguggcug

SEQ ID NO: 282653 - RNA, 32 nt, Homo Sapiens
uuaaauuuuaucgauucuuaaaaacuggacac

SEQ ID NO: 282654 - RNA, 32 nt, Homo Sapiens
ggaagcauaucaauuccaauauuuuauaacca

SEQ ID NO: 282655 - RNA, 32 nt, Homo Sapiens
ugaucucuaauuuucuacaucaugguaaucug

SEQ ID NO: 282656 - RNA, 32 nt, Homo Sapiens
uguucaaggcaaacagaaacacuucacauuuu

SEQ ID NO: 282657 - RNA, 32 nt, Homo Sapiens
aaagggcugggccucaccgcucccagcaacug

SEQ ID NO: 282658 - RNA, 32 nt, Homo Sapiens
uucugcugucuccagacugucuaccaaagaga

SEQ ID NO: 282659 - RNA, 32 nt, Homo Sapiens
ugagcucaagcacuccucccgccuuggcuucc

SEQ ID NO: 282660 - RNA, 32 nt, Homo Sapiens
uacauagcccccaaccuguguacugacagacc

SEQ ID NO: 282661 - RNA, 32 nt, Homo Sapiens
uguguucccucuauccguccugcuuccugggc

SEQ ID NO: 282662 - RNA, 32 nt, Homo Sapiens
gggcuuuugaguuuuacgcacugaggaaugau

SEQ ID NO: 282663 - RNA, 32 nt, Homo Sapiens
guuuuauaaaagacaaaauguauaucaauaaa

SEQ ID NO: 282664 - RNA, 32 nt, Homo Sapiens
uuuuaauaaacuauaguaguguuauaaaaagu

SEQ ID NO: 282665 - RNA, 32 nt, Homo Sapiens
gacugaguucccugcccagcuuucgggaucuc

SEQ ID NO: 282666 - RNA, 32 nt, Homo Sapiens
ucuguggagacgccagcccugcccaaucagag

SEQ ID NO: 282667 - RNA, 32 nt, Homo Sapiens
ucugcacacuaacaggcaauauaugagagggc

SEQ ID NO: 282668 - RNA, 32 nt, Homo Sapiens
cgccucucuccgcgcgcacccccaacccgccc

SEQ ID NO: 282669 - RNA, 32 nt, Homo Sapiens
ggaggcccggcaggcgcgacccgggcugcgua

SEQ ID NO: 282670 - RNA, 32 nt, Homo Sapiens
ucaggagaccuggugauuugaccugcaccugu

SEQ ID NO: 282671 - RNA, 32 nt, Homo Sapiens
cagcuacggcgcccggcuggucagcagcacag

SEQ ID NO: 282672 - RNA, 32 nt, Homo Sapiens
augcucaaauggugcuauguucuguuucaaaa

SEQ ID NO: 282673 - RNA, 32 nt, Homo Sapiens
gcggaggggcggccugggaggggaggagggga

SEQ ID NO: 282674 - RNA, 32 nt, Homo Sapiens
agcaaccaagauaaaaaauauuuuaaagcaau

SEQ ID NO: 282675 - RNA, 32 nt, Homo Sapiens
gugcccaccucccaggguaggcaccugggggc

SEQ ID NO: 282676 - RNA, 32 nt, Homo Sapiens
acagcaauuauugaggacaauuauugagcuuu

SEQ ID NO: 282677 - RNA, 32 nt, Homo Sapiens
ccacgucccucaugcacaucacucaucuccug

SEQ ID NO: 282678 - RNA, 32 nt, Homo Sapiens
ccucuguuguccagguguucucuucaagauuc

SEQ ID NO: 282679 - RNA, 32 nt, Homo Sapiens
cgccaugcugcagacuccagugggccugguuu

SEQ ID NO: 282680 - RNA, 32 nt, Homo Sapiens
auucguauauugcuuuacuguuugcaaagcag

SEQ ID NO: 282681 - RNA, 32 nt, Homo Sapiens
cugccacacggaagcaagcagaugaacuaauu

SEQ ID NO: 282682 - RNA, 32 nt, Homo Sapiens
uucuuguguacacacacacacacacacacaca

SEQ ID NO: 282683 - RNA, 32 nt, Homo Sapiens
guccucccugcagacucccuccccuccagccc

SEQ ID NO: 282684 - RNA, 32 nt, Homo Sapiens
ugcugucaaauuaaaucagccucuguauugug

SEQ ID NO: 282685 - RNA, 32 nt, Homo Sapiens
guggcaaaugcauguaaauauuuuucguaggc

SEQ ID NO: 282686 - RNA, 32 nt, Homo Sapiens
cccucccggacgggguggcuggccgggcagag

SEQ ID NO: 282687 - RNA, 32 nt, Homo Sapiens
acaaggaauuuauguagauauacuuaguccua

SEQ ID NO: 282688 - RNA, 32 nt, Homo Sapiens
ccucccccaucuccccgccaucugcagcccgg

SEQ ID NO: 282689 - RNA, 32 nt, Homo Sapiens
uacgaauucauaauauuugauucagaacaaau

SEQ ID NO: 282690 - RNA, 32 nt, Homo Sapiens
agcuaggcuaaaauuugcuaaaugccuugguu

SEQ ID NO: 282691 - RNA, 32 nt, Homo Sapiens
cuucaaucaaggaaaaauagagcaacuguaca

SEQ ID NO: 282692 - RNA, 32 nt, Homo Sapiens
ccacaguggaagacuaccuacauuacuaugca

SEQ ID NO: 282693 - RNA, 32 nt, Homo Sapiens
ccuuaaaaguucccuguaugugaaacgggaag

SEQ ID NO: 282694 - RNA, 29 nt, Homo Sapiens
gaugaacuagugauguagaaaagagacuu

SEQ ID NO: 282695 - RNA, 32 nt, Homo Sapiens
uguaagaaaaauacuggagcuaacaaugaaga

SEQ ID NO: 282696 - RNA, 32 nt, Homo Sapiens
cuguaaaugcaaacacagcauuuuuuacaacu

SEQ ID NO: 282697 - RNA, 32 nt, Homo Sapiens
gugccaugaagauaagucuuccauggccaaau

SEQ ID NO: 282698 - RNA, 32 nt, Homo Sapiens
ucagcuccuguaaacagccagguuauaaaagc

SEQ ID NO: 282699 - RNA, 32 nt, Homo Sapiens
ucugggcugccucuccuauucagguauuggga

SEQ ID NO: 282700 - RNA, 32 nt, Homo Sapiens
caccaguauguaccugcaggcaucagggggag

SEQ ID NO: 282701 - RNA, 32 nt, Homo Sapiens
gguagggaugagggagggaggggcauugugau

SEQ ID NO: 282702 - RNA, 32 nt, Homo Sapiens
agaagaaaaaaguugaaauauugagucaugau

SEQ ID NO: 282703 - RNA, 32 nt, Homo Sapiens
ugguaaauauuuuuauucuugaguuaucuagg

SEQ ID NO: 282704 - RNA, 32 nt, Homo Sapiens
auugggaauauguuuuuucucuguaaauuugu

SEQ ID NO: 282705 - RNA, 32 nt, Homo Sapiens
cuuagacuugagggcucuguccugaugccuua

SEQ ID NO: 282706 - RNA, 32 nt, Homo Sapiens
ggcagcuuuuugaaacacacccugaaguaccg

SEQ ID NO: 282707 - RNA, 32 nt, Homo Sapiens
augugaacacaaguuuaagaggauugaggaag

SEQ ID NO: 282708 - RNA, 32 nt, Homo Sapiens
ugacuacgugcgugcagccuccccucgauguc

SEQ ID NO: 282709 - RNA, 32 nt, Homo Sapiens
agcuuguauaauguaaccauuugggguccgcu

SEQ ID NO: 282710 - RNA, 32 nt, Homo Sapiens
ugguccgccucccuggccuggcucaaccgagu

SEQ ID NO: 282711 - RNA, 32 nt, Homo Sapiens
accuagucuaugcaucugcagaacgcacacuc

SEQ ID NO: 282712 - RNA, 32 nt, Homo Sapiens
uacuaaugagaguuggguagaacucucugaga

SEQ ID NO: 282713 - RNA, 32 nt, Homo Sapiens
caggcuuugggaacuguauaacucugagaucg

SEQ ID NO: 282714 - RNA, 32 nt, Homo Sapiens
uacagauucuucauaaauacaugcauacugac

SEQ ID NO: 282715 - RNA, 32 nt, Homo Sapiens
gugugccucaguuuccuccuccacaacugaau

SEQ ID NO: 282716 - RNA, 32 nt, Homo Sapiens
aaaugagaaacuuuauacuucaguuuucagau

SEQ ID NO: 282717 - RNA, 32 nt, Homo Sapiens
uguguuuuucuuuuucuuuuaaguaggaaaac

SEQ ID NO: 282718 - RNA, 32 nt, Homo Sapiens
ucccucuguacccacacccacccacucacuug

SEQ ID NO: 282719 - RNA, 32 nt, Homo Sapiens
ggccgagggggaagagugugucugcgggagaa

SEQ ID NO: 282720 - RNA, 32 nt, Homo Sapiens
cccgcccacccccaccaagggcguugugaaua

SEQ ID NO: 282721 - RNA, 32 nt, Homo Sapiens
cccaggucuggguggggcccaggcccggaugc

SEQ ID NO: 282722 - RNA, 32 nt, Homo Sapiens
ugcucagggucacucagcagguccuggaggau

SEQ ID NO: 282723 - RNA, 32 nt, Homo Sapiens
uuucuaguugcacccacaguccccucauucaa

SEQ ID NO: 282724 - RNA, 32 nt, Homo Sapiens
cggggccgagggugggugccgugcacgcgcgc

SEQ ID NO: 282725 - RNA, 32 nt, Homo Sapiens
cacgcugggcccucugccugggacgccgucgu

SEQ ID NO: 282726 - RNA, 32 nt, Homo Sapiens
aacacaucugaagccacuauguuuccuggcuc

SEQ ID NO: 282727 - RNA, 32 nt, Homo Sapiens
aaaaucucagaauucacugcuauauaauucau

SEQ ID NO: 282728 - RNA, 32 nt, Homo Sapiens
ggccgucauggugccgucggcgcucccugcgc

SEQ ID NO: 282729 - RNA, 32 nt, Homo Sapiens
cgagggugguggcucacgcauguaauccuaac

SEQ ID NO: 282730 - RNA, 32 nt, Homo Sapiens
agaaugaagauaaguaauuuaccuguccagga

SEQ ID NO: 282731 - RNA, 32 nt, Homo Sapiens
aauguggcuauaauacacacuaccucccuuca

SEQ ID NO: 282732 - RNA, 32 nt, Homo Sapiens
gauuaccuuucuguuccuugcaguucaccuca

SEQ ID NO: 282733 - RNA, 32 nt, Homo Sapiens
agacaugcacauaauauagauacacaaggaau

SEQ ID NO: 282734 - RNA, 32 nt, Homo Sapiens
caacccugucuccaccuugauauugcacuucc

SEQ ID NO: 282735 - RNA, 32 nt, Homo Sapiens
aaacaaacaaauaaagaaagaacauuggacau

SEQ ID NO: 282736 - RNA, 32 nt, Homo Sapiens
augcucuggaggcagcacacacagaauaaccc

SEQ ID NO: 282737 - RNA, 32 nt, Homo Sapiens
gcaccgcguccggcagcgccagcccuacacuc

SEQ ID NO: 282738 - RNA, 32 nt, Homo Sapiens
ucuagccuccggccaacaugggcuugauuccu

SEQ ID NO: 282739 - RNA, 28 nt, Homo Sapiens
gcgcgggggcggcgugucaggugguugc

SEQ ID NO: 282740 - RNA, 32 nt, Homo Sapiens
gaucagggcccggcccacggcccugagcggcu

SEQ ID NO: 282741 - RNA, 31 nt, Homo Sapiens
guuaaagaaguccagaaccagaaccagaggc

SEQ ID NO: 282742 - RNA, 32 nt, Homo Sapiens
ucaugcacauaaaaggagcuuuucagcagcca

SEQ ID NO: 282743 - RNA, 30 nt, Homo Sapiens
gcgccaggcaggcuucgcggcugcgccccc

SEQ ID NO: 282744 - RNA, 32 nt, Homo Sapiens
gcaucauucgcgggcagcggcggagaccgaga

SEQ ID NO: 282745 - RNA, 32 nt, Homo Sapiens
uuaaugccgagaggucucugugacgauuuugg

SEQ ID NO: 282746 - RNA, 32 nt, Homo Sapiens
gcauugccaggaaauaggcuccagguuaucuu

SEQ ID NO: 282747 - RNA, 32 nt, Homo Sapiens
cugaaaacacauuuguugauauuugucuugcu

SEQ ID NO: 282748 - RNA, 32 nt, Homo Sapiens
agcaacugggaaguugaacagaugaaaauaau

SEQ ID NO: 282749 - RNA, 32 nt, Homo Sapiens
cuguccccuuuccacuuccccagcuucugccc

SEQ ID NO: 282750 - RNA, 32 nt, Homo Sapiens
gcugggcuuuggggcagccugcgacccucccc

SEQ ID NO: 282751 - RNA, 32 nt, Homo Sapiens
ugaucggucuucugcuuggguucucggugaag

SEQ ID NO: 282752 - RNA, 32 nt, Homo Sapiens
accuucuggugccugccccuccccggccuaug

SEQ ID NO: 282753 - RNA, 32 nt, Homo Sapiens
cuggggcugagcuuuaaaaugguuccgacuug

SEQ ID NO: 282754 - RNA, 32 nt, Homo Sapiens
cucgcggggcugggccugagcucgacaaguug

SEQ ID NO: 282755 - RNA, 32 nt, Homo Sapiens
aaagcugcccagauggggcugcggccgguggu

SEQ ID NO: 282756 - RNA, 32 nt, Homo Sapiens
gcacuacuuuuuuuuucuuuuuuccccccaag

SEQ ID NO: 282757 - RNA, 32 nt, Homo Sapiens
cuccagccccaccuuccaaccccucagugccc

SEQ ID NO: 282758 - RNA, 32 nt, Homo Sapiens
ggagaagaaacaagaaaaguaacugguuguca

SEQ ID NO: 282759 - RNA, 32 nt, Homo Sapiens
aagagugagagggcugaguucuuccaggucau

SEQ ID NO: 282760 - RNA, 32 nt, Homo Sapiens
ugacccuuucccuuuuuauuaaaccggacaca

SEQ ID NO: 282761 - RNA, 32 nt, Homo Sapiens
uaccagcugggauguuggcagcagccgcuccc

SEQ ID NO: 282762 - RNA, 32 nt, Homo Sapiens
uaauuacauaagaugccuguuugcuauuuggu

SEQ ID NO: 282763 - RNA, 32 nt, Homo Sapiens
augaaacaaaaauuaaaauacguauuacaagu

SEQ ID NO: 282764 - RNA, 32 nt, Homo Sapiens
gggcuccuggggagguggcccucguggcccac

SEQ ID NO: 282765 - RNA, 32 nt, Homo Sapiens
ugcuuuugggagaggcuagcagggugguuccu

SEQ ID NO: 282766 - RNA, 32 nt, Homo Sapiens
ggggggcugacacccccaccucccucccggac

SEQ ID NO: 282767 - RNA, 32 nt, Homo Sapiens
agaaggccccaagcuucuaugguuucuucuaa

SEQ ID NO: 282768 - RNA, 32 nt, Homo Sapiens
ugaaaguaauuaaugauuuuauguuugguuac

SEQ ID NO: 282769 - RNA, 32 nt, Homo Sapiens
uuaaucaaaaauucuuuucucaaaggguuaac

SEQ ID NO: 282770 - RNA, 32 nt, Homo Sapiens
aaguaugagaaacacaguuuguccucuccuuu

SEQ ID NO: 282771 - RNA, 27 nt, Homo Sapiens
cgauccucccgcuucagccucccuaag

SEQ ID NO: 282772 - RNA, 32 nt, Homo Sapiens
guaaguaauauuuggaugaucuugauuuacua

SEQ ID NO: 282773 - RNA, 32 nt, Homo Sapiens
caccagccccauggccucuccaggcgugcuca

SEQ ID NO: 282774 - RNA, 29 nt, Homo Sapiens
aguaggaaaauaaaauauaugcaaaucaa

SEQ ID NO: 282775 - RNA, 32 nt, Homo Sapiens
agcugcggacucuggagcugccuguagauuac

SEQ ID NO: 282776 - RNA, 32 nt, Homo Sapiens
caguucuggaaggaucugcagaugauggagaa

SEQ ID NO: 282777 - RNA, 32 nt, Homo Sapiens
gacucagcuucuggcuucucugcuacaucaaa

SEQ ID NO: 282778 - RNA, 32 nt, Homo Sapiens
uuauucuguaaauuauuuaauuuugucaagau

SEQ ID NO: 282779 - RNA, 32 nt, Homo Sapiens
gggcacaggcaggcccuugggugcuaagggcu

SEQ ID NO: 282780 - RNA, 32 nt, Homo Sapiens
gagguuaaucuaggaaugacucguuuaaggcc

SEQ ID NO: 282781 - RNA, 32 nt, Homo Sapiens
aguacaauuacaugcuaaauuuugcauuuucu

SEQ ID NO: 282782 - RNA, 32 nt, Homo Sapiens
uguuaccggcgggucuuuguucuuagaccugg

SEQ ID NO: 282783 - RNA, 32 nt, Homo Sapiens
gcaaagcccuccccugucccaggacaaagcug

SEQ ID NO: 282784 - RNA, 32 nt, Homo Sapiens
uuauguugacauuuucuuuuuaaauuuuuguu

SEQ ID NO: 282785 - RNA, 32 nt, Homo Sapiens
uauuaauuugaauagaaaauaaucacauuuuc

SEQ ID NO: 282786 - RNA, 32 nt, Homo Sapiens
uuucuaaaaucagauaauccuaaacaaaaaug

SEQ ID NO: 282787 - RNA, 32 nt, Homo Sapiens
augcauuuuuguuuguuuuuuauauguagcuu

SEQ ID NO: 282788 - RNA, 32 nt, Homo Sapiens
caucaagacagagaaaggacuaucaaaaguau

SEQ ID NO: 282789 - RNA, 32 nt, Homo Sapiens
acaccaacaccaaauccaucagcaaauucuac

SEQ ID NO: 282790 - RNA, 32 nt, Homo Sapiens
acuaaaaggacaucaagagggauacuucaguc

SEQ ID NO: 282791 - RNA, 32 nt, Homo Sapiens
cagcagcauccaccaaaagucacuuuuccaac

SEQ ID NO: 282792 - RNA, 32 nt, Homo Sapiens
caacaaagaacacuaacuaugcauggugcccc

SEQ ID NO: 282793 - RNA, 32 nt, Homo Sapiens
acaagcgucucgggauuguguuugacuugugu

SEQ ID NO: 282794 - RNA, 32 nt, Homo Sapiens
gccugaccaacaugaugaaaccccguugcuac

SEQ ID NO: 282795 - RNA, 32 nt, Homo Sapiens
aaccuuaauauuugaagugacccccauucccc

SEQ ID NO: 282796 - RNA, 32 nt, Homo Sapiens
gucauacacuuuuccccaguuauuuucaaacu

SEQ ID NO: 282797 - RNA, 32 nt, Homo Sapiens
uugcuccguuuucucuaaacugccgcgaugaa

SEQ ID NO: 282798 - RNA, 32 nt, Homo Sapiens
acaccgcccuccccgccgacccaucgcguuca

SEQ ID NO: 282799 - RNA, 32 nt, Homo Sapiens
uacauccuggugcaggaugccuuguucuuucu

SEQ ID NO: 282800 - RNA, 32 nt, Homo Sapiens
caugacuguggauauuuacaguucuuacuccu

SEQ ID NO: 282801 - RNA, 32 nt, Homo Sapiens
ccugacccuccccauuuccccagcuugggcag

SEQ ID NO: 282802 - RNA, 32 nt, Homo Sapiens
caaauaccucccagcccugcagcagccccaga

SEQ ID NO: 282803 - RNA, 32 nt, Homo Sapiens
ugcgagaagucagugguaacugcugcagggcu

SEQ ID NO: 282804 - RNA, 32 nt, Homo Sapiens
gaggcacaccuggacgcagagcccugccagcg

SEQ ID NO: 282805 - RNA, 32 nt, Homo Sapiens
uugagcgcgcugagcgucacggccaaguguac

SEQ ID NO: 282806 - RNA, 32 nt, Homo Sapiens
gcggggguggcggcgccggaggucgccauggc

SEQ ID NO: 282807 - RNA, 32 nt, Homo Sapiens
gcuucaccaccagccacaggcuugucggaagg

SEQ ID NO: 282808 - RNA, 32 nt, Homo Sapiens
uggauuugucuaauuuuuuucuuuauaaucuu

SEQ ID NO: 282809 - RNA, 32 nt, Homo Sapiens
aauuuuacuagauauuugucauucaaguuuuc

SEQ ID NO: 282810 - RNA, 32 nt, Homo Sapiens
auuuuguaaacugucguauacuguaaaggguu

SEQ ID NO: 282811 - RNA, 32 nt, Homo Sapiens
gaguugaauuacauaagcuaagaucacuauag

SEQ ID NO: 282812 - RNA, 32 nt, Homo Sapiens
cugacuaauguuuguauuuuuuguagagacag

SEQ ID NO: 282813 - RNA, 32 nt, Homo Sapiens
agaaaugaaaauuuaucucaccuuuaauacug

SEQ ID NO: 282814 - RNA, 32 nt, Homo Sapiens
cacccggaagccugggggcgagaggcgaagug

SEQ ID NO: 282815 - RNA, 32 nt, Homo Sapiens
cugaggauauccggcccggagcguuugugcgg

SEQ ID NO: 282816 - RNA, 32 nt, Homo Sapiens
accgcgaguaccgggcgggggcucggggcucg

SEQ ID NO: 282817 - RNA, 32 nt, Homo Sapiens
aaagcacauggcucuuucuucuccgagauccc

SEQ ID NO: 282818 - RNA, 32 nt, Homo Sapiens
aaaaggucauauauuuuuugcuacuuuugcug

SEQ ID NO: 282819 - RNA, 32 nt, Homo Sapiens
gccgccggcagaggagaccucagcaucaucua

SEQ ID NO: 282820 - RNA, 32 nt, Homo Sapiens
ggcaccagccugaugccaaccggagcucuccu

SEQ ID NO: 282821 - RNA, 32 nt, Homo Sapiens
cggcucuggccccuggacuucuccucggugcu

SEQ ID NO: 282822 - RNA, 32 nt, Homo Sapiens
ugcauugauuuccuuuuccccauuguaauuua

SEQ ID NO: 282823 - RNA, 32 nt, Homo Sapiens
cagaagccccccaccccagcuuuccugggucu

SEQ ID NO: 282824 - RNA, 32 nt, Homo Sapiens
uuccuagaagguuuauacugccuucuugcuuu

SEQ ID NO: 282825 - RNA, 32 nt, Homo Sapiens
uggggaggccucccugcuuccaccugcauggu

SEQ ID NO: 282826 - RNA, 32 nt, Homo Sapiens
ucaucagccuuccaauaccagguuuaagggua

SEQ ID NO: 282827 - RNA, 32 nt, Homo Sapiens
ccaguggcauauauuucauuuuuuaaugacaa

SEQ ID NO: 282828 - RNA, 32 nt, Homo Sapiens
uagcaucuucucuaccuucaagaaccaggcag

SEQ ID NO: 282829 - RNA, 32 nt, Homo Sapiens
uucuucccuuacccuguccccagcuggcuuuu

SEQ ID NO: 282830 - RNA, 32 nt, Homo Sapiens
cccggggcggggcaggcggggacuagcgggug

SEQ ID NO: 282831 - RNA, 32 nt, Homo Sapiens
cuugaguguuuguacucauggucuuauucucg

SEQ ID NO: 282832 - RNA, 29 nt, Homo Sapiens
ugagugcugaagauucgcagcauucaaua

SEQ ID NO: 282833 - RNA, 32 nt, Homo Sapiens
accuuugcagaauaaacucucuccugggguuu

SEQ ID NO: 282834 - RNA, 32 nt, Homo Sapiens
uggcccaggugagcgggcgcgcugguccaggu

SEQ ID NO: 282835 - RNA, 32 nt, Homo Sapiens
gccagcccagggcuuagcacaagcaugcucaa

SEQ ID NO: 282836 - RNA, 32 nt, Homo Sapiens
aacugucagacuuugggggauccccgccuagg

SEQ ID NO: 282837 - RNA, 32 nt, Homo Sapiens
cgccuggcccugagcugucaccaccgacacuc

SEQ ID NO: 282838 - RNA, 31 nt, Homo Sapiens
uccccuuugugcuguguucauggugugcacg

SEQ ID NO: 282839 - RNA, 32 nt, Homo Sapiens
auuucuggcagcagcccucauugguccacgug

SEQ ID NO: 282840 - RNA, 32 nt, Homo Sapiens
auaacaaaaaacaaaagcauuuccuaugcuag

SEQ ID NO: 282841 - RNA, 32 nt, Homo Sapiens
guucuugaguaguucugcucuuaaacguaggg

SEQ ID NO: 282842 - RNA, 32 nt, Homo Sapiens
auagcuuugaguuucugugugaguccaggaua

SEQ ID NO: 282843 - RNA, 32 nt, Homo Sapiens
aagcugagaauggugauucugaagauagaaug

SEQ ID NO: 282844 - RNA, 32 nt, Homo Sapiens
cagaggauggaccucaccuacuccgcacaccg

SEQ ID NO: 282845 - RNA, 32 nt, Homo Sapiens
acaaggucaggaguucgagaccugccugacca

SEQ ID NO: 282846 - RNA, 32 nt, Homo Sapiens
ggcaaagagauuucuaucaaagaaaucaguca

SEQ ID NO: 282847 - RNA, 32 nt, Homo Sapiens
guccucugagaauggguugggggaggcgggug

SEQ ID NO: 282848 - RNA, 32 nt, Homo Sapiens
gauugagaaaauacccgugagguaugggacuc

SEQ ID NO: 282849 - RNA, 32 nt, Homo Sapiens
auggcuauauauauguauuuuauaaagccauu

SEQ ID NO: 282850 - RNA, 32 nt, Homo Sapiens
ccccgggcucugauagagagguaggaggcacg

SEQ ID NO: 282851 - RNA, 32 nt, Homo Sapiens
acuucuccagcauauguaaguggaacucagaa

SEQ ID NO: 282852 - RNA, 32 nt, Homo Sapiens
gcuuugucuggggcuccagggcuggacaugca

SEQ ID NO: 282853 - RNA, 32 nt, Homo Sapiens
ugcccuuuggugcugggcuggcgucccgcacu

SEQ ID NO: 282854 - RNA, 32 nt, Homo Sapiens
uuuuuaaucuugcaguaauauuaaacaggaau

SEQ ID NO: 282855 - RNA, 32 nt, Homo Sapiens
aagaagcagcagcggcuagggcggcgguagcu

SEQ ID NO: 282856 - RNA, 32 nt, Homo Sapiens
gccagccagaagcauccguacugcacgcuguc

SEQ ID NO: 282857 - RNA, 32 nt, Homo Sapiens
agcuuagaguuaggaauuguguucaagugcuu

SEQ ID NO: 282858 - RNA, 32 nt, Homo Sapiens
gugcaaugucugaggaaauuucaacugugaaa

SEQ ID NO: 282859 - RNA, 32 nt, Homo Sapiens
agucaugggggaacccugaggguguggguaga

SEQ ID NO: 282860 - RNA, 32 nt, Homo Sapiens
auuggcuuauucuggaggaaaagcagugaucu

SEQ ID NO: 282861 - RNA, 32 nt, Homo Sapiens
ugcccugcacaccaccacauuggaccugugcu

SEQ ID NO: 282862 - RNA, 32 nt, Homo Sapiens
ggaggggcguggggcgggcgugggggcaguuc

SEQ ID NO: 282863 - RNA, 32 nt, Homo Sapiens
gucgcugacuuggccuggaacgaggaaucugg

SEQ ID NO: 282864 - RNA, 32 nt, Homo Sapiens
auuuuccuaaaauaaacaggaugaaaacucaa

SEQ ID NO: 282865 - RNA, 32 nt, Homo Sapiens
cccggugccuaggugcccggccccacaccgcc

SEQ ID NO: 282866 - RNA, 32 nt, Homo Sapiens
uaacaaaaucauaaauauggugccuuauaaca

SEQ ID NO: 282867 - RNA, 32 nt, Homo Sapiens
uggaccgcauucuccugcccuguccuggagcu

SEQ ID NO: 282868 - RNA, 32 nt, Homo Sapiens
cggugcagcggcggcgggaggguccugggaac

SEQ ID NO: 282869 - RNA, 32 nt, Homo Sapiens
ucuggcacccucaauccuucaauaaaauguuu

SEQ ID NO: 282870 - RNA, 32 nt, Homo Sapiens
caggaacuuuucucgaggaguguuaugucaug

SEQ ID NO: 282871 - RNA, 32 nt, Homo Sapiens
guaggugacugugaauuuuguacuacguggcu

SEQ ID NO: 282872 - RNA, 32 nt, Homo Sapiens
auguggggagggaaacaacaaaaauguagaaa

SEQ ID NO: 282873 - RNA, 32 nt, Homo Sapiens
ccgcccuaggccuggcucuucccggccucugu

SEQ ID NO: 282874 - RNA, 32 nt, Homo Sapiens
guacaaacuccguuaugauauauccuagccac

SEQ ID NO: 282875 - RNA, 32 nt, Homo Sapiens
guauuuuguuaaauaacuaacaugcugcucua

SEQ ID NO: 282876 - RNA, 32 nt, Homo Sapiens
gcuuuggaccauugguuacaaaacagacacag

SEQ ID NO: 282877 - RNA, 32 nt, Homo Sapiens
uuucguggcuggaaguggccaguuugguuccg

SEQ ID NO: 282878 - RNA, 32 nt, Homo Sapiens
gaaagggagccuggagagcggcggugcuggga

SEQ ID NO: 282879 - RNA, 32 nt, Homo Sapiens
uuggcccgugcguggggcugggguggagggcg

SEQ ID NO: 282880 - RNA, 32 nt, Homo Sapiens
aagugagauguuaagaucuuauggcacuaaag

SEQ ID NO: 282881 - RNA, 32 nt, Homo Sapiens
ucuagaaaauaccaccccagaguccucauuug

SEQ ID NO: 282882 - RNA, 32 nt, Homo Sapiens
agcugccuucagacaaggcuagucuaggggca

SEQ ID NO: 282883 - RNA, 32 nt, Homo Sapiens
gccagagccaggugcugccagccugcccaugu

SEQ ID NO: 282884 - RNA, 32 nt, Homo Sapiens
auuccucugguggggagcugccugcagagagg

SEQ ID NO: 282885 - RNA, 32 nt, Homo Sapiens
acuaaagcaauaaccaucaaaaaacacaagaa

SEQ ID NO: 282886 - RNA, 32 nt, Homo Sapiens
guucugcacaccaggcagcugcaccucacugg

SEQ ID NO: 282887 - RNA, 32 nt, Homo Sapiens
ucauuucugauguugagggcuguuuggcucug

SEQ ID NO: 282888 - RNA, 32 nt, Homo Sapiens
ccucugggggcaggagcccacccccagcaccc

SEQ ID NO: 282889 - RNA, 28 nt, Homo Sapiens
cgcaauggggccgggccgaggugcaauc

SEQ ID NO: 282890 - RNA, 32 nt, Homo Sapiens
cucucuccuugucucugucucuuaauaauagu

SEQ ID NO: 282891 - RNA, 32 nt, Homo Sapiens
cccuccugccugugggagcugcaccguggagu

SEQ ID NO: 282892 - RNA, 32 nt, Homo Sapiens
gucaaaucuugaaauauuaaauguauacauuu

SEQ ID NO: 282893 - RNA, 31 nt, Homo Sapiens
cgcgcuguggcagcaccuccccgcgcgcuag

SEQ ID NO: 282894 - RNA, 28 nt, Homo Sapiens
gcugagguuacaggcaccaugagccagg

SEQ ID NO: 282895 - RNA, 32 nt, Homo Sapiens
agcuccgguuugcaucacccggaccgggggau

SEQ ID NO: 282896 - RNA, 32 nt, Homo Sapiens
caggacucuaaagaaggaaugagugcaauuuc

SEQ ID NO: 282897 - RNA, 32 nt, Homo Sapiens
uaaggaaagcuggcagaagggugugcauaaau

SEQ ID NO: 282898 - RNA, 32 nt, Homo Sapiens
acacaguaaguacacaaauuugagcaacagua

SEQ ID NO: 282899 - RNA, 32 nt, Homo Sapiens
uaacucggguugaaacuuuuggcuuucagggg

SEQ ID NO: 282900 - RNA, 32 nt, Homo Sapiens
ggggcagguacuccccaccuuccugccucccc

SEQ ID NO: 282901 - RNA, 31 nt, Homo Sapiens
uucuacagaaagaaaaaugcauuauugacga

SEQ ID NO: 282902 - RNA, 32 nt, Homo Sapiens
ucuccuuauuuuuaccuuuuuacaggguuucu

SEQ ID NO: 282903 - RNA, 32 nt, Homo Sapiens
uaauagauuugucuuuuuuacuucuccugaag

SEQ ID NO: 282904 - RNA, 32 nt, Homo Sapiens
aaucuauguauauagcuaguuacagacgggag

SEQ ID NO: 282905 - RNA, 32 nt, Homo Sapiens
ccgcgucgccccagcugccccggucgcuggac

SEQ ID NO: 282906 - RNA, 32 nt, Homo Sapiens
uguauuuuuguagacuuuaauagagaaguuga

SEQ ID NO: 282907 - RNA, 32 nt, Homo Sapiens
gcugcugccaugaacugucaaguguguguugu

SEQ ID NO: 282908 - RNA, 32 nt, Homo Sapiens
caacucugaaacaaucucccgguccagggcau

SEQ ID NO: 282909 - RNA, 32 nt, Homo Sapiens
ugugaauguauauagucuuugcagagguccaa

SEQ ID NO: 282910 - RNA, 32 nt, Homo Sapiens
uccuuccccuacugcugccuaaguggucuucc

SEQ ID NO: 282911 - RNA, 32 nt, Homo Sapiens
uuucauuaucuaaguguauuaaugacuuguuu

SEQ ID NO: 282912 - RNA, 32 nt, Homo Sapiens
aagaccucccugccuuucccugagcccaggcc

SEQ ID NO: 282913 - RNA, 32 nt, Homo Sapiens
cuuaaguguuugucaucaauaaaugguaauac

SEQ ID NO: 282914 - RNA, 29 nt, Homo Sapiens
gacaggaugaagauuuaggaauaaauaug

SEQ ID NO: 282915 - RNA, 32 nt, Homo Sapiens
uauaagaaagagaacugaaaaguagcgugcua

SEQ ID NO: 282916 - RNA, 32 nt, Homo Sapiens
gcagcaauuaauugugccuugccgcaugagga

SEQ ID NO: 282917 - RNA, 32 nt, Homo Sapiens
ggcugcagaugccgaggcgccccgagacgccc

SEQ ID NO: 282918 - RNA, 32 nt, Homo Sapiens
gagaacuagagcaaacaaaauccaaaguuacu

SEQ ID NO: 282919 - RNA, 32 nt, Homo Sapiens
gcgccucugucacucagcauccucuuaggcgu

SEQ ID NO: 282920 - RNA, 32 nt, Homo Sapiens
guuacaaggucccaggccaagccccucuccuc

SEQ ID NO: 282921 - RNA, 32 nt, Homo Sapiens
gaaaacgcagcauacuuggccucccccaccuc

SEQ ID NO: 282922 - RNA, 32 nt, Homo Sapiens
uuuuuccuacacauacauaccuaugauaaagu

SEQ ID NO: 282923 - RNA, 29 nt, Homo Sapiens
gaucuauugaauuucagagaagagccuuc

SEQ ID NO: 282924 - RNA, 32 nt, Homo Sapiens
uggguguaugacguuacguggcugcuuaauua

SEQ ID NO: 282925 - RNA, 32 nt, Homo Sapiens
gggaauaggaggaggcagcaugccgagccccu

SEQ ID NO: 282926 - RNA, 32 nt, Homo Sapiens
gcggucucuccagccucuggucccugggagca

SEQ ID NO: 282927 - RNA, 32 nt, Homo Sapiens
uguuugcuuucugcugagauaaggaaugcauc

SEQ ID NO: 282928 - RNA, 32 nt, Homo Sapiens
uucugguaauccacgcaauaaacaguuauaaa

SEQ ID NO: 282929 - RNA, 32 nt, Homo Sapiens
cagaauauacacaacagaugcugaaggagaag

SEQ ID NO: 282930 - RNA, 32 nt, Homo Sapiens
uaaugugcacugaauaaauuguacagccggca

SEQ ID NO: 282931 - RNA, 32 nt, Homo Sapiens
ccccccgcccaccgugcccuccaucacgcccu

SEQ ID NO: 282932 - RNA, 32 nt, Homo Sapiens
uauaucugucuucccuuuauagauuccaaaaa

SEQ ID NO: 282933 - RNA, 32 nt, Homo Sapiens
auccaaauugauaauaaugaucucaaaacaca

SEQ ID NO: 282934 - RNA, 30 nt, Homo Sapiens
uaccuccuacuugccauucacccaucaaug

SEQ ID NO: 282935 - RNA, 32 nt, Homo Sapiens
ggagaagcccucugcugguuuuccuggcauuc

SEQ ID NO: 282936 - RNA, 32 nt, Homo Sapiens
gcggcuggugcuuuuuccuugccggcguccac

SEQ ID NO: 282937 - RNA, 32 nt, Homo Sapiens
uucacuuuguauccacugggcacagauauucu

SEQ ID NO: 282938 - RNA, 32 nt, Homo Sapiens
caggcuucgcgcugccugcgcgcggggcgagg

SEQ ID NO: 282939 - RNA, 32 nt, Homo Sapiens
gucucagccucccuccacggucaccuucaacg

SEQ ID NO: 282940 - RNA, 32 nt, Homo Sapiens
uagggcccaucccaucacacaugauccaccgu

SEQ ID NO: 282941 - RNA, 32 nt, Homo Sapiens
auacauauauauauuuucacuugcuuucaaga

SEQ ID NO: 282942 - RNA, 32 nt, Homo Sapiens
gcacggagagccccuucucgcgcgcgggcggu

SEQ ID NO: 282943 - RNA, 32 nt, Homo Sapiens
gcugagaggguggcgacgucggggccaugggg

SEQ ID NO: 282944 - RNA, 32 nt, Homo Sapiens
gguuccaugggcggggguggggugguugcccc

SEQ ID NO: 282945 - RNA, 32 nt, Homo Sapiens
agggcuucccugccuaccacagcccucugugu

SEQ ID NO: 282946 - RNA, 32 nt, Homo Sapiens
ggcagcuggaaugagagucaucugaaggcuug

SEQ ID NO: 282947 - RNA, 32 nt, Homo Sapiens
uauguaaauuuaugcugcaauagcuuuugcug

SEQ ID NO: 282948 - RNA, 32 nt, Homo Sapiens
ggcuccgacgguggccggcgggggucacgagg

SEQ ID NO: 282949 - RNA, 32 nt, Homo Sapiens
cuccuccgguggugggggccgggaucaccagc

SEQ ID NO: 282950 - RNA, 32 nt, Homo Sapiens
cgggggaggaggaggaggacgccgcggugaag

SEQ ID NO: 282951 - RNA, 32 nt, Homo Sapiens
ggagcauucugccugccugggaacggggugga

SEQ ID NO: 282952 - RNA, 32 nt, Homo Sapiens
aagggucggcggcggcgggguugacggcuuug

SEQ ID NO: 282953 - RNA, 32 nt, Homo Sapiens
gcaccuccugaaaaucgggucuguggauaaug

SEQ ID NO: 282954 - RNA, 32 nt, Homo Sapiens
cagugaugaucugacauuuacaauuaccccac

SEQ ID NO: 282955 - RNA, 32 nt, Homo Sapiens
uggucuauuccugcccacccccgggugacuag

SEQ ID NO: 282956 - RNA, 32 nt, Homo Sapiens
agaaacaaguuuuuauuuuuuauuccuuguaa

SEQ ID NO: 282957 - RNA, 32 nt, Homo Sapiens
gcuucugccuucccuuuguuuacccccacugc

SEQ ID NO: 282958 - RNA, 32 nt, Homo Sapiens
ccagccucugcguuuccagaucuccuaacuca

SEQ ID NO: 282959 - RNA, 32 nt, Homo Sapiens
ccgucagccacgcacgcggaggcgcucgggcc

SEQ ID NO: 282960 - RNA, 32 nt, Homo Sapiens
agccuaagaugaagaggaucggaggcuuguca

SEQ ID NO: 282961 - RNA, 32 nt, Homo Sapiens
uauuugcucugcuuagcaaagaaaauaucacu

SEQ ID NO: 282962 - RNA, 32 nt, Homo Sapiens
uacucacgcugacuucauggcagcaggcucca

SEQ ID NO: 282963 - RNA, 32 nt, Homo Sapiens
guuccuucccagccugucaucaccuuccucca

SEQ ID NO: 282964 - RNA, 32 nt, Homo Sapiens
auuuucuuaguguauuuaaccagauuuuacaa

SEQ ID NO: 282965 - RNA, 32 nt, Homo Sapiens
uggaacauaucccacaaacauuccccaaacca

SEQ ID NO: 282966 - RNA, 32 nt, Homo Sapiens
gccgccgcccgacuccacggcggcuuugacuc

SEQ ID NO: 282967 - RNA, 32 nt, Homo Sapiens
acaucuaaugagacaucagagaauucacagug

SEQ ID NO: 282968 - RNA, 27 nt, Homo Sapiens
uauguaaucauguucugguaugucuca

SEQ ID NO: 282969 - RNA, 32 nt, Homo Sapiens
gucauuucuauuuccuuuuuugagaacugcca

SEQ ID NO: 282970 - RNA, 32 nt, Homo Sapiens
cagaguccacguguuuuuccuuccacccggag

SEQ ID NO: 282971 - RNA, 32 nt, Homo Sapiens
gcgggcucgggcuggagaagggccgcgggacc

SEQ ID NO: 282972 - RNA, 32 nt, Homo Sapiens
uugguugugggaaaagguggaaugacaaguua

SEQ ID NO: 282973 - RNA, 28 nt, Homo Sapiens
acggaaguggcuauggaaugguguauuu

SEQ ID NO: 282974 - RNA, 32 nt, Homo Sapiens
ucccucugggcagaggcccaucugcucuguuu

SEQ ID NO: 282975 - RNA, 32 nt, Homo Sapiens
ugagcccgaacaguccacacggcggcgccaga

SEQ ID NO: 282976 - RNA, 32 nt, Homo Sapiens
aucaagaguaaaugcaguggcaugcuaaguac

SEQ ID NO: 282977 - RNA, 32 nt, Homo Sapiens
ccaccacccucucagcagcacuuccccauggc

SEQ ID NO: 282978 - RNA, 32 nt, Homo Sapiens
ccaugauguuuuaaucucagguaaaugccaau

SEQ ID NO: 282979 - RNA, 32 nt, Homo Sapiens
cagccggccgcgucaugccaggcgcugcucgg

SEQ ID NO: 282980 - RNA, 32 nt, Homo Sapiens
aagaacccaccaauuccggacacacaaccggc

SEQ ID NO: 282981 - RNA, 32 nt, Homo Sapiens
aagcaguuuaaccaaaugugugguuaguguuu

SEQ ID NO: 282982 - RNA, 32 nt, Homo Sapiens
uggcuggucuucaucaccugaggccaccaggc

SEQ ID NO: 282983 - RNA, 32 nt, Homo Sapiens
ggggacacacauugcaacuucccacuucugac

SEQ ID NO: 282984 - RNA, 32 nt, Homo Sapiens
ggggccugagggugggggcggggccucuucau

SEQ ID NO: 282985 - RNA, 31 nt, Homo Sapiens
aggcacccccugccccugccccccacugcug

SEQ ID NO: 282986 - RNA, 32 nt, Homo Sapiens
cgaauaacaauuauuucauguauuauauguaa

SEQ ID NO: 282987 - RNA, 32 nt, Homo Sapiens
ggcaccucggggcucccgccucacuggaggcc

SEQ ID NO: 282988 - RNA, 32 nt, Homo Sapiens
uccuugcuauuuuuccucuucaauuuccuuca

SEQ ID NO: 282989 - RNA, 32 nt, Homo Sapiens
uguaauggaggaucagaugcuugagcuucuga

SEQ ID NO: 282990 - RNA, 32 nt, Homo Sapiens
uucuuacagcgucuuugaaagugacuggggcc

SEQ ID NO: 282991 - RNA, 32 nt, Homo Sapiens
uugagcacagauaauggcauuauucuuauaau

SEQ ID NO: 282992 - RNA, 32 nt, Homo Sapiens
cagacggccucgaaaccacagcccuuacccca

SEQ ID NO: 282993 - RNA, 32 nt, Homo Sapiens
ugaauuagugauacaauaaaauuuacugucau

SEQ ID NO: 282994 - RNA, 32 nt, Homo Sapiens
uaugguaacaaggucgugugcauuugcuuuca

SEQ ID NO: 282995 - RNA, 32 nt, Homo Sapiens
aacaguuuaaugguggaaaugaacuaccauuu

SEQ ID NO: 282996 - RNA, 32 nt, Homo Sapiens
cuucuuucucccuccgccucccgagcaccagc

SEQ ID NO: 282997 - RNA, 32 nt, Homo Sapiens
uccacguuccccucauagcagugucacuccca

SEQ ID NO: 282998 - RNA, 32 nt, Homo Sapiens
augggacgccccacccauuugccaggcuggau

SEQ ID NO: 282999 - RNA, 32 nt, Homo Sapiens
guggauccucguuuuccaagcaaaaaaaaaug

SEQ ID NO: 283000 - RNA, 32 nt, Homo Sapiens
uucuuugacaacagcgacaacguggugcugcg

SEQ ID NO: 283001 - RNA, 32 nt, Homo Sapiens
aagacagaauuaugaaauuauaugagugcuua

SEQ ID NO: 283002 - RNA, 32 nt, Homo Sapiens
ccucggggaaguccuggcgcagaugggccacg

SEQ ID NO: 283003 - RNA, 32 nt, Homo Sapiens
gauggucugggaaaguucugugccucugaggc

SEQ ID NO: 283004 - RNA, 32 nt, Homo Sapiens
aaauuaaaagugaaacauaacacauaaggacg

SEQ ID NO: 283005 - RNA, 32 nt, Homo Sapiens
caccuguaaacccagcacuuugggagacugag

SEQ ID NO: 283006 - RNA, 32 nt, Homo Sapiens
guacucgaugugacuucuccccugcccuuccu

SEQ ID NO: 283007 - RNA, 32 nt, Homo Sapiens
ccuggacuuuaucuaaauagugccaagacaca

SEQ ID NO: 283008 - RNA, 32 nt, Homo Sapiens
cacauaaaacagauuugcauaaaauuaccaug

SEQ ID NO: 283009 - RNA, 32 nt, Homo Sapiens
ccugggaaaaucuuaaauuucuuuuuacuuaa

SEQ ID NO: 283010 - RNA, 29 nt, Homo Sapiens
aagcauggauguuagugaaaguuacuaca

SEQ ID NO: 283011 - RNA, 32 nt, Homo Sapiens
cuuggggaaugccucacccacccagguccuga

SEQ ID NO: 283012 - RNA, 32 nt, Homo Sapiens
gauacgguggccgcacggcaggccugaggcca

SEQ ID NO: 283013 - RNA, 32 nt, Homo Sapiens
gcggugcugggagccaccauggagaguaggug

SEQ ID NO: 283014 - RNA, 32 nt, Homo Sapiens
aaucacuucuuguaggaggguuuucauuaacu

SEQ ID NO: 283015 - RNA, 32 nt, Homo Sapiens
auuacaaaaugugaaacaacuacauuauucuu

SEQ ID NO: 283016 - RNA, 32 nt, Homo Sapiens
aaucuuguugcugauuuguccauuucuuuccc

SEQ ID NO: 283017 - RNA, 32 nt, Homo Sapiens
gcaaugcucccucuuugucaggguccacgggc

SEQ ID NO: 283018 - RNA, 32 nt, Homo Sapiens
aagcuguugaugcacaggcgucuuguggcaag

SEQ ID NO: 283019 - RNA, 32 nt, Homo Sapiens
cgcagaucagaauuggagauaaccgaggcuuc

SEQ ID NO: 283020 - RNA, 32 nt, Homo Sapiens
cccagccccuccccuccccuaccagucuuccc

SEQ ID NO: 283021 - RNA, 32 nt, Homo Sapiens
ucuguuggccucgggggcgcgccgccgcggag

SEQ ID NO: 283022 - RNA, 32 nt, Homo Sapiens
ggugggcaaccugguggccaucguggugcugu

SEQ ID NO: 283023 - RNA, 32 nt, Homo Sapiens
gggauugcagacggagucucguucauucagug

SEQ ID NO: 283024 - RNA, 32 nt, Homo Sapiens
gggagcagauuuugggucuggaucucccuggg

SEQ ID NO: 283025 - RNA, 32 nt, Homo Sapiens
ucuggcuuugccuuucauaucauuccauaccu

SEQ ID NO: 283026 - RNA, 32 nt, Homo Sapiens
uugaaauguaaaugucuguguaaaacuacaaa

SEQ ID NO: 283027 - RNA, 32 nt, Homo Sapiens
ucacugagcucuucuucauucucacccugauc

SEQ ID NO: 283028 - RNA, 32 nt, Homo Sapiens
gggugcuaugaggugauccguccccacacaug

SEQ ID NO: 283029 - RNA, 32 nt, Homo Sapiens
gaugggaauggcaauggccuagcuuuuauuuu

SEQ ID NO: 283030 - RNA, 32 nt, Homo Sapiens
uuuguagagaugaggucucaccauguugccca

SEQ ID NO: 283031 - RNA, 32 nt, Homo Sapiens
cacccccagauaagaagcuggugccucuuguc

SEQ ID NO: 283032 - RNA, 32 nt, Homo Sapiens
gugcuucaguuucucucacuuugcccugggua

SEQ ID NO: 283033 - RNA, 28 nt, Homo Sapiens
ccaccggggcggccucgcgggugacucc

SEQ ID NO: 283034 - RNA, 32 nt, Homo Sapiens
cacugagagggaacagaaggauauugcuuccu

SEQ ID NO: 283035 - RNA, 32 nt, Homo Sapiens
cuacccagaccuuguuuuuuguuguauuuugg

SEQ ID NO: 283036 - RNA, 32 nt, Homo Sapiens
gugcggagagucgagaugcucccugcagccca

SEQ ID NO: 283037 - RNA, 32 nt, Homo Sapiens
ggagggggaaagggucaccgggaacccgcagg

SEQ ID NO: 283038 - RNA, 32 nt, Homo Sapiens
uguugcuuugaaaucuuagaagagagcccacu

SEQ ID NO: 283039 - RNA, 32 nt, Homo Sapiens
guuugacuuucauacauacuguaugggaagau

SEQ ID NO: 283040 - RNA, 32 nt, Homo Sapiens
accuccucuucacacuaauucuaggccauucu

SEQ ID NO: 283041 - RNA, 32 nt, Homo Sapiens
gucuaccgagcccagugggcgcggcgggaggg

SEQ ID NO: 283042 - RNA, 32 nt, Homo Sapiens
gaauugucuagcacgccaccacuuccugccag

SEQ ID NO: 283043 - RNA, 32 nt, Homo Sapiens
aauuagccgggcgugguggcaggugccuguaa

SEQ ID NO: 283044 - RNA, 32 nt, Homo Sapiens
aacauuugccacugaggcuucacuggugagau

SEQ ID NO: 283045 - RNA, 32 nt, Homo Sapiens
ugcagcccggcggucccuguuuugcuuuauug

SEQ ID NO: 283046 - RNA, 32 nt, Homo Sapiens
uggcaaguuuuugguaaugaugauucaaucau

SEQ ID NO: 283047 - RNA, 32 nt, Homo Sapiens
ccuaucuuaguagagauuucauagcuauuuag

SEQ ID NO: 283048 - RNA, 32 nt, Homo Sapiens
uagaaacccaaguuccucuaagcacagccucc

SEQ ID NO: 283049 - RNA, 32 nt, Homo Sapiens
gccccgcgccucagccucggcgccgcaucacc

SEQ ID NO: 283050 - RNA, 32 nt, Homo Sapiens
uaaaccucaaauaguuguguaucuguccuguu

SEQ ID NO: 283051 - RNA, 32 nt, Homo Sapiens
uuucuauuacacaaguuuaaaaauauuauuaa

SEQ ID NO: 283052 - RNA, 32 nt, Homo Sapiens
ucugcauaaaaacaauauagauaauauaaaga

SEQ ID NO: 283053 - RNA, 32 nt, Homo Sapiens
uggaaaaggaggaggcguggugggacugcggc

SEQ ID NO: 283054 - RNA, 32 nt, Homo Sapiens
ccuacugcuucuuuucuaggauaaaucuaauu

SEQ ID NO: 283055 - RNA, 32 nt, Homo Sapiens
auugaccuacaacgagguggcuccucagauga

SEQ ID NO: 283056 - RNA, 32 nt, Homo Sapiens
agaacuaaaaauuuauaaauauggaauucuuc

SEQ ID NO: 283057 - RNA, 32 nt, Homo Sapiens
gcugccacgggcucuccugggcuuauggccgg

SEQ ID NO: 283058 - RNA, 32 nt, Homo Sapiens
cucucuaaagacuguuccauuuuaacaugucc

SEQ ID NO: 283059 - RNA, 32 nt, Homo Sapiens
ugcccuccaagccccagcugccuuccuuuugg

SEQ ID NO: 283060 - RNA, 32 nt, Homo Sapiens
aagcugcuggaaaaaaugcaacaaagaagagg

SEQ ID NO: 283061 - RNA, 32 nt, Homo Sapiens
cauggugguagcaaguuuuucaaaucuaauac

SEQ ID NO: 283062 - RNA, 32 nt, Homo Sapiens
ugucccaauuuucucccucccugugugucacu

SEQ ID NO: 283063 - RNA, 32 nt, Homo Sapiens
guguugccaaaggagauuaauauuugagucag

SEQ ID NO: 283064 - RNA, 32 nt, Homo Sapiens
ggacuaaguccucugcuucaguuucauuguua

SEQ ID NO: 283065 - RNA, 32 nt, Homo Sapiens
uuuccguccuucccguccagccccagcccugg

SEQ ID NO: 283066 - RNA, 32 nt, Homo Sapiens
ugauuaccaacgccagcucccuucacugucca

SEQ ID NO: 283067 - RNA, 32 nt, Homo Sapiens
uccugcuuccccccuccuggggugcaguggug

SEQ ID NO: 283068 - RNA, 32 nt, Homo Sapiens
cuggccuccccagcguggggcuccucguuuga

SEQ ID NO: 283069 - RNA, 32 nt, Homo Sapiens
auuacagaugcuaaauagaucaccuuuuacag

SEQ ID NO: 283070 - RNA, 32 nt, Homo Sapiens
aguuucuuuuaaaauugaguuauguaucaucu

SEQ ID NO: 283071 - RNA, 32 nt, Homo Sapiens
uccuaaguuugugaagaugaggagcagugaua

SEQ ID NO: 283072 - RNA, 32 nt, Homo Sapiens
ucugcuccuuggccugccugcccgccagccac

SEQ ID NO: 283073 - RNA, 32 nt, Homo Sapiens
cauugccuacuuuaacaccugucagagaaacg

SEQ ID NO: 283074 - RNA, 32 nt, Homo Sapiens
ugcauuuucuauuucuauaugauacagacucu

SEQ ID NO: 283075 - RNA, 32 nt, Homo Sapiens
cugcaugcggugccggcgagugcucggcucag

SEQ ID NO: 283076 - RNA, 32 nt, Homo Sapiens
uaagaaucugauucaucucauuauugccagca

SEQ ID NO: 283077 - RNA, 32 nt, Homo Sapiens
ggaaaaagcugaugguccuguccaaaggcuau

SEQ ID NO: 283078 - RNA, 32 nt, Homo Sapiens
gauguuuugaagaucgugacgucuuguaacua

SEQ ID NO: 283079 - RNA, 32 nt, Homo Sapiens
gagauugaaccacuaaaauguuagagcagaau

SEQ ID NO: 283080 - RNA, 32 nt, Homo Sapiens
aaaucugugucuuuuuaauauucuugugaugu

SEQ ID NO: 283081 - RNA, 32 nt, Homo Sapiens
agauuguucaacaugagagaaaggcucagcaa

SEQ ID NO: 283082 - RNA, 32 nt, Homo Sapiens
gcccguuuauguaugcuccaugucuagcccau

SEQ ID NO: 283083 - RNA, 30 nt, Homo Sapiens
augagcguggagccgccgccggagcuggag

SEQ ID NO: 283084 - RNA, 32 nt, Homo Sapiens
aauccucugucauggagccuguccugccaagu

SEQ ID NO: 283085 - RNA, 32 nt, Homo Sapiens
ucugcucugaggaagagggucuguggguucca

SEQ ID NO: 283086 - RNA, 32 nt, Homo Sapiens
uguacucugcuagaacacaggaugcuucugcu

SEQ ID NO: 283087 - RNA, 32 nt, Homo Sapiens
guggggaggguggaggggugacaguggaggaa

SEQ ID NO: 283088 - RNA, 32 nt, Homo Sapiens
uugauaaaaugaauauaaaguauuucauuggu

SEQ ID NO: 283089 - RNA, 32 nt, Homo Sapiens
uguccuuccaacaaaccaaccacacauguaac

SEQ ID NO: 283090 - RNA, 32 nt, Homo Sapiens
agaacaauaacugaagaauguacaauaaaaac

SEQ ID NO: 283091 - RNA, 32 nt, Homo Sapiens
caaaaucagaucuauuugauaucuucuguuua

SEQ ID NO: 283092 - RNA, 32 nt, Homo Sapiens
cuggggugcagggcuccgggccugcucuucug

SEQ ID NO: 283093 - RNA, 32 nt, Homo Sapiens
uugcacuuauguuugugagaugcaaaaauaag

SEQ ID NO: 283094 - RNA, 32 nt, Homo Sapiens
ugccgagcugagcgcggcagcggcggcgggau

SEQ ID NO: 283095 - RNA, 32 nt, Homo Sapiens
uguggggguaagggcugccgcgcucuggccug

SEQ ID NO: 283096 - RNA, 32 nt, Homo Sapiens
ugauuguuuaauuguaggucaaugaaauauuu

SEQ ID NO: 283097 - RNA, 32 nt, Homo Sapiens
gauuccacuucugucgaggagcuucggggcuc

SEQ ID NO: 283098 - RNA, 32 nt, Homo Sapiens
agacagucaauguggaugagaacuaucgcuga

SEQ ID NO: 283099 - RNA, 31 nt, Homo Sapiens
agagacacaaagagaagugguaauaggaaac

SEQ ID NO: 283100 - RNA, 32 nt, Homo Sapiens
acagugcugacuguccggauaagagcuggcaa

SEQ ID NO: 283101 - RNA, 32 nt, Homo Sapiens
uacucacugacaaagugauguuuucuucccau

SEQ ID NO: 283102 - RNA, 32 nt, Homo Sapiens
gagcuugcuuuuuuuucuucugucacaaugcc

SEQ ID NO: 283103 - RNA, 32 nt, Homo Sapiens
cugaaauuucaagauaaugcuauauuaacuuu

SEQ ID NO: 283104 - RNA, 32 nt, Homo Sapiens
aagauaaaugucauguguaagauaacugauaa

SEQ ID NO: 283105 - RNA, 32 nt, Homo Sapiens
cuaagaaagucuuuuuccaagugcuacaguag

SEQ ID NO: 283106 - RNA, 32 nt, Homo Sapiens
cucgaucuacgcguccggggccccgcggggcc

SEQ ID NO: 283107 - RNA, 32 nt, Homo Sapiens
ucuggcccuggcccuuacuugcuucucuagcu

SEQ ID NO: 283108 - RNA, 32 nt, Homo Sapiens
agaagucugucauguuaguuaagcaggcaaga

SEQ ID NO: 283109 - RNA, 32 nt, Homo Sapiens
aggaaacagaaguugccagucuucuuaaaagc

SEQ ID NO: 283110 - RNA, 32 nt, Homo Sapiens
ugagugaugugcuacaaaguguuuaaaacaga

SEQ ID NO: 283111 - RNA, 32 nt, Homo Sapiens
ggcugcgccccgcucgucgaggagcugcgcuc

SEQ ID NO: 283112 - RNA, 32 nt, Homo Sapiens
aaaagacugaggugggggugggaggccagcac

SEQ ID NO: 283113 - RNA, 32 nt, Homo Sapiens
aaggggcacccacauuuuuuugaaagacugga

SEQ ID NO: 283114 - RNA, 32 nt, Homo Sapiens
uucuucugucuccucuguuuggaaguccacua

SEQ ID NO: 283115 - RNA, 29 nt, Homo Sapiens
ugcacugugacuuuggagugccgggaaaa

SEQ ID NO: 283116 - RNA, 32 nt, Homo Sapiens
cccgccagccccagcccugcagccuugggccc

SEQ ID NO: 283117 - RNA, 32 nt, Homo Sapiens
uuuggaguguuaugaugacaaauacacuacuc

SEQ ID NO: 283118 - RNA, 32 nt, Homo Sapiens
aauaaaaaacaaauugaagaaguauggaauuc

SEQ ID NO: 283119 - RNA, 32 nt, Homo Sapiens
agcauauuuuuaccaaauuaaagagcuacagu

SEQ ID NO: 283120 - RNA, 32 nt, Homo Sapiens
cgcacccucugucuccuuccuucucgggccuc

SEQ ID NO: 283121 - RNA, 30 nt, Homo Sapiens
ccauuggauaaaaugcuggggagcaggaca

SEQ ID NO: 283122 - RNA, 32 nt, Homo Sapiens
uuuauuuuuguacaguuucuaagugauuuuug

SEQ ID NO: 283123 - RNA, 32 nt, Homo Sapiens
agcaaucuggaucuuaaauuuaugugaauaca

SEQ ID NO: 283124 - RNA, 32 nt, Homo Sapiens
gaaauacuuugcugcccuugccaucuuuuagg

SEQ ID NO: 283125 - RNA, 32 nt, Homo Sapiens
gagcaccgagaccagccuggggagccggugac

SEQ ID NO: 283126 - RNA, 32 nt, Homo Sapiens
gagcaugcugccugaguauuacuaguggacgu

SEQ ID NO: 283127 - RNA, 32 nt, Homo Sapiens
gcucuagaaucuggacagagaauagcaagggc

SEQ ID NO: 283128 - RNA, 32 nt, Homo Sapiens
ggggcgccgggcggaugacagcgggaacgguu

SEQ ID NO: 283129 - RNA, 31 nt, Homo Sapiens
uccagcuccugggauccgggaguccaucccg

SEQ ID NO: 283130 - RNA, 32 nt, Homo Sapiens
cgcugcggacgacccggccgucccggaggccg

SEQ ID NO: 283131 - RNA, 32 nt, Homo Sapiens
uguguuuauugguuuuugauguuguaaaagca

SEQ ID NO: 283132 - RNA, 32 nt, Homo Sapiens
guggacacuauaaaggcagacuuagggccaac

SEQ ID NO: 283133 - RNA, 32 nt, Homo Sapiens
uuacugcugauucuuguaaaucuuuuugcuuc

SEQ ID NO: 283134 - RNA, 32 nt, Homo Sapiens
gagggcgaggccuggcagcuguagugcuucug

SEQ ID NO: 283135 - RNA, 32 nt, Homo Sapiens
ccgggccccccgccgccccaggcucgcucaua

SEQ ID NO: 283136 - RNA, 32 nt, Homo Sapiens
uuaauauuuaauguggccuucacugcgcaaaa

SEQ ID NO: 283137 - RNA, 32 nt, Homo Sapiens
agacguccuucaugcuucuccucccuauuauu

SEQ ID NO: 283138 - RNA, 32 nt, Homo Sapiens
gcuaccccugcagcuggggaagacuuaugcca

SEQ ID NO: 283139 - RNA, 32 nt, Homo Sapiens
cuucugcccagcucuccuuguaaaaugaauga

SEQ ID NO: 283140 - RNA, 27 nt, Homo Sapiens
gcaggguuagauuucagcccucguuua

SEQ ID NO: 283141 - RNA, 32 nt, Homo Sapiens
cuucauguucuucuuucacaauuauuugacag

SEQ ID NO: 283142 - RNA, 32 nt, Homo Sapiens
gcaggaaggacuucaaacuucugcugagaccu

SEQ ID NO: 283143 - RNA, 32 nt, Homo Sapiens
cauauccuuuuggcagcagcuaccugccagag

SEQ ID NO: 283144 - RNA, 32 nt, Homo Sapiens
uuuuuccuuuuuuuuuuuuuuaaaccuccccc

SEQ ID NO: 283145 - RNA, 32 nt, Homo Sapiens
acaccuuaaucccagcacuuugggaggcugag

SEQ ID NO: 283146 - RNA, 32 nt, Homo Sapiens
ggugugugcacaaggaggcccgggccagggac

SEQ ID NO: 283147 - RNA, 32 nt, Homo Sapiens
aacugaugcuccuugggugcugcugcuacuca

SEQ ID NO: 283148 - RNA, 32 nt, Homo Sapiens
ugaucuuggcucacggcagccuugcccucccu

SEQ ID NO: 283149 - RNA, 30 nt, Homo Sapiens
cacagccuugcccggccgccggggcacaua

SEQ ID NO: 283150 - RNA, 32 nt, Homo Sapiens
ugagauuugaggguccgcauggauggccugug

SEQ ID NO: 283151 - RNA, 32 nt, Homo Sapiens
cagcacuacuuauguaguauacuugguaagac

SEQ ID NO: 283152 - RNA, 31 nt, Homo Sapiens
gauggugcaagguccaguccaaagguaucug

SEQ ID NO: 283153 - RNA, 32 nt, Homo Sapiens
ugaagcuaaaauuggccugagcacuuucccug

SEQ ID NO: 283154 - RNA, 32 nt, Homo Sapiens
agugucccauuggugccaaaaauacacgucuu

SEQ ID NO: 283155 - RNA, 32 nt, Homo Sapiens
uaugugguuucauucuguuuuuagaagaauau

SEQ ID NO: 283156 - RNA, 32 nt, Homo Sapiens
uauauuugaagaaauaaugguagaaaaugucc

SEQ ID NO: 283157 - RNA, 32 nt, Homo Sapiens
ucccuuacugucaccuucacuccccacacagc

SEQ ID NO: 283158 - RNA, 32 nt, Homo Sapiens
gugacggauuuucucuuucuuaaacuuaccug

SEQ ID NO: 283159 - RNA, 32 nt, Homo Sapiens
gaguaagcaccgagaagucuguuccuuaucac

SEQ ID NO: 283160 - RNA, 32 nt, Homo Sapiens
uuugguuuuucuuugcagaacagcucuggaag

SEQ ID NO: 283161 - RNA, 32 nt, Homo Sapiens
gcccaggaucgcggggcgcccugaggcaaggg

SEQ ID NO: 283162 - RNA, 32 nt, Homo Sapiens
uaaaagcaaaaauugguuugaguuuucaaguu

SEQ ID NO: 283163 - RNA, 32 nt, Homo Sapiens
aucccggccccgggauggcguccccacgggaa

SEQ ID NO: 283164 - RNA, 32 nt, Homo Sapiens
gcgggcgagggcgggggugucccggcuauaaa

SEQ ID NO: 283165 - RNA, 32 nt, Homo Sapiens
cgguucugaauuucauuuuuuauaacaugaag

SEQ ID NO: 283166 - RNA, 32 nt, Homo Sapiens
gccuaugcauucaugucugucuccaugcaugu

SEQ ID NO: 283167 - RNA, 32 nt, Homo Sapiens
aguucuguccugaggcuucugcucucauucau

SEQ ID NO: 283168 - RNA, 32 nt, Homo Sapiens
cuaccgugacgcgcuccggagacgcucugcgg

SEQ ID NO: 283169 - RNA, 32 nt, Homo Sapiens
uugccucccuccccaccuacaaggcccucucc

SEQ ID NO: 283170 - RNA, 32 nt, Homo Sapiens
ucaucuacauuguuuaaaugucugcagcaaga

SEQ ID NO: 283171 - RNA, 32 nt, Homo Sapiens
ccgggaaugcugcugcugcugcugcugcugcu

SEQ ID NO: 283172 - RNA, 32 nt, Homo Sapiens
cugcccccgcugacucaggagcuccggugcug

SEQ ID NO: 283173 - RNA, 32 nt, Homo Sapiens
cgcggcgagcuucucccggcgccgcccgcucg

SEQ ID NO: 283174 - RNA, 32 nt, Homo Sapiens
uuuugcuuguguuuauuacugcuugagguuga

SEQ ID NO: 283175 - RNA, 32 nt, Homo Sapiens
gcuuuccccucgcccgcgguucuuggcgcaug

SEQ ID NO: 283176 - RNA, 32 nt, Homo Sapiens
ugcacccuuccacagcuggccugguuuccucg

SEQ ID NO: 283177 - RNA, 32 nt, Homo Sapiens
accugcaaugaguaggccuggcuggucacuuu

SEQ ID NO: 283178 - RNA, 32 nt, Homo Sapiens
uuaccgcgugacucccaccauccagcucgcgc

SEQ ID NO: 283179 - RNA, 32 nt, Homo Sapiens
auuucuggacaacagcugcuauuuucacuuga

SEQ ID NO: 283180 - RNA, 32 nt, Homo Sapiens
cuuccucccuuucuuaccacagaugggacaga

SEQ ID NO: 283181 - RNA, 32 nt, Homo Sapiens
aagugagcugggugugguggcacgugccugug

SEQ ID NO: 283182 - RNA, 29 nt, Homo Sapiens
cugaaugucuguuucagagacgcuucggg

SEQ ID NO: 283183 - RNA, 32 nt, Homo Sapiens
aguggcuuuccuugccuacuuuagucacccag

SEQ ID NO: 283184 - RNA, 32 nt, Homo Sapiens
acccccaaauauauuucuuugcccuaccuuga

SEQ ID NO: 283185 - RNA, 32 nt, Homo Sapiens
aagaaaggaaagauuacacaccgaaggaauug

SEQ ID NO: 283186 - RNA, 29 nt, Homo Sapiens
uguaagucauaugagcaagcucaauaaaa

SEQ ID NO: 283187 - RNA, 32 nt, Homo Sapiens
auaauuuucuucaugcaaugacaucuucaaag

SEQ ID NO: 283188 - RNA, 32 nt, Homo Sapiens
auaucuucuuugaggcaucugcucagaucuuu

SEQ ID NO: 283189 - RNA, 32 nt, Homo Sapiens
gagagacaggucgugggcaggguguggcuugg

SEQ ID NO: 283190 - RNA, 32 nt, Homo Sapiens
gucaucuguauaucaaacuauuuuauucccau

SEQ ID NO: 283191 - RNA, 32 nt, Homo Sapiens
aaaagaugagagaggggacuaauuauuuuguu

SEQ ID NO: 283192 - RNA, 31 nt, Homo Sapiens
uaggggagggcggugcuccgccgcgguggcg

SEQ ID NO: 283193 - RNA, 32 nt, Homo Sapiens
aggccaugagggugggagccggccugggcagc

SEQ ID NO: 283194 - RNA, 32 nt, Homo Sapiens
gcuuuuccagggugggggagggaaugaauaca

SEQ ID NO: 283195 - RNA, 32 nt, Homo Sapiens
uuuuugucucugguuuccaucauucuguaaua

SEQ ID NO: 283196 - RNA, 32 nt, Homo Sapiens
gggcccuugugcuuccuguggguggggugagg

SEQ ID NO: 283197 - RNA, 32 nt, Homo Sapiens
guuuauuuugcugugcagaaacuuuuuuaguu

SEQ ID NO: 283198 - RNA, 32 nt, Homo Sapiens
ggcaauuuggggguggggagggggaggugcgc

SEQ ID NO: 283199 - RNA, 32 nt, Homo Sapiens
agccuucauccucuauuccccauccagugggg

SEQ ID NO: 283200 - RNA, 32 nt, Homo Sapiens
aaaaaaacacaaacagaagaggaaaaaaaagc

SEQ ID NO: 283201 - RNA, 32 nt, Homo Sapiens
gucacgcuagaaucagaucugcucuccagcau

SEQ ID NO: 283202 - RNA, 32 nt, Homo Sapiens
acauuauagcaaauuugugucugggggacugc

SEQ ID NO: 283203 - RNA, 32 nt, Homo Sapiens
cuccuucuccaggcagagagccccaugucaau

SEQ ID NO: 283204 - RNA, 32 nt, Homo Sapiens
ugucaccucccuccccgccacuuuguguagau

SEQ ID NO: 283205 - RNA, 32 nt, Homo Sapiens
ggcacccccacccaccccccgccccgagcccu

SEQ ID NO: 283206 - RNA, 32 nt, Homo Sapiens
cagcuuuuaccaguuuaacauccaaaguucac

SEQ ID NO: 283207 - RNA, 32 nt, Homo Sapiens
ucuucauggagggguggucagaggcgggcggg

SEQ ID NO: 283208 - RNA, 32 nt, Homo Sapiens
agucuuucaaagccagccaggcuacacacaga

SEQ ID NO: 283209 - RNA, 32 nt, Homo Sapiens
ggccuuccuuucucuuuccccaguagcagggg

SEQ ID NO: 283210 - RNA, 32 nt, Homo Sapiens
aguuucuagguccccacuguccccgccguccc

SEQ ID NO: 283211 - RNA, 32 nt, Homo Sapiens
aggaacauuccccccauccccucguggccuca

SEQ ID NO: 283212 - RNA, 32 nt, Homo Sapiens
gucaucaaacuccacccaccuggcuucauaca

SEQ ID NO: 283213 - RNA, 29 nt, Homo Sapiens
ucauguaguuuaauguaccauaugugaaa

SEQ ID NO: 283214 - RNA, 32 nt, Homo Sapiens
auccauccugcucaaccuugugccugucuguu

SEQ ID NO: 283215 - RNA, 32 nt, Homo Sapiens
gguugcagggccccagagggcuggggugaccu

SEQ ID NO: 283216 - RNA, 32 nt, Homo Sapiens
ccagguguggcagugacuccgcgcuccacguu

SEQ ID NO: 283217 - RNA, 32 nt, Homo Sapiens
gcaaacuuucauaccacugcuggccauggaag

SEQ ID NO: 283218 - RNA, 32 nt, Homo Sapiens
cuaugaaccaaucucaaauauuuuaugaucuu

SEQ ID NO: 283219 - RNA, 32 nt, Homo Sapiens
cagaaagcggcuucgugccggcggagggggcc

SEQ ID NO: 283220 - RNA, 32 nt, Homo Sapiens
ugaacguugaguacacaugagugcguguaugc

SEQ ID NO: 283221 - RNA, 32 nt, Homo Sapiens
cggaaccccgcgggccagcagcagucgucucg

SEQ ID NO: 283222 - RNA, 32 nt, Homo Sapiens
cuauaaagcauuuaauaaacuguuauuaauag

SEQ ID NO: 283223 - RNA, 32 nt, Homo Sapiens
uucuuggcaggauggcuucucaucgucugcuc

SEQ ID NO: 283224 - RNA, 32 nt, Homo Sapiens
uacccaaaggauuacaaaucaugcugcuauaa

SEQ ID NO: 283225 - RNA, 32 nt, Homo Sapiens
cugacacuuaggauugugagacuuuuuaaugu

SEQ ID NO: 283226 - RNA, 32 nt, Homo Sapiens
augauuauauggauuucuuuaaaaggauaugc

SEQ ID NO: 283227 - RNA, 32 nt, Homo Sapiens
ccuccgugggacgagccacccgcuuucagccc

SEQ ID NO: 283228 - RNA, 32 nt, Homo Sapiens
cacuccugccccagcuguucuccagggcuugg

SEQ ID NO: 283229 - RNA, 32 nt, Homo Sapiens
uuaaaacugcaaacaguuggagaacauggaac

SEQ ID NO: 283230 - RNA, 32 nt, Homo Sapiens
acggguuuuuacugcccuucacccaaccucuc

SEQ ID NO: 283231 - RNA, 32 nt, Homo Sapiens
auauuuuauuucaauguaauuaaacuguuaac

SEQ ID NO: 283232 - RNA, 32 nt, Homo Sapiens
cagaucugcccucuccacuccauccucaaccc

SEQ ID NO: 283233 - RNA, 32 nt, Homo Sapiens
ucaauaaacaacauugaauacaaaagaggcuu

SEQ ID NO: 283234 - RNA, 32 nt, Homo Sapiens
uuccuuggccucgggguuuccugggucgggga

SEQ ID NO: 283235 - RNA, 32 nt, Homo Sapiens
ucuccagcggggccccagccccggcccccucu

SEQ ID NO: 283236 - RNA, 32 nt, Homo Sapiens
uuaaaguaaaagacaaaacuaaacuuccuccu

SEQ ID NO: 283237 - RNA, 32 nt, Homo Sapiens
gcugcggguccugggauucagccacgaggaaa

SEQ ID NO: 283238 - RNA, 32 nt, Homo Sapiens
guuaauuuuggugagaaggaugcaaaaguccc

SEQ ID NO: 283239 - RNA, 32 nt, Homo Sapiens
auacccaugggugauuuuugcuccucaggccc

SEQ ID NO: 283240 - RNA, 32 nt, Homo Sapiens
auagucgggcccccgacaccggacagggguug

SEQ ID NO: 283241 - RNA, 32 nt, Homo Sapiens
accuucauuguuaacggauuuuaaugaauaau

SEQ ID NO: 283242 - RNA, 32 nt, Homo Sapiens
auguuugguagccguagcacaagugauuggag

SEQ ID NO: 283243 - RNA, 30 nt, Homo Sapiens
agggccccugcuaggaccuuaagaaggagc

SEQ ID NO: 283244 - RNA, 32 nt, Homo Sapiens
cgugccuggugccagcuucuacauuggccugg

SEQ ID NO: 283245 - RNA, 32 nt, Homo Sapiens
uaacuauuuuaauuugauuaauccacuauuau

SEQ ID NO: 283246 - RNA, 32 nt, Homo Sapiens
aaggauauagguuuuucucauguaucuuuuug

SEQ ID NO: 283247 - RNA, 32 nt, Homo Sapiens
acuacucuguaaauuaauccgaaacuuuuaag

SEQ ID NO: 283248 - RNA, 32 nt, Homo Sapiens
cugguggaauccaugacucauauguuuaaccu

SEQ ID NO: 283249 - RNA, 32 nt, Homo Sapiens
agcacuuugggaggccgagaugggcggaucac

SEQ ID NO: 283250 - RNA, 32 nt, Homo Sapiens
aauugggacaugggcguugucuggccacacug

SEQ ID NO: 283251 - RNA, 32 nt, Homo Sapiens
gucaucgagguagucagcccaccuccucugcc

SEQ ID NO: 283252 - RNA, 32 nt, Homo Sapiens
agccagagggucaggagagaaugggggaggag

SEQ ID NO: 283253 - RNA, 23 nt, Homo Sapiens
ggcgcggacgcgggaccgcguac

SEQ ID NO: 283254 - RNA, 32 nt, Homo Sapiens
gagggagguucugggggcgagcagacaggcgg

SEQ ID NO: 283255 - RNA, 32 nt, Homo Sapiens
auguggccauauuuauagaaugcugaacucaa

SEQ ID NO: 283256 - RNA, 31 nt, Homo Sapiens
gccaacacagccaccaacucuggguccagug

SEQ ID NO: 283257 - RNA, 32 nt, Homo Sapiens
uucuucaaguagaguuaugaaaacgaagaaac

SEQ ID NO: 283258 - RNA, 32 nt, Homo Sapiens
acgagggauggcggcagcggcgcuggggaggg

SEQ ID NO: 283259 - RNA, 32 nt, Homo Sapiens
cacacuuaagcccucgugcacacacacaaauu

SEQ ID NO: 283260 - RNA, 32 nt, Homo Sapiens
auuuauuagacuauuguuggacuauuuuuuau

SEQ ID NO: 283261 - RNA, 32 nt, Homo Sapiens
agagcgcggcggccgcgggcuccggcgaggga

SEQ ID NO: 283262 - RNA, 31 nt, Homo Sapiens
gcugccaggcacugcuuguaucccugcugau

SEQ ID NO: 283263 - RNA, 32 nt, Homo Sapiens
gccauccaggcagaacuaagccaggcauaacc

SEQ ID NO: 283264 - RNA, 32 nt, Homo Sapiens
cagagcagccacagaagcugugccugaagggu

SEQ ID NO: 283265 - RNA, 32 nt, Homo Sapiens
cgccgcucgggacccggcuaggcggcggcggg

SEQ ID NO: 283266 - RNA, 32 nt, Homo Sapiens
agucugggggccuggaacaggagagcgggcgu

SEQ ID NO: 283267 - RNA, 32 nt, Homo Sapiens
ucagugccuacuacugggucuagacagaccuc

SEQ ID NO: 283268 - RNA, 32 nt, Homo Sapiens
agaacugccaagcccagaaguaccuuugcacu

SEQ ID NO: 283269 - RNA, 32 nt, Homo Sapiens
aggaagcggaggaggucgggcgcucggggccc

SEQ ID NO: 283270 - RNA, 32 nt, Homo Sapiens
acaccaggccgcgccuggccugcuuucauuuu

SEQ ID NO: 283271 - RNA, 32 nt, Homo Sapiens
aggaaaucaaaauuauauguugauuuuucuuu

SEQ ID NO: 283272 - RNA, 32 nt, Homo Sapiens
cagccaaggccccuuccacccucuccagaggu

SEQ ID NO: 283273 - RNA, 32 nt, Homo Sapiens
accgugcccggccucucccaauaggucuuuau

SEQ ID NO: 283274 - RNA, 32 nt, Homo Sapiens
uagagauaauccaaaaucaggguuugguuugg

SEQ ID NO: 283275 - RNA, 32 nt, Homo Sapiens
acaaaggauuuauuuaucuggauguaccaaua

SEQ ID NO: 283276 - RNA, 32 nt, Homo Sapiens
gcaggggaaggggagcaggugugucacacagu

SEQ ID NO: 283277 - RNA, 32 nt, Homo Sapiens
gcagugucuucugcaccauccugugggacaca

SEQ ID NO: 283278 - RNA, 32 nt, Homo Sapiens
aaaagagauaagaaaaguugauggagccggga

SEQ ID NO: 283279 - RNA, 32 nt, Homo Sapiens
gcgcaguccagccggcccggcccugcccugcc

SEQ ID NO: 283280 - RNA, 28 nt, Homo Sapiens
gggauguucggcuccgccccccagcguc

SEQ ID NO: 283281 - RNA, 32 nt, Homo Sapiens
ugaaucaaaaguuuggugaaaacuuacugagu

SEQ ID NO: 283282 - RNA, 32 nt, Homo Sapiens
acagcaguccacagcagcaggguuagacucag

SEQ ID NO: 283283 - RNA, 32 nt, Homo Sapiens
ccacugcacccucucccccuuaucuaucuccu

SEQ ID NO: 283284 - RNA, 32 nt, Homo Sapiens
cuaaccuccccauuuuaaggucugcagccuua

SEQ ID NO: 283285 - RNA, 32 nt, Homo Sapiens
auuggggauccuuuuuauacugaaacaucugu

SEQ ID NO: 283286 - RNA, 32 nt, Homo Sapiens
aaaugaccaacuugauccuggcccugaggagu

SEQ ID NO: 283287 - RNA, 32 nt, Homo Sapiens
ucccugaagaugcuuuuggacaauggucugag

SEQ ID NO: 283288 - RNA, 32 nt, Homo Sapiens
cuuggccgucgaaggaggugcuucucgcggag

SEQ ID NO: 283289 - RNA, 32 nt, Homo Sapiens
cccccgcuccagcuccagccggguccucgcuc

SEQ ID NO: 283290 - RNA, 32 nt, Homo Sapiens
guucgacggaacaaaggacaugacagcccggc

SEQ ID NO: 283291 - RNA, 32 nt, Homo Sapiens
gguguccccguccucccucacugccccauaug

SEQ ID NO: 283292 - RNA, 32 nt, Homo Sapiens
ucgccguagaaagaaaaauaaaauaccaauuc

SEQ ID NO: 283293 - RNA, 32 nt, Homo Sapiens
uuucugaggggagagggaaaaggacuuguuuu

SEQ ID NO: 283294 - RNA, 32 nt, Homo Sapiens
aagaccuaaaaaguacaagaagcuacaucccu

SEQ ID NO: 283295 - RNA, 32 nt, Homo Sapiens
uaguauguuuuuauuacugguuuaauggagua

SEQ ID NO: 283296 - RNA, 32 nt, Homo Sapiens
acuugccugggcggcauagugagaccuugucu

SEQ ID NO: 283297 - RNA, 32 nt, Homo Sapiens
gggguuggagaggauauagagaaggcagccca

SEQ ID NO: 283298 - RNA, 32 nt, Homo Sapiens
gaaggaaacccucuccucuccccuucccuucu

SEQ ID NO: 283299 - RNA, 32 nt, Homo Sapiens
aauuuuaauguuuuauuggcaacguaugcugc

SEQ ID NO: 283300 - RNA, 32 nt, Homo Sapiens
cugcgccucuggcgcgcucugcagcgcggacc

SEQ ID NO: 283301 - RNA, 32 nt, Homo Sapiens
accagcucacccaaaacuauaggggccuucua

SEQ ID NO: 283302 - RNA, 32 nt, Homo Sapiens
guucucauuacuuuagagguaguuagauaucu

SEQ ID NO: 283303 - RNA, 32 nt, Homo Sapiens
cauaaauacuagugugauuauaucuuuggagu

SEQ ID NO: 283304 - RNA, 32 nt, Homo Sapiens
acacguugaaagaauagacaaggaccacuugc

SEQ ID NO: 283305 - RNA, 32 nt, Homo Sapiens
auguaaauuccuccuuuuuuuccuuuuuuggc

SEQ ID NO: 283306 - RNA, 32 nt, Homo Sapiens
cagcagcuuauaaugggcucuccggggccauu

SEQ ID NO: 283307 - RNA, 32 nt, Homo Sapiens
ccccaaacccccaacucccaauaaaagccgug

SEQ ID NO: 283308 - RNA, 32 nt, Homo Sapiens
agccggcagcuacugcccagggcccgcagugu

SEQ ID NO: 283309 - RNA, 32 nt, Homo Sapiens
guggcacaucuucugucuucuguugggaacag

SEQ ID NO: 283310 - RNA, 32 nt, Homo Sapiens
ucgggcucauuuaacacuuacuauuucuauac

SEQ ID NO: 283311 - RNA, 32 nt, Homo Sapiens
gguggaggagaaugaugggcguacagaggagu

SEQ ID NO: 283312 - RNA, 32 nt, Homo Sapiens
ccacuucauuuggaaaacuuggauagauuuuc

SEQ ID NO: 283313 - RNA, 32 nt, Homo Sapiens
gagguuuaacugagugaacaccgcuguuccgg

SEQ ID NO: 283314 - RNA, 32 nt, Homo Sapiens
gagggcacgucuagaaucgaggaggcaagccu

SEQ ID NO: 283315 - RNA, 32 nt, Homo Sapiens
cauguuuuuaucaaucuucauuuuaaaguugu

SEQ ID NO: 283316 - RNA, 32 nt, Homo Sapiens
acuauucccucuauuuuccucuaagguaaaua

SEQ ID NO: 283317 - RNA, 32 nt, Homo Sapiens
cuguagagccauuuaauguuauugucauaugc

SEQ ID NO: 283318 - RNA, 32 nt, Homo Sapiens
caucggucugccuugauucagcaucagaacau

SEQ ID NO: 283319 - RNA, 32 nt, Homo Sapiens
agacacacacauugauccuccuccucagcucc

SEQ ID NO: 283320 - RNA, 32 nt, Homo Sapiens
gccacugcacaccagccugggugacagagcga

SEQ ID NO: 283321 - RNA, 32 nt, Homo Sapiens
ugaaggauaaauuuaaugcauuucagaaacua

SEQ ID NO: 283322 - RNA, 32 nt, Homo Sapiens
aauacaguuaguugauaacauaaagccauagu

SEQ ID NO: 283323 - RNA, 31 nt, Homo Sapiens
cagggcacagaggccgggacggccucucccu

SEQ ID NO: 283324 - RNA, 32 nt, Homo Sapiens
uugauuauauuuuuaaucguucuuugcccuaa

SEQ ID NO: 283325 - RNA, 32 nt, Homo Sapiens
cuauuucccccuccucccagcuccuggaaacc

SEQ ID NO: 283326 - RNA, 32 nt, Homo Sapiens
ccggcucgaccauccgccugccgcccggacgc

SEQ ID NO: 283327 - RNA, 32 nt, Homo Sapiens
aaucuuuuaaaaauaaaugcuauauauuagga

SEQ ID NO: 283328 - RNA, 32 nt, Homo Sapiens
auggggaccugagagggaaggggacagauguu

SEQ ID NO: 283329 - RNA, 32 nt, Homo Sapiens
ccaggggcacaccacugccagcggggauagag

SEQ ID NO: 283330 - RNA, 32 nt, Homo Sapiens
agauccagggauguacagcagagagcuaggag

SEQ ID NO: 283331 - RNA, 32 nt, Homo Sapiens
uuugagacagaguuucacucuuguuauccagg

SEQ ID NO: 283332 - RNA, 32 nt, Homo Sapiens
aacucuccccuaaucacacacucuguauuuau

SEQ ID NO: 283333 - RNA, 32 nt, Homo Sapiens
agcuuuuuucuuuauuuaguagccaaauucuu

SEQ ID NO: 283334 - RNA, 27 nt, Homo Sapiens
gcaggaacuucuuucagcccuuuaggc

SEQ ID NO: 283335 - RNA, 32 nt, Homo Sapiens
acugguuuuccacaggcaucuucaguuauugc

SEQ ID NO: 283336 - RNA, 32 nt, Homo Sapiens
gugcuugcuguucccaaauaugcaagaauaac

SEQ ID NO: 283337 - RNA, 32 nt, Homo Sapiens
acuuuguggcaaaaauuuucaauauaauacau

SEQ ID NO: 283338 - RNA, 32 nt, Homo Sapiens
ccugguccaccucggaggccucuaggacccgg

SEQ ID NO: 283339 - RNA, 32 nt, Homo Sapiens
gccccugagccuuauaccuccaccacaggggg

SEQ ID NO: 283340 - RNA, 32 nt, Homo Sapiens
guuaccacauaaaaagaagucaccagauaaaa

SEQ ID NO: 283341 - RNA, 32 nt, Homo Sapiens
cuuuuugagacggggucucacugucacccagg

SEQ ID NO: 283342 - RNA, 32 nt, Homo Sapiens
uuauaggugugagccaccgcgcccggccugcc

SEQ ID NO: 283343 - RNA, 32 nt, Homo Sapiens
uuagaaggaaauacuugguaaaacuuaauaaa

SEQ ID NO: 283344 - RNA, 32 nt, Homo Sapiens
caaagcaacugauguuuacaggucuuguguua

SEQ ID NO: 283345 - RNA, 32 nt, Homo Sapiens
aagcugccaagccccugccuccagccuuccug

SEQ ID NO: 283346 - RNA, 32 nt, Homo Sapiens
ccugugcgcgccccuccgcgcgcggccccgau

SEQ ID NO: 283347 - RNA, 32 nt, Homo Sapiens
acgugcacauggaugcacacacgugcacaccu

SEQ ID NO: 283348 - RNA, 32 nt, Homo Sapiens
gcaggaauccuacaucaauuugaaaggagcuu

SEQ ID NO: 283349 - RNA, 30 nt, Homo Sapiens
ggcgcucacgcaggggcgggucccgguagc

SEQ ID NO: 283350 - RNA, 32 nt, Homo Sapiens
aauauacuuaaacaacaaacuuugaagaaagu

SEQ ID NO: 283351 - RNA, 32 nt, Homo Sapiens
ugaccccugccagcuccacaagcacuggccuu

SEQ ID NO: 283352 - RNA, 32 nt, Homo Sapiens
cucggcacuuugggagacugaggugggagcau

SEQ ID NO: 283353 - RNA, 32 nt, Homo Sapiens
cccugacucccucugcuguccuccccucucag

SEQ ID NO: 283354 - RNA, 32 nt, Homo Sapiens
agccauaguucugaaugcacuucaauuaagcc

SEQ ID NO: 283355 - RNA, 32 nt, Homo Sapiens
aaauccuggguacagcuuuacaagcaguauug

SEQ ID NO: 283356 - RNA, 32 nt, Homo Sapiens
gaauuuggccccagcaguuugccuuugacucc

SEQ ID NO: 283357 - RNA, 32 nt, Homo Sapiens
ucauagcccaccccccaccuccaugcauacac

SEQ ID NO: 283358 - RNA, 32 nt, Homo Sapiens
cugacuugaagauagaggggccauguggaaau

SEQ ID NO: 283359 - RNA, 32 nt, Homo Sapiens
ugaccgcgcucugccucagcgacgguaagugc

SEQ ID NO: 283360 - RNA, 32 nt, Homo Sapiens
aucacauaggauauauuaagauaaugauaaag

SEQ ID NO: 283361 - RNA, 32 nt, Homo Sapiens
uuagcugggugugguggcgugugccuguagug

SEQ ID NO: 283362 - RNA, 32 nt, Homo Sapiens
accacucccccgcuuuuuuggcgaauccuagu

SEQ ID NO: 283363 - RNA, 31 nt, Homo Sapiens
ggaggaaagauagguacaggaguccacagga

SEQ ID NO: 283364 - RNA, 32 nt, Homo Sapiens
acccucggucauuguacacagcagccaguuuu

SEQ ID NO: 283365 - RNA, 32 nt, Homo Sapiens
uuuacaaguggaaacacauugguucugaucac

SEQ ID NO: 283366 - RNA, 32 nt, Homo Sapiens
cucccagcacgcucuggggaggcggcucuggu

SEQ ID NO: 283367 - RNA, 32 nt, Homo Sapiens
ucaugcugugauugaagcauccauucagaaca

SEQ ID NO: 283368 - RNA, 32 nt, Homo Sapiens
ucguuuccucgcgacaugacugcuggaugaag

SEQ ID NO: 283369 - RNA, 32 nt, Homo Sapiens
cucacggugcaaacacaguugauuuaggaagu

SEQ ID NO: 283370 - RNA, 32 nt, Homo Sapiens
ggaaccuucccgcucccaccgcgcacuugccc

SEQ ID NO: 283371 - RNA, 32 nt, Homo Sapiens
ggaaacuuuguccuucauugaauuacgacacu

SEQ ID NO: 283372 - RNA, 28 nt, Homo Sapiens
aacauggaggcagaggaaucggagaagg

SEQ ID NO: 283373 - RNA, 32 nt, Homo Sapiens
uggugcugggcccagagucagagggcagcccc

SEQ ID NO: 283374 - RNA, 32 nt, Homo Sapiens
uuucagcaaucgugagaccgucuaguauaaga

SEQ ID NO: 283375 - RNA, 32 nt, Homo Sapiens
agagcuaucccaucugcccccaucuggagcuc

SEQ ID NO: 283376 - RNA, 32 nt, Homo Sapiens
gagcaguagacaguccaccucccgguacgugg

SEQ ID NO: 283377 - RNA, 32 nt, Homo Sapiens
cacaguuagacaauccaugguuuaaugcacau

SEQ ID NO: 283378 - RNA, 32 nt, Homo Sapiens
cuguuucuacuccaucaccauguucgcucuuu

SEQ ID NO: 283379 - RNA, 32 nt, Homo Sapiens
ugauuuguuuuuguccuugaauaagcauguua

SEQ ID NO: 283380 - RNA, 32 nt, Homo Sapiens
ggagcuagaaaagaagaugauugcaguaggca

SEQ ID NO: 283381 - RNA, 32 nt, Homo Sapiens
uccuuaauauaaauauucugguuuuguauuuu

SEQ ID NO: 283382 - RNA, 32 nt, Homo Sapiens
cucuuuccuuuucucugucugcuacugacuuu

SEQ ID NO: 283383 - RNA, 32 nt, Homo Sapiens
ugccaccaugcagcugccaaugguccuaguua

SEQ ID NO: 283384 - RNA, 32 nt, Homo Sapiens
cuugcuuguaaauccuaaucuuagaguuauca

SEQ ID NO: 283385 - RNA, 32 nt, Homo Sapiens
accuggaguuuucagagcugccugaucauugc

SEQ ID NO: 283386 - RNA, 32 nt, Homo Sapiens
uguauuuguaucuauuuguaaaaaaaaaauca

SEQ ID NO: 283387 - RNA, 32 nt, Homo Sapiens
uuucccugguuaagaaaugaccucaucuguaa

SEQ ID NO: 283388 - RNA, 32 nt, Homo Sapiens
uucugaugggagguguuagaaccuggcuuucu

SEQ ID NO: 283389 - RNA, 32 nt, Homo Sapiens
cacugagggcugaggagaaagcugccgucuag

SEQ ID NO: 283390 - RNA, 31 nt, Homo Sapiens
agagggagggcggggacaacugggucuuuug

SEQ ID NO: 283391 - RNA, 32 nt, Homo Sapiens
gaaucaggggaccccaccggacucuuaccaaa

SEQ ID NO: 283392 - RNA, 28 nt, Homo Sapiens
acuucagugagagccauuauaagugaaa

SEQ ID NO: 283393 - RNA, 32 nt, Homo Sapiens
ccucgccgacgcugggaggagccccguguccc

SEQ ID NO: 283394 - RNA, 32 nt, Homo Sapiens
uuccccugcuccgcauuuuguaaaauggcccc

SEQ ID NO: 283395 - RNA, 31 nt, Homo Sapiens
cuuuugaacauauuguaacacaguuuucauc

SEQ ID NO: 283396 - RNA, 32 nt, Homo Sapiens
auugguaaaauauuuguauauaacuuuaaaag

SEQ ID NO: 283397 - RNA, 32 nt, Homo Sapiens
uuacuuccgggcuugcgagcgacgacugcucu

SEQ ID NO: 283398 - RNA, 32 nt, Homo Sapiens
gucggccuugccuccuccuccuccucuaccuc

SEQ ID NO: 283399 - RNA, 32 nt, Homo Sapiens
caauaaaaaacugguccaacgaagacacugcu

SEQ ID NO: 283400 - RNA, 32 nt, Homo Sapiens
auagaaggauaaaggaugcauguguaguauuu

SEQ ID NO: 283401 - RNA, 32 nt, Homo Sapiens
cuuggggacaccuuucuguagccccuuaccca

SEQ ID NO: 283402 - RNA, 32 nt, Homo Sapiens
ucccuggucccccucacaggaugugugacagg

SEQ ID NO: 283403 - RNA, 32 nt, Homo Sapiens
uauuuggagucaauucuuacguaauuuguugu

SEQ ID NO: 283404 - RNA, 32 nt, Homo Sapiens
acaugcgcuggguacaguugcuuacaccugua

SEQ ID NO: 283405 - RNA, 32 nt, Homo Sapiens
ugaaucgcugcaaccagaccacagggcagugu

SEQ ID NO: 283406 - RNA, 32 nt, Homo Sapiens
ugugggacugccgcucugcgcggcgagaggug

SEQ ID NO: 283407 - RNA, 32 nt, Homo Sapiens
ugccuauggcggaguucugagaggaacuggga

SEQ ID NO: 283408 - RNA, 32 nt, Homo Sapiens
ggggaggaacuguguuuuauucaucucuaugu

SEQ ID NO: 283409 - RNA, 32 nt, Homo Sapiens
gucaucaacuuggaaaggaaacaaagagugcu

SEQ ID NO: 283410 - RNA, 32 nt, Homo Sapiens
gugcccugguggccugccccagcucucuucug

SEQ ID NO: 283411 - RNA, 32 nt, Homo Sapiens
aaaugcaugaaaggauguucaacaucacuaau

SEQ ID NO: 283412 - RNA, 32 nt, Homo Sapiens
ucucacccacagagggaggaucuuuaagagga

SEQ ID NO: 283413 - RNA, 32 nt, Homo Sapiens
guggccggucuccgucgugaccucugacgguu

SEQ ID NO: 283414 - RNA, 32 nt, Homo Sapiens
ucuccauacuaagaaaaauuaauauauacagu

SEQ ID NO: 283415 - RNA, 32 nt, Homo Sapiens
aaaauguuuguugaaaaaauagucuucuccac

SEQ ID NO: 283416 - RNA, 32 nt, Homo Sapiens
ccggcccugcccguccaccggccgccgagagu

SEQ ID NO: 283417 - RNA, 32 nt, Homo Sapiens
cucccauacauuuuaauauguauuauauuuaa

SEQ ID NO: 283418 - RNA, 32 nt, Homo Sapiens
ccaacagcagggcuuuggccaagcccuugucu

SEQ ID NO: 283419 - RNA, 31 nt, Homo Sapiens
caacauggcaaugauccugauugacuaauac

SEQ ID NO: 283420 - RNA, 32 nt, Homo Sapiens
accacaagcaaaaaacaaaacagaccaccacg

SEQ ID NO: 283421 - RNA, 30 nt, Homo Sapiens
agccgugucugugaucaggaugcacugggc

SEQ ID NO: 283422 - RNA, 32 nt, Homo Sapiens
uugaaaaagcaucagaaucugaggagucagau

SEQ ID NO: 283423 - RNA, 32 nt, Homo Sapiens
ggcaauggccuuaccucccugccgcccaauuu

SEQ ID NO: 283424 - RNA, 32 nt, Homo Sapiens
gaaccgugagccaauuaaacuucuuuucuuua

SEQ ID NO: 283425 - RNA, 32 nt, Homo Sapiens
gugccguggcccggccguggcuggcgugaucc

SEQ ID NO: 283426 - RNA, 32 nt, Homo Sapiens
ggcggcaacgcugcccggccggcagcgcuggg

SEQ ID NO: 283427 - RNA, 32 nt, Homo Sapiens
aacauccuggucaacagccaucuuuucagcag

SEQ ID NO: 283428 - RNA, 32 nt, Homo Sapiens
agagauaaauguuuguuuauaucacugucuag

SEQ ID NO: 283429 - RNA, 32 nt, Homo Sapiens
cgcucugucgcccaagcuggaguacaguggug

SEQ ID NO: 283430 - RNA, 32 nt, Homo Sapiens
gagccacuguccccggccuccuggcuuccuuc

SEQ ID NO: 283431 - RNA, 32 nt, Homo Sapiens
gcgccggggccggcggaggagcagccacuucc

SEQ ID NO: 283432 - RNA, 32 nt, Homo Sapiens
cuuguccuggacuccugcaaugacucauaaua

SEQ ID NO: 283433 - RNA, 32 nt, Homo Sapiens
ccggccggguuccgcuccugcuggagcccggu

SEQ ID NO: 283434 - RNA, 32 nt, Homo Sapiens
uguuguuuuuugcuguccaaucugacaggcuc

SEQ ID NO: 283435 - RNA, 32 nt, Homo Sapiens
cggacucggaggcgcagcggcgccugguggga

SEQ ID NO: 283436 - RNA, 32 nt, Homo Sapiens
aguuggaggggaggacaguaaccagggaaggu

SEQ ID NO: 283437 - RNA, 32 nt, Homo Sapiens
aagcccagacuuuacgacuacacaauauauuc

SEQ ID NO: 283438 - RNA, 32 nt, Homo Sapiens
ucuugccucuugaggacaucuaccagccucuc

SEQ ID NO: 283439 - RNA, 31 nt, Homo Sapiens
gguggcauggccccccugccccgugcugaau

SEQ ID NO: 283440 - RNA, 32 nt, Homo Sapiens
acagccaaucagccgauuuccugagcagugau

SEQ ID NO: 283441 - RNA, 30 nt, Homo Sapiens
auguuaaagaagcuuggccugagucuccca

SEQ ID NO: 283442 - RNA, 32 nt, Homo Sapiens
gaucuuggagaaugugagaagccagccagagg

SEQ ID NO: 283443 - RNA, 32 nt, Homo Sapiens
gccucuuagcagccucuucccuagggccuuug

SEQ ID NO: 283444 - RNA, 32 nt, Homo Sapiens
ccgccgccggcgagauggacaccugagaugcu

SEQ ID NO: 283445 - RNA, 32 nt, Homo Sapiens
gguccugcuaguuucuggauuguacaaauaaa

SEQ ID NO: 283446 - RNA, 32 nt, Homo Sapiens
ccucaaguggucgcgccgccucacuggacuca

SEQ ID NO: 283447 - RNA, 32 nt, Homo Sapiens
aaaugugauuuuuguguuguuaaacuucagcu

SEQ ID NO: 283448 - RNA, 32 nt, Homo Sapiens
ucuggaagggaagaggaguuggaaggucucug

SEQ ID NO: 283449 - RNA, 32 nt, Homo Sapiens
ccuacuugauuaaagauugaguggaauucuaa

SEQ ID NO: 283450 - RNA, 32 nt, Homo Sapiens
cuuggaccacagcaugucagugcucuagggau

SEQ ID NO: 283451 - RNA, 32 nt, Homo Sapiens
aaauaucccuccccucucucccugguccccuc

SEQ ID NO: 283452 - RNA, 32 nt, Homo Sapiens
uuugccgugaagggcugugcgguucccgugcg

SEQ ID NO: 283453 - RNA, 32 nt, Homo Sapiens
gcugccggguggccaggguauggggcaugugc

SEQ ID NO: 283454 - RNA, 32 nt, Homo Sapiens
ccaaaacccagcuucugaucuugacuaaguuc

SEQ ID NO: 283455 - RNA, 32 nt, Homo Sapiens
ucuaacucaagcagaacccugggguuuuggga

SEQ ID NO: 283456 - RNA, 32 nt, Homo Sapiens
gcucuuuaauucuuuuuccccggggagggggg

SEQ ID NO: 283457 - RNA, 32 nt, Homo Sapiens
ucaugugauaauuuaaaauuauuuucaacuac

SEQ ID NO: 283458 - RNA, 32 nt, Homo Sapiens
cgaggcgcggagaggaggcgggaaagagcuuc

SEQ ID NO: 283459 - RNA, 32 nt, Homo Sapiens
gcauuugauggcucgggacgcggccuuccugc

SEQ ID NO: 283460 - RNA, 32 nt, Homo Sapiens
aaauuucuguuaugaaaccuuuuauucuaagg

SEQ ID NO: 283461 - RNA, 32 nt, Homo Sapiens
ugcguucaaaucaacguauuuauaugguacug

SEQ ID NO: 283462 - RNA, 32 nt, Homo Sapiens
ccuccucagccggcggcggcccgggcccagca

SEQ ID NO: 283463 - RNA, 32 nt, Homo Sapiens
gcauggcggguacuucugucucugucgcuaug

SEQ ID NO: 283464 - RNA, 32 nt, Homo Sapiens
agaaucccauggauguuucuucuuugacuaua

SEQ ID NO: 283465 - RNA, 32 nt, Homo Sapiens
ggcccgcgaggggcucccggcgcgguccccga

SEQ ID NO: 283466 - RNA, 32 nt, Homo Sapiens
ugccuaucaacccuuuuuuguguuaugauuac

SEQ ID NO: 283467 - RNA, 32 nt, Homo Sapiens
augauuggccccaguccccuuguuugucccuu

SEQ ID NO: 283468 - RNA, 32 nt, Homo Sapiens
guuaaaggaauuucauuuuuuaaaagaaaucu

SEQ ID NO: 283469 - RNA, 32 nt, Homo Sapiens
uuuccuauuuccccaaagacuuaucagaugcu

SEQ ID NO: 283470 - RNA, 32 nt, Homo Sapiens
ucaacugaauauauuuccauggccaucacacc

SEQ ID NO: 283471 - RNA, 32 nt, Homo Sapiens
cuaccacccagcugguuccagcccuggccaag

SEQ ID NO: 283472 - RNA, 30 nt, Homo Sapiens
ccugggaugaucccugcuggguauuugcac

SEQ ID NO: 283473 - RNA, 32 nt, Homo Sapiens
gugugaguccugaagcacuuucagugcuguga

SEQ ID NO: 283474 - RNA, 32 nt, Homo Sapiens
aucccgaaugcuauggccgccgucgccgucuu

SEQ ID NO: 283475 - RNA, 32 nt, Homo Sapiens
cacaacugccagcaauccuuccaccaggcaaa

SEQ ID NO: 283476 - RNA, 32 nt, Homo Sapiens
cucaagucaggaguucgagaccagccuggcca

SEQ ID NO: 283477 - RNA, 32 nt, Homo Sapiens
ccuuuugcuuuaucuucaguguaccuccuuaa

SEQ ID NO: 283478 - RNA, 32 nt, Homo Sapiens
ccacuggguucucuugguuacaaacuccuucc

SEQ ID NO: 283479 - RNA, 32 nt, Homo Sapiens
cucugugagggccagcggguccccuucggccc

SEQ ID NO: 283480 - RNA, 32 nt, Homo Sapiens
aaguugagguuaaaggcgcgccagguauuccu

SEQ ID NO: 283481 - RNA, 32 nt, Homo Sapiens
cgcauuugaacagggccgcgggccaccagaga

SEQ ID NO: 283482 - RNA, 32 nt, Homo Sapiens
aaaaacaaaacacagacugcaauguuuguuuc

SEQ ID NO: 283483 - RNA, 32 nt, Homo Sapiens
cuucguucuuguuaguacuauaucuguuuuac

SEQ ID NO: 283484 - RNA, 32 nt, Homo Sapiens
gcuuuucagacaccccaucauccucgcgcguc

SEQ ID NO: 283485 - RNA, 31 nt, Homo Sapiens
gaugcauaaaggguuuuuauuuugauugaau

SEQ ID NO: 283486 - RNA, 32 nt, Homo Sapiens
cguucaagcccaggacugcccgggcgcaggau

SEQ ID NO: 283487 - RNA, 32 nt, Homo Sapiens
gggaggcccaaccuccugccccucucagggac

SEQ ID NO: 283488 - RNA, 32 nt, Homo Sapiens
ggcccaugcccccuucgcuccuccucucauca

SEQ ID NO: 283489 - RNA, 30 nt, Homo Sapiens
gcggaggcggcgggagcgccggcgcuuggu

SEQ ID NO: 283490 - RNA, 31 nt, Homo Sapiens
guaguauucaaugauuuuuuaugaucaaggu

SEQ ID NO: 283491 - RNA, 32 nt, Homo Sapiens
augagcuggugaccacgcuggacccaggccua

SEQ ID NO: 283492 - RNA, 27 nt, Homo Sapiens
uguugguccuucucuuaggccugcucc

SEQ ID NO: 283493 - RNA, 32 nt, Homo Sapiens
ggcacaugcuggaagcccugggcugccaccag

SEQ ID NO: 283494 - RNA, 32 nt, Homo Sapiens
cuguggucggggcucgggaccggcugccaucu

SEQ ID NO: 283495 - RNA, 32 nt, Homo Sapiens
ccggaccgggaggaggggagggggcgaugcug

SEQ ID NO: 283496 - RNA, 32 nt, Homo Sapiens
caguguaaauuaaauauauucaauauauuucc

SEQ ID NO: 283497 - RNA, 32 nt, Homo Sapiens
aggacccugcgggucgcacgcccuccccagcu

SEQ ID NO: 283498 - RNA, 32 nt, Homo Sapiens
ugcugccugggugcccucuccuuugcacccua

SEQ ID NO: 283499 - RNA, 32 nt, Homo Sapiens
gaaaauucccccucgagguugagagaaccucu

SEQ ID NO: 283500 - RNA, 32 nt, Homo Sapiens
gcaagaggggguggagggguguggcagugguu

SEQ ID NO: 283501 - RNA, 31 nt, Homo Sapiens
gaacuccaagagguggguaauuugguuuaaa

SEQ ID NO: 283502 - RNA, 32 nt, Homo Sapiens
cucccgcugaaucuuggcucuugucuucucuu

SEQ ID NO: 283503 - RNA, 32 nt, Homo Sapiens
ugugggcacgggggcugggaagagcaaaguca

SEQ ID NO: 283504 - RNA, 32 nt, Homo Sapiens
cacacgcacugacgugggccugggagauuguc

SEQ ID NO: 283505 - RNA, 32 nt, Homo Sapiens
guuugaaaucaucauacaaacugcaguagcau

SEQ ID NO: 283506 - RNA, 30 nt, Homo Sapiens
cggacgagggaggugccgccgucgcccagg

SEQ ID NO: 283507 - RNA, 32 nt, Homo Sapiens
cagggccugugcugcagucggggacaaggagc

SEQ ID NO: 283508 - RNA, 32 nt, Homo Sapiens
aacaggggauguuccaagaggguguggauucc

SEQ ID NO: 283509 - RNA, 32 nt, Homo Sapiens
ccucugcugcgcaccgcagccucggaccuaca

SEQ ID NO: 283510 - RNA, 32 nt, Homo Sapiens
cggacggcgccucaggcagcgcggcggacagc

SEQ ID NO: 283511 - RNA, 32 nt, Homo Sapiens
agcgaccccaagccggcuguggccgcggcagc

SEQ ID NO: 283512 - RNA, 32 nt, Homo Sapiens
cugcucggagaaugaaggcgcuucuguugcug

SEQ ID NO: 283513 - RNA, 32 nt, Homo Sapiens
aaccccacagaaacggacaacauggagcaaaa

SEQ ID NO: 283514 - RNA, 32 nt, Homo Sapiens
ggcacccauggcuguggccuggcaccgucagc

SEQ ID NO: 283515 - RNA, 32 nt, Homo Sapiens
cuaauuagaaauuaauaagauacuaaaauuca

SEQ ID NO: 283516 - RNA, 32 nt, Homo Sapiens
agaggaaaaugguuuuaauguuugcuggucag

SEQ ID NO: 283517 - RNA, 32 nt, Homo Sapiens
uacuccggguggcggcgaggacgagucugugc

SEQ ID NO: 283518 - RNA, 32 nt, Homo Sapiens
ggugcgcgugcagcggggugggugcccugguc

SEQ ID NO: 283519 - RNA, 32 nt, Homo Sapiens
aaggccagcuggagcgucggcgcugcggggcc

SEQ ID NO: 283520 - RNA, 32 nt, Homo Sapiens
cggccggucgacuccgccccagccucagaggg

SEQ ID NO: 283521 - RNA, 32 nt, Homo Sapiens
ccugaccucaggugaucugcccgccucggucu

SEQ ID NO: 283522 - RNA, 32 nt, Homo Sapiens
ccagugcucccuccucuacucugaccuggggc

SEQ ID NO: 283523 - RNA, 29 nt, Homo Sapiens
aaaauuauauguauaaaaccaaagugcug

SEQ ID NO: 283524 - RNA, 32 nt, Homo Sapiens
gaaggcccugcggcugcagaaggagcagcugc

SEQ ID NO: 283525 - RNA, 32 nt, Homo Sapiens
cacuuggugagggcagcagcucgccacagcug

SEQ ID NO: 283526 - RNA, 32 nt, Homo Sapiens
agugggagcugggacaugugacaggcuguggu

SEQ ID NO: 283527 - RNA, 32 nt, Homo Sapiens
uuacucauccuccaggaacugcaggucaaguu

SEQ ID NO: 283528 - RNA, 32 nt, Homo Sapiens
uaaccaaaaaauauuucuuguaugucccauaa

SEQ ID NO: 283529 - RNA, 32 nt, Homo Sapiens
uuguaauggaagcaaaauacaugaaggaaaaa

SEQ ID NO: 283530 - RNA, 32 nt, Homo Sapiens
gaaggcagagcaaccaaucaagggcaggguga

SEQ ID NO: 283531 - RNA, 30 nt, Homo Sapiens
ccuugucugagcccagcagaagcagcacaa

SEQ ID NO: 283532 - RNA, 32 nt, Homo Sapiens
gaguucaugaaggcagaaaugccuggggccca

SEQ ID NO: 283533 - RNA, 32 nt, Homo Sapiens
auucugugaaaauaaauuuuuaaauaaaaugu

SEQ ID NO: 283534 - RNA, 32 nt, Homo Sapiens
ggcagggcgggcccgucgccuuuggcagcucc

SEQ ID NO: 283535 - RNA, 32 nt, Homo Sapiens
aauucagagauugagggcacuugcuugaaauc

SEQ ID NO: 283536 - RNA, 32 nt, Homo Sapiens
uauuuggcucuuaucccugcacauguagaggc

SEQ ID NO: 283537 - RNA, 32 nt, Homo Sapiens
gcagcaucggcggcggcugcccggggcccaag

SEQ ID NO: 283538 - RNA, 32 nt, Homo Sapiens
cuguggccuggccuucggcacagaggcccucc

SEQ ID NO: 283539 - RNA, 32 nt, Homo Sapiens
guuaggcuauggaaugaacaaacaggaaggaa

SEQ ID NO: 283540 - RNA, 32 nt, Homo Sapiens
uccgggguaguuggcagaaauacagucuucca

SEQ ID NO: 283541 - RNA, 32 nt, Homo Sapiens
gacccucauacggcugacgugccuuggcugau

SEQ ID NO: 283542 - RNA, 32 nt, Homo Sapiens
cuggccguccaagguccgccgccccaccaugc

SEQ ID NO: 283543 - RNA, 32 nt, Homo Sapiens
acagaugccugccuuaaaauggaggcacaaag

SEQ ID NO: 283544 - RNA, 32 nt, Homo Sapiens
acuuauggguaauaaaggcuagucagaacccu

SEQ ID NO: 283545 - RNA, 32 nt, Homo Sapiens
gcaccacggggaccggauucgguacguuccua

SEQ ID NO: 283546 - RNA, 32 nt, Homo Sapiens
ggagacagauguguucugauaauuaaaucagg

SEQ ID NO: 283547 - RNA, 32 nt, Homo Sapiens
cccuucggcuggcgcccucccaugcucucggc

SEQ ID NO: 283548 - RNA, 32 nt, Homo Sapiens
gguggagccaagguucccucucuguuccuguu

SEQ ID NO: 283549 - RNA, 32 nt, Homo Sapiens
ccggccccuaaaacauucauuaagucuggggu

SEQ ID NO: 283550 - RNA, 32 nt, Homo Sapiens
ggguguuuuuuaaguuuuuucuuuuauaucau

SEQ ID NO: 283551 - RNA, 32 nt, Homo Sapiens
cagggccgcagugccccuccccccgacccagc

SEQ ID NO: 283552 - RNA, 32 nt, Homo Sapiens
aaaagacagagauaagaaaaacaaggacuucc

SEQ ID NO: 283553 - RNA, 32 nt, Homo Sapiens
ccuggaguuccucccccugccugaccuagaag

SEQ ID NO: 283554 - RNA, 32 nt, Homo Sapiens
ccauuaggggccggugcggcggcggcgcggag

SEQ ID NO: 283555 - RNA, 32 nt, Homo Sapiens
auuauguaaucaauuuuaauaauagcaagauu

SEQ ID NO: 283556 - RNA, 32 nt, Homo Sapiens
ggcaggcggauuaauuggaauucuucaaaaug

SEQ ID NO: 283557 - RNA, 32 nt, Homo Sapiens
guucagaacacuuuuuaugacaaaaauugggu

SEQ ID NO: 283558 - RNA, 32 nt, Homo Sapiens
gaagacccuuggaagaggaaaauuggauuccc

SEQ ID NO: 283559 - RNA, 32 nt, Homo Sapiens
agaaaucaguuauaugauacuaccuuuguaug

SEQ ID NO: 283560 - RNA, 32 nt, Homo Sapiens
acacuacuguaaauugugaauagccaauacau

SEQ ID NO: 283561 - RNA, 32 nt, Homo Sapiens
gcaacacgagacccuccagcuuugggagccac

SEQ ID NO: 283562 - RNA, 32 nt, Homo Sapiens
guccacccuuuggagaccaggccucagcucuu

SEQ ID NO: 283563 - RNA, 32 nt, Homo Sapiens
gaggggaagaauaugcuaauuugacauuugag

SEQ ID NO: 283564 - RNA, 32 nt, Homo Sapiens
ggacuccacuggacagacccaggucuuccaga

SEQ ID NO: 283565 - RNA, 32 nt, Homo Sapiens
uugcauugguauauacgugccauggugguuug

SEQ ID NO: 283566 - RNA, 32 nt, Homo Sapiens
acugaccccacuuuauuggccaugaguuaagg

SEQ ID NO: 283567 - RNA, 32 nt, Homo Sapiens
uuacaggcugucuaccuggucuccagaaugga

SEQ ID NO: 283568 - RNA, 32 nt, Homo Sapiens
uggaaucuccuccauuauuacccaggcuuugc

SEQ ID NO: 283569 - RNA, 32 nt, Homo Sapiens
cuuuugccgcguggucucuggugucucugaca

SEQ ID NO: 283570 - RNA, 32 nt, Homo Sapiens
ccccaugucccccgccagcauucuggauguca

SEQ ID NO: 283571 - RNA, 32 nt, Homo Sapiens
agaaaacaugaaaaaauaauaugaguggaggc

SEQ ID NO: 283572 - RNA, 32 nt, Homo Sapiens
ucucuccucccccucccuccccgcccgcacgg

SEQ ID NO: 283573 - RNA, 32 nt, Homo Sapiens
uuauacucuaaaaguuuguaugucaguuagcu

SEQ ID NO: 283574 - RNA, 32 nt, Homo Sapiens
aggcugcucucuuccaccuggcccagacccug

SEQ ID NO: 283575 - RNA, 32 nt, Homo Sapiens
acccucacuuugcaugaggagcugaaacugac

SEQ ID NO: 283576 - RNA, 32 nt, Homo Sapiens
ccaugaguccccuguuuguuucugaaagggac

SEQ ID NO: 283577 - RNA, 32 nt, Homo Sapiens
uggcuggaaugggggccaggcugagccgaucu

SEQ ID NO: 283578 - RNA, 32 nt, Homo Sapiens
ggcaggggccgcggccgaaagaugccgguccg

SEQ ID NO: 283579 - RNA, 30 nt, Homo Sapiens
gugcguggugacguuucgccggcgcgggcg

SEQ ID NO: 283580 - RNA, 32 nt, Homo Sapiens
uuacaguaaaccgaaauugugccacuaguacu

SEQ ID NO: 283581 - RNA, 32 nt, Homo Sapiens
aagacuucaggauagaauucuccaucaaauau

SEQ ID NO: 283582 - RNA, 32 nt, Homo Sapiens
ggcucacuggguuuucuuuucuuuucuguuaa

SEQ ID NO: 283583 - RNA, 32 nt, Homo Sapiens
auaugaccaaaauauuuaaaaugcacaaugcu

SEQ ID NO: 283584 - RNA, 32 nt, Homo Sapiens
uaaaaguuucccuuuucuuuuuugccaauaaa

SEQ ID NO: 283585 - RNA, 32 nt, Homo Sapiens
uucugccaucuugaaacccccauucuguuucc

SEQ ID NO: 283586 - RNA, 32 nt, Homo Sapiens
agagugguguugcaucacuggugcgcggcaua

SEQ ID NO: 283587 - RNA, 32 nt, Homo Sapiens
cgggcggccgagugggggcgucauggaggaug

SEQ ID NO: 283588 - RNA, 32 nt, Homo Sapiens
gggaaaacaaaauaaaauuagggggcaaaggg

SEQ ID NO: 283589 - RNA, 32 nt, Homo Sapiens
gcaugcccaucagucuggucuuuuuccucugc

SEQ ID NO: 283590 - RNA, 32 nt, Homo Sapiens
ccagaggauuaccuggcugaaccauuggcucu

SEQ ID NO: 283591 - RNA, 32 nt, Homo Sapiens
ggcgaccgugaugcugcagaaccggcgggagc

SEQ ID NO: 283592 - RNA, 32 nt, Homo Sapiens
uuuuucuaugggauguucuggcagcuguguca

SEQ ID NO: 283593 - RNA, 32 nt, Homo Sapiens
aauacguuugaaaagaccuaugaaaaaacacg

SEQ ID NO: 283594 - RNA, 32 nt, Homo Sapiens
aggugaugccagcaguuccugcuccucuguca

SEQ ID NO: 283595 - RNA, 32 nt, Homo Sapiens
uuggccaccucgcgccagcccaaaggcgcagc

SEQ ID NO: 283596 - RNA, 32 nt, Homo Sapiens
ucugccacccucggcccucccugucacugcag

SEQ ID NO: 283597 - RNA, 32 nt, Homo Sapiens
guuucauacagcacuuagaugaauuauugauc

SEQ ID NO: 283598 - RNA, 32 nt, Homo Sapiens
aaccucuguauauugagaccuuggcauaauug

SEQ ID NO: 283599 - RNA, 32 nt, Homo Sapiens
cccgacacccccgcccgccuccccuccuccuc

SEQ ID NO: 283600 - RNA, 32 nt, Homo Sapiens
uuucaaaaauuuggauugcaaucacagcaaac

SEQ ID NO: 283601 - RNA, 32 nt, Homo Sapiens
guuuccuuauugucuuuuuucuuuaguguuuc

SEQ ID NO: 283602 - RNA, 32 nt, Homo Sapiens
gaucacacuuuauaauaagaucagaggcaaag

SEQ ID NO: 283603 - RNA, 32 nt, Homo Sapiens
ucucucucgcucucuuuuuuuguuuguuuguu

SEQ ID NO: 283604 - RNA, 32 nt, Homo Sapiens
gagcucuggaggcugggaaguccauaguggag

SEQ ID NO: 283605 - RNA, 32 nt, Homo Sapiens
uugaacaguuuaaugauuagucauuuuaauuu

SEQ ID NO: 283606 - RNA, 32 nt, Homo Sapiens
ccuggaccuggagagaaugcuuccucaaggaa

SEQ ID NO: 283607 - RNA, 32 nt, Homo Sapiens
uccacagcaccucguggcccguacucuugugu

SEQ ID NO: 283608 - RNA, 32 nt, Homo Sapiens
uauugacacaggauugcaaacacacaaacagu

SEQ ID NO: 283609 - RNA, 32 nt, Homo Sapiens
ggagagaaggauggggaagcauugcaaggaaa

SEQ ID NO: 283610 - RNA, 32 nt, Homo Sapiens
ccaaggauggucuggaggacaaacaaaggagg

SEQ ID NO: 283611 - RNA, 32 nt, Homo Sapiens
aaaggcagagaaacuuuuuccuacacagauuc

SEQ ID NO: 283612 - RNA, 32 nt, Homo Sapiens
gagugcagugcugcaaucuuggcucacugcaa

SEQ ID NO: 283613 - RNA, 32 nt, Homo Sapiens
uauuugauuuauaaguuuuuuuuuuuuuuugg

SEQ ID NO: 283614 - RNA, 32 nt, Homo Sapiens
ucagaagcagaaaaacggaggauuaaaaccac

SEQ ID NO: 283615 - RNA, 32 nt, Homo Sapiens
ggcgccuccccgcuccccccacucggaggccg

SEQ ID NO: 283616 - RNA, 32 nt, Homo Sapiens
ccggucaggcaaacgcacacaucaaguucuug

SEQ ID NO: 283617 - RNA, 32 nt, Homo Sapiens
cccgucucauuuccucccaaguuccuucacug

SEQ ID NO: 283618 - RNA, 32 nt, Homo Sapiens
uucuuuuuuuuuucuuuuuuuuuuuucaauuu

SEQ ID NO: 283619 - RNA, 32 nt, Homo Sapiens
auaauuaauaauuuauauuuucauuauuauaa

SEQ ID NO: 283620 - RNA, 32 nt, Homo Sapiens
ggaugcucagcaaugggggcgccugcagcucu

SEQ ID NO: 283621 - RNA, 32 nt, Homo Sapiens
gagaaauaacugccucuugaaacuugcagggc

SEQ ID NO: 283622 - RNA, 32 nt, Homo Sapiens
aaguggguuuugcgcaguggcuuagaccuaga

SEQ ID NO: 283623 - RNA, 32 nt, Homo Sapiens
uaaagcuuucagggacagcuaucaccugaggc

SEQ ID NO: 283624 - RNA, 32 nt, Homo Sapiens
auggaucuguuuuccaagagauucugagaaau

SEQ ID NO: 283625 - RNA, 32 nt, Homo Sapiens
aaaucucauuuucuguguggcuguguguuugg

SEQ ID NO: 283626 - RNA, 32 nt, Homo Sapiens
gcuaauuuucuuugaaacuugauagguauaua

SEQ ID NO: 283627 - RNA, 32 nt, Homo Sapiens
ugagaugaaaaacacaugagcaaaagcaagga

SEQ ID NO: 283628 - RNA, 32 nt, Homo Sapiens
ugggcagaaccagagagaugggacaugguaga

SEQ ID NO: 283629 - RNA, 32 nt, Homo Sapiens
ugcagcuccaucucacuucucuacugccuccc

SEQ ID NO: 283630 - RNA, 32 nt, Homo Sapiens
agcacacaccaaucauauaacugucaaaugaa

SEQ ID NO: 283631 - RNA, 32 nt, Homo Sapiens
cccuuggcccgcgcgcccguggucacagugga

SEQ ID NO: 283632 - RNA, 32 nt, Homo Sapiens
cagcucuccacgugcgcgacugcgaggcugga

SEQ ID NO: 283633 - RNA, 32 nt, Homo Sapiens
ugcucagcugagugugggaacaguccagcccu

SEQ ID NO: 283634 - RNA, 32 nt, Homo Sapiens
agaccagcugucugugaccugcgagggagucc

SEQ ID NO: 283635 - RNA, 32 nt, Homo Sapiens
gucucaauaaaccaggggcacaauacacugug

SEQ ID NO: 283636 - RNA, 32 nt, Homo Sapiens
cgugucgccgccucuggcaucgccuccgguug

SEQ ID NO: 283637 - RNA, 32 nt, Homo Sapiens
aaaaaauaagggaucuuccaaaaggaaaaggu

SEQ ID NO: 283638 - RNA, 32 nt, Homo Sapiens
acaaccucagugggcucugcuucugccaggac

SEQ ID NO: 283639 - RNA, 32 nt, Homo Sapiens
gagaaaacugaaaagaauaaaaauaagcagcu

SEQ ID NO: 283640 - RNA, 32 nt, Homo Sapiens
uuuuuuauugcuuuucaugacccauuaagcau

SEQ ID NO: 283641 - RNA, 32 nt, Homo Sapiens
gaagaaaaauuugaaaacguuaaguuuaggga

SEQ ID NO: 283642 - RNA, 28 nt, Homo Sapiens
auacggaggcggccgcggcgcgggcugc

SEQ ID NO: 283643 - RNA, 32 nt, Homo Sapiens
ccugcaguggguguuacgggcggugugcccug

SEQ ID NO: 283644 - RNA, 32 nt, Homo Sapiens
uuggcauuuuuccuugcagucaucaguuaagc

SEQ ID NO: 283645 - RNA, 32 nt, Homo Sapiens
ccagaaaaauuuggcaccaggcaaacgaauaa

SEQ ID NO: 283646 - RNA, 32 nt, Homo Sapiens
gcugugauugcacaacuugaagggccaucauu

SEQ ID NO: 283647 - RNA, 32 nt, Homo Sapiens
cgggcugcucggcgccgccgccgccucgucca

SEQ ID NO: 283648 - RNA, 32 nt, Homo Sapiens
gucaucaccacucugcaucagcugcccuucca

SEQ ID NO: 283649 - RNA, 32 nt, Homo Sapiens
gcuugaauuuugacuuaguaacuuuuuaugua

SEQ ID NO: 283650 - RNA, 32 nt, Homo Sapiens
caagucgcuggacuuuugaaggccuauccaag

SEQ ID NO: 283651 - RNA, 29 nt, Homo Sapiens
ccaguucuguguuucaguuacaguguuug

SEQ ID NO: 283652 - RNA, 32 nt, Homo Sapiens
gcagcuugggucugaguuuugauagaacagua

SEQ ID NO: 283653 - RNA, 32 nt, Homo Sapiens
gaacacagcucuuuaacaugguucagguacac

SEQ ID NO: 283654 - RNA, 32 nt, Homo Sapiens
aguuccucuggugggagggagaacgcacaucu

SEQ ID NO: 283655 - RNA, 32 nt, Homo Sapiens
gagguggugagagcggcugaggaggcugcguc

SEQ ID NO: 283656 - RNA, 32 nt, Homo Sapiens
cuguugagauaaagcuggcuguuaucucaaca

SEQ ID NO: 283657 - RNA, 32 nt, Homo Sapiens
ugaaacaacuguuugcagacauuggacaacug

SEQ ID NO: 283658 - RNA, 32 nt, Homo Sapiens
cgagcggacggggucgagucagugcguucgcg

SEQ ID NO: 283659 - RNA, 32 nt, Homo Sapiens
gcaggaauuuaaaacaugcuaguuucagagcc

SEQ ID NO: 283660 - RNA, 32 nt, Homo Sapiens
uucccucugcaccucuguucaucccuguauuc

SEQ ID NO: 283661 - RNA, 32 nt, Homo Sapiens
augacgagcauacggugugcaagccccucguc

SEQ ID NO: 283662 - RNA, 32 nt, Homo Sapiens
aggugucugcaccucaguuccagugugcuaau

SEQ ID NO: 283663 - RNA, 32 nt, Homo Sapiens
gcaggcuacacccacccugccaugcagcggug

SEQ ID NO: 283664 - RNA, 32 nt, Homo Sapiens
cccaauucgcccuagacuuuggggguggcucu

SEQ ID NO: 283665 - RNA, 32 nt, Homo Sapiens
uuaucuaaaugaaugagccaaaaugacuuuga

SEQ ID NO: 283666 - RNA, 32 nt, Homo Sapiens
cugccucuuggccucacgggaccgucagcaug

SEQ ID NO: 283667 - RNA, 32 nt, Homo Sapiens
caugaaucggcacccuagauuaugguuuucug

SEQ ID NO: 283668 - RNA, 32 nt, Homo Sapiens
guauuccucacucccuuccccaucccaacccc

SEQ ID NO: 283669 - RNA, 32 nt, Homo Sapiens
uuggaugccaauggugauguuaugauuuccua

SEQ ID NO: 283670 - RNA, 32 nt, Homo Sapiens
caugacucuuggagccucuuuuuccuucuuca

SEQ ID NO: 283671 - RNA, 32 nt, Homo Sapiens
accacagagcccucgcacccaccaugguuacc

SEQ ID NO: 283672 - RNA, 32 nt, Homo Sapiens
uagcuugauauuacagaugugcuauuagugca

SEQ ID NO: 283673 - RNA, 32 nt, Homo Sapiens
ccucaguaggcacaacuaccucucagccagcc

SEQ ID NO: 283674 - RNA, 32 nt, Homo Sapiens
ccacaugcugguggugccugaggucugauggc

SEQ ID NO: 283675 - RNA, 32 nt, Homo Sapiens
ucuuaauaucuuagagauuauuucauaucaac

SEQ ID NO: 283676 - RNA, 32 nt, Homo Sapiens
aaauuaacugggcaccaugacacacaccagua

SEQ ID NO: 283677 - RNA, 32 nt, Homo Sapiens
caccugacaaagacuagaugaagcuacaacuu

SEQ ID NO: 283678 - RNA, 32 nt, Homo Sapiens
aauauuagcagguacagagccuuuuuucaucc

SEQ ID NO: 283679 - RNA, 32 nt, Homo Sapiens
ucuuccuuucccuaugugcuccuaucaucaag

SEQ ID NO: 283680 - RNA, 32 nt, Homo Sapiens
ucuugacccagcugaacaugucuuccugaguc

SEQ ID NO: 283681 - RNA, 32 nt, Homo Sapiens
ucuucaaaaugaaaauaacgaaugacagugcu

SEQ ID NO: 283682 - RNA, 32 nt, Homo Sapiens
gcaggccuaguccucccacaccugcccccuaa

SEQ ID NO: 283683 - RNA, 32 nt, Homo Sapiens
ggugggcugcgguggcuucgucaagucggacg

SEQ ID NO: 283684 - RNA, 32 nt, Homo Sapiens
auuguuguuuuuaucccuggucuguaacauga

SEQ ID NO: 283685 - RNA, 32 nt, Homo Sapiens
cccggaccucggcgagcccaccaccguucccu

SEQ ID NO: 283686 - RNA, 32 nt, Homo Sapiens
auaguauugaaugggguauuuacuguugauua

SEQ ID NO: 283687 - RNA, 32 nt, Homo Sapiens
gcaaauaaaaauuaagaagcguucaaauuuau

SEQ ID NO: 283688 - RNA, 32 nt, Homo Sapiens
gagaguccaugccgaguuuuugaaauaaaugu

SEQ ID NO: 283689 - RNA, 32 nt, Homo Sapiens
gggaaguugauagugguguuggguuuuuggua

SEQ ID NO: 283690 - RNA, 32 nt, Homo Sapiens
uuucuauagauauuaaauaaacuaaaaguauc

SEQ ID NO: 283691 - RNA, 32 nt, Homo Sapiens
ucgggguacugagaaaacugagguggccggag

SEQ ID NO: 283692 - RNA, 32 nt, Homo Sapiens
uuccagcuagaguugcugggaauccaugaauc

SEQ ID NO: 283693 - RNA, 32 nt, Homo Sapiens
cagaaguacacauuuacaauagauagaugugc

SEQ ID NO: 283694 - RNA, 32 nt, Homo Sapiens
gaggcuccccacugagggcccuggacagggcu

SEQ ID NO: 283695 - RNA, 32 nt, Homo Sapiens
cagauuccaucuuuuccaacuccaaggugcca

SEQ ID NO: 283696 - RNA, 32 nt, Homo Sapiens
cucaacgcuucucaaccuggcacuacugacuu

SEQ ID NO: 283697 - RNA, 32 nt, Homo Sapiens
cccaggccuuccuucacccgacuuccaaacuc

SEQ ID NO: 283698 - RNA, 32 nt, Homo Sapiens
uuaaauuuuuauuguuuuuaguaguuucccaa

SEQ ID NO: 283699 - RNA, 32 nt, Homo Sapiens
uggauuuuugccccuucuuaauuuucucccac

SEQ ID NO: 283700 - RNA, 32 nt, Homo Sapiens
accgagccugggaggccggccggugccagcac

SEQ ID NO: 283701 - RNA, 32 nt, Homo Sapiens
gcugaaggaucgucugcugaauacaagaaaga

SEQ ID NO: 283702 - RNA, 32 nt, Homo Sapiens
uuaacucuggucccgggcagccaagacaaagc

SEQ ID NO: 283703 - RNA, 32 nt, Homo Sapiens
accaucauuuacuuuucuggcuuacuuuugau

SEQ ID NO: 283704 - RNA, 32 nt, Homo Sapiens
ggguuuccacacucaggaggucagaggacugg

SEQ ID NO: 283705 - RNA, 32 nt, Homo Sapiens
ucuuuccucuggcugaucccagcccuaaagga

SEQ ID NO: 283706 - RNA, 32 nt, Homo Sapiens
aauagcagucagggaacuggguugccuccagc

SEQ ID NO: 283707 - RNA, 31 nt, Homo Sapiens
uuaccugagcgcagccaaucagcaccuagag

SEQ ID NO: 283708 - RNA, 32 nt, Homo Sapiens
aaggggaagaucugagagcgugcuguuugugg

SEQ ID NO: 283709 - RNA, 32 nt, Homo Sapiens
acuugagacugaguaauuuauaaagaagaggu

SEQ ID NO: 283710 - RNA, 32 nt, Homo Sapiens
ggcggcggcggcagcagcgcggcucggucucu

SEQ ID NO: 283711 - RNA, 32 nt, Homo Sapiens
ucauucagaaaaggaggaaaggguaguuuaau

SEQ ID NO: 283712 - RNA, 32 nt, Homo Sapiens
ccuagcuuuuuggagaauagccaugauuaacu

SEQ ID NO: 283713 - RNA, 32 nt, Homo Sapiens
ucaucaugaugaugauaauuuauuaacuuuuu

SEQ ID NO: 283714 - RNA, 32 nt, Homo Sapiens
guuagcuauauacuaugaaguacucuuaguuu

SEQ ID NO: 283715 - RNA, 32 nt, Homo Sapiens
cagggacggccacuuccugguccccgacgcaa

SEQ ID NO: 283716 - RNA, 32 nt, Homo Sapiens
aggugcccucugcugucuuuuguuuaauagag

SEQ ID NO: 283717 - RNA, 32 nt, Homo Sapiens
guggggagcuauaaaaaugacaauuaaaagag

SEQ ID NO: 283718 - RNA, 32 nt, Homo Sapiens
guuuuguuuuguuuuucucuuucacucagcca

SEQ ID NO: 283719 - RNA, 32 nt, Homo Sapiens
ucuucccgcaugcgcaguacaccgccccccuc

SEQ ID NO: 283720 - RNA, 32 nt, Homo Sapiens
aaagcccggacccuguagcauggcauguucca

SEQ ID NO: 283721 - RNA, 32 nt, Homo Sapiens
agacacuuugaaaauggauuugaauguucuca

SEQ ID NO: 283722 - RNA, 32 nt, Homo Sapiens
aagaaagggaaaagaaucauggauuugauuuu

SEQ ID NO: 283723 - RNA, 30 nt, Homo Sapiens
agaagcuacguugccaccugucccccuucc

SEQ ID NO: 283724 - RNA, 32 nt, Homo Sapiens
aagaagacagauuaguacuuuucaugcugaca

SEQ ID NO: 283725 - RNA, 32 nt, Homo Sapiens
ccuggagaaaaucaugaaaugccugaguucau

SEQ ID NO: 283726 - RNA, 32 nt, Homo Sapiens
gcuggggauuuguggagggaagaccaccaccc

SEQ ID NO: 283727 - RNA, 32 nt, Homo Sapiens
ucgggucucagguggcugcgugucugcgccau

SEQ ID NO: 283728 - RNA, 32 nt, Homo Sapiens
guaauuuuucuuuuuaaaauuuaacauuaugc

SEQ ID NO: 283729 - RNA, 32 nt, Homo Sapiens
cuuuucuuuccacaccccugugcccgucgcau

SEQ ID NO: 283730 - RNA, 32 nt, Homo Sapiens
cagacgaagcuacucuggcaucugcacauuuc

SEQ ID NO: 283731 - RNA, 32 nt, Homo Sapiens
uguagcggcguuguugccacuccgccaccaug

SEQ ID NO: 283732 - RNA, 32 nt, Homo Sapiens
ugguauaugauggagaaugaaaaacuagaguc

SEQ ID NO: 283733 - RNA, 32 nt, Homo Sapiens
uuacaacauuuucuuucgccaucgauguuauc

SEQ ID NO: 283734 - RNA, 32 nt, Homo Sapiens
ugcaugggacagagacuuugcaauccgaaaga

SEQ ID NO: 283735 - RNA, 32 nt, Homo Sapiens
aaggaaugaugaugauuuaaaaaguaguucug

SEQ ID NO: 283736 - RNA, 32 nt, Homo Sapiens
cuccggggccgcuggcacugcggccgcuccgc

SEQ ID NO: 283737 - RNA, 30 nt, Homo Sapiens
ggaguccgaggcggcggcgaggggcgaacg

SEQ ID NO: 283738 - RNA, 32 nt, Homo Sapiens
cagcccuggccaagcccuccccaucccaugua

SEQ ID NO: 283739 - RNA, 32 nt, Homo Sapiens
acuuggacaagccccgucgcucucccacacug

SEQ ID NO: 283740 - RNA, 32 nt, Homo Sapiens
cuaacauuaaaucuagucucuauccuguuaau

SEQ ID NO: 283741 - RNA, 32 nt, Homo Sapiens
auuuucugaacuaaaaaccucuauucuaaacu

SEQ ID NO: 283742 - RNA, 32 nt, Homo Sapiens
uaaagaauugagaauuugacuaucuugggggu

SEQ ID NO: 283743 - RNA, 32 nt, Homo Sapiens
aaagccaggccgcuccuccugccuguuguggc

SEQ ID NO: 283744 - RNA, 32 nt, Homo Sapiens
gcagagagccggcuccugggccugcuggggcc

SEQ ID NO: 283745 - RNA, 32 nt, Homo Sapiens
cauaaucaaggcacuguaaaucuuauaauuuu

SEQ ID NO: 283746 - RNA, 32 nt, Homo Sapiens
gcagguggagagcggacgcgggggcgagggug

SEQ ID NO: 283747 - RNA, 32 nt, Homo Sapiens
gcaaaaaucugggaaacucaagcaaaggaauu

SEQ ID NO: 283748 - RNA, 32 nt, Homo Sapiens
agucuuaaauauucugauacaauccagcuguc

SEQ ID NO: 283749 - RNA, 32 nt, Homo Sapiens
uccgucacaucccaccccauccuccagggcuc

SEQ ID NO: 283750 - RNA, 32 nt, Homo Sapiens
auuucaugaaguacauauauauuguucccaua

SEQ ID NO: 283751 - RNA, 32 nt, Homo Sapiens
ugcuaaaucacaaaugaugcuauguaugggua

SEQ ID NO: 283752 - RNA, 32 nt, Homo Sapiens
gccgucccucucauccuccccauuccucgucc

SEQ ID NO: 283753 - RNA, 32 nt, Homo Sapiens
auagacuuuucuuuuuaaccuucugcaaaagu

SEQ ID NO: 283754 - RNA, 32 nt, Homo Sapiens
uacagccagaaagugugggcugaagaugguug

SEQ ID NO: 283755 - RNA, 32 nt, Homo Sapiens
agaauagcauauagagaauaaucauguugacu

SEQ ID NO: 283756 - RNA, 32 nt, Homo Sapiens
guccccuugaacauuaugugggagaacaccaa

SEQ ID NO: 283757 - RNA, 32 nt, Homo Sapiens
uuucacuggauggagcugaacuuugggcggcc

SEQ ID NO: 283758 - RNA, 32 nt, Homo Sapiens
gagccagaggggcuugcgagcggcggcugagg

SEQ ID NO: 283759 - RNA, 32 nt, Homo Sapiens
cagccugguucggccuggcggccccaggacgc

SEQ ID NO: 283760 - RNA, 32 nt, Homo Sapiens
cacuuccagaugccugugcuuacagcauugug

SEQ ID NO: 283761 - RNA, 32 nt, Homo Sapiens
aacauucaauuucggacacugaguuauauaug

SEQ ID NO: 283762 - RNA, 32 nt, Homo Sapiens
cacaccuguuuuuuuucuuuuucuuuuucuuu

SEQ ID NO: 283763 - RNA, 27 nt, Homo Sapiens
gaguccauuuacuucagccuuugauuc

SEQ ID NO: 283764 - RNA, 32 nt, Homo Sapiens
ccaaaaaugaaggcuuuaaaaaauauuacaca

SEQ ID NO: 283765 - RNA, 32 nt, Homo Sapiens
uauaaccgccuggccagcgcccgugugcacca

SEQ ID NO: 283766 - RNA, 32 nt, Homo Sapiens
cuccuggugcccagccccucuuguuaccaaag

SEQ ID NO: 283767 - RNA, 32 nt, Homo Sapiens
gccuguaucaucuauuugguauuauuauacua

SEQ ID NO: 283768 - RNA, 32 nt, Homo Sapiens
ugcggcagcgccucagagugguuccggucguc

SEQ ID NO: 283769 - RNA, 32 nt, Homo Sapiens
ggcagaagacuccggaggcauuggcucaguaa

SEQ ID NO: 283770 - RNA, 32 nt, Homo Sapiens
auuuauaaaaauuguauauugaacauuggaaa

SEQ ID NO: 283771 - RNA, 32 nt, Homo Sapiens
acagccuuguuugcugcuuccaucuuccccag

SEQ ID NO: 283772 - RNA, 32 nt, Homo Sapiens
ucccuucuuucaaagcacuuugcuugcauuuu

SEQ ID NO: 283773 - RNA, 32 nt, Homo Sapiens
gacuucagcaaccuggcuuuugaugcccggau

SEQ ID NO: 283774 - RNA, 32 nt, Homo Sapiens
ucuuccugcaaagggaacugaagaccuccaca

SEQ ID NO: 283775 - RNA, 32 nt, Homo Sapiens
aaaccuucccauccugauucucuucuucuacc

SEQ ID NO: 283776 - RNA, 32 nt, Homo Sapiens
acuuguccuguggucaggcccagcugauggaa

SEQ ID NO: 283777 - RNA, 32 nt, Homo Sapiens
acccugguguucaaguuccagaggaacgggau

SEQ ID NO: 283778 - RNA, 32 nt, Homo Sapiens
cuuugugccacuuuucccagggcuugggcauc

SEQ ID NO: 283779 - RNA, 32 nt, Homo Sapiens
guuaaggaaacgauccaugcaagagaggccca

SEQ ID NO: 283780 - RNA, 32 nt, Homo Sapiens
caguauguuugugagagagguuucugggaaga

SEQ ID NO: 283781 - RNA, 32 nt, Homo Sapiens
gguuaugagaggucucaguuaaguguguuuag

SEQ ID NO: 283782 - RNA, 32 nt, Homo Sapiens
cagcuguucuguaggcacuuugagaagaggaa

SEQ ID NO: 283783 - RNA, 32 nt, Homo Sapiens
caccugggaaaggugggcgcgagccuccagca

SEQ ID NO: 283784 - RNA, 32 nt, Homo Sapiens
cuucgaggagcagugcgcagggggcgaggacg

SEQ ID NO: 283785 - RNA, 32 nt, Homo Sapiens
ggcuggggaaggagggcggcgagcgcguccgg

SEQ ID NO: 283786 - RNA, 32 nt, Homo Sapiens
caugggcggaggcgccagaggcugggaagaaa

SEQ ID NO: 283787 - RNA, 32 nt, Homo Sapiens
caccuguaauccuagcacuuugggaggccaag

SEQ ID NO: 283788 - RNA, 32 nt, Homo Sapiens
caccuauaaucccagcacuuugggaggcugag

SEQ ID NO: 283789 - RNA, 32 nt, Homo Sapiens
caccuguaaucccagcacuuugggaggcuaag

SEQ ID NO: 283790 - RNA, 32 nt, Homo Sapiens
gguuugauguagucuguaaaugguccuuguaa

SEQ ID NO: 283791 - RNA, 32 nt, Homo Sapiens
cgguggucguguccgggcgauggcucuucgcc

SEQ ID NO: 283792 - RNA, 32 nt, Homo Sapiens
gaggagucuauacuaucucuauauacacauuu

SEQ ID NO: 283793 - RNA, 32 nt, Homo Sapiens
uucuucugccucagccucccaaguagcuggga

SEQ ID NO: 283794 - RNA, 32 nt, Homo Sapiens
cucagaggagcuaagguggaaauacugccuga

SEQ ID NO: 283795 - RNA, 32 nt, Homo Sapiens
guuuugguuuucacuucuuuuaaacuggacaa

SEQ ID NO: 283796 - RNA, 32 nt, Homo Sapiens
gaaagacuaaaaauucucauacaccuguucuu

SEQ ID NO: 283797 - RNA, 32 nt, Homo Sapiens
aauaagugugucauccucaaaauauccguggg

SEQ ID NO: 283798 - RNA, 32 nt, Homo Sapiens
aucccuauucuguguuuuaucuagucacauaa

SEQ ID NO: 283799 - RNA, 32 nt, Homo Sapiens
ccaaaccagcagaucuuacugaagaugauguu

SEQ ID NO: 283800 - RNA, 32 nt, Homo Sapiens
aaugcugcuuggauuuucaucuuauuuauaaa

SEQ ID NO: 283801 - RNA, 32 nt, Homo Sapiens
gaacuagaaaggaaacaagagcauaggaguuu

SEQ ID NO: 283802 - RNA, 32 nt, Homo Sapiens
ucggcggcccucgcgcgcuggccaucaggugc

SEQ ID NO: 283803 - RNA, 32 nt, Homo Sapiens
agagaccgccgggaaggcuagagcuuggaauu

SEQ ID NO: 283804 - RNA, 32 nt, Homo Sapiens
gcacauagauaggcaggauauuacauagguaa

SEQ ID NO: 283805 - RNA, 32 nt, Homo Sapiens
cuuagcagagaccccugggguuuagcugacuc

SEQ ID NO: 283806 - RNA, 32 nt, Homo Sapiens
aaagaccagaaaaaagugagccucuucaucug

SEQ ID NO: 283807 - RNA, 32 nt, Homo Sapiens
ugcucuccaucccauguaccacaacuaucuug

SEQ ID NO: 283808 - RNA, 32 nt, Homo Sapiens
gagcccgugccccucccuccccgugcuucaug

SEQ ID NO: 283809 - RNA, 32 nt, Homo Sapiens
cggaggugguggcugcacagaggacgccugac

SEQ ID NO: 283810 - RNA, 32 nt, Homo Sapiens
aaaaccuaucaugucagccagcgggcccacac

SEQ ID NO: 283811 - RNA, 32 nt, Homo Sapiens
gcugugauguaaacagaaaucacgaauucgcu

SEQ ID NO: 283812 - RNA, 32 nt, Homo Sapiens
ucuuccugaccccuccuucucccucuccuggg

SEQ ID NO: 283813 - RNA, 32 nt, Homo Sapiens
uugagauccugaacaugugcugauuuuuauug

SEQ ID NO: 283814 - RNA, 32 nt, Homo Sapiens
accuucacaaauuuauaugaucuagguauguu

SEQ ID NO: 283815 - RNA, 31 nt, Homo Sapiens
uuaaagugcaucacagccagagccuguugug

SEQ ID NO: 283816 - RNA, 32 nt, Homo Sapiens
uauuacaaaacaaacaaacaaacaaaaaaccc

SEQ ID NO: 283817 - RNA, 32 nt, Homo Sapiens
uucucuuuuuuuucuucauuggcuccuucuua

SEQ ID NO: 283818 - RNA, 32 nt, Homo Sapiens
gauucauauaaaauguuuaaaagagugccugg

SEQ ID NO: 283819 - RNA, 32 nt, Homo Sapiens
ucggacugcgggugcggcccugcccgccacca

SEQ ID NO: 283820 - RNA, 32 nt, Homo Sapiens
uaaaccaacugggauggaauucagaauaccua

SEQ ID NO: 283821 - RNA, 32 nt, Homo Sapiens
cugaaugucugccuauauauucucugcucuuu

SEQ ID NO: 283822 - RNA, 32 nt, Homo Sapiens
cccggggccccggccagagguacaucaauuac

SEQ ID NO: 283823 - RNA, 32 nt, Homo Sapiens
aggagcucauauccuuauuuuccaugacagau

SEQ ID NO: 283824 - RNA, 32 nt, Homo Sapiens
uugacugggcuggcguuaacugugcggaggca

SEQ ID NO: 283825 - RNA, 32 nt, Homo Sapiens
cgacuccuugcagcugcugucagcauggccca

SEQ ID NO: 283826 - RNA, 32 nt, Homo Sapiens
acagguggguguugcucagcucccugaggcau

SEQ ID NO: 283827 - RNA, 32 nt, Homo Sapiens
acccaaacccugcaucgucucucacucgccug

SEQ ID NO: 283828 - RNA, 30 nt, Homo Sapiens
cuaccuucuccaggcgcggguccugcuccu

SEQ ID NO: 283829 - RNA, 32 nt, Homo Sapiens
cugccuggccuugagccgugaccuccaggaag

SEQ ID NO: 283830 - RNA, 32 nt, Homo Sapiens
ugugaugcugguggagaugccagaugccgccu

SEQ ID NO: 283831 - RNA, 32 nt, Homo Sapiens
aacccguuuuaaaaauauuuucuugagaaaga

SEQ ID NO: 283832 - RNA, 32 nt, Homo Sapiens
cuguugcacccagugaucucuccggccuccug

SEQ ID NO: 283833 - RNA, 32 nt, Homo Sapiens
uggaggcugaggaggagaggacgaggcuaugu

SEQ ID NO: 283834 - RNA, 32 nt, Homo Sapiens
uuccaucuuacuugcccuucuauacuuucuca

SEQ ID NO: 283835 - RNA, 32 nt, Homo Sapiens
ugcuguuuauuaaugcugaagugugguuuucc

SEQ ID NO: 283836 - RNA, 32 nt, Homo Sapiens
uuugaagcccccacaaauaccuaaaugaggaa

SEQ ID NO: 283837 - RNA, 32 nt, Homo Sapiens
ugaacguacagguuuaaaauggcugugauaag

SEQ ID NO: 283838 - RNA, 32 nt, Homo Sapiens
uaaaacuaacauuagggcuuguccacgggcau

SEQ ID NO: 283839 - RNA, 32 nt, Homo Sapiens
gaaauugguuugcuuugugugcuaggagguga

SEQ ID NO: 283840 - RNA, 32 nt, Homo Sapiens
uaguucaaacaaaauuccccagcaaauguuag

SEQ ID NO: 283841 - RNA, 32 nt, Homo Sapiens
uguugcccaggcuggaaugcagugguacgcuc

SEQ ID NO: 283842 - RNA, 31 nt, Homo Sapiens
cacauccagauggucccucuaacugggcuuu

SEQ ID NO: 283843 - RNA, 32 nt, Homo Sapiens
cccuuucugggguggggccagccaaucagcga

SEQ ID NO: 283844 - RNA, 32 nt, Homo Sapiens
cagagcugccagcagggagcucacagaagggg

SEQ ID NO: 283845 - RNA, 32 nt, Homo Sapiens
agcgcgcggagcagcuggggccggggcgcgga

SEQ ID NO: 283846 - RNA, 32 nt, Homo Sapiens
agccccugugcgccuccggcccggcccagcga

SEQ ID NO: 283847 - RNA, 32 nt, Homo Sapiens
auauucaaaaauauugcuauaaucuucacuug

SEQ ID NO: 283848 - RNA, 32 nt, Homo Sapiens
aucagcaccucuggggaccccuggccaaugcu

SEQ ID NO: 283849 - RNA, 32 nt, Homo Sapiens
cugguugagaauaugaaaaacuaguugaguug

SEQ ID NO: 283850 - RNA, 32 nt, Homo Sapiens
gccacagccccgccccaccucccccaggccaa

SEQ ID NO: 283851 - RNA, 32 nt, Homo Sapiens
cugagugcuguuaugacugccggcgucucucc

SEQ ID NO: 283852 - RNA, 32 nt, Homo Sapiens
aaaagcaaugaaaacggauggacaacauuuua

SEQ ID NO: 283853 - RNA, 32 nt, Homo Sapiens
ugaaaaaauauuagauauggcuuguggacuuc

SEQ ID NO: 283854 - RNA, 32 nt, Homo Sapiens
cgcgcagacuuucuccccaccccuccccgacc

SEQ ID NO: 283855 - RNA, 32 nt, Homo Sapiens
gaagugaugauuaucauaugauaccucaguga

SEQ ID NO: 283856 - RNA, 29 nt, Homo Sapiens
ccaaaagugaagauuuugugaggaauaag

SEQ ID NO: 283857 - RNA, 32 nt, Homo Sapiens
cucuauguguauauuucuaauggaucuauaag

SEQ ID NO: 283858 - RNA, 32 nt, Homo Sapiens
aacugauuuuaacguaacuaacuuauaaauaa

SEQ ID NO: 283859 - RNA, 32 nt, Homo Sapiens
ugcagcagaaaagcugugaaggaaggaaauuu

SEQ ID NO: 283860 - RNA, 32 nt, Homo Sapiens
gcacaugccacauggcuucucucucugcaugg

SEQ ID NO: 283861 - RNA, 32 nt, Homo Sapiens
uuucuuuuuaucauuguaucaaacuauaugga

SEQ ID NO: 283862 - RNA, 32 nt, Homo Sapiens
cagaaaagauacuguaaaaauauaguguaaaa

SEQ ID NO: 283863 - RNA, 32 nt, Homo Sapiens
ggcgcucacgagaggcccgggaggcggggcuu

SEQ ID NO: 283864 - RNA, 32 nt, Homo Sapiens
gaagggccuuggcgagcuuguggauguugcac

SEQ ID NO: 283865 - RNA, 32 nt, Homo Sapiens
guggcgacggagagcugacaguagcccagggc

SEQ ID NO: 283866 - RNA, 32 nt, Homo Sapiens
uugauauuuuguaaaaugcacuuuuugugugu

SEQ ID NO: 283867 - RNA, 32 nt, Homo Sapiens
gccucaggggagagugaaggccugcaggaggg

SEQ ID NO: 283868 - RNA, 32 nt, Homo Sapiens
aguacauguauauauuuacgggguaugugaga

SEQ ID NO: 283869 - RNA, 32 nt, Homo Sapiens
cucuuuucagagccacccacguuuucaaauaa

SEQ ID NO: 283870 - RNA, 32 nt, Homo Sapiens
uccauugaacuaaaauaauuuuauuaugcaac

SEQ ID NO: 283871 - RNA, 32 nt, Homo Sapiens
gaaacacaggccaucagggaaaacgaaaugcu

SEQ ID NO: 283872 - RNA, 32 nt, Homo Sapiens
gauugucauaguuguuuuccugcuuuacaaaa

SEQ ID NO: 283873 - RNA, 32 nt, Homo Sapiens
cugcccugggccggcaggauccgggggcuaca

SEQ ID NO: 283874 - RNA, 32 nt, Homo Sapiens
ugucuguuaucgucugucucucuugacaucac

SEQ ID NO: 283875 - RNA, 32 nt, Homo Sapiens
aucgcaauaaauuuauagguaaaucuagagag

SEQ ID NO: 283876 - RNA, 32 nt, Homo Sapiens
aagugugagggcugaaagaaugccccagucuc

SEQ ID NO: 283877 - RNA, 32 nt, Homo Sapiens
gaugauugcuggucuuaacuuuagguaacucu

SEQ ID NO: 283878 - RNA, 32 nt, Homo Sapiens
cauggacauuuccuucuaguccuuccaaggag

SEQ ID NO: 283879 - RNA, 32 nt, Homo Sapiens
guaugagaagaaauuagaaaagaaaauuaacu

SEQ ID NO: 283880 - RNA, 32 nt, Homo Sapiens
cagcaaugaagaugucuagagaugaacuagaa

SEQ ID NO: 283881 - RNA, 32 nt, Homo Sapiens
gccccgcgcgccccuguacuccccgcgccgcu

SEQ ID NO: 283882 - RNA, 32 nt, Homo Sapiens
cacaagcacauuuuuaaaauguugcuuugugu

SEQ ID NO: 283883 - RNA, 32 nt, Homo Sapiens
cccccacaacuucuccacggcucccccacaac

SEQ ID NO: 283884 - RNA, 32 nt, Homo Sapiens
cacccgcacugcgcgucauggugcuggccugg

SEQ ID NO: 283885 - RNA, 32 nt, Homo Sapiens
aacaggugcuuaauugcaauaaaauuacuaug

SEQ ID NO: 283886 - RNA, 32 nt, Homo Sapiens
uugaaaauguccucuuuuuuuauauuagagau

SEQ ID NO: 283887 - RNA, 32 nt, Homo Sapiens
augggucuggaacauguguacuguauaucuuu

SEQ ID NO: 283888 - RNA, 32 nt, Homo Sapiens
gcucugauauuguaaacacaauagauguagcu

SEQ ID NO: 283889 - RNA, 32 nt, Homo Sapiens
ucgugguuuauuauuuuucauauccauaccac

SEQ ID NO: 283890 - RNA, 32 nt, Homo Sapiens
ggcggcgucggcgcggggccagagcaccacuc

SEQ ID NO: 283891 - RNA, 32 nt, Homo Sapiens
ggagcuggggcaaccaggacuuucucgggcac

SEQ ID NO: 283892 - RNA, 32 nt, Homo Sapiens
guagauuagcuguuacaccucccuucccuuuu

SEQ ID NO: 283893 - RNA, 32 nt, Homo Sapiens
ccgucuccacccagacccccaccugccccaug

SEQ ID NO: 283894 - RNA, 32 nt, Homo Sapiens
uauagauuuuuggucacuugcuuuuauagacu

SEQ ID NO: 283895 - RNA, 32 nt, Homo Sapiens
uccuggggcaggggcgggggguuggguguggu

SEQ ID NO: 283896 - RNA, 32 nt, Homo Sapiens
ugguucaugaacaacagugucuagaaacccau

SEQ ID NO: 283897 - RNA, 32 nt, Homo Sapiens
gcucauaguauuuuaauauuuuauuaacaugg

SEQ ID NO: 283898 - RNA, 29 nt, Homo Sapiens
uaaauuugccaguuuuauuuucuaaauuc

SEQ ID NO: 283899 - RNA, 32 nt, Homo Sapiens
auaaaguuucaaaagaaaauguuuauuuguuc

SEQ ID NO: 283900 - RNA, 31 nt, Homo Sapiens
gaacugcguaaaucccaggugcuguucagug

SEQ ID NO: 283901 - RNA, 32 nt, Homo Sapiens
gccacggaagcucagcagacucggcagggcaa

SEQ ID NO: 283902 - RNA, 32 nt, Homo Sapiens
ucuggggcuccucauucagugggacaaacugc

SEQ ID NO: 283903 - RNA, 32 nt, Homo Sapiens
agggauguauaaaguacuuguguucugcuggu

SEQ ID NO: 283904 - RNA, 32 nt, Homo Sapiens
gugcacggccugugcugccuucugccugggcc

SEQ ID NO: 283905 - RNA, 32 nt, Homo Sapiens
cugcuuuguaucuauuagaauaguccaaacaa

SEQ ID NO: 283906 - RNA, 32 nt, Homo Sapiens
cuauuaauuuccccauaugcuucaaccacccc

SEQ ID NO: 283907 - RNA, 30 nt, Homo Sapiens
cgaguggcccagugggcggguccgcggugg

SEQ ID NO: 283908 - RNA, 32 nt, Homo Sapiens
auuacuuugggguuugcuuugccauuaauuug

SEQ ID NO: 283909 - RNA, 32 nt, Homo Sapiens
uguuuuuaaugagaaucuuguuuuaaaaugua

SEQ ID NO: 283910 - RNA, 32 nt, Homo Sapiens
ggucaguucucgucucaccacacucccaauau

SEQ ID NO: 283911 - RNA, 32 nt, Homo Sapiens
caaagcagacccagcauacaaacaagagcuga

SEQ ID NO: 283912 - RNA, 32 nt, Homo Sapiens
cuggucuggggggaccacuuugaucggaccca

SEQ ID NO: 283913 - RNA, 32 nt, Homo Sapiens
ggucccgggggcggggcugucggcggaacaaa

SEQ ID NO: 283914 - RNA, 32 nt, Homo Sapiens
cacgcgcccggacggccugggguugcugcccg

SEQ ID NO: 283915 - RNA, 32 nt, Homo Sapiens
guuuggaaaaagacauuuggcaagaaagagaa

SEQ ID NO: 283916 - RNA, 32 nt, Homo Sapiens
ccgccauuccaagucaacacucuucuugagca

SEQ ID NO: 283917 - RNA, 32 nt, Homo Sapiens
uacugaggcagaccugcaacagaaguggcauu

SEQ ID NO: 283918 - RNA, 32 nt, Homo Sapiens
auuuucaauagccacuaaccuugcuugguaca

SEQ ID NO: 283919 - RNA, 32 nt, Homo Sapiens
cauucccagcccagccccgccccguugugagc

SEQ ID NO: 283920 - RNA, 32 nt, Homo Sapiens
uuggcuguugggauuggucaggacucagcuau

SEQ ID NO: 283921 - RNA, 32 nt, Homo Sapiens
ccgugcugugggugcccucgggccccaagagu

SEQ ID NO: 283922 - RNA, 32 nt, Homo Sapiens
uuucuugagaaccucagguguucuauaaacag

SEQ ID NO: 283923 - RNA, 32 nt, Homo Sapiens
ugacauugcucauuuuaacaaauaugaccgag

SEQ ID NO: 283924 - RNA, 32 nt, Homo Sapiens
cucccggacggggcggcuggccaggcaggggg

SEQ ID NO: 283925 - RNA, 32 nt, Homo Sapiens
ucugcccaggacugcaagccugcugguggcag

SEQ ID NO: 283926 - RNA, 32 nt, Homo Sapiens
uugugccguagugaccaggccuuuuuuuggug

SEQ ID NO: 283927 - RNA, 32 nt, Homo Sapiens
gucagugcguggggggcgcagggcccccgaug

SEQ ID NO: 283928 - RNA, 32 nt, Homo Sapiens
gggggcagcggcaaccccggcgccgcggcaag

SEQ ID NO: 283929 - RNA, 32 nt, Homo Sapiens
cuacacuagugggcccagugccugcaccagcu

SEQ ID NO: 283930 - RNA, 32 nt, Homo Sapiens
acacagaacucaacugguccagcccuuuggga

SEQ ID NO: 283931 - RNA, 32 nt, Homo Sapiens
cauauuuuuuagguauaaauucuuaugcuuua

SEQ ID NO: 283932 - RNA, 32 nt, Homo Sapiens
caucauggagcagauucccggcuggucagggu

SEQ ID NO: 283933 - RNA, 32 nt, Homo Sapiens
cguuccgugagccucugaccgcccaaauccau

SEQ ID NO: 283934 - RNA, 32 nt, Homo Sapiens
acauggaagaggccuauguuaucccaacagug

SEQ ID NO: 283935 - RNA, 32 nt, Homo Sapiens
guucuuauuuuacuuuucuguuuuauuuuuag

SEQ ID NO: 283936 - RNA, 27 nt, Homo Sapiens
caagagccuuccuucagccuuucuggu

SEQ ID NO: 283937 - RNA, 32 nt, Homo Sapiens
ggggauucugcacuuuagccagccugggucgg

SEQ ID NO: 283938 - RNA, 32 nt, Homo Sapiens
cgcccgcgcgcccugagcgcagcuggguucca

SEQ ID NO: 283939 - RNA, 32 nt, Homo Sapiens
cuguggguggcgggaccgcugacucuguaaga

SEQ ID NO: 283940 - RNA, 32 nt, Homo Sapiens
uccaucagacugccucccuggcccuccccauu

SEQ ID NO: 283941 - RNA, 32 nt, Homo Sapiens
uccuuccccacuuggaaaauuccuaugcaucu

SEQ ID NO: 283942 - RNA, 32 nt, Homo Sapiens
cgucugaagucugcagaggaagcuucuaucuu

SEQ ID NO: 283943 - RNA, 29 nt, Homo Sapiens
gcggaugugccgcugcccgccggagcacc

SEQ ID NO: 283944 - RNA, 32 nt, Homo Sapiens
cuucuggccacgcagccguccgggccacacuc

SEQ ID NO: 283945 - RNA, 32 nt, Homo Sapiens
augaaaucuaaugggaaauggaucacacgauu

SEQ ID NO: 283946 - RNA, 32 nt, Homo Sapiens
ucagucuccccucccugguauauauguggcag

SEQ ID NO: 283947 - RNA, 32 nt, Homo Sapiens
gaggagcauauuuuuaccaaauuaaagagcua

SEQ ID NO: 283948 - RNA, 32 nt, Homo Sapiens
uacguaauucuauaucugugacuagguuuuua

SEQ ID NO: 283949 - RNA, 32 nt, Homo Sapiens
gcagggugcuggaggaggaaaccggcggagca

SEQ ID NO: 283950 - RNA, 32 nt, Homo Sapiens
cucuuuucugucaaggacuuucugggaauaau

SEQ ID NO: 283951 - RNA, 32 nt, Homo Sapiens
ccuaagcuuccauguagcccucauccagggaa

SEQ ID NO: 283952 - RNA, 32 nt, Homo Sapiens
aacaacaacccaggccagacagagcaucucuu

SEQ ID NO: 283953 - RNA, 32 nt, Homo Sapiens
aaggaaugaagagccagagacuugcugugcag

SEQ ID NO: 283954 - RNA, 32 nt, Homo Sapiens
accugaacuccaaguucucaccauggccugug

SEQ ID NO: 283955 - RNA, 31 nt, Homo Sapiens
cuaacugcaagguugcugggaaguagagucc

SEQ ID NO: 283956 - RNA, 28 nt, Homo Sapiens
gggggcaagcggguuccgaggugcaaag

SEQ ID NO: 283957 - RNA, 32 nt, Homo Sapiens
uggaaugguggcguguccugcuguacccaacu

SEQ ID NO: 283958 - RNA, 32 nt, Homo Sapiens
ucccucaugcuuccugucccccgcuuacacga

SEQ ID NO: 283959 - RNA, 32 nt, Homo Sapiens
cuauuuugcauuuuuucuuuuaccauguuuca

SEQ ID NO: 283960 - RNA, 32 nt, Homo Sapiens
ucggcggcgggggcgagauuggcgggaggggg

SEQ ID NO: 283961 - RNA, 32 nt, Homo Sapiens
caccaaucugcaccccagcuccaagcacaagg

SEQ ID NO: 283962 - RNA, 32 nt, Homo Sapiens
gcagcggcucagaggcagcugcuccaugcaga

SEQ ID NO: 283963 - RNA, 32 nt, Homo Sapiens
gaaucgcuggaacccaggaggcaaagguugca

SEQ ID NO: 283964 - RNA, 32 nt, Homo Sapiens
gcagccugggaccuugcuaaggucuugcuuua

SEQ ID NO: 283965 - RNA, 32 nt, Homo Sapiens
guggggcuccuaccgggcgccacagcugcucc

SEQ ID NO: 283966 - RNA, 32 nt, Homo Sapiens
cccccagccaagcauuggggccgccauccugc

SEQ ID NO: 283967 - RNA, 27 nt, Homo Sapiens
gauccaauuugauucuggugaaaaagg

SEQ ID NO: 283968 - RNA, 32 nt, Homo Sapiens
agcuugaggugggagcggggcugggaggaagg

SEQ ID NO: 283969 - RNA, 32 nt, Homo Sapiens
gucaauuucccauuuuauuuuuuuaaauaaau

SEQ ID NO: 283970 - RNA, 32 nt, Homo Sapiens
augcuuuugggucuuaggagccuagggugucu

SEQ ID NO: 283971 - RNA, 32 nt, Homo Sapiens
ugcgcucacugcccggcgggacccacgccaug

SEQ ID NO: 283972 - RNA, 27 nt, Homo Sapiens
ccaugagggcggccgagcaggcgggcu

SEQ ID NO: 283973 - RNA, 27 nt, Homo Sapiens
ccuaccccaggauucugguguggccuc

SEQ ID NO: 283974 - RNA, 32 nt, Homo Sapiens
gacugggcaagaagaaagaugggaaacugaau

SEQ ID NO: 283975 - RNA, 32 nt, Homo Sapiens
uggagauuuaggugcugcucugcugcucugga

SEQ ID NO: 283976 - RNA, 32 nt, Homo Sapiens
gacaccaggugcgcccucuggggcucagagca

SEQ ID NO: 283977 - RNA, 32 nt, Homo Sapiens
aguaaacagugauucucuuuauaucugauuuu

SEQ ID NO: 283978 - RNA, 32 nt, Homo Sapiens
ggggaggauagggcaggagucuggccaggagc

SEQ ID NO: 283979 - RNA, 32 nt, Homo Sapiens
uacagauguuugccaccaugcccgccucauuu

SEQ ID NO: 283980 - RNA, 32 nt, Homo Sapiens
ucauggggcuugaugguggccgaggaacuagu

SEQ ID NO: 283981 - RNA, 32 nt, Homo Sapiens
cgggggaagguaacgcgccgcgcccggggcug

SEQ ID NO: 283982 - RNA, 32 nt, Homo Sapiens
ggagaaaauugaugaaguuggcugcuuccagu

SEQ ID NO: 283983 - RNA, 31 nt, Homo Sapiens
cccgccauaugcugccugccucggcuuugag

SEQ ID NO: 283984 - RNA, 29 nt, Homo Sapiens
aaaaauaaaauuucauauuuucgcucgua

SEQ ID NO: 283985 - RNA, 32 nt, Homo Sapiens
gucguggagcgccaucaugucuuaccagugac

SEQ ID NO: 283986 - RNA, 32 nt, Homo Sapiens
ccugugcuuccuugcugcccuccagcuuccuu

SEQ ID NO: 283987 - RNA, 32 nt, Homo Sapiens
uaguuaugagucaaacaaaacccaauuuaacu

SEQ ID NO: 283988 - RNA, 32 nt, Homo Sapiens
uucccaccucccuccagacuccuuugacccca

SEQ ID NO: 283989 - RNA, 32 nt, Homo Sapiens
acauacuagguugaaagagaguugaggaaacc

SEQ ID NO: 283990 - RNA, 32 nt, Homo Sapiens
ugccaaucuuaaaauuuuuaguuugcaccuga

SEQ ID NO: 283991 - RNA, 32 nt, Homo Sapiens
aagccacguccagccuggccccgcaggagcca

SEQ ID NO: 283992 - RNA, 32 nt, Homo Sapiens
uuaaauuuaaacauguuuuaccugcagaaauu

SEQ ID NO: 283993 - RNA, 32 nt, Homo Sapiens
gauuuuguuagcuuuuuucagaauuuaucuuu

SEQ ID NO: 283994 - RNA, 32 nt, Homo Sapiens
gauauucuccaaguuguccucucuccugcuga

SEQ ID NO: 283995 - RNA, 32 nt, Homo Sapiens
gggagcccacagccaccauuuccacuaggagg

SEQ ID NO: 283996 - RNA, 29 nt, Homo Sapiens
ucucaauaaaguuugaguuuucucugaag

SEQ ID NO: 283997 - RNA, 32 nt, Homo Sapiens
cgagggagggagggcugccugaucccucuccu

SEQ ID NO: 283998 - RNA, 32 nt, Homo Sapiens
guugauauuguuaaacugguucaaagaaauaa

SEQ ID NO: 283999 - RNA, 32 nt, Homo Sapiens
cuggauguuuuugaauuauuuuauacuuagag

SEQ ID NO: 284000 - RNA, 32 nt, Homo Sapiens
uagcucugucugcggcggcccgccagccuggc

SEQ ID NO: 284001 - RNA, 32 nt, Homo Sapiens
aggggucagagguggcuacagggcaggcagag

SEQ ID NO: 284002 - RNA, 32 nt, Homo Sapiens
ucacuguggcacccaggugugggccuggcuag

SEQ ID NO: 284003 - RNA, 32 nt, Homo Sapiens
gggaggggcuggcggcuuggcuguuggggauc

SEQ ID NO: 284004 - RNA, 32 nt, Homo Sapiens
ggucuaagauaagagauaaaacaucagguggu

SEQ ID NO: 284005 - RNA, 32 nt, Homo Sapiens
ucccugcucccuggcuggcccacugcacccac

SEQ ID NO: 284006 - RNA, 32 nt, Homo Sapiens
ucgccacccccuccugccaacugggaugacug

SEQ ID NO: 284007 - RNA, 32 nt, Homo Sapiens
ccagcuggcuccuggccccaccccucgggccu

SEQ ID NO: 284008 - RNA, 32 nt, Homo Sapiens
aggaguuccuggaagcccugcgguagcuagca

SEQ ID NO: 284009 - RNA, 32 nt, Homo Sapiens
ccucuaucccauucuuuuuacauuuaacaaaa

SEQ ID NO: 284010 - RNA, 32 nt, Homo Sapiens
uaaggaaugcaggaaaaccuucagccagauga

SEQ ID NO: 284011 - RNA, 32 nt, Homo Sapiens
gagcccaggacacagcaguagacuggggccug

SEQ ID NO: 284012 - RNA, 32 nt, Homo Sapiens
uguuuuccuccaagcgggucauaaggcuucag

SEQ ID NO: 284013 - RNA, 32 nt, Homo Sapiens
auguauggcaaccugguuuagcacuggcaucc

SEQ ID NO: 284014 - RNA, 29 nt, Homo Sapiens
agggauggagaggccucugugcucccacc

SEQ ID NO: 284015 - RNA, 32 nt, Homo Sapiens
uuggaggaucaagauguugaccaacuugagga

SEQ ID NO: 284016 - RNA, 32 nt, Homo Sapiens
gauuguggcagccucugugaccaagagcagaa

SEQ ID NO: 284017 - RNA, 32 nt, Homo Sapiens
gcacccacggacguggcuuggugcugaggaua

SEQ ID NO: 284018 - RNA, 32 nt, Homo Sapiens
gaggugugguugcaggugcgggcuguggucug

SEQ ID NO: 284019 - RNA, 32 nt, Homo Sapiens
auuaccacauucaaucauggguaauaaaauau

SEQ ID NO: 284020 - RNA, 32 nt, Homo Sapiens
cuuagcacgcgccccagcgccggagcaggguc

SEQ ID NO: 284021 - RNA, 32 nt, Homo Sapiens
uauucccuuuugaaugagacaguuuuuaaaag

SEQ ID NO: 284022 - RNA, 32 nt, Homo Sapiens
ugacugcguugugugaacaaucugcaauuuuu

SEQ ID NO: 284023 - RNA, 32 nt, Homo Sapiens
caggaaagaagaagaaaagagauuauuauauc

SEQ ID NO: 284024 - RNA, 29 nt, Homo Sapiens
ggcaggaggaucugggcauccugagcccc

SEQ ID NO: 284025 - RNA, 32 nt, Homo Sapiens
guccucccacgcgacccugcaggagcugcugg

SEQ ID NO: 284026 - RNA, 31 nt, Homo Sapiens
gacccccaggccggcagcggaguccaggagc

SEQ ID NO: 284027 - RNA, 32 nt, Homo Sapiens
cggagcccgcaagucccggcccgagguccgag

SEQ ID NO: 284028 - RNA, 32 nt, Homo Sapiens
uuccagccccaccuuccaaccccucagugccc

SEQ ID NO: 284029 - RNA, 32 nt, Homo Sapiens
gccccuccaggaaguaaggugcucucggggcc

SEQ ID NO: 284030 - RNA, 32 nt, Homo Sapiens
caaagcaggcggggcguuggaguucagauguu

SEQ ID NO: 284031 - RNA, 32 nt, Homo Sapiens
ugguaaaaauauacuguaaauuuuugguaauc

SEQ ID NO: 284032 - RNA, 32 nt, Homo Sapiens
caaagcccccauccacaccuggcacuccccuc

SEQ ID NO: 284033 - RNA, 32 nt, Homo Sapiens
ggaucuucccuggaagaccacugcacaccuuc

SEQ ID NO: 284034 - RNA, 32 nt, Homo Sapiens
ucuagauccauaguuaaugaugcccuggcagu

SEQ ID NO: 284035 - RNA, 32 nt, Homo Sapiens
ucuucauuuuucuguguuggaaaccugcguca

SEQ ID NO: 284036 - RNA, 32 nt, Homo Sapiens
uuggcccuauuuaaggcagauuuuacagagcg

SEQ ID NO: 284037 - RNA, 32 nt, Homo Sapiens
ccuggaccaagcuacuccagaucaucugacca

SEQ ID NO: 284038 - RNA, 32 nt, Homo Sapiens
cuaguccugcaguaggcggcccggggccacac

SEQ ID NO: 284039 - RNA, 32 nt, Homo Sapiens
auccagagcugcugcugcucacugccaguccu

SEQ ID NO: 284040 - RNA, 32 nt, Homo Sapiens
cgagagauccugcuccacggagcccggcucua

SEQ ID NO: 284041 - RNA, 32 nt, Homo Sapiens
ugcuguugcugccgccgccgccgcccggagcg

SEQ ID NO: 284042 - RNA, 32 nt, Homo Sapiens
uuuuacucugguguauuauagaauaaugaaca

SEQ ID NO: 284043 - RNA, 32 nt, Homo Sapiens
ccccuggcucugcccuguggguucagggaggg

SEQ ID NO: 284044 - RNA, 32 nt, Homo Sapiens
gggcgggguggagcugaucagaauaauguuca

SEQ ID NO: 284045 - RNA, 32 nt, Homo Sapiens
cccagucugcacccccaguugaccuucacagc

SEQ ID NO: 284046 - RNA, 32 nt, Homo Sapiens
uauaaucccaaguuuauuguuguuauggucaa

SEQ ID NO: 284047 - RNA, 32 nt, Homo Sapiens
auuggugaaauaauguaauuauagagauggaa

SEQ ID NO: 284048 - RNA, 32 nt, Homo Sapiens
gcugaggugggggugcagaaaagggguccucg

SEQ ID NO: 284049 - RNA, 32 nt, Homo Sapiens
uugcuuggguuuucuuuuuuaaaaacauaaua

SEQ ID NO: 284050 - RNA, 32 nt, Homo Sapiens
agcugccauggcaacuggaggcugugguuaua

SEQ ID NO: 284051 - RNA, 32 nt, Homo Sapiens
ucaauugauaggaugaaaaaauuuaagagaag

SEQ ID NO: 284052 - RNA, 32 nt, Homo Sapiens
auaucugcaauacccaagccacagggaagaac

SEQ ID NO: 284053 - RNA, 32 nt, Homo Sapiens
uggcuuugcuggcacucagagcuccucacuua

SEQ ID NO: 284054 - RNA, 32 nt, Homo Sapiens
agucuucccaaucuccucucccugcuccuuuc

SEQ ID NO: 284055 - RNA, 32 nt, Homo Sapiens
ccggcgcgggauuggggcgcgagggccauggg

SEQ ID NO: 284056 - RNA, 32 nt, Homo Sapiens
ugaggagugaucccugucccagccccuggaaa

SEQ ID NO: 284057 - RNA, 32 nt, Homo Sapiens
uuauacaaagauuuuucuuugacccaguuugc

SEQ ID NO: 284058 - RNA, 32 nt, Homo Sapiens
uuguauacuuuuuuauaauuaaugacuaaaug

SEQ ID NO: 284059 - RNA, 32 nt, Homo Sapiens
gcucacugaaccuccgccucccagguucaagc

SEQ ID NO: 284060 - RNA, 32 nt, Homo Sapiens
aggucagaaaucagccuccucuaugcugccau

SEQ ID NO: 284061 - RNA, 32 nt, Homo Sapiens
cacaucugccagcggggccccacgcacacucg

SEQ ID NO: 284062 - RNA, 32 nt, Homo Sapiens
uaauuuaggauuuucauauaaaaauagcuguu

SEQ ID NO: 284063 - RNA, 32 nt, Homo Sapiens
ucacuguggcauccugcacccauccucacccc

SEQ ID NO: 284064 - RNA, 32 nt, Homo Sapiens
ggcccugccucccaagccccgcccucagaaag

SEQ ID NO: 284065 - RNA, 32 nt, Homo Sapiens
acacuuuccagaagccugaucucuccaagucc

SEQ ID NO: 284066 - RNA, 32 nt, Homo Sapiens
agaaggugcaaauuagucuuguagaagaaaau

SEQ ID NO: 284067 - RNA, 31 nt, Homo Sapiens
ugucaauuugaaguucaaucaguguaguugu

SEQ ID NO: 284068 - RNA, 32 nt, Homo Sapiens
aucagaaguaaauggucucuguuuccaaucug

SEQ ID NO: 284069 - RNA, 32 nt, Homo Sapiens
guuugcccauucucccggauccugcuuaaagg

SEQ ID NO: 284070 - RNA, 32 nt, Homo Sapiens
gacagcauaggaccagaguccuuagcauucga

SEQ ID NO: 284071 - RNA, 32 nt, Homo Sapiens
gcauguguguguauauauccaugaaaccucuc

SEQ ID NO: 284072 - RNA, 32 nt, Homo Sapiens
cucucagucaacaugacagauucuggaggaua

SEQ ID NO: 284073 - RNA, 32 nt, Homo Sapiens
gaggaaugaaaacacacccacgccuuggaacc

SEQ ID NO: 284074 - RNA, 32 nt, Homo Sapiens
gggcgggaggaagagggacgccgcugagggcc

SEQ ID NO: 284075 - RNA, 32 nt, Homo Sapiens
gcgggcggguucaccguggagagacgaaggag

SEQ ID NO: 284076 - RNA, 32 nt, Homo Sapiens
auguugugaaaaugaaaaagugaauguccauu

SEQ ID NO: 284077 - RNA, 32 nt, Homo Sapiens
uaucauccugggagauucuggagucgggaaga

SEQ ID NO: 284078 - RNA, 32 nt, Homo Sapiens
uuaaauauaugauuuauauuacugucuuuucu

SEQ ID NO: 284079 - RNA, 32 nt, Homo Sapiens
gggggaauaaaacaggaauguauauuuagguc

SEQ ID NO: 284080 - RNA, 32 nt, Homo Sapiens
aagcaacguuuagguaucacuucuacuuggac

SEQ ID NO: 284081 - RNA, 32 nt, Homo Sapiens
gauuuuuaaaaauaauguauagcuauaaacug

SEQ ID NO: 284082 - RNA, 32 nt, Homo Sapiens
ucaaaaguugccaggagcugccaaguauucug

SEQ ID NO: 284083 - RNA, 30 nt, Homo Sapiens
acacacugggguggcggcggcagcgaggac

SEQ ID NO: 284084 - RNA, 32 nt, Homo Sapiens
uccuacccucagucucccugucugugguucca

SEQ ID NO: 284085 - RNA, 32 nt, Homo Sapiens
uaaaaaugaucaauguuuugauuguuuugcaa

SEQ ID NO: 284086 - RNA, 32 nt, Homo Sapiens
uuaguccuguuugucuuaauuuuuauugguuu

SEQ ID NO: 284087 - RNA, 32 nt, Homo Sapiens
cccgcccgcucgcugucccgcgcaccccguag

SEQ ID NO: 284088 - RNA, 32 nt, Homo Sapiens
agagcaugugucugcuggagagcgagcuggag

SEQ ID NO: 284089 - RNA, 32 nt, Homo Sapiens
gaggaguauggagaauucuauaagagccucac

SEQ ID NO: 284090 - RNA, 32 nt, Homo Sapiens
gaacaagaaaaaagaacaccuuauuuuuaucu

SEQ ID NO: 284091 - RNA, 32 nt, Homo Sapiens
ugcuuuuguaaauuccuucuuguuacauucuu

SEQ ID NO: 284092 - RNA, 32 nt, Homo Sapiens
ccauguccauccagcccuuccccccaaaccua

SEQ ID NO: 284093 - RNA, 32 nt, Homo Sapiens
acagggacccaaucaauucacaaugagaaauu

SEQ ID NO: 284094 - RNA, 30 nt, Homo Sapiens
agacugcagcccgugcugaugacuguggcu

SEQ ID NO: 284095 - RNA, 32 nt, Homo Sapiens
agccagagugugcgcauuucagagcaugggau

SEQ ID NO: 284096 - RNA, 32 nt, Homo Sapiens
cgcagcccccuggccccugcccggcccugcgu

SEQ ID NO: 284097 - RNA, 32 nt, Homo Sapiens
ccuuccagauuggcagaauccuuccauuucau

SEQ ID NO: 284098 - RNA, 32 nt, Homo Sapiens
cacuaagcugaaucagguggagaaaguaaucu

SEQ ID NO: 284099 - RNA, 32 nt, Homo Sapiens
cagaacugcccggcccgggccccucaggagca

SEQ ID NO: 284100 - RNA, 32 nt, Homo Sapiens
cccgugucuggguugccuggggugauccuccc

SEQ ID NO: 284101 - RNA, 32 nt, Homo Sapiens
acgagcccuuagcagggaaggcuggucucccc

SEQ ID NO: 284102 - RNA, 32 nt, Homo Sapiens
uaaacauaugcauuuuaagccuucaaauuaca

SEQ ID NO: 284103 - RNA, 32 nt, Homo Sapiens
uaaauucuaaaaugggauuaaaagaagaguug

SEQ ID NO: 284104 - RNA, 32 nt, Homo Sapiens
agugcccagagugcagaccuccccugccuccc

SEQ ID NO: 284105 - RNA, 32 nt, Homo Sapiens
aaauuuuccaaauacauuagauaggugaaaau

SEQ ID NO: 284106 - RNA, 32 nt, Homo Sapiens
guccauccucuuccuccccagucggcugaacu

SEQ ID NO: 284107 - RNA, 27 nt, Homo Sapiens
aaauaguccuucuuuaacuuagauauu

SEQ ID NO: 284108 - RNA, 32 nt, Homo Sapiens
gaucacagcagggccuucugccugcugaccau

SEQ ID NO: 284109 - RNA, 32 nt, Homo Sapiens
aagcugacccagaggccuuggugcugccggcg

SEQ ID NO: 284110 - RNA, 32 nt, Homo Sapiens
ugcaguuuuuauguaucugauuuuauaagggg

SEQ ID NO: 284111 - RNA, 32 nt, Homo Sapiens
uugcaacuuggcaucauccggagcuucuucac

SEQ ID NO: 284112 - RNA, 32 nt, Homo Sapiens
gccuuguauugcaaagcagaucaguggcuggg

SEQ ID NO: 284113 - RNA, 32 nt, Homo Sapiens
cucucggugcccucuccuuuucguuuccggaa

SEQ ID NO: 284114 - RNA, 32 nt, Homo Sapiens
aguaagggaaauagaaaaacccugcccccaaa

SEQ ID NO: 284115 - RNA, 32 nt, Homo Sapiens
cacaccuguaaucccaguacuuugagacgcug

SEQ ID NO: 284116 - RNA, 32 nt, Homo Sapiens
ucucucucucucuuuuuuuuuacgaaagacuu

SEQ ID NO: 284117 - RNA, 32 nt, Homo Sapiens
agggaggcugccaccaccuggggccucuccac

SEQ ID NO: 284118 - RNA, 32 nt, Homo Sapiens
agaauugggucuuuuuauuauuauuauuauua

SEQ ID NO: 284119 - RNA, 32 nt, Homo Sapiens
cagcagaccgcgccaagaagaagugcgcugga

SEQ ID NO: 284120 - RNA, 32 nt, Homo Sapiens
gcucgcaagcugacucacgguguuaugaauaa

SEQ ID NO: 284121 - RNA, 32 nt, Homo Sapiens
uaagaaguuuaaaagacagacaacucuagacu

SEQ ID NO: 284122 - RNA, 32 nt, Homo Sapiens
uguuauuauucggucuuaaaauuauaccuggg

SEQ ID NO: 284123 - RNA, 32 nt, Homo Sapiens
ccccaguccggcccggccccucccacccuugc

SEQ ID NO: 284124 - RNA, 32 nt, Homo Sapiens
uaauaaaguauucauuugauaaaaaaaaaaaa

SEQ ID NO: 284125 - RNA, 32 nt, Homo Sapiens
uguuggggccauccuccaagagggaucucugc

SEQ ID NO: 284126 - RNA, 32 nt, Homo Sapiens
caaguccaaggugacagcuggugcuaggggcg

SEQ ID NO: 284127 - RNA, 32 nt, Homo Sapiens
aaaggaaggaggagccgccgcgggacugagac

SEQ ID NO: 284128 - RNA, 32 nt, Homo Sapiens
uuaccuuguauaucaucuucgaccacaucaga

SEQ ID NO: 284129 - RNA, 32 nt, Homo Sapiens
gaugaugucuucuggugucauggugaccaccc

SEQ ID NO: 284130 - RNA, 32 nt, Homo Sapiens
aagccaguguagaaacagcaaaaaugucauaa

SEQ ID NO: 284131 - RNA, 32 nt, Homo Sapiens
ccaauaaauucaguaacuuaagcaaaauggac

SEQ ID NO: 284132 - RNA, 32 nt, Homo Sapiens
cauuuguucuuugccagucucauuuucaucuu

SEQ ID NO: 284133 - RNA, 32 nt, Homo Sapiens
ggccuccuuccuuuccucuuucauaaaaaugu

SEQ ID NO: 284134 - RNA, 32 nt, Homo Sapiens
uaugugcccuuaaagacuguuagacaagaaaa

SEQ ID NO: 284135 - RNA, 32 nt, Homo Sapiens
gaccuugcccucacccgcacaugccguggggc

SEQ ID NO: 284136 - RNA, 32 nt, Homo Sapiens
cauauuuugaaauggacugugaaggaaaaggg

SEQ ID NO: 284137 - RNA, 32 nt, Homo Sapiens
uaggaugucuuaaauuauuagcaguacuccuu

SEQ ID NO: 284138 - RNA, 32 nt, Homo Sapiens
augcuuacugucaugcuccuccauggucuuag

SEQ ID NO: 284139 - RNA, 32 nt, Homo Sapiens
caggggugggccgacaggauggggacccaggc

SEQ ID NO: 284140 - RNA, 32 nt, Homo Sapiens
aguuuucugaauccuaaucuagucauccauua

SEQ ID NO: 284141 - RNA, 32 nt, Homo Sapiens
ccccagaccgggggcgcagucccacucgcucc

SEQ ID NO: 284142 - RNA, 32 nt, Homo Sapiens
agccaggcaugguggcacgugccuguaauccc

SEQ ID NO: 284143 - RNA, 32 nt, Homo Sapiens
gcagccucggaaccgagacgaugcgugcgcuc

SEQ ID NO: 284144 - RNA, 32 nt, Homo Sapiens
ccagguuaucccaugcaggccuauguggaucc

SEQ ID NO: 284145 - RNA, 32 nt, Homo Sapiens
aaaaaaugcagacuguacaaacgcuuacaaaa

SEQ ID NO: 284146 - RNA, 32 nt, Homo Sapiens
uuguucaaauguuuuuuuuuaagggaugguug

SEQ ID NO: 284147 - RNA, 32 nt, Homo Sapiens
ggucguggaugacacgcguggccagccucuau

SEQ ID NO: 284148 - RNA, 32 nt, Homo Sapiens
acuuauguaacauuugcuaccuuuauguaaac

SEQ ID NO: 284149 - RNA, 29 nt, Homo Sapiens
uaagcaaugaagauugagacaauaaauag

SEQ ID NO: 284150 - RNA, 32 nt, Homo Sapiens
guugccucugcuuggcugugccugcagcucag

SEQ ID NO: 284151 - RNA, 30 nt, Homo Sapiens
uuucauuucccauugggggaauuguuuugu

SEQ ID NO: 284152 - RNA, 32 nt, Homo Sapiens
acuugccaccgggucuaauuagcccuauuuau

SEQ ID NO: 284153 - RNA, 32 nt, Homo Sapiens
ucaagaaaagugcaauuucaugcugaaugaag

SEQ ID NO: 284154 - RNA, 32 nt, Homo Sapiens
cgcccggcccuccugggacuuguauuuuucuc

SEQ ID NO: 284155 - RNA, 32 nt, Homo Sapiens
cagacccgcgccgaccacccuuucgacgacca

SEQ ID NO: 284156 - RNA, 32 nt, Homo Sapiens
ccucugccugcgccgggcaucacuugcgcgcc

SEQ ID NO: 284157 - RNA, 32 nt, Homo Sapiens
aaauguauuauucgcuaguagcggcuacuuua

SEQ ID NO: 284158 - RNA, 32 nt, Homo Sapiens
gaaaucaugguaucuguuaauuuuauaagcua

SEQ ID NO: 284159 - RNA, 32 nt, Homo Sapiens
ugucaucuugaaggcuccauggaaugagauaa

SEQ ID NO: 284160 - RNA, 32 nt, Homo Sapiens
cgaugccgccccagccccucugauggcccucc

SEQ ID NO: 284161 - RNA, 32 nt, Homo Sapiens
acugagaggcuuuggggcccaaaauaagaagg

SEQ ID NO: 284162 - RNA, 32 nt, Homo Sapiens
uuauauaauuuucuaauuugaaaucaugacaa

SEQ ID NO: 284163 - RNA, 32 nt, Homo Sapiens
acggcugaagauuccagaagguccuggucucc

SEQ ID NO: 284164 - RNA, 32 nt, Homo Sapiens
acucggggcguaucgaggcugcugcuggcugu

SEQ ID NO: 284165 - RNA, 32 nt, Homo Sapiens
agauguauauauacguaugaagaaaaccugcu

SEQ ID NO: 284166 - RNA, 32 nt, Homo Sapiens
ugagucagugaguugcgugucugcaagagagc

SEQ ID NO: 284167 - RNA, 32 nt, Homo Sapiens
gaugcaaaaaauuuuuccaacgaacuccgcau

SEQ ID NO: 284168 - RNA, 32 nt, Homo Sapiens
ucaaaacaagcagccuggcccggggcuggauc

SEQ ID NO: 284169 - RNA, 32 nt, Homo Sapiens
aagagcggacgggucugcgccgccgcaggagg

SEQ ID NO: 284170 - RNA, 32 nt, Homo Sapiens
aguugggcugucggguuggccuggacauccuc

SEQ ID NO: 284171 - RNA, 32 nt, Homo Sapiens
cugugcuuuccacuauacacagucaccguccc

SEQ ID NO: 284172 - RNA, 32 nt, Homo Sapiens
cagccccagccacuccuccccacugcagccag

SEQ ID NO: 284173 - RNA, 32 nt, Homo Sapiens
ucagacucggaaccgaugugugcuuuagggaa

SEQ ID NO: 284174 - RNA, 30 nt, Homo Sapiens
cauugaggaagcaacuacagauucagcaac

SEQ ID NO: 284175 - RNA, 32 nt, Homo Sapiens
uuugaaauuugaacuggagagauccagaaccu

SEQ ID NO: 284176 - RNA, 32 nt, Homo Sapiens
gaucgcuugagcccaggcgguugaggcugcag

SEQ ID NO: 284177 - RNA, 32 nt, Homo Sapiens
uagcugcagaccaugcacagugccuggggcgg

SEQ ID NO: 284178 - RNA, 32 nt, Homo Sapiens
ucagccauuauuauuuauauauguauuaccaa

SEQ ID NO: 284179 - RNA, 32 nt, Homo Sapiens
uagucacacugaacuagaacugucccaacaca

SEQ ID NO: 284180 - RNA, 32 nt, Homo Sapiens
ccacgcgccccgauacccggcacaggagccac

SEQ ID NO: 284181 - RNA, 32 nt, Homo Sapiens
cccugugcuccuccccgcaggacauggcuccc

SEQ ID NO: 284182 - RNA, 32 nt, Homo Sapiens
ccacaucguggcggugccgucugagcuguagc

SEQ ID NO: 284183 - RNA, 32 nt, Homo Sapiens
cuggaguguguuccugaagagcagccaggagg

SEQ ID NO: 284184 - RNA, 32 nt, Homo Sapiens
ccaccucggccgcgccagucgugcagugagac

SEQ ID NO: 284185 - RNA, 32 nt, Homo Sapiens
gaaggaaacaacauccacaaaguaaccacaug

SEQ ID NO: 284186 - RNA, 32 nt, Homo Sapiens
ccuuccugugcuccccauugccugccagaacc

SEQ ID NO: 284187 - RNA, 32 nt, Homo Sapiens
ucugaagcacgugcugcagagccaccuugguc

SEQ ID NO: 284188 - RNA, 32 nt, Homo Sapiens
cagagcaagacucugucucaaaaaauauauau

SEQ ID NO: 284189 - RNA, 32 nt, Homo Sapiens
ugcucgcgcugugaccccggcuugagguaaca

SEQ ID NO: 284190 - RNA, 32 nt, Homo Sapiens
caauauguaaaaaauacuaauuuacuugguag

SEQ ID NO: 284191 - RNA, 32 nt, Homo Sapiens
auaagggaagagaggaggauguggcuuucacu

SEQ ID NO: 284192 - RNA, 32 nt, Homo Sapiens
gcccauccucagcccuacccagccccgcagcc

SEQ ID NO: 284193 - RNA, 32 nt, Homo Sapiens
agugaagagacccacuccaaauaaaaaagggg

SEQ ID NO: 284194 - RNA, 32 nt, Homo Sapiens
gggcuuuauuugucuuuuuuuauuuuuuaagc

SEQ ID NO: 284195 - RNA, 32 nt, Homo Sapiens
augagguaaagaguuuaaaccagggaaggcau

SEQ ID NO: 284196 - RNA, 32 nt, Homo Sapiens
acccaucgauauauuuuugauaauuuuucaug

SEQ ID NO: 284197 - RNA, 32 nt, Homo Sapiens
gucgugagcgcgcgcccgccccgcucugggag

SEQ ID NO: 284198 - RNA, 32 nt, Homo Sapiens
ggaaauccuacaacuucuccuuuccuuucaug

SEQ ID NO: 284199 - RNA, 32 nt, Homo Sapiens
uugcucuccuuacgugauacugccaugaauaa

SEQ ID NO: 284200 - RNA, 28 nt, Homo Sapiens
uagugacuagauuaacuauugaaaauau

SEQ ID NO: 284201 - RNA, 32 nt, Homo Sapiens
cuaacagcagugcacuccccuaagucucugcu

SEQ ID NO: 284202 - RNA, 32 nt, Homo Sapiens
cgcgcgcgcccggcgucucuccagugauuggc

SEQ ID NO: 284203 - RNA, 32 nt, Homo Sapiens
gaggcuuccucauagauguuaggaauaaucaa

SEQ ID NO: 284204 - RNA, 27 nt, Homo Sapiens
caagguuccccuugccucccccaugcu

SEQ ID NO: 284205 - RNA, 32 nt, Homo Sapiens
ccagggccagcaugccaguccaggcagagcag

SEQ ID NO: 284206 - RNA, 32 nt, Homo Sapiens
uggaggaggggcgagcuguggagcagccaccc

SEQ ID NO: 284207 - RNA, 32 nt, Homo Sapiens
guuuggauuccugguggaugacaucauucuug

SEQ ID NO: 284208 - RNA, 32 nt, Homo Sapiens
cugucaucaguggcacggccacuuccuuucug

SEQ ID NO: 284209 - RNA, 32 nt, Homo Sapiens
uucagggggauaaucuccuucucucggaucau

SEQ ID NO: 284210 - RNA, 32 nt, Homo Sapiens
uucacagaugaccacuaaacuucaggcacccu

SEQ ID NO: 284211 - RNA, 32 nt, Homo Sapiens
caggcgagcaggcugcuuucccugcccaguca

SEQ ID NO: 284212 - RNA, 32 nt, Homo Sapiens
uaaauauuugaaaauuaccuuuaaugcaaugc

SEQ ID NO: 284213 - RNA, 32 nt, Homo Sapiens
gccacugcacuccagccugggcgacagggcaa

SEQ ID NO: 284214 - RNA, 32 nt, Homo Sapiens
gaguaaauuacauugacacuuacugggagaua

SEQ ID NO: 284215 - RNA, 32 nt, Homo Sapiens
ccucuccauggccugccuagccaggcuggcac

SEQ ID NO: 284216 - RNA, 32 nt, Homo Sapiens
auccccuccagcgcccuuccuggagaaucuac

SEQ ID NO: 284217 - RNA, 32 nt, Homo Sapiens
aaugagguuguccauuugauaauuuuaacaaa

SEQ ID NO: 284218 - RNA, 32 nt, Homo Sapiens
ccucaaagcucauuuuaucuaauugugagucu

SEQ ID NO: 284219 - RNA, 32 nt, Homo Sapiens
gagcucggccucccuaccuucuccaggcgcgg

SEQ ID NO: 284220 - RNA, 32 nt, Homo Sapiens
acgcagaugcugucacuggcagagcacagccc

SEQ ID NO: 284221 - RNA, 32 nt, Homo Sapiens
gauugugagcuauuucagaacuguucucagga

SEQ ID NO: 284222 - RNA, 32 nt, Homo Sapiens
caugaucuauguguuuauccuuucucugacac

SEQ ID NO: 284223 - RNA, 32 nt, Homo Sapiens
ucccuccucggugaccccccagcccaaccccu

SEQ ID NO: 284224 - RNA, 32 nt, Homo Sapiens
aguaaagaaaacaaaaacugccuguugguaaa

SEQ ID NO: 284225 - RNA, 32 nt, Homo Sapiens
agccacgcugccgaggcgcccggggacccgca

SEQ ID NO: 284226 - RNA, 32 nt, Homo Sapiens
cugcauugaaauguuaaaauggcuuacacuug

SEQ ID NO: 284227 - RNA, 32 nt, Homo Sapiens
guuaaaauccugugacuguguacuggaucugg

SEQ ID NO: 284228 - RNA, 32 nt, Homo Sapiens
uuucuacccaaguuuaaaugaccugcuaugcc

SEQ ID NO: 284229 - RNA, 32 nt, Homo Sapiens
gauuuaaaaaauauuuucaaagugaagcugag

SEQ ID NO: 284230 - RNA, 32 nt, Homo Sapiens
uuaccuuauuuucucuuggaacauaucugaaa

SEQ ID NO: 284231 - RNA, 32 nt, Homo Sapiens
gcccuccaaacuauuccaaccccugccuguua

SEQ ID NO: 284232 - RNA, 32 nt, Homo Sapiens
ucugcugcuccucccccuuggcucuccaccug

SEQ ID NO: 284233 - RNA, 29 nt, Homo Sapiens
aacaguucuauccuggugccuuacgaaua

SEQ ID NO: 284234 - RNA, 32 nt, Homo Sapiens
gaaggacccagcucacuauaccaccccagagg

SEQ ID NO: 284235 - RNA, 32 nt, Homo Sapiens
gguucuguucaugcugcuuucugcgaugugcg

SEQ ID NO: 284236 - RNA, 32 nt, Homo Sapiens
cggcggaggcggaggcccggaguugggccggg

SEQ ID NO: 284237 - RNA, 32 nt, Homo Sapiens
cuacgacgaggccgauggcccgggcagcgggg

SEQ ID NO: 284238 - RNA, 32 nt, Homo Sapiens
ccagcaagugaaccgcucuguccuuuuuaaag

SEQ ID NO: 284239 - RNA, 32 nt, Homo Sapiens
acccaucucaugccccagggaccgccacugcc

SEQ ID NO: 284240 - RNA, 32 nt, Homo Sapiens
aaguacuccagauggaguguguaggaacacgg

SEQ ID NO: 284241 - RNA, 32 nt, Homo Sapiens
cacacauacacacacacacacacacacagaga

SEQ ID NO: 284242 - RNA, 31 nt, Homo Sapiens
agggcagcuggcugccugcccuuggcccguu

SEQ ID NO: 284243 - RNA, 32 nt, Homo Sapiens
acaaguugaacauuuuaccaugauugaacaug

SEQ ID NO: 284244 - RNA, 32 nt, Homo Sapiens
gccuggagcugucuaucuguccuuccagccac

SEQ ID NO: 284245 - RNA, 32 nt, Homo Sapiens
gacugauagaaaguauuggcagaccaggcgug

SEQ ID NO: 284246 - RNA, 32 nt, Homo Sapiens
cucugggaacagccagcucccgagcacagccg

SEQ ID NO: 284247 - RNA, 32 nt, Homo Sapiens
uccaggagcgggcgcccucgggccccacccug

SEQ ID NO: 284248 - RNA, 32 nt, Homo Sapiens
ucccaccaaguaccuauauauguauauaaaca

SEQ ID NO: 284249 - RNA, 32 nt, Homo Sapiens
auaggauuguggcuaaauuugcuucuagcugu

SEQ ID NO: 284250 - RNA, 32 nt, Homo Sapiens
gagggaaauaaauggaguuuacuaguucaauu

SEQ ID NO: 284251 - RNA, 32 nt, Homo Sapiens
cucuugcccauuaagaaguguaucaaaaucuc

SEQ ID NO: 284252 - RNA, 32 nt, Homo Sapiens
guuuguugauaaaguggacacaguauugucug

SEQ ID NO: 284253 - RNA, 32 nt, Homo Sapiens
aggcgcaguggcucaccucuguaaucccagca

SEQ ID NO: 284254 - RNA, 32 nt, Homo Sapiens
aucaauuuauuuccaauccaucagacuaaaau

SEQ ID NO: 284255 - RNA, 32 nt, Homo Sapiens
gacuucugaaacaaaauuuggauuuccuuuua

SEQ ID NO: 284256 - RNA, 32 nt, Homo Sapiens
uucuuuuuucuuuuucuauuuuaguguuucau

SEQ ID NO: 284257 - RNA, 32 nt, Homo Sapiens
ugcacuucuuccgguuaauuuuuauggggaag

SEQ ID NO: 284258 - RNA, 32 nt, Homo Sapiens
ggggaaggucuugugucuggaagacccaagga

SEQ ID NO: 284259 - RNA, 32 nt, Homo Sapiens
uccuuuuuugcacuaacaguuggcucuuguag

SEQ ID NO: 284260 - RNA, 32 nt, Homo Sapiens
ccgaaccaccgcugccucuccuuccuccgcau

SEQ ID NO: 284261 - RNA, 32 nt, Homo Sapiens
gagaaaccggccgagcaguccgggccaagcuc

SEQ ID NO: 284262 - RNA, 32 nt, Homo Sapiens
cauugccgugacucacacaccucuacuucugu

SEQ ID NO: 284263 - RNA, 32 nt, Homo Sapiens
auccugucccugccccaccccauccccaagaa

SEQ ID NO: 284264 - RNA, 32 nt, Homo Sapiens
ucuuuguguacuuuauuuguaaauuauuugcc

SEQ ID NO: 284265 - RNA, 32 nt, Homo Sapiens
ugcggggaagggagucgccaggcggccgucau

SEQ ID NO: 284266 - RNA, 32 nt, Homo Sapiens
cuuugcaaaaagcugagcugccacucaaagaa

SEQ ID NO: 284267 - RNA, 32 nt, Homo Sapiens
gagagggcuuugaguguuucugauggcaggca

SEQ ID NO: 284268 - RNA, 32 nt, Homo Sapiens
uccgauaaagcaagucccacuucauuaguuuu

SEQ ID NO: 284269 - RNA, 32 nt, Homo Sapiens
aaaggcccgcggagucgcgcugggccgccccg

SEQ ID NO: 284270 - RNA, 32 nt, Homo Sapiens
ucacaccuagaacaggauguccugcaacgcuu

SEQ ID NO: 284271 - RNA, 32 nt, Homo Sapiens
ugcccggagcccugcucaucaaugaaaaaccc

SEQ ID NO: 284272 - RNA, 31 nt, Homo Sapiens
accacagcgccgcugcugccccgccuugcag

SEQ ID NO: 284273 - RNA, 32 nt, Homo Sapiens
gaucuuggcucacugcagacuucaccuccuga

SEQ ID NO: 284274 - RNA, 32 nt, Homo Sapiens
gucgggguccggggggccgccggcgcucaacc

SEQ ID NO: 284275 - RNA, 32 nt, Homo Sapiens
aguaccagauuauaaugccagaauauaaugug

SEQ ID NO: 284276 - RNA, 32 nt, Homo Sapiens
gggaggagagcagcugcgggcgcgccagggcg

SEQ ID NO: 284277 - RNA, 32 nt, Homo Sapiens
cgccgagcaccucgaggaccggcucuuccacc

SEQ ID NO: 284278 - RNA, 32 nt, Homo Sapiens
cucccgucauauggcugccacuugcuugggaa

SEQ ID NO: 284279 - RNA, 31 nt, Homo Sapiens
ccccaccuggagcccccgccccgcgccaugg

SEQ ID NO: 284280 - RNA, 32 nt, Homo Sapiens
ccuuucucuguuucuauuagcuucuuuauuuu

SEQ ID NO: 284281 - RNA, 32 nt, Homo Sapiens
agggaguugucggcgccgcggccgcugcggac

SEQ ID NO: 284282 - RNA, 32 nt, Homo Sapiens
acuucuuuguugcuuucuuuucuauugagucu

SEQ ID NO: 284283 - RNA, 32 nt, Homo Sapiens
acaagauccagccggaaaguguagaagucaca

SEQ ID NO: 284284 - RNA, 32 nt, Homo Sapiens
uguguggcauuucuagcgcucucuaaauuaug

SEQ ID NO: 284285 - RNA, 32 nt, Homo Sapiens
cagaagaaauugaggauguuuccuuucacagc

SEQ ID NO: 284286 - RNA, 32 nt, Homo Sapiens
cugcccuagcuccacacccucucccaggaccc

SEQ ID NO: 284287 - RNA, 32 nt, Homo Sapiens
gaguccucggccagcccugccugcccaccagg

SEQ ID NO: 284288 - RNA, 32 nt, Homo Sapiens
aggcaggcccucuggaagggaaggggcaggac

SEQ ID NO: 284289 - RNA, 32 nt, Homo Sapiens
gaugggggaaaacagcuuccucucuaaaagga

SEQ ID NO: 284290 - RNA, 32 nt, Homo Sapiens
agggaggacuuccuagaggaagggacaucgaa

SEQ ID NO: 284291 - RNA, 32 nt, Homo Sapiens
auagaguagagcuggucugaggucacagugcu

SEQ ID NO: 284292 - RNA, 32 nt, Homo Sapiens
caucuuuauagcagugcuguuuccugggcuca

SEQ ID NO: 284293 - RNA, 32 nt, Homo Sapiens
ggacuuuaaaagacaauuaacagaaguggaaa

SEQ ID NO: 284294 - RNA, 32 nt, Homo Sapiens
uggcuccuugucaucauucagcuccaccuucc

SEQ ID NO: 284295 - RNA, 32 nt, Homo Sapiens
gccgaggcuugagguaggcagcaagcgccggc

SEQ ID NO: 284296 - RNA, 32 nt, Homo Sapiens
cccagguccugccagcugggaagugccagcau

SEQ ID NO: 284297 - RNA, 32 nt, Homo Sapiens
gacauaauuuuuagccucuucucuaaaugcuu

SEQ ID NO: 284298 - RNA, 32 nt, Homo Sapiens
aaagaaaugguuucuuuuuguacuuucauuca

SEQ ID NO: 284299 - RNA, 31 nt, Homo Sapiens
ugguagcuuaggccaacuggaguccagguuc

SEQ ID NO: 284300 - RNA, 32 nt, Homo Sapiens
ugcaguggugugaucucggcucacugcaaccu

SEQ ID NO: 284301 - RNA, 32 nt, Homo Sapiens
acugggugcacaggauggaaacuucuauuccc

SEQ ID NO: 284302 - RNA, 32 nt, Homo Sapiens
uaagucuuccucagucuuuucuaaucauaauu

SEQ ID NO: 284303 - RNA, 32 nt, Homo Sapiens
cgccccugcccccucuccccccgcaugugggu

SEQ ID NO: 284304 - RNA, 32 nt, Homo Sapiens
cacacuuuauuccuaaaacgugucuuauuuuu

SEQ ID NO: 284305 - RNA, 32 nt, Homo Sapiens
cuaaccaaaccuggucccacgggccagcucuc

SEQ ID NO: 284306 - RNA, 32 nt, Homo Sapiens
caagccccccaccccaaucaaccucuaugcuu

SEQ ID NO: 284307 - RNA, 32 nt, Homo Sapiens
acgccggcggcucgcgggcuguggcgggggcu

SEQ ID NO: 284308 - RNA, 32 nt, Homo Sapiens
uggcagggucagcugcaagaacaucaaaccag

SEQ ID NO: 284309 - RNA, 32 nt, Homo Sapiens
caacaagaaaccggggccuuugccaacagcca

SEQ ID NO: 284310 - RNA, 32 nt, Homo Sapiens
ugcagagaggggcugcugaaccucuagagaca

SEQ ID NO: 284311 - RNA, 32 nt, Homo Sapiens
cauuaacaaaaauaaacuauuuaaauaaucug

SEQ ID NO: 284312 - RNA, 32 nt, Homo Sapiens
ucaguggaaagauaaacuaaguuuuaauguua

SEQ ID NO: 284313 - RNA, 32 nt, Homo Sapiens
guggcacaaguauuuguacauacucugcuucu

SEQ ID NO: 284314 - RNA, 32 nt, Homo Sapiens
uuguuggcauucacugagaccuuguauuagca

SEQ ID NO: 284315 - RNA, 31 nt, Homo Sapiens
ggugaucagacaugaccugugcuguuguuug

SEQ ID NO: 284316 - RNA, 32 nt, Homo Sapiens
uucuggaaggagccaguaucuuccucaccucu

SEQ ID NO: 284317 - RNA, 32 nt, Homo Sapiens
gagggaugugaggccagacagcuccuuggugg

SEQ ID NO: 284318 - RNA, 32 nt, Homo Sapiens
aguggcugcggcgcggccuccucgcggugcaa

SEQ ID NO: 284319 - RNA, 32 nt, Homo Sapiens
agcuaaguccaccccaccugcugccucacaug

SEQ ID NO: 284320 - RNA, 32 nt, Homo Sapiens
cugcaguccgccucuccacgauugcggaaagc

SEQ ID NO: 284321 - RNA, 32 nt, Homo Sapiens
uuuugagaaugauaagaaguagccaugccagg

SEQ ID NO: 284322 - RNA, 32 nt, Homo Sapiens
acaaacaccaaauauuaauaucaucaaggagc

SEQ ID NO: 284323 - RNA, 32 nt, Homo Sapiens
uuuauucucuuacugccugagcaauuugaaac

SEQ ID NO: 284324 - RNA, 32 nt, Homo Sapiens
aaaggacaaaagaccaguuuauaggguugggu

SEQ ID NO: 284325 - RNA, 32 nt, Homo Sapiens
gaauuuuuguuugacaugaacuauuuaggugu

SEQ ID NO: 284326 - RNA, 32 nt, Homo Sapiens
acccagagcgacccucccgucaauuguugggc

SEQ ID NO: 284327 - RNA, 32 nt, Homo Sapiens
ugaaggugucauaaaaaguggaagugcaaaga

SEQ ID NO: 284328 - RNA, 32 nt, Homo Sapiens
uguauguuuauauacacacauguaucuguaua

SEQ ID NO: 284329 - RNA, 32 nt, Homo Sapiens
ugguagguaaacuuuuuuuuuauuuuuuucug

SEQ ID NO: 284330 - RNA, 32 nt, Homo Sapiens
agaggcaggggagggacggugcaggcgcagag

SEQ ID NO: 284331 - RNA, 32 nt, Homo Sapiens
acugcgaggauggagaucuuggucaucucuga

SEQ ID NO: 284332 - RNA, 32 nt, Homo Sapiens
cagcuaaaccuggguuggggugcuuucugccc

SEQ ID NO: 284333 - RNA, 32 nt, Homo Sapiens
uccacucccuguucugcccuggcacucagagu

SEQ ID NO: 284334 - RNA, 32 nt, Homo Sapiens
gauagugcaauaaucagugaucuauagacccu

SEQ ID NO: 284335 - RNA, 32 nt, Homo Sapiens
caugucgcgggccuucgagcaccaccgcgugg

SEQ ID NO: 284336 - RNA, 32 nt, Homo Sapiens
ugguuagaugacuuugaaugaauagacugcug

SEQ ID NO: 284337 - RNA, 32 nt, Homo Sapiens
agucccgcuccuucuccccgaaaugcagaugg

SEQ ID NO: 284338 - RNA, 32 nt, Homo Sapiens
aaacuugcugaauaaagcgaauggaaguuaaa

SEQ ID NO: 284339 - RNA, 32 nt, Homo Sapiens
gucugucccgggccggccgcccgccucugaga

SEQ ID NO: 284340 - RNA, 32 nt, Homo Sapiens
uuguugccaagaguuugugccaaugcaguaug

SEQ ID NO: 284341 - RNA, 32 nt, Homo Sapiens
aguuguggaucuguuagaugugaauuauuuug

SEQ ID NO: 284342 - RNA, 32 nt, Homo Sapiens
ggaaggggacgcugagccuagccccggcgaga

SEQ ID NO: 284343 - RNA, 32 nt, Homo Sapiens
gaggauaaaaauacauuggguuaguacucuca

SEQ ID NO: 284344 - RNA, 29 nt, Homo Sapiens
ggauucauggaugaaugaaagcuagaccu

SEQ ID NO: 284345 - RNA, 32 nt, Homo Sapiens
agagcgcuggggcuaccaggugggcucccacc

SEQ ID NO: 284346 - RNA, 32 nt, Homo Sapiens
aguaugagaaguggccaaguggucaauagcuu

SEQ ID NO: 284347 - RNA, 32 nt, Homo Sapiens
gaugguuuggaaguugugcaguuucuuaacaa

SEQ ID NO: 284348 - RNA, 32 nt, Homo Sapiens
uugauuucaugacugaugcacaaauuuuaaug

SEQ ID NO: 284349 - RNA, 32 nt, Homo Sapiens
cacacucaugcacacgcugacacgcgguugca

SEQ ID NO: 284350 - RNA, 32 nt, Homo Sapiens
gcgucuccuugguaacucuccuccggucgcaa

SEQ ID NO: 284351 - RNA, 32 nt, Homo Sapiens
gguuuggcccccagcccccgucacgccagucc

SEQ ID NO: 284352 - RNA, 32 nt, Homo Sapiens
aguuuguaccgaugaaacgcgcaacuuuguaa

SEQ ID NO: 284353 - RNA, 32 nt, Homo Sapiens
augcgaucguccuagagaguccauucagcugc

SEQ ID NO: 284354 - RNA, 32 nt, Homo Sapiens
aggcgccaccccgggaugggggcgcgcccugc

SEQ ID NO: 284355 - RNA, 32 nt, Homo Sapiens
uuucuugugaauggaggauggauguggagcug

SEQ ID NO: 284356 - RNA, 32 nt, Homo Sapiens
cuggaauggugcuggcuguguuggucggugcc

SEQ ID NO: 284357 - RNA, 32 nt, Homo Sapiens
acuaugcccagcuaauuuuuuauuuuguagau

SEQ ID NO: 284358 - RNA, 32 nt, Homo Sapiens
ugcuguugaaaaaaggaacaaagcguuacuga

SEQ ID NO: 284359 - RNA, 32 nt, Homo Sapiens
cugagcccaagccugaggcugggggcugcggg

SEQ ID NO: 284360 - RNA, 32 nt, Homo Sapiens
ugucacccugcucuggcaguccugcuaagagu

SEQ ID NO: 284361 - RNA, 32 nt, Homo Sapiens
aacuuuuacuguguaauugccaaauacacuuu

SEQ ID NO: 284362 - RNA, 32 nt, Homo Sapiens
cucccgcacgcuugcacgcgggcccggcuucg

SEQ ID NO: 284363 - RNA, 32 nt, Homo Sapiens
uuaauuacauauauuuuguauaauuuguauau

SEQ ID NO: 284364 - RNA, 32 nt, Homo Sapiens
agauacguauuuccaauacagaaaagaauuuu

SEQ ID NO: 284365 - RNA, 31 nt, Homo Sapiens
aggcggcugccggcgcugcgccggagcuuag

SEQ ID NO: 284366 - RNA, 32 nt, Homo Sapiens
agggucccacgucugcaucuuugugugugcua

SEQ ID NO: 284367 - RNA, 32 nt, Homo Sapiens
uuugggaggcggaggcaggcggaucgccugag

SEQ ID NO: 284368 - RNA, 32 nt, Homo Sapiens
uuccaaaauauuaacuggggagcugcucauuu

SEQ ID NO: 284369 - RNA, 32 nt, Homo Sapiens
accuccuuguaacaacucuauagcccucuuug

SEQ ID NO: 284370 - RNA, 32 nt, Homo Sapiens
cugcgugcauccauggagacgcaauggggcgg

SEQ ID NO: 284371 - RNA, 32 nt, Homo Sapiens
auccacagccccaccaggccucauuucaccug

SEQ ID NO: 284372 - RNA, 32 nt, Homo Sapiens
agcugauuucccaaacaggggcugcaaugugu

SEQ ID NO: 284373 - RNA, 32 nt, Homo Sapiens
ggcuggaucgcgcagcggcugcuuccuuuacc

SEQ ID NO: 284374 - RNA, 32 nt, Homo Sapiens
ggcaaaggucucgagaugcaggcggcccuaga

SEQ ID NO: 284375 - RNA, 32 nt, Homo Sapiens
gaaccugaggccgcuggagaaaaggaaaaaau

SEQ ID NO: 284376 - RNA, 32 nt, Homo Sapiens
uaccucgaguccuuaugcacagaaaggcccug

SEQ ID NO: 284377 - RNA, 32 nt, Homo Sapiens
uaaauuugccaccucacacguguacagcugca

SEQ ID NO: 284378 - RNA, 32 nt, Homo Sapiens
gugugguucagacccuggccuagggccgguga

SEQ ID NO: 284379 - RNA, 32 nt, Homo Sapiens
ucagauuugugauuuuuguuucuaaacuugau

SEQ ID NO: 284380 - RNA, 32 nt, Homo Sapiens
ggugcucgcacgcgucucgggagccagguugg

SEQ ID NO: 284381 - RNA, 32 nt, Homo Sapiens
cauaggcgccuggcccagggagggucagagaa

SEQ ID NO: 284382 - RNA, 32 nt, Homo Sapiens
cagaaucugcggcuaggaagaccugggccgcc

SEQ ID NO: 284383 - RNA, 32 nt, Homo Sapiens
aauuagccgggcgugguggcgugugccuguaa

SEQ ID NO: 284384 - RNA, 32 nt, Homo Sapiens
gcccucagccccuaaaauguuccuccugcuga

SEQ ID NO: 284385 - RNA, 32 nt, Homo Sapiens
augcuaggaaagcuuaucaaaacuacuuuccc

SEQ ID NO: 284386 - RNA, 32 nt, Homo Sapiens
uccagcaggggaggggugggaacgagaaagaa

SEQ ID NO: 284387 - RNA, 32 nt, Homo Sapiens
uccuggaaauacccccugggagcgcggaaagc

SEQ ID NO: 284388 - RNA, 32 nt, Homo Sapiens
uaggcuuuuauuucuuuuuuauuuuuugaaga

SEQ ID NO: 284389 - RNA, 32 nt, Homo Sapiens
auuuauaaaaauucugaaaucaauccauuugg

SEQ ID NO: 284390 - RNA, 32 nt, Homo Sapiens
aaagagugaagauaguacuagcaaguauacuu

SEQ ID NO: 284391 - RNA, 32 nt, Homo Sapiens
accgugcuguguuuaaauguuacuuguuuuca

SEQ ID NO: 284392 - RNA, 32 nt, Homo Sapiens
ucccuucccgccuggcgccgcccgggagagcc

SEQ ID NO: 284393 - RNA, 31 nt, Homo Sapiens
uacacucucaaugaacuuuuaugacuuuuaa

SEQ ID NO: 284394 - RNA, 32 nt, Homo Sapiens
ugacucuuaggcauggcaaacgccagugauau

SEQ ID NO: 284395 - RNA, 32 nt, Homo Sapiens
aggcaggcucucugagggcauucuguaguccc

SEQ ID NO: 284396 - RNA, 32 nt, Homo Sapiens
ggacuugaaguaaaguauauuuuuguaccaaa

SEQ ID NO: 284397 - RNA, 32 nt, Homo Sapiens
gugucugcuuuccucagcccuuuucugucuau

SEQ ID NO: 284398 - RNA, 31 nt, Homo Sapiens
uuucugugaaacacauuuuccaagucuuggg

SEQ ID NO: 284399 - RNA, 32 nt, Homo Sapiens
acauuauguggcagaggcugcccgcaccacag

SEQ ID NO: 284400 - RNA, 32 nt, Homo Sapiens
auacuguuacaaucuuuauuuguaucauaugu

SEQ ID NO: 284401 - RNA, 32 nt, Homo Sapiens
auuguuauuuuuguccuuaaaaauauuguaca

SEQ ID NO: 284402 - RNA, 32 nt, Homo Sapiens
uauccgagcucugcagaagugcaccgcuauug

SEQ ID NO: 284403 - RNA, 32 nt, Homo Sapiens
cauccugggccaguuuguucucucagaaccca

SEQ ID NO: 284404 - RNA, 32 nt, Homo Sapiens
caaagagaugcagguuguacuccaugagaauu

SEQ ID NO: 284405 - RNA, 32 nt, Homo Sapiens
agcaggcuuugugaaaauguaauacaaacagc

SEQ ID NO: 284406 - RNA, 32 nt, Homo Sapiens
uugacuacuucaagcagagggauuguaaacag

SEQ ID NO: 284407 - RNA, 32 nt, Homo Sapiens
ccaggccaccaagaggcccagcccuccaaacc

SEQ ID NO: 284408 - RNA, 32 nt, Homo Sapiens
uguaccuccaugagcuggacauaacagcuaau

SEQ ID NO: 284409 - RNA, 32 nt, Homo Sapiens
auuuggcgcucuuuuaauuacacucuguagaa

SEQ ID NO: 284410 - RNA, 32 nt, Homo Sapiens
uauacauucauauagaaaauuuagacaauaua

SEQ ID NO: 284411 - RNA, 31 nt, Homo Sapiens
cauagugucuaggagucucaggcaagguagg

SEQ ID NO: 284412 - RNA, 32 nt, Homo Sapiens
uuuaugcagucaaauuaguuauagaauaacuu

SEQ ID NO: 284413 - RNA, 32 nt, Homo Sapiens
aaaccaaggauauagaauaaaacaagagugua

SEQ ID NO: 284414 - RNA, 32 nt, Homo Sapiens
caaauggaaaaguuuuauucuaauaauugauu

SEQ ID NO: 284415 - RNA, 32 nt, Homo Sapiens
aacaucuuggggggaaagaauauuuugagaaa

SEQ ID NO: 284416 - RNA, 32 nt, Homo Sapiens
uuugcuugcacuuuuccacaucagaccuucca

SEQ ID NO: 284417 - RNA, 32 nt, Homo Sapiens
uacuaaugcucuaauaauguaaauuguuaaua

SEQ ID NO: 284418 - RNA, 32 nt, Homo Sapiens
uucaugcauuuguccuucucccacccccuuac

SEQ ID NO: 284419 - RNA, 30 nt, Homo Sapiens
uugcugggaggugggagaugcagccaggag

SEQ ID NO: 284420 - RNA, 32 nt, Homo Sapiens
ccaucaggucaccgcgaggccuauuguugaau

SEQ ID NO: 284421 - RNA, 32 nt, Homo Sapiens
uaggcacacagcaccaugccccggcuauuuuu

SEQ ID NO: 284422 - RNA, 31 nt, Homo Sapiens
uacaugucaaagaaaaaagauuuuaauaagc

SEQ ID NO: 284423 - RNA, 32 nt, Homo Sapiens
uaaaagacaaugaguaaauauuauaaaaucug

SEQ ID NO: 284424 - RNA, 32 nt, Homo Sapiens
cuguccccauccccccuccagccagaccucac

SEQ ID NO: 284425 - RNA, 32 nt, Homo Sapiens
uuuaucaacugagacuuuggggccuguaagcu

SEQ ID NO: 284426 - RNA, 32 nt, Homo Sapiens
cuggcugaagauuugaugugguuccuccuuaa

SEQ ID NO: 284427 - RNA, 32 nt, Homo Sapiens
aagcucaggaaaccuggucugcucuccugcau

SEQ ID NO: 284428 - RNA, 32 nt, Homo Sapiens
aaaauugccuugguaacuuucagauuccugug

SEQ ID NO: 284429 - RNA, 32 nt, Homo Sapiens
uucaagcgcuuggcagaaucuuguacuucgug

SEQ ID NO: 284430 - RNA, 32 nt, Homo Sapiens
uccgaggggguggaagggggugggcacacucc

SEQ ID NO: 284431 - RNA, 32 nt, Homo Sapiens
gucggaggcugcgagugucgcugcugaaggcu

SEQ ID NO: 284432 - RNA, 32 nt, Homo Sapiens
uauugagagauugccugccauaaaaacagcau

SEQ ID NO: 284433 - RNA, 32 nt, Homo Sapiens
cgcacuccauucuccuuuuacauuuuaucaug

SEQ ID NO: 284434 - RNA, 32 nt, Homo Sapiens
cauuaauguauuauaaaacuuguguggaaaaa

SEQ ID NO: 284435 - RNA, 32 nt, Homo Sapiens
ugcaguagaaacaaaaguaggcuacagucugu

SEQ ID NO: 284436 - RNA, 32 nt, Homo Sapiens
ccuagccugagacuuggcggcgcggcugcuau

SEQ ID NO: 284437 - RNA, 32 nt, Homo Sapiens
ucaguguccagcacgucguggccucugguccg

SEQ ID NO: 284438 - RNA, 32 nt, Homo Sapiens
gaagagggaucccacgaaguuauucuuacgca

SEQ ID NO: 284439 - RNA, 32 nt, Homo Sapiens
caggaugcucucaaggaccccucgggcucaga

SEQ ID NO: 284440 - RNA, 32 nt, Homo Sapiens
aguugaugggagcuguugaaacagguaaacag

SEQ ID NO: 284441 - RNA, 32 nt, Homo Sapiens
uucaugccauucuccugcuucagccuccugag

SEQ ID NO: 284442 - RNA, 32 nt, Homo Sapiens
cauaaaagauaaaaaacauauuuguuucauca

SEQ ID NO: 284443 - RNA, 32 nt, Homo Sapiens
gaaaaggguauuaaugauacaaauaugaugug

SEQ ID NO: 284444 - RNA, 32 nt, Homo Sapiens
guccuccguugacacagcuucucuggagaccc

SEQ ID NO: 284445 - RNA, 32 nt, Homo Sapiens
aaacucugcuccagguuuuuguugaaaugugg

SEQ ID NO: 284446 - RNA, 32 nt, Homo Sapiens
gcuucuuaaaacuugggcacuuuuauuuguuu

SEQ ID NO: 284447 - RNA, 32 nt, Homo Sapiens
cccucugucuccuuccuucucgggccucaccc

SEQ ID NO: 284448 - RNA, 32 nt, Homo Sapiens
gagagagcgaccgccgccccgcgcucagggcc

SEQ ID NO: 284449 - RNA, 32 nt, Homo Sapiens
ccuguuuucuucauucccugauagcuaucuca

SEQ ID NO: 284450 - RNA, 32 nt, Homo Sapiens
ugggaaccagugccugagucacagcugucagu

SEQ ID NO: 284451 - RNA, 32 nt, Homo Sapiens
cauucaaaauuccccguccugucaguguuugc

SEQ ID NO: 284452 - RNA, 32 nt, Homo Sapiens
augaucagaaaagaucuagagugcaaagaggu

SEQ ID NO: 284453 - RNA, 32 nt, Homo Sapiens
gccccccggagccccagauccccguucccccc

SEQ ID NO: 284454 - RNA, 32 nt, Homo Sapiens
gaguuauuugguuuuugacuuaaauuccuauu

SEQ ID NO: 284455 - RNA, 32 nt, Homo Sapiens
auuacagugccuaaaauaagaauagaacaaca

SEQ ID NO: 284456 - RNA, 32 nt, Homo Sapiens
uagauacuaauaaaaauaaggcuguguaauuu

SEQ ID NO: 284457 - RNA, 32 nt, Homo Sapiens
ucuaaggacgaaggaaagggccaggcaaggcu

SEQ ID NO: 284458 - RNA, 32 nt, Homo Sapiens
gcugugcugucaugcagcuaaccucugaugug

SEQ ID NO: 284459 - RNA, 32 nt, Homo Sapiens
cgggaacccgaguuucaguccuccccagacag

SEQ ID NO: 284460 - RNA, 32 nt, Homo Sapiens
cucccaggcaggucaucuuuucugggagaugc

SEQ ID NO: 284461 - RNA, 32 nt, Homo Sapiens
uaguuauugucagagaaauaaccauaguguaa

SEQ ID NO: 284462 - RNA, 32 nt, Homo Sapiens
gagcguugcguucgguuucccgagggucuucu

SEQ ID NO: 284463 - RNA, 32 nt, Homo Sapiens
ccgggcugcacgagcggccgcacaaggaccac

SEQ ID NO: 284464 - RNA, 32 nt, Homo Sapiens
gguggcuucucuccuuccuccucccauagccc

SEQ ID NO: 284465 - RNA, 32 nt, Homo Sapiens
ccgggcggcuacgggcggggugucgcagcucu

SEQ ID NO: 284466 - RNA, 32 nt, Homo Sapiens
agaaaaauguuguuuuucaacuugcuuuauaa

SEQ ID NO: 284467 - RNA, 32 nt, Homo Sapiens
auuagccgggcaugauggcgcgugccuguaau

SEQ ID NO: 284468 - RNA, 32 nt, Homo Sapiens
aagacaucaucugucugcauuuauugagaaug

SEQ ID NO: 284469 - RNA, 32 nt, Homo Sapiens
gaauguuaauuuaagacuauuuuaucaauuaa

SEQ ID NO: 284470 - RNA, 32 nt, Homo Sapiens
ucuuuccagaaaaucuaauuucaucauugaga

SEQ ID NO: 284471 - RNA, 32 nt, Homo Sapiens
uugagaaugcaaaagaaauuaaaucugaauaa

SEQ ID NO: 284472 - RNA, 32 nt, Homo Sapiens
agaagcugaaagauucuuggaacauuuuagcu

SEQ ID NO: 284473 - RNA, 32 nt, Homo Sapiens
uuuagcauccuguuauaugcauacaguugcug

SEQ ID NO: 284474 - RNA, 32 nt, Homo Sapiens
uuuuccaguagaaaauaguuugugaaaugaug

SEQ ID NO: 284475 - RNA, 32 nt, Homo Sapiens
uguuuucauuuucucuagacauucaucugaaa

SEQ ID NO: 284476 - RNA, 32 nt, Homo Sapiens
ugguccccacccagaggguccuggggggcggg

SEQ ID NO: 284477 - RNA, 29 nt, Homo Sapiens
auauuuucuccccaauaccaccaacgaag

SEQ ID NO: 284478 - RNA, 32 nt, Homo Sapiens
gccccagugugcacagaagaauuggaccaggu

SEQ ID NO: 284479 - RNA, 32 nt, Homo Sapiens
cccugccccucccccggccccccaucccucac

SEQ ID NO: 284480 - RNA, 32 nt, Homo Sapiens
acuuccuuuugguuuuucaguacuguuucaua

SEQ ID NO: 284481 - RNA, 32 nt, Homo Sapiens
ggguccgugcucccagcccgcuucgagggguu

SEQ ID NO: 284482 - RNA, 32 nt, Homo Sapiens
gccgucggagcagccccuccucacuucagggg

SEQ ID NO: 284483 - RNA, 32 nt, Homo Sapiens
cagaagaauggacuugcuaaaugaccuagcac

SEQ ID NO: 284484 - RNA, 32 nt, Homo Sapiens
aggcagugguggcucggcuagagaagcagaac

SEQ ID NO: 284485 - RNA, 32 nt, Homo Sapiens
aaaagaaaugcagauuucccaguuaucuugcu

SEQ ID NO: 284486 - RNA, 32 nt, Homo Sapiens
agaaaggauucaguuaaccaaacaagaaaaag

SEQ ID NO: 284487 - RNA, 32 nt, Homo Sapiens
gaguuguacugguuagauucauuagguugaau

SEQ ID NO: 284488 - RNA, 32 nt, Homo Sapiens
caguccagcucuggggccuccaggccaugugg

SEQ ID NO: 284489 - RNA, 32 nt, Homo Sapiens
caaaaugaacuuacucuagaaagcuuacccuu

SEQ ID NO: 284490 - RNA, 32 nt, Homo Sapiens
gugcacuuuguccuugccaccaauggcgggag

SEQ ID NO: 284491 - RNA, 32 nt, Homo Sapiens
acccagacccuuccagcacgggccggccaagu

SEQ ID NO: 284492 - RNA, 32 nt, Homo Sapiens
ucccugcuaugaaaagugaugugguagcaauu

SEQ ID NO: 284493 - RNA, 32 nt, Homo Sapiens
gauguugcgggcagaaaacauaaaagagguga

SEQ ID NO: 284494 - RNA, 32 nt, Homo Sapiens
uuaagggacagagguaguauaguuagauauac

SEQ ID NO: 284495 - RNA, 32 nt, Homo Sapiens
cccugagcgcaccggcccuuccugucacccag

SEQ ID NO: 284496 - RNA, 32 nt, Homo Sapiens
aggcagccgggcgggugagcgagcagaggcgu

SEQ ID NO: 284497 - RNA, 32 nt, Homo Sapiens
ucaaaugcauuacuaucaguguccuaggcaau

SEQ ID NO: 284498 - RNA, 32 nt, Homo Sapiens
gcuaaagugggaagaaggagaacuugaagcca

SEQ ID NO: 284499 - RNA, 32 nt, Homo Sapiens
ccucuuugucuacaccauuaugugcgcugaua

SEQ ID NO: 284500 - RNA, 32 nt, Homo Sapiens
uuuaaaaagacaaauaaaaacaguguuuuaua

SEQ ID NO: 284501 - RNA, 32 nt, Homo Sapiens
auuguaguuguuuugguaaaaucuucauuucc

SEQ ID NO: 284502 - RNA, 32 nt, Homo Sapiens
uagguuagagggucccugggaucccuucaucu

SEQ ID NO: 284503 - RNA, 32 nt, Homo Sapiens
gaauaaaggacgcagaauagggagaaaaacuu

SEQ ID NO: 284504 - RNA, 32 nt, Homo Sapiens
gcuucacuucagcccggaugccggcgaugggg

SEQ ID NO: 284505 - RNA, 32 nt, Homo Sapiens
uuaauuucaaagcuuuauucugucugccuaag

SEQ ID NO: 284506 - RNA, 32 nt, Homo Sapiens
ggaaagggcucuuuuccugcuguuucaaaaau

SEQ ID NO: 284507 - RNA, 32 nt, Homo Sapiens
gcaccaauuuaaaagagaaguuucuagucagc

SEQ ID NO: 284508 - RNA, 32 nt, Homo Sapiens
gaacugcccucccccuccucucggugcagcca

SEQ ID NO: 284509 - RNA, 32 nt, Homo Sapiens
gcauguaccaacagcacaacuuugaaaacugu

SEQ ID NO: 284510 - RNA, 32 nt, Homo Sapiens
aucggguguuuguuaucagaaaagagaugaga

SEQ ID NO: 284511 - RNA, 32 nt, Homo Sapiens
ggaaguuugccaucuccauccuccucaagcug

SEQ ID NO: 284512 - RNA, 32 nt, Homo Sapiens
cuugaagcugaaucuaugcuaguagauauaac

SEQ ID NO: 284513 - RNA, 32 nt, Homo Sapiens
uaggaauugacuccaaugcagaauagugagaa

SEQ ID NO: 284514 - RNA, 32 nt, Homo Sapiens
cugaggacuugaugaagugauccuuaaccccc

SEQ ID NO: 284515 - RNA, 31 nt, Homo Sapiens
auuuguggguuccccaucagccaggccuugg

SEQ ID NO: 284516 - RNA, 32 nt, Homo Sapiens
auucauucauucaaucaauuuauuuuuggagc

SEQ ID NO: 284517 - RNA, 32 nt, Homo Sapiens
aauccagagagguagugaggugucagagcuaa

SEQ ID NO: 284518 - RNA, 32 nt, Homo Sapiens
gagagcaggcaggcccacugcugcugagaaca

SEQ ID NO: 284519 - RNA, 32 nt, Homo Sapiens
aucaagauguauauuucauacucagugugucu

SEQ ID NO: 284520 - RNA, 32 nt, Homo Sapiens
caccagugguauauuccacaacagugucacag

SEQ ID NO: 284521 - RNA, 32 nt, Homo Sapiens
cucuucuggucuuuccucuucuguuuauggag

SEQ ID NO: 284522 - RNA, 32 nt, Homo Sapiens
uuaaguauaaaauaaauuauguucuuaaugcc

SEQ ID NO: 284523 - RNA, 32 nt, Homo Sapiens
uuuggcaggcccagcuccugccugccaguggc

SEQ ID NO: 284524 - RNA, 32 nt, Homo Sapiens
caacuaacuggugaacaaugggcuguuucuag

SEQ ID NO: 284525 - RNA, 32 nt, Homo Sapiens
ucaucccaggacacugaaacuggaagaacuga

SEQ ID NO: 284526 - RNA, 32 nt, Homo Sapiens
ugcucuguacaaucggccucuuuacaauaaaa

SEQ ID NO: 284527 - RNA, 32 nt, Homo Sapiens
gaaguggagugaauaccaaauguuugcccugg

SEQ ID NO: 284528 - RNA, 32 nt, Homo Sapiens
cucccuagucuccaccugagacccugggagag

SEQ ID NO: 284529 - RNA, 32 nt, Homo Sapiens
ucuguugcuagauaaauagaaacuaauaauag

SEQ ID NO: 284530 - RNA, 32 nt, Homo Sapiens
ucaauuuaguugccucauagaaguauaacugc

SEQ ID NO: 284531 - RNA, 32 nt, Homo Sapiens
ccuuaagaagauaaaugagcgcagcagagaug

SEQ ID NO: 284532 - RNA, 32 nt, Homo Sapiens
gcauguagcucuugcuuauuuacuggucuggg

SEQ ID NO: 284533 - RNA, 32 nt, Homo Sapiens
gcuguacacacguguauggguacgcguuuggc

SEQ ID NO: 284534 - RNA, 32 nt, Homo Sapiens
uauccugcuucauaacuuguauggagaacuca

SEQ ID NO: 284535 - RNA, 32 nt, Homo Sapiens
uuuuaacacaucagcauucaccaccagguuua

SEQ ID NO: 284536 - RNA, 32 nt, Homo Sapiens
aaucaugucauucuuuaagugggcuaugcuuu

SEQ ID NO: 284537 - RNA, 32 nt, Homo Sapiens
uguuauuagaaauuuucuuuuauugaaugaga

SEQ ID NO: 284538 - RNA, 32 nt, Homo Sapiens
gcuccccggaaaggacggggcguguuaccggg

SEQ ID NO: 284539 - RNA, 32 nt, Homo Sapiens
aggucuuucuucaccugaacugugucuaaagc

SEQ ID NO: 284540 - RNA, 32 nt, Homo Sapiens
cccccggaauccacagugcucugcuucucugu

SEQ ID NO: 284541 - RNA, 32 nt, Homo Sapiens
aaggacaguuuagggaacaaguuaccuaccac

SEQ ID NO: 284542 - RNA, 32 nt, Homo Sapiens
ggacuuauggaaaagcugacaccuaguuuacc

SEQ ID NO: 284543 - RNA, 32 nt, Homo Sapiens
ccaucucaauaguuacaagaauuaaaagagau

SEQ ID NO: 284544 - RNA, 31 nt, Homo Sapiens
gaaauaaaacaaaagcauauucaauggaagg

SEQ ID NO: 284545 - RNA, 32 nt, Homo Sapiens
augaaaaggcacccacagcaucaugcaagugg

SEQ ID NO: 284546 - RNA, 32 nt, Homo Sapiens
acauucuuuuaaaaucuaggucuugguuuugu

SEQ ID NO: 284547 - RNA, 32 nt, Homo Sapiens
aggugaugucugggucuauuuugcauucuaaa

SEQ ID NO: 284548 - RNA, 32 nt, Homo Sapiens
ucggugcgcuacgcaggacgccgccucacgca

SEQ ID NO: 284549 - RNA, 32 nt, Homo Sapiens
acaagaccagcaugccuugcugcacgugugug

SEQ ID NO: 284550 - RNA, 32 nt, Homo Sapiens
uuauuuaauaauuuauaaauaccaaguucauu

SEQ ID NO: 284551 - RNA, 32 nt, Homo Sapiens
acuuuauuggguccagauuguuguguggcuuc

SEQ ID NO: 284552 - RNA, 32 nt, Homo Sapiens
aucagcgccgccgccgccgcgcggcgcccaau

SEQ ID NO: 284553 - RNA, 32 nt, Homo Sapiens
uugucuguguguccagaggaggaguccaucau

SEQ ID NO: 284554 - RNA, 32 nt, Homo Sapiens
guucacuacuuuuccugauuaagggaucugug

SEQ ID NO: 284555 - RNA, 32 nt, Homo Sapiens
cauuuguauguggcagcuagagauuuauauag

SEQ ID NO: 284556 - RNA, 32 nt, Homo Sapiens
cagcccuagcccucagcccaccuggggaguuu

SEQ ID NO: 284557 - RNA, 32 nt, Homo Sapiens
ggcgggaucugcaguucggacuccgcgcgcca

SEQ ID NO: 284558 - RNA, 32 nt, Homo Sapiens
ggagcuaagggcgaggcccuucccuucagagg

SEQ ID NO: 284559 - RNA, 32 nt, Homo Sapiens
uuucuauuugaaaaugugcugauucuuggaau

SEQ ID NO: 284560 - RNA, 32 nt, Homo Sapiens
gcagaauaaaugaauuaauguuuuacuuaauu

SEQ ID NO: 284561 - RNA, 32 nt, Homo Sapiens
caggccucccugccucagcugcaucugauaaa

SEQ ID NO: 284562 - RNA, 32 nt, Homo Sapiens
uuugaacccagcugcucuguacugcacuuaga

SEQ ID NO: 284563 - RNA, 32 nt, Homo Sapiens
ggcggacgggccaggcgggcggccuccugaac

SEQ ID NO: 284564 - RNA, 32 nt, Homo Sapiens
uccacagugaugcagaggacaaacaccgacgu

SEQ ID NO: 284565 - RNA, 32 nt, Homo Sapiens
gaccauuuguaauuuuuucauauuaucuaaaa

SEQ ID NO: 284566 - RNA, 32 nt, Homo Sapiens
uuucuguuuaauggaagaaagaaauccagccu

SEQ ID NO: 284567 - RNA, 32 nt, Homo Sapiens
aguugagacauuacauauauuuuauuguuuau

SEQ ID NO: 284568 - RNA, 32 nt, Homo Sapiens
acccuccacccucccccggcagggcggagagg

SEQ ID NO: 284569 - RNA, 27 nt, Homo Sapiens
auugcucaacucuucagcccccucccc

SEQ ID NO: 284570 - RNA, 32 nt, Homo Sapiens
ugcugauagaaagcacuauacauccuauuguu

SEQ ID NO: 284571 - RNA, 29 nt, Homo Sapiens
cagcucugggaacagaggacacugaggac

SEQ ID NO: 284572 - RNA, 32 nt, Homo Sapiens
cuuuguuuuaucggcauuaccuuuucuacaag

SEQ ID NO: 284573 - RNA, 32 nt, Homo Sapiens
guuuagauaaacuucagugaaaugacucuuca

SEQ ID NO: 284574 - RNA, 32 nt, Homo Sapiens
caccaggcgggugggacucaagggcaggcugg

SEQ ID NO: 284575 - RNA, 30 nt, Homo Sapiens
acuuagggggugagcgcgggugucgagguc

SEQ ID NO: 284576 - RNA, 32 nt, Homo Sapiens
uuuuuaaaaagagaagaaaaauacuaguuuuc

SEQ ID NO: 284577 - RNA, 32 nt, Homo Sapiens
auuugcaaaaugugcaaagaccucuuaugagg

SEQ ID NO: 284578 - RNA, 32 nt, Homo Sapiens
gucacccucuucgucucccucuucgguguucg

SEQ ID NO: 284579 - RNA, 32 nt, Homo Sapiens
cgguggcggcggcggcggcagcucgggagugc

SEQ ID NO: 284580 - RNA, 32 nt, Homo Sapiens
agggacuggaggccagcgguguccacccuugc

SEQ ID NO: 284581 - RNA, 32 nt, Homo Sapiens
cuaacgucccccuggggugguucagaaagaug

SEQ ID NO: 284582 - RNA, 32 nt, Homo Sapiens
gauccagagacaagacagcaccuaguauaaug

SEQ ID NO: 284583 - RNA, 27 nt, Homo Sapiens
gcgauucucagcuucagccuccugagu

SEQ ID NO: 284584 - RNA, 32 nt, Homo Sapiens
uccuagacuggacucuugagggacauauugga

SEQ ID NO: 284585 - RNA, 32 nt, Homo Sapiens
cugcccggacccgacaccgccacccucgcucc

SEQ ID NO: 284586 - RNA, 32 nt, Homo Sapiens
cgugcugugggaagagagcagccguguggcag

SEQ ID NO: 284587 - RNA, 32 nt, Homo Sapiens
gcccccagccccagccuacccugagggccugc

SEQ ID NO: 284588 - RNA, 32 nt, Homo Sapiens
gcugacauuucuaagcaagauaggaagggagc

SEQ ID NO: 284589 - RNA, 32 nt, Homo Sapiens
cauauuacuuuuuaacuuuaaaucucaaagag

SEQ ID NO: 284590 - RNA, 32 nt, Homo Sapiens
uugcuucugcuuccauuuuuagcauuuuaguu

SEQ ID NO: 284591 - RNA, 32 nt, Homo Sapiens
aucaaauuacacaacugaacucaagacauggc

SEQ ID NO: 284592 - RNA, 32 nt, Homo Sapiens
ugaaggcccugcugcuacugcugcugggggug

SEQ ID NO: 284593 - RNA, 32 nt, Homo Sapiens
cugccgcggccccucgggccuguccacauccc

SEQ ID NO: 284594 - RNA, 32 nt, Homo Sapiens
uauauauuuuuggacugguguuuuucacaaag

SEQ ID NO: 284595 - RNA, 32 nt, Homo Sapiens
aauacagaaagauggaugugcuuugcauuccu

SEQ ID NO: 284596 - RNA, 32 nt, Homo Sapiens
gguaagaagaucugguuuuuuggucaaaggga

SEQ ID NO: 284597 - RNA, 32 nt, Homo Sapiens
cuggguagggaagagaaggggcaugugguauc

SEQ ID NO: 284598 - RNA, 31 nt, Homo Sapiens
guuauaguguaaaagcagccauagacaguag

SEQ ID NO: 284599 - RNA, 32 nt, Homo Sapiens
cugaugcuggggacacagcaucagcucaagac

SEQ ID NO: 284600 - RNA, 32 nt, Homo Sapiens
ugggaggaagggggcguggcaaggggugggca

SEQ ID NO: 284601 - RNA, 32 nt, Homo Sapiens
gaugggcuuucuacagccugcuuaccacuaac

SEQ ID NO: 284602 - RNA, 32 nt, Homo Sapiens
cauuggguaugaaaauggauguauguuuagaa

SEQ ID NO: 284603 - RNA, 32 nt, Homo Sapiens
aagaccuauuccauccugguacaugaaaaaga

SEQ ID NO: 284604 - RNA, 32 nt, Homo Sapiens
cagccacucgggcuuguaacugucugagcccc

SEQ ID NO: 284605 - RNA, 32 nt, Homo Sapiens
uuaauuaaugaaaacugaauuauagauuguuu

SEQ ID NO: 284606 - RNA, 32 nt, Homo Sapiens
ucauuguaacugugacuuuucucucugucugc

SEQ ID NO: 284607 - RNA, 32 nt, Homo Sapiens
caggcaucuccauggccuuggcagccuccacc

SEQ ID NO: 284608 - RNA, 32 nt, Homo Sapiens
ugggcuuucuucagaggucacuucuacccuug

SEQ ID NO: 284609 - RNA, 32 nt, Homo Sapiens
ggaagccauuggcagggcugccgugcaugugg

SEQ ID NO: 284610 - RNA, 32 nt, Homo Sapiens
cgaggucuccgcggcccgaggucuccgcccgc

SEQ ID NO: 284611 - RNA, 32 nt, Homo Sapiens
cacugcaggaggaaggguggagugggcgcagg

SEQ ID NO: 284612 - RNA, 32 nt, Homo Sapiens
auauuuauuucccccauuucaagcccugaguc

SEQ ID NO: 284613 - RNA, 32 nt, Homo Sapiens
uuaggucgcucuggggcuaucaggccagcaug

SEQ ID NO: 284614 - RNA, 32 nt, Homo Sapiens
uggagguugcggcggcggcugcggcgcagccc

SEQ ID NO: 284615 - RNA, 32 nt, Homo Sapiens
gggaggcggcaggcgcgcggcgcggacagcug

SEQ ID NO: 284616 - RNA, 32 nt, Homo Sapiens
cuucuacagagucugagaagauaucaucaugc

SEQ ID NO: 284617 - RNA, 32 nt, Homo Sapiens
uacuguggggccuugugagcugcuucuaagag

SEQ ID NO: 284618 - RNA, 32 nt, Homo Sapiens
guuggugguggugguucuuaauuuuuaauuua

SEQ ID NO: 284619 - RNA, 32 nt, Homo Sapiens
auuuuuugucauuugcaacggaaugagacaug

SEQ ID NO: 284620 - RNA, 32 nt, Homo Sapiens
uuuaagcucuuggaaaagcuccagguccucau

SEQ ID NO: 284621 - RNA, 32 nt, Homo Sapiens
acgggucggugugucccguuucccucugugcg

SEQ ID NO: 284622 - RNA, 32 nt, Homo Sapiens
caacccugaaagauuaugaacuaugaauuguc

SEQ ID NO: 284623 - RNA, 32 nt, Homo Sapiens
uguccaggcauggccuguggcccgagggccaa

SEQ ID NO: 284624 - RNA, 32 nt, Homo Sapiens
cuguugccucauuccuugaguuucacucuucc

SEQ ID NO: 284625 - RNA, 32 nt, Homo Sapiens
acagcucugcccgccgcagaugguguaauugc

SEQ ID NO: 284626 - RNA, 32 nt, Homo Sapiens
guacuaugcugcucagauagaacuggucagac

SEQ ID NO: 284627 - RNA, 32 nt, Homo Sapiens
aggggcaggguguacagcagugaugggguggg

SEQ ID NO: 284628 - RNA, 28 nt, Homo Sapiens
uucaggagucagugacauuugaggaugu

SEQ ID NO: 284629 - RNA, 32 nt, Homo Sapiens
ugagauggaagacauggcuaguucuuuucagc

SEQ ID NO: 284630 - RNA, 32 nt, Homo Sapiens
ggaucgggccccaugucugugcugucuaguuu

SEQ ID NO: 284631 - RNA, 32 nt, Homo Sapiens
uaaauuaauaauauuucuuugcuacuuaauaa

SEQ ID NO: 284632 - RNA, 32 nt, Homo Sapiens
cgagaagagggaggagacacuggugugacuca

SEQ ID NO: 284633 - RNA, 32 nt, Homo Sapiens
caacauggccgugaacuuuaugcuguaaauaa

SEQ ID NO: 284634 - RNA, 32 nt, Homo Sapiens
ucauuaaauuuauuuguacucagaacuguuac

SEQ ID NO: 284635 - RNA, 32 nt, Homo Sapiens
gcagugaaugaaugaaccuugcccuggguuua

SEQ ID NO: 284636 - RNA, 32 nt, Homo Sapiens
cugucaccagaggagcugguccugcugcuuag

SEQ ID NO: 284637 - RNA, 32 nt, Homo Sapiens
auauugugucauuguucuguuuuauaauaaaa

SEQ ID NO: 284638 - RNA, 32 nt, Homo Sapiens
ugacagucugcagggaugugaauagaaaccca

SEQ ID NO: 284639 - RNA, 32 nt, Homo Sapiens
uuuaacuuguuaugaaaucuuuguugugugau

SEQ ID NO: 284640 - RNA, 32 nt, Homo Sapiens
guucaguucuccugggcuccagccuccugcaa

SEQ ID NO: 284641 - RNA, 32 nt, Homo Sapiens
ggauuccaggcccagggcuucuacucugcccc

SEQ ID NO: 284642 - RNA, 32 nt, Homo Sapiens
ugggccccacccauugccaagccaggaaggca

SEQ ID NO: 284643 - RNA, 32 nt, Homo Sapiens
uagggcacuggggguggcgcgcggccaggagc

SEQ ID NO: 284644 - RNA, 32 nt, Homo Sapiens
aacccaggucugcccuauggcagacgccgugu

SEQ ID NO: 284645 - RNA, 32 nt, Homo Sapiens
uguguaugugcgugugcgugcacaugugugcc

SEQ ID NO: 284646 - RNA, 32 nt, Homo Sapiens
guuuuuaggugguucccugcugcacagcguga

SEQ ID NO: 284647 - RNA, 32 nt, Homo Sapiens
cccggccgccccaucugggaagugaggagcuc

SEQ ID NO: 284648 - RNA, 32 nt, Homo Sapiens
agcgcgggggcuccggccgugccuccgcgucc

SEQ ID NO: 284649 - RNA, 32 nt, Homo Sapiens
gagauggccucagcuguggggcugguccaugu

SEQ ID NO: 284650 - RNA, 32 nt, Homo Sapiens
guuugcugcucaaauuuuuccacuagcguaac

SEQ ID NO: 284651 - RNA, 32 nt, Homo Sapiens
guucuggcuguggucagcagaugccagugaag

SEQ ID NO: 284652 - RNA, 32 nt, Homo Sapiens
cacagugaaauauuuugaguacaauuuuguug

SEQ ID NO: 284653 - RNA, 32 nt, Homo Sapiens
ggccgaggagcggcggacucggggcgcgggga

SEQ ID NO: 284654 - RNA, 32 nt, Homo Sapiens
uaagauuuaucauuuuaaucauucguaagugg

SEQ ID NO: 284655 - RNA, 31 nt, Homo Sapiens
gcgguggcuguggucaggccaagggcaggcc

SEQ ID NO: 284656 - RNA, 32 nt, Homo Sapiens
cagccuguccuuuccccagcuccuauaccucu

SEQ ID NO: 284657 - RNA, 29 nt, Homo Sapiens
cagcaaauagugauaacaaauaaaaccuu

SEQ ID NO: 284658 - RNA, 32 nt, Homo Sapiens
auuugaugugacucagucuccauucuucccug

SEQ ID NO: 284659 - RNA, 32 nt, Homo Sapiens
aaucauaaggauuuuuauugccgcuccauucu

SEQ ID NO: 284660 - RNA, 32 nt, Homo Sapiens
ucguggagcagggcuacaccauaggcagugug

SEQ ID NO: 284661 - RNA, 32 nt, Homo Sapiens
gugcuguauccugugcuuuuucugugggacca

SEQ ID NO: 284662 - RNA, 32 nt, Homo Sapiens
acguugaaagacugaggguacaaaaucauguu

SEQ ID NO: 284663 - RNA, 32 nt, Homo Sapiens
gauggggagggagggaguuuugucugucuccc

SEQ ID NO: 284664 - RNA, 32 nt, Homo Sapiens
ugugucccaagcacaggaaucccagcaguuuc

SEQ ID NO: 284665 - RNA, 32 nt, Homo Sapiens
uguaaaaaccuucccauaaaauguaagaaaag

SEQ ID NO: 284666 - RNA, 32 nt, Homo Sapiens
ggccuguggaggaggugaguguagccagcagc

SEQ ID NO: 284667 - RNA, 31 nt, Homo Sapiens
ucacuugagccccagggguggaggcugcaau

SEQ ID NO: 284668 - RNA, 32 nt, Homo Sapiens
cuaaucauuauuuauuuugguuuugauuuugc

SEQ ID NO: 284669 - RNA, 29 nt, Homo Sapiens
uuauauauauguauauacgacauauucag

SEQ ID NO: 284670 - RNA, 32 nt, Homo Sapiens
aggaacugcuguucaccauucauuccagaccu

SEQ ID NO: 284671 - RNA, 32 nt, Homo Sapiens
uagaauauacucaagguuuaggacugccuuca

SEQ ID NO: 284672 - RNA, 32 nt, Homo Sapiens
gaaguggcgggggaaggagugugguggugguu

SEQ ID NO: 284673 - RNA, 32 nt, Homo Sapiens
ugcucgagagguccgugggggaggccguggga

SEQ ID NO: 284674 - RNA, 32 nt, Homo Sapiens
ggcuggucuugaauuccugaccucaggugauc

SEQ ID NO: 284675 - RNA, 32 nt, Homo Sapiens
uugcacacacacaaaaucuugaccccguuauc

SEQ ID NO: 284676 - RNA, 32 nt, Homo Sapiens
cagaaugcagcuuucaagguucguuucaagca

SEQ ID NO: 284677 - RNA, 32 nt, Homo Sapiens
uuuugaaacugacuuccagagcuccacugccu

SEQ ID NO: 284678 - RNA, 32 nt, Homo Sapiens
caaguccacccuccccuucaggauggccuacc

SEQ ID NO: 284679 - RNA, 32 nt, Homo Sapiens
ucauugccugaagaugaaggccauacuaagac

SEQ ID NO: 284680 - RNA, 32 nt, Homo Sapiens
uaaaaucuugaaaguagaauaguucuauaaaa

SEQ ID NO: 284681 - RNA, 32 nt, Homo Sapiens
ucaaggcugucuggcgcgggacuccaugagcc

SEQ ID NO: 284682 - RNA, 32 nt, Homo Sapiens
uugcuccgagguauagguuuuguucgacugac

SEQ ID NO: 284683 - RNA, 32 nt, Homo Sapiens
cuuucacuguguuguucaugguggcuuuuugg

SEQ ID NO: 284684 - RNA, 32 nt, Homo Sapiens
cccucuccuugccagcuucuccccaggccaga

SEQ ID NO: 284685 - RNA, 32 nt, Homo Sapiens
ggcgcuuggacauagacacguggucccaggcc

SEQ ID NO: 284686 - RNA, 32 nt, Homo Sapiens
ucauggcggcggcggcggcggcggcggugcug

SEQ ID NO: 284687 - RNA, 32 nt, Homo Sapiens
uacucacaacgcugucacaucagucagggucc

SEQ ID NO: 284688 - RNA, 32 nt, Homo Sapiens
uggggucagguggcagcuauuccccaccaaga

SEQ ID NO: 284689 - RNA, 32 nt, Homo Sapiens
gacgggcuuucuuuggaagaugaugaaauugu

SEQ ID NO: 284690 - RNA, 32 nt, Homo Sapiens
cgggccuugggguucgggaaccacagcagggg

SEQ ID NO: 284691 - RNA, 32 nt, Homo Sapiens
uugguguuggauagagcuaguuucaggaacag

SEQ ID NO: 284692 - RNA, 32 nt, Homo Sapiens
auuacugaagagacuacucauguuguuaugaa

SEQ ID NO: 284693 - RNA, 32 nt, Homo Sapiens
cgaacucugcaccuuccuccaccaggagccug

SEQ ID NO: 284694 - RNA, 32 nt, Homo Sapiens
gaaagguuguuguuaauccuuuccagaaugau

SEQ ID NO: 284695 - RNA, 32 nt, Homo Sapiens
accgaggucccucucccgcuacgcugcucgga

SEQ ID NO: 284696 - RNA, 32 nt, Homo Sapiens
cugugacugcaucaccuuuauggaguguagac

SEQ ID NO: 284697 - RNA, 31 nt, Homo Sapiens
cacgccaugcugccauuaagcaccauuucag

SEQ ID NO: 284698 - RNA, 32 nt, Homo Sapiens
ggggcccugccagccugucgcccagaggccga

SEQ ID NO: 284699 - RNA, 32 nt, Homo Sapiens
aguuugggaagacgggggcgccagagcaggua

SEQ ID NO: 284700 - RNA, 32 nt, Homo Sapiens
uuuuuaaauuccauuuugauaauuuuuuuccu

SEQ ID NO: 284701 - RNA, 32 nt, Homo Sapiens
cuguccacuccagcaagauccagggaugauag

SEQ ID NO: 284702 - RNA, 32 nt, Homo Sapiens
ugauguguuaaaaauaaaaacaucuucacaga

SEQ ID NO: 284703 - RNA, 32 nt, Homo Sapiens
ggggaugcaugaggggggagggggugcugagu

SEQ ID NO: 284704 - RNA, 32 nt, Homo Sapiens
ggguccuaguggcggccgcagugucgcaggcc

SEQ ID NO: 284705 - RNA, 32 nt, Homo Sapiens
acaccucccugcucccucccccacucgaugug

SEQ ID NO: 284706 - RNA, 32 nt, Homo Sapiens
ggccgcucgccagcgucgcccgcuguguuggg

SEQ ID NO: 284707 - RNA, 32 nt, Homo Sapiens
caugagagucauuguggaaagaaauaaaauaa

SEQ ID NO: 284708 - RNA, 32 nt, Homo Sapiens
aguguguauuuuugggccacuccacggcaggu

SEQ ID NO: 284709 - RNA, 32 nt, Homo Sapiens
ucugccaugagcacaaaauuaugguaauuuuu

SEQ ID NO: 284710 - RNA, 32 nt, Homo Sapiens
ucaaaauggaguacacaauguuagaaagaccu

SEQ ID NO: 284711 - RNA, 32 nt, Homo Sapiens
ucccucuuguaagucaucuacuuaauaaauau

SEQ ID NO: 284712 - RNA, 32 nt, Homo Sapiens
agccccucccgcagcccuccucccucccgcuc

SEQ ID NO: 284713 - RNA, 32 nt, Homo Sapiens
agcccagccuuuccuuccguccuucugaaacc

SEQ ID NO: 284714 - RNA, 32 nt, Homo Sapiens
ggaaaacugacaucagaagaggucaacuugcc

SEQ ID NO: 284715 - RNA, 29 nt, Homo Sapiens
auaaaguaaaguuuauuuuccucugccau

SEQ ID NO: 284716 - RNA, 32 nt, Homo Sapiens
ccaagggcaugacaccaaguagacacuacaga

SEQ ID NO: 284717 - RNA, 32 nt, Homo Sapiens
auuuuuauaucgaucucuuauuuuacaauaaa

SEQ ID NO: 284718 - RNA, 32 nt, Homo Sapiens
cuucacuuagagacuggaguccugcuuauaau

SEQ ID NO: 284719 - RNA, 32 nt, Homo Sapiens
cugucugcaccuguauucauuguggaacuucc

SEQ ID NO: 284720 - RNA, 32 nt, Homo Sapiens
acaaucacauaagagggaggcagaggagacuu

SEQ ID NO: 284721 - RNA, 32 nt, Homo Sapiens
gggcaggcccuguucuggggccccaccacaug

SEQ ID NO: 284722 - RNA, 32 nt, Homo Sapiens
cucccgaagaaccuugccuaaggcuuccccaa

SEQ ID NO: 284723 - RNA, 30 nt, Homo Sapiens
aaccacccuaucccugccaaguuucugggc

SEQ ID NO: 284724 - RNA, 30 nt, Homo Sapiens
gaggggcggcaggccgcggguccugcugug

SEQ ID NO: 284725 - RNA, 32 nt, Homo Sapiens
ggcuggcccugcccucccccacggccgucccu

SEQ ID NO: 284726 - RNA, 32 nt, Homo Sapiens
uucccaauauauauuuguuaggucagugauac

SEQ ID NO: 284727 - RNA, 32 nt, Homo Sapiens
cguaagaaucaggccacugccuggaaagacuu

SEQ ID NO: 284728 - RNA, 32 nt, Homo Sapiens
ugguuauugcccauccugggcauuaaacuugg

SEQ ID NO: 284729 - RNA, 32 nt, Homo Sapiens
auaaaucuauaagguuaaguauguccccagaa

SEQ ID NO: 284730 - RNA, 32 nt, Homo Sapiens
caugaucauagccccaggaacccuugagguuc

SEQ ID NO: 284731 - RNA, 30 nt, Homo Sapiens
ugacaugucugugagcugcggaggcugcgg

SEQ ID NO: 284732 - RNA, 32 nt, Homo Sapiens
guggguguggccugggguggcucagggcugga

SEQ ID NO: 284733 - RNA, 32 nt, Homo Sapiens
auuuguaguuugccccaccugcccuaaauaag

SEQ ID NO: 284734 - RNA, 32 nt, Homo Sapiens
aguucaccuccucccccaaacacacacacaca

SEQ ID NO: 284735 - RNA, 32 nt, Homo Sapiens
accccuugauuuuuauuucuuuuucuuuuguu

SEQ ID NO: 284736 - RNA, 32 nt, Homo Sapiens
ccaaauuugggguugaugugaacauuuuaugu

SEQ ID NO: 284737 - RNA, 32 nt, Homo Sapiens
cuucugcuguccuuuggagggugucuucuggg

SEQ ID NO: 284738 - RNA, 32 nt, Homo Sapiens
agggacuuuuuguugauaauccaaauacucaa

SEQ ID NO: 284739 - RNA, 32 nt, Homo Sapiens
gggcugccagguuggacgcagcugcugcugcc

SEQ ID NO: 284740 - RNA, 32 nt, Homo Sapiens
ugcuggauucuauuucaucugcuguugauacu

SEQ ID NO: 284741 - RNA, 32 nt, Homo Sapiens
uagcauuuucaauuuacaauauuuucaacuga

SEQ ID NO: 284742 - RNA, 32 nt, Homo Sapiens
ucagugcucuugacccagguccagcgagccuu

SEQ ID NO: 284743 - RNA, 32 nt, Homo Sapiens
ccacacuguacuguucaagucaauguuaauaa

SEQ ID NO: 284744 - RNA, 32 nt, Homo Sapiens
ccucgugccggcggcccaggcacggagaggcg

SEQ ID NO: 284745 - RNA, 32 nt, Homo Sapiens
uaagauaagauauacuggagauaaaaccuuua

SEQ ID NO: 284746 - RNA, 32 nt, Homo Sapiens
uucugcucugucgucucuccacagcaccuuug

SEQ ID NO: 284747 - RNA, 32 nt, Homo Sapiens
aaacgaggccucacuauauuguccaggcugag

SEQ ID NO: 284748 - RNA, 30 nt, Homo Sapiens
gcgccaggagguggaccccagagugugagu

SEQ ID NO: 284749 - RNA, 32 nt, Homo Sapiens
gucagauuuuuguuuucuuucuuucagccuga

SEQ ID NO: 284750 - RNA, 32 nt, Homo Sapiens
gugcuguucguuuauagaaagcugacuuuuua

SEQ ID NO: 284751 - RNA, 32 nt, Homo Sapiens
acugucccucuuccugcccccggguaccacag

SEQ ID NO: 284752 - RNA, 32 nt, Homo Sapiens
ucugcccgccucgaccucccaaggugcugaga

SEQ ID NO: 284753 - RNA, 32 nt, Homo Sapiens
agaggcgcggaggcggcgagggcgcgggggcu

SEQ ID NO: 284754 - RNA, 32 nt, Homo Sapiens
gcuaggccucgaggccuagccgagugggagug

SEQ ID NO: 284755 - RNA, 32 nt, Homo Sapiens
agggggccagggaaacaaaauuuuaaaaauaa

SEQ ID NO: 284756 - RNA, 32 nt, Homo Sapiens
aucauacaucagagaacccacacuggagagaa

SEQ ID NO: 284757 - RNA, 32 nt, Homo Sapiens
ggcccaggugaccccuaagaaccaggagaugg

SEQ ID NO: 284758 - RNA, 32 nt, Homo Sapiens
gcaucugauauuaaacgggagguuuuaagaag

SEQ ID NO: 284759 - RNA, 32 nt, Homo Sapiens
ggccuccgagguucgagggcugcgaggcugug

SEQ ID NO: 284760 - RNA, 32 nt, Homo Sapiens
gcuugggaaggggauggcugcgcaagcccaca

SEQ ID NO: 284761 - RNA, 32 nt, Homo Sapiens
ugccagccccuacagugaguccccaugccaug

SEQ ID NO: 284762 - RNA, 32 nt, Homo Sapiens
acuuugcuucucccccagcaguuuggcaauaa

SEQ ID NO: 284763 - RNA, 30 nt, Homo Sapiens
aagggugggaagcuugcuggcuucuguugc

SEQ ID NO: 284764 - RNA, 32 nt, Homo Sapiens
cuggcacguccacguggcccagcccucauaga

SEQ ID NO: 284765 - RNA, 32 nt, Homo Sapiens
cuugcagcaccaccugcaggaccuccuccugc

SEQ ID NO: 284766 - RNA, 32 nt, Homo Sapiens
ugccgguccgagucuccuaccucccccaaccc

SEQ ID NO: 284767 - RNA, 32 nt, Homo Sapiens
cuuaccuugaacaaaauuuugucuguguuccu

SEQ ID NO: 284768 - RNA, 32 nt, Homo Sapiens
ccauacacacacauggagaagccaggagagga

SEQ ID NO: 284769 - RNA, 32 nt, Homo Sapiens
ucccaguuccagcccgugucauuaaaacuccg

SEQ ID NO: 284770 - RNA, 32 nt, Homo Sapiens
uuaaguccugucaucccuaccagccaauccca

SEQ ID NO: 284771 - RNA, 32 nt, Homo Sapiens
cccacucaaaaauaucuaaacugauaguggga

SEQ ID NO: 284772 - RNA, 32 nt, Homo Sapiens
cacacuuuucuuaaaugauggaauaaaguacu

SEQ ID NO: 284773 - RNA, 32 nt, Homo Sapiens
gaaugaaugaggugauauccacaguguccaac

SEQ ID NO: 284774 - RNA, 32 nt, Homo Sapiens
aggugguggaggcggcggaggcggcggcggag

SEQ ID NO: 284775 - RNA, 32 nt, Homo Sapiens
auugcucuauaaguauaaugaagaggaugaua

SEQ ID NO: 284776 - RNA, 32 nt, Homo Sapiens
acagacuguaaauuucuugauggcaagaacca

SEQ ID NO: 284777 - RNA, 32 nt, Homo Sapiens
acaucaauugaaagagaagaaaaggagaaagu

SEQ ID NO: 284778 - RNA, 32 nt, Homo Sapiens
cuuuggaugagcaaaaaguaaauuuuucacag

SEQ ID NO: 284779 - RNA, 30 nt, Homo Sapiens
gaggcugucuguguccaggaaacuuaauuc

SEQ ID NO: 284780 - RNA, 32 nt, Homo Sapiens
uuaucuaguaugauuaguauagcuuucuccag

SEQ ID NO: 284781 - RNA, 32 nt, Homo Sapiens
cacagccuccaagucuguggcucuucccuucu

SEQ ID NO: 284782 - RNA, 32 nt, Homo Sapiens
caagcugcccagcuguggucccggugagcugg

SEQ ID NO: 284783 - RNA, 32 nt, Homo Sapiens
gugaggucaggaggcaaguggaggauggacug

SEQ ID NO: 284784 - RNA, 32 nt, Homo Sapiens
agagcagucaaucuugcuacauuauuuuuguc

SEQ ID NO: 284785 - RNA, 32 nt, Homo Sapiens
gugagcagguggcccacacaugugccuccagu

SEQ ID NO: 284786 - RNA, 31 nt, Homo Sapiens
auuuuccuggggaaaaaguccauggcuucua

SEQ ID NO: 284787 - RNA, 32 nt, Homo Sapiens
agcaaaugggggaaaaguuagucaauccuguc

SEQ ID NO: 284788 - RNA, 31 nt, Homo Sapiens
uuugucaugacacauuugccaaaucaguagg

SEQ ID NO: 284789 - RNA, 27 nt, Homo Sapiens
ucagagaucauuuucugguaaagaaaa

SEQ ID NO: 284790 - RNA, 32 nt, Homo Sapiens
uaggugggauuacaggcaugcgccaccacgcc

SEQ ID NO: 284791 - RNA, 32 nt, Homo Sapiens
acagaagauggcagauuuuuugaaaggacugc

SEQ ID NO: 284792 - RNA, 32 nt, Homo Sapiens
uucucauuacuguguccuauuuuauucaugcc

SEQ ID NO: 284793 - RNA, 32 nt, Homo Sapiens
ccuugagccauacacaaaaccaccacaaaauu

SEQ ID NO: 284794 - RNA, 32 nt, Homo Sapiens
aauacauacugauaauacauaccucaugaaag

SEQ ID NO: 284795 - RNA, 32 nt, Homo Sapiens
cagaaaacuuaaaagaguuuguuaaagugaag

SEQ ID NO: 284796 - RNA, 32 nt, Homo Sapiens
agauuccuuucacugccuuaaucuuugcaaca

SEQ ID NO: 284797 - RNA, 32 nt, Homo Sapiens
caacacagagcugcuauuaaauuaauauugau

SEQ ID NO: 284798 - RNA, 32 nt, Homo Sapiens
cuuuccuggcuaaaagacccagguaaaagacc

SEQ ID NO: 284799 - RNA, 30 nt, Homo Sapiens
gcuuggccacucccgaucgcuccucccugg

SEQ ID NO: 284800 - RNA, 32 nt, Homo Sapiens
ugcacaugucacuaagaacuagguuucuuugg

SEQ ID NO: 284801 - RNA, 32 nt, Homo Sapiens
gucggcgagccgcgaccggguccuggcgcgca

SEQ ID NO: 284802 - RNA, 32 nt, Homo Sapiens
uaaaaaggcccggcccaggaccacugugagcu

SEQ ID NO: 284803 - RNA, 32 nt, Homo Sapiens
acauuaggcagaguaaauauuuuguaguuuuc

SEQ ID NO: 284804 - RNA, 32 nt, Homo Sapiens
gaucaggcgcgguggcucacgccuguaauccc

SEQ ID NO: 284805 - RNA, 32 nt, Homo Sapiens
ccggaccccagcccggcccggaacacucuggg

SEQ ID NO: 284806 - RNA, 32 nt, Homo Sapiens
cauauuaaaacuuuuggaauuuuuugggcauc

SEQ ID NO: 284807 - RNA, 32 nt, Homo Sapiens
gaugugauaugguacugugguuauguuguuuu

SEQ ID NO: 284808 - RNA, 32 nt, Homo Sapiens
uuaggauaauauccuuccccccgggagccuuc

SEQ ID NO: 284809 - RNA, 32 nt, Homo Sapiens
augaguccaccuuguugcuucccccugccauu

SEQ ID NO: 284810 - RNA, 32 nt, Homo Sapiens
aauuuguaaccucagcucugggagaggauuuu

SEQ ID NO: 284811 - RNA, 30 nt, Homo Sapiens
ugcccucuggacuggaaccuuuuggagaga

SEQ ID NO: 284812 - RNA, 32 nt, Homo Sapiens
cagucaaccaaggagcuugcaguuuuaaagaa

SEQ ID NO: 284813 - RNA, 32 nt, Homo Sapiens
gacuggugggucucuagaagcaaaacugagug

SEQ ID NO: 284814 - RNA, 32 nt, Homo Sapiens
aagcagaucuguggauggggagccuacgggug

SEQ ID NO: 284815 - RNA, 32 nt, Homo Sapiens
ggcaccuccagacacccugaaacuacacacca

SEQ ID NO: 284816 - RNA, 32 nt, Homo Sapiens
acgagagaaagagugagaggaauagaagauca

SEQ ID NO: 284817 - RNA, 32 nt, Homo Sapiens
cuuguaugucugugccuauugauuaauucauu

SEQ ID NO: 284818 - RNA, 32 nt, Homo Sapiens
uuugggagaugaggaggauaugaaugggacca

SEQ ID NO: 284819 - RNA, 32 nt, Homo Sapiens
guaccaacucaccuuaaauuagcauguuccaa

SEQ ID NO: 284820 - RNA, 32 nt, Homo Sapiens
ggaauaaaagacugaagaaagacauaauaaau

SEQ ID NO: 284821 - RNA, 32 nt, Homo Sapiens
ccgggcuccgucacccgccccuccccccacuc

SEQ ID NO: 284822 - RNA, 32 nt, Homo Sapiens
guucucucugacccccaccucgacucggccuc

SEQ ID NO: 284823 - RNA, 32 nt, Homo Sapiens
agccgcaaggaggaggagugccaggcaggggc

SEQ ID NO: 284824 - RNA, 32 nt, Homo Sapiens
agaaaaauaggacaccggcagcccuuaguuuc

SEQ ID NO: 284825 - RNA, 32 nt, Homo Sapiens
aacaagccaacuuuagacccucugccaguggc

SEQ ID NO: 284826 - RNA, 32 nt, Homo Sapiens
gagaccucaaaauuauuaaauccaacagacgc

SEQ ID NO: 284827 - RNA, 32 nt, Homo Sapiens
gcuuugggagggggugaugcugugccaaguuc

SEQ ID NO: 284828 - RNA, 32 nt, Homo Sapiens
gucugcacaacacuaaauugggcaauaacaua

SEQ ID NO: 284829 - RNA, 32 nt, Homo Sapiens
auugcugccaggaagagcugcgacguccugca

SEQ ID NO: 284830 - RNA, 32 nt, Homo Sapiens
agagaaucugugaaguuugagcaagcggccuu

SEQ ID NO: 284831 - RNA, 32 nt, Homo Sapiens
ccaccacaccgggcuaauuuuuguauuuuuug

SEQ ID NO: 284832 - RNA, 32 nt, Homo Sapiens
ccccucagcaaggaugacucagcacugccgcu

SEQ ID NO: 284833 - RNA, 32 nt, Homo Sapiens
aaaaauuacaugaaagaugaaacuaugcaaug

SEQ ID NO: 284834 - RNA, 32 nt, Homo Sapiens
ggacuagaccuguguuacauaauaaucuuggu

SEQ ID NO: 284835 - RNA, 32 nt, Homo Sapiens
cucuuuucuccaucucgaaagccuucccugug

SEQ ID NO: 284836 - RNA, 32 nt, Homo Sapiens
ugucagggagcuugugcugugcauggccagag

SEQ ID NO: 284837 - RNA, 32 nt, Homo Sapiens
cugaaagaucuggguuggaauucugcuucagc

SEQ ID NO: 284838 - RNA, 32 nt, Homo Sapiens
acugauuucuuaccacauuuuagucuuucuug

SEQ ID NO: 284839 - RNA, 32 nt, Homo Sapiens
gaagcuguguauggcgggaggcuguggcgguc

SEQ ID NO: 284840 - RNA, 32 nt, Homo Sapiens
ggaacagccaaagggauuccaaggcuaaaucu

SEQ ID NO: 284841 - RNA, 32 nt, Homo Sapiens
uggccgccgguggccuggggagagugcggcgc

SEQ ID NO: 284842 - RNA, 32 nt, Homo Sapiens
ccuguucuguaucgauaaaccccgaucaaaaa

SEQ ID NO: 284843 - RNA, 32 nt, Homo Sapiens
ggcuccuacggcugcagcggcgccuagaagac

SEQ ID NO: 284844 - RNA, 32 nt, Homo Sapiens
ugcacuccacccacccaccccauucucugcua

SEQ ID NO: 284845 - RNA, 32 nt, Homo Sapiens
uacucuaaauuaaacagcaaacuuucagugcu

SEQ ID NO: 284846 - RNA, 32 nt, Homo Sapiens
ggagcugcucauggagaaagugccaggcgaga

SEQ ID NO: 284847 - RNA, 29 nt, Homo Sapiens
caaauacuguguuucagaagcgccaccua

SEQ ID NO: 284848 - RNA, 32 nt, Homo Sapiens
cccucacgcaguaaguauguguucaggcacag

SEQ ID NO: 284849 - RNA, 30 nt, Homo Sapiens
aaaaacuccaugcucugccaucuuaaucag

SEQ ID NO: 284850 - RNA, 32 nt, Homo Sapiens
acagaaugagagagacagagagguuuauugua

SEQ ID NO: 284851 - RNA, 32 nt, Homo Sapiens
ucccaccgaggccgcuuuuuuaggccuaguug

SEQ ID NO: 284852 - RNA, 32 nt, Homo Sapiens
ugauaauuaauaugaaaaguaacuggcauguu

SEQ ID NO: 284853 - RNA, 32 nt, Homo Sapiens
uuuggcggggagaggagugguauuugaugcuu

SEQ ID NO: 284854 - RNA, 32 nt, Homo Sapiens
agcugaaaaaucaucuacuucuuuguuugugg

SEQ ID NO: 284855 - RNA, 32 nt, Homo Sapiens
ucaaaaccgaagaaacaaaaucuuaaaggcua

SEQ ID NO: 284856 - RNA, 32 nt, Homo Sapiens
ucauaugaacucucccgccacccgggaacagc

SEQ ID NO: 284857 - RNA, 32 nt, Homo Sapiens
cucuccaggcccagcucuuccucucagcgccu

SEQ ID NO: 284858 - RNA, 32 nt, Homo Sapiens
caaaauacugauuacagauguacaauuuagcu

SEQ ID NO: 284859 - RNA, 30 nt, Homo Sapiens
ccugagugcugugcugcugcuggucuccug

SEQ ID NO: 284860 - RNA, 32 nt, Homo Sapiens
uaugaaagaacaaagugggaaaauaucuuuuu

SEQ ID NO: 284861 - RNA, 32 nt, Homo Sapiens
uucccgcgcgucgccuagcccgccccucagcu

SEQ ID NO: 284862 - RNA, 32 nt, Homo Sapiens
acagugaccuccacccccgcagcccucuuaaa

SEQ ID NO: 284863 - RNA, 32 nt, Homo Sapiens
aggacaguuaucgacaaugcauuagaacuugg

SEQ ID NO: 284864 - RNA, 32 nt, Homo Sapiens
ugagguggcaggcaggaugccugccuucuaau

SEQ ID NO: 284865 - RNA, 32 nt, Homo Sapiens
cccgugucguguccagcauuuuagugcagacu

SEQ ID NO: 284866 - RNA, 32 nt, Homo Sapiens
cccgcucagcgcccggccccgggaugacggcg

SEQ ID NO: 284867 - RNA, 32 nt, Homo Sapiens
uccuguuucauuugagccuccaaacuacauau

SEQ ID NO: 284868 - RNA, 32 nt, Homo Sapiens
aagucggaagcucugugcugcugcuggccccu

SEQ ID NO: 284869 - RNA, 32 nt, Homo Sapiens
ggaguggaaggggaauucauuuguucauuguc

SEQ ID NO: 284870 - RNA, 32 nt, Homo Sapiens
gcuuuaauuugaaagaaaaaugcauccuaacc

SEQ ID NO: 284871 - RNA, 32 nt, Homo Sapiens
gagaaccacgggggcccguccaagaccuggcc

SEQ ID NO: 284872 - RNA, 32 nt, Homo Sapiens
gacuuuaaauagucccuaaucccuaauuugca

SEQ ID NO: 284873 - RNA, 32 nt, Homo Sapiens
auucuuuagauuuuuacccaggccagugcaga

SEQ ID NO: 284874 - RNA, 32 nt, Homo Sapiens
uguguuuuuguucuuuugaagaauagaguggu

SEQ ID NO: 284875 - RNA, 32 nt, Homo Sapiens
cacauuucaugugcagacgugccucuguguaa

SEQ ID NO: 284876 - RNA, 32 nt, Homo Sapiens
agaguuaaaaauuuuuuuuaauauaagccaaa

SEQ ID NO: 284877 - RNA, 32 nt, Homo Sapiens
aggaaagaaaaaagaagacuuuuccaacugcu

SEQ ID NO: 284878 - RNA, 32 nt, Homo Sapiens
auguuuucuugaacauuugaaugugcuguugu

SEQ ID NO: 284879 - RNA, 32 nt, Homo Sapiens
gccaguugcugcggcugguucaagcgguggcg

SEQ ID NO: 284880 - RNA, 32 nt, Homo Sapiens
ggagcgccaggagaggagggucauggaggaug

SEQ ID NO: 284881 - RNA, 32 nt, Homo Sapiens
guggagcacgugagacacggaaggacacacgc

SEQ ID NO: 284882 - RNA, 32 nt, Homo Sapiens
cucggggcgccgcagagccggauuaacugugc

SEQ ID NO: 284883 - RNA, 32 nt, Homo Sapiens
gggggagcucgucgccgccgccggcggcuagc

SEQ ID NO: 284884 - RNA, 31 nt, Homo Sapiens
ccccaggagccccagaacagacauggaccuc

SEQ ID NO: 284885 - RNA, 32 nt, Homo Sapiens
ccagcaugagagcaggcacagaaggaccagug

SEQ ID NO: 284886 - RNA, 32 nt, Homo Sapiens
ugccacuaacuuuaaccuaucccaccuuaauc

SEQ ID NO: 284887 - RNA, 32 nt, Homo Sapiens
auauuucaaauuagauucccuaggagguauaa

SEQ ID NO: 284888 - RNA, 32 nt, Homo Sapiens
uguguuaggaaucaaaaguauuuuauaaaagg

SEQ ID NO: 284889 - RNA, 32 nt, Homo Sapiens
caacucuaagucacagcccccauccuaacccu

SEQ ID NO: 284890 - RNA, 32 nt, Homo Sapiens
gacaucacuggccgcuuucuggccuccugugg

SEQ ID NO: 284891 - RNA, 32 nt, Homo Sapiens
aaaugaagugcaaauuugauacauaugugaau

SEQ ID NO: 284892 - RNA, 32 nt, Homo Sapiens
aggacaaccagcaaguucuaugcugagccuua

SEQ ID NO: 284893 - RNA, 32 nt, Homo Sapiens
auaaagauacucaugaaaaauauaaacaacaa

SEQ ID NO: 284894 - RNA, 32 nt, Homo Sapiens
ugcgcgucgggcccgagcccacagaguccaug

SEQ ID NO: 284895 - RNA, 32 nt, Homo Sapiens
gugugguugggggucuuaaaacuaauaaaagc

SEQ ID NO: 284896 - RNA, 32 nt, Homo Sapiens
augcacgcaccucacugccaggccauuaaaau

SEQ ID NO: 284897 - RNA, 32 nt, Homo Sapiens
cacacacacacacacacacacacacacgccac

SEQ ID NO: 284898 - RNA, 32 nt, Homo Sapiens
ucuguugucugccugugugacacacaucaaug

SEQ ID NO: 284899 - RNA, 32 nt, Homo Sapiens
ucggaccugcccagccccggggcccucacugg

SEQ ID NO: 284900 - RNA, 32 nt, Homo Sapiens
uuuuuuccuugaauggguuuaaguaugcuaca

SEQ ID NO: 284901 - RNA, 32 nt, Homo Sapiens
cgcuagcccgcggcgccgcgacgucugcacgg

SEQ ID NO: 284902 - RNA, 32 nt, Homo Sapiens
gaaagccgggcggcgccgcgcaacgccucuuc

SEQ ID NO: 284903 - RNA, 32 nt, Homo Sapiens
ccauuuguucuucuguuggagagaugagacau

SEQ ID NO: 284904 - RNA, 32 nt, Homo Sapiens
uguaucagccaaccagagaacaucagugacuu

SEQ ID NO: 284905 - RNA, 32 nt, Homo Sapiens
guaggauguaggccauuucagaauagauguag

SEQ ID NO: 284906 - RNA, 32 nt, Homo Sapiens
aaacguggaaauugauuauagcaccaugcagg

SEQ ID NO: 284907 - RNA, 32 nt, Homo Sapiens
cauuccuuguauccuuuccccuuuugagcccg

SEQ ID NO: 284908 - RNA, 32 nt, Homo Sapiens
cuuaaucugaaaacagaagacagucuuaauau

SEQ ID NO: 284909 - RNA, 32 nt, Homo Sapiens
uucuggcauguccucaaaaaugacucaugacu

SEQ ID NO: 284910 - RNA, 27 nt, Homo Sapiens
ugauggcucuauuugcagucuuucaga

SEQ ID NO: 284911 - RNA, 32 nt, Homo Sapiens
gagcccaggaguccucggccagcccugccugc

SEQ ID NO: 284912 - RNA, 32 nt, Homo Sapiens
accuccccauccccuaguccccaccuugaaca

SEQ ID NO: 284913 - RNA, 32 nt, Homo Sapiens
ucuuucgagacuaaagcucuuuuuguaugcgu

SEQ ID NO: 284914 - RNA, 32 nt, Homo Sapiens
gggcguggccugccuggcgccgagggcaggug

SEQ ID NO: 284915 - RNA, 32 nt, Homo Sapiens
aauguugcagaaagaacugaaaagguauauga

SEQ ID NO: 284916 - RNA, 32 nt, Homo Sapiens
uccagccugagacgcagccucccgccuggaag

SEQ ID NO: 284917 - RNA, 32 nt, Homo Sapiens
uuugacucagaauuguuugccgaaaagaauga

SEQ ID NO: 284918 - RNA, 32 nt, Homo Sapiens
gccgagggcgaccgugaugcugcagaaccggc

SEQ ID NO: 284919 - RNA, 32 nt, Homo Sapiens
guuugagcucacguggcggccaugcaugguuu

SEQ ID NO: 284920 - RNA, 32 nt, Homo Sapiens
augacuccuggcugccccaccauccucucuga

SEQ ID NO: 284921 - RNA, 32 nt, Homo Sapiens
aggcaagacuugucuguaauuuuaaauuagaa

SEQ ID NO: 284922 - RNA, 32 nt, Homo Sapiens
aaacuuuugaucauaaugcuuuugcccauacu

SEQ ID NO: 284923 - RNA, 32 nt, Homo Sapiens
uuaguuaaaacacuuaggugaugggcacugcu

SEQ ID NO: 284924 - RNA, 32 nt, Homo Sapiens
cagaaugccccaccccacuuaguccauaguga

SEQ ID NO: 284925 - RNA, 32 nt, Homo Sapiens
uaguugggucauuugaagguuagcagcccggg

SEQ ID NO: 284926 - RNA, 32 nt, Homo Sapiens
guguugguggugcugaugaaucugccagaguu

SEQ ID NO: 284927 - RNA, 32 nt, Homo Sapiens
cagcaccuaaaauagugccgggaacauaguaa

SEQ ID NO: 284928 - RNA, 32 nt, Homo Sapiens
agagaugcucuuuuccaagcuauaauggaugc

SEQ ID NO: 284929 - RNA, 32 nt, Homo Sapiens
gagccuggggacggguuuggguccccaggagg

SEQ ID NO: 284930 - RNA, 32 nt, Homo Sapiens
cacggacgacagccacgcgcgcgggaacuggg

SEQ ID NO: 284931 - RNA, 32 nt, Homo Sapiens
agagagguggaacagugcuguuauuuuaaaca

SEQ ID NO: 284932 - RNA, 32 nt, Homo Sapiens
ccugcagaccugucuuuuuuuguccagcucca

SEQ ID NO: 284933 - RNA, 32 nt, Homo Sapiens
gcagauagaauagaagacagucugggauagga

SEQ ID NO: 284934 - RNA, 32 nt, Homo Sapiens
acaucaaagcaucagcucucuggaccugggag

SEQ ID NO: 284935 - RNA, 32 nt, Homo Sapiens
cagacagcccugggcauccaccgacggcgcag

SEQ ID NO: 284936 - RNA, 32 nt, Homo Sapiens
aaauuggaaaacagucuuguuaaggugaaagg

SEQ ID NO: 284937 - RNA, 27 nt, Homo Sapiens
gcggggcccuucuucccuccgcauccc

SEQ ID NO: 284938 - RNA, 32 nt, Homo Sapiens
ucuguaccugccacucuauuucuggggugacu

SEQ ID NO: 284939 - RNA, 32 nt, Homo Sapiens
aauuuaaagggucuguuaauucuuauauuuuu

SEQ ID NO: 284940 - RNA, 32 nt, Homo Sapiens
agaagagagggguaaaccuaugaaaacagggg

SEQ ID NO: 284941 - RNA, 32 nt, Homo Sapiens
aggagaccaggcugcacagaccgucacgucca

SEQ ID NO: 284942 - RNA, 32 nt, Homo Sapiens
cccucaaagugcaucgggacuggccccccaaa

SEQ ID NO: 284943 - RNA, 32 nt, Homo Sapiens
auuuugugggucuugauggaaaaacgcugguc

SEQ ID NO: 284944 - RNA, 32 nt, Homo Sapiens
ucccuccuggagggcucugggaccuggacagg

SEQ ID NO: 284945 - RNA, 28 nt, Homo Sapiens
gaggggggucggccgccgcagccaugga

SEQ ID NO: 284946 - RNA, 32 nt, Homo Sapiens
ggaauccacagcuggcgacgcgggagcaucug

SEQ ID NO: 284947 - RNA, 32 nt, Homo Sapiens
gauaaugauaaugaaauuuuagugacaaugug

SEQ ID NO: 284948 - RNA, 32 nt, Homo Sapiens
aggaggaacugauaucucuggcuaaauauuug

SEQ ID NO: 284949 - RNA, 32 nt, Homo Sapiens
uuuuaaaagacuacucugaaaaacacucuugg

SEQ ID NO: 284950 - RNA, 32 nt, Homo Sapiens
uaaauaagacuacauuggucuugaugcaaggc

SEQ ID NO: 284951 - RNA, 32 nt, Homo Sapiens
gaauuggaauaauuuuucuaugauuagguaca

SEQ ID NO: 284952 - RNA, 32 nt, Homo Sapiens
uauuucggcaauaaaguuuacaaaaucuggau

SEQ ID NO: 284953 - RNA, 32 nt, Homo Sapiens
uuauucauuauauugcuaugacaacuucacuc

SEQ ID NO: 284954 - RNA, 28 nt, Homo Sapiens
acuguuaagauuagacauuugaauucug

SEQ ID NO: 284955 - RNA, 32 nt, Homo Sapiens
uuaaaaaauaugucguagaauuccuucgaaag

SEQ ID NO: 284956 - RNA, 32 nt, Homo Sapiens
cuuugggaggcugaggcggguggaucacgagg

SEQ ID NO: 284957 - RNA, 32 nt, Homo Sapiens
aggaugugaccuugagugucaaggcuggacag

SEQ ID NO: 284958 - RNA, 32 nt, Homo Sapiens
cacaaagaauaaaaacuguugcauugagauac

SEQ ID NO: 284959 - RNA, 31 nt, Homo Sapiens
gagcucgcggugagguggccccgcgcugccg

SEQ ID NO: 284960 - RNA, 32 nt, Homo Sapiens
ggcuauuuguuuucuuuuuuuuuuuuuuuuuu

SEQ ID NO: 284961 - RNA, 32 nt, Homo Sapiens
uuuuuaaaugacuuuuuauucuuuaucauagc

SEQ ID NO: 284962 - RNA, 32 nt, Homo Sapiens
gcucgucggucuccgaggauggagauagcuca

SEQ ID NO: 284963 - RNA, 32 nt, Homo Sapiens
cgauaacuuguaugcgaagaccucuuuauauc

SEQ ID NO: 284964 - RNA, 32 nt, Homo Sapiens
ggccucgggaacgccaggggccccugggugcg

SEQ ID NO: 284965 - RNA, 32 nt, Homo Sapiens
gaucccagcacuuuucccagcuuucucuccag

SEQ ID NO: 284966 - RNA, 32 nt, Homo Sapiens
aucuaacuuuguaauuugauuugauuauacug

SEQ ID NO: 284967 - RNA, 32 nt, Homo Sapiens
agguauuuuugccugcccucuaggguuauaca

SEQ ID NO: 284968 - RNA, 32 nt, Homo Sapiens
uuaccggcuuggaggcgccgcugcugagcccc

SEQ ID NO: 284969 - RNA, 32 nt, Homo Sapiens
agcggggccuggaggaggagcugcggaggcuu

SEQ ID NO: 284970 - RNA, 32 nt, Homo Sapiens
gaucugggaggcuucgugggcuuuuggguccu

SEQ ID NO: 284971 - RNA, 32 nt, Homo Sapiens
uggucagaaugucauagaagugaugucggcug

SEQ ID NO: 284972 - RNA, 32 nt, Homo Sapiens
cccagugcuagaucucucccucccuucgucuc

SEQ ID NO: 284973 - RNA, 32 nt, Homo Sapiens
uauccuaguuuaugugagaaugucucaguggg

SEQ ID NO: 284974 - RNA, 32 nt, Homo Sapiens
cugggucaauucuccuuccugacucaaggcuu

SEQ ID NO: 284975 - RNA, 32 nt, Homo Sapiens
gagcucuccucuaucagcaauucuuuccugag

SEQ ID NO: 284976 - RNA, 32 nt, Homo Sapiens
aauuauucaaggaagugacaaauauuguccag

SEQ ID NO: 284977 - RNA, 32 nt, Homo Sapiens
gaucgacacgugggggcgccugagcgaagaua

SEQ ID NO: 284978 - RNA, 32 nt, Homo Sapiens
cuagguggaguugguggugcugauauuuaaau

SEQ ID NO: 284979 - RNA, 32 nt, Homo Sapiens
aauuugaaaacaaaacaaaauugcaaaagacu

SEQ ID NO: 284980 - RNA, 32 nt, Homo Sapiens
gccucagucuauucuguaaaauuuaaaaaaua

SEQ ID NO: 284981 - RNA, 32 nt, Homo Sapiens
gccucuuccuuccuauuucccuuccgcuaagg

SEQ ID NO: 284982 - RNA, 32 nt, Homo Sapiens
cgugacugcccccguugugcccagcauugccc

SEQ ID NO: 284983 - RNA, 32 nt, Homo Sapiens
auacucgcucaugcuuuuuuuguacggaauag

SEQ ID NO: 284984 - RNA, 32 nt, Homo Sapiens
ccacugcccagcacccaauguccucccgugcc

SEQ ID NO: 284985 - RNA, 32 nt, Homo Sapiens
auggggagggaagaggaauaagaaaaguuacg

SEQ ID NO: 284986 - RNA, 32 nt, Homo Sapiens
agaaaccuggaguccuuauccuccccucugua

SEQ ID NO: 284987 - RNA, 32 nt, Homo Sapiens
ggaccuggggccagauaagcccugccccggug

SEQ ID NO: 284988 - RNA, 32 nt, Homo Sapiens
auuacaaaacacacucuauaugauuucacuua

SEQ ID NO: 284989 - RNA, 32 nt, Homo Sapiens
ccgcucgcuaugucaacguccacuagcugccc

SEQ ID NO: 284990 - RNA, 32 nt, Homo Sapiens
cugcaggggggcauccgcugcagacucagccu

SEQ ID NO: 284991 - RNA, 32 nt, Homo Sapiens
cacugguggcucuaaggauauugcaauuaagc

SEQ ID NO: 284992 - RNA, 32 nt, Homo Sapiens
ugcugagcgcuggccucuggguugccucuuga

SEQ ID NO: 284993 - RNA, 32 nt, Homo Sapiens
gccggcccgcggcugcccagcagcaugaggug

SEQ ID NO: 284994 - RNA, 29 nt, Homo Sapiens
cguaugguagauuuuuauuuucuuggcac

SEQ ID NO: 284995 - RNA, 32 nt, Homo Sapiens
ugcuuuugaaaauuauuuuguagauaauauuu

SEQ ID NO: 284996 - RNA, 32 nt, Homo Sapiens
ggaaaggcccucaagaggcaugcuagaacguu

SEQ ID NO: 284997 - RNA, 32 nt, Homo Sapiens
cccggagcugggugcuggggaaggcggggcgc

SEQ ID NO: 284998 - RNA, 32 nt, Homo Sapiens
agugguucuucagauuuucucucauaaaaucc

SEQ ID NO: 284999 - RNA, 32 nt, Homo Sapiens
ccuaaauccucccuccucuccucacauccugg

SEQ ID NO: 285000 - RNA, 32 nt, Homo Sapiens
gucuggggguuaguccugggguggaggucugg

SEQ ID NO: 285001 - RNA, 32 nt, Homo Sapiens
gcggcgagcgcucgcgagcggcugcgggacgc

SEQ ID NO: 285002 - RNA, 32 nt, Homo Sapiens
caucaagguucagaaaacacaaggaacaaaug

SEQ ID NO: 285003 - RNA, 32 nt, Homo Sapiens
gacaaacugccagcugccacuggcuuaucagg

SEQ ID NO: 285004 - RNA, 32 nt, Homo Sapiens
ccuggugccaacaggggcaucccggcccauac

SEQ ID NO: 285005 - RNA, 32 nt, Homo Sapiens
gauuaucuuguacagccuuuuauggaccaauu

SEQ ID NO: 285006 - RNA, 32 nt, Homo Sapiens
cuagaucauaucuauuuucaaaucucuaggaa

SEQ ID NO: 285007 - RNA, 32 nt, Homo Sapiens
cgcccuguuucauuccuuaccacuagcccuuu

SEQ ID NO: 285008 - RNA, 32 nt, Homo Sapiens
cccuucuguccucauucuuagagacugcuucu

SEQ ID NO: 285009 - RNA, 32 nt, Homo Sapiens
aaaauuagccaggcauguugucgggcaccugu

SEQ ID NO: 285010 - RNA, 32 nt, Homo Sapiens
ggaacgugcgucgcgcccccaguguccgucgc

SEQ ID NO: 285011 - RNA, 32 nt, Homo Sapiens
guaugcaguuuacccaaguccaaauaaagcau

SEQ ID NO: 285012 - RNA, 32 nt, Homo Sapiens
ccaggcuccucgcgccucagguggaauccugc

SEQ ID NO: 285013 - RNA, 32 nt, Homo Sapiens
uauugagcaaccagcucugggcucaguuuccu

SEQ ID NO: 285014 - RNA, 32 nt, Homo Sapiens
cuccugacaugagaaaugccauccucuguggg

SEQ ID NO: 285015 - RNA, 32 nt, Homo Sapiens
accugcccugaggucagcagcucccagacucc

SEQ ID NO: 285016 - RNA, 32 nt, Homo Sapiens
gguaguuuuuauugacuuaucuucugguuucc

SEQ ID NO: 285017 - RNA, 32 nt, Homo Sapiens
uggcaugcaccuguaaucccaacuacucagcu

SEQ ID NO: 285018 - RNA, 32 nt, Homo Sapiens
gcacaauguacauuaaaucauuauuacaugaa

SEQ ID NO: 285019 - RNA, 32 nt, Homo Sapiens
gauaauuugaauugacccaaccccaacuuuua

SEQ ID NO: 285020 - RNA, 32 nt, Homo Sapiens
agaucaaggagacugcauucccugcccugaag

SEQ ID NO: 285021 - RNA, 29 nt, Homo Sapiens
cacuaugcccagcccaagagcucuuugcc

SEQ ID NO: 285022 - RNA, 32 nt, Homo Sapiens
cgccggcgacugccugccccagccccucagug

SEQ ID NO: 285023 - RNA, 32 nt, Homo Sapiens
uuucuaaacauuucuuuuuuucuaugcgcaaa

SEQ ID NO: 285024 - RNA, 32 nt, Homo Sapiens
ucaucacaguguacaguuaaacaaaggaaucu

SEQ ID NO: 285025 - RNA, 32 nt, Homo Sapiens
gaaacuguagaauugaauaaaucacugaaaau

SEQ ID NO: 285026 - RNA, 32 nt, Homo Sapiens
gauauguaucuaggauaauuauaauuaauaau

SEQ ID NO: 285027 - RNA, 32 nt, Homo Sapiens
aaagaagggaaaacagaagcaaagaaaacugu

SEQ ID NO: 285028 - RNA, 32 nt, Homo Sapiens
gacccccuggcccugccucauccaccaaucuc

SEQ ID NO: 285029 - RNA, 32 nt, Homo Sapiens
cgucugcucccucuccacucucuucucaaaug

SEQ ID NO: 285030 - RNA, 32 nt, Homo Sapiens
aaauuuuaccacguuauauaaagagaaaauug

SEQ ID NO: 285031 - RNA, 31 nt, Homo Sapiens
caggaugcaaggucugcgguccagaagcuug

SEQ ID NO: 285032 - RNA, 32 nt, Homo Sapiens
aaaagaagugaagucuuggguauuuuaaccug

SEQ ID NO: 285033 - RNA, 32 nt, Homo Sapiens
uggcagggccccaaaacagccucccucauacc

SEQ ID NO: 285034 - RNA, 32 nt, Homo Sapiens
uauccggacagguggcucuugcccuuuagacu

SEQ ID NO: 285035 - RNA, 32 nt, Homo Sapiens
cccgcgucauggccgcgccggccccggucacg

SEQ ID NO: 285036 - RNA, 32 nt, Homo Sapiens
uaccuacaguugagaagaaaaugacagacaau

SEQ ID NO: 285037 - RNA, 32 nt, Homo Sapiens
caaaaauaaaauaccaucuacucauggaaugu

SEQ ID NO: 285038 - RNA, 32 nt, Homo Sapiens
aaaaucuguaugccugaguaccauccuggaug

SEQ ID NO: 285039 - RNA, 32 nt, Homo Sapiens
aauagaagacaccagcagcauaauuuauucag

SEQ ID NO: 285040 - RNA, 32 nt, Homo Sapiens
guggugugcauaugugugaacacacacgugua

SEQ ID NO: 285041 - RNA, 32 nt, Homo Sapiens
uuccagugcaacaaaaucaauuuuuugcuaaa

SEQ ID NO: 285042 - RNA, 32 nt, Homo Sapiens
uuuugaaguauuugggcaggugagucauguuu

SEQ ID NO: 285043 - RNA, 32 nt, Homo Sapiens
gggcccaaaaauuccuuuucaaagaaacaaaa

SEQ ID NO: 285044 - RNA, 32 nt, Homo Sapiens
accagagguucagugagaacaugggcagggua

SEQ ID NO: 285045 - RNA, 32 nt, Homo Sapiens
uaugucgcaugucaauccgaagagugaugccc

SEQ ID NO: 285046 - RNA, 32 nt, Homo Sapiens
acagaaguuguauaacaguacaacaaagacaa

SEQ ID NO: 285047 - RNA, 32 nt, Homo Sapiens
guuggugcugauggagggagggggaagucgaa

SEQ ID NO: 285048 - RNA, 32 nt, Homo Sapiens
aaaggagcagaacaaaaauaaaaaauaauuag

SEQ ID NO: 285049 - RNA, 32 nt, Homo Sapiens
ucacugaccuacuaguuuauuuuggucagcug

SEQ ID NO: 285050 - RNA, 32 nt, Homo Sapiens
ccuauaggaaaaugaaccucccugcccgcaau

SEQ ID NO: 285051 - RNA, 32 nt, Homo Sapiens
cuugucugucuccacucucauuccaggcaauc

SEQ ID NO: 285052 - RNA, 32 nt, Homo Sapiens
agcacuuuuauucucuuuuucuuaaucucugc

SEQ ID NO: 285053 - RNA, 32 nt, Homo Sapiens
gaggccagaugcagcccucccugaguggcucu

SEQ ID NO: 285054 - RNA, 32 nt, Homo Sapiens
uuuaaauguauuaauagagucaauggaacuuu

SEQ ID NO: 285055 - RNA, 32 nt, Homo Sapiens
gaggagaauuccaggacaagagugucaaggac

SEQ ID NO: 285056 - RNA, 32 nt, Homo Sapiens
gauggcaugugaaagcacuuugaaaauuguaa

SEQ ID NO: 285057 - RNA, 32 nt, Homo Sapiens
cuccugcugcggaggagcugccugcuuggccc

SEQ ID NO: 285058 - RNA, 32 nt, Homo Sapiens
aaagcaaaucucuggaggcaagaucuggacuc

SEQ ID NO: 285059 - RNA, 32 nt, Homo Sapiens
uacugaauacucugauacaaaagcagaaccag

SEQ ID NO: 285060 - RNA, 32 nt, Homo Sapiens
acuuauagaaaguuagagaagaccuuguugaa

SEQ ID NO: 285061 - RNA, 32 nt, Homo Sapiens
cagaacugaaauugauaaugaaguugcaaguu

SEQ ID NO: 285062 - RNA, 32 nt, Homo Sapiens
cgaguccucuuucagcagcagcagccggagcc

SEQ ID NO: 285063 - RNA, 32 nt, Homo Sapiens
ggaaacugagagaagaggggcuggagugcggc

SEQ ID NO: 285064 - RNA, 32 nt, Homo Sapiens
uaccccggccccagcacccgccaggaugugga

SEQ ID NO: 285065 - RNA, 32 nt, Homo Sapiens
auccacaaauaccaccagcugcuucauccaca

SEQ ID NO: 285066 - RNA, 32 nt, Homo Sapiens
uacaaacaaaaauuuaaaaacaaugagcuggg

SEQ ID NO: 285067 - RNA, 32 nt, Homo Sapiens
acuuauguauauaaagggggguggggggaggg

SEQ ID NO: 285068 - RNA, 32 nt, Homo Sapiens
agaaauagcgcaguguccuggaugcccauuau

SEQ ID NO: 285069 - RNA, 32 nt, Homo Sapiens
gggcagcagcguggcucacgggccuggcgcgc

SEQ ID NO: 285070 - RNA, 32 nt, Homo Sapiens
augugaaauguugucaucaucaucauuaagga

SEQ ID NO: 285071 - RNA, 32 nt, Homo Sapiens
aagcaaacuuucuauuugaaaaaaaaaaaaaa

SEQ ID NO: 285072 - RNA, 32 nt, Homo Sapiens
aaccuuucaaccaaaugauugguucaaaagga

SEQ ID NO: 285073 - RNA, 32 nt, Homo Sapiens
agacacuucccugcauuaacugcacaaacaau

SEQ ID NO: 285074 - RNA, 32 nt, Homo Sapiens
ccaguguucagcagcagcguuuggaaagcagg

SEQ ID NO: 285075 - RNA, 32 nt, Homo Sapiens
auaaagcaauauacuggucuagcugaguucua

SEQ ID NO: 285076 - RNA, 32 nt, Homo Sapiens
uccgccugccagcccaccccagccuggggaga

SEQ ID NO: 285077 - RNA, 32 nt, Homo Sapiens
gcaaauugucacaacuaagagugauaauuugg

SEQ ID NO: 285078 - RNA, 32 nt, Homo Sapiens
auacuuggcaaaagauucuugcugucagcaua

SEQ ID NO: 285079 - RNA, 32 nt, Homo Sapiens
gcuuaucugcugagacagcaguucuugacccc

SEQ ID NO: 285080 - RNA, 32 nt, Homo Sapiens
gauauuuggggauaguaguucaaaaacagccg

SEQ ID NO: 285081 - RNA, 32 nt, Homo Sapiens
cucagaacuguagaaauagaacugugcacagg

SEQ ID NO: 285082 - RNA, 32 nt, Homo Sapiens
aggggagagagcugugguucuccaucauuggg

SEQ ID NO: 285083 - RNA, 32 nt, Homo Sapiens
gcucccgucuaaggugggccuguggugagguc

SEQ ID NO: 285084 - RNA, 32 nt, Homo Sapiens
ccgcugggcugugcgccccgccggcgccggua

SEQ ID NO: 285085 - RNA, 32 nt, Homo Sapiens
aauuuuaaaaugcagcauaaauuuagaaaaau

SEQ ID NO: 285086 - RNA, 32 nt, Homo Sapiens
cuggucugaaugcacaagcuaagagagcuugc

SEQ ID NO: 285087 - RNA, 32 nt, Homo Sapiens
gguuuguguauauaugacuguugcagauuccu

SEQ ID NO: 285088 - RNA, 32 nt, Homo Sapiens
aucucuauuucauuuuguggcuuaccauuccc

SEQ ID NO: 285089 - RNA, 32 nt, Homo Sapiens
gagcugggggccgugcgcugcccugggaaugu

SEQ ID NO: 285090 - RNA, 30 nt, Homo Sapiens
agugcggguucccuaccagccagggguuuc

SEQ ID NO: 285091 - RNA, 31 nt, Homo Sapiens
gcgcgcagucacugccugggccgugcgcugc

SEQ ID NO: 285092 - RNA, 32 nt, Homo Sapiens
ugcacuuuuccuuuccaaaugcaucucguugg

SEQ ID NO: 285093 - RNA, 32 nt, Homo Sapiens
aaaucaaaguuucagcaaugggcuggcuuguc

SEQ ID NO: 285094 - RNA, 32 nt, Homo Sapiens
uaaaugccaccucgggcaagucccagucccag

SEQ ID NO: 285095 - RNA, 32 nt, Homo Sapiens
gaagaugugagagggagcaagcaagguuagca

SEQ ID NO: 285096 - RNA, 32 nt, Homo Sapiens
cauuuuugguaugaccaacucuauucauuccu

SEQ ID NO: 285097 - RNA, 30 nt, Homo Sapiens
uggaacaaucgcagcggcggcggcagcggc

SEQ ID NO: 285098 - RNA, 32 nt, Homo Sapiens
uaguaguggguugcccuguauguuuucucuuu

SEQ ID NO: 285099 - RNA, 32 nt, Homo Sapiens
gagcagcuccacgugagagcauuaaagaugua

SEQ ID NO: 285100 - RNA, 32 nt, Homo Sapiens
uccugacuggggcuugcgacucacaggauugc

SEQ ID NO: 285101 - RNA, 32 nt, Homo Sapiens
aauuggguugagaggaaacuaauggaguuuca

SEQ ID NO: 285102 - RNA, 32 nt, Homo Sapiens
ugcuguuguuguuaauuuuguuaagaauuuca

SEQ ID NO: 285103 - RNA, 32 nt, Homo Sapiens
acucgagucuguuuauugaauuuuaugguccc

SEQ ID NO: 285104 - RNA, 32 nt, Homo Sapiens
ggguccccgacccaggagaacgguggcuccca

SEQ ID NO: 285105 - RNA, 32 nt, Homo Sapiens
auuucagucacccccgcccagcccuccugauc

SEQ ID NO: 285106 - RNA, 32 nt, Homo Sapiens
cacagaaauagagaugcuauagugaacuccca

SEQ ID NO: 285107 - RNA, 32 nt, Homo Sapiens
ccguuugggguaggaguguggauggagaaccc

SEQ ID NO: 285108 - RNA, 32 nt, Homo Sapiens
cggcgcugggcgcugcagcugcucccggcgcg

SEQ ID NO: 285109 - RNA, 32 nt, Homo Sapiens
agccaagauugugccacugcacucuagccugg

SEQ ID NO: 285110 - RNA, 32 nt, Homo Sapiens
agccaagauugugccauugcacuccagccugg

SEQ ID NO: 285111 - RNA, 32 nt, Homo Sapiens
uuuggaaagacuuuuccaacccucaucaccaa

SEQ ID NO: 285112 - RNA, 32 nt, Homo Sapiens
cauguggagcagcggcucucccuggaaagcuc

SEQ ID NO: 285113 - RNA, 32 nt, Homo Sapiens
uuaaacagaaaucucugcaugcacuuuuacau

SEQ ID NO: 285114 - RNA, 32 nt, Homo Sapiens
ugggauuuuaguucuuauucugugauaacuau

SEQ ID NO: 285115 - RNA, 32 nt, Homo Sapiens
uucaauacaaauuuauagcugaguaaauauga

SEQ ID NO: 285116 - RNA, 32 nt, Homo Sapiens
gauuccaggaggagcagagaaagcacagaugg

SEQ ID NO: 285117 - RNA, 32 nt, Homo Sapiens
aauggggaaggggaguaaggcuaacaugguuu

SEQ ID NO: 285118 - RNA, 32 nt, Homo Sapiens
cugacaauaugauuuuaaauuugaagauggga

SEQ ID NO: 285119 - RNA, 32 nt, Homo Sapiens
ccccaccccccacucucucucaucucucgcug

SEQ ID NO: 285120 - RNA, 32 nt, Homo Sapiens
ggcggcugccagaguggugcccggcccaccag

SEQ ID NO: 285121 - RNA, 32 nt, Homo Sapiens
aaaucaaaggcacagugaacuccucauagcau

SEQ ID NO: 285122 - RNA, 32 nt, Homo Sapiens
aaaaccaguccuccucagcccuccccaagucg

SEQ ID NO: 285123 - RNA, 32 nt, Homo Sapiens
aagcuuccgggaaaaggcuuugcuguucuaca

SEQ ID NO: 285124 - RNA, 32 nt, Homo Sapiens
ucacugcuaugaaaauuuauauggcucacccc

SEQ ID NO: 285125 - RNA, 32 nt, Homo Sapiens
uuucucagucuucgcgcgacccucgugcggug

SEQ ID NO: 285126 - RNA, 32 nt, Homo Sapiens
cugggugcgggcuccgagagggggcgacuugc

SEQ ID NO: 285127 - RNA, 32 nt, Homo Sapiens
gaagaauucuucugcccauuucucagaacuag

SEQ ID NO: 285128 - RNA, 32 nt, Homo Sapiens
uggcuguacagcucgaucuagguucugcggca

SEQ ID NO: 285129 - RNA, 32 nt, Homo Sapiens
uuuuuuacauuuuaagaguuguagaaguuguu

SEQ ID NO: 285130 - RNA, 32 nt, Homo Sapiens
aauagcaacccaugguuauggcgagugacccg

SEQ ID NO: 285131 - RNA, 32 nt, Homo Sapiens
acuaggaagagagugggcugcagaugaaucug

SEQ ID NO: 285132 - RNA, 32 nt, Homo Sapiens
aagcaguguaguggugauuggucagugacuaa

SEQ ID NO: 285133 - RNA, 32 nt, Homo Sapiens
aaacaaagccccaugggcugccuugaaaucaa

SEQ ID NO: 285134 - RNA, 32 nt, Homo Sapiens
agucuuugaagaaaaaauauguaaauauauau

SEQ ID NO: 285135 - RNA, 32 nt, Homo Sapiens
gggcuugggggcgggggaggguggcaguggga

SEQ ID NO: 285136 - RNA, 32 nt, Homo Sapiens
ucugugccaaacuuacugauauccucaucugu

SEQ ID NO: 285137 - RNA, 32 nt, Homo Sapiens
cccuuggcagggcaucgacugugugcgaggca

SEQ ID NO: 285138 - RNA, 32 nt, Homo Sapiens
aauugcaaagggauugguuggauugcauaucu

SEQ ID NO: 285139 - RNA, 32 nt, Homo Sapiens
uccaaguggcucucgcagcugccagcaaucca

SEQ ID NO: 285140 - RNA, 32 nt, Homo Sapiens
ugccuucuccaccagggucgcuccaucaccca

SEQ ID NO: 285141 - RNA, 32 nt, Homo Sapiens
uuaacuugaaucuuuucuugcauuguauuuuu

SEQ ID NO: 285142 - RNA, 28 nt, Homo Sapiens
uaagggagagaaaugcauuugaacgaau

SEQ ID NO: 285143 - RNA, 32 nt, Homo Sapiens
ccgugcgcgcuucgacguugcugcuguuggcu

SEQ ID NO: 285144 - RNA, 32 nt, Homo Sapiens
gcuguuauuucuauuuuuguagaaguaggaag

SEQ ID NO: 285145 - RNA, 30 nt, Homo Sapiens
cagaugcugaggaugggggagcucaggcgg

SEQ ID NO: 285146 - RNA, 32 nt, Homo Sapiens
ucgaggacggucggacucccgcggcgggagga

SEQ ID NO: 285147 - RNA, 32 nt, Homo Sapiens
cugcuggguucagaggccgaggaggcacugga

SEQ ID NO: 285148 - RNA, 32 nt, Homo Sapiens
aucaggugaaagggcagcuuuaauggugguuu

SEQ ID NO: 285149 - RNA, 32 nt, Homo Sapiens
caaccuguauagugauagccauauauuuaaua

SEQ ID NO: 285150 - RNA, 32 nt, Homo Sapiens
gaggcaccgcggcugcgggcuucugaguuccc

SEQ ID NO: 285151 - RNA, 32 nt, Homo Sapiens
ccgcgacccacccgcggaguggggggcccccu

SEQ ID NO: 285152 - RNA, 32 nt, Homo Sapiens
agaacuauuuuuguuuuggucagauaaauuga

SEQ ID NO: 285153 - RNA, 32 nt, Homo Sapiens
aagcaccaagaagcuuccaaacgacagugauc

SEQ ID NO: 285154 - RNA, 32 nt, Homo Sapiens
auuucagacugauccagauuugccgccuggcu

SEQ ID NO: 285155 - RNA, 32 nt, Homo Sapiens
ccuugggguuguggagauggacccgugaccuc

SEQ ID NO: 285156 - RNA, 32 nt, Homo Sapiens
cuccugggauccugcuggcuugggcccggcuc

SEQ ID NO: 285157 - RNA, 32 nt, Homo Sapiens
cccaagagggucgccuugggcugggggcgcac

SEQ ID NO: 285158 - RNA, 32 nt, Homo Sapiens
cagaugcagucuauauuuuaugcugaguuuua

SEQ ID NO: 285159 - RNA, 32 nt, Homo Sapiens
cuggauguuucauuguaggaauauuuaaguua

SEQ ID NO: 285160 - RNA, 32 nt, Homo Sapiens
aagcccgcaguuuuuucgcccccgucacuucc

SEQ ID NO: 285161 - RNA, 32 nt, Homo Sapiens
aggcauucagcaugcgugagccauaccauccu

SEQ ID NO: 285162 - RNA, 32 nt, Homo Sapiens
auuaucccuuuuauaccuaagaagggcaugcu

SEQ ID NO: 285163 - RNA, 32 nt, Homo Sapiens
agcggcccgagcuguggccggcguggaugagg

SEQ ID NO: 285164 - RNA, 32 nt, Homo Sapiens
cuggucccugagccggccggcgaccccggacc

SEQ ID NO: 285165 - RNA, 32 nt, Homo Sapiens
gcggcucccuuucagcagcugcgggagcaugc

SEQ ID NO: 285166 - RNA, 32 nt, Homo Sapiens
gagugugggggugguggugcugcaggggcagg

SEQ ID NO: 285167 - RNA, 32 nt, Homo Sapiens
uuuagggggaaauuauuugaaucagauucuau

SEQ ID NO: 285168 - RNA, 32 nt, Homo Sapiens
gauaacauuauuuacagauuuaaaagaugugg

SEQ ID NO: 285169 - RNA, 32 nt, Homo Sapiens
cuggcagagaagguuugugucccuguugagga

SEQ ID NO: 285170 - RNA, 32 nt, Homo Sapiens
agccgagauugugccacugcacucccgccugg

SEQ ID NO: 285171 - RNA, 32 nt, Homo Sapiens
cagcacaaauaacuauuuuuuaugucacaagc

SEQ ID NO: 285172 - RNA, 32 nt, Homo Sapiens
uccugggccugccugcccccuggggaacacag

SEQ ID NO: 285173 - RNA, 32 nt, Homo Sapiens
guugguguagcggugauggcuucuguggauau

SEQ ID NO: 285174 - RNA, 32 nt, Homo Sapiens
uuucaacuugaguuuucuuuuaauguuaauaa

SEQ ID NO: 285175 - RNA, 32 nt, Homo Sapiens
ccaagaaucuucaacccuuucccacaaaagcu

SEQ ID NO: 285176 - RNA, 32 nt, Homo Sapiens
guaaguaugagcagacaaaugcaaugaauaug

SEQ ID NO: 285177 - RNA, 32 nt, Homo Sapiens
guaagucugcuggccuccgccaucuuaguaaa

SEQ ID NO: 285178 - RNA, 32 nt, Homo Sapiens
acaugacuugaagcucuaguuuucuagaucuu

SEQ ID NO: 285179 - RNA, 32 nt, Homo Sapiens
ccuggacuagaaauccaguauaguuugccauu

SEQ ID NO: 285180 - RNA, 32 nt, Homo Sapiens
gcaaaaagaaaauaugugaaaacagaaauuaa

SEQ ID NO: 285181 - RNA, 32 nt, Homo Sapiens
cagagaaagggagggagggagccacccgggug

SEQ ID NO: 285182 - RNA, 32 nt, Homo Sapiens
uaugcauuaaaauaaauaacuauucaaauaaa

SEQ ID NO: 285183 - RNA, 32 nt, Homo Sapiens
ccucuggcgguccuuccaccuuccucuguccu

SEQ ID NO: 285184 - RNA, 32 nt, Homo Sapiens
auucaucucuuugaaucauuugcucaaauaau

SEQ ID NO: 285185 - RNA, 32 nt, Homo Sapiens
uguggcucuaucuuuuaaaaccucaaggcccu

SEQ ID NO: 285186 - RNA, 32 nt, Homo Sapiens
gggcagugcgggcugugcgcgcgguccgcggc

SEQ ID NO: 285187 - RNA, 32 nt, Homo Sapiens
ggcuucucuguccaaugcccacccggagcugg

SEQ ID NO: 285188 - RNA, 32 nt, Homo Sapiens
aacauauagaucugguuugaauuccaggaucg

SEQ ID NO: 285189 - RNA, 32 nt, Homo Sapiens
agguggccugggccgggaauguccagcuagag

SEQ ID NO: 285190 - RNA, 32 nt, Homo Sapiens
uccuuugcuucuugagaccggggugugugugg

SEQ ID NO: 285191 - RNA, 32 nt, Homo Sapiens
aaucucaauuucaguauuuuuacuuuaggacu

SEQ ID NO: 285192 - RNA, 32 nt, Homo Sapiens
gcagugagccggggcgggggcggaaucccccg

SEQ ID NO: 285193 - RNA, 32 nt, Homo Sapiens
aauguuaaucaaggggaagugauuuaaauaug

SEQ ID NO: 285194 - RNA, 32 nt, Homo Sapiens
ggaugggcgugguggcucacgccuguaauucc

SEQ ID NO: 285195 - RNA, 32 nt, Homo Sapiens
ccccacacgaccagcugucaacuuccaggacg

SEQ ID NO: 285196 - RNA, 32 nt, Homo Sapiens
gggaggaggaggagccggagccucugccucag

SEQ ID NO: 285197 - RNA, 32 nt, Homo Sapiens
uuuguggggcauauauuuuuugagaccuuguu

SEQ ID NO: 285198 - RNA, 32 nt, Homo Sapiens
ucuuuuccaaaaaaugauucuguaucuuuugg

SEQ ID NO: 285199 - RNA, 32 nt, Homo Sapiens
agugggccgcuguguuuggagacggccaagug

SEQ ID NO: 285200 - RNA, 32 nt, Homo Sapiens
cggccggggagcugcguagcucccggccccgc

SEQ ID NO: 285201 - RNA, 31 nt, Homo Sapiens
cuccgcccgcagugccaaccaugaccgccgc

SEQ ID NO: 285202 - RNA, 32 nt, Homo Sapiens
uggaagauaacaguggauucuuucucuggugc

SEQ ID NO: 285203 - RNA, 32 nt, Homo Sapiens
gaccccagugggcagccccggcgagaccucca

SEQ ID NO: 285204 - RNA, 29 nt, Homo Sapiens
uuucuuuuuauacaauaccauguuaacca

SEQ ID NO: 285205 - RNA, 32 nt, Homo Sapiens
auauguaaauaccaccuugcauuucauuguuc

SEQ ID NO: 285206 - RNA, 32 nt, Homo Sapiens
guuuuacagcauaugaagagcugucauugucc

SEQ ID NO: 285207 - RNA, 32 nt, Homo Sapiens
cauagaaaauuuggaacuuaggaaaauagcug

SEQ ID NO: 285208 - RNA, 32 nt, Homo Sapiens
guaggugaacaaaguuaacgaaugcccuguua

SEQ ID NO: 285209 - RNA, 32 nt, Homo Sapiens
uguguuucucacuuuccaaccuaaucccuggc

SEQ ID NO: 285210 - RNA, 32 nt, Homo Sapiens
gucucuauucuucaccccccagccuuccugaa

SEQ ID NO: 285211 - RNA, 32 nt, Homo Sapiens
uacaggguacgaagaaugaacucugagaaugu

SEQ ID NO: 285212 - RNA, 32 nt, Homo Sapiens
guauuguacucgggaggcugaggugggaggau

SEQ ID NO: 285213 - RNA, 32 nt, Homo Sapiens
acaauuucucagugauccucugcaucucugcc

SEQ ID NO: 285214 - RNA, 32 nt, Homo Sapiens
uuguuuuaucacucuggacugugcagagccac

SEQ ID NO: 285215 - RNA, 32 nt, Homo Sapiens
uuuuagugauaaaauacauuuguaaguguaaa

SEQ ID NO: 285216 - RNA, 32 nt, Homo Sapiens
gccucugccuuccagcucccacagccuggucc

SEQ ID NO: 285217 - RNA, 32 nt, Homo Sapiens
uaaagguacgcgccgcggccaaggccgcaccg

SEQ ID NO: 285218 - RNA, 32 nt, Homo Sapiens
caaacauuaaaaguuguauaugucuaacaggg

SEQ ID NO: 285219 - RNA, 32 nt, Homo Sapiens
cacacccaggacuuuucuuugcaagcgaaccu

SEQ ID NO: 285220 - RNA, 32 nt, Homo Sapiens
aaaaggaaaaaguucgaagaaaugaaccauuu

SEQ ID NO: 285221 - RNA, 32 nt, Homo Sapiens
ugcuggguagagaacacagaggacagggcaua

SEQ ID NO: 285222 - RNA, 32 nt, Homo Sapiens
agccuucaguuccccuucucccgucagaccuu

SEQ ID NO: 285223 - RNA, 32 nt, Homo Sapiens
aaugggggucuuucugugaugugaugagacau

SEQ ID NO: 285224 - RNA, 32 nt, Homo Sapiens
gggaaggugaaacagggcuugucccuccaacu

SEQ ID NO: 285225 - RNA, 32 nt, Homo Sapiens
ucugcuguggcuucuccugggcucuggcauua

SEQ ID NO: 285226 - RNA, 32 nt, Homo Sapiens
uucuuuuaauuguucacagauuuuaaaagcgg

SEQ ID NO: 285227 - RNA, 32 nt, Homo Sapiens
ucgcuguccccucccccuggagggcauggugu

SEQ ID NO: 285228 - RNA, 32 nt, Homo Sapiens
gaggagccgggguugcugcugcugcuuccggu

SEQ ID NO: 285229 - RNA, 32 nt, Homo Sapiens
aacgaaaaaugaaugcuuuaguggccuguuua

SEQ ID NO: 285230 - RNA, 32 nt, Homo Sapiens
uucccccuuuugcucaggacucuccuuccugc

SEQ ID NO: 285231 - RNA, 32 nt, Homo Sapiens
accugcucgggcagccccggcgggcucuggga

SEQ ID NO: 285232 - RNA, 32 nt, Homo Sapiens
gggggcagaggcccucgggggcccguggagaa

SEQ ID NO: 285233 - RNA, 32 nt, Homo Sapiens
agaaaggcucugcgcccugcgcccggaugaca

SEQ ID NO: 285234 - RNA, 32 nt, Homo Sapiens
agacagaugauuacuaugccucaugugcugug

SEQ ID NO: 285235 - RNA, 32 nt, Homo Sapiens
gacgaggaaggaauaacacaccaguugaccau

SEQ ID NO: 285236 - RNA, 32 nt, Homo Sapiens
guguacagaaaugcgguuuacuuuguaggcca

SEQ ID NO: 285237 - RNA, 30 nt, Homo Sapiens
uggugccguggaugucaccagucggacugu

SEQ ID NO: 285238 - RNA, 32 nt, Homo Sapiens
uuucaggcuuugcauuuuguauaugggaagaa

SEQ ID NO: 285239 - RNA, 32 nt, Homo Sapiens
cugggcaucuucugcacuuucucugcauuugu

SEQ ID NO: 285240 - RNA, 32 nt, Homo Sapiens
ugggggguugggggaggcagggaaauccuauu

SEQ ID NO: 285241 - RNA, 32 nt, Homo Sapiens
cucccuuagcuaccuucuuuuggauuauugga

SEQ ID NO: 285242 - RNA, 32 nt, Homo Sapiens
ugggccagccccaccuggagcucaguaaaaac

SEQ ID NO: 285243 - RNA, 32 nt, Homo Sapiens
uuggaauaauaaagguugggugauuauaucuu

SEQ ID NO: 285244 - RNA, 32 nt, Homo Sapiens
ccggcagacagaggcaagacgggggcugcggc

SEQ ID NO: 285245 - RNA, 32 nt, Homo Sapiens
aagaauuguugauaguuacaucuucaaacuua

SEQ ID NO: 285246 - RNA, 32 nt, Homo Sapiens
guuccacugacagggcagcugcucuuggagca

SEQ ID NO: 285247 - RNA, 32 nt, Homo Sapiens
gaaaaaaagaaguuuauaaaacaaguaaccca

SEQ ID NO: 285248 - RNA, 32 nt, Homo Sapiens
ggcgguggaggccgugcagggaggcgggagau

SEQ ID NO: 285249 - RNA, 32 nt, Homo Sapiens
uucggugaggccgccgugggccccaucuuccg

SEQ ID NO: 285250 - RNA, 32 nt, Homo Sapiens
uaguuaguacuugaugucacuaaccaaguugu

SEQ ID NO: 285251 - RNA, 32 nt, Homo Sapiens
uugccuuagugaucaugauuacacaaaagagg

SEQ ID NO: 285252 - RNA, 32 nt, Homo Sapiens
agguuuccggcuuguccuaugcucuccguuga

SEQ ID NO: 285253 - RNA, 32 nt, Homo Sapiens
uccagugcaagagaagggaaauacuaggaacu

SEQ ID NO: 285254 - RNA, 32 nt, Homo Sapiens
ccuuugaaaaucuggaaaugggcuggucaagu

SEQ ID NO: 285255 - RNA, 32 nt, Homo Sapiens
gcccacuccccucucuuccccagcaggcugua

SEQ ID NO: 285256 - RNA, 32 nt, Homo Sapiens
acggucugaucuuuacguauucuggaugcuaa

SEQ ID NO: 285257 - RNA, 32 nt, Homo Sapiens
cauagauuuaaacuuuuauuuuuacuuaucuu

SEQ ID NO: 285258 - RNA, 32 nt, Homo Sapiens
ccccggaaaauccucugucuccagucucugga

SEQ ID NO: 285259 - RNA, 32 nt, Homo Sapiens
uuuaucuaugaaaggcuuacuuugaaagaugg

SEQ ID NO: 285260 - RNA, 32 nt, Homo Sapiens
auaagugcaaugcauaaaauuuccugucugua

SEQ ID NO: 285261 - RNA, 32 nt, Homo Sapiens
aacuaaauuuuuuguaucaagucccugaaugg

SEQ ID NO: 285262 - RNA, 32 nt, Homo Sapiens
uuccugggacgcccucccggacacccccgcug

SEQ ID NO: 285263 - RNA, 32 nt, Homo Sapiens
cacccagcaacccgccuuggcccgcaggcugu

SEQ ID NO: 285264 - RNA, 32 nt, Homo Sapiens
ugcucgcucuuccgcaccguccuucccgguua

SEQ ID NO: 285265 - RNA, 32 nt, Homo Sapiens
uauugugcaauaacaaugacuuccuuggcggu

SEQ ID NO: 285266 - RNA, 32 nt, Homo Sapiens
ccuccaaaauucaaauguggaaauguauuugc

SEQ ID NO: 285267 - RNA, 32 nt, Homo Sapiens
ucuuugcaagcugcugacugggcacacucaug

SEQ ID NO: 285268 - RNA, 30 nt, Homo Sapiens
ggaggaagugggggcuggauaugcccaccc

SEQ ID NO: 285269 - RNA, 32 nt, Homo Sapiens
ucucugcccucccucuuacccugccucugugu

SEQ ID NO: 285270 - RNA, 32 nt, Homo Sapiens
auccugcaccccagucccccagcccuaaaucc

SEQ ID NO: 285271 - RNA, 32 nt, Homo Sapiens
agcaaaggaguacuacagcaucaaggcacaac

SEQ ID NO: 285272 - RNA, 32 nt, Homo Sapiens
uuuccuggaaacaaaugcaaagcaguauaaua

SEQ ID NO: 285273 - RNA, 32 nt, Homo Sapiens
cacuugcuugagauuauaucauuucuuuuuca

SEQ ID NO: 285274 - RNA, 32 nt, Homo Sapiens
uucagugugaggucgugagcucccugaaggcc

SEQ ID NO: 285275 - RNA, 30 nt, Homo Sapiens
aggggggauaaaagaggaggagugagcacu

SEQ ID NO: 285276 - RNA, 32 nt, Homo Sapiens
ugugcccccggcccgucuccgcgcucaccacg

SEQ ID NO: 285277 - RNA, 30 nt, Homo Sapiens
ugggguucccgggcgacgccggcgcugggc

SEQ ID NO: 285278 - RNA, 32 nt, Homo Sapiens
aaaucuuauuucagaauggaaauauuuuugag

SEQ ID NO: 285279 - RNA, 32 nt, Homo Sapiens
gggguaagacuacugauacuaacaggccugcu

SEQ ID NO: 285280 - RNA, 32 nt, Homo Sapiens
cauaaagcaaugccuuauccacagcagauuuu

SEQ ID NO: 285281 - RNA, 32 nt, Homo Sapiens
ggucacuauuuucucuuaacacauaggaaaaa

SEQ ID NO: 285282 - RNA, 32 nt, Homo Sapiens
agccuaacguucgucauugccucgucacauca

SEQ ID NO: 285283 - RNA, 32 nt, Homo Sapiens
gccacugcacuccagccugggcgacagagcac

SEQ ID NO: 285284 - RNA, 32 nt, Homo Sapiens
ggucucaaacuccuagucuuaagcaaucuucc

SEQ ID NO: 285285 - RNA, 32 nt, Homo Sapiens
gccucccguugacccuauguagcugcuauaaa

SEQ ID NO: 285286 - RNA, 32 nt, Homo Sapiens
agcuaacuuggguuugagucaaggcagggaaa

SEQ ID NO: 285287 - RNA, 29 nt, Homo Sapiens
ugcccuucuaucccagauuaccuaaaugu

SEQ ID NO: 285288 - RNA, 32 nt, Homo Sapiens
ugcccaggggcacuuaucguguccuucaugaa

SEQ ID NO: 285289 - RNA, 32 nt, Homo Sapiens
gcugaccaccaccaccuggccucuccgagacg

SEQ ID NO: 285290 - RNA, 32 nt, Homo Sapiens
ccuuugucuagauggaaacaaacaagauccug

SEQ ID NO: 285291 - RNA, 32 nt, Homo Sapiens
aaauucuguuguguuucccugguauacaucuu

SEQ ID NO: 285292 - RNA, 32 nt, Homo Sapiens
caggcccgacuuucgccgucuucuugucuacu

SEQ ID NO: 285293 - RNA, 32 nt, Homo Sapiens
aacccgcgcgcccgccaggcgcugcggccguc

SEQ ID NO: 285294 - RNA, 32 nt, Homo Sapiens
aaccaaugcucccaagcugaauauucuugagc

SEQ ID NO: 285295 - RNA, 32 nt, Homo Sapiens
auggaaacaaggaaaaauaaagcaagcucaca

SEQ ID NO: 285296 - RNA, 32 nt, Homo Sapiens
gggcacaaagacaagcuucuguuauuaucauc

SEQ ID NO: 285297 - RNA, 32 nt, Homo Sapiens
acuccagggauugguuucaggaccccugcauu

SEQ ID NO: 285298 - RNA, 32 nt, Homo Sapiens
ucaacccucggcuccgccgccggcuccuugcg

SEQ ID NO: 285299 - RNA, 32 nt, Homo Sapiens
aaugccugcuauaaaaauuugaaauauuagaa

SEQ ID NO: 285300 - RNA, 32 nt, Homo Sapiens
gaccauggcugccugccuuggggaggaaccau

SEQ ID NO: 285301 - RNA, 32 nt, Homo Sapiens
ccucaagucccgaccguggagcgcuggcaagg

SEQ ID NO: 285302 - RNA, 31 nt, Homo Sapiens
gcuuuugugauucaaaguucaggggugguaa

SEQ ID NO: 285303 - RNA, 32 nt, Homo Sapiens
uugagagcguuuucgcacuccagcggcugcuc

SEQ ID NO: 285304 - RNA, 32 nt, Homo Sapiens
uguucuagaagcccguuccccaguggcuguau

SEQ ID NO: 285305 - RNA, 31 nt, Homo Sapiens
aagggaagcaugugccaaccaaggcuagacc

SEQ ID NO: 285306 - RNA, 32 nt, Homo Sapiens
gugguuuuuguuuuuucuuauugcuguggaac

SEQ ID NO: 285307 - RNA, 32 nt, Homo Sapiens
ggggaggcgggugcaggaccgaggccuggaac

SEQ ID NO: 285308 - RNA, 32 nt, Homo Sapiens
cagugaacaguguacuuguucuuucaacuuuu

SEQ ID NO: 285309 - RNA, 32 nt, Homo Sapiens
uguuauuuucuuucucagugacacauaacaua

SEQ ID NO: 285310 - RNA, 32 nt, Homo Sapiens
guccaucugacaucaaagccagugucucuaau

SEQ ID NO: 285311 - RNA, 32 nt, Homo Sapiens
aaaaaauuuugcuagcuuaguaaaacgaauug

SEQ ID NO: 285312 - RNA, 32 nt, Homo Sapiens
cgccucggccccagccuguccccagccccuca

SEQ ID NO: 285313 - RNA, 32 nt, Homo Sapiens
gugccaccaaauucuuuuucuuuuuaaaucuu

SEQ ID NO: 285314 - RNA, 32 nt, Homo Sapiens
uuccuccacaccugagggacgcagcaacagcu

SEQ ID NO: 285315 - RNA, 32 nt, Homo Sapiens
cgagaaaugagauaaauuauuuccucagcuau

SEQ ID NO: 285316 - RNA, 32 nt, Homo Sapiens
ugaaacuuuucugcacaaagaauaaaauuaag

SEQ ID NO: 285317 - RNA, 32 nt, Homo Sapiens
ccacacccagcccaacucauuauucuugaaau

SEQ ID NO: 285318 - RNA, 32 nt, Homo Sapiens
agggucuuccugaaaugcaguggugcuuacgc

SEQ ID NO: 285319 - RNA, 32 nt, Homo Sapiens
cuguccaugcucuuuguuuuuaaacuuguucu

SEQ ID NO: 285320 - RNA, 32 nt, Homo Sapiens
ggaaguaggcucuggguccaugccuaacucug

SEQ ID NO: 285321 - RNA, 32 nt, Homo Sapiens
uuaauauuuuucccuauuagaaaccacaauua

SEQ ID NO: 285322 - RNA, 32 nt, Homo Sapiens
auugcuuguuguugcgcuucggaggcggagau

SEQ ID NO: 285323 - RNA, 32 nt, Homo Sapiens
aguggggaugacuguggcaaacaaaaggagau

SEQ ID NO: 285324 - RNA, 32 nt, Homo Sapiens
acuuuuucaucccacaacuuuaauuccuguua

SEQ ID NO: 285325 - RNA, 32 nt, Homo Sapiens
acuauugaaacaccuuaaucugugguuacuaa

SEQ ID NO: 285326 - RNA, 32 nt, Homo Sapiens
cuggaaaaacaugucauuucauuuucagaaaa

SEQ ID NO: 285327 - RNA, 29 nt, Homo Sapiens
aauaaacaagugauguccuagaagaucaa

SEQ ID NO: 285328 - RNA, 32 nt, Homo Sapiens
ggagguggaaggccauacagaauggagccgug

SEQ ID NO: 285329 - RNA, 32 nt, Homo Sapiens
caugcaggggagacgacucagggaucgugggg

SEQ ID NO: 285330 - RNA, 32 nt, Homo Sapiens
ugucugcuaauacaguuagcuuucucacuuuu

SEQ ID NO: 285331 - RNA, 32 nt, Homo Sapiens
acauuccagaaagaagcacaugaacuacagcc

SEQ ID NO: 285332 - RNA, 32 nt, Homo Sapiens
gcaggcuggcgugagaggagcggcagccacac

SEQ ID NO: 285333 - RNA, 32 nt, Homo Sapiens
cuauugguaaggaugugguuuuauugacuuga

SEQ ID NO: 285334 - RNA, 32 nt, Homo Sapiens
ucccgcggccccaguggcgccucagcucugcg

SEQ ID NO: 285335 - RNA, 32 nt, Homo Sapiens
ucggagggcccggcuggugcugcgggggcccc

SEQ ID NO: 285336 - RNA, 32 nt, Homo Sapiens
uggacaccacuacucccuucucuucccucccu

SEQ ID NO: 285337 - RNA, 32 nt, Homo Sapiens
cagcugacaaguaaaguaguagcaauccuuuu

SEQ ID NO: 285338 - RNA, 32 nt, Homo Sapiens
cuuccuuccuuccuuuccuuggagcacugagc

SEQ ID NO: 285339 - RNA, 32 nt, Homo Sapiens
cacagccccgcgccgcgcagggucuugcccac

SEQ ID NO: 285340 - RNA, 32 nt, Homo Sapiens
uucuaaagauguuccccauggguuuugauugu

SEQ ID NO: 285341 - RNA, 32 nt, Homo Sapiens
gaccuauaucccaugugaguggucacuuuauu

SEQ ID NO: 285342 - RNA, 32 nt, Homo Sapiens
gcccucagcaagacagggacaccuggaaaugc

SEQ ID NO: 285343 - RNA, 32 nt, Homo Sapiens
ccuccuuaaugaugaagaucacugccuugggc

SEQ ID NO: 285344 - RNA, 32 nt, Homo Sapiens
gcagccgccuugcugcguggacagcagcuucc

SEQ ID NO: 285345 - RNA, 32 nt, Homo Sapiens
gguggcggcagggcgucccagggugcggcacc

SEQ ID NO: 285346 - RNA, 32 nt, Homo Sapiens
gccggugccugcgccucccgcuccaccucgcu

SEQ ID NO: 285347 - RNA, 32 nt, Homo Sapiens
gcuuuauuagggacuuuuuuuuuuuuuuuuug

SEQ ID NO: 285348 - RNA, 32 nt, Homo Sapiens
uguaucuaaaauugauucuguuaacuguuguc

SEQ ID NO: 285349 - RNA, 32 nt, Homo Sapiens
ugaaagucauucuccccucucucauccaccuc

SEQ ID NO: 285350 - RNA, 32 nt, Homo Sapiens
uucugauacuauuuacuuagaggcaguuuuaa

SEQ ID NO: 285351 - RNA, 32 nt, Homo Sapiens
agcuguguuugaagaaagcuagugggaaaagu

SEQ ID NO: 285352 - RNA, 32 nt, Homo Sapiens
uggcagcccuguagggaacgggguccuucaag

SEQ ID NO: 285353 - RNA, 32 nt, Homo Sapiens
cucacacacacacacacacacacacacacaca

SEQ ID NO: 285354 - RNA, 32 nt, Homo Sapiens
gaagcuuguucccucuccuccucccuucuucc

SEQ ID NO: 285355 - RNA, 32 nt, Homo Sapiens
aauuuuuaauccagcacauacuauugcaagcg

SEQ ID NO: 285356 - RNA, 32 nt, Homo Sapiens
uuuuaccacuuccuugaauaguugcaggagaa

SEQ ID NO: 285357 - RNA, 32 nt, Homo Sapiens
gcgagcaggcagcaguuggccgugccguagca

SEQ ID NO: 285358 - RNA, 32 nt, Homo Sapiens
uuuuauccaaauauuuuguaucuuguaaauau

SEQ ID NO: 285359 - RNA, 32 nt, Homo Sapiens
uaguucaauucagcaagcauucauggaguucu

SEQ ID NO: 285360 - RNA, 32 nt, Homo Sapiens
ccucgcuccucgcuccucgcuccucgccccua

SEQ ID NO: 285361 - RNA, 32 nt, Homo Sapiens
uuucccugcuggaagccagaagggcuugaggc

SEQ ID NO: 285362 - RNA, 32 nt, Homo Sapiens
aaugagcauuuaaaacaugaaaacacucuugu

SEQ ID NO: 285363 - RNA, 32 nt, Homo Sapiens
ggagagagacaaauuaaugggauuguuaaaaa

SEQ ID NO: 285364 - RNA, 32 nt, Homo Sapiens
cuucagcaauaagcuuccugcucgaccccaag

SEQ ID NO: 285365 - RNA, 32 nt, Homo Sapiens
gcauuuuugguauuuuuguguauaagcuuuua

SEQ ID NO: 285366 - RNA, 32 nt, Homo Sapiens
aaacuguuuguuauauuuucuggaaugauaag

SEQ ID NO: 285367 - RNA, 32 nt, Homo Sapiens
aggcacauuucccccuuucucuuuaaagccaa

SEQ ID NO: 285368 - RNA, 32 nt, Homo Sapiens
guacaguguuuccacucuuucugcccucaccu

SEQ ID NO: 285369 - RNA, 32 nt, Homo Sapiens
gcuccagagaccucacagcauuguagggcggg

SEQ ID NO: 285370 - RNA, 32 nt, Homo Sapiens
ggaaagaagaagacauaagaaacuccauuuug

SEQ ID NO: 285371 - RNA, 32 nt, Homo Sapiens
ucccuguaauuccagcacuuuggaaggccaag

SEQ ID NO: 285372 - RNA, 32 nt, Homo Sapiens
cagccugccugacuucugcaaaccuacccugu

SEQ ID NO: 285373 - RNA, 32 nt, Homo Sapiens
cugcaguugcauuugagaaggaugagaagagc

SEQ ID NO: 285374 - RNA, 32 nt, Homo Sapiens
gcggccgcugcauggcgcugagauggcggggg

SEQ ID NO: 285375 - RNA, 32 nt, Homo Sapiens
augccuguucuuccauccacacuccagggcug

SEQ ID NO: 285376 - RNA, 27 nt, Homo Sapiens
agcccugcauuguacagccccccacuc

SEQ ID NO: 285377 - RNA, 32 nt, Homo Sapiens
ccccaguaucuaggauucaaugacaggaagug

SEQ ID NO: 285378 - RNA, 32 nt, Homo Sapiens
gaacuauagcuaaaaguaucaaugugguguua

SEQ ID NO: 285379 - RNA, 32 nt, Homo Sapiens
guggcugccgggcggagacgcuccucacuucc

SEQ ID NO: 285380 - RNA, 32 nt, Homo Sapiens
caaaaagaaauauuucaaagcuuucuccucca

SEQ ID NO: 285381 - RNA, 32 nt, Homo Sapiens
gccguuucuucauauaauccgaccacaguggg

SEQ ID NO: 285382 - RNA, 32 nt, Homo Sapiens
uguagcuuaggacgugaguuauuuuuccgcag

SEQ ID NO: 285383 - RNA, 32 nt, Homo Sapiens
aguuccuuuauuuuuucuuuucuaugcaagau

SEQ ID NO: 285384 - RNA, 32 nt, Homo Sapiens
ccucccccauucucuccauuuucucccaagaa

SEQ ID NO: 285385 - RNA, 32 nt, Homo Sapiens
aauuagccaggugguggcagcagacgcuugug

SEQ ID NO: 285386 - RNA, 32 nt, Homo Sapiens
uagaggccucgcccagagcccgagggcagcac

SEQ ID NO: 285387 - RNA, 32 nt, Homo Sapiens
auaauuuauuuuacuggcaaaugucaugcaac

SEQ ID NO: 285388 - RNA, 32 nt, Homo Sapiens
gcaaaccuggggcugacacgcguaagcuaggg

SEQ ID NO: 285389 - RNA, 32 nt, Homo Sapiens
uuauuucuuuauuugcaaaagaaucuuuauua

SEQ ID NO: 285390 - RNA, 32 nt, Homo Sapiens
ucccucgcccugccccgcaccguggggaugcc

SEQ ID NO: 285391 - RNA, 32 nt, Homo Sapiens
acuugagauaaucuaaauauaaaccagcuacu

SEQ ID NO: 285392 - RNA, 32 nt, Homo Sapiens
augaugaguguauugucuuugcacacacauau

SEQ ID NO: 285393 - RNA, 32 nt, Homo Sapiens
cugguguggggaggagagagaugcagagagcc

SEQ ID NO: 285394 - RNA, 32 nt, Homo Sapiens
agcucugaagcugacaaauaugcgagagaauc

SEQ ID NO: 285395 - RNA, 32 nt, Homo Sapiens
gaugaucuuuaaaagaaaaucuaauguuuuaa

SEQ ID NO: 285396 - RNA, 32 nt, Homo Sapiens
cuacauuuucuuuuaaaaguuuuauaguuuca

SEQ ID NO: 285397 - RNA, 32 nt, Homo Sapiens
agaaagaaagacuguaauaaguuaccuugucu

SEQ ID NO: 285398 - RNA, 32 nt, Homo Sapiens
ggggcgagcgcuugggacucggcccggcuccc

SEQ ID NO: 285399 - RNA, 32 nt, Homo Sapiens
ggaugugcagcuuaaggaggcucgacaggaga

SEQ ID NO: 285400 - RNA, 29 nt, Homo Sapiens
uaggaugaaguuauuuauuuucuauuuuc

SEQ ID NO: 285401 - RNA, 30 nt, Homo Sapiens
ccgagagucuguaggagggaaaccgccaug

SEQ ID NO: 285402 - RNA, 32 nt, Homo Sapiens
cugugauuugaaaaauauagaaucauuaaugg

SEQ ID NO: 285403 - RNA, 32 nt, Homo Sapiens
cguccgcgcgcggugccccgggacggccuagg

SEQ ID NO: 285404 - RNA, 30 nt, Homo Sapiens
auuuuaauuccaguggcccaucuuauaaua

SEQ ID NO: 285405 - RNA, 29 nt, Homo Sapiens
cuuucguaaaguuuauauucagcuuuuua

SEQ ID NO: 285406 - RNA, 32 nt, Homo Sapiens
uuuaaaacuuuuuuggaguaggggguauaggg

SEQ ID NO: 285407 - RNA, 32 nt, Homo Sapiens
cauuuugcaacauggcuucuccuuuggcaugu

SEQ ID NO: 285408 - RNA, 32 nt, Homo Sapiens
acaacuguucuugcugguuugggauaggcugc

SEQ ID NO: 285409 - RNA, 32 nt, Homo Sapiens
cuuuggauuuucucuccccuuucacauggauu

SEQ ID NO: 285410 - RNA, 30 nt, Homo Sapiens
ugcucccuaagcggcggcggcggcgagucg

SEQ ID NO: 285411 - RNA, 32 nt, Homo Sapiens
gccuccucuucugcacagaaugcuuccaccag

SEQ ID NO: 285412 - RNA, 32 nt, Homo Sapiens
gauuucuguggucccagaccagcccucuucuc

SEQ ID NO: 285413 - RNA, 32 nt, Homo Sapiens
gaaucugacaccuugccuugcucuugccacca

SEQ ID NO: 285414 - RNA, 32 nt, Homo Sapiens
gggguuugagggugggguaagggauuucuuag

SEQ ID NO: 285415 - RNA, 32 nt, Homo Sapiens
uggugugcaccuguaauuccagcuacucggga

SEQ ID NO: 285416 - RNA, 32 nt, Homo Sapiens
gcagguugcucagcugcccccggagcgguucc

SEQ ID NO: 285417 - RNA, 30 nt, Homo Sapiens
cgcggguggggcgggguuaggcggcgcucc

SEQ ID NO: 285418 - RNA, 32 nt, Homo Sapiens
ccauuuaaguugaauaaaucugucauuuucac

SEQ ID NO: 285419 - RNA, 32 nt, Homo Sapiens
ucacucgauagaaaauggcaaagcugggcauc

SEQ ID NO: 285420 - RNA, 32 nt, Homo Sapiens
ucucaagagggcauuuccccuugcgccuucuc

SEQ ID NO: 285421 - RNA, 32 nt, Homo Sapiens
aguggggaugacuguggcuucauaacucuacc

SEQ ID NO: 285422 - RNA, 32 nt, Homo Sapiens
ggucauuuacaacuuacauuuacaauuuauag

SEQ ID NO: 285423 - RNA, 32 nt, Homo Sapiens
cccuuuggacugugucccaaggaccugaugcu

SEQ ID NO: 285424 - RNA, 32 nt, Homo Sapiens
guucccaacacucuucaccuagcugaugguua

SEQ ID NO: 285425 - RNA, 32 nt, Homo Sapiens
ucucucaaucucaugcugagucucucugucuc

SEQ ID NO: 285426 - RNA, 32 nt, Homo Sapiens
acugcccugcuggauucuagacuugcaugggg

SEQ ID NO: 285427 - RNA, 32 nt, Homo Sapiens
uuuaaagagucuuuaacauuauuucagcaguu

SEQ ID NO: 285428 - RNA, 32 nt, Homo Sapiens
augauggauaucuauaauuguagauuuuguuu

SEQ ID NO: 285429 - RNA, 32 nt, Homo Sapiens
cccagcgcggcccgcaccgccauggaggugcu

SEQ ID NO: 285430 - RNA, 32 nt, Homo Sapiens
agucuucagagguuggaacuugggaaaaauca

SEQ ID NO: 285431 - RNA, 32 nt, Homo Sapiens
cgcuaagcauauauuaauaaaugcaaguggcu

SEQ ID NO: 285432 - RNA, 32 nt, Homo Sapiens
cagguuuuucauuuugccuuuaccaaagauca

SEQ ID NO: 285433 - RNA, 32 nt, Homo Sapiens
ugccacagaagauaacaacacccaaguccucu

SEQ ID NO: 285434 - RNA, 32 nt, Homo Sapiens
caggaucaguuucuacacaacucuguguggcu

SEQ ID NO: 285435 - RNA, 32 nt, Homo Sapiens
uggcaugcaccucggagcgcugcccaguggcc

SEQ ID NO: 285436 - RNA, 32 nt, Homo Sapiens
uuccugggggaggggggcagggggugaauuuu

SEQ ID NO: 285437 - RNA, 32 nt, Homo Sapiens
cugcccucacccugccccacuccuacgacugg

SEQ ID NO: 285438 - RNA, 32 nt, Homo Sapiens
uacccuguuucauuuccacuugugccaucuuc

SEQ ID NO: 285439 - RNA, 32 nt, Homo Sapiens
ugacuggaguuaaaagugaaaugucagguugu

SEQ ID NO: 285440 - RNA, 32 nt, Homo Sapiens
uuauauucuaacugagauauauugagauuaau

SEQ ID NO: 285441 - RNA, 32 nt, Homo Sapiens
uguauacuaugaacaauuuguaaaugucuuaa

SEQ ID NO: 285442 - RNA, 32 nt, Homo Sapiens
augggucagaggaaacaacauuuguguuauaa

SEQ ID NO: 285443 - RNA, 32 nt, Homo Sapiens
cacccucccuccccaguuacuuaaggaacuaa

SEQ ID NO: 285444 - RNA, 32 nt, Homo Sapiens
acaggagauaaugaaagguaucaguuguguug

SEQ ID NO: 285445 - RNA, 32 nt, Homo Sapiens
ugcccacccaccacugagccucauggaggugg

SEQ ID NO: 285446 - RNA, 31 nt, Homo Sapiens
aaagggccgauuucagcaggaguucagaggg

SEQ ID NO: 285447 - RNA, 32 nt, Homo Sapiens
ugugauagggagaggggugggaugccaucaua

SEQ ID NO: 285448 - RNA, 32 nt, Homo Sapiens
aguccaccaagaugcuuugaggcgggcuguag

SEQ ID NO: 285449 - RNA, 32 nt, Homo Sapiens
cuccugaaaucauauuuaaucuccaaauaaag

SEQ ID NO: 285450 - RNA, 32 nt, Homo Sapiens
uaacaaauauauuuaauguguugccauaaugu

SEQ ID NO: 285451 - RNA, 32 nt, Homo Sapiens
ggcccgagcuggaagcgcaaggcagccgccgc

SEQ ID NO: 285452 - RNA, 32 nt, Homo Sapiens
accuuguaaucaucaauacauccaccaaaaau

SEQ ID NO: 285453 - RNA, 32 nt, Homo Sapiens
gccuucucagaaugcuguuuuuucucaggagg

SEQ ID NO: 285454 - RNA, 32 nt, Homo Sapiens
cccugcggggcgcaccaccgaucuggggugcg

SEQ ID NO: 285455 - RNA, 32 nt, Homo Sapiens
guugugcucuuucaaagacccuuguuucugcc

SEQ ID NO: 285456 - RNA, 32 nt, Homo Sapiens
ugggguguggcaggcugggggcugggauguga

SEQ ID NO: 285457 - RNA, 32 nt, Homo Sapiens
auacuuguaaaaucgauggagcacuaaggacc

SEQ ID NO: 285458 - RNA, 32 nt, Homo Sapiens
agggagaggccugguccucgcugccgagggau

SEQ ID NO: 285459 - RNA, 32 nt, Homo Sapiens
ugccgaggggagagggcgcucaguccagaugu

SEQ ID NO: 285460 - RNA, 32 nt, Homo Sapiens
cggcgguggucuugcgggaggcgugggcuggg

SEQ ID NO: 285461 - RNA, 32 nt, Homo Sapiens
aacacauucuucccuucuucacaaacggccca

SEQ ID NO: 285462 - RNA, 32 nt, Homo Sapiens
uuuaucuagaaaagaagcaaaagggaaauaug

SEQ ID NO: 285463 - RNA, 32 nt, Homo Sapiens
uaaacugcagagcuuuuucuguucuaucuuaa

SEQ ID NO: 285464 - RNA, 32 nt, Homo Sapiens
ucuuuuuuaaacagcaucaucuugauucuuag

SEQ ID NO: 285465 - RNA, 32 nt, Homo Sapiens
uuguggcuccagccccagggauucugagucug

SEQ ID NO: 285466 - RNA, 32 nt, Homo Sapiens
gugugucugugugagggcagguccuggacuug

SEQ ID NO: 285467 - RNA, 32 nt, Homo Sapiens
acaaacugacccucuuuuuuuuuuuuuuuuuu

SEQ ID NO: 285468 - RNA, 32 nt, Homo Sapiens
ggugguuuauggccauacguggagguuuuuug

SEQ ID NO: 285469 - RNA, 32 nt, Homo Sapiens
ucauguguuucccaaaucuucucuagauuaaa

SEQ ID NO: 285470 - RNA, 32 nt, Homo Sapiens
ugccucccuggcccuccccauucuucuccugu

SEQ ID NO: 285471 - RNA, 32 nt, Homo Sapiens
ucccuauugaauugcuuucuccauuuucuuuu

SEQ ID NO: 285472 - RNA, 32 nt, Homo Sapiens
ccugaugcgccgcuccuucuccuuugcccucu

SEQ ID NO: 285473 - RNA, 32 nt, Homo Sapiens
uucugcccacugauacugacauguucugcacu

SEQ ID NO: 285474 - RNA, 32 nt, Homo Sapiens
gguuguauuuuucgauuugacauggaagccug

SEQ ID NO: 285475 - RNA, 32 nt, Homo Sapiens
uaagcggagggccugaggaaaccuguagcuuc

SEQ ID NO: 285476 - RNA, 32 nt, Homo Sapiens
gacugcccucccacccuccuaccuguucagua

SEQ ID NO: 285477 - RNA, 32 nt, Homo Sapiens
cagguucgauacaagaggcuguuuuccuagcg

SEQ ID NO: 285478 - RNA, 30 nt, Homo Sapiens
acuggagagaagccauaugaguguaaggaa

SEQ ID NO: 285479 - RNA, 32 nt, Homo Sapiens
guaucuguaggcauccuguaaauaauuccaag

SEQ ID NO: 285480 - RNA, 32 nt, Homo Sapiens
gaaccuugggcugcuccacuuugggucacaag

SEQ ID NO: 285481 - RNA, 32 nt, Homo Sapiens
gcaggggcgggggguuggguguggugagggag

SEQ ID NO: 285482 - RNA, 32 nt, Homo Sapiens
aagccggcguucgguaucagaagcgcugaugg

SEQ ID NO: 285483 - RNA, 32 nt, Homo Sapiens
uuuaauauaaagguguuaagcuuauuuugcuu

SEQ ID NO: 285484 - RNA, 32 nt, Homo Sapiens
auuuguauauauauuuuguguauaaauaguaa

SEQ ID NO: 285485 - RNA, 32 nt, Homo Sapiens
aucagcuccagagaugaguccuggagccuuga

SEQ ID NO: 285486 - RNA, 32 nt, Homo Sapiens
ggagcugugccuccucacccccagcuuugcua

SEQ ID NO: 285487 - RNA, 32 nt, Homo Sapiens
agcuggguccccaagagugcaucucccccuag

SEQ ID NO: 285488 - RNA, 32 nt, Homo Sapiens
gguagcuccugauagcacuuucaagggauuau

SEQ ID NO: 285489 - RNA, 32 nt, Homo Sapiens
uagagacaggcacaugggcagcucuguucccu

SEQ ID NO: 285490 - RNA, 32 nt, Homo Sapiens
aguaggggaaagggccuucuuguacacuagua

SEQ ID NO: 285491 - RNA, 32 nt, Homo Sapiens
cagccgcggcggcggcggcggcuggagugagc

SEQ ID NO: 285492 - RNA, 32 nt, Homo Sapiens
ucucagaaugguuuuuuuauuauaauccaaag

SEQ ID NO: 285493 - RNA, 32 nt, Homo Sapiens
ccggagagauggugggggcagcuccucuucuu

SEQ ID NO: 285494 - RNA, 32 nt, Homo Sapiens
gaagccuuauuuccaagauggagaagaagcgg

SEQ ID NO: 285495 - RNA, 32 nt, Homo Sapiens
uucauagugggaggcauggagaauuaacguag

SEQ ID NO: 285496 - RNA, 25 nt, Homo Sapiens
augagcugcgcggggcgggcgggcc

SEQ ID NO: 285497 - RNA, 32 nt, Homo Sapiens
uaauuuucacaauaaccuuguuuuuacuucug

SEQ ID NO: 285498 - RNA, 32 nt, Homo Sapiens
caccccuccccuccccacaguggaauuguuga

SEQ ID NO: 285499 - RNA, 32 nt, Homo Sapiens
cuaugaaucagcaaauuuuuaagauuguacca

SEQ ID NO: 285500 - RNA, 32 nt, Homo Sapiens
cuguggagggaguuuuccccaggaggccgucu

SEQ ID NO: 285501 - RNA, 32 nt, Homo Sapiens
aaucauuucuaaaaccaacccaacugcuuuuc

SEQ ID NO: 285502 - RNA, 32 nt, Homo Sapiens
cucuucuuuuucugucauuucaugcuugguuc

SEQ ID NO: 285503 - RNA, 32 nt, Homo Sapiens
cuauaccccagccguggggcccggggucccug

SEQ ID NO: 285504 - RNA, 32 nt, Homo Sapiens
cagagcuaagggugggugcucagaauaaggca

SEQ ID NO: 285505 - RNA, 32 nt, Homo Sapiens
gacgaugagugugugauccccccuucuccaag

SEQ ID NO: 285506 - RNA, 32 nt, Homo Sapiens
ugguuuucaaggaaaugggauuugguugcuga

SEQ ID NO: 285507 - RNA, 32 nt, Homo Sapiens
uaucagugcccauuuauauaaugguuauaaaa

SEQ ID NO: 285508 - RNA, 32 nt, Homo Sapiens
cucuccucccggaccccuccccaguccccaga

SEQ ID NO: 285509 - RNA, 32 nt, Homo Sapiens
ucauuuuggaaugugaacaaccagagacuaca

SEQ ID NO: 285510 - RNA, 32 nt, Homo Sapiens
cuggaaaaucagccuucuucuggaugccucca

SEQ ID NO: 285511 - RNA, 32 nt, Homo Sapiens
ugaaagaccguaaaacuuucugguugccacaa

SEQ ID NO: 285512 - RNA, 32 nt, Homo Sapiens
cagccccgccaacagccacagagccccugaga

SEQ ID NO: 285513 - RNA, 32 nt, Homo Sapiens
acuugcuauauguuuuuaaauauuuacuggau

SEQ ID NO: 285514 - RNA, 32 nt, Homo Sapiens
ugcgcaccuucccggcccagccggcgauucau

SEQ ID NO: 285515 - RNA, 32 nt, Homo Sapiens
ugcuuuucuuuccccauagaaaguaccuugaa

SEQ ID NO: 285516 - RNA, 32 nt, Homo Sapiens
gccaagggacucagagcacaugugcugugaac

SEQ ID NO: 285517 - RNA, 32 nt, Homo Sapiens
cuuuguggcagcacugauggugcaggaggcac

SEQ ID NO: 285518 - RNA, 32 nt, Homo Sapiens
uguucucaggaucacugggcucuucuuggcag

SEQ ID NO: 285519 - RNA, 32 nt, Homo Sapiens
ggugugugccacucagagacuucaccuaacua

SEQ ID NO: 285520 - RNA, 32 nt, Homo Sapiens
agggaccccucccccuuugcccagagcuccaa

SEQ ID NO: 285521 - RNA, 32 nt, Homo Sapiens
aagcccaaaagccccagauccccuuaaagcag

SEQ ID NO: 285522 - RNA, 32 nt, Homo Sapiens
aacucacauuaaugcuuggagcuuaucucuuu

SEQ ID NO: 285523 - RNA, 32 nt, Homo Sapiens
ggcagggccuggagggcucccuaugguggcgg

SEQ ID NO: 285524 - RNA, 32 nt, Homo Sapiens
uauacauuucuuuuuucuaucagauauucauu

SEQ ID NO: 285525 - RNA, 31 nt, Homo Sapiens
cuggcaccagagacgccaagagccugugggg

SEQ ID NO: 285526 - RNA, 32 nt, Homo Sapiens
ugcacccgcucugccuggccagcccucgggcc

SEQ ID NO: 285527 - RNA, 32 nt, Homo Sapiens
aucacugguucgggggaaauaguuccauucua

SEQ ID NO: 285528 - RNA, 32 nt, Homo Sapiens
ccugugaagggagacaggccaggaagucccag

SEQ ID NO: 285529 - RNA, 32 nt, Homo Sapiens
gccuccugccuuccuuuauauuuuaaaauaga

SEQ ID NO: 285530 - RNA, 32 nt, Homo Sapiens
gcuucccaacuggucagaaggcacagggcuaa

SEQ ID NO: 285531 - RNA, 32 nt, Homo Sapiens
uugugcccggcgggguccaguuccugcaccuu

SEQ ID NO: 285532 - RNA, 32 nt, Homo Sapiens
cgggccuguuggcaagcuucgaucucacacac

SEQ ID NO: 285533 - RNA, 32 nt, Homo Sapiens
auacguguucuuccggcccaccauccaggugg

SEQ ID NO: 285534 - RNA, 32 nt, Homo Sapiens
caacugcuucucucccuucucucuccugaggu

SEQ ID NO: 285535 - RNA, 32 nt, Homo Sapiens
gcaggcacccucaaagguagacgugauugagg

SEQ ID NO: 285536 - RNA, 32 nt, Homo Sapiens
aggaaaaggaaagcguuuuuguagcccaccau

SEQ ID NO: 285537 - RNA, 32 nt, Homo Sapiens
cucagguacauuugacccugagguuaaaaggg

SEQ ID NO: 285538 - RNA, 32 nt, Homo Sapiens
gcccagaaacccagcccuguccggcgugccgc

SEQ ID NO: 285539 - RNA, 32 nt, Homo Sapiens
aaguucaaguguuuuucucuuaaauucaguau

SEQ ID NO: 285540 - RNA, 32 nt, Homo Sapiens
aagaauaaugaaaaaucuagaucaauucuuca

SEQ ID NO: 285541 - RNA, 32 nt, Homo Sapiens
gucacucucgugggaagaguuuuuauauggga

SEQ ID NO: 285542 - RNA, 32 nt, Homo Sapiens
gcaggcgaguggaaccacaggugcuucccguc

SEQ ID NO: 285543 - RNA, 32 nt, Homo Sapiens
cccagagccgcgcugccugcagugcgcucuga

SEQ ID NO: 285544 - RNA, 32 nt, Homo Sapiens
cugcuucugaccaagcuaaauguuuggaugaa

SEQ ID NO: 285545 - RNA, 32 nt, Homo Sapiens
caccccuggcccggcagcgccgaggccgcuuc

SEQ ID NO: 285546 - RNA, 32 nt, Homo Sapiens
ugucacguucccuccccuuuccccagcgcacu

SEQ ID NO: 285547 - RNA, 32 nt, Homo Sapiens
uguccacaaugccccaggccucugagcaccgc

SEQ ID NO: 285548 - RNA, 32 nt, Homo Sapiens
cccuaaaaccuuggauuaaacagaaugugcau

SEQ ID NO: 285549 - RNA, 32 nt, Homo Sapiens
ccggcugaggcgcgcgggagggaaggaggcaa

SEQ ID NO: 285550 - RNA, 32 nt, Homo Sapiens
guaucauccugccuauuuaaaaauauguuugg

SEQ ID NO: 285551 - RNA, 32 nt, Homo Sapiens
gggacagaagucuugcuguccaugguggugua

SEQ ID NO: 285552 - RNA, 32 nt, Homo Sapiens
uccaacugccaucuauacaauuuucuuacaga

SEQ ID NO: 285553 - RNA, 32 nt, Homo Sapiens
ccuccgcacgaugcucccacgcguccaacuug

SEQ ID NO: 285554 - RNA, 32 nt, Homo Sapiens
gcugccccaucccucccccaaccccuguaucc

SEQ ID NO: 285555 - RNA, 32 nt, Homo Sapiens
aguacuggccgcggcgcgguggcggcggcugg

SEQ ID NO: 285556 - RNA, 32 nt, Homo Sapiens
cccugacaggcacaacuccccgggcagaaaac

SEQ ID NO: 285557 - RNA, 32 nt, Homo Sapiens
gaagaggagagcucagccaagugaggcagcag

SEQ ID NO: 285558 - RNA, 32 nt, Homo Sapiens
acucuccugcugagauuccccaucccaaaaau

SEQ ID NO: 285559 - RNA, 32 nt, Homo Sapiens
cagcucccucgucuucagcugcauuucacaug

SEQ ID NO: 285560 - RNA, 32 nt, Homo Sapiens
ucuagagcagcauggagcuguugguagaauau

SEQ ID NO: 285561 - RNA, 32 nt, Homo Sapiens
auacgugccagauauaacugucuuguuucagu

SEQ ID NO: 285562 - RNA, 32 nt, Homo Sapiens
gccccugagcugcgcgcacuaccgccucggua

SEQ ID NO: 285563 - RNA, 32 nt, Homo Sapiens
gcccagacaaccccugcagagugacccugaag

SEQ ID NO: 285564 - RNA, 32 nt, Homo Sapiens
guaguccucucuuccuucuccucuucagcuuu

SEQ ID NO: 285565 - RNA, 32 nt, Homo Sapiens
gccgcccuccgggucucuccggguccggagcc

SEQ ID NO: 285566 - RNA, 32 nt, Homo Sapiens
aaacuuuucagaugaacuauuguuuaguacag

SEQ ID NO: 285567 - RNA, 32 nt, Homo Sapiens
accacccagcgagccccuccccuccguagcac

SEQ ID NO: 285568 - RNA, 32 nt, Homo Sapiens
ggcuggcgcuggcgccaugaacccgcuguaag

SEQ ID NO: 285569 - RNA, 32 nt, Homo Sapiens
gcaggaagggagggccuggggggugggaagca

SEQ ID NO: 285570 - RNA, 32 nt, Homo Sapiens
ccacccugcagcaucaagguugcuauggacuc

SEQ ID NO: 285571 - RNA, 32 nt, Homo Sapiens
ccucucaaaaauaaauaaaauaaaguaaaaua

SEQ ID NO: 285572 - RNA, 32 nt, Homo Sapiens
uucagguuuugccaagaaugacacuguaaaug

SEQ ID NO: 285573 - RNA, 32 nt, Homo Sapiens
ucagaaauauuuuccaaacacuuuccuuuauu

SEQ ID NO: 285574 - RNA, 32 nt, Homo Sapiens
guuagggaagggcugcaggaagggcaguuucc

SEQ ID NO: 285575 - RNA, 32 nt, Homo Sapiens
aauauauguauaaagaaguauuacuguuugua

SEQ ID NO: 285576 - RNA, 32 nt, Homo Sapiens
auccaaagauguccagauguccaugugcuagu

SEQ ID NO: 285577 - RNA, 32 nt, Homo Sapiens
cgacacgcugcuguggggucccggugagaugg

SEQ ID NO: 285578 - RNA, 32 nt, Homo Sapiens
caaagagaauaaaacaauucggcggccagugu

SEQ ID NO: 285579 - RNA, 32 nt, Homo Sapiens
ugaagccucgccccgcggccugccgcaggaua

SEQ ID NO: 285580 - RNA, 32 nt, Homo Sapiens
cuuagaaagggagguggcggauggagugggaa

SEQ ID NO: 285581 - RNA, 32 nt, Homo Sapiens
ucacggucuuucugcccuuuccugccucccuc

SEQ ID NO: 285582 - RNA, 32 nt, Homo Sapiens
gucccccgcucccgggguccccggccggccaa

SEQ ID NO: 285583 - RNA, 31 nt, Homo Sapiens
uuaucuaaaggaaucaaguccacucuucugc

SEQ ID NO: 285584 - RNA, 32 nt, Homo Sapiens
ucuugaacacaaguuccugauaacuuuaagau

SEQ ID NO: 285585 - RNA, 31 nt, Homo Sapiens
ucuacucucaggggcugucuaacugaugguc

SEQ ID NO: 285586 - RNA, 32 nt, Homo Sapiens
uaagaaaccuguucuuaauguuggcaugucac

SEQ ID NO: 285587 - RNA, 32 nt, Homo Sapiens
uaaaggagaagaaccaguauauguaaagcaua

SEQ ID NO: 285588 - RNA, 32 nt, Homo Sapiens
acaaaaacuguuuuuauuuauuucuguagaua

SEQ ID NO: 285589 - RNA, 32 nt, Homo Sapiens
ggucagguuucccccgaccuucccucaccccc

SEQ ID NO: 285590 - RNA, 32 nt, Homo Sapiens
ccuucugaaaauaauaaacucucauuaaccca

SEQ ID NO: 285591 - RNA, 32 nt, Homo Sapiens
uuaguauaugaaaggacagggauuuuuguucu

SEQ ID NO: 285592 - RNA, 32 nt, Homo Sapiens
gggaggggacagagcugaggauuuccuggagu

SEQ ID NO: 285593 - RNA, 32 nt, Homo Sapiens
gagacauaaaaagcaggugacaaggauaccag

SEQ ID NO: 285594 - RNA, 32 nt, Homo Sapiens
ggauuagcccgucauucugaugggguuuuccu

SEQ ID NO: 285595 - RNA, 32 nt, Homo Sapiens
ccuguagaacuaaaggcuguuccaagaaugug

SEQ ID NO: 285596 - RNA, 32 nt, Homo Sapiens
gaaaaucaauauuuaaaacaaaguucaauuua

SEQ ID NO: 285597 - RNA, 32 nt, Homo Sapiens
uaagugacgcucaacaacgaaaagcaaaaaga

SEQ ID NO: 285598 - RNA, 32 nt, Homo Sapiens
uggguuggguggggcgggaugggggaaaagua

SEQ ID NO: 285599 - RNA, 32 nt, Homo Sapiens
uacuuacugauagaccaaaaaacuacaccagu

SEQ ID NO: 285600 - RNA, 28 nt, Homo Sapiens
aaguauuuggcuaccagccagauccccu

SEQ ID NO: 285601 - RNA, 32 nt, Homo Sapiens
caauaccugcucccaacagccaugcaugccgg

SEQ ID NO: 285602 - RNA, 32 nt, Homo Sapiens
cgaacauuugaauauugaucaauauaagagau

SEQ ID NO: 285603 - RNA, 32 nt, Homo Sapiens
cagucaaggcuuugggggcucuguuuugaaug

SEQ ID NO: 285604 - RNA, 32 nt, Homo Sapiens
ccccgucuccuggccugcccccuucaugggcc

SEQ ID NO: 285605 - RNA, 32 nt, Homo Sapiens
aggacgugagcacuucacuuucaaggaccggu

SEQ ID NO: 285606 - RNA, 32 nt, Homo Sapiens
guggcggcggcgagggcuggacucgggcuuag

SEQ ID NO: 285607 - RNA, 32 nt, Homo Sapiens
cgugauucuugguucuugguuaccacacuggu

SEQ ID NO: 285608 - RNA, 32 nt, Homo Sapiens
uuaugaaaucaucauguagccaacuucaaauc

SEQ ID NO: 285609 - RNA, 32 nt, Homo Sapiens
cccgcccuccuucuccaccuucuagugcccgu

SEQ ID NO: 285610 - RNA, 32 nt, Homo Sapiens
gcaggugcuuaaagggacauuguaggagguac

SEQ ID NO: 285611 - RNA, 32 nt, Homo Sapiens
gaaggguacgccagggucgcugagagacucug

SEQ ID NO: 285612 - RNA, 32 nt, Homo Sapiens
gaagcugcugaccccaggaucccagcccgugg

SEQ ID NO: 285613 - RNA, 32 nt, Homo Sapiens
acacuaaaauauauuuuugcaaaugcagcagu

SEQ ID NO: 285614 - RNA, 32 nt, Homo Sapiens
cauaguuuuuaaaguaccuauuagugauacuc

SEQ ID NO: 285615 - RNA, 32 nt, Homo Sapiens
cugcccugccccccaccccuuccugaccacgg

SEQ ID NO: 285616 - RNA, 32 nt, Homo Sapiens
ugucuucacauacauucucugagccaacaucu

SEQ ID NO: 285617 - RNA, 32 nt, Homo Sapiens
gaacaaauggugccugaauauuaacaguguuc

SEQ ID NO: 285618 - RNA, 32 nt, Homo Sapiens
ggaucggguguugcauccauggagcgagcuga

SEQ ID NO: 285619 - RNA, 32 nt, Homo Sapiens
ccucaggagaucugggucccuggagccaguac

SEQ ID NO: 285620 - RNA, 32 nt, Homo Sapiens
ucuugcuuuucacaucucuccuccuacagccu

SEQ ID NO: 285621 - RNA, 32 nt, Homo Sapiens
acacugacguuuuccuucuacuccgucagcaa

SEQ ID NO: 285622 - RNA, 32 nt, Homo Sapiens
caacauaauguuuaauuuacaacuuacauuag

SEQ ID NO: 285623 - RNA, 32 nt, Homo Sapiens
aacugccuuuuaaaauuucauuacaauaaaaa

SEQ ID NO: 285624 - RNA, 32 nt, Homo Sapiens
aauauguaugcauucaccuugccucuugcaca

SEQ ID NO: 285625 - RNA, 32 nt, Homo Sapiens
cuuaacccuggcuccuggcccgagccugggcu

SEQ ID NO: 285626 - RNA, 32 nt, Homo Sapiens
cucaucaugauccaucucuggcacauuuuuaa

SEQ ID NO: 285627 - RNA, 32 nt, Homo Sapiens
aaaauccaaagucugaccaguuuguaaagaaa

SEQ ID NO: 285628 - RNA, 32 nt, Homo Sapiens
ggagaagccugggugggaagcugcuggcccag

SEQ ID NO: 285629 - RNA, 32 nt, Homo Sapiens
gccaccugccccacccaguuucuggaaaaagu

SEQ ID NO: 285630 - RNA, 32 nt, Homo Sapiens
uuuaguuuaagugaaaagagguuugauugcau

SEQ ID NO: 285631 - RNA, 32 nt, Homo Sapiens
gccuccccacguggggccccagcucccgcuga

SEQ ID NO: 285632 - RNA, 32 nt, Homo Sapiens
ucaccguuugcacuuuuuguauuucaauaaaa

SEQ ID NO: 285633 - RNA, 32 nt, Homo Sapiens
uugaacuccugacuucaggugacccacccgcc

SEQ ID NO: 285634 - RNA, 29 nt, Homo Sapiens
cuuaccuguucaguuuauuuucuguguuc

SEQ ID NO: 285635 - RNA, 32 nt, Homo Sapiens
uuggaccagaaguccuaucgacuuuauacaga

SEQ ID NO: 285636 - RNA, 32 nt, Homo Sapiens
uccuccaccugccuuccauuuugaagugggau

SEQ ID NO: 285637 - RNA, 32 nt, Homo Sapiens
aaaaguaacaauaccuaggacugacugaaugu

SEQ ID NO: 285638 - RNA, 32 nt, Homo Sapiens
auuacuguacuauccuguacugcaguggugcc

SEQ ID NO: 285639 - RNA, 32 nt, Homo Sapiens
cagagggucuuuaggacacagauucuuaaaag

SEQ ID NO: 285640 - RNA, 32 nt, Homo Sapiens
ccaaagaaaaagguuuaaagcuuauuucccuu

SEQ ID NO: 285641 - RNA, 32 nt, Homo Sapiens
caagcaaagaucaacacuuucuuuuuugguaa

SEQ ID NO: 285642 - RNA, 32 nt, Homo Sapiens
uucacacguacacacauaaacacacccaccag

SEQ ID NO: 285643 - RNA, 32 nt, Homo Sapiens
auaauauacuuaauauaacauaaaaagccagu

SEQ ID NO: 285644 - RNA, 32 nt, Homo Sapiens
ugaguuugaaugucuuuuuuuuuuuuuuuuuu

SEQ ID NO: 285645 - RNA, 32 nt, Homo Sapiens
gaaggcucccggcugccuccccgccaccgagc

SEQ ID NO: 285646 - RNA, 32 nt, Homo Sapiens
guggaagcagaaggaagaagaugcgcugagag

SEQ ID NO: 285647 - RNA, 32 nt, Homo Sapiens
uuuuagauauuaugauauucugaaauaacuau

SEQ ID NO: 285648 - RNA, 32 nt, Homo Sapiens
ucuuaauuguauauguccugugguguauuaac

SEQ ID NO: 285649 - RNA, 32 nt, Homo Sapiens
cucauuguucaaaaauccgccaaaaaauguuc

SEQ ID NO: 285650 - RNA, 32 nt, Homo Sapiens
cagagccacuacauuuaggcuguagacauuau

SEQ ID NO: 285651 - RNA, 32 nt, Homo Sapiens
cugccagccagcccuccuccccgacccagcgc

SEQ ID NO: 285652 - RNA, 32 nt, Homo Sapiens
gcccacguacauacguaugucuccaugaguuc

SEQ ID NO: 285653 - RNA, 32 nt, Homo Sapiens
accugcccggcacccccuccccagugguuguu

SEQ ID NO: 285654 - RNA, 32 nt, Homo Sapiens
cggagccccggcccgccgcggucccgucuccu

SEQ ID NO: 285655 - RNA, 32 nt, Homo Sapiens
uccucuuugcagguauuaauucuuauaauuuu

SEQ ID NO: 285656 - RNA, 32 nt, Homo Sapiens
ccgcggcugcccagcagcaugagguggugcug

SEQ ID NO: 285657 - RNA, 32 nt, Homo Sapiens
acgagcagugccgcguggccuucggccccaag

SEQ ID NO: 285658 - RNA, 32 nt, Homo Sapiens
ucggggaggggagggaaaagcagcacccacag

SEQ ID NO: 285659 - RNA, 29 nt, Homo Sapiens
gaaaacugaaacaaaacagcagcaauaau

SEQ ID NO: 285660 - RNA, 32 nt, Homo Sapiens
cuuuuggcgugcgcgcgcacacacaaacacac

SEQ ID NO: 285661 - RNA, 32 nt, Homo Sapiens
caccagcucuuaggaaguaaauacagauuuuu

SEQ ID NO: 285662 - RNA, 32 nt, Homo Sapiens
cuaccccaggacgcaugcagggcccccacugg

SEQ ID NO: 285663 - RNA, 32 nt, Homo Sapiens
gccugguucucaauuugacacccuaagcgauc

SEQ ID NO: 285664 - RNA, 32 nt, Homo Sapiens
ccaugccacugagugccuggaacguaguaaau

SEQ ID NO: 285665 - RNA, 32 nt, Homo Sapiens
ugauuuuaaaagaccaugacgaauguguacac

SEQ ID NO: 285666 - RNA, 32 nt, Homo Sapiens
uaugccgaccaccagcaguggaugggccucag

SEQ ID NO: 285667 - RNA, 32 nt, Homo Sapiens
ccacccaccccuccccgcauuguggcaucagu

SEQ ID NO: 285668 - RNA, 32 nt, Homo Sapiens
ucuccugccucagcuucccgcguagcgugugc

SEQ ID NO: 285669 - RNA, 30 nt, Homo Sapiens
uaccugucgcuauucugggaaaccuucuug

SEQ ID NO: 285670 - RNA, 32 nt, Homo Sapiens
acaugguuccaagaaggaggguguaaaaccug

SEQ ID NO: 285671 - RNA, 31 nt, Homo Sapiens
cauguagccuuggagacccaggcaaggacaa

SEQ ID NO: 285672 - RNA, 28 nt, Homo Sapiens
gcccagguggcuacaaagaauguggcac

SEQ ID NO: 285673 - RNA, 32 nt, Homo Sapiens
cuguaugucuucugccuccacacuugcuugcc

SEQ ID NO: 285674 - RNA, 32 nt, Homo Sapiens
aacggacggacggacggaaggcgacucgaggg

SEQ ID NO: 285675 - RNA, 32 nt, Homo Sapiens
uaguuaacccaccuagugcuccuaaucauaca

SEQ ID NO: 285676 - RNA, 32 nt, Homo Sapiens
aaaugaaguauuuuuucccucuuggcaacuug

SEQ ID NO: 285677 - RNA, 32 nt, Homo Sapiens
cugcauuauuuuugcaauuaaucuuuauaugc

SEQ ID NO: 285678 - RNA, 32 nt, Homo Sapiens
auggugaauauugauagauauaaaccucauga

SEQ ID NO: 285679 - RNA, 32 nt, Homo Sapiens
ugcaucucccagcagaaggcgcagccaugaau

SEQ ID NO: 285680 - RNA, 32 nt, Homo Sapiens
ggguggugcagugggugagcucagccccuccc

SEQ ID NO: 285681 - RNA, 32 nt, Homo Sapiens
gcccuagcagagacagugucuuucauuugaug

SEQ ID NO: 285682 - RNA, 32 nt, Homo Sapiens
auguaaauauuuuuguuacuguucugagccaa

SEQ ID NO: 285683 - RNA, 32 nt, Homo Sapiens
augauaaagguguuuacuuuuacuucccaguc

SEQ ID NO: 285684 - RNA, 32 nt, Homo Sapiens
ccggugcgagucaaagagccgcuccggccccg

SEQ ID NO: 285685 - RNA, 32 nt, Homo Sapiens
ccacccuagaucagcugaaacucuaagcacaa

SEQ ID NO: 285686 - RNA, 32 nt, Homo Sapiens
agguucgggcagccgucgggaauaccgaccau

SEQ ID NO: 285687 - RNA, 32 nt, Homo Sapiens
augcaaauuucaugaccaguaaaggcugcugc

SEQ ID NO: 285688 - RNA, 32 nt, Homo Sapiens
uuguuaaggugauucaagguuuuaaaauauuu

SEQ ID NO: 285689 - RNA, 32 nt, Homo Sapiens
aauguugcaugcauauuucaccuaccaaagcu

SEQ ID NO: 285690 - RNA, 32 nt, Homo Sapiens
gcaccacacgcgccagcgucuuccgcacacac

SEQ ID NO: 285691 - RNA, 32 nt, Homo Sapiens
uugaauagggcuaggaauauagauuaaaucau

SEQ ID NO: 285692 - RNA, 32 nt, Homo Sapiens
uccgggucucaaauagggauugguuuaaauga

SEQ ID NO: 285693 - RNA, 32 nt, Homo Sapiens
gaugugcuccagcccagccgggcuucaguucc

SEQ ID NO: 285694 - RNA, 32 nt, Homo Sapiens
gaagagcagaaagcaucugcugugugagcguu

SEQ ID NO: 285695 - RNA, 32 nt, Homo Sapiens
agagaaugaggccacacaaacacacccaggcc

SEQ ID NO: 285696 - RNA, 32 nt, Homo Sapiens
gcuccccgcucgcggcagcccccguguacugg

SEQ ID NO: 285697 - RNA, 32 nt, Homo Sapiens
agaaggggagacugaggcugaggcuggggaac

SEQ ID NO: 285698 - RNA, 32 nt, Homo Sapiens
gagaucugccugccgaagacucgcgggggcgc

SEQ ID NO: 285699 - RNA, 32 nt, Homo Sapiens
ucuuucucucuuucuuuuuuuuuguuuguuug

SEQ ID NO: 285700 - RNA, 28 nt, Homo Sapiens
gccaaaagagauuaacauuugagucccu

SEQ ID NO: 285701 - RNA, 32 nt, Homo Sapiens
augugagagguuagggcaaucuguggauuggg

SEQ ID NO: 285702 - RNA, 32 nt, Homo Sapiens
ggaaggccuugauuugugaugugcuaggagag

SEQ ID NO: 285703 - RNA, 30 nt, Homo Sapiens
cggggaggcggcggcggcggcaggauuccc

SEQ ID NO: 285704 - RNA, 32 nt, Homo Sapiens
guguugguuuugggggugugaguguuuggggg

SEQ ID NO: 285705 - RNA, 32 nt, Homo Sapiens
acacccccaaccucccacuccucccuccucgc

SEQ ID NO: 285706 - RNA, 32 nt, Homo Sapiens
ucccacccuuucugccagggauggcaguggcu

SEQ ID NO: 285707 - RNA, 32 nt, Homo Sapiens
uccuggggcaaugcuccucccucucgggagcc

SEQ ID NO: 285708 - RNA, 32 nt, Homo Sapiens
ggcgcccgggcuggagcgccccggccguguug

SEQ ID NO: 285709 - RNA, 30 nt, Homo Sapiens
ugaagauggcugccucugccuuugcuggug

SEQ ID NO: 285710 - RNA, 32 nt, Homo Sapiens
agaggcagcuggaucagaagggaccagcugga

SEQ ID NO: 285711 - RNA, 28 nt, Homo Sapiens
uaaagugaauaaaauguccacaagcaaa

SEQ ID NO: 285712 - RNA, 32 nt, Homo Sapiens
cgggcggccccgcuccagcaucccagcuccug

SEQ ID NO: 285713 - RNA, 28 nt, Homo Sapiens
gggaugaaguuggggagaaccugguauu

SEQ ID NO: 285714 - RNA, 32 nt, Homo Sapiens
gaaagccuaauguaaaguagugaugggauuuc

SEQ ID NO: 285715 - RNA, 32 nt, Homo Sapiens
acuuuuuguuuaguauaguuuuauaaucuaua

SEQ ID NO: 285716 - RNA, 32 nt, Homo Sapiens
uacgugauauugugauugauuuucaugcagag

SEQ ID NO: 285717 - RNA, 32 nt, Homo Sapiens
uagggaccagugcaugugaggucggugcugga

SEQ ID NO: 285718 - RNA, 32 nt, Homo Sapiens
ugggcaaggucauuaaauuugccaccucacac

SEQ ID NO: 285719 - RNA, 32 nt, Homo Sapiens
cagcgagcccuccccacccacccacgguccuc

SEQ ID NO: 285720 - RNA, 32 nt, Homo Sapiens
cacccgcccugaugcuaaggaaacccugacgu

SEQ ID NO: 285721 - RNA, 32 nt, Homo Sapiens
ugcagcacgugggcaacguccaggauuuccug

SEQ ID NO: 285722 - RNA, 32 nt, Homo Sapiens
gcggcagaaaaguuuucuucaaaaauggaugg

SEQ ID NO: 285723 - RNA, 32 nt, Homo Sapiens
ggucaacccugucaaugacccaccccacauca

SEQ ID NO: 285724 - RNA, 32 nt, Homo Sapiens
cuugagagagaagcauugggggugcaaguguc

SEQ ID NO: 285725 - RNA, 32 nt, Homo Sapiens
gaggugagccauguuguagacacaugauacgc

SEQ ID NO: 285726 - RNA, 32 nt, Homo Sapiens
gaaaacugcuuggauccuggggguaugugcug

SEQ ID NO: 285727 - RNA, 32 nt, Homo Sapiens
uucuucccgcauuacugcuguuuaauagaacg

SEQ ID NO: 285728 - RNA, 32 nt, Homo Sapiens
gggaggcuuuggugacaucaucacucauguca

SEQ ID NO: 285729 - RNA, 32 nt, Homo Sapiens
gauguggaaaucaagccugucuuccagugggg

SEQ ID NO: 285730 - RNA, 30 nt, Homo Sapiens
gugcuaugacauuguucauguaugaaguua

SEQ ID NO: 285731 - RNA, 32 nt, Homo Sapiens
ugugaauccuuccagaaauacuccaugugauc

SEQ ID NO: 285732 - RNA, 32 nt, Homo Sapiens
uauauuuuccugcucugccuucugggacuagc

SEQ ID NO: 285733 - RNA, 31 nt, Homo Sapiens
auagaaaggcacugcaggcugggcgcagggg

SEQ ID NO: 285734 - RNA, 32 nt, Homo Sapiens
aaaaauggugcagcguggccaaaccuaccaau

SEQ ID NO: 285735 - RNA, 32 nt, Homo Sapiens
uauccgggaaagggccgaaugcgaucaaaccu

SEQ ID NO: 285736 - RNA, 32 nt, Homo Sapiens
gcuagaggaucggggagaaggagcauucgccg

SEQ ID NO: 285737 - RNA, 32 nt, Homo Sapiens
gcaaaggaaaggggagcguggagacguguucg

SEQ ID NO: 285738 - RNA, 30 nt, Homo Sapiens
gccaagcacacucuggcgggucccgcaagg

SEQ ID NO: 285739 - RNA, 32 nt, Homo Sapiens
uaacaacgaaacaaaucgagggaaaaacucuu

SEQ ID NO: 285740 - RNA, 30 nt, Homo Sapiens
gagguggggcgggugccgccgagguagcca

SEQ ID NO: 285741 - RNA, 32 nt, Homo Sapiens
uuuccauaaaagguguggccuggcaugcagug

SEQ ID NO: 285742 - RNA, 32 nt, Homo Sapiens
gaggacacaggguguccuuaccuaccagcaga

SEQ ID NO: 285743 - RNA, 32 nt, Homo Sapiens
auauguuuacuuuaugaacuuaaauggaaauu

SEQ ID NO: 285744 - RNA, 32 nt, Homo Sapiens
aaugcagaaaucaccgucuucuccaucgcuca

SEQ ID NO: 285745 - RNA, 32 nt, Homo Sapiens
uauuuuccuguuaaauaagauaucaaaagcau

SEQ ID NO: 285746 - RNA, 32 nt, Homo Sapiens
gcgacauuucgggucuggugcuaacacccccu

SEQ ID NO: 285747 - RNA, 32 nt, Homo Sapiens
aucaacaaaaacugaauauuauaagcaagcaa

SEQ ID NO: 285748 - RNA, 32 nt, Homo Sapiens
cuaaugccaauauauacaugguuagccaacau

SEQ ID NO: 285749 - RNA, 32 nt, Homo Sapiens
uagugugaaacaugauugaaaauacacuguuu

SEQ ID NO: 285750 - RNA, 32 nt, Homo Sapiens
gcgacuugaagucggacgagauggagcugcuc

SEQ ID NO: 285751 - RNA, 32 nt, Homo Sapiens
gccgcgacgcagggaaccggcgcggagaaccg

SEQ ID NO: 285752 - RNA, 32 nt, Homo Sapiens
aaacuuuguucaacaucagggaauuuauauug

SEQ ID NO: 285753 - RNA, 32 nt, Homo Sapiens
agaagagacagcuggaggagcaagaagaagcu

SEQ ID NO: 285754 - RNA, 32 nt, Homo Sapiens
cagguaaaaauuucucuuggcuuuaaugacau

SEQ ID NO: 285755 - RNA, 32 nt, Homo Sapiens
ugauaucuacaauguaauaaauuuagagagua

SEQ ID NO: 285756 - RNA, 32 nt, Homo Sapiens
cuagaaggagcagagaguuaugcuguuucucc

SEQ ID NO: 285757 - RNA, 32 nt, Homo Sapiens
uuuucuaaaaauuguaaauagaaaaauaauuu

SEQ ID NO: 285758 - RNA, 32 nt, Homo Sapiens
aaaaaauuuagguuuaaauuuagauguucaaa

SEQ ID NO: 285759 - RNA, 32 nt, Homo Sapiens
gccauccuauucaaauaaacgaguaacaaaaa

SEQ ID NO: 285760 - RNA, 32 nt, Homo Sapiens
aaaacauagaacaaaaucacuaucucagaaau

SEQ ID NO: 285761 - RNA, 32 nt, Homo Sapiens
ccaccacaccuggcuuuuuuuuguuguuuuua

SEQ ID NO: 285762 - RNA, 32 nt, Homo Sapiens
ccuguacuuugugaagcuuucagcugucucug

SEQ ID NO: 285763 - RNA, 31 nt, Homo Sapiens
uccuuguauaugugaaggagguugguuccuu

SEQ ID NO: 285764 - RNA, 32 nt, Homo Sapiens
agucaaaucccuuccuucucccucuggcucag

SEQ ID NO: 285765 - RNA, 30 nt, Homo Sapiens
gcugucaguaaggcugcagaagggcugggg

SEQ ID NO: 285766 - RNA, 32 nt, Homo Sapiens
cugucucucaggcuagagcagugugcgaucuc

SEQ ID NO: 285767 - RNA, 32 nt, Homo Sapiens
cguaaugaaaauaauuuguaaaauguccuuua

SEQ ID NO: 285768 - RNA, 32 nt, Homo Sapiens
cggacugccgggcauuggggccguuuguuaag

SEQ ID NO: 285769 - RNA, 32 nt, Homo Sapiens
cauuuaaaaacgcuauggcaaagagaauaaaa

SEQ ID NO: 285770 - RNA, 32 nt, Homo Sapiens
cauguagguucuugggagggaaugggacaggg

SEQ ID NO: 285771 - RNA, 32 nt, Homo Sapiens
cggccacuccaguuccucacguggugagcacu

SEQ ID NO: 285772 - RNA, 32 nt, Homo Sapiens
cuguccauccacacuucauguacgacaggccu

SEQ ID NO: 285773 - RNA, 32 nt, Homo Sapiens
cugggaaagcauccaguggaugaagaagucac

SEQ ID NO: 285774 - RNA, 32 nt, Homo Sapiens
gucuguagcaguugaagcugugaaugugcuag

SEQ ID NO: 285775 - RNA, 32 nt, Homo Sapiens
cuccuuuguaaguaccaggucauguccauccc

SEQ ID NO: 285776 - RNA, 32 nt, Homo Sapiens
gcacgagggaugcaugucauggccgccuccau

SEQ ID NO: 285777 - RNA, 32 nt, Homo Sapiens
agcuugacuugacucccaacccuaccaugcuc

SEQ ID NO: 285778 - RNA, 32 nt, Homo Sapiens
ggaauccacauccuaaugcugccacaagcugc

SEQ ID NO: 285779 - RNA, 32 nt, Homo Sapiens
uucugcgacccggggcucuggccagcacugug

SEQ ID NO: 285780 - RNA, 32 nt, Homo Sapiens
uauacucuuaauuuucuuucugagcuggggaa

SEQ ID NO: 285781 - RNA, 32 nt, Homo Sapiens
gaucacuugagcucaggaguaugagacuagcc

SEQ ID NO: 285782 - RNA, 32 nt, Homo Sapiens
caaugucagguauaccaaagcauuccucugac

SEQ ID NO: 285783 - RNA, 32 nt, Homo Sapiens
uuaguauguauaacuggcuuuaccaaauugaa

SEQ ID NO: 285784 - RNA, 32 nt, Homo Sapiens
ugcgagcugcccgugcgcgugcggagggaccg

SEQ ID NO: 285785 - RNA, 32 nt, Homo Sapiens
gcagggucaggagaucgagaccauccuggcua

SEQ ID NO: 285786 - RNA, 32 nt, Homo Sapiens
agcagcccacuucagcagcacugccacugccu

SEQ ID NO: 285787 - RNA, 32 nt, Homo Sapiens
cuccggcucccgcgcccucccggccggccaug

SEQ ID NO: 285788 - RNA, 32 nt, Homo Sapiens
cugcgccgcgcugcgcucugcuccaucccuga

SEQ ID NO: 285789 - RNA, 32 nt, Homo Sapiens
ugccgggcgggcgggucgucguccgaggccag

SEQ ID NO: 285790 - RNA, 32 nt, Homo Sapiens
gggauaaugcuguuuauugucaagaaaaagua

SEQ ID NO: 285791 - RNA, 32 nt, Homo Sapiens
ccaucugaagccugucucuggugaacaaacuu

SEQ ID NO: 285792 - RNA, 32 nt, Homo Sapiens
cgcagacacacacacacacacacacacccaua

SEQ ID NO: 285793 - RNA, 32 nt, Homo Sapiens
auuccuucuguuuacucuuuuaauuuucaucc

SEQ ID NO: 285794 - RNA, 32 nt, Homo Sapiens
auucgcaccccugcccgcgcgccgggccgccu

SEQ ID NO: 285795 - RNA, 32 nt, Homo Sapiens
gaaggcggugcugcagcagcccggggccagcg

SEQ ID NO: 285796 - RNA, 32 nt, Homo Sapiens
gcccagaccugucccugucccuccucagcucu

SEQ ID NO: 285797 - RNA, 32 nt, Homo Sapiens
uagccagagaggaggaaggagggaaacugaaa

SEQ ID NO: 285798 - RNA, 29 nt, Homo Sapiens
uggggugcacgucucagguggaggaagau

SEQ ID NO: 285799 - RNA, 32 nt, Homo Sapiens
ccucccaggaaagaagccgggccucaggcuga

SEQ ID NO: 285800 - RNA, 32 nt, Homo Sapiens
uauauauuugaaaaaugcacuugaaauacacu

SEQ ID NO: 285801 - RNA, 32 nt, Homo Sapiens
cgugcggcacgcugcagggcugaagcggcggc

SEQ ID NO: 285802 - RNA, 32 nt, Homo Sapiens
agggguguugagcgaugaugcucugauaugga

SEQ ID NO: 285803 - RNA, 32 nt, Homo Sapiens
gucgccgagcgcgagggcgggcgugcucggag

SEQ ID NO: 285804 - RNA, 32 nt, Homo Sapiens
auggggaccuuuugaguugaauuuauuuuauu

SEQ ID NO: 285805 - RNA, 32 nt, Homo Sapiens
cagaaagaggcagaugaggccaaacuagccga

SEQ ID NO: 285806 - RNA, 32 nt, Homo Sapiens
auuacgaugucauuugggucucuuuuaugacc

SEQ ID NO: 285807 - RNA, 32 nt, Homo Sapiens
ccugccuuuuucuuuugcuuaagggauggaca

SEQ ID NO: 285808 - RNA, 32 nt, Homo Sapiens
gguucugauaaugaaaucugggcaagucaccc

SEQ ID NO: 285809 - RNA, 32 nt, Homo Sapiens
gaaaagugaaagauuucuauguauuaacucuu

SEQ ID NO: 285810 - RNA, 32 nt, Homo Sapiens
ccuugugcagugaguucuccuaaggucuggcc

SEQ ID NO: 285811 - RNA, 32 nt, Homo Sapiens
uguuuuucaaggaaaauuuuauuucauucaau

SEQ ID NO: 285812 - RNA, 32 nt, Homo Sapiens
gcaaagaaggcacacuguuaauuacaaccucu

SEQ ID NO: 285813 - RNA, 32 nt, Homo Sapiens
uugucuaaacacauuccacagaauaaggcuua

SEQ ID NO: 285814 - RNA, 32 nt, Homo Sapiens
cuauguauuugugaaagaaaauggucauuuuu

SEQ ID NO: 285815 - RNA, 32 nt, Homo Sapiens
caggucggucccagcucuggucucccgcccca

SEQ ID NO: 285816 - RNA, 32 nt, Homo Sapiens
ugucaugaaaguagcaccccgacggugcuugc

SEQ ID NO: 285817 - RNA, 32 nt, Homo Sapiens
guagugggugcacacgcgugcacugggacccc

SEQ ID NO: 285818 - RNA, 32 nt, Homo Sapiens
acgaugaaaaagacacaagugagagagacaau

SEQ ID NO: 285819 - RNA, 32 nt, Homo Sapiens
cggcggcagcaagacgacuucuccggagccgc

SEQ ID NO: 285820 - RNA, 32 nt, Homo Sapiens
cccuuagcggugccgggcagcacugccggcgc

SEQ ID NO: 285821 - RNA, 32 nt, Homo Sapiens
cucccaagaugcccauguccuaaucccaggaa

SEQ ID NO: 285822 - RNA, 32 nt, Homo Sapiens
cugcagcccucccacggcagagucuccagaga

SEQ ID NO: 285823 - RNA, 32 nt, Homo Sapiens
ggguuucagcauauugaccaggcugaucucgg

SEQ ID NO: 285824 - RNA, 32 nt, Homo Sapiens
cuuccuagcuuugugcccggggugcugagccc

SEQ ID NO: 285825 - RNA, 32 nt, Homo Sapiens
ccccuagccuugaggacuggggugcugggugu

SEQ ID NO: 285826 - RNA, 32 nt, Homo Sapiens
agcgccggcguccccacguccaggacaaagcu

SEQ ID NO: 285827 - RNA, 32 nt, Homo Sapiens
ccccauacucuuugugauacacaugugacaug

SEQ ID NO: 285828 - RNA, 32 nt, Homo Sapiens
ccagggcggugcgacccggagcuccagcgccc

SEQ ID NO: 285829 - RNA, 32 nt, Homo Sapiens
cugccucccgguuucaagcaauucuccugccu

SEQ ID NO: 285830 - RNA, 32 nt, Homo Sapiens
acaauaaacuucaccucuuuuaucuucauuuu

SEQ ID NO: 285831 - RNA, 32 nt, Homo Sapiens
guuugcaguaauucuuuuuuuuuuuuuuuuug

SEQ ID NO: 285832 - RNA, 32 nt, Homo Sapiens
gaugauuacagugaugacauccauucuuuuuu

SEQ ID NO: 285833 - RNA, 31 nt, Homo Sapiens
caggugcaggccaccaccuccgggucggcac

SEQ ID NO: 285834 - RNA, 32 nt, Homo Sapiens
aguacucugggggaaagggaaugugauagaag

SEQ ID NO: 285835 - RNA, 32 nt, Homo Sapiens
gcccacuucccggcccggggccugcacaaucu

SEQ ID NO: 285836 - RNA, 32 nt, Homo Sapiens
ugaggguguuuguucuagaugagugucucagg

SEQ ID NO: 285837 - RNA, 32 nt, Homo Sapiens
cuggacgccgggcggcggcccuggacgugcgg

SEQ ID NO: 285838 - RNA, 32 nt, Homo Sapiens
ccucacguggccuugucuucacacccagcgug

SEQ ID NO: 285839 - RNA, 32 nt, Homo Sapiens
agcauagauaucuauauuuuuauuucuacuau

SEQ ID NO: 285840 - RNA, 32 nt, Homo Sapiens
cucacagaugacccacuucauaccacauucac

SEQ ID NO: 285841 - RNA, 32 nt, Homo Sapiens
ggcgcccuagcagaugcacgugucugucgaau

SEQ ID NO: 285842 - RNA, 32 nt, Homo Sapiens
uuuccauauggguuguuauuuacaaucuggau

SEQ ID NO: 285843 - RNA, 32 nt, Homo Sapiens
gcagcgcggggccuuggcgcgcggggcgcuuc

SEQ ID NO: 285844 - RNA, 32 nt, Homo Sapiens
gaccucaggugauccgcccaccucagccucgu

SEQ ID NO: 285845 - RNA, 32 nt, Homo Sapiens
acaggcaguuuuauucuguuucccaugucaag

SEQ ID NO: 285846 - RNA, 32 nt, Homo Sapiens
ccuugagccaucuuaucagaagagucuucaaa

SEQ ID NO: 285847 - RNA, 32 nt, Homo Sapiens
ggcgugaaaaggaaaaauaucaagcuggaggu

SEQ ID NO: 285848 - RNA, 32 nt, Homo Sapiens
caagaggacuguaggaaccguuaucauugcag

SEQ ID NO: 285849 - RNA, 32 nt, Homo Sapiens
ugcugcacuuccuguucauguacgacccuaag

SEQ ID NO: 285850 - RNA, 32 nt, Homo Sapiens
gggccgugcgcucugcacuccggagcgguucc

SEQ ID NO: 285851 - RNA, 32 nt, Homo Sapiens
agcagacggacagggggcgcugcgcgcggccu

SEQ ID NO: 285852 - RNA, 32 nt, Homo Sapiens
cccccuacaaauacaauggauauugcaagcga

SEQ ID NO: 285853 - RNA, 32 nt, Homo Sapiens
aucuaagcaucuugucaagaaauauccuaguc

SEQ ID NO: 285854 - RNA, 32 nt, Homo Sapiens
gugcagaauuaccaugaaauuaugacucguca

SEQ ID NO: 285855 - RNA, 32 nt, Homo Sapiens
gcuacugggauaucagggucaccaugguggga

SEQ ID NO: 285856 - RNA, 32 nt, Homo Sapiens
uuucaggcuccaacauccucccccugucaaga

SEQ ID NO: 285857 - RNA, 31 nt, Homo Sapiens
gcauggauggugugucggcagcuccguccuu

SEQ ID NO: 285858 - RNA, 32 nt, Homo Sapiens
uuaacuccuugaccuuuuuuuuuuuuuuugag

SEQ ID NO: 285859 - RNA, 32 nt, Homo Sapiens
uucaccccauucuccucuccucugaccccuca

SEQ ID NO: 285860 - RNA, 32 nt, Homo Sapiens
gaaaacacaaaguguauaaaucugaguauaua

SEQ ID NO: 285861 - RNA, 32 nt, Homo Sapiens
aaugagaaacaaguaagaaaaaauccuuuccu

SEQ ID NO: 285862 - RNA, 32 nt, Homo Sapiens
uuguggaacuguaucuguugucauuuuuaaaa

SEQ ID NO: 285863 - RNA, 32 nt, Homo Sapiens
ucucuuuuggcucggaggccugugauauuuca

SEQ ID NO: 285864 - RNA, 32 nt, Homo Sapiens
ugugcaggugcugugucauucucugcagcagc

SEQ ID NO: 285865 - RNA, 32 nt, Homo Sapiens
gagaacuguccuucuuuuucuccucucccucc

SEQ ID NO: 285866 - RNA, 32 nt, Homo Sapiens
gccacaucucugucaagggucuccaggaugag

SEQ ID NO: 285867 - RNA, 32 nt, Homo Sapiens
gaaggaaggguguuucaaagcuuguauuaaaa

SEQ ID NO: 285868 - RNA, 32 nt, Homo Sapiens
ccuggccccggaucuugcacgcgguguugagc

SEQ ID NO: 285869 - RNA, 32 nt, Homo Sapiens
aagcaagaaaagggcaugucuugcuugcgucu

SEQ ID NO: 285870 - RNA, 30 nt, Homo Sapiens
caaggaggcaggcucgccggggcuggcgcu

SEQ ID NO: 285871 - RNA, 32 nt, Homo Sapiens
ugccugggggagagaggcagcaagucuuaaca

SEQ ID NO: 285872 - RNA, 32 nt, Homo Sapiens
ucagagcagagccucuaccuccccuggagcuc

SEQ ID NO: 285873 - RNA, 32 nt, Homo Sapiens
cuguagcuuuguauaaguuuugaaauaagaaa

SEQ ID NO: 285874 - RNA, 32 nt, Homo Sapiens
acugucggcgggggcgcgggaagggacuugga

SEQ ID NO: 285875 - RNA, 32 nt, Homo Sapiens
ggaaggggggccugggccagcccugccaggac

SEQ ID NO: 285876 - RNA, 32 nt, Homo Sapiens
ccaggcuggagcaggaggcauuucaacucaga

SEQ ID NO: 285877 - RNA, 32 nt, Homo Sapiens
cuuggcugucauuuuuaguugccauuugcauu

SEQ ID NO: 285878 - RNA, 32 nt, Homo Sapiens
cucugaaggagccagugccagccaucaccaaa

SEQ ID NO: 285879 - RNA, 32 nt, Homo Sapiens
ccgaggcgucccggagucauggccggccugaa

SEQ ID NO: 285880 - RNA, 32 nt, Homo Sapiens
auuaaaaaucauaucaucuuuuagagguuaga

SEQ ID NO: 285881 - RNA, 32 nt, Homo Sapiens
ggcccuauggugggaaaggcuggagucuucua

SEQ ID NO: 285882 - RNA, 32 nt, Homo Sapiens
agauauagugcugcagcgugccugaugggaua

SEQ ID NO: 285883 - RNA, 32 nt, Homo Sapiens
uucauuuuuacucuccuugguuuaggucuaga

SEQ ID NO: 285884 - RNA, 32 nt, Homo Sapiens
guuuugcaugcucuccucccucccacuucugc

SEQ ID NO: 285885 - RNA, 32 nt, Homo Sapiens
ugaucccgccaccgcccacgggccgcuagcag

SEQ ID NO: 285886 - RNA, 32 nt, Homo Sapiens
uguauuccugaaacuuuuugacuuacuuaucu

SEQ ID NO: 285887 - RNA, 29 nt, Homo Sapiens
ucugaguacaguuuauauucugucacagg

SEQ ID NO: 285888 - RNA, 32 nt, Homo Sapiens
gccgcagcccaggcgcgggggcgacgacaggu

SEQ ID NO: 285889 - RNA, 32 nt, Homo Sapiens
ccuacccgaacaccggccccggcuccaccgag

SEQ ID NO: 285890 - RNA, 32 nt, Homo Sapiens
agggcagccucugaccccggcgccgcccaacc

SEQ ID NO: 285891 - RNA, 32 nt, Homo Sapiens
accccgccggccgcgggucucccggcccaacc

SEQ ID NO: 285892 - RNA, 32 nt, Homo Sapiens
ugaggacacuaaccacgcuggaccuugaacug

SEQ ID NO: 285893 - RNA, 32 nt, Homo Sapiens
uccacagcuacuugagugucuaacauacagua

SEQ ID NO: 285894 - RNA, 31 nt, Homo Sapiens
uccugcggggcgguggcucacugucucucgc

SEQ ID NO: 285895 - RNA, 32 nt, Homo Sapiens
aucugggaccugccaggcaggggugggggugg

SEQ ID NO: 285896 - RNA, 32 nt, Homo Sapiens
uggcagagcugggauucaaacccaggcagcuu

SEQ ID NO: 285897 - RNA, 32 nt, Homo Sapiens
uuugggggagaaugguggacagugggauucug

SEQ ID NO: 285898 - RNA, 32 nt, Homo Sapiens
agcaaaccuuuucauuggaaaaacagaaacaa

SEQ ID NO: 285899 - RNA, 32 nt, Homo Sapiens
gggagggccaggcacagcugcccgcugucaga

SEQ ID NO: 285900 - RNA, 32 nt, Homo Sapiens
ugcagugcuauuuuuucuuaaucagaaaggaa

SEQ ID NO: 285901 - RNA, 32 nt, Homo Sapiens
agaaaaccaaauagaugaaaaauucucauugu

SEQ ID NO: 285902 - RNA, 32 nt, Homo Sapiens
ccucgucgucgccaccuucccuccccccaacc

SEQ ID NO: 285903 - RNA, 32 nt, Homo Sapiens
auugaaaaugucauccuuucuguuguuagaua

SEQ ID NO: 285904 - RNA, 32 nt, Homo Sapiens
cgggccccgccuucuccgcaucgccccgcgcc

SEQ ID NO: 285905 - RNA, 32 nt, Homo Sapiens
agagccuggugggugauucugucaacagaaaa

SEQ ID NO: 285906 - RNA, 32 nt, Homo Sapiens
cucccgguccucucaugagccuauggaagaug

SEQ ID NO: 285907 - RNA, 31 nt, Homo Sapiens
ccuaggcugccggggguccggggccccaggc

SEQ ID NO: 285908 - RNA, 32 nt, Homo Sapiens
cguccucccccgcugccuccgcugcucccgac

SEQ ID NO: 285909 - RNA, 32 nt, Homo Sapiens
gccacacaggguauaucucagagccuggagaa

SEQ ID NO: 285910 - RNA, 32 nt, Homo Sapiens
aucagacuaaauagaaaauauuugagccauua

SEQ ID NO: 285911 - RNA, 32 nt, Homo Sapiens
uugcuaauguaacauuugucuguuccagugau

SEQ ID NO: 285912 - RNA, 32 nt, Homo Sapiens
agcaggcccagcugaccaccuccugcugcagc

SEQ ID NO: 285913 - RNA, 32 nt, Homo Sapiens
uguucacagcagccuuuuaacaacaacugggu

SEQ ID NO: 285914 - RNA, 32 nt, Homo Sapiens
guaccugcgggacagcucgccggcgcccugug

SEQ ID NO: 285915 - RNA, 32 nt, Homo Sapiens
ccgcgcccccugggcuggcgucgugcccuagc

SEQ ID NO: 285916 - RNA, 32 nt, Homo Sapiens
auccccacguugaguuggaggaauagucucuu

SEQ ID NO: 285917 - RNA, 32 nt, Homo Sapiens
ccccgagagaaggcagcucaugcugaaguuca

SEQ ID NO: 285918 - RNA, 32 nt, Homo Sapiens
uugaggucaggaguucaagaucaggaccaaca

SEQ ID NO: 285919 - RNA, 32 nt, Homo Sapiens
ucuuuccuuuuuuuuuuuuuuaaagauuuuau

SEQ ID NO: 285920 - RNA, 32 nt, Homo Sapiens
gagggcaugagcagaggcaaugauagcuggaa

SEQ ID NO: 285921 - RNA, 32 nt, Homo Sapiens
ggcuguuucuccguccucuccuaucaccccca

SEQ ID NO: 285922 - RNA, 32 nt, Homo Sapiens
accgacacucccucagccucucagugccuguc

SEQ ID NO: 285923 - RNA, 32 nt, Homo Sapiens
auaguuuguuuuucuuuuuuaaaaaagaaaga

SEQ ID NO: 285924 - RNA, 32 nt, Homo Sapiens
gccauguuauauccaauaacuagaaaaaucac

SEQ ID NO: 285925 - RNA, 32 nt, Homo Sapiens
aaaaucacugguuuauacaaagcuuuauuuag

SEQ ID NO: 285926 - RNA, 32 nt, Homo Sapiens
guuugacaaccacuuauuuuuuccuuuguuua

SEQ ID NO: 285927 - RNA, 32 nt, Homo Sapiens
cucccuucucccagcccccagaggccuggccu

SEQ ID NO: 285928 - RNA, 32 nt, Homo Sapiens
aaccccgcgggccuggcucaggcgggagugcg

SEQ ID NO: 285929 - RNA, 32 nt, Homo Sapiens
aguaggagagugaguuuuggggccagacacgc

SEQ ID NO: 285930 - RNA, 32 nt, Homo Sapiens
gugcagccaccgggugcgugccaggcaggccc

SEQ ID NO: 285931 - RNA, 32 nt, Homo Sapiens
aacuuuaucugucagcuucucccugccacuuc

SEQ ID NO: 285932 - RNA, 32 nt, Homo Sapiens
cacagaaaugcuuuuaaaaugccuguuuuaag

SEQ ID NO: 285933 - RNA, 32 nt, Homo Sapiens
gacacgcacccggcugccaccauggcccgccu

SEQ ID NO: 285934 - RNA, 32 nt, Homo Sapiens
acaucuucucuucugacuuuggcuacaucuca

SEQ ID NO: 285935 - RNA, 32 nt, Homo Sapiens
ugcuugucaguggucauggcuguugucuugcc

SEQ ID NO: 285936 - RNA, 32 nt, Homo Sapiens
uuugcaaaugagaauuuggaaaaguuaguuac

SEQ ID NO: 285937 - RNA, 32 nt, Homo Sapiens
acuucauuccuccauguuuucuucccuuaucu

SEQ ID NO: 285938 - RNA, 32 nt, Homo Sapiens
ugggcggcagcgacuccgagaagugcuccuac

SEQ ID NO: 285939 - RNA, 32 nt, Homo Sapiens
ugccugaaauccuagcacuuugggaagacaau

SEQ ID NO: 285940 - RNA, 32 nt, Homo Sapiens
accauaaacuaaauuuagaaauuuuuuagauu

SEQ ID NO: 285941 - RNA, 32 nt, Homo Sapiens
gggcuagaggccgcggaccauggugcggggca

SEQ ID NO: 285942 - RNA, 32 nt, Homo Sapiens
gguugguuuuguguuuucugguaaauauucca

SEQ ID NO: 285943 - RNA, 29 nt, Homo Sapiens
acauuuuggagauuguauuuucuagacaa

SEQ ID NO: 285944 - RNA, 32 nt, Homo Sapiens
aguccaauuaaaccucuuuuucuucccaguuu

SEQ ID NO: 285945 - RNA, 32 nt, Homo Sapiens
gccggcuaauugcaugagggaguugacuugua

SEQ ID NO: 285946 - RNA, 32 nt, Homo Sapiens
ucacucccacccccuaccccagcccgucuucc

SEQ ID NO: 285947 - RNA, 32 nt, Homo Sapiens
acaaauucacccaaacaagcuacugaggcuau

SEQ ID NO: 285948 - RNA, 32 nt, Homo Sapiens
uuucacuuucccuuucgaauuccaggguauau

SEQ ID NO: 285949 - RNA, 32 nt, Homo Sapiens
caaggcuccaucagccggggcccuggcaggaa

SEQ ID NO: 285950 - RNA, 32 nt, Homo Sapiens
uaagaaggaaggggagcgugucugcuuccuga

SEQ ID NO: 285951 - RNA, 32 nt, Homo Sapiens
gauuuauaugaaaucaaaugacugguugaggu

SEQ ID NO: 285952 - RNA, 32 nt, Homo Sapiens
ucugguauuuuugcuuuccaauaaaggggauc

SEQ ID NO: 285953 - RNA, 32 nt, Homo Sapiens
agauuauuuccacaucuuggcuauuaugagua

SEQ ID NO: 285954 - RNA, 32 nt, Homo Sapiens
aggcugagagcaccgcugcacucgcggccggc

SEQ ID NO: 285955 - RNA, 32 nt, Homo Sapiens
gcacacugucuccugcuggcauucaccccacu

SEQ ID NO: 285956 - RNA, 32 nt, Homo Sapiens
acggagaggagcugcaggagggcuggggggag

SEQ ID NO: 285957 - RNA, 32 nt, Homo Sapiens
auuucuucccccuggucccccggaccaugcuu

SEQ ID NO: 285958 - RNA, 32 nt, Homo Sapiens
cccucccaggcggcccccucccugccccucag

SEQ ID NO: 285959 - RNA, 32 nt, Homo Sapiens
uuuaggugaugauggucauugaaacucacuuc

SEQ ID NO: 285960 - RNA, 32 nt, Homo Sapiens
auuauaaguaucaguaaaggaagugaaagaca

SEQ ID NO: 285961 - RNA, 32 nt, Homo Sapiens
ccagccggcgaccgguuccaucuggcucgggc

SEQ ID NO: 285962 - RNA, 32 nt, Homo Sapiens
cgaccugccguggucucaggcacuggaggaca

SEQ ID NO: 285963 - RNA, 32 nt, Homo Sapiens
ugacagcugccagcugaccgcagaccucgacg

SEQ ID NO: 285964 - RNA, 32 nt, Homo Sapiens
gggcaguggccaagaacaccacccccggggca

SEQ ID NO: 285965 - RNA, 32 nt, Homo Sapiens
ggguauugagugugagguugaggugggacauu

SEQ ID NO: 285966 - RNA, 32 nt, Homo Sapiens
cagaagcccccuccccuacucagagaggaacg

SEQ ID NO: 285967 - RNA, 32 nt, Homo Sapiens
accuauccagacaccuucuccugacccaggca

SEQ ID NO: 285968 - RNA, 32 nt, Homo Sapiens
cgccucacaaaauaaaauucuauuuguuuuua

SEQ ID NO: 285969 - RNA, 32 nt, Homo Sapiens
cuaccccaggacgcaugcagggcccccacagg

SEQ ID NO: 285970 - RNA, 32 nt, Homo Sapiens
gaaucauuuuuguaggaagcauuuuuuauaau

SEQ ID NO: 285971 - RNA, 32 nt, Homo Sapiens
cuggcgaggccgccgcgccgccgcugagacgg

SEQ ID NO: 285972 - RNA, 32 nt, Homo Sapiens
uuuuccuuaaguugcauuuauuccuaagguag

SEQ ID NO: 285973 - RNA, 32 nt, Homo Sapiens
aauauaccacauaaguuuauaauuuaaugucu

SEQ ID NO: 285974 - RNA, 32 nt, Homo Sapiens
ggcggugcgcggcggcgguggcggcggggaaa

SEQ ID NO: 285975 - RNA, 32 nt, Homo Sapiens
uuuauucuagaugugaauuugcuauuuauuuu

SEQ ID NO: 285976 - RNA, 32 nt, Homo Sapiens
agggccugacaguggguggguggguauauucc

SEQ ID NO: 285977 - RNA, 32 nt, Homo Sapiens
aaugaagacaccuuccucaguccccuaccuac

SEQ ID NO: 285978 - RNA, 32 nt, Homo Sapiens
uacucuuccccucuucucacuacugcacuuga

SEQ ID NO: 285979 - RNA, 32 nt, Homo Sapiens
uucaguggcauuaaguaccuucaaauuguugu

SEQ ID NO: 285980 - RNA, 27 nt, Homo Sapiens
gacauucauuucuucagcagcccauua

SEQ ID NO: 285981 - RNA, 32 nt, Homo Sapiens
caaaugugaagaaugugacaaaaguuuucaau

SEQ ID NO: 285982 - RNA, 32 nt, Homo Sapiens
guuggaggauucucuuguucugggaagaggac

SEQ ID NO: 285983 - RNA, 32 nt, Homo Sapiens
agagauugcucuagaagguuuacuacaccagu

SEQ ID NO: 285984 - RNA, 32 nt, Homo Sapiens
cccugccccacccacuccaggauguuaggguc

SEQ ID NO: 285985 - RNA, 32 nt, Homo Sapiens
agcuccaggaaggcuuugugggaaaugaguug

SEQ ID NO: 285986 - RNA, 32 nt, Homo Sapiens
cuguggcuggacugccugcugcugcccaacug

SEQ ID NO: 285987 - RNA, 32 nt, Homo Sapiens
uuggaccuuggguuuccaacucugcagccuuc

SEQ ID NO: 285988 - RNA, 32 nt, Homo Sapiens
gaaaaugaggguaaauauaguuuauuucccag

SEQ ID NO: 285989 - RNA, 32 nt, Homo Sapiens
uguuuacagcuggccagugcagagcugcugcu

SEQ ID NO: 285990 - RNA, 32 nt, Homo Sapiens
ucaauacaucuuucccuuucucuucuucauga

SEQ ID NO: 285991 - RNA, 32 nt, Homo Sapiens
augagcuuuguguaggaaguucauaguagcaa

SEQ ID NO: 285992 - RNA, 32 nt, Homo Sapiens
cccugagcccucggagccugcgacagguggug

SEQ ID NO: 285993 - RNA, 32 nt, Homo Sapiens
aaaucugaaacacuugugguuccaagcauuuu

SEQ ID NO: 285994 - RNA, 32 nt, Homo Sapiens
caucugcugccuuguuacucuugcuuuuugug

SEQ ID NO: 285995 - RNA, 32 nt, Homo Sapiens
uuuagaggacuauuacauauuuuuuguauauu

SEQ ID NO: 285996 - RNA, 32 nt, Homo Sapiens
cuauugccuuccagggcugagaacgaaggauc

SEQ ID NO: 285997 - RNA, 32 nt, Homo Sapiens
acccuggaggcggagauugaagugagcugagu

SEQ ID NO: 285998 - RNA, 32 nt, Homo Sapiens
uuuguaggguacauguuauauuuugauacaug

SEQ ID NO: 285999 - RNA, 32 nt, Homo Sapiens
gggcuuauauaaggcuauuuccccucacccca

SEQ ID NO: 286000 - RNA, 32 nt, Homo Sapiens
gagcauuugguaguaaucuaacuuuuuguuca

SEQ ID NO: 286001 - RNA, 32 nt, Homo Sapiens
agacaccacacacacacauacacacacacaca

SEQ ID NO: 286002 - RNA, 32 nt, Homo Sapiens
cugaggaacaaauagaccauuuccauacuaaa

SEQ ID NO: 286003 - RNA, 30 nt, Homo Sapiens
cugguggcgcccgccagccggcccgggaga

SEQ ID NO: 286004 - RNA, 32 nt, Homo Sapiens
uguucaggagauggcgcuuaacauuuuggaaa

SEQ ID NO: 286005 - RNA, 32 nt, Homo Sapiens
cuugggcucgggccuacuggcucaagaagaca

SEQ ID NO: 286006 - RNA, 32 nt, Homo Sapiens
gccccgagcccccagcacuuguguguacagcc

SEQ ID NO: 286007 - RNA, 32 nt, Homo Sapiens
aacugcgguggcgggcgggcgcacggucuccu

SEQ ID NO: 286008 - RNA, 32 nt, Homo Sapiens
gacuggccgcggugcuagucgguagcagcggc

SEQ ID NO: 286009 - RNA, 32 nt, Homo Sapiens
agccuuccacacucaccucuaaaacaguccuu

SEQ ID NO: 286010 - RNA, 32 nt, Homo Sapiens
cgacccccacccuaccccggcuggaguagccu

SEQ ID NO: 286011 - RNA, 32 nt, Homo Sapiens
ccuccugaggcaccugccagcgugccucagag

SEQ ID NO: 286012 - RNA, 32 nt, Homo Sapiens
cuucggggguggagucggagcggcgcggcggc

SEQ ID NO: 286013 - RNA, 29 nt, Homo Sapiens
uaguaugugacuuuucugauuaauauauu

SEQ ID NO: 286014 - RNA, 32 nt, Homo Sapiens
ggcagcaaggacggacucguugugaaggcgcc

SEQ ID NO: 286015 - RNA, 32 nt, Homo Sapiens
uggaagaaagacugucaacagcugagugcggg

SEQ ID NO: 286016 - RNA, 32 nt, Homo Sapiens
ucuuuuuggacggucccaaaggaggcagcggg

SEQ ID NO: 286017 - RNA, 32 nt, Homo Sapiens
gcugucauccuccauuguucccggggacucaa

SEQ ID NO: 286018 - RNA, 32 nt, Homo Sapiens
agcugccgcgcgccugccggacgagggcguag

SEQ ID NO: 286019 - RNA, 32 nt, Homo Sapiens
ucuuucaucccuaagauaguuugagagagcuc

SEQ ID NO: 286020 - RNA, 32 nt, Homo Sapiens
cggacagacagacagacagacacacacacaca

SEQ ID NO: 286021 - RNA, 32 nt, Homo Sapiens
agccccuuggaguucugcuggagaaaguugcu

SEQ ID NO: 286022 - RNA, 32 nt, Homo Sapiens
caaugcuugcuaaaccaugcccacgugagcac

SEQ ID NO: 286023 - RNA, 32 nt, Homo Sapiens
cccuguuccgcuuaaauuggguuccuuccugu

SEQ ID NO: 286024 - RNA, 32 nt, Homo Sapiens
aaagaugaaaugggauuguuuuuuacucguau

SEQ ID NO: 286025 - RNA, 32 nt, Homo Sapiens
gcugucuuuaggcuaauaaccagcagaaacua

SEQ ID NO: 286026 - RNA, 32 nt, Homo Sapiens
cucccgacccugugcccuggcucccgggacac

SEQ ID NO: 286027 - RNA, 32 nt, Homo Sapiens
caaguccaccacuacuggccaucugaucuaca

SEQ ID NO: 286028 - RNA, 27 nt, Homo Sapiens
cucagcuccuucuuggccccaucccca

SEQ ID NO: 286029 - RNA, 32 nt, Homo Sapiens
guucacuguacaaauuugacaacugucaccaa

SEQ ID NO: 286030 - RNA, 32 nt, Homo Sapiens
gggagagcucuuucuccugcuguucuggguuc

SEQ ID NO: 286031 - RNA, 32 nt, Homo Sapiens
ggcacugacuagacuggaagugccaagaacuu

SEQ ID NO: 286032 - RNA, 32 nt, Homo Sapiens
ucuuccacggcaggaauuuuuaccaaaaccac

SEQ ID NO: 286033 - RNA, 32 nt, Homo Sapiens
agggcugggaagcucgcggccgggguuccacc

SEQ ID NO: 286034 - RNA, 32 nt, Homo Sapiens
agaucuugggacuuccucucuuucuaugucua

SEQ ID NO: 286035 - RNA, 32 nt, Homo Sapiens
caucaauucccauugcaucaccucuguaauuu

SEQ ID NO: 286036 - RNA, 32 nt, Homo Sapiens
auggccccaaaggcugagggccccaaagccac

SEQ ID NO: 286037 - RNA, 32 nt, Homo Sapiens
gcaugacugaaacuaaaauauuucauaaggcu

SEQ ID NO: 286038 - RNA, 32 nt, Homo Sapiens
aaauacucaguuucuuuggagagagcaaagca

SEQ ID NO: 286039 - RNA, 32 nt, Homo Sapiens
ugauuuccuuucuguuuguaacucaucauaga

SEQ ID NO: 286040 - RNA, 32 nt, Homo Sapiens
cuugauugucuccuaaugcuuuauccaucacc

SEQ ID NO: 286041 - RNA, 32 nt, Homo Sapiens
ccaaggcugcccgugcguccugggacccugga

SEQ ID NO: 286042 - RNA, 32 nt, Homo Sapiens
acuuuuuaaaaaaaaauaucaacuuggaauug

SEQ ID NO: 286043 - RNA, 32 nt, Homo Sapiens
ccuaacugacuucaauauuucagcaggguaca

SEQ ID NO: 286044 - RNA, 32 nt, Homo Sapiens
aggaauauauuuuuuaaaauuuuucuuugguu

SEQ ID NO: 286045 - RNA, 32 nt, Homo Sapiens
aaaagccauucuuuaaaauauuuauagcauaa

SEQ ID NO: 286046 - RNA, 32 nt, Homo Sapiens
aaugguuaagaugaauguuaaauacuaugcuu

SEQ ID NO: 286047 - RNA, 32 nt, Homo Sapiens
uaugggaaauuugaacaaaugagugaaacucu

SEQ ID NO: 286048 - RNA, 27 nt, Homo Sapiens
gcccuagcuuucuucagcccuuggguc

SEQ ID NO: 286049 - RNA, 32 nt, Homo Sapiens
aggaggagaagcugagcacgugugacauugcc

SEQ ID NO: 286050 - RNA, 32 nt, Homo Sapiens
cugguaucaagagcuuucugauguuuuacagc

SEQ ID NO: 286051 - RNA, 32 nt, Homo Sapiens
uuggaggacaaaguggcuguaucaguucaucg

SEQ ID NO: 286052 - RNA, 32 nt, Homo Sapiens
uuuuucaguuggcaguuuuuugaaaggggaua

SEQ ID NO: 286053 - RNA, 32 nt, Homo Sapiens
uugucugauggucugggcucauuuuuauguuu

SEQ ID NO: 286054 - RNA, 32 nt, Homo Sapiens
caucauugucgucgucaucaucuugcugaguc

SEQ ID NO: 286055 - RNA, 32 nt, Homo Sapiens
gggagcggccccaccgcugucccgaguguggu

SEQ ID NO: 286056 - RNA, 32 nt, Homo Sapiens
cgcacuggugguugggucagugccgcgcgccg

SEQ ID NO: 286057 - RNA, 32 nt, Homo Sapiens
acaugagauacguuaaauaauaaaauaagaua

SEQ ID NO: 286058 - RNA, 32 nt, Homo Sapiens
gccuccacgagccugcuguuuccaggaaauua

SEQ ID NO: 286059 - RNA, 32 nt, Homo Sapiens
augccuuaaucccagcacuuuuggaggccaag

SEQ ID NO: 286060 - RNA, 32 nt, Homo Sapiens
gcgcaccgagcgcacucucuagcccggcagau

SEQ ID NO: 286061 - RNA, 32 nt, Homo Sapiens
ugccaauuuacuaugauuguguaugugccgcu

SEQ ID NO: 286062 - RNA, 32 nt, Homo Sapiens
uuaagguagauggugauuagcacauguaguau

SEQ ID NO: 286063 - RNA, 32 nt, Homo Sapiens
aaacauggugccuauaucugagagaccugugu

SEQ ID NO: 286064 - RNA, 32 nt, Homo Sapiens
uguuugcaaaacagagcugaaaacggacuuug

SEQ ID NO: 286065 - RNA, 32 nt, Homo Sapiens
accaguugccagcaguguccccccugccuugg

SEQ ID NO: 286066 - RNA, 32 nt, Homo Sapiens
aucucuaaaaauuuuuaguaguaauuauuuac

SEQ ID NO: 286067 - RNA, 32 nt, Homo Sapiens
uuaaaauggaaauccuggagaauaguaguucu

SEQ ID NO: 286068 - RNA, 32 nt, Homo Sapiens
uugcacacgcacccuggggcugacagacuugu

SEQ ID NO: 286069 - RNA, 32 nt, Homo Sapiens
gcagccucauucugaggccugagugauccacg

SEQ ID NO: 286070 - RNA, 32 nt, Homo Sapiens
cuggcuggcagagcuuuuccauauguuacucc

SEQ ID NO: 286071 - RNA, 32 nt, Homo Sapiens
aauaaugauuugcaugauaccuugaaauuggg

SEQ ID NO: 286072 - RNA, 32 nt, Homo Sapiens
accuuacuccuuucugugacuccaccaccagu

SEQ ID NO: 286073 - RNA, 32 nt, Homo Sapiens
accuuaagagaugugaaaaagaauuauacuuu

SEQ ID NO: 286074 - RNA, 32 nt, Homo Sapiens
ggaaaaugagagaaacaggaaacaaagaaugc

SEQ ID NO: 286075 - RNA, 31 nt, Homo Sapiens
guacccauguguuuagcuucaguguauuuua

SEQ ID NO: 286076 - RNA, 32 nt, Homo Sapiens
aaucauaucuaugagacaaaugucuccgaugc

SEQ ID NO: 286077 - RNA, 32 nt, Homo Sapiens
accaggccaccaagaggcccagcccuccaaac

SEQ ID NO: 286078 - RNA, 32 nt, Homo Sapiens
uaaugaguguggcaagaacuuuagucagaagu

SEQ ID NO: 286079 - RNA, 32 nt, Homo Sapiens
gucucggggcucuggagagaguggggcgggag

SEQ ID NO: 286080 - RNA, 32 nt, Homo Sapiens
caaccaccaccaccacaauaaacaaguugcug

SEQ ID NO: 286081 - RNA, 32 nt, Homo Sapiens
acauacuaacuguuugcuucauacccuccugc

SEQ ID NO: 286082 - RNA, 32 nt, Homo Sapiens
uucauuuuuuauuuuuccuugcuuuguuuuua

SEQ ID NO: 286083 - RNA, 32 nt, Homo Sapiens
accuggcagcccugggccccaggcccugggac

SEQ ID NO: 286084 - RNA, 32 nt, Homo Sapiens
acacauauauauaaaugaguauauaugcuuau

SEQ ID NO: 286085 - RNA, 32 nt, Homo Sapiens
cuuuguacaauuuugaaaguuucuaccuguau

SEQ ID NO: 286086 - RNA, 32 nt, Homo Sapiens
ucuggcuaccgccgccccaccagcucggcuuu

SEQ ID NO: 286087 - RNA, 31 nt, Homo Sapiens
cuuauuaaauaaaacaagguuuauuaaaagu

SEQ ID NO: 286088 - RNA, 32 nt, Homo Sapiens
agcccaggaguucgggaccagccugggaaaua

SEQ ID NO: 286089 - RNA, 32 nt, Homo Sapiens
caucccgccggcgggggagccuggcaggggcc

SEQ ID NO: 286090 - RNA, 32 nt, Homo Sapiens
guaaagaagucauggcggcgcugugucggacc

SEQ ID NO: 286091 - RNA, 32 nt, Homo Sapiens
agcacuggaggcggcggcggcccgagggcgac

SEQ ID NO: 286092 - RNA, 32 nt, Homo Sapiens
gccguggagucgagcuggccgacggaccccuu

SEQ ID NO: 286093 - RNA, 32 nt, Homo Sapiens
guaucugcuggauauuuaguucaacuguauag

SEQ ID NO: 286094 - RNA, 31 nt, Homo Sapiens
agagcugagcgcagcugacaacuaggggccg

SEQ ID NO: 286095 - RNA, 32 nt, Homo Sapiens
gacacuuuuuugcugcuggccacccaugccuc

SEQ ID NO: 286096 - RNA, 32 nt, Homo Sapiens
ccccuacuuccuaggccauuucuggggcuugg

SEQ ID NO: 286097 - RNA, 32 nt, Homo Sapiens
gccugaguggggacagaguugaucguccaccu

SEQ ID NO: 286098 - RNA, 32 nt, Homo Sapiens
uaccuuagguucuuucugaaaaggagguaucu

SEQ ID NO: 286099 - RNA, 32 nt, Homo Sapiens
uaucaagaucauaauuuuauagaagagucucu

SEQ ID NO: 286100 - RNA, 32 nt, Homo Sapiens
auuaacagacugcuacuaggugauuaaugggu

SEQ ID NO: 286101 - RNA, 32 nt, Homo Sapiens
uaggcagucggggaugccauguccuugguucc

SEQ ID NO: 286102 - RNA, 32 nt, Homo Sapiens
acugccuugaacuuuuggagacuuguacugua

SEQ ID NO: 286103 - RNA, 32 nt, Homo Sapiens
auucuccaagcccugcccuccggcgcccccgu

SEQ ID NO: 286104 - RNA, 32 nt, Homo Sapiens
ucuaaugucacacuuaaaacuguguggaauaa

SEQ ID NO: 286105 - RNA, 32 nt, Homo Sapiens
aacacacacaugcguauagacauacauacaug

SEQ ID NO: 286106 - RNA, 32 nt, Homo Sapiens
ccaauuuguagcaaaauugaauuuuuucauaa

SEQ ID NO: 286107 - RNA, 32 nt, Homo Sapiens
guacuugccagagucccaaaugcugaauuauu

SEQ ID NO: 286108 - RNA, 29 nt, Homo Sapiens
caagaugugacuuuuugguagcacuguug

SEQ ID NO: 286109 - RNA, 32 nt, Homo Sapiens
uuuaucugauaauauaaugacuguucccugua

SEQ ID NO: 286110 - RNA, 32 nt, Homo Sapiens
uaaucuuauucuugcaccuuuuuuucuuggua

SEQ ID NO: 286111 - RNA, 32 nt, Homo Sapiens
gggggaaaacaaaaggcaacaaggagaccaug

SEQ ID NO: 286112 - RNA, 32 nt, Homo Sapiens
ugugcggaggcgcauggccucccgccacgggg

SEQ ID NO: 286113 - RNA, 32 nt, Homo Sapiens
acaaaaccaacccgcaguggccgaccggagau

SEQ ID NO: 286114 - RNA, 32 nt, Homo Sapiens
guacgcugcugcgcugacguggcuccuggaag

SEQ ID NO: 286115 - RNA, 32 nt, Homo Sapiens
uucuuugaaaauaacuggaguuauuagcauac

SEQ ID NO: 286116 - RNA, 32 nt, Homo Sapiens
cagucggagcagccagaacuuucuuucacggu

SEQ ID NO: 286117 - RNA, 32 nt, Homo Sapiens
uugccguaaauaaaaauagcuauaaauaguga

SEQ ID NO: 286118 - RNA, 32 nt, Homo Sapiens
agcgccgccccggccgugucccggaggagcgg

SEQ ID NO: 286119 - RNA, 32 nt, Homo Sapiens
cgggcgaaggcgcggagcucgcagugcagccc

SEQ ID NO: 286120 - RNA, 32 nt, Homo Sapiens
uaggcugggagcaaaaggagagggugggaccc

SEQ ID NO: 286121 - RNA, 32 nt, Homo Sapiens
uccaguuccaagcccuuguguuuuccauuaug

SEQ ID NO: 286122 - RNA, 32 nt, Homo Sapiens
ggaaagauauucuauuuuuuuauauagguaga

SEQ ID NO: 286123 - RNA, 32 nt, Homo Sapiens
gucaggggucagccgcggggcccucaggaugc

SEQ ID NO: 286124 - RNA, 32 nt, Homo Sapiens
uuuagcugcaaggggaugccgcagccccaguu

SEQ ID NO: 286125 - RNA, 32 nt, Homo Sapiens
aaugagcccccuccccaggaggagggauggcc

SEQ ID NO: 286126 - RNA, 32 nt, Homo Sapiens
ggagaauaccaccccacccccagcccauaauu

SEQ ID NO: 286127 - RNA, 32 nt, Homo Sapiens
uccccuuucucaguuguuaugaggauaacgug

SEQ ID NO: 286128 - RNA, 32 nt, Homo Sapiens
gccugggaugcagugaugugaucauagcucac

SEQ ID NO: 286129 - RNA, 32 nt, Homo Sapiens
agaaggcugggaggauuguguauuuugcaagu

SEQ ID NO: 286130 - RNA, 32 nt, Homo Sapiens
uuucaaugaaaacacaaaccucuccagcaggu

SEQ ID NO: 286131 - RNA, 32 nt, Homo Sapiens
aguuccacugauuaaaaacuuucucuuccacg

SEQ ID NO: 286132 - RNA, 32 nt, Homo Sapiens
ugcagauaccacauucauuaugcugcaguacu

SEQ ID NO: 286133 - RNA, 32 nt, Homo Sapiens
uguacacaaacuaauuuaaaguuuacuuaaua

SEQ ID NO: 286134 - RNA, 32 nt, Homo Sapiens
guccacaaaaacaaaauagggguuuuguguua

SEQ ID NO: 286135 - RNA, 29 nt, Homo Sapiens
uugcuguaaguauuauauuucuggaauuu

SEQ ID NO: 286136 - RNA, 32 nt, Homo Sapiens
ggauggugaucccugcccuuucuaccucauag

SEQ ID NO: 286137 - RNA, 32 nt, Homo Sapiens
aaccccacuuggauaugauagauaguauucuu

SEQ ID NO: 286138 - RNA, 32 nt, Homo Sapiens
cauuuguccuuuucugcuaucaccuuccucuu

SEQ ID NO: 286139 - RNA, 32 nt, Homo Sapiens
aaaagaaggggagagauguucauguaaccuca

SEQ ID NO: 286140 - RNA, 32 nt, Homo Sapiens
guacugggaaagggugaggcugaggcugccug

SEQ ID NO: 286141 - RNA, 32 nt, Homo Sapiens
cuaaauguugaagacaaguuugagaucuguaa

SEQ ID NO: 286142 - RNA, 32 nt, Homo Sapiens
auaguaguugaaaugguaacaucaaaauuauu

SEQ ID NO: 286143 - RNA, 32 nt, Homo Sapiens
aaagaccugacugucccccagccugacacccg

SEQ ID NO: 286144 - RNA, 32 nt, Homo Sapiens
uauaaaauauuguaaagcagggucucaacuuu

SEQ ID NO: 286145 - RNA, 32 nt, Homo Sapiens
gcaggggcuuugugacuaucagaaacaccugc

SEQ ID NO: 286146 - RNA, 32 nt, Homo Sapiens
uuuucuuucccucucuguuccugcacccaagu

SEQ ID NO: 286147 - RNA, 32 nt, Homo Sapiens
gcggacgccccgagggucggggaaggaaccga

SEQ ID NO: 286148 - RNA, 32 nt, Homo Sapiens
ggguccgcgguccaggcugcugccgcgacggg

SEQ ID NO: 286149 - RNA, 32 nt, Homo Sapiens
ccauucccgggaggggggagcggcguuggagg

SEQ ID NO: 286150 - RNA, 32 nt, Homo Sapiens
agcagaucuccgggccuccgcggccauagcug

SEQ ID NO: 286151 - RNA, 32 nt, Homo Sapiens
cugacaccgcgccccggguucccaggccaccu

SEQ ID NO: 286152 - RNA, 29 nt, Homo Sapiens
ugucaugggcccgcgccgccggagccgaa

SEQ ID NO: 286153 - RNA, 32 nt, Homo Sapiens
gaugaagccaggugggcuccgcguucacuccc

SEQ ID NO: 286154 - RNA, 32 nt, Homo Sapiens
aauucugccccacucauuuguuuacccugggu

SEQ ID NO: 286155 - RNA, 32 nt, Homo Sapiens
acgaggucaagagguugagaccauccuggcca

SEQ ID NO: 286156 - RNA, 32 nt, Homo Sapiens
uacaaccgacauuuuaaauauucuuuauacau

SEQ ID NO: 286157 - RNA, 32 nt, Homo Sapiens
gaguggguguugcacagacugguccacagggc

SEQ ID NO: 286158 - RNA, 32 nt, Homo Sapiens
auaagaauggaaaugacaauggcugccuguca

SEQ ID NO: 286159 - RNA, 32 nt, Homo Sapiens
aucucuuugugauuuaagaaguggcuggauug

SEQ ID NO: 286160 - RNA, 32 nt, Homo Sapiens
ucugcauuugaaaauggaagagggaaacaaca

SEQ ID NO: 286161 - RNA, 32 nt, Homo Sapiens
aauugguuucuuguaggggacaucucaacuuu

SEQ ID NO: 286162 - RNA, 32 nt, Homo Sapiens
auugauuugggaguucuuuacauauuaaaaaa

SEQ ID NO: 286163 - RNA, 32 nt, Homo Sapiens
ugcgggaagaucugaugauguucaggaaacag

SEQ ID NO: 286164 - RNA, 32 nt, Homo Sapiens
uggccggcuguggggagccaggcggccgcagu

SEQ ID NO: 286165 - RNA, 32 nt, Homo Sapiens
accccgucccgccagcgucugccaguccagcc

SEQ ID NO: 286166 - RNA, 32 nt, Homo Sapiens
uguuuguuaauuuuguagaaauuaacuuuccc

SEQ ID NO: 286167 - RNA, 32 nt, Homo Sapiens
uaaucagugggucuuuuaaaccuacuccuggu

SEQ ID NO: 286168 - RNA, 32 nt, Homo Sapiens
gcugucuuggaaaguacugugcauguauguaa

SEQ ID NO: 286169 - RNA, 32 nt, Homo Sapiens
gcacgaggcucgccgcucgcuauggcgucgcu

SEQ ID NO: 286170 - RNA, 31 nt, Homo Sapiens
ccaagaaccauaucgagcccugcugcuaccc

SEQ ID NO: 286171 - RNA, 32 nt, Homo Sapiens
cgcuuucccuccccacggccccaacuccaggg

SEQ ID NO: 286172 - RNA, 32 nt, Homo Sapiens
gggcugcggcuccaggcgggcgggcgucaggc

SEQ ID NO: 286173 - RNA, 32 nt, Homo Sapiens
uugaauuguuuagcaauuuguuuucuuugcuu

SEQ ID NO: 286174 - RNA, 32 nt, Homo Sapiens
ggccccgcacucggagccgccggcuagccccg

SEQ ID NO: 286175 - RNA, 32 nt, Homo Sapiens
cccagcccagcuccagaauggcccugcccccc

SEQ ID NO: 286176 - RNA, 32 nt, Homo Sapiens
ucugccccugucugcugcucccagucucucgc

SEQ ID NO: 286177 - RNA, 32 nt, Homo Sapiens
cucuuuaucaucauaauuucugauguaaagag

SEQ ID NO: 286178 - RNA, 32 nt, Homo Sapiens
uguuagacaucgagaucaaugaaccuuuagau

SEQ ID NO: 286179 - RNA, 32 nt, Homo Sapiens
uugcuuagcccacaagguaucuauuucacuug

SEQ ID NO: 286180 - RNA, 32 nt, Homo Sapiens
ugacagccucaucgcgcccccuaccgccccau

SEQ ID NO: 286181 - RNA, 32 nt, Homo Sapiens
cuaucuuccaacaaugcugaccaccagacaau

SEQ ID NO: 286182 - RNA, 32 nt, Homo Sapiens
ggcuacuguuccuccgccucccucucgggcag

SEQ ID NO: 286183 - RNA, 32 nt, Homo Sapiens
acaaauaggugugugcaaauagcauuuguaca

SEQ ID NO: 286184 - RNA, 32 nt, Homo Sapiens
caagaaacaacacugaguuccagauuucggaa

SEQ ID NO: 286185 - RNA, 32 nt, Homo Sapiens
aggcuguccagcugcuuuagcagggcucgcug

SEQ ID NO: 286186 - RNA, 32 nt, Homo Sapiens
ucaggucuugagggaaggcucgggccuagguu

SEQ ID NO: 286187 - RNA, 32 nt, Homo Sapiens
cuccaggcucugggcuggucacuccgaagaag

SEQ ID NO: 286188 - RNA, 32 nt, Homo Sapiens
agggaguggagcaaagagggaaggcagccccu

SEQ ID NO: 286189 - RNA, 32 nt, Homo Sapiens
aggucuccggcgggcgcugccugccuuccucc

SEQ ID NO: 286190 - RNA, 32 nt, Homo Sapiens
gcucacugacaucuuaauugccugcagaaaaa

SEQ ID NO: 286191 - RNA, 32 nt, Homo Sapiens
agaacuugaaguuuuuuuuuuaauuuuuauaa

SEQ ID NO: 286192 - RNA, 32 nt, Homo Sapiens
uuuuuuaucuucugcauaauaauccacaacau

SEQ ID NO: 286193 - RNA, 32 nt, Homo Sapiens
cuggggggugucggcuucaaggaguccagcuu

SEQ ID NO: 286194 - RNA, 32 nt, Homo Sapiens
guuggguuuguugguuucacugaaacauuuaa

SEQ ID NO: 286195 - RNA, 32 nt, Homo Sapiens
gcauagauuuccucuuccacaagcugccgcuu

SEQ ID NO: 286196 - RNA, 32 nt, Homo Sapiens
uggagacucccucucccuggugggccuggcaa

SEQ ID NO: 286197 - RNA, 32 nt, Homo Sapiens
acaauuuauauaaaaacugauagaaaugacaa

SEQ ID NO: 286198 - RNA, 32 nt, Homo Sapiens
ugcugcuuccuucaguuccccaggcuccuccu

SEQ ID NO: 286199 - RNA, 32 nt, Homo Sapiens
acuuuuucuguacuuuuuguuuuguucuuggu

SEQ ID NO: 286200 - RNA, 32 nt, Homo Sapiens
gggcugagcugcccuccccaccagggccgcug

SEQ ID NO: 286201 - RNA, 32 nt, Homo Sapiens
gagggcgagggcgcggggaggggugggggucc

SEQ ID NO: 286202 - RNA, 32 nt, Homo Sapiens
uguggcguggcauggcauccacagugaggaca

SEQ ID NO: 286203 - RNA, 32 nt, Homo Sapiens
gcugucaucauucagagcacagccugaagaga

SEQ ID NO: 286204 - RNA, 32 nt, Homo Sapiens
caagugaauucaugguauuuuacuuuuuuggg

SEQ ID NO: 286205 - RNA, 31 nt, Homo Sapiens
aacuaggaauccuccaaccaggcuccuguga

SEQ ID NO: 286206 - RNA, 32 nt, Homo Sapiens
agcacuuugugauaugagacaucuucauucag

SEQ ID NO: 286207 - RNA, 32 nt, Homo Sapiens
gacagagcucuaauugauaacucuguaguuca

SEQ ID NO: 286208 - RNA, 32 nt, Homo Sapiens
aagagaacccagaaauaaaggcauauaccuac

SEQ ID NO: 286209 - RNA, 32 nt, Homo Sapiens
gagggucuuccuucuugcuccucccauccuuc

SEQ ID NO: 286210 - RNA, 32 nt, Homo Sapiens
ugaucugaggagauccugugacuguagcgugu

SEQ ID NO: 286211 - RNA, 32 nt, Homo Sapiens
augaagcauucaacugugcucugugaggucuc

SEQ ID NO: 286212 - RNA, 32 nt, Homo Sapiens
ucguccagcugcugcccuccacagcgguucuu

SEQ ID NO: 286213 - RNA, 32 nt, Homo Sapiens
ggcuggcauucuagauuacuuuucuuacucug

SEQ ID NO: 286214 - RNA, 32 nt, Homo Sapiens
aggagcaaaaauuuuugggaguaguuuagcug

SEQ ID NO: 286215 - RNA, 32 nt, Homo Sapiens
cucuguuagccuucccuaaccuccucaguguu

SEQ ID NO: 286216 - RNA, 32 nt, Homo Sapiens
auuacaagaucuuuccaaauacccaaauaucc

SEQ ID NO: 286217 - RNA, 32 nt, Homo Sapiens
gagugugguccguaucuugguuuggaaucgaa

SEQ ID NO: 286218 - RNA, 32 nt, Homo Sapiens
gaauaucaugaaauacaaaaccaguguuuggg

SEQ ID NO: 286219 - RNA, 32 nt, Homo Sapiens
agaucaaggaaugucaauaacauuuuaaagga

SEQ ID NO: 286220 - RNA, 32 nt, Homo Sapiens
accuccgggccucguccuccagugccuucccu

SEQ ID NO: 286221 - RNA, 32 nt, Homo Sapiens
ugggaugcacagagcacagcgcgguggggagg

SEQ ID NO: 286222 - RNA, 32 nt, Homo Sapiens
agagugggcugacaucaaguguaauuagcuuu

SEQ ID NO: 286223 - RNA, 32 nt, Homo Sapiens
cagccaauugucccuugccguccuccugaggg

SEQ ID NO: 286224 - RNA, 32 nt, Homo Sapiens
aaccagggaaaagaaaaaggauggacucuguu

SEQ ID NO: 286225 - RNA, 32 nt, Homo Sapiens
ucagaaauugguucaucaccacuggaccugug

SEQ ID NO: 286226 - RNA, 29 nt, Homo Sapiens
acuucccuguguuucagugggagaauuuc

SEQ ID NO: 286227 - RNA, 32 nt, Homo Sapiens
ugcucacuucagaguuugaauucgugagcuga

SEQ ID NO: 286228 - RNA, 32 nt, Homo Sapiens
cccccagcugucucuggcugaaccggcgcucu

SEQ ID NO: 286229 - RNA, 32 nt, Homo Sapiens
gugauucaugcuucuggcuggcauucugcaug

SEQ ID NO: 286230 - RNA, 32 nt, Homo Sapiens
ggccucaaacuccuagcuucaagcaguccucc

SEQ ID NO: 286231 - RNA, 32 nt, Homo Sapiens
gcgaucgaugcggccuucagccgcgggggacu

SEQ ID NO: 286232 - RNA, 32 nt, Homo Sapiens
acagagcugaguguugguuccuuuuucuuauu

SEQ ID NO: 286233 - RNA, 32 nt, Homo Sapiens
accagccugggcaacauagugagauccugucu

SEQ ID NO: 286234 - RNA, 32 nt, Homo Sapiens
ucuaggggaaccuggggucggaugagccccug

SEQ ID NO: 286235 - RNA, 32 nt, Homo Sapiens
agccaccugucaacaaacccccauuauguaca

SEQ ID NO: 286236 - RNA, 32 nt, Homo Sapiens
caacgggauugugagaaucaagucacucucgu

SEQ ID NO: 286237 - RNA, 32 nt, Homo Sapiens
gguuagaaaacuugcuugaaguuccagaauca

SEQ ID NO: 286238 - RNA, 32 nt, Homo Sapiens
agggcuuguguccauuuggccuuuuacaagug

SEQ ID NO: 286239 - RNA, 31 nt, Homo Sapiens
uucuuuuuguacuuucauucaguguagaggg

SEQ ID NO: 286240 - RNA, 32 nt, Homo Sapiens
aagggccacuggucucccugggcuugcagugc

SEQ ID NO: 286241 - RNA, 32 nt, Homo Sapiens
gggaguucucugcaugccccaggccauuucuc

SEQ ID NO: 286242 - RNA, 32 nt, Homo Sapiens
uugcucuuuaguaaagaaaggcacaagaaaga

SEQ ID NO: 286243 - RNA, 32 nt, Homo Sapiens
cacacuaaaaacaaaaauauaugugaauaaaa

SEQ ID NO: 286244 - RNA, 31 nt, Homo Sapiens
ggagaggcgucgagcgcagcccagcgcccgc

SEQ ID NO: 286245 - RNA, 32 nt, Homo Sapiens
uuccucaaguuaugaaauacuuuuguacuuaa

SEQ ID NO: 286246 - RNA, 32 nt, Homo Sapiens
ggcauagcaaaguggggguugcuaccauuucu

SEQ ID NO: 286247 - RNA, 32 nt, Homo Sapiens
acccuucuuuauuugaaacaaacaaacauuua

SEQ ID NO: 286248 - RNA, 32 nt, Homo Sapiens
uaaaauuccucgguguauuaaucuaagguuuc

SEQ ID NO: 286249 - RNA, 32 nt, Homo Sapiens
gauggcggaaucuuaaagugauacaugcuaac

SEQ ID NO: 286250 - RNA, 32 nt, Homo Sapiens
uaugauugauuguuaaauuucagggaacauga

SEQ ID NO: 286251 - RNA, 32 nt, Homo Sapiens
uuauauaucucuuuuggucccauccucuaaag

SEQ ID NO: 286252 - RNA, 32 nt, Homo Sapiens
ggcgaagccccggccuaggccucgcggagaug

SEQ ID NO: 286253 - RNA, 32 nt, Homo Sapiens
cuaguuacagaaaaauuuaacuccagaauaug

SEQ ID NO: 286254 - RNA, 32 nt, Homo Sapiens
ccccagaucuuacuuuccuguccuugaggaac

SEQ ID NO: 286255 - RNA, 32 nt, Homo Sapiens
gacuacacagaaauuuaaauagaaauagugua

SEQ ID NO: 286256 - RNA, 32 nt, Homo Sapiens
gaguauuagaaaccacuguauauauguggaaa

SEQ ID NO: 286257 - RNA, 32 nt, Homo Sapiens
uguaaccgcugccccggccgccgcccgcuccu

SEQ ID NO: 286258 - RNA, 32 nt, Homo Sapiens
ugucugacaacaacugcaggcaguagccccca

SEQ ID NO: 286259 - RNA, 32 nt, Homo Sapiens
uccagccucucuuuuccaggaaccuugccaca

SEQ ID NO: 286260 - RNA, 32 nt, Homo Sapiens
guuugcuguauuaaaauagaucaaugaauaua

SEQ ID NO: 286261 - RNA, 32 nt, Homo Sapiens
cuggaugaugagagugagacuccaucgcaaaa

SEQ ID NO: 286262 - RNA, 32 nt, Homo Sapiens
cacugauaugaagcaguucaacuuuuuggaug

SEQ ID NO: 286263 - RNA, 32 nt, Homo Sapiens
agucgggcucucccggcccugccucccagcaa

SEQ ID NO: 286264 - RNA, 32 nt, Homo Sapiens
gcacgggacccgccagcuucagccuccagggc

SEQ ID NO: 286265 - RNA, 32 nt, Homo Sapiens
uuuuaauuggggugugggaggggcggggaggu

SEQ ID NO: 286266 - RNA, 32 nt, Homo Sapiens
caaaggaauuuauguuuuguaacuuggguacu

SEQ ID NO: 286267 - RNA, 32 nt, Homo Sapiens
uggaaaccaagccccacugccucuuugcugaa

SEQ ID NO: 286268 - RNA, 32 nt, Homo Sapiens
uaaaaugaaggauuuaauuugcuuuugcuccu

SEQ ID NO: 286269 - RNA, 32 nt, Homo Sapiens
gcccuccaggcuuuucuuggggaagauacccc

SEQ ID NO: 286270 - RNA, 32 nt, Homo Sapiens
gcgcgcgggaggcgcgcagagcuuucgggcug

SEQ ID NO: 286271 - RNA, 32 nt, Homo Sapiens
aguuccauuguuaagaaguucuguuuguuugg

SEQ ID NO: 286272 - RNA, 32 nt, Homo Sapiens
ucauacauugaauugcuauggaagacuuguuu

SEQ ID NO: 286273 - RNA, 32 nt, Homo Sapiens
cggcccucccaugugcagcccggccagccggg

SEQ ID NO: 286274 - RNA, 32 nt, Homo Sapiens
gucagagaaaagacauuaacagcaacauaagg

SEQ ID NO: 286275 - RNA, 32 nt, Homo Sapiens
acucgugugggaggcaccgcuccagccgcccg

SEQ ID NO: 286276 - RNA, 32 nt, Homo Sapiens
ucaguccccacccucgugggguugccuccccc

SEQ ID NO: 286277 - RNA, 32 nt, Homo Sapiens
cugucuggaacauaacgcuuguuuguuuuuac

SEQ ID NO: 286278 - RNA, 32 nt, Homo Sapiens
gacaucuccacuuuucucuguaccugugugua

SEQ ID NO: 286279 - RNA, 32 nt, Homo Sapiens
cuuguuuugacuuccacugacucauucugaac

SEQ ID NO: 286280 - RNA, 32 nt, Homo Sapiens
gggccgcgguugaacuggagucuugagugcgc

SEQ ID NO: 286281 - RNA, 32 nt, Homo Sapiens
cugugacgguggcaagaaauguggcuuuuugg

SEQ ID NO: 286282 - RNA, 32 nt, Homo Sapiens
uauacuugaaggaaauguuucaccuuauuuuu

SEQ ID NO: 286283 - RNA, 32 nt, Homo Sapiens
gcaacccagaaagcgucauggcugccgccggc

SEQ ID NO: 286284 - RNA, 32 nt, Homo Sapiens
ggcaucaccuaaaucaucacaaacaucuccaa

SEQ ID NO: 286285 - RNA, 32 nt, Homo Sapiens
cgcuggcuccucccucaguucucuuuggaaaa

SEQ ID NO: 286286 - RNA, 32 nt, Homo Sapiens
cuccuucccgcccgccgccgccgagacccagg

SEQ ID NO: 286287 - RNA, 32 nt, Homo Sapiens
auagcuauggaaucaauucaauuuggacuggu

SEQ ID NO: 286288 - RNA, 32 nt, Homo Sapiens
cguuccuccagccccuucuccucucugcaccu

SEQ ID NO: 286289 - RNA, 32 nt, Homo Sapiens
gaagaacuaaaaaauuaggaaacaaguucuag

SEQ ID NO: 286290 - RNA, 32 nt, Homo Sapiens
agcuggccaucggugagagcugcuccaugccu

SEQ ID NO: 286291 - RNA, 32 nt, Homo Sapiens
cuccguggccuccuccugugugagucccacca

SEQ ID NO: 286292 - RNA, 32 nt, Homo Sapiens
uuaaggcccagcugcgccugugccuugggcuc

SEQ ID NO: 286293 - RNA, 32 nt, Homo Sapiens
guuugccauccgcuguggcugcagcuuggacc

SEQ ID NO: 286294 - RNA, 32 nt, Homo Sapiens
ugugaggggagcuucugcucugggccucucuc

SEQ ID NO: 286295 - RNA, 32 nt, Homo Sapiens
guguguccagcauugaagagaacugcaacuga

SEQ ID NO: 286296 - RNA, 32 nt, Homo Sapiens
cagauccugaagaucuucguggacaaucucuu

SEQ ID NO: 286297 - RNA, 32 nt, Homo Sapiens
agguggucggggaugggagaaagggaaaaguc

SEQ ID NO: 286298 - RNA, 31 nt, Homo Sapiens
ccugacaggcacugcugccaugcugccuccc

SEQ ID NO: 286299 - RNA, 32 nt, Homo Sapiens
gcaggcugccucuucugccccggagcuggggu

SEQ ID NO: 286300 - RNA, 32 nt, Homo Sapiens
ugguuuuuagaaauauuuuuuauuuuucccca

SEQ ID NO: 286301 - RNA, 29 nt, Homo Sapiens
ucuuaugugacuuagcugcuguuuuaagg

SEQ ID NO: 286302 - RNA, 32 nt, Homo Sapiens
gcaggaucugcuucccuucucuccaggaccug

SEQ ID NO: 286303 - RNA, 30 nt, Homo Sapiens
gggcugcgcgcgcgggaccccggagcccaa

SEQ ID NO: 286304 - RNA, 32 nt, Homo Sapiens
uuaauuuguccucaucaagaaggauguggaug

SEQ ID NO: 286305 - RNA, 32 nt, Homo Sapiens
gaucuuaugcuguuuguaaaauguuacugucc

SEQ ID NO: 286306 - RNA, 32 nt, Homo Sapiens
auucauaaauguuuuauuucuguuaguaugaa

SEQ ID NO: 286307 - RNA, 32 nt, Homo Sapiens
acagcauguugguuacccuaggcgguacagau

SEQ ID NO: 286308 - RNA, 32 nt, Homo Sapiens
aaaauagcucuuuuaugaauuagcugauaagg

SEQ ID NO: 286309 - RNA, 32 nt, Homo Sapiens
caggaaagccagaaauaagauauuuuaaacau

SEQ ID NO: 286310 - RNA, 32 nt, Homo Sapiens
ccgcugcgggcucgcucugccgugcgcuaggc

SEQ ID NO: 286311 - RNA, 32 nt, Homo Sapiens
uguaagcuaaaauggguuauuuauaggacuga

SEQ ID NO: 286312 - RNA, 25 nt, Homo Sapiens
augcgcggcgcgggggcgauccugc

SEQ ID NO: 286313 - RNA, 32 nt, Homo Sapiens
gccucuuccccgucccucuccuaccuccgcca

SEQ ID NO: 286314 - RNA, 32 nt, Homo Sapiens
caaaagugguauagagggggcuggggcuugag

SEQ ID NO: 286315 - RNA, 32 nt, Homo Sapiens
uauuugaaaguauucaugccaaugcauaauac

SEQ ID NO: 286316 - RNA, 32 nt, Homo Sapiens
aaguccgccacagcccucccccgcccccuucc

SEQ ID NO: 286317 - RNA, 32 nt, Homo Sapiens
uuuggggaaagggcuccuugggcugcugguga

SEQ ID NO: 286318 - RNA, 32 nt, Homo Sapiens
uuggagggcaagggcuggggcugggaugggag

SEQ ID NO: 286319 - RNA, 32 nt, Homo Sapiens
ccgaaaaugaaagccucagaagcaaaagugac

SEQ ID NO: 286320 - RNA, 32 nt, Homo Sapiens
acaaagacacugguuuucaaucggcgucuaaa

SEQ ID NO: 286321 - RNA, 32 nt, Homo Sapiens
caggauucaaggaagaaauuagaccagaugag

SEQ ID NO: 286322 - RNA, 32 nt, Homo Sapiens
auacuaaaguaaaagaggaauauucugaauuu

SEQ ID NO: 286323 - RNA, 32 nt, Homo Sapiens
agacuuaaauguuuaaagaguaugugcucauu

SEQ ID NO: 286324 - RNA, 32 nt, Homo Sapiens
auugugauguccuccuggccucuuccagauac

SEQ ID NO: 286325 - RNA, 32 nt, Homo Sapiens
aucaauugagaauuuauuggaacuucacagug

SEQ ID NO: 286326 - RNA, 32 nt, Homo Sapiens
ucuacagcacaaccucuugaggguggacaggg

SEQ ID NO: 286327 - RNA, 32 nt, Homo Sapiens
gucagaugggucugauauuaaucaaaauuguc

SEQ ID NO: 286328 - RNA, 32 nt, Homo Sapiens
uauagacuauaaauaugucuccaucugccuua

SEQ ID NO: 286329 - RNA, 32 nt, Homo Sapiens
cgcuguuccggguuggaacagcagaggcucag

SEQ ID NO: 286330 - RNA, 32 nt, Homo Sapiens
uccucacacauccuguauuaugaacacaguag

SEQ ID NO: 286331 - RNA, 32 nt, Homo Sapiens
uccccaaauuccuaagccuccugggcacagag

SEQ ID NO: 286332 - RNA, 32 nt, Homo Sapiens
ccccugcugcucugcagauucccuuuauuuag

SEQ ID NO: 286333 - RNA, 32 nt, Homo Sapiens
uaaaaccuauuauuguuuaguguugugguaug

SEQ ID NO: 286334 - RNA, 32 nt, Homo Sapiens
aggggcaguggggugagaagguccuggcuccc

SEQ ID NO: 286335 - RNA, 32 nt, Homo Sapiens
ccccgugccugcccuggcuggauccuaggagc

SEQ ID NO: 286336 - RNA, 32 nt, Homo Sapiens
gucgaagaagaaaagugaagugagcacugaac

SEQ ID NO: 286337 - RNA, 32 nt, Homo Sapiens
gucugcccugggccucaguuucccucuuaacg

SEQ ID NO: 286338 - RNA, 32 nt, Homo Sapiens
acucucuccaggagggcucggggugugucauu

SEQ ID NO: 286339 - RNA, 32 nt, Homo Sapiens
gaggggcgcagggcugcgcgcucgccggcgcu

SEQ ID NO: 286340 - RNA, 32 nt, Homo Sapiens
ggcugguauccaacucuugaccucaggugauc

SEQ ID NO: 286341 - RNA, 28 nt, Homo Sapiens
cauuuggaagauuaaacccauuucacga

SEQ ID NO: 286342 - RNA, 32 nt, Homo Sapiens
cacccaagguggggggcaggggcccucacucu

SEQ ID NO: 286343 - RNA, 32 nt, Homo Sapiens
gcacagacucgcgcucggggucccugccaaaa

SEQ ID NO: 286344 - RNA, 32 nt, Homo Sapiens
gcugagcucccucggcaagacccagcggcggc

SEQ ID NO: 286345 - RNA, 32 nt, Homo Sapiens
gcaacacacaagaaccagguccccucagccca

SEQ ID NO: 286346 - RNA, 32 nt, Homo Sapiens
cguggagagggaguggugucagagggucagag

SEQ ID NO: 286347 - RNA, 32 nt, Homo Sapiens
ugugacuucccucccccugccagaauacuccu

SEQ ID NO: 286348 - RNA, 32 nt, Homo Sapiens
ccacagcuccaccugcaucuucucaucaaagc

SEQ ID NO: 286349 - RNA, 32 nt, Homo Sapiens
gguugcaguccuggaacccaucccccauggau

SEQ ID NO: 286350 - RNA, 25 nt, Homo Sapiens
augagcuuccucuucagcagccgcu

SEQ ID NO: 286351 - RNA, 32 nt, Homo Sapiens
ggaacuguuucuuuaaaaucccuuaauuuucc

SEQ ID NO: 286352 - RNA, 32 nt, Homo Sapiens
uucuuuacauuuaaguuuuguuuacgagauuu

SEQ ID NO: 286353 - RNA, 32 nt, Homo Sapiens
auuuugaggggaggaguuccacagauuguuuc

SEQ ID NO: 286354 - RNA, 32 nt, Homo Sapiens
gcauggggcgccccggccccuccgacagcgcg

SEQ ID NO: 286355 - RNA, 32 nt, Homo Sapiens
guaucuaugcaguuuauauaaacuacaugauu

SEQ ID NO: 286356 - RNA, 32 nt, Homo Sapiens
ugcugcacuccagccugggugacagagggaga

SEQ ID NO: 286357 - RNA, 32 nt, Homo Sapiens
uauaacuuuuuauuagaugcuuaauguucaau

SEQ ID NO: 286358 - RNA, 32 nt, Homo Sapiens
agugagcagacaccaccgacuuccuuucugcg

SEQ ID NO: 286359 - RNA, 32 nt, Homo Sapiens
ugagucuaucuaugcaccuucuuguccauuca

SEQ ID NO: 286360 - RNA, 32 nt, Homo Sapiens
gagaagaaccugaguucaagccucugcugugc

SEQ ID NO: 286361 - RNA, 32 nt, Homo Sapiens
gcaaaaaugggcuagaaugaaaaggagaugcc

SEQ ID NO: 286362 - RNA, 32 nt, Homo Sapiens
ucuggaaguccuccccacagcuccucccaauc

SEQ ID NO: 286363 - RNA, 32 nt, Homo Sapiens
guugggaccugcugcuccauggaugcaugccc

SEQ ID NO: 286364 - RNA, 32 nt, Homo Sapiens
ccggagugcagucccuggauaaaauuaaaggc

SEQ ID NO: 286365 - RNA, 32 nt, Homo Sapiens
uaaagaaugcugacuuuuccuacauuuccaga

SEQ ID NO: 286366 - RNA, 32 nt, Homo Sapiens
uugcaaaaccagaaacaaaaucgcagacugcc

SEQ ID NO: 286367 - RNA, 31 nt, Homo Sapiens
uugauguguagacaugucagagccuuggccc

SEQ ID NO: 286368 - RNA, 31 nt, Homo Sapiens
gccccugugcuggagauaccaagggcauggg

SEQ ID NO: 286369 - RNA, 32 nt, Homo Sapiens
gauauccuuguuugcacaggacugguggaaaa

SEQ ID NO: 286370 - RNA, 32 nt, Homo Sapiens
ggcgccuguagccccagcuacuugggaggcug

SEQ ID NO: 286371 - RNA, 32 nt, Homo Sapiens
aagaagcucacagaugguuacaugggacaaac

SEQ ID NO: 286372 - RNA, 32 nt, Homo Sapiens
ggacucagauuuauuuacucuugcuggaucug

SEQ ID NO: 286373 - RNA, 32 nt, Homo Sapiens
caccgcugccagcacagagcguccuucccccu

SEQ ID NO: 286374 - RNA, 32 nt, Homo Sapiens
gccuccauauccuuguccggcuugcuaucuug

SEQ ID NO: 286375 - RNA, 32 nt, Homo Sapiens
uccuugguucccggucccccagcccauccgcc

SEQ ID NO: 286376 - RNA, 32 nt, Homo Sapiens
ccugcaugaacagaguugaugaaaguggggug

SEQ ID NO: 286377 - RNA, 32 nt, Homo Sapiens
uccguugccucccagcccucuguauccaccug

SEQ ID NO: 286378 - RNA, 32 nt, Homo Sapiens
cuucaguaacaaguguuggcaaacgagacuuu

SEQ ID NO: 286379 - RNA, 32 nt, Homo Sapiens
agcaacagugauugaugauaauacuguacuuc

SEQ ID NO: 286380 - RNA, 31 nt, Homo Sapiens
cccuauuuaaacccuauucaagauggcuccc

SEQ ID NO: 286381 - RNA, 32 nt, Homo Sapiens
ugcccacuccacuccuugugcggcgcuaggcc

SEQ ID NO: 286382 - RNA, 32 nt, Homo Sapiens
gacgcgacugguccgcgccggccgcaggggaa

SEQ ID NO: 286383 - RNA, 32 nt, Homo Sapiens
cccagaggguggcaagaacagugggcguuggg

SEQ ID NO: 286384 - RNA, 32 nt, Homo Sapiens
uucugagacagagcuccucaaaccauugugga

SEQ ID NO: 286385 - RNA, 32 nt, Homo Sapiens
ucggcugggcaccaugaacagcagcagcgcca

SEQ ID NO: 286386 - RNA, 32 nt, Homo Sapiens
cacagccgaccccuucgucauccaccacucag

SEQ ID NO: 286387 - RNA, 32 nt, Homo Sapiens
guaaauagaaaagacauugaaucaccaaggcc

SEQ ID NO: 286388 - RNA, 31 nt, Homo Sapiens
guaacaaaauaaaacagaugugucauaauau

SEQ ID NO: 286389 - RNA, 32 nt, Homo Sapiens
cuucuggagggccagcucccagagcugagcuu

SEQ ID NO: 286390 - RNA, 32 nt, Homo Sapiens
caugggagaagacuucaucaugacaggacuuc

SEQ ID NO: 286391 - RNA, 32 nt, Homo Sapiens
gacagaaugagaugaccaugcauaaaccagga

SEQ ID NO: 286392 - RNA, 32 nt, Homo Sapiens
ggugggagaggucuuuuuuaaaaggaaguuac

SEQ ID NO: 286393 - RNA, 32 nt, Homo Sapiens
uggacuuggggucagagacugcuguguuugag

SEQ ID NO: 286394 - RNA, 32 nt, Homo Sapiens
ugguaucgguagcugggaagcuuuaugugugu

SEQ ID NO: 286395 - RNA, 32 nt, Homo Sapiens
uccgcuuggacgcgcgcaaguucgucugcgag

SEQ ID NO: 286396 - RNA, 32 nt, Homo Sapiens
cuacacagcaagagaacagaaauacugugucu

SEQ ID NO: 286397 - RNA, 32 nt, Homo Sapiens
ggaaaagggcuuucucaauaagccucagcuuu

SEQ ID NO: 286398 - RNA, 32 nt, Homo Sapiens
aucaggaucaaaaauugggaaauacuaagcuc

SEQ ID NO: 286399 - RNA, 32 nt, Homo Sapiens
cccauguugugcuuugucuuguugaguuucuc

SEQ ID NO: 286400 - RNA, 32 nt, Homo Sapiens
acaguauuuguaucuaauaccuuugaaagauc

SEQ ID NO: 286401 - RNA, 32 nt, Homo Sapiens
aagugguugcuguuauuaucaccaguguaaag

SEQ ID NO: 286402 - RNA, 30 nt, Homo Sapiens
cuguuauuacuugccaagcgucccuuuuuu

SEQ ID NO: 286403 - RNA, 32 nt, Homo Sapiens
agugaauuaucuuuauuuuaaaauguauguuu

SEQ ID NO: 286404 - RNA, 32 nt, Homo Sapiens
uuaacauucaagaugguacaugcugaagccuu

SEQ ID NO: 286405 - RNA, 32 nt, Homo Sapiens
cuugccucccucuccuggacaccuggggucaa

SEQ ID NO: 286406 - RNA, 32 nt, Homo Sapiens
acacugccccucaacagggaugacucagcaga

SEQ ID NO: 286407 - RNA, 32 nt, Homo Sapiens
auuccagcagucagcaugauuuccagguucca

SEQ ID NO: 286408 - RNA, 32 nt, Homo Sapiens
uuaaucugcauucuguuuccucuucuaguugu

SEQ ID NO: 286409 - RNA, 32 nt, Homo Sapiens
ccagccuagagaccucuuuuaaagggacuccu

SEQ ID NO: 286410 - RNA, 32 nt, Homo Sapiens
auauggggaaacugaggcuuagaauaaugucu

SEQ ID NO: 286411 - RNA, 32 nt, Homo Sapiens
agcagaagccccaagcaacuuuccuuuccugg

SEQ ID NO: 286412 - RNA, 32 nt, Homo Sapiens
cucuucuugggguccugauacucauucccauu

SEQ ID NO: 286413 - RNA, 32 nt, Homo Sapiens
uccagcagccgcgccagcugguugcccgccag

SEQ ID NO: 286414 - RNA, 32 nt, Homo Sapiens
ccuaagagucagggggagugagcggcuggcuc

SEQ ID NO: 286415 - RNA, 32 nt, Homo Sapiens
guaauuccuuauauuucuuucuuccacagugu

SEQ ID NO: 286416 - RNA, 32 nt, Homo Sapiens
uacgacgaguucugcgcggcggugcgggccua

SEQ ID NO: 286417 - RNA, 32 nt, Homo Sapiens
acuugagcuguuaaagacuggauacuuuaagu

SEQ ID NO: 286418 - RNA, 31 nt, Homo Sapiens
gguuccaggguauaucucagagccuggagaa

SEQ ID NO: 286419 - RNA, 32 nt, Homo Sapiens
uuccuucauuucccuuugcgaucauacaguaa

SEQ ID NO: 286420 - RNA, 32 nt, Homo Sapiens
aaaaaaguuauucaaaguauuuuuaaagcauu

SEQ ID NO: 286421 - RNA, 28 nt, Homo Sapiens
cagugaguuacagcgagaggcagagaaa

SEQ ID NO: 286422 - RNA, 32 nt, Homo Sapiens
ugcaguggugugaucucagaucaguguaccau

SEQ ID NO: 286423 - RNA, 32 nt, Homo Sapiens
cagguaugucagaggaccgugucucaaagaag

SEQ ID NO: 286424 - RNA, 32 nt, Homo Sapiens
cgccaggugcugggggcgacucggacagcggg

SEQ ID NO: 286425 - RNA, 32 nt, Homo Sapiens
uguguauaucuguauauggaucuuaccaucau

SEQ ID NO: 286426 - RNA, 32 nt, Homo Sapiens
ggagccacagagagggcggggcguaggaccug

SEQ ID NO: 286427 - RNA, 32 nt, Homo Sapiens
uuuuauuaauaaagaaugcagauauuucagau

SEQ ID NO: 286428 - RNA, 32 nt, Homo Sapiens
gacugggcgugguggcucacgccuauaauccc

SEQ ID NO: 286429 - RNA, 30 nt, Homo Sapiens
ccgggagcagcugagccgccggcgccucgg

SEQ ID NO: 286430 - RNA, 32 nt, Homo Sapiens
gggaauacaauuuuuuuuuuuaguaaauacac

SEQ ID NO: 286431 - RNA, 32 nt, Homo Sapiens
uagaccgggcugggucugcagcagccccuggu

SEQ ID NO: 286432 - RNA, 32 nt, Homo Sapiens
ggggauacgguggagaagaucgcauggcagaa

SEQ ID NO: 286433 - RNA, 32 nt, Homo Sapiens
ggaggagucggagaggcaggggcuugcuuugc

SEQ ID NO: 286434 - RNA, 32 nt, Homo Sapiens
aaguaguaguggggcaggccucucuaugcuug

SEQ ID NO: 286435 - RNA, 32 nt, Homo Sapiens
gugcuggagcagccauugccuccggaucaagg

SEQ ID NO: 286436 - RNA, 32 nt, Homo Sapiens
gcccgcgggaggaggaaccgcccgguccuuua

SEQ ID NO: 286437 - RNA, 32 nt, Homo Sapiens
cugcccgccgcgcaguacugccugcagagggu

SEQ ID NO: 286438 - RNA, 32 nt, Homo Sapiens
auuuuuguugauaacacaaaaaacacuauguu

SEQ ID NO: 286439 - RNA, 32 nt, Homo Sapiens
cuccucccagccccggcccauuccuccccugc

SEQ ID NO: 286440 - RNA, 31 nt, Homo Sapiens
ggaagaaguaacaugauuucuuuguuugcuc

SEQ ID NO: 286441 - RNA, 32 nt, Homo Sapiens
uagcacuggagcaaauagccaagggaaaucaa

SEQ ID NO: 286442 - RNA, 32 nt, Homo Sapiens
uaaugaaucuucggguguuucccuuuagcuaa

SEQ ID NO: 286443 - RNA, 32 nt, Homo Sapiens
ucuacuaaaaauacaaaaauuagucaggugug

SEQ ID NO: 286444 - RNA, 32 nt, Homo Sapiens
ggccuguucugugugugccgccgggcgacgug

SEQ ID NO: 286445 - RNA, 32 nt, Homo Sapiens
uaaguccccagcccccucuccucccagccucu

SEQ ID NO: 286446 - RNA, 32 nt, Homo Sapiens
ggcuguccccauucaccuuccacaaugcuggu

SEQ ID NO: 286447 - RNA, 32 nt, Homo Sapiens
aagaaaugugucaaauuuuuaacauugguaaa

SEQ ID NO: 286448 - RNA, 32 nt, Homo Sapiens
ugauaccauuuaugaaacauucuugcuguaac

SEQ ID NO: 286449 - RNA, 32 nt, Homo Sapiens
uuaucuccuuugaagaaggcaaggcugauaau

SEQ ID NO: 286450 - RNA, 29 nt, Homo Sapiens
gucggugcgcuacgcaggacgccgccuca

SEQ ID NO: 286451 - RNA, 32 nt, Homo Sapiens
uuuauuagcaaguuccuuuuuacuucaagcua

SEQ ID NO: 286452 - RNA, 32 nt, Homo Sapiens
cuccucaguuugaggagaaaaaucuugauguc

SEQ ID NO: 286453 - RNA, 32 nt, Homo Sapiens
ucgucguauuccgggcggcccgcggcccacgg

SEQ ID NO: 286454 - RNA, 32 nt, Homo Sapiens
aauuguuuguuaucaucucuuuagacagauaa

SEQ ID NO: 286455 - RNA, 32 nt, Homo Sapiens
uucagaggcuccugggggauuaggguguggug

SEQ ID NO: 286456 - RNA, 32 nt, Homo Sapiens
uuugcaaacaaaugcauaaaugcaaauguaaa

SEQ ID NO: 286457 - RNA, 32 nt, Homo Sapiens
acagaagacauucaggagcccagccugugggg

SEQ ID NO: 286458 - RNA, 32 nt, Homo Sapiens
auacaaacaaaauuaugaagaauacagagaaa

SEQ ID NO: 286459 - RNA, 31 nt, Homo Sapiens
uggaagaaauaaauauaagguucugcauuug

SEQ ID NO: 286460 - RNA, 32 nt, Homo Sapiens
auugggcuugggaugccuuuggagcuuuucuc

SEQ ID NO: 286461 - RNA, 32 nt, Homo Sapiens
gagcuucgauugcgcggccgccaaguuucagu

SEQ ID NO: 286462 - RNA, 32 nt, Homo Sapiens
uaaaaaugaaagauugaauguucauguguggg

SEQ ID NO: 286463 - RNA, 31 nt, Homo Sapiens
agucaucaguccauuuuaugaguuaacaaug

SEQ ID NO: 286464 - RNA, 32 nt, Homo Sapiens
caaaagggugggggugggaggggcagaggcca

SEQ ID NO: 286465 - RNA, 32 nt, Homo Sapiens
cauguccugaaauaaauauugauucaauaugg

SEQ ID NO: 286466 - RNA, 32 nt, Homo Sapiens
gacugaggcacgagcgggugacgcugggccug

SEQ ID NO: 286467 - RNA, 32 nt, Homo Sapiens
agaagaggucuuugcccuucguuuuuccacgg

SEQ ID NO: 286468 - RNA, 32 nt, Homo Sapiens
gguaauaaugaaaguuuaauucucauaacaaa

SEQ ID NO: 286469 - RNA, 32 nt, Homo Sapiens
caacugaaggauuuucucugccccagggaccu

SEQ ID NO: 286470 - RNA, 32 nt, Homo Sapiens
aacuuuuaaaauugguauaguaucuacagagu

SEQ ID NO: 286471 - RNA, 32 nt, Homo Sapiens
auaaaguggaauauaagaaugaacuaaguaug

SEQ ID NO: 286472 - RNA, 32 nt, Homo Sapiens
agccugcugaacaccugagaaacaagugcagg

SEQ ID NO: 286473 - RNA, 32 nt, Homo Sapiens
augcugcucuauuuucuggguguagaaaguau

SEQ ID NO: 286474 - RNA, 32 nt, Homo Sapiens
gaaauggugcugcccccuccccggagggcugg

SEQ ID NO: 286475 - RNA, 32 nt, Homo Sapiens
gccuccgcguccgcgcccagcgcgcccagcga

SEQ ID NO: 286476 - RNA, 32 nt, Homo Sapiens
ucaagcaauccuuccacuuuggccuuccaaag

SEQ ID NO: 286477 - RNA, 32 nt, Homo Sapiens
cguuccauucaacaggcacauguuuaaaagag

SEQ ID NO: 286478 - RNA, 32 nt, Homo Sapiens
ccugaguacagcacucguacuuuuacaugaug

SEQ ID NO: 286479 - RNA, 32 nt, Homo Sapiens
cauuccauucaacaggcacauguuugaaagag

SEQ ID NO: 286480 - RNA, 32 nt, Homo Sapiens
ccccgccgucuucgcgccuccgggacucuagc

SEQ ID NO: 286481 - RNA, 28 nt, Homo Sapiens
uuaaugauggguauugguaagaauacca

SEQ ID NO: 286482 - RNA, 32 nt, Homo Sapiens
cccaagggccuccugcccuguccugccuugga

SEQ ID NO: 286483 - RNA, 32 nt, Homo Sapiens
ugcgaggauccggcccgccgccccccggggga

SEQ ID NO: 286484 - RNA, 32 nt, Homo Sapiens
ccaggcccggcccccucuggcuuggagagcau

SEQ ID NO: 286485 - RNA, 32 nt, Homo Sapiens
ugugggucccagcaccuaucucaggaagcagg

SEQ ID NO: 286486 - RNA, 32 nt, Homo Sapiens
uaacacuaaaacuggacagucuccugagacaa

SEQ ID NO: 286487 - RNA, 32 nt, Homo Sapiens
uguuuccaucuuccuugccaaguuuuccuacc

SEQ ID NO: 286488 - RNA, 32 nt, Homo Sapiens
acaauaaacuaaaggaaagcauugcuugaaga

SEQ ID NO: 286489 - RNA, 32 nt, Homo Sapiens
cuggucacaaaauaaagaaauuugggaugcaa

SEQ ID NO: 286490 - RNA, 32 nt, Homo Sapiens
ucagaggcuacuuuuccccuuuauauuuuaua

SEQ ID NO: 286491 - RNA, 32 nt, Homo Sapiens
uggagcuuuuaaaaauguuugguuucagguau

SEQ ID NO: 286492 - RNA, 32 nt, Homo Sapiens
uuuguguuccugcuuucuuucauuucacaguc

SEQ ID NO: 286493 - RNA, 32 nt, Homo Sapiens
aucguuugauaaagauuaaggacauguucuuu

SEQ ID NO: 286494 - RNA, 32 nt, Homo Sapiens
ucaagagcagagggguaaacauccucugcuaa

SEQ ID NO: 286495 - RNA, 32 nt, Homo Sapiens
gacacaucccucgggaacucugccccucugac

SEQ ID NO: 286496 - RNA, 32 nt, Homo Sapiens
gggcaagcccugaugucaguguguguaacuga

SEQ ID NO: 286497 - RNA, 32 nt, Homo Sapiens
ugcacagugagcucugcggaaggggucaggcu

SEQ ID NO: 286498 - RNA, 32 nt, Homo Sapiens
aacauagauaaaaucauauauacuaucuugua

SEQ ID NO: 286499 - RNA, 32 nt, Homo Sapiens
auuuaacuaugaauaucaugaagguuauuuaa

SEQ ID NO: 286500 - RNA, 31 nt, Homo Sapiens
agggggagcgcagaggcgacggcccccaugc

SEQ ID NO: 286501 - RNA, 32 nt, Homo Sapiens
cucaagggcauuaccccgccuccucuucauca

SEQ ID NO: 286502 - RNA, 32 nt, Homo Sapiens
gacccucugccugcaccuggagggcgcccggg

SEQ ID NO: 286503 - RNA, 32 nt, Homo Sapiens
uuccauuuuuuaaaauacaugaacuuggcaag

SEQ ID NO: 286504 - RNA, 32 nt, Homo Sapiens
guuggcaccuucccccucccccagccacuccc

SEQ ID NO: 286505 - RNA, 32 nt, Homo Sapiens
ggcccagagucugagucccagcccugagcacu

SEQ ID NO: 286506 - RNA, 32 nt, Homo Sapiens
aucauagcccuggccuggcggcacagcagcac

SEQ ID NO: 286507 - RNA, 32 nt, Homo Sapiens
agguggccaccaugcuggccugcggcaugugc

SEQ ID NO: 286508 - RNA, 32 nt, Homo Sapiens
augauuuguaaguaauuauguaggauccauca

SEQ ID NO: 286509 - RNA, 32 nt, Homo Sapiens
gcagcaggguugggggcuggccagcugcucgu

SEQ ID NO: 286510 - RNA, 32 nt, Homo Sapiens
aaauacaaaaauaaaacugaaacugcuccaga

SEQ ID NO: 286511 - RNA, 32 nt, Homo Sapiens
aaaaccuacauggaauguaugucuggaguauu

SEQ ID NO: 286512 - RNA, 32 nt, Homo Sapiens
cucuuuucgccaucucucccagcccuggaaca

SEQ ID NO: 286513 - RNA, 32 nt, Homo Sapiens
uucuaccgucagagccgggcccgggaccgcag

SEQ ID NO: 286514 - RNA, 28 nt, Homo Sapiens
gagagguggcugugaauuauaaaccuca

SEQ ID NO: 286515 - RNA, 32 nt, Homo Sapiens
agagugagaaguuaaagguccaauuaaguuaa

SEQ ID NO: 286516 - RNA, 32 nt, Homo Sapiens
accagagagaauaauuugucugaagcaucaug

SEQ ID NO: 286517 - RNA, 32 nt, Homo Sapiens
cacugagacagagccaaacaugaaagggaagg

SEQ ID NO: 286518 - RNA, 32 nt, Homo Sapiens
caaagucaggauuccuuggcagaauuuaacga

SEQ ID NO: 286519 - RNA, 32 nt, Homo Sapiens
gcacacaggaccaguguccuccccgugaccuu

SEQ ID NO: 286520 - RNA, 32 nt, Homo Sapiens
aagaacuguuggaaacaaaacuaaaagcaaac

SEQ ID NO: 286521 - RNA, 29 nt, Homo Sapiens
agccaugggccucacccugcucuugcugc

SEQ ID NO: 286522 - RNA, 29 nt, Homo Sapiens
cacaaugaauguaacuauuuucuaaacac

SEQ ID NO: 286523 - RNA, 32 nt, Homo Sapiens
gugccaauauugauauucucuuauaccucaau

SEQ ID NO: 286524 - RNA, 32 nt, Homo Sapiens
gggacuggggaucccgccgccgggccgcagca

SEQ ID NO: 286525 - RNA, 32 nt, Homo Sapiens
ggaggccgaggugggaggagcgcuugagccga

SEQ ID NO: 286526 - RNA, 32 nt, Homo Sapiens
ccgcugcgccuguuggggcugcaccucggacc

SEQ ID NO: 286527 - RNA, 32 nt, Homo Sapiens
agcaggcgaugcgcgccgcugcuccgcgcgcu

SEQ ID NO: 286528 - RNA, 32 nt, Homo Sapiens
cagucacuucccuccccaggccccaaagcacc

SEQ ID NO: 286529 - RNA, 32 nt, Homo Sapiens
acccgggcgggcccccggcauugacuggcaua

SEQ ID NO: 286530 - RNA, 32 nt, Homo Sapiens
ugccuuugaucgaugcugcuccaguaacuaca

SEQ ID NO: 286531 - RNA, 32 nt, Homo Sapiens
cagaggcuuucaugagccccaaggcuggggcc

SEQ ID NO: 286532 - RNA, 32 nt, Homo Sapiens
cccuccccuacuggauggaacucuguggcaau

SEQ ID NO: 286533 - RNA, 32 nt, Homo Sapiens
ugggaaucagucaccgugcuguccuuguggag

SEQ ID NO: 286534 - RNA, 32 nt, Homo Sapiens
ggaggacagucugcuagcaagauggaaguuac

SEQ ID NO: 286535 - RNA, 32 nt, Homo Sapiens
cauuuaccagugcaggaagucucauaaaacuc

SEQ ID NO: 286536 - RNA, 32 nt, Homo Sapiens
gauuucuucucccuccuccccugcaagagugg

SEQ ID NO: 286537 - RNA, 32 nt, Homo Sapiens
cugccgggagacggagccaggcuguguagagg

SEQ ID NO: 286538 - RNA, 32 nt, Homo Sapiens
gaguaaagugacucacaguuguaguccuaccu

SEQ ID NO: 286539 - RNA, 32 nt, Homo Sapiens
aggcuucaccauacuguaagcauuuuagguag

SEQ ID NO: 286540 - RNA, 32 nt, Homo Sapiens
ccuuucucccuccccaccugacuucagcuuga

SEQ ID NO: 286541 - RNA, 32 nt, Homo Sapiens
ucugggcaaaauucucacaaagggcuuucuaa

SEQ ID NO: 286542 - RNA, 32 nt, Homo Sapiens
uggcuuguuuucuuagacuccuccucagcuac

SEQ ID NO: 286543 - RNA, 32 nt, Homo Sapiens
auuauuuuucagagagauuuaguuuuacuuua

SEQ ID NO: 286544 - RNA, 32 nt, Homo Sapiens
uuggugguggcucagaacuuaguugcaccaga

SEQ ID NO: 286545 - RNA, 32 nt, Homo Sapiens
uuauuugcuacaucgggcaucauucuaaaaac

SEQ ID NO: 286546 - RNA, 32 nt, Homo Sapiens
gugucccuuuauuagacuuugucagccugacu

SEQ ID NO: 286547 - RNA, 32 nt, Homo Sapiens
aauucagauaaaauuuccuuauguucugcuau

SEQ ID NO: 286548 - RNA, 32 nt, Homo Sapiens
ucaaaaagaaaagaaaagaagacucugaccug

SEQ ID NO: 286549 - RNA, 30 nt, Homo Sapiens
gcuguguggggcggugagcgccggcccagc

SEQ ID NO: 286550 - RNA, 32 nt, Homo Sapiens
gaccugccccgcggcaagcgcggccgcggagu

SEQ ID NO: 286551 - RNA, 32 nt, Homo Sapiens
augcugagugucuuuuccugugcuuacgggcc

SEQ ID NO: 286552 - RNA, 32 nt, Homo Sapiens
cuaauuacuggagggcugaugccaagugaugg

SEQ ID NO: 286553 - RNA, 32 nt, Homo Sapiens
uugcugcuuccacugauacccuuuugacugga

SEQ ID NO: 286554 - RNA, 32 nt, Homo Sapiens
ugggcuccccaucuccuucuggcccaucugcc

SEQ ID NO: 286555 - RNA, 32 nt, Homo Sapiens
aguccccugccagcuccugaucaggcgcugcg

SEQ ID NO: 286556 - RNA, 32 nt, Homo Sapiens
ccggagcccucccagcccucaggccugcgccu

SEQ ID NO: 286557 - RNA, 32 nt, Homo Sapiens
acuuucaggggagaggaacagcaugggcaaag

SEQ ID NO: 286558 - RNA, 32 nt, Homo Sapiens
gagggcccgcgccuacuuccugucccacugcc

SEQ ID NO: 286559 - RNA, 32 nt, Homo Sapiens
ggaccaaaauacacagcagguaguguuagcuc

SEQ ID NO: 286560 - RNA, 32 nt, Homo Sapiens
uuuggccccaacagcccuccugugccugcuuc

SEQ ID NO: 286561 - RNA, 32 nt, Homo Sapiens
aauuucaugcaaacacauuuagggugaauuca

SEQ ID NO: 286562 - RNA, 32 nt, Homo Sapiens
cacuuguccgucuucugcauucugggaacaug

SEQ ID NO: 286563 - RNA, 32 nt, Homo Sapiens
uccacccccuccccauccccagcccccgggga

SEQ ID NO: 286564 - RNA, 32 nt, Homo Sapiens
caguaauaacaagauuguaugaaccgcauggu

SEQ ID NO: 286565 - RNA, 32 nt, Homo Sapiens
ggaggugaaacugaaaauaaaaagagaaaguu

SEQ ID NO: 286566 - RNA, 32 nt, Homo Sapiens
gggaacacccagacaugagaaacuaugcuaag

SEQ ID NO: 286567 - RNA, 32 nt, Homo Sapiens
aucacugugaaugguggugaccaggugggcag

SEQ ID NO: 286568 - RNA, 32 nt, Homo Sapiens
gacagugaucauuaggaugaagaggaagagaa

SEQ ID NO: 286569 - RNA, 32 nt, Homo Sapiens
uuuaaaaaaaaauaaaaucaucugaaaagcaa

SEQ ID NO: 286570 - RNA, 32 nt, Homo Sapiens
cggccugggggcguggcggggaggaggaggag

SEQ ID NO: 286571 - RNA, 32 nt, Homo Sapiens
gaugguguuuccucuccagggaugacacccua

SEQ ID NO: 286572 - RNA, 32 nt, Homo Sapiens
acaacuaugaccacaaugguccacccacaaau

SEQ ID NO: 286573 - RNA, 32 nt, Homo Sapiens
auuaaaccauuuaugcuacauaaaaaaaaaaa

SEQ ID NO: 286574 - RNA, 32 nt, Homo Sapiens
uugaaguccuuccuaauagaguugcaucaucu

SEQ ID NO: 286575 - RNA, 32 nt, Homo Sapiens
aauaaaauaaaguggaaucuuuuucauggcuu

SEQ ID NO: 286576 - RNA, 32 nt, Homo Sapiens
gggccugagcggccgccuccuccgccacccga

SEQ ID NO: 286577 - RNA, 32 nt, Homo Sapiens
cccaggcagggagaggcaggugagguucucag

SEQ ID NO: 286578 - RNA, 32 nt, Homo Sapiens
aacuuuucccuccucccuuuuugcggaugaga

SEQ ID NO: 286579 - RNA, 32 nt, Homo Sapiens
cuucucugaaaucaucucuccucuuuuuaaac

SEQ ID NO: 286580 - RNA, 32 nt, Homo Sapiens
uaguuauaaaaagcuagcauuugccuagauca

SEQ ID NO: 286581 - RNA, 28 nt, Homo Sapiens
ggaguugggcggccgggccgagggccca

SEQ ID NO: 286582 - RNA, 32 nt, Homo Sapiens
auuuguccgcauuucuucuccuucccggaaau

SEQ ID NO: 286583 - RNA, 32 nt, Homo Sapiens
uuaucuaacuagaugucagaucuugaaaucug

SEQ ID NO: 286584 - RNA, 32 nt, Homo Sapiens
ccuccuguagcccacacccuucuuaaagcggc

SEQ ID NO: 286585 - RNA, 32 nt, Homo Sapiens
guuaaggaacuguguuaccuuuuguccuaaga

SEQ ID NO: 286586 - RNA, 31 nt, Homo Sapiens
uacuaucauuuuuuguugccaaaacaaaguc

SEQ ID NO: 286587 - RNA, 32 nt, Homo Sapiens
guccucaggucagccucuccagggccaacucc

SEQ ID NO: 286588 - RNA, 32 nt, Homo Sapiens
gcaguccacaauggaaggcuucuuggaggagg

SEQ ID NO: 286589 - RNA, 32 nt, Homo Sapiens
gcguaaaaggcacagcguuuucugaucgcagc

SEQ ID NO: 286590 - RNA, 32 nt, Homo Sapiens
auuccacagaauaaaagauauuuuguguguag

SEQ ID NO: 286591 - RNA, 32 nt, Homo Sapiens
gguucccagugaugaagugaugagaccccuaa

SEQ ID NO: 286592 - RNA, 32 nt, Homo Sapiens
cacauucgccagcagcauccugucauaguggc

SEQ ID NO: 286593 - RNA, 32 nt, Homo Sapiens
gagccccugagaacaaccaaucuccgcucucu

SEQ ID NO: 286594 - RNA, 32 nt, Homo Sapiens
aggguccucacagauuuuuccugaacaacccc

SEQ ID NO: 286595 - RNA, 32 nt, Homo Sapiens
aagacauucaucuauuuuucaaauguucuuuc

SEQ ID NO: 286596 - RNA, 32 nt, Homo Sapiens
cccgccuuacugccgccuaccccgcccgccac

SEQ ID NO: 286597 - RNA, 32 nt, Homo Sapiens
accuuaacuaugacuaagaaauuaaagaagaa

SEQ ID NO: 286598 - RNA, 32 nt, Homo Sapiens
aguucccaugucugccauuauuuucuuucuuu

SEQ ID NO: 286599 - RNA, 32 nt, Homo Sapiens
uuauuuuauuuuuauuguaaaucuuagugugg

SEQ ID NO: 286600 - RNA, 32 nt, Homo Sapiens
uuuuauugucacauuucuuuucuuuguuaucu

SEQ ID NO: 286601 - RNA, 32 nt, Homo Sapiens
agauaaggaaagauuauggagaauguaguugu

SEQ ID NO: 286602 - RNA, 32 nt, Homo Sapiens
gcagccagcagcgcccacuggugugucacugc

SEQ ID NO: 286603 - RNA, 32 nt, Homo Sapiens
augacugcauagggaccaacacugccugacuu

SEQ ID NO: 286604 - RNA, 32 nt, Homo Sapiens
gguacacaaaggaguacagauguaacugggga

SEQ ID NO: 286605 - RNA, 32 nt, Homo Sapiens
uauguaaaaguugcuuucugcuuggcaagagc

SEQ ID NO: 286606 - RNA, 29 nt, Homo Sapiens
uucucauaaaguuagauuauuuuauucuu

SEQ ID NO: 286607 - RNA, 29 nt, Homo Sapiens
aaaaagaugaagaggaagaugaugaugua

SEQ ID NO: 286608 - RNA, 32 nt, Homo Sapiens
ucgaaugccuucugagggcuuuguagguucca

SEQ ID NO: 286609 - RNA, 32 nt, Homo Sapiens
uaaaauauuuuaaauuguuuucuguuaguuuc

SEQ ID NO: 286610 - RNA, 32 nt, Homo Sapiens
gggagagagggagagugacagcagcgcucgga

SEQ ID NO: 286611 - RNA, 32 nt, Homo Sapiens
ugcacuggcgugaucucggcucacugcaccuu

SEQ ID NO: 286612 - RNA, 32 nt, Homo Sapiens
cugggcuguuuuuuuucuuaaacacauuuuau

SEQ ID NO: 286613 - RNA, 32 nt, Homo Sapiens
ucgaggacuaguugggagauucugggguaauc

SEQ ID NO: 286614 - RNA, 32 nt, Homo Sapiens
ucagcuucuuguuccuuugggccgcgggcugu

SEQ ID NO: 286615 - RNA, 32 nt, Homo Sapiens
cucauugccuguccccaccccaucccagguca

SEQ ID NO: 286616 - RNA, 32 nt, Homo Sapiens
gccaaacccaacaaacuaacauuccuacuaaa

SEQ ID NO: 286617 - RNA, 32 nt, Homo Sapiens
acauuuccggugcugacucggccuuaaacguu

SEQ ID NO: 286618 - RNA, 32 nt, Homo Sapiens
auguggaaagacuauuagugguagcuaucaac

SEQ ID NO: 286619 - RNA, 32 nt, Homo Sapiens
uuuucaccaaaaugagccucaucccuuuaugc

SEQ ID NO: 286620 - RNA, 32 nt, Homo Sapiens
aaaacagaauaaaacuguucaauaaaaaaugc

SEQ ID NO: 286621 - RNA, 32 nt, Homo Sapiens
ucucugagccagcggcuucgggugcaggagca

SEQ ID NO: 286622 - RNA, 32 nt, Homo Sapiens
ucuuauacagaaaauaguugcaaggguaaggu

SEQ ID NO: 286623 - RNA, 32 nt, Homo Sapiens
uuguagaagaucugcugguccuugcaggcaaa

SEQ ID NO: 286624 - RNA, 32 nt, Homo Sapiens
gaagacacuaauaccgugcuauuucagauaug

SEQ ID NO: 286625 - RNA, 32 nt, Homo Sapiens
gauucaacuuuaguccucuccuucccccuaaa

SEQ ID NO: 286626 - RNA, 32 nt, Homo Sapiens
gccgccacugcccguaccuggacaccauuaac

SEQ ID NO: 286627 - RNA, 32 nt, Homo Sapiens
uugcauaaacacacuuugcuacaaucuugcua

SEQ ID NO: 286628 - RNA, 32 nt, Homo Sapiens
uuuguuguuuaauuaaaugugccguuauuuac

SEQ ID NO: 286629 - RNA, 32 nt, Homo Sapiens
agaguugugagggaugggacggaggcuggcga

SEQ ID NO: 286630 - RNA, 32 nt, Homo Sapiens
gucaaggugugagcgacgucuccucaccacag

SEQ ID NO: 286631 - RNA, 32 nt, Homo Sapiens
cuugcuuuaugacguuuauuuuccuguuaaag

SEQ ID NO: 286632 - RNA, 32 nt, Homo Sapiens
cagaauaaugauuuuauuucuacagcuuugua

SEQ ID NO: 286633 - RNA, 32 nt, Homo Sapiens
ccagcccgucucgccgccgccauggcggaccc

SEQ ID NO: 286634 - RNA, 32 nt, Homo Sapiens
ugaaggacacugaaaaaauguacaaaagugga

SEQ ID NO: 286635 - RNA, 32 nt, Homo Sapiens
uuugauuggacuacuuuuuuuuuuuuccucaa

SEQ ID NO: 286636 - RNA, 32 nt, Homo Sapiens
agacagccgcugcuucccgugagcgacaagag

SEQ ID NO: 286637 - RNA, 32 nt, Homo Sapiens
cugcgcaggaccagcgguucugcgaguuuccg

SEQ ID NO: 286638 - RNA, 32 nt, Homo Sapiens
ugucagccaugaagcugaaucucugggggugc

SEQ ID NO: 286639 - RNA, 29 nt, Homo Sapiens
gucauuguucaaguguauuuucuguaaca

SEQ ID NO: 286640 - RNA, 32 nt, Homo Sapiens
aagcacgugugagaauuuagagacacugugca

SEQ ID NO: 286641 - RNA, 32 nt, Homo Sapiens
cagaguacuuuuuucuuaugaugauuggugua

SEQ ID NO: 286642 - RNA, 32 nt, Homo Sapiens
ucuggcccagugaccacagagagaucugcacc

SEQ ID NO: 286643 - RNA, 32 nt, Homo Sapiens
auucaugccuguguguuuuucuuaaguaugaa

SEQ ID NO: 286644 - RNA, 32 nt, Homo Sapiens
ccuguucugggauacauuuacugugagcuuuu

SEQ ID NO: 286645 - RNA, 32 nt, Homo Sapiens
uaugaagaaugaucugaaguaauugugcugua

SEQ ID NO: 286646 - RNA, 32 nt, Homo Sapiens
ugucucugucccucacugccuuccaggagcaa

SEQ ID NO: 286647 - RNA, 32 nt, Homo Sapiens
cuuguuaggacacggccauuggggcaacaagg

SEQ ID NO: 286648 - RNA, 32 nt, Homo Sapiens
gaaauggaacuaaaugcaauccucagcaucgc

SEQ ID NO: 286649 - RNA, 32 nt, Homo Sapiens
gaggccccacugaugcuguucucuucuucauu

SEQ ID NO: 286650 - RNA, 32 nt, Homo Sapiens
ugcgccagugacuaaaaagagaauuaaauaug

SEQ ID NO: 286651 - RNA, 32 nt, Homo Sapiens
aaaugacuucaggaagaccucaggcuucauua

SEQ ID NO: 286652 - RNA, 32 nt, Homo Sapiens
cuuccugccuucacugcccccgcagcacucac

SEQ ID NO: 286653 - RNA, 32 nt, Homo Sapiens
cuggccgccgagggucgcggcgcccaggcugc

SEQ ID NO: 286654 - RNA, 27 nt, Homo Sapiens
uucugccccuucuucagcuccucccag

SEQ ID NO: 286655 - RNA, 32 nt, Homo Sapiens
cgugcugggcaggguccugcccggggggccug

SEQ ID NO: 286656 - RNA, 32 nt, Homo Sapiens
cuaaguacagugaauauaaucacuuggaugau

SEQ ID NO: 286657 - RNA, 32 nt, Homo Sapiens
ucuccagauaaagagcaaaaagaaauagauag

SEQ ID NO: 286658 - RNA, 32 nt, Homo Sapiens
agauucauucauacuucauuuauucauucaac

SEQ ID NO: 286659 - RNA, 32 nt, Homo Sapiens
cugaguucccgaaagcacuugcaacaaaaaca

SEQ ID NO: 286660 - RNA, 32 nt, Homo Sapiens
aaaagguucugugcccucagguggggcuuacc

SEQ ID NO: 286661 - RNA, 32 nt, Homo Sapiens
agagaggaagcagagagagcugaagauuaaaa

SEQ ID NO: 286662 - RNA, 32 nt, Homo Sapiens
ugucauugguggaggucugaaugugaggcugg

SEQ ID NO: 286663 - RNA, 32 nt, Homo Sapiens
ggaggagcgggaggagggacgagcuggucggg

SEQ ID NO: 286664 - RNA, 32 nt, Homo Sapiens
ugauuacuuuuggguuuugucuaccucaugug

SEQ ID NO: 286665 - RNA, 32 nt, Homo Sapiens
gcgcccgcccgcgcccggggugaugcaguugc

SEQ ID NO: 286666 - RNA, 32 nt, Homo Sapiens
gugcaugcagaggcuccuggaucugggaagcc

SEQ ID NO: 286667 - RNA, 32 nt, Homo Sapiens
aaaucggagcgcggccggggcgcgcgggggug

SEQ ID NO: 286668 - RNA, 32 nt, Homo Sapiens
uccucucaccucagccucccaaguaguugugc

SEQ ID NO: 286669 - RNA, 32 nt, Homo Sapiens
aaacuucacucucuucccauuaaacuugaacu

SEQ ID NO: 286670 - RNA, 32 nt, Homo Sapiens
gaucagaauaaaaacugacuagaaauaccguc

SEQ ID NO: 286671 - RNA, 32 nt, Homo Sapiens
aaaagaauuucauagauauuuuauauguaugg

SEQ ID NO: 286672 - RNA, 32 nt, Homo Sapiens
acguaucuaagcauauaguaaauauuacuagu

SEQ ID NO: 286673 - RNA, 32 nt, Homo Sapiens
caucuguauuccagccugggcaauagagcaag

SEQ ID NO: 286674 - RNA, 32 nt, Homo Sapiens
aauuucagaaacaugaacaggauaguucuccc

SEQ ID NO: 286675 - RNA, 32 nt, Homo Sapiens
gccuccucccgcccaggcgcccggccccgcaa

SEQ ID NO: 286676 - RNA, 32 nt, Homo Sapiens
ccugcccugugcccagccccagcugcauggac

SEQ ID NO: 286677 - RNA, 32 nt, Homo Sapiens
gccaauuggguccgcugacucuggccagguuc

SEQ ID NO: 286678 - RNA, 32 nt, Homo Sapiens
caggccaggggcccuggaaggguguggccaac

SEQ ID NO: 286679 - RNA, 32 nt, Homo Sapiens
agguuuugcccauuuuuaauuggauugcucau

SEQ ID NO: 286680 - RNA, 32 nt, Homo Sapiens
caaacuucuuaccaaagaaaaugaaaagaucu

SEQ ID NO: 286681 - RNA, 32 nt, Homo Sapiens
ugaacuuguuuuuaaauuaccaaguaauuacu

SEQ ID NO: 286682 - RNA, 32 nt, Homo Sapiens
uggcuaaagagaugagacaaacaugcaggucg

SEQ ID NO: 286683 - RNA, 32 nt, Homo Sapiens
aggggaugcaggauggagucuagacaagccaa

SEQ ID NO: 286684 - RNA, 32 nt, Homo Sapiens
caggcauugucauggugaaugccccgcuguag

SEQ ID NO: 286685 - RNA, 32 nt, Homo Sapiens
cccaguuguaaauuacuguuuacacacauuuu

SEQ ID NO: 286686 - RNA, 32 nt, Homo Sapiens
uaccagcccucccagcagccacaagcuugccc

SEQ ID NO: 286687 - RNA, 30 nt, Homo Sapiens
ucccauuuauagaugggggaaagcaaagca

SEQ ID NO: 286688 - RNA, 32 nt, Homo Sapiens
ggccucccaauguucccgagccaggaacucug

SEQ ID NO: 286689 - RNA, 32 nt, Homo Sapiens
acgcgggcccuaauugauaguguucuuuucuu

SEQ ID NO: 286690 - RNA, 32 nt, Homo Sapiens
aauauuugccucaaggauuguuuaccuaaaac

SEQ ID NO: 286691 - RNA, 32 nt, Homo Sapiens
caccaccagacaaauauagacccuuuaacacu

SEQ ID NO: 286692 - RNA, 32 nt, Homo Sapiens
cccacguggccgcgaagaccggcucaggagca

SEQ ID NO: 286693 - RNA, 30 nt, Homo Sapiens
uggagggaaaggguagcugagucugcuuag

SEQ ID NO: 286694 - RNA, 32 nt, Homo Sapiens
aguuugccucucucuuuuuuucccccaaauua

SEQ ID NO: 286695 - RNA, 32 nt, Homo Sapiens
cguucucugccccucccugcccgcguuucagg

SEQ ID NO: 286696 - RNA, 32 nt, Homo Sapiens
gcaccuccaccuugggccuccauccucuacca

SEQ ID NO: 286697 - RNA, 32 nt, Homo Sapiens
aguuagggaaagaguauaaauagccagccagg

SEQ ID NO: 286698 - RNA, 32 nt, Homo Sapiens
uuuauucaagauacaacagugagggaauccgg

SEQ ID NO: 286699 - RNA, 32 nt, Homo Sapiens
ggcuaggcugcuggcuggcccuggcucccaca

SEQ ID NO: 286700 - RNA, 31 nt, Homo Sapiens
ggccgggcacuuauaaacucgagcccuggcc

SEQ ID NO: 286701 - RNA, 32 nt, Homo Sapiens
uucccagaggcuggucccagccaggcacacac

SEQ ID NO: 286702 - RNA, 32 nt, Homo Sapiens
accaauuauguauagucauaaaaauuacaauu

SEQ ID NO: 286703 - RNA, 32 nt, Homo Sapiens
uuaugcacugccccucccacccggccccgccc

SEQ ID NO: 286704 - RNA, 32 nt, Homo Sapiens
uuauuagggucucaauacuuucucaaggggcu

SEQ ID NO: 286705 - RNA, 32 nt, Homo Sapiens
aucauuuuguguauauuguugaaaugcuuuuu

SEQ ID NO: 286706 - RNA, 32 nt, Homo Sapiens
ccaguggcggcugguaucccgcggcggcucug

SEQ ID NO: 286707 - RNA, 29 nt, Homo Sapiens
gguuuaugaaguuuauaaaaucuacauau

SEQ ID NO: 286708 - RNA, 32 nt, Homo Sapiens
cuccgcgucggguggcacagaagauguuggca

SEQ ID NO: 286709 - RNA, 32 nt, Homo Sapiens
ccaccggcccuguccugcuugccgccccagcg

SEQ ID NO: 286710 - RNA, 32 nt, Homo Sapiens
ccuuugccuuggaaguugcauggcaucaccuc

SEQ ID NO: 286711 - RNA, 32 nt, Homo Sapiens
cccgggcuggagaggaaggggcaccacccacu

SEQ ID NO: 286712 - RNA, 32 nt, Homo Sapiens
ucaucuaaaaagacaacuuggaaagcugauaa

SEQ ID NO: 286713 - RNA, 32 nt, Homo Sapiens
caugguguuagaguugcaaacuuuuuagcaag

SEQ ID NO: 286714 - RNA, 32 nt, Homo Sapiens
aaacuaucaacaacaaggaagucugcucugua

SEQ ID NO: 286715 - RNA, 32 nt, Homo Sapiens
uuugaaaggauuauuuuguaaggaauaacuuu

SEQ ID NO: 286716 - RNA, 32 nt, Homo Sapiens
cuuuucaaauguccaucaauugauggggaagg

SEQ ID NO: 286717 - RNA, 32 nt, Homo Sapiens
gccuggagacauuuuccccaugguguugggga

SEQ ID NO: 286718 - RNA, 32 nt, Homo Sapiens
ggcagaacagagccccaauguuucuaaagaaa

SEQ ID NO: 286719 - RNA, 32 nt, Homo Sapiens
ccucccuuccagcccaggccuccuugagcucc

SEQ ID NO: 286720 - RNA, 32 nt, Homo Sapiens
uacuugccacuuaagcaaggaacuugucaaga

SEQ ID NO: 286721 - RNA, 32 nt, Homo Sapiens
aggcuccagcccuccacccccacccgaguugc

SEQ ID NO: 286722 - RNA, 32 nt, Homo Sapiens
acauaauuuaaucuuugccauccuuagauaga

SEQ ID NO: 286723 - RNA, 32 nt, Homo Sapiens
cuacagcggaugcuggcgugucugcucaggcg

SEQ ID NO: 286724 - RNA, 32 nt, Homo Sapiens
guaugcuucauccccaggaugcaagguugccu

SEQ ID NO: 286725 - RNA, 32 nt, Homo Sapiens
gguaaccgcuccugggagcaguggggaacugu

SEQ ID NO: 286726 - RNA, 32 nt, Homo Sapiens
aggggggcgggcagcccucccuggcugccagg

SEQ ID NO: 286727 - RNA, 32 nt, Homo Sapiens
uccaggcaagcaugcaaaaacacauugauaau

SEQ ID NO: 286728 - RNA, 32 nt, Homo Sapiens
ucgcuaccaggaacagaagagauuaaaugaua

SEQ ID NO: 286729 - RNA, 32 nt, Homo Sapiens
cgggacguucucggcucugugcguucaguccc

SEQ ID NO: 286730 - RNA, 32 nt, Homo Sapiens
cauagcucaguggucaagacuugggcuuggga

SEQ ID NO: 286731 - RNA, 32 nt, Homo Sapiens
ccuuucagcucgugccuucucuggggccuccc

SEQ ID NO: 286732 - RNA, 32 nt, Homo Sapiens
aaauccggguucagaacacuuuuuaugacaaa

SEQ ID NO: 286733 - RNA, 32 nt, Homo Sapiens
cccacaacucuggcagcggacccggcacuucc

SEQ ID NO: 286734 - RNA, 32 nt, Homo Sapiens
ucuguucucucgaagauagugaauacaggcca

SEQ ID NO: 286735 - RNA, 32 nt, Homo Sapiens
gaaucacugcaaaaugaauccagauugcuguc

SEQ ID NO: 286736 - RNA, 32 nt, Homo Sapiens
aggaagaauucagucacugccugggcugugug

SEQ ID NO: 286737 - RNA, 32 nt, Homo Sapiens
ggauauugacauuaagaaaguaaauggaguuc

SEQ ID NO: 286738 - RNA, 32 nt, Homo Sapiens
ugcgccccacgccagcccgcgccccgcauggc

SEQ ID NO: 286739 - RNA, 32 nt, Homo Sapiens
uagaccugcuccaaacuagugacuaggauaga

SEQ ID NO: 286740 - RNA, 27 nt, Homo Sapiens
agauggcggacguggucguggguaaag

SEQ ID NO: 286741 - RNA, 32 nt, Homo Sapiens
ugccaauuaauuuucucagaaaucggggacuc

SEQ ID NO: 286742 - RNA, 32 nt, Homo Sapiens
uuuuuacagacaccuauuuugggcucaguuuu

SEQ ID NO: 286743 - RNA, 32 nt, Homo Sapiens
ccuuuugcaucauauggguaucuaaacuuaau

SEQ ID NO: 286744 - RNA, 32 nt, Homo Sapiens
cuugauaacacaaagaaaacagugucaacgag

SEQ ID NO: 286745 - RNA, 32 nt, Homo Sapiens
uccccacccucuuuuuacuaacuccccucccc

SEQ ID NO: 286746 - RNA, 32 nt, Homo Sapiens
acaaccaccaucaucgcagccacagccccagc

SEQ ID NO: 286747 - RNA, 32 nt, Homo Sapiens
gcaacauagugucagccaaagcucauuugcau

SEQ ID NO: 286748 - RNA, 32 nt, Homo Sapiens
cacccgagacucuccgcucugagcgaccccag

SEQ ID NO: 286749 - RNA, 31 nt, Homo Sapiens
gaucacuccaccugccugcccugcccauaaa

SEQ ID NO: 286750 - RNA, 32 nt, Homo Sapiens
ccucuggugggaagagcggcgccuagguggag

SEQ ID NO: 286751 - RNA, 32 nt, Homo Sapiens
cccuggaggcugccuccugcccuggaucugga

SEQ ID NO: 286752 - RNA, 32 nt, Homo Sapiens
cacccguucacccccaggaugcuguugcugua

SEQ ID NO: 286753 - RNA, 32 nt, Homo Sapiens
cggcucugggcacucagcaucguuuccuuuuc

SEQ ID NO: 286754 - RNA, 32 nt, Homo Sapiens
gccuauacagaaaaucauggggagugauuucu

SEQ ID NO: 286755 - RNA, 32 nt, Homo Sapiens
aaguagaauuuucacuuuauguuagaagagag

SEQ ID NO: 286756 - RNA, 31 nt, Homo Sapiens
uucaccgagcgcagcgaagccgagacccggg

SEQ ID NO: 286757 - RNA, 29 nt, Homo Sapiens
agcgcggcucagagucggacgaggggaga

SEQ ID NO: 286758 - RNA, 32 nt, Homo Sapiens
uggucccuauguuggaaguaaaaagugaagca

SEQ ID NO: 286759 - RNA, 32 nt, Homo Sapiens
uuccucacgugauugggugagacccaugaaau

SEQ ID NO: 286760 - RNA, 32 nt, Homo Sapiens
ugaacuggucuuccuuuuugguuuuuacuuaa

SEQ ID NO: 286761 - RNA, 32 nt, Homo Sapiens
gagccgggggccggaggcuuaggggcucuggc

SEQ ID NO: 286762 - RNA, 30 nt, Homo Sapiens
acuucaugccucaggauuugggagaauacc

SEQ ID NO: 286763 - RNA, 32 nt, Homo Sapiens
aauggccgcccggagcguguucggcgcgguuc

SEQ ID NO: 286764 - RNA, 32 nt, Homo Sapiens
uaauuacuguuuucuuuuuucuuaaccuacua

SEQ ID NO: 286765 - RNA, 28 nt, Homo Sapiens
accauguccugggcuccuguccugcuca

SEQ ID NO: 286766 - RNA, 32 nt, Homo Sapiens
uaucuaggagucucuugaugagcauuggucga

SEQ ID NO: 286767 - RNA, 32 nt, Homo Sapiens
aagaaucuaaaauggguggggaggguggaaga

SEQ ID NO: 286768 - RNA, 32 nt, Homo Sapiens
ccggcgggcugcucgcgccggugaggccugcg

SEQ ID NO: 286769 - RNA, 32 nt, Homo Sapiens
gagaagcaaccaacuggaguuaauugcccauu

SEQ ID NO: 286770 - RNA, 32 nt, Homo Sapiens
auuucauaaaauuggcaucaauuuuaaugacg

SEQ ID NO: 286771 - RNA, 32 nt, Homo Sapiens
gauucaucacaugaacaaaacuaaagauaaaa

SEQ ID NO: 286772 - RNA, 32 nt, Homo Sapiens
uaguaacagacggaaagaaaaaauaaauuauc

SEQ ID NO: 286773 - RNA, 32 nt, Homo Sapiens
aucagguaccuccucccuuucaucucagcaag

SEQ ID NO: 286774 - RNA, 32 nt, Homo Sapiens
cagcacgaggcaggcacuuuuacuucuuuuac

SEQ ID NO: 286775 - RNA, 32 nt, Homo Sapiens
gcgcucggcccucaagugcccgggccggccuu

SEQ ID NO: 286776 - RNA, 32 nt, Homo Sapiens
ccguuccccgcgauggccgcgggccgcagucg

SEQ ID NO: 286777 - RNA, 32 nt, Homo Sapiens
cuauauuuacacaaagauuagcuugcaggaaa

SEQ ID NO: 286778 - RNA, 32 nt, Homo Sapiens
gggguaguggggaggucagggaggcggggcca

SEQ ID NO: 286779 - RNA, 32 nt, Homo Sapiens
gugucacagggccugugcuccucccuccucca

SEQ ID NO: 286780 - RNA, 32 nt, Homo Sapiens
ugugggagggugggcagggaggggucccagag

SEQ ID NO: 286781 - RNA, 32 nt, Homo Sapiens
auuuugucauuuuggccaaacaaaagacacug

SEQ ID NO: 286782 - RNA, 32 nt, Homo Sapiens
cgcccucgccugguccggcccggcccugggca

SEQ ID NO: 286783 - RNA, 32 nt, Homo Sapiens
caucaaaauauguucuagaucuuugacagacu

SEQ ID NO: 286784 - RNA, 32 nt, Homo Sapiens
uuuggaagauaaaaaauauaucccaguaguaa

SEQ ID NO: 286785 - RNA, 32 nt, Homo Sapiens
gcagacaccuccacgcuuuguuuuccacggca

SEQ ID NO: 286786 - RNA, 32 nt, Homo Sapiens
acuacuuuuggaacuggaagggggaaaucugu

SEQ ID NO: 286787 - RNA, 32 nt, Homo Sapiens
gugggcagccucucucggggggcggcgugaga

SEQ ID NO: 286788 - RNA, 32 nt, Homo Sapiens
ucuuuguucaauuucagagaucaauagcuauu

SEQ ID NO: 286789 - RNA, 32 nt, Homo Sapiens
gagaggggagauuuaaaggaccagggacaugg

SEQ ID NO: 286790 - RNA, 32 nt, Homo Sapiens
gcggcgcgaagaggccgcgcugugccaccagc

SEQ ID NO: 286791 - RNA, 32 nt, Homo Sapiens
ccuggcauuuccccucccucucccugaugacu

SEQ ID NO: 286792 - RNA, 32 nt, Homo Sapiens
cccaagaaaggaggcaacauggcugccauaaa

SEQ ID NO: 286793 - RNA, 32 nt, Homo Sapiens
uuagucuguauauuuuguucuucauagucugu

SEQ ID NO: 286794 - RNA, 32 nt, Homo Sapiens
ggugucuacaaaugucuucaugaccuacuuca

SEQ ID NO: 286795 - RNA, 32 nt, Homo Sapiens
cagucucauccugcccuugccauccucccauc

SEQ ID NO: 286796 - RNA, 29 nt, Homo Sapiens
cagccugggcgacagagggggacucuguc

SEQ ID NO: 286797 - RNA, 32 nt, Homo Sapiens
aacucugcaggcagauuuacugucccaggagc

SEQ ID NO: 286798 - RNA, 32 nt, Homo Sapiens
uccaucuuuuaaaaauauauuuugccauuaau

SEQ ID NO: 286799 - RNA, 32 nt, Homo Sapiens
aagagaccguggcuauggaaacggccaaggcu

SEQ ID NO: 286800 - RNA, 32 nt, Homo Sapiens
cuucuuccccuguagaugugggcuuguugccu

SEQ ID NO: 286801 - RNA, 32 nt, Homo Sapiens
agaauagagguuaacauuuaaaaaauauccua

SEQ ID NO: 286802 - RNA, 32 nt, Homo Sapiens
ccuagugcucuucggcagcugcaccuucugcc

SEQ ID NO: 286803 - RNA, 32 nt, Homo Sapiens
gagugcugcugacuucaacguucacuuuaugc

SEQ ID NO: 286804 - RNA, 32 nt, Homo Sapiens
uuuggaauugcaauguaguuauuaagggcugu

SEQ ID NO: 286805 - RNA, 28 nt, Homo Sapiens
ccccaggagaggcccaggaugagccuca

SEQ ID NO: 286806 - RNA, 32 nt, Homo Sapiens
caagaaaagugcuagaauaaauaagauuacag

SEQ ID NO: 286807 - RNA, 32 nt, Homo Sapiens
gaccugggucaaguucccacuccugcucccau

SEQ ID NO: 286808 - RNA, 32 nt, Homo Sapiens
auagacccgaggugaaaaggcuuuuguucaau

SEQ ID NO: 286809 - RNA, 32 nt, Homo Sapiens
gggccugccgcagcugacggggaaacugaggc

SEQ ID NO: 286810 - RNA, 32 nt, Homo Sapiens
cagguguucuccagugccaaguacccugcucc

SEQ ID NO: 286811 - RNA, 32 nt, Homo Sapiens
uuauacauuguuauguccaguuaugucaauaa

SEQ ID NO: 286812 - RNA, 32 nt, Homo Sapiens
cagaguagcccuuuccucuguucuuuuauuuc

SEQ ID NO: 286813 - RNA, 32 nt, Homo Sapiens
cauaugacgcagaaccccaacuguuacaacuu

SEQ ID NO: 286814 - RNA, 31 nt, Homo Sapiens
ugucuucuugucuauuaauagaugcauuuaa

SEQ ID NO: 286815 - RNA, 29 nt, Homo Sapiens
uggggagggacacagaggacggcuucccc

SEQ ID NO: 286816 - RNA, 32 nt, Homo Sapiens
aaaguggagauaaaaacugcuaaauauuaaga

SEQ ID NO: 286817 - RNA, 32 nt, Homo Sapiens
guggaggagcuacggcgccgccggcgggagcg

SEQ ID NO: 286818 - RNA, 32 nt, Homo Sapiens
gggcuuggcacccucacagacacgcggggcug

SEQ ID NO: 286819 - RNA, 32 nt, Homo Sapiens
uguuggcuuggaugcugugugccugucaagau

SEQ ID NO: 286820 - RNA, 32 nt, Homo Sapiens
gccugauuaaagaguuucugccuguuaaaaaa

SEQ ID NO: 286821 - RNA, 32 nt, Homo Sapiens
uugcuuugcauaucagaaaaacuccauuuuuu

SEQ ID NO: 286822 - RNA, 32 nt, Homo Sapiens
auacaccacauacuagcuucuuucucuauaag

SEQ ID NO: 286823 - RNA, 32 nt, Homo Sapiens
uacaguggcucugcacccucggucauuguaca

SEQ ID NO: 286824 - RNA, 32 nt, Homo Sapiens
ucaccuccccucgggcucugggcaacugucaa

SEQ ID NO: 286825 - RNA, 32 nt, Homo Sapiens
gcuuucaaaacggggcacaucuggcugggaag

SEQ ID NO: 286826 - RNA, 32 nt, Homo Sapiens
acuaaucuccccuccgccgcucccagcugcca

SEQ ID NO: 286827 - RNA, 32 nt, Homo Sapiens
uccuaauuugaauagugccuucuggccuugau

SEQ ID NO: 286828 - RNA, 32 nt, Homo Sapiens
cagauaaauuuauggacuucucuuuugaaaag

SEQ ID NO: 286829 - RNA, 32 nt, Homo Sapiens
ggggagggaaggagaccccugcaggcucccuc

SEQ ID NO: 286830 - RNA, 32 nt, Homo Sapiens
caggcuggggacguucaccacccagaacgccu

SEQ ID NO: 286831 - RNA, 32 nt, Homo Sapiens
aaguagagaaaguucugaaccaaugccaagaa

SEQ ID NO: 286832 - RNA, 32 nt, Homo Sapiens
ccuccucccgucugacgccccucaggggaccc

SEQ ID NO: 286833 - RNA, 32 nt, Homo Sapiens
gccgcagagucccagcccccagcccugcucac

SEQ ID NO: 286834 - RNA, 32 nt, Homo Sapiens
cuccggaggacaggaccgcgcgacuggccggc

SEQ ID NO: 286835 - RNA, 32 nt, Homo Sapiens
ccucccgggcccuccauggcccgggccgcugc

SEQ ID NO: 286836 - RNA, 32 nt, Homo Sapiens
gucgugcccugccaguggggcccccgcagcuc

SEQ ID NO: 286837 - RNA, 32 nt, Homo Sapiens
ucccugcacucgcucccggcggcucuucgcgu

SEQ ID NO: 286838 - RNA, 32 nt, Homo Sapiens
cuugugaagaaggcaccaugcauugugcucug

SEQ ID NO: 286839 - RNA, 32 nt, Homo Sapiens
uggaagugggucccuucguaccucugguccuc

SEQ ID NO: 286840 - RNA, 32 nt, Homo Sapiens
cucccuggaccuuuccuagccagccgcacagu

SEQ ID NO: 286841 - RNA, 32 nt, Homo Sapiens
uuuuaauuacaauuauacuaacaauacacaug

SEQ ID NO: 286842 - RNA, 27 nt, Homo Sapiens
acuaucuccuucuucacuuucauggcg

SEQ ID NO: 286843 - RNA, 32 nt, Homo Sapiens
cugcuuggaaaucuuuuuguuuguucuucuau

SEQ ID NO: 286844 - RNA, 32 nt, Homo Sapiens
uggaaaguaagggaagcagaaggaaggcuuug

SEQ ID NO: 286845 - RNA, 32 nt, Homo Sapiens
cucagaacaauggagcaauaaagcagaaggag

SEQ ID NO: 286846 - RNA, 32 nt, Homo Sapiens
uccuucccgccgcccccucccccgcaccauga

SEQ ID NO: 286847 - RNA, 32 nt, Homo Sapiens
cuaacaugcaugugcuguaaaaauaguuaaca

SEQ ID NO: 286848 - RNA, 32 nt, Homo Sapiens
cgcaguuugaccccacgcccagcccuucuggc

SEQ ID NO: 286849 - RNA, 32 nt, Homo Sapiens
ucacacguggggucagcagagguaccacgaag

SEQ ID NO: 286850 - RNA, 32 nt, Homo Sapiens
gccuaaagaacacuuauucagaaaugcaggcc

SEQ ID NO: 286851 - RNA, 32 nt, Homo Sapiens
ggaaucuccgaucuguggagaagucuccucag

SEQ ID NO: 286852 - RNA, 32 nt, Homo Sapiens
uuaaagaaccaucagcaucacccgggaacuuu

SEQ ID NO: 286853 - RNA, 32 nt, Homo Sapiens
gaucgaugcuauagaagacaaacaaggaaagg

SEQ ID NO: 286854 - RNA, 32 nt, Homo Sapiens
ugaaugagugagauccuggaggacccuggccc

SEQ ID NO: 286855 - RNA, 32 nt, Homo Sapiens
gaacugaauucuuaaacauaaaacagauaaaa

SEQ ID NO: 286856 - RNA, 32 nt, Homo Sapiens
cuuuuggaacaaaaaauuagguacaugauaac

SEQ ID NO: 286857 - RNA, 32 nt, Homo Sapiens
ccuuaaaguuuuccuuuuuuuaguaauuauuu

SEQ ID NO: 286858 - RNA, 32 nt, Homo Sapiens
cccguguuuuuaaaggagggaacuuuggggau

SEQ ID NO: 286859 - RNA, 32 nt, Homo Sapiens
caaaagucaggagcaguaaucugagaaaguua

SEQ ID NO: 286860 - RNA, 32 nt, Homo Sapiens
ggccuggccuccccgucgaccucagugccuuu

SEQ ID NO: 286861 - RNA, 32 nt, Homo Sapiens
ggugcuuuugcccaagcuuugaccacacgucu

SEQ ID NO: 286862 - RNA, 32 nt, Homo Sapiens
uucacucaacugaguuagcauugucuuugugg

SEQ ID NO: 286863 - RNA, 32 nt, Homo Sapiens
auggcagcucugcgccaggccacagcagccgc

SEQ ID NO: 286864 - RNA, 32 nt, Homo Sapiens
gcuauuaugaacaaaauuuuuccuguuaaaua

SEQ ID NO: 286865 - RNA, 32 nt, Homo Sapiens
gccaguuccucucccgccgcgccgggccgcgu

SEQ ID NO: 286866 - RNA, 32 nt, Homo Sapiens
ugcuguguucugcuccuccccacgcuucccug

SEQ ID NO: 286867 - RNA, 29 nt, Homo Sapiens
aaaauaaauguuugcaauuuucuacagaa

SEQ ID NO: 286868 - RNA, 32 nt, Homo Sapiens
ugccuguaauuccagcacuuugggaggcuaag

SEQ ID NO: 286869 - RNA, 32 nt, Homo Sapiens
ugucuguaauccuagcacuuugggaggccaag

SEQ ID NO: 286870 - RNA, 32 nt, Homo Sapiens
uugcuuaucucaccauuggauauuugcaaagu

SEQ ID NO: 286871 - RNA, 26 nt, Homo Sapiens
aaagaaaaucaacuugcuacuacaug

SEQ ID NO: 286872 - RNA, 32 nt, Homo Sapiens
guuggcacuucuaaguuuuacuuuuuguaugu

SEQ ID NO: 286873 - RNA, 32 nt, Homo Sapiens
ccugggcuucacacaagaaccaccucucccgc

SEQ ID NO: 286874 - RNA, 28 nt, Homo Sapiens
gccaugucucugaccaagacugagagga

SEQ ID NO: 286875 - RNA, 32 nt, Homo Sapiens
uccacucguccgcacgguacgucuucauggga

SEQ ID NO: 286876 - RNA, 32 nt, Homo Sapiens
acuacuuccucauuuuaagguauggcaguucc

SEQ ID NO: 286877 - RNA, 32 nt, Homo Sapiens
aggcuuuuuuuuucuucaaccccauuuucuuc

SEQ ID NO: 286878 - RNA, 32 nt, Homo Sapiens
ugcagggaaaauuugaaagaaauuacuuccug

SEQ ID NO: 286879 - RNA, 32 nt, Homo Sapiens
ccaaggucaugccucuguccuguccccugagc

SEQ ID NO: 286880 - RNA, 30 nt, Homo Sapiens
ucugcguccugugcugauaaaggcucgccg

SEQ ID NO: 286881 - RNA, 32 nt, Homo Sapiens
auccaucuccugguguucugcagucaucuccc

SEQ ID NO: 286882 - RNA, 32 nt, Homo Sapiens
gggguccgcccgggcugguggaccucggggcc

SEQ ID NO: 286883 - RNA, 32 nt, Homo Sapiens
ucugacuuugggggcaccauggaccaaagugg

SEQ ID NO: 286884 - RNA, 32 nt, Homo Sapiens
gaucucccaucccaucuaucuuguaaccaaac

SEQ ID NO: 286885 - RNA, 32 nt, Homo Sapiens
aauagcaaugauucacacucacagcaaugaug

SEQ ID NO: 286886 - RNA, 32 nt, Homo Sapiens
cccuccagcccccucgccggugaccuuggccg

SEQ ID NO: 286887 - RNA, 32 nt, Homo Sapiens
cuccacauuuuucagugcauaauugaguuuuc

SEQ ID NO: 286888 - RNA, 32 nt, Homo Sapiens
uuguuucuauuaugaccauuuaauuuuguuuu

SEQ ID NO: 286889 - RNA, 32 nt, Homo Sapiens
uacuuggucccuggcacaaagcagccaucuga

SEQ ID NO: 286890 - RNA, 32 nt, Homo Sapiens
ccccggcagcgcggggcggccgcuucuccugu

SEQ ID NO: 286891 - RNA, 31 nt, Homo Sapiens
uuuaugugaaacauucagaaguugcuugcau

SEQ ID NO: 286892 - RNA, 32 nt, Homo Sapiens
guuuugccacagagccguaaaggcgcgcggga

SEQ ID NO: 286893 - RNA, 32 nt, Homo Sapiens
ucuagcaaaaauacaaaaauuagucaggagug

SEQ ID NO: 286894 - RNA, 32 nt, Homo Sapiens
gagccaggucgcccugaagguuuuccaaaggg

SEQ ID NO: 286895 - RNA, 32 nt, Homo Sapiens
cuguaaaauauuauuuaaaugcugcugggcau

SEQ ID NO: 286896 - RNA, 32 nt, Homo Sapiens
gacccuguuggcaagucuguaccuguuggucc

SEQ ID NO: 286897 - RNA, 32 nt, Homo Sapiens
uuuguaaugcaaauggagcucagucuaauaaa

SEQ ID NO: 286898 - RNA, 25 nt, Homo Sapiens
gcaaccagcucagagaaccaaccac

SEQ ID NO: 286899 - RNA, 32 nt, Homo Sapiens
auaauuauuuuuguuaacaaagacacuaaaac

SEQ ID NO: 286900 - RNA, 32 nt, Homo Sapiens
aagcagaaagacugcugagguaacacggaccc

SEQ ID NO: 286901 - RNA, 32 nt, Homo Sapiens
accccguuucuaaaauaaaaauaaaaaacaaa

SEQ ID NO: 286902 - RNA, 32 nt, Homo Sapiens
guaguaauuacaaagugugaauuaaaaaccca

SEQ ID NO: 286903 - RNA, 32 nt, Homo Sapiens
ugaauauuguguauuucauacuauucuuuaaa

SEQ ID NO: 286904 - RNA, 32 nt, Homo Sapiens
uguuggaagaaggaaccugccuuagcucaguu

SEQ ID NO: 286905 - RNA, 32 nt, Homo Sapiens
agagaguucgcaguggggagaagugcugggua

SEQ ID NO: 286906 - RNA, 32 nt, Homo Sapiens
cacccgcacaugccguggggcagagaugcucu

SEQ ID NO: 286907 - RNA, 32 nt, Homo Sapiens
ccagagcaagaucugggcaagcagagagugcc

SEQ ID NO: 286908 - RNA, 32 nt, Homo Sapiens
uguucuaaaacacuuucuaagccugccuguuu

SEQ ID NO: 286909 - RNA, 32 nt, Homo Sapiens
augguaacugcaccugggcagcuccucccugu

SEQ ID NO: 286910 - RNA, 32 nt, Homo Sapiens
cauccugaaauauaauucagauaauaugaaaa

SEQ ID NO: 286911 - RNA, 32 nt, Homo Sapiens
ugcccuggguggcagccccagccugccacuca

SEQ ID NO: 286912 - RNA, 32 nt, Homo Sapiens
ggcuguggucuccucugcaaagcauuuuaauu

SEQ ID NO: 286913 - RNA, 32 nt, Homo Sapiens
gcaccaccccucaggaauggugugguggcguc

SEQ ID NO: 286914 - RNA, 32 nt, Homo Sapiens
uuacaaagggcacaacuacgacauucaaacaa

SEQ ID NO: 286915 - RNA, 32 nt, Homo Sapiens
uuuuuagagauuuuuuuuuuuaauuuuggagg

SEQ ID NO: 286916 - RNA, 32 nt, Homo Sapiens
ggcgugaggugcuuugggguccauucuuuguc

SEQ ID NO: 286917 - RNA, 32 nt, Homo Sapiens
cuuucuugauaaauauuugcuaucguuuuacu

SEQ ID NO: 286918 - RNA, 32 nt, Homo Sapiens
uuuuuucccagcuguuaaauucuuggcuauuu

SEQ ID NO: 286919 - RNA, 32 nt, Homo Sapiens
cgccugcgcugcgcuagggcgcggcgggcggu

SEQ ID NO: 286920 - RNA, 32 nt, Homo Sapiens
ccagcugccugccugccucuuaggaguccuca

SEQ ID NO: 286921 - RNA, 32 nt, Homo Sapiens
accgguugacuguugccuuccacacaaacagc

SEQ ID NO: 286922 - RNA, 32 nt, Homo Sapiens
gcgacgcgccgacgccgguguuuugcaguccu

SEQ ID NO: 286923 - RNA, 32 nt, Homo Sapiens
accucuguccuuuccauccccaucccugcuca

SEQ ID NO: 286924 - RNA, 31 nt, Homo Sapiens
ccacccugguacugccuggugccugccacaa

SEQ ID NO: 286925 - RNA, 32 nt, Homo Sapiens
uauuuuuaacacuuaaauuucuuggcaaauuu

SEQ ID NO: 286926 - RNA, 32 nt, Homo Sapiens
uuguaaauuacaucugucaugguuucuuggag

SEQ ID NO: 286927 - RNA, 28 nt, Homo Sapiens
gaggggcggcggccgcgcugcucccuga

SEQ ID NO: 286928 - RNA, 32 nt, Homo Sapiens
gugccagugccccugccugccgugccaggccc

SEQ ID NO: 286929 - RNA, 32 nt, Homo Sapiens
aaggaacaaggugaggaaaaagagacugaccc

SEQ ID NO: 286930 - RNA, 32 nt, Homo Sapiens
cugccggagccgugguggcagccccgggagga

SEQ ID NO: 286931 - RNA, 32 nt, Homo Sapiens
uuugacauuuuacugcuucuuucugucugugu

SEQ ID NO: 286932 - RNA, 32 nt, Homo Sapiens
gccugcugcuucuccaccuccccuccccaccu

SEQ ID NO: 286933 - RNA, 32 nt, Homo Sapiens
gggguaaacugggaauaacaugaaaagauuuc

SEQ ID NO: 286934 - RNA, 32 nt, Homo Sapiens
acaagauugaacaaaauguuuucuguuugggc

SEQ ID NO: 286935 - RNA, 32 nt, Homo Sapiens
ucucaagcggcuuccgcucgugguggaaggug

SEQ ID NO: 286936 - RNA, 32 nt, Homo Sapiens
gugugcagcguggcgcucucggagcacgaacg

SEQ ID NO: 286937 - RNA, 32 nt, Homo Sapiens
cgaguuugauguucuguaaguguaaaaugcac

SEQ ID NO: 286938 - RNA, 32 nt, Homo Sapiens
uuuggaaugacuauaaacauuaaaagagacug

SEQ ID NO: 286939 - RNA, 32 nt, Homo Sapiens
acauaaaggaacaguugugcucugcccacaaa

SEQ ID NO: 286940 - RNA, 32 nt, Homo Sapiens
ucaguggggcucucugaguccuggcccaaaga

SEQ ID NO: 286941 - RNA, 32 nt, Homo Sapiens
aauuguuuuguuucuauuagcauauuuuuugu

SEQ ID NO: 286942 - RNA, 28 nt, Homo Sapiens
gcugugaaagauuacagauuugaacaug

SEQ ID NO: 286943 - RNA, 32 nt, Homo Sapiens
caguugcugguggagagacaagaggagaagga

SEQ ID NO: 286944 - RNA, 32 nt, Homo Sapiens
ggaaaacaaauauuucacuuaaacuuugucac

SEQ ID NO: 286945 - RNA, 32 nt, Homo Sapiens
ucugguuguaaguucagccuuugguguuugca

SEQ ID NO: 286946 - RNA, 32 nt, Homo Sapiens
uuucuuuugagacugugaauuauuuaaaacug

SEQ ID NO: 286947 - RNA, 32 nt, Homo Sapiens
ccgggaaggaggagacccccgugggcacgugu

SEQ ID NO: 286948 - RNA, 32 nt, Homo Sapiens
uuucugcccucccuggugagccacugugggcc

SEQ ID NO: 286949 - RNA, 32 nt, Homo Sapiens
uugacacugugagcgcacgcgcgggcacacac

SEQ ID NO: 286950 - RNA, 32 nt, Homo Sapiens
caacgcuccgggugccugucuugucugugugg

SEQ ID NO: 286951 - RNA, 32 nt, Homo Sapiens
aacucauuaugaaaaguggaaaguaugagcug

SEQ ID NO: 286952 - RNA, 32 nt, Homo Sapiens
cugcccugcaguccccugacuccagcucugga

SEQ ID NO: 286953 - RNA, 32 nt, Homo Sapiens
gcaucuccugcuccuggacacccaggccugcc

SEQ ID NO: 286954 - RNA, 32 nt, Homo Sapiens
gccauucccgcacugacaaacgucugcccugg

SEQ ID NO: 286955 - RNA, 32 nt, Homo Sapiens
aggcggaggcugcagugagcugugauugugcc

SEQ ID NO: 286956 - RNA, 32 nt, Homo Sapiens
auauacaauuuaauguccuaguguuuuacuua

SEQ ID NO: 286957 - RNA, 32 nt, Homo Sapiens
ccucagcugcccggcccggagcccgagacgcg

SEQ ID NO: 286958 - RNA, 32 nt, Homo Sapiens
uauaguuagugugaucaugacuuugucaaagg

SEQ ID NO: 286959 - RNA, 32 nt, Homo Sapiens
ggaccucugaguagcuaauugauucaaguagu

SEQ ID NO: 286960 - RNA, 32 nt, Homo Sapiens
auacguugugaagaguuagaaaaggagaucuc

SEQ ID NO: 286961 - RNA, 32 nt, Homo Sapiens
guaaucucuaaggugcaaaacacacguggaaa

SEQ ID NO: 286962 - RNA, 32 nt, Homo Sapiens
cccacguaaauagcugucaucaucauuaucuu

SEQ ID NO: 286963 - RNA, 32 nt, Homo Sapiens
uuuguagaugauggguguuuuauuuucaaucg

SEQ ID NO: 286964 - RNA, 32 nt, Homo Sapiens
ucaggcuucuaaacuaauaacaagucugcuuu

SEQ ID NO: 286965 - RNA, 32 nt, Homo Sapiens
gauggggacgaggaugaagcuuccucgaccca

SEQ ID NO: 286966 - RNA, 32 nt, Homo Sapiens
gcggcggcgguacgaggcgcgcgcucgggguc

SEQ ID NO: 286967 - RNA, 32 nt, Homo Sapiens
cucauugcaaccuccgccucccggguucgcgg

SEQ ID NO: 286968 - RNA, 28 nt, Homo Sapiens
acaacuuccuuccgcuuagcgagcaugc

SEQ ID NO: 286969 - RNA, 32 nt, Homo Sapiens
aaagagauugggaacaaaaauaucuaauugag

SEQ ID NO: 286970 - RNA, 32 nt, Homo Sapiens
uuguauuaagugucauaauagcaucaaugugc

SEQ ID NO: 286971 - RNA, 32 nt, Homo Sapiens
acccguucgcccccggccaacuccgugcccgu

SEQ ID NO: 286972 - RNA, 32 nt, Homo Sapiens
acagccaaccucaggcuuagaucaauguauag

SEQ ID NO: 286973 - RNA, 32 nt, Homo Sapiens
agagaugaugaugguaauauuuuauuugugcu

SEQ ID NO: 286974 - RNA, 32 nt, Homo Sapiens
ccauuauugggaagcuuaaaugaauugaagcu

SEQ ID NO: 286975 - RNA, 32 nt, Homo Sapiens
cuaugggcucccagccccuugcacccucauug

SEQ ID NO: 286976 - RNA, 32 nt, Homo Sapiens
ucaauguugcuguucuugcucagugauuuuaa

SEQ ID NO: 286977 - RNA, 32 nt, Homo Sapiens
uccucuaggaccagcuugccacgguuucucag

SEQ ID NO: 286978 - RNA, 32 nt, Homo Sapiens
caguagaggggaagggauuguuguguagucaa

SEQ ID NO: 286979 - RNA, 32 nt, Homo Sapiens
acaccacugaacagaaauuucuccagggagcc

SEQ ID NO: 286980 - RNA, 32 nt, Homo Sapiens
cagcccucaucccacuuccuuuccuacugucc

SEQ ID NO: 286981 - RNA, 32 nt, Homo Sapiens
uggaauggucaggaauuuguuuucucauaguu

SEQ ID NO: 286982 - RNA, 32 nt, Homo Sapiens
cucaggggucggcgggugacuucuuuccggaa

SEQ ID NO: 286983 - RNA, 32 nt, Homo Sapiens
ggacacucaagagcuuacagaacuggcucaua

SEQ ID NO: 286984 - RNA, 32 nt, Homo Sapiens
gcugccggaggccuugccguagguggcuucga

SEQ ID NO: 286985 - RNA, 32 nt, Homo Sapiens
cugcgcggagagcggcgagcgcagccaugccc

SEQ ID NO: 286986 - RNA, 32 nt, Homo Sapiens
uaucauccaagcauagaaagggucuuccccaa

SEQ ID NO: 286987 - RNA, 32 nt, Homo Sapiens
gccugugccuucugcuggggcagggccucagg

SEQ ID NO: 286988 - RNA, 32 nt, Homo Sapiens
gcacucugagaccaugaucuuccuccugccag

SEQ ID NO: 286989 - RNA, 32 nt, Homo Sapiens
augucuggcuccagcccuuucucugugccuuc

SEQ ID NO: 286990 - RNA, 32 nt, Homo Sapiens
ccacccuccccucccaacccacggccaggagc

SEQ ID NO: 286991 - RNA, 32 nt, Homo Sapiens
cucuuuauaugauguaaauuauucuaauucau

SEQ ID NO: 286992 - RNA, 32 nt, Homo Sapiens
uuacaccaaaaggucugcagggugugguaacu

SEQ ID NO: 286993 - RNA, 32 nt, Homo Sapiens
guuccuuagguggucauaguccucccgugcug

SEQ ID NO: 286994 - RNA, 32 nt, Homo Sapiens
gauguagcucuggaacauguuguccguguugc

SEQ ID NO: 286995 - RNA, 32 nt, Homo Sapiens
gccuggccuugccuucacagggcucaccauac

SEQ ID NO: 286996 - RNA, 32 nt, Homo Sapiens
agagauauucaaaacucagaagcaucagcaau

SEQ ID NO: 286997 - RNA, 32 nt, Homo Sapiens
cagacacacacaggagggccuggccacuguug

SEQ ID NO: 286998 - RNA, 32 nt, Homo Sapiens
uaggcuucuauauugcauuuaacuuguuuuug

SEQ ID NO: 286999 - RNA, 32 nt, Homo Sapiens
uaacagugguccguugauguugguaucuccuc

SEQ ID NO: 287000 - RNA, 32 nt, Homo Sapiens
ggcgcugagcgcggcggcggcggcugcucugg

SEQ ID NO: 287001 - RNA, 32 nt, Homo Sapiens
ccuccuuagagcucugaaggggucuccuaguu

SEQ ID NO: 287002 - RNA, 32 nt, Homo Sapiens
gaauuccagauuacaaucgccauaauauaagg

SEQ ID NO: 287003 - RNA, 32 nt, Homo Sapiens
uacaacaggcuuaugaauauauuuaagcaaca

SEQ ID NO: 287004 - RNA, 32 nt, Homo Sapiens
ucugggauucgagcggauccaggccgcucccu

SEQ ID NO: 287005 - RNA, 32 nt, Homo Sapiens
uaaaguauuuauucucauaaacucuuauucau

SEQ ID NO: 287006 - RNA, 32 nt, Homo Sapiens
cacguguguaccgggggugaaugugugugagc

SEQ ID NO: 287007 - RNA, 32 nt, Homo Sapiens
cucuccaccaaaaucaacagaauauacauuuu

SEQ ID NO: 287008 - RNA, 32 nt, Homo Sapiens
agagcugguuccgcgccgcggccgccgcgaca

SEQ ID NO: 287009 - RNA, 32 nt, Homo Sapiens
gagacauucaggaagaucuaucaauaaauagc

SEQ ID NO: 287010 - RNA, 32 nt, Homo Sapiens
uggcccuguccuguuuaguucuuaguggguua

SEQ ID NO: 287011 - RNA, 32 nt, Homo Sapiens
aaggauccacuuuauuauuauuuuuucuguuu

SEQ ID NO: 287012 - RNA, 32 nt, Homo Sapiens
uaggggacugugcgggaagcuggggguggaug

SEQ ID NO: 287013 - RNA, 31 nt, Homo Sapiens
acagagaagugcucaaaucauaaguguacag

SEQ ID NO: 287014 - RNA, 32 nt, Homo Sapiens
cucugggugcagagggcgagaggugggagguc

SEQ ID NO: 287015 - RNA, 32 nt, Homo Sapiens
cagccaugugguuucuucaucaucauggauuu

SEQ ID NO: 287016 - RNA, 32 nt, Homo Sapiens
ugcaguguguagaccagagaccucuuugggua

SEQ ID NO: 287017 - RNA, 32 nt, Homo Sapiens
cgccgcuggccggcccucccagcccucuccgc

SEQ ID NO: 287018 - RNA, 32 nt, Homo Sapiens
ugacgggaggucgcccggcggacagcguggca

SEQ ID NO: 287019 - RNA, 32 nt, Homo Sapiens
cucugcugugggccgugggcgccccgccagcu

SEQ ID NO: 287020 - RNA, 32 nt, Homo Sapiens
ugcaaggagucaccuuauaacacuauuuccag

SEQ ID NO: 287021 - RNA, 32 nt, Homo Sapiens
aaaccgcagacacauccccgcgccccagagcc

SEQ ID NO: 287022 - RNA, 32 nt, Homo Sapiens
cugcucgcgagcugcuuucucuccucuucccu

SEQ ID NO: 287023 - RNA, 32 nt, Homo Sapiens
agagccuuggggugcccggugcggcugcuuca

SEQ ID NO: 287024 - RNA, 32 nt, Homo Sapiens
uucacacugaccaagauacuuaagugcugcaa

SEQ ID NO: 287025 - RNA, 32 nt, Homo Sapiens
uuccccccacagagccccuuucaguggccccu

SEQ ID NO: 287026 - RNA, 28 nt, Homo Sapiens
cagccacugugaaccauuauaaagguuu

SEQ ID NO: 287027 - RNA, 32 nt, Homo Sapiens
gccauaccaaagggcaauuauuuaucuaccua

SEQ ID NO: 287028 - RNA, 32 nt, Homo Sapiens
gccuuuuccuacuucagugaagugcagucaua

SEQ ID NO: 287029 - RNA, 32 nt, Homo Sapiens
ugggacuuccuggauccuccucuucuuauaaa

SEQ ID NO: 287030 - RNA, 32 nt, Homo Sapiens
uaugcagccuggagugggcaucaauaaaauga

SEQ ID NO: 287031 - RNA, 32 nt, Homo Sapiens
uugccuuaacucaucacccuuuuucacuauga

SEQ ID NO: 287032 - RNA, 32 nt, Homo Sapiens
uuuaaacugagguuaaaagaugcugagaagcc

SEQ ID NO: 287033 - RNA, 32 nt, Homo Sapiens
accuggggcagacaggccuggugggggguggg

SEQ ID NO: 287034 - RNA, 32 nt, Homo Sapiens
gcaucggaaaggaugccugguuugcuuuuaug

SEQ ID NO: 287035 - RNA, 27 nt, Homo Sapiens
cuguggccuguuaacugguauauacau

SEQ ID NO: 287036 - RNA, 32 nt, Homo Sapiens
uuaauuugauaaagaucuccaguuguauccuc

SEQ ID NO: 287037 - RNA, 32 nt, Homo Sapiens
gcauuucaagccguguauaaucaucaaaaugg

SEQ ID NO: 287038 - RNA, 32 nt, Homo Sapiens
agcgcggcagugccaacggccucugcccgccc

SEQ ID NO: 287039 - RNA, 30 nt, Homo Sapiens
augacauugcuaaugaggacacuguacaag

SEQ ID NO: 287040 - RNA, 32 nt, Homo Sapiens
aagguuaguugcuacuucuuaauagccaaagc

SEQ ID NO: 287041 - RNA, 32 nt, Homo Sapiens
gggaagcugcggccgccucgcacccggaacaa

SEQ ID NO: 287042 - RNA, 32 nt, Homo Sapiens
uuaauucugaauuuucuuucucauucagguuc

SEQ ID NO: 287043 - RNA, 32 nt, Homo Sapiens
cuacuacugcauggagaaagugcugagggaga

SEQ ID NO: 287044 - RNA, 32 nt, Homo Sapiens
uuaugccucuuacugggcaugcuugagcccac

SEQ ID NO: 287045 - RNA, 32 nt, Homo Sapiens
ugcuccucucugaggaaguggaauugucuagc

SEQ ID NO: 287046 - RNA, 32 nt, Homo Sapiens
uaaaaagaacaagagucgauauuuugaaauag

SEQ ID NO: 287047 - RNA, 32 nt, Homo Sapiens
cugggcggccccagagccccucggaggacaau

SEQ ID NO: 287048 - RNA, 32 nt, Homo Sapiens
gaaacuauagaauuagcagagaaaguggagaa

SEQ ID NO: 287049 - RNA, 32 nt, Homo Sapiens
agauuccugggguggggggaaagcagcaagaa

SEQ ID NO: 287050 - RNA, 32 nt, Homo Sapiens
gaggugauucagaaugauaguuucgugauuac

SEQ ID NO: 287051 - RNA, 32 nt, Homo Sapiens
cucagggagcacgggagggucugcaguuggga

SEQ ID NO: 287052 - RNA, 32 nt, Homo Sapiens
uuuauaucucuuaaaauggugauggaugugac

SEQ ID NO: 287053 - RNA, 32 nt, Homo Sapiens
aaagagaaaaaguuauacaggauaaaacaaau

SEQ ID NO: 287054 - RNA, 32 nt, Homo Sapiens
aacuccaaagccugcguucucaucccagucug

SEQ ID NO: 287055 - RNA, 32 nt, Homo Sapiens
aauuaugaaaauuugagccagaugaacccccg

SEQ ID NO: 287056 - RNA, 32 nt, Homo Sapiens
ccacugaggguggggcagcuguggggagcugg

SEQ ID NO: 287057 - RNA, 32 nt, Homo Sapiens
aggccggccccggcccgacucgcccucagaaa

SEQ ID NO: 287058 - RNA, 32 nt, Homo Sapiens
ugaccucuggucguccucacugcuacacuccu

SEQ ID NO: 287059 - RNA, 32 nt, Homo Sapiens
ucaucccaggcuuugaucaccuuuaaaguaaa

SEQ ID NO: 287060 - RNA, 32 nt, Homo Sapiens
aaaaaaugaaaauaaacauaagccacaaggaa

SEQ ID NO: 287061 - RNA, 32 nt, Homo Sapiens
ggguggcacagcagugccccccugcagccuuc

SEQ ID NO: 287062 - RNA, 32 nt, Homo Sapiens
ccugccucagcaugcuucgaaaggcagcuucc

SEQ ID NO: 287063 - RNA, 32 nt, Homo Sapiens
cuuuaauauacuccuuaaaaauguauguuggu

SEQ ID NO: 287064 - RNA, 32 nt, Homo Sapiens
gcggagacagagagccgcuacugcaugcagcu

SEQ ID NO: 287065 - RNA, 32 nt, Homo Sapiens
uguccucacuugcaacaggggcuucggguggg

SEQ ID NO: 287066 - RNA, 31 nt, Homo Sapiens
gcggugcagcgcagagcaggcugggcgggaa

SEQ ID NO: 287067 - RNA, 32 nt, Homo Sapiens
ucccccugccagcagcugcuccuucagccagg

SEQ ID NO: 287068 - RNA, 32 nt, Homo Sapiens
acuggaaaucaucacagcagugggauaucaga

SEQ ID NO: 287069 - RNA, 32 nt, Homo Sapiens
gagacagcgggccccagcgcgcggcucggggc

SEQ ID NO: 287070 - RNA, 32 nt, Homo Sapiens
ccccugcaaccucggggagugccacuucggga

SEQ ID NO: 287071 - RNA, 32 nt, Homo Sapiens
ggcaucuuaggacuggaggggcuccuuggaaa

SEQ ID NO: 287072 - RNA, 32 nt, Homo Sapiens
cagcccaaaggggacaggccucaccucuaccc

SEQ ID NO: 287073 - RNA, 32 nt, Homo Sapiens
ucgucugccucccaguucuggguccacuguag

SEQ ID NO: 287074 - RNA, 32 nt, Homo Sapiens
gagaggcagacacguucccuauuuccaggaga

SEQ ID NO: 287075 - RNA, 32 nt, Homo Sapiens
guugaaaguggaaagcacuugaaagagcuccc

SEQ ID NO: 287076 - RNA, 32 nt, Homo Sapiens
gggauuguuguguugcagaaauccggcaaucg

SEQ ID NO: 287077 - RNA, 32 nt, Homo Sapiens
ccggcgaggccgcgaugaagccgagcggcgag

SEQ ID NO: 287078 - RNA, 32 nt, Homo Sapiens
uggcuccggaugucgaucccccucccuuggau

SEQ ID NO: 287079 - RNA, 32 nt, Homo Sapiens
uccaagagaugaacaguggaugaugcuuccaa

SEQ ID NO: 287080 - RNA, 32 nt, Homo Sapiens
agccggggccgcggcggcgcucccuaggaagg

SEQ ID NO: 287081 - RNA, 32 nt, Homo Sapiens
aagugggccaggcccggaggcggccgcgggca

SEQ ID NO: 287082 - RNA, 32 nt, Homo Sapiens
gaaguaagauugucuuggaaauacuaaguugg

SEQ ID NO: 287083 - RNA, 32 nt, Homo Sapiens
gagagcccaugggucuuauuuaugggauaugg

SEQ ID NO: 287084 - RNA, 32 nt, Homo Sapiens
uguuaccacugggcagaaugacauggcggcca

SEQ ID NO: 287085 - RNA, 32 nt, Homo Sapiens
ccaagcaucugugcagggucgugggagccaca

SEQ ID NO: 287086 - RNA, 32 nt, Homo Sapiens
gcuuuacaguacagaucuuacaauuaaguuuu

SEQ ID NO: 287087 - RNA, 32 nt, Homo Sapiens
uuaggaugaaaacucuagaacuacccuaugcu

SEQ ID NO: 287088 - RNA, 32 nt, Homo Sapiens
gcauuuugcucaucuucaguaugucagcuuua

SEQ ID NO: 287089 - RNA, 32 nt, Homo Sapiens
uguuuuguuaaaucugguggguaccuggaucu

SEQ ID NO: 287090 - RNA, 32 nt, Homo Sapiens
cuggccaaagauuuauuucucuugacaaccaa

SEQ ID NO: 287091 - RNA, 32 nt, Homo Sapiens
cagcaagaauccaaaagaaguguccuacauaa

SEQ ID NO: 287092 - RNA, 32 nt, Homo Sapiens
gaauauuauaugccuaaauaaaaaauuugcac

SEQ ID NO: 287093 - RNA, 32 nt, Homo Sapiens
uuuuaaaaaaauuuuuaaaaugccuaggucau

SEQ ID NO: 287094 - RNA, 32 nt, Homo Sapiens
agaacuugaccucccuggacgcagcggcaccc

SEQ ID NO: 287095 - RNA, 32 nt, Homo Sapiens
ccccggaagcaagugccgcauucuucaggaag

SEQ ID NO: 287096 - RNA, 32 nt, Homo Sapiens
ggaaaguaaaguucuuuuuguuuuucuuuaua

SEQ ID NO: 287097 - RNA, 32 nt, Homo Sapiens
ucaacaugaaacaaagaauuauaguuccuucu

SEQ ID NO: 287098 - RNA, 32 nt, Homo Sapiens
caaaacaaaaauuuucuugagagaaauuagug

SEQ ID NO: 287099 - RNA, 32 nt, Homo Sapiens
cccuuaacuaaaguguaggauuuuaaaauuaa

SEQ ID NO: 287100 - RNA, 32 nt, Homo Sapiens
uuaggcuccgcggccuccaagcuguagcuaug

SEQ ID NO: 287101 - RNA, 32 nt, Homo Sapiens
cauaacuaaugugcaaaauguaaaacgcuaaa

SEQ ID NO: 287102 - RNA, 32 nt, Homo Sapiens
cuuggucuccuucccaggaucccacaccaugu

SEQ ID NO: 287103 - RNA, 32 nt, Homo Sapiens
acgugacugucuuguucuuaauuuucauggaa

SEQ ID NO: 287104 - RNA, 32 nt, Homo Sapiens
caaucaaugcaaaaggauagacaaugaacaaa

SEQ ID NO: 287105 - RNA, 32 nt, Homo Sapiens
uuuugugaaacuugaaagagaauagacaguau

SEQ ID NO: 287106 - RNA, 32 nt, Homo Sapiens
cccccuguuaacugccuauuuauaacccuagg

SEQ ID NO: 287107 - RNA, 32 nt, Homo Sapiens
gugugcuguacgggggcgcccggggacaggag

SEQ ID NO: 287108 - RNA, 32 nt, Homo Sapiens
uuuacucccucauaacauaucuacuugcacaa

SEQ ID NO: 287109 - RNA, 29 nt, Homo Sapiens
ggcgcccggggacagagaacaugggacgc

SEQ ID NO: 287110 - RNA, 32 nt, Homo Sapiens
uccaaaggaauggaaacguauuuuacaacuug

SEQ ID NO: 287111 - RNA, 32 nt, Homo Sapiens
guauguauuaaaccuuuuccaguucuccaaag

SEQ ID NO: 287112 - RNA, 32 nt, Homo Sapiens
agcgguggggcugccuucccccggcccuccuc

SEQ ID NO: 287113 - RNA, 32 nt, Homo Sapiens
caaggccugugcugcaugcgacagcguccggg

SEQ ID NO: 287114 - RNA, 32 nt, Homo Sapiens
cuugugguaauuugaauauaugcaauguggcc

SEQ ID NO: 287115 - RNA, 32 nt, Homo Sapiens
guuuccaaucccaauuauuucaugccccuugc

SEQ ID NO: 287116 - RNA, 32 nt, Homo Sapiens
ggccagaguucaaaugugacuccaccucuuaa

SEQ ID NO: 287117 - RNA, 32 nt, Homo Sapiens
uacacguggggauaugucgagguggccauguu

SEQ ID NO: 287118 - RNA, 32 nt, Homo Sapiens
uuuuuuaguaaaacgugucucgaggaaguggu

SEQ ID NO: 287119 - RNA, 32 nt, Homo Sapiens
caggugguuggaaaagaaauggcuuccuggug

SEQ ID NO: 287120 - RNA, 32 nt, Homo Sapiens
uauacuguuuguguguggauagaagauguuga

SEQ ID NO: 287121 - RNA, 27 nt, Homo Sapiens
uuccuugucuucuucacucuccaugga

SEQ ID NO: 287122 - RNA, 32 nt, Homo Sapiens
uucagccaucccugcccuuguucucccugcaa

SEQ ID NO: 287123 - RNA, 32 nt, Homo Sapiens
uccccagugcaacaagaaagccaggcacagug

SEQ ID NO: 287124 - RNA, 32 nt, Homo Sapiens
aaguuuuccuucuccuaccccagccucgugua

SEQ ID NO: 287125 - RNA, 32 nt, Homo Sapiens
ugaccaccuuuguuucucccccauguucuguc

SEQ ID NO: 287126 - RNA, 32 nt, Homo Sapiens
uauuuuuuauuuucuuuuugguuuggggaggg

SEQ ID NO: 287127 - RNA, 32 nt, Homo Sapiens
aaguagcuauggcagugccugauacaaaauaa

SEQ ID NO: 287128 - RNA, 32 nt, Homo Sapiens
ucugucugucucuggcccccagccccagagcu

SEQ ID NO: 287129 - RNA, 32 nt, Homo Sapiens
ucacagguggggcuguuaccuuccucagggcu

SEQ ID NO: 287130 - RNA, 32 nt, Homo Sapiens
cucaucaggucuucaaacauuuagcaagcaug

SEQ ID NO: 287131 - RNA, 32 nt, Homo Sapiens
ccaucugggggaggauguaccucacaccaucg

SEQ ID NO: 287132 - RNA, 32 nt, Homo Sapiens
uagccucagacucuucuuuuauuguuuuucuu

SEQ ID NO: 287133 - RNA, 32 nt, Homo Sapiens
auugggggccucccggcccuggcucacgccaa

SEQ ID NO: 287134 - RNA, 32 nt, Homo Sapiens
ucaaguggcugggggccaggaugccuggguug

SEQ ID NO: 287135 - RNA, 32 nt, Homo Sapiens
ccgcgccuccaagguuucacggcuuccucagc

SEQ ID NO: 287136 - RNA, 32 nt, Homo Sapiens
aggaauucccccugcuagauuagaaaugauau

SEQ ID NO: 287137 - RNA, 32 nt, Homo Sapiens
cauuucaucucucccuuuuuuauaucaaguuu

SEQ ID NO: 287138 - RNA, 32 nt, Homo Sapiens
gagaucaggaccagugcuucccaccaggcuuu

SEQ ID NO: 287139 - RNA, 32 nt, Homo Sapiens
uuuccccacucgccucucacagcccuccauug

SEQ ID NO: 287140 - RNA, 32 nt, Homo Sapiens
cuuugucuuccacucacugucauucacaaggc

SEQ ID NO: 287141 - RNA, 32 nt, Homo Sapiens
uacgggccugcaccgccaccgcacaaagacgc

SEQ ID NO: 287142 - RNA, 32 nt, Homo Sapiens
cggucccggcggcggcagcuucgcccgcgagc

SEQ ID NO: 287143 - RNA, 32 nt, Homo Sapiens
gaggugugcuggcucucgcagguugcaaaaug

SEQ ID NO: 287144 - RNA, 32 nt, Homo Sapiens
cgggucacgugguccagcggcuccaccgaggc

SEQ ID NO: 287145 - RNA, 31 nt, Homo Sapiens
cuucuuguggccaacuucagagccugucacc

SEQ ID NO: 287146 - RNA, 32 nt, Homo Sapiens
aggcugaggcacggagaagaaaaggaaucagc

SEQ ID NO: 287147 - RNA, 32 nt, Homo Sapiens
ggcuucgcgggaagacgcggcggcggcggcgg

SEQ ID NO: 287148 - RNA, 32 nt, Homo Sapiens
cuuuuggugcucucaccuuaucuggaagaucu

SEQ ID NO: 287149 - RNA, 32 nt, Homo Sapiens
ccccagcucuguuuccucuacuccuggcucag

SEQ ID NO: 287150 - RNA, 32 nt, Homo Sapiens
uuggugcccucccugagggcccugcaugcuug

SEQ ID NO: 287151 - RNA, 32 nt, Homo Sapiens
cccgggaggaggaggcggcgagaauggcagcg

SEQ ID NO: 287152 - RNA, 32 nt, Homo Sapiens
caggcaccugacgccucuuuccccucacggug

SEQ ID NO: 287153 - RNA, 32 nt, Homo Sapiens
cugaggccucccuggaggaaggaggguuaggg

SEQ ID NO: 287154 - RNA, 32 nt, Homo Sapiens
guccaagcccuugaccucuccucuauccagac

SEQ ID NO: 287155 - RNA, 32 nt, Homo Sapiens
ccccucggacccugcgcugagccccggaggcc

SEQ ID NO: 287156 - RNA, 32 nt, Homo Sapiens
aaauucaaagauuuaauucuugcuaugaauuc

SEQ ID NO: 287157 - RNA, 32 nt, Homo Sapiens
gaaugccuggacuaugggucccgagcaguucc

SEQ ID NO: 287158 - RNA, 32 nt, Homo Sapiens
ccuggagggggaagagcggggaggccggcacc

SEQ ID NO: 287159 - RNA, 32 nt, Homo Sapiens
gcgaccuggggcccugggugaagugcuccgcc

SEQ ID NO: 287160 - RNA, 32 nt, Homo Sapiens
aaacgagaaaauuuaaaggagcaaaaauuugc

SEQ ID NO: 287161 - RNA, 32 nt, Homo Sapiens
caucuaucaaagaagagacaucaucaacagug

SEQ ID NO: 287162 - RNA, 32 nt, Homo Sapiens
gaauaagguguugaaagagugcaggggguugg

SEQ ID NO: 287163 - RNA, 32 nt, Homo Sapiens
uuuuguacaucaugauuuucaauuuaggauau

SEQ ID NO: 287164 - RNA, 32 nt, Homo Sapiens
uggaagaacuaaaagaugaauaaacuggguuu

SEQ ID NO: 287165 - RNA, 27 nt, Homo Sapiens
gguuuugacuucuucaguuucuccccu

SEQ ID NO: 287166 - RNA, 32 nt, Homo Sapiens
ucuguuuaguagucauuuuuuaaaagauaauc

SEQ ID NO: 287167 - RNA, 32 nt, Homo Sapiens
gaugcacacacacgcagacagacacaccgacu

SEQ ID NO: 287168 - RNA, 32 nt, Homo Sapiens
gccgguguucaggcccucuccuccugcaagga

SEQ ID NO: 287169 - RNA, 32 nt, Homo Sapiens
agcacuggacgaagacaaggaucccaccacga

SEQ ID NO: 287170 - RNA, 32 nt, Homo Sapiens
aaagggcggcuggaggcucccggagcgggcuc

SEQ ID NO: 287171 - RNA, 32 nt, Homo Sapiens
aauuuuauuuuuccuuuucucaccaggugucu

SEQ ID NO: 287172 - RNA, 32 nt, Homo Sapiens
ggaaagagaagagcagucauggcccugaggug

SEQ ID NO: 287173 - RNA, 32 nt, Homo Sapiens
acaauuugaaauugauaccauuuucuacucac

SEQ ID NO: 287174 - RNA, 32 nt, Homo Sapiens
uugcgcuccccagccgcaagucggccgcgcuu

SEQ ID NO: 287175 - RNA, 32 nt, Homo Sapiens
cucugcagagggcgagcggcgcggccacggag

SEQ ID NO: 287176 - RNA, 32 nt, Homo Sapiens
gguauuucaaaauaaaucucaggugcuauaac

SEQ ID NO: 287177 - RNA, 32 nt, Homo Sapiens
uacuuuuguaaugacugugaaauacacuuuuc

SEQ ID NO: 287178 - RNA, 32 nt, Homo Sapiens
uuuuucuuuuagacauucugcagacaugcagg

SEQ ID NO: 287179 - RNA, 32 nt, Homo Sapiens
uuuagaugcuauuauuacuguuuggacuuuua

SEQ ID NO: 287180 - RNA, 32 nt, Homo Sapiens
ggggccuguccagcugcaggaccauagaggcu

SEQ ID NO: 287181 - RNA, 32 nt, Homo Sapiens
gaacgaaugaacuuguagggggcauagaggau

SEQ ID NO: 287182 - RNA, 32 nt, Homo Sapiens
ugguaaaucucagaaagcacaagcauaaaaug

SEQ ID NO: 287183 - RNA, 32 nt, Homo Sapiens
aggagagggggaucggugggcggucccgccuc

SEQ ID NO: 287184 - RNA, 32 nt, Homo Sapiens
ugaaaucucuacacauuucauccuuuugcuug

SEQ ID NO: 287185 - RNA, 32 nt, Homo Sapiens
ucggcuaccaaaacagcuggcaggacugccgg

SEQ ID NO: 287186 - RNA, 32 nt, Homo Sapiens
ugaggcgccaguuccggggcgcugcucccggc

SEQ ID NO: 287187 - RNA, 32 nt, Homo Sapiens
gggccuuugucaagucauccccucuucuccuc

SEQ ID NO: 287188 - RNA, 32 nt, Homo Sapiens
uagagccgaguaugagcccuagcugugggcua

SEQ ID NO: 287189 - RNA, 32 nt, Homo Sapiens
auguagaaagggaagacauaagagacuccauu

SEQ ID NO: 287190 - RNA, 32 nt, Homo Sapiens
cucuguuugacaaaagaacuguuuuggaaggu

SEQ ID NO: 287191 - RNA, 32 nt, Homo Sapiens
agacgggagagccgccaaagacucuaagcaga

SEQ ID NO: 287192 - RNA, 32 nt, Homo Sapiens
ggaggcggguggcacgcugcagcccggagucc

SEQ ID NO: 287193 - RNA, 32 nt, Homo Sapiens
aaggaagaauuugaacaucagcagaaagagcu

SEQ ID NO: 287194 - RNA, 32 nt, Homo Sapiens
cuaggaaaguucccaaguguaugaaagaaaca

SEQ ID NO: 287195 - RNA, 32 nt, Homo Sapiens
uugcguucucuccaccagcucccggcucaccc

SEQ ID NO: 287196 - RNA, 32 nt, Homo Sapiens
gggcacggccccagcuccguggggcucucacg

SEQ ID NO: 287197 - RNA, 32 nt, Homo Sapiens
uccagcagggaaccuuccauuauauucuucaa

SEQ ID NO: 287198 - RNA, 32 nt, Homo Sapiens
gaccaagacaccugaggacacaucuuggcacc

SEQ ID NO: 287199 - RNA, 32 nt, Homo Sapiens
cgcgggcaggcgagacuggcggagcccccaga

SEQ ID NO: 287200 - RNA, 32 nt, Homo Sapiens
cccuccgguagccgccccuccuccccccgcgc

SEQ ID NO: 287201 - RNA, 32 nt, Homo Sapiens
uaaacuuuuuaaaaaacauuguaagauucuuu

SEQ ID NO: 287202 - RNA, 32 nt, Homo Sapiens
caagggaaaagagcuugugcuggggaacuccu

SEQ ID NO: 287203 - RNA, 32 nt, Homo Sapiens
aacugacuuaggauuucugacuuuuuauuaau

SEQ ID NO: 287204 - RNA, 30 nt, Homo Sapiens
gacgcggcgcggagacugccggcgcguccc

SEQ ID NO: 287205 - RNA, 32 nt, Homo Sapiens
ccaucagugaggaccagacaccacugauugca

SEQ ID NO: 287206 - RNA, 32 nt, Homo Sapiens
agccugcacugcucaaaugcaagaugcauuuc

SEQ ID NO: 287207 - RNA, 32 nt, Homo Sapiens
gcucaacaucuucuguuaguuuuagcugcaau

SEQ ID NO: 287208 - RNA, 32 nt, Homo Sapiens
agagccgugucccagacacgcugucagugccu

SEQ ID NO: 287209 - RNA, 30 nt, Homo Sapiens
gccugcugcgcgcccaggggucccgcgggu

SEQ ID NO: 287210 - RNA, 32 nt, Homo Sapiens
ggguguuucguuuuaaauccuggaaucaaagu

SEQ ID NO: 287211 - RNA, 32 nt, Homo Sapiens
ggagccgcugccuugccccccggagacugaag

SEQ ID NO: 287212 - RNA, 32 nt, Homo Sapiens
cugucuuccuucccagcuuccuccgugucugg

SEQ ID NO: 287213 - RNA, 32 nt, Homo Sapiens
cuuaagcagaacuaagcucaguaugugaccuu

SEQ ID NO: 287214 - RNA, 32 nt, Homo Sapiens
aaggacgugucugcauuuuaaaaaaugucuuu

SEQ ID NO: 287215 - RNA, 32 nt, Homo Sapiens
aaauagaaaaucuauuuaguaaaaucuaaguu

SEQ ID NO: 287216 - RNA, 32 nt, Homo Sapiens
gcacccucccucccggcccccaugcucccuuc

SEQ ID NO: 287217 - RNA, 32 nt, Homo Sapiens
uuuguguucuaaaaguacaaugagccuuacug

SEQ ID NO: 287218 - RNA, 32 nt, Homo Sapiens
ccccaggagcccaguuucaauggccuugcugu

SEQ ID NO: 287219 - RNA, 32 nt, Homo Sapiens
uaacagugcaggguuggggucugcauuggagg

SEQ ID NO: 287220 - RNA, 32 nt, Homo Sapiens
cuuuuauugcuuuugggguuauacaaauagcu

SEQ ID NO: 287221 - RNA, 32 nt, Homo Sapiens
aggaccccgccuuucuggaggggucaccaagc

SEQ ID NO: 287222 - RNA, 32 nt, Homo Sapiens
cugagacccagcuggcuuuuacccuugaccug

SEQ ID NO: 287223 - RNA, 32 nt, Homo Sapiens
gacaagaugcugggauguccccugccccaugg

SEQ ID NO: 287224 - RNA, 32 nt, Homo Sapiens
auuaccaaaugauauuuucugaagaugcuuuu

SEQ ID NO: 287225 - RNA, 32 nt, Homo Sapiens
uuuuugagauggauucuugcucugucaccagg

SEQ ID NO: 287226 - RNA, 32 nt, Homo Sapiens
cuucgcucauuaugaaauguuuuaaaauuaug

SEQ ID NO: 287227 - RNA, 32 nt, Homo Sapiens
agacugugaacaucugauuguucagcaaccuu

SEQ ID NO: 287228 - RNA, 32 nt, Homo Sapiens
uguaccuguauauuauuaaacaugcaaugaac

SEQ ID NO: 287229 - RNA, 32 nt, Homo Sapiens
uaugcuuacaguguuaucugugaaugcacaua

SEQ ID NO: 287230 - RNA, 32 nt, Homo Sapiens
cuagcuggauacuacuacuaaugucacaaugc

SEQ ID NO: 287231 - RNA, 32 nt, Homo Sapiens
aaggaucacauuucauguguguguaucuuaga

SEQ ID NO: 287232 - RNA, 32 nt, Homo Sapiens
ugcccacaccccagcccaaccugcccacguuc

SEQ ID NO: 287233 - RNA, 32 nt, Homo Sapiens
aauuaauucuauuucugacuuuauugaaauuu

SEQ ID NO: 287234 - RNA, 32 nt, Homo Sapiens
gggagcugggucuguggcuuugaucagaaggu

SEQ ID NO: 287235 - RNA, 32 nt, Homo Sapiens
gucuuccugaauuuaguccauucauaaucaac

SEQ ID NO: 287236 - RNA, 32 nt, Homo Sapiens
cagcaugaguuaauuuaaguggauucacugcu

SEQ ID NO: 287237 - RNA, 32 nt, Homo Sapiens
aagacccacuauuugcacaaaacuauucuugc

SEQ ID NO: 287238 - RNA, 32 nt, Homo Sapiens
aaugguguuucuuuucuuguccaauuuuaucc

SEQ ID NO: 287239 - RNA, 32 nt, Homo Sapiens
ucagccggcgucugcgagccguccucaagcgc

SEQ ID NO: 287240 - RNA, 32 nt, Homo Sapiens
cccugccccuggagcuucuccaagauggcacu

SEQ ID NO: 287241 - RNA, 32 nt, Homo Sapiens
uacccauaauauuuugucaaaugcacuaaaca

SEQ ID NO: 287242 - RNA, 32 nt, Homo Sapiens
gucuagcgaugucaaggcccccaguuuggguu

SEQ ID NO: 287243 - RNA, 32 nt, Homo Sapiens
uaauacugucuuacguuuuucuggugcuuuau

SEQ ID NO: 287244 - RNA, 32 nt, Homo Sapiens
gggaccgcagcuccccgcuccccagguguggg

SEQ ID NO: 287245 - RNA, 32 nt, Homo Sapiens
uucucaauuaaagauuugauuuauucaaguau

SEQ ID NO: 287246 - RNA, 32 nt, Homo Sapiens
cucuuuugauucaauuauacugcacauguuuu

SEQ ID NO: 287247 - RNA, 32 nt, Homo Sapiens
aggaaagcagcuuaaacauaaauaucagaagu

SEQ ID NO: 287248 - RNA, 32 nt, Homo Sapiens
agauaacaacugugaguagccuaugaaugaaa

SEQ ID NO: 287249 - RNA, 32 nt, Homo Sapiens
uauuagugaauuuaaaauaauuuuuauacugc

SEQ ID NO: 287250 - RNA, 32 nt, Homo Sapiens
caggaucuuuugcuucaugcaaaaaacuugga

SEQ ID NO: 287251 - RNA, 32 nt, Homo Sapiens
aucuguucuucugccgcucugucuucucucuu

SEQ ID NO: 287252 - RNA, 32 nt, Homo Sapiens
guaugucuccauuguucacuguagcauaggga

SEQ ID NO: 287253 - RNA, 32 nt, Homo Sapiens
cugcaaacaggccaccugagccucacacccag

SEQ ID NO: 287254 - RNA, 32 nt, Homo Sapiens
uagcagcagcgggagugccggguugagccggg

SEQ ID NO: 287255 - RNA, 32 nt, Homo Sapiens
uuguuuagugaauacagaggaaaggaaaaaca

SEQ ID NO: 287256 - RNA, 32 nt, Homo Sapiens
cucagaaucaccauccgcggcgcgggagacga

SEQ ID NO: 287257 - RNA, 32 nt, Homo Sapiens
gucaauaaacccuacuuuuuuauuuuugguuu

SEQ ID NO: 287258 - RNA, 32 nt, Homo Sapiens
uguucugugugcucuugcugaaaggauauugc

SEQ ID NO: 287259 - RNA, 32 nt, Homo Sapiens
caaucucacaaucugaaaauaaaguugaguug

SEQ ID NO: 287260 - RNA, 32 nt, Homo Sapiens
uucaguaugagccccaguucagccggccucag

SEQ ID NO: 287261 - RNA, 32 nt, Homo Sapiens
cccggcucuggggcggaggccggcgccuuccc

SEQ ID NO: 287262 - RNA, 32 nt, Homo Sapiens
accggcggggaaagcagcuggugugggaggaa

SEQ ID NO: 287263 - RNA, 32 nt, Homo Sapiens
agcaacccugaacacucugcuccagccaaggu

SEQ ID NO: 287264 - RNA, 32 nt, Homo Sapiens
acauaaaaagauaugaagaauaaaauaaugaa

SEQ ID NO: 287265 - RNA, 32 nt, Homo Sapiens
gccuuccccgccauccagggaggaacaccagg

SEQ ID NO: 287266 - RNA, 32 nt, Homo Sapiens
cuuuuucuccuuucuucugccugccuuccugu

SEQ ID NO: 287267 - RNA, 32 nt, Homo Sapiens
cuuaauuugcuugucaucacaaugaaguaugu

SEQ ID NO: 287268 - RNA, 32 nt, Homo Sapiens
gccuugggaacugcaucuccugggcuggugcu

SEQ ID NO: 287269 - RNA, 32 nt, Homo Sapiens
cccuccccgcccucagcccuggccugcgggaa

SEQ ID NO: 287270 - RNA, 32 nt, Homo Sapiens
aggcuuuuuagaagcuggcuuuaacuuugagu

SEQ ID NO: 287271 - RNA, 32 nt, Homo Sapiens
ucuuagcuauacuuuaaauauuuuggucauca

SEQ ID NO: 287272 - RNA, 32 nt, Homo Sapiens
agguaaaugauuacagaaaaauuuaugugcuu

SEQ ID NO: 287273 - RNA, 32 nt, Homo Sapiens
uucggcuucuauccagagucagaugggagcug

SEQ ID NO: 287274 - RNA, 32 nt, Homo Sapiens
uuggcuuuaccaguguugacagaaaaauuuua

SEQ ID NO: 287275 - RNA, 32 nt, Homo Sapiens
uggaucacuggaguuugagaccacccuggcca

SEQ ID NO: 287276 - RNA, 32 nt, Homo Sapiens
aggggugugggaagguaaagaaacuugcugga

SEQ ID NO: 287277 - RNA, 32 nt, Homo Sapiens
gugcauguuaauaaauaucuuuccaucaguca

SEQ ID NO: 287278 - RNA, 32 nt, Homo Sapiens
cgccaagcauaaagguggggcauggcaucaaa

SEQ ID NO: 287279 - RNA, 32 nt, Homo Sapiens
ccugucugggacccgggcauugcugggcgccg

SEQ ID NO: 287280 - RNA, 32 nt, Homo Sapiens
ugcagacaguguggcuucagcuaugcacgggg

SEQ ID NO: 287281 - RNA, 32 nt, Homo Sapiens
uuugaaagccgucauuguguggcacuggacgg

SEQ ID NO: 287282 - RNA, 32 nt, Homo Sapiens
ugaucagugaauaaaaaugucagaacugugaa

SEQ ID NO: 287283 - RNA, 32 nt, Homo Sapiens
uucugcuccuuaaauaugaggaguccuacuuu

SEQ ID NO: 287284 - RNA, 32 nt, Homo Sapiens
guauugaagaaccuggacuugaagcaggaggu

SEQ ID NO: 287285 - RNA, 32 nt, Homo Sapiens
uggguuaacaaugaaaucaagauggaaauuuu

SEQ ID NO: 287286 - RNA, 32 nt, Homo Sapiens
cagcaaacuuaacaggcuuuccaauuagccuu

SEQ ID NO: 287287 - RNA, 32 nt, Homo Sapiens
gguuugggaguggaaggggcaggcagugcacu

SEQ ID NO: 287288 - RNA, 32 nt, Homo Sapiens
gaaucagugaauuuuaggaaaaugacucgaua

SEQ ID NO: 287289 - RNA, 32 nt, Homo Sapiens
gcguggagggcugucguuugaacucucccagc

SEQ ID NO: 287290 - RNA, 32 nt, Homo Sapiens
acagggagggaacuggugcauauuuuagccuc

SEQ ID NO: 287291 - RNA, 32 nt, Homo Sapiens
cccauucaucccccugcccccaucugacugcg

SEQ ID NO: 287292 - RNA, 32 nt, Homo Sapiens
aguuguucucuugagcacuuugaauuuauccu

SEQ ID NO: 287293 - RNA, 32 nt, Homo Sapiens
gggggcuuggagaagggcggagcccaccagcc

SEQ ID NO: 287294 - RNA, 32 nt, Homo Sapiens
gaccuccugggcaacauagugagaucccaucu

SEQ ID NO: 287295 - RNA, 32 nt, Homo Sapiens
cuuccucagcuguaguccccaacaucagacuu

SEQ ID NO: 287296 - RNA, 32 nt, Homo Sapiens
ccaucaccuuggagcacugacuguacauagug

SEQ ID NO: 287297 - RNA, 32 nt, Homo Sapiens
uguuuuuaaacacacacacacacacacacaca

SEQ ID NO: 287298 - RNA, 32 nt, Homo Sapiens
ggacucuggggaaaggacgggaggcgggugag

SEQ ID NO: 287299 - RNA, 32 nt, Homo Sapiens
ucuugaagccccaggcgaagcugguaccucug

SEQ ID NO: 287300 - RNA, 32 nt, Homo Sapiens
cgaccuggucccugagccggccggcgaccccg

SEQ ID NO: 287301 - RNA, 32 nt, Homo Sapiens
ucguggggagacaaaaauauaccugugaaaua

SEQ ID NO: 287302 - RNA, 30 nt, Homo Sapiens
aaucuauaaaaaauaaauccuuucuagccc

SEQ ID NO: 287303 - RNA, 32 nt, Homo Sapiens
acuaucagaagacacguuuuucugguuggugu

SEQ ID NO: 287304 - RNA, 32 nt, Homo Sapiens
cccuccccacccaccacccagcuguugaagcu

SEQ ID NO: 287305 - RNA, 32 nt, Homo Sapiens
gaaagacaagaaagcagaaauauuuuuaccgg

SEQ ID NO: 287306 - RNA, 32 nt, Homo Sapiens
uauuuuaauaauaaguauaauuagcuuguucc

SEQ ID NO: 287307 - RNA, 32 nt, Homo Sapiens
uguacuuuagaguauuuuuguauaaaauccau

SEQ ID NO: 287308 - RNA, 32 nt, Homo Sapiens
ggauggcaacgcggaacuccucccagagaaag

SEQ ID NO: 287309 - RNA, 32 nt, Homo Sapiens
guuucugggucccaggccuugcgcucugggac

SEQ ID NO: 287310 - RNA, 32 nt, Homo Sapiens
aauuaaaauaguggcaaaauaagauuuaguug

SEQ ID NO: 287311 - RNA, 32 nt, Homo Sapiens
agaccgcgcccgaucccggcgacagggcgggc

SEQ ID NO: 287312 - RNA, 30 nt, Homo Sapiens
gagacgggcgggcgcgcgggccaaugggug

SEQ ID NO: 287313 - RNA, 31 nt, Homo Sapiens
guccucagcacuucacccagagccuggcaca

SEQ ID NO: 287314 - RNA, 32 nt, Homo Sapiens
aggcaaguuaccagugggcccgcggcuaucau

SEQ ID NO: 287315 - RNA, 32 nt, Homo Sapiens
gagcuggauugccugcaaauagugaaagccug

SEQ ID NO: 287316 - RNA, 32 nt, Homo Sapiens
gggcccagccuggguucugcuggaagcugaug

SEQ ID NO: 287317 - RNA, 32 nt, Homo Sapiens
cgcucccaggaggaacgagaaugaauaugacu

SEQ ID NO: 287318 - RNA, 32 nt, Homo Sapiens
uucaacuuuguaucaguauacuguauuuauaa

SEQ ID NO: 287319 - RNA, 32 nt, Homo Sapiens
gcacagagagcagcggacuccggagcgucagc

SEQ ID NO: 287320 - RNA, 32 nt, Homo Sapiens
ccuuuccggccgguccccauggaggcgcuggg

SEQ ID NO: 287321 - RNA, 32 nt, Homo Sapiens
ccaaauuuaguuccucaucacaaaagaacaaa

SEQ ID NO: 287322 - RNA, 32 nt, Homo Sapiens
uuaaucuacuguaucaauaaaauucuguaauu

SEQ ID NO: 287323 - RNA, 27 nt, Homo Sapiens
agccuccucgccuucagccuccucagc

SEQ ID NO: 287324 - RNA, 31 nt, Homo Sapiens
accuaggcuggagcccuucagaauacuguca

SEQ ID NO: 287325 - RNA, 32 nt, Homo Sapiens
uuuaccgcugcguucugggagcuccucccccu

SEQ ID NO: 287326 - RNA, 28 nt, Homo Sapiens
agugaggggcggcuggcgggggacugcu

SEQ ID NO: 287327 - RNA, 32 nt, Homo Sapiens
uccuaacuuuuuguauuuuucuuguauagcca

SEQ ID NO: 287328 - RNA, 32 nt, Homo Sapiens
cacauugaaauaugucuauaugcugaauauag

SEQ ID NO: 287329 - RNA, 32 nt, Homo Sapiens
uaaacauaaguaugaagugcucuuuuugcugg

SEQ ID NO: 287330 - RNA, 32 nt, Homo Sapiens
cuugccucccgggcugcccugagugaaacgcc

SEQ ID NO: 287331 - RNA, 32 nt, Homo Sapiens
cggcacagcgaggucggcagcggcacagcgag

SEQ ID NO: 287332 - RNA, 32 nt, Homo Sapiens
uugucaugaaaacaccagcuccugcaccccug

SEQ ID NO: 287333 - RNA, 32 nt, Homo Sapiens
gccuggaagauaaaaauggagcaccccauggc

SEQ ID NO: 287334 - RNA, 32 nt, Homo Sapiens
aggcaaaaaaaguauuugauaucauuguacau

SEQ ID NO: 287335 - RNA, 32 nt, Homo Sapiens
uugugaaaugucaaaauauggcuaugguuuca

SEQ ID NO: 287336 - RNA, 32 nt, Homo Sapiens
aucauccccucgcagcacuuguucguaaggca

SEQ ID NO: 287337 - RNA, 32 nt, Homo Sapiens
guuuuccccuugaauggcguguguguauauau

SEQ ID NO: 287338 - RNA, 32 nt, Homo Sapiens
aggacacuuguggcaauauggcaccgauggcu

SEQ ID NO: 287339 - RNA, 32 nt, Homo Sapiens
ggcagggcugcggggaggccaggccgagcccc

SEQ ID NO: 287340 - RNA, 32 nt, Homo Sapiens
cagcaaguuuuaaaauagugacuaucuuaaaa

SEQ ID NO: 287341 - RNA, 32 nt, Homo Sapiens
gccuccguccccgcccuccaggcuucucguuc

SEQ ID NO: 287342 - RNA, 32 nt, Homo Sapiens
uuuucucaagcacagcguuugcucuuagacuc

SEQ ID NO: 287343 - RNA, 32 nt, Homo Sapiens
ugaaagccugacgccgugccccuccuggccca

SEQ ID NO: 287344 - RNA, 32 nt, Homo Sapiens
acucggaucaacuggcagucguuguugguaga

SEQ ID NO: 287345 - RNA, 32 nt, Homo Sapiens
gagagaguagagaacaacaugacccuggaugg

SEQ ID NO: 287346 - RNA, 32 nt, Homo Sapiens
gccaccgugucuggaggaagcugauguggaag

SEQ ID NO: 287347 - RNA, 32 nt, Homo Sapiens
auucaauuauuuuaagcauuugaauuauuuau

SEQ ID NO: 287348 - RNA, 32 nt, Homo Sapiens
uggguggugucugcgggaaacaguacugaguc

SEQ ID NO: 287349 - RNA, 32 nt, Homo Sapiens
ccuguauggcuuuggcggcugguguuuuacuu

SEQ ID NO: 287350 - RNA, 32 nt, Homo Sapiens
aucucauuccagcccacaucuucuccuuuccu

SEQ ID NO: 287351 - RNA, 32 nt, Homo Sapiens
gguuguugcaggugcuagccgccugccugcga

SEQ ID NO: 287352 - RNA, 32 nt, Homo Sapiens
acauccuguuugcggagcuuugaaauauugga

SEQ ID NO: 287353 - RNA, 32 nt, Homo Sapiens
auauuauuuuuccuaauuagaaaagucacagg

SEQ ID NO: 287354 - RNA, 32 nt, Homo Sapiens
ucuaccugcuccacccucaauccaccagaacc

SEQ ID NO: 287355 - RNA, 32 nt, Homo Sapiens
acucagaggacgagggcgacagcagcgugucc

SEQ ID NO: 287356 - RNA, 32 nt, Homo Sapiens
ccugugauuggcgccugcgccggcggaccgug

SEQ ID NO: 287357 - RNA, 32 nt, Homo Sapiens
gccccagaggcuuuuccagcacccaugauguu

SEQ ID NO: 287358 - RNA, 32 nt, Homo Sapiens
uauugugcuuugcaucuccaggcaguucucuc

SEQ ID NO: 287359 - RNA, 32 nt, Homo Sapiens
uggggccucgaagggauuccuggagcagcaac

SEQ ID NO: 287360 - RNA, 32 nt, Homo Sapiens
ugauugaaaaggaaaagagugagugaacagaa

SEQ ID NO: 287361 - RNA, 32 nt, Homo Sapiens
cauuuuuuuuccuuuucuuuuacuauuauccu

SEQ ID NO: 287362 - RNA, 32 nt, Homo Sapiens
auaacauuaacauuuauugaaacaagucacuc

SEQ ID NO: 287363 - RNA, 32 nt, Homo Sapiens
aguuuaagauggaguguagcucgagcucugua

SEQ ID NO: 287364 - RNA, 32 nt, Homo Sapiens
ucaaaagcaugaaagcacuauugaugugguuu

SEQ ID NO: 287365 - RNA, 32 nt, Homo Sapiens
ggagccugaagucaaggcauuccaaggggcuu

SEQ ID NO: 287366 - RNA, 32 nt, Homo Sapiens
aaauaaugucauuaaaguauuuccuccucuaa

SEQ ID NO: 287367 - RNA, 32 nt, Homo Sapiens
aaauauaugauguuauucuuuggacacuaggu

SEQ ID NO: 287368 - RNA, 32 nt, Homo Sapiens
acauccaugaugaacgaaaccucaaaauuuua

SEQ ID NO: 287369 - RNA, 32 nt, Homo Sapiens
uguaccuucaccacccucugguguccccugcu

SEQ ID NO: 287370 - RNA, 32 nt, Homo Sapiens
cgcagacccucugugaagccaggccggccggg

SEQ ID NO: 287371 - RNA, 32 nt, Homo Sapiens
gacagaaggaccuuuacauggcagcuaacagu

SEQ ID NO: 287372 - RNA, 32 nt, Homo Sapiens
aguucgagcccagccugaccaauauggugaaa

SEQ ID NO: 287373 - RNA, 32 nt, Homo Sapiens
gugcuuagaacucauccuggcccgcagagccu

SEQ ID NO: 287374 - RNA, 32 nt, Homo Sapiens
uuuuuaugucuaguauguaugcuugagugaau

SEQ ID NO: 287375 - RNA, 32 nt, Homo Sapiens
agcccacgucccgcuuucagaccccaggccca

SEQ ID NO: 287376 - RNA, 32 nt, Homo Sapiens
aagaaugucuucauauuugacuugcuaagcua

SEQ ID NO: 287377 - RNA, 32 nt, Homo Sapiens
acuuuuacuuuugacgaccaccaugacugaga

SEQ ID NO: 287378 - RNA, 32 nt, Homo Sapiens
cuccaggcaggccugguuauccugcuugaggc

SEQ ID NO: 287379 - RNA, 32 nt, Homo Sapiens
guuuaucugaugccaaaguuugugaugcucuu

SEQ ID NO: 287380 - RNA, 32 nt, Homo Sapiens
aauguauuuuuggcacugcgauuuuaaccauu

SEQ ID NO: 287381 - RNA, 32 nt, Homo Sapiens
uuauuucuuaaaauuucagaauagauauucac

SEQ ID NO: 287382 - RNA, 28 nt, Homo Sapiens
cuaaguguggcuacacggauggcaggcu

SEQ ID NO: 287383 - RNA, 32 nt, Homo Sapiens
gccuauuccccggccugcagcguccccgacgu

SEQ ID NO: 287384 - RNA, 32 nt, Homo Sapiens
accccuaauguuuauauauuaauuauuucaau

SEQ ID NO: 287385 - RNA, 32 nt, Homo Sapiens
ccaucuucacuggcuuccccagccacucacgu

SEQ ID NO: 287386 - RNA, 32 nt, Homo Sapiens
agugugcguggccaccugaaugcugccuuauc

SEQ ID NO: 287387 - RNA, 32 nt, Homo Sapiens
aguguucugaauagagacgccuaaaacaagua

SEQ ID NO: 287388 - RNA, 32 nt, Homo Sapiens
acagcaccuguagaagacaaaucugguagaca

SEQ ID NO: 287389 - RNA, 30 nt, Homo Sapiens
gagugugagacccuguucuaacucuuagaa

SEQ ID NO: 287390 - RNA, 32 nt, Homo Sapiens
uuuucuucuugcaccuugggaaguggaggacg

SEQ ID NO: 287391 - RNA, 32 nt, Homo Sapiens
ccacagaugcccucgcagcccuuucgcgcuuc

SEQ ID NO: 287392 - RNA, 32 nt, Homo Sapiens
cugcugugucacccgcuuucccucccagcccc

SEQ ID NO: 287393 - RNA, 32 nt, Homo Sapiens
auuuuuaaaaauuuuaggaugaaggaaacaag

SEQ ID NO: 287394 - RNA, 32 nt, Homo Sapiens
ucggagccaugccguccaagggcccgcugcag

SEQ ID NO: 287395 - RNA, 32 nt, Homo Sapiens
uacauguaguggugugguguucugucuagagg

SEQ ID NO: 287396 - RNA, 32 nt, Homo Sapiens
uaucucagcucacugcaaccacugccucccag

SEQ ID NO: 287397 - RNA, 32 nt, Homo Sapiens
gaacuaggaaauguuccaacacaucugaggaa

SEQ ID NO: 287398 - RNA, 31 nt, Homo Sapiens
gggucaucuugauuagauuagauuagauuag

SEQ ID NO: 287399 - RNA, 32 nt, Homo Sapiens
cauaugaaaaagaucaggcuuucugacuucca

SEQ ID NO: 287400 - RNA, 32 nt, Homo Sapiens
agccccuccgcccggcagccgccccgucugag

SEQ ID NO: 287401 - RNA, 32 nt, Homo Sapiens
uucauuguuaacuuugcauuugcaauuggugc

SEQ ID NO: 287402 - RNA, 32 nt, Homo Sapiens
uuugaaaugcaaacagguuugaaaauauguau

SEQ ID NO: 287403 - RNA, 32 nt, Homo Sapiens
gcagccccugcgccaacaccaccuucugcugc

SEQ ID NO: 287404 - RNA, 32 nt, Homo Sapiens
uauuuauuucuucuaggaaacaauagauaaac

SEQ ID NO: 287405 - RNA, 32 nt, Homo Sapiens
ucuuuuuuccauucuucaggaccuucggcaag

SEQ ID NO: 287406 - RNA, 32 nt, Homo Sapiens
guugggcagggccaccugugcuaguuuaaccu

SEQ ID NO: 287407 - RNA, 32 nt, Homo Sapiens
uguuacgucacuuuucuauaguuuugagaguu

SEQ ID NO: 287408 - RNA, 32 nt, Homo Sapiens
ucccccaagaaaggcaggauccuggucccugc

SEQ ID NO: 287409 - RNA, 32 nt, Homo Sapiens
uccccuaguguccuuaaguccuccuccacagg

SEQ ID NO: 287410 - RNA, 32 nt, Homo Sapiens
ucaaauguauuuacaaagagaauuuggccagg

SEQ ID NO: 287411 - RNA, 32 nt, Homo Sapiens
ggaaaagggaguaaaagguguauuuuugucgu

SEQ ID NO: 287412 - RNA, 32 nt, Homo Sapiens
uucuaguggaugcaugcagccuuuuuuucaau

SEQ ID NO: 287413 - RNA, 32 nt, Homo Sapiens
guaaaacccuuuugagggaagagggagacugg

SEQ ID NO: 287414 - RNA, 32 nt, Homo Sapiens
ucaaugugugauuuuaaaaauaaacagcaaca

SEQ ID NO: 287415 - RNA, 32 nt, Homo Sapiens
ggggcacagggagaggccgggacacacuuagc

SEQ ID NO: 287416 - RNA, 32 nt, Homo Sapiens
gagccccccacauggugccgcggcacgucccc

SEQ ID NO: 287417 - RNA, 32 nt, Homo Sapiens
gggccgcucgccccgcuaguccugccugucuc

SEQ ID NO: 287418 - RNA, 32 nt, Homo Sapiens
uuacacccaagccuugaugggauucugcugcg

SEQ ID NO: 287419 - RNA, 32 nt, Homo Sapiens
ugacugaaagggaaaaguggaggaaacgcagc

SEQ ID NO: 287420 - RNA, 31 nt, Homo Sapiens
uuucuccugugcuaagaaauagcuccagcca

SEQ ID NO: 287421 - RNA, 32 nt, Homo Sapiens
cuccuccgccagaggccacgggcgcccuuguu

SEQ ID NO: 287422 - RNA, 32 nt, Homo Sapiens
gaaaggaagagaaaacgugggguguggaagac

SEQ ID NO: 287423 - RNA, 32 nt, Homo Sapiens
uugcaugcaauaaaauucaauaaaauuaaaug

SEQ ID NO: 287424 - RNA, 32 nt, Homo Sapiens
uucaggacaagccaccugaugccccucggccc

SEQ ID NO: 287425 - RNA, 32 nt, Homo Sapiens
gguucuuccuuccugcgcuucuuccccaaagc

SEQ ID NO: 287426 - RNA, 32 nt, Homo Sapiens
cagagaggggcaggugcugggcggcggcugac

SEQ ID NO: 287427 - RNA, 32 nt, Homo Sapiens
gcugggagaagcucuucgcgcugcgcgccccg

SEQ ID NO: 287428 - RNA, 32 nt, Homo Sapiens
aucuaaacuguauagcacuuugugaagugauu

SEQ ID NO: 287429 - RNA, 32 nt, Homo Sapiens
uggaauuugucaacagacuggaguccuugaca

SEQ ID NO: 287430 - RNA, 32 nt, Homo Sapiens
caacucuucugccucagcaucccaaguagcug

SEQ ID NO: 287431 - RNA, 32 nt, Homo Sapiens
uuccucagggcuggguaccugcucuccgaguc

SEQ ID NO: 287432 - RNA, 32 nt, Homo Sapiens
uagcuacaaaaauaaacacaaugaaaccgauc

SEQ ID NO: 287433 - RNA, 32 nt, Homo Sapiens
gaaggugcuggagaugccaagugagugugugc

SEQ ID NO: 287434 - RNA, 32 nt, Homo Sapiens
uuaggcuuugcuauauccccaggccaaauagc

SEQ ID NO: 287435 - RNA, 32 nt, Homo Sapiens
gaaacaaucaggggcuaacuacagaggauaaa

SEQ ID NO: 287436 - RNA, 32 nt, Homo Sapiens
uuucugcccguggacaccgccgaagaagcauc

SEQ ID NO: 287437 - RNA, 32 nt, Homo Sapiens
ucagcucuagaucccccuccccugccugcucu

SEQ ID NO: 287438 - RNA, 32 nt, Homo Sapiens
aaagaucgcuugaugcugcugcuugguggcag

SEQ ID NO: 287439 - RNA, 31 nt, Homo Sapiens
auuuccugccggugccuagggccgacgggga

SEQ ID NO: 287440 - RNA, 32 nt, Homo Sapiens
aagcaugaaggggacuguccccucgcuugcuc

SEQ ID NO: 287441 - RNA, 28 nt, Homo Sapiens
acuguauaacauuaacauuugaauguuu

SEQ ID NO: 287442 - RNA, 32 nt, Homo Sapiens
ccuccgcccgcacccagcaugcuucgccgagg

SEQ ID NO: 287443 - RNA, 32 nt, Homo Sapiens
cacuacauucuguaaccuuguuucuuuuacuc

SEQ ID NO: 287444 - RNA, 32 nt, Homo Sapiens
ugguugaaaauaauuuguguauuuucaguaac

SEQ ID NO: 287445 - RNA, 32 nt, Homo Sapiens
guuccccuucccgcccccucgacuggaggcag

SEQ ID NO: 287446 - RNA, 32 nt, Homo Sapiens
cgaggagcccccacggccccaccuuuccccau

SEQ ID NO: 287447 - RNA, 32 nt, Homo Sapiens
aacuagcagccucuggcuuguuuucuacuccc

SEQ ID NO: 287448 - RNA, 32 nt, Homo Sapiens
cugaagggaaagggcucuuuuccugcuguuuc

SEQ ID NO: 287449 - RNA, 32 nt, Homo Sapiens
aagcaauuauauauauuuuggaaaguucaugu

SEQ ID NO: 287450 - RNA, 32 nt, Homo Sapiens
cuauauuuaaaucauuuuaacuucuauagguu

SEQ ID NO: 287451 - RNA, 32 nt, Homo Sapiens
agccgggcgugguggcgggcgccuguaauccu

SEQ ID NO: 287452 - RNA, 32 nt, Homo Sapiens
agcuagaggaagcagaagagcaguauguggau

SEQ ID NO: 287453 - RNA, 32 nt, Homo Sapiens
uuuuguuacaugaaagguugaaauauugagug

SEQ ID NO: 287454 - RNA, 32 nt, Homo Sapiens
ugccucgaccaucaaagccggagcuccagggc

SEQ ID NO: 287455 - RNA, 32 nt, Homo Sapiens
ggcccggcgauggcccggguggcgacugcgac

SEQ ID NO: 287456 - RNA, 32 nt, Homo Sapiens
gacuauugaaaugcgaaaaauuagauugaggc

SEQ ID NO: 287457 - RNA, 32 nt, Homo Sapiens
ggggauuuuacagccgagggaccuccaaaggg

SEQ ID NO: 287458 - RNA, 32 nt, Homo Sapiens
ccaccaguucuacugugacauacucgaguaua

SEQ ID NO: 287459 - RNA, 32 nt, Homo Sapiens
gugacuauucgaauaggaaaugucaacgacaa

SEQ ID NO: 287460 - RNA, 32 nt, Homo Sapiens
uggcuucccucaugucugcguuggcugcccaa

SEQ ID NO: 287461 - RNA, 32 nt, Homo Sapiens
uggccgcuuuugcuaugaggaugaccugcuca

SEQ ID NO: 287462 - RNA, 32 nt, Homo Sapiens
ccccacaugcccagcagccccauccuugugaa

SEQ ID NO: 287463 - RNA, 32 nt, Homo Sapiens
agaaggugugaccucuuguugcuugaggcaca

SEQ ID NO: 287464 - RNA, 32 nt, Homo Sapiens
aauccaaaauuaacucuguaaaugucagagaa

SEQ ID NO: 287465 - RNA, 32 nt, Homo Sapiens
gcaguguguacuuuguuuuugugagucauguc

SEQ ID NO: 287466 - RNA, 32 nt, Homo Sapiens
uugggagggcuggucccaagccugcugugcuc

SEQ ID NO: 287467 - RNA, 32 nt, Homo Sapiens
uugggcacccugccuccaggagauggaggcac

SEQ ID NO: 287468 - RNA, 32 nt, Homo Sapiens
acucagaaagaaaaaacaaaaagaaaauuagu

SEQ ID NO: 287469 - RNA, 32 nt, Homo Sapiens
ccgcucgcucgcccggcccgcgacucaugucc

SEQ ID NO: 287470 - RNA, 31 nt, Homo Sapiens
auguuccaagccaucuacugagggaggcaga

SEQ ID NO: 287471 - RNA, 32 nt, Homo Sapiens
cgcggagcgagguggccgcagcgucuccgcgc

SEQ ID NO: 287472 - RNA, 32 nt, Homo Sapiens
gacugaaugcuguuaauauuucuaaaaguuuc

SEQ ID NO: 287473 - RNA, 32 nt, Homo Sapiens
auauauucucaaagugaucugauauuuggaaa

SEQ ID NO: 287474 - RNA, 32 nt, Homo Sapiens
uccuuaggaugaauucuuagaaguggaacuuc

SEQ ID NO: 287475 - RNA, 32 nt, Homo Sapiens
caaauucucagugauaaauaugugugcagauc

SEQ ID NO: 287476 - RNA, 32 nt, Homo Sapiens
guugucuguaaauaauauauguuugacaucug

SEQ ID NO: 287477 - RNA, 32 nt, Homo Sapiens
ccaaagagcagccagacccuguccucugcgcu

SEQ ID NO: 287478 - RNA, 32 nt, Homo Sapiens
gaagaguguugaacagaagugguuauagaggc

SEQ ID NO: 287479 - RNA, 32 nt, Homo Sapiens
uggguucugggaguguucugugccucuuacau

SEQ ID NO: 287480 - RNA, 32 nt, Homo Sapiens
acuuggcaugggccagcuccgugcauggcauu

SEQ ID NO: 287481 - RNA, 32 nt, Homo Sapiens
cuguguugacauuugcaauuaauauuucaaua

SEQ ID NO: 287482 - RNA, 32 nt, Homo Sapiens
gguggccuggggacuggagggaccaggaugcu

SEQ ID NO: 287483 - RNA, 32 nt, Homo Sapiens
uggcucucggcagccuucccaggccccgcuuu

SEQ ID NO: 287484 - RNA, 32 nt, Homo Sapiens
gcagaaaggauaacagaagaccaggagaaaaa

SEQ ID NO: 287485 - RNA, 32 nt, Homo Sapiens
uuaaaauguagaagaaagcaaaaaauaaaaua

SEQ ID NO: 287486 - RNA, 32 nt, Homo Sapiens
cuccuaggacagagacucagcgaacccuugcu

SEQ ID NO: 287487 - RNA, 32 nt, Homo Sapiens
cucuaucauuggccuccaaacacagauugugu

SEQ ID NO: 287488 - RNA, 32 nt, Homo Sapiens
cggauacugcgccugcgccgcggcagaggcuc

SEQ ID NO: 287489 - RNA, 32 nt, Homo Sapiens
ccgaggaacugggcgcuugcagugcguugcac

SEQ ID NO: 287490 - RNA, 32 nt, Homo Sapiens
aaaaauugcugcguuuuugguaaaggguguaa

SEQ ID NO: 287491 - RNA, 32 nt, Homo Sapiens
cccagcccaucccuccggccccugugccucug

SEQ ID NO: 287492 - RNA, 32 nt, Homo Sapiens
ccuagggaccuugccgcugaccaagagggagg

SEQ ID NO: 287493 - RNA, 32 nt, Homo Sapiens
cgcggccauggcucaccuccggggauuugcca

SEQ ID NO: 287494 - RNA, 32 nt, Homo Sapiens
uugcucaggaaacagggcagccaggcccccaa

SEQ ID NO: 287495 - RNA, 32 nt, Homo Sapiens
aguuccaugaccugaaguuaaccccguucuuc

SEQ ID NO: 287496 - RNA, 32 nt, Homo Sapiens
guuucauuuuuacaccaauuugguaaaaaugc

SEQ ID NO: 287497 - RNA, 32 nt, Homo Sapiens
uagcugcaaaaauaaucaugaaccaaucugga

SEQ ID NO: 287498 - RNA, 32 nt, Homo Sapiens
gagugugagcauuuaagaagcauccucugcca

SEQ ID NO: 287499 - RNA, 32 nt, Homo Sapiens
ccuucucuagaauccagcccagaucugaggcc

SEQ ID NO: 287500 - RNA, 32 nt, Homo Sapiens
gucagcuuaaugcuuuuacaucucgaugugac

SEQ ID NO: 287501 - RNA, 31 nt, Homo Sapiens
auuuuucgguuuccuucaucauucucuucuc

SEQ ID NO: 287502 - RNA, 32 nt, Homo Sapiens
gcguggggcagucggugggggaggcaggcggu

SEQ ID NO: 287503 - RNA, 32 nt, Homo Sapiens
uagccccaggacaggugacaagaaagaucuaa

SEQ ID NO: 287504 - RNA, 30 nt, Homo Sapiens
caccaguaucaccacuuuggaaggggacag

SEQ ID NO: 287505 - RNA, 31 nt, Homo Sapiens
aaaauucacaggagaaaguaacacuaucaau

SEQ ID NO: 287506 - RNA, 32 nt, Homo Sapiens
auaaucuagacuuuuccaaacaagauggcaac

SEQ ID NO: 287507 - RNA, 32 nt, Homo Sapiens
acacugaugauuuguggaaaagaaauagaagu

SEQ ID NO: 287508 - RNA, 32 nt, Homo Sapiens
gucacaaagcuacuuacuguacaugggcagua

SEQ ID NO: 287509 - RNA, 32 nt, Homo Sapiens
auucgaagaaacaaaacauucguucuacuaga

SEQ ID NO: 287510 - RNA, 32 nt, Homo Sapiens
uaacaaaauggcaaccuuaauguaugcuguga

SEQ ID NO: 287511 - RNA, 32 nt, Homo Sapiens
auuacuguuuuaaugauucaguuucuucagag

SEQ ID NO: 287512 - RNA, 32 nt, Homo Sapiens
gugcaguggcaugaucucaacucucaacucac

SEQ ID NO: 287513 - RNA, 32 nt, Homo Sapiens
guggguuggggaugacaggggaggaugcugac

SEQ ID NO: 287514 - RNA, 32 nt, Homo Sapiens
cccguccucucggcugccaggggcucuguggc

SEQ ID NO: 287515 - RNA, 32 nt, Homo Sapiens
aagugaucgugccuuuaccucaguaaugugua

SEQ ID NO: 287516 - RNA, 32 nt, Homo Sapiens
cccgaggcccucgcagcagggagcucagcgag

SEQ ID NO: 287517 - RNA, 32 nt, Homo Sapiens
agcggaaaaagaaccaaagaagggcaguucaa

SEQ ID NO: 287518 - RNA, 32 nt, Homo Sapiens
auauuguagccccacuauucuccucuuuauca

SEQ ID NO: 287519 - RNA, 30 nt, Homo Sapiens
acgaacugugauggcggcggccgcggugau

SEQ ID NO: 287520 - RNA, 32 nt, Homo Sapiens
uucagggaagggaaacaauaaaucucgcugaa

SEQ ID NO: 287521 - RNA, 31 nt, Homo Sapiens
ccacagcagcgcagguagauggggcugaccu

SEQ ID NO: 287522 - RNA, 32 nt, Homo Sapiens
uuuacagcuuuugcauuuccuguuguauuuau

SEQ ID NO: 287523 - RNA, 27 nt, Homo Sapiens
ccaugcgcugggugugggcgcugcuga

SEQ ID NO: 287524 - RNA, 32 nt, Homo Sapiens
caucucugcccccggggagccucccaucuggu

SEQ ID NO: 287525 - RNA, 32 nt, Homo Sapiens
acuggcagugggacgagcuagcccgaacugac

SEQ ID NO: 287526 - RNA, 30 nt, Homo Sapiens
auuacaggcaggcgccaccaggcccggcua

SEQ ID NO: 287527 - RNA, 32 nt, Homo Sapiens
cauaaaccaacccggcuuucuccggaggaaug

SEQ ID NO: 287528 - RNA, 32 nt, Homo Sapiens
uucacuugaucuccagcuuccaacuuaagcag

SEQ ID NO: 287529 - RNA, 32 nt, Homo Sapiens
cauaaauauuaccaugaugaauucuagugaaa

SEQ ID NO: 287530 - RNA, 32 nt, Homo Sapiens
cucgggagcucgagcagcggcggcggcaagac

SEQ ID NO: 287531 - RNA, 32 nt, Homo Sapiens
ccgcgcuggcaccggaggcagcucccagggcc

SEQ ID NO: 287532 - RNA, 32 nt, Homo Sapiens
caaagaauauuuuuaauguggauaucuaauuc

SEQ ID NO: 287533 - RNA, 32 nt, Homo Sapiens
gcuuaaucauacgucaaaaucuguaaaaucug

SEQ ID NO: 287534 - RNA, 32 nt, Homo Sapiens
cucuuguguaccauacaacaaauacaccagga

SEQ ID NO: 287535 - RNA, 32 nt, Homo Sapiens
gguuguuuguuguuuguuuguuuuccuacaag

SEQ ID NO: 287536 - RNA, 32 nt, Homo Sapiens
accugugccaggcugaauuacagugaaauuuu

SEQ ID NO: 287537 - RNA, 32 nt, Homo Sapiens
ucagggaggcggaacauuccagaaugcuucag

SEQ ID NO: 287538 - RNA, 32 nt, Homo Sapiens
guaaauacugcuuguuugugucucucugcugu

SEQ ID NO: 287539 - RNA, 32 nt, Homo Sapiens
ggcggcguucccacccacaccuucgacgcgac

SEQ ID NO: 287540 - RNA, 32 nt, Homo Sapiens
auccaguguuucugcuuucaguuucuuggcuu

SEQ ID NO: 287541 - RNA, 32 nt, Homo Sapiens
uguggaucagcccacacccuucccagagccag

SEQ ID NO: 287542 - RNA, 32 nt, Homo Sapiens
gaaauuucuccauuuuaauuucuaauaaauau

SEQ ID NO: 287543 - RNA, 32 nt, Homo Sapiens
caccccaggcccuccacauccuccucccuguc

SEQ ID NO: 287544 - RNA, 32 nt, Homo Sapiens
cucaagaauccaaaaugggucuguggacauag

SEQ ID NO: 287545 - RNA, 32 nt, Homo Sapiens
guccuacucaccagcuggguggcaccaccggc

SEQ ID NO: 287546 - RNA, 32 nt, Homo Sapiens
accccccagccccuccucccucagacccagga

SEQ ID NO: 287547 - RNA, 32 nt, Homo Sapiens
agaccccuccccagcccucccgucggcagggg

SEQ ID NO: 287548 - RNA, 32 nt, Homo Sapiens
caagacuuuuaaaaagcacuucuacuugguuu

SEQ ID NO: 287549 - RNA, 32 nt, Homo Sapiens
aacuccgccucccagguucacgccauucuccu

SEQ ID NO: 287550 - RNA, 32 nt, Homo Sapiens
ggcgcaggccccacaggagcuggcuggaggcu

SEQ ID NO: 287551 - RNA, 32 nt, Homo Sapiens
uuaaccucucugaaccucagcuucucauccac

SEQ ID NO: 287552 - RNA, 32 nt, Homo Sapiens
gaagacauuaaacaggcaguuuguaggaauca

SEQ ID NO: 287553 - RNA, 32 nt, Homo Sapiens
gguuucaccauguuggccaggcuggucacaaa

SEQ ID NO: 287554 - RNA, 32 nt, Homo Sapiens
gggaccaccagccccaggauggcagagggacc

SEQ ID NO: 287555 - RNA, 32 nt, Homo Sapiens
gacacuuuuucaucaucuaaacugauucgcau

SEQ ID NO: 287556 - RNA, 32 nt, Homo Sapiens
agcaauaguaaagacuagaaacaaagaaaauu

SEQ ID NO: 287557 - RNA, 32 nt, Homo Sapiens
gccugaguugugaagcgcaacccccgcaaaac

SEQ ID NO: 287558 - RNA, 32 nt, Homo Sapiens
ggguuccgccgcggccgcagcgacccgacccc

SEQ ID NO: 287559 - RNA, 32 nt, Homo Sapiens
aaggagugacuuucuuucugcuacguguaaua

SEQ ID NO: 287560 - RNA, 30 nt, Homo Sapiens
cccucagcgcccguagcuucggcggagucu

SEQ ID NO: 287561 - RNA, 32 nt, Homo Sapiens
acauucagacuagaagcagccaaagaugauua

SEQ ID NO: 287562 - RNA, 32 nt, Homo Sapiens
auaacguaaaaauacaggggcuacaggagggu

SEQ ID NO: 287563 - RNA, 32 nt, Homo Sapiens
caagggagaagcugcuggucggacucacaaug

SEQ ID NO: 287564 - RNA, 32 nt, Homo Sapiens
gaccaccugcggccccauggggugcuggauaa

SEQ ID NO: 287565 - RNA, 32 nt, Homo Sapiens
cgggucuuucugaggguccaccagccauccua

SEQ ID NO: 287566 - RNA, 32 nt, Homo Sapiens
agagcagccccacagcugggaagaaguugcca

SEQ ID NO: 287567 - RNA, 32 nt, Homo Sapiens
gcagacuguacuuagcauugucuaaauccauu

SEQ ID NO: 287568 - RNA, 32 nt, Homo Sapiens
agggggguggugggugggagggggcaaguaaa

SEQ ID NO: 287569 - RNA, 32 nt, Homo Sapiens
agguucucaauauauuaaaauucacaugaaaa

SEQ ID NO: 287570 - RNA, 32 nt, Homo Sapiens
uguaugaugagccccagggcccauccugaggu

SEQ ID NO: 287571 - RNA, 32 nt, Homo Sapiens
aaagucaucugccugcuccccgggggagagga

SEQ ID NO: 287572 - RNA, 32 nt, Homo Sapiens
ccgcgaaccuccccacaccucccucaccgcgc

SEQ ID NO: 287573 - RNA, 32 nt, Homo Sapiens
agauuugacuugaguucuuuaugacccaggac

SEQ ID NO: 287574 - RNA, 32 nt, Homo Sapiens
guuggaaccggcgggggaagggugcgggggcg

SEQ ID NO: 287575 - RNA, 32 nt, Homo Sapiens
gagucugugggaaguagguagggcugggcacu

SEQ ID NO: 287576 - RNA, 32 nt, Homo Sapiens
ggugcgcccauuggccgcugggcccccuacgu

SEQ ID NO: 287577 - RNA, 32 nt, Homo Sapiens
acuguucuuuggaccuaggauucugccgugag

SEQ ID NO: 287578 - RNA, 32 nt, Homo Sapiens
uauguauauauucgaauaagacuccaaaaagu

SEQ ID NO: 287579 - RNA, 31 nt, Homo Sapiens
gcaguggugucguucaccgugagagucugca

SEQ ID NO: 287580 - RNA, 32 nt, Homo Sapiens
ccaagugggaaaauaaagacuucuuggaugac

SEQ ID NO: 287581 - RNA, 32 nt, Homo Sapiens
cuggguaggaccagacuggucucuacauucca

SEQ ID NO: 287582 - RNA, 32 nt, Homo Sapiens
ugcaugaaaaagauggagaaacaugccauuuu

SEQ ID NO: 287583 - RNA, 32 nt, Homo Sapiens
guaauuauccuuaugauuuucuuaauaccauu

SEQ ID NO: 287584 - RNA, 32 nt, Homo Sapiens
cccggccgucaccccacccgaugaccugcaug

SEQ ID NO: 287585 - RNA, 32 nt, Homo Sapiens
ucacacacuaaacacauuuuauuguuauuucu

SEQ ID NO: 287586 - RNA, 32 nt, Homo Sapiens
agaaacaaggaagaaauugacccugacgaaga

SEQ ID NO: 287587 - RNA, 32 nt, Homo Sapiens
caagccugcugguggcagagccagguuccaau

SEQ ID NO: 287588 - RNA, 32 nt, Homo Sapiens
gagagcggcggccagggaggugcggagcagcc

SEQ ID NO: 287589 - RNA, 32 nt, Homo Sapiens
ccuuuguuccugcagcguggacccugccagca

SEQ ID NO: 287590 - RNA, 32 nt, Homo Sapiens
cuuugguuugguuuucugagaagauaggauug

SEQ ID NO: 287591 - RNA, 29 nt, Homo Sapiens
aaguaauaaaguuuuuauuuggcuguuga

SEQ ID NO: 287592 - RNA, 32 nt, Homo Sapiens
cccuaaaaacucccuaggaaguaacagaaaag

SEQ ID NO: 287593 - RNA, 32 nt, Homo Sapiens
aggacauggauccaaaaugaugaugaagcauc

SEQ ID NO: 287594 - RNA, 32 nt, Homo Sapiens
ggagcccacucggauugcucuccgcccggguc

SEQ ID NO: 287595 - RNA, 32 nt, Homo Sapiens
uccccuucuucucuccuuggccucacucugca

SEQ ID NO: 287596 - RNA, 32 nt, Homo Sapiens
uguugcugugguuuucagaauuuucucuuuua

SEQ ID NO: 287597 - RNA, 32 nt, Homo Sapiens
gcgcgggacaaagggaagcgaagccggagcug

SEQ ID NO: 287598 - RNA, 32 nt, Homo Sapiens
cuuuagagaagcuugaucuuggaggccucacc

SEQ ID NO: 287599 - RNA, 32 nt, Homo Sapiens
ugucaugacaucacugauggguaauagaaugu

SEQ ID NO: 287600 - RNA, 32 nt, Homo Sapiens
cuucuuccagugaagcacgaggucuugguucc

SEQ ID NO: 287601 - RNA, 32 nt, Homo Sapiens
auuuaaacuaaauuacuguuuuauguugaucu

SEQ ID NO: 287602 - RNA, 32 nt, Homo Sapiens
cagcagggacugugggggcgggcggugaggau

SEQ ID NO: 287603 - RNA, 32 nt, Homo Sapiens
gauccucaggugggcucugcugugugcccuca

SEQ ID NO: 287604 - RNA, 32 nt, Homo Sapiens
cggcggagcccggggccguggaugcugcgugc

SEQ ID NO: 287605 - RNA, 32 nt, Homo Sapiens
auaucaauuacaaugaugauauuucacuacag

SEQ ID NO: 287606 - RNA, 32 nt, Homo Sapiens
acaugacuaacaaggauagcuggccaugccca

SEQ ID NO: 287607 - RNA, 32 nt, Homo Sapiens
ggcagcagugaucugggaauuauuuaaugcuu

SEQ ID NO: 287608 - RNA, 32 nt, Homo Sapiens
uaugaaauuuuuucuguuauuauuguagggau

SEQ ID NO: 287609 - RNA, 32 nt, Homo Sapiens
gagcagagcgggcgguaaagcugcugaccgau

SEQ ID NO: 287610 - RNA, 32 nt, Homo Sapiens
cggcgccgaggguggggcgcgggcguaguggc

SEQ ID NO: 287611 - RNA, 32 nt, Homo Sapiens
gcuccgaagggaacuggcuggcuguccgucca

SEQ ID NO: 287612 - RNA, 32 nt, Homo Sapiens
uaccggacgggcugggucuauggucgcuccgc

SEQ ID NO: 287613 - RNA, 32 nt, Homo Sapiens
gguuuacuaggauuuaagcuuuugagugcauu

SEQ ID NO: 287614 - RNA, 32 nt, Homo Sapiens
uuaaagauuugugccaagagaguauauuuaau

SEQ ID NO: 287615 - RNA, 32 nt, Homo Sapiens
gccuggccaccccgucugagaagugaggagcg

SEQ ID NO: 287616 - RNA, 27 nt, Homo Sapiens
cacuggagccuccucagccccuagugg

SEQ ID NO: 287617 - RNA, 32 nt, Homo Sapiens
uggcaggagcgcaggggcgcgagccggcgauc

SEQ ID NO: 287618 - RNA, 32 nt, Homo Sapiens
cucucccuccauguccauccaaaaaccauaaa

SEQ ID NO: 287619 - RNA, 32 nt, Homo Sapiens
guuaacuuuucauacuaacaaacagaacaaga

SEQ ID NO: 287620 - RNA, 32 nt, Homo Sapiens
augaaagaugacagaagaaguuauugugauag

SEQ ID NO: 287621 - RNA, 32 nt, Homo Sapiens
ccucaggucccggcccugccuucuacacugcc

SEQ ID NO: 287622 - RNA, 32 nt, Homo Sapiens
aguguuuuaugaugaaacgguguuagguuuug

SEQ ID NO: 287623 - RNA, 32 nt, Homo Sapiens
guggagaagaucuggcugggcccugggauacu

SEQ ID NO: 287624 - RNA, 32 nt, Homo Sapiens
caagagagaagagucccaguuauucuugcugc

SEQ ID NO: 287625 - RNA, 32 nt, Homo Sapiens
gcagaccugcagcagaggggccugacuguuau

SEQ ID NO: 287626 - RNA, 32 nt, Homo Sapiens
auauuaauaauuauauuagacacagcccucau

SEQ ID NO: 287627 - RNA, 32 nt, Homo Sapiens
uggcagagcuggguacugcugugcuuuugcca

SEQ ID NO: 287628 - RNA, 32 nt, Homo Sapiens
caucagauccugccuccuggagugggggaaac

SEQ ID NO: 287629 - RNA, 32 nt, Homo Sapiens
aaucuccccccaagcccucccuccuacgauca

SEQ ID NO: 287630 - RNA, 32 nt, Homo Sapiens
uuuucuuuuccuuuauaaaugucuaguucuua

SEQ ID NO: 287631 - RNA, 32 nt, Homo Sapiens
gggacuuugcugucagguccaagcccuccuga

SEQ ID NO: 287632 - RNA, 32 nt, Homo Sapiens
ucuucgggucgcgggugcacuccggcccggcu

SEQ ID NO: 287633 - RNA, 32 nt, Homo Sapiens
cucuggagccgccgccgccgcugcugcgguuc

SEQ ID NO: 287634 - RNA, 32 nt, Homo Sapiens
uuuccauuccaagaagaaugcuaaguuugugu

SEQ ID NO: 287635 - RNA, 32 nt, Homo Sapiens
ggucgaggcgcacagggcaagcaggaagaggc

SEQ ID NO: 287636 - RNA, 32 nt, Homo Sapiens
acgugagcugagaagaauaaacaaugaagaua

SEQ ID NO: 287637 - RNA, 32 nt, Homo Sapiens
ucccgcagcugcggcccgggccuggccucucg

SEQ ID NO: 287638 - RNA, 32 nt, Homo Sapiens
accucaagaauauuuuagaacagauuaaugcg

SEQ ID NO: 287639 - RNA, 32 nt, Homo Sapiens
agcuagcucugccccaggacggcccugcccuc

SEQ ID NO: 287640 - RNA, 32 nt, Homo Sapiens
uacauguuauauuuuugguuucucucuacuga

SEQ ID NO: 287641 - RNA, 32 nt, Homo Sapiens
aacguaugcuagcagagcuucuccccgugaau

SEQ ID NO: 287642 - RNA, 32 nt, Homo Sapiens
cacucauguccuccagaccccuggcacccauc

SEQ ID NO: 287643 - RNA, 32 nt, Homo Sapiens
agacugcgcccucucccuggcgccgccuuccc

SEQ ID NO: 287644 - RNA, 32 nt, Homo Sapiens
ggauucuuguuuugcuuccccuccccccgaga

SEQ ID NO: 287645 - RNA, 32 nt, Homo Sapiens
augucacugcagagguaugaaaaggagagcuc

SEQ ID NO: 287646 - RNA, 32 nt, Homo Sapiens
cccggccccccucccagucccuguuggcuuuc

SEQ ID NO: 287647 - RNA, 32 nt, Homo Sapiens
aaucccagcagcucagcgugcagaagaccgag

SEQ ID NO: 287648 - RNA, 32 nt, Homo Sapiens
uggaauugcauaaugugugccuuuuaaaacaa

SEQ ID NO: 287649 - RNA, 32 nt, Homo Sapiens
ccuagaagcaccugcugacacucuucaacuga

SEQ ID NO: 287650 - RNA, 32 nt, Homo Sapiens
aauggauuucuaggaaaagcuaccuuaagaaa

SEQ ID NO: 287651 - RNA, 32 nt, Homo Sapiens
cagucaggugagagaugcugcaauauuggcua

SEQ ID NO: 287652 - RNA, 32 nt, Homo Sapiens
guuucacuaguacaccaggaaacuacagauug

SEQ ID NO: 287653 - RNA, 32 nt, Homo Sapiens
uucuccuucaguuuccucucauugccugaggu

SEQ ID NO: 287654 - RNA, 31 nt, Homo Sapiens
uuucuguguaacauggaaacuugugugacca

SEQ ID NO: 287655 - RNA, 32 nt, Homo Sapiens
gggagaugaaaacacacccaccucacaggcug

SEQ ID NO: 287656 - RNA, 32 nt, Homo Sapiens
ucuuuggaaaaauuaaguuauacauaaaauuc

SEQ ID NO: 287657 - RNA, 32 nt, Homo Sapiens
aaauauguauuccauguuuuuaaaagauuacu

SEQ ID NO: 287658 - RNA, 32 nt, Homo Sapiens
uguacaugaugaugcgggacugcuggcaugca

SEQ ID NO: 287659 - RNA, 32 nt, Homo Sapiens
cagagauaaauguaucucugaggcaugguuuc

SEQ ID NO: 287660 - RNA, 32 nt, Homo Sapiens
gugcagcugcgggccaccaacaugcugggcag

SEQ ID NO: 287661 - RNA, 32 nt, Homo Sapiens
caaagguuggguccaucuucucuccgagguug

SEQ ID NO: 287662 - RNA, 32 nt, Homo Sapiens
ggugccucuuaucuccuucuagcggucugccu

SEQ ID NO: 287663 - RNA, 32 nt, Homo Sapiens
agcuaccuuuacucccucuccuucaauuccac

SEQ ID NO: 287664 - RNA, 32 nt, Homo Sapiens
ugugauuuuuguaauuuuuuuaucgucacugc

SEQ ID NO: 287665 - RNA, 32 nt, Homo Sapiens
uuagcugugugauaaacuucaguuuucucauu

SEQ ID NO: 287666 - RNA, 32 nt, Homo Sapiens
uucucggcggugguaccugcucccgguggccc

SEQ ID NO: 287667 - RNA, 32 nt, Homo Sapiens
caaaaucuguguacaaaaauuaguugcauuuc

SEQ ID NO: 287668 - RNA, 32 nt, Homo Sapiens
aggaagagggcuuggugugcucuguggauggc

SEQ ID NO: 287669 - RNA, 32 nt, Homo Sapiens
gcagucacaccuguagcccccucugccaagag

SEQ ID NO: 287670 - RNA, 32 nt, Homo Sapiens
acauauagauacugagaccuguguguacagua

SEQ ID NO: 287671 - RNA, 32 nt, Homo Sapiens
aaaggcuucucgcucacugcgcucgaggccgg

SEQ ID NO: 287672 - RNA, 32 nt, Homo Sapiens
gagacagggucucguucugucgcuuagcugga

SEQ ID NO: 287673 - RNA, 32 nt, Homo Sapiens
gacacacacacacgcgcgcacacacacacgca

SEQ ID NO: 287674 - RNA, 32 nt, Homo Sapiens
acucuggccugccugguccucugcguuguagu

SEQ ID NO: 287675 - RNA, 32 nt, Homo Sapiens
gaaaaugacaccuuccccacuucuugggcauu

SEQ ID NO: 287676 - RNA, 32 nt, Homo Sapiens
uaucuaacccaccgugugaaugaacugggaga

SEQ ID NO: 287677 - RNA, 32 nt, Homo Sapiens
caaaagguguuaaagaaaacugaauuaaaccc

SEQ ID NO: 287678 - RNA, 32 nt, Homo Sapiens
ggcgcgcccucgcgcugucgccgccacagucu

SEQ ID NO: 287679 - RNA, 30 nt, Homo Sapiens
gugggugaggggcgcgcggauccggagagg

SEQ ID NO: 287680 - RNA, 32 nt, Homo Sapiens
aacccgauggagaggagggggcccccauggau

SEQ ID NO: 287681 - RNA, 32 nt, Homo Sapiens
uuccauuaugacacagcagcuccuuuguaagu

SEQ ID NO: 287682 - RNA, 32 nt, Homo Sapiens
agcggcagcagcuucggcugcugcuuucaggc

SEQ ID NO: 287683 - RNA, 32 nt, Homo Sapiens
ggcccgcuucgcagcuuucucccuuugucuca

SEQ ID NO: 287684 - RNA, 32 nt, Homo Sapiens
aaaaaccauuuuccuauguuaggagugcaaga

SEQ ID NO: 287685 - RNA, 32 nt, Homo Sapiens
gguauccgcuaggcuucccagaacccugcugc

SEQ ID NO: 287686 - RNA, 32 nt, Homo Sapiens
cucccugucagccacacccuuugucucccccu

SEQ ID NO: 287687 - RNA, 32 nt, Homo Sapiens
cagguuaucccuugcucugugcgccuuuuauu

SEQ ID NO: 287688 - RNA, 32 nt, Homo Sapiens
gucucuuggcuauuuuaaccuaaaauaacagu

SEQ ID NO: 287689 - RNA, 32 nt, Homo Sapiens
uugacagaaaauaaacaucaguuucuaaaaaa

SEQ ID NO: 287690 - RNA, 32 nt, Homo Sapiens
uggcccgcgggccccagugaggcacuuugucc

SEQ ID NO: 287691 - RNA, 32 nt, Homo Sapiens
aauggaauucagaucauguuuaccccucuguu

SEQ ID NO: 287692 - RNA, 32 nt, Homo Sapiens
auaggggaugauuuuagcuuguccuaaaucuu

SEQ ID NO: 287693 - RNA, 32 nt, Homo Sapiens
ucugccugggcccaccaagguggacgcugggc

SEQ ID NO: 287694 - RNA, 32 nt, Homo Sapiens
uuuuccucuucaauuuccuucaauccauaguu

SEQ ID NO: 287695 - RNA, 32 nt, Homo Sapiens
ucauuucuguuauaugagacacccacuguaca

SEQ ID NO: 287696 - RNA, 32 nt, Homo Sapiens
cugguccacccuugcccucccugggucgcaga

SEQ ID NO: 287697 - RNA, 32 nt, Homo Sapiens
cguuguuuacuuuuuguaguuauugucaugcu

SEQ ID NO: 287698 - RNA, 32 nt, Homo Sapiens
cgggguuggccauggccgcugcccgcccagcg

SEQ ID NO: 287699 - RNA, 32 nt, Homo Sapiens
cacccugagauggagcugagacuuuauuuauu

SEQ ID NO: 287700 - RNA, 32 nt, Homo Sapiens
cuuagcauuucccucucaggcuuccucucaag

SEQ ID NO: 287701 - RNA, 32 nt, Homo Sapiens
cugcgcugcccugcccugcaccuacccucacu

SEQ ID NO: 287702 - RNA, 32 nt, Homo Sapiens
acuaggacagggaucuguauuuagacuauauu

SEQ ID NO: 287703 - RNA, 32 nt, Homo Sapiens
gcgggaccccgggcgagcggcgcgggcggcac

SEQ ID NO: 287704 - RNA, 32 nt, Homo Sapiens
uuaagaccaaagcccuuccucccgcugcugca

SEQ ID NO: 287705 - RNA, 32 nt, Homo Sapiens
accuugguuuucugcucucuggagcggugaac

SEQ ID NO: 287706 - RNA, 32 nt, Homo Sapiens
cugcagugagucgagaucgugccacugcacuc

SEQ ID NO: 287707 - RNA, 32 nt, Homo Sapiens
gaaggcgucccggcaucggccaagauucuaca

SEQ ID NO: 287708 - RNA, 32 nt, Homo Sapiens
gucgaggcggacgcgcggcugcgucagguaag

SEQ ID NO: 287709 - RNA, 32 nt, Homo Sapiens
cuuuagccuugaugaaaaguacaagauauguu

SEQ ID NO: 287710 - RNA, 32 nt, Homo Sapiens
caaaacaaugaaaucaaugaaacaaugaaacc

SEQ ID NO: 287711 - RNA, 32 nt, Homo Sapiens
agucccugagcccaccucccagcccucuccuc

SEQ ID NO: 287712 - RNA, 32 nt, Homo Sapiens
caacuuaaucucaccagugaaaacagagguga

SEQ ID NO: 287713 - RNA, 32 nt, Homo Sapiens
gacucccuguguuugaaauucaaaacucaagc

SEQ ID NO: 287714 - RNA, 32 nt, Homo Sapiens
gcugggcuuuauauuuuauaucugcaaauaaa

SEQ ID NO: 287715 - RNA, 32 nt, Homo Sapiens
accucuguucuuccuauuucuggcugccucag

SEQ ID NO: 287716 - RNA, 32 nt, Homo Sapiens
ugcaauaugaaccucccauugggccuuccaua

SEQ ID NO: 287717 - RNA, 32 nt, Homo Sapiens
aauguuaagauuuuuucuucuugauuuuuuaa

SEQ ID NO: 287718 - RNA, 32 nt, Homo Sapiens
gccagggagguguauccuccccggggucugca

SEQ ID NO: 287719 - RNA, 30 nt, Homo Sapiens
uggguccuggccgccggcuucgcugagacg

SEQ ID NO: 287720 - RNA, 32 nt, Homo Sapiens
ggggggcaugugcugccuguuguuauggguuu

SEQ ID NO: 287721 - RNA, 32 nt, Homo Sapiens
acauggaaggcacauuuggagaccacguaugu

SEQ ID NO: 287722 - RNA, 32 nt, Homo Sapiens
cuguggugacccugccuggugcuggagggcag

SEQ ID NO: 287723 - RNA, 32 nt, Homo Sapiens
auaucauaaaaggagcuggugauucagcuggg

SEQ ID NO: 287724 - RNA, 32 nt, Homo Sapiens
accaaggggccugccacccagccccuccagug

SEQ ID NO: 287725 - RNA, 32 nt, Homo Sapiens
auuuuuccuaaaacaucucccuaagaagucac

SEQ ID NO: 287726 - RNA, 32 nt, Homo Sapiens
cuguugguaaugaccucucuauaaucucugag

SEQ ID NO: 287727 - RNA, 32 nt, Homo Sapiens
cggcggguccucggcgagacccggcccccacg

SEQ ID NO: 287728 - RNA, 32 nt, Homo Sapiens
cagucuguaccccucccugggucaucugccag

SEQ ID NO: 287729 - RNA, 32 nt, Homo Sapiens
ggccggggcuccugccgggcaccccaaguacg

SEQ ID NO: 287730 - RNA, 32 nt, Homo Sapiens
gaucuuuguuucugcccuuaccccucaguagu

SEQ ID NO: 287731 - RNA, 32 nt, Homo Sapiens
ccacuuaggaagaggauagagaaggaucugcu

SEQ ID NO: 287732 - RNA, 32 nt, Homo Sapiens
aauaaaugucugccaugucagcaccguuuguu

SEQ ID NO: 287733 - RNA, 32 nt, Homo Sapiens
ccagccauguggaacugugaauccauuaaacc

SEQ ID NO: 287734 - RNA, 32 nt, Homo Sapiens
ucacauggggguacacauacacagcuuccucu

SEQ ID NO: 287735 - RNA, 32 nt, Homo Sapiens
ccacagaccccucccuggggcagagggacagc

SEQ ID NO: 287736 - RNA, 32 nt, Homo Sapiens
aggucaucaaaauaauuuuuguguauaaggga

SEQ ID NO: 287737 - RNA, 32 nt, Homo Sapiens
aauauagguucauaaaaguaaauucaaagcag

SEQ ID NO: 287738 - RNA, 32 nt, Homo Sapiens
gccccuccccccagccuuccaaguccaucccg

SEQ ID NO: 287739 - RNA, 32 nt, Homo Sapiens
aagaaaauauagucacaggaaacuacucacgu

SEQ ID NO: 287740 - RNA, 32 nt, Homo Sapiens
ucuaggugacagagcgagacuccaucucaaca

SEQ ID NO: 287741 - RNA, 32 nt, Homo Sapiens
cuucucuccccauuuuguccuuugcuaaggaa

SEQ ID NO: 287742 - RNA, 30 nt, Homo Sapiens
acuuuguaauaugccaccaagaguacugac

SEQ ID NO: 287743 - RNA, 32 nt, Homo Sapiens
ucccugucgagcaugacuguguagaaguguug

SEQ ID NO: 287744 - RNA, 32 nt, Homo Sapiens
ugggccgcgaacgcagccgccacgccggggcc

SEQ ID NO: 287745 - RNA, 32 nt, Homo Sapiens
cugggguccaggaaacaaagcaaaagcacaau

SEQ ID NO: 287746 - RNA, 32 nt, Homo Sapiens
aggaguccaaaaaagaaagugagacacugggc

SEQ ID NO: 287747 - RNA, 32 nt, Homo Sapiens
uccaugugaacaguuuaguucgccgaggugga

SEQ ID NO: 287748 - RNA, 32 nt, Homo Sapiens
aaucaugcauuacauaaagugugacaacuuca

SEQ ID NO: 287749 - RNA, 32 nt, Homo Sapiens
caagagcauaaugguaaaucuuuuggggucau

SEQ ID NO: 287750 - RNA, 30 nt, Homo Sapiens
cuuucacuggacuggaauguuuggagaaug

SEQ ID NO: 287751 - RNA, 32 nt, Homo Sapiens
auaccagaaucucugaggaaaauggaccaaaa

SEQ ID NO: 287752 - RNA, 32 nt, Homo Sapiens
aucaagguauuaaauauaagacguuaaauaua

SEQ ID NO: 287753 - RNA, 32 nt, Homo Sapiens
uccagcaugcacacccaguccacaagaccuca

SEQ ID NO: 287754 - RNA, 32 nt, Homo Sapiens
uuccgggugccuuuauuuuuuauucuuuucua

SEQ ID NO: 287755 - RNA, 32 nt, Homo Sapiens
caaauaaagcauccuuucugcucuguugcaug

SEQ ID NO: 287756 - RNA, 32 nt, Homo Sapiens
gucggggcgggggucgggcgguagaaaaaagg

SEQ ID NO: 287757 - RNA, 32 nt, Homo Sapiens
cguuaugcaaaauuauacuuuuaaauauuugu

SEQ ID NO: 287758 - RNA, 32 nt, Homo Sapiens
ucaccuuaucuuuguaagaugaggauaucauc

SEQ ID NO: 287759 - RNA, 32 nt, Homo Sapiens
gauucugcaguuugggcuccguagcugcucag

SEQ ID NO: 287760 - RNA, 32 nt, Homo Sapiens
uuuaauaggggcggguauagggaccaacuggg

SEQ ID NO: 287761 - RNA, 32 nt, Homo Sapiens
cuaccaauccuccaacuugaugcagaagaaac

SEQ ID NO: 287762 - RNA, 32 nt, Homo Sapiens
ccagaccugcuguuuuugggguuuccuuccaa

SEQ ID NO: 287763 - RNA, 32 nt, Homo Sapiens
cuucuagaguggaugcugaggaccacguggaa

SEQ ID NO: 287764 - RNA, 31 nt, Homo Sapiens
cuggcgaugcuucaggacuggugcaggagga

SEQ ID NO: 287765 - RNA, 32 nt, Homo Sapiens
gucggcccaaaaagcggcggccguuggaggug

SEQ ID NO: 287766 - RNA, 32 nt, Homo Sapiens
ccucagcuguugggcuccggcugcugggggcu

SEQ ID NO: 287767 - RNA, 32 nt, Homo Sapiens
cccguuuccuucccucaucagugaaaaaaucu

SEQ ID NO: 287768 - RNA, 32 nt, Homo Sapiens
ucuuaaaacagcagcaguaacaacaacaaagu

SEQ ID NO: 287769 - RNA, 32 nt, Homo Sapiens
acaucacagcggggcucagcaguucccacagc

SEQ ID NO: 287770 - RNA, 32 nt, Homo Sapiens
gcugcagggauuuaagucuacuugcuuuuaca

SEQ ID NO: 287771 - RNA, 32 nt, Homo Sapiens
acagagacgaagagacccccacaugcuucagg

SEQ ID NO: 287772 - RNA, 32 nt, Homo Sapiens
caauucacaggucaccccucucuucuugcacu

SEQ ID NO: 287773 - RNA, 32 nt, Homo Sapiens
cuuuggcuugcucgggaccauuuggcuggacc

SEQ ID NO: 287774 - RNA, 32 nt, Homo Sapiens
cgcuugugagcgguuguggucauugugagggc

SEQ ID NO: 287775 - RNA, 32 nt, Homo Sapiens
cccuaccucccggcccccgcucccgccccagc

SEQ ID NO: 287776 - RNA, 32 nt, Homo Sapiens
gcaugaacuauacaagaguaucugaaacuaac

SEQ ID NO: 287777 - RNA, 32 nt, Homo Sapiens
cggcucgccccggcucugcuccgggggguaag

SEQ ID NO: 287778 - RNA, 32 nt, Homo Sapiens
aacuuaagacuuuacuaugcuuccuucacaga

SEQ ID NO: 287779 - RNA, 32 nt, Homo Sapiens
cuuaagggacuaaauuaaugcuugggugcauu

SEQ ID NO: 287780 - RNA, 32 nt, Homo Sapiens
gauggaaggggguggaauaaaaccugucaacc

SEQ ID NO: 287781 - RNA, 32 nt, Homo Sapiens
uuuauugacacuauuugaaacuuuugaaauau

SEQ ID NO: 287782 - RNA, 32 nt, Homo Sapiens
ugggcagccgcgccagcugccgggacacugcu

SEQ ID NO: 287783 - RNA, 32 nt, Homo Sapiens
agcccaggcaggguguguggcuccuggauggg

SEQ ID NO: 287784 - RNA, 32 nt, Homo Sapiens
gcagcauccgcgcggcuaccgcggcggcgcag

SEQ ID NO: 287785 - RNA, 32 nt, Homo Sapiens
ccugugaauaaucaaauauauucuauuuaaca

SEQ ID NO: 287786 - RNA, 32 nt, Homo Sapiens
aaguucggguggcagcgccgggcgcaacgcag

SEQ ID NO: 287787 - RNA, 32 nt, Homo Sapiens
accacacacacacacacacacacacacacaca

SEQ ID NO: 287788 - RNA, 32 nt, Homo Sapiens
acaguacauacaccgucuaccaguaagcccuu

SEQ ID NO: 287789 - RNA, 32 nt, Homo Sapiens
ggagcggcagcgccggccggccauggggggua

SEQ ID NO: 287790 - RNA, 32 nt, Homo Sapiens
auagacccacgcuccaugccugucccacugca

SEQ ID NO: 287791 - RNA, 32 nt, Homo Sapiens
aggaggcauaaagucaauucuugcuuguuuuu

SEQ ID NO: 287792 - RNA, 32 nt, Homo Sapiens
agggagccucgacuuccggcgccgccgcccuc

SEQ ID NO: 287793 - RNA, 32 nt, Homo Sapiens
cagggccuagaucuccucuccuccuccacgga

SEQ ID NO: 287794 - RNA, 32 nt, Homo Sapiens
agcuaccucauaggguuguugaggauuaagug

SEQ ID NO: 287795 - RNA, 32 nt, Homo Sapiens
cugcagcccucccugccgccucacccuucagc

SEQ ID NO: 287796 - RNA, 32 nt, Homo Sapiens
aaguuacccaacaaaggauuuuauuccacauu

SEQ ID NO: 287797 - RNA, 32 nt, Homo Sapiens
ggucucgggagauggaggaaaaggagauguua

SEQ ID NO: 287798 - RNA, 32 nt, Homo Sapiens
ggacagucauggcggcccggcgcggggcucuc

SEQ ID NO: 287799 - RNA, 32 nt, Homo Sapiens
cuugauuguaaauucaggaguauuugcuuggg

SEQ ID NO: 287800 - RNA, 30 nt, Homo Sapiens
gccgcgccgcacgagcaccagccuagagcc

SEQ ID NO: 287801 - RNA, 32 nt, Homo Sapiens
uugaauugcugcgucugagggcaugugcuuuu

SEQ ID NO: 287802 - RNA, 32 nt, Homo Sapiens
agcaugucaggagauuucuaaugauuuguggc

SEQ ID NO: 287803 - RNA, 32 nt, Homo Sapiens
guccaacugacacacacguuuccccgcugacg

SEQ ID NO: 287804 - RNA, 32 nt, Homo Sapiens
ucucuggggggcaaaaucacucccgguugaga

SEQ ID NO: 287805 - RNA, 32 nt, Homo Sapiens
acacaacaagguggggcucccuaggccucucc

SEQ ID NO: 287806 - RNA, 32 nt, Homo Sapiens
ucuguucacaagagccaccaaaaguuagggga

SEQ ID NO: 287807 - RNA, 32 nt, Homo Sapiens
ggucugcggagcggggacucggggccucggcg

SEQ ID NO: 287808 - RNA, 32 nt, Homo Sapiens
augaccuuauccuuccucuccuuccuuguuac

SEQ ID NO: 287809 - RNA, 32 nt, Homo Sapiens
gaucuuuugaccaagaccucaagagagccaga

SEQ ID NO: 287810 - RNA, 32 nt, Homo Sapiens
uuauuaauaaauuuauuuuuaaauauuaaagu

SEQ ID NO: 287811 - RNA, 32 nt, Homo Sapiens
caagaggaggauuuuguuuuguaguuugcaga

SEQ ID NO: 287812 - RNA, 32 nt, Homo Sapiens
uguggugucccuucccucucccaugugcucgg

SEQ ID NO: 287813 - RNA, 32 nt, Homo Sapiens
gcguuccccucgcugccccgggagccgcagcc

SEQ ID NO: 287814 - RNA, 32 nt, Homo Sapiens
ugcauuaaaaauugaaagcucgaucucauuau

SEQ ID NO: 287815 - RNA, 31 nt, Homo Sapiens
gaugugugucagagcuuuagagccugcaagg

SEQ ID NO: 287816 - RNA, 32 nt, Homo Sapiens
uuaauacacacacacacacacacacacacaca

SEQ ID NO: 287817 - RNA, 32 nt, Homo Sapiens
gggccccugaggccacucuccggagcgcgccg

SEQ ID NO: 287818 - RNA, 30 nt, Homo Sapiens
ggucuggacagcgcguggccggcgccgcug

SEQ ID NO: 287819 - RNA, 32 nt, Homo Sapiens
uuucauugcccccagggcacuucacagagugu

SEQ ID NO: 287820 - RNA, 32 nt, Homo Sapiens
cuuuggguuuuaacuguuuggccacggcgggg

SEQ ID NO: 287821 - RNA, 32 nt, Homo Sapiens
cauacugcuaagucagcuacuuugccaagaaa

SEQ ID NO: 287822 - RNA, 32 nt, Homo Sapiens
aaaaauuggggaggagggggccgggcgcggug

SEQ ID NO: 287823 - RNA, 32 nt, Homo Sapiens
uuacagguguuguggaauaaaaacuguaagaa

SEQ ID NO: 287824 - RNA, 32 nt, Homo Sapiens
uauaaaguucagaugagaauacguguccaguu

SEQ ID NO: 287825 - RNA, 32 nt, Homo Sapiens
uuaucagaguccacgcagccccaccgcccucc

SEQ ID NO: 287826 - RNA, 32 nt, Homo Sapiens
caggccaggggagggcaucuggaccagggcau

SEQ ID NO: 287827 - RNA, 32 nt, Homo Sapiens
uguuucuaugauugccucagacuuucacauuu

SEQ ID NO: 287828 - RNA, 32 nt, Homo Sapiens
caugcacgugcacacauguacacacacacacc

SEQ ID NO: 287829 - RNA, 32 nt, Homo Sapiens
ccuuuccccacgcccacccccagucuccaggg

SEQ ID NO: 287830 - RNA, 32 nt, Homo Sapiens
gacccagccuuccagcaucaccgggguucgcg

SEQ ID NO: 287831 - RNA, 32 nt, Homo Sapiens
acuaucuucuucaaauacaaaguaaauacaag

SEQ ID NO: 287832 - RNA, 32 nt, Homo Sapiens
uuuauacuuucugcacauucaguguauuggua

SEQ ID NO: 287833 - RNA, 32 nt, Homo Sapiens
uuguuuuguuuuguuuuccccucaccucacag

SEQ ID NO: 287834 - RNA, 32 nt, Homo Sapiens
uuaguuucauccuuuaguuacccaggccagua

SEQ ID NO: 287835 - RNA, 32 nt, Homo Sapiens
cacuagugucucugcagguugcugguuguguu

SEQ ID NO: 287836 - RNA, 32 nt, Homo Sapiens
agagcuguaaagggcaaugaccucaaguggau

SEQ ID NO: 287837 - RNA, 32 nt, Homo Sapiens
ucuaccccacuacucacaugaguguuagcucc

SEQ ID NO: 287838 - RNA, 32 nt, Homo Sapiens
uuaggggccaucucagcgagacagugaggugc

SEQ ID NO: 287839 - RNA, 32 nt, Homo Sapiens
uugagcauucugaacuuuuuuaugauuuagau

SEQ ID NO: 287840 - RNA, 31 nt, Homo Sapiens
uuugugacaagacuucucagagucugauucu

SEQ ID NO: 287841 - RNA, 32 nt, Homo Sapiens
augaucacagagcuaaguaaaugauagagcua

SEQ ID NO: 287842 - RNA, 32 nt, Homo Sapiens
uucaugaguuuaggaaucaaaguauagcauuu

SEQ ID NO: 287843 - RNA, 32 nt, Homo Sapiens
uggcuguuccccagccccucucauuggcucug

SEQ ID NO: 287844 - RNA, 32 nt, Homo Sapiens
auccaaauaaucuuguaaccuauuuaucuagu

SEQ ID NO: 287845 - RNA, 32 nt, Homo Sapiens
gaucaauauucuuauucugggcacauauugga

SEQ ID NO: 287846 - RNA, 32 nt, Homo Sapiens
cugcacccuucuuuucucauguguuugcauaa

SEQ ID NO: 287847 - RNA, 32 nt, Homo Sapiens
uucucguuucugcucacaucccauugcccggc

SEQ ID NO: 287848 - RNA, 32 nt, Homo Sapiens
cccagggaaagaguuaauccccugcccccagc

SEQ ID NO: 287849 - RNA, 32 nt, Homo Sapiens
cauauuuaugucugucuuucucuacuuuuccc

SEQ ID NO: 287850 - RNA, 32 nt, Homo Sapiens
gggugcuaccgcuguuuccgcugcugagcccu

SEQ ID NO: 287851 - RNA, 30 nt, Homo Sapiens
acaccucaugucccugcccucuucgugugc

SEQ ID NO: 287852 - RNA, 32 nt, Homo Sapiens
uaaguggugcuuugugguaucugaacaauuca

SEQ ID NO: 287853 - RNA, 32 nt, Homo Sapiens
ggaaugugcccucuccucucuuuguuuccaua

SEQ ID NO: 287854 - RNA, 32 nt, Homo Sapiens
uuagcacugcaguuccguuuuauuuucuuauu

SEQ ID NO: 287855 - RNA, 32 nt, Homo Sapiens
aaagagaggggagcauccauuauugguacaug

SEQ ID NO: 287856 - RNA, 32 nt, Homo Sapiens
cgucccugugcagcugcguguccuucaguucu

SEQ ID NO: 287857 - RNA, 32 nt, Homo Sapiens
gcgaggguggcugaggcuguugugcaguaggg

SEQ ID NO: 287858 - RNA, 32 nt, Homo Sapiens
uuuauuuccuucccucauaccuugcccauucc

SEQ ID NO: 287859 - RNA, 32 nt, Homo Sapiens
uucaguauuuaauguaauuaaucuuuaaucca

SEQ ID NO: 287860 - RNA, 32 nt, Homo Sapiens
caccuguaaucccagcacuuugggagucugag

SEQ ID NO: 287861 - RNA, 32 nt, Homo Sapiens
cuggauggugccugggucucugcaggccugcu

SEQ ID NO: 287862 - RNA, 32 nt, Homo Sapiens
gggccuggggacggccgucccauggcuuccau

SEQ ID NO: 287863 - RNA, 32 nt, Homo Sapiens
guuuaaucuuccaagcacaucuagugucuguc

SEQ ID NO: 287864 - RNA, 32 nt, Homo Sapiens
auauugauuuuaucucuuucuguaucuauagg

SEQ ID NO: 287865 - RNA, 32 nt, Homo Sapiens
guauaacacauagaaacaccaagauuuucagc

SEQ ID NO: 287866 - RNA, 32 nt, Homo Sapiens
acuaaggaaagaaggguguguuuugugaaaga

SEQ ID NO: 287867 - RNA, 32 nt, Homo Sapiens
ugugcuuuucauuugcagaaguuaguaacugc

SEQ ID NO: 287868 - RNA, 32 nt, Homo Sapiens
gcgcgacgccaugggccggccgggcccagagc

SEQ ID NO: 287869 - RNA, 32 nt, Homo Sapiens
caguagaccacacuuucaaaacaucacucgga

SEQ ID NO: 287870 - RNA, 32 nt, Homo Sapiens
ccacagggacgccugagcaaggacccaagcag

SEQ ID NO: 287871 - RNA, 32 nt, Homo Sapiens
ggcuuccccgcagggcccccacuucccagugg

SEQ ID NO: 287872 - RNA, 32 nt, Homo Sapiens
uguaacugguaguuugaucccaauagccauag

SEQ ID NO: 287873 - RNA, 32 nt, Homo Sapiens
augccuuuuccacaaaucucuugccuuuucag

SEQ ID NO: 287874 - RNA, 32 nt, Homo Sapiens
ucuucaggaccaacuggagggagaguuaggaa

SEQ ID NO: 287875 - RNA, 32 nt, Homo Sapiens
ggaaggggagagcggcccggccugggcggcgg

SEQ ID NO: 287876 - RNA, 32 nt, Homo Sapiens
cuucccuuggccgaccagggcuccucuaccaa

SEQ ID NO: 287877 - RNA, 32 nt, Homo Sapiens
ugucacucacugacaaauaaccuuucagccug

SEQ ID NO: 287878 - RNA, 32 nt, Homo Sapiens
agaaggggcacgccugcccagccucgcaugcc

SEQ ID NO: 287879 - RNA, 32 nt, Homo Sapiens
cuuuaugacaauuuuacuuauuuuggaacuag

SEQ ID NO: 287880 - RNA, 32 nt, Homo Sapiens
gggucuaauaauaacaguuaauacuuauuaaa

SEQ ID NO: 287881 - RNA, 32 nt, Homo Sapiens
ugggugaccggggcucuggcggugcguguggg

SEQ ID NO: 287882 - RNA, 32 nt, Homo Sapiens
uguuuauuuguggcagggugaaaaauguacaa

SEQ ID NO: 287883 - RNA, 32 nt, Homo Sapiens
ccuagagaacuaaauuuggcuuuagugugacg

SEQ ID NO: 287884 - RNA, 32 nt, Homo Sapiens
aauguauuuauuaaacaaaaacugagaauucc

SEQ ID NO: 287885 - RNA, 32 nt, Homo Sapiens
gacagaggccuggccugaagccuaggcuggag

SEQ ID NO: 287886 - RNA, 32 nt, Homo Sapiens
aagucauacuauauucuuuauagaauuaaaag

SEQ ID NO: 287887 - RNA, 32 nt, Homo Sapiens
ccccagccgggcgggcgccucagccauggccc

SEQ ID NO: 287888 - RNA, 32 nt, Homo Sapiens
ggccuuuggacccagggccugacuugagccac

SEQ ID NO: 287889 - RNA, 32 nt, Homo Sapiens
uuucaguguaguguacauuguaaaacucagau

SEQ ID NO: 287890 - RNA, 32 nt, Homo Sapiens
uguauugaaguaccuagauuuguuugauaauc

SEQ ID NO: 287891 - RNA, 32 nt, Homo Sapiens
aguccagggaaucccggcugcccuaucuuccc

SEQ ID NO: 287892 - RNA, 32 nt, Homo Sapiens
gacgugcaccaaucagucugcacaucccaacc

SEQ ID NO: 287893 - RNA, 29 nt, Homo Sapiens
aguucuccuauccaaaaauaaaugcgaac

SEQ ID NO: 287894 - RNA, 32 nt, Homo Sapiens
gaguauccugccuaagcuuccugugucacugg

SEQ ID NO: 287895 - RNA, 32 nt, Homo Sapiens
uccuuccaaaaauuauuauaagcauugaaauu

SEQ ID NO: 287896 - RNA, 32 nt, Homo Sapiens
accaccgugugauuuuugcuaguccaugugcu

SEQ ID NO: 287897 - RNA, 32 nt, Homo Sapiens
caugagugacuguguccaggccacaugcaacu

SEQ ID NO: 287898 - RNA, 32 nt, Homo Sapiens
gacucguguacuagggaucuucaucagaaacu

SEQ ID NO: 287899 - RNA, 32 nt, Homo Sapiens
ucaaaggaugaccccuaaacacagaggagcgg

SEQ ID NO: 287900 - RNA, 32 nt, Homo Sapiens
cagacgcucuuuaaguuugauuccuaacacug

SEQ ID NO: 287901 - RNA, 32 nt, Homo Sapiens
ccggggcagcuggugacccaccccuccaggca

SEQ ID NO: 287902 - RNA, 32 nt, Homo Sapiens
ucaccagccaauugucccuugccguccuccug

SEQ ID NO: 287903 - RNA, 32 nt, Homo Sapiens
ugugaaaauaaauguuauuuguugaucauuuc

SEQ ID NO: 287904 - RNA, 32 nt, Homo Sapiens
guacacguuuggaaaauaaucugcagaaacga

SEQ ID NO: 287905 - RNA, 32 nt, Homo Sapiens
guuuacaguaucuuguaucgcuguuuacaaau

SEQ ID NO: 287906 - RNA, 32 nt, Homo Sapiens
cacagccccuugcucugggaucuuuaauaucc

SEQ ID NO: 287907 - RNA, 32 nt, Homo Sapiens
ggcacagaggggcuucuggcacugcuagguuc

SEQ ID NO: 287908 - RNA, 32 nt, Homo Sapiens
auuuuuaaagaugucuuaagauaucuuaauuu

SEQ ID NO: 287909 - RNA, 32 nt, Homo Sapiens
aggucuagauaggguuugcuauaggguuugcu

SEQ ID NO: 287910 - RNA, 32 nt, Homo Sapiens
cauccggauauuaaaaggagcguugcuggaaa

SEQ ID NO: 287911 - RNA, 32 nt, Homo Sapiens
ggguguuggccucacaggcgcccgcaaguguu

SEQ ID NO: 287912 - RNA, 32 nt, Homo Sapiens
cuauaauaaaaagucaaaaaauaacaugccgg

SEQ ID NO: 287913 - RNA, 32 nt, Homo Sapiens
uaguuuuagcuuggugucuaaauaaugggcag

SEQ ID NO: 287914 - RNA, 32 nt, Homo Sapiens
uagaaauaauaauuuucuacaaaaauuagcca

SEQ ID NO: 287915 - RNA, 32 nt, Homo Sapiens
ggcuggucucaaacuccugaccucaagugauc

SEQ ID NO: 287916 - RNA, 32 nt, Homo Sapiens
uacuaacuacuuucuucagcauuugacucuug

SEQ ID NO: 287917 - RNA, 32 nt, Homo Sapiens
aaaaaaugccugaauauucagaauagauauuu

SEQ ID NO: 287918 - RNA, 32 nt, Homo Sapiens
agcaucacagagaaagcagaguuagugcugga

SEQ ID NO: 287919 - RNA, 32 nt, Homo Sapiens
uuuugaaacaauucaauuuucaugucuacagc

SEQ ID NO: 287920 - RNA, 32 nt, Homo Sapiens
guuuucggacggcugcagcaucgcggugggga

SEQ ID NO: 287921 - RNA, 32 nt, Homo Sapiens
gcagcaacaacaacaacuacugugccuugggc

SEQ ID NO: 287922 - RNA, 32 nt, Homo Sapiens
ggguaagaaacaaaaaagaaagaaugagucuu

SEQ ID NO: 287923 - RNA, 32 nt, Homo Sapiens
caggaugugcuggguguuuuguuucgggcuuu

SEQ ID NO: 287924 - RNA, 32 nt, Homo Sapiens
uccacgcuuucugcagccgccacugcagccgc

SEQ ID NO: 287925 - RNA, 32 nt, Homo Sapiens
ucgcggcgcucgccgcacugguuguucagcac

SEQ ID NO: 287926 - RNA, 32 nt, Homo Sapiens
cgagcuggcggcgggcggcgcgcgcuuccgag

SEQ ID NO: 287927 - RNA, 32 nt, Homo Sapiens
auuaacuucauuugcuggaaagaaauuauuuu

SEQ ID NO: 287928 - RNA, 32 nt, Homo Sapiens
cauguauggcaaggcuuauccaaaguucaagc

SEQ ID NO: 287929 - RNA, 32 nt, Homo Sapiens
ccacucugacagucuccuccaguuccagcaau

SEQ ID NO: 287930 - RNA, 32 nt, Homo Sapiens
ugugauauuuaaucuguucucuaaacauacac

SEQ ID NO: 287931 - RNA, 32 nt, Homo Sapiens
uuuuaugcugcuggcuuuugugcccuggaaga

SEQ ID NO: 287932 - RNA, 32 nt, Homo Sapiens
aaaguaaauggcaaccacuagugugcucaucc

SEQ ID NO: 287933 - RNA, 32 nt, Homo Sapiens
agagccgagcagccccggcucugggcuacgga

SEQ ID NO: 287934 - RNA, 32 nt, Homo Sapiens
gccaguuuguccagacucccccgcccccucuc

SEQ ID NO: 287935 - RNA, 32 nt, Homo Sapiens
auuaaguauaucuaucuauauauacauauaca

SEQ ID NO: 287936 - RNA, 32 nt, Homo Sapiens
gauggagaaaauaaauaauguaucaaugaccu

SEQ ID NO: 287937 - RNA, 32 nt, Homo Sapiens
uaaucuauuuuuguuuuguaggugugggauua

SEQ ID NO: 287938 - RNA, 32 nt, Homo Sapiens
auuucuaacaauuuaguggaaguaucaaaaga

SEQ ID NO: 287939 - RNA, 32 nt, Homo Sapiens
caccaaaguauuuuuuccauuguauuaagagu

SEQ ID NO: 287940 - RNA, 32 nt, Homo Sapiens
cuggacuuuccacauuuuaacaucugauccau

SEQ ID NO: 287941 - RNA, 32 nt, Homo Sapiens
auguucccgcagagccggcacccgacgccgca

SEQ ID NO: 287942 - RNA, 32 nt, Homo Sapiens
aguguaugcuaggcaacaauucucccgcucca

SEQ ID NO: 287943 - RNA, 32 nt, Homo Sapiens
cuuccaggggcagacaaagugauucgaucuug

SEQ ID NO: 287944 - RNA, 32 nt, Homo Sapiens
auugcaggacauuugggcuggccaacagcaga

SEQ ID NO: 287945 - RNA, 32 nt, Homo Sapiens
gagacucaagacaaaccaagauaaaguaacug

SEQ ID NO: 287946 - RNA, 32 nt, Homo Sapiens
cucugcuggugccuucucccccacuacuacug

SEQ ID NO: 287947 - RNA, 32 nt, Homo Sapiens
ucucgcacguugaggcuuaguggagaugggca

SEQ ID NO: 287948 - RNA, 32 nt, Homo Sapiens
caaacagggccugggaggaaaagagaguccug

SEQ ID NO: 287949 - RNA, 30 nt, Homo Sapiens
ucuacgcccugcuggcggcgcugugcuucg

SEQ ID NO: 287950 - RNA, 32 nt, Homo Sapiens
cagaaucagcaauuugagagaaaggcaaaguu

SEQ ID NO: 287951 - RNA, 32 nt, Homo Sapiens
gugugggggaugggggugggggugcugcagag

SEQ ID NO: 287952 - RNA, 32 nt, Homo Sapiens
uuuaauuauuauuauuaucauuauuguuacgc

SEQ ID NO: 287953 - RNA, 32 nt, Homo Sapiens
aauauuuaacagauuacuucuugauaaaauuu

SEQ ID NO: 287954 - RNA, 31 nt, Homo Sapiens
cugauaauaaagaaaaauuacuauugaccuu

SEQ ID NO: 287955 - RNA, 32 nt, Homo Sapiens
agaaaguuuuuauuuucuuaaaugucauugag

SEQ ID NO: 287956 - RNA, 32 nt, Homo Sapiens
auuccaaagcaucauuccugaaaaaucagaau

SEQ ID NO: 287957 - RNA, 31 nt, Homo Sapiens
cauuuuugaaaccaaaccagagccugagugu

SEQ ID NO: 287958 - RNA, 32 nt, Homo Sapiens
ucuuuucaaaccaaauugggagaauuguugca

SEQ ID NO: 287959 - RNA, 32 nt, Homo Sapiens
uuugaauagacagagguuucauuuucaucuca

SEQ ID NO: 287960 - RNA, 32 nt, Homo Sapiens
ccccaaaaacucccuaggugauccgaugugca

SEQ ID NO: 287961 - RNA, 32 nt, Homo Sapiens
aguguuguuaccauuuagcccauugguugcca

SEQ ID NO: 287962 - RNA, 32 nt, Homo Sapiens
gauuaagaggguuuuucuuaaauauuagcuuu

SEQ ID NO: 287963 - RNA, 32 nt, Homo Sapiens
caaccuacuuuugaaaaucaacuguauugggu

SEQ ID NO: 287964 - RNA, 32 nt, Homo Sapiens
acauauguauuucugcuggguauaaagcuuaa

SEQ ID NO: 287965 - RNA, 32 nt, Homo Sapiens
auuugucuuaaauauauaggacaauacauuau

SEQ ID NO: 287966 - RNA, 32 nt, Homo Sapiens
augucaugaagauaauggaauuuggagucuca

SEQ ID NO: 287967 - RNA, 32 nt, Homo Sapiens
gaggacaguucuuuggaagguuuuccagggcc

SEQ ID NO: 287968 - RNA, 32 nt, Homo Sapiens
aguucuguguuucaucaccgccgaaagguuaa

SEQ ID NO: 287969 - RNA, 32 nt, Homo Sapiens
ggaucacagcagaaucccuugcucuccccugg

SEQ ID NO: 287970 - RNA, 32 nt, Homo Sapiens
cauuuaauucauaauuagaacaauagcuauug

SEQ ID NO: 287971 - RNA, 32 nt, Homo Sapiens
ucccucccugucaccucccucucaccaacccg

SEQ ID NO: 287972 - RNA, 32 nt, Homo Sapiens
aacuuuagucuaaagaauugagacuaccguaa

SEQ ID NO: 287973 - RNA, 32 nt, Homo Sapiens
cccaugagcuggugggggcuguagggguaacc

SEQ ID NO: 287974 - RNA, 32 nt, Homo Sapiens
agauuuuguuuggaguggggucugggauggag

SEQ ID NO: 287975 - RNA, 32 nt, Homo Sapiens
ggaguggggaggaggggggucggccgccgcag

SEQ ID NO: 287976 - RNA, 32 nt, Homo Sapiens
caggucagcagaagaaggaacugagcaguuga

SEQ ID NO: 287977 - RNA, 32 nt, Homo Sapiens
cgcagcccccucccggcccugcagccccuggg

SEQ ID NO: 287978 - RNA, 32 nt, Homo Sapiens
agccauguguacgaauugcaaucaugacaugg

SEQ ID NO: 287979 - RNA, 32 nt, Homo Sapiens
cauuggcuugaugugaucaucaucucauaacu

SEQ ID NO: 287980 - RNA, 32 nt, Homo Sapiens
uccguagcgggaggcucuggccucaccgcagc

SEQ ID NO: 287981 - RNA, 32 nt, Homo Sapiens
ucccauagaacacucuuuuuuaucuucccuga

SEQ ID NO: 287982 - RNA, 32 nt, Homo Sapiens
auugcauuuuccccccuucaucagaaguguuc

SEQ ID NO: 287983 - RNA, 32 nt, Homo Sapiens
caggaucaugcaaugcccuccggccaaaggcu

SEQ ID NO: 287984 - RNA, 32 nt, Homo Sapiens
ugcuagaaacauugcuucuguuuguaaguucc

SEQ ID NO: 287985 - RNA, 32 nt, Homo Sapiens
gcaaaaacaaacaaaaagcaagccugugaaua

SEQ ID NO: 287986 - RNA, 32 nt, Homo Sapiens
agcugcgacucggcgccggccggggagccgcc

SEQ ID NO: 287987 - RNA, 32 nt, Homo Sapiens
cacauuauuuaguuauuuugauaauauucaua

SEQ ID NO: 287988 - RNA, 31 nt, Homo Sapiens
ccagagggccggagcgcaggaguucaagugg

SEQ ID NO: 287989 - RNA, 32 nt, Homo Sapiens
auggauguuucaucagcugaguuuaauuuagu

SEQ ID NO: 287990 - RNA, 32 nt, Homo Sapiens
gccaccacuucuccuguuguccuucccaguuu

SEQ ID NO: 287991 - RNA, 32 nt, Homo Sapiens
ccagagacucugcuccuauccuccccaccuuc

SEQ ID NO: 287992 - RNA, 32 nt, Homo Sapiens
aauguaagucucagucuuuguaauuaauuauu

SEQ ID NO: 287993 - RNA, 32 nt, Homo Sapiens
uaauaugcucauugaaaacauggcauugaagc

SEQ ID NO: 287994 - RNA, 32 nt, Homo Sapiens
ugcgggaccccggccgggccggacccuggcaa

SEQ ID NO: 287995 - RNA, 32 nt, Homo Sapiens
accaagggccaggagcugcugcugaccaucca

SEQ ID NO: 287996 - RNA, 32 nt, Homo Sapiens
uaaugagaauaaaaauguuggcccaaaauuac

SEQ ID NO: 287997 - RNA, 32 nt, Homo Sapiens
cgcgcccggccgcggcgcgacucggcugcacu

SEQ ID NO: 287998 - RNA, 32 nt, Homo Sapiens
ucagggaacuaaaagucugagggggacacaaa

SEQ ID NO: 287999 - RNA, 32 nt, Homo Sapiens
gaaauaaguauuuugaaauuaagauucaauua

SEQ ID NO: 288000 - RNA, 32 nt, Homo Sapiens
ggaugcucuucuucuggaaaaagcagagacug

SEQ ID NO: 288001 - RNA, 32 nt, Homo Sapiens
uacgggccuccuucccguguccugcuggaacg

SEQ ID NO: 288002 - RNA, 32 nt, Homo Sapiens
uuacagaaaaauuugugccuaauguuaaccaa

SEQ ID NO: 288003 - RNA, 32 nt, Homo Sapiens
cucgcugcaaccuccgccucccagguucaaga

SEQ ID NO: 288004 - RNA, 32 nt, Homo Sapiens
aguaaucguuuuacaggcugagcauuaacuaa

SEQ ID NO: 288005 - RNA, 32 nt, Homo Sapiens
ccauugcuaucaugcauuccugucucauggca

SEQ ID NO: 288006 - RNA, 32 nt, Homo Sapiens
cguagaggguggccgacggcggcggcccucaa

SEQ ID NO: 288007 - RNA, 32 nt, Homo Sapiens
aauugugagagaaguacauuuauaaaaauuaa

SEQ ID NO: 288008 - RNA, 32 nt, Homo Sapiens
caacaacacuuauucaaacauuucauaaacug

SEQ ID NO: 288009 - RNA, 32 nt, Homo Sapiens
guuuacaccauuuuauacucccgucagcaaua

SEQ ID NO: 288010 - RNA, 32 nt, Homo Sapiens
gccucccaauaccagcaggagguucugggccu

SEQ ID NO: 288011 - RNA, 32 nt, Homo Sapiens
ugcugcaugauguuauuuuguaaacagaugac

SEQ ID NO: 288012 - RNA, 32 nt, Homo Sapiens
cuauguacuuuuuuauaaauacuguauggaca

SEQ ID NO: 288013 - RNA, 32 nt, Homo Sapiens
uuuuuaggauuugagguacaaguucauacgug

SEQ ID NO: 288014 - RNA, 32 nt, Homo Sapiens
cccuccacccucaacaggauguggugggggug

SEQ ID NO: 288015 - RNA, 32 nt, Homo Sapiens
uaaccccaggacucagaagugaaggagaaaug

SEQ ID NO: 288016 - RNA, 32 nt, Homo Sapiens
gcccuucaggucaccaaacauccaccuggagc

SEQ ID NO: 288017 - RNA, 32 nt, Homo Sapiens
gaugcuucucuuauccuccagaauagagaccu

SEQ ID NO: 288018 - RNA, 32 nt, Homo Sapiens
uaaaucuuucuuucuuuuuuuuuuuaacagaa

SEQ ID NO: 288019 - RNA, 32 nt, Homo Sapiens
uaugaaaaacaaacuugugaaaauguauaaaa

SEQ ID NO: 288020 - RNA, 32 nt, Homo Sapiens
caaacaacaacaaaaacaaaaaaugugcuguu

SEQ ID NO: 288021 - RNA, 32 nt, Homo Sapiens
guggcgggauggggcugcugcucaugauccug

SEQ ID NO: 288022 - RNA, 32 nt, Homo Sapiens
ggcaggcccgcgcccgcgcccggacuuugcca

SEQ ID NO: 288023 - RNA, 32 nt, Homo Sapiens
uuuucagagccggcccgccucuccucgguuca

SEQ ID NO: 288024 - RNA, 32 nt, Homo Sapiens
cuguuguuucugaagaaaugugauguaacuga

SEQ ID NO: 288025 - RNA, 29 nt, Homo Sapiens
agggagcuguggccgaggacgccgaggcc

SEQ ID NO: 288026 - RNA, 32 nt, Homo Sapiens
guugcccgaggaggggccggccugcuggccug

SEQ ID NO: 288027 - RNA, 32 nt, Homo Sapiens
uucuccccgauguuccucuccugaauucugga

SEQ ID NO: 288028 - RNA, 32 nt, Homo Sapiens
cugaugcugcagccggaagugauccuucccuc

SEQ ID NO: 288029 - RNA, 32 nt, Homo Sapiens
caaacacccagaacucuuuugcuggucagaga

SEQ ID NO: 288030 - RNA, 32 nt, Homo Sapiens
gcuuauguuaugauuguugauaacuaaccaaa

SEQ ID NO: 288031 - RNA, 32 nt, Homo Sapiens
aucuguccgcacccuucccagugauggggcag

SEQ ID NO: 288032 - RNA, 32 nt, Homo Sapiens
cuaauauucuuugcauauaucuagcuacuccc

SEQ ID NO: 288033 - RNA, 32 nt, Homo Sapiens
guggcuccggagcccacaugcauugauucgac

SEQ ID NO: 288034 - RNA, 32 nt, Homo Sapiens
auuacgaaguuuagaugaccaaaauggauauc

SEQ ID NO: 288035 - RNA, 30 nt, Homo Sapiens
ggggccgacgccuuccugccggcgcugacc

SEQ ID NO: 288036 - RNA, 30 nt, Homo Sapiens
cacagggccaggcgcgguggcucaugcgug

SEQ ID NO: 288037 - RNA, 32 nt, Homo Sapiens
uuuaaaugaguguacauacauaaaagcugcca

SEQ ID NO: 288038 - RNA, 32 nt, Homo Sapiens
aagacaguagccaagaagauggcauagcauaa

SEQ ID NO: 288039 - RNA, 32 nt, Homo Sapiens
gacccuugccucaccccucccccuggccucac

SEQ ID NO: 288040 - RNA, 32 nt, Homo Sapiens
gguuccuggacccauuccauuaaacuacauua

SEQ ID NO: 288041 - RNA, 32 nt, Homo Sapiens
uucuauaauaaugaggaagaaaugguaagacg

SEQ ID NO: 288042 - RNA, 32 nt, Homo Sapiens
cagagcugccaccagcagcaggcucagacacu

SEQ ID NO: 288043 - RNA, 32 nt, Homo Sapiens
gcuuugauauuuuuguuuugugcuucugaaga

SEQ ID NO: 288044 - RNA, 32 nt, Homo Sapiens
cccagcuuauaaacagaagugacugauguucc

SEQ ID NO: 288045 - RNA, 32 nt, Homo Sapiens
gaauccgucgugguguuucaagcgagucaaga

SEQ ID NO: 288046 - RNA, 32 nt, Homo Sapiens
gggaaaaauaaauauaagaccuaugaguuaug

SEQ ID NO: 288047 - RNA, 32 nt, Homo Sapiens
gcuccaccccuucuggcaccagauggggcuug

SEQ ID NO: 288048 - RNA, 32 nt, Homo Sapiens
uaugggggaacagugaagaaaaggagggugag

SEQ ID NO: 288049 - RNA, 32 nt, Homo Sapiens
gaagacugauuggagggcccuaucuugugagu

SEQ ID NO: 288050 - RNA, 32 nt, Homo Sapiens
gaagauaagccauguuucuguauuguacaugu

SEQ ID NO: 288051 - RNA, 32 nt, Homo Sapiens
uauuaaggacuuucuuuuuuuaauguuguaca

SEQ ID NO: 288052 - RNA, 32 nt, Homo Sapiens
acggccaggaccaaggcgcugccugcucgggc

SEQ ID NO: 288053 - RNA, 32 nt, Homo Sapiens
uacaaacacaugugcaugcacacacacacaua

SEQ ID NO: 288054 - RNA, 32 nt, Homo Sapiens
uguaaguaaaaauuauaaaauuucaugugagc

SEQ ID NO: 288055 - RNA, 32 nt, Homo Sapiens
ucuauagcauauaauguuuuaauauucugugu

SEQ ID NO: 288056 - RNA, 32 nt, Homo Sapiens
acuucagcuuugcaucacgagucuuguauucc

SEQ ID NO: 288057 - RNA, 32 nt, Homo Sapiens
uggaucacaccuguaaucccagcacuuuggga

SEQ ID NO: 288058 - RNA, 32 nt, Homo Sapiens
uggcucacaccuguaauccaagcacuuuggga

SEQ ID NO: 288059 - RNA, 32 nt, Homo Sapiens
cuaaaagaaacacaauauaugacugacuacuu

SEQ ID NO: 288060 - RNA, 32 nt, Homo Sapiens
uuuaguuccuuccccagucaacaacugaccac

SEQ ID NO: 288061 - RNA, 32 nt, Homo Sapiens
ucuuuucauuucuagugagacacacgcuuugg

SEQ ID NO: 288062 - RNA, 32 nt, Homo Sapiens
cacauuccauuugguagcaauaugcgguccga

SEQ ID NO: 288063 - RNA, 32 nt, Homo Sapiens
caggaaccccagagcaggcaguggauuaccca

SEQ ID NO: 288064 - RNA, 32 nt, Homo Sapiens
cuacagggaaaucccggcccagcuuuccacag

SEQ ID NO: 288065 - RNA, 32 nt, Homo Sapiens
gaugugacauuuuuuucuuaaccuuguugagc

SEQ ID NO: 288066 - RNA, 32 nt, Homo Sapiens
gaaugucuuucugcauauuacugaacagaaua

SEQ ID NO: 288067 - RNA, 32 nt, Homo Sapiens
uagagcggagccagcgucggacacgcgcaacc

SEQ ID NO: 288068 - RNA, 32 nt, Homo Sapiens
cagcagcagcagcagcagcagcaaccuuugau

SEQ ID NO: 288069 - RNA, 32 nt, Homo Sapiens
gccugaagcuacaugcaccucccccacugcug

SEQ ID NO: 288070 - RNA, 32 nt, Homo Sapiens
agagggggccgcgggugucuuguccuguccca

SEQ ID NO: 288071 - RNA, 32 nt, Homo Sapiens
ggcaacuggccaaguaggugauucagcagaca

SEQ ID NO: 288072 - RNA, 32 nt, Homo Sapiens
caagucaucuuaccucucuggaucucaguugu

SEQ ID NO: 288073 - RNA, 32 nt, Homo Sapiens
caauguaugcuuuagaaguaaagacauugacc

SEQ ID NO: 288074 - RNA, 32 nt, Homo Sapiens
uaaauuuuucuuuuuggauauucgaguaaaac

SEQ ID NO: 288075 - RNA, 32 nt, Homo Sapiens
gggagggaugaggcacccucuugcucagccug

SEQ ID NO: 288076 - RNA, 32 nt, Homo Sapiens
aaugggaagguuuuauugaaaacuacagcugg

SEQ ID NO: 288077 - RNA, 30 nt, Homo Sapiens
cccgcugucugugcugugagagucgccgcu

SEQ ID NO: 288078 - RNA, 32 nt, Homo Sapiens
aaagcuuuguauuauucuuccacauaugcugg

SEQ ID NO: 288079 - RNA, 32 nt, Homo Sapiens
caagaaacaugaugucucggaggcgguccccu

SEQ ID NO: 288080 - RNA, 32 nt, Homo Sapiens
aguguuggagaauggggccuguuaggaagugu

SEQ ID NO: 288081 - RNA, 32 nt, Homo Sapiens
cguguggcgggggugugccggggcgugagugc

SEQ ID NO: 288082 - RNA, 32 nt, Homo Sapiens
uauaugauauauauuuauacuaaaacuauaua

SEQ ID NO: 288083 - RNA, 32 nt, Homo Sapiens
agagugaagucgcagggcccgccccgcgucug

SEQ ID NO: 288084 - RNA, 32 nt, Homo Sapiens
caagccgccccgagguucucagaggcgaggcg

SEQ ID NO: 288085 - RNA, 32 nt, Homo Sapiens
uaauagaaaagggccaagaaaaauaugcaucu

SEQ ID NO: 288086 - RNA, 32 nt, Homo Sapiens
ugagacuuuuucuuugcuuguuuguguaauuc

SEQ ID NO: 288087 - RNA, 32 nt, Homo Sapiens
ggagauaucuucuaaaagugaacuggaugaau

SEQ ID NO: 288088 - RNA, 32 nt, Homo Sapiens
cgcuggugucugggcugugcucccucacuaaa

SEQ ID NO: 288089 - RNA, 32 nt, Homo Sapiens
ugcugccuacaccuccaccuccuuccccuucu

SEQ ID NO: 288090 - RNA, 32 nt, Homo Sapiens
aaagcacccaggaugccugugauugguugguc

SEQ ID NO: 288091 - RNA, 32 nt, Homo Sapiens
ugcuuuguuugugagagauguguauguauuuc

SEQ ID NO: 288092 - RNA, 32 nt, Homo Sapiens
uuuuuuggucugauuuuguauuguuugagaac

SEQ ID NO: 288093 - RNA, 32 nt, Homo Sapiens
uaaaauuugacuguuuaaaauguuggccaaaa

SEQ ID NO: 288094 - RNA, 32 nt, Homo Sapiens
aaauccuuuaagagauauuagagcaaguauuu

SEQ ID NO: 288095 - RNA, 32 nt, Homo Sapiens
ccggaucagugaccaccaccacguucagguuu

SEQ ID NO: 288096 - RNA, 31 nt, Homo Sapiens
aggauucugugacucuugccaaauaauuuug

SEQ ID NO: 288097 - RNA, 32 nt, Homo Sapiens
gcuagaaugcagcggugcaaucaugagucaau

SEQ ID NO: 288098 - RNA, 32 nt, Homo Sapiens
auauacaacaaggccauuuugucaaacgagag

SEQ ID NO: 288099 - RNA, 32 nt, Homo Sapiens
gcuccggccgccgcgccgccuggcuuucguau

SEQ ID NO: 288100 - RNA, 32 nt, Homo Sapiens
uaaauguccccuuaugcuuuugaaauaaauuu

SEQ ID NO: 288101 - RNA, 32 nt, Homo Sapiens
agucccacguggagugaccagucuuccuccuu

SEQ ID NO: 288102 - RNA, 32 nt, Homo Sapiens
gagaaaauauauauuuuuuguugggguaaaua

SEQ ID NO: 288103 - RNA, 32 nt, Homo Sapiens
guucucgaguauccuguggaggaggcaaaaau

SEQ ID NO: 288104 - RNA, 32 nt, Homo Sapiens
accugccugcccuccccucccccacucuauac

SEQ ID NO: 288105 - RNA, 32 nt, Homo Sapiens
cagccucagguggugcuuggggcuuucaguca

SEQ ID NO: 288106 - RNA, 32 nt, Homo Sapiens
gguuucaggaguuccuuguggagaggggaucg

SEQ ID NO: 288107 - RNA, 32 nt, Homo Sapiens
agcaucugcccgcaggccccagcccuucccug

SEQ ID NO: 288108 - RNA, 31 nt, Homo Sapiens
gaagagccaacaugcuggccccgcgcggagc

SEQ ID NO: 288109 - RNA, 32 nt, Homo Sapiens
cccagccccuccccacccacccucuaauggac

SEQ ID NO: 288110 - RNA, 32 nt, Homo Sapiens
gcccgccugggaggagcgccuggacucgcggg

SEQ ID NO: 288111 - RNA, 32 nt, Homo Sapiens
aggguggggucucauuagcuuugcaacaggaa

SEQ ID NO: 288112 - RNA, 32 nt, Homo Sapiens
aaacgucccucuuggcucuauaauauaagaua

SEQ ID NO: 288113 - RNA, 32 nt, Homo Sapiens
uauuguauuucaggguacaacaaaaugcugug

SEQ ID NO: 288114 - RNA, 32 nt, Homo Sapiens
acauacugcuccauaugcuguugagaagggag

SEQ ID NO: 288115 - RNA, 32 nt, Homo Sapiens
uucacaugaaagaagaaguauauuuuagaaau

SEQ ID NO: 288116 - RNA, 32 nt, Homo Sapiens
aaaguuuguaagguuuuucagaucuaggucua

SEQ ID NO: 288117 - RNA, 32 nt, Homo Sapiens
ggagugcaguacgcaaucuuggcucacugcaa

SEQ ID NO: 288118 - RNA, 32 nt, Homo Sapiens
ccgagaucaugcuacugcacuccagccugggc

SEQ ID NO: 288119 - RNA, 32 nt, Homo Sapiens
cuaaguacuuuuuuggaucaaaucuaugaugc

SEQ ID NO: 288120 - RNA, 32 nt, Homo Sapiens
ccgggcgcucggagcugugcccggccccgcuu

SEQ ID NO: 288121 - RNA, 32 nt, Homo Sapiens
uuuuagguauuuuguccuaagaauguaaaugu

SEQ ID NO: 288122 - RNA, 32 nt, Homo Sapiens
guggcaguggaggugggguguuugggaggcug

SEQ ID NO: 288123 - RNA, 32 nt, Homo Sapiens
guuuaaacacuugcuuuuuuuuuuuugagucu

SEQ ID NO: 288124 - RNA, 32 nt, Homo Sapiens
ggcgggcguuucugaaaagcaaagaugccgga

SEQ ID NO: 288125 - RNA, 32 nt, Homo Sapiens
caccucugccgacgacggaccagcucccucuc

SEQ ID NO: 288126 - RNA, 32 nt, Homo Sapiens
ucuacuaaaaauaccaaaauuagccgggcaug

SEQ ID NO: 288127 - RNA, 32 nt, Homo Sapiens
gcuugugaugucuuccccauuaaacugggugc

SEQ ID NO: 288128 - RNA, 32 nt, Homo Sapiens
cgaaagggcuccuugcgggcuccgggagcgaa

SEQ ID NO: 288129 - RNA, 32 nt, Homo Sapiens
cuagcuacucaagggagggggaugugggcacu

SEQ ID NO: 288130 - RNA, 32 nt, Homo Sapiens
ugagacguuucucuuucugaucuagcaggagg

SEQ ID NO: 288131 - RNA, 32 nt, Homo Sapiens
cuaacaauuucccccuguucuuaacacuuccu

SEQ ID NO: 288132 - RNA, 32 nt, Homo Sapiens
uaacuaaauaaagcuugcaacaaaauucucug

SEQ ID NO: 288133 - RNA, 32 nt, Homo Sapiens
aacacggaagcagggcgagaaaaguaaacgua

SEQ ID NO: 288134 - RNA, 32 nt, Homo Sapiens
uagauuuauuaauguuaauaccuagugaauau

SEQ ID NO: 288135 - RNA, 32 nt, Homo Sapiens
cgagguccagagccccaccuccuaacaccaug

SEQ ID NO: 288136 - RNA, 32 nt, Homo Sapiens
aggccaguacagccugaacuuccacaacugca

SEQ ID NO: 288137 - RNA, 32 nt, Homo Sapiens
ucuguggccggcggcagcuggugcggggggca

SEQ ID NO: 288138 - RNA, 30 nt, Homo Sapiens
aggcucuaggacugcaucaucugcugaagc

SEQ ID NO: 288139 - RNA, 32 nt, Homo Sapiens
cagccucuguucugcccuuuccaaaccuccuc

SEQ ID NO: 288140 - RNA, 32 nt, Homo Sapiens
uaaucccaggacuuugggaggcugaggcaggu

SEQ ID NO: 288141 - RNA, 32 nt, Homo Sapiens
uuuugugacaacaacuacugauacaaggguca

SEQ ID NO: 288142 - RNA, 32 nt, Homo Sapiens
auugacccuaguugguugguauugaugacuuc

SEQ ID NO: 288143 - RNA, 32 nt, Homo Sapiens
aacaugggaaguauucuugaaaugucacauuu

SEQ ID NO: 288144 - RNA, 32 nt, Homo Sapiens
agaggggcacagaacgguuugccucauucuga

SEQ ID NO: 288145 - RNA, 32 nt, Homo Sapiens
agagaccauuuucauuuacugccaucauaaau

SEQ ID NO: 288146 - RNA, 32 nt, Homo Sapiens
gacaugaaaggcauuaucaacuaacucuagac

SEQ ID NO: 288147 - RNA, 32 nt, Homo Sapiens
gggauggugcuaaaccauuagaaaccagcccc

SEQ ID NO: 288148 - RNA, 31 nt, Homo Sapiens
ugucugaaauaaagggagagaguaugcagau

SEQ ID NO: 288149 - RNA, 32 nt, Homo Sapiens
cgcgugggacgccugagccccagcgggagacc

SEQ ID NO: 288150 - RNA, 32 nt, Homo Sapiens
acagagcugcuuuggggaaaguucuuaucagc

SEQ ID NO: 288151 - RNA, 28 nt, Homo Sapiens
gcacaggucccaggaccaaggagaggug

SEQ ID NO: 288152 - RNA, 32 nt, Homo Sapiens
auuccccagugucuucuauugauucagcugua

SEQ ID NO: 288153 - RNA, 32 nt, Homo Sapiens
gccgagggcugcucggccgccgcagccucgcc

SEQ ID NO: 288154 - RNA, 32 nt, Homo Sapiens
uaauuucaggaaaauguauugauucaacaggg

SEQ ID NO: 288155 - RNA, 32 nt, Homo Sapiens
acccccaguccucccuagcucuuccccaucuc

SEQ ID NO: 288156 - RNA, 28 nt, Homo Sapiens
cuaaagaaguuugaacauuuggguuacu

SEQ ID NO: 288157 - RNA, 32 nt, Homo Sapiens
cgaggcuucggcgggggcgggaggagcugccc

SEQ ID NO: 288158 - RNA, 32 nt, Homo Sapiens
aacgugccggagugcuugggugccaucagcua

SEQ ID NO: 288159 - RNA, 29 nt, Homo Sapiens
ucacugaaauaaaagcuauauaagauuca

SEQ ID NO: 288160 - RNA, 32 nt, Homo Sapiens
gcagcuggcagccuggggcgugcuucaggcuc

SEQ ID NO: 288161 - RNA, 32 nt, Homo Sapiens
uucaagcugugauaugaguaaguucuacagau

SEQ ID NO: 288162 - RNA, 32 nt, Homo Sapiens
cuugugaaauuuaaaaaaugugaauaugaugu

SEQ ID NO: 288163 - RNA, 32 nt, Homo Sapiens
gccgaggcggguggaucacuugagaucagaag

SEQ ID NO: 288164 - RNA, 32 nt, Homo Sapiens
agcaucucccucacugaaaccagguggccggc

SEQ ID NO: 288165 - RNA, 32 nt, Homo Sapiens
acaaugcaaaacaaaauaaugaaguaagugaa

SEQ ID NO: 288166 - RNA, 32 nt, Homo Sapiens
gacuguggcagcgggaguucccggcccuccac

SEQ ID NO: 288167 - RNA, 31 nt, Homo Sapiens
gccacuuggcgcagcccagcccggaggccgg

SEQ ID NO: 288168 - RNA, 32 nt, Homo Sapiens
gauguugauagcggaggcucucuguuuggcuc

SEQ ID NO: 288169 - RNA, 32 nt, Homo Sapiens
cgcccacugcuccucagcguccaguccuccug

SEQ ID NO: 288170 - RNA, 32 nt, Homo Sapiens
uuacaaucuauuuacucuuauucaauucuaag

SEQ ID NO: 288171 - RNA, 32 nt, Homo Sapiens
ugggacccuggccgcuucccaccaucuucugc

SEQ ID NO: 288172 - RNA, 32 nt, Homo Sapiens
aaugggaagauauacauguuguguaaaaaauc

SEQ ID NO: 288173 - RNA, 32 nt, Homo Sapiens
guccgugacgucacugaugugcgcuucucccg

SEQ ID NO: 288174 - RNA, 31 nt, Homo Sapiens
gcagggaaauaaaaaauacauaucaaaacaa

SEQ ID NO: 288175 - RNA, 32 nt, Homo Sapiens
gcugaugacgaacuaucucuaacuggucuuga

SEQ ID NO: 288176 - RNA, 27 nt, Homo Sapiens
auucauuccuucuucauucuuugcaaa

SEQ ID NO: 288177 - RNA, 32 nt, Homo Sapiens
aaccucugucucccggguucaagcaauucucc

SEQ ID NO: 288178 - RNA, 32 nt, Homo Sapiens
gcgacucgggagccccgggccacagccuggcc

SEQ ID NO: 288179 - RNA, 32 nt, Homo Sapiens
gccaggaaagcagcaaaggaaagagaaaccug

SEQ ID NO: 288180 - RNA, 32 nt, Homo Sapiens
ggcuggaagggcggcggcggcugggggagacg

SEQ ID NO: 288181 - RNA, 32 nt, Homo Sapiens
ccuuugggugucugcuugccacuuccuaagaa

SEQ ID NO: 288182 - RNA, 32 nt, Homo Sapiens
ucaagauggcaccagcucuuugggccuaggau

SEQ ID NO: 288183 - RNA, 32 nt, Homo Sapiens
acugacaguagcucccacuguuucacaggcag

SEQ ID NO: 288184 - RNA, 30 nt, Homo Sapiens
gaggugggagguggaagaagggagaagaaa

SEQ ID NO: 288185 - RNA, 32 nt, Homo Sapiens
ugcacuucucuggcaagcugcccccucugaag

SEQ ID NO: 288186 - RNA, 32 nt, Homo Sapiens
uacugccaggacggagcgcauugccucgagcc

SEQ ID NO: 288187 - RNA, 32 nt, Homo Sapiens
agcgcucaccuggccuuuccucaaggcauggu

SEQ ID NO: 288188 - RNA, 32 nt, Homo Sapiens
ugggucgccagccucucccgcgcacguugccu

SEQ ID NO: 288189 - RNA, 32 nt, Homo Sapiens
uuuauuuauuuaaaugugugucaagggccugc

SEQ ID NO: 288190 - RNA, 32 nt, Homo Sapiens
cuuggagagcuguaaaugacaagcauuaggaa

SEQ ID NO: 288191 - RNA, 32 nt, Homo Sapiens
auaagacaaugaaaguuugauguuguacauac

SEQ ID NO: 288192 - RNA, 32 nt, Homo Sapiens
ucaagcgccaggugcucugcuaccagcugggc

SEQ ID NO: 288193 - RNA, 32 nt, Homo Sapiens
cguaggucuuuucggagugacaccaacgauug

SEQ ID NO: 288194 - RNA, 32 nt, Homo Sapiens
agcuuuauuaaacauuuuaaucagauaaguga

SEQ ID NO: 288195 - RNA, 32 nt, Homo Sapiens
aaaccaacaucauuuuuuuuuaaucucucagg

SEQ ID NO: 288196 - RNA, 32 nt, Homo Sapiens
uuuguuuguuuuuaaucugccuuaaugagcuc

SEQ ID NO: 288197 - RNA, 32 nt, Homo Sapiens
gccuggacacaagcuuagauucucuauguaua

SEQ ID NO: 288198 - RNA, 32 nt, Homo Sapiens
ggaguauuuuuaggagcagaaacugcaaacac

SEQ ID NO: 288199 - RNA, 32 nt, Homo Sapiens
gggcagggcuuagcuuccugugccgcccauuc

SEQ ID NO: 288200 - RNA, 32 nt, Homo Sapiens
ugauuugguggauauuaagauuauacacaucc

SEQ ID NO: 288201 - RNA, 32 nt, Homo Sapiens
uucugagagaagaacacugcugauugugggag

SEQ ID NO: 288202 - RNA, 32 nt, Homo Sapiens
ccacccgcgcgagguaucguccuuggagaaga

SEQ ID NO: 288203 - RNA, 32 nt, Homo Sapiens
ucaacugagagaagaaccacaguugaaaccug

SEQ ID NO: 288204 - RNA, 32 nt, Homo Sapiens
cuccucggccucagcccucuccuagcucuccc

SEQ ID NO: 288205 - RNA, 32 nt, Homo Sapiens
aagaggccggcuucaacaaaaugggauaaaaa

SEQ ID NO: 288206 - RNA, 32 nt, Homo Sapiens
ugcugcaggggccuuugugugcccuaaaaaca

SEQ ID NO: 288207 - RNA, 32 nt, Homo Sapiens
gaaaaccagaagcccaggaucuucugccuccg

SEQ ID NO: 288208 - RNA, 32 nt, Homo Sapiens
gaucuuccgccagcgccuccaccuucagaugu

SEQ ID NO: 288209 - RNA, 32 nt, Homo Sapiens
aaaaaugugugcuugcugcugcugugagugaa

SEQ ID NO: 288210 - RNA, 32 nt, Homo Sapiens
uuuggaauaauuuuaugcucuuucuggcaaau

SEQ ID NO: 288211 - RNA, 32 nt, Homo Sapiens
acauucucaagccccuuuaacucagaugucaa

SEQ ID NO: 288212 - RNA, 32 nt, Homo Sapiens
aauggugggcugggggcgcuugaaaguucugg

SEQ ID NO: 288213 - RNA, 32 nt, Homo Sapiens
gaucaaaaccauucuguaaaaucuuuguuguu

SEQ ID NO: 288214 - RNA, 32 nt, Homo Sapiens
guaaagaggcuguucccagcuccagcucuaac

SEQ ID NO: 288215 - RNA, 32 nt, Homo Sapiens
uucccgccacuccuagccccagccuccaagga

SEQ ID NO: 288216 - RNA, 32 nt, Homo Sapiens
caaaggacgcguccccacgggcggacugaccg

SEQ ID NO: 288217 - RNA, 32 nt, Homo Sapiens
ggcaagcgccggcgugaugacaucagugugga

SEQ ID NO: 288218 - RNA, 32 nt, Homo Sapiens
uggacgccgccgggcgcugggcuggagcuggg

SEQ ID NO: 288219 - RNA, 32 nt, Homo Sapiens
cauuuuuuugguuuuauuuucuuaauaaaagc

SEQ ID NO: 288220 - RNA, 32 nt, Homo Sapiens
uagcaaggauccuaauguuaauccccaagacc

SEQ ID NO: 288221 - RNA, 32 nt, Homo Sapiens
aggauuucaggguuuccaaucaccccacaggu

SEQ ID NO: 288222 - RNA, 32 nt, Homo Sapiens
uaagagugccguacaacuguggucaauccgaa

SEQ ID NO: 288223 - RNA, 32 nt, Homo Sapiens
guccuaaauccaaccaacuacacauuuuaucu

SEQ ID NO: 288224 - RNA, 32 nt, Homo Sapiens
agccuuaagccugggaaggcaauuaggguuuc

SEQ ID NO: 288225 - RNA, 32 nt, Homo Sapiens
uuugagcugaguccugagacacuuagcuuccc

SEQ ID NO: 288226 - RNA, 32 nt, Homo Sapiens
aagccucaaaacacagcacacacacacacgag

SEQ ID NO: 288227 - RNA, 32 nt, Homo Sapiens
accagccugggcaacauagugagaccuugucu

SEQ ID NO: 288228 - RNA, 32 nt, Homo Sapiens
guggcagacaccuguccccugcccugcauggg

SEQ ID NO: 288229 - RNA, 32 nt, Homo Sapiens
aagcacuugucauuuuaaaucuugcacuaaaa

SEQ ID NO: 288230 - RNA, 32 nt, Homo Sapiens
gguuugucagacaauaggauagauguuaggag

SEQ ID NO: 288231 - RNA, 32 nt, Homo Sapiens
uguugguugaaagaagcgcagggaagagacug

SEQ ID NO: 288232 - RNA, 32 nt, Homo Sapiens
gaacggcgggcucgaccugcccgugaccgugu

SEQ ID NO: 288233 - RNA, 32 nt, Homo Sapiens
auccuuucucuuucuucucucucauuucccac

SEQ ID NO: 288234 - RNA, 32 nt, Homo Sapiens
ugaauuauuuuaucucuuauguuaacaugaga

SEQ ID NO: 288235 - RNA, 32 nt, Homo Sapiens
guaugauguuuguaagaccauguuuguaagac

SEQ ID NO: 288236 - RNA, 32 nt, Homo Sapiens
ccuuuguccugcugaaccacuccagccugcug

SEQ ID NO: 288237 - RNA, 32 nt, Homo Sapiens
gcgucgugucauuggauauaauccucagaaau

SEQ ID NO: 288238 - RNA, 32 nt, Homo Sapiens
auuugguuuaaauuccucucccugacauucau

SEQ ID NO: 288239 - RNA, 32 nt, Homo Sapiens
gaugggcgugacccagcgucagagggucgggg

SEQ ID NO: 288240 - RNA, 32 nt, Homo Sapiens
gaauucggggggcgccggaguggagaaaggag

SEQ ID NO: 288241 - RNA, 32 nt, Homo Sapiens
agccuucuuucugcccuccagauccacggugc

SEQ ID NO: 288242 - RNA, 32 nt, Homo Sapiens
aagcuaaguagaaaaaaguagaaaaaucagac

SEQ ID NO: 288243 - RNA, 32 nt, Homo Sapiens
agacaagggcuuuuuaugcaaguuuugaaaga

SEQ ID NO: 288244 - RNA, 32 nt, Homo Sapiens
cucccucgcuggcggagcggcugggcggcggg

SEQ ID NO: 288245 - RNA, 32 nt, Homo Sapiens
gacaugacgugacaccuguaugaaaaugugau

SEQ ID NO: 288246 - RNA, 32 nt, Homo Sapiens
agacgacuccggacgcgccaucuuuaagagcu

SEQ ID NO: 288247 - RNA, 32 nt, Homo Sapiens
aaacaguagcauaugcaggcaagucauuggac

SEQ ID NO: 288248 - RNA, 32 nt, Homo Sapiens
uuaacuguuguagaagacaaaauguucacaau

SEQ ID NO: 288249 - RNA, 32 nt, Homo Sapiens
agugggcaguuacugagcuuuccuccucagag

SEQ ID NO: 288250 - RNA, 32 nt, Homo Sapiens
cuuuuuugaaagagaauauauggacagauuau

SEQ ID NO: 288251 - RNA, 28 nt, Homo Sapiens
cauaugaaagauuacuucugacauucca

SEQ ID NO: 288252 - RNA, 32 nt, Homo Sapiens
aggcuauacuccagcuggccaaggcuggaaac

SEQ ID NO: 288253 - RNA, 32 nt, Homo Sapiens
gggcgcccugcagggcgggcaggcugugccau

SEQ ID NO: 288254 - RNA, 30 nt, Homo Sapiens
cguggaugaugaugaugaugaugaugaaaa

SEQ ID NO: 288255 - RNA, 30 nt, Homo Sapiens
gccaccagagggcgcgcgaucccgccccaa

SEQ ID NO: 288256 - RNA, 32 nt, Homo Sapiens
augguagauuugugguguuugaugccacuaaa

SEQ ID NO: 288257 - RNA, 32 nt, Homo Sapiens
gaggagguggcucaggugucagggcgcaccgu

SEQ ID NO: 288258 - RNA, 32 nt, Homo Sapiens
gcccccacccucggagaugcugcugcagugag

SEQ ID NO: 288259 - RNA, 32 nt, Homo Sapiens
agaguguaugacacauaaccagcacccaagaa

SEQ ID NO: 288260 - RNA, 31 nt, Homo Sapiens
cggcgcgggcacugcuuuccacucggcuccu

SEQ ID NO: 288261 - RNA, 32 nt, Homo Sapiens
guugggccugugucacauccaggcagccaugu

SEQ ID NO: 288262 - RNA, 32 nt, Homo Sapiens
gcagugagagggaggcuaugccugcugcuugg

SEQ ID NO: 288263 - RNA, 32 nt, Homo Sapiens
acauuuaacugggagucuuguauuuuaucugg

SEQ ID NO: 288264 - RNA, 32 nt, Homo Sapiens
cacccacgcuggcggagcucagggcuggggac

SEQ ID NO: 288265 - RNA, 32 nt, Homo Sapiens
guguuggggggccguggucagguguuggggga

SEQ ID NO: 288266 - RNA, 29 nt, Homo Sapiens
aagguuucuaaauuuaucaguaccuaagu

SEQ ID NO: 288267 - RNA, 32 nt, Homo Sapiens
uuacaagaguauaaaaauggacauuaaaucau

SEQ ID NO: 288268 - RNA, 32 nt, Homo Sapiens
uucucugauggcgagaggcugcggcuguacca

SEQ ID NO: 288269 - RNA, 32 nt, Homo Sapiens
ggugggggacgccuguguucacccauggugcc

SEQ ID NO: 288270 - RNA, 32 nt, Homo Sapiens
gaaacagaagagcugcaguugcuggagcuggg

SEQ ID NO: 288271 - RNA, 32 nt, Homo Sapiens
ccacggccaaaauaaauugguacuguuuguua

SEQ ID NO: 288272 - RNA, 32 nt, Homo Sapiens
acaaggucaggaguuugagaccggccuggcca

SEQ ID NO: 288273 - RNA, 32 nt, Homo Sapiens
cccacgggccccaccuaccucugaggugggcu

SEQ ID NO: 288274 - RNA, 32 nt, Homo Sapiens
gcgccgcucaggggcgggaagaggaggcggua

SEQ ID NO: 288275 - RNA, 32 nt, Homo Sapiens
agaccuggauucaaauucugccuugaaauauu

SEQ ID NO: 288276 - RNA, 32 nt, Homo Sapiens
ucagaagauaaaauauuuuuauauuuaugcau

SEQ ID NO: 288277 - RNA, 32 nt, Homo Sapiens
gaugaaacauuuuuuccaauucaaauucuagc

SEQ ID NO: 288278 - RNA, 32 nt, Homo Sapiens
gggagugaaggagguggcguugcugagagcag

SEQ ID NO: 288279 - RNA, 32 nt, Homo Sapiens
cugugcgguuagccagccuguaaugagaggag

SEQ ID NO: 288280 - RNA, 32 nt, Homo Sapiens
augaaaaugcuguuuucaacauuguauuugga

SEQ ID NO: 288281 - RNA, 32 nt, Homo Sapiens
cuucauuacuuucuauguaguuucauucuuug

SEQ ID NO: 288282 - RNA, 32 nt, Homo Sapiens
ggaucagcauauucuuuuuuuagaugagacag

SEQ ID NO: 288283 - RNA, 32 nt, Homo Sapiens
uugauaccaaaauaaauuuacguagagauccu

SEQ ID NO: 288284 - RNA, 32 nt, Homo Sapiens
gaugaggagccgggguugcugcugcugcuucc

SEQ ID NO: 288285 - RNA, 32 nt, Homo Sapiens
ccaaaacaucagcauuucuaaaauaguccuaa

SEQ ID NO: 288286 - RNA, 32 nt, Homo Sapiens
gaaaauguuuuaaauauuuaggaagcuuuuaa

SEQ ID NO: 288287 - RNA, 32 nt, Homo Sapiens
aaccagcccagccugcccccuaucuuguaccu

SEQ ID NO: 288288 - RNA, 32 nt, Homo Sapiens
ucaucagugugauuuauaugcauuaucuucuu

SEQ ID NO: 288289 - RNA, 32 nt, Homo Sapiens
uuugguaaaaauucuuuuuucuuuuuuaauaa

SEQ ID NO: 288290 - RNA, 32 nt, Homo Sapiens
augaauauaaaaauauacuaaaaccuuccauu

SEQ ID NO: 288291 - RNA, 32 nt, Homo Sapiens
ugaaccuguuugcaugaguugcuccugacggc

SEQ ID NO: 288292 - RNA, 32 nt, Homo Sapiens
uuaauaucucaaacaacaguguuaugcucugc

SEQ ID NO: 288293 - RNA, 32 nt, Homo Sapiens
cccggccggggccugaggagcgggcacagggc

SEQ ID NO: 288294 - RNA, 32 nt, Homo Sapiens
acacugucgcccaaucuggagugcacuggcgc

SEQ ID NO: 288295 - RNA, 32 nt, Homo Sapiens
gcccacacgcaccccaggguccaugggcuccc

SEQ ID NO: 288296 - RNA, 32 nt, Homo Sapiens
aaaucaugaagauagaauucaacaguguauau

SEQ ID NO: 288297 - RNA, 32 nt, Homo Sapiens
agacacucucuucuuacuucugucacucuucc

SEQ ID NO: 288298 - RNA, 32 nt, Homo Sapiens
ccggccccaguguggugggcgaggguggcgca

SEQ ID NO: 288299 - RNA, 32 nt, Homo Sapiens
caucuuccugagggcucugucuugccugcagg

SEQ ID NO: 288300 - RNA, 32 nt, Homo Sapiens
uggcugcuccagccccacuucuuagcauucuu

SEQ ID NO: 288301 - RNA, 32 nt, Homo Sapiens
acgugcaggucccgugggaaggaggcaaaagc

SEQ ID NO: 288302 - RNA, 31 nt, Homo Sapiens
ggcuucauggcagacagcagcgagccagcgg

SEQ ID NO: 288303 - RNA, 32 nt, Homo Sapiens
uauauuagcaagaaaacauacuauuuacauau

SEQ ID NO: 288304 - RNA, 32 nt, Homo Sapiens
gucccccucacagguuaguggugauacauuuu

SEQ ID NO: 288305 - RNA, 32 nt, Homo Sapiens
acacucuguuggcccacgcagauagauuccau

SEQ ID NO: 288306 - RNA, 32 nt, Homo Sapiens
cugcuugaagggcugggagaugaggugggucu

SEQ ID NO: 288307 - RNA, 32 nt, Homo Sapiens
cgagcuuggguuauggcggcgccgggcgcgcu

SEQ ID NO: 288308 - RNA, 31 nt, Homo Sapiens
accggacagugaagccaaccaggacaagagu

SEQ ID NO: 288309 - RNA, 32 nt, Homo Sapiens
accuccgccucccagauucaagcgauucuccu

SEQ ID NO: 288310 - RNA, 32 nt, Homo Sapiens
gugaacuauuaauaauccaauuaaauaaaaua

SEQ ID NO: 288311 - RNA, 32 nt, Homo Sapiens
cugcccuucccuccccguuuuucauggccugc

SEQ ID NO: 288312 - RNA, 32 nt, Homo Sapiens
gaucagugucuagcgaugucaaggcccccagu

SEQ ID NO: 288313 - RNA, 32 nt, Homo Sapiens
gagaggugggaaggugauacaaacaggugguc

SEQ ID NO: 288314 - RNA, 32 nt, Homo Sapiens
ccgcgagccaggcgagugccgcggcggcagcg

SEQ ID NO: 288315 - RNA, 32 nt, Homo Sapiens
aggagguaaaagaucuguucaaggaaaacuau

SEQ ID NO: 288316 - RNA, 31 nt, Homo Sapiens
auuuaaaauaaaacacagguauagcaguauu

SEQ ID NO: 288317 - RNA, 32 nt, Homo Sapiens
gagaucacaucacugcacuccauccuggguga

SEQ ID NO: 288318 - RNA, 32 nt, Homo Sapiens
gaguguuuguuuccaauaaauaaaaaaguuga

SEQ ID NO: 288319 - RNA, 32 nt, Homo Sapiens
uuuuaaccaaaggaauauauuuuuaacuugaa

SEQ ID NO: 288320 - RNA, 32 nt, Homo Sapiens
ggccuuccaggcagagacccaggagcugcucg

SEQ ID NO: 288321 - RNA, 32 nt, Homo Sapiens
augaccaugaggaggaggaggggaaagcgcca

SEQ ID NO: 288322 - RNA, 32 nt, Homo Sapiens
agccacagugcccaccugcucuucccagccca

SEQ ID NO: 288323 - RNA, 32 nt, Homo Sapiens
cuggaacugcccacccuuccccugccaccccg

SEQ ID NO: 288324 - RNA, 32 nt, Homo Sapiens
uguuccugccccagccccuuccccagaccccu

SEQ ID NO: 288325 - RNA, 32 nt, Homo Sapiens
gcaccauccagcugcagcccucggggucgagc

SEQ ID NO: 288326 - RNA, 32 nt, Homo Sapiens
ccaugcauuaggcuuuggaaauuuaauguuag

SEQ ID NO: 288327 - RNA, 32 nt, Homo Sapiens
cucagccucccuguagccaucuccagggugac

SEQ ID NO: 288328 - RNA, 32 nt, Homo Sapiens
ucgucagucccggggcugacugucccucucag

SEQ ID NO: 288329 - RNA, 32 nt, Homo Sapiens
ccgcggcugcgccagacaguguagaaccugcg

SEQ ID NO: 288330 - RNA, 31 nt, Homo Sapiens
gggagccuggccugccugccccgcagaaggu

SEQ ID NO: 288331 - RNA, 32 nt, Homo Sapiens
augaaugaggaugagugucuuuuuguagguua

SEQ ID NO: 288332 - RNA, 32 nt, Homo Sapiens
augcagcuucccagccccuccccuccccuacc

SEQ ID NO: 288333 - RNA, 32 nt, Homo Sapiens
cuggccaccucucuccuuugcugaggccucca

SEQ ID NO: 288334 - RNA, 32 nt, Homo Sapiens
ucuccuuccuuccuuuucaugggaacugcuug

SEQ ID NO: 288335 - RNA, 32 nt, Homo Sapiens
cagcguggcagagcuggguucuccuccugggg

SEQ ID NO: 288336 - RNA, 32 nt, Homo Sapiens
uuagcaacaaacguacccgcuuggcaagccca

SEQ ID NO: 288337 - RNA, 32 nt, Homo Sapiens
cccuuuuuuuuuucuuuuuuuugagauguagu

SEQ ID NO: 288338 - RNA, 29 nt, Homo Sapiens
uuuugcauauguauguaugugagccguac

SEQ ID NO: 288339 - RNA, 32 nt, Homo Sapiens
ggccuagggggaggacagguugguaaaacaug

SEQ ID NO: 288340 - RNA, 30 nt, Homo Sapiens
ccggcggcgcccgcgccuuagccugucagg

SEQ ID NO: 288341 - RNA, 32 nt, Homo Sapiens
acaaauuauuuauguuuucuuaguaucagaag

SEQ ID NO: 288342 - RNA, 29 nt, Homo Sapiens
aaccugucuuguuucaggagccaccaugu

SEQ ID NO: 288343 - RNA, 32 nt, Homo Sapiens
agcaggcaaccucugggguaagacuacugaua

SEQ ID NO: 288344 - RNA, 32 nt, Homo Sapiens
ugcaacggaaacuuuuggcuccacgaacagaa

SEQ ID NO: 288345 - RNA, 32 nt, Homo Sapiens
gccagaggguggugugguguccagggguccau

SEQ ID NO: 288346 - RNA, 32 nt, Homo Sapiens
gcauacuaacuguccucagauuucaguucuuu

SEQ ID NO: 288347 - RNA, 32 nt, Homo Sapiens
ugauuuagauaaaauuuagucuuuguuaucac

SEQ ID NO: 288348 - RNA, 32 nt, Homo Sapiens
gggucaggagucaugccagaccagaacuugau

SEQ ID NO: 288349 - RNA, 32 nt, Homo Sapiens
ggucucugacuucugcuugauuccacagucuc

SEQ ID NO: 288350 - RNA, 32 nt, Homo Sapiens
uauguuaaccucagugcucaacuauuugaacu

SEQ ID NO: 288351 - RNA, 29 nt, Homo Sapiens
aguauaauagugaucccuauggagaauua

SEQ ID NO: 288352 - RNA, 32 nt, Homo Sapiens
agaaccauuuuaggcauagaacuacagacauu

SEQ ID NO: 288353 - RNA, 32 nt, Homo Sapiens
cacaguauauauuauaguaauuagggugacuu

SEQ ID NO: 288354 - RNA, 32 nt, Homo Sapiens
gccggcgaauaaaacgagcggcgaaagaaccg

SEQ ID NO: 288355 - RNA, 30 nt, Homo Sapiens
ggaggagggcaccgcgcgggguccgacgcg

SEQ ID NO: 288356 - RNA, 32 nt, Homo Sapiens
uauuuuguucugaauaaauuuacaguauuggg

SEQ ID NO: 288357 - RNA, 32 nt, Homo Sapiens
cuggucccaacgccagcccuucauccuuccuc

SEQ ID NO: 288358 - RNA, 32 nt, Homo Sapiens
uagauuacuauuaaccugaggacccaugggaa

SEQ ID NO: 288359 - RNA, 32 nt, Homo Sapiens
gacuggugccccacagggauuaagugccuugc

SEQ ID NO: 288360 - RNA, 32 nt, Homo Sapiens
uacaggucugcuacaaugcugcugcugcacag

SEQ ID NO: 288361 - RNA, 32 nt, Homo Sapiens
ugauaaaaccuccuuaaaucuguucagaccaa

SEQ ID NO: 288362 - RNA, 32 nt, Homo Sapiens
cuggguguggccuggggcucccucugcagggg

SEQ ID NO: 288363 - RNA, 32 nt, Homo Sapiens
ucaugcucgcugcaggggucggaggucagggc

SEQ ID NO: 288364 - RNA, 31 nt, Homo Sapiens
aucaucuauugaguguacauuuaugugugaa

SEQ ID NO: 288365 - RNA, 30 nt, Homo Sapiens
gaauggaguuuccuugaugagccugagagc

SEQ ID NO: 288366 - RNA, 32 nt, Homo Sapiens
uugauacauuuuacagaaacuaauugugaugu

SEQ ID NO: 288367 - RNA, 32 nt, Homo Sapiens
ugaggcgcguccuccgggucauggggaaacag

SEQ ID NO: 288368 - RNA, 32 nt, Homo Sapiens
ugcuaagaggaugucacuacugcaauccaucu

SEQ ID NO: 288369 - RNA, 32 nt, Homo Sapiens
auauuuauuaaaggaaagaaauugccuuauga

SEQ ID NO: 288370 - RNA, 32 nt, Homo Sapiens
cguggcgcgcagcccgcggggccugaagggau

SEQ ID NO: 288371 - RNA, 32 nt, Homo Sapiens
agcugggggcuggguucauacacgugcacaca

SEQ ID NO: 288372 - RNA, 28 nt, Homo Sapiens
uucaagaaagauuuccuuugauccaagu

SEQ ID NO: 288373 - RNA, 32 nt, Homo Sapiens
cucacuuguucuacaaugagugccaaaucugc

SEQ ID NO: 288374 - RNA, 32 nt, Homo Sapiens
cgccgcgucccucucuccacgaggcugccggc

SEQ ID NO: 288375 - RNA, 32 nt, Homo Sapiens
agcccgugggggugggggaggccagccaccuc

SEQ ID NO: 288376 - RNA, 32 nt, Homo Sapiens
ccucauccugcguuuggucuccaggugucccc

SEQ ID NO: 288377 - RNA, 32 nt, Homo Sapiens
aaauauuguuuuauuuuagaaucggguuugca

SEQ ID NO: 288378 - RNA, 32 nt, Homo Sapiens
auguucugcgccaagcuccuaucaugccaauu

SEQ ID NO: 288379 - RNA, 32 nt, Homo Sapiens
guguaugcaguuugauuugcacauguauaaau

SEQ ID NO: 288380 - RNA, 31 nt, Homo Sapiens
aaaaugugaaacagccucuugcccuguaccu

SEQ ID NO: 288381 - RNA, 31 nt, Homo Sapiens
gacaugcuuugggcuuacucaguguaccaga

SEQ ID NO: 288382 - RNA, 32 nt, Homo Sapiens
ugccuccccuccccaggccgcggcccagcuga

SEQ ID NO: 288383 - RNA, 32 nt, Homo Sapiens
gcgccgcgucgacaaacccccauccugggaaa

SEQ ID NO: 288384 - RNA, 32 nt, Homo Sapiens
ccgccgccgagcgcccggggccaugcgaccga

SEQ ID NO: 288385 - RNA, 32 nt, Homo Sapiens
agccugcggggcccgccgcagccaugggcaac

SEQ ID NO: 288386 - RNA, 32 nt, Homo Sapiens
auuuuacuugucacaccugucuuaauaaacug

SEQ ID NO: 288387 - RNA, 32 nt, Homo Sapiens
accagcgccacacauagcacagccaccauccu

SEQ ID NO: 288388 - RNA, 32 nt, Homo Sapiens
ggaaggaauaacaaccacaaaggaaagaauag

SEQ ID NO: 288389 - RNA, 30 nt, Homo Sapiens
ugagaaggauauugacggauauuccagaac

SEQ ID NO: 288390 - RNA, 32 nt, Homo Sapiens
acagaaaaugcagaaaauaaaaaauauuuuau

SEQ ID NO: 288391 - RNA, 32 nt, Homo Sapiens
ucaggcaaaacaaaaaauaaaagauauccaaa

SEQ ID NO: 288392 - RNA, 32 nt, Homo Sapiens
caugcgcccuuuccucuucccugccccacccc

SEQ ID NO: 288393 - RNA, 32 nt, Homo Sapiens
augagggaugaaaagcacucuugagaaaggca

SEQ ID NO: 288394 - RNA, 32 nt, Homo Sapiens
agccaaauggaaauucuuaaugcaaucaugag

SEQ ID NO: 288395 - RNA, 32 nt, Homo Sapiens
aaaauugggaaaucacaacagauuccauggcu

SEQ ID NO: 288396 - RNA, 32 nt, Homo Sapiens
ugagauuucuucacgguccagcaucgugagca

SEQ ID NO: 288397 - RNA, 32 nt, Homo Sapiens
aauggcuagaaaguaugguuuaacuggacccu

SEQ ID NO: 288398 - RNA, 32 nt, Homo Sapiens
aauguacaaaauaaaaucauucucuucacagu

SEQ ID NO: 288399 - RNA, 32 nt, Homo Sapiens
accucugugcuaagagaugaucagagucuauc

SEQ ID NO: 288400 - RNA, 32 nt, Homo Sapiens
ugcauuuuuuaaaauaguuaagaauccaaguc

SEQ ID NO: 288401 - RNA, 31 nt, Homo Sapiens
uggagaucacggagggaaguucauccaugag

SEQ ID NO: 288402 - RNA, 32 nt, Homo Sapiens
uguccaggaacauugagcagugcucgugcugg

SEQ ID NO: 288403 - RNA, 32 nt, Homo Sapiens
cagcaaggcagacaguggcuggcaggggggcc

SEQ ID NO: 288404 - RNA, 32 nt, Homo Sapiens
guaacuccccucggggauacgacacaugccca

SEQ ID NO: 288405 - RNA, 32 nt, Homo Sapiens
auuguccuccaugccccuccagaaggaccuag

SEQ ID NO: 288406 - RNA, 32 nt, Homo Sapiens
ccucagugauucuccuguccccucccucaugc

SEQ ID NO: 288407 - RNA, 32 nt, Homo Sapiens
cuucucgcccuucucacccucccuacccagcu

SEQ ID NO: 288408 - RNA, 30 nt, Homo Sapiens
ggugagaggagagaugaugaguugcugagu

SEQ ID NO: 288409 - RNA, 32 nt, Homo Sapiens
uuaguuuaaugugcucuuuguaaaaugaaauu

SEQ ID NO: 288410 - RNA, 32 nt, Homo Sapiens
cacccgagaggagguguggguguuccgcuucc

SEQ ID NO: 288411 - RNA, 32 nt, Homo Sapiens
gcugaaacgaugguguuaauucuuaggacuac

SEQ ID NO: 288412 - RNA, 32 nt, Homo Sapiens
auugggaggaagauuagaagcagugggggucg

SEQ ID NO: 288413 - RNA, 32 nt, Homo Sapiens
uuguggaugacaguaagaaacaacaaauacug

SEQ ID NO: 288414 - RNA, 32 nt, Homo Sapiens
agggggcacggcaggcguguggcagccacaca

SEQ ID NO: 288415 - RNA, 32 nt, Homo Sapiens
gaauguuucaggaaacaaauaggauaagacaa

SEQ ID NO: 288416 - RNA, 32 nt, Homo Sapiens
agacuguucuccuggggcgaggaggggagggg

SEQ ID NO: 288417 - RNA, 32 nt, Homo Sapiens
guggacaguaucuggaaguucugggauucagg

SEQ ID NO: 288418 - RNA, 32 nt, Homo Sapiens
ugcggcgacccaccggccucuucgagggccag

SEQ ID NO: 288419 - RNA, 29 nt, Homo Sapiens
cuaaguuaguaugacagaggcagugcucc

SEQ ID NO: 288420 - RNA, 32 nt, Homo Sapiens
uuguaaauauuuugaaacuguauucuuaucuc

SEQ ID NO: 288421 - RNA, 32 nt, Homo Sapiens
gauccugcucagugucccacuucccugucaug

SEQ ID NO: 288422 - RNA, 32 nt, Homo Sapiens
gaaaucaggugcccaacagcccccuucuccuc

SEQ ID NO: 288423 - RNA, 30 nt, Homo Sapiens
uuauaaugucaaaaacuuuucuuagaccaa

SEQ ID NO: 288424 - RNA, 32 nt, Homo Sapiens
cuuaguuuucuuuuuaauuccagaaauaagug

SEQ ID NO: 288425 - RNA, 32 nt, Homo Sapiens
gacaauugagguaaguuuuuugaaauuaugug

SEQ ID NO: 288426 - RNA, 31 nt, Homo Sapiens
uuaggcggcuuaggccugcccuguggagcau

SEQ ID NO: 288427 - RNA, 32 nt, Homo Sapiens
uuuuaaaaggucgccuuugaugcagaugcauc

SEQ ID NO: 288428 - RNA, 32 nt, Homo Sapiens
uuuaggguauaucauuuuuuacaauucugaga

SEQ ID NO: 288429 - RNA, 32 nt, Homo Sapiens
aagaggcccucagcccucccccggucucagag

SEQ ID NO: 288430 - RNA, 32 nt, Homo Sapiens
ggaagccgccgggagcugcccgcaggcccugg

SEQ ID NO: 288431 - RNA, 32 nt, Homo Sapiens
acagccucugucugcaacaugcuugggguccc

SEQ ID NO: 288432 - RNA, 32 nt, Homo Sapiens
gaguuuuccuguaaaaauagcacuauaguauc

SEQ ID NO: 288433 - RNA, 32 nt, Homo Sapiens
uaaauggcaguuguacaucuccccucaucagu

SEQ ID NO: 288434 - RNA, 32 nt, Homo Sapiens
uuguuuuguuuuucuuuuuuuucuuucuuuuu

SEQ ID NO: 288435 - RNA, 32 nt, Homo Sapiens
gcggccgccuucugcuggcuguguccaugcag

SEQ ID NO: 288436 - RNA, 29 nt, Homo Sapiens
agaugugggagaggauggacgagggaugc

SEQ ID NO: 288437 - RNA, 32 nt, Homo Sapiens
ucacauuuuugaaaaauaaauuuaagaguuuu

SEQ ID NO: 288438 - RNA, 32 nt, Homo Sapiens
caauggacacauuagccuuuuacaagaggacu

SEQ ID NO: 288439 - RNA, 32 nt, Homo Sapiens
gggaagucauugaauuuuuacacuauaguaau

SEQ ID NO: 288440 - RNA, 32 nt, Homo Sapiens
aaacgaugucauuguucagcagcugagagccc

SEQ ID NO: 288441 - RNA, 32 nt, Homo Sapiens
uuguucaucugaggucaugaaaaggaauuagu

SEQ ID NO: 288442 - RNA, 32 nt, Homo Sapiens
gugagaaaaugaacauuaacaggcauguuugu

SEQ ID NO: 288443 - RNA, 32 nt, Homo Sapiens
uuucuuuucuuuccuuuuuuuuuuuuuuuuga

SEQ ID NO: 288444 - RNA, 32 nt, Homo Sapiens
cccacccccugcccaccucuccaggcucugcu

SEQ ID NO: 288445 - RNA, 32 nt, Homo Sapiens
gauccuguagccgggugugggcccgugucugu

SEQ ID NO: 288446 - RNA, 32 nt, Homo Sapiens
ggagcaaaaaauaagugaguucugcuuuuagu

SEQ ID NO: 288447 - RNA, 32 nt, Homo Sapiens
aagcaauuccaagaacgugugauggugugaac

SEQ ID NO: 288448 - RNA, 32 nt, Homo Sapiens
aagagugcucaugcgcaccaggcuuucuuuuu

SEQ ID NO: 288449 - RNA, 32 nt, Homo Sapiens
ggcgcuuguuuuagaagaggcagaacagugau

SEQ ID NO: 288450 - RNA, 32 nt, Homo Sapiens
cagcgguauuuucuaauucagaucaucaaacu

SEQ ID NO: 288451 - RNA, 32 nt, Homo Sapiens
cggaagucauuagaauggcuugugauaucuga

SEQ ID NO: 288452 - RNA, 32 nt, Homo Sapiens
uaaaauuauuuuuuauuccuuuuucuacugug

SEQ ID NO: 288453 - RNA, 32 nt, Homo Sapiens
cuaccucucguuucugcccagcccucuguggc

SEQ ID NO: 288454 - RNA, 32 nt, Homo Sapiens
aguggcugaguaaacagcgucagguggccuca

SEQ ID NO: 288455 - RNA, 32 nt, Homo Sapiens
gagauaagcccugccccucguucccacuuuaa

SEQ ID NO: 288456 - RNA, 32 nt, Homo Sapiens
aagccuucagcgaacgugaaaugugcgcuaaa

SEQ ID NO: 288457 - RNA, 32 nt, Homo Sapiens
uuugauaaagcacuggaggucuuauugccaaa

SEQ ID NO: 288458 - RNA, 32 nt, Homo Sapiens
guaugacgcugauacauaacuaaauuugauac

SEQ ID NO: 288459 - RNA, 32 nt, Homo Sapiens
uccauaagaaacuuaauaccagcaaaugcauu

SEQ ID NO: 288460 - RNA, 32 nt, Homo Sapiens
cucucagauuaccaugcagagcuucacguuau

SEQ ID NO: 288461 - RNA, 29 nt, Homo Sapiens
aucucccugggacagagcaccugggggaa

SEQ ID NO: 288462 - RNA, 28 nt, Homo Sapiens
aagcaaguuacagaaccaagggcucugu

SEQ ID NO: 288463 - RNA, 32 nt, Homo Sapiens
auuguuaauugcucgccacauaaagagaagcu

SEQ ID NO: 288464 - RNA, 32 nt, Homo Sapiens
acccccauguugccuuguuuguuuuuuccuuc

SEQ ID NO: 288465 - RNA, 32 nt, Homo Sapiens
gaagcuccagauggcgucuuccgugggcaacg

SEQ ID NO: 288466 - RNA, 32 nt, Homo Sapiens
cuguggcuacuucuaagacaauguagaggguu

SEQ ID NO: 288467 - RNA, 32 nt, Homo Sapiens
gcgucgugcugcgcgcacaccuucagcuccau

SEQ ID NO: 288468 - RNA, 32 nt, Homo Sapiens
aaggcucccugagacuccugcagcagucgacc

SEQ ID NO: 288469 - RNA, 32 nt, Homo Sapiens
ugcaauacaaauauugugaugcauuuaucuua

SEQ ID NO: 288470 - RNA, 32 nt, Homo Sapiens
gcccagcucacgccgcgcccgcgcucccaggc

SEQ ID NO: 288471 - RNA, 32 nt, Homo Sapiens
auccauagaaagccuccacugcugggccgggg

SEQ ID NO: 288472 - RNA, 32 nt, Homo Sapiens
gggaggggaugcacacauuagaguaggaaaga

SEQ ID NO: 288473 - RNA, 29 nt, Homo Sapiens
uccgggccggagaagaggacgacgacgag

SEQ ID NO: 288474 - RNA, 32 nt, Homo Sapiens
aggagaugugagcaaauuaaaucuuguuuguu

SEQ ID NO: 288475 - RNA, 32 nt, Homo Sapiens
ccagcaccuuaccccaggacuuggucuucaac

SEQ ID NO: 288476 - RNA, 32 nt, Homo Sapiens
gaaacuuguggguggggcccagggaggauggg

SEQ ID NO: 288477 - RNA, 32 nt, Homo Sapiens
auuuuauuaagcaugcccaguuaugccaagca

SEQ ID NO: 288478 - RNA, 32 nt, Homo Sapiens
gugugggcagucgggggaggcugggguccuga

SEQ ID NO: 288479 - RNA, 32 nt, Homo Sapiens
ccguugcuucuggucagcccacuuguagacuu

SEQ ID NO: 288480 - RNA, 32 nt, Homo Sapiens
cggauuuccuggaugagcuaccacguggcgcu

SEQ ID NO: 288481 - RNA, 32 nt, Homo Sapiens
gcugugcacugaagaguccggcuggggagcca

SEQ ID NO: 288482 - RNA, 32 nt, Homo Sapiens
uacuagaccuuaauuucuuuauuacagacauu

SEQ ID NO: 288483 - RNA, 32 nt, Homo Sapiens
caggaaggaagugacccagacaguccagccug

SEQ ID NO: 288484 - RNA, 32 nt, Homo Sapiens
uagacaggagguuuauuaugagcauuuugcag

SEQ ID NO: 288485 - RNA, 32 nt, Homo Sapiens
accagggagcauucuuauuugcuggcucggcg

SEQ ID NO: 288486 - RNA, 32 nt, Homo Sapiens
ggccccgcuuccccugcccccgugugauuugu

SEQ ID NO: 288487 - RNA, 32 nt, Homo Sapiens
cccuuugaacuaguuaaaaucuguaagaauaa

SEQ ID NO: 288488 - RNA, 32 nt, Homo Sapiens
gggacaaauaagguucuuaggguguggagacu

SEQ ID NO: 288489 - RNA, 32 nt, Homo Sapiens
uccuuugauaaaacuuuucuuuuuucuuuuuu

SEQ ID NO: 288490 - RNA, 30 nt, Homo Sapiens
ucccuuuuucuugugggggaauaaaagagg

SEQ ID NO: 288491 - RNA, 32 nt, Homo Sapiens
gcccccgagacagagucuuacucuguugccca

SEQ ID NO: 288492 - RNA, 32 nt, Homo Sapiens
agcugcugccuugccuuccgggaccucguuug

SEQ ID NO: 288493 - RNA, 32 nt, Homo Sapiens
gcucugugcccccaacucacacccgucggcuc

SEQ ID NO: 288494 - RNA, 32 nt, Homo Sapiens
gguccugaagcccuugaccccugggggccugg

SEQ ID NO: 288495 - RNA, 32 nt, Homo Sapiens
acucggacuggagccucuucucucccaccgcg

SEQ ID NO: 288496 - RNA, 32 nt, Homo Sapiens
agaaaaggcuccacuucccagcccuuccuugc

SEQ ID NO: 288497 - RNA, 32 nt, Homo Sapiens
ggucgcuuccuuagcccucccgccuucggcau

SEQ ID NO: 288498 - RNA, 32 nt, Homo Sapiens
ggggauuucuuuuucucuuuuaauuuuuaauu

SEQ ID NO: 288499 - RNA, 32 nt, Homo Sapiens
cccucaguggcggcuugcucucuucucucgcu

SEQ ID NO: 288500 - RNA, 32 nt, Homo Sapiens
agaauggcauggcaggagucucugccaguuac

SEQ ID NO: 288501 - RNA, 32 nt, Homo Sapiens
gagaagaggaggaggaggagcgggguccccgg

SEQ ID NO: 288502 - RNA, 32 nt, Homo Sapiens
cugugagugugugcuucuuuuauuauggauca

SEQ ID NO: 288503 - RNA, 32 nt, Homo Sapiens
ccuagaggcgagccaggcaagguuggcgacug

SEQ ID NO: 288504 - RNA, 32 nt, Homo Sapiens
cuugggauaaaguuaaauauuuuuaaagauca

SEQ ID NO: 288505 - RNA, 32 nt, Homo Sapiens
uuuuuuguuguucuauuuuguacagacaaguu

SEQ ID NO: 288506 - RNA, 32 nt, Homo Sapiens
cugguaggggggcaacaacaaaaggaaaaugu

SEQ ID NO: 288507 - RNA, 32 nt, Homo Sapiens
cguggccggggcggggacucaggcgccuggca

SEQ ID NO: 288508 - RNA, 32 nt, Homo Sapiens
aaaaauaaaaauuaauuuggggggauuauuua

SEQ ID NO: 288509 - RNA, 32 nt, Homo Sapiens
aaaugaugaugauauuauggauccaauaagua

SEQ ID NO: 288510 - RNA, 32 nt, Homo Sapiens
gggacuugcggugucucggcauaccccucucc

SEQ ID NO: 288511 - RNA, 32 nt, Homo Sapiens
gcauuuauauuuucuuuuuuuuuuacuaaaau

SEQ ID NO: 288512 - RNA, 32 nt, Homo Sapiens
ccccaagacggaagaggauggccgcggcggcu

SEQ ID NO: 288513 - RNA, 32 nt, Homo Sapiens
uguuguggccgccgccgccgcgcgucgcggag

SEQ ID NO: 288514 - RNA, 27 nt, Homo Sapiens
ugaucagcccgcuucagccucccaaag

SEQ ID NO: 288515 - RNA, 32 nt, Homo Sapiens
guaccaugaacuaacaauucuuugaaaggacc

SEQ ID NO: 288516 - RNA, 32 nt, Homo Sapiens
ucuucauguaaaauaucuugagaauaauaaau

SEQ ID NO: 288517 - RNA, 32 nt, Homo Sapiens
caggagguagagauucugggaaugagguuggg

SEQ ID NO: 288518 - RNA, 32 nt, Homo Sapiens
aaugggacuuuucuuucugcauccaccuuagc

SEQ ID NO: 288519 - RNA, 32 nt, Homo Sapiens
gcguugccugcccuuccuccauuguugcccug

SEQ ID NO: 288520 - RNA, 32 nt, Homo Sapiens
uuucucugccucuuccuccccugucuugggca

SEQ ID NO: 288521 - RNA, 32 nt, Homo Sapiens
gaaccaugggccgcggugugggcuaagcuggu

SEQ ID NO: 288522 - RNA, 32 nt, Homo Sapiens
acucucccagcaugcuggacuaugauacagag

SEQ ID NO: 288523 - RNA, 32 nt, Homo Sapiens
uucaaaaaauuuaaagacgauauaaugaacac

SEQ ID NO: 288524 - RNA, 32 nt, Homo Sapiens
uucacacuuuuguauggcguuuuuauugugag

SEQ ID NO: 288525 - RNA, 32 nt, Homo Sapiens
agagauggugccuucuggcauaguaguguuuu

SEQ ID NO: 288526 - RNA, 32 nt, Homo Sapiens
aaugaucuuccacuugagcaaccuuuuacuug

SEQ ID NO: 288527 - RNA, 30 nt, Homo Sapiens
cucugggcgcccgccucuagcgcgguucug

SEQ ID NO: 288528 - RNA, 32 nt, Homo Sapiens
uuauuuuaucuaauaacaacaauggaauauag

SEQ ID NO: 288529 - RNA, 32 nt, Homo Sapiens
gcggggggcugcugggaggcgcggcggugugc

SEQ ID NO: 288530 - RNA, 32 nt, Homo Sapiens
aagcacaggaaacagaaacaaaaaauaggcaa

SEQ ID NO: 288531 - RNA, 32 nt, Homo Sapiens
aaaagcauuuguaggaaguuagauuugaauau

SEQ ID NO: 288532 - RNA, 32 nt, Homo Sapiens
ggucuuggaaauaaauuucaaggugcauugua

SEQ ID NO: 288533 - RNA, 32 nt, Homo Sapiens
aaaauauccuugaguuuguaaucuaguuacag

SEQ ID NO: 288534 - RNA, 32 nt, Homo Sapiens
ccgucucccugcgcgccgcgggcacuucuccu

SEQ ID NO: 288535 - RNA, 32 nt, Homo Sapiens
aaguaccugggauuacaggagcucccaccaag

SEQ ID NO: 288536 - RNA, 32 nt, Homo Sapiens
uuugcacgucaucugguccuuccaccuggcug

SEQ ID NO: 288537 - RNA, 31 nt, Homo Sapiens
cgcggcuagcgcagccgcugccaugcaccgg

SEQ ID NO: 288538 - RNA, 32 nt, Homo Sapiens
ugcaggucccgucuggcuccagcccuugucag

SEQ ID NO: 288539 - RNA, 32 nt, Homo Sapiens
uuuuaaaauaauuuauauuuaaaaauugcacu

SEQ ID NO: 288540 - RNA, 32 nt, Homo Sapiens
uuuacauaggcuguuuuuuuuaaguuuaaauu

SEQ ID NO: 288541 - RNA, 32 nt, Homo Sapiens
ccaaauagcauucuuagacuucuguauuauga

SEQ ID NO: 288542 - RNA, 32 nt, Homo Sapiens
ccugcucagaggugcuuugaagaugccggagg

SEQ ID NO: 288543 - RNA, 32 nt, Homo Sapiens
uuuuuucaaaaaucucuucucggggacaacau

SEQ ID NO: 288544 - RNA, 31 nt, Homo Sapiens
ccucuguagcccggcucgccccgcgcuugga

SEQ ID NO: 288545 - RNA, 29 nt, Homo Sapiens
ggaguuuccauuuggauacgguccuuaua

SEQ ID NO: 288546 - RNA, 32 nt, Homo Sapiens
aaaggacucugcauugaggguggggguaauug

SEQ ID NO: 288547 - RNA, 32 nt, Homo Sapiens
uucucugcuuggauuuccauuauucuguuugg

SEQ ID NO: 288548 - RNA, 32 nt, Homo Sapiens
gauuuuucccccuuuuauuuguccuaagauuc

SEQ ID NO: 288549 - RNA, 32 nt, Homo Sapiens
ccuuagugcucuugcccaccgacagcucuggg

SEQ ID NO: 288550 - RNA, 32 nt, Homo Sapiens
cgcagccaggccagcucuggggucucggcagg

SEQ ID NO: 288551 - RNA, 32 nt, Homo Sapiens
cccugucuagggcagcccagggcccccacucc

SEQ ID NO: 288552 - RNA, 32 nt, Homo Sapiens
ggccaagccugcugaguauugcagcugcauuu

SEQ ID NO: 288553 - RNA, 32 nt, Homo Sapiens
cgggcccuuucacggcagcugcugcuguauag

SEQ ID NO: 288554 - RNA, 32 nt, Homo Sapiens
uagcagagaaacuggauuguuuuuguauauaa

SEQ ID NO: 288555 - RNA, 30 nt, Homo Sapiens
cucccaggcaggcgcgggagcccggugcgg

SEQ ID NO: 288556 - RNA, 32 nt, Homo Sapiens
uuuuaucuacuuguuuauuuuguacaaaauac

SEQ ID NO: 288557 - RNA, 32 nt, Homo Sapiens
ggguaagcuguggcggcgugggagcaccucug

SEQ ID NO: 288558 - RNA, 32 nt, Homo Sapiens
uuuuugcucaggucaggauuacuccagcaaga

SEQ ID NO: 288559 - RNA, 32 nt, Homo Sapiens
aacggccugggcggggucaccccggcugggac

SEQ ID NO: 288560 - RNA, 32 nt, Homo Sapiens
cucuuugaugccaucugcuuucaacuccacca

SEQ ID NO: 288561 - RNA, 32 nt, Homo Sapiens
auucuuacauagugcuuguaucguugcauuug

SEQ ID NO: 288562 - RNA, 32 nt, Homo Sapiens
cagacuggggaugccuauagguugucugugaa

SEQ ID NO: 288563 - RNA, 32 nt, Homo Sapiens
gaaaagaaaaggaauuuuauguucaaaauacu

SEQ ID NO: 288564 - RNA, 32 nt, Homo Sapiens
uuccuaaacacccacccaaugggagaggcuga

SEQ ID NO: 288565 - RNA, 32 nt, Homo Sapiens
auaaaggaagauuuuucuucuugugaaguucu

SEQ ID NO: 288566 - RNA, 32 nt, Homo Sapiens
ggagccccggcugcgccgcgcgacucccucuu

SEQ ID NO: 288567 - RNA, 32 nt, Homo Sapiens
ccauuccaucuaaaauguuuucauuuaguacu

SEQ ID NO: 288568 - RNA, 32 nt, Homo Sapiens
aaaauuguaagcacuuuuuuuguaaaaccaau

SEQ ID NO: 288569 - RNA, 32 nt, Homo Sapiens
uacugcugucagaugaauaaaugauuaugaau

SEQ ID NO: 288570 - RNA, 32 nt, Homo Sapiens
uuccucgcuuaccugugcagucuaauuuugag

SEQ ID NO: 288571 - RNA, 32 nt, Homo Sapiens
aaccccaucucuacuaaaaauacagaaauuau

SEQ ID NO: 288572 - RNA, 28 nt, Homo Sapiens
aguuggcacagguaacauuuggacaugu

SEQ ID NO: 288573 - RNA, 32 nt, Homo Sapiens
cauuggaggcuuuauuuugaacuaauuucuua

SEQ ID NO: 288574 - RNA, 32 nt, Homo Sapiens
cugaaauaaaaauuaugaaauauggugagguc

SEQ ID NO: 288575 - RNA, 32 nt, Homo Sapiens
acaggugugcaccacugcgucuggcuagcuaa

SEQ ID NO: 288576 - RNA, 32 nt, Homo Sapiens
ucaagaggaaaugucacagaagcagcuaaacc

SEQ ID NO: 288577 - RNA, 32 nt, Homo Sapiens
aaaacccgagggacagcagauuccacaggaca

SEQ ID NO: 288578 - RNA, 32 nt, Homo Sapiens
ccaggugacggguaguaggggcggcgccgcuu

SEQ ID NO: 288579 - RNA, 32 nt, Homo Sapiens
cugaugaauuucuaagugagcaacuugauaua

SEQ ID NO: 288580 - RNA, 32 nt, Homo Sapiens
aggaaguggcuuuggguuuuuaaaguagguga

SEQ ID NO: 288581 - RNA, 32 nt, Homo Sapiens
ccagccaccccaaagcccuccuccuccuuaac

SEQ ID NO: 288582 - RNA, 32 nt, Homo Sapiens
uuaaaacgcgucugccugggccguggcacagc

SEQ ID NO: 288583 - RNA, 32 nt, Homo Sapiens
cuuuaucugcgccugcgccgcgcgggauucgc

SEQ ID NO: 288584 - RNA, 32 nt, Homo Sapiens
uugaguguuucugauggcaggcacaacaucug

SEQ ID NO: 288585 - RNA, 32 nt, Homo Sapiens
gcauaaacagaaaagaaagauuuaagaggauu

SEQ ID NO: 288586 - RNA, 32 nt, Homo Sapiens
auuggcgccgugcagagaggcggaauguucaa

SEQ ID NO: 288587 - RNA, 32 nt, Homo Sapiens
cuaccuacugguuugggagauguauauaguaa

SEQ ID NO: 288588 - RNA, 32 nt, Homo Sapiens
guguccaucucaugugcugcgugugucuguaa

SEQ ID NO: 288589 - RNA, 32 nt, Homo Sapiens
uggcccaaaaauaucuugaagcaauggcugua

SEQ ID NO: 288590 - RNA, 32 nt, Homo Sapiens
caccaguauuaagaggauuuuccaguguuucu

SEQ ID NO: 288591 - RNA, 32 nt, Homo Sapiens
acaacacuaugaagcuguggcuagaaagggac

SEQ ID NO: 288592 - RNA, 32 nt, Homo Sapiens
ucuccaacaaguuaaaguuaugcuguuugagc

SEQ ID NO: 288593 - RNA, 32 nt, Homo Sapiens
ggcaguggaaauauggcugaaugagugucuaa

SEQ ID NO: 288594 - RNA, 32 nt, Homo Sapiens
auacgcaugcgugcacgcugccggucgggcug

SEQ ID NO: 288595 - RNA, 32 nt, Homo Sapiens
cgagagccucccagcccgccccgugccccgcc

SEQ ID NO: 288596 - RNA, 32 nt, Homo Sapiens
cgacucgcgggccgcugcacccaccgccaagg

SEQ ID NO: 288597 - RNA, 32 nt, Homo Sapiens
cgaggcucggcgggcgcggacgcgcagcaugg

SEQ ID NO: 288598 - RNA, 32 nt, Homo Sapiens
aagggcaggaccagauaugugagagacuucua

SEQ ID NO: 288599 - RNA, 32 nt, Homo Sapiens
caccgccugccagugugagaggcggccacuuu

SEQ ID NO: 288600 - RNA, 32 nt, Homo Sapiens
cugauuggcauugcauugaauuauuaauuaaa

SEQ ID NO: 288601 - RNA, 29 nt, Homo Sapiens
agcagucccugagaccauuuaacaugcaa

SEQ ID NO: 288602 - RNA, 32 nt, Homo Sapiens
caugucgagccucggcgguggcucccaggaug

SEQ ID NO: 288603 - RNA, 32 nt, Homo Sapiens
accuggugagaucagaggagggggugccacca

SEQ ID NO: 288604 - RNA, 32 nt, Homo Sapiens
cacuccugccagccagccccucucccgcuucc

SEQ ID NO: 288605 - RNA, 32 nt, Homo Sapiens
agacuaaaacaaaugcacagaucaaggguagu

SEQ ID NO: 288606 - RNA, 32 nt, Homo Sapiens
uagacuuaauacuuauuccuaucuaaugggau

SEQ ID NO: 288607 - RNA, 32 nt, Homo Sapiens
guccuguugccucuccugccccuccaggccac

SEQ ID NO: 288608 - RNA, 32 nt, Homo Sapiens
ucccgccggccucggccgcgggcacccgugcu

SEQ ID NO: 288609 - RNA, 32 nt, Homo Sapiens
cuuggauguuuugacaaaaauaaaccucaucg

SEQ ID NO: 288610 - RNA, 32 nt, Homo Sapiens
agaauugaaauaaguaucaguuuaaaaauuua

SEQ ID NO: 288611 - RNA, 32 nt, Homo Sapiens
ucuguucugcccggaggagccgcccauugauc

SEQ ID NO: 288612 - RNA, 32 nt, Homo Sapiens
agcuucucuaaagaggaaagugaguggauuaa

SEQ ID NO: 288613 - RNA, 32 nt, Homo Sapiens
cggcccgccucagccgcauugucccgggccgc

SEQ ID NO: 288614 - RNA, 32 nt, Homo Sapiens
cagcaccuggcccaggaugcaggcugcucuag

SEQ ID NO: 288615 - RNA, 32 nt, Homo Sapiens
cacugggcagccagacccccacuuauagcuuc

SEQ ID NO: 288616 - RNA, 32 nt, Homo Sapiens
gcugggcgcuggccgagagcugcgcgcuggca

SEQ ID NO: 288617 - RNA, 32 nt, Homo Sapiens
cgggucucuggagucgcggcccgggguucacg

SEQ ID NO: 288618 - RNA, 32 nt, Homo Sapiens
gcgcgcgcacgcugcgccagggccccaggcug

SEQ ID NO: 288619 - RNA, 32 nt, Homo Sapiens
ggauagcggcagagccgguagcggacgguccu

SEQ ID NO: 288620 - RNA, 32 nt, Homo Sapiens
uccaggagucgggcggagcggcuggggaugag

SEQ ID NO: 288621 - RNA, 32 nt, Homo Sapiens
gagaaacaguaaccucacuuugaaaauuagcu

SEQ ID NO: 288622 - RNA, 32 nt, Homo Sapiens
aagcucccgcgccuuccgcgacugccacacgc

SEQ ID NO: 288623 - RNA, 32 nt, Homo Sapiens
auaagcuacccagccacccccauccuaacagc

SEQ ID NO: 288624 - RNA, 30 nt, Homo Sapiens
ugugcucuggacugcugcccuuguccccga

SEQ ID NO: 288625 - RNA, 32 nt, Homo Sapiens
ugcucuuggguggaggagacgaggggagggca

SEQ ID NO: 288626 - RNA, 32 nt, Homo Sapiens
aaaauacaaaaauuagcugggugugguggugc

SEQ ID NO: 288627 - RNA, 32 nt, Homo Sapiens
gggggaauccgaaacggcucagcagaauccca

SEQ ID NO: 288628 - RNA, 29 nt, Homo Sapiens
ucaaaaucauaugaugagggucuggauga

SEQ ID NO: 288629 - RNA, 32 nt, Homo Sapiens
cgugcuuuuccugugugugcugccagcacagg

SEQ ID NO: 288630 - RNA, 32 nt, Homo Sapiens
uggcggcggcuucggcggcugcggcgucugca

SEQ ID NO: 288631 - RNA, 31 nt, Homo Sapiens
cccagcucguggugugccagagccugugugg

SEQ ID NO: 288632 - RNA, 32 nt, Homo Sapiens
caugccccgcgguggucagcccgccuuauccc

SEQ ID NO: 288633 - RNA, 32 nt, Homo Sapiens
uccuaugaaaaugcacgagaaaacagucaaau

SEQ ID NO: 288634 - RNA, 32 nt, Homo Sapiens
uauuuucacugcuguguccccagcgccugguc

SEQ ID NO: 288635 - RNA, 32 nt, Homo Sapiens
ccugagcugggguugcaaagucacuggccaca

SEQ ID NO: 288636 - RNA, 32 nt, Homo Sapiens
uuugcuguccacucauaucagcuguguaguag

SEQ ID NO: 288637 - RNA, 32 nt, Homo Sapiens
cugcugggcacccgaagaccaagcccccugcc

SEQ ID NO: 288638 - RNA, 32 nt, Homo Sapiens
uauauauggauauauauacacauauauauaca

SEQ ID NO: 288639 - RNA, 30 nt, Homo Sapiens
uacagugguagcggcggcggcggcgaccgg

SEQ ID NO: 288640 - RNA, 32 nt, Homo Sapiens
cgaguccauuuucuuucagcuggucuaccgau

SEQ ID NO: 288641 - RNA, 32 nt, Homo Sapiens
uucccuuacugcaaauguguuagcucuaacau

SEQ ID NO: 288642 - RNA, 32 nt, Homo Sapiens
acuauuuguugccuuaaaauagaauggcuuga

SEQ ID NO: 288643 - RNA, 32 nt, Homo Sapiens
agaaucucagaauuuaccaccaaagaacucau

SEQ ID NO: 288644 - RNA, 28 nt, Homo Sapiens
gagaagguggcuaccuggggguguccca

SEQ ID NO: 288645 - RNA, 32 nt, Homo Sapiens
ugauaaucgaaauuauuuuuugaaaaauaauu

SEQ ID NO: 288646 - RNA, 32 nt, Homo Sapiens
accacccucuucugccuaugagcggggaacaa

SEQ ID NO: 288647 - RNA, 32 nt, Homo Sapiens
aaagagggaaacaaaagccuguucagcagagg

SEQ ID NO: 288648 - RNA, 32 nt, Homo Sapiens
gcugggaaaagggcuuguggggugccuguaua

SEQ ID NO: 288649 - RNA, 27 nt, Homo Sapiens
uuggauuaauucuucaguuccuccgca

SEQ ID NO: 288650 - RNA, 32 nt, Homo Sapiens
cagauaagucuggaagaugaccacugacuccu

SEQ ID NO: 288651 - RNA, 32 nt, Homo Sapiens
auaaugcccgcggcgcccgcgcgaccaugcaa

SEQ ID NO: 288652 - RNA, 32 nt, Homo Sapiens
aaucuugggauuuaucuuucuaugccuugcug

SEQ ID NO: 288653 - RNA, 32 nt, Homo Sapiens
aucuaacuuccacuuucgugucaccacuguaa

SEQ ID NO: 288654 - RNA, 32 nt, Homo Sapiens
gcauaaauuuuacaguagaauaugaucaaacc

SEQ ID NO: 288655 - RNA, 32 nt, Homo Sapiens
aauuuggggaagacaggguggagcaagggaua

SEQ ID NO: 288656 - RNA, 32 nt, Homo Sapiens
uguuucaaucuuaaaaagaaucaauaaaaaca

SEQ ID NO: 288657 - RNA, 32 nt, Homo Sapiens
uucuaauuauuccgauaugaccuuaaggaaaa

SEQ ID NO: 288658 - RNA, 32 nt, Homo Sapiens
aucagaauucuauguauuguguagcuaggccu

SEQ ID NO: 288659 - RNA, 32 nt, Homo Sapiens
gaguuguuccgggggacugaggucucuugcau

SEQ ID NO: 288660 - RNA, 32 nt, Homo Sapiens
gggcacuuaagugaccugucauuccgagccag

SEQ ID NO: 288661 - RNA, 32 nt, Homo Sapiens
ugcaggcauagcugccugcugcucuggcagag

SEQ ID NO: 288662 - RNA, 32 nt, Homo Sapiens
gaaagaucaaggaguaaaccagaagaagaaga

SEQ ID NO: 288663 - RNA, 32 nt, Homo Sapiens
gggaaaagaaguccuucucucacucauuuccc

SEQ ID NO: 288664 - RNA, 32 nt, Homo Sapiens
cuguuucagugcugucccacuccucaagucug

SEQ ID NO: 288665 - RNA, 32 nt, Homo Sapiens
gagacccagguccuauggcagcuccucauuag

SEQ ID NO: 288666 - RNA, 32 nt, Homo Sapiens
augaguuccagaauuuaucuuuagaucuggaa

SEQ ID NO: 288667 - RNA, 32 nt, Homo Sapiens
cuuaagacauauuuauguaauaccaugggaca

SEQ ID NO: 288668 - RNA, 32 nt, Homo Sapiens
gugugaaguuuauguacuggcacuauaaaaua

SEQ ID NO: 288669 - RNA, 32 nt, Homo Sapiens
ugccccagccccagccccacccaccgggccca

SEQ ID NO: 288670 - RNA, 32 nt, Homo Sapiens
acuguauaacuuucccagguucuguuuauggc

SEQ ID NO: 288671 - RNA, 32 nt, Homo Sapiens
accuguacucacccucacgcucuuugaagaaa

SEQ ID NO: 288672 - RNA, 32 nt, Homo Sapiens
ggcuggcagggccagccggcugcuccgagugc

SEQ ID NO: 288673 - RNA, 32 nt, Homo Sapiens
agacaagcauuuucucuguagagcagccacac

SEQ ID NO: 288674 - RNA, 32 nt, Homo Sapiens
cgccagccauggccgcgccgggggauccgcag

SEQ ID NO: 288675 - RNA, 32 nt, Homo Sapiens
gcagaaucaaaugccuacuauuuuauaugcau

SEQ ID NO: 288676 - RNA, 32 nt, Homo Sapiens
aaauacuauggacagcuuucugauuguugggg

SEQ ID NO: 288677 - RNA, 32 nt, Homo Sapiens
auugaugguuucuagauuaucuaguccaaaca

SEQ ID NO: 288678 - RNA, 32 nt, Homo Sapiens
gaucuauauauaaauagaaauagaaaauccag

SEQ ID NO: 288679 - RNA, 32 nt, Homo Sapiens
auaagaaaaaauuuauauuaaugauuguuucc

SEQ ID NO: 288680 - RNA, 32 nt, Homo Sapiens
ccccucugccagcagcuccggcgccaccucgg

SEQ ID NO: 288681 - RNA, 32 nt, Homo Sapiens
uacuucgccuccccaaaccaauccuaaugucu

SEQ ID NO: 288682 - RNA, 32 nt, Homo Sapiens
ccccaggccaaggggaucauggcccuggcugg

SEQ ID NO: 288683 - RNA, 32 nt, Homo Sapiens
gcccgcggccccaccaugccccagcucggcgg

SEQ ID NO: 288684 - RNA, 30 nt, Homo Sapiens
ggaggcagcagcggcggcggcaguggcggc

SEQ ID NO: 288685 - RNA, 32 nt, Homo Sapiens
uaaacuccagcauuuagauaaucuugugcaaa

SEQ ID NO: 288686 - RNA, 32 nt, Homo Sapiens
auguauugacauuuucaaagaaaguaaaugca

SEQ ID NO: 288687 - RNA, 32 nt, Homo Sapiens
uaguaaucucaaagcgaagguuuguuguuuaa

SEQ ID NO: 288688 - RNA, 32 nt, Homo Sapiens
uaggacuggguaaauuugagauauaucuccaa

SEQ ID NO: 288689 - RNA, 32 nt, Homo Sapiens
gaacacaaguauuuuuucaaugcaagaugagg

SEQ ID NO: 288690 - RNA, 32 nt, Homo Sapiens
ccaugauguuugucucagagguuaaaaccauu

SEQ ID NO: 288691 - RNA, 32 nt, Homo Sapiens
acugaguuuaaaccucugugcuaagagaugau

SEQ ID NO: 288692 - RNA, 32 nt, Homo Sapiens
ucagcagcaggugcuuuuuuauggccuuuucu

SEQ ID NO: 288693 - RNA, 32 nt, Homo Sapiens
gcagguucauuaaauuuguaagauggcauauu

SEQ ID NO: 288694 - RNA, 32 nt, Homo Sapiens
uaagagccgcggcuuccgguuccuugcuccac

SEQ ID NO: 288695 - RNA, 32 nt, Homo Sapiens
aaauucuuugguuuccucaaguccauuccugu

SEQ ID NO: 288696 - RNA, 32 nt, Homo Sapiens
accauccauccgauccuccccuuccccugucc

SEQ ID NO: 288697 - RNA, 32 nt, Homo Sapiens
gaaccagcggccugcgccuuccucuggguacc

SEQ ID NO: 288698 - RNA, 32 nt, Homo Sapiens
acuguuauucuauuuaaucuucauuauagcag

SEQ ID NO: 288699 - RNA, 32 nt, Homo Sapiens
gaaaucuuuguacagcuuuaaguugugucaga

SEQ ID NO: 288700 - RNA, 32 nt, Homo Sapiens
uuuuucugugucugaggcccugcugaccugug

SEQ ID NO: 288701 - RNA, 32 nt, Homo Sapiens
ucucauauuuaguauugaauacuuacauucuc

SEQ ID NO: 288702 - RNA, 32 nt, Homo Sapiens
acugcccacccggcugcugauggccuggugcc

SEQ ID NO: 288703 - RNA, 32 nt, Homo Sapiens
aguauauaaaaagcauuagguucaaaacagag

SEQ ID NO: 288704 - RNA, 32 nt, Homo Sapiens
cagcucccgcggcuggaaggagccauucaagg

SEQ ID NO: 288705 - RNA, 32 nt, Homo Sapiens
uaaauacuggaacaaauccugcugcaaaaaug

SEQ ID NO: 288706 - RNA, 32 nt, Homo Sapiens
cuuaaaaucugugaagaaagagguuaggagua

SEQ ID NO: 288707 - RNA, 32 nt, Homo Sapiens
uguuguugucauuguuguuguuguuuuaaccu

SEQ ID NO: 288708 - RNA, 32 nt, Homo Sapiens
uguuuuuguuacugccuggaugaggcacuucu

SEQ ID NO: 288709 - RNA, 32 nt, Homo Sapiens
cuuucuauauauggauuaaaacaaaaauccua

SEQ ID NO: 288710 - RNA, 32 nt, Homo Sapiens
guagacauuuuaagcauuuucuacacagcgag

SEQ ID NO: 288711 - RNA, 32 nt, Homo Sapiens
agagcgagauuuacuuucugagcaucugcagu

SEQ ID NO: 288712 - RNA, 32 nt, Homo Sapiens
aaaacagaacuguguacuguauaucuguauau

SEQ ID NO: 288713 - RNA, 32 nt, Homo Sapiens
cugccuagggggcuccuccauucccugcucac

SEQ ID NO: 288714 - RNA, 32 nt, Homo Sapiens
ugaggggaggaggcggagccggugccucgggu

SEQ ID NO: 288715 - RNA, 32 nt, Homo Sapiens
uggaaagccggguuggggugggguggggguac

SEQ ID NO: 288716 - RNA, 32 nt, Homo Sapiens
uguguucacagcaaucauuuaaccacaaauaa

SEQ ID NO: 288717 - RNA, 32 nt, Homo Sapiens
cagcaggcggcauuggagucuaggagcucagc

SEQ ID NO: 288718 - RNA, 32 nt, Homo Sapiens
uugaaaaaacuggucuuaaguuggaaaaacua

SEQ ID NO: 288719 - RNA, 32 nt, Homo Sapiens
caagacaaacuuaugauaaaguauuugucuug

SEQ ID NO: 288720 - RNA, 32 nt, Homo Sapiens
aaaacaggcuuguguccuuccauuaaccccuu

SEQ ID NO: 288721 - RNA, 32 nt, Homo Sapiens
ugcauaguuaguaaguuggguuuagcuuuugu

SEQ ID NO: 288722 - RNA, 32 nt, Homo Sapiens
gagagggagcuacuaccuuugcucucuucaua

SEQ ID NO: 288723 - RNA, 32 nt, Homo Sapiens
uucagugaugaaauaauuuguguuuuauaucc

SEQ ID NO: 288724 - RNA, 32 nt, Homo Sapiens
aguccuugaagauaagaagcuuguucucuguu

SEQ ID NO: 288725 - RNA, 32 nt, Homo Sapiens
gugggugacacucagaggcagcccuuggaugc

SEQ ID NO: 288726 - RNA, 32 nt, Homo Sapiens
cagugccugugcccacucugugccugcuggga

SEQ ID NO: 288727 - RNA, 32 nt, Homo Sapiens
agggagcagggagagaaagacuggaguagauu

SEQ ID NO: 288728 - RNA, 32 nt, Homo Sapiens
cuacaguuuaauuccacacuguuacagaaaag

SEQ ID NO: 288729 - RNA, 32 nt, Homo Sapiens
gggcacucuguuccccucccccuuaagccaac

SEQ ID NO: 288730 - RNA, 32 nt, Homo Sapiens
caccagaggagauucaaaagauaccuuuaccu

SEQ ID NO: 288731 - RNA, 32 nt, Homo Sapiens
ugugaacucugcagaaagucucuucuucauca

SEQ ID NO: 288732 - RNA, 32 nt, Homo Sapiens
ggcccguccuuccccgccccugcccacauggc

SEQ ID NO: 288733 - RNA, 32 nt, Homo Sapiens
cauugucuuccuucgugcaggcccaggaccau

SEQ ID NO: 288734 - RNA, 30 nt, Homo Sapiens
ggguguagucucggcggcagcggcggagac

SEQ ID NO: 288735 - RNA, 32 nt, Homo Sapiens
ggcagggaccaucaagaaccuacagacuccau

SEQ ID NO: 288736 - RNA, 32 nt, Homo Sapiens
ucagagguuuaaauuaaucuagcccacuuaau

SEQ ID NO: 288737 - RNA, 32 nt, Homo Sapiens
gguaaacaagguggagagaagcuucauugagu

SEQ ID NO: 288738 - RNA, 32 nt, Homo Sapiens
caugagauagacagcaagcuucugaucuugaa

SEQ ID NO: 288739 - RNA, 29 nt, Homo Sapiens
ccaucugugacuuuccuggugcauccagg

SEQ ID NO: 288740 - RNA, 32 nt, Homo Sapiens
guaacugaacuucaggauaauaaaguguuugc

SEQ ID NO: 288741 - RNA, 32 nt, Homo Sapiens
accacggcugguuuuuggcaggauucgaggca

SEQ ID NO: 288742 - RNA, 32 nt, Homo Sapiens
uucuuauauauagauuuuguucaccaaaucac

SEQ ID NO: 288743 - RNA, 32 nt, Homo Sapiens
uugcaucugcauuuuccaaggcugauucgugu

SEQ ID NO: 288744 - RNA, 32 nt, Homo Sapiens
uauuguaggguuacuauuaaaauacauagcga

SEQ ID NO: 288745 - RNA, 32 nt, Homo Sapiens
aaucuucaugcuguagucacuccagaccaugg

SEQ ID NO: 288746 - RNA, 32 nt, Homo Sapiens
cagcgggcgguugucuguggcuccgcgacugg

SEQ ID NO: 288747 - RNA, 32 nt, Homo Sapiens
gugugugucuacgugugugcgugcguggcugg

SEQ ID NO: 288748 - RNA, 32 nt, Homo Sapiens
aggaccagcugccuuucucaccaccacagcuu

SEQ ID NO: 288749 - RNA, 32 nt, Homo Sapiens
aagaggagggagagggugacgaacaccaggca

SEQ ID NO: 288750 - RNA, 32 nt, Homo Sapiens
auagaguaagcaaggcaaguuacuucuauaua

SEQ ID NO: 288751 - RNA, 32 nt, Homo Sapiens
aacacucauuugauugugaaaagacuugaauu

SEQ ID NO: 288752 - RNA, 32 nt, Homo Sapiens
ucagacaaagcagagauggaaauaaugcgccu

SEQ ID NO: 288753 - RNA, 32 nt, Homo Sapiens
uggcacccugucaucaccaguggccuuggucc

SEQ ID NO: 288754 - RNA, 32 nt, Homo Sapiens
guauucuggcuaaaaguuggacuucucaguau

SEQ ID NO: 288755 - RNA, 32 nt, Homo Sapiens
caacagaguuuuagggauaaaaugguacccgg

SEQ ID NO: 288756 - RNA, 32 nt, Homo Sapiens
ccuaggccaccacuccuccagcccuuugcccg

SEQ ID NO: 288757 - RNA, 32 nt, Homo Sapiens
gccaucuggugccuccugccaccuggugccuc

SEQ ID NO: 288758 - RNA, 32 nt, Homo Sapiens
cgagcggggcuggccucuggcuucacaguggc

SEQ ID NO: 288759 - RNA, 32 nt, Homo Sapiens
agucuugccugccaauaaggagcuggauugaa

SEQ ID NO: 288760 - RNA, 31 nt, Homo Sapiens
auuauucauuugauggguaaauauuuuaggg

SEQ ID NO: 288761 - RNA, 32 nt, Homo Sapiens
auuagaagccuggccuccugaugcugugcucu

SEQ ID NO: 288762 - RNA, 32 nt, Homo Sapiens
gccauucacccccaggccuggugcuucucccc

SEQ ID NO: 288763 - RNA, 32 nt, Homo Sapiens
cuugcccuaccucuccucuccuguuacaauag

SEQ ID NO: 288764 - RNA, 32 nt, Homo Sapiens
ugguggcagugacaccaaagauagaggcaaug

SEQ ID NO: 288765 - RNA, 32 nt, Homo Sapiens
ugaguauuaauccuauggauacauauuaaaac

SEQ ID NO: 288766 - RNA, 32 nt, Homo Sapiens
caccugcccucccgggcaguacuggggaccuu

SEQ ID NO: 288767 - RNA, 32 nt, Homo Sapiens
accuuuugguaucuuuucccacugcuucuucc

SEQ ID NO: 288768 - RNA, 32 nt, Homo Sapiens
uaaaauuuuguacagcauaaauaaguaaaaaa

SEQ ID NO: 288769 - RNA, 32 nt, Homo Sapiens
auguuugccaaguuugaaugcgcaaaacuugg

SEQ ID NO: 288770 - RNA, 32 nt, Homo Sapiens
cucccauguacaaaauugggucuguaugcaca

SEQ ID NO: 288771 - RNA, 32 nt, Homo Sapiens
ccaugauuuuuagagccagucaaaugguauuu

SEQ ID NO: 288772 - RNA, 29 nt, Homo Sapiens
augcagcuugacaaugugguagaacaaaa

SEQ ID NO: 288773 - RNA, 32 nt, Homo Sapiens
aaaaggaaaaaagaagggcucagcgccucccc

SEQ ID NO: 288774 - RNA, 32 nt, Homo Sapiens
cuacgguccccgucuucccccauccacgaaga

SEQ ID NO: 288775 - RNA, 32 nt, Homo Sapiens
ggaguucugcuuacuucaguccugcugagaua

SEQ ID NO: 288776 - RNA, 32 nt, Homo Sapiens
auuguugauauuguauuauuuauauuuucagu

SEQ ID NO: 288777 - RNA, 32 nt, Homo Sapiens
agguggcaugugggugucuacacaucgagaag

SEQ ID NO: 288778 - RNA, 32 nt, Homo Sapiens
agcuguguuuuaaaugccgugaucacuggauu

SEQ ID NO: 288779 - RNA, 32 nt, Homo Sapiens
agcaccccagcccuguucugcuuguaucccag

SEQ ID NO: 288780 - RNA, 32 nt, Homo Sapiens
uugccuucuaaauuaugauaaaacagaaguga

SEQ ID NO: 288781 - RNA, 32 nt, Homo Sapiens
uauguggcgggcauuugggauaccaagauaaa

SEQ ID NO: 288782 - RNA, 32 nt, Homo Sapiens
ggcucacuuuguuuuccaguggguccagaguc

SEQ ID NO: 288783 - RNA, 32 nt, Homo Sapiens
cuauaagaacuaaugauaauccaucacccuuc

SEQ ID NO: 288784 - RNA, 32 nt, Homo Sapiens
cuccccgccucccgggcgccgggguuggcgau

SEQ ID NO: 288785 - RNA, 32 nt, Homo Sapiens
uaaaauacugaauuaguuucuaaacuaaacua

SEQ ID NO: 288786 - RNA, 32 nt, Homo Sapiens
uucuaguuuuucugcagccgaccuccagcguc

SEQ ID NO: 288787 - RNA, 32 nt, Homo Sapiens
uuguuugcaagaagccaaaaccacaucaaagc

SEQ ID NO: 288788 - RNA, 32 nt, Homo Sapiens
cugaaaucaaaccaaaggagugcuguggcucc

SEQ ID NO: 288789 - RNA, 32 nt, Homo Sapiens
cagugcccacuacuucccagggacucucacau

SEQ ID NO: 288790 - RNA, 32 nt, Homo Sapiens
ccaaacaugcaaacacugaggauugagcugug

SEQ ID NO: 288791 - RNA, 32 nt, Homo Sapiens
ggguuccugcugcggcagccaccucgcaaucu

SEQ ID NO: 288792 - RNA, 32 nt, Homo Sapiens
gaaggccuaaaggccgcgguugccaggaaccg

SEQ ID NO: 288793 - RNA, 32 nt, Homo Sapiens
gaaaaaauacuguaauacuaagaaacuguguu

SEQ ID NO: 288794 - RNA, 32 nt, Homo Sapiens
uacuuugaaguguuucugaaaugauaaaaugu

SEQ ID NO: 288795 - RNA, 32 nt, Homo Sapiens
ugguugaggacucugacucagaggagcccucu

SEQ ID NO: 288796 - RNA, 32 nt, Homo Sapiens
uggcccugccccagccuguguagcucuuccug

SEQ ID NO: 288797 - RNA, 32 nt, Homo Sapiens
cgugguggggagaggcauggcugggguggggg

SEQ ID NO: 288798 - RNA, 32 nt, Homo Sapiens
uuccuuugcccccaggaaaggacgcauccacc

SEQ ID NO: 288799 - RNA, 32 nt, Homo Sapiens
acuuaaacaucauacuucuuagccaacagaug

SEQ ID NO: 288800 - RNA, 32 nt, Homo Sapiens
aaauagcuucaaaagcacuuguguaucuugau

SEQ ID NO: 288801 - RNA, 28 nt, Homo Sapiens
cacgaggggcggcguaggggcggagguc

SEQ ID NO: 288802 - RNA, 32 nt, Homo Sapiens
ggccgcacuccgaguuucuccuccucacagau

SEQ ID NO: 288803 - RNA, 32 nt, Homo Sapiens
gccgucaccucauggcgacgcggguagaggag

SEQ ID NO: 288804 - RNA, 32 nt, Homo Sapiens
agcggcggggacuggggaagggcgagcagcgg

SEQ ID NO: 288805 - RNA, 32 nt, Homo Sapiens
gguuuaggggaugguucugggaggcgagggcu

SEQ ID NO: 288806 - RNA, 32 nt, Homo Sapiens
uuacucaccacuucccuaacacugccgggcug

SEQ ID NO: 288807 - RNA, 32 nt, Homo Sapiens
ccuaaucuuuguuuccucaucuguccaucccu

SEQ ID NO: 288808 - RNA, 32 nt, Homo Sapiens
cagguuuccuuccuucgcagcuuuuagaccaa

SEQ ID NO: 288809 - RNA, 32 nt, Homo Sapiens
cccccacugggcccuccuuccuccuggugcua

SEQ ID NO: 288810 - RNA, 32 nt, Homo Sapiens
uguuucaggcuuaaaaguuuugaaagauuuuu

SEQ ID NO: 288811 - RNA, 32 nt, Homo Sapiens
uucuuuuuugauggguuuaugauucaguuuau

SEQ ID NO: 288812 - RNA, 32 nt, Homo Sapiens
uuuauccuuccuuuaacuuaaucuuuuuaucc

SEQ ID NO: 288813 - RNA, 32 nt, Homo Sapiens
ccaggcucaagcgguccuucuaccucagccuc

SEQ ID NO: 288814 - RNA, 32 nt, Homo Sapiens
guagaaccgaucucagccuugcugaucaucuc

SEQ ID NO: 288815 - RNA, 32 nt, Homo Sapiens
cugaucauuccgcuuuuucuuucuuaaaaaua

SEQ ID NO: 288816 - RNA, 32 nt, Homo Sapiens
uuuuauuuagcuuuacauauuccuuugaccaa

SEQ ID NO: 288817 - RNA, 32 nt, Homo Sapiens
acacuaauggcccuucuuucuguuugagcugc

SEQ ID NO: 288818 - RNA, 31 nt, Homo Sapiens
cgcgccacgcacugccugcgucccgcgcccc

SEQ ID NO: 288819 - RNA, 32 nt, Homo Sapiens
cauguuaaugaaauaauucaacuucaaaugaa

SEQ ID NO: 288820 - RNA, 32 nt, Homo Sapiens
uuuccagucaggugggucacaaugagaugguu

SEQ ID NO: 288821 - RNA, 32 nt, Homo Sapiens
acaaagagccgaggaucagagaagaccccuga

SEQ ID NO: 288822 - RNA, 32 nt, Homo Sapiens
uuucuuaccucacaggggcaagagggacucua

SEQ ID NO: 288823 - RNA, 32 nt, Homo Sapiens
uaaugggaagggguucauguucucuuuauaau

SEQ ID NO: 288824 - RNA, 32 nt, Homo Sapiens
aaucagagauaaagcuuaggucaaaguucaua

SEQ ID NO: 288825 - RNA, 32 nt, Homo Sapiens
uugucugucuucuuuaaucaaaucacaucuua

SEQ ID NO: 288826 - RNA, 32 nt, Homo Sapiens
auuggggugauccaaagcuggcaccuucaggc

SEQ ID NO: 288827 - RNA, 32 nt, Homo Sapiens
ugaccuuccaaguuugacuuguauaacaucac

SEQ ID NO: 288828 - RNA, 32 nt, Homo Sapiens
guccgguuccugauguucuugucauaugaguu

SEQ ID NO: 288829 - RNA, 32 nt, Homo Sapiens
cagcacggcgggcagcgccgcgcugcgcaccg

SEQ ID NO: 288830 - RNA, 32 nt, Homo Sapiens
agugcucugaaucguaccuggauucugugccu

SEQ ID NO: 288831 - RNA, 32 nt, Homo Sapiens
uucuacacaaaauaaaguucucuaugaagaau

SEQ ID NO: 288832 - RNA, 32 nt, Homo Sapiens
aaaaauuuuuaaguucacaauucagugguauu

SEQ ID NO: 288833 - RNA, 32 nt, Homo Sapiens
ccucauggaagaugcaaguaaaaggaaaugca

SEQ ID NO: 288834 - RNA, 32 nt, Homo Sapiens
agggaguacuuuguaaccacuuugauaugcug

SEQ ID NO: 288835 - RNA, 32 nt, Homo Sapiens
cuuuuccuuuuacucuggucuuuuacucguuu

SEQ ID NO: 288836 - RNA, 32 nt, Homo Sapiens
agccagccuguggcucugacgucuaccagcau

SEQ ID NO: 288837 - RNA, 32 nt, Homo Sapiens
ccuacugcuucuuuucuuguucuuuauucuca

SEQ ID NO: 288838 - RNA, 32 nt, Homo Sapiens
gcugaguccagauuauagagguugccuuaccc

SEQ ID NO: 288839 - RNA, 32 nt, Homo Sapiens
cuuccuuccuucccucauugagcacuccagug

SEQ ID NO: 288840 - RNA, 32 nt, Homo Sapiens
agaacaagaugccauaaugccuaugaagacuu

SEQ ID NO: 288841 - RNA, 32 nt, Homo Sapiens
cuuuuggaaaauacccuacacaauacuaaccu

SEQ ID NO: 288842 - RNA, 32 nt, Homo Sapiens
gccucuggagccgcgacugcccgggguugugc

SEQ ID NO: 288843 - RNA, 32 nt, Homo Sapiens
cagucaucaguucuuuaggggcugcaauguuu

SEQ ID NO: 288844 - RNA, 32 nt, Homo Sapiens
gggcugauguguagaaaauauguaaugcaggg

SEQ ID NO: 288845 - RNA, 30 nt, Homo Sapiens
gcaaaaugaagauugaggaggugaagagca

SEQ ID NO: 288846 - RNA, 32 nt, Homo Sapiens
uuuaagaaaaauuuaaguuuauucagauaagu

SEQ ID NO: 288847 - RNA, 32 nt, Homo Sapiens
gaccuggcggugccggcgcccggaguggcccu

SEQ ID NO: 288848 - RNA, 32 nt, Homo Sapiens
cuucaaggaauuccaaugaugaagauuuuaag

SEQ ID NO: 288849 - RNA, 32 nt, Homo Sapiens
ggaaagaugauggacugggacucauaaucccu

SEQ ID NO: 288850 - RNA, 32 nt, Homo Sapiens
cacucugcagaccgcuccagacaaucaggcac

SEQ ID NO: 288851 - RNA, 31 nt, Homo Sapiens
uaauggaaauaaaacgguauaauuaauaauu

SEQ ID NO: 288852 - RNA, 32 nt, Homo Sapiens
auaugaagucagcauuggccccgccccccacc

SEQ ID NO: 288853 - RNA, 32 nt, Homo Sapiens
aauuugugcacagagauaacacaggggauaug

SEQ ID NO: 288854 - RNA, 27 nt, Homo Sapiens
accauacuuuacuucugguaugguuua

SEQ ID NO: 288855 - RNA, 32 nt, Homo Sapiens
aagacuuucaggauuaagcgauuccuggccaa

SEQ ID NO: 288856 - RNA, 32 nt, Homo Sapiens
aaagccagaggccccaggcucugugcugauga

SEQ ID NO: 288857 - RNA, 32 nt, Homo Sapiens
cgagcgggcgcauacgcccgggccccaaggcc

SEQ ID NO: 288858 - RNA, 32 nt, Homo Sapiens
cuaugguuaugagguggggagaacggaaugac

SEQ ID NO: 288859 - RNA, 32 nt, Homo Sapiens
ggugcccagcuaagaccugaaugccaucaccc

SEQ ID NO: 288860 - RNA, 32 nt, Homo Sapiens
cacaagccccccacccccugacccuuggccuu

SEQ ID NO: 288861 - RNA, 32 nt, Homo Sapiens
agagauuguuuugaagccaaaaugguacaccg

SEQ ID NO: 288862 - RNA, 32 nt, Homo Sapiens
ccgguagaggaucaccggugacaacuauagca

SEQ ID NO: 288863 - RNA, 30 nt, Homo Sapiens
cugagauggcgggggcgccgcgcggcggag

SEQ ID NO: 288864 - RNA, 32 nt, Homo Sapiens
cagcauaaaaauugguaaacacuacaaaucgg

SEQ ID NO: 288865 - RNA, 32 nt, Homo Sapiens
gacaguauuuuuggcagggagaaggugcgcag

SEQ ID NO: 288866 - RNA, 32 nt, Homo Sapiens
gcuggagaacagagacccuucaagaggugagg

SEQ ID NO: 288867 - RNA, 32 nt, Homo Sapiens
cuucugcuuuucugcccuggcugcugccccca

SEQ ID NO: 288868 - RNA, 32 nt, Homo Sapiens
uucuuguuuaaacagcucuauauggauuuaua

SEQ ID NO: 288869 - RNA, 32 nt, Homo Sapiens
uccugaagcugauauaaauaagucuagcucua

SEQ ID NO: 288870 - RNA, 32 nt, Homo Sapiens
ugaaaacauaaaugucuguaacuuacaaacau

SEQ ID NO: 288871 - RNA, 32 nt, Homo Sapiens
cuggaucugaagacuuuugauacuuuuucaaa

SEQ ID NO: 288872 - RNA, 32 nt, Homo Sapiens
cccggucccguccagacgcugucuggcgagau

SEQ ID NO: 288873 - RNA, 32 nt, Homo Sapiens
gggccagaaucgcccggcccagcccuggagcc

SEQ ID NO: 288874 - RNA, 32 nt, Homo Sapiens
gccacugcacuguguaaccauuagugcaacua

SEQ ID NO: 288875 - RNA, 27 nt, Homo Sapiens
ggaagcccuuaauucuugguuguggga

SEQ ID NO: 288876 - RNA, 32 nt, Homo Sapiens
augaaauucauuuauuugucuugacaauguuc

SEQ ID NO: 288877 - RNA, 32 nt, Homo Sapiens
ucuuacccgucaacuuuuuuuuuuuuuuaaau

SEQ ID NO: 288878 - RNA, 32 nt, Homo Sapiens
aaagauaaaaauuucuagcaagccuuugaagu

SEQ ID NO: 288879 - RNA, 32 nt, Homo Sapiens
uuauuuauuucuuuacaaaucauuccaguuca

SEQ ID NO: 288880 - RNA, 32 nt, Homo Sapiens
agcuaagcauguguaauuucuugugaagaagc

SEQ ID NO: 288881 - RNA, 32 nt, Homo Sapiens
gcuucaagagaaauauauuugcuggaaggcag

SEQ ID NO: 288882 - RNA, 32 nt, Homo Sapiens
accaucuccugccgggccucagcccucgccug

SEQ ID NO: 288883 - RNA, 32 nt, Homo Sapiens
ggaggcccaguguggagaagggaccagaacaa

SEQ ID NO: 288884 - RNA, 32 nt, Homo Sapiens
aucauuaugggaagauggcugggaagagagga

SEQ ID NO: 288885 - RNA, 32 nt, Homo Sapiens
uuuuguacuuuuuguauaaauggagucucacu

SEQ ID NO: 288886 - RNA, 32 nt, Homo Sapiens
auccauuugcaaacacaagaacuauacacaug

SEQ ID NO: 288887 - RNA, 30 nt, Homo Sapiens
cuguuugucuguguuucauacaagguucuu

SEQ ID NO: 288888 - RNA, 32 nt, Homo Sapiens
cuccggcccacacucuccugcugcccugaccu

SEQ ID NO: 288889 - RNA, 32 nt, Homo Sapiens
gagauggggagcaucauucuguuauacuucug

SEQ ID NO: 288890 - RNA, 32 nt, Homo Sapiens
ggaagggggaccugggucucaaugggucucau

SEQ ID NO: 288891 - RNA, 32 nt, Homo Sapiens
aguaugcaggguuuaaauuuuuaaguauaauu

SEQ ID NO: 288892 - RNA, 32 nt, Homo Sapiens
gaagagucagggagacccccagccugaggcac

SEQ ID NO: 288893 - RNA, 28 nt, Homo Sapiens
gacauggagggcgagauggcagugcggg

SEQ ID NO: 288894 - RNA, 32 nt, Homo Sapiens
cacugaaccgaggcacuguuauagaagaaugg

SEQ ID NO: 288895 - RNA, 32 nt, Homo Sapiens
cauacguguauguacacacacacacacaauac

SEQ ID NO: 288896 - RNA, 32 nt, Homo Sapiens
uuugccugggugggaauuuuugaaguauaaaa

SEQ ID NO: 288897 - RNA, 31 nt, Homo Sapiens
cacagcucacggagccuggccgcggaccccu

SEQ ID NO: 288898 - RNA, 32 nt, Homo Sapiens
gcccccagcaucuccuggggcccccauggcug

SEQ ID NO: 288899 - RNA, 32 nt, Homo Sapiens
ccagagggagagaggacucuggaccuaggaaa

SEQ ID NO: 288900 - RNA, 32 nt, Homo Sapiens
agccugccuaacauggugaaaccccgucucca

SEQ ID NO: 288901 - RNA, 32 nt, Homo Sapiens
gucgucgggccuccgcgccgcugacuuccccc

SEQ ID NO: 288902 - RNA, 32 nt, Homo Sapiens
accgugucucaaaacaaacaaacaaaagcuac

SEQ ID NO: 288903 - RNA, 32 nt, Homo Sapiens
uagacauucagcucacugcuuaacucaacauu

SEQ ID NO: 288904 - RNA, 32 nt, Homo Sapiens
cccuaccugccuggcuaagacccguggccguc

SEQ ID NO: 288905 - RNA, 32 nt, Homo Sapiens
uuaaaauaacaucaaggcaagcguacguguca

SEQ ID NO: 288906 - RNA, 32 nt, Homo Sapiens
aagaauggacgaaaugaccauccaacgugauu

SEQ ID NO: 288907 - RNA, 32 nt, Homo Sapiens
gugcuaugugcagaucuuaacucauugccaga

SEQ ID NO: 288908 - RNA, 26 nt, Homo Sapiens
uaugucuggggacagcagcggccgcg

SEQ ID NO: 288909 - RNA, 32 nt, Homo Sapiens
uaagcacccccacuuacaauucuuaaauucag

SEQ ID NO: 288910 - RNA, 32 nt, Homo Sapiens
uggaacuaauuuauuucuuuugaggaaaagau

SEQ ID NO: 288911 - RNA, 32 nt, Homo Sapiens
auuuaggauauucaaaucugcaucauaagccg

SEQ ID NO: 288912 - RNA, 32 nt, Homo Sapiens
gguuugugagcaggcccggccgggccaggagc

SEQ ID NO: 288913 - RNA, 32 nt, Homo Sapiens
gccgcagcgcuuggcguccgucggucuccguc

SEQ ID NO: 288914 - RNA, 30 nt, Homo Sapiens
uacugguaucaccuuacaugguaucacugg

SEQ ID NO: 288915 - RNA, 32 nt, Homo Sapiens
acuuagucauaugucucaauaaguuaaggaca

SEQ ID NO: 288916 - RNA, 32 nt, Homo Sapiens
gggcuggggcgaggagugaagagcggugggga

SEQ ID NO: 288917 - RNA, 32 nt, Homo Sapiens
uuuuuuacagcugccugcaguacuuuaccucc

SEQ ID NO: 288918 - RNA, 32 nt, Homo Sapiens
gcuagacgaaaacccacauuaccuguuaggcc

SEQ ID NO: 288919 - RNA, 32 nt, Homo Sapiens
aggaggggaaauguguagaaagaggcuucgcc

SEQ ID NO: 288920 - RNA, 32 nt, Homo Sapiens
uaaaggucaacaccaaucauaugguauuugaa

SEQ ID NO: 288921 - RNA, 32 nt, Homo Sapiens
ugcuuauggaaagccaguuaguuagaauugga

SEQ ID NO: 288922 - RNA, 32 nt, Homo Sapiens
aauauauucagcaauuuuuuaaagggcagaua

SEQ ID NO: 288923 - RNA, 32 nt, Homo Sapiens
gagacauccuguguuugcuccuccccucauac

SEQ ID NO: 288924 - RNA, 32 nt, Homo Sapiens
cucaaagagauucggaaauuugccaugaagga

SEQ ID NO: 288925 - RNA, 32 nt, Homo Sapiens
aacucaguagagaucuauauuuuuguacugaa

SEQ ID NO: 288926 - RNA, 32 nt, Homo Sapiens
agaaagcaagccagauuuacugcacaauaugc

SEQ ID NO: 288927 - RNA, 32 nt, Homo Sapiens
uucccugaaagauaagaacaauguuauguugg

SEQ ID NO: 288928 - RNA, 32 nt, Homo Sapiens
uugaaaaggaaauaaacuuugaugaauuagau

SEQ ID NO: 288929 - RNA, 32 nt, Homo Sapiens
cccccuccucugcuccugcagcgcccugcaca

SEQ ID NO: 288930 - RNA, 32 nt, Homo Sapiens
ccagaccagccucugcagcugcacuucagcuc

SEQ ID NO: 288931 - RNA, 32 nt, Homo Sapiens
ugcagcccuagaagcuggaaaaacuaaugaaa

SEQ ID NO: 288932 - RNA, 32 nt, Homo Sapiens
gcucugauugaucuauucuugcacgauuuccu

SEQ ID NO: 288933 - RNA, 32 nt, Homo Sapiens
ugcaccuuuuauuugcaaacugauguuacuuu

SEQ ID NO: 288934 - RNA, 28 nt, Homo Sapiens
cagccguggcggccgccggggaccgcaa

SEQ ID NO: 288935 - RNA, 32 nt, Homo Sapiens
gaagucauaugauagacauacuguguaaaauu

SEQ ID NO: 288936 - RNA, 32 nt, Homo Sapiens
uaccgaauuacaugucagucuguugccaccuu

SEQ ID NO: 288937 - RNA, 32 nt, Homo Sapiens
ccgcccuccccgcucuccuuccugggcgagcu

SEQ ID NO: 288938 - RNA, 31 nt, Homo Sapiens
cauguacugcacugcccuggucgaaugcucg

SEQ ID NO: 288939 - RNA, 32 nt, Homo Sapiens
auauucuuauuuuuauucucuuaagucuuuau

SEQ ID NO: 288940 - RNA, 32 nt, Homo Sapiens
gccaguuaauaaaguccagaacuuaagcccaa

SEQ ID NO: 288941 - RNA, 32 nt, Homo Sapiens
uuuuaauaaaacaaaauuuguuugaaaucuuu

SEQ ID NO: 288942 - RNA, 27 nt, Homo Sapiens
ggauggaggcguccugccuagagcugg

SEQ ID NO: 288943 - RNA, 32 nt, Homo Sapiens
aaaacuguggcuuuucuggaauggaauuggac

SEQ ID NO: 288944 - RNA, 32 nt, Homo Sapiens
gggcgcucgggcggcccuggccggggagacga

SEQ ID NO: 288945 - RNA, 32 nt, Homo Sapiens
uccuggggccccagacgcccccuccuuucuug

SEQ ID NO: 288946 - RNA, 32 nt, Homo Sapiens
cgccucacacgcgcgcccgagcgagccccggg

SEQ ID NO: 288947 - RNA, 32 nt, Homo Sapiens
gguccggccccgggagggcccggggcgcguuu

SEQ ID NO: 288948 - RNA, 32 nt, Homo Sapiens
cagcuucaaagucagauagauuuuucucccag

SEQ ID NO: 288949 - RNA, 32 nt, Homo Sapiens
ccaggcccugcuuaggcccccauccugggguc

SEQ ID NO: 288950 - RNA, 29 nt, Homo Sapiens
ggaaauucauguuucaggaagcaaaguuu

SEQ ID NO: 288951 - RNA, 32 nt, Homo Sapiens
gaacuggcacgcugggggcucugggcuugugg

SEQ ID NO: 288952 - RNA, 32 nt, Homo Sapiens
caagguguugacucagacucucacuuaggcuc

SEQ ID NO: 288953 - RNA, 32 nt, Homo Sapiens
agccucucaaaugugcuuugucucucugugcu

SEQ ID NO: 288954 - RNA, 32 nt, Homo Sapiens
auguaacacacaauacaugcaugcacuguauu

SEQ ID NO: 288955 - RNA, 32 nt, Homo Sapiens
gcccgcccaauauggugaaaccccgucucucc

SEQ ID NO: 288956 - RNA, 32 nt, Homo Sapiens
aaguccuucuaaagagcugccugccagcugcc

SEQ ID NO: 288957 - RNA, 32 nt, Homo Sapiens
cagggaaguuuuggaguuugcaaccacaguau

SEQ ID NO: 288958 - RNA, 32 nt, Homo Sapiens
uaaauuucauuaggugacccagguucucagca

SEQ ID NO: 288959 - RNA, 32 nt, Homo Sapiens
ucaucauuuuuggcaggauuuacauaggcaag

SEQ ID NO: 288960 - RNA, 30 nt, Homo Sapiens
uccggagccgcgccgccgccggcccagcau

SEQ ID NO: 288961 - RNA, 32 nt, Homo Sapiens
aauguuucagagugaaugcaaaaaagagagau

SEQ ID NO: 288962 - RNA, 32 nt, Homo Sapiens
uuuggcugaguggcuggaguggucaauaaagc

SEQ ID NO: 288963 - RNA, 32 nt, Homo Sapiens
ucucagcucuuggucugcaaccccaacgucua

SEQ ID NO: 288964 - RNA, 32 nt, Homo Sapiens
guuuugcaguucccaaccacaacauucuucua

SEQ ID NO: 288965 - RNA, 32 nt, Homo Sapiens
cacggaucccacuucugacaccaucuauuaaa

SEQ ID NO: 288966 - RNA, 32 nt, Homo Sapiens
gaguggggggcguggaaggcgggaggggcuga

SEQ ID NO: 288967 - RNA, 28 nt, Homo Sapiens
ucagagguggcuacagggcaggcagagg

SEQ ID NO: 288968 - RNA, 32 nt, Homo Sapiens
uaauggacuuuucaagccuuccuuccauuguu

SEQ ID NO: 288969 - RNA, 32 nt, Homo Sapiens
cuuucuccugggaucuccaugggggaugccau

SEQ ID NO: 288970 - RNA, 32 nt, Homo Sapiens
aauauauuacagucacaccauaaaaaaaaaaa

SEQ ID NO: 288971 - RNA, 32 nt, Homo Sapiens
caaaggaugcaacaacauccacagcacugccc

SEQ ID NO: 288972 - RNA, 32 nt, Homo Sapiens
cccgcagcccgcucgcggcgcuucuccggccc

SEQ ID NO: 288973 - RNA, 32 nt, Homo Sapiens
cagucuuguuuggaguucugaacccaugaugu

SEQ ID NO: 288974 - RNA, 32 nt, Homo Sapiens
uuuaauguggguuuucuguuuccuuuuggccu

SEQ ID NO: 288975 - RNA, 32 nt, Homo Sapiens
ggauuguuuugugaaacuuuuaauuuuauaua

SEQ ID NO: 288976 - RNA, 32 nt, Homo Sapiens
accauaucuauuuucgaacguuuucuugaauc

SEQ ID NO: 288977 - RNA, 32 nt, Homo Sapiens
ugaguucuuggugauacaauggugagacuugu

SEQ ID NO: 288978 - RNA, 32 nt, Homo Sapiens
ccaacccaucucuccuucucacuguuauccca

SEQ ID NO: 288979 - RNA, 32 nt, Homo Sapiens
agaaacgcgggaaguugggcccaggcaguguu

SEQ ID NO: 288980 - RNA, 32 nt, Homo Sapiens
cacaugaaauauuuaaacuuuuuugugugccu

SEQ ID NO: 288981 - RNA, 32 nt, Homo Sapiens
ucuagaaauuuuauuucuuuuuggaaugagau

SEQ ID NO: 288982 - RNA, 32 nt, Homo Sapiens
gggccccggggccuccucuccuccucucaggc

SEQ ID NO: 288983 - RNA, 32 nt, Homo Sapiens
uuccucuucuuuuuuccaacugugaagguccc

SEQ ID NO: 288984 - RNA, 32 nt, Homo Sapiens
caggggucugaggcugccauuaccucaggagc

SEQ ID NO: 288985 - RNA, 32 nt, Homo Sapiens
gagucccgagccucgcgccccggagugcccga

SEQ ID NO: 288986 - RNA, 32 nt, Homo Sapiens
auaacucucuacaggaauauauuuuuuaaacg

SEQ ID NO: 288987 - RNA, 32 nt, Homo Sapiens
acaucagcugaauuguccuagcuugauaagca

SEQ ID NO: 288988 - RNA, 32 nt, Homo Sapiens
agcagagguucaugggacacaguuggaaagcc

SEQ ID NO: 288989 - RNA, 32 nt, Homo Sapiens
caucucuuuuccuccgccuccgccggcgcgau

SEQ ID NO: 288990 - RNA, 32 nt, Homo Sapiens
acaucugugggaauuaugagggggagauuaua

SEQ ID NO: 288991 - RNA, 32 nt, Homo Sapiens
auggcugccugccugacuguagugcccaccaa

SEQ ID NO: 288992 - RNA, 32 nt, Homo Sapiens
cucccacccuugccccaguccugcccggcccc

SEQ ID NO: 288993 - RNA, 32 nt, Homo Sapiens
aauggccuugagaauagagccacaaaaauaac

SEQ ID NO: 288994 - RNA, 32 nt, Homo Sapiens
uugauugccaaaaaaugcuaaccaucaucugg

SEQ ID NO: 288995 - RNA, 32 nt, Homo Sapiens
gguugggggaguaguggggcacggcuccuaag

SEQ ID NO: 288996 - RNA, 32 nt, Homo Sapiens
gagaaaccuuggagauucacggcaaggcguaa

SEQ ID NO: 288997 - RNA, 32 nt, Homo Sapiens
uguagauguauuaaauauguaaauguuuuuca

SEQ ID NO: 288998 - RNA, 32 nt, Homo Sapiens
gcauggaaaaauuuaaagcuaauaaagcaauu

SEQ ID NO: 288999 - RNA, 32 nt, Homo Sapiens
guaauaaaaguacuuauaaacauacuaauccu

SEQ ID NO: 289000 - RNA, 32 nt, Homo Sapiens
uuuuaccuuuuguccucuggcuuauugccuca

SEQ ID NO: 289001 - RNA, 32 nt, Homo Sapiens
ucuaauuuuuaaaacugaugugguuugcauuu

SEQ ID NO: 289002 - RNA, 32 nt, Homo Sapiens
guuuuggauugguggggugcggccuggggcca

SEQ ID NO: 289003 - RNA, 32 nt, Homo Sapiens
uaacaucuuauucuaaugaaauguagauuuuu

SEQ ID NO: 289004 - RNA, 32 nt, Homo Sapiens
agcaaagcugggugugguguugcaccgcuaua

SEQ ID NO: 289005 - RNA, 32 nt, Homo Sapiens
uugacuaauuguagaacuuugugugaggacuu

SEQ ID NO: 289006 - RNA, 32 nt, Homo Sapiens
agcccagcgaggggcgcgcgugggcgcggcca

SEQ ID NO: 289007 - RNA, 32 nt, Homo Sapiens
cauugggaauauacauuuuucuuaauguucca

SEQ ID NO: 289008 - RNA, 32 nt, Homo Sapiens
agcgccugcagccguacccuggccugcaggcg

SEQ ID NO: 289009 - RNA, 32 nt, Homo Sapiens
cccgccucccuuucuucccauccacauacucc

SEQ ID NO: 289010 - RNA, 29 nt, Homo Sapiens
uuuucuccgguccgagcucggggcgcccc

SEQ ID NO: 289011 - RNA, 32 nt, Homo Sapiens
uuagaggggaagcucugcugaggacucuuggg

SEQ ID NO: 289012 - RNA, 32 nt, Homo Sapiens
ccuggauccugccucgcgcgggccguccuguu

SEQ ID NO: 289013 - RNA, 32 nt, Homo Sapiens
ggauacucaaagucaugcucagggccucuaau

SEQ ID NO: 289014 - RNA, 32 nt, Homo Sapiens
guaaccguucacaaugggcagcucccggcuga

SEQ ID NO: 289015 - RNA, 32 nt, Homo Sapiens
uaguccuggggccugggccucuggccauugcc

SEQ ID NO: 289016 - RNA, 32 nt, Homo Sapiens
agugauccugggaaacaaaucugucuggauug

SEQ ID NO: 289017 - RNA, 32 nt, Homo Sapiens
ugacugauacaaacaacuuauuugagcauauu

SEQ ID NO: 289018 - RNA, 32 nt, Homo Sapiens
ccuugcugcuaagucagaucagauuugcuaac

SEQ ID NO: 289019 - RNA, 32 nt, Homo Sapiens
aacggguagcagcagauguaguuucagacuug

SEQ ID NO: 289020 - RNA, 32 nt, Homo Sapiens
cuguuaagggcuuauuuuuuuaaaacauugga

SEQ ID NO: 289021 - RNA, 32 nt, Homo Sapiens
ucuggcccuggccagcucugcauuugacaaau

SEQ ID NO: 289022 - RNA, 32 nt, Homo Sapiens
ucucuuuguacuccucccuguacaacaucaca

SEQ ID NO: 289023 - RNA, 32 nt, Homo Sapiens
cuuuggacuuggcgaccauuucagagaugucu

SEQ ID NO: 289024 - RNA, 32 nt, Homo Sapiens
uauauauguuucccuuuuugauuauugcauug

SEQ ID NO: 289025 - RNA, 32 nt, Homo Sapiens
uauauuuucuguuguuuuuaaaauaguuuuca

SEQ ID NO: 289026 - RNA, 32 nt, Homo Sapiens
ucuguccggaaucacauagauaccaucgugga

SEQ ID NO: 289027 - RNA, 32 nt, Homo Sapiens
auguugcaacuguaaauugaauuauuuggcau

SEQ ID NO: 289028 - RNA, 32 nt, Homo Sapiens
uaacuccugugggcacgggggcugggaagagc

SEQ ID NO: 289029 - RNA, 32 nt, Homo Sapiens
guggugauaaccucaaagaauggcucuguuuu

SEQ ID NO: 289030 - RNA, 32 nt, Homo Sapiens
gccugucugggaauuccugggggcugagacua

SEQ ID NO: 289031 - RNA, 32 nt, Homo Sapiens
auaauagaauccaugaugaguucuguacaaga

SEQ ID NO: 289032 - RNA, 32 nt, Homo Sapiens
auauguuaaguguaaaaugcaaguggcgggac

SEQ ID NO: 289033 - RNA, 32 nt, Homo Sapiens
ucagugcugugagcgaagcgugaucacacauc

SEQ ID NO: 289034 - RNA, 32 nt, Homo Sapiens
uguuaugcaaugcuggagacguggugaaauag

SEQ ID NO: 289035 - RNA, 32 nt, Homo Sapiens
auuugagcauauuuuuaucaguuaaugucauu

SEQ ID NO: 289036 - RNA, 32 nt, Homo Sapiens
cuagauucuacgacaagguacuuucuuugcau

SEQ ID NO: 289037 - RNA, 32 nt, Homo Sapiens
uauuccuuugcuuaugccccaacccuuggcua

SEQ ID NO: 289038 - RNA, 32 nt, Homo Sapiens
ucugccccagccccggccacccagggaucgau

SEQ ID NO: 289039 - RNA, 32 nt, Homo Sapiens
guuuguauucauaagugguuuuuaaaagccuu

SEQ ID NO: 289040 - RNA, 32 nt, Homo Sapiens
uaauaacaacaauggaauauagaauacaaagg

SEQ ID NO: 289041 - RNA, 32 nt, Homo Sapiens
acagaccaccacgaccaacaacaaagaugggg

SEQ ID NO: 289042 - RNA, 32 nt, Homo Sapiens
gccccucccacccuugccccagccccugccug

SEQ ID NO: 289043 - RNA, 32 nt, Homo Sapiens
aaaggaagaauugcacugagcauuccacuuag

SEQ ID NO: 289044 - RNA, 32 nt, Homo Sapiens
uuagacuucccguuucugaaagaaagagcauc

SEQ ID NO: 289045 - RNA, 32 nt, Homo Sapiens
cuuccacagggaagcuuaaaacaaaagauauu

SEQ ID NO: 289046 - RNA, 32 nt, Homo Sapiens
aguaccgcuggcggcccaggaccgugcgcucu

SEQ ID NO: 289047 - RNA, 32 nt, Homo Sapiens
accgccuccuucccagccccuagcgcuccggc

SEQ ID NO: 289048 - RNA, 32 nt, Homo Sapiens
gucggcugcggugugggaggcacggccugggc

SEQ ID NO: 289049 - RNA, 32 nt, Homo Sapiens
gaccaaagacauuuucuguuuccuggaaaaaa

SEQ ID NO: 289050 - RNA, 32 nt, Homo Sapiens
acauaagugggcaaaaaaacaguaucaaaaug

SEQ ID NO: 289051 - RNA, 32 nt, Homo Sapiens
aaauauuuuuuauuuuuccccaagaauugcaa

SEQ ID NO: 289052 - RNA, 32 nt, Homo Sapiens
guuguucuucuaaauuugcuuuauuuuucuua

SEQ ID NO: 289053 - RNA, 32 nt, Homo Sapiens
ucccacuugcaacuucuuucuguugagagaac

SEQ ID NO: 289054 - RNA, 32 nt, Homo Sapiens
ucuugaccccaccaucaguacuccauucuuca

SEQ ID NO: 289055 - RNA, 32 nt, Homo Sapiens
ggaaaauaucucaugaagaccaaaaagcagaa

SEQ ID NO: 289056 - RNA, 32 nt, Homo Sapiens
ucggaggugggcgggguugcagugacuggugg

SEQ ID NO: 289057 - RNA, 32 nt, Homo Sapiens
ugauccugaacacaaauugaucuucagauuug

SEQ ID NO: 289058 - RNA, 32 nt, Homo Sapiens
uagucaaugaagaauuaaucucuguuaagaag

SEQ ID NO: 289059 - RNA, 32 nt, Homo Sapiens
gcacagacagcuuccaccugggcuacacggag

SEQ ID NO: 289060 - RNA, 32 nt, Homo Sapiens
gaauccagacgaagaccucgguccacgagcca

SEQ ID NO: 289061 - RNA, 32 nt, Homo Sapiens
accccuacuccagcccaccccagacaguauuc

SEQ ID NO: 289062 - RNA, 32 nt, Homo Sapiens
agauauuuaaacaagguuauaauuuagcaucu

SEQ ID NO: 289063 - RNA, 32 nt, Homo Sapiens
ccuaaagcuccuccagcagagccccguguucu

SEQ ID NO: 289064 - RNA, 32 nt, Homo Sapiens
ucauuuuguucuaugaguucugcagugacuca

SEQ ID NO: 289065 - RNA, 32 nt, Homo Sapiens
aggguguaugugucuaaauauagaaucauacc

SEQ ID NO: 289066 - RNA, 32 nt, Homo Sapiens
aauauaaaacagucauggccugagaugcaggu

SEQ ID NO: 289067 - RNA, 32 nt, Homo Sapiens
uugugauuuuaauuugauacaaaaugcugagg

SEQ ID NO: 289068 - RNA, 32 nt, Homo Sapiens
cagcucgaggacccgcggccccgccccggcuc

SEQ ID NO: 289069 - RNA, 32 nt, Homo Sapiens
gcauggccaagagaggccuggggagggggggu

SEQ ID NO: 289070 - RNA, 32 nt, Homo Sapiens
ccuaucguucuacaauaaaauacauggaaaua

SEQ ID NO: 289071 - RNA, 32 nt, Homo Sapiens
cuucuucuccaagucgcugccuuugcauacca

SEQ ID NO: 289072 - RNA, 32 nt, Homo Sapiens
ggauguugcuccauccuuugucuuggaaccac

SEQ ID NO: 289073 - RNA, 32 nt, Homo Sapiens
ucucuuauagguuuucuguuuucuacuuucuu

SEQ ID NO: 289074 - RNA, 32 nt, Homo Sapiens
ccuaggucaguccccuccuggacccacccgcu

SEQ ID NO: 289075 - RNA, 32 nt, Homo Sapiens
gggagcugcgggagcaggcccgggccuggcuc

SEQ ID NO: 289076 - RNA, 32 nt, Homo Sapiens
guggcucgcacgagcacugucugguagcucuc

SEQ ID NO: 289077 - RNA, 32 nt, Homo Sapiens
ggggaccgccucccgcgccgccaccaugccca

SEQ ID NO: 289078 - RNA, 32 nt, Homo Sapiens
ugucugaaagagaauuggaagcuuuuagcauu

SEQ ID NO: 289079 - RNA, 32 nt, Homo Sapiens
auaaagacuggugauaauaaaaauugaauuau

SEQ ID NO: 289080 - RNA, 32 nt, Homo Sapiens
cuggcaucuuuuucuauucauucccccuucaa

SEQ ID NO: 289081 - RNA, 32 nt, Homo Sapiens
uguaagcagaaucgcaaugcauccguccuucc

SEQ ID NO: 289082 - RNA, 32 nt, Homo Sapiens
uugaauuaaauagaaacuuauugaauauacau

SEQ ID NO: 289083 - RNA, 32 nt, Homo Sapiens
caucucugaugggagagggugaggaaaucagc

SEQ ID NO: 289084 - RNA, 32 nt, Homo Sapiens
gccugcuggcagauccucccccaccucuccgc

SEQ ID NO: 289085 - RNA, 30 nt, Homo Sapiens
ucccaacuuuucaguacccaucuuaauuuu

SEQ ID NO: 289086 - RNA, 32 nt, Homo Sapiens
cuuacaacaagaacagaaaacaugcuaauuag

SEQ ID NO: 289087 - RNA, 32 nt, Homo Sapiens
cugaaaaugcccugucagccaauggcagcucu

SEQ ID NO: 289088 - RNA, 32 nt, Homo Sapiens
gauggaguugaagaggcagagaaaaagaugga

SEQ ID NO: 289089 - RNA, 32 nt, Homo Sapiens
uggggagggcagguccuggggccgggacgccu

SEQ ID NO: 289090 - RNA, 32 nt, Homo Sapiens
guucugcccucccccuucacucuccccacaag

SEQ ID NO: 289091 - RNA, 32 nt, Homo Sapiens
gggaaaggcagccccagagggaucccgcccuc

SEQ ID NO: 289092 - RNA, 32 nt, Homo Sapiens
caaacacaaggugcagcagggucccaaaggua

SEQ ID NO: 289093 - RNA, 28 nt, Homo Sapiens
auuaggaagguauaacauuuuacuauag

SEQ ID NO: 289094 - RNA, 32 nt, Homo Sapiens
uuuccagaaagagcuguggauauuuuacugga

SEQ ID NO: 289095 - RNA, 32 nt, Homo Sapiens
ucaaaaaggguuuguaacuuuuuacugcccaa

SEQ ID NO: 289096 - RNA, 32 nt, Homo Sapiens
uguacuguauugucaucaaggauacugucccu

SEQ ID NO: 289097 - RNA, 32 nt, Homo Sapiens
cccggguuuggacucuuccuccuggcaucagg

SEQ ID NO: 289098 - RNA, 32 nt, Homo Sapiens
uugaucagaacuguuaccaaaaaacaacuguc

SEQ ID NO: 289099 - RNA, 32 nt, Homo Sapiens
caauaauugucaucuguuauuauuuucaucag

SEQ ID NO: 289100 - RNA, 32 nt, Homo Sapiens
agcgggaggggaggagucacguugucuaccac

SEQ ID NO: 289101 - RNA, 32 nt, Homo Sapiens
cauucucuccugccccaaagugccaagccauu

SEQ ID NO: 289102 - RNA, 32 nt, Homo Sapiens
caccccauuuaauuauuuuuuauguuauaaaa

SEQ ID NO: 289103 - RNA, 32 nt, Homo Sapiens
augggucucuaccauggucaggucuugugcaa

SEQ ID NO: 289104 - RNA, 32 nt, Homo Sapiens
gcggcccggcuggguaaggcgcugcucgagag

SEQ ID NO: 289105 - RNA, 32 nt, Homo Sapiens
uuuuaccuuuugggggaaaaaagcauugcuau

SEQ ID NO: 289106 - RNA, 32 nt, Homo Sapiens
augaaacauuuuccuucucaguggaaagugga

SEQ ID NO: 289107 - RNA, 32 nt, Homo Sapiens
aaauuaagaaaaacuuugaaauggucucaaaa

SEQ ID NO: 289108 - RNA, 32 nt, Homo Sapiens
ccgagccgcucccgcggcggaacuugccggag

SEQ ID NO: 289109 - RNA, 32 nt, Homo Sapiens
gaauaucaaagucauuucuaauuuaguuguca

SEQ ID NO: 289110 - RNA, 32 nt, Homo Sapiens
gacuccuggugcccucucccuuugucccccca

SEQ ID NO: 289111 - RNA, 32 nt, Homo Sapiens
guuuaaaauuaaaagagcauccgguuuuggua

SEQ ID NO: 289112 - RNA, 32 nt, Homo Sapiens
cggaagucacgaccucuccagccagggagucu

SEQ ID NO: 289113 - RNA, 32 nt, Homo Sapiens
ucugccacacagucacaccgugucuccuuagc

SEQ ID NO: 289114 - RNA, 32 nt, Homo Sapiens
ggcaggacaacacugagacugggauaugucca

SEQ ID NO: 289115 - RNA, 32 nt, Homo Sapiens
uaaccagcaugaugaaguguccuugguuuuaa

SEQ ID NO: 289116 - RNA, 32 nt, Homo Sapiens
cauauaugucucugugaaucuccguugcauug

SEQ ID NO: 289117 - RNA, 32 nt, Homo Sapiens
ccugugccggugccuggagcugcccacaccac

SEQ ID NO: 289118 - RNA, 32 nt, Homo Sapiens
cuucaucucucugggucucaguuucuucaucu

SEQ ID NO: 289119 - RNA, 32 nt, Homo Sapiens
cccauuccauagucccuguguugcucugagcc

SEQ ID NO: 289120 - RNA, 32 nt, Homo Sapiens
uccucggucgccgcugccgccgggcuuaacag

SEQ ID NO: 289121 - RNA, 32 nt, Homo Sapiens
cagccccuucccgccccucgccgggcauccgc

SEQ ID NO: 289122 - RNA, 32 nt, Homo Sapiens
cgcccccgccagccgcgccgugacgcgggcau

SEQ ID NO: 289123 - RNA, 32 nt, Homo Sapiens
gcaggucccugauccgccccagccugcaggcc

SEQ ID NO: 289124 - RNA, 32 nt, Homo Sapiens
ccacucuaguugaguucugcagcaugcagcgg

SEQ ID NO: 289125 - RNA, 32 nt, Homo Sapiens
cucuccccugucauuuccagauuucauuaccu

SEQ ID NO: 289126 - RNA, 32 nt, Homo Sapiens
uggcggcgacgggacccgccucccugggcgcc

SEQ ID NO: 289127 - RNA, 32 nt, Homo Sapiens
acaccagccaggugcuggucuugggccaguuc

SEQ ID NO: 289128 - RNA, 32 nt, Homo Sapiens
guaaaaaggagauaaaaauuauuuaccugccu

SEQ ID NO: 289129 - RNA, 32 nt, Homo Sapiens
cugguuuuggagucuugcacuggccaugagug

SEQ ID NO: 289130 - RNA, 32 nt, Homo Sapiens
ccugucccuucugccccaggggcuugccuggc

SEQ ID NO: 289131 - RNA, 32 nt, Homo Sapiens
uagagcugccgccccagggagcccgccacggc

SEQ ID NO: 289132 - RNA, 32 nt, Homo Sapiens
cauugcaaccucagcugauacaaccacaauua

SEQ ID NO: 289133 - RNA, 32 nt, Homo Sapiens
ccucuggcagugccgcuagcuuucaggcaguc

SEQ ID NO: 289134 - RNA, 32 nt, Homo Sapiens
ucauugccccggugcugagcggcgccgcgagu

SEQ ID NO: 289135 - RNA, 32 nt, Homo Sapiens
ccggagcgcggcagccggcggcacgaugccgg

SEQ ID NO: 289136 - RNA, 32 nt, Homo Sapiens
ugcagccucgguugcccggccggggacccgag

SEQ ID NO: 289137 - RNA, 28 nt, Homo Sapiens
gcccugcucagagcucggcugaaacucc

SEQ ID NO: 289138 - RNA, 32 nt, Homo Sapiens
uucugauuuugaaacgaucugcaggucuugcc

SEQ ID NO: 289139 - RNA, 30 nt, Homo Sapiens
ggagcgcgacagugagcgccggcgcgagga

SEQ ID NO: 289140 - RNA, 32 nt, Homo Sapiens
cgccuaaaaagccccagguucagccauugugc

SEQ ID NO: 289141 - RNA, 32 nt, Homo Sapiens
caccguccagagagccgaggucagcgacagcg

SEQ ID NO: 289142 - RNA, 29 nt, Homo Sapiens
gggcguccgguccgguggucuugcagccu

SEQ ID NO: 289143 - RNA, 32 nt, Homo Sapiens
ugugguuugggaaggcagacaccugguucuag

SEQ ID NO: 289144 - RNA, 32 nt, Homo Sapiens
auuuuuuggaggaaacaauucaacuccuaaca

SEQ ID NO: 289145 - RNA, 32 nt, Homo Sapiens
gacucaacacgcugauucuccuccugccucuc

SEQ ID NO: 289146 - RNA, 28 nt, Homo Sapiens
gucaugcccagcugugaccccgguccgg

SEQ ID NO: 289147 - RNA, 32 nt, Homo Sapiens
gugggaagggaagcggguucauggcuuugagg

SEQ ID NO: 289148 - RNA, 32 nt, Homo Sapiens
cccccacguccucuccuucucgccacuuauua

SEQ ID NO: 289149 - RNA, 32 nt, Homo Sapiens
ugaggaauuccacagacacauauguuguguac

SEQ ID NO: 289150 - RNA, 32 nt, Homo Sapiens
uuacagucuaguacuuauuacaugcugcuaua

SEQ ID NO: 289151 - RNA, 32 nt, Homo Sapiens
ccucuuguuuuaauauauuaaaauuuugcaaa

SEQ ID NO: 289152 - RNA, 32 nt, Homo Sapiens
guaggcaguguuuggcaguucucuuugcacuu

SEQ ID NO: 289153 - RNA, 32 nt, Homo Sapiens
uccuaucauuuucuucccuuucagucauaaua

SEQ ID NO: 289154 - RNA, 32 nt, Homo Sapiens
ggugcggagcagccucggcggcggcggccgaa

SEQ ID NO: 289155 - RNA, 30 nt, Homo Sapiens
cgugccagcggucugccgccgccgccccuc

SEQ ID NO: 289156 - RNA, 30 nt, Homo Sapiens
gcuuccacaguucgcuauucucacauccuc

SEQ ID NO: 289157 - RNA, 32 nt, Homo Sapiens
gcggucugaggaagauaagggcccacgcccca

SEQ ID NO: 289158 - RNA, 32 nt, Homo Sapiens
gggagaggauccuccacagugcucucuucagu

SEQ ID NO: 289159 - RNA, 32 nt, Homo Sapiens
ggugagaacaacaacagugccuggagaauccc

SEQ ID NO: 289160 - RNA, 32 nt, Homo Sapiens
gcauuaagcuaaaacuaucaacauuuuaaacc

SEQ ID NO: 289161 - RNA, 32 nt, Homo Sapiens
uuaaaaauucugccuccuguuuauugagaacu

SEQ ID NO: 289162 - RNA, 32 nt, Homo Sapiens
cuuuuugaaaauaaauguuuaccugucaucag

SEQ ID NO: 289163 - RNA, 32 nt, Homo Sapiens
uguuccacguguuaagaauaaauguacauuaa

SEQ ID NO: 289164 - RNA, 32 nt, Homo Sapiens
aaaaaugcuucuuucuaacuuuguuuauuuua

SEQ ID NO: 289165 - RNA, 32 nt, Homo Sapiens
cugcugaggaccagcuguggcugggccaggac

SEQ ID NO: 289166 - RNA, 32 nt, Homo Sapiens
ugcaaucauucucaucuguugaggauguggga

SEQ ID NO: 289167 - RNA, 32 nt, Homo Sapiens
gugacauaacagaaacaaaaucauguugguua

SEQ ID NO: 289168 - RNA, 32 nt, Homo Sapiens
ccuuccgcuucccucccuuucuucccacgggg

SEQ ID NO: 289169 - RNA, 32 nt, Homo Sapiens
aaaauuuugucauucaaaaauuuuuucagaaa

SEQ ID NO: 289170 - RNA, 32 nt, Homo Sapiens
uagauugacugauagucuaguugcauauagau

SEQ ID NO: 289171 - RNA, 32 nt, Homo Sapiens
cgacucagacaagauggugacaaugccuugag

SEQ ID NO: 289172 - RNA, 32 nt, Homo Sapiens
cagcgggggaggaggagacggcggcggcgauc

SEQ ID NO: 289173 - RNA, 32 nt, Homo Sapiens
cgaccccgcccggcagcccccauccaucugug

SEQ ID NO: 289174 - RNA, 32 nt, Homo Sapiens
uguuuguguuuguguagcuagguaucuggcac

SEQ ID NO: 289175 - RNA, 32 nt, Homo Sapiens
gggguuaaaaauuaucugcuagggaugauagg

SEQ ID NO: 289176 - RNA, 32 nt, Homo Sapiens
auuuauccacuacuccgugaaggcuucucugu

SEQ ID NO: 289177 - RNA, 31 nt, Homo Sapiens
cccugagcucccugccaccaggcagcugaaa

SEQ ID NO: 289178 - RNA, 32 nt, Homo Sapiens
uggccugauuugcugccaccagcguccccucc

SEQ ID NO: 289179 - RNA, 32 nt, Homo Sapiens
guugaucugaagauuauggcagaauucaauau

SEQ ID NO: 289180 - RNA, 32 nt, Homo Sapiens
uucuggacucugcgccuuugccugcacagcca

SEQ ID NO: 289181 - RNA, 32 nt, Homo Sapiens
gaauauggauauauuucuuuaagucugcagau

SEQ ID NO: 289182 - RNA, 32 nt, Homo Sapiens
aaaacagugcuucagccaaauuccauauguaa

SEQ ID NO: 289183 - RNA, 32 nt, Homo Sapiens
acucuucaaccuccaugcaaccccaccgccca

SEQ ID NO: 289184 - RNA, 32 nt, Homo Sapiens
cuggcaccuggccccaggagcgggcccgugug

SEQ ID NO: 289185 - RNA, 32 nt, Homo Sapiens
cggcacugugccgccacccgcggccacaccgc

SEQ ID NO: 289186 - RNA, 32 nt, Homo Sapiens
uguugaucacuguuguuuuuugaagugccaau

SEQ ID NO: 289187 - RNA, 32 nt, Homo Sapiens
gagugauggcggcauggcggugcggcggcggc

SEQ ID NO: 289188 - RNA, 32 nt, Homo Sapiens
uuuguuuauaauguuaucggcucuauucucua

SEQ ID NO: 289189 - RNA, 32 nt, Homo Sapiens
agaaaugaggccagcuguguguugugcccaaa

SEQ ID NO: 289190 - RNA, 32 nt, Homo Sapiens
ccgggggucgccaguugcucgggguggucguc

SEQ ID NO: 289191 - RNA, 29 nt, Homo Sapiens
acuguuauacauuaaaagaaauuaaaagc

SEQ ID NO: 289192 - RNA, 32 nt, Homo Sapiens
aacuagccaggcgcgguggugcaugccuguaa

SEQ ID NO: 289193 - RNA, 32 nt, Homo Sapiens
acuagacuuagcucaucuaucuguguauucgu

SEQ ID NO: 289194 - RNA, 32 nt, Homo Sapiens
gaagauuaguauuagaggauacguguuggaaa

SEQ ID NO: 289195 - RNA, 32 nt, Homo Sapiens
uaagccuuucaacagcagcaucaaccuacgug

SEQ ID NO: 289196 - RNA, 32 nt, Homo Sapiens
uguuugugggcaauauuuuuuauugucucuug

SEQ ID NO: 289197 - RNA, 32 nt, Homo Sapiens
uccagcuccgcucugcgccgcugcugccaucg

SEQ ID NO: 289198 - RNA, 32 nt, Homo Sapiens
ugagacgugaagccagcuggacuuccuggguu

SEQ ID NO: 289199 - RNA, 32 nt, Homo Sapiens
uaaugcuguuaugaacauguguguacaaguau

SEQ ID NO: 289200 - RNA, 32 nt, Homo Sapiens
cucuccuuaaauauuucuuugcauaugugggc

SEQ ID NO: 289201 - RNA, 32 nt, Homo Sapiens
cgagccuggccuggcucuggcccgguccuaag

SEQ ID NO: 289202 - RNA, 32 nt, Homo Sapiens
aaaagaaguggaaaugaaggggugguaucacg

SEQ ID NO: 289203 - RNA, 32 nt, Homo Sapiens
gauucgacagcagugacagaucagugcauuuc

SEQ ID NO: 289204 - RNA, 32 nt, Homo Sapiens
acaggggucucccucugucacccaggcuggag

SEQ ID NO: 289205 - RNA, 32 nt, Homo Sapiens
aacagugacaaggaagcagagaaagacgggaa

SEQ ID NO: 289206 - RNA, 32 nt, Homo Sapiens
aauugcaaucaggcucaaaaccagagaccagg

SEQ ID NO: 289207 - RNA, 32 nt, Homo Sapiens
uauauucugcacgguaagaauuccuuuuacag

SEQ ID NO: 289208 - RNA, 32 nt, Homo Sapiens
uuccuucccacccccaguccuguccuaucacu

SEQ ID NO: 289209 - RNA, 32 nt, Homo Sapiens
acuucaucuagucucuuaauuuuuuaacacua

SEQ ID NO: 289210 - RNA, 32 nt, Homo Sapiens
ucuucucaagaaaaauaccuauguuaacucac

SEQ ID NO: 289211 - RNA, 32 nt, Homo Sapiens
uuucucuucuaaagguagucuuucccaacuga

SEQ ID NO: 289212 - RNA, 32 nt, Homo Sapiens
caaaugcuuaaugggaaauagaauauguauau

SEQ ID NO: 289213 - RNA, 32 nt, Homo Sapiens
ugcguuauccauccuauauaaaagaaagauaa

SEQ ID NO: 289214 - RNA, 32 nt, Homo Sapiens
uuguuuuauuuuuccuguuaagguuuauaacc

SEQ ID NO: 289215 - RNA, 32 nt, Homo Sapiens
aaaaacugguuauuuuaccaaggcuuuuacug

SEQ ID NO: 289216 - RNA, 32 nt, Homo Sapiens
gcccagccugacguggauguggcugcccagga

SEQ ID NO: 289217 - RNA, 32 nt, Homo Sapiens
cuucuggugggaagggaggcgggaggugggcu

SEQ ID NO: 289218 - RNA, 32 nt, Homo Sapiens
aacugccauaagaaaacaccauaggcuggugg

SEQ ID NO: 289219 - RNA, 32 nt, Homo Sapiens
cuugaagaucauuuagucaaagaaauugcuga

SEQ ID NO: 289220 - RNA, 32 nt, Homo Sapiens
ggcggcuucccggcugaccacaguggcuugga

SEQ ID NO: 289221 - RNA, 32 nt, Homo Sapiens
cuggucugcagaaaggcagagaagaccugcuu

SEQ ID NO: 289222 - RNA, 32 nt, Homo Sapiens
cggcucucucgcuguacauucuguaaaggugu

SEQ ID NO: 289223 - RNA, 32 nt, Homo Sapiens
gaggcagcgacugguccagagacccagaugug

SEQ ID NO: 289224 - RNA, 32 nt, Homo Sapiens
gccugcagacugccuccguggagaaggcgcag

SEQ ID NO: 289225 - RNA, 32 nt, Homo Sapiens
gccagagcaccccccgacgugccacccagcug

SEQ ID NO: 289226 - RNA, 31 nt, Homo Sapiens
ccaggaucaauuguaucuugaguuaaaagaa

SEQ ID NO: 289227 - RNA, 32 nt, Homo Sapiens
cagugagcgagggccagggcggugggcgcgcg

SEQ ID NO: 289228 - RNA, 32 nt, Homo Sapiens
ucaacugccccuuuccucucccucagaauuug

SEQ ID NO: 289229 - RNA, 32 nt, Homo Sapiens
uaacuuuuuaaggucagaauucuuaucaaaca

SEQ ID NO: 289230 - RNA, 32 nt, Homo Sapiens
ccaagccuggaaacauagagucucacccuguu

SEQ ID NO: 289231 - RNA, 32 nt, Homo Sapiens
ccgcccgcgccccucgcgcccgccggggcccc

SEQ ID NO: 289232 - RNA, 32 nt, Homo Sapiens
uucuuuuaguggaaacaaaugguugauggauc

SEQ ID NO: 289233 - RNA, 32 nt, Homo Sapiens
cagaggcaugcuccuggcaucgagugggugga

SEQ ID NO: 289234 - RNA, 32 nt, Homo Sapiens
guccgccgagccggagcgcgacgaggccccgg

SEQ ID NO: 289235 - RNA, 32 nt, Homo Sapiens
ggggcuccauucuccucuguccacccacccac

SEQ ID NO: 289236 - RNA, 32 nt, Homo Sapiens
gcuuauaggucugauggcaccaaaaaagaucc

SEQ ID NO: 289237 - RNA, 32 nt, Homo Sapiens
gaucauccuaugaguucuaacaucauuucgcg

SEQ ID NO: 289238 - RNA, 32 nt, Homo Sapiens
uuuccucguuuccugcagacucauaacuaucc

SEQ ID NO: 289239 - RNA, 32 nt, Homo Sapiens
gcuacuggcugcguuccgggagacucggggca

SEQ ID NO: 289240 - RNA, 32 nt, Homo Sapiens
agcuacggagagcgaggagucgcgcaggcagg

SEQ ID NO: 289241 - RNA, 32 nt, Homo Sapiens
ggaggggaugggcggggcgcgcggccguuagc

SEQ ID NO: 289242 - RNA, 32 nt, Homo Sapiens
guuagugcauuacaugaaaugauuugcagggg

SEQ ID NO: 289243 - RNA, 32 nt, Homo Sapiens
ucacaaggagcuuuuccacaccugccaugcag

SEQ ID NO: 289244 - RNA, 32 nt, Homo Sapiens
uggccucaggacuuagccauacuagaccaguc

SEQ ID NO: 289245 - RNA, 32 nt, Homo Sapiens
gaucacuugaguucaggaguucgagaucagcc

SEQ ID NO: 289246 - RNA, 32 nt, Homo Sapiens
cuuuaucugaagaucuggaauggaacugacuu

SEQ ID NO: 289247 - RNA, 32 nt, Homo Sapiens
uccaugagguuucuucucuacugugccuucau

SEQ ID NO: 289248 - RNA, 32 nt, Homo Sapiens
ccagauauggaaacagaagacaaaauuguaag

SEQ ID NO: 289249 - RNA, 32 nt, Homo Sapiens
gcgucgggccuggcccgagcugucucuguggu

SEQ ID NO: 289250 - RNA, 32 nt, Homo Sapiens
aaaaucacauucaauuuucagaugaaggggaa

SEQ ID NO: 289251 - RNA, 32 nt, Homo Sapiens
ccgagcucaguggauguuugaacuugcuccag

SEQ ID NO: 289252 - RNA, 32 nt, Homo Sapiens
augcacauuuuuuuuucuucuuuuuccacccc

SEQ ID NO: 289253 - RNA, 32 nt, Homo Sapiens
acagcaacuccugaggaaagugcuauucuugu

SEQ ID NO: 289254 - RNA, 32 nt, Homo Sapiens
acccccuggcccggccgcggcgcgacgccgaa

SEQ ID NO: 289255 - RNA, 32 nt, Homo Sapiens
agaagccccagccccagaaccuggagacccau

SEQ ID NO: 289256 - RNA, 32 nt, Homo Sapiens
ugguuuaggaauugugauuauuauaaaacugc

SEQ ID NO: 289257 - RNA, 32 nt, Homo Sapiens
cguccgagggugggagucgggguguggcaggc

SEQ ID NO: 289258 - RNA, 32 nt, Homo Sapiens
cucgauacuguuaauuacaucuccauuagggc

SEQ ID NO: 289259 - RNA, 32 nt, Homo Sapiens
agaauccaaguuaacaggauccugacuaagau

SEQ ID NO: 289260 - RNA, 32 nt, Homo Sapiens
auaaacaccaacuucucgaagcgugccaggcu

SEQ ID NO: 289261 - RNA, 30 nt, Homo Sapiens
agcggaggcaggcgcagcauccucgcuggg

SEQ ID NO: 289262 - RNA, 32 nt, Homo Sapiens
uguaaauucucagaaaugaaaacugcuuauga

SEQ ID NO: 289263 - RNA, 32 nt, Homo Sapiens
cuguguugcuuaaauaucaaguauuguuuaua

SEQ ID NO: 289264 - RNA, 32 nt, Homo Sapiens
agcggcuguggcggcgacgcugggcgugaggu

SEQ ID NO: 289265 - RNA, 32 nt, Homo Sapiens
gcccucuggaagcucauaggguugugaggcaa

SEQ ID NO: 289266 - RNA, 32 nt, Homo Sapiens
uauguauacuuaaaaauaaaguaacuuuaugc

SEQ ID NO: 289267 - RNA, 32 nt, Homo Sapiens
cagcguuuguguauccaugugauucagaggcu

SEQ ID NO: 289268 - RNA, 32 nt, Homo Sapiens
gcuuagaaaaagaggugagaguagugguuuuc

SEQ ID NO: 289269 - RNA, 32 nt, Homo Sapiens
agagcaaaaauuaguaauaaaaauaagaaaua

SEQ ID NO: 289270 - RNA, 32 nt, Homo Sapiens
uuaccagauaguuauauuaaauuuauaucuua

SEQ ID NO: 289271 - RNA, 32 nt, Homo Sapiens
cggcugggccccagaccccagcuuccugcccu

SEQ ID NO: 289272 - RNA, 32 nt, Homo Sapiens
gauugagaaauacgaaaaauggcugguauagu

SEQ ID NO: 289273 - RNA, 32 nt, Homo Sapiens
ccaaauguacuucuuauucauuuuauggaaaa

SEQ ID NO: 289274 - RNA, 32 nt, Homo Sapiens
ggaguggcagucaaaacugaaauuauagcucu

SEQ ID NO: 289275 - RNA, 32 nt, Homo Sapiens
cacagcacaucccaccacucuccuuccagucc

SEQ ID NO: 289276 - RNA, 32 nt, Homo Sapiens
gccgccacggccaccgccuggaccuuugcccg

SEQ ID NO: 289277 - RNA, 32 nt, Homo Sapiens
caaucuuguguauuuagaaaaauguauuacuu

SEQ ID NO: 289278 - RNA, 32 nt, Homo Sapiens
cgagggaguccaggaggcucuccaaggagccu

SEQ ID NO: 289279 - RNA, 32 nt, Homo Sapiens
uucacaauguuaaaauguuaaauauuuggaua

SEQ ID NO: 289280 - RNA, 32 nt, Homo Sapiens
cuucuguugcucugggaccugcaggucccgga

SEQ ID NO: 289281 - RNA, 32 nt, Homo Sapiens
ggccgccgccccacgucccggucuguguccca

SEQ ID NO: 289282 - RNA, 32 nt, Homo Sapiens
cgagccggcgguggggcgcccgggagcuggcu

SEQ ID NO: 289283 - RNA, 32 nt, Homo Sapiens
ccaucaaagccucccccucccccaccccuuug

SEQ ID NO: 289284 - RNA, 32 nt, Homo Sapiens
ugugggcccugccugaucccuacugggaggau

SEQ ID NO: 289285 - RNA, 32 nt, Homo Sapiens
cguguguguuuggggcccgcgcggguugcgcg

SEQ ID NO: 289286 - RNA, 32 nt, Homo Sapiens
auuuccauuucccuucauguuuuguuucuuac

SEQ ID NO: 289287 - RNA, 32 nt, Homo Sapiens
cuaaaagagaaaguagaaaacuauucuaacaa

SEQ ID NO: 289288 - RNA, 32 nt, Homo Sapiens
gcagaguacagcaauuuuugguguuuauugga

SEQ ID NO: 289289 - RNA, 32 nt, Homo Sapiens
ggcucacaccuauaaucccagcccuuugggag

SEQ ID NO: 289290 - RNA, 32 nt, Homo Sapiens
caucaugucccaggaaguggcaucauaaaagg

SEQ ID NO: 289291 - RNA, 32 nt, Homo Sapiens
uugccugccccgaggggcgucugguaggcacc

SEQ ID NO: 289292 - RNA, 32 nt, Homo Sapiens
accugggccccggcccuugagguacucccuga

SEQ ID NO: 289293 - RNA, 32 nt, Homo Sapiens
auccagggguggcagcaauaagccugcuuuag

SEQ ID NO: 289294 - RNA, 32 nt, Homo Sapiens
acuaugaacaaaaacaaaugauagauauagug

SEQ ID NO: 289295 - RNA, 32 nt, Homo Sapiens
aggugugaguagagccugggggagaguggauc

SEQ ID NO: 289296 - RNA, 32 nt, Homo Sapiens
uguaaauacucaguuuuauacuguauguauau

SEQ ID NO: 289297 - RNA, 32 nt, Homo Sapiens
ggaagcugaugaagaggacgccgccagcgagu

SEQ ID NO: 289298 - RNA, 32 nt, Homo Sapiens
uauugaccaauguauuucaaacuuuuuugacu

SEQ ID NO: 289299 - RNA, 32 nt, Homo Sapiens
aggacggcucugcauuguccccucccauggcu

SEQ ID NO: 289300 - RNA, 32 nt, Homo Sapiens
gcaccaccuguuugcauaaacacacuuugcua

SEQ ID NO: 289301 - RNA, 32 nt, Homo Sapiens
uucaccuugacaagguacaauuuucaaggaca

SEQ ID NO: 289302 - RNA, 32 nt, Homo Sapiens
uguagcuggggucagauuaguucuauugggag

SEQ ID NO: 289303 - RNA, 27 nt, Homo Sapiens
cugcauuccuucuuaugugguccccuc

SEQ ID NO: 289304 - RNA, 32 nt, Homo Sapiens
ucaaucuaucuuucuuguuuuggguuguuuuc

SEQ ID NO: 289305 - RNA, 32 nt, Homo Sapiens
agucuacaaccuggccauccacaaaaccacgg

SEQ ID NO: 289306 - RNA, 32 nt, Homo Sapiens
ugguguggcccgucagcccgcguaccacagcg

SEQ ID NO: 289307 - RNA, 32 nt, Homo Sapiens
ccccuccccuccccuaccagucuucccggccc

SEQ ID NO: 289308 - RNA, 32 nt, Homo Sapiens
cacccucaauccuuauccuucccuaugugccc

SEQ ID NO: 289309 - RNA, 32 nt, Homo Sapiens
ucuugauaaaauuuaaaugggauuauaugaau

SEQ ID NO: 289310 - RNA, 32 nt, Homo Sapiens
caggggccaggaggaguaacagaaccaggucu

SEQ ID NO: 289311 - RNA, 32 nt, Homo Sapiens
ccacucaaggccacaucuggcccugccauagc

SEQ ID NO: 289312 - RNA, 32 nt, Homo Sapiens
gauuucaccacguuggccaggcuggucucgaa

SEQ ID NO: 289313 - RNA, 32 nt, Homo Sapiens
guuuggcuuccuuuccuucucuuuguauuuga

SEQ ID NO: 289314 - RNA, 32 nt, Homo Sapiens
cggacgcggccgccgccgucgccgccaucugu

SEQ ID NO: 289315 - RNA, 32 nt, Homo Sapiens
gucuacuaaaauugcuacuuuuucacuuugga

SEQ ID NO: 289316 - RNA, 32 nt, Homo Sapiens
uuagguaugugauuagaaaacauacuugucag

SEQ ID NO: 289317 - RNA, 32 nt, Homo Sapiens
gacuccccaucccgggcacacccugucuuccc

SEQ ID NO: 289318 - RNA, 32 nt, Homo Sapiens
caaucugcauugauuacaauuuggauauuucc

SEQ ID NO: 289319 - RNA, 32 nt, Homo Sapiens
uggggaagcaguuuggcccagcccaaggagac

SEQ ID NO: 289320 - RNA, 32 nt, Homo Sapiens
cuucaaauuguaaaauguaaagauugcucuuu

SEQ ID NO: 289321 - RNA, 32 nt, Homo Sapiens
uuuuugccaaaauaucauguucaauuucagua

SEQ ID NO: 289322 - RNA, 32 nt, Homo Sapiens
ugauuauaauugaacauugauuuuaaaaaagc

SEQ ID NO: 289323 - RNA, 32 nt, Homo Sapiens
cucucaccucaagguagcuccucccucccucc

SEQ ID NO: 289324 - RNA, 32 nt, Homo Sapiens
ucuacuccagcaugcaguuucaagucaaguuc

SEQ ID NO: 289325 - RNA, 32 nt, Homo Sapiens
cguccgccuccguccccuuccauguuccuccu

SEQ ID NO: 289326 - RNA, 27 nt, Homo Sapiens
agggucuguuaauucuuauauuuuucc

SEQ ID NO: 289327 - RNA, 32 nt, Homo Sapiens
gguggaccgcuggccugggaugagagggccca

SEQ ID NO: 289328 - RNA, 32 nt, Homo Sapiens
cacucugcuccagccaagguggugagggcagc

SEQ ID NO: 289329 - RNA, 32 nt, Homo Sapiens
gggacaguaggguuggugggaguugcgaugau

SEQ ID NO: 289330 - RNA, 32 nt, Homo Sapiens
ccgaaucacgggcuccuguuucccgcagggug

SEQ ID NO: 289331 - RNA, 32 nt, Homo Sapiens
ucuccagggucuuuuucuacuuugcuaucuca

SEQ ID NO: 289332 - RNA, 32 nt, Homo Sapiens
ccauuugcccccagccuccagcuggcuccuga

SEQ ID NO: 289333 - RNA, 32 nt, Homo Sapiens
uaccacuuuccacaguagccccagaucaccag

SEQ ID NO: 289334 - RNA, 32 nt, Homo Sapiens
ccccgccgccagcgcacccccggacgcuaugg

SEQ ID NO: 289335 - RNA, 32 nt, Homo Sapiens
gaaauuuuccucuggaacuaucaggaaggacu

SEQ ID NO: 289336 - RNA, 32 nt, Homo Sapiens
uuggagccagcuggccugcugcucuccaguca

SEQ ID NO: 289337 - RNA, 32 nt, Homo Sapiens
ccuauacuugacaucccgcagaugagaccaaa

SEQ ID NO: 289338 - RNA, 32 nt, Homo Sapiens
uggccagauguggugccuggagcgacuccgcu

SEQ ID NO: 289339 - RNA, 32 nt, Homo Sapiens
cauucuacaaaucagcuggaugccaacuuaaa

SEQ ID NO: 289340 - RNA, 32 nt, Homo Sapiens
gacgugauggauggaauugaaguuaaaaaccc

SEQ ID NO: 289341 - RNA, 32 nt, Homo Sapiens
guuggcauuuggggaaggcuugaguuagaaau

SEQ ID NO: 289342 - RNA, 32 nt, Homo Sapiens
ccaaaucugaaucgaauuacucuuuugccucc

SEQ ID NO: 289343 - RNA, 32 nt, Homo Sapiens
agcuguaacacucaccacaaaggucugcagcu

SEQ ID NO: 289344 - RNA, 32 nt, Homo Sapiens
ucuguacuggaaaggcuguggccauguccgcu

SEQ ID NO: 289345 - RNA, 32 nt, Homo Sapiens
uguacagggagagaagacauauugacucugac

SEQ ID NO: 289346 - RNA, 32 nt, Homo Sapiens
gggacagagucuuuuuuuuuuaauguggaaga

SEQ ID NO: 289347 - RNA, 32 nt, Homo Sapiens
ucccggcagcucagcccucugccugcccagga

SEQ ID NO: 289348 - RNA, 32 nt, Homo Sapiens
aucauacauacaccacauagauaguuugccaa

SEQ ID NO: 289349 - RNA, 32 nt, Homo Sapiens
ccagcuguucuuccugcacaggccaucgagcc

SEQ ID NO: 289350 - RNA, 32 nt, Homo Sapiens
acgaauaagacagcgcggaaaagcagauucuc

SEQ ID NO: 289351 - RNA, 32 nt, Homo Sapiens
aguuggucucuggaccucuccuuacuuauuaa

SEQ ID NO: 289352 - RNA, 32 nt, Homo Sapiens
uaaacacaugaaauaaguauuuuucacugaua

SEQ ID NO: 289353 - RNA, 32 nt, Homo Sapiens
uggcugaagccuauuccacagcuccuuguuuu

SEQ ID NO: 289354 - RNA, 32 nt, Homo Sapiens
gacauuccugcagcugaaucacagcucuugcc

SEQ ID NO: 289355 - RNA, 32 nt, Homo Sapiens
aagcgcgcucugcggcgcgguccgcuguggag

SEQ ID NO: 289356 - RNA, 32 nt, Homo Sapiens
ucuguauguucagaauaauuucacugccuuaa

SEQ ID NO: 289357 - RNA, 32 nt, Homo Sapiens
ucccagaacaaaaacugucuggcugcuccuga

SEQ ID NO: 289358 - RNA, 32 nt, Homo Sapiens
acaaagaggguggggaacaugggggcuaugcu

SEQ ID NO: 289359 - RNA, 32 nt, Homo Sapiens
aguccugcuuuuaggcaguuaagggaucucag

SEQ ID NO: 289360 - RNA, 32 nt, Homo Sapiens
uuugguagucuucaaccagggauuguuucugu

SEQ ID NO: 289361 - RNA, 32 nt, Homo Sapiens
cuuuccccauuucucucaccacuucuuugcca

SEQ ID NO: 289362 - RNA, 32 nt, Homo Sapiens
uuaccuugauguagaaucaugguggaaaaagu

SEQ ID NO: 289363 - RNA, 32 nt, Homo Sapiens
auaugaccuuuaauuucuuuuuuauuuuaaau

SEQ ID NO: 289364 - RNA, 32 nt, Homo Sapiens
guauacauugugccuuuaagaauggggaauua

SEQ ID NO: 289365 - RNA, 32 nt, Homo Sapiens
ccugugacgguugcuguuaccugguauuucca

SEQ ID NO: 289366 - RNA, 32 nt, Homo Sapiens
cguucauguuuccccccuuuucucccuucagc

SEQ ID NO: 289367 - RNA, 32 nt, Homo Sapiens
aauuuccugggcuguuugugaggagagaucga

SEQ ID NO: 289368 - RNA, 32 nt, Homo Sapiens
aaacucacuguccaauaaagagccaaagaaag

SEQ ID NO: 289369 - RNA, 32 nt, Homo Sapiens
aauggggaagggggugugccaggccugaacug

SEQ ID NO: 289370 - RNA, 32 nt, Homo Sapiens
ugaguuuucgccucuguccugucccccgaacu

SEQ ID NO: 289371 - RNA, 32 nt, Homo Sapiens
ucccauugcucacaaaggucuuguuuuugaac

SEQ ID NO: 289372 - RNA, 32 nt, Homo Sapiens
cauacuguuuuugucauuggauaucaccuggc

SEQ ID NO: 289373 - RNA, 32 nt, Homo Sapiens
cuccuaggauguguguucauggcauuauagcc

SEQ ID NO: 289374 - RNA, 32 nt, Homo Sapiens
ccaagagcaggccccaggggucugugucacau

SEQ ID NO: 289375 - RNA, 32 nt, Homo Sapiens
aaggugcaaaauaccauuagaaaauacuauuu

SEQ ID NO: 289376 - RNA, 32 nt, Homo Sapiens
aaauguacagccagcgguuuggcaccguacag

SEQ ID NO: 289377 - RNA, 30 nt, Homo Sapiens
cgagaaggcaggcagucuuuggguucuguu

SEQ ID NO: 289378 - RNA, 32 nt, Homo Sapiens
cccuaucccuucuccuuuucguuuguggccuu

SEQ ID NO: 289379 - RNA, 32 nt, Homo Sapiens
ccaccucggaagcauuuagagauguaaacuuu

SEQ ID NO: 289380 - RNA, 32 nt, Homo Sapiens
aacaaaaauagaauaucagugauucaaaaccc

SEQ ID NO: 289381 - RNA, 32 nt, Homo Sapiens
ucccagacugccuugagaggcucuacuggccu

SEQ ID NO: 289382 - RNA, 32 nt, Homo Sapiens
uuggacaucaagguugcagagaugaacaaugc

SEQ ID NO: 289383 - RNA, 32 nt, Homo Sapiens
aaacgcagggaguguguggccgggccaaggac

SEQ ID NO: 289384 - RNA, 32 nt, Homo Sapiens
caguaagcauuaggaagugaauaugauauaca

SEQ ID NO: 289385 - RNA, 32 nt, Homo Sapiens
ggagcgccauggcccagccgccgcccgacgug

SEQ ID NO: 289386 - RNA, 32 nt, Homo Sapiens
gaaagagagagugugugggucuauguaaaugc

SEQ ID NO: 289387 - RNA, 32 nt, Homo Sapiens
gcugggaggagcuucuauccugcucuguggaa

SEQ ID NO: 289388 - RNA, 32 nt, Homo Sapiens
ugcuugguugaaaaaauauuucugaauaaaaa

SEQ ID NO: 289389 - RNA, 32 nt, Homo Sapiens
uuuucuuuaugauuauuuuagaaaaaaaauuu

SEQ ID NO: 289390 - RNA, 32 nt, Homo Sapiens
cagcuacuugggaggcagcggcuggagaauug

SEQ ID NO: 289391 - RNA, 32 nt, Homo Sapiens
caggcguguucgccgcggaggcgccguuaucc

SEQ ID NO: 289392 - RNA, 32 nt, Homo Sapiens
caguguaucaggucagggacuuggacaggagu

SEQ ID NO: 289393 - RNA, 32 nt, Homo Sapiens
auaauuaaaaaauuauuucuguagagaugaag

SEQ ID NO: 289394 - RNA, 32 nt, Homo Sapiens
acccaauaguccuaggcccccauccucgcaug

SEQ ID NO: 289395 - RNA, 32 nt, Homo Sapiens
agugucucauuucaccucagagaaaaggauac

SEQ ID NO: 289396 - RNA, 32 nt, Homo Sapiens
uucccuaaccuccucaguguuuucuaaccccc

SEQ ID NO: 289397 - RNA, 32 nt, Homo Sapiens
ggagaagaaaaagaaguaccacucuggccugg

SEQ ID NO: 289398 - RNA, 32 nt, Homo Sapiens
ggggaggaguggagauggcggcggcggcggcu

SEQ ID NO: 289399 - RNA, 32 nt, Homo Sapiens
agcucuggccccagcugggcccuccugcugcu

SEQ ID NO: 289400 - RNA, 32 nt, Homo Sapiens
agcacagacauuaccaguagucuugucaaaua

SEQ ID NO: 289401 - RNA, 32 nt, Homo Sapiens
gaagaaaugcaaaagaaguggcauaggagugu

SEQ ID NO: 289402 - RNA, 32 nt, Homo Sapiens
gaaaguacacugggacgguuugcgauggaauu

SEQ ID NO: 289403 - RNA, 32 nt, Homo Sapiens
gcaggccucugcuccuugucuuucuuaccugu

SEQ ID NO: 289404 - RNA, 32 nt, Homo Sapiens
uuuuucuuucccugucuucuuucagauuaucu

SEQ ID NO: 289405 - RNA, 32 nt, Homo Sapiens
uucuugcagaaucugaaugugucuccugagac

SEQ ID NO: 289406 - RNA, 32 nt, Homo Sapiens
ggacucagcgccuucggguggcggcgguaagc

SEQ ID NO: 289407 - RNA, 32 nt, Homo Sapiens
cccacccuuguacacaaauggaggugcucuua

SEQ ID NO: 289408 - RNA, 32 nt, Homo Sapiens
ucgagguggccuccuccucccaugugagggaa

SEQ ID NO: 289409 - RNA, 32 nt, Homo Sapiens
aagugcugacuuuguuuucucauucaguuuug

SEQ ID NO: 289410 - RNA, 32 nt, Homo Sapiens
ugggucccacuccugccccaccccacccuugu

SEQ ID NO: 289411 - RNA, 32 nt, Homo Sapiens
aggucccggggcuggggugucgcagagcugug

SEQ ID NO: 289412 - RNA, 32 nt, Homo Sapiens
cuucuguguauauaguuaguuuuauaacccug

SEQ ID NO: 289413 - RNA, 32 nt, Homo Sapiens
ucagaaaaucaauaaacugguucuguauacag

SEQ ID NO: 289414 - RNA, 32 nt, Homo Sapiens
agcucccacagcuaacauggcggcgcccugug

SEQ ID NO: 289415 - RNA, 32 nt, Homo Sapiens
aaaauuuuuuaacuuuugugucaaauaggagu

SEQ ID NO: 289416 - RNA, 32 nt, Homo Sapiens
ucagauccuuuccaacaauauagaggcaucau

SEQ ID NO: 289417 - RNA, 32 nt, Homo Sapiens
uauaaacccacuuuuaaaaauaacagguccaa

SEQ ID NO: 289418 - RNA, 32 nt, Homo Sapiens
uuuuauauauggaguucucuccucuuuauauc

SEQ ID NO: 289419 - RNA, 32 nt, Homo Sapiens
aacuggaagcuuuugaauuuuuucauauucua

SEQ ID NO: 289420 - RNA, 32 nt, Homo Sapiens
cgcucugacugcuccggcugcccgcccgcgcg

SEQ ID NO: 289421 - RNA, 32 nt, Homo Sapiens
guaugagaaugaugauccaucuucaaagucca

SEQ ID NO: 289422 - RNA, 32 nt, Homo Sapiens
cgcgcgugugcauuuuaaaagucauaaauuaa

SEQ ID NO: 289423 - RNA, 32 nt, Homo Sapiens
cacugaccugggcauacgcagcugcaggaucc

SEQ ID NO: 289424 - RNA, 32 nt, Homo Sapiens
cacugcacuccagccugggcaacagugagacu

SEQ ID NO: 289425 - RNA, 32 nt, Homo Sapiens
aacucguccccucuuccacaccuucccagcau

SEQ ID NO: 289426 - RNA, 32 nt, Homo Sapiens
acaugucccuacaccccuccccugcccuagag

SEQ ID NO: 289427 - RNA, 32 nt, Homo Sapiens
ucuuuuuguaaaccuccuuuucaaugucaaag

SEQ ID NO: 289428 - RNA, 32 nt, Homo Sapiens
uccauagagaaaaccaggagacacucccccca

SEQ ID NO: 289429 - RNA, 32 nt, Homo Sapiens
aucacaaagacauguauagaguaaaucuuuuc

SEQ ID NO: 289430 - RNA, 32 nt, Homo Sapiens
accgcuguguugggggcagcuuggugucaggu

SEQ ID NO: 289431 - RNA, 32 nt, Homo Sapiens
uuuaaguaacuuuaaauuaugccguuacuuuu

SEQ ID NO: 289432 - RNA, 32 nt, Homo Sapiens
uuuccccccgucccacgaggccaccugggcca

SEQ ID NO: 289433 - RNA, 32 nt, Homo Sapiens
acauaugaguguggaagccggaggguguuuau

SEQ ID NO: 289434 - RNA, 32 nt, Homo Sapiens
guuaaccuuguacugugcuuucuugaugcgua

SEQ ID NO: 289435 - RNA, 32 nt, Homo Sapiens
cucuggcaaggcuuucuugagccccgccccuu

SEQ ID NO: 289436 - RNA, 32 nt, Homo Sapiens
uucuuggaacugagacccccuagccgcagccc

SEQ ID NO: 289437 - RNA, 32 nt, Homo Sapiens
ccauccuagggaucuugucaggguuccuuacu

SEQ ID NO: 289438 - RNA, 32 nt, Homo Sapiens
uguuuuucauaauaaacuugugaacuaagaac

SEQ ID NO: 289439 - RNA, 32 nt, Homo Sapiens
ucaaaccuguacgcuuuuccugccucccaagg

SEQ ID NO: 289440 - RNA, 32 nt, Homo Sapiens
cgcgagcuggccucugagccccggccucggac

SEQ ID NO: 289441 - RNA, 32 nt, Homo Sapiens
auuaauuuuuucuguuugacuggaagggguuu

SEQ ID NO: 289442 - RNA, 32 nt, Homo Sapiens
gcuaccacaggacccaggauuacaacuccugg

SEQ ID NO: 289443 - RNA, 32 nt, Homo Sapiens
ucguaggccggaccaugggaaccccaaagcca

SEQ ID NO: 289444 - RNA, 32 nt, Homo Sapiens
auuaagaaaggaaguauaggccaggcacagug

SEQ ID NO: 289445 - RNA, 32 nt, Homo Sapiens
aaccuggcuaacacagugaaaccccgucucua

SEQ ID NO: 289446 - RNA, 32 nt, Homo Sapiens
acuaauacaggugccauguacugcacucauau

SEQ ID NO: 289447 - RNA, 32 nt, Homo Sapiens
aaacggcucucgcagcccgaggagggucaggc

SEQ ID NO: 289448 - RNA, 30 nt, Homo Sapiens
acaccugucugugcagaugcuuugcccagg

SEQ ID NO: 289449 - RNA, 32 nt, Homo Sapiens
acugaacuggauauuucuuaacuuuuggagua

SEQ ID NO: 289450 - RNA, 32 nt, Homo Sapiens
gaucaaguucccugcccggugccugggcuguu

SEQ ID NO: 289451 - RNA, 30 nt, Homo Sapiens
uuuuuuacuggggugggggaaucuaugcaa

SEQ ID NO: 289452 - RNA, 32 nt, Homo Sapiens
ccccgccgcucccgggggccgugacggagaug

SEQ ID NO: 289453 - RNA, 32 nt, Homo Sapiens
cuccucuguaaaauaaugucuacuucacaagg

SEQ ID NO: 289454 - RNA, 32 nt, Homo Sapiens
ccuccugugccaccggagggccugcaggaagc

SEQ ID NO: 289455 - RNA, 32 nt, Homo Sapiens
gccacaggagcuaccgaggcggcggccggggg

SEQ ID NO: 289456 - RNA, 32 nt, Homo Sapiens
gucuaaacuggaaaaguccuguaaucuuaugu

SEQ ID NO: 289457 - RNA, 32 nt, Homo Sapiens
guggugagcacaucugggaggcuggucucccu

SEQ ID NO: 289458 - RNA, 32 nt, Homo Sapiens
augcagauuggaguaagaaguagaucaaauuu

SEQ ID NO: 289459 - RNA, 32 nt, Homo Sapiens
gugauaauuuguauuucuuuuuucuugcaauu

SEQ ID NO: 289460 - RNA, 32 nt, Homo Sapiens
auucauguggaggucagaguggaagcaggugu

SEQ ID NO: 289461 - RNA, 32 nt, Homo Sapiens
uuuuagcagaaucaugaagaccuuuuuucucc

SEQ ID NO: 289462 - RNA, 32 nt, Homo Sapiens
aacagacucauggacauuaaacaucaucagaa

SEQ ID NO: 289463 - RNA, 32 nt, Homo Sapiens
cucaccacaauuuguccacccugcagcugccg

SEQ ID NO: 289464 - RNA, 32 nt, Homo Sapiens
gaguuucauguuccaacaagugccaaugguug

SEQ ID NO: 289465 - RNA, 32 nt, Homo Sapiens
ccuuacuguugagacugcaauauccuagaccc

SEQ ID NO: 289466 - RNA, 32 nt, Homo Sapiens
uuguuguaaaauuguaauaacguuggauugaa

SEQ ID NO: 289467 - RNA, 32 nt, Homo Sapiens
agcaaaucgaguccauauacuacauuccaccc

SEQ ID NO: 289468 - RNA, 32 nt, Homo Sapiens
ccuccucuuccacugucguccuuccucagagg

SEQ ID NO: 289469 - RNA, 32 nt, Homo Sapiens
uuaucguuugauaaagauuaaggacauguucu

SEQ ID NO: 289470 - RNA, 32 nt, Homo Sapiens
agcaacuugagugaucccaaaccaaacuaaca

SEQ ID NO: 289471 - RNA, 32 nt, Homo Sapiens
acagcacuuaaguucuuaaugcacuuugcaca

SEQ ID NO: 289472 - RNA, 27 nt, Homo Sapiens
gugccacauuuuuucagcccucauagg

SEQ ID NO: 289473 - RNA, 32 nt, Homo Sapiens
gccucggaucagcugagccuucugagcuggcc

SEQ ID NO: 289474 - RNA, 32 nt, Homo Sapiens
gucggccuccuucgucgcccccgcccccgcga

SEQ ID NO: 289475 - RNA, 32 nt, Homo Sapiens
gccauggagcagcauuacccuaauggauugca

SEQ ID NO: 289476 - RNA, 32 nt, Homo Sapiens
aaaucuaugcuuuguggcagcucuacggugcu

SEQ ID NO: 289477 - RNA, 32 nt, Homo Sapiens
cucugagguuuucccaacaguaccucaagaaa

SEQ ID NO: 289478 - RNA, 32 nt, Homo Sapiens
gcccagacagagcugacucuggucccagugac

SEQ ID NO: 289479 - RNA, 32 nt, Homo Sapiens
ggagaggcgcacccgggcggccagcugggcuc

SEQ ID NO: 289480 - RNA, 32 nt, Homo Sapiens
uggucuccagcauaggagggauuucacucuuc

SEQ ID NO: 289481 - RNA, 32 nt, Homo Sapiens
gggaauaaguuguggaaagccacaaaaggccu

SEQ ID NO: 289482 - RNA, 32 nt, Homo Sapiens
ucuucaggagacucaggaauggagcgguacag

SEQ ID NO: 289483 - RNA, 32 nt, Homo Sapiens
cugacaaaaugaaaaugacuuaauuacccaag

SEQ ID NO: 289484 - RNA, 32 nt, Homo Sapiens
aagugagacuccaucucaaaaaaaaaaaaaaa

SEQ ID NO: 289485 - RNA, 32 nt, Homo Sapiens
ugaugaugaugaugaugauggcagcuuuauau

SEQ ID NO: 289486 - RNA, 32 nt, Homo Sapiens
ugcucucaaggaucuaguggauuaguaaguua

SEQ ID NO: 289487 - RNA, 32 nt, Homo Sapiens
aauaaacuaucuaauuuucauaaaaaaaaaaa

SEQ ID NO: 289488 - RNA, 32 nt, Homo Sapiens
uagacuaaggaauaaacuucagauuugugauu

SEQ ID NO: 289489 - RNA, 32 nt, Homo Sapiens
guagacccuuuagcucccuuccaauuaaagga

SEQ ID NO: 289490 - RNA, 32 nt, Homo Sapiens
acgggguugacacaaugcugcacgugucuggu

SEQ ID NO: 289491 - RNA, 32 nt, Homo Sapiens
aaugugagccaaugugaguccugcccagcccc

SEQ ID NO: 289492 - RNA, 32 nt, Homo Sapiens
cucaaaagaacaaugagaacauuugcuuugcu

SEQ ID NO: 289493 - RNA, 32 nt, Homo Sapiens
gagccgcgacaguacaugcugcugcugcccga

SEQ ID NO: 289494 - RNA, 32 nt, Homo Sapiens
ugcaggauuuacuuaauaaaaauacacgcuau

SEQ ID NO: 289495 - RNA, 32 nt, Homo Sapiens
gguaagaggaacacuagaagcucagcaugacu

SEQ ID NO: 289496 - RNA, 32 nt, Homo Sapiens
ucauguaguuucugggucuucugggagccuac

SEQ ID NO: 289497 - RNA, 32 nt, Homo Sapiens
ggccagcagagacuuagggauuuuaaauuggc

SEQ ID NO: 289498 - RNA, 30 nt, Homo Sapiens
ggcagcucuuugcucacccaucuccccagu

SEQ ID NO: 289499 - RNA, 32 nt, Homo Sapiens
ucuaucugcaccuuuaacaugguguuauugca

SEQ ID NO: 289500 - RNA, 32 nt, Homo Sapiens
acgccccacuguccccucacagcccucagcuc

SEQ ID NO: 289501 - RNA, 32 nt, Homo Sapiens
ugcacccucuuuacuucaguacaaugccacca

SEQ ID NO: 289502 - RNA, 32 nt, Homo Sapiens
cuggggcgcuggcuugcgagcugggccaggga

SEQ ID NO: 289503 - RNA, 32 nt, Homo Sapiens
ugguaucguaauguaaagcuuggaugauguuc

SEQ ID NO: 289504 - RNA, 32 nt, Homo Sapiens
auaauucuuacaugccaggcucauguccaguc

SEQ ID NO: 289505 - RNA, 32 nt, Homo Sapiens
aauaaagugcaaacagaagugcauccugauua

SEQ ID NO: 289506 - RNA, 32 nt, Homo Sapiens
gccugguuuucuaaugcugucaucucaguucg

SEQ ID NO: 289507 - RNA, 32 nt, Homo Sapiens
uguuuugggaucucaacuccaucaccuuuguu

SEQ ID NO: 289508 - RNA, 32 nt, Homo Sapiens
uaugugcuagaggagggcacaaacauccgcuc

SEQ ID NO: 289509 - RNA, 32 nt, Homo Sapiens
ggugucuguccgugcgcacgcagugcggcgug

SEQ ID NO: 289510 - RNA, 32 nt, Homo Sapiens
gacgggguuucguccuguuacccaggcugguu

SEQ ID NO: 289511 - RNA, 32 nt, Homo Sapiens
auuuuacuccuuucuucaacaacuauucacug

SEQ ID NO: 289512 - RNA, 32 nt, Homo Sapiens
cgcguuugaggguggagggguccuguaaggug

SEQ ID NO: 289513 - RNA, 32 nt, Homo Sapiens
ccaucacacccggcugguuuuuuguguuuuua

SEQ ID NO: 289514 - RNA, 32 nt, Homo Sapiens
uucccuugaagaagaucuacgauguggagcag

SEQ ID NO: 289515 - RNA, 32 nt, Homo Sapiens
cuaagcuuaauuuuuaaaaacaaaaucuguag

SEQ ID NO: 289516 - RNA, 32 nt, Homo Sapiens
ugcacagcagccgggagcugcccucaaggccu

SEQ ID NO: 289517 - RNA, 32 nt, Homo Sapiens
ggauuuuaagcaguccgaaauaauagcaauuc

SEQ ID NO: 289518 - RNA, 30 nt, Homo Sapiens
ggccugggaggugcacaugaaacagucccu

SEQ ID NO: 289519 - RNA, 32 nt, Homo Sapiens
ugcauuuacccauucguuauauaaauauguua

SEQ ID NO: 289520 - RNA, 32 nt, Homo Sapiens
agagcggaccagggcugcugccagcaccugcc

SEQ ID NO: 289521 - RNA, 32 nt, Homo Sapiens
gggaggccaaggcaggcagaccacgaggucag

SEQ ID NO: 289522 - RNA, 32 nt, Homo Sapiens
gggugaggggagggccucugucugcaacaucc

SEQ ID NO: 289523 - RNA, 32 nt, Homo Sapiens
uggagcuucgggauggaaagugcuaugugucc

SEQ ID NO: 289524 - RNA, 32 nt, Homo Sapiens
auuagaauauaaauuuuaagugaguuugucuc

SEQ ID NO: 289525 - RNA, 32 nt, Homo Sapiens
uagaggucacagagaugacaaaaggaaaaaug

SEQ ID NO: 289526 - RNA, 32 nt, Homo Sapiens
agagaugggggcuugaacacggggcuuccuua

SEQ ID NO: 289527 - RNA, 32 nt, Homo Sapiens
caugugaaucugggugggauaauggacucagc

SEQ ID NO: 289528 - RNA, 32 nt, Homo Sapiens
cauugcacuccagccuggccuauaagaguaaa

SEQ ID NO: 289529 - RNA, 32 nt, Homo Sapiens
aggggaaggugauuggagccaccugggauuau

SEQ ID NO: 289530 - RNA, 32 nt, Homo Sapiens
ggaggagagacgggcccugcucacagacuaga

SEQ ID NO: 289531 - RNA, 32 nt, Homo Sapiens
guauguuuggauuuuuucucuuuguagguaua

SEQ ID NO: 289532 - RNA, 32 nt, Homo Sapiens
acauagagcuagagucauauuaucauacuuau

SEQ ID NO: 289533 - RNA, 32 nt, Homo Sapiens
aauccucgaggugcuuccuggcaggagagcag

SEQ ID NO: 289534 - RNA, 32 nt, Homo Sapiens
cuuggugauacaauggugagacuuguaaugag

SEQ ID NO: 289535 - RNA, 32 nt, Homo Sapiens
uaucacguccucuccugucacccauuuugaag

SEQ ID NO: 289536 - RNA, 32 nt, Homo Sapiens
agaggggcaaaguggcaggaaccucuuaaagg

SEQ ID NO: 289537 - RNA, 32 nt, Homo Sapiens
ugucaggaaugggcaagucuacuuccugccau

SEQ ID NO: 289538 - RNA, 32 nt, Homo Sapiens
gucuuccucggucugagagaaaagcagcccac

SEQ ID NO: 289539 - RNA, 32 nt, Homo Sapiens
ggacugugccccacagggagaucccgaagagc

SEQ ID NO: 289540 - RNA, 32 nt, Homo Sapiens
aguacugugaggggugauuuugaaagacaugg

SEQ ID NO: 289541 - RNA, 32 nt, Homo Sapiens
gcggaggcgccguuaucccgggcccgccggcc

SEQ ID NO: 289542 - RNA, 32 nt, Homo Sapiens
gggcugcaaacauggcgggugcgguccaauug

SEQ ID NO: 289543 - RNA, 32 nt, Homo Sapiens
gcauaccauuuuccuuucauggaaggguacag

SEQ ID NO: 289544 - RNA, 32 nt, Homo Sapiens
gggguuucuucauauuccugcuguuggaagca

SEQ ID NO: 289545 - RNA, 32 nt, Homo Sapiens
aaacaucaaugaguaggcauuuuauagcuuua

SEQ ID NO: 289546 - RNA, 32 nt, Homo Sapiens
cguuucccacccaaaagcauagggagggaagg

SEQ ID NO: 289547 - RNA, 32 nt, Homo Sapiens
cuuagucuuccaagcaaucugcuuaaggguuc

SEQ ID NO: 289548 - RNA, 32 nt, Homo Sapiens
cggacccgcaugcugacagcgggacuggcaac

SEQ ID NO: 289549 - RNA, 32 nt, Homo Sapiens
accugcuggaccccaaagagaccgccaucaug

SEQ ID NO: 289550 - RNA, 32 nt, Homo Sapiens
guugucuaauggcaugaaucuaccccaaaugu

SEQ ID NO: 289551 - RNA, 32 nt, Homo Sapiens
acuguuugguugaaaaccuugcucauuuuuua

SEQ ID NO: 289552 - RNA, 32 nt, Homo Sapiens
ucccacauucuauuuucccccgguauucuuua

SEQ ID NO: 289553 - RNA, 32 nt, Homo Sapiens
gcacagagugcugucugcugaggugggcgucc

SEQ ID NO: 289554 - RNA, 31 nt, Homo Sapiens
gccuccugcuucuuucuuccccgcgcccaau

SEQ ID NO: 289555 - RNA, 32 nt, Homo Sapiens
uuaguuacauuauagaauauuacuuauuuuuc

SEQ ID NO: 289556 - RNA, 32 nt, Homo Sapiens
uagcugggacuacaggcacgcgccacuacacu

SEQ ID NO: 289557 - RNA, 32 nt, Homo Sapiens
accguuugcuuuauacccacacagcaacuggu

SEQ ID NO: 289558 - RNA, 32 nt, Homo Sapiens
gcuguguucagcagaaagaaauguaaaugaag

SEQ ID NO: 289559 - RNA, 29 nt, Homo Sapiens
uccugagaagugauguuugauggaauaaa

SEQ ID NO: 289560 - RNA, 32 nt, Homo Sapiens
agcagccccgacaggccuggcuccauccucug

SEQ ID NO: 289561 - RNA, 32 nt, Homo Sapiens
gccgguacuggcgcacccuggugcugcugcua

SEQ ID NO: 289562 - RNA, 32 nt, Homo Sapiens
agcucugcuuucaaaacaaaaagagauugggg

SEQ ID NO: 289563 - RNA, 32 nt, Homo Sapiens
ggguucccacugaggggucccuucagcaaaga

SEQ ID NO: 289564 - RNA, 32 nt, Homo Sapiens
gcggcaggaggaggguucggagggugggggcg

SEQ ID NO: 289565 - RNA, 30 nt, Homo Sapiens
uguggggagaagcugguguaacugagaccc

SEQ ID NO: 289566 - RNA, 32 nt, Homo Sapiens
ccuaaucucagagcugcagcccugcccuguca

SEQ ID NO: 289567 - RNA, 32 nt, Homo Sapiens
gggguacugcuauuaagauaucugaaaaugug

SEQ ID NO: 289568 - RNA, 32 nt, Homo Sapiens
aaaaugcuugggacaagaaguauuucagauuu

SEQ ID NO: 289569 - RNA, 32 nt, Homo Sapiens
agaucaguuuauuuaaugcuugcaacgacucu

SEQ ID NO: 289570 - RNA, 32 nt, Homo Sapiens
gccggagcugcaaugagcggcgcccggaggcu

SEQ ID NO: 289571 - RNA, 32 nt, Homo Sapiens
auauuguggcauugaaguagccgaaaaauugu

SEQ ID NO: 289572 - RNA, 32 nt, Homo Sapiens
agaagaaaaaucacacucugaauggugcuugc

SEQ ID NO: 289573 - RNA, 32 nt, Homo Sapiens
auccucucuguccacagccuggucucagagaa

SEQ ID NO: 289574 - RNA, 32 nt, Homo Sapiens
ucauccccaagccccagagagugacagagccc

SEQ ID NO: 289575 - RNA, 32 nt, Homo Sapiens
uggagcacaaauguuccauacaagacaucauu

SEQ ID NO: 289576 - RNA, 32 nt, Homo Sapiens
cacgccccggucuggggaggcuccucccuggu

SEQ ID NO: 289577 - RNA, 32 nt, Homo Sapiens
agcaccagccucugcugggcugcagaagcggc

SEQ ID NO: 289578 - RNA, 32 nt, Homo Sapiens
gagggcagaggguggcagcgagggcagggcag

SEQ ID NO: 289579 - RNA, 32 nt, Homo Sapiens
gccgaagaacugugaauagcuccaucaccaau

SEQ ID NO: 289580 - RNA, 30 nt, Homo Sapiens
ucagugcgccugcgcgcggguccggcgccg

SEQ ID NO: 289581 - RNA, 32 nt, Homo Sapiens
aagcgccgcgggaaggagcggcuccgagcaac

SEQ ID NO: 289582 - RNA, 32 nt, Homo Sapiens
ggggcagaggagaggauggggaggccaaggac

SEQ ID NO: 289583 - RNA, 32 nt, Homo Sapiens
uauuaccagugaauuucuuuuauucaccuucc

SEQ ID NO: 289584 - RNA, 28 nt, Homo Sapiens
uauauguguauguguauguguuucauuu

SEQ ID NO: 289585 - RNA, 32 nt, Homo Sapiens
uagccccagucauccugcccagcccugccucc

SEQ ID NO: 289586 - RNA, 32 nt, Homo Sapiens
gaauauauuucuguuguuuuaagcaaccccag

SEQ ID NO: 289587 - RNA, 32 nt, Homo Sapiens
uugcaggaagauugaagaaaaauccucaucaa

SEQ ID NO: 289588 - RNA, 32 nt, Homo Sapiens
aucaggagcuuuuuuacacaccuacuaaaaaa

SEQ ID NO: 289589 - RNA, 32 nt, Homo Sapiens
cuauggugcugagaaugaaaaucuaaaugauu

SEQ ID NO: 289590 - RNA, 32 nt, Homo Sapiens
gggucuagcucuucuuaucuuggcugggaucu

SEQ ID NO: 289591 - RNA, 32 nt, Homo Sapiens
gaggaagccuugccgggugggguguggcaggc

SEQ ID NO: 289592 - RNA, 32 nt, Homo Sapiens
aucucuggaggaagguggugacaacucaggga

SEQ ID NO: 289593 - RNA, 32 nt, Homo Sapiens
agccaacaccgccuuucucagcauggagaccu

SEQ ID NO: 289594 - RNA, 32 nt, Homo Sapiens
agccuccucucucuccuuccuccaaccugucc

SEQ ID NO: 289595 - RNA, 32 nt, Homo Sapiens
acuuugggucccgccucgggguggcggcgcgc

SEQ ID NO: 289596 - RNA, 32 nt, Homo Sapiens
gugaacuagaaaaaagugcuuacuagggccua

SEQ ID NO: 289597 - RNA, 32 nt, Homo Sapiens
uguaagugaaguccaaugggacaguggaaugu

SEQ ID NO: 289598 - RNA, 32 nt, Homo Sapiens
uacacucuuucaggccucuuucugccuuuugu

SEQ ID NO: 289599 - RNA, 32 nt, Homo Sapiens
accauuucuaaaccucuaucuuagcagaucaa

SEQ ID NO: 289600 - RNA, 32 nt, Homo Sapiens
uguacacgguggggggcggggggaccuuuugc

SEQ ID NO: 289601 - RNA, 32 nt, Homo Sapiens
uuauaauaaaacugaaaauacuguaaacauuu

SEQ ID NO: 289602 - RNA, 32 nt, Homo Sapiens
uguagcaaagauuaugccugaaaaggaaaauu

SEQ ID NO: 289603 - RNA, 32 nt, Homo Sapiens
uuggaugacauaauuggaaaaagcagauuagc

SEQ ID NO: 289604 - RNA, 32 nt, Homo Sapiens
uggcugaagaucugcagccucagagccucugg

SEQ ID NO: 289605 - RNA, 32 nt, Homo Sapiens
gcauuguaacuuaugaaccuuuacauccagau

SEQ ID NO: 289606 - RNA, 32 nt, Homo Sapiens
aggccucugaaauaucaauaaggcuaaauauu

SEQ ID NO: 289607 - RNA, 32 nt, Homo Sapiens
cuugggcuaagccccaauuugggguucaccug

SEQ ID NO: 289608 - RNA, 32 nt, Homo Sapiens
aaaaaauagcuggacauuuguuuucagucauu

SEQ ID NO: 289609 - RNA, 32 nt, Homo Sapiens
cgcgagauccgcgcucgccgccgcccgcccag

SEQ ID NO: 289610 - RNA, 32 nt, Homo Sapiens
aagacaucugaacauauucaguuuucaguaga

SEQ ID NO: 289611 - RNA, 32 nt, Homo Sapiens
ccccggucuggcuuccccggcgcgcaccacgg

SEQ ID NO: 289612 - RNA, 30 nt, Homo Sapiens
cuagauuuggacugcccuuacggauuggcu

SEQ ID NO: 289613 - RNA, 32 nt, Homo Sapiens
agcaagcggcggucgagcugggccgccgcgcc

SEQ ID NO: 289614 - RNA, 32 nt, Homo Sapiens
guuaaacuucaauucacaaucaccuuggaauc

SEQ ID NO: 289615 - RNA, 32 nt, Homo Sapiens
cccuggauggccucuggaggagcccacgacac

SEQ ID NO: 289616 - RNA, 32 nt, Homo Sapiens
auaaaauaaaacaaaaccaaaacuauacuuuu

SEQ ID NO: 289617 - RNA, 32 nt, Homo Sapiens
ggcauacacaaggagcucucauuauggugggu

SEQ ID NO: 289618 - RNA, 32 nt, Homo Sapiens
uaccugcuugagcuuucugugcaugugcaggu

SEQ ID NO: 289619 - RNA, 32 nt, Homo Sapiens
cccgccccagcucucagaggcccgccaucacu

SEQ ID NO: 289620 - RNA, 32 nt, Homo Sapiens
ggcccugcucuuccucgucuucugggacaagg

SEQ ID NO: 289621 - RNA, 32 nt, Homo Sapiens
guagaaguuugugccaacacacggagucauuc

SEQ ID NO: 289622 - RNA, 32 nt, Homo Sapiens
acucuucccacucccagggaccgcguugucuu

SEQ ID NO: 289623 - RNA, 32 nt, Homo Sapiens
cugauucauauccuaauguggaccacccaucu

SEQ ID NO: 289624 - RNA, 32 nt, Homo Sapiens
ugcccacaccuacgcccuccccuccccggccc

SEQ ID NO: 289625 - RNA, 32 nt, Homo Sapiens
gguaauaauaauacauguacuuuuagccugaa

SEQ ID NO: 289626 - RNA, 32 nt, Homo Sapiens
ccccuccaccaggcuuccugcuggaggaguuu

SEQ ID NO: 289627 - RNA, 32 nt, Homo Sapiens
accgcugguucuuggggugcagagaggggccg

SEQ ID NO: 289628 - RNA, 32 nt, Homo Sapiens
aauuguuccaauguuccuucuaauggauggug

SEQ ID NO: 289629 - RNA, 32 nt, Homo Sapiens
agcgggguugaacgugguguugguuuccacuc

SEQ ID NO: 289630 - RNA, 30 nt, Homo Sapiens
ucugcucuggggaggggucauuggaaacca

SEQ ID NO: 289631 - RNA, 32 nt, Homo Sapiens
cgggccucguccccgcgcccagcccucggugc

SEQ ID NO: 289632 - RNA, 32 nt, Homo Sapiens
uaggcuacagaaaaagucacaagcgcaugguu

SEQ ID NO: 289633 - RNA, 32 nt, Homo Sapiens
cucugagaaaauccaaauauuuuuugugacaa

SEQ ID NO: 289634 - RNA, 32 nt, Homo Sapiens
gagcgagacucuaucucaaaacaaucaaaaca

SEQ ID NO: 289635 - RNA, 32 nt, Homo Sapiens
ugcgugccacuaccaaagccuucugggcuguc

SEQ ID NO: 289636 - RNA, 32 nt, Homo Sapiens
aaugagccgggcgugguggcgggcgccuguag

SEQ ID NO: 289637 - RNA, 32 nt, Homo Sapiens
aauguaauaauagaaaaauacucauaauaggg

SEQ ID NO: 289638 - RNA, 32 nt, Homo Sapiens
acguuuguagagauauuggccuugaagcagaa

SEQ ID NO: 289639 - RNA, 32 nt, Homo Sapiens
ggggccggcggcucuggcugcccggcgguuga

SEQ ID NO: 289640 - RNA, 32 nt, Homo Sapiens
guaguauucuaccuacuuuuaagucuaauuuu

SEQ ID NO: 289641 - RNA, 32 nt, Homo Sapiens
uuauuugucauuuucuucaaaggauuuuuaua

SEQ ID NO: 289642 - RNA, 32 nt, Homo Sapiens
uuuaauuugauuaaagcugauuacugucaaua

SEQ ID NO: 289643 - RNA, 32 nt, Homo Sapiens
gggcuucucugagacaaguaaaugucaggugc

SEQ ID NO: 289644 - RNA, 32 nt, Homo Sapiens
ucucuuucaagauagaaaaucccuuuagagua

SEQ ID NO: 289645 - RNA, 32 nt, Homo Sapiens
aagaacguauucucaugguacuuacagagcug

SEQ ID NO: 289646 - RNA, 32 nt, Homo Sapiens
ggguugagguguccaagaagugcuggcaccaa

SEQ ID NO: 289647 - RNA, 32 nt, Homo Sapiens
gggaccucuggccacuguggcccuuccauugu

SEQ ID NO: 289648 - RNA, 30 nt, Homo Sapiens
accuucuccaggcgcggguccugcuccuuu

SEQ ID NO: 289649 - RNA, 32 nt, Homo Sapiens
gguuauuggccauagccauuugcaaacaggcu

SEQ ID NO: 289650 - RNA, 32 nt, Homo Sapiens
ccauucggguccacagcugagguugccucuga

SEQ ID NO: 289651 - RNA, 30 nt, Homo Sapiens
cgcagcgcccagcagcacccggagucgcuu

SEQ ID NO: 289652 - RNA, 32 nt, Homo Sapiens
uacuuaggagaaugaggugggaggauugcuug

SEQ ID NO: 289653 - RNA, 32 nt, Homo Sapiens
aguaauauuuuugagucucuugugagguuaca

SEQ ID NO: 289654 - RNA, 27 nt, Homo Sapiens
cuuugauucuccuucagcccucacccc

SEQ ID NO: 289655 - RNA, 32 nt, Homo Sapiens
uugaguccagcaugggcaacauaacaagaccc

SEQ ID NO: 289656 - RNA, 32 nt, Homo Sapiens
aacugcaagacuccagcacaagaggugggauu

SEQ ID NO: 289657 - RNA, 32 nt, Homo Sapiens
uucuaccugccaguggagcugagcacugccua

SEQ ID NO: 289658 - RNA, 32 nt, Homo Sapiens
ccguuccggccacaccagagaagugcuuccgg

SEQ ID NO: 289659 - RNA, 32 nt, Homo Sapiens
agcaggcccagcuggggccccucggcuacccc

SEQ ID NO: 289660 - RNA, 32 nt, Homo Sapiens
ccgagcgagcgcggcgguggggccgagaggac

SEQ ID NO: 289661 - RNA, 32 nt, Homo Sapiens
agcaagugagggaaggggcagcucaccuaggc

SEQ ID NO: 289662 - RNA, 32 nt, Homo Sapiens
aaaauaaauuuauuuuguugaagaauuuaacc

SEQ ID NO: 289663 - RNA, 32 nt, Homo Sapiens
uggcuuccggacugaagcugcagacuuucgcg

SEQ ID NO: 289664 - RNA, 32 nt, Homo Sapiens
cggguccugcggcugcggcugccgccaucaug

SEQ ID NO: 289665 - RNA, 32 nt, Homo Sapiens
augaguagacauuguggaccucacaagauuau

SEQ ID NO: 289666 - RNA, 32 nt, Homo Sapiens
gccuagaaguucugcccacauccuuaugacgc

SEQ ID NO: 289667 - RNA, 32 nt, Homo Sapiens
uguugcuguuggaaucuaucuaaaugccacuc

SEQ ID NO: 289668 - RNA, 32 nt, Homo Sapiens
ugauacaaggacagaagaauuggguagauauu

SEQ ID NO: 289669 - RNA, 30 nt, Homo Sapiens
gucggauggcgguuccgccgcgcggcgggc

SEQ ID NO: 289670 - RNA, 32 nt, Homo Sapiens
gggcgggggccuggcgggaggccuggccccuu

SEQ ID NO: 289671 - RNA, 30 nt, Homo Sapiens
ccuucccccugugcuguugaacucugggag

SEQ ID NO: 289672 - RNA, 32 nt, Homo Sapiens
cacaugagaguaaaacaaaccuuuacuuacua

SEQ ID NO: 289673 - RNA, 32 nt, Homo Sapiens
guggaguagggagaugcggggagcaggguggg

SEQ ID NO: 289674 - RNA, 32 nt, Homo Sapiens
ugggaggaaacacuugagaggcgauauuguca

SEQ ID NO: 289675 - RNA, 32 nt, Homo Sapiens
cugagacgacggccgcggcugcacaggaauaa

SEQ ID NO: 289676 - RNA, 32 nt, Homo Sapiens
gcccggcccuccccggcuaugacgcccccggc

SEQ ID NO: 289677 - RNA, 32 nt, Homo Sapiens
aacauucuugcuuuugaggagacagacuccca

SEQ ID NO: 289678 - RNA, 32 nt, Homo Sapiens
gagcaccucaugcaugucccagccccugggcc

SEQ ID NO: 289679 - RNA, 32 nt, Homo Sapiens
aauuguauaaaauugcuauugcagcuuuauau

SEQ ID NO: 289680 - RNA, 32 nt, Homo Sapiens
uaggaccugguuuauucacaggcucagguguc

SEQ ID NO: 289681 - RNA, 32 nt, Homo Sapiens
aguauuaauuuauaauuagggauuguucaaac

SEQ ID NO: 289682 - RNA, 32 nt, Homo Sapiens
gaagauguggcauggaaggcagaggcugggug

SEQ ID NO: 289683 - RNA, 32 nt, Homo Sapiens
aucuuaguucaaucugccauagacuuaagcuu

SEQ ID NO: 289684 - RNA, 32 nt, Homo Sapiens
uuucagugcgaugcagcuggcgcuaggauccu

SEQ ID NO: 289685 - RNA, 30 nt, Homo Sapiens
cuguccaaucucccugccauuucucuauuc

SEQ ID NO: 289686 - RNA, 32 nt, Homo Sapiens
ugaugcaagccagcuuccugugcagaaggucu

SEQ ID NO: 289687 - RNA, 32 nt, Homo Sapiens
ucuucaccuguaaaauggggugaagcugugau

SEQ ID NO: 289688 - RNA, 32 nt, Homo Sapiens
ugaucuuucuagagccagcaguacguggcuuc

SEQ ID NO: 289689 - RNA, 32 nt, Homo Sapiens
ggagggcccaacccggcugggugggugggaag

SEQ ID NO: 289690 - RNA, 30 nt, Homo Sapiens
uauagcaauaucccacaauaccucugacaa

SEQ ID NO: 289691 - RNA, 32 nt, Homo Sapiens
auuauuuaaaacagcaaaauuauuuuuguagc

SEQ ID NO: 289692 - RNA, 26 nt, Homo Sapiens
accucagagagcguggcggggagcgg

SEQ ID NO: 289693 - RNA, 32 nt, Homo Sapiens
uuuauuuugaaaggaaaauguacaauguguga

SEQ ID NO: 289694 - RNA, 32 nt, Homo Sapiens
gaaggacgcaccaagccgaaaguaaaacacaa

SEQ ID NO: 289695 - RNA, 32 nt, Homo Sapiens
cuguuucuccacuuccuucucuauugguuggu

SEQ ID NO: 289696 - RNA, 32 nt, Homo Sapiens
gcagaaaaucaaaagaagaacaauauuucaug

SEQ ID NO: 289697 - RNA, 32 nt, Homo Sapiens
ggcuaauuuuuucuaaaguuaaauuuagugca

SEQ ID NO: 289698 - RNA, 32 nt, Homo Sapiens
uuccuguuugauccugagacaccuguagauug

SEQ ID NO: 289699 - RNA, 32 nt, Homo Sapiens
auugaucucuguacggcaaaaaaaaaaaaaaa

SEQ ID NO: 289700 - RNA, 32 nt, Homo Sapiens
cgacccccugcccaagcugcuugacgucccag

SEQ ID NO: 289701 - RNA, 32 nt, Homo Sapiens
cccauuuagucugguaucugguugaugccugc

SEQ ID NO: 289702 - RNA, 32 nt, Homo Sapiens
auuuuaagcugcuuuauuuuauuuucacuugu

SEQ ID NO: 289703 - RNA, 32 nt, Homo Sapiens
gggagccacuuggcagaagggugcagggcugc

SEQ ID NO: 289704 - RNA, 32 nt, Homo Sapiens
gugugcgcccccagccggcugcccucguggau

SEQ ID NO: 289705 - RNA, 32 nt, Homo Sapiens
uggggaucaucacuuacccaccccccaaguuc

SEQ ID NO: 289706 - RNA, 32 nt, Homo Sapiens
uucuuguccucccagcugagcuuucuuauucc

SEQ ID NO: 289707 - RNA, 32 nt, Homo Sapiens
ccuccgggagccggggcgcacccagcccgcag

SEQ ID NO: 289708 - RNA, 32 nt, Homo Sapiens
ccuuaaaaggauuaaaguaauggagauauaca

SEQ ID NO: 289709 - RNA, 32 nt, Homo Sapiens
gccugucccaauucugcccgcuccauggaaaa

SEQ ID NO: 289710 - RNA, 32 nt, Homo Sapiens
uccuuuauauugcuuuaauaauuuucuuuuuu

SEQ ID NO: 289711 - RNA, 32 nt, Homo Sapiens
agacggguggcauggggagcagcuaaacaaug

SEQ ID NO: 289712 - RNA, 32 nt, Homo Sapiens
uucaggcuugcccucaccagcggccgucagcc

SEQ ID NO: 289713 - RNA, 32 nt, Homo Sapiens
uacauuuaucuucuguuuuucucaaauaaagu

SEQ ID NO: 289714 - RNA, 32 nt, Homo Sapiens
acgaggcacgagugaggggggaggcgguggcg

SEQ ID NO: 289715 - RNA, 32 nt, Homo Sapiens
uuuacccauuuucccuuuuauggcucaugccu

SEQ ID NO: 289716 - RNA, 32 nt, Homo Sapiens
acaauagaugacuuaaaguguuauuucuauua

SEQ ID NO: 289717 - RNA, 32 nt, Homo Sapiens
uuucucauuaaaaaacaaaauuagccagaaaa

SEQ ID NO: 289718 - RNA, 32 nt, Homo Sapiens
aaagcguucucggcggcagcgcaacaacuaga

SEQ ID NO: 289719 - RNA, 32 nt, Homo Sapiens
gcugcggcgagggagcggccgagcggagcccg

SEQ ID NO: 289720 - RNA, 32 nt, Homo Sapiens
cccucuacuacuggaugaaaugucugcauuuc

SEQ ID NO: 289721 - RNA, 32 nt, Homo Sapiens
gaacagauuuugcagcugguagggucucaaua

SEQ ID NO: 289722 - RNA, 32 nt, Homo Sapiens
aaagcaccaagggggugagacacacgccuuga

SEQ ID NO: 289723 - RNA, 32 nt, Homo Sapiens
aaagugucuucagauuuagacucuucuccaug

SEQ ID NO: 289724 - RNA, 29 nt, Homo Sapiens
cuggccucuauccauaccaaggaggccag

SEQ ID NO: 289725 - RNA, 32 nt, Homo Sapiens
ugcacggcccaccggcggccagccccagagac

SEQ ID NO: 289726 - RNA, 32 nt, Homo Sapiens
uccacagacggaaggguaaacaauauagucuu

SEQ ID NO: 289727 - RNA, 32 nt, Homo Sapiens
ggccucagugggggcugcugccugacccccag

SEQ ID NO: 289728 - RNA, 32 nt, Homo Sapiens
uacuauuccuucccuuccuaucuccuuucuag

SEQ ID NO: 289729 - RNA, 32 nt, Homo Sapiens
uaaugaauccuccacaguuggucagauucaua

SEQ ID NO: 289730 - RNA, 32 nt, Homo Sapiens
cugccgcucggccagcagcccgcucgcgauug

SEQ ID NO: 289731 - RNA, 32 nt, Homo Sapiens
guuggggugaugucuuuucggaagagcuucaa

SEQ ID NO: 289732 - RNA, 32 nt, Homo Sapiens
cauuuuaaauuaacaaaauaaauuaagagaug

SEQ ID NO: 289733 - RNA, 31 nt, Homo Sapiens
ucucuaacauguccaaaagugcuguuuuucc

SEQ ID NO: 289734 - RNA, 32 nt, Homo Sapiens
uacaguuucccucuauaagugaauccaaaauu

SEQ ID NO: 289735 - RNA, 32 nt, Homo Sapiens
cggagcagagcggucagggaucaugagggaga

SEQ ID NO: 289736 - RNA, 32 nt, Homo Sapiens
gggaggcugaggugggcagaucauuugagauc

SEQ ID NO: 289737 - RNA, 32 nt, Homo Sapiens
aggagaacaucaucuuaauagccuuuggcuca

SEQ ID NO: 289738 - RNA, 32 nt, Homo Sapiens
gacucaaagagaaaaagagagucuauaauauu

SEQ ID NO: 289739 - RNA, 32 nt, Homo Sapiens
aacagaauggaaaaacaguguaugaaagucau

SEQ ID NO: 289740 - RNA, 32 nt, Homo Sapiens
uuaccaaaacuuaugcuaaauauacuuuccag

SEQ ID NO: 289741 - RNA, 32 nt, Homo Sapiens
uucuggguguugccagaagagauuaacauuug

SEQ ID NO: 289742 - RNA, 31 nt, Homo Sapiens
gcgacaauggcagaacugcccacaacagaga

SEQ ID NO: 289743 - RNA, 32 nt, Homo Sapiens
ccaggaggucccaagaguuaguuuuagggaaa

SEQ ID NO: 289744 - RNA, 32 nt, Homo Sapiens
gggaagaggagaaaguucuggagaggauggug

SEQ ID NO: 289745 - RNA, 32 nt, Homo Sapiens
gaaugagaaaaguuuaauacaacaggugucca

SEQ ID NO: 289746 - RNA, 32 nt, Homo Sapiens
gaccuggagcucuggaagcugaucuccuccca

SEQ ID NO: 289747 - RNA, 32 nt, Homo Sapiens
gcaguggauuauagcucuguuuucuucuuucc

SEQ ID NO: 289748 - RNA, 32 nt, Homo Sapiens
caggagaaucauuuccuugucauuccaccuuc

SEQ ID NO: 289749 - RNA, 32 nt, Homo Sapiens
ccucccuccgcggggauagccgcagccccagg

SEQ ID NO: 289750 - RNA, 32 nt, Homo Sapiens
cacacacacacacacacacacacacacauaca

SEQ ID NO: 289751 - RNA, 32 nt, Homo Sapiens
cacacacacacauacacacacacacacacaca

SEQ ID NO: 289752 - RNA, 32 nt, Homo Sapiens
uucagguuaguuacaaaaagcucaguuuucaa

SEQ ID NO: 289753 - RNA, 32 nt, Homo Sapiens
cuagcgaggaggaguugagagaacggagcgga

SEQ ID NO: 289754 - RNA, 30 nt, Homo Sapiens
cugugaccagaucuagcccaucuuacucca

SEQ ID NO: 289755 - RNA, 32 nt, Homo Sapiens
uuagaaauggaaauuacauuugaaagccauua

SEQ ID NO: 289756 - RNA, 32 nt, Homo Sapiens
caaaucggaagggacgagccugcccuuugaaa

SEQ ID NO: 289757 - RNA, 32 nt, Homo Sapiens
aaaccuugacauuucaauuaaaacaugaauug

SEQ ID NO: 289758 - RNA, 32 nt, Homo Sapiens
aagguuaauuauauuucuuguuaugagacaaa

SEQ ID NO: 289759 - RNA, 32 nt, Homo Sapiens
ggcuuauaauuucgaacucuucuggaagguca

SEQ ID NO: 289760 - RNA, 32 nt, Homo Sapiens
uauauagucaauugaaaagauuuuaucaggaa

SEQ ID NO: 289761 - RNA, 32 nt, Homo Sapiens
ccaccuggaggcuggggugcuggggcuugggg

SEQ ID NO: 289762 - RNA, 30 nt, Homo Sapiens
uacccaaggacuggcaugcaaagucuucca

SEQ ID NO: 289763 - RNA, 32 nt, Homo Sapiens
aaagccccgagcuguggugaugggagggagga

SEQ ID NO: 289764 - RNA, 32 nt, Homo Sapiens
cuauucugugaaacagaagacauugugaugga

SEQ ID NO: 289765 - RNA, 32 nt, Homo Sapiens
auucuugccggccagggacaagaggaagcugg

SEQ ID NO: 289766 - RNA, 32 nt, Homo Sapiens
aagcaccugaaauuauuugcaaaauguuacgc

SEQ ID NO: 289767 - RNA, 32 nt, Homo Sapiens
uaggcuucaucccacaaauccagccucuuucu

SEQ ID NO: 289768 - RNA, 32 nt, Homo Sapiens
ucgggcggagagcgcggcugugcccaguaucc

SEQ ID NO: 289769 - RNA, 32 nt, Homo Sapiens
gcuaaacucucugaaucaaggaucacaaacua

SEQ ID NO: 289770 - RNA, 32 nt, Homo Sapiens
cggcugcagguucccaggaucugucagaggcu

SEQ ID NO: 289771 - RNA, 32 nt, Homo Sapiens
aggccguguuguuugucuaccugggacuacac

SEQ ID NO: 289772 - RNA, 32 nt, Homo Sapiens
ugaccccugcacccaccccccacagccugccc

SEQ ID NO: 289773 - RNA, 32 nt, Homo Sapiens
uauuuaggcguagaacaaaauuauucauauuu

SEQ ID NO: 289774 - RNA, 32 nt, Homo Sapiens
cuggcuagcauuggaaacaacaacaacaacaa

SEQ ID NO: 289775 - RNA, 32 nt, Homo Sapiens
ggcucacccgucugcauccccugcuccugccc

SEQ ID NO: 289776 - RNA, 32 nt, Homo Sapiens
gccgcccggcgcgggggccauggcguucaccu

SEQ ID NO: 289777 - RNA, 32 nt, Homo Sapiens
uuucuccagguaacucaaaaccacuaaaacug

SEQ ID NO: 289778 - RNA, 32 nt, Homo Sapiens
gcggccccgagcucuguggcgcuguggaggag

SEQ ID NO: 289779 - RNA, 32 nt, Homo Sapiens
ugggaugagucuuuuuuuguuucuguucagag

SEQ ID NO: 289780 - RNA, 32 nt, Homo Sapiens
ccgaacgucccggcccgccgcgcuucgugccg

SEQ ID NO: 289781 - RNA, 32 nt, Homo Sapiens
uacagcaggacuccugaacauucuuccuuaaa

SEQ ID NO: 289782 - RNA, 32 nt, Homo Sapiens
guggaguugacucgguguucugucccagugcg

SEQ ID NO: 289783 - RNA, 30 nt, Homo Sapiens
cucaaacugcuaauugcgaagaaucgauaa

SEQ ID NO: 289784 - RNA, 32 nt, Homo Sapiens
uuaaacacgucaacuaaacgcacuugauggug

SEQ ID NO: 289785 - RNA, 32 nt, Homo Sapiens
uuccuacuguggcccagcugcccagcauggac

SEQ ID NO: 289786 - RNA, 32 nt, Homo Sapiens
acagccaguaggcauaggagcgggaaugaaaa

SEQ ID NO: 289787 - RNA, 32 nt, Homo Sapiens
uucuauuuuaugcuauuugucuacccugucac

SEQ ID NO: 289788 - RNA, 32 nt, Homo Sapiens
uuacaggcgugagccaccacgcccggccccaa

SEQ ID NO: 289789 - RNA, 32 nt, Homo Sapiens
gcccucggccccagccgggcuccgcuccucgg

SEQ ID NO: 289790 - RNA, 32 nt, Homo Sapiens
ugcuccuggaagccugcauuccagucagguug

SEQ ID NO: 289791 - RNA, 32 nt, Homo Sapiens
gcuuugccacugggcuugggguuaagugggug

SEQ ID NO: 289792 - RNA, 31 nt, Homo Sapiens
uggaccuugagugaauaauagauuccuaaua

SEQ ID NO: 289793 - RNA, 32 nt, Homo Sapiens
ccaucuccacucuccuucuccagaacccccuu

SEQ ID NO: 289794 - RNA, 32 nt, Homo Sapiens
gcugaagcggguggaucaugaggucagaagau

SEQ ID NO: 289795 - RNA, 32 nt, Homo Sapiens
ugaaaauacaagauugauuagaugaaucuaca

SEQ ID NO: 289796 - RNA, 32 nt, Homo Sapiens
uguagcugaugcaacuaacaaguacuggggcc

SEQ ID NO: 289797 - RNA, 32 nt, Homo Sapiens
ugcaagagcccccagaggcauuguucugggac

SEQ ID NO: 289798 - RNA, 32 nt, Homo Sapiens
ucuaugcccccgcacgcgggagccacgaaccu

SEQ ID NO: 289799 - RNA, 29 nt, Homo Sapiens
aggucauaaaguuuguaucucuaucuuua

SEQ ID NO: 289800 - RNA, 32 nt, Homo Sapiens
gcugggggguggcagagagaaggcuccuccuc

SEQ ID NO: 289801 - RNA, 30 nt, Homo Sapiens
uggguccaugggaagcaugagucuguuggg

SEQ ID NO: 289802 - RNA, 32 nt, Homo Sapiens
uguguguguuuccuuauugucauuccauuaua

SEQ ID NO: 289803 - RNA, 32 nt, Homo Sapiens
gaagggcagggccagacugcaccuuuauuaga

SEQ ID NO: 289804 - RNA, 32 nt, Homo Sapiens
cuguucugccagcgaagcuuccuccuccucuc

SEQ ID NO: 289805 - RNA, 32 nt, Homo Sapiens
auaaaaugcauuucagagaauaugcauuuuac

SEQ ID NO: 289806 - RNA, 32 nt, Homo Sapiens
gcuuugcccucccaggacccugagguugcuuu

SEQ ID NO: 289807 - RNA, 32 nt, Homo Sapiens
cuaucuguguucagggaaugauuugcaagaag

SEQ ID NO: 289808 - RNA, 32 nt, Homo Sapiens
guaaaguucuuuuuguuuuucuuuauaagcua

SEQ ID NO: 289809 - RNA, 32 nt, Homo Sapiens
cucccggucccggcccuggcccagccagccca

SEQ ID NO: 289810 - RNA, 32 nt, Homo Sapiens
uuuuuaaaggacaaauauaaaaauagcaacag

SEQ ID NO: 289811 - RNA, 32 nt, Homo Sapiens
uucuauugaguucaaauuaacuugcuuaagug

SEQ ID NO: 289812 - RNA, 32 nt, Homo Sapiens
ucauuuacauaaauauuauacuagcauuuacc

SEQ ID NO: 289813 - RNA, 32 nt, Homo Sapiens
uaaccaaaugguagagggcuguuccaugaugg

SEQ ID NO: 289814 - RNA, 32 nt, Homo Sapiens
cccggccauggcgcugagugaacccauccugc

SEQ ID NO: 289815 - RNA, 32 nt, Homo Sapiens
acugggcccuccggcccuccccugcccaggca

SEQ ID NO: 289816 - RNA, 31 nt, Homo Sapiens
uaguuucuugguacuucaguggauguggcag

SEQ ID NO: 289817 - RNA, 32 nt, Homo Sapiens
cgugugggccgcggcccggcccucaccaugga

SEQ ID NO: 289818 - RNA, 30 nt, Homo Sapiens
caaaguauaugccacuacagguuugacucg

SEQ ID NO: 289819 - RNA, 32 nt, Homo Sapiens
augcucugcauccggggccccuggaacacaua

SEQ ID NO: 289820 - RNA, 32 nt, Homo Sapiens
auugcgcucccuccuucuguagagggcgccug

SEQ ID NO: 289821 - RNA, 32 nt, Homo Sapiens
ccucccccaucccccgaccccaccacaagucc

SEQ ID NO: 289822 - RNA, 32 nt, Homo Sapiens
gugagagacaaccagcagcauccucuuuguaa

SEQ ID NO: 289823 - RNA, 32 nt, Homo Sapiens
cucucggauggcaacauuaaguccuaccucug

SEQ ID NO: 289824 - RNA, 32 nt, Homo Sapiens
guaaugguuccaugggcggggguggggugguu

SEQ ID NO: 289825 - RNA, 32 nt, Homo Sapiens
auuuuacaucuuccaguuuguccaucccauga

SEQ ID NO: 289826 - RNA, 32 nt, Homo Sapiens
caggccuccccgcucugugcuaccugcggccc

SEQ ID NO: 289827 - RNA, 32 nt, Homo Sapiens
gaauguuuaccagacacagagcccagagggac

SEQ ID NO: 289828 - RNA, 32 nt, Homo Sapiens
cuuccccagcggauucccacucuguccaccaa

SEQ ID NO: 289829 - RNA, 32 nt, Homo Sapiens
cgccgauguugaaacuucuccucacgggguga

SEQ ID NO: 289830 - RNA, 32 nt, Homo Sapiens
uccuagauuggcuuuucuuacucuuuucuguu

SEQ ID NO: 289831 - RNA, 32 nt, Homo Sapiens
ugcggcccagagcaccggggccacccgguccc

SEQ ID NO: 289832 - RNA, 32 nt, Homo Sapiens
gcugcucuggucugggagagcuucuguccugu

SEQ ID NO: 289833 - RNA, 32 nt, Homo Sapiens
ugugauuauccccauugcacagaugaggaaac

SEQ ID NO: 289834 - RNA, 28 nt, Homo Sapiens
aaaaugaaggcacucauugcagcacugc

SEQ ID NO: 289835 - RNA, 32 nt, Homo Sapiens
agaguuucuguaaaagaagagacauuaagagu

SEQ ID NO: 289836 - RNA, 32 nt, Homo Sapiens
uuuguacuuuguuguguagaguggaagaauug

SEQ ID NO: 289837 - RNA, 32 nt, Homo Sapiens
auguuuccguggcaauggccacuucccucuuu

SEQ ID NO: 289838 - RNA, 32 nt, Homo Sapiens
uugcugggguccacuccugggccugccccagc

SEQ ID NO: 289839 - RNA, 32 nt, Homo Sapiens
gucuacaauuggguucuagauacaucaggaac

SEQ ID NO: 289840 - RNA, 31 nt, Homo Sapiens
ugagcucucaaugaucaucuguaguggcagc

SEQ ID NO: 289841 - RNA, 32 nt, Homo Sapiens
uagugauaccuauauuuccacauugugcauug

SEQ ID NO: 289842 - RNA, 32 nt, Homo Sapiens
ccaucugccugcugcccugagccccgguucug

SEQ ID NO: 289843 - RNA, 31 nt, Homo Sapiens
gauuaaccuuagcuccuuccaaggguucgug

SEQ ID NO: 289844 - RNA, 32 nt, Homo Sapiens
ucaggaaugggagaagugucagacacuagaga

SEQ ID NO: 289845 - RNA, 32 nt, Homo Sapiens
gagaaaaagcaucccaccuggggaggaaagga

SEQ ID NO: 289846 - RNA, 32 nt, Homo Sapiens
cuguguagaauuuuuuucauucuuauauuuug

SEQ ID NO: 289847 - RNA, 32 nt, Homo Sapiens
ccaggcccgagcgaagcccgcgcgcggucaca

SEQ ID NO: 289848 - RNA, 32 nt, Homo Sapiens
uuaaagcaaaaauaaucuuuucaguauguuuc

SEQ ID NO: 289849 - RNA, 32 nt, Homo Sapiens
uagaugggacuguguccccccaaaauucaugu

SEQ ID NO: 289850 - RNA, 32 nt, Homo Sapiens
auuaaugaaguugauucauauugcaucauagu

SEQ ID NO: 289851 - RNA, 32 nt, Homo Sapiens
ugaaauugugcuccaugauuuuacagauuuca

SEQ ID NO: 289852 - RNA, 32 nt, Homo Sapiens
cuuuguucauuuucuuuuuauacacccgucug

SEQ ID NO: 289853 - RNA, 32 nt, Homo Sapiens
uuaauaccugguuuuguacauaucuaacucug

SEQ ID NO: 289854 - RNA, 32 nt, Homo Sapiens
agcgcaguccagagggcugcgcugcucguccc

SEQ ID NO: 289855 - RNA, 30 nt, Homo Sapiens
gucagggcgcugguuggggaaaccagccug

SEQ ID NO: 289856 - RNA, 32 nt, Homo Sapiens
gcccccgcggcuggaggguggucgccacuggg

SEQ ID NO: 289857 - RNA, 32 nt, Homo Sapiens
gacgaaacugcaucuuagcagaugaaaugggu

SEQ ID NO: 289858 - RNA, 32 nt, Homo Sapiens
cagggagagggcaggcggcugcugcuguugca

SEQ ID NO: 289859 - RNA, 32 nt, Homo Sapiens
cacucuauauuucucucuauuugcuaauauug

SEQ ID NO: 289860 - RNA, 32 nt, Homo Sapiens
cuagguuuucggaccgcggcgcggcggggaag

SEQ ID NO: 289861 - RNA, 32 nt, Homo Sapiens
cccucgauacucaacaaagagaagcaaagccu

SEQ ID NO: 289862 - RNA, 32 nt, Homo Sapiens
cuaagaaugccucuucuuggggaaaaggaccc

SEQ ID NO: 289863 - RNA, 32 nt, Homo Sapiens
aguucuauuuaguuagcaucuugaaauuugua

SEQ ID NO: 289864 - RNA, 32 nt, Homo Sapiens
cuucaauagaacuguuucaacuguauaacuau

SEQ ID NO: 289865 - RNA, 32 nt, Homo Sapiens
acacacccaaguacacgcagccaggcauucag

SEQ ID NO: 289866 - RNA, 32 nt, Homo Sapiens
gaaaugugggcaugcauggugaugggauaugg

SEQ ID NO: 289867 - RNA, 32 nt, Homo Sapiens
cugaggcccuguaaaggagugaguuaggacag

SEQ ID NO: 289868 - RNA, 32 nt, Homo Sapiens
gcaaaacuauacagcuaauaaacaguagaguu

SEQ ID NO: 289869 - RNA, 32 nt, Homo Sapiens
cauaacucaauccaguuuugaccagucugacu

SEQ ID NO: 289870 - RNA, 32 nt, Homo Sapiens
cauccuugccagcacgucuguacuucuguuca

SEQ ID NO: 289871 - RNA, 32 nt, Homo Sapiens
cccauaaauuuauugccugagaacuuaguuca

SEQ ID NO: 289872 - RNA, 32 nt, Homo Sapiens
gcugaacugcaggggagggaaggaggagcagc

SEQ ID NO: 289873 - RNA, 32 nt, Homo Sapiens
ccccaucugccgucuugguucaucucaccaca

SEQ ID NO: 289874 - RNA, 32 nt, Homo Sapiens
uuguuuuuugguuuuuuuuuuuacccagacaa

SEQ ID NO: 289875 - RNA, 32 nt, Homo Sapiens
aagggcagccugcagcaccaugccaagggggg

SEQ ID NO: 289876 - RNA, 32 nt, Homo Sapiens
auggccgggggcccggccagagcggggcugca

SEQ ID NO: 289877 - RNA, 32 nt, Homo Sapiens
gccaauuccuuccuucucuucuguacagcaga

SEQ ID NO: 289878 - RNA, 32 nt, Homo Sapiens
agggugagauugaacagaagagggaguuggug

SEQ ID NO: 289879 - RNA, 32 nt, Homo Sapiens
gggaguuuucacaacaguaguuuuggaaucau

SEQ ID NO: 289880 - RNA, 32 nt, Homo Sapiens
uuuccauacaaugaaagcuauaacuagcuggu

SEQ ID NO: 289881 - RNA, 32 nt, Homo Sapiens
gcuuucauuuuucugguagauacauguaaggg

SEQ ID NO: 289882 - RNA, 32 nt, Homo Sapiens
uaaguguucuuugccauuucuggaauuguccu

SEQ ID NO: 289883 - RNA, 32 nt, Homo Sapiens
cuacguucacuuaugaucuggauuuauaaaca

SEQ ID NO: 289884 - RNA, 32 nt, Homo Sapiens
gcggagcuggaacugcugcagcugcugccgcc

SEQ ID NO: 289885 - RNA, 32 nt, Homo Sapiens
guagccgcaggaccccaccaccccccauggcu

SEQ ID NO: 289886 - RNA, 32 nt, Homo Sapiens
uacagaacuuuuaguucugugcugucuaugug

SEQ ID NO: 289887 - RNA, 32 nt, Homo Sapiens
aacuuaauucccuggugacuagagcuuugccu

SEQ ID NO: 289888 - RNA, 32 nt, Homo Sapiens
guacucaggaccagaguuaagcugauaccuua

SEQ ID NO: 289889 - RNA, 32 nt, Homo Sapiens
ggaccagagaaagccaggcuggaucgucacau

SEQ ID NO: 289890 - RNA, 32 nt, Homo Sapiens
aaacugaacaaagggauuaaauugugagaaca

SEQ ID NO: 289891 - RNA, 32 nt, Homo Sapiens
acauuuagaaugccuuguaagaacugaaaaaa

SEQ ID NO: 289892 - RNA, 32 nt, Homo Sapiens
gcaugccuguguuucuagcuacgcaggaggau

SEQ ID NO: 289893 - RNA, 32 nt, Homo Sapiens
cuuaucuuccguguugucuuuggaccuguuuu

SEQ ID NO: 289894 - RNA, 32 nt, Homo Sapiens
aggggccuauagagaacagagaaggcaaauua

SEQ ID NO: 289895 - RNA, 32 nt, Homo Sapiens
accuccucuacagaugaguccccgucaagcca

SEQ ID NO: 289896 - RNA, 32 nt, Homo Sapiens
gccaagccagguguccucuugcagcuuggccu

SEQ ID NO: 289897 - RNA, 32 nt, Homo Sapiens
ugaucaguagucucucuggagagauaaaggaa

SEQ ID NO: 289898 - RNA, 32 nt, Homo Sapiens
ugaggacuaugcucuggugggaccacagguca

SEQ ID NO: 289899 - RNA, 32 nt, Homo Sapiens
gcuuuacuuaggagaauggacuaagcugaagg

SEQ ID NO: 289900 - RNA, 32 nt, Homo Sapiens
caaggugaggccugcugugcugcccgcacacc

SEQ ID NO: 289901 - RNA, 32 nt, Homo Sapiens
augaacugucaagggaggugcuggagagggau

SEQ ID NO: 289902 - RNA, 32 nt, Homo Sapiens
ggagcauguuuccagguucuucauggcaaacu

SEQ ID NO: 289903 - RNA, 32 nt, Homo Sapiens
ugaucucaacucguggcacuaacuuggaaaag

SEQ ID NO: 289904 - RNA, 32 nt, Homo Sapiens
gaagauaccacauugaaugaacaaagacugaa

SEQ ID NO: 289905 - RNA, 32 nt, Homo Sapiens
gcucuggaaguaccuaccacauuuuagagauu

SEQ ID NO: 289906 - RNA, 32 nt, Homo Sapiens
uacguggugcaccccaccagcuucaucaaggu

SEQ ID NO: 289907 - RNA, 32 nt, Homo Sapiens
ccuugagcaccucagcuaaggaccgcagugcc

SEQ ID NO: 289908 - RNA, 32 nt, Homo Sapiens
cccggaccggacgcaugcagggcccccacagg

SEQ ID NO: 289909 - RNA, 30 nt, Homo Sapiens
ggcagggggcccgugcugucccgggcuggg

SEQ ID NO: 289910 - RNA, 32 nt, Homo Sapiens
cgggggagccauuaggaggcgaggagagagga

SEQ ID NO: 289911 - RNA, 32 nt, Homo Sapiens
cgcugcccgccagcuguuugugcuucugcggc

SEQ ID NO: 289912 - RNA, 32 nt, Homo Sapiens
uuuaccaaaaauauguacucaauuauuguauu

SEQ ID NO: 289913 - RNA, 32 nt, Homo Sapiens
gcccuggacaagccacagccccugccuggguc

SEQ ID NO: 289914 - RNA, 32 nt, Homo Sapiens
guagcucaugccuguaucccagcccuuuggga

SEQ ID NO: 289915 - RNA, 32 nt, Homo Sapiens
uaccuggaacgaauucucuuugucuuacugcg

SEQ ID NO: 289916 - RNA, 32 nt, Homo Sapiens
ccugaagauuuauguuuuugucuaccuuguga

SEQ ID NO: 289917 - RNA, 32 nt, Homo Sapiens
acccuuuaaaaauuauuuuuaccugaagcuug

SEQ ID NO: 289918 - RNA, 32 nt, Homo Sapiens
ugguggcagacaccuguagucccagcuacuug

SEQ ID NO: 289919 - RNA, 32 nt, Homo Sapiens
aagguaugaguuauauuuuaggagauacuuuc

SEQ ID NO: 289920 - RNA, 32 nt, Homo Sapiens
cauugcugaaauuuauaagaggucgaauguuu

SEQ ID NO: 289921 - RNA, 32 nt, Homo Sapiens
acuucuguuucaucaaaagugcugccuuaaua

SEQ ID NO: 289922 - RNA, 32 nt, Homo Sapiens
gggcuggggcgcgggggccggaccaugagccg

SEQ ID NO: 289923 - RNA, 32 nt, Homo Sapiens
cgucgaucuauucuuuguaccaucugucuugc

SEQ ID NO: 289924 - RNA, 32 nt, Homo Sapiens
agcccagcugucugcaguggcugacagcaggg

SEQ ID NO: 289925 - RNA, 32 nt, Homo Sapiens
uuauguauaaaacaaagucacuuuucuccaag

SEQ ID NO: 289926 - RNA, 32 nt, Homo Sapiens
uccgucccacccagcagcccgcagagaaagga

SEQ ID NO: 289927 - RNA, 32 nt, Homo Sapiens
caguggagcugggcuccaagagggaucuagac

SEQ ID NO: 289928 - RNA, 32 nt, Homo Sapiens
uauauuaugaggacagaagauauucugauaag

SEQ ID NO: 289929 - RNA, 32 nt, Homo Sapiens
cugaauccucaauagaaaaucacauuaaucuu

SEQ ID NO: 289930 - RNA, 32 nt, Homo Sapiens
acugaaagucagggucggcuugugaaaaguug

SEQ ID NO: 289931 - RNA, 32 nt, Homo Sapiens
aggccagggcaagucucugugcgccccugucc

SEQ ID NO: 289932 - RNA, 32 nt, Homo Sapiens
uccacacagggcuuuuaccauaaccgccccag

SEQ ID NO: 289933 - RNA, 32 nt, Homo Sapiens
cacucauuuaauauuucucauuuaugagaaga

SEQ ID NO: 289934 - RNA, 32 nt, Homo Sapiens
gaagaugacuuggaaaucgcaacaucauggua

SEQ ID NO: 289935 - RNA, 32 nt, Homo Sapiens
guauauugauguugucuuuucuuucuguaucu

SEQ ID NO: 289936 - RNA, 32 nt, Homo Sapiens
gccuuccacaugcuucucaggaugccaagagg

SEQ ID NO: 289937 - RNA, 32 nt, Homo Sapiens
uuuccaggccccugcccuccccuuccucccau

SEQ ID NO: 289938 - RNA, 32 nt, Homo Sapiens
agcaagagggcuuguggacuugggggagcggu

SEQ ID NO: 289939 - RNA, 32 nt, Homo Sapiens
acaaagggcugggccccucagagccucugaga

SEQ ID NO: 289940 - RNA, 32 nt, Homo Sapiens
aucuguuuuucugcucuccaguuucuuuucuu

SEQ ID NO: 289941 - RNA, 32 nt, Homo Sapiens
uauuuauuugaaauguuuuaaagaaacauaag

SEQ ID NO: 289942 - RNA, 32 nt, Homo Sapiens
auguucacugcaaugcuggacacuacagguau

SEQ ID NO: 289943 - RNA, 32 nt, Homo Sapiens
uguaauaauggacauuagggagcccugccuuu

SEQ ID NO: 289944 - RNA, 32 nt, Homo Sapiens
ccacucugucuccugcagugaagucuguuuga

SEQ ID NO: 289945 - RNA, 32 nt, Homo Sapiens
auguaaaagaugaguguaauugugaaauguuc

SEQ ID NO: 289946 - RNA, 32 nt, Homo Sapiens
gcccugggcagcuaugccaugcucuccaucuu

SEQ ID NO: 289947 - RNA, 32 nt, Homo Sapiens
acgaaaccuaaguuuaaaaacugcuuagagac

SEQ ID NO: 289948 - RNA, 32 nt, Homo Sapiens
ccaucucagggugauucacuuucauaauccgu

SEQ ID NO: 289949 - RNA, 32 nt, Homo Sapiens
ugcaaccuccgucuccaggguucaagugauuc

SEQ ID NO: 289950 - RNA, 32 nt, Homo Sapiens
uacaggcgugagccaccacaccuggcccuaaa

SEQ ID NO: 289951 - RNA, 32 nt, Homo Sapiens
agguggaggaggaggggccagggcagucguua

SEQ ID NO: 289952 - RNA, 32 nt, Homo Sapiens
aaggagauaauuauaaaauauuuauuugcaca

SEQ ID NO: 289953 - RNA, 32 nt, Homo Sapiens
augcuuggcuccagcucugugcucucaggacu

SEQ ID NO: 289954 - RNA, 32 nt, Homo Sapiens
acucuccccccgcccacccccauugguuuuaa

SEQ ID NO: 289955 - RNA, 32 nt, Homo Sapiens
uuucaaugaagaugucacuuugaaaauaauac

SEQ ID NO: 289956 - RNA, 32 nt, Homo Sapiens
gcuagaggcugagggaggaaagagcaguuaac

SEQ ID NO: 289957 - RNA, 32 nt, Homo Sapiens
acgggcugaaaauaccaccccaggagaggacc

SEQ ID NO: 289958 - RNA, 32 nt, Homo Sapiens
ccaccccaccccacccuucacaccuggcugau

SEQ ID NO: 289959 - RNA, 32 nt, Homo Sapiens
cccagccccucccccaugucccacccuguacc

SEQ ID NO: 289960 - RNA, 32 nt, Homo Sapiens
caggguuguuuaaaguuuuuuuucucccucaa

SEQ ID NO: 289961 - RNA, 32 nt, Homo Sapiens
acggaacgcucggcgucgcgggccccgcccgg

SEQ ID NO: 289962 - RNA, 32 nt, Homo Sapiens
cagaagcuggaaguugcaaugaacuaugauag

SEQ ID NO: 289963 - RNA, 32 nt, Homo Sapiens
ggaggucccugccuaugcugacauuccauugu

SEQ ID NO: 289964 - RNA, 32 nt, Homo Sapiens
ugaauagcuccuucggccccaucuccauccuc

SEQ ID NO: 289965 - RNA, 32 nt, Homo Sapiens
uacacacacacacacacacacacacacacacc

SEQ ID NO: 289966 - RNA, 32 nt, Homo Sapiens
cacacacacacacacauacacacacacacacc

SEQ ID NO: 289967 - RNA, 32 nt, Homo Sapiens
gacaagauauuguaaggaacgaacaagguugc

SEQ ID NO: 289968 - RNA, 32 nt, Homo Sapiens
auggauugccagagccuucucaucucucccuu

SEQ ID NO: 289969 - RNA, 32 nt, Homo Sapiens
agaugcucggugcacauuggggugcuuuggga

SEQ ID NO: 289970 - RNA, 32 nt, Homo Sapiens
ccuaauuuuguuauuucaagaaugcuauuaaa

SEQ ID NO: 289971 - RNA, 32 nt, Homo Sapiens
cuucguggagcugcuucuccaaccugagaaac

SEQ ID NO: 289972 - RNA, 32 nt, Homo Sapiens
gcucuguuguuuacaaacucagguacccgcag

SEQ ID NO: 289973 - RNA, 32 nt, Homo Sapiens
guaauaaaaaauuuuaggagaauuugagaagu

SEQ ID NO: 289974 - RNA, 32 nt, Homo Sapiens
aaauucucuuuccuagucaaaaauugcccaac

SEQ ID NO: 289975 - RNA, 32 nt, Homo Sapiens
agaaaacuccuggaagacccgaucuucaccca

SEQ ID NO: 289976 - RNA, 32 nt, Homo Sapiens
ggcacuggagcacuguucggacacaccaggga

SEQ ID NO: 289977 - RNA, 32 nt, Homo Sapiens
aagcagaaaaagacaacaaauauuaaagcaag

SEQ ID NO: 289978 - RNA, 32 nt, Homo Sapiens
cgcgggcguggucgggcuccgcgccucgcgca

SEQ ID NO: 289979 - RNA, 32 nt, Homo Sapiens
agugaagaaugacaacuccucccgauucggca

SEQ ID NO: 289980 - RNA, 32 nt, Homo Sapiens
cucaaugucccccucacccccaccucaagguc

SEQ ID NO: 289981 - RNA, 32 nt, Homo Sapiens
cugcaaacuuggauaauaauuuaugucauuau

SEQ ID NO: 289982 - RNA, 32 nt, Homo Sapiens
gccaguucucgguguccugggguaggugcugu

SEQ ID NO: 289983 - RNA, 32 nt, Homo Sapiens
aaucuuggacuaguccugcaagguauaaagaa

SEQ ID NO: 289984 - RNA, 31 nt, Homo Sapiens
guggaauugcugacccauccaagggcguccu

SEQ ID NO: 289985 - RNA, 32 nt, Homo Sapiens
cugcccgccccucccuccagcaucauggccag

SEQ ID NO: 289986 - RNA, 32 nt, Homo Sapiens
gagacuucugaggcugcccccagggagggugg

SEQ ID NO: 289987 - RNA, 32 nt, Homo Sapiens
cuauaccagaauguaaauauuuuuguguuuug

SEQ ID NO: 289988 - RNA, 32 nt, Homo Sapiens
gcaaagccugaagaaguggggcuggauacccu

SEQ ID NO: 289989 - RNA, 32 nt, Homo Sapiens
ggccgcgggcagcgucgccucacgcggagcag

SEQ ID NO: 289990 - RNA, 32 nt, Homo Sapiens
ucauguccaaucuuguucgaucacuagaugau

SEQ ID NO: 289991 - RNA, 32 nt, Homo Sapiens
aauuacacccugaguacacuguaaugggcauu

SEQ ID NO: 289992 - RNA, 32 nt, Homo Sapiens
agagguucucccuuggccacugucagcuuuuc

SEQ ID NO: 289993 - RNA, 32 nt, Homo Sapiens
caaugaaugcaaacagugaagaccucaaagaa

SEQ ID NO: 289994 - RNA, 32 nt, Homo Sapiens
ugaaauuauccaugguaaaaacuaguuauaaa

SEQ ID NO: 289995 - RNA, 32 nt, Homo Sapiens
ugcggggcggagaugggcagggggcggugcgu

SEQ ID NO: 289996 - RNA, 32 nt, Homo Sapiens
gaggccaggugguggcucaugccuguaauccc

SEQ ID NO: 289997 - RNA, 32 nt, Homo Sapiens
gacuugaccagcauagauauuuggcacucucc

SEQ ID NO: 289998 - RNA, 32 nt, Homo Sapiens
gagaacccuuucaguauagugaaucagaaacu

SEQ ID NO: 289999 - RNA, 32 nt, Homo Sapiens
aacaaacugcucucaagauggugccuguuaac

SEQ ID NO: 290000 - RNA, 32 nt, Homo Sapiens
gccgcgcgcgcccucgcagucaccgccaccca

SEQ ID NO: 290001 - RNA, 32 nt, Homo Sapiens
ccacuugaaaucaagggaaauuccaugaauag

SEQ ID NO: 290002 - RNA, 32 nt, Homo Sapiens
aaggagcgugacuucuccauguuccugaaccu

SEQ ID NO: 290003 - RNA, 32 nt, Homo Sapiens
auguuuuuacuuuguuuacaacucaaaacuuu

SEQ ID NO: 290004 - RNA, 32 nt, Homo Sapiens
ggaagaugaggcucagugugauuggacugaag

SEQ ID NO: 290005 - RNA, 32 nt, Homo Sapiens
acguuuguggagaggaggguguucuggccuga

SEQ ID NO: 290006 - RNA, 32 nt, Homo Sapiens
ggauugccaaaauauucauaguagaggaaaac

SEQ ID NO: 290007 - RNA, 32 nt, Homo Sapiens
uccgggccgggcgggacagcgcagggccaugg

SEQ ID NO: 290008 - RNA, 32 nt, Homo Sapiens
gcgcucccgggcgggaaggccgcuguggagac

SEQ ID NO: 290009 - RNA, 32 nt, Homo Sapiens
gggggaagaaacaaaaacgugauggugccuca

SEQ ID NO: 290010 - RNA, 31 nt, Homo Sapiens
ucagcgcagccccagugcugugcuugaagcc

SEQ ID NO: 290011 - RNA, 32 nt, Homo Sapiens
ggccagcaguggcugagagcugagagauacuc

SEQ ID NO: 290012 - RNA, 32 nt, Homo Sapiens
aucacaugaacaaaacuaaagauaaaaaccau

SEQ ID NO: 290013 - RNA, 32 nt, Homo Sapiens
cuaccccccuggagcuuugauuuugcacugag

SEQ ID NO: 290014 - RNA, 32 nt, Homo Sapiens
gcagaggugguggaaggggccaggggccugca

SEQ ID NO: 290015 - RNA, 32 nt, Homo Sapiens
aaaaaacaagguggcacagcuggcuugagcaa

SEQ ID NO: 290016 - RNA, 32 nt, Homo Sapiens
ggagaggagugaguggcgggcugggcggcggc

SEQ ID NO: 290017 - RNA, 32 nt, Homo Sapiens
cucuuugugagauucuucugagcaguuaaccu

SEQ ID NO: 290018 - RNA, 32 nt, Homo Sapiens
caggguuuuaaaucaaacaauguagcauaaag

SEQ ID NO: 290019 - RNA, 32 nt, Homo Sapiens
aguucagccggugcaggcuccucccucccucu

SEQ ID NO: 290020 - RNA, 31 nt, Homo Sapiens
ccgucacuaacacuaaaugugcuguuuuccu

SEQ ID NO: 290021 - RNA, 32 nt, Homo Sapiens
auaacgacccucaacagcggcggaaagggagc

SEQ ID NO: 290022 - RNA, 32 nt, Homo Sapiens
ugggcgccgggagucggcgggcggcgaggagc

SEQ ID NO: 290023 - RNA, 32 nt, Homo Sapiens
cuucagaagcagaauccggagaaggaucaggu

SEQ ID NO: 290024 - RNA, 29 nt, Homo Sapiens
aagccugugacuuucgugacugcuuucuc

SEQ ID NO: 290025 - RNA, 32 nt, Homo Sapiens
ccugcugaaucgccuucucaccuccucggcaa

SEQ ID NO: 290026 - RNA, 32 nt, Homo Sapiens
agcugcccugcccaugcccacccaggccgugg

SEQ ID NO: 290027 - RNA, 32 nt, Homo Sapiens
aaaaccugacuucagugaauauuuuuguauuu

SEQ ID NO: 290028 - RNA, 32 nt, Homo Sapiens
aagggagguugggcggggcggugcugggacug

SEQ ID NO: 290029 - RNA, 32 nt, Homo Sapiens
cugagggacgccccugcccccgaccuggaggc

SEQ ID NO: 290030 - RNA, 32 nt, Homo Sapiens
ugggcugggcccgggggcgggacuggggaggg

SEQ ID NO: 290031 - RNA, 32 nt, Homo Sapiens
gaaaccccuagcauagagacagacagcgaaga

SEQ ID NO: 290032 - RNA, 32 nt, Homo Sapiens
uugacaaacuaaguuuuuuuuauuuuucccau

SEQ ID NO: 290033 - RNA, 32 nt, Homo Sapiens
acagcugcagcaggugaccuccccuuccagac

SEQ ID NO: 290034 - RNA, 32 nt, Homo Sapiens
guaccuuuucuuuuuagaaagccaaauguacu

SEQ ID NO: 290035 - RNA, 32 nt, Homo Sapiens
auuuuacuauaaauaucaccugaaauauuuca

SEQ ID NO: 290036 - RNA, 32 nt, Homo Sapiens
gggccggcacgguggcucacgccuguaauccc

SEQ ID NO: 290037 - RNA, 32 nt, Homo Sapiens
guauauaaacccauuucuuuuaacauuuauaa

SEQ ID NO: 290038 - RNA, 32 nt, Homo Sapiens
ugcagaaacgagcugugcuugcaaagacuuca

SEQ ID NO: 290039 - RNA, 32 nt, Homo Sapiens
ucagaucaguggcaaucauuuauuuuaugggg

SEQ ID NO: 290040 - RNA, 32 nt, Homo Sapiens
cccacucucgucuccuuccccucgccauagag

SEQ ID NO: 290041 - RNA, 31 nt, Homo Sapiens
agaaagcaaaaagaucugggauauguguugg

SEQ ID NO: 290042 - RNA, 32 nt, Homo Sapiens
augauaaaaccccaacucuacuaaaaauauaa

SEQ ID NO: 290043 - RNA, 31 nt, Homo Sapiens
cacugcaagccccagaagcauauggcaugug

SEQ ID NO: 290044 - RNA, 32 nt, Homo Sapiens
ccgccgagccugggcgcagagagccgggagga

SEQ ID NO: 290045 - RNA, 32 nt, Homo Sapiens
acugccagugcauccgcccaggccaggaauca

SEQ ID NO: 290046 - RNA, 32 nt, Homo Sapiens
uccauuuuauuacuaauagcuugaacccuuuu

SEQ ID NO: 290047 - RNA, 32 nt, Homo Sapiens
gguccucgcgcuugacugcacaucaguuacuu

SEQ ID NO: 290048 - RNA, 32 nt, Homo Sapiens
gcagagggacccacaagugccucccgagccua

SEQ ID NO: 290049 - RNA, 32 nt, Homo Sapiens
ugaacaggacaaaaugguuaaaaaagagauaa

SEQ ID NO: 290050 - RNA, 32 nt, Homo Sapiens
gugggugcaggcaugcacacacacgauggaau

SEQ ID NO: 290051 - RNA, 32 nt, Homo Sapiens
guguauuucuuugucucuuucuuucuugucuu

SEQ ID NO: 290052 - RNA, 32 nt, Homo Sapiens
uugugauuaucuucuuuuuccucaagaaguca

SEQ ID NO: 290053 - RNA, 32 nt, Homo Sapiens
acgcguuuuuauuuuucauuuucucgaaggaa

SEQ ID NO: 290054 - RNA, 32 nt, Homo Sapiens
gacccacugcauuccagccuggcgacagagca

SEQ ID NO: 290055 - RNA, 32 nt, Homo Sapiens
ccucucgcggcgaucccggcccagcggcuggg

SEQ ID NO: 290056 - RNA, 32 nt, Homo Sapiens
caaagccuauuauuucuaaccuaaguaaaggc

SEQ ID NO: 290057 - RNA, 32 nt, Homo Sapiens
auaucuggacugaguuuugccaaauguuaaag

SEQ ID NO: 290058 - RNA, 32 nt, Homo Sapiens
aacaaaaccaguugcaccuuaaaccauggaua

SEQ ID NO: 290059 - RNA, 32 nt, Homo Sapiens
aauuguuauuuuucucuuuuuuguuguuggug

SEQ ID NO: 290060 - RNA, 32 nt, Homo Sapiens
agcaguuugucaauaaaguuuaguccuuuuuu

SEQ ID NO: 290061 - RNA, 32 nt, Homo Sapiens
agagaaaacaauuugauaugcuucaauuuugu

SEQ ID NO: 290062 - RNA, 32 nt, Homo Sapiens
caggacguugcuggaauuuucuuuuucuuuuu

SEQ ID NO: 290063 - RNA, 32 nt, Homo Sapiens
caagauccagagcuaucaauaccucaguuaug

SEQ ID NO: 290064 - RNA, 32 nt, Homo Sapiens
cuucagcagucaacugaauuagaguugcuaau

SEQ ID NO: 290065 - RNA, 32 nt, Homo Sapiens
gcagccgcguccucccgcaggggcccccgacc

SEQ ID NO: 290066 - RNA, 32 nt, Homo Sapiens
agcuccgccucccagguucacgccauucuccc

SEQ ID NO: 290067 - RNA, 32 nt, Homo Sapiens
gucuggcagcccggcuggcccaggcccugcag

SEQ ID NO: 290068 - RNA, 32 nt, Homo Sapiens
gccaguaccucgcgccaggagaacgcgccgcc

SEQ ID NO: 290069 - RNA, 32 nt, Homo Sapiens
cagggaaagggaggagucggauggggggcaac

SEQ ID NO: 290070 - RNA, 32 nt, Homo Sapiens
agcacggaagagcagccacaaaacucaacugc

SEQ ID NO: 290071 - RNA, 32 nt, Homo Sapiens
gccgggcgggauguaaccggcugcugagcugg

SEQ ID NO: 290072 - RNA, 32 nt, Homo Sapiens
aaagaucugaauagauauuacuccaaaguaua

SEQ ID NO: 290073 - RNA, 32 nt, Homo Sapiens
guauuuuugugauuuuucuacucuuauuauau

SEQ ID NO: 290074 - RNA, 32 nt, Homo Sapiens
ccuccaccaucccacacccuccuccugcccuu

SEQ ID NO: 290075 - RNA, 32 nt, Homo Sapiens
agaaagagcggacagaggcagacgccggggcu

SEQ ID NO: 290076 - RNA, 27 nt, Homo Sapiens
caagauuaaaauugaugcgcuuaauuu

SEQ ID NO: 290077 - RNA, 32 nt, Homo Sapiens
cucugugaaggggaccugggugucacccucag

SEQ ID NO: 290078 - RNA, 32 nt, Homo Sapiens
cgguuugaauguugguuccaugccuggcccag

SEQ ID NO: 290079 - RNA, 31 nt, Homo Sapiens
gucugaaaauagaaacagguuuauuucuucc

SEQ ID NO: 290080 - RNA, 32 nt, Homo Sapiens
gagaacuucuaaaaucuaaaauccauuucaag

SEQ ID NO: 290081 - RNA, 32 nt, Homo Sapiens
ugcgcgaugagccccagggugcccccaggcuc

SEQ ID NO: 290082 - RNA, 32 nt, Homo Sapiens
ucauaccauucauuuuuuaacaaagaaaggga

SEQ ID NO: 290083 - RNA, 32 nt, Homo Sapiens
gccuuuuuagaagcagccucauggucucaugc

SEQ ID NO: 290084 - RNA, 32 nt, Homo Sapiens
auuaggugaaggauacucccuucuuucauaca

SEQ ID NO: 290085 - RNA, 32 nt, Homo Sapiens
ugcaggaauccacaaugacuuugaaguuguug

SEQ ID NO: 290086 - RNA, 32 nt, Homo Sapiens
aucuuggcugggcacgguggcuccugccugug

SEQ ID NO: 290087 - RNA, 32 nt, Homo Sapiens
agcagacuaccuucuuguguacucaugugaug

SEQ ID NO: 290088 - RNA, 32 nt, Homo Sapiens
aucuuguggcuaaaccagcauuucuguguuug

SEQ ID NO: 290089 - RNA, 32 nt, Homo Sapiens
ggaggcuggagcggggaggcgaggagggggcu

SEQ ID NO: 290090 - RNA, 32 nt, Homo Sapiens
ugaggguggggguggggguccuuaaacagacu

SEQ ID NO: 290091 - RNA, 32 nt, Homo Sapiens
ggccggggguggggcugcuuuugcuuccuuua

SEQ ID NO: 290092 - RNA, 32 nt, Homo Sapiens
gucagaucaaaggaguacauugucucaagcag

SEQ ID NO: 290093 - RNA, 31 nt, Homo Sapiens
uggaacuauugaguuacauaaagaaaauaga

SEQ ID NO: 290094 - RNA, 32 nt, Homo Sapiens
gacaucacaacacgcuuggguuccugcucugc

SEQ ID NO: 290095 - RNA, 32 nt, Homo Sapiens
aggguacaggagagggcaggggcuccaggccc

SEQ ID NO: 290096 - RNA, 31 nt, Homo Sapiens
ugguagcggcacugucuuggcuuucgugcuc

SEQ ID NO: 290097 - RNA, 32 nt, Homo Sapiens
gaauguauuuaguuagggcaguguuacaaagu

SEQ ID NO: 290098 - RNA, 29 nt, Homo Sapiens
cagucgggaggacagaggugccuacaccu

SEQ ID NO: 290099 - RNA, 32 nt, Homo Sapiens
acccaggugcuucggucaguauuaucucuuua

SEQ ID NO: 290100 - RNA, 32 nt, Homo Sapiens
ucugcccuaccgugacgcgcuccggagacgcu

SEQ ID NO: 290101 - RNA, 32 nt, Homo Sapiens
caugcacccagcuguccaucucucuguccauc

SEQ ID NO: 290102 - RNA, 32 nt, Homo Sapiens
cacuuugggagaccgaggcggguggcucaccu

SEQ ID NO: 290103 - RNA, 32 nt, Homo Sapiens
aaguuaagugcagugguaugaucaugagcuca

SEQ ID NO: 290104 - RNA, 32 nt, Homo Sapiens
uuuaagguaauuuggggaaaaggauuagucag

SEQ ID NO: 290105 - RNA, 32 nt, Homo Sapiens
agucagccagcuuggugguuaugucccaugac

SEQ ID NO: 290106 - RNA, 32 nt, Homo Sapiens
aguccuaaauguuucuagaauuuauacuguuu

SEQ ID NO: 290107 - RNA, 32 nt, Homo Sapiens
agaugagagagaaauagcuggcuugucugagu

SEQ ID NO: 290108 - RNA, 32 nt, Homo Sapiens
cacggccugugaccccggcgaccgcuccccag

SEQ ID NO: 290109 - RNA, 32 nt, Homo Sapiens
acacuguccagcuuguaauguuuaauguaaaa

SEQ ID NO: 290110 - RNA, 32 nt, Homo Sapiens
cgcugacgaaaaccacgcccccugguggcccc

SEQ ID NO: 290111 - RNA, 32 nt, Homo Sapiens
ggcaggcggcaggaaugcugcgcgccgcccug

SEQ ID NO: 290112 - RNA, 32 nt, Homo Sapiens
gagcauugccccagccacacuuucucccuggu

SEQ ID NO: 290113 - RNA, 32 nt, Homo Sapiens
ccaggggaccagcuguguucucccacccccug

SEQ ID NO: 290114 - RNA, 32 nt, Homo Sapiens
ccgacuccugaucccccucuuuuucuauggag

SEQ ID NO: 290115 - RNA, 32 nt, Homo Sapiens
aauuaauguaacuuaaauuaguugugcucugc

SEQ ID NO: 290116 - RNA, 32 nt, Homo Sapiens
auuucugaacaaagagagcucaucaucagucu

SEQ ID NO: 290117 - RNA, 32 nt, Homo Sapiens
ggccucucuaggcuaccacugacaccgucucu

SEQ ID NO: 290118 - RNA, 32 nt, Homo Sapiens
uuucaggaagaagaagcagacguugaaggcau

SEQ ID NO: 290119 - RNA, 32 nt, Homo Sapiens
cccacucccuccccuccccccuccuaggggau

SEQ ID NO: 290120 - RNA, 32 nt, Homo Sapiens
ggccgggaggucgggcucccggcaguguccag

SEQ ID NO: 290121 - RNA, 32 nt, Homo Sapiens
cgugagacuaaaacgugaccguaggcuguuuu

SEQ ID NO: 290122 - RNA, 32 nt, Homo Sapiens
gagugccccccgccgcgccagccucagcccgc

SEQ ID NO: 290123 - RNA, 32 nt, Homo Sapiens
uacuggaaaaagaguggaaauuuauuaaaauc

SEQ ID NO: 290124 - RNA, 32 nt, Homo Sapiens
cccgaccccggcgcccgggcucccagagggaa

SEQ ID NO: 290125 - RNA, 32 nt, Homo Sapiens
agagagguugaccuuaugaugagaggagucaa

SEQ ID NO: 290126 - RNA, 32 nt, Homo Sapiens
aacccccuugggaugccuguuccagcugccgc

SEQ ID NO: 290127 - RNA, 32 nt, Homo Sapiens
guacuuuaguuuaauguauaaagauccucuag

SEQ ID NO: 290128 - RNA, 32 nt, Homo Sapiens
ucauaaauccugaaauaaaucuuaugauucuc

SEQ ID NO: 290129 - RNA, 32 nt, Homo Sapiens
uuaaggaaaaagauggucuauauucucuuuau

SEQ ID NO: 290130 - RNA, 32 nt, Homo Sapiens
gaagaagaaggagaggcagggguugcuagggg

SEQ ID NO: 290131 - RNA, 32 nt, Homo Sapiens
cucuuccggcagcgguacguuuggagacgccg

SEQ ID NO: 290132 - RNA, 32 nt, Homo Sapiens
aaacaaaauacuuuuacccacuuaaaaagaga

SEQ ID NO: 290133 - RNA, 32 nt, Homo Sapiens
cugaagaaaugucaagcagagccccaggaaug

SEQ ID NO: 290134 - RNA, 32 nt, Homo Sapiens
uaaugggauuagcuguagucacugcuuauggg

SEQ ID NO: 290135 - RNA, 32 nt, Homo Sapiens
gauaucccggagccucuggggaggcggucacu

SEQ ID NO: 290136 - RNA, 32 nt, Homo Sapiens
auagggaauuuucauuuucauuauuucaagga

SEQ ID NO: 290137 - RNA, 32 nt, Homo Sapiens
uguucuggacauuucauauaaauggaaucaca

SEQ ID NO: 290138 - RNA, 32 nt, Homo Sapiens
uuaaaauuuuccaugauguucuuuuaaagauc

SEQ ID NO: 290139 - RNA, 32 nt, Homo Sapiens
cccgggugcccccaggcccaugcagacugggg

SEQ ID NO: 290140 - RNA, 32 nt, Homo Sapiens
ucagcugcugaagggagggggcuggcucugag

SEQ ID NO: 290141 - RNA, 32 nt, Homo Sapiens
uucuuucugacaccugagucuuucuccugcug

SEQ ID NO: 290142 - RNA, 32 nt, Homo Sapiens
aauggaaugugaugaaguggugacuauuucaa

SEQ ID NO: 290143 - RNA, 32 nt, Homo Sapiens
ggguucugguccuggcugugccacugacucac

SEQ ID NO: 290144 - RNA, 32 nt, Homo Sapiens
aauaacucacugaugccaucccagaaagucgg

SEQ ID NO: 290145 - RNA, 32 nt, Homo Sapiens
uaauagagccccacuugacacuauucacuaaa

SEQ ID NO: 290146 - RNA, 32 nt, Homo Sapiens
cucaucccuccucauucagacauccuccacca

SEQ ID NO: 290147 - RNA, 32 nt, Homo Sapiens
cggcagcucccuccaggcugucugggccucca

SEQ ID NO: 290148 - RNA, 32 nt, Homo Sapiens
gugcagagccuggccugcucuugugggcugug

SEQ ID NO: 290149 - RNA, 32 nt, Homo Sapiens
augugguagagacaaauccuuuuaagcaucuu

SEQ ID NO: 290150 - RNA, 32 nt, Homo Sapiens
agcccuccuacccgagccccagcuguauugga

SEQ ID NO: 290151 - RNA, 32 nt, Homo Sapiens
cucagcucagcgcagcuccgcggccgccaagc

SEQ ID NO: 290152 - RNA, 32 nt, Homo Sapiens
ggcaagaggaccaguguugcugacuccaugcu

SEQ ID NO: 290153 - RNA, 32 nt, Homo Sapiens
ccugaagaauuacuaucuagugugcagucugu

SEQ ID NO: 290154 - RNA, 32 nt, Homo Sapiens
cccuccacuuacuauuuugcuuauuuuucuuu

SEQ ID NO: 290155 - RNA, 32 nt, Homo Sapiens
gucuucaguaauauuacagccauugcaaaaca

SEQ ID NO: 290156 - RNA, 32 nt, Homo Sapiens
acauugcuaaccccaaacaggcauguaucaaa

SEQ ID NO: 290157 - RNA, 32 nt, Homo Sapiens
aagagagaaagugacacccagcccuucuucag

SEQ ID NO: 290158 - RNA, 32 nt, Homo Sapiens
uuaaaucacagcaaaguuauuuguguucaccc

SEQ ID NO: 290159 - RNA, 32 nt, Homo Sapiens
cuccgaaagggagagcagagauggcagcugaa

SEQ ID NO: 290160 - RNA, 31 nt, Homo Sapiens
guccggcagcgccugcccaggugugcuacga

SEQ ID NO: 290161 - RNA, 32 nt, Homo Sapiens
aaacuccacaucuuugcacuaccuguuugccu

SEQ ID NO: 290162 - RNA, 32 nt, Homo Sapiens
aagagugauccuccuuccuucccuggcccuug

SEQ ID NO: 290163 - RNA, 32 nt, Homo Sapiens
cccaagaggcggagguugagcuggaagaggcc

SEQ ID NO: 290164 - RNA, 32 nt, Homo Sapiens
gaugucccaucccaagccaucacacuccacuc

SEQ ID NO: 290165 - RNA, 32 nt, Homo Sapiens
acccucccuggcccucuuucccccuccagcac

SEQ ID NO: 290166 - RNA, 32 nt, Homo Sapiens
gccuuggccucuggcugcugcacuggacucau

SEQ ID NO: 290167 - RNA, 32 nt, Homo Sapiens
uagaguuuguacacaaaaucuacaaauacauu

SEQ ID NO: 290168 - RNA, 32 nt, Homo Sapiens
uugaguccucuaaaaaacuauaugcugauagc

SEQ ID NO: 290169 - RNA, 32 nt, Homo Sapiens
cacacagcugggggugcagagcccaccugggu

SEQ ID NO: 290170 - RNA, 32 nt, Homo Sapiens
guuaacagucuauuuacugcacaauuaauugu

SEQ ID NO: 290171 - RNA, 32 nt, Homo Sapiens
acaccggauuuuuucuuuuaauuauggaugua

SEQ ID NO: 290172 - RNA, 32 nt, Homo Sapiens
cagugcugugauccuugcggacgcugcccacc

SEQ ID NO: 290173 - RNA, 32 nt, Homo Sapiens
ccucccuucuccaugauuuccauggagaccug

SEQ ID NO: 290174 - RNA, 27 nt, Homo Sapiens
uaaugggccccggcuccgggaguuccu

SEQ ID NO: 290175 - RNA, 32 nt, Homo Sapiens
aaauaaauauaaauaauuguggccgggugcaa

SEQ ID NO: 290176 - RNA, 32 nt, Homo Sapiens
uaugaaggaaauguuauguuuaguucuuucag

SEQ ID NO: 290177 - RNA, 32 nt, Homo Sapiens
gagcugggaaucuauuuuuuguauuauguuuu

SEQ ID NO: 290178 - RNA, 32 nt, Homo Sapiens
aaacaggccagagcuuccuguucgacgugucc

SEQ ID NO: 290179 - RNA, 32 nt, Homo Sapiens
guuacuguuuaaaagaaaaaugcuguuuauuc

SEQ ID NO: 290180 - RNA, 32 nt, Homo Sapiens
uaccagaugugcauuucuuuuauaagucuucu

SEQ ID NO: 290181 - RNA, 32 nt, Homo Sapiens
uaaugaguauaaauagcagggagcacauugua

SEQ ID NO: 290182 - RNA, 32 nt, Homo Sapiens
ggauacaauagaaauguaaaaggucagcucca

SEQ ID NO: 290183 - RNA, 32 nt, Homo Sapiens
ucuguaaucuucacauucauuuuagcagguac

SEQ ID NO: 290184 - RNA, 32 nt, Homo Sapiens
ggaguugagugucaagcccgaagggaagacuu

SEQ ID NO: 290185 - RNA, 32 nt, Homo Sapiens
guagaaacuaaaucaucgcuuuaguaagaaag

SEQ ID NO: 290186 - RNA, 32 nt, Homo Sapiens
ucagacccacccaagggcagggauucccaaaa

SEQ ID NO: 290187 - RNA, 32 nt, Homo Sapiens
acugucggggcgagguggccgaggcaggucaa

SEQ ID NO: 290188 - RNA, 32 nt, Homo Sapiens
ggagacagcaucuggaacaagcuugggauaug

SEQ ID NO: 290189 - RNA, 32 nt, Homo Sapiens
agcaguccuggggcuuccugguggcugugacc

SEQ ID NO: 290190 - RNA, 32 nt, Homo Sapiens
gcagcaguguccaccccagugucuacaguccu

SEQ ID NO: 290191 - RNA, 32 nt, Homo Sapiens
uuugacaagaugccuucccacccagguaaccc

SEQ ID NO: 290192 - RNA, 32 nt, Homo Sapiens
acagcacuucgggaggcugaagugggaagauc

SEQ ID NO: 290193 - RNA, 32 nt, Homo Sapiens
cauauuguuuuaaaauaagaauguuauccaac

SEQ ID NO: 290194 - RNA, 32 nt, Homo Sapiens
uguaaccaaauaccaccuguaccccaauaacu

SEQ ID NO: 290195 - RNA, 32 nt, Homo Sapiens
acguuauuagcauaucuuugugcuuuauuauc

SEQ ID NO: 290196 - RNA, 32 nt, Homo Sapiens
ccagcugccucuucuuuuuuuguuuuuguuuu

SEQ ID NO: 290197 - RNA, 32 nt, Homo Sapiens
guggccgccgcugcugccccagcuggagcccg

SEQ ID NO: 290198 - RNA, 31 nt, Homo Sapiens
ugccugaguccacuuucucaaacacaaaccu

SEQ ID NO: 290199 - RNA, 32 nt, Homo Sapiens
gggugaggcaagugaggcucucagcugggcgc

SEQ ID NO: 290200 - RNA, 32 nt, Homo Sapiens
guuccaagaccaccccaccccuuuuuguaaau

SEQ ID NO: 290201 - RNA, 32 nt, Homo Sapiens
cgcacgcccuccccagccaugucguccauccu

SEQ ID NO: 290202 - RNA, 32 nt, Homo Sapiens
cagccacccgcaccuucacagacauaaaaacc

SEQ ID NO: 290203 - RNA, 32 nt, Homo Sapiens
cucugucucaauuuuuaaaccuuugcuguuaa

SEQ ID NO: 290204 - RNA, 32 nt, Homo Sapiens
ucuaaaucuauuuucauucaucuccuauucug

SEQ ID NO: 290205 - RNA, 32 nt, Homo Sapiens
ugcuccuugacuguccagaguguacaaauguu

SEQ ID NO: 290206 - RNA, 32 nt, Homo Sapiens
uauaaaggagcauacaccaugaccaaauggga

SEQ ID NO: 290207 - RNA, 32 nt, Homo Sapiens
cuuugaagauuucagaauaaggaggagccugc

SEQ ID NO: 290208 - RNA, 32 nt, Homo Sapiens
ggucacuccuggaugugcuguccuauccagcc

SEQ ID NO: 290209 - RNA, 32 nt, Homo Sapiens
cgcgagggcacgggcuguggcccgaggaggcg

SEQ ID NO: 290210 - RNA, 32 nt, Homo Sapiens
guguauaaauguuuuaugauaugauucccugu

SEQ ID NO: 290211 - RNA, 32 nt, Homo Sapiens
cuuugggaggcugaggcggguggaucacaagg

SEQ ID NO: 290212 - RNA, 32 nt, Homo Sapiens
gacaguuugaggagucgaauugagauucauca

SEQ ID NO: 290213 - RNA, 32 nt, Homo Sapiens
cauuuagagauuacauuuaagauaaagucauc

SEQ ID NO: 290214 - RNA, 32 nt, Homo Sapiens
acccagcuccacccugcuuccacuacaucagg

SEQ ID NO: 290215 - RNA, 32 nt, Homo Sapiens
cagcccagggacgaggccacucccuuuguccu

SEQ ID NO: 290216 - RNA, 27 nt, Homo Sapiens
aagccccucuucuucagcucauccugc

SEQ ID NO: 290217 - RNA, 32 nt, Homo Sapiens
aucuugcugugagcgcgaucacaggcagucca

SEQ ID NO: 290218 - RNA, 32 nt, Homo Sapiens
cggcgcguugcggcaggugcccugggcguacc

SEQ ID NO: 290219 - RNA, 32 nt, Homo Sapiens
cugccagcccuucuucuggcuuccccuuccau

SEQ ID NO: 290220 - RNA, 32 nt, Homo Sapiens
ccuaaugucaaauaugaaguagacagucguau

SEQ ID NO: 290221 - RNA, 32 nt, Homo Sapiens
acuaaaggaaacaaacaaaaacaggacaaaau

SEQ ID NO: 290222 - RNA, 32 nt, Homo Sapiens
caagauuauuaguaaagggcucccugugagau

SEQ ID NO: 290223 - RNA, 32 nt, Homo Sapiens
cagcgacugcccggcccucccuccccugccuc

SEQ ID NO: 290224 - RNA, 32 nt, Homo Sapiens
guaccagcuuaguuaugauacuuagucacaua

SEQ ID NO: 290225 - RNA, 32 nt, Homo Sapiens
aguacuuuuuauuaguuucuugucuuucaaca

SEQ ID NO: 290226 - RNA, 32 nt, Homo Sapiens
cccuucagcaauggcuacuagaaggacgaaca

SEQ ID NO: 290227 - RNA, 32 nt, Homo Sapiens
cuguggaagauaaucuagcuucuccaccucuu

SEQ ID NO: 290228 - RNA, 32 nt, Homo Sapiens
cauaguaacugaaaugaaaucuucuugauuuu

SEQ ID NO: 290229 - RNA, 32 nt, Homo Sapiens
uggagagcgggccccgcccugaaggggcaccg

SEQ ID NO: 290230 - RNA, 32 nt, Homo Sapiens
acguuaauuaagagagcuaaaaaggaagcaau

SEQ ID NO: 290231 - RNA, 32 nt, Homo Sapiens
ccguaccccugaggaaacaaaaaggaaaugag

SEQ ID NO: 290232 - RNA, 32 nt, Homo Sapiens
uaggugucgcucugcuggccuggccggcaacc

SEQ ID NO: 290233 - RNA, 32 nt, Homo Sapiens
cacagagauaaugcagacucaggcagugcgca

SEQ ID NO: 290234 - RNA, 32 nt, Homo Sapiens
auggcugaugggcgcuccugguguugauagag

SEQ ID NO: 290235 - RNA, 32 nt, Homo Sapiens
ggcugcuaaaauuuaugaagaggacucacauu

SEQ ID NO: 290236 - RNA, 32 nt, Homo Sapiens
guguguggccccaguuucuagcggcuuuugca

SEQ ID NO: 290237 - RNA, 32 nt, Homo Sapiens
uccagcgcaccuccccagagcuccccgcacug

SEQ ID NO: 290238 - RNA, 32 nt, Homo Sapiens
gucucucgggcaccacccauauagcaguccca

SEQ ID NO: 290239 - RNA, 32 nt, Homo Sapiens
cugcccgccucagccucccaaagugcugggau

SEQ ID NO: 290240 - RNA, 32 nt, Homo Sapiens
gcacuuugggaggccaaggcgagcggaucaug

SEQ ID NO: 290241 - RNA, 32 nt, Homo Sapiens
cugcccgccucggccucccaaagugcuaggau

SEQ ID NO: 290242 - RNA, 32 nt, Homo Sapiens
gaugcuucucugaguucugcuacaaccucuag

SEQ ID NO: 290243 - RNA, 32 nt, Homo Sapiens
uggguucaaaucccagcuccagcauucagccu

SEQ ID NO: 290244 - RNA, 32 nt, Homo Sapiens
agauaguugcuguuuuguaaaauguaauguau

SEQ ID NO: 290245 - RNA, 32 nt, Homo Sapiens
caacaaauuuuuguacuuuuaguacagaugag

SEQ ID NO: 290246 - RNA, 32 nt, Homo Sapiens
acuggaauguucggaaaacauaaaggacagcu

SEQ ID NO: 290247 - RNA, 32 nt, Homo Sapiens
gugcacgggucgucggcgagccgcgaccgggu

SEQ ID NO: 290248 - RNA, 32 nt, Homo Sapiens
cagucagccccacuuccuuucuuucuaacucc

SEQ ID NO: 290249 - RNA, 32 nt, Homo Sapiens
acucacaucuguuuaacuugaacucuuaugca

SEQ ID NO: 290250 - RNA, 32 nt, Homo Sapiens
acuagcaucagaccucaaggcuuuugucccac

SEQ ID NO: 290251 - RNA, 32 nt, Homo Sapiens
cgcgcgugcacacacacacacacacacacgag

SEQ ID NO: 290252 - RNA, 32 nt, Homo Sapiens
gaaaucugacuuccuaacucaugcucccucca

SEQ ID NO: 290253 - RNA, 32 nt, Homo Sapiens
ccccagauggcaggauauuugguuucagagua

SEQ ID NO: 290254 - RNA, 32 nt, Homo Sapiens
agaaacucuacaaauguacugaauguggaaaa

SEQ ID NO: 290255 - RNA, 32 nt, Homo Sapiens
ccagggcuccacggggcgcccuugucucaguc

SEQ ID NO: 290256 - RNA, 32 nt, Homo Sapiens
ugccacugcacuccagccugggugacugagug

SEQ ID NO: 290257 - RNA, 32 nt, Homo Sapiens
ggggcccgccaugaaccccggcuucgauuugu

SEQ ID NO: 290258 - RNA, 32 nt, Homo Sapiens
acuuuacagccucuuuucaucuguaaaaugag

SEQ ID NO: 290259 - RNA, 32 nt, Homo Sapiens
uucucauucacgggacuaguuagcuuuaagca

SEQ ID NO: 290260 - RNA, 32 nt, Homo Sapiens
agugaaccuuuagaaacucaaaaacugagaaa

SEQ ID NO: 290261 - RNA, 32 nt, Homo Sapiens
gugggggcagcuuuugggaagucucagcagcu

SEQ ID NO: 290262 - RNA, 32 nt, Homo Sapiens
cgguggcggccacugcaucgcgucccaccucc

SEQ ID NO: 290263 - RNA, 32 nt, Homo Sapiens
gaagggagagggugggccugcuguggacaaug

SEQ ID NO: 290264 - RNA, 32 nt, Homo Sapiens
uuuuuacuuuuaggguuuuggccaaauugggc

SEQ ID NO: 290265 - RNA, 32 nt, Homo Sapiens
uucagacacauuuugaagaugaaucuucaacu

SEQ ID NO: 290266 - RNA, 30 nt, Homo Sapiens
gcccucggagcgcagcacccggcggacaag

SEQ ID NO: 290267 - RNA, 32 nt, Homo Sapiens
ggccugaggggagggggccagacucugggagu

SEQ ID NO: 290268 - RNA, 32 nt, Homo Sapiens
aaacauaaucauuguucucacccucuuuuaaa

SEQ ID NO: 290269 - RNA, 32 nt, Homo Sapiens
uaacaaacuauuaugaaauacuuucaaaucug

SEQ ID NO: 290270 - RNA, 32 nt, Homo Sapiens
agaggcggcggacgggccggagggaggauguu

SEQ ID NO: 290271 - RNA, 32 nt, Homo Sapiens
uauaauucaauacaugaucaucaaguuaauug

SEQ ID NO: 290272 - RNA, 32 nt, Homo Sapiens
cgcgccggauguuucugugacacacaaucagc

SEQ ID NO: 290273 - RNA, 32 nt, Homo Sapiens
gagagcuggcccucgcuccucauggugugccu

SEQ ID NO: 290274 - RNA, 32 nt, Homo Sapiens
gggggugagcaggggguuuaucuguguguagu

SEQ ID NO: 290275 - RNA, 32 nt, Homo Sapiens
guuuacuggaguauaacuggcuuaguaaguau

SEQ ID NO: 290276 - RNA, 32 nt, Homo Sapiens
accacgcccgucugacugaccucugaccucug

SEQ ID NO: 290277 - RNA, 32 nt, Homo Sapiens
ccagacugacgaaggcgugaccucaggcccac

SEQ ID NO: 290278 - RNA, 32 nt, Homo Sapiens
guacuaugugcaugcauacuaccuauuucuaa

SEQ ID NO: 290279 - RNA, 32 nt, Homo Sapiens
ccugccgucuuucgccagccaagcccagccug

SEQ ID NO: 290280 - RNA, 32 nt, Homo Sapiens
cuuggaagguuuuaagcagagaagugacaggu

SEQ ID NO: 290281 - RNA, 32 nt, Homo Sapiens
gaagucacaaaacagcagauuucccaagagca

SEQ ID NO: 290282 - RNA, 32 nt, Homo Sapiens
gcauuaagaacaaggaggucaaaauaucaaca

SEQ ID NO: 290283 - RNA, 32 nt, Homo Sapiens
aagauuccuuuccuauccauccuuccauccag

SEQ ID NO: 290284 - RNA, 32 nt, Homo Sapiens
cggacuggccuggccgacgugguaaaacccca

SEQ ID NO: 290285 - RNA, 32 nt, Homo Sapiens
uaauaaaggaagaucugggaugggcugguggg

SEQ ID NO: 290286 - RNA, 32 nt, Homo Sapiens
aacugauggcccaaaaacuaccucaagagacc

SEQ ID NO: 290287 - RNA, 32 nt, Homo Sapiens
ucaagaccacgauccuaccgggaggaaugaau

SEQ ID NO: 290288 - RNA, 32 nt, Homo Sapiens
aaaaagcuccuggggcguccaggccgcgcccu

SEQ ID NO: 290289 - RNA, 32 nt, Homo Sapiens
cuaggcaacuccaagaggcuucucaagcaggg

SEQ ID NO: 290290 - RNA, 32 nt, Homo Sapiens
uuuaucuguaaauuuuaaaguuugacuguaua

SEQ ID NO: 290291 - RNA, 32 nt, Homo Sapiens
ccauucauaacuguugagaguacaccaugagc

SEQ ID NO: 290292 - RNA, 32 nt, Homo Sapiens
uagaaaaugaauuguucacuacaauuagagaa

SEQ ID NO: 290293 - RNA, 32 nt, Homo Sapiens
ucaaggagcccgggccccgcggcggccgggag

SEQ ID NO: 290294 - RNA, 32 nt, Homo Sapiens
agcccccucuguaacugccucccuuuaguuca

SEQ ID NO: 290295 - RNA, 32 nt, Homo Sapiens
uuauccauaguaugaaaccuguaguuuuaaug

SEQ ID NO: 290296 - RNA, 32 nt, Homo Sapiens
ugugaggccccagccuggagccaggcacuggg

SEQ ID NO: 290297 - RNA, 32 nt, Homo Sapiens
auucaacuuugauuauucaacaaaaucaugac

SEQ ID NO: 290298 - RNA, 32 nt, Homo Sapiens
uuuuucuuaaucaaguuuuuccagaagagagu

SEQ ID NO: 290299 - RNA, 32 nt, Homo Sapiens
augggugcugcacuuuauuuuuguuugguuuu

SEQ ID NO: 290300 - RNA, 32 nt, Homo Sapiens
guugaaauagugauuuauacaugaugggcaau

SEQ ID NO: 290301 - RNA, 32 nt, Homo Sapiens
aauccucugcaccccaggagcgccgcuuggac

SEQ ID NO: 290302 - RNA, 32 nt, Homo Sapiens
cuuccuguggccccuuuccccaagcaggggcg

SEQ ID NO: 290303 - RNA, 32 nt, Homo Sapiens
acgaauuguuguuaaaaauuauagcaaaaaga

SEQ ID NO: 290304 - RNA, 32 nt, Homo Sapiens
cgaaggccuccugacauccccagccguggcug

SEQ ID NO: 290305 - RNA, 32 nt, Homo Sapiens
agacugucugccuguccugggguggcuaggag

SEQ ID NO: 290306 - RNA, 32 nt, Homo Sapiens
auggcauggccucagcugugccaaggcuacaa

SEQ ID NO: 290307 - RNA, 32 nt, Homo Sapiens
uuuagucaggacucagaaaauuugagcuuagu

SEQ ID NO: 290308 - RNA, 32 nt, Homo Sapiens
uaaggaaaaaauauuuacuggaaaagacuagc

SEQ ID NO: 290309 - RNA, 32 nt, Homo Sapiens
agugggaaauauagcagcaauuugagcaacuu

SEQ ID NO: 290310 - RNA, 32 nt, Homo Sapiens
ugacaccuuucccccagcuccucggugaggug

SEQ ID NO: 290311 - RNA, 32 nt, Homo Sapiens
aauuacuauagcaaaaggaagccuaagaagua

SEQ ID NO: 290312 - RNA, 32 nt, Homo Sapiens
gagcagccgccgccgccucagucagucaguca

SEQ ID NO: 290313 - RNA, 32 nt, Homo Sapiens
accacccaccccaccccucuuucuccggcucc

SEQ ID NO: 290314 - RNA, 32 nt, Homo Sapiens
ucuauuucccaguuccaaauuccaggugcuug

SEQ ID NO: 290315 - RNA, 32 nt, Homo Sapiens
gcggaauguggcagaugaaaugugcuggagga

SEQ ID NO: 290316 - RNA, 32 nt, Homo Sapiens
agauggccuugccuugggguccugcuuguuuc

SEQ ID NO: 290317 - RNA, 32 nt, Homo Sapiens
gacacccucuguuuccuuucccggccccaccu

SEQ ID NO: 290318 - RNA, 32 nt, Homo Sapiens
cuccuccaugcugcugccccuggucccaggug

SEQ ID NO: 290319 - RNA, 29 nt, Homo Sapiens
guguuuguguguuucaaggucagaacagg

SEQ ID NO: 290320 - RNA, 32 nt, Homo Sapiens
uuauuacagaaaaaaaugcagaugaucucuua

SEQ ID NO: 290321 - RNA, 32 nt, Homo Sapiens
accagagcagggagccugggggugucggggca

SEQ ID NO: 290322 - RNA, 32 nt, Homo Sapiens
uugaauuugacaaacugaaacagauggguuuu

SEQ ID NO: 290323 - RNA, 32 nt, Homo Sapiens
ucaggccccgcccccaggauccuacggauuga

SEQ ID NO: 290324 - RNA, 32 nt, Homo Sapiens
uagaucccgcgagguagcccccgaacuauuuc

SEQ ID NO: 290325 - RNA, 32 nt, Homo Sapiens
uacccuggaaaugugacaggaaccuuccaguu

SEQ ID NO: 290326 - RNA, 32 nt, Homo Sapiens
agaggccccgcggccucgcaagaugugagagg

SEQ ID NO: 290327 - RNA, 32 nt, Homo Sapiens
cugaggaccccaagagcagugauucagagaac

SEQ ID NO: 290328 - RNA, 32 nt, Homo Sapiens
cucauaauucuuaucucuauaaucaaaaguau

SEQ ID NO: 290329 - RNA, 32 nt, Homo Sapiens
gaaaccaaucccacuucuuucuaggagauugg

SEQ ID NO: 290330 - RNA, 32 nt, Homo Sapiens
agaaaauccaaauauuuuuugugacaagaauc

SEQ ID NO: 290331 - RNA, 32 nt, Homo Sapiens
uuucauauguauuguucaucuauacuucaucu

SEQ ID NO: 290332 - RNA, 32 nt, Homo Sapiens
ugagacucuugcuguagcguagauagcuguga

SEQ ID NO: 290333 - RNA, 32 nt, Homo Sapiens
gcuaauguggacuuuucuuuuuccaugaaaug

SEQ ID NO: 290334 - RNA, 32 nt, Homo Sapiens
acagggaaaauuaaacaaaaccccagguuauu

SEQ ID NO: 290335 - RNA, 32 nt, Homo Sapiens
ccggaggaaaggaaaagacagagucagacagg

SEQ ID NO: 290336 - RNA, 32 nt, Homo Sapiens
acccuagacuguugguaacugggauaacugua

SEQ ID NO: 290337 - RNA, 32 nt, Homo Sapiens
ugcaguauaaagucagaaaauaaaguuaacau

SEQ ID NO: 290338 - RNA, 32 nt, Homo Sapiens
uaguuauagggcuuaaauugauuucuauuuca

SEQ ID NO: 290339 - RNA, 32 nt, Homo Sapiens
cacacuggccccagggcccugcugccugggcc

SEQ ID NO: 290340 - RNA, 32 nt, Homo Sapiens
aaaagucuccagaggucuaaccccagauaaau

SEQ ID NO: 290341 - RNA, 32 nt, Homo Sapiens
uccgcaugcggagccacagcuaccuccgggcc

SEQ ID NO: 290342 - RNA, 32 nt, Homo Sapiens
gggcgggguugggggcgggcggggagcugccu

SEQ ID NO: 290343 - RNA, 29 nt, Homo Sapiens
ggcggugcggcacagaggagcgcucgcuu

SEQ ID NO: 290344 - RNA, 32 nt, Homo Sapiens
uccagaucgggagcagucuuauagcuggauca

SEQ ID NO: 290345 - RNA, 32 nt, Homo Sapiens
cugcagggauaauaaugaacuaauguaguguu

SEQ ID NO: 290346 - RNA, 32 nt, Homo Sapiens
aauaaaaaggcaaucacauaaaaaagaguuua

SEQ ID NO: 290347 - RNA, 32 nt, Homo Sapiens
uucugagaaugaauuuaauugaaauagaccag

SEQ ID NO: 290348 - RNA, 32 nt, Homo Sapiens
cggggccgccuucagccacguguccucgcuua

SEQ ID NO: 290349 - RNA, 32 nt, Homo Sapiens
ugguugagcugaugucaauugguucuugucuu

SEQ ID NO: 290350 - RNA, 32 nt, Homo Sapiens
caguuuuuuaauaaaaggaacaauauacaaca

SEQ ID NO: 290351 - RNA, 32 nt, Homo Sapiens
cuccuucauagaugaaugcuugguguuauuca

SEQ ID NO: 290352 - RNA, 32 nt, Homo Sapiens
gcauggaaaaguucuucaguggugauuucuga

SEQ ID NO: 290353 - RNA, 32 nt, Homo Sapiens
guaugaaguugugucuauaauuauuaccaauu

SEQ ID NO: 290354 - RNA, 32 nt, Homo Sapiens
ccugccauacccaugagcaaacaguuuggcau

SEQ ID NO: 290355 - RNA, 32 nt, Homo Sapiens
caguguuuuauuuguccuuucaucaguuggug

SEQ ID NO: 290356 - RNA, 32 nt, Homo Sapiens
caguggucagucaacacuuauucaccaucaag

SEQ ID NO: 290357 - RNA, 32 nt, Homo Sapiens
gcagcuggcuuggaggcuccgcgcucuggagg

SEQ ID NO: 290358 - RNA, 32 nt, Homo Sapiens
ucguccuggagcccucccaguaccucgggcug

SEQ ID NO: 290359 - RNA, 32 nt, Homo Sapiens
uaaugcuugcucucccaagaucuuuaacuccu

SEQ ID NO: 290360 - RNA, 32 nt, Homo Sapiens
ugaaugugagcgacuuggcuuuuacaugcccu

SEQ ID NO: 290361 - RNA, 32 nt, Homo Sapiens
cgcccacggggacggauugguuguuuuuuccu

SEQ ID NO: 290362 - RNA, 32 nt, Homo Sapiens
gacuuacccuugagagggcaucugcagaauau

SEQ ID NO: 290363 - RNA, 32 nt, Homo Sapiens
guuaaccagaaaguccuggcugugguugcaga

SEQ ID NO: 290364 - RNA, 32 nt, Homo Sapiens
auuuggucauuaaauuuguuuacaauauacuu

SEQ ID NO: 290365 - RNA, 32 nt, Homo Sapiens
aacuggguuccagucuuaauucauuuuccgug

SEQ ID NO: 290366 - RNA, 32 nt, Homo Sapiens
cuuuccccagcaccccagagccagucgggaca

SEQ ID NO: 290367 - RNA, 32 nt, Homo Sapiens
aguuccgucccggcccugcucacagcagcgcc

SEQ ID NO: 290368 - RNA, 32 nt, Homo Sapiens
uaccuuggcugauguugcagccugcagcaagu

SEQ ID NO: 290369 - RNA, 32 nt, Homo Sapiens
uggaguuugauccaugaaccuggcuucgaggc

SEQ ID NO: 290370 - RNA, 32 nt, Homo Sapiens
uuuauaaugcccuccauccagguagcaagaug

SEQ ID NO: 290371 - RNA, 32 nt, Homo Sapiens
ggaagacacagguagcuacuagguuuuauuuc

SEQ ID NO: 290372 - RNA, 32 nt, Homo Sapiens
uucuugugucguuugugaaaguucuuaaccug

SEQ ID NO: 290373 - RNA, 32 nt, Homo Sapiens
cgccagugcacuccagcugggcgacagagcga

SEQ ID NO: 290374 - RNA, 32 nt, Homo Sapiens
ugccaccaugcccagcuaauucuuguauuuuu

SEQ ID NO: 290375 - RNA, 32 nt, Homo Sapiens
aaaaccugcuccauguauggaccuggaaggcc

SEQ ID NO: 290376 - RNA, 32 nt, Homo Sapiens
aucuauaaaaauuauaaaaggauuuuugaaag

SEQ ID NO: 290377 - RNA, 32 nt, Homo Sapiens
gucagucugcuuccuucaggcaucauucucaa

SEQ ID NO: 290378 - RNA, 32 nt, Homo Sapiens
acaaggccaagggcaaguaaacgagaacucuu

SEQ ID NO: 290379 - RNA, 32 nt, Homo Sapiens
ucacuggggucuuuuuggauuugguuguuuga

SEQ ID NO: 290380 - RNA, 32 nt, Homo Sapiens
cgugggcaccugaguucuagcuucccccagcg

SEQ ID NO: 290381 - RNA, 27 nt, Homo Sapiens
gcaaguuccuucuugaacccuggugcc

SEQ ID NO: 290382 - RNA, 32 nt, Homo Sapiens
acuucagcagaagacaaggaaacugaagaagc

SEQ ID NO: 290383 - RNA, 32 nt, Homo Sapiens
acugcuguucuucuuuaucauuuauucacuuc

SEQ ID NO: 290384 - RNA, 32 nt, Homo Sapiens
gaaagagauugugucucuuucauugcuuuguu

SEQ ID NO: 290385 - RNA, 32 nt, Homo Sapiens
aacccuggcucuaucauuuuccuuuuuugcca

SEQ ID NO: 290386 - RNA, 32 nt, Homo Sapiens
accgcgcucccuggcugcucccggggccuucc

SEQ ID NO: 290387 - RNA, 32 nt, Homo Sapiens
aauuaagcgcgaaaagcagaaauaucaguguc

SEQ ID NO: 290388 - RNA, 32 nt, Homo Sapiens
cccucagccgaggcugcuccgcggcggccgca

SEQ ID NO: 290389 - RNA, 32 nt, Homo Sapiens
uguaucuuguccuacauaguucucagaauaca

SEQ ID NO: 290390 - RNA, 32 nt, Homo Sapiens
acagaaaauauuucccaaacauccuuuucauc

SEQ ID NO: 290391 - RNA, 32 nt, Homo Sapiens
uauaaccugggaugggcaccccugccaguccu

SEQ ID NO: 290392 - RNA, 32 nt, Homo Sapiens
ggguucgcgcgggggagaagggcugccccggg

SEQ ID NO: 290393 - RNA, 32 nt, Homo Sapiens
cccuuggaagaugcuuugaggaccccagugau

SEQ ID NO: 290394 - RNA, 32 nt, Homo Sapiens
cugaaguaaggacagcagaucgugaggaaaaa

SEQ ID NO: 290395 - RNA, 32 nt, Homo Sapiens
ggcggcggcucuggcagcggcggcgacagugu

SEQ ID NO: 290396 - RNA, 32 nt, Homo Sapiens
uuagccauggggauuuuugaccaggaugugag

SEQ ID NO: 290397 - RNA, 32 nt, Homo Sapiens
uuuaaagaaaaauuauuuuaaaaugugacuua

SEQ ID NO: 290398 - RNA, 32 nt, Homo Sapiens
uauaagacaaugaaaguuugauguuguacaua

SEQ ID NO: 290399 - RNA, 32 nt, Homo Sapiens
caucagaggaccccagaaaacuacccaaauga

SEQ ID NO: 290400 - RNA, 32 nt, Homo Sapiens
aggugcuucgucugaaagugaacucucauaau

SEQ ID NO: 290401 - RNA, 32 nt, Homo Sapiens
ugagcgguuuuggagaucuugcuggccugagc

SEQ ID NO: 290402 - RNA, 32 nt, Homo Sapiens
ucauuuuucugcacacuuuuuugaugugaugc

SEQ ID NO: 290403 - RNA, 32 nt, Homo Sapiens
gaagaagaggccuucaaaugcuuauuuaauuc

SEQ ID NO: 290404 - RNA, 32 nt, Homo Sapiens
aacaauaaaaauucucuuauaaaggcaaaaaa

SEQ ID NO: 290405 - RNA, 32 nt, Homo Sapiens
cagcaggaguuucaagaacagcagcacaaaaa

SEQ ID NO: 290406 - RNA, 32 nt, Homo Sapiens
cuacccaucucccccaucccccacugccacac

SEQ ID NO: 290407 - RNA, 32 nt, Homo Sapiens
acacaaaauggaaugacugcuuaguccuuucu

SEQ ID NO: 290408 - RNA, 30 nt, Homo Sapiens
cggugucucugggccggcggcagugggcaa

SEQ ID NO: 290409 - RNA, 32 nt, Homo Sapiens
gcgggcgccggcgccgcagaucagccaguaga

SEQ ID NO: 290410 - RNA, 32 nt, Homo Sapiens
gcgagggagcgcgcucccucccgacgcgcggg

SEQ ID NO: 290411 - RNA, 32 nt, Homo Sapiens
ccagugucuguggccuggcaaguggccacgcc

SEQ ID NO: 290412 - RNA, 32 nt, Homo Sapiens
ggacucuggcacccacccacaaagcaagaccu

SEQ ID NO: 290413 - RNA, 32 nt, Homo Sapiens
cuucugcgugcccuggccccagccccagccaa

SEQ ID NO: 290414 - RNA, 32 nt, Homo Sapiens
gguugggcgugguggcucaugccuguaauccc

SEQ ID NO: 290415 - RNA, 32 nt, Homo Sapiens
gggugggcguaguggcucuugccuguaauccc

SEQ ID NO: 290416 - RNA, 31 nt, Homo Sapiens
cacuagaugucaucagaggugcuguuccgug

SEQ ID NO: 290417 - RNA, 32 nt, Homo Sapiens
gguaguuuaugugaaagggcuuuggaaauaau

SEQ ID NO: 290418 - RNA, 32 nt, Homo Sapiens
uucuacuugguucauaaaauaguggcuuucaa

SEQ ID NO: 290419 - RNA, 32 nt, Homo Sapiens
caaugcccaagcagagggagcccccuugcccu

SEQ ID NO: 290420 - RNA, 32 nt, Homo Sapiens
guauuguaugacugucaggauuuuaagauuau

SEQ ID NO: 290421 - RNA, 32 nt, Homo Sapiens
agggagcaacaccggagcuggugcaugcuggg

SEQ ID NO: 290422 - RNA, 32 nt, Homo Sapiens
uggaaaagcugcagacauucaaugcaagccug

SEQ ID NO: 290423 - RNA, 32 nt, Homo Sapiens
ccugacuccccuccccagacuggcuugggagc

SEQ ID NO: 290424 - RNA, 30 nt, Homo Sapiens
cgcgcgcgccauuucuagucguuuucaaag

SEQ ID NO: 290425 - RNA, 32 nt, Homo Sapiens
gucaugcugagcaagaggcauucuugcaccug

SEQ ID NO: 290426 - RNA, 32 nt, Homo Sapiens
cgcccccgccccacagccaaccucccgggcac

SEQ ID NO: 290427 - RNA, 32 nt, Homo Sapiens
aaugggcaguguuccccuuuagagagggugug

SEQ ID NO: 290428 - RNA, 32 nt, Homo Sapiens
aagagccacaaaugcauggguguuguauagau

SEQ ID NO: 290429 - RNA, 32 nt, Homo Sapiens
uuuccacuggcacuucccugcuuugcuaccau

SEQ ID NO: 290430 - RNA, 32 nt, Homo Sapiens
gcgcccgucgccaucuccaccaugcagucccg

SEQ ID NO: 290431 - RNA, 32 nt, Homo Sapiens
aggcaaugaguggcaagaacaugaugacagac

SEQ ID NO: 290432 - RNA, 32 nt, Homo Sapiens
auaccaauaacacuaacaauaccgaucuugaa

SEQ ID NO: 290433 - RNA, 32 nt, Homo Sapiens
agacauggaauuaccuuagauuagcucuggac

SEQ ID NO: 290434 - RNA, 32 nt, Homo Sapiens
gcccagaaagccagcccucccuucccuucuug

SEQ ID NO: 290435 - RNA, 32 nt, Homo Sapiens
ccgcccucugcaaaaacuaggcacauccgcag

SEQ ID NO: 290436 - RNA, 32 nt, Homo Sapiens
cagcagccgcggcugcggcugcaguggugacu

SEQ ID NO: 290437 - RNA, 32 nt, Homo Sapiens
uuuucaugagauacuguguuacacaaaguccu

SEQ ID NO: 290438 - RNA, 32 nt, Homo Sapiens
gggcguuucacuuuuccugcguuuggggaguc

SEQ ID NO: 290439 - RNA, 32 nt, Homo Sapiens
gcugccuucaggaaauacaacuaacuaaaauc

SEQ ID NO: 290440 - RNA, 32 nt, Homo Sapiens
caucuucuuuugcgucgccagccgagccacau

SEQ ID NO: 290441 - RNA, 32 nt, Homo Sapiens
gcuuuucuaaucuuguuaaauauaucuauuuu

SEQ ID NO: 290442 - RNA, 32 nt, Homo Sapiens
gcugagaugcggaaagcaccaggccguaggga

SEQ ID NO: 290443 - RNA, 32 nt, Homo Sapiens
uagaggaaaaucaaugcuuuaucugauaugcu

SEQ ID NO: 290444 - RNA, 32 nt, Homo Sapiens
gugacaugucugugagcugcggaggcugcggc

SEQ ID NO: 290445 - RNA, 32 nt, Homo Sapiens
aaucaaggaaccaaauaucuguagccauggag

SEQ ID NO: 290446 - RNA, 32 nt, Homo Sapiens
aaugccaccuucuggugucaagagggaggugg

SEQ ID NO: 290447 - RNA, 32 nt, Homo Sapiens
acgcucugcccggcugcugccgcugaggaaag

SEQ ID NO: 290448 - RNA, 32 nt, Homo Sapiens
aggacuagccaagcccucugugugccaucucc

SEQ ID NO: 290449 - RNA, 32 nt, Homo Sapiens
gaggaggcagcggggaggagcgugcagggagg

SEQ ID NO: 290450 - RNA, 32 nt, Homo Sapiens
gcccagaguguggcgguccccaugguggcagc

SEQ ID NO: 290451 - RNA, 32 nt, Homo Sapiens
uggaagcgggugggcggggcugagagagggua

SEQ ID NO: 290452 - RNA, 32 nt, Homo Sapiens
agcugcagagagcaacgagaaaaggaacucuc

SEQ ID NO: 290453 - RNA, 32 nt, Homo Sapiens
cgugagccacuuuagccaggauauacuuaauu

SEQ ID NO: 290454 - RNA, 32 nt, Homo Sapiens
gccaggccuuguccucgcucaaggcugugggu

SEQ ID NO: 290455 - RNA, 32 nt, Homo Sapiens
uggagaaacugggcauuuuaccaaggauuuga

SEQ ID NO: 290456 - RNA, 32 nt, Homo Sapiens
cccugacccccuccccccgcugcugggguccu

SEQ ID NO: 290457 - RNA, 28 nt, Homo Sapiens
uccaugaccacucugauguggacaguag

SEQ ID NO: 290458 - RNA, 32 nt, Homo Sapiens
gugcauccuaggaaacaaacugaacguaggaa

SEQ ID NO: 290459 - RNA, 32 nt, Homo Sapiens
caaucuacuuucuguuaugucagacuauaaga

SEQ ID NO: 290460 - RNA, 32 nt, Homo Sapiens
uugcaugagaagccauacaaauccacagaacu

SEQ ID NO: 290461 - RNA, 32 nt, Homo Sapiens
acacuguucuugggcgccccagcauuguguug

SEQ ID NO: 290462 - RNA, 32 nt, Homo Sapiens
cugccucucugucaugagacgcauucgaagag

SEQ ID NO: 290463 - RNA, 32 nt, Homo Sapiens
auagcucugcaaaaaacaccaaaggaccguuu

SEQ ID NO: 290464 - RNA, 32 nt, Homo Sapiens
uggaacggcaugcaucaguccacagcuguaug

SEQ ID NO: 290465 - RNA, 32 nt, Homo Sapiens
gcuguggaccagagaccuggacuuuugucugc

SEQ ID NO: 290466 - RNA, 32 nt, Homo Sapiens
ccaccuacauaaauaaaacauaagcauauuga

SEQ ID NO: 290467 - RNA, 32 nt, Homo Sapiens
caccauuucuucugccacgugccaccucuguu

SEQ ID NO: 290468 - RNA, 30 nt, Homo Sapiens
uggggaggcaggccugcugccugcccucga

SEQ ID NO: 290469 - RNA, 32 nt, Homo Sapiens
uuuacuguauugaugauuaaaugaggucuuuu

SEQ ID NO: 290470 - RNA, 32 nt, Homo Sapiens
gaagcuccgaccguccucuccuguuuuaccca

SEQ ID NO: 290471 - RNA, 32 nt, Homo Sapiens
cagcugcccuccccucgccccuuggcauugga

SEQ ID NO: 290472 - RNA, 32 nt, Homo Sapiens
aacagugguuuuuguuuuguuuuguuuuauug

SEQ ID NO: 290473 - RNA, 32 nt, Homo Sapiens
cggcucaggcccaggcagcuggacagcaccca

SEQ ID NO: 290474 - RNA, 32 nt, Homo Sapiens
uaggaagucaauauguggaagcaaccaagccu

SEQ ID NO: 290475 - RNA, 32 nt, Homo Sapiens
cuucucucugcucuucgacugcaccgcacucg

SEQ ID NO: 290476 - RNA, 32 nt, Homo Sapiens
agccggugguggcggcagcugucuguguuucu

SEQ ID NO: 290477 - RNA, 32 nt, Homo Sapiens
uuuaaaguuuugcaugaggaacacugacuuua

SEQ ID NO: 290478 - RNA, 32 nt, Homo Sapiens
uuauguaucuuggucagcuucuccacaagcuu

SEQ ID NO: 290479 - RNA, 32 nt, Homo Sapiens
cucacaaaccugcaggcauaucauuggcguau

SEQ ID NO: 290480 - RNA, 32 nt, Homo Sapiens
caagaugucagccgaggugacagugaagauau

SEQ ID NO: 290481 - RNA, 32 nt, Homo Sapiens
cccagccgcggcggcggcggcgcggacuuugc

SEQ ID NO: 290482 - RNA, 29 nt, Homo Sapiens
agcauauaaaguuugagucaguuucucaa

SEQ ID NO: 290483 - RNA, 32 nt, Homo Sapiens
cgcaucccuuacauagagagcagaggccugau

SEQ ID NO: 290484 - RNA, 32 nt, Homo Sapiens
gcuuggaguuucugcuggucuugggccagccg

SEQ ID NO: 290485 - RNA, 32 nt, Homo Sapiens
uuagaagaauacuugauguuuaugaugauugu

SEQ ID NO: 290486 - RNA, 32 nt, Homo Sapiens
gccaggaucgagcccuggcccgggcccuggcc

SEQ ID NO: 290487 - RNA, 32 nt, Homo Sapiens
cuccugcugggggaggcccaucugccgccugg

SEQ ID NO: 290488 - RNA, 32 nt, Homo Sapiens
ccuugauggagauauuuacaugaauugcauuu

SEQ ID NO: 290489 - RNA, 32 nt, Homo Sapiens
gcauguuaaagagauuucugccuuguuguguc

SEQ ID NO: 290490 - RNA, 28 nt, Homo Sapiens
agaaggaaagauuuggaaagauauacac

SEQ ID NO: 290491 - RNA, 32 nt, Homo Sapiens
gguuggagaggauauagagaaggcagcccagg

SEQ ID NO: 290492 - RNA, 32 nt, Homo Sapiens
ggaaaauauuuuauguuaaauaugaaacaaua

SEQ ID NO: 290493 - RNA, 30 nt, Homo Sapiens
ugagcucuggacuccagcaccggaggacac

SEQ ID NO: 290494 - RNA, 32 nt, Homo Sapiens
agaaauuuagagaaaaauauuuucugaucuug

SEQ ID NO: 290495 - RNA, 32 nt, Homo Sapiens
acaaaagaucauuuuuacauuugaacugagaa

SEQ ID NO: 290496 - RNA, 32 nt, Homo Sapiens
ugagugacugcuuuguugaaucagauaguaac

SEQ ID NO: 290497 - RNA, 32 nt, Homo Sapiens
ugcagccagacggaaaggcggcugcuugccuc

SEQ ID NO: 290498 - RNA, 32 nt, Homo Sapiens
agagcuacuguguucaggguucuugucuccag

SEQ ID NO: 290499 - RNA, 32 nt, Homo Sapiens
cgcgugcgcacacacacaaacacacacacacu

SEQ ID NO: 290500 - RNA, 32 nt, Homo Sapiens
gcccgucagccuggucccacccccauggagaa

SEQ ID NO: 290501 - RNA, 32 nt, Homo Sapiens
acauaaccaaaaucagagcuaaacugaaggaa

SEQ ID NO: 290502 - RNA, 32 nt, Homo Sapiens
uuuggguugagcuuuuuuagaaagucgaagug

SEQ ID NO: 290503 - RNA, 32 nt, Homo Sapiens
uuggugcaccucagucaguuggaagguguaaa

SEQ ID NO: 290504 - RNA, 32 nt, Homo Sapiens
aucaaggaaaggcucauuuaaaacaggcaaag

SEQ ID NO: 290505 - RNA, 32 nt, Homo Sapiens
agaugggggcagggggcggggagaggagaguc

SEQ ID NO: 290506 - RNA, 32 nt, Homo Sapiens
agguggauggcuacuuuaaucucuaaaaaagc

SEQ ID NO: 290507 - RNA, 32 nt, Homo Sapiens
guggccccagcgguacccuacacaacgcccuc

SEQ ID NO: 290508 - RNA, 32 nt, Homo Sapiens
aguauaaaauaccaaugcaacuacucuacaua

SEQ ID NO: 290509 - RNA, 32 nt, Homo Sapiens
agccccaugcugaccuucuccugugcuuuggc

SEQ ID NO: 290510 - RNA, 32 nt, Homo Sapiens
guugguuuuguuugccuguucauuucaaacca

SEQ ID NO: 290511 - RNA, 32 nt, Homo Sapiens
uuuauguucuucauuaaaaaucuuaucuugga

SEQ ID NO: 290512 - RNA, 32 nt, Homo Sapiens
uugauguuuucuuguaugucuacauuaaacuu

SEQ ID NO: 290513 - RNA, 32 nt, Homo Sapiens
ggcacgagggcugagagggcccgcggguaggc

SEQ ID NO: 290514 - RNA, 32 nt, Homo Sapiens
ugcagacacacaggugggcucugacugccaga

SEQ ID NO: 290515 - RNA, 32 nt, Homo Sapiens
gucaccugugggugggggagggagagggcagu

SEQ ID NO: 290516 - RNA, 32 nt, Homo Sapiens
ggcaccuguuuuucuucagcuaauaaaaaaga

SEQ ID NO: 290517 - RNA, 32 nt, Homo Sapiens
cagccucugcaauccauauauauccuggucuu

SEQ ID NO: 290518 - RNA, 32 nt, Homo Sapiens
ugaggccaggaguucaagaccaggcagggcaa

SEQ ID NO: 290519 - RNA, 32 nt, Homo Sapiens
uuuuccagacagaaaaaucaacaaagaaaugu

SEQ ID NO: 290520 - RNA, 32 nt, Homo Sapiens
auuuucccaaucuauuuauaauuuaaugauau

SEQ ID NO: 290521 - RNA, 32 nt, Homo Sapiens
cagacagacagaggggcggaugcagccuaccu

SEQ ID NO: 290522 - RNA, 32 nt, Homo Sapiens
ggagauuuacacauuagaaagcaaagauuauu

SEQ ID NO: 290523 - RNA, 32 nt, Homo Sapiens
ugagcacaaaaaugggcaccaauggaggaaaa

SEQ ID NO: 290524 - RNA, 32 nt, Homo Sapiens
cucuuuuuucuuucuuuuuuuuuuauuauggu

SEQ ID NO: 290525 - RNA, 32 nt, Homo Sapiens
uacagauguaagucacuaccccagccagaaac

SEQ ID NO: 290526 - RNA, 32 nt, Homo Sapiens
uggccacgacccagcccucccccgugcguauc

SEQ ID NO: 290527 - RNA, 32 nt, Homo Sapiens
agguauggccccagcaccccacugcccucucu

SEQ ID NO: 290528 - RNA, 32 nt, Homo Sapiens
aaccuuuccagaagacuaaaggugauagcaac

SEQ ID NO: 290529 - RNA, 32 nt, Homo Sapiens
auaacuuaguaccagcaguuuuuaaccuugac

SEQ ID NO: 290530 - RNA, 32 nt, Homo Sapiens
ugauaccaaauaaguauauucaguucaauaau

SEQ ID NO: 290531 - RNA, 32 nt, Homo Sapiens
uauuguuacuuccaauuuauaaucaagaaggg

SEQ ID NO: 290532 - RNA, 32 nt, Homo Sapiens
gggcugaugacgggacaaccucguguggagaa

SEQ ID NO: 290533 - RNA, 32 nt, Homo Sapiens
cgcuuuauuuauuugcagucuguuuucuaggc

SEQ ID NO: 290534 - RNA, 32 nt, Homo Sapiens
cucagcccaucuuuaauguccucugaaucuac

SEQ ID NO: 290535 - RNA, 32 nt, Homo Sapiens
ugaucacuacauauuguaugcauguaucaaaa

SEQ ID NO: 290536 - RNA, 32 nt, Homo Sapiens
caguucugccucagccucccaaguagcuguga

SEQ ID NO: 290537 - RNA, 32 nt, Homo Sapiens
uggaugugggguuauguggucaugcucagauc

SEQ ID NO: 290538 - RNA, 32 nt, Homo Sapiens
agugguugacauuugacugcuuguuccaauua

SEQ ID NO: 290539 - RNA, 32 nt, Homo Sapiens
uggaacacagaaaaccaggacaggauguuuuc

SEQ ID NO: 290540 - RNA, 32 nt, Homo Sapiens
agacaaaucccugcguccucccugccccgcuc

SEQ ID NO: 290541 - RNA, 32 nt, Homo Sapiens
cugacagagauuucuuuuuguuuuguuauucu

SEQ ID NO: 290542 - RNA, 32 nt, Homo Sapiens
cacucauguucccucuagggccaccacgaucc

SEQ ID NO: 290543 - RNA, 32 nt, Homo Sapiens
ccucccgccuccccggcccccuccccggaacc

SEQ ID NO: 290544 - RNA, 32 nt, Homo Sapiens
cccuguccgucccaggccccagccucauggcc

SEQ ID NO: 290545 - RNA, 32 nt, Homo Sapiens
uuaaagcacuuacuguuuucagagcacccaua

SEQ ID NO: 290546 - RNA, 32 nt, Homo Sapiens
aaacuacauugaaaauguaaauacauagcuua

SEQ ID NO: 290547 - RNA, 32 nt, Homo Sapiens
aggaaccgccgggggccauggacggagcagug

SEQ ID NO: 290548 - RNA, 32 nt, Homo Sapiens
uuaauuuuuugcaaauggaaacaucaacagac

SEQ ID NO: 290549 - RNA, 32 nt, Homo Sapiens
ucuccugcuagccaucucuuuggcacuaaagg

SEQ ID NO: 290550 - RNA, 32 nt, Homo Sapiens
gugcugguuaugaacaaauuuguccuugcauu

SEQ ID NO: 290551 - RNA, 32 nt, Homo Sapiens
gucguggguuccaggcagcuguguggacccag

SEQ ID NO: 290552 - RNA, 32 nt, Homo Sapiens
aaggcgcggacgcuaucuacgaccacaucaac

SEQ ID NO: 290553 - RNA, 28 nt, Homo Sapiens
augaugugaguacccaggaugauuuccu

SEQ ID NO: 290554 - RNA, 32 nt, Homo Sapiens
gggggcugguggcuccggggcugggggaucac

SEQ ID NO: 290555 - RNA, 32 nt, Homo Sapiens
gcucccuuagcguugccuggaaaagccacaga

SEQ ID NO: 290556 - RNA, 32 nt, Homo Sapiens
cuuggugaauaaauucuggcauuuugguggua

SEQ ID NO: 290557 - RNA, 32 nt, Homo Sapiens
acucaguaugguuuuucuucuaagccuaaaau

SEQ ID NO: 290558 - RNA, 32 nt, Homo Sapiens
uggcgacagucggaaggcgcgaggggaggggu

SEQ ID NO: 290559 - RNA, 32 nt, Homo Sapiens
ugauuuuauuaacagcguuaaguuuuaauuua

SEQ ID NO: 290560 - RNA, 32 nt, Homo Sapiens
cucuucaacgcccuccucccccucaacccacc

SEQ ID NO: 290561 - RNA, 32 nt, Homo Sapiens
cugaagucacugugacaguucuccaggaagga

SEQ ID NO: 290562 - RNA, 32 nt, Homo Sapiens
cuuagucaagggaucuuauguuuucuauuuac

SEQ ID NO: 290563 - RNA, 32 nt, Homo Sapiens
aagagcccgcggcgucuucacgccccugcgcu

SEQ ID NO: 290564 - RNA, 32 nt, Homo Sapiens
uuguguuccagguuagcaaaugaccuaucaaa

SEQ ID NO: 290565 - RNA, 32 nt, Homo Sapiens
ugugagcccucccugcgauggucagcccugcu

SEQ ID NO: 290566 - RNA, 32 nt, Homo Sapiens
cugcccuggcgggaaccccgcauggccaggaa

SEQ ID NO: 290567 - RNA, 32 nt, Homo Sapiens
cuccaugcaaaacacauacuucccucccauuu

SEQ ID NO: 290568 - RNA, 32 nt, Homo Sapiens
gacacagaagaugggugaugucugcauuucca

SEQ ID NO: 290569 - RNA, 32 nt, Homo Sapiens
ccuuuguucuuugacucaaaugguauugagcu

SEQ ID NO: 290570 - RNA, 32 nt, Homo Sapiens
gcgucuccccuuucccuccccagcccggcccc

SEQ ID NO: 290571 - RNA, 32 nt, Homo Sapiens
ccucuucgccgccacguccgcgaaggccucac

SEQ ID NO: 290572 - RNA, 32 nt, Homo Sapiens
uuauuuacuucucuaaacaugacgauugcuau

SEQ ID NO: 290573 - RNA, 32 nt, Homo Sapiens
aaggacaugauuuaccucugaaacucauguuu

SEQ ID NO: 290574 - RNA, 32 nt, Homo Sapiens
ucggauuuuuauucuagagagcucaucuucag

SEQ ID NO: 290575 - RNA, 32 nt, Homo Sapiens
cagcggcggcggcagccaaaauacagcagccu

SEQ ID NO: 290576 - RNA, 32 nt, Homo Sapiens
aauaugaaaaauacuguuucuucuauccaacu

SEQ ID NO: 290577 - RNA, 32 nt, Homo Sapiens
gccggguugcuaggcgacaucgagagaggaag

SEQ ID NO: 290578 - RNA, 32 nt, Homo Sapiens
ccuggcgggaccccgcagcagccccggcccca

SEQ ID NO: 290579 - RNA, 32 nt, Homo Sapiens
cucgcuuugggucuugucgcgcccaggccagc

SEQ ID NO: 290580 - RNA, 32 nt, Homo Sapiens
gacucaugaggaggggccccccugcccagagg

SEQ ID NO: 290581 - RNA, 32 nt, Homo Sapiens
aguagcagacacagggcuccccugcccuacuc

SEQ ID NO: 290582 - RNA, 32 nt, Homo Sapiens
caacuccugaccucagaugguccacccaccuc

SEQ ID NO: 290583 - RNA, 32 nt, Homo Sapiens
ucggcacagccguagccuccccggcuugcaga

SEQ ID NO: 290584 - RNA, 32 nt, Homo Sapiens
cugcucgccuccuggggauucucaggggcucc

SEQ ID NO: 290585 - RNA, 32 nt, Homo Sapiens
cggugcuuguuucuccuucauugcagccauca

SEQ ID NO: 290586 - RNA, 32 nt, Homo Sapiens
gauuaacccccauaaggcauguguguguauac

SEQ ID NO: 290587 - RNA, 32 nt, Homo Sapiens
acacacccuggaaggccccggcggggaacggg

SEQ ID NO: 290588 - RNA, 32 nt, Homo Sapiens
ccagcaucguugugggcaaacaauuaucugga

SEQ ID NO: 290589 - RNA, 32 nt, Homo Sapiens
aagccuggaaaacacaaggcuccugcuguggg

SEQ ID NO: 290590 - RNA, 32 nt, Homo Sapiens
uuuggguuguuuuuaaagaaaaggggaacaga

SEQ ID NO: 290591 - RNA, 32 nt, Homo Sapiens
ggcgcaucucccccggccccacguaacgcuga

SEQ ID NO: 290592 - RNA, 32 nt, Homo Sapiens
cauccgcuuuaaagacagaggucuagacguga

SEQ ID NO: 290593 - RNA, 32 nt, Homo Sapiens
acaucuacuuuuuuaaaugugucauuauauuu

SEQ ID NO: 290594 - RNA, 32 nt, Homo Sapiens
aguagcagcagcaucucugaacauuucucugg

SEQ ID NO: 290595 - RNA, 32 nt, Homo Sapiens
uugaacugcgguggcgggcgggcgcacggucu

SEQ ID NO: 290596 - RNA, 32 nt, Homo Sapiens
guccuacccgcggcacuggcugcgagcgccgg

SEQ ID NO: 290597 - RNA, 32 nt, Homo Sapiens
uuauguggaucuucauggaaaaguauauuucu

SEQ ID NO: 290598 - RNA, 32 nt, Homo Sapiens
aagccauucuccucccucagacuuccgagugg

SEQ ID NO: 290599 - RNA, 32 nt, Homo Sapiens
gcuggggcuccgcuccccggcgggagcccgcg

SEQ ID NO: 290600 - RNA, 31 nt, Homo Sapiens
aaggugagcuuccagaaccuggcaggaggcu

SEQ ID NO: 290601 - RNA, 32 nt, Homo Sapiens
ugauguuuuaaaaucccuuucauucaccugaa

SEQ ID NO: 290602 - RNA, 25 nt, Homo Sapiens
uuaaauggcuuugaccacaaugccg

SEQ ID NO: 290603 - RNA, 32 nt, Homo Sapiens
ucccggcagucgcgggcgugggcuugagcgcg

SEQ ID NO: 290604 - RNA, 32 nt, Homo Sapiens
cugaggucaggaguucgagacgacccuggcca

SEQ ID NO: 290605 - RNA, 32 nt, Homo Sapiens
agugcaauauauggauuuauuuccuguucugu

SEQ ID NO: 290606 - RNA, 32 nt, Homo Sapiens
agaacggggcgguggcugcagccugggagcuc

SEQ ID NO: 290607 - RNA, 32 nt, Homo Sapiens
cagcagugcuggacugcacagccccggggcuc

SEQ ID NO: 290608 - RNA, 32 nt, Homo Sapiens
cuucugugggucugucggugccgagggcagga

SEQ ID NO: 290609 - RNA, 32 nt, Homo Sapiens
auuuacuucuaaaagccacaggugcuuuuaca

SEQ ID NO: 290610 - RNA, 32 nt, Homo Sapiens
gcugcgugaggguggugggccugcggggacau

SEQ ID NO: 290611 - RNA, 32 nt, Homo Sapiens
cagagaaggagcagaggcucucccggcaggag

SEQ ID NO: 290612 - RNA, 32 nt, Homo Sapiens
uauauucaaaaauuauauuuugaacaacucga

SEQ ID NO: 290613 - RNA, 32 nt, Homo Sapiens
cuuucucuuugagguggagagacccauaaagc

SEQ ID NO: 290614 - RNA, 32 nt, Homo Sapiens
cccgccgccuccccggccuggugacaccaccu

SEQ ID NO: 290615 - RNA, 32 nt, Homo Sapiens
cauugaagaaggaaaacaauauguagaaagua

SEQ ID NO: 290616 - RNA, 32 nt, Homo Sapiens
cuccagagcccggcucuucucucggagcugca

SEQ ID NO: 290617 - RNA, 32 nt, Homo Sapiens
agaagugcuuugggggaugcgcaggggcaugg

SEQ ID NO: 290618 - RNA, 32 nt, Homo Sapiens
cagaauuucuaaaaauuuaaguucuguaaggg

SEQ ID NO: 290619 - RNA, 32 nt, Homo Sapiens
uuuuaauguggacuuuuacucauggaaaaauu

SEQ ID NO: 290620 - RNA, 32 nt, Homo Sapiens
cguucggggcuuugccucgagccgagcccugc

SEQ ID NO: 290621 - RNA, 32 nt, Homo Sapiens
uaauauuuuguaaauaaaucggauuccuugug

SEQ ID NO: 290622 - RNA, 32 nt, Homo Sapiens
aauugaguacagucaucuaacuaguuuaaaag

SEQ ID NO: 290623 - RNA, 32 nt, Homo Sapiens
gcucacugcaaccucccugccugauucucuug

SEQ ID NO: 290624 - RNA, 32 nt, Homo Sapiens
acucucuuauucugccgccacaaugcaagcau

SEQ ID NO: 290625 - RNA, 32 nt, Homo Sapiens
ucugggguucccgggcgacgccggcgcugggc

SEQ ID NO: 290626 - RNA, 32 nt, Homo Sapiens
aaaggggccgcgcugcgccggggccgcuuucu

SEQ ID NO: 290627 - RNA, 30 nt, Homo Sapiens
cgcucggcgcccgcgugggauggugcagcg

SEQ ID NO: 290628 - RNA, 32 nt, Homo Sapiens
uccugcugucuucuccuucccugugcccugaa

SEQ ID NO: 290629 - RNA, 32 nt, Homo Sapiens
aacaaauuuauaaacauuacuaauuucugaug

SEQ ID NO: 290630 - RNA, 32 nt, Homo Sapiens
gggcagcuucugugguguaaauucucccagca

SEQ ID NO: 290631 - RNA, 32 nt, Homo Sapiens
ucuugccaggcaugcauaugugagauaugcau

SEQ ID NO: 290632 - RNA, 32 nt, Homo Sapiens
ggacugucaggaggagccagagguuggcuuuc

SEQ ID NO: 290633 - RNA, 32 nt, Homo Sapiens
gcuuucuguauuuuaaugcuuuaguguuucag

SEQ ID NO: 290634 - RNA, 32 nt, Homo Sapiens
gaauggaaaaacaguguaugaaagucauguua

SEQ ID NO: 290635 - RNA, 32 nt, Homo Sapiens
guggcaccccuacugcuggggaccacaguccu

SEQ ID NO: 290636 - RNA, 32 nt, Homo Sapiens
cugcccacaccugcugcaacacuaaugccuug

SEQ ID NO: 290637 - RNA, 32 nt, Homo Sapiens
ccguaacccgucccagacacgucuuuucauuc

SEQ ID NO: 290638 - RNA, 32 nt, Homo Sapiens
gagcaguugaaaggauuaaaaaauagugggca

SEQ ID NO: 290639 - RNA, 32 nt, Homo Sapiens
gaacagaggaugaguugggucuguugggggga

SEQ ID NO: 290640 - RNA, 32 nt, Homo Sapiens
cccuucccacucaccacccccaccccaggugc

SEQ ID NO: 290641 - RNA, 32 nt, Homo Sapiens
cugcccaggucucggugccugcaccgccauag

SEQ ID NO: 290642 - RNA, 32 nt, Homo Sapiens
uuuuuuguuugcauccuuuauuuuuaauauuc

SEQ ID NO: 290643 - RNA, 32 nt, Homo Sapiens
cucccaaagaugccaucuccaaacaccaucau

SEQ ID NO: 290644 - RNA, 32 nt, Homo Sapiens
uaaauuguugugaauuugaagaauccgucuac

SEQ ID NO: 290645 - RNA, 32 nt, Homo Sapiens
ucgaauugucuuccaguauuacggugccucuu

SEQ ID NO: 290646 - RNA, 32 nt, Homo Sapiens
gaaggggcugguggagauguaggaaccgaucu

SEQ ID NO: 290647 - RNA, 32 nt, Homo Sapiens
auugcuuuaggugcagggacaccacccacuca

SEQ ID NO: 290648 - RNA, 32 nt, Homo Sapiens
aaguacacccccgucuuauuaaggagcuuuua

SEQ ID NO: 290649 - RNA, 32 nt, Homo Sapiens
gaggucuguaauaguuuuuacauuuuucaggc

SEQ ID NO: 290650 - RNA, 32 nt, Homo Sapiens
auacagauucuggucuacauuuagaaccuugc

SEQ ID NO: 290651 - RNA, 30 nt, Homo Sapiens
ggaccaugcauggccaccgagccccggggg

SEQ ID NO: 290652 - RNA, 30 nt, Homo Sapiens
cuucagggagguggcaggaaaggcuuggaa

SEQ ID NO: 290653 - RNA, 32 nt, Homo Sapiens
ucaguauaacgcuuuuauuuuaguuuuuagag

SEQ ID NO: 290654 - RNA, 32 nt, Homo Sapiens
acuuuuuaaagauugaagaaaaauaagaagaa

SEQ ID NO: 290655 - RNA, 32 nt, Homo Sapiens
acccuaccgcguucaauuuguguaucucagau

SEQ ID NO: 290656 - RNA, 32 nt, Homo Sapiens
cucaagagaugccuuaagauaauuaugugagg

SEQ ID NO: 290657 - RNA, 32 nt, Homo Sapiens
acuauuuggaaugugaucugggacagacagaa

SEQ ID NO: 290658 - RNA, 32 nt, Homo Sapiens
ggauuaagacaaucacugauagcuuuguugug

SEQ ID NO: 290659 - RNA, 32 nt, Homo Sapiens
uuauaauaacuuaaugugcaauauuacuaaca

SEQ ID NO: 290660 - RNA, 32 nt, Homo Sapiens
auacaaugacauauuucuuuauuuucacauac

SEQ ID NO: 290661 - RNA, 32 nt, Homo Sapiens
guuuuguuuuguuuuauuguuuaagugggacc

SEQ ID NO: 290662 - RNA, 29 nt, Homo Sapiens
auuuuugugacuuuuuccuacugauuacc

SEQ ID NO: 290663 - RNA, 32 nt, Homo Sapiens
uagaaucagaucugcucuccagcaucuucugu

SEQ ID NO: 290664 - RNA, 32 nt, Homo Sapiens
gcucaggcgagggagaugagagacggcggcgg

SEQ ID NO: 290665 - RNA, 32 nt, Homo Sapiens
aguccaguaccuaacaggcauuccaucaaugu

SEQ ID NO: 290666 - RNA, 32 nt, Homo Sapiens
agagcgggcaccugcgcggcgccgggugaagg

SEQ ID NO: 290667 - RNA, 32 nt, Homo Sapiens
agagauaaaauugggggaggagcccagggcca

SEQ ID NO: 290668 - RNA, 32 nt, Homo Sapiens
agcaucaucuucuagucacucuuccauccaug

SEQ ID NO: 290669 - RNA, 32 nt, Homo Sapiens
gguggcagaggucccucagcugcgaggcuaau

SEQ ID NO: 290670 - RNA, 32 nt, Homo Sapiens
uggcauagccccggccccccgcgcucgcccag

SEQ ID NO: 290671 - RNA, 32 nt, Homo Sapiens
cucccugagauugaucugccaguguccugcug

SEQ ID NO: 290672 - RNA, 32 nt, Homo Sapiens
auuuccuuggaaagagacgucgcuuucauccc

SEQ ID NO: 290673 - RNA, 32 nt, Homo Sapiens
cagcuuccuugggucuggauagacagacaacu

SEQ ID NO: 290674 - RNA, 32 nt, Homo Sapiens
cugugaaugccuauguuauugauauguggagg

SEQ ID NO: 290675 - RNA, 32 nt, Homo Sapiens
gggcccugccccagccccuaagccccgucccc

SEQ ID NO: 290676 - RNA, 32 nt, Homo Sapiens
gcuggcccgcggcgccaugagccgcagccugg

SEQ ID NO: 290677 - RNA, 32 nt, Homo Sapiens
auaagggauaauuuuucuuuuuuuuuuuuuuu

SEQ ID NO: 290678 - RNA, 32 nt, Homo Sapiens
cacaaagcggggggaggguuggggaggggcgg

SEQ ID NO: 290679 - RNA, 32 nt, Homo Sapiens
cuaguauccaaaauauuuaaauuuaugagugu

SEQ ID NO: 290680 - RNA, 32 nt, Homo Sapiens
gaggcggguaggcgcuccugugccugccacgg

SEQ ID NO: 290681 - RNA, 32 nt, Homo Sapiens
uaugucucuguggcuuuucuuuugugugugug

SEQ ID NO: 290682 - RNA, 31 nt, Homo Sapiens
gaggcugcgccgugccugccucgcgcucccu

SEQ ID NO: 290683 - RNA, 32 nt, Homo Sapiens
cccgggagcccuuaagccccagcugucgguuu

SEQ ID NO: 290684 - RNA, 32 nt, Homo Sapiens
uguccgcccucccagcuccagcccugcaggcc

SEQ ID NO: 290685 - RNA, 32 nt, Homo Sapiens
gugcuguuuuguucuuuuuuuguuuuuuguug

SEQ ID NO: 290686 - RNA, 32 nt, Homo Sapiens
ggggggaggguggggccgugguccccucagcc

SEQ ID NO: 290687 - RNA, 32 nt, Homo Sapiens
uuauaugacauguauggcuuuacaauauuaaa

SEQ ID NO: 290688 - RNA, 27 nt, Homo Sapiens
ccgcaggcuuucuucagucccuugguc

SEQ ID NO: 290689 - RNA, 32 nt, Homo Sapiens
cgucuggccgcagguggugacucucaaaagga

SEQ ID NO: 290690 - RNA, 32 nt, Homo Sapiens
caugaggggacagugcagcuacaggauaugcc

SEQ ID NO: 290691 - RNA, 32 nt, Homo Sapiens
augagaucugaagcacgucaaguugaaauuag

SEQ ID NO: 290692 - RNA, 32 nt, Homo Sapiens
cugggcugccuuguagagaugcagccugccca

SEQ ID NO: 290693 - RNA, 32 nt, Homo Sapiens
accucccucccucuuaugguuuagacccaaca

SEQ ID NO: 290694 - RNA, 32 nt, Homo Sapiens
uguucugaaucauguagauacauggcagguaa

SEQ ID NO: 290695 - RNA, 32 nt, Homo Sapiens
cuucgaguauccgcgggacccggagcaucgca

SEQ ID NO: 290696 - RNA, 32 nt, Homo Sapiens
uuacaguauacuuggaaagauagucauggccc

SEQ ID NO: 290697 - RNA, 32 nt, Homo Sapiens
ggacucuccggcgcgccgccgcguccccagac

SEQ ID NO: 290698 - RNA, 32 nt, Homo Sapiens
cauggacaggaggagggaaaagggaccugugc

SEQ ID NO: 290699 - RNA, 32 nt, Homo Sapiens
cuugugagggugacagaagaggguccaggcug

SEQ ID NO: 290700 - RNA, 32 nt, Homo Sapiens
gaaaccuugucucuaccaaaauaaaaauuagc

SEQ ID NO: 290701 - RNA, 32 nt, Homo Sapiens
cuaagggcagcuugcggguuagcucugugacu

SEQ ID NO: 290702 - RNA, 32 nt, Homo Sapiens
gccccaagcugauaagauuaaucuaaagagca

SEQ ID NO: 290703 - RNA, 32 nt, Homo Sapiens
acaucuugauuguuuuaaccauuaacuuguca

SEQ ID NO: 290704 - RNA, 32 nt, Homo Sapiens
cacauauauauccuauuugauuaggguaguaa

SEQ ID NO: 290705 - RNA, 32 nt, Homo Sapiens
ccgccccagggaggaggcgccagagcgcgggg

SEQ ID NO: 290706 - RNA, 32 nt, Homo Sapiens
agagcuguacagaagcacuuuucauggacaga

SEQ ID NO: 290707 - RNA, 32 nt, Homo Sapiens
cuaugaagaaaauaaacuagggugaugauuuu

SEQ ID NO: 290708 - RNA, 32 nt, Homo Sapiens
gaugcagcacucacuauguaccaggcacuauc

SEQ ID NO: 290709 - RNA, 32 nt, Homo Sapiens
uucucuucaaugccuuugacaccaaccaugau

SEQ ID NO: 290710 - RNA, 32 nt, Homo Sapiens
ggggaugaaaggaaacaacagagaugguugau

SEQ ID NO: 290711 - RNA, 32 nt, Homo Sapiens
ucgggcagugccggcuggacccgccccgagcu

SEQ ID NO: 290712 - RNA, 32 nt, Homo Sapiens
cccccaaguccugcaaagaaaaacagagcugg

SEQ ID NO: 290713 - RNA, 32 nt, Homo Sapiens
gggagucucgcacugucacccaggcuggagug

SEQ ID NO: 290714 - RNA, 32 nt, Homo Sapiens
ccuacucucaugcugcagaggguacuuuaaga

SEQ ID NO: 290715 - RNA, 32 nt, Homo Sapiens
cuuuuauaauacuugaaaaauaaguaccucuu

SEQ ID NO: 290716 - RNA, 32 nt, Homo Sapiens
gcgccuaccuccccgaaucgcggccgcuggga

SEQ ID NO: 290717 - RNA, 29 nt, Homo Sapiens
ggauuaucuauccaauauggacaaucaua

SEQ ID NO: 290718 - RNA, 32 nt, Homo Sapiens
ccugaccccgccgccgaacccggcgccagcca

SEQ ID NO: 290719 - RNA, 32 nt, Homo Sapiens
uugccugccuucucuggacugcacuguagggc

SEQ ID NO: 290720 - RNA, 32 nt, Homo Sapiens
gagcggguggcccgguaugcagugugcgcugc

SEQ ID NO: 290721 - RNA, 32 nt, Homo Sapiens
gcuucccccauuucccaugucuucccuuucca

SEQ ID NO: 290722 - RNA, 32 nt, Homo Sapiens
uugaaguuacuuaauguugaucuaucccuugg

SEQ ID NO: 290723 - RNA, 32 nt, Homo Sapiens
uuaaagaaaaagaauuaaaugcaugcuuuaaa

SEQ ID NO: 290724 - RNA, 32 nt, Homo Sapiens
auuagcaggacuuuuccacuuugaagauaaau

SEQ ID NO: 290725 - RNA, 32 nt, Homo Sapiens
cugaguagcugcugucccacacaauaggguau

SEQ ID NO: 290726 - RNA, 27 nt, Homo Sapiens
auucuguccuucugaugccuccaaguu

SEQ ID NO: 290727 - RNA, 32 nt, Homo Sapiens
uuuucucuuuuuucuuuuuuuuuuuacaaagu

SEQ ID NO: 290728 - RNA, 32 nt, Homo Sapiens
agccucccauccagggcccccaucucaugccc

SEQ ID NO: 290729 - RNA, 32 nt, Homo Sapiens
ccugggggucgcgucgggagcccugcgcugca

SEQ ID NO: 290730 - RNA, 32 nt, Homo Sapiens
gagaccaggcagggcagagacaauggcugcag

SEQ ID NO: 290731 - RNA, 31 nt, Homo Sapiens
uugcauucacggaggaccuggguucaaauac

SEQ ID NO: 290732 - RNA, 32 nt, Homo Sapiens
ggcacgagggccgggcgugcggaggcggcuga

SEQ ID NO: 290733 - RNA, 32 nt, Homo Sapiens
gaauaucggcugccuccagaccacaggacugc

SEQ ID NO: 290734 - RNA, 32 nt, Homo Sapiens
uucauucauuggccucugcuggggccuccuau

SEQ ID NO: 290735 - RNA, 32 nt, Homo Sapiens
gauagccuccaaggcagaaacacuuuucagug

SEQ ID NO: 290736 - RNA, 32 nt, Homo Sapiens
ggcuugcuucaucuaacaaucucaguuuccuu

SEQ ID NO: 290737 - RNA, 32 nt, Homo Sapiens
acugcuggccugaacugccccuggacacugga

SEQ ID NO: 290738 - RNA, 32 nt, Homo Sapiens
aauuuugaugaccuauuggaaaagaucuggga

SEQ ID NO: 290739 - RNA, 32 nt, Homo Sapiens
ucggacucugacugaggccuggcgggugccuu

SEQ ID NO: 290740 - RNA, 32 nt, Homo Sapiens
caauggaaaaggaaacuaaaaaauauacauac

SEQ ID NO: 290741 - RNA, 32 nt, Homo Sapiens
aaagcggaugguguuccugcucccucaagguu

SEQ ID NO: 290742 - RNA, 32 nt, Homo Sapiens
cagcucuggaguucagcagcaacagcagcagg

SEQ ID NO: 290743 - RNA, 32 nt, Homo Sapiens
ucucugcucuucugcagccucaucucugccau

SEQ ID NO: 290744 - RNA, 32 nt, Homo Sapiens
aacgcaacccagcagaguugucuuaaauuagu

SEQ ID NO: 290745 - RNA, 32 nt, Homo Sapiens
uucuaauuuccccccaucuuucugucuuggag

SEQ ID NO: 290746 - RNA, 32 nt, Homo Sapiens
cccucuuacaccugaagaaauaggaagcugug

SEQ ID NO: 290747 - RNA, 32 nt, Homo Sapiens
acuuauuaaugugacuaaauguuucaucuuga

SEQ ID NO: 290748 - RNA, 32 nt, Homo Sapiens
cucuuuuccauuucucccuccaucaccaccug

SEQ ID NO: 290749 - RNA, 32 nt, Homo Sapiens
gagugcccaagccccugagggcucgaucucau

SEQ ID NO: 290750 - RNA, 32 nt, Homo Sapiens
aaacccugcucuaucaacuaaguuuauggaau

SEQ ID NO: 290751 - RNA, 32 nt, Homo Sapiens
gaaccauuuguuaacuaauaucauguguuggc

SEQ ID NO: 290752 - RNA, 32 nt, Homo Sapiens
uccaggaucauuucucuuucuucagggccaga

SEQ ID NO: 290753 - RNA, 32 nt, Homo Sapiens
ugaacuggguugaacugaacaagaggaugggg

SEQ ID NO: 290754 - RNA, 32 nt, Homo Sapiens
cccucugugccuuuucugcaggugcuaauaaa

SEQ ID NO: 290755 - RNA, 32 nt, Homo Sapiens
ugggcagaggcuggcagugcugauucagccug

SEQ ID NO: 290756 - RNA, 32 nt, Homo Sapiens
guguccacuuuucuguauaaaauguauaaagu

SEQ ID NO: 290757 - RNA, 32 nt, Homo Sapiens
cuuaaaaauaaauuauuuucagggacuuuggg

SEQ ID NO: 290758 - RNA, 32 nt, Homo Sapiens
ucaauuggcuucggacccaagggggagacgag

SEQ ID NO: 290759 - RNA, 32 nt, Homo Sapiens
ggcccugcaggccaaugaccugcguccgcgcu

SEQ ID NO: 290760 - RNA, 32 nt, Homo Sapiens
uaccugggaaaggcagcuuugugggccaugug

SEQ ID NO: 290761 - RNA, 32 nt, Homo Sapiens
uccacacaaugaauaacagccacaaaaaaggg

SEQ ID NO: 290762 - RNA, 32 nt, Homo Sapiens
gauguaguucuuuucaugcaaguauaaauuca

SEQ ID NO: 290763 - RNA, 32 nt, Homo Sapiens
uuaaaaucaaaauaaaggaauuacugaguuua

SEQ ID NO: 290764 - RNA, 32 nt, Homo Sapiens
aaaguucauucuauuuguauuauuuucauaca

SEQ ID NO: 290765 - RNA, 32 nt, Homo Sapiens
gucagagaaaaacacuugcccuuuuuccuggg

SEQ ID NO: 290766 - RNA, 32 nt, Homo Sapiens
ugguugaagggagaaggucaaaaaaggacgug

SEQ ID NO: 290767 - RNA, 32 nt, Homo Sapiens
aacugaacaucuccaaguaaauauuuucacug

SEQ ID NO: 290768 - RNA, 32 nt, Homo Sapiens
ccuggccaagaauggaagcuugugaggagacg

SEQ ID NO: 290769 - RNA, 32 nt, Homo Sapiens
augagaagggaaggccgggugcgaaagggacg

SEQ ID NO: 290770 - RNA, 32 nt, Homo Sapiens
uucccugugcccugaacaaggaccucacugcc

SEQ ID NO: 290771 - RNA, 32 nt, Homo Sapiens
gccaacuuugcugcagagccacugccgcccuu

SEQ ID NO: 290772 - RNA, 32 nt, Homo Sapiens
ccgaucuuucuaaaauacaguucugaauaugc

SEQ ID NO: 290773 - RNA, 32 nt, Homo Sapiens
ucacagcguggccuugcuugucugccacagcg

SEQ ID NO: 290774 - RNA, 32 nt, Homo Sapiens
ccaggcuggcgugcaauggcgcaguugacuca

SEQ ID NO: 290775 - RNA, 32 nt, Homo Sapiens
uaaacuucacuggcaggauggcaggggugccc

SEQ ID NO: 290776 - RNA, 32 nt, Homo Sapiens
ggacagagggcuuucuguaucccagguucuug

SEQ ID NO: 290777 - RNA, 32 nt, Homo Sapiens
ucccuuaaaaagacaaaaaaaauaaggcaaaa

SEQ ID NO: 290778 - RNA, 32 nt, Homo Sapiens
auuuucccaagguuacauacacagcaagggug

SEQ ID NO: 290779 - RNA, 32 nt, Homo Sapiens
ugcuaccaugaagugaaaaugccacauuuugc

SEQ ID NO: 290780 - RNA, 32 nt, Homo Sapiens
ggcgcuggcccggcccagaggggacaggaagc

SEQ ID NO: 290781 - RNA, 32 nt, Homo Sapiens
agcugggcgcgguggcgggcgccuguaguccc

SEQ ID NO: 290782 - RNA, 32 nt, Homo Sapiens
uucacaucucaucaaaucuucugcaucaagcc

SEQ ID NO: 290783 - RNA, 32 nt, Homo Sapiens
cuucacauuucccacauuggcccuuggauugu

SEQ ID NO: 290784 - RNA, 32 nt, Homo Sapiens
aaggauaugaacuauuugaaacauucgcaacu

SEQ ID NO: 290785 - RNA, 32 nt, Homo Sapiens
gcuggggcgaggggagggggugcgcucugggu

SEQ ID NO: 290786 - RNA, 32 nt, Homo Sapiens
gagucucucuggaaggcgaacgccacagcugc

SEQ ID NO: 290787 - RNA, 32 nt, Homo Sapiens
aauuucagcaagccguguuagauggggagcgu

SEQ ID NO: 290788 - RNA, 32 nt, Homo Sapiens
acauugauagauggggugugggaccaacaaac

SEQ ID NO: 290789 - RNA, 32 nt, Homo Sapiens
cucccuccugcugcuauugcccggugaauggg

SEQ ID NO: 290790 - RNA, 32 nt, Homo Sapiens
cacucccgcugccacccaaaggcgcugcgugc

SEQ ID NO: 290791 - RNA, 32 nt, Homo Sapiens
aggauuuggauaaaguuuuuguuuaaauuuug

SEQ ID NO: 290792 - RNA, 32 nt, Homo Sapiens
ccaccucgcccauuuggccgcgugcacugagu

SEQ ID NO: 290793 - RNA, 32 nt, Homo Sapiens
uacuuugcguuuggcccggccagcgcccgggc

SEQ ID NO: 290794 - RNA, 32 nt, Homo Sapiens
cucauuaaaaccacaaugaauagcaucucaca

SEQ ID NO: 290795 - RNA, 32 nt, Homo Sapiens
gccccuggugcaaugcggucacagguuuuaug

SEQ ID NO: 290796 - RNA, 32 nt, Homo Sapiens
aucacuccuggccacacuuuccuugccugugu

SEQ ID NO: 290797 - RNA, 30 nt, Homo Sapiens
cacccuucuuaaagcggcggcgggaagaug

SEQ ID NO: 290798 - RNA, 32 nt, Homo Sapiens
acuguuguaucgucucccugaggugaacguug

SEQ ID NO: 290799 - RNA, 32 nt, Homo Sapiens
uugcaaaaauauuuuauuuuuaucccaucuca

SEQ ID NO: 290800 - RNA, 32 nt, Homo Sapiens
gccuuguagaccaugucuggcaucacccuguu

SEQ ID NO: 290801 - RNA, 32 nt, Homo Sapiens
gcgaaacuccgucucuacaaaaaauagaaaaa

SEQ ID NO: 290802 - RNA, 32 nt, Homo Sapiens
cucauagauguuaggaauaaucaaacuugccc

SEQ ID NO: 290803 - RNA, 32 nt, Homo Sapiens
ccucugcugcuuuugcuuuguacuucauugcu

SEQ ID NO: 290804 - RNA, 32 nt, Homo Sapiens
cucugccccuggauaguguccagccuuguaua

SEQ ID NO: 290805 - RNA, 32 nt, Homo Sapiens
gcuaaucuguaaccuauagaaacaaugcuuau

SEQ ID NO: 290806 - RNA, 32 nt, Homo Sapiens
aaaacaaaaaauuuuuuuagcuuugacaaaca

SEQ ID NO: 290807 - RNA, 32 nt, Homo Sapiens
uagaaagaaacaaagaacaggauaguuuagaa

SEQ ID NO: 290808 - RNA, 32 nt, Homo Sapiens
guagaauuaaugguugaggcaggaccauacag

SEQ ID NO: 290809 - RNA, 32 nt, Homo Sapiens
gcagccggccccagucaccaucaccgcaacca

SEQ ID NO: 290810 - RNA, 32 nt, Homo Sapiens
cauugacuaauagugaguggaagugcagugga

SEQ ID NO: 290811 - RNA, 32 nt, Homo Sapiens
ugcccagaugcaacugagaaaauacaggaaaa

SEQ ID NO: 290812 - RNA, 32 nt, Homo Sapiens
uuuaagaacacauaaaacuauuacgucuggua

SEQ ID NO: 290813 - RNA, 32 nt, Homo Sapiens
guuuugaagcccuuugacuauuucauaacaaa

SEQ ID NO: 290814 - RNA, 32 nt, Homo Sapiens
gagcucucggaacugcaugcugcuggacagua

SEQ ID NO: 290815 - RNA, 32 nt, Homo Sapiens
ucagcugggagcaucauucuccugcuuuguac

SEQ ID NO: 290816 - RNA, 32 nt, Homo Sapiens
uucagucaguggcagcccucuugcuccacagu

SEQ ID NO: 290817 - RNA, 32 nt, Homo Sapiens
ucuauuuuaaaauuauuuuuaaauuuuuauug

SEQ ID NO: 290818 - RNA, 32 nt, Homo Sapiens
ugcuaagcagaaaugcagacaauauaagacac

SEQ ID NO: 290819 - RNA, 32 nt, Homo Sapiens
augggaacccucauuaauuagacaagaacacc

SEQ ID NO: 290820 - RNA, 32 nt, Homo Sapiens
caucccgugucugcagagaacuggacaugccu

SEQ ID NO: 290821 - RNA, 32 nt, Homo Sapiens
cucacagaagcacgugcuggggccuccugugu

SEQ ID NO: 290822 - RNA, 32 nt, Homo Sapiens
gcccgggcagacggcugcuugguuccagagcc

SEQ ID NO: 290823 - RNA, 32 nt, Homo Sapiens
cugcugaguuugggugcacccaaagauggagg

SEQ ID NO: 290824 - RNA, 32 nt, Homo Sapiens
gaaccugagaagggggucgugggguccccggg

SEQ ID NO: 290825 - RNA, 32 nt, Homo Sapiens
ggggcgcugcucccggccuccccucgcucuga

SEQ ID NO: 290826 - RNA, 32 nt, Homo Sapiens
acuugguuaaaaggaaguuuguucacuucgau

SEQ ID NO: 290827 - RNA, 32 nt, Homo Sapiens
gaaugacaaaaauauucauguauagccaauug

SEQ ID NO: 290828 - RNA, 32 nt, Homo Sapiens
ccuugaauuggaaaaauguacuuugaaagaac

SEQ ID NO: 290829 - RNA, 32 nt, Homo Sapiens
guguaccuggguuccuucccuugcccaugaau

SEQ ID NO: 290830 - RNA, 32 nt, Homo Sapiens
uuuuaauugcaaagcugccaaaauaguugaag

SEQ ID NO: 290831 - RNA, 32 nt, Homo Sapiens
agauuucagauuugugaccauuagcauuuguc

SEQ ID NO: 290832 - RNA, 32 nt, Homo Sapiens
agauggggccccagcugccgccucgggacccc

SEQ ID NO: 290833 - RNA, 32 nt, Homo Sapiens
uauugcugcaagagauuuauuuuuguuauacu

SEQ ID NO: 290834 - RNA, 32 nt, Homo Sapiens
caagagagugagcccuuggagagagaggcuga

SEQ ID NO: 290835 - RNA, 32 nt, Homo Sapiens
aucccauuucccuggaggcgggccccccuggc

SEQ ID NO: 290836 - RNA, 32 nt, Homo Sapiens
augaccuuguaacuuuuguucuuucaacacca

SEQ ID NO: 290837 - RNA, 32 nt, Homo Sapiens
uccccuccuuugucuuuuuuuucauccuuuuu

SEQ ID NO: 290838 - RNA, 32 nt, Homo Sapiens
ggagccgcggcugacgggcccgcggucugggc

SEQ ID NO: 290839 - RNA, 32 nt, Homo Sapiens
aaaguucugcaugacccuccaguuuucuuuug

SEQ ID NO: 290840 - RNA, 32 nt, Homo Sapiens
ugauauacuuuuuuaaugaauaauuucaaucu

SEQ ID NO: 290841 - RNA, 32 nt, Homo Sapiens
guggccguuuuccgagcuuuccggucacaucg

SEQ ID NO: 290842 - RNA, 32 nt, Homo Sapiens
ucaaugccugguuuuuucugugacugcuggcc

SEQ ID NO: 290843 - RNA, 32 nt, Homo Sapiens
acccagaaaaauguacaugacucucagugucu

SEQ ID NO: 290844 - RNA, 32 nt, Homo Sapiens
cuugugcccccucuccuccuuggcacuggcgg

SEQ ID NO: 290845 - RNA, 32 nt, Homo Sapiens
gcucauuguuucuccuuucaacauguuugcuu

SEQ ID NO: 290846 - RNA, 32 nt, Homo Sapiens
cugaugaaaauauuuguaagcagaucaucuuu

SEQ ID NO: 290847 - RNA, 32 nt, Homo Sapiens
ccuucucagccucacaccccuuccucccaguc

SEQ ID NO: 290848 - RNA, 32 nt, Homo Sapiens
auuuugaaagcagaaggaaaggagacagacgg

SEQ ID NO: 290849 - RNA, 32 nt, Homo Sapiens
caggauucaauccuugauacacagcaaagcau

SEQ ID NO: 290850 - RNA, 32 nt, Homo Sapiens
agggcggugucugagccugccggcgccaccug

SEQ ID NO: 290851 - RNA, 32 nt, Homo Sapiens
cacucccguuuacacacauuccagugggcggg

SEQ ID NO: 290852 - RNA, 32 nt, Homo Sapiens
gcgcgccgcgcagacgcccccggagucgccag

SEQ ID NO: 290853 - RNA, 31 nt, Homo Sapiens
ggguuccugccgguagcucuccgggucuugg

SEQ ID NO: 290854 - RNA, 32 nt, Homo Sapiens
gggagggcgagaccgagcgccggccaugggaa

SEQ ID NO: 290855 - RNA, 32 nt, Homo Sapiens
uccauggugaugucugcacacggagaagcagu

SEQ ID NO: 290856 - RNA, 32 nt, Homo Sapiens
ccaaaaugagucuacgugaugcuaguggggga

SEQ ID NO: 290857 - RNA, 32 nt, Homo Sapiens
cagguguguggaucucguucauuuucauguag

SEQ ID NO: 290858 - RNA, 32 nt, Homo Sapiens
aaaauggaguuaaagaaaauugaccaggcgug

SEQ ID NO: 290859 - RNA, 32 nt, Homo Sapiens
gucucggaauauggaagaaucauguagccaag

SEQ ID NO: 290860 - RNA, 32 nt, Homo Sapiens
auggcccagggcgggggcagcuccaaggccuc

SEQ ID NO: 290861 - RNA, 32 nt, Homo Sapiens
acacuuacacauacuugaaacuuggaauaaaa

SEQ ID NO: 290862 - RNA, 32 nt, Homo Sapiens
ggacauuucugugagaagucaaaccuguuaaa

SEQ ID NO: 290863 - RNA, 32 nt, Homo Sapiens
aggagacccagcuguccugcacccccuugcag

SEQ ID NO: 290864 - RNA, 32 nt, Homo Sapiens
aaucuggcuuugccucccuuucucagacuaga

SEQ ID NO: 290865 - RNA, 31 nt, Homo Sapiens
augcuauucaaugaucuuagaaguacugaaa

SEQ ID NO: 290866 - RNA, 32 nt, Homo Sapiens
ucuggucuacaguucccagcgugagugacaca

SEQ ID NO: 290867 - RNA, 32 nt, Homo Sapiens
caaccuauuucugucucguucuccuguuaaaa

SEQ ID NO: 290868 - RNA, 32 nt, Homo Sapiens
gcaaugauaaccuuuagaaaauuuuucuauca

SEQ ID NO: 290869 - RNA, 32 nt, Homo Sapiens
ugacuucuauagacuaaaguuggcccagcuuu

SEQ ID NO: 290870 - RNA, 32 nt, Homo Sapiens
gacauucaguuauauggaaauauagucaaguc

SEQ ID NO: 290871 - RNA, 32 nt, Homo Sapiens
gcuggcugguggucccuggauccuagagcccu

SEQ ID NO: 290872 - RNA, 32 nt, Homo Sapiens
uggaagaagaacuagaagcugagagggccaug

SEQ ID NO: 290873 - RNA, 32 nt, Homo Sapiens
uuuaaaaaaaggagacuguguuugguccugua

SEQ ID NO: 290874 - RNA, 32 nt, Homo Sapiens
ugaaacuuuuucuggugucuacaugaagcuca

SEQ ID NO: 290875 - RNA, 32 nt, Homo Sapiens
cuaucaucaggucacgggcagcuccuguggag

SEQ ID NO: 290876 - RNA, 32 nt, Homo Sapiens
augcucauaggaaaaaauauuuuguguucuug

SEQ ID NO: 290877 - RNA, 32 nt, Homo Sapiens
acaaaaacgcuguccggcgccaggcgcccacc

SEQ ID NO: 290878 - RNA, 32 nt, Homo Sapiens
guuucucccugucaccgucauccaccaccugu

SEQ ID NO: 290879 - RNA, 29 nt, Homo Sapiens
aguucauaaaguuuauuguaaugagucug

SEQ ID NO: 290880 - RNA, 32 nt, Homo Sapiens
agguaugagguguuugcugcucugccacguag

SEQ ID NO: 290881 - RNA, 32 nt, Homo Sapiens
cgacguagaaauuuuuuuuucuuaauaaauua

SEQ ID NO: 290882 - RNA, 32 nt, Homo Sapiens
accaggugcagggaagcacuccacacccucac

SEQ ID NO: 290883 - RNA, 32 nt, Homo Sapiens
ugacccccuagugcuuccuggagcugaggcug

SEQ ID NO: 290884 - RNA, 32 nt, Homo Sapiens
uuuacacauuuuacagauuuuuguuugguuua

SEQ ID NO: 290885 - RNA, 32 nt, Homo Sapiens
ccaggagugugcucugggaaugcuggaggucc

SEQ ID NO: 290886 - RNA, 32 nt, Homo Sapiens
gacaguuuaggacccaagguggucuuggagag

SEQ ID NO: 290887 - RNA, 32 nt, Homo Sapiens
cagguuuaauaaaggacauuugaaauuucugu

SEQ ID NO: 290888 - RNA, 32 nt, Homo Sapiens
aggaaccggccggcccgggggccccgcuccug

SEQ ID NO: 290889 - RNA, 32 nt, Homo Sapiens
ugguggagggugggcugggcaugggaugcaca

SEQ ID NO: 290890 - RNA, 32 nt, Homo Sapiens
gacuaguacuccugggaugccaugccacgcag

SEQ ID NO: 290891 - RNA, 32 nt, Homo Sapiens
cucgcagcuugcacgucgagacucguaggccg

SEQ ID NO: 290892 - RNA, 32 nt, Homo Sapiens
gccccagcuccagccccagcccaggugggccg

SEQ ID NO: 290893 - RNA, 32 nt, Homo Sapiens
aauuaauucauuccaauauucagagguuccuu

SEQ ID NO: 290894 - RNA, 32 nt, Homo Sapiens
gccgcgcgccccagcaccaugcggccgcccug

SEQ ID NO: 290895 - RNA, 32 nt, Homo Sapiens
ccugccuugggcgcagccuccggcgccagagc

SEQ ID NO: 290896 - RNA, 32 nt, Homo Sapiens
aucauaaauggaagaaucagaguuauaaugag

SEQ ID NO: 290897 - RNA, 32 nt, Homo Sapiens
uuuggcacuuacaauuuuuaaaauaguuuaug

SEQ ID NO: 290898 - RNA, 32 nt, Homo Sapiens
uugugucuaccuuguuauuaacuuuuggggcu

SEQ ID NO: 290899 - RNA, 32 nt, Homo Sapiens
aaucuaagaaacaaaguaaucuacuguaaagu

SEQ ID NO: 290900 - RNA, 32 nt, Homo Sapiens
cauagagaggcacuguaugacaauuaccaggu

SEQ ID NO: 290901 - RNA, 32 nt, Homo Sapiens
gcauuuaaugaaacauuguacaaauugucacu

SEQ ID NO: 290902 - RNA, 32 nt, Homo Sapiens
cccucgcggacggggcagcuggccgggcagag

SEQ ID NO: 290903 - RNA, 32 nt, Homo Sapiens
aggagccccucuacgcugccuucccuggcuca

SEQ ID NO: 290904 - RNA, 32 nt, Homo Sapiens
ugggagguggagguugcagugagccaggauug

SEQ ID NO: 290905 - RNA, 32 nt, Homo Sapiens
aaucuuaaguacaagggggaaaaaauaaauca

SEQ ID NO: 290906 - RNA, 32 nt, Homo Sapiens
ucauuguuuaagaucacuguuuucauacuugu

SEQ ID NO: 290907 - RNA, 32 nt, Homo Sapiens
cuauuuugcauaauaaaugcuucagugaaaau

SEQ ID NO: 290908 - RNA, 32 nt, Homo Sapiens
ccccuguccacccuauguggccccacaacaca

SEQ ID NO: 290909 - RNA, 32 nt, Homo Sapiens
agggugcgcggcagaagcugcagcuggagaag

SEQ ID NO: 290910 - RNA, 32 nt, Homo Sapiens
uggacccguuugcgaagcgccagggagaagga

SEQ ID NO: 290911 - RNA, 32 nt, Homo Sapiens
cugccuuccuuccuguagcugucgcuuucuca

SEQ ID NO: 290912 - RNA, 32 nt, Homo Sapiens
uaaucuaguuuacagaaaaaucuugugcuaga

SEQ ID NO: 290913 - RNA, 32 nt, Homo Sapiens
cagagcagugugcagaauauaaugcucuuuuu

SEQ ID NO: 290914 - RNA, 32 nt, Homo Sapiens
uuugacauuuuuccuguuuuaaauucuaggau

SEQ ID NO: 290915 - RNA, 32 nt, Homo Sapiens
accucuucugauugauuggauuuccuuaauaa

SEQ ID NO: 290916 - RNA, 32 nt, Homo Sapiens
aggagagcccccugcccugcccugccccgugu

SEQ ID NO: 290917 - RNA, 32 nt, Homo Sapiens
gcauagcguggcgggcggguucaccguggaga

SEQ ID NO: 290918 - RNA, 32 nt, Homo Sapiens
gcggccaggaggagaagggcucuaccacgcca

SEQ ID NO: 290919 - RNA, 32 nt, Homo Sapiens
auuuuuaaauaaauguuauuguccucaccuuc

SEQ ID NO: 290920 - RNA, 32 nt, Homo Sapiens
auaauguguacaaguccuuuugaaaugacaac

SEQ ID NO: 290921 - RNA, 32 nt, Homo Sapiens
ccagaacugugagaaauaaaugucuguugucu

SEQ ID NO: 290922 - RNA, 32 nt, Homo Sapiens
uccauacauaucuuuuuguucaucaguaauaa

SEQ ID NO: 290923 - RNA, 32 nt, Homo Sapiens
cugucaggaccauuagguaaaaacagaaguga

SEQ ID NO: 290924 - RNA, 32 nt, Homo Sapiens
agccuggaacagagccuccucugguguugcaa

SEQ ID NO: 290925 - RNA, 32 nt, Homo Sapiens
aaucugauaaugguuguacugaagaugacacc

SEQ ID NO: 290926 - RNA, 32 nt, Homo Sapiens
gaacaagaccugcaaggcguugcucauggggg

SEQ ID NO: 290927 - RNA, 32 nt, Homo Sapiens
guauugagccccacuauggcaucucccccaaa

SEQ ID NO: 290928 - RNA, 32 nt, Homo Sapiens
gauccaaguuugauaacauugcaugaugccau

SEQ ID NO: 290929 - RNA, 32 nt, Homo Sapiens
uuugcccccacccccacccccacauucugaag

SEQ ID NO: 290930 - RNA, 32 nt, Homo Sapiens
gucccuguggcccacacccagccugucuugcu

SEQ ID NO: 290931 - RNA, 32 nt, Homo Sapiens
ggugcccuuucuuuuuacucucacgugguccc

SEQ ID NO: 290932 - RNA, 32 nt, Homo Sapiens
aaagcuuuuuaaaauuucuauuguugucuauu

SEQ ID NO: 290933 - RNA, 32 nt, Homo Sapiens
gggaaaaaacaaaaacaaaaaacuauaguuag

SEQ ID NO: 290934 - RNA, 32 nt, Homo Sapiens
aguggacagggcggaggguuugaaagaauauu

SEQ ID NO: 290935 - RNA, 32 nt, Homo Sapiens
aggcauagaagccccagaggaacacggccacu

SEQ ID NO: 290936 - RNA, 32 nt, Homo Sapiens
caccccggacaccccaccacggucccaggccc

SEQ ID NO: 290937 - RNA, 32 nt, Homo Sapiens
gguuuguguagagaggcgugcagagcccguug

SEQ ID NO: 290938 - RNA, 32 nt, Homo Sapiens
ccgcuccuggaacacuuccugcagcugugccu

SEQ ID NO: 290939 - RNA, 32 nt, Homo Sapiens
gaagguuucuaaaauuccucaucuauagaagu

SEQ ID NO: 290940 - RNA, 32 nt, Homo Sapiens
aaaauucugaccaggcuacuggccucuuuucu

SEQ ID NO: 290941 - RNA, 32 nt, Homo Sapiens
caguucugguggcccuggacuuuggaggggaa

SEQ ID NO: 290942 - RNA, 32 nt, Homo Sapiens
uugcagaagcaccuaaagguugagcagaaggg

SEQ ID NO: 290943 - RNA, 32 nt, Homo Sapiens
gucuuacugucaacagagauauuuuaaaagag

SEQ ID NO: 290944 - RNA, 32 nt, Homo Sapiens
ccggagcagcgcugccgccgcgcgggggucga

SEQ ID NO: 290945 - RNA, 31 nt, Homo Sapiens
ugagucgcuuggaacagcagagccugcuccu

SEQ ID NO: 290946 - RNA, 32 nt, Homo Sapiens
cucguagcgccgggccuucucuccucgucauc

SEQ ID NO: 290947 - RNA, 32 nt, Homo Sapiens
ggaagagugaagaacagaaaaauguuaguggg

SEQ ID NO: 290948 - RNA, 32 nt, Homo Sapiens
ucugugcagggcccaggcgcauuuccugcccg

SEQ ID NO: 290949 - RNA, 32 nt, Homo Sapiens
uugguaaaaauaaauaaauguccuuuaguuau

SEQ ID NO: 290950 - RNA, 32 nt, Homo Sapiens
agcaaucuucaaaagcacuuucaguggauugg

SEQ ID NO: 290951 - RNA, 30 nt, Homo Sapiens
ugaccuuggggcgauaagcagccagggaaa

SEQ ID NO: 290952 - RNA, 32 nt, Homo Sapiens
aaauacccggagggccugcucccggccccccu

SEQ ID NO: 290953 - RNA, 32 nt, Homo Sapiens
cagagcccaccucuccuccuaggccucgagug

SEQ ID NO: 290954 - RNA, 32 nt, Homo Sapiens
gcugccggagccgggcagccaggccgcucagg

SEQ ID NO: 290955 - RNA, 32 nt, Homo Sapiens
cugcucgacuggcccguccucuccaugugcca

SEQ ID NO: 290956 - RNA, 32 nt, Homo Sapiens
ucacuggguauuuuacucagacugucauguuu

SEQ ID NO: 290957 - RNA, 32 nt, Homo Sapiens
cagcguggcuggaagcugaugggaaacgaccc

SEQ ID NO: 290958 - RNA, 32 nt, Homo Sapiens
auauuucaagaauuauuuuauugcaagucuug

SEQ ID NO: 290959 - RNA, 32 nt, Homo Sapiens
acagcugggguggccugggggugggggugggc

SEQ ID NO: 290960 - RNA, 32 nt, Homo Sapiens
cugaauugggaauauagucagugggacaguga

SEQ ID NO: 290961 - RNA, 32 nt, Homo Sapiens
aaauaugucacauuuuguuuaacauuauuuuu

SEQ ID NO: 290962 - RNA, 31 nt, Homo Sapiens
cagggccaagccacgaaggguuuuauaaugc

SEQ ID NO: 290963 - RNA, 32 nt, Homo Sapiens
gcuuccugcccccuccuugcccaccugccugc

SEQ ID NO: 290964 - RNA, 32 nt, Homo Sapiens
gccacugcacucuagccugggcgacagagcaa

SEQ ID NO: 290965 - RNA, 32 nt, Homo Sapiens
ggugccccaucccaaggaccaaccauguuccc

SEQ ID NO: 290966 - RNA, 32 nt, Homo Sapiens
gcuguguugucaacaaaccaagcaucaggggg

SEQ ID NO: 290967 - RNA, 32 nt, Homo Sapiens
acguguauauauauuuauauaagaucuaccua

SEQ ID NO: 290968 - RNA, 31 nt, Homo Sapiens
cauggugugaaaggccaagugcugaggcggg

SEQ ID NO: 290969 - RNA, 32 nt, Homo Sapiens
acauagggauaugcguauuauaccaaaauguu

SEQ ID NO: 290970 - RNA, 32 nt, Homo Sapiens
gugcggaccugccugccgcccggagcgcaucg

SEQ ID NO: 290971 - RNA, 32 nt, Homo Sapiens
gccucauggaccagcccacguuuuccaugggg

SEQ ID NO: 290972 - RNA, 32 nt, Homo Sapiens
cauuucguuaccccaaaaagaaacccuguacc

SEQ ID NO: 290973 - RNA, 32 nt, Homo Sapiens
ggggccccgugcacauuguuccccucacccac

SEQ ID NO: 290974 - RNA, 30 nt, Homo Sapiens
gcgcccuggggcgagggagcggggagcccu

SEQ ID NO: 290975 - RNA, 32 nt, Homo Sapiens
cucuuccccuggaagcugcacaucacgcagaa

SEQ ID NO: 290976 - RNA, 32 nt, Homo Sapiens
guguaguuuguuguuuaaaauaauguaaucau

SEQ ID NO: 290977 - RNA, 32 nt, Homo Sapiens
uucugguugucauugaauugggauaaacagag

SEQ ID NO: 290978 - RNA, 32 nt, Homo Sapiens
cuguaucugcaccugccucucuguccuggcca

SEQ ID NO: 290979 - RNA, 32 nt, Homo Sapiens
agaugcugagcagugaucuggcugggaaaggg

SEQ ID NO: 290980 - RNA, 32 nt, Homo Sapiens
aaucuucugcggcuuguccauagugugaauaa

SEQ ID NO: 290981 - RNA, 32 nt, Homo Sapiens
ucgugggggacuggugacuccucgguggaaaa

SEQ ID NO: 290982 - RNA, 32 nt, Homo Sapiens
uuugaaccaacaucuuuuuuauuauauucaga

SEQ ID NO: 290983 - RNA, 32 nt, Homo Sapiens
ggcaccaccaaaagugaggucuucuacccagg

SEQ ID NO: 290984 - RNA, 32 nt, Homo Sapiens
uaccaggccuggccaaugauauaauucauggu

SEQ ID NO: 290985 - RNA, 32 nt, Homo Sapiens
agggcacucugggggcagcugugccugcugcc

SEQ ID NO: 290986 - RNA, 32 nt, Homo Sapiens
auugggaagggcagccccagggugugggagau

SEQ ID NO: 290987 - RNA, 32 nt, Homo Sapiens
auaguugaagcauccaaaauauguaaaagcaa

SEQ ID NO: 290988 - RNA, 31 nt, Homo Sapiens
gccacguaugggugccugcccugggcucugg

SEQ ID NO: 290989 - RNA, 32 nt, Homo Sapiens
guaacaggcgcuggagcuggcccgccaccgcc

SEQ ID NO: 290990 - RNA, 30 nt, Homo Sapiens
caaaugcugcuaauggacagccgcuccugc

SEQ ID NO: 290991 - RNA, 32 nt, Homo Sapiens
guuaucuucacagcugacuucacacucacugg

SEQ ID NO: 290992 - RNA, 32 nt, Homo Sapiens
ucccggggcuucaaggggugacugcuguaggc

SEQ ID NO: 290993 - RNA, 32 nt, Homo Sapiens
uaagccuuccugccgcaacaguuuuuuaugcu

SEQ ID NO: 290994 - RNA, 32 nt, Homo Sapiens
aauauuuaauuucaaccuuuaguuuauguaua

SEQ ID NO: 290995 - RNA, 32 nt, Homo Sapiens
ucggucacgccccucaguccgccccgccccgc

SEQ ID NO: 290996 - RNA, 32 nt, Homo Sapiens
ugggcacgggcugugagcuggugccaaggaca

SEQ ID NO: 290997 - RNA, 32 nt, Homo Sapiens
aacaauacuuuguuuucuaaauguagauauug

SEQ ID NO: 290998 - RNA, 32 nt, Homo Sapiens
uucuuuccaucccaccccccuuggaauuauuu

SEQ ID NO: 290999 - RNA, 32 nt, Homo Sapiens
acuugaagaguaagaauaaaaacuaccaaagu

SEQ ID NO: 291000 - RNA, 32 nt, Homo Sapiens
guaagaaaacaucacugaaaugcuagcugcaa

SEQ ID NO: 291001 - RNA, 32 nt, Homo Sapiens
gcggcccugcugaagcugcugcagcccugcca

SEQ ID NO: 291002 - RNA, 32 nt, Homo Sapiens
cgggagggaggguggggcaggggucggggguc

SEQ ID NO: 291003 - RNA, 32 nt, Homo Sapiens
cacccgcccacccagcggcgacauuguacaga

SEQ ID NO: 291004 - RNA, 32 nt, Homo Sapiens
guauaauuucaguacuggggucggggagagga

SEQ ID NO: 291005 - RNA, 32 nt, Homo Sapiens
ucaccgguucccuccauuuugaaagggaaaaa

SEQ ID NO: 291006 - RNA, 32 nt, Homo Sapiens
gcgccgcugcaggaggccgccggcagcuacca

SEQ ID NO: 291007 - RNA, 32 nt, Homo Sapiens
cacugccgcucaugcauagaaaccaccaaaag

SEQ ID NO: 291008 - RNA, 32 nt, Homo Sapiens
cuuagaggugagcaucagagccagagcaguga

SEQ ID NO: 291009 - RNA, 32 nt, Homo Sapiens
augaacacacuguguccuggugcucucugcca

SEQ ID NO: 291010 - RNA, 32 nt, Homo Sapiens
uguacuuaauaaauugagcagcauucauuaag

SEQ ID NO: 291011 - RNA, 32 nt, Homo Sapiens
cuguuuagaucaaaguuuuuucugauucuucu

SEQ ID NO: 291012 - RNA, 32 nt, Homo Sapiens
cgagcaccuuccugucucucauuuucaccauc

SEQ ID NO: 291013 - RNA, 32 nt, Homo Sapiens
ccucauagccaccaccugagcaagcuccuguu

SEQ ID NO: 291014 - RNA, 32 nt, Homo Sapiens
ggguucaauguuuacuuucucauucggaugcc

SEQ ID NO: 291015 - RNA, 32 nt, Homo Sapiens
acuugccaaagaagaggaaccacagaaagaga

SEQ ID NO: 291016 - RNA, 32 nt, Homo Sapiens
uagaguuauggucaugucucauguuucauuac

SEQ ID NO: 291017 - RNA, 32 nt, Homo Sapiens
aaaucccuguguucuccucuguggaaaugaag

SEQ ID NO: 291018 - RNA, 32 nt, Homo Sapiens
uuauaauuucuuuccaaagauaccaaauaaac

SEQ ID NO: 291019 - RNA, 32 nt, Homo Sapiens
cuauaguauuuaaugagaaugaggguuuacuc

SEQ ID NO: 291020 - RNA, 32 nt, Homo Sapiens
accagggagggagaagcagguuuggagaggac

SEQ ID NO: 291021 - RNA, 32 nt, Homo Sapiens
uggggaagggggacaagggucagucugucggg

SEQ ID NO: 291022 - RNA, 32 nt, Homo Sapiens
ugccagcacugacucaggaacagcaagucagg

SEQ ID NO: 291023 - RNA, 32 nt, Homo Sapiens
auuguauccaaggcagguuagagcuaguguau

SEQ ID NO: 291024 - RNA, 32 nt, Homo Sapiens
caguagucauugaaaguuauguuucuuugcuu

SEQ ID NO: 291025 - RNA, 32 nt, Homo Sapiens
cccagcacuaugcuuuccuucuuugggauaga

SEQ ID NO: 291026 - RNA, 32 nt, Homo Sapiens
cucuaccuggugcuccucccuaaugcucauga

SEQ ID NO: 291027 - RNA, 32 nt, Homo Sapiens
ucccagcucucccuguccuccuccccccgaca

SEQ ID NO: 291028 - RNA, 31 nt, Homo Sapiens
gagucaauuaaaccucuuuccuuuauaaauu

SEQ ID NO: 291029 - RNA, 32 nt, Homo Sapiens
gagugagcacuuuggguccuuagacucacguc

SEQ ID NO: 291030 - RNA, 32 nt, Homo Sapiens
aaauagccaagucugagaaguuuggcaguccu

SEQ ID NO: 291031 - RNA, 32 nt, Homo Sapiens
ccguggaggauauaugcccacccccacugggg

SEQ ID NO: 291032 - RNA, 32 nt, Homo Sapiens
ucagacuucuauuuuuuaaagacugugaaaug

SEQ ID NO: 291033 - RNA, 32 nt, Homo Sapiens
gucauuuucuucacauucucaucuguaaaaug

SEQ ID NO: 291034 - RNA, 32 nt, Homo Sapiens
ucuuuugaacaccugaugacagagacagcauc

SEQ ID NO: 291035 - RNA, 32 nt, Homo Sapiens
uagcauuaaggguuucuauuaaugacacagaa

SEQ ID NO: 291036 - RNA, 32 nt, Homo Sapiens
cgacuaggccuagucguagcggcggccagcgg

SEQ ID NO: 291037 - RNA, 32 nt, Homo Sapiens
auauugcuuuuuuggagauacuuugacgaagg

SEQ ID NO: 291038 - RNA, 32 nt, Homo Sapiens
accuucaccuccccgguucaagcaauucuccu

SEQ ID NO: 291039 - RNA, 32 nt, Homo Sapiens
ccugcuugucuauuuucuucucuucacggcuc

SEQ ID NO: 291040 - RNA, 32 nt, Homo Sapiens
agaaaaaauaaaauaaaaugagccccuuacuc

SEQ ID NO: 291041 - RNA, 32 nt, Homo Sapiens
cccacaaggaguggaccaagacuauuauuuaa

SEQ ID NO: 291042 - RNA, 32 nt, Homo Sapiens
uuuugucuuuaaacguauuuucaggugauucc

SEQ ID NO: 291043 - RNA, 31 nt, Homo Sapiens
aggacauuuucugcacugccccgaggaacgc

SEQ ID NO: 291044 - RNA, 32 nt, Homo Sapiens
gcuuugggguugucccuggacuugucuugguu

SEQ ID NO: 291045 - RNA, 32 nt, Homo Sapiens
uccaugcccaagagcugcgcuccggagcuggg

SEQ ID NO: 291046 - RNA, 32 nt, Homo Sapiens
uccccgcgccccaaacuuugccucccgcggcg

SEQ ID NO: 291047 - RNA, 32 nt, Homo Sapiens
ugcacaggaacccccaggacccagucgcugcu

SEQ ID NO: 291048 - RNA, 32 nt, Homo Sapiens
gaauaaaugaauuuugcucaagaaagaaacac

SEQ ID NO: 291049 - RNA, 32 nt, Homo Sapiens
auuuuagagucuuugaaauggggauuguggaa

SEQ ID NO: 291050 - RNA, 32 nt, Homo Sapiens
aaaaggcucagaccgaccgauggcaagaucug

SEQ ID NO: 291051 - RNA, 32 nt, Homo Sapiens
ggugggaggaggagguucgggugcuggguaag

SEQ ID NO: 291052 - RNA, 32 nt, Homo Sapiens
ccaccccagguaucccugguauuguccuaagc

SEQ ID NO: 291053 - RNA, 32 nt, Homo Sapiens
acagcgagguguggaaucauggguuucccuug

SEQ ID NO: 291054 - RNA, 32 nt, Homo Sapiens
agggagauuggcaccuaguggcugggagcuug

SEQ ID NO: 291055 - RNA, 32 nt, Homo Sapiens
cccugacgccuccagacaccccuucuugccga

SEQ ID NO: 291056 - RNA, 32 nt, Homo Sapiens
gaauuggagcuuuggaacaggaugguggaacc

SEQ ID NO: 291057 - RNA, 32 nt, Homo Sapiens
augauuucgacguauuuaauauuuucaaagag

SEQ ID NO: 291058 - RNA, 32 nt, Homo Sapiens
gcaucugugaacuggcugcuucuuccagagag

SEQ ID NO: 291059 - RNA, 32 nt, Homo Sapiens
ugcgccaucugugcacacuaagaaaugggacu

SEQ ID NO: 291060 - RNA, 32 nt, Homo Sapiens
uaugucuuucccuuuucaguuuccauguacua

SEQ ID NO: 291061 - RNA, 32 nt, Homo Sapiens
cgucugcccgggcccgcccaucggggucccca

SEQ ID NO: 291062 - RNA, 32 nt, Homo Sapiens
acuucauguggguugcugaagcaccauucagc

SEQ ID NO: 291063 - RNA, 32 nt, Homo Sapiens
cuguuuuucauauuuugagacuugccucagau

SEQ ID NO: 291064 - RNA, 32 nt, Homo Sapiens
ggacgggcccagggugggagcggccggcccac

SEQ ID NO: 291065 - RNA, 32 nt, Homo Sapiens
uucuccugccccagccucccaaguagcuggga

SEQ ID NO: 291066 - RNA, 32 nt, Homo Sapiens
caagggugggccuggggauauuuugcuuacca

SEQ ID NO: 291067 - RNA, 32 nt, Homo Sapiens
gguuuugccauguuggccaggcuggucucgag

SEQ ID NO: 291068 - RNA, 32 nt, Homo Sapiens
uccauccucccucucuuccaccuccccaggcu

SEQ ID NO: 291069 - RNA, 32 nt, Homo Sapiens
aaggcaagaaaauggauccucccuuggagccu

SEQ ID NO: 291070 - RNA, 32 nt, Homo Sapiens
cuccgccgacuagcugcccccgcgagcaacgg

SEQ ID NO: 291071 - RNA, 32 nt, Homo Sapiens
acacuaucuaagaugguaaaaaauugacgaag

SEQ ID NO: 291072 - RNA, 32 nt, Homo Sapiens
ccuuguauuugcuccuaucacaaaagauauau

SEQ ID NO: 291073 - RNA, 32 nt, Homo Sapiens
aaacauuucugagaggaggcuccagccucagg

SEQ ID NO: 291074 - RNA, 32 nt, Homo Sapiens
cuccccucacacaugcacuuccacuaccuggg

SEQ ID NO: 291075 - RNA, 32 nt, Homo Sapiens
aaaagcugcauuuaccaaaaaauacaaguaaa

SEQ ID NO: 291076 - RNA, 32 nt, Homo Sapiens
ugcuuccccguccucugacaucgccugcagcc

SEQ ID NO: 291077 - RNA, 32 nt, Homo Sapiens
ggguggaaaaggugauggugcuggggugugag

SEQ ID NO: 291078 - RNA, 32 nt, Homo Sapiens
agacaggcucacaugcaccaggaacugcaugu

SEQ ID NO: 291079 - RNA, 31 nt, Homo Sapiens
aucuccuugugcucaggccagugucuuccca

SEQ ID NO: 291080 - RNA, 32 nt, Homo Sapiens
agugcccuugaaguugguuaggaccuuccugu

SEQ ID NO: 291081 - RNA, 32 nt, Homo Sapiens
agguggugccccugcgggcugugguggccgug

SEQ ID NO: 291082 - RNA, 32 nt, Homo Sapiens
uuuaugaacaaaugcucauugcacuauauuau

SEQ ID NO: 291083 - RNA, 32 nt, Homo Sapiens
gcccucuccgaguccggggcugggucccacca

SEQ ID NO: 291084 - RNA, 32 nt, Homo Sapiens
uucuucuuuuaccuuuuugucuaccucauagu

SEQ ID NO: 291085 - RNA, 32 nt, Homo Sapiens
gaaugacguccucaagagcggcuggaagaugu

SEQ ID NO: 291086 - RNA, 32 nt, Homo Sapiens
uuccucuuuuucugugugagguuuuuuuuauc

SEQ ID NO: 291087 - RNA, 32 nt, Homo Sapiens
agaaaagacagaagaagauugguugaaaauga

SEQ ID NO: 291088 - RNA, 32 nt, Homo Sapiens
acccaccaucaccaugcaagugccaggagcuc

SEQ ID NO: 291089 - RNA, 32 nt, Homo Sapiens
ccccaaggaagccgacgauccaaaugccgugu

SEQ ID NO: 291090 - RNA, 32 nt, Homo Sapiens
acccggcagcggccgaccuaggcggucuugug

SEQ ID NO: 291091 - RNA, 32 nt, Homo Sapiens
gucccucuguugucugcauucgugcccugggu

SEQ ID NO: 291092 - RNA, 32 nt, Homo Sapiens
guucccugggggauguucugugacagugugac

SEQ ID NO: 291093 - RNA, 32 nt, Homo Sapiens
uaauguagggggaggcgggggaggcuucaaac

SEQ ID NO: 291094 - RNA, 32 nt, Homo Sapiens
cgccgagggguuggggggugggugugggggag

SEQ ID NO: 291095 - RNA, 31 nt, Homo Sapiens
ccuuucucauccucuuugccaugugaggagc

SEQ ID NO: 291096 - RNA, 32 nt, Homo Sapiens
ggccaaugcaggaggaugguugagcucaggag

SEQ ID NO: 291097 - RNA, 32 nt, Homo Sapiens
gagaacaaggacccucucggccucaggaaucu

SEQ ID NO: 291098 - RNA, 32 nt, Homo Sapiens
ugacuugggggaacgaugugucuguauuucau

SEQ ID NO: 291099 - RNA, 32 nt, Homo Sapiens
gaagcugccuuauauagagcuacauuugggcc

SEQ ID NO: 291100 - RNA, 32 nt, Homo Sapiens
caaaaggagcagcccuacuucuaccccuuccc

SEQ ID NO: 291101 - RNA, 32 nt, Homo Sapiens
agugguucagagcggccugggugccuggcgga

SEQ ID NO: 291102 - RNA, 32 nt, Homo Sapiens
uugaaaguagagaggagggggcagccaaugga

SEQ ID NO: 291103 - RNA, 32 nt, Homo Sapiens
uuagucuuguagaagaaaauaaaaucuuggga

SEQ ID NO: 291104 - RNA, 32 nt, Homo Sapiens
gaagcaauggggaauuuggaaucuuguguaag

SEQ ID NO: 291105 - RNA, 32 nt, Homo Sapiens
ggcuggggacagagccgggcaccaaggagcga

SEQ ID NO: 291106 - RNA, 32 nt, Homo Sapiens
accacacaguuuggaagaaacggagcgggacg

SEQ ID NO: 291107 - RNA, 32 nt, Homo Sapiens
aggacacauuuuggaaaaccagcaggaggugc

SEQ ID NO: 291108 - RNA, 32 nt, Homo Sapiens
gaauaaauguuccauuuuuguuuucuacauuu

SEQ ID NO: 291109 - RNA, 32 nt, Homo Sapiens
auuaaacuugauaggaacgcaacauuaaauuu

SEQ ID NO: 291110 - RNA, 32 nt, Homo Sapiens
ccgcccgcaccucgcuagcguuccccugucuu

SEQ ID NO: 291111 - RNA, 32 nt, Homo Sapiens
cuuuucuccugguuuuggagucuugcacuggc

SEQ ID NO: 291112 - RNA, 32 nt, Homo Sapiens
ugaaacagagcacuugcagagccugggacaac

SEQ ID NO: 291113 - RNA, 32 nt, Homo Sapiens
gagugggaauaaaacuacuuaauuccuguggg

SEQ ID NO: 291114 - RNA, 32 nt, Homo Sapiens
cuaauaggauaaaggaagacauucaaaaaauu

SEQ ID NO: 291115 - RNA, 32 nt, Homo Sapiens
agcuuggccaaggggacuuugaauccagccaa

SEQ ID NO: 291116 - RNA, 32 nt, Homo Sapiens
caccugcugcggcuacugcugcugccgcugcc

SEQ ID NO: 291117 - RNA, 32 nt, Homo Sapiens
ggacguggggacggagcgcuuuccucuuggcg

SEQ ID NO: 291118 - RNA, 32 nt, Homo Sapiens
gggugggagccuggagauagcgcuccuggaga

SEQ ID NO: 291119 - RNA, 32 nt, Homo Sapiens
ugacucucuuuccauucuauuauucuuccguc

SEQ ID NO: 291120 - RNA, 31 nt, Homo Sapiens
gauucggaguuaaaacagggaugugcagaug

SEQ ID NO: 291121 - RNA, 32 nt, Homo Sapiens
auugucugaagcggcacuggagacccaggaaa

SEQ ID NO: 291122 - RNA, 31 nt, Homo Sapiens
cacucgccucggagaaauuccaacucuuggu

SEQ ID NO: 291123 - RNA, 30 nt, Homo Sapiens
agcauugggaggaagcacagaucucuagag

SEQ ID NO: 291124 - RNA, 32 nt, Homo Sapiens
cgcccgccggcucccccucccccgaucccucg

SEQ ID NO: 291125 - RNA, 32 nt, Homo Sapiens
guagauuuacagaacaaaguuuuauauuucac

SEQ ID NO: 291126 - RNA, 32 nt, Homo Sapiens
cugugggaggaugugacuaagauguuuaaagc

SEQ ID NO: 291127 - RNA, 32 nt, Homo Sapiens
aacuguaggugaucauuauccugugaaaauau

SEQ ID NO: 291128 - RNA, 32 nt, Homo Sapiens
agccagccucaccagcagcugggccagcugug

SEQ ID NO: 291129 - RNA, 32 nt, Homo Sapiens
ccccugcugauggagagccuucugcuucugcc

SEQ ID NO: 291130 - RNA, 32 nt, Homo Sapiens
ugaugucaaccuggaagcugguguucaccaga

SEQ ID NO: 291131 - RNA, 32 nt, Homo Sapiens
aacagccuccacucgcggugcacggggaagag

SEQ ID NO: 291132 - RNA, 32 nt, Homo Sapiens
guuuccucugucaucagucauucaauaaacac

SEQ ID NO: 291133 - RNA, 32 nt, Homo Sapiens
ucuauuuggggggcagggaacugucauucauu

SEQ ID NO: 291134 - RNA, 31 nt, Homo Sapiens
acuuugugcaacugccugugcccgucaucca

SEQ ID NO: 291135 - RNA, 32 nt, Homo Sapiens
gugugcgcuggcacacaugggugcugggugug

SEQ ID NO: 291136 - RNA, 32 nt, Homo Sapiens
cuggacccuucccaccugagcaugcugacccc

SEQ ID NO: 291137 - RNA, 32 nt, Homo Sapiens
uguuggaguauuuucuuccuuacgucaauacu

SEQ ID NO: 291138 - RNA, 32 nt, Homo Sapiens
agucucacagaaacugagcugcagacggggag

SEQ ID NO: 291139 - RNA, 32 nt, Homo Sapiens
augaaccaguguuccugagugcacacugacau

SEQ ID NO: 291140 - RNA, 32 nt, Homo Sapiens
ugaucaugucuccucuugucaggcuacagagu

SEQ ID NO: 291141 - RNA, 32 nt, Homo Sapiens
cgcuccacuccccgccgccgccgcgcggaugc

SEQ ID NO: 291142 - RNA, 32 nt, Homo Sapiens
aaaugccagggcccgcaccgaccacggggccg

SEQ ID NO: 291143 - RNA, 32 nt, Homo Sapiens
uguauaauuacauacugaauuauuucaugcau

SEQ ID NO: 291144 - RNA, 32 nt, Homo Sapiens
cauuuguggguuccccaucagccaggccuugg

SEQ ID NO: 291145 - RNA, 32 nt, Homo Sapiens
gguuagcgaagcacccaccucccuuuucucag

SEQ ID NO: 291146 - RNA, 32 nt, Homo Sapiens
acaugcuaaaagaggaagaagagaggcuccag

SEQ ID NO: 291147 - RNA, 32 nt, Homo Sapiens
gccucccuccaugcaucccacauacaagcacu

SEQ ID NO: 291148 - RNA, 32 nt, Homo Sapiens
auuggcugacaguuuugcaggcuguacaagca

SEQ ID NO: 291149 - RNA, 32 nt, Homo Sapiens
cuucgucucccucuucgguguucgggguccca

SEQ ID NO: 291150 - RNA, 32 nt, Homo Sapiens
ccuucagaaauaugagccaauuaaacucuuuu

SEQ ID NO: 291151 - RNA, 32 nt, Homo Sapiens
uauucaguggugcucucccacccaggggcccu

SEQ ID NO: 291152 - RNA, 32 nt, Homo Sapiens
cuggacgccgccggucccggcgcggaggugcg

SEQ ID NO: 291153 - RNA, 32 nt, Homo Sapiens
agauaaaauaggucuuuguuauuuucaacugu

SEQ ID NO: 291154 - RNA, 32 nt, Homo Sapiens
cgggcgggcaagcgggcgggcggcaacagcau

SEQ ID NO: 291155 - RNA, 32 nt, Homo Sapiens
acgugugauuuucagacuuuucuuucgagcag

SEQ ID NO: 291156 - RNA, 32 nt, Homo Sapiens
agucccugccagcagcuguccucccuggugca

SEQ ID NO: 291157 - RNA, 32 nt, Homo Sapiens
aacuauagugcuaaauugguaacugguauuuu

SEQ ID NO: 291158 - RNA, 32 nt, Homo Sapiens
uccuggaccagccccaggcuccugugcuggcg

SEQ ID NO: 291159 - RNA, 32 nt, Homo Sapiens
cucuacaucuucugccuuagucucaguuugug

SEQ ID NO: 291160 - RNA, 32 nt, Homo Sapiens
caggaccuaugaguggaaugggcaugaauaug

SEQ ID NO: 291161 - RNA, 32 nt, Homo Sapiens
agcagacugggcugcgggcggcggggccggcg

SEQ ID NO: 291162 - RNA, 32 nt, Homo Sapiens
cagagugugggaagggagagcggggcagucuc

SEQ ID NO: 291163 - RNA, 32 nt, Homo Sapiens
cuggccugugcagcucggguuuccgagcuucu

SEQ ID NO: 291164 - RNA, 32 nt, Homo Sapiens
uuuuuuguguggaacagcucaccuugucagac

SEQ ID NO: 291165 - RNA, 32 nt, Homo Sapiens
auuauauacugauucuacaaaauagaaacuac

SEQ ID NO: 291166 - RNA, 32 nt, Homo Sapiens
uaguuaacuccucccugcccgccgcgccgacc

SEQ ID NO: 291167 - RNA, 32 nt, Homo Sapiens
acguacucauaaauaugacuuauuguauugcc

SEQ ID NO: 291168 - RNA, 32 nt, Homo Sapiens
uucuacuuuccacauuuugacuauuacaagcu

SEQ ID NO: 291169 - RNA, 32 nt, Homo Sapiens
cucaucuacugcuuauguuaagugagaacuuu

SEQ ID NO: 291170 - RNA, 32 nt, Homo Sapiens
ugggcaucuaggaaacaugaccaagaucugca

SEQ ID NO: 291171 - RNA, 32 nt, Homo Sapiens
cucugcgggacuuuaaaaaucuauucagauau

SEQ ID NO: 291172 - RNA, 32 nt, Homo Sapiens
uagauccgacgucugucugggcgaaggguagg

SEQ ID NO: 291173 - RNA, 32 nt, Homo Sapiens
cuguaugaauguuacuaaauuuucuaauuaaa

SEQ ID NO: 291174 - RNA, 32 nt, Homo Sapiens
cccugugccggggaggaggggguggguucgcu

SEQ ID NO: 291175 - RNA, 32 nt, Homo Sapiens
acaccuguaccuccucccccuucaucauacaa

SEQ ID NO: 291176 - RNA, 32 nt, Homo Sapiens
gguaucugcugcgccugagaugaguaaacugu

SEQ ID NO: 291177 - RNA, 32 nt, Homo Sapiens
gagacagaggagaggaaagggaaguaguuugg

SEQ ID NO: 291178 - RNA, 32 nt, Homo Sapiens
gacggccaagguggcaguuugucccacgggag

SEQ ID NO: 291179 - RNA, 32 nt, Homo Sapiens
gggugugagggagagacggggacguugggugc

SEQ ID NO: 291180 - RNA, 32 nt, Homo Sapiens
cugccgccccucuggagagagcagcuuuuuau

SEQ ID NO: 291181 - RNA, 32 nt, Homo Sapiens
gaggcccucccgagagacccagucacacgucu

SEQ ID NO: 291182 - RNA, 32 nt, Homo Sapiens
ucugcccuccccacccauggugguacugggga

SEQ ID NO: 291183 - RNA, 30 nt, Homo Sapiens
gcuaaacucaacauggauuuggcugagcuc

SEQ ID NO: 291184 - RNA, 32 nt, Homo Sapiens
cacuagugccuaaauguaguaaaggcugcuuc

SEQ ID NO: 291185 - RNA, 32 nt, Homo Sapiens
acagcugagaguugauggguguguaaugcaua

SEQ ID NO: 291186 - RNA, 32 nt, Homo Sapiens
gauaguauaaauaaaaagaaauacagucuaga

SEQ ID NO: 291187 - RNA, 32 nt, Homo Sapiens
cuuagcuguccuugcuugugccugccucuuuc

SEQ ID NO: 291188 - RNA, 32 nt, Homo Sapiens
ucguuagcuguaaaaguaauauuaugacauau

SEQ ID NO: 291189 - RNA, 32 nt, Homo Sapiens
uaugucuuuuuugcuuuuuuuuuaaaaaaaag

SEQ ID NO: 291190 - RNA, 32 nt, Homo Sapiens
cugucucgucggcuaccggggccgggcgcccc

SEQ ID NO: 291191 - RNA, 32 nt, Homo Sapiens
aggaaucaaagccagcagcauccuagaaagga

SEQ ID NO: 291192 - RNA, 32 nt, Homo Sapiens
uuaaaugugccaugcauagaaugaaccccugc

SEQ ID NO: 291193 - RNA, 32 nt, Homo Sapiens
ccuggucagacacaauguuggcacucuugguu

SEQ ID NO: 291194 - RNA, 32 nt, Homo Sapiens
uggagcggaucccacaccuccggaccgaggga

SEQ ID NO: 291195 - RNA, 32 nt, Homo Sapiens
agacuuuucaaucccaccccacuccucaucuc

SEQ ID NO: 291196 - RNA, 32 nt, Homo Sapiens
ggagugcugccccuuccaggccuccucuguca

SEQ ID NO: 291197 - RNA, 32 nt, Homo Sapiens
aaagaccuuauccuuguaaccaaaagccgccu

SEQ ID NO: 291198 - RNA, 32 nt, Homo Sapiens
uacagaauauauuuuucccuuguugagaucuu

SEQ ID NO: 291199 - RNA, 32 nt, Homo Sapiens
gcgacuucuccagcccaguccccggagaccac

SEQ ID NO: 291200 - RNA, 32 nt, Homo Sapiens
caugugacgcagaauaguuuugcaauguguau

SEQ ID NO: 291201 - RNA, 32 nt, Homo Sapiens
ucuagguccccucuccugcaucugucucccuu

SEQ ID NO: 291202 - RNA, 32 nt, Homo Sapiens
cugaggccccacuggaaaaaggacucaucgag

SEQ ID NO: 291203 - RNA, 32 nt, Homo Sapiens
uccuccuugaaucugagacuggcugcccauuc

SEQ ID NO: 291204 - RNA, 32 nt, Homo Sapiens
uauucauacuuauugauauagcuuguauauuu

SEQ ID NO: 291205 - RNA, 32 nt, Homo Sapiens
uuuucucauuauguuacuucuaguguucaccu

SEQ ID NO: 291206 - RNA, 32 nt, Homo Sapiens
gaggcccccucucuccuuuggguuuagucaac

SEQ ID NO: 291207 - RNA, 32 nt, Homo Sapiens
agaacuuugagaaggacgagacacagauggaa

SEQ ID NO: 291208 - RNA, 32 nt, Homo Sapiens
gcagaaugaagaagauguuuguguggguuuug

SEQ ID NO: 291209 - RNA, 32 nt, Homo Sapiens
gcgaggcggcggcggcagcagcgauggcagga

SEQ ID NO: 291210 - RNA, 30 nt, Homo Sapiens
gagccguggggcgcgggcggccgagccuau

SEQ ID NO: 291211 - RNA, 32 nt, Homo Sapiens
aggcacagucugugcacacauacucucagguc

SEQ ID NO: 291212 - RNA, 32 nt, Homo Sapiens
uaacucaaacaaaaaagggacauuuaugugca

SEQ ID NO: 291213 - RNA, 32 nt, Homo Sapiens
ucccugcuuccugguccagagccucccuccag

SEQ ID NO: 291214 - RNA, 32 nt, Homo Sapiens
ggugggggacccuccgcugccacuucgccuag

SEQ ID NO: 291215 - RNA, 32 nt, Homo Sapiens
ucccacacagaaaguguuagauagggaaauug

SEQ ID NO: 291216 - RNA, 29 nt, Homo Sapiens
uuaaugaggggacagagucgccuggagaa

SEQ ID NO: 291217 - RNA, 32 nt, Homo Sapiens
uggcuaaagacagagcaauucaggccacagaa

SEQ ID NO: 291218 - RNA, 32 nt, Homo Sapiens
acccugcugcugcuccucccugugacccagac

SEQ ID NO: 291219 - RNA, 32 nt, Homo Sapiens
uccuuuccuuucuacauagacacagugacagu

SEQ ID NO: 291220 - RNA, 32 nt, Homo Sapiens
auaucccgggggugggggguggggguggguca

SEQ ID NO: 291221 - RNA, 31 nt, Homo Sapiens
gcaggcgccgacugccuggcgucguccguga

SEQ ID NO: 291222 - RNA, 32 nt, Homo Sapiens
ccccuggaaagugauccuggcauccgagagcc

SEQ ID NO: 291223 - RNA, 32 nt, Homo Sapiens
ggccuucucuacaaccuaguccaucucacuuc

SEQ ID NO: 291224 - RNA, 32 nt, Homo Sapiens
uucauucuuucaacaaacaugccaucuaucuc

SEQ ID NO: 291225 - RNA, 32 nt, Homo Sapiens
guucugggccauguacagaaaauaucacugua

SEQ ID NO: 291226 - RNA, 32 nt, Homo Sapiens
aaugaucauaauugcagauugcuauacguuuc

SEQ ID NO: 291227 - RNA, 32 nt, Homo Sapiens
cccaggccauuagugccauccaggcgcugcgc

SEQ ID NO: 291228 - RNA, 32 nt, Homo Sapiens
aauccagaguuguuauuuuucuuagaaggagc

SEQ ID NO: 291229 - RNA, 32 nt, Homo Sapiens
ggagggagggccucagucuuccgcccccagcc

SEQ ID NO: 291230 - RNA, 32 nt, Homo Sapiens
ugggagccgugcucagccugccaggaagccaa

SEQ ID NO: 291231 - RNA, 32 nt, Homo Sapiens
aaggagacgcgcugcgcgccgccgcugcccgg

SEQ ID NO: 291232 - RNA, 32 nt, Homo Sapiens
cucuugaaggccgccagugaguuccuacaaag

SEQ ID NO: 291233 - RNA, 32 nt, Homo Sapiens
uaaguguuuuuaagcaaagguauuuuugaagu

SEQ ID NO: 291234 - RNA, 32 nt, Homo Sapiens
cauggaaucagaguaaacaggauauugaggaa

SEQ ID NO: 291235 - RNA, 32 nt, Homo Sapiens
cccuccgucuacaggccuuguaccucuccagg

SEQ ID NO: 291236 - RNA, 32 nt, Homo Sapiens
auuaaagcagaagcauuuuucuuaauguacaa

SEQ ID NO: 291237 - RNA, 32 nt, Homo Sapiens
gauuguuaaaaauggcugaaaacuugauacua

SEQ ID NO: 291238 - RNA, 32 nt, Homo Sapiens
cugaucggugucggagcgccccucaccauccu

SEQ ID NO: 291239 - RNA, 29 nt, Homo Sapiens
agugcuugauauuucagagucagucauug

SEQ ID NO: 291240 - RNA, 32 nt, Homo Sapiens
ggauguuaccuugcuuguccacagcagccagu

SEQ ID NO: 291241 - RNA, 32 nt, Homo Sapiens
auacaugccuucuuuguagguggaguuuguga

SEQ ID NO: 291242 - RNA, 32 nt, Homo Sapiens
ccugcagccaucugugaggcccgcggggaugg

SEQ ID NO: 291243 - RNA, 32 nt, Homo Sapiens
aggcggggccggaagcgcuacgguuugacccc

SEQ ID NO: 291244 - RNA, 32 nt, Homo Sapiens
guugguauuguuaacuuuuuauugucaucaaa

SEQ ID NO: 291245 - RNA, 32 nt, Homo Sapiens
uuugaucuucgucauugucgucguguguuuug

SEQ ID NO: 291246 - RNA, 32 nt, Homo Sapiens
auccuagcuuuauuguuuuuuauuacuucccu

SEQ ID NO: 291247 - RNA, 32 nt, Homo Sapiens
cuggggagggggucauuguucuccucguccau

SEQ ID NO: 291248 - RNA, 32 nt, Homo Sapiens
cauaguaacaauggcuaaugauaauuuagcuu

SEQ ID NO: 291249 - RNA, 27 nt, Homo Sapiens
aucaauuuuaucuucagcuucuguuau

SEQ ID NO: 291250 - RNA, 32 nt, Homo Sapiens
uuuuacucaaaauaaacauggccaugaacuca

SEQ ID NO: 291251 - RNA, 32 nt, Homo Sapiens
gcccugugacucaggaccagcucuggagucuc

SEQ ID NO: 291252 - RNA, 29 nt, Homo Sapiens
ccagagaugaagauguauguggaagaaag

SEQ ID NO: 291253 - RNA, 32 nt, Homo Sapiens
ugcuucgagggugaggacuucucuggagaggc

SEQ ID NO: 291254 - RNA, 32 nt, Homo Sapiens
acacccaggaccaauuugccauccaugagagu

SEQ ID NO: 291255 - RNA, 32 nt, Homo Sapiens
uguggauuaugucauauauaauaauuaucaga

SEQ ID NO: 291256 - RNA, 32 nt, Homo Sapiens
agaugccagcauucuaggaaaagcagggcggg

SEQ ID NO: 291257 - RNA, 29 nt, Homo Sapiens
gcccaugccccgagcggacugcauuauga

SEQ ID NO: 291258 - RNA, 32 nt, Homo Sapiens
ugcccaaauaguuuuucuuguuuucauaucua

SEQ ID NO: 291259 - RNA, 32 nt, Homo Sapiens
uuacaggugugagccacugcacccagccuacc

SEQ ID NO: 291260 - RNA, 32 nt, Homo Sapiens
cagaucaacaaaucuucacugagcauguauuu

SEQ ID NO: 291261 - RNA, 32 nt, Homo Sapiens
ucuugccccacuuuccccuuuagcugaacaga

SEQ ID NO: 291262 - RNA, 32 nt, Homo Sapiens
cugccccaccucacaagaagcucagaagcuga

SEQ ID NO: 291263 - RNA, 32 nt, Homo Sapiens
agccucaggacacacaccccugccucaaggug

SEQ ID NO: 291264 - RNA, 32 nt, Homo Sapiens
uuguaaauuuaaauauguaagugcuauauaag

SEQ ID NO: 291265 - RNA, 32 nt, Homo Sapiens
cugguacucaagcccgcggggacauugggaag

SEQ ID NO: 291266 - RNA, 32 nt, Homo Sapiens
auuugcuggauuuacuaacaauuucccccugu

SEQ ID NO: 291267 - RNA, 32 nt, Homo Sapiens
guggcucaaaaauuuguuuuaggucagagauu

SEQ ID NO: 291268 - RNA, 32 nt, Homo Sapiens
aagacaagagaaagcucugugcucucccaggg

SEQ ID NO: 291269 - RNA, 32 nt, Homo Sapiens
gcuauuaaaaauacacagaacuauuucccuga

SEQ ID NO: 291270 - RNA, 32 nt, Homo Sapiens
uaaacaaaaagauaaacaugcguguuaauggc

SEQ ID NO: 291271 - RNA, 32 nt, Homo Sapiens
aacauauccuucccucacuaccugugugacca

SEQ ID NO: 291272 - RNA, 32 nt, Homo Sapiens
gucccagcccccagcccugcucaccuuucuua

SEQ ID NO: 291273 - RNA, 32 nt, Homo Sapiens
aauaacauaguuuuggccuauucaucacauuu

SEQ ID NO: 291274 - RNA, 32 nt, Homo Sapiens
caucgccagauuuauuauccaguguauuccua

SEQ ID NO: 291275 - RNA, 32 nt, Homo Sapiens
guuuuguuuuuuacuuuucauauuuauauuag

SEQ ID NO: 291276 - RNA, 32 nt, Homo Sapiens
agccuuggcuggcgcaggcugauggggaggcu

SEQ ID NO: 291277 - RNA, 32 nt, Homo Sapiens
agcugcugaagagcuuuggugaggacgagauc

SEQ ID NO: 291278 - RNA, 31 nt, Homo Sapiens
gaaugugauugguaacuaggauauguauauu

SEQ ID NO: 291279 - RNA, 32 nt, Homo Sapiens
ggaggacguggaggugggggcuggggaaacug

SEQ ID NO: 291280 - RNA, 32 nt, Homo Sapiens
gaugagcugauugcuugaggcuuuuagugagu

SEQ ID NO: 291281 - RNA, 32 nt, Homo Sapiens
uugcgagagucuccaguguucauuagccuauu

SEQ ID NO: 291282 - RNA, 32 nt, Homo Sapiens
ugugaacccacuuuggaccaucacacacauuu

SEQ ID NO: 291283 - RNA, 32 nt, Homo Sapiens
guccagcccucccacaucauagucagcucccg

SEQ ID NO: 291284 - RNA, 32 nt, Homo Sapiens
uuuaaaaugucagugcaaaaaauauauggugg

SEQ ID NO: 291285 - RNA, 32 nt, Homo Sapiens
uacguuucaauacauacugcauucugugcuac

SEQ ID NO: 291286 - RNA, 32 nt, Homo Sapiens
aauuagccgggugugguggcgcgugcuuguaa

SEQ ID NO: 291287 - RNA, 32 nt, Homo Sapiens
acaggagaaucaguuuaaagacuuuaaaaaua

SEQ ID NO: 291288 - RNA, 32 nt, Homo Sapiens
aaaaugagauaaauguuucuuuuuucuuucug

SEQ ID NO: 291289 - RNA, 32 nt, Homo Sapiens
acguuuuccacuuuucuccuuuaaaaucuaau

SEQ ID NO: 291290 - RNA, 32 nt, Homo Sapiens
cugccauucuuucucuccucugcuucucugua

SEQ ID NO: 291291 - RNA, 32 nt, Homo Sapiens
gguaggacaaaaugagugguguucaagaauug

SEQ ID NO: 291292 - RNA, 32 nt, Homo Sapiens
caucaucauugauuuccaacuuagacuaguuu

SEQ ID NO: 291293 - RNA, 32 nt, Homo Sapiens
augggaggauuauuuuaacagaucaagaaaau

SEQ ID NO: 291294 - RNA, 32 nt, Homo Sapiens
cucccacuuguccuccaucaccaugugguuuu

SEQ ID NO: 291295 - RNA, 32 nt, Homo Sapiens
uugagccuugacucaagggcuguagauguucc

SEQ ID NO: 291296 - RNA, 32 nt, Homo Sapiens
aauacaagaugcaugaggaaaauguagagaug

SEQ ID NO: 291297 - RNA, 32 nt, Homo Sapiens
cauuguaaauguuguagagaugugggccgugg

SEQ ID NO: 291298 - RNA, 29 nt, Homo Sapiens
ccuccugugacuuauucccugagacuuuu

SEQ ID NO: 291299 - RNA, 32 nt, Homo Sapiens
ggcaggggucucucauguguguccaucugcgu

SEQ ID NO: 291300 - RNA, 32 nt, Homo Sapiens
auucacugucugaaguauuguuuacuucguua

SEQ ID NO: 291301 - RNA, 32 nt, Homo Sapiens
cuuccuaggacaaaaaggagacuggggaggga

SEQ ID NO: 291302 - RNA, 32 nt, Homo Sapiens
cggaauguuacaaugguaaaaugagugaucuc

SEQ ID NO: 291303 - RNA, 32 nt, Homo Sapiens
gauccagcccugaguuccuagccaccgccucc

SEQ ID NO: 291304 - RNA, 32 nt, Homo Sapiens
ccgccgccgucuccgccgucgcuggggcagcu

SEQ ID NO: 291305 - RNA, 32 nt, Homo Sapiens
uaauauugagaugccugaugccauuguauuuu

SEQ ID NO: 291306 - RNA, 32 nt, Homo Sapiens
cuaacuguuaaggcccucuaaugccauuuuuc

SEQ ID NO: 291307 - RNA, 32 nt, Homo Sapiens
uccccgccugcagcucucuuuaauuuuuugua

SEQ ID NO: 291308 - RNA, 32 nt, Homo Sapiens
auauaaggacaguaaagaaacuugugcagugc

SEQ ID NO: 291309 - RNA, 32 nt, Homo Sapiens
gcgcugggcagggaccggcagcccuggaaggg

SEQ ID NO: 291310 - RNA, 32 nt, Homo Sapiens
cuagacccaagccccaggucgugggacgauuu

SEQ ID NO: 291311 - RNA, 32 nt, Homo Sapiens
ugugcggguuaauacaacaaacuguaacaagu

SEQ ID NO: 291312 - RNA, 32 nt, Homo Sapiens
agucgaggugacccgggccgggcugcgggagg

SEQ ID NO: 291313 - RNA, 32 nt, Homo Sapiens
gcagaauauuauaaaaagagugucauauucca

SEQ ID NO: 291314 - RNA, 32 nt, Homo Sapiens
gcguccuaguggccugcuucagggccacccac

SEQ ID NO: 291315 - RNA, 32 nt, Homo Sapiens
cuuuuccuaaaauguacaaaaauaauaggagg

SEQ ID NO: 291316 - RNA, 32 nt, Homo Sapiens
gcaacucccaggcgggggcgccugcagcucag

SEQ ID NO: 291317 - RNA, 32 nt, Homo Sapiens
uuguagaacaaaugcaagcccaaauguguuaa

SEQ ID NO: 291318 - RNA, 32 nt, Homo Sapiens
uaccaaacagagcucccagccaucuccucccu

SEQ ID NO: 291319 - RNA, 32 nt, Homo Sapiens
ggcgggcgggcuccggagcuuuccugagcggc

SEQ ID NO: 291320 - RNA, 32 nt, Homo Sapiens
aacucagaaaucaaacagcugcucugauggca

SEQ ID NO: 291321 - RNA, 32 nt, Homo Sapiens
agaauauguggaauuuaaaauaaacauuccau

SEQ ID NO: 291322 - RNA, 32 nt, Homo Sapiens
uggauuggaauaacccaaaacugccgauuuca

SEQ ID NO: 291323 - RNA, 32 nt, Homo Sapiens
ccggccugagccgccaugcgcgggaaguugcu

SEQ ID NO: 291324 - RNA, 32 nt, Homo Sapiens
uaugcuccuaaaacaucuuuuuucaaacucca

SEQ ID NO: 291325 - RNA, 32 nt, Homo Sapiens
uuccuacuucaacagaagaacaauauaaaauu

SEQ ID NO: 291326 - RNA, 32 nt, Homo Sapiens
aagugcuguacaaauuccacccgccccaggac

SEQ ID NO: 291327 - RNA, 32 nt, Homo Sapiens
gcugagcuggccauggcgcagcugugcgggcu

SEQ ID NO: 291328 - RNA, 32 nt, Homo Sapiens
ucuuaguauuauucugauuuuauuuugcccuu

SEQ ID NO: 291329 - RNA, 30 nt, Homo Sapiens
ccaggcugcagcugcucagaagcuccaggc

SEQ ID NO: 291330 - RNA, 32 nt, Homo Sapiens
agcgggggcuuggggaggggcuggggguugga

SEQ ID NO: 291331 - RNA, 32 nt, Homo Sapiens
uugugugugaguguguuuuuugaguuugcauc

SEQ ID NO: 291332 - RNA, 32 nt, Homo Sapiens
agaggacucugcagcggugaggaggauggaau

SEQ ID NO: 291333 - RNA, 32 nt, Homo Sapiens
ggcagacaccucuggacugacaaugguaucag

SEQ ID NO: 291334 - RNA, 32 nt, Homo Sapiens
acucucccacugagcaagcgucugugguccua

SEQ ID NO: 291335 - RNA, 32 nt, Homo Sapiens
ccgggugcccaucccccuccccgcccuggcau

SEQ ID NO: 291336 - RNA, 32 nt, Homo Sapiens
aauguggcaacacuuuuaauaaaugcucaccc

SEQ ID NO: 291337 - RNA, 32 nt, Homo Sapiens
gucuaagaauccuucaggcauucuuuaaggag

SEQ ID NO: 291338 - RNA, 32 nt, Homo Sapiens
gaauacagaggaaaggaaaaacaaguauuaaa

SEQ ID NO: 291339 - RNA, 32 nt, Homo Sapiens
uguuuaccaauauuacuaguaugaauaauaca

SEQ ID NO: 291340 - RNA, 32 nt, Homo Sapiens
aauucuuggccauguucucucuucucuagguu

SEQ ID NO: 291341 - RNA, 32 nt, Homo Sapiens
gugacucugcugcugcagugucugguuucccu

SEQ ID NO: 291342 - RNA, 32 nt, Homo Sapiens
gauuucaccaugauggucaggcuggucucgaa

SEQ ID NO: 291343 - RNA, 32 nt, Homo Sapiens
cuucccgcgggccgccagugcgcacccucggc

SEQ ID NO: 291344 - RNA, 32 nt, Homo Sapiens
uauaaucuauagaaacuaugcuuaucauuggc

SEQ ID NO: 291345 - RNA, 32 nt, Homo Sapiens
uggccuccuuuucuucagcgggcccuucaacc

SEQ ID NO: 291346 - RNA, 32 nt, Homo Sapiens
aauaguuuaaacagucauucaugcccccagug

SEQ ID NO: 291347 - RNA, 32 nt, Homo Sapiens
aucccacccuuccauccauaccucugccuccc

SEQ ID NO: 291348 - RNA, 32 nt, Homo Sapiens
gcaugugcacuggccugccaugacagcccucu

SEQ ID NO: 291349 - RNA, 32 nt, Homo Sapiens
accgaggaagagggaggcucccgccgcgcuca

SEQ ID NO: 291350 - RNA, 32 nt, Homo Sapiens
guguucugccucuggcagcugugcuaacagcu

SEQ ID NO: 291351 - RNA, 32 nt, Homo Sapiens
aaauuguuuuauucuucauucugacuuuuuaa

SEQ ID NO: 291352 - RNA, 32 nt, Homo Sapiens
uugaauaaaugaaugaaaaaugagaaaaccag

SEQ ID NO: 291353 - RNA, 32 nt, Homo Sapiens
agucuuaggagcaaaacgucuggggccugcga

SEQ ID NO: 291354 - RNA, 32 nt, Homo Sapiens
uacaaucuguuguuuuguuuuguuuuuagaga

SEQ ID NO: 291355 - RNA, 32 nt, Homo Sapiens
caggaccagcugccuccuuggucugaaaggcc

SEQ ID NO: 291356 - RNA, 32 nt, Homo Sapiens
cauuucauaccugcccugguccugcuugaagg

SEQ ID NO: 291357 - RNA, 32 nt, Homo Sapiens
gggaccaauucagagaaguacuguauaggaga

SEQ ID NO: 291358 - RNA, 32 nt, Homo Sapiens
aggcacaugugcacgcacacacaacuugugaa

SEQ ID NO: 291359 - RNA, 32 nt, Homo Sapiens
aaaaugguucccucagugacaucgaguggcau

SEQ ID NO: 291360 - RNA, 32 nt, Homo Sapiens
accgccgcugcacaggcugccggagcgagccu

SEQ ID NO: 291361 - RNA, 32 nt, Homo Sapiens
ugcaccccauucuugggccccccucauucccu

SEQ ID NO: 291362 - RNA, 32 nt, Homo Sapiens
uguagccuuggggaggcccaucccccaccugc

SEQ ID NO: 291363 - RNA, 32 nt, Homo Sapiens
auggagauuaguagaacuuucaaguacauaaa

SEQ ID NO: 291364 - RNA, 32 nt, Homo Sapiens
acccaguguugcauuuugucuuacucugaaag

SEQ ID NO: 291365 - RNA, 32 nt, Homo Sapiens
cccacaaauggcaucccgcgcaugcuugcccu

SEQ ID NO: 291366 - RNA, 32 nt, Homo Sapiens
aguauguuuucccuccugggagguaauuuuau

SEQ ID NO: 291367 - RNA, 32 nt, Homo Sapiens
gaaaauaucucacaauuuuugaauguucuuuu

SEQ ID NO: 291368 - RNA, 32 nt, Homo Sapiens
cauuccauucagaauucauuccuuccaccuuc

SEQ ID NO: 291369 - RNA, 32 nt, Homo Sapiens
gguguggacaauagaggcuuauuuucaagcag

SEQ ID NO: 291370 - RNA, 31 nt, Homo Sapiens
uccacgauguccaaggccgaggaggccaaga

SEQ ID NO: 291371 - RNA, 30 nt, Homo Sapiens
aaggaugucugugaugacaguggccauccc

SEQ ID NO: 291372 - RNA, 32 nt, Homo Sapiens
ugacagucacugccacgguuuccccaggcagg

SEQ ID NO: 291373 - RNA, 30 nt, Homo Sapiens
gggaccagacuuggcgcgggugucucgaag

SEQ ID NO: 291374 - RNA, 32 nt, Homo Sapiens
cugagcccaggcugcguagugaccacaagcuu

SEQ ID NO: 291375 - RNA, 32 nt, Homo Sapiens
gagaagaucuuugaguaagaaaaugcaguguu

SEQ ID NO: 291376 - RNA, 32 nt, Homo Sapiens
agcgggaacaagagcugaaaaacuaccuacug

SEQ ID NO: 291377 - RNA, 32 nt, Homo Sapiens
guggccacuauaagaacucgcacugcgugcug

SEQ ID NO: 291378 - RNA, 32 nt, Homo Sapiens
ccccgggcuucccuucuccccagccagaggug

SEQ ID NO: 291379 - RNA, 32 nt, Homo Sapiens
uuaacuuuauaaccgcgugaguuaagauuuaa

SEQ ID NO: 291380 - RNA, 32 nt, Homo Sapiens
ccgcggccuagagguccagcgcccgccgcgag

SEQ ID NO: 291381 - RNA, 32 nt, Homo Sapiens
uagucaaggaaagaagcaaagggaauaccucc

SEQ ID NO: 291382 - RNA, 31 nt, Homo Sapiens
ccgcugugccccccuccuccccgcgccccag

SEQ ID NO: 291383 - RNA, 32 nt, Homo Sapiens
cauaggguaaaauggaugaguagauagaaguc

SEQ ID NO: 291384 - RNA, 31 nt, Homo Sapiens
uauuuaaacagugaaaaacuaacugaaagca

SEQ ID NO: 291385 - RNA, 32 nt, Homo Sapiens
cgcaaaguucccuggcuccccucccuccugcc

SEQ ID NO: 291386 - RNA, 32 nt, Homo Sapiens
uuuccauguguugguuacuagaguaguagguu

SEQ ID NO: 291387 - RNA, 32 nt, Homo Sapiens
gcccggccgcgcugcgcccagaaacccaugag

SEQ ID NO: 291388 - RNA, 32 nt, Homo Sapiens
gaaagcucagucucaauuguguuuccugccug

SEQ ID NO: 291389 - RNA, 30 nt, Homo Sapiens
gacaugcucuuggauggggaaacuuaauau

SEQ ID NO: 291390 - RNA, 32 nt, Homo Sapiens
gaaaugcaaaaauaacaaaauaguuacugugc

SEQ ID NO: 291391 - RNA, 32 nt, Homo Sapiens
ccucuccgcccaugaaaaugccuccaaacuga

SEQ ID NO: 291392 - RNA, 32 nt, Homo Sapiens
ugguugcagaacuguauagauuuacuaggaac

SEQ ID NO: 291393 - RNA, 32 nt, Homo Sapiens
cuagugaaccaagcuucacagguagccccagu

SEQ ID NO: 291394 - RNA, 32 nt, Homo Sapiens
cccgagcagcccugcucuggggugcugaguga

SEQ ID NO: 291395 - RNA, 32 nt, Homo Sapiens
aaacacaguccuccacaucaauuuccaaacaa

SEQ ID NO: 291396 - RNA, 32 nt, Homo Sapiens
uuuuaccccuucuugccaaaauaaaaaaggau

SEQ ID NO: 291397 - RNA, 32 nt, Homo Sapiens
gccauuuccccuccuucuucucuccauguugg

SEQ ID NO: 291398 - RNA, 32 nt, Homo Sapiens
guugcugcuccaugguggggccaagagucacu

SEQ ID NO: 291399 - RNA, 32 nt, Homo Sapiens
aggaauugggggugggggucuucuaccuagga

SEQ ID NO: 291400 - RNA, 32 nt, Homo Sapiens
uuuuuuuuuuucugagacagagucuugcucug

SEQ ID NO: 291401 - RNA, 32 nt, Homo Sapiens
cacucucggggccgccauucuaccugccucau

SEQ ID NO: 291402 - RNA, 32 nt, Homo Sapiens
uucuaaggucccuuccagcccagccguucugg

SEQ ID NO: 291403 - RNA, 32 nt, Homo Sapiens
ugggcauucagucgcuccucucacgcggcugc

SEQ ID NO: 291404 - RNA, 32 nt, Homo Sapiens
gcuaccaguuucuuuaggcagcucuuuguccu

SEQ ID NO: 291405 - RNA, 32 nt, Homo Sapiens
guaaacggccgcagaacccuggucgguuugac

SEQ ID NO: 291406 - RNA, 32 nt, Homo Sapiens
agacugagggcggggauacugauucagaaauc

SEQ ID NO: 291407 - RNA, 32 nt, Homo Sapiens
ucaugcagucauauggcagcagguuggugauu

SEQ ID NO: 291408 - RNA, 32 nt, Homo Sapiens
cuccagcccagccccgguuccuccccgcugca

SEQ ID NO: 291409 - RNA, 32 nt, Homo Sapiens
acugccugguuuucgagcagguccuggcugag

SEQ ID NO: 291410 - RNA, 31 nt, Homo Sapiens
uaucucucacggagagacaguauucgccagc

SEQ ID NO: 291411 - RNA, 30 nt, Homo Sapiens
agcugaagcaggcgcucuuggcucggcgcg

SEQ ID NO: 291412 - RNA, 32 nt, Homo Sapiens
aagaugaaucuuauaaacuauauuuuaugaau

SEQ ID NO: 291413 - RNA, 32 nt, Homo Sapiens
uaggugacagccuggugacuccagaauggagc

SEQ ID NO: 291414 - RNA, 32 nt, Homo Sapiens
agagccacacuuauuucuuucuagacuuuuaa

SEQ ID NO: 291415 - RNA, 32 nt, Homo Sapiens
cccgggcugguagcgcgccgcucucggucgcg

SEQ ID NO: 291416 - RNA, 32 nt, Homo Sapiens
ugcaguggccgccgccucuuccgccgccgggc

SEQ ID NO: 291417 - RNA, 32 nt, Homo Sapiens
acuacaucuuuauucucuaaauguaguauaau

SEQ ID NO: 291418 - RNA, 32 nt, Homo Sapiens
ggauaaauacuguuacccuuaucccuggucac

SEQ ID NO: 291419 - RNA, 32 nt, Homo Sapiens
ggccucugggccgcccucccggcuggagagcu

SEQ ID NO: 291420 - RNA, 32 nt, Homo Sapiens
aucuguuuuguuuuuguuuuuaucuauaucuu

SEQ ID NO: 291421 - RNA, 32 nt, Homo Sapiens
ccaucccaauuugaauggaccaagaaaaacug

SEQ ID NO: 291422 - RNA, 30 nt, Homo Sapiens
cgcggguggggcgaaugcguucccagcggg

SEQ ID NO: 291423 - RNA, 28 nt, Homo Sapiens
cuuaggaggcggccggagcggugggcac

SEQ ID NO: 291424 - RNA, 32 nt, Homo Sapiens
uggcagggaaugugagacaacacaauauugcu

SEQ ID NO: 291425 - RNA, 32 nt, Homo Sapiens
agggauccucucuccuuguucaucucugcauc

SEQ ID NO: 291426 - RNA, 32 nt, Homo Sapiens
gauggcugcugggcugcccaggggugugaugu

SEQ ID NO: 291427 - RNA, 32 nt, Homo Sapiens
gcuuccggcgccguaacugcugccaucuucuc

SEQ ID NO: 291428 - RNA, 32 nt, Homo Sapiens
uccugcauuggauccgcuuuuguauuuuuuaa

SEQ ID NO: 291429 - RNA, 32 nt, Homo Sapiens
cggcugcgaggcggcccgugcaguccgugcuc

SEQ ID NO: 291430 - RNA, 32 nt, Homo Sapiens
gaaacaaaaugugacaauucuagccauuaugu

SEQ ID NO: 291431 - RNA, 32 nt, Homo Sapiens
aucuccacuuuucucuguaccuguguguauag

SEQ ID NO: 291432 - RNA, 32 nt, Homo Sapiens
auguuauacuggauucauuuccaauuaaauac

SEQ ID NO: 291433 - RNA, 32 nt, Homo Sapiens
uucccuuguuauaaguuuuaugucaaguaagg

SEQ ID NO: 291434 - RNA, 32 nt, Homo Sapiens
ccugggcucuucauuuaaagguaagcaguaau

SEQ ID NO: 291435 - RNA, 26 nt, Homo Sapiens
cauguccaaggaggagcgccccgguc

SEQ ID NO: 291436 - RNA, 32 nt, Homo Sapiens
augcugaauuauguucuuauuauuuucacugg

SEQ ID NO: 291437 - RNA, 32 nt, Homo Sapiens
ugaguaaagggagacagaaugacaggguaaau

SEQ ID NO: 291438 - RNA, 32 nt, Homo Sapiens
ugccuggccagaaauuguuuugaaaggcuaac

SEQ ID NO: 291439 - RNA, 32 nt, Homo Sapiens
auggaggugauauguuacacaguaaacaccug

SEQ ID NO: 291440 - RNA, 32 nt, Homo Sapiens
agacaguuucuuuuuucuuuucuuuuuuuuuu

SEQ ID NO: 291441 - RNA, 32 nt, Homo Sapiens
uccagauuuuuccaagagcagcagaaaaugaa

SEQ ID NO: 291442 - RNA, 32 nt, Homo Sapiens
ugguuuuugucaaauauacuguugauaaauau

SEQ ID NO: 291443 - RNA, 32 nt, Homo Sapiens
ucacaaggggcgaccgucgccacgguggcggc

SEQ ID NO: 291444 - RNA, 32 nt, Homo Sapiens
uucgugcaggacuuugaugcuugggguguucc

SEQ ID NO: 291445 - RNA, 32 nt, Homo Sapiens
auuuuuuucuuuuuuaucugguaaauaauuaa

SEQ ID NO: 291446 - RNA, 32 nt, Homo Sapiens
aaauggcagugcauauuaggauuuuuuagcac

SEQ ID NO: 291447 - RNA, 32 nt, Homo Sapiens
ccaacgggagcaaauaaaaaauccccaacaaa

SEQ ID NO: 291448 - RNA, 32 nt, Homo Sapiens
auuuccuguauaauucacuuaaauaaaagcag

SEQ ID NO: 291449 - RNA, 32 nt, Homo Sapiens
gugggaagagcugaagcaggcgcuuucggcuc

SEQ ID NO: 291450 - RNA, 32 nt, Homo Sapiens
uacugcuuggcggcggccagccccacaggggg

SEQ ID NO: 291451 - RNA, 32 nt, Homo Sapiens
ccuguguucuuugacccucggagcagggacag

SEQ ID NO: 291452 - RNA, 32 nt, Homo Sapiens
aaaauuagccggguguggugucgggcaccugu

SEQ ID NO: 291453 - RNA, 32 nt, Homo Sapiens
cccugaggugucuggcuguggcucaagauuug

SEQ ID NO: 291454 - RNA, 32 nt, Homo Sapiens
auaauucuuuuuacugaaaauacuauguuaug

SEQ ID NO: 291455 - RNA, 32 nt, Homo Sapiens
gcugucucaguaccaagaaaaagcccaacauc

SEQ ID NO: 291456 - RNA, 32 nt, Homo Sapiens
uccaguccccucacaaucccagauggguucua

SEQ ID NO: 291457 - RNA, 32 nt, Homo Sapiens
gagcaugagguccgccuccugggcgagaccca

SEQ ID NO: 291458 - RNA, 32 nt, Homo Sapiens
uuccagucuuggccaucaaaucaaugauuuaa

SEQ ID NO: 291459 - RNA, 32 nt, Homo Sapiens
agccccucggcuugucgccggagcugagaacc

SEQ ID NO: 291460 - RNA, 32 nt, Homo Sapiens
cgaggggggagaaauguuugccccgggaaaau

SEQ ID NO: 291461 - RNA, 32 nt, Homo Sapiens
ccgcccauauccugagguggaucaggcaggcu

SEQ ID NO: 291462 - RNA, 32 nt, Homo Sapiens
uaaauaggcuggaaguaauauucuaccagcag

SEQ ID NO: 291463 - RNA, 32 nt, Homo Sapiens
ggcgcgcguaugcggccgcggccgcgugacgc

SEQ ID NO: 291464 - RNA, 32 nt, Homo Sapiens
gugauccgcccaucucggccucccaaagugcu

SEQ ID NO: 291465 - RNA, 32 nt, Homo Sapiens
ugacaucucauuucuauuuucuguaauugguu

SEQ ID NO: 291466 - RNA, 32 nt, Homo Sapiens
cggggcggaggaggaggcgcccugggcggcga

SEQ ID NO: 291467 - RNA, 32 nt, Homo Sapiens
gcacuacugaaguuuaaaucuguggcacaauc

SEQ ID NO: 291468 - RNA, 32 nt, Homo Sapiens
ugugccugcugagacugcugggccacccccac

SEQ ID NO: 291469 - RNA, 32 nt, Homo Sapiens
caaaucaccaaaauguccaguuagaacaagaa

SEQ ID NO: 291470 - RNA, 32 nt, Homo Sapiens
uguguuuuguuuugauuuaauaacauaacaaa

SEQ ID NO: 291471 - RNA, 32 nt, Homo Sapiens
guuugccucugccucugacacacagcucuguc

SEQ ID NO: 291472 - RNA, 32 nt, Homo Sapiens
agugauggaaauagcauagaaaucacagugug

SEQ ID NO: 291473 - RNA, 32 nt, Homo Sapiens
ccgccaucuccauggccacggccgugagccgg

SEQ ID NO: 291474 - RNA, 32 nt, Homo Sapiens
ucccugucccucugcuggggaccgcugccucc

SEQ ID NO: 291475 - RNA, 32 nt, Homo Sapiens
ggcggggcggggggcuuugcaggccgccagug

SEQ ID NO: 291476 - RNA, 32 nt, Homo Sapiens
cucacuuguaagucaccgccaguaccuaaguu

SEQ ID NO: 291477 - RNA, 32 nt, Homo Sapiens
uggaggcauggccagcaucugcucuguccaac

SEQ ID NO: 291478 - RNA, 32 nt, Homo Sapiens
cuugaaccggggaggcggaggguguggugagc

SEQ ID NO: 291479 - RNA, 32 nt, Homo Sapiens
cguuucugcuccucgcugcgccggcgaccccg

SEQ ID NO: 291480 - RNA, 30 nt, Homo Sapiens
uaugucugacuucaaaauaaaauguaugaa

SEQ ID NO: 291481 - RNA, 32 nt, Homo Sapiens
ggccuccuucccugccccggcgcggggccacu

SEQ ID NO: 291482 - RNA, 32 nt, Homo Sapiens
ugagccccagacaaauaauguuuuaaaguuau

SEQ ID NO: 291483 - RNA, 32 nt, Homo Sapiens
ugagcucugaguuucucaguacucccucaaga

SEQ ID NO: 291484 - RNA, 32 nt, Homo Sapiens
caaggcauguuuuguuaugcugaaacugggcu

SEQ ID NO: 291485 - RNA, 32 nt, Homo Sapiens
uaaauugacagcaucuggauuaugaauacacc

SEQ ID NO: 291486 - RNA, 32 nt, Homo Sapiens
guuccucuggugcugcagccagagcucccugu

SEQ ID NO: 291487 - RNA, 32 nt, Homo Sapiens
ugagugcucagaguacagcugcaaccgcgacc

SEQ ID NO: 291488 - RNA, 32 nt, Homo Sapiens
gguggcaggcgugcuggccggcguggagagcc

SEQ ID NO: 291489 - RNA, 32 nt, Homo Sapiens
guugucucuuuggucaaggugaacuuuuaaug

SEQ ID NO: 291490 - RNA, 32 nt, Homo Sapiens
ucccugaccaugguuuuggcucucccaccccg

SEQ ID NO: 291491 - RNA, 32 nt, Homo Sapiens
aggagaaaagcuugcuucaggguccuuagaga

SEQ ID NO: 291492 - RNA, 32 nt, Homo Sapiens
gagugacgccuggcguguggccgcgggcaggc

SEQ ID NO: 291493 - RNA, 32 nt, Homo Sapiens
aauguauuugcugaauuauagauccaaauaaa

SEQ ID NO: 291494 - RNA, 32 nt, Homo Sapiens
gcuaaaagcaaaugaaguaaagggcauacuau

SEQ ID NO: 291495 - RNA, 32 nt, Homo Sapiens
uuauagacugguuuuucaaaagugaacaaucc

SEQ ID NO: 291496 - RNA, 32 nt, Homo Sapiens
aaauaaagugaacagugaggugguagcaagac

SEQ ID NO: 291497 - RNA, 32 nt, Homo Sapiens
ugccuccguguugucucuggcuucucacggac

SEQ ID NO: 291498 - RNA, 32 nt, Homo Sapiens
agucugacaacacuaaagaaauuucuuaauau

SEQ ID NO: 291499 - RNA, 32 nt, Homo Sapiens
gcuuuaaaaguacuuacuauaaccacaucaua

SEQ ID NO: 291500 - RNA, 32 nt, Homo Sapiens
gucaguugauaaacaaaauauuauauauucaa

SEQ ID NO: 291501 - RNA, 32 nt, Homo Sapiens
uuuggcaguacugcuggcuuucugggugauua

SEQ ID NO: 291502 - RNA, 32 nt, Homo Sapiens
cagaagcuguacuuuuaccaguuucuuugucc

SEQ ID NO: 291503 - RNA, 32 nt, Homo Sapiens
gggaggacauggcgcccggugcccuaggagcc

SEQ ID NO: 291504 - RNA, 32 nt, Homo Sapiens
uauguguguacacgcgcacgccuguaugugcg

SEQ ID NO: 291505 - RNA, 32 nt, Homo Sapiens
ggacucaaaagcaacuaacauaaaugguucuu

SEQ ID NO: 291506 - RNA, 32 nt, Homo Sapiens
cccaaguacuggauuuuaaaucuguauguauc

SEQ ID NO: 291507 - RNA, 32 nt, Homo Sapiens
gcuuaaaguacaugggccagugggacuggaag

SEQ ID NO: 291508 - RNA, 32 nt, Homo Sapiens
gguuucaucauguuggccuggcuggucucaaa

SEQ ID NO: 291509 - RNA, 32 nt, Homo Sapiens
uuaaacgccgcgcgugccucggcgucuucguu

SEQ ID NO: 291510 - RNA, 32 nt, Homo Sapiens
aaggugcccgcacuaccauacaucaguauuuu

SEQ ID NO: 291511 - RNA, 32 nt, Homo Sapiens
cggcucccuagccaccgcggccccacccucuu

SEQ ID NO: 291512 - RNA, 32 nt, Homo Sapiens
cuuccccuucccccauugacagauggagaaac

SEQ ID NO: 291513 - RNA, 32 nt, Homo Sapiens
uuuccuacgaucuggguggaugccuugccugu

SEQ ID NO: 291514 - RNA, 32 nt, Homo Sapiens
ucugaaaaugaagauuuggaaggagaucauca

SEQ ID NO: 291515 - RNA, 32 nt, Homo Sapiens
aauuaauacuaaauauugugauuucuuauuug

SEQ ID NO: 291516 - RNA, 32 nt, Homo Sapiens
uuccuagguccucuccuucugaugggaccacg

SEQ ID NO: 291517 - RNA, 32 nt, Homo Sapiens
cugcaugcccagcuccaaaucaccuugauuca

SEQ ID NO: 291518 - RNA, 32 nt, Homo Sapiens
uuuaaaucuuugagguaucaucaugaggucgu

SEQ ID NO: 291519 - RNA, 32 nt, Homo Sapiens
cauucaggcauggcaaacaauuaggguuaagu

SEQ ID NO: 291520 - RNA, 32 nt, Homo Sapiens
guguuagccgggauggucaaucuccugaccuu

SEQ ID NO: 291521 - RNA, 32 nt, Homo Sapiens
acucgccggagcaucaaugccgcugccucugg

SEQ ID NO: 291522 - RNA, 32 nt, Homo Sapiens
aaaacaacaaaguacagauuuauacauaaacc

SEQ ID NO: 291523 - RNA, 32 nt, Homo Sapiens
cagcucggcuguuuuucugcauuauuuauauu

SEQ ID NO: 291524 - RNA, 32 nt, Homo Sapiens
cacgaugagauugccuaccauuuuauaggaua

SEQ ID NO: 291525 - RNA, 32 nt, Homo Sapiens
gugcugagcugugggcgguuucuggggauguc

SEQ ID NO: 291526 - RNA, 32 nt, Homo Sapiens
gauuauauauuggaauuguugcacuuucagcc

SEQ ID NO: 291527 - RNA, 32 nt, Homo Sapiens
aauaaaucuggugaauaauuucaucuuuggua

SEQ ID NO: 291528 - RNA, 32 nt, Homo Sapiens
ccacauuuuuuaaaaugaaacuucuaucggaa

SEQ ID NO: 291529 - RNA, 32 nt, Homo Sapiens
agggagcgcgcgcggccgccacaaagcucggg

SEQ ID NO: 291530 - RNA, 32 nt, Homo Sapiens
uuaaaucaugauuuugcagaaccuuugguuuu

SEQ ID NO: 291531 - RNA, 28 nt, Homo Sapiens
gcgaugguaggcggcggcggggucggcg

SEQ ID NO: 291532 - RNA, 32 nt, Homo Sapiens
uguccagugccacagcacaaggcgccuccccg

SEQ ID NO: 291533 - RNA, 32 nt, Homo Sapiens
cucugccuuggagggaggggaggucuguuacc

SEQ ID NO: 291534 - RNA, 32 nt, Homo Sapiens
uguagcugaugaaaaggagcaugaugaacaac

SEQ ID NO: 291535 - RNA, 32 nt, Homo Sapiens
ucagagcugccccuuccacuuccuccccaaaa

SEQ ID NO: 291536 - RNA, 32 nt, Homo Sapiens
cacuccucuguccuaugaagaccgcugccauu

SEQ ID NO: 291537 - RNA, 31 nt, Homo Sapiens
agagcuggggacugccugcugucugccagua

SEQ ID NO: 291538 - RNA, 32 nt, Homo Sapiens
aucucaggaacaaauguagauacauucauuuu

SEQ ID NO: 291539 - RNA, 32 nt, Homo Sapiens
gggcguuguccggagagcugcgaggccggggu

SEQ ID NO: 291540 - RNA, 32 nt, Homo Sapiens
gcuaugccuugacuuggcagaagguuaucucu

SEQ ID NO: 291541 - RNA, 32 nt, Homo Sapiens
auaaccaauuuucagacacauuuuuggauuuc

SEQ ID NO: 291542 - RNA, 32 nt, Homo Sapiens
ucuucuucaaagcuuuuucuuaguuauaauau

SEQ ID NO: 291543 - RNA, 32 nt, Homo Sapiens
uuccucuccuggcgggcccggcggcgggcaag

SEQ ID NO: 291544 - RNA, 32 nt, Homo Sapiens
agagcgggggugggaggggaaugccacaguga

SEQ ID NO: 291545 - RNA, 32 nt, Homo Sapiens
aguuucgcuuuggauaauauuccucuuggccu

SEQ ID NO: 291546 - RNA, 32 nt, Homo Sapiens
gcagccuccccucggcgaucgcgcagccccau

SEQ ID NO: 291547 - RNA, 32 nt, Homo Sapiens
uagaauuuggugaaaaccuugcuauuuucaua

SEQ ID NO: 291548 - RNA, 32 nt, Homo Sapiens
gaaagcacuagguaggggccagcaaauacugg

SEQ ID NO: 291549 - RNA, 32 nt, Homo Sapiens
ggucauacagcuaagaagagaauagagcaaaa

SEQ ID NO: 291550 - RNA, 32 nt, Homo Sapiens
agguugugcagggacaucuuauugacugccuc

SEQ ID NO: 291551 - RNA, 32 nt, Homo Sapiens
gacucacucuuagaaacaaaaaugucauacua

SEQ ID NO: 291552 - RNA, 27 nt, Homo Sapiens
auuaaauccuucuuuggcugccugugu

SEQ ID NO: 291553 - RNA, 32 nt, Homo Sapiens
ccucucccacccacguccgggaagccucuggg

SEQ ID NO: 291554 - RNA, 32 nt, Homo Sapiens
agccagaggucuugaaagacuucagccaugug

SEQ ID NO: 291555 - RNA, 32 nt, Homo Sapiens
augccggccucucaugcucccggagcguccgc

SEQ ID NO: 291556 - RNA, 32 nt, Homo Sapiens
uuccuucagggugaugccagguucuauuugga

SEQ ID NO: 291557 - RNA, 32 nt, Homo Sapiens
uacagguuauauuauuuuuauuuuauuuugag

SEQ ID NO: 291558 - RNA, 32 nt, Homo Sapiens
gccacuggaagucuucccgucucuaaauggaa

SEQ ID NO: 291559 - RNA, 32 nt, Homo Sapiens
guucgacggcgggcccgggguucagccucccg

SEQ ID NO: 291560 - RNA, 32 nt, Homo Sapiens
gcagucgcggggacuugucuggagcggcgggg

SEQ ID NO: 291561 - RNA, 32 nt, Homo Sapiens
cugugcucuuugauggcaguuuuugcaccuuu

SEQ ID NO: 291562 - RNA, 32 nt, Homo Sapiens
accugccagcgguagagcugccugccuugcuu

SEQ ID NO: 291563 - RNA, 32 nt, Homo Sapiens
gugucuauuucugaaagaauaggauuaaugau

SEQ ID NO: 291564 - RNA, 32 nt, Homo Sapiens
ccucaugguccccacacccuccucuuugaucu

SEQ ID NO: 291565 - RNA, 32 nt, Homo Sapiens
gugugccgagaccauccuaaggguccgaugug

SEQ ID NO: 291566 - RNA, 32 nt, Homo Sapiens
ugguaugcaccuguagucccggcuacucagga

SEQ ID NO: 291567 - RNA, 32 nt, Homo Sapiens
uggugugcaccuguagucccagcuacucagga

SEQ ID NO: 291568 - RNA, 32 nt, Homo Sapiens
gagcgcagcugagacugggggagcgcguucgg

SEQ ID NO: 291569 - RNA, 32 nt, Homo Sapiens
accugacgacccggcgacggcgacgucucuuu

SEQ ID NO: 291570 - RNA, 32 nt, Homo Sapiens
accaagaucagucugucugugaucagccugug

SEQ ID NO: 291571 - RNA, 32 nt, Homo Sapiens
auuuccccggagggcucuggcuuuauaauuga

SEQ ID NO: 291572 - RNA, 32 nt, Homo Sapiens
uaugauaaagaaaaaauaaaguggaaacuuuu

SEQ ID NO: 291573 - RNA, 32 nt, Homo Sapiens
ccuggggggcuccuuuccuucuuccuauuugu

SEQ ID NO: 291574 - RNA, 32 nt, Homo Sapiens
caggagggcgccggaccugggaagccgauucc

SEQ ID NO: 291575 - RNA, 32 nt, Homo Sapiens
uucugcgcugacgcggggcgggcgggagagag

SEQ ID NO: 291576 - RNA, 32 nt, Homo Sapiens
uauuaaaagcuacauuuuauaacacuggcaca

SEQ ID NO: 291577 - RNA, 32 nt, Homo Sapiens
ugggcucacgugcauaagacugucccagacag

SEQ ID NO: 291578 - RNA, 32 nt, Homo Sapiens
gaaaacggguggcgcugcguccugggccgagg

SEQ ID NO: 291579 - RNA, 32 nt, Homo Sapiens
acagcccuagguauggccccagcaccccacug

SEQ ID NO: 291580 - RNA, 32 nt, Homo Sapiens
gcucuguccauguggggugcucacaggagggu

SEQ ID NO: 291581 - RNA, 32 nt, Homo Sapiens
ggcuagccugcgcuucugguucugggaggggg

SEQ ID NO: 291582 - RNA, 32 nt, Homo Sapiens
aggcgccccccagcggucggcgcgggccccau

SEQ ID NO: 291583 - RNA, 32 nt, Homo Sapiens
gcuuggggcccccgucugcugcuggacacaga

SEQ ID NO: 291584 - RNA, 32 nt, Homo Sapiens
agagccccagcagauuccuguggauuuaagcg

SEQ ID NO: 291585 - RNA, 32 nt, Homo Sapiens
gugagcugcccucuccaaauccagccagagau

SEQ ID NO: 291586 - RNA, 32 nt, Homo Sapiens
ggcuugcugggaagagaggcgaagccagguca

SEQ ID NO: 291587 - RNA, 32 nt, Homo Sapiens
cacaaugugggcauccuugugcucuuccugca

SEQ ID NO: 291588 - RNA, 32 nt, Homo Sapiens
agaggcacagaaauggacaccagaaauaaggc

SEQ ID NO: 291589 - RNA, 32 nt, Homo Sapiens
aaucuauggacacacacacacacacacacaca

SEQ ID NO: 291590 - RNA, 32 nt, Homo Sapiens
uugcgacgcaggcgcagaggcugggcgugcag

SEQ ID NO: 291591 - RNA, 32 nt, Homo Sapiens
cccuauuuaaacacaugaagcucuggguccua

SEQ ID NO: 291592 - RNA, 32 nt, Homo Sapiens
guaucauuuuuggaccugacuuugcuucucuc

SEQ ID NO: 291593 - RNA, 32 nt, Homo Sapiens
aucaggagacugggcucuggcucuguucggcc

SEQ ID NO: 291594 - RNA, 32 nt, Homo Sapiens
gaagaguuauuuauagcauguucauaugcuaa

SEQ ID NO: 291595 - RNA, 32 nt, Homo Sapiens
auacugugugaauauuuucauuagauuaauuc

SEQ ID NO: 291596 - RNA, 32 nt, Homo Sapiens
gucucuaggcaaaaggaaauggauuugguuaa

SEQ ID NO: 291597 - RNA, 32 nt, Homo Sapiens
aauguguuagacaugcagguucucaggcccca

SEQ ID NO: 291598 - RNA, 32 nt, Homo Sapiens
gagcuuugaagauuaggaggagaaaaagagga

SEQ ID NO: 291599 - RNA, 32 nt, Homo Sapiens
gcugguacggguggaaugggggugagacacca

SEQ ID NO: 291600 - RNA, 32 nt, Homo Sapiens
aacaggggacaaaauggaccgaggggaaccca

SEQ ID NO: 291601 - RNA, 32 nt, Homo Sapiens
ccaaguaaaaauuucuucugggcugaguagau

SEQ ID NO: 291602 - RNA, 32 nt, Homo Sapiens
caagggcgugguggcuucggccugcuucccgg

SEQ ID NO: 291603 - RNA, 32 nt, Homo Sapiens
uaggaagcucguguuuccagaucuccgcaaau

SEQ ID NO: 291604 - RNA, 32 nt, Homo Sapiens
uuaagaauauaaaauuugaucuucuaaucugu

SEQ ID NO: 291605 - RNA, 32 nt, Homo Sapiens
cucucagucaauccaaguguccaucaauggua

SEQ ID NO: 291606 - RNA, 32 nt, Homo Sapiens
gaaugagcgagaaaaauguggauguacuguuu

SEQ ID NO: 291607 - RNA, 32 nt, Homo Sapiens
gagguuggcaguggggcagagccuguggaggc

SEQ ID NO: 291608 - RNA, 32 nt, Homo Sapiens
cagugucuugccuugcuuucucuucuuacugu

SEQ ID NO: 291609 - RNA, 32 nt, Homo Sapiens
uuuuuguaauuuucuuuuuaauuacuuuagag

SEQ ID NO: 291610 - RNA, 32 nt, Homo Sapiens
gguggagggucucaaggcaacgcuggccccac

SEQ ID NO: 291611 - RNA, 32 nt, Homo Sapiens
agucaacggggggcauucguucccuccccugg

SEQ ID NO: 291612 - RNA, 32 nt, Homo Sapiens
aauuggaucaauucuggaacccuaacaagauc

SEQ ID NO: 291613 - RNA, 32 nt, Homo Sapiens
aagagacuuaaacuacaacaaacaauaugcuu

SEQ ID NO: 291614 - RNA, 32 nt, Homo Sapiens
aaaaguguguauauauuuugugugaaauugca

SEQ ID NO: 291615 - RNA, 32 nt, Homo Sapiens
ggaauguugcaugaaucguccuguuugcuguu

SEQ ID NO: 291616 - RNA, 32 nt, Homo Sapiens
auguuuacccacauguuuuggccauggauaaa

SEQ ID NO: 291617 - RNA, 32 nt, Homo Sapiens
uuaauggaauaauaagaggcuacuguuguguc

SEQ ID NO: 291618 - RNA, 32 nt, Homo Sapiens
ucccugucccagggcccucccagcccauugcu

SEQ ID NO: 291619 - RNA, 32 nt, Homo Sapiens
cgagaaucagaauauuaauaaaacuuuaugua

SEQ ID NO: 291620 - RNA, 32 nt, Homo Sapiens
accgcagcaagaucugcacccggagccucagg

SEQ ID NO: 291621 - RNA, 32 nt, Homo Sapiens
ucuuuagggcuuugguuuucauuccuuuuugu

SEQ ID NO: 291622 - RNA, 32 nt, Homo Sapiens
gcauuuuucuuacuuuuguaauuauugggggg

SEQ ID NO: 291623 - RNA, 32 nt, Homo Sapiens
gcaagaggcagacaugccuuugauguccuagg

SEQ ID NO: 291624 - RNA, 32 nt, Homo Sapiens
gcccugcucccucuaccccuuaccccacaacg

SEQ ID NO: 291625 - RNA, 32 nt, Homo Sapiens
uuuggggcucugcaguuccugcaucuccaagu

SEQ ID NO: 291626 - RNA, 32 nt, Homo Sapiens
uagauaggggauuuuucugaacacugcaaaaa

SEQ ID NO: 291627 - RNA, 32 nt, Homo Sapiens
agagggagugggguugcaguggcugccugucc

SEQ ID NO: 291628 - RNA, 32 nt, Homo Sapiens
uaauagugcauuuauuuuuagcacugaauaau

SEQ ID NO: 291629 - RNA, 32 nt, Homo Sapiens
cgagcgagcugcugcacgcagccccggcuccu

SEQ ID NO: 291630 - RNA, 32 nt, Homo Sapiens
ggugacuucuaccugaagcccucugauuguug

SEQ ID NO: 291631 - RNA, 32 nt, Homo Sapiens
cucuuacacuucagucaacaaacaaacuagua

SEQ ID NO: 291632 - RNA, 32 nt, Homo Sapiens
ugaaacccuaaaacaucucaucugugcaaaaa

SEQ ID NO: 291633 - RNA, 32 nt, Homo Sapiens
cuuucgcuguuaaugaggaauaaucguuuggc

SEQ ID NO: 291634 - RNA, 32 nt, Homo Sapiens
uuuuuuuuuuuuaaacauccacaguuaagguu

SEQ ID NO: 291635 - RNA, 32 nt, Homo Sapiens
cccgaggcuaggcaggggacugcgaguaccug

SEQ ID NO: 291636 - RNA, 32 nt, Homo Sapiens
auuuagugaaaccaauuguaauaauuguggaa

SEQ ID NO: 291637 - RNA, 32 nt, Homo Sapiens
gccugagccauucaccacggacaggaagagca

SEQ ID NO: 291638 - RNA, 32 nt, Homo Sapiens
ucucuugauuuucauuauuccuguggauguaa

SEQ ID NO: 291639 - RNA, 32 nt, Homo Sapiens
gccucaguguaauaacuauuauagaaacuguu

SEQ ID NO: 291640 - RNA, 32 nt, Homo Sapiens
ggugacacuuggugugaccagucaccuucaaa

SEQ ID NO: 291641 - RNA, 32 nt, Homo Sapiens
aggaagcgcggauucuauuacuggaaacuuug

SEQ ID NO: 291642 - RNA, 32 nt, Homo Sapiens
uucuuaggauuuuuuuaccagcuuuguuuaca

SEQ ID NO: 291643 - RNA, 32 nt, Homo Sapiens
auaagcagcauuguuaaauaguucuuacgcuu

SEQ ID NO: 291644 - RNA, 32 nt, Homo Sapiens
aagucagugcaagaggcugacuucugagaggc

SEQ ID NO: 291645 - RNA, 32 nt, Homo Sapiens
guacugcagucccgcgucuggaugccccgcgc

SEQ ID NO: 291646 - RNA, 32 nt, Homo Sapiens
cagcagcggcgguggcagcagcagcagcagcg

SEQ ID NO: 291647 - RNA, 32 nt, Homo Sapiens
gacacacacgggggccggcauugcuccuuucc

SEQ ID NO: 291648 - RNA, 32 nt, Homo Sapiens
ggcgaacuaugagaauggccucugacgauggc

SEQ ID NO: 291649 - RNA, 32 nt, Homo Sapiens
ggaagcaaacuuauaaaucauauucucauggc

SEQ ID NO: 291650 - RNA, 32 nt, Homo Sapiens
ucaccggcuucuccuccuucguguggcaaagc

SEQ ID NO: 291651 - RNA, 32 nt, Homo Sapiens
uagaaacagccacuucccaucccucgcauuac

SEQ ID NO: 291652 - RNA, 32 nt, Homo Sapiens
uugugggaagaauuauuuuucacggugcuacu

SEQ ID NO: 291653 - RNA, 32 nt, Homo Sapiens
cacccccaucacauggaaugggcuggucuagg

SEQ ID NO: 291654 - RNA, 32 nt, Homo Sapiens
agaauguuugaaaauuagagaucaugaauuau

SEQ ID NO: 291655 - RNA, 32 nt, Homo Sapiens
gggagcgagcggggcgcccggcagcgcggagu

SEQ ID NO: 291656 - RNA, 32 nt, Homo Sapiens
ccucuccuggaaaguaugaugcuacccgguuc

SEQ ID NO: 291657 - RNA, 32 nt, Homo Sapiens
acguacccugcacuccgggaggaggccccaag

SEQ ID NO: 291658 - RNA, 32 nt, Homo Sapiens
uuguccuucuauuuacucaggagagcaggagc

SEQ ID NO: 291659 - RNA, 32 nt, Homo Sapiens
uuguuucuuuuuaauucuuaauuugacuagaa

SEQ ID NO: 291660 - RNA, 32 nt, Homo Sapiens
gggaauaaacacacuuacuugaaaauuaaaaa

SEQ ID NO: 291661 - RNA, 32 nt, Homo Sapiens
gcugccaucuucucuccccaccacccuuucac

SEQ ID NO: 291662 - RNA, 32 nt, Homo Sapiens
uccucuuucuucaaaucugaggaucugagugu

SEQ ID NO: 291663 - RNA, 32 nt, Homo Sapiens
gcacccgacucgcgccuggacacucgcggggc

SEQ ID NO: 291664 - RNA, 32 nt, Homo Sapiens
gcagcaggcagaugcacaccggaccuggucaa

SEQ ID NO: 291665 - RNA, 32 nt, Homo Sapiens
ggaugcguccccugccauccagcccuccccgc

SEQ ID NO: 291666 - RNA, 32 nt, Homo Sapiens
aggaacuucauauacagcuguugaccaugaau

SEQ ID NO: 291667 - RNA, 32 nt, Homo Sapiens
ggauggaguuugggggaggagcccagggcacc

SEQ ID NO: 291668 - RNA, 32 nt, Homo Sapiens
cccuauuacccccucgccucccggcccccuuc

SEQ ID NO: 291669 - RNA, 32 nt, Homo Sapiens
ggugaacacgggggcugcggcgcgcaggcuca

SEQ ID NO: 291670 - RNA, 32 nt, Homo Sapiens
uucuugcauuucuauaaagaaauaugugagac

SEQ ID NO: 291671 - RNA, 32 nt, Homo Sapiens
auuuggauaucuaguacuucuaugauauaguu

SEQ ID NO: 291672 - RNA, 32 nt, Homo Sapiens
augggagaaacgccaguguguuuaaauugaua

SEQ ID NO: 291673 - RNA, 32 nt, Homo Sapiens
agugcgcaccucuggugccagugucgccccgc

SEQ ID NO: 291674 - RNA, 32 nt, Homo Sapiens
uagacuuauuugcagaggaagaaugagaaccc

SEQ ID NO: 291675 - RNA, 32 nt, Homo Sapiens
ucugggccuucuggguuuuucuauacugucaa

SEQ ID NO: 291676 - RNA, 32 nt, Homo Sapiens
gacgcuguacacaacaucacuaaugaugacac

SEQ ID NO: 291677 - RNA, 32 nt, Homo Sapiens
auccugaaucuccuuuguccaagcucaaggcc

SEQ ID NO: 291678 - RNA, 32 nt, Homo Sapiens
accucagaagguuuuugugaagaucaaagaag

SEQ ID NO: 291679 - RNA, 32 nt, Homo Sapiens
gccuacuggggaagaaagugaaggaggggaaa

SEQ ID NO: 291680 - RNA, 28 nt, Homo Sapiens
cuaggagcugucuccaggauggugcagg

SEQ ID NO: 291681 - RNA, 32 nt, Homo Sapiens
gauaacagagacguugugaauuuugcuuuuug

SEQ ID NO: 291682 - RNA, 32 nt, Homo Sapiens
aggcuuucaccuauugccccuuucucgucccc

SEQ ID NO: 291683 - RNA, 32 nt, Homo Sapiens
acgcuugccccggcccacccuccauccccacc

SEQ ID NO: 291684 - RNA, 32 nt, Homo Sapiens
acauccuggggcucagaccccugugggagguc

SEQ ID NO: 291685 - RNA, 32 nt, Homo Sapiens
ucccagggcuggggccagcugcagggcugcag

SEQ ID NO: 291686 - RNA, 32 nt, Homo Sapiens
uucaaccugccaggcaugguggcacaugccug

SEQ ID NO: 291687 - RNA, 26 nt, Homo Sapiens
cauggggccccucucagccccucccu

SEQ ID NO: 291688 - RNA, 32 nt, Homo Sapiens
cgcuagagggugcgcaccuggaugcuggaugg

SEQ ID NO: 291689 - RNA, 31 nt, Homo Sapiens
uucagugaaauauaggaagugcugaauuaca

SEQ ID NO: 291690 - RNA, 32 nt, Homo Sapiens
ccgagacaacgaagcguugggauacuucauua

SEQ ID NO: 291691 - RNA, 32 nt, Homo Sapiens
uuauaauguucccuagacugcuguaaacagaa

SEQ ID NO: 291692 - RNA, 32 nt, Homo Sapiens
agauggguagcgguagggguguguguuuagga

SEQ ID NO: 291693 - RNA, 32 nt, Homo Sapiens
uuacacauuuuagggagacaugagauaucaau

SEQ ID NO: 291694 - RNA, 32 nt, Homo Sapiens
gagcaccgacccggugccgccggagcuggccc

SEQ ID NO: 291695 - RNA, 32 nt, Homo Sapiens
aacuguuuugggaggaaaauagauuuuuauug

SEQ ID NO: 291696 - RNA, 32 nt, Homo Sapiens
ccugacccgggccugggcgcgccugcggaggc

SEQ ID NO: 291697 - RNA, 32 nt, Homo Sapiens
gaaaggaaauuugaccuccaagcagcccugac

SEQ ID NO: 291698 - RNA, 32 nt, Homo Sapiens
ucaacuaaaauauuaagugaaugcuuugcaag

SEQ ID NO: 291699 - RNA, 32 nt, Homo Sapiens
gagcaggagccggauggucagaggagcccggc

SEQ ID NO: 291700 - RNA, 32 nt, Homo Sapiens
gggggccgcggcccgcgcugacccuggacguc

SEQ ID NO: 291701 - RNA, 32 nt, Homo Sapiens
cugcaguccaaggugccuggagccagaggucg

SEQ ID NO: 291702 - RNA, 32 nt, Homo Sapiens
aaugauugaauggucaacucucuucuuugugc

SEQ ID NO: 291703 - RNA, 32 nt, Homo Sapiens
caaaaugccaaauuuauuaaggugguggagcc

SEQ ID NO: 291704 - RNA, 32 nt, Homo Sapiens
gugguucaaggugaauaauuucaauugacaua

SEQ ID NO: 291705 - RNA, 32 nt, Homo Sapiens
ggacagaggcaccagcagcuguaauguuugcc

SEQ ID NO: 291706 - RNA, 32 nt, Homo Sapiens
cugcugcuggagucugaauguuugucagucac

SEQ ID NO: 291707 - RNA, 32 nt, Homo Sapiens
cacacuccaaaccaauaaaguuuuauauuuug

SEQ ID NO: 291708 - RNA, 25 nt, Homo Sapiens
auggcugggccgcggggcgcgcugc

SEQ ID NO: 291709 - RNA, 32 nt, Homo Sapiens
acggacgacagccacgcgcgcgggaacugggg

SEQ ID NO: 291710 - RNA, 32 nt, Homo Sapiens
uuaucucccccucccugcaugugucaacauug

SEQ ID NO: 291711 - RNA, 32 nt, Homo Sapiens
cagauaucucaaaauaguauuuacauuuauca

SEQ ID NO: 291712 - RNA, 32 nt, Homo Sapiens
uuuaaaaugaauuuuaccguaacuauaaaagg

SEQ ID NO: 291713 - RNA, 32 nt, Homo Sapiens
uaauaauuuauaaauguuuucuuaacugacuu

SEQ ID NO: 291714 - RNA, 32 nt, Homo Sapiens
ucuguagaaagaccuuauaaauguaagauaug

SEQ ID NO: 291715 - RNA, 32 nt, Homo Sapiens
ggccacauugucugcugcacgugaucaugagg

SEQ ID NO: 291716 - RNA, 32 nt, Homo Sapiens
cgcgguucagcaugcaggaaaaagacgccucc

SEQ ID NO: 291717 - RNA, 32 nt, Homo Sapiens
cugcgacaagguggcugcagcuaggccggggg

SEQ ID NO: 291718 - RNA, 32 nt, Homo Sapiens
ccacucggcuccuggucucugucuggaugacc

SEQ ID NO: 291719 - RNA, 31 nt, Homo Sapiens
aacaguggcaaagccugaccccgcgcgcccg

SEQ ID NO: 291720 - RNA, 32 nt, Homo Sapiens
gccauuaguguauaacaucaaguucuguguaa

SEQ ID NO: 291721 - RNA, 32 nt, Homo Sapiens
aaggauagucuuuaucaguucauuauuuauug

SEQ ID NO: 291722 - RNA, 32 nt, Homo Sapiens
cagccuccccuugcagucaucauucguguucu

SEQ ID NO: 291723 - RNA, 32 nt, Homo Sapiens
ccuacuugugaagcugcagauauagguaagau

SEQ ID NO: 291724 - RNA, 32 nt, Homo Sapiens
ugcagcaacgcccuaggguuugcagugaaugu

SEQ ID NO: 291725 - RNA, 32 nt, Homo Sapiens
gaggaagaggaggagaaggcgaggccacucgc

SEQ ID NO: 291726 - RNA, 32 nt, Homo Sapiens
agaccuggccgcgucaggcagaucaucgccug

SEQ ID NO: 291727 - RNA, 32 nt, Homo Sapiens
ugagucuguaaaaauaauaaauauguuugaag

SEQ ID NO: 291728 - RNA, 32 nt, Homo Sapiens
agaaggcccuguauucauuguguuucaucugc

SEQ ID NO: 291729 - RNA, 32 nt, Homo Sapiens
uucccccacacccagaucacaaacagccuaca

SEQ ID NO: 291730 - RNA, 32 nt, Homo Sapiens
cggaacgcaggcggagcgcaagucugucagcc

SEQ ID NO: 291731 - RNA, 32 nt, Homo Sapiens
ugcccaucuugccagcagugcccgcccccacc

SEQ ID NO: 291732 - RNA, 32 nt, Homo Sapiens
aagagcgugaggaggaaagauggcggacgagg

SEQ ID NO: 291733 - RNA, 32 nt, Homo Sapiens
ggagggaggcaggggagagccggucacggugg

SEQ ID NO: 291734 - RNA, 32 nt, Homo Sapiens
gagaacuaaaguaguugaaacaauauagaaac

SEQ ID NO: 291735 - RNA, 32 nt, Homo Sapiens
agaaagaggugauuauggagggaaucaaaauu

SEQ ID NO: 291736 - RNA, 32 nt, Homo Sapiens
caucccugcccugugaaguaaaacagagucca

SEQ ID NO: 291737 - RNA, 32 nt, Homo Sapiens
aggucacccgcucuccacggcacccccacugc

SEQ ID NO: 291738 - RNA, 32 nt, Homo Sapiens
cacacacacacgcagacacacacacacacaca

SEQ ID NO: 291739 - RNA, 32 nt, Homo Sapiens
gaccauuguauuaaaauggcauauggaaaaug

SEQ ID NO: 291740 - RNA, 32 nt, Homo Sapiens
ucgccacucuauaaaaucauggcaauaauaga

SEQ ID NO: 291741 - RNA, 32 nt, Homo Sapiens
agcaacaugcauguuuacagucuugcagugug

SEQ ID NO: 291742 - RNA, 32 nt, Homo Sapiens
caugaaaggugcaguuugcggauuguaagguc

SEQ ID NO: 291743 - RNA, 32 nt, Homo Sapiens
agucagaugucacagauguguuguguaaacag

SEQ ID NO: 291744 - RNA, 32 nt, Homo Sapiens
caguuggugccccuuaaaucugagcaaccucu

SEQ ID NO: 291745 - RNA, 32 nt, Homo Sapiens
guccauuaucuaauagugacagcaaagggacc

SEQ ID NO: 291746 - RNA, 32 nt, Homo Sapiens
agaaguugcuggcuugcccgauagcccaguuc

SEQ ID NO: 291747 - RNA, 32 nt, Homo Sapiens
ccguguaccgggccgagcuggugggggagcug

SEQ ID NO: 291748 - RNA, 32 nt, Homo Sapiens
ccuguccccccucaaaacccacagguuccuuu

SEQ ID NO: 291749 - RNA, 32 nt, Homo Sapiens
gggucacugcagcugccuggaccugcugaccg

SEQ ID NO: 291750 - RNA, 32 nt, Homo Sapiens
ugacuggcugauucugucuccuccccucccuc

SEQ ID NO: 291751 - RNA, 32 nt, Homo Sapiens
uuuccggccgcccuuccucagcccccggcucg

SEQ ID NO: 291752 - RNA, 32 nt, Homo Sapiens
ucaugacuaucuaauacucugugcaagugguu

SEQ ID NO: 291753 - RNA, 32 nt, Homo Sapiens
gucuuaagggaagccgagaagaagggcagacg

SEQ ID NO: 291754 - RNA, 32 nt, Homo Sapiens
aaugugcuuuccucccucuccccugcccaccu

SEQ ID NO: 291755 - RNA, 32 nt, Homo Sapiens
uuagaggauguuccucuuggugaccucaugua

SEQ ID NO: 291756 - RNA, 29 nt, Homo Sapiens
uaaaagaugaagauuuaagugaccuuaau

SEQ ID NO: 291757 - RNA, 32 nt, Homo Sapiens
gggggaaaaggugggauucaugucgaggcuag

SEQ ID NO: 291758 - RNA, 32 nt, Homo Sapiens
caguuccucuucugcuggccuguaugaccucc

SEQ ID NO: 291759 - RNA, 32 nt, Homo Sapiens
ccagccugcgggacagagugagacccugucug

SEQ ID NO: 291760 - RNA, 32 nt, Homo Sapiens
cacgugcucgacaggggaacccgcccggacgg

SEQ ID NO: 291761 - RNA, 32 nt, Homo Sapiens
gucacaccccugcgugaaccgccccacaacac

SEQ ID NO: 291762 - RNA, 32 nt, Homo Sapiens
gugccucagcgcugcccacaccaccguccucc

SEQ ID NO: 291763 - RNA, 32 nt, Homo Sapiens
guacuuuguaauuauaacuuauggucauaacu

SEQ ID NO: 291764 - RNA, 32 nt, Homo Sapiens
ggacagaaggauuguaccugcgguuuaagagc

SEQ ID NO: 291765 - RNA, 32 nt, Homo Sapiens
gacaggauauauaaaaagguagauuaggucaa

SEQ ID NO: 291766 - RNA, 32 nt, Homo Sapiens
ugcuugccccgcccccgagacggagucuuacu

SEQ ID NO: 291767 - RNA, 32 nt, Homo Sapiens
uugggggugggggauugcauggucaauuaaaa

SEQ ID NO: 291768 - RNA, 32 nt, Homo Sapiens
cuacaagguggauuccuggggaggcgguggcg

SEQ ID NO: 291769 - RNA, 32 nt, Homo Sapiens
gcuucucugagagcacaggggugaccaaugag

SEQ ID NO: 291770 - RNA, 30 nt, Homo Sapiens
auaaaaggcugugucaugcaaaaaaaaaaa

SEQ ID NO: 291771 - RNA, 32 nt, Homo Sapiens
gagaaggcucugcugggucuccaugguggggg

SEQ ID NO: 291772 - RNA, 32 nt, Homo Sapiens
aaccccccucccugcacccagcccucaacacc

SEQ ID NO: 291773 - RNA, 32 nt, Homo Sapiens
ucuauaucuaaauaaacuuagguuaucauaau

SEQ ID NO: 291774 - RNA, 32 nt, Homo Sapiens
uuuaagaaaaagaugaagugagacuaaaugau

SEQ ID NO: 291775 - RNA, 32 nt, Homo Sapiens
cgagguuaccagggaaggcuugcuuggaaaag

SEQ ID NO: 291776 - RNA, 32 nt, Homo Sapiens
ugcucauuucccccagccccagccccuggcau

SEQ ID NO: 291777 - RNA, 32 nt, Homo Sapiens
aauccuaggaaauaaacuuuuaaagaguuucu

SEQ ID NO: 291778 - RNA, 32 nt, Homo Sapiens
ucggaggcccucccccucccccagcucagacc

SEQ ID NO: 291779 - RNA, 32 nt, Homo Sapiens
cggggcugcagagggcggcugggguuccgucg

SEQ ID NO: 291780 - RNA, 32 nt, Homo Sapiens
uacucaagcaauaaaaagcccaaauauauuaa

SEQ ID NO: 291781 - RNA, 32 nt, Homo Sapiens
gugggagagaaaaaccaaacaaucuacuucag

SEQ ID NO: 291782 - RNA, 32 nt, Homo Sapiens
gccugcaaucccagcuacuuggaaggcugagg

SEQ ID NO: 291783 - RNA, 32 nt, Homo Sapiens
gugggcacuggaagucacuuugauagauggau

SEQ ID NO: 291784 - RNA, 32 nt, Homo Sapiens
cugauaaaauuugagauguaaauucauuucac

SEQ ID NO: 291785 - RNA, 32 nt, Homo Sapiens
auucuuuuuccacaagcacuagauauguuucu

SEQ ID NO: 291786 - RNA, 32 nt, Homo Sapiens
uaugauuauuggcauauacugacugacugcaa

SEQ ID NO: 291787 - RNA, 32 nt, Homo Sapiens
gacagcaaggaccugcagcugcuccgccaggg

SEQ ID NO: 291788 - RNA, 32 nt, Homo Sapiens
agaaggccccacuuggcuauuucauaucuacc

SEQ ID NO: 291789 - RNA, 32 nt, Homo Sapiens
gguucgacaggcuccgcagagcugccggccga

SEQ ID NO: 291790 - RNA, 32 nt, Homo Sapiens
gggaaaagagaugaugaaaauauuuaaaggcc

SEQ ID NO: 291791 - RNA, 32 nt, Homo Sapiens
guaugaaucuauuugugggugugcuauagcuu

SEQ ID NO: 291792 - RNA, 32 nt, Homo Sapiens
aguuucauuucaucagaugaucugcacagaac

SEQ ID NO: 291793 - RNA, 32 nt, Homo Sapiens
cgucaaaccucauagcuggggcgcucccagac

SEQ ID NO: 291794 - RNA, 32 nt, Homo Sapiens
caguguccucuggccugcugcccugcaccccc

SEQ ID NO: 291795 - RNA, 32 nt, Homo Sapiens
ucugaagugucuaaugcauuaacuuuuguaag

SEQ ID NO: 291796 - RNA, 32 nt, Homo Sapiens
ucuuuaguucccuugacuccaccaucuaagcc

SEQ ID NO: 291797 - RNA, 32 nt, Homo Sapiens
aggccuacuaaggauguacugcugaugaccuu

SEQ ID NO: 291798 - RNA, 32 nt, Homo Sapiens
aauaaauacaauaaaucagggauuuuuccccu

SEQ ID NO: 291799 - RNA, 32 nt, Homo Sapiens
uaaaacuagugucacagucucucuugggagga

SEQ ID NO: 291800 - RNA, 32 nt, Homo Sapiens
uagccccuccccagccuucuuucucucccaga

SEQ ID NO: 291801 - RNA, 32 nt, Homo Sapiens
cgcuuccuggaagugaagucgugcuguccuga

SEQ ID NO: 291802 - RNA, 32 nt, Homo Sapiens
ccaaaaauuuuuccaguggaaaaaggaaaaga

SEQ ID NO: 291803 - RNA, 32 nt, Homo Sapiens
uuuaaaaauaaaauaaagugauaccuuuacaa

SEQ ID NO: 291804 - RNA, 32 nt, Homo Sapiens
uggucucggcccggcugcgccagaguccgcgc

SEQ ID NO: 291805 - RNA, 32 nt, Homo Sapiens
uguguccaucaucaacggcuucacaucggugu

SEQ ID NO: 291806 - RNA, 32 nt, Homo Sapiens
guggggacgcggagaccgcgcgcacgaggagg

SEQ ID NO: 291807 - RNA, 32 nt, Homo Sapiens
ugcugggcgcaguuucuccgccugcugcuucg

SEQ ID NO: 291808 - RNA, 32 nt, Homo Sapiens
ggagcagccccucccccaaagggggcuggugu

SEQ ID NO: 291809 - RNA, 32 nt, Homo Sapiens
uaguuaaaugucuuacucuacugugccuaugc

SEQ ID NO: 291810 - RNA, 32 nt, Homo Sapiens
gcuugauuccaagaguaggugcugccuagcag

SEQ ID NO: 291811 - RNA, 32 nt, Homo Sapiens
aaaaaaaaucaaaggcgcuuugaaacaggggc

SEQ ID NO: 291812 - RNA, 32 nt, Homo Sapiens
agaaauucaaacaaaauauugcuguucuucag

SEQ ID NO: 291813 - RNA, 32 nt, Homo Sapiens
gagcuaugaagaggaucuuauuaaacugcugg

SEQ ID NO: 291814 - RNA, 32 nt, Homo Sapiens
cgagaagggccgcaucuacaccuacaucggug

SEQ ID NO: 291815 - RNA, 32 nt, Homo Sapiens
auggccucugcaagccucuccuccaccuucac

SEQ ID NO: 291816 - RNA, 32 nt, Homo Sapiens
ccuuugaaagagagugagugacuguuuccaaa

SEQ ID NO: 291817 - RNA, 32 nt, Homo Sapiens
uguaguuuuuccagcggcccagccccagaaag

SEQ ID NO: 291818 - RNA, 32 nt, Homo Sapiens
augcggcuggaggcaacgcagcuggaaggggu

SEQ ID NO: 291819 - RNA, 32 nt, Homo Sapiens
agugauggaagacacuugggaaagucuuuuua

SEQ ID NO: 291820 - RNA, 32 nt, Homo Sapiens
uuuagcaaauauauuuuuauauguguauggca

SEQ ID NO: 291821 - RNA, 32 nt, Homo Sapiens
aacgggagaaauuuauaucagauucuuggcug

SEQ ID NO: 291822 - RNA, 32 nt, Homo Sapiens
gggacuccaggcaauuauuuccagucagagaa

SEQ ID NO: 291823 - RNA, 32 nt, Homo Sapiens
uccuccagaaacaaaagaaucccugagauaaa

SEQ ID NO: 291824 - RNA, 32 nt, Homo Sapiens
aggcccuucccagguuugcgcgcgggggccau

SEQ ID NO: 291825 - RNA, 32 nt, Homo Sapiens
agauuuucauuuuuguacuaaauagaaaaagu

SEQ ID NO: 291826 - RNA, 32 nt, Homo Sapiens
aaaaaugcagaaauguauaaaaaagcaaaaau

SEQ ID NO: 291827 - RNA, 32 nt, Homo Sapiens
auuccaucaggagcugguuuugaaccgaggug

SEQ ID NO: 291828 - RNA, 32 nt, Homo Sapiens
caacggcgcggccgcgggcgcugagcgcgacc

SEQ ID NO: 291829 - RNA, 29 nt, Homo Sapiens
cuugucuccgucucuggaggcaagucucu

SEQ ID NO: 291830 - RNA, 32 nt, Homo Sapiens
uuuuuguucuuuugaagaauagagugguauuu

SEQ ID NO: 291831 - RNA, 32 nt, Homo Sapiens
uaguaaacuucuuuuuuguuuguuuauuuguu

SEQ ID NO: 291832 - RNA, 32 nt, Homo Sapiens
ccucccuacacacacacacacacacacacaca

SEQ ID NO: 291833 - RNA, 32 nt, Homo Sapiens
uuagugugucugcuccuccucucucuccucau

SEQ ID NO: 291834 - RNA, 32 nt, Homo Sapiens
cgcgugaggcggaggcgcgggcggcggaggga

SEQ ID NO: 291835 - RNA, 32 nt, Homo Sapiens
acucuaagcagacuccagagccaggugcacac

SEQ ID NO: 291836 - RNA, 32 nt, Homo Sapiens
gggaguaggggcccgggcggaggcgguggcgg

SEQ ID NO: 291837 - RNA, 32 nt, Homo Sapiens
ggggugugaaagccucaagugacucagccugg

SEQ ID NO: 291838 - RNA, 32 nt, Homo Sapiens
uacauuugacauggauuaaaccaguauaaaca

SEQ ID NO: 291839 - RNA, 32 nt, Homo Sapiens
gagugguguugcuuuuuuuuuauaaaaguaaa

SEQ ID NO: 291840 - RNA, 32 nt, Homo Sapiens
gcgccuguggcugggcgggccuaaguuuaaga

SEQ ID NO: 291841 - RNA, 31 nt, Homo Sapiens
aaucuguaaaugagaaagguauauauacuau

SEQ ID NO: 291842 - RNA, 32 nt, Homo Sapiens
ccugacuuucccuuugacuucacccuguuugu

SEQ ID NO: 291843 - RNA, 32 nt, Homo Sapiens
auuguuaccugcuugaaaacacugcuguguua

SEQ ID NO: 291844 - RNA, 32 nt, Homo Sapiens
ugauuguacuauuguacuugaaauuacagaug

SEQ ID NO: 291845 - RNA, 32 nt, Homo Sapiens
cuucagcagagcaaaggagguggagcacaagc

SEQ ID NO: 291846 - RNA, 32 nt, Homo Sapiens
gguuucacuaugugggcugggcuggucucaaa

SEQ ID NO: 291847 - RNA, 32 nt, Homo Sapiens
cgggggcgcuggcuuccgugcuggcuggccag

SEQ ID NO: 291848 - RNA, 32 nt, Homo Sapiens
uaaaacuaggcaugcauauaugccagagagcu

SEQ ID NO: 291849 - RNA, 32 nt, Homo Sapiens
cagggccgacguuccaccuggggcuucccucc

SEQ ID NO: 291850 - RNA, 31 nt, Homo Sapiens
gcccccaauuccgcccugcccccgccgcggc

SEQ ID NO: 291851 - RNA, 32 nt, Homo Sapiens
uccgggacgcgcaaggcagagcccugacgcuc

SEQ ID NO: 291852 - RNA, 32 nt, Homo Sapiens
uuuacuguaaaaauaaauuggacuuugcaaaa

SEQ ID NO: 291853 - RNA, 32 nt, Homo Sapiens
gugcccaagaaauuauuuuggccauuuauugu

SEQ ID NO: 291854 - RNA, 32 nt, Homo Sapiens
ccuggauggccccuccuugcaaccaggcagcu

SEQ ID NO: 291855 - RNA, 32 nt, Homo Sapiens
ccgaccuccguccugacccagggcgccggagc

SEQ ID NO: 291856 - RNA, 32 nt, Homo Sapiens
gaagagcuggggugggggaggagggagcguga

SEQ ID NO: 291857 - RNA, 32 nt, Homo Sapiens
uguugucuuaggaaacagaacacagcagugaa

SEQ ID NO: 291858 - RNA, 32 nt, Homo Sapiens
acuuuucaaauuaauucaaaacuaguaucuaa

SEQ ID NO: 291859 - RNA, 25 nt, Homo Sapiens
augacuuggccuucagaugcuuccu

SEQ ID NO: 291860 - RNA, 32 nt, Homo Sapiens
ugcagguccuaccccucggccuugaagcuccc

SEQ ID NO: 291861 - RNA, 32 nt, Homo Sapiens
cccuuguucgccuccccacccuccucagaggc

SEQ ID NO: 291862 - RNA, 32 nt, Homo Sapiens
cugugacacaaaaaauucaauuacugucaucu

SEQ ID NO: 291863 - RNA, 32 nt, Homo Sapiens
ggacaaagggagagggaggugcaggucgcuca

SEQ ID NO: 291864 - RNA, 32 nt, Homo Sapiens
gcucucguccgccucccuuccacagguaagca

SEQ ID NO: 291865 - RNA, 32 nt, Homo Sapiens
ccccaggccccggccccccacccacgucugcg

SEQ ID NO: 291866 - RNA, 32 nt, Homo Sapiens
gagacggggucucacugucacccaggccggag

SEQ ID NO: 291867 - RNA, 32 nt, Homo Sapiens
auuuacuaaaauuccaguaaccccaagggaau

SEQ ID NO: 291868 - RNA, 32 nt, Homo Sapiens
ucacaguacuuaccagaaaaacaagguaaugu

SEQ ID NO: 291869 - RNA, 32 nt, Homo Sapiens
agccaagauugugccacuacuguacucuagcc

SEQ ID NO: 291870 - RNA, 32 nt, Homo Sapiens
aaguuuaucaccccaaagagaaauccugcacc

SEQ ID NO: 291871 - RNA, 32 nt, Homo Sapiens
cccucucugugcucccgucugcaccgcauguc

SEQ ID NO: 291872 - RNA, 32 nt, Homo Sapiens
guuguccugcauacugaugaaacuacugaugu

SEQ ID NO: 291873 - RNA, 32 nt, Homo Sapiens
ccgccgggaugccccaacucuccggaggaggu

SEQ ID NO: 291874 - RNA, 32 nt, Homo Sapiens
gcccuuaauuauuaacaaagugccagagucua

SEQ ID NO: 291875 - RNA, 32 nt, Homo Sapiens
cagggugcuuuuauauauaagagcagcagccg

SEQ ID NO: 291876 - RNA, 32 nt, Homo Sapiens
uucaaaggaaaaaaacaaaaggaauaaauuuu

SEQ ID NO: 291877 - RNA, 32 nt, Homo Sapiens
uuuaauguauucccuucagggauucccugucc

SEQ ID NO: 291878 - RNA, 29 nt, Homo Sapiens
cugcggucgaagaaggggacgccgacaag

SEQ ID NO: 291879 - RNA, 32 nt, Homo Sapiens
caguggugucucuggagaagaugaaguagagc

SEQ ID NO: 291880 - RNA, 32 nt, Homo Sapiens
ccuucagcagcuacugacugaauaccacuuuu

SEQ ID NO: 291881 - RNA, 32 nt, Homo Sapiens
uguuauagauuguugccuauuuccugcugaaa

SEQ ID NO: 291882 - RNA, 32 nt, Homo Sapiens
gaaauauuuaaaguggauacaaaauuauuuca

SEQ ID NO: 291883 - RNA, 32 nt, Homo Sapiens
gcugcaucuucagccugauauguacuuuguag

SEQ ID NO: 291884 - RNA, 32 nt, Homo Sapiens
cgauguuguaacaaaauugggaucaucuaaac

SEQ ID NO: 291885 - RNA, 32 nt, Homo Sapiens
cuucuccuuuuggcagaaaagggauggcgugg

SEQ ID NO: 291886 - RNA, 32 nt, Homo Sapiens
cuuagagaccaaucaauggacacugguuuuua

SEQ ID NO: 291887 - RNA, 32 nt, Homo Sapiens
ggcggcggagccgacucgucgcggccgaggcg

SEQ ID NO: 291888 - RNA, 32 nt, Homo Sapiens
uggcggaggaggagagacggaggaggccgaga

SEQ ID NO: 291889 - RNA, 32 nt, Homo Sapiens
gcauccacucucuccugaggcgagccaccuug

SEQ ID NO: 291890 - RNA, 32 nt, Homo Sapiens
ucuuuggaguguuuuuguuuucucuuccaagg

SEQ ID NO: 291891 - RNA, 32 nt, Homo Sapiens
auuugguugacauuggguugcauuuuuaaaca

SEQ ID NO: 291892 - RNA, 32 nt, Homo Sapiens
cccugcaagccacugguguagguccgagaguc

SEQ ID NO: 291893 - RNA, 32 nt, Homo Sapiens
cauuuuuacacggcuagcagggguugagacug

SEQ ID NO: 291894 - RNA, 32 nt, Homo Sapiens
auuucaucuuuaggaaaaaauuacuugccaua

SEQ ID NO: 291895 - RNA, 32 nt, Homo Sapiens
aauuguguucccuaggaaaugacugucccaag

SEQ ID NO: 291896 - RNA, 32 nt, Homo Sapiens
cacuguugcugaaaggggaauuuucuuucgcc

SEQ ID NO: 291897 - RNA, 32 nt, Homo Sapiens
cuucauuuuuuauuuuaaccuuacagggaauu

SEQ ID NO: 291898 - RNA, 32 nt, Homo Sapiens
agagguaggaccagugcuuuuuuguuucuuuu

SEQ ID NO: 291899 - RNA, 32 nt, Homo Sapiens
agcugcacuuucuugggguucuggccaugcac

SEQ ID NO: 291900 - RNA, 32 nt, Homo Sapiens
auccuaugucucgcgugcaggugguugguuuu

SEQ ID NO: 291901 - RNA, 32 nt, Homo Sapiens
uccuggcauaugcuaaaugaugggaaagucug

SEQ ID NO: 291902 - RNA, 32 nt, Homo Sapiens
cagugguagcgcggggacuggcugggaagcgg

SEQ ID NO: 291903 - RNA, 32 nt, Homo Sapiens
aucuaggugaggauugauuaccuaguagucau

SEQ ID NO: 291904 - RNA, 32 nt, Homo Sapiens
acccucagccaggaggcgcggcuggucggucc

SEQ ID NO: 291905 - RNA, 32 nt, Homo Sapiens
agggagauagagaggguuggcggccaauguag

SEQ ID NO: 291906 - RNA, 32 nt, Homo Sapiens
uacacacgcagcguuuugauaaauuauugguu

SEQ ID NO: 291907 - RNA, 32 nt, Homo Sapiens
uuguucuguauauucuaaauuccuuuuauuaa

SEQ ID NO: 291908 - RNA, 30 nt, Homo Sapiens
ccagcagauaaaagaaugagcaaaaccaca

SEQ ID NO: 291909 - RNA, 32 nt, Homo Sapiens
aaaacuucaccauucaaaaaauguaaagauag

SEQ ID NO: 291910 - RNA, 32 nt, Homo Sapiens
uucugaacuguucuuugugcaaaccccacacg

SEQ ID NO: 291911 - RNA, 32 nt, Homo Sapiens
aucugcaaguuccaugaugauuguauacugga

SEQ ID NO: 291912 - RNA, 32 nt, Homo Sapiens
acauuuaaugacgguuuaaaacuuuuuaaaag

SEQ ID NO: 291913 - RNA, 32 nt, Homo Sapiens
gccagguguguuaguccacaccugugguccca

SEQ ID NO: 291914 - RNA, 32 nt, Homo Sapiens
cauuuucuggucugaccggcggaacccccacg

SEQ ID NO: 291915 - RNA, 32 nt, Homo Sapiens
uucgacagaaguggaagugcugaaaaaugcuc

SEQ ID NO: 291916 - RNA, 32 nt, Homo Sapiens
aaccuccaaagugcccucugcuccucaguuug

SEQ ID NO: 291917 - RNA, 32 nt, Homo Sapiens
ugcagaucugguuuuuccaaugugccacaguc

SEQ ID NO: 291918 - RNA, 32 nt, Homo Sapiens
ucaucuucuuggucuacugccuccucagccag

SEQ ID NO: 291919 - RNA, 32 nt, Homo Sapiens
gcuguacuauaaguaguugguuuguaugagau

SEQ ID NO: 291920 - RNA, 32 nt, Homo Sapiens
aucacaguauuaucuuuuuuuuuuugagacag

SEQ ID NO: 291921 - RNA, 32 nt, Homo Sapiens
auaguaaagucucagucugaauauuuagcaag

SEQ ID NO: 291922 - RNA, 32 nt, Homo Sapiens
cagccagaccucuggcugcagaggagucugag

SEQ ID NO: 291923 - RNA, 32 nt, Homo Sapiens
gggauucucugcuggugcuggugcaaggacuu

SEQ ID NO: 291924 - RNA, 32 nt, Homo Sapiens
uucaagccccucacuuuacagaugaggaaaug

SEQ ID NO: 291925 - RNA, 32 nt, Homo Sapiens
guuucaauuuaaagugcuaguguuuaaaaaca

SEQ ID NO: 291926 - RNA, 29 nt, Homo Sapiens
uggauggugacgcagaggacgucucuaug

SEQ ID NO: 291927 - RNA, 32 nt, Homo Sapiens
uuucuuuaaccuccuaaauauuggugggaaga

SEQ ID NO: 291928 - RNA, 32 nt, Homo Sapiens
gaaauuaagguuuuagaaagcuuaaugaauua

SEQ ID NO: 291929 - RNA, 32 nt, Homo Sapiens
cugcccccagcuggccgcagggcccgccccau

SEQ ID NO: 291930 - RNA, 32 nt, Homo Sapiens
ggccuggagucagggcccacuccaggagggac

SEQ ID NO: 291931 - RNA, 32 nt, Homo Sapiens
auacccccauucuccuugccucuuagcauguu

SEQ ID NO: 291932 - RNA, 32 nt, Homo Sapiens
guugaagaacuaaaagaggauauucuuucauc

SEQ ID NO: 291933 - RNA, 32 nt, Homo Sapiens
ggccagagcccuccccgcgcugccagugggac

SEQ ID NO: 291934 - RNA, 32 nt, Homo Sapiens
ucugggagauagguccuguuguuaucuucauu

SEQ ID NO: 291935 - RNA, 32 nt, Homo Sapiens
uaaauaauacuuuggaucuccugaggaaaaga

SEQ ID NO: 291936 - RNA, 32 nt, Homo Sapiens
uagugugguuuugaggucucacuacacuuuga

SEQ ID NO: 291937 - RNA, 32 nt, Homo Sapiens
cucuuucggcccagcccagcucauggcucucg

SEQ ID NO: 291938 - RNA, 32 nt, Homo Sapiens
cgccuguaaucccagcacuuuggggggucgag

SEQ ID NO: 291939 - RNA, 32 nt, Homo Sapiens
cuccugcggugugcuugucaagcaguggucaa

SEQ ID NO: 291940 - RNA, 32 nt, Homo Sapiens
uuuccuuuccuuuuagucuuuaucucauuguu

SEQ ID NO: 291941 - RNA, 32 nt, Homo Sapiens
uacugaagaagacaagaggauucuucaugaca

SEQ ID NO: 291942 - RNA, 32 nt, Homo Sapiens
auauuuauauauaugauguggacauauguaua

SEQ ID NO: 291943 - RNA, 32 nt, Homo Sapiens
cauaagagaaauguguuuuuguuuuuguuuuu

SEQ ID NO: 291944 - RNA, 32 nt, Homo Sapiens
acccugggacggccuccaccuggacggggacg

SEQ ID NO: 291945 - RNA, 32 nt, Homo Sapiens
gggaauuugcugugucccucguuguagucacc

SEQ ID NO: 291946 - RNA, 32 nt, Homo Sapiens
uuucugugcacuaugaacgcuucuuucccagg

SEQ ID NO: 291947 - RNA, 31 nt, Homo Sapiens
cucuucuguaacaugaagucguugugagggu

SEQ ID NO: 291948 - RNA, 32 nt, Homo Sapiens
uagguucuuaagaauuugauucaucaguggca

SEQ ID NO: 291949 - RNA, 31 nt, Homo Sapiens
ccgcagcggcagucccugccccggugggccg

SEQ ID NO: 291950 - RNA, 32 nt, Homo Sapiens
gcaggagcacgcuucccgagcuugggguaggc

SEQ ID NO: 291951 - RNA, 32 nt, Homo Sapiens
aaauucgccccauuuucuuuacagucuuuugu

SEQ ID NO: 291952 - RNA, 32 nt, Homo Sapiens
cccugccuuuuuuuuucuuuuuuuacaucuga

SEQ ID NO: 291953 - RNA, 32 nt, Homo Sapiens
aggcucugccaacccacagucuacagcagagc

SEQ ID NO: 291954 - RNA, 32 nt, Homo Sapiens
caccagacccucaaaacccauccaagacugug

SEQ ID NO: 291955 - RNA, 32 nt, Homo Sapiens
ccaagcaccgcuucguguggcuccaccuggau

SEQ ID NO: 291956 - RNA, 30 nt, Homo Sapiens
agggggccagccuugccgccgccugccugc

SEQ ID NO: 291957 - RNA, 32 nt, Homo Sapiens
caaagcaauuuucaaaaauuuguacaugauau

SEQ ID NO: 291958 - RNA, 32 nt, Homo Sapiens
gcguucccguagccagcagccgggccaaggua

SEQ ID NO: 291959 - RNA, 32 nt, Homo Sapiens
guacuuucagaauuagaagaaaagugagagcu

SEQ ID NO: 291960 - RNA, 32 nt, Homo Sapiens
uuucuccuuuuggauugaggcuauguacuugg

SEQ ID NO: 291961 - RNA, 32 nt, Homo Sapiens
cacucuuggaucuacccugaguauccuccaaa

SEQ ID NO: 291962 - RNA, 32 nt, Homo Sapiens
accacuauuguggguaaaaugucucugcauca

SEQ ID NO: 291963 - RNA, 32 nt, Homo Sapiens
guuuccgcaccucaaguaauuaaucccuuagc

SEQ ID NO: 291964 - RNA, 32 nt, Homo Sapiens
ucaucgggcguaaugaggaagaagggagugaa

SEQ ID NO: 291965 - RNA, 32 nt, Homo Sapiens
ucagguucugaggcggcugugguggcugcucc

SEQ ID NO: 291966 - RNA, 32 nt, Homo Sapiens
uuauaaacaauuaaaagauacauaucauguau

SEQ ID NO: 291967 - RNA, 32 nt, Homo Sapiens
ccacuggacaccuucuuccccuuugaucccug

SEQ ID NO: 291968 - RNA, 32 nt, Homo Sapiens
cagcaaauggcuucagccugggacgccagugu

SEQ ID NO: 291969 - RNA, 32 nt, Homo Sapiens
uccacaaugcagacauaagaagcaggucaucu

SEQ ID NO: 291970 - RNA, 32 nt, Homo Sapiens
gccccucccuugcaccuccccccaccggacuu

SEQ ID NO: 291971 - RNA, 32 nt, Homo Sapiens
aagaagagauaaaauuugccuuaaaacuuacc

SEQ ID NO: 291972 - RNA, 32 nt, Homo Sapiens
agggaccuugccgcugaccaagagggaggacc

SEQ ID NO: 291973 - RNA, 32 nt, Homo Sapiens
aauguggcaacuugcuugugccuaaaaggagg

SEQ ID NO: 291974 - RNA, 32 nt, Homo Sapiens
gugaugcugggcaacuacagaaacuuggucuu

SEQ ID NO: 291975 - RNA, 32 nt, Homo Sapiens
auaucaaguccucacccuccuuccacauaaug

SEQ ID NO: 291976 - RNA, 32 nt, Homo Sapiens
cagcuucccucaugggcuugguucucacagac

SEQ ID NO: 291977 - RNA, 32 nt, Homo Sapiens
uuucuaauguaaauguuguguacaauaguuuu

SEQ ID NO: 291978 - RNA, 32 nt, Homo Sapiens
ggcggcguucggagucgccgggagcugccagg

SEQ ID NO: 291979 - RNA, 32 nt, Homo Sapiens
gaagcugugggaugaagugcuuucacaucuug

SEQ ID NO: 291980 - RNA, 32 nt, Homo Sapiens
caccccaaacuccaaccuguaucagaugcagc

SEQ ID NO: 291981 - RNA, 32 nt, Homo Sapiens
acuggugcacaccaccacacucagcuaauuuu

SEQ ID NO: 291982 - RNA, 32 nt, Homo Sapiens
augcaguuucuauuuaccuuuaggcugauuuu

SEQ ID NO: 291983 - RNA, 32 nt, Homo Sapiens
gugacuguggacgugcagucuccagcuuguac

SEQ ID NO: 291984 - RNA, 32 nt, Homo Sapiens
cugaaggccaggguagauuggggggugggaca

SEQ ID NO: 291985 - RNA, 32 nt, Homo Sapiens
gggauucugaggugggaggaucaugaggucaa

SEQ ID NO: 291986 - RNA, 32 nt, Homo Sapiens
aggaaaucaguucauuacuuugacaucauuca

SEQ ID NO: 291987 - RNA, 32 nt, Homo Sapiens
uuaauuccccccacccccugccaaugguggca

SEQ ID NO: 291988 - RNA, 32 nt, Homo Sapiens
cuagcacgaaacauuaucuguauggugaauuu

SEQ ID NO: 291989 - RNA, 32 nt, Homo Sapiens
uuuguaucuggaacuuucauaauuaccuuagu

SEQ ID NO: 291990 - RNA, 32 nt, Homo Sapiens
cacugcuugugacgcagccgggacuccagccc

SEQ ID NO: 291991 - RNA, 32 nt, Homo Sapiens
cgaaaaugauaauuuuuaaaucuuccagagca

SEQ ID NO: 291992 - RNA, 32 nt, Homo Sapiens
auacagacugugaacaaaucauucacaaacag

SEQ ID NO: 291993 - RNA, 32 nt, Homo Sapiens
caggagcguguuaacucugugcucucugaguc

SEQ ID NO: 291994 - RNA, 32 nt, Homo Sapiens
uuguuaaaaaucaaauucaaagauuuaauucu

SEQ ID NO: 291995 - RNA, 32 nt, Homo Sapiens
gccugggugggaagaacaggccccuggagggc

SEQ ID NO: 291996 - RNA, 32 nt, Homo Sapiens
uuuaauucauacaauacuuuaagaaaaucugu

SEQ ID NO: 291997 - RNA, 32 nt, Homo Sapiens
agccuggcucuggccuggcaggagccgagcuu

SEQ ID NO: 291998 - RNA, 32 nt, Homo Sapiens
uggaggaggaaauaaagggaaagggaagucgu

SEQ ID NO: 291999 - RNA, 32 nt, Homo Sapiens
gagauggcacuaguauuuccaagguguuccuu

SEQ ID NO: 292000 - RNA, 32 nt, Homo Sapiens
cugggcugacaggcacccaccaccacacccag

SEQ ID NO: 292001 - RNA, 32 nt, Homo Sapiens
gacucgaaguuugauaaaaguaccuuuucaug

SEQ ID NO: 292002 - RNA, 32 nt, Homo Sapiens
gauuauaggcucuuugcuguauauacacuaca

SEQ ID NO: 292003 - RNA, 32 nt, Homo Sapiens
gccucgggcuggccuccaccaagcucacgugc

SEQ ID NO: 292004 - RNA, 32 nt, Homo Sapiens
acagagggggcgcgcgcacaggagccugacuc

SEQ ID NO: 292005 - RNA, 32 nt, Homo Sapiens
gcaacucaugcagaagacccaggaaucuucca

SEQ ID NO: 292006 - RNA, 32 nt, Homo Sapiens
ccuuugacucucaaacaaaaaagacccaugca

SEQ ID NO: 292007 - RNA, 32 nt, Homo Sapiens
aaucccaccucugccaucuacuaccuaaguga

SEQ ID NO: 292008 - RNA, 30 nt, Homo Sapiens
caggcaggcagggaucccgcagcgaggggc

SEQ ID NO: 292009 - RNA, 32 nt, Homo Sapiens
uucuugugccucaggcucccaaguagcuggga

SEQ ID NO: 292010 - RNA, 32 nt, Homo Sapiens
aguaaaaaaugaacucuugguucacacaauaa

SEQ ID NO: 292011 - RNA, 29 nt, Homo Sapiens
cgccauggcuucccgggaggagguacucg

SEQ ID NO: 292012 - RNA, 32 nt, Homo Sapiens
agcugcgccggggcgcccuccggagaugcugc

SEQ ID NO: 292013 - RNA, 32 nt, Homo Sapiens
ggaaaggggagaaauagcaaugguuguuccua

SEQ ID NO: 292014 - RNA, 32 nt, Homo Sapiens
cucgggccgggcguaggaggcggcaccgggcc

SEQ ID NO: 292015 - RNA, 32 nt, Homo Sapiens
caaaugaagauaagugugcaguuucuagugcu

SEQ ID NO: 292016 - RNA, 32 nt, Homo Sapiens
gguuucgccauauugaucaggcuggucucgaa

SEQ ID NO: 292017 - RNA, 32 nt, Homo Sapiens
cucuacaaaaauacaaauuaacugggcauccu

SEQ ID NO: 292018 - RNA, 32 nt, Homo Sapiens
aaagagccuaacaucuccauggggaggccuca

SEQ ID NO: 292019 - RNA, 32 nt, Homo Sapiens
aagaggccagccuggccaacccugucucaaaa

SEQ ID NO: 292020 - RNA, 32 nt, Homo Sapiens
gcuugguggcucaugccuauaauccuagcuac

SEQ ID NO: 292021 - RNA, 32 nt, Homo Sapiens
aauguauuucuuuuuacaagugaaugaagaau

SEQ ID NO: 292022 - RNA, 32 nt, Homo Sapiens
ccguuucuggagucucgggcccacagucaccg

SEQ ID NO: 292023 - RNA, 32 nt, Homo Sapiens
ugauguucucgugaaauguugaggguggggag

SEQ ID NO: 292024 - RNA, 32 nt, Homo Sapiens
uacaggaaaugauuggaauagaauuaaaagga

SEQ ID NO: 292025 - RNA, 31 nt, Homo Sapiens
aacuaccuaaaugaucgucuuugguugggcc

SEQ ID NO: 292026 - RNA, 32 nt, Homo Sapiens
auaacaagaauaaacaacuuugugaaauauca

SEQ ID NO: 292027 - RNA, 32 nt, Homo Sapiens
aaaaucuacaguugaauucaguuuuuuaugca

SEQ ID NO: 292028 - RNA, 32 nt, Homo Sapiens
caaaaacagcagucaugguuaggaaggcagug

SEQ ID NO: 292029 - RNA, 32 nt, Homo Sapiens
cuagccccuugacuucggauuucacgauuucu

SEQ ID NO: 292030 - RNA, 32 nt, Homo Sapiens
uucucaaaagauuguuuuauauguaguacuaa

SEQ ID NO: 292031 - RNA, 32 nt, Homo Sapiens
uucgacaggcuccgcagagcugccggccgaca

SEQ ID NO: 292032 - RNA, 32 nt, Homo Sapiens
cccagcuagcuccuguguuuuguuuuuguuuu

SEQ ID NO: 292033 - RNA, 32 nt, Homo Sapiens
ccaggcguccgcucuccacaccuuucacagcc

SEQ ID NO: 292034 - RNA, 27 nt, Homo Sapiens
cgcagcuccuucuuguuccccgcccug

SEQ ID NO: 292035 - RNA, 32 nt, Homo Sapiens
agcccacucucuucacccuauuuuuucuuauc

SEQ ID NO: 292036 - RNA, 32 nt, Homo Sapiens
uccuaagccagaaaacagagacagaagacaaa

SEQ ID NO: 292037 - RNA, 32 nt, Homo Sapiens
gggacauggccagcugacggacaacugagucu

SEQ ID NO: 292038 - RNA, 32 nt, Homo Sapiens
aggucuuuuggcgaguuugcuauuugccuguu

SEQ ID NO: 292039 - RNA, 32 nt, Homo Sapiens
uaugcgaccgguggcgccggcgcggcuucugc

SEQ ID NO: 292040 - RNA, 32 nt, Homo Sapiens
ugcagcuucccagccccuccccuccccuacca

SEQ ID NO: 292041 - RNA, 32 nt, Homo Sapiens
agcccagagccgcuguuggcccugcccaccaa

SEQ ID NO: 292042 - RNA, 32 nt, Homo Sapiens
caucacugcaguccagccugggugacagagca

SEQ ID NO: 292043 - RNA, 32 nt, Homo Sapiens
gcaguccuucguagggucaguuuuuguuucag

SEQ ID NO: 292044 - RNA, 32 nt, Homo Sapiens
uuaccuaaaaauuuaaaauaugccauucauug

SEQ ID NO: 292045 - RNA, 32 nt, Homo Sapiens
uucuuaaaugguguaauuuuguccucucugug

SEQ ID NO: 292046 - RNA, 32 nt, Homo Sapiens
uagcauuuuuaugauuugaugaguuucuugua

SEQ ID NO: 292047 - RNA, 32 nt, Homo Sapiens
auggcaaccacugcuagaacccuaaaagaacc

SEQ ID NO: 292048 - RNA, 32 nt, Homo Sapiens
aauguacaguguauuacguaaauauguaaaga

SEQ ID NO: 292049 - RNA, 30 nt, Homo Sapiens
ccgugggauaaaagccaaaagcaugcguca

SEQ ID NO: 292050 - RNA, 32 nt, Homo Sapiens
cucuccugucucccuccucugcccgggagcuc

SEQ ID NO: 292051 - RNA, 32 nt, Homo Sapiens
gggcuuguuggugugccuggagcaaugcucca

SEQ ID NO: 292052 - RNA, 32 nt, Homo Sapiens
agugacucguggcuugccuuggucucuuggga

SEQ ID NO: 292053 - RNA, 32 nt, Homo Sapiens
ccagccuucucgcaccagccaagccuuaacug

SEQ ID NO: 292054 - RNA, 32 nt, Homo Sapiens
uagccuuugcuaaagagcaacuaauaaauuaa

SEQ ID NO: 292055 - RNA, 32 nt, Homo Sapiens
cccggcccugugucuuuucuuaauuugagcga

SEQ ID NO: 292056 - RNA, 32 nt, Homo Sapiens
agucccagcgccccuccuguccuuccccuacu

SEQ ID NO: 292057 - RNA, 31 nt, Homo Sapiens
caggcucaagccacugcuguugcauuacacc

SEQ ID NO: 292058 - RNA, 32 nt, Homo Sapiens
aggcgaccucgcgaccugugucagcagagccg

SEQ ID NO: 292059 - RNA, 32 nt, Homo Sapiens
augcagagcaggugguagugggacaggacaau

SEQ ID NO: 292060 - RNA, 32 nt, Homo Sapiens
caaccuuucauuuccuacuucauuccagcagg

SEQ ID NO: 292061 - RNA, 32 nt, Homo Sapiens
gucccagaagauggaauggggguguggggguc

SEQ ID NO: 292062 - RNA, 32 nt, Homo Sapiens
ggacacgcgcccagcucuguagccuccuccgu

SEQ ID NO: 292063 - RNA, 32 nt, Homo Sapiens
cgcucggcgucggccgccgccaugggagugca

SEQ ID NO: 292064 - RNA, 32 nt, Homo Sapiens
uuuuguuugaaauucuaggcauuggauacacu

SEQ ID NO: 292065 - RNA, 32 nt, Homo Sapiens
ugcuaugauaccacgccuuaaaaauugacagu

SEQ ID NO: 292066 - RNA, 32 nt, Homo Sapiens
uaaccugcucacuccagaacuccagcuccccc

SEQ ID NO: 292067 - RNA, 32 nt, Homo Sapiens
cccuuccccucccccuucccggcgcacucggg

SEQ ID NO: 292068 - RNA, 32 nt, Homo Sapiens
cggccagggaaggucggauggcggcggccagg

SEQ ID NO: 292069 - RNA, 32 nt, Homo Sapiens
ggucacuggggcugcgcagggcucuuugaggu

SEQ ID NO: 292070 - RNA, 32 nt, Homo Sapiens
cccgggccaagcccagcugcgggucccgcccg

SEQ ID NO: 292071 - RNA, 32 nt, Homo Sapiens
gcucggcuuuccccggcgcuggcugggcucag

SEQ ID NO: 292072 - RNA, 32 nt, Homo Sapiens
cuuauaagaacaagaaaugagcaaaguguuca

SEQ ID NO: 292073 - RNA, 32 nt, Homo Sapiens
uucccaccugaaagucuguuugcaaaggcaau

SEQ ID NO: 292074 - RNA, 32 nt, Homo Sapiens
ccggaggaggggacgugaagugaggagggggu

SEQ ID NO: 292075 - RNA, 32 nt, Homo Sapiens
ucggaggaggccggggcucaaggugugcagcu

SEQ ID NO: 292076 - RNA, 32 nt, Homo Sapiens
gugcgggcaggcgggggcgcugacgagaagca

SEQ ID NO: 292077 - RNA, 32 nt, Homo Sapiens
ucagacuugcugccccugugugucucaguucu

SEQ ID NO: 292078 - RNA, 32 nt, Homo Sapiens
acccaguuguaauugguccaaauaauuccaau

SEQ ID NO: 292079 - RNA, 32 nt, Homo Sapiens
acuugggcgcucugcccucccuggccucacgc

SEQ ID NO: 292080 - RNA, 32 nt, Homo Sapiens
cuggcuuugugauuuugggcaaguuacuuauc

SEQ ID NO: 292081 - RNA, 32 nt, Homo Sapiens
cauuggccugucugcugggugcuaacaaagcu

SEQ ID NO: 292082 - RNA, 32 nt, Homo Sapiens
guggaaauaccaucuugguuugagaugcauuu

SEQ ID NO: 292083 - RNA, 32 nt, Homo Sapiens
ggagcucaaauggauuugauaaagguuuaaga

SEQ ID NO: 292084 - RNA, 32 nt, Homo Sapiens
gugccugcucacaccugcuccugcaggcacac

SEQ ID NO: 292085 - RNA, 32 nt, Homo Sapiens
gagcugccacagagaaguuuguagccagguac

SEQ ID NO: 292086 - RNA, 29 nt, Homo Sapiens
gggcauggagcgcucgcagagccgccuca

SEQ ID NO: 292087 - RNA, 32 nt, Homo Sapiens
ugcugugcaguggggcgcugggugcuggcggu

SEQ ID NO: 292088 - RNA, 32 nt, Homo Sapiens
uaucgggacaaagagacuguugguaacugugg

SEQ ID NO: 292089 - RNA, 32 nt, Homo Sapiens
aucacagacuuacgcacuuguuuggacaguuu

SEQ ID NO: 292090 - RNA, 31 nt, Homo Sapiens
cugacugggcacugccucugcccccagcacc

SEQ ID NO: 292091 - RNA, 32 nt, Homo Sapiens
uucccagacaccuucaaagucuuauugacaca

SEQ ID NO: 292092 - RNA, 32 nt, Homo Sapiens
auuaaaauucuauaacuugccguauuaccagu

SEQ ID NO: 292093 - RNA, 32 nt, Homo Sapiens
aaugccugcuuaccucuuuuucuguagaggca

SEQ ID NO: 292094 - RNA, 32 nt, Homo Sapiens
agcucagcacaagcucgccugacccagauggu

SEQ ID NO: 292095 - RNA, 32 nt, Homo Sapiens
aacuaacugugaguaaggacgucuagcacauu

SEQ ID NO: 292096 - RNA, 32 nt, Homo Sapiens
cucugggccuggccuuccucauucgugagcug

SEQ ID NO: 292097 - RNA, 32 nt, Homo Sapiens
aagccagccuuuauuucccuggcaggcagccu

SEQ ID NO: 292098 - RNA, 32 nt, Homo Sapiens
agaaagaggucuuucagaaggaaaccgaaacu

SEQ ID NO: 292099 - RNA, 32 nt, Homo Sapiens
acagucccagucugcgggcagaugugccuccu

SEQ ID NO: 292100 - RNA, 32 nt, Homo Sapiens
auaauuauaccuaugguauuugaaagaacaau

SEQ ID NO: 292101 - RNA, 32 nt, Homo Sapiens
ccccaggagagccgcaggggccugccacacac

SEQ ID NO: 292102 - RNA, 32 nt, Homo Sapiens
uguccuuccuccuuccuccccggauuggcuug

SEQ ID NO: 292103 - RNA, 32 nt, Homo Sapiens
aauaaaaugaacucacaguuucaacaaugacc

SEQ ID NO: 292104 - RNA, 32 nt, Homo Sapiens
ggcaguggggacgggucccagcaccucggagc

SEQ ID NO: 292105 - RNA, 32 nt, Homo Sapiens
uggggcccacagccuaggagccaggugaucag

SEQ ID NO: 292106 - RNA, 32 nt, Homo Sapiens
aguguccucuaguccagacucccccacugcag

SEQ ID NO: 292107 - RNA, 32 nt, Homo Sapiens
uuaugauucaguuuauacugacuuugaaauau

SEQ ID NO: 292108 - RNA, 32 nt, Homo Sapiens
gauuuuccuggggccggggacccggcgggcuc

SEQ ID NO: 292109 - RNA, 32 nt, Homo Sapiens
ggaacuggcccuggccugucuccagcucugcg

SEQ ID NO: 292110 - RNA, 32 nt, Homo Sapiens
uuuauguuauuuauuuauuaguuuguccauuu

SEQ ID NO: 292111 - RNA, 32 nt, Homo Sapiens
ucuauucugaagauauuugauuaauauauuuc

SEQ ID NO: 292112 - RNA, 32 nt, Homo Sapiens
gugcaaagccccccggacacgggccgccgccu

SEQ ID NO: 292113 - RNA, 32 nt, Homo Sapiens
gugugggccgcggcccggcccucaccauggag

SEQ ID NO: 292114 - RNA, 32 nt, Homo Sapiens
uacgaaguuuugugccuuccaagugcugaaga

SEQ ID NO: 292115 - RNA, 32 nt, Homo Sapiens
aggaagggguagaggagaagguugaagcugug

SEQ ID NO: 292116 - RNA, 32 nt, Homo Sapiens
ucaugagcgccaaguuucccacuggcgcgcaa

SEQ ID NO: 292117 - RNA, 32 nt, Homo Sapiens
ggccaggcgcagugacuuacgccuguaaucuc

SEQ ID NO: 292118 - RNA, 32 nt, Homo Sapiens
ucccugcccucaucucucucccccgaguaccg

SEQ ID NO: 292119 - RNA, 32 nt, Homo Sapiens
uccagaugcuucuggaggaggggcaggagaca

SEQ ID NO: 292120 - RNA, 31 nt, Homo Sapiens
cauaucacaaagaccaauuagaauuagucau

SEQ ID NO: 292121 - RNA, 32 nt, Homo Sapiens
cuaucauggacuuccagaaaauaaaaaacagg

SEQ ID NO: 292122 - RNA, 32 nt, Homo Sapiens
aaaucagaaccucaguggacuugccaggaagu

SEQ ID NO: 292123 - RNA, 32 nt, Homo Sapiens
ugauuaugaugauaaagcgaaggucugcgguc

SEQ ID NO: 292124 - RNA, 32 nt, Homo Sapiens
ucaagcuaaggagcuuccuaggugaaagggga

SEQ ID NO: 292125 - RNA, 32 nt, Homo Sapiens
uuucuacauuacuuauaauaucaaauauaaug

SEQ ID NO: 292126 - RNA, 32 nt, Homo Sapiens
gaaauuuuaguuuuauuccuuaauugguaaau

SEQ ID NO: 292127 - RNA, 32 nt, Homo Sapiens
gagggcccucacuggggugucucugcaugggg

SEQ ID NO: 292128 - RNA, 32 nt, Homo Sapiens
uauuccgacaaaugaagugcuggcagagagag

SEQ ID NO: 292129 - RNA, 32 nt, Homo Sapiens
ucucucucucaaccucuuucuuccaaucucuc

SEQ ID NO: 292130 - RNA, 32 nt, Homo Sapiens
ccugggugggugguggggaggggcgcuggccc

SEQ ID NO: 292131 - RNA, 32 nt, Homo Sapiens
ucaucuggaucuuuuucuuuaucucccuuccc

SEQ ID NO: 292132 - RNA, 32 nt, Homo Sapiens
ccugugcccuccccuuacccaggcuuaggcuu

SEQ ID NO: 292133 - RNA, 32 nt, Homo Sapiens
uuguaagggcuuuaggaucaggcugaauauga

SEQ ID NO: 292134 - RNA, 32 nt, Homo Sapiens
ccccagccaaaauaaucuugugccaaaagauu

SEQ ID NO: 292135 - RNA, 32 nt, Homo Sapiens
aacacacaaaaauacugccuuguacugguggu

SEQ ID NO: 292136 - RNA, 32 nt, Homo Sapiens
accggacgccccggcccccgggcccgucacac

SEQ ID NO: 292137 - RNA, 32 nt, Homo Sapiens
aucuguugugggaauaaaugagaauauguaug

SEQ ID NO: 292138 - RNA, 32 nt, Homo Sapiens
guucgccgccccgcucgccgccgcgaugccag

SEQ ID NO: 292139 - RNA, 32 nt, Homo Sapiens
ggcugagguaguagaauugcuugaaccaggga

SEQ ID NO: 292140 - RNA, 32 nt, Homo Sapiens
cccccgccccacuucuagcugcuucuccucuu

SEQ ID NO: 292141 - RNA, 32 nt, Homo Sapiens
aaagaaaugauaaggcuguaguacaagcaagc

SEQ ID NO: 292142 - RNA, 32 nt, Homo Sapiens
guggcuuucuuucuuaucaucauggcacagau

SEQ ID NO: 292143 - RNA, 32 nt, Homo Sapiens
caggacccggaagaaucaucuaccucccagcu

SEQ ID NO: 292144 - RNA, 32 nt, Homo Sapiens
gugguggagcagagcagccaucuuuuaagugg

SEQ ID NO: 292145 - RNA, 32 nt, Homo Sapiens
cgagccagggagcggcuaaccggggacccacc

SEQ ID NO: 292146 - RNA, 32 nt, Homo Sapiens
cuuggguccuccccgcccucccucaugcugcc

SEQ ID NO: 292147 - RNA, 32 nt, Homo Sapiens
gagaaauuggaauguuuuaacugcagcccuca

SEQ ID NO: 292148 - RNA, 32 nt, Homo Sapiens
ucucugucuaccucagcauuucugggguucac

SEQ ID NO: 292149 - RNA, 32 nt, Homo Sapiens
aaaacaccuucaauguucugacuucaaagaga

SEQ ID NO: 292150 - RNA, 32 nt, Homo Sapiens
cuugagaggcugagacacgagaaucacuugaa

SEQ ID NO: 292151 - RNA, 32 nt, Homo Sapiens
acccccacccucauguucaggguggauguggg

SEQ ID NO: 292152 - RNA, 32 nt, Homo Sapiens
gagcuaaauuuaucuuuguaaaucuuuuugag

SEQ ID NO: 292153 - RNA, 32 nt, Homo Sapiens
ugagcagugagagagggaagggacuaacgugc

SEQ ID NO: 292154 - RNA, 32 nt, Homo Sapiens
acuucagcaucccacaucccuagccaagcaug

SEQ ID NO: 292155 - RNA, 32 nt, Homo Sapiens
ccaacaucacacagcaaccaagggcagaguca

SEQ ID NO: 292156 - RNA, 27 nt, Homo Sapiens
ugauccuccuacuucagccuccuggua

SEQ ID NO: 292157 - RNA, 32 nt, Homo Sapiens
gggagcucauuucuaaaccaaguggcagaggg

SEQ ID NO: 292158 - RNA, 32 nt, Homo Sapiens
ugcgccucccagcguccagcaauucuuguuuc

SEQ ID NO: 292159 - RNA, 32 nt, Homo Sapiens
guguagguucuauuuauauggcagaugacgug

SEQ ID NO: 292160 - RNA, 32 nt, Homo Sapiens
cuuuguaugacugucauagacacaugggugcu

SEQ ID NO: 292161 - RNA, 32 nt, Homo Sapiens
gaacccugccagcugagcccugugcaucuacu

SEQ ID NO: 292162 - RNA, 32 nt, Homo Sapiens
gaggaggagguggucuuaggcagugauggacc

SEQ ID NO: 292163 - RNA, 27 nt, Homo Sapiens
uuuccauuccaauucugggagugcucu

SEQ ID NO: 292164 - RNA, 32 nt, Homo Sapiens
cuacaguugacucuccucucccguuuuuuccc

SEQ ID NO: 292165 - RNA, 32 nt, Homo Sapiens
guuguuuucuuauauuauucugcauauaaaca

SEQ ID NO: 292166 - RNA, 32 nt, Homo Sapiens
cuugccggugccuggggugccuuucccccagc

SEQ ID NO: 292167 - RNA, 30 nt, Homo Sapiens
gcugcucugcuaacacggcagcccauccuu

SEQ ID NO: 292168 - RNA, 32 nt, Homo Sapiens
acaugaguccccaagcuccucuggcuguggga

SEQ ID NO: 292169 - RNA, 32 nt, Homo Sapiens
auucacccuccacuucccgucucagaaucuaa

SEQ ID NO: 292170 - RNA, 32 nt, Homo Sapiens
cuacuuacugguuuucuaccuucuuucauaac

SEQ ID NO: 292171 - RNA, 32 nt, Homo Sapiens
uguuuucgaugaugaugaugaucaugaugaug

SEQ ID NO: 292172 - RNA, 32 nt, Homo Sapiens
aagccuggaagacaccauggaugccauggauu

SEQ ID NO: 292173 - RNA, 28 nt, Homo Sapiens
accaugagccgccugcucuggaggaagg

SEQ ID NO: 292174 - RNA, 32 nt, Homo Sapiens
uccuucuuuuuaaaacagagggaagaauauac

SEQ ID NO: 292175 - RNA, 32 nt, Homo Sapiens
aagaaugguuuguaaaauccacagcuauaucc

SEQ ID NO: 292176 - RNA, 32 nt, Homo Sapiens
cagggccggggccagcaaagucccucccauau

SEQ ID NO: 292177 - RNA, 31 nt, Homo Sapiens
auuaagcagauacuucauccauagacuuuuu

SEQ ID NO: 292178 - RNA, 32 nt, Homo Sapiens
aggagugggcguggcucuguguccagggcccc

SEQ ID NO: 292179 - RNA, 32 nt, Homo Sapiens
aacagcaaggaauuauuuuccagaaugacacc

SEQ ID NO: 292180 - RNA, 28 nt, Homo Sapiens
gcaccagagcuuuaacauuugaagccac

SEQ ID NO: 292181 - RNA, 32 nt, Homo Sapiens
gcugguauuuccccgcaugucuuauucuugcc

SEQ ID NO: 292182 - RNA, 32 nt, Homo Sapiens
ccugaacuuauuuuuucuuaauucaaguugaa

SEQ ID NO: 292183 - RNA, 32 nt, Homo Sapiens
gggcagcaggcuuuuguguucucuaaaaaugu

SEQ ID NO: 292184 - RNA, 32 nt, Homo Sapiens
cuggcucccucuucuuucagacuugccaugug

SEQ ID NO: 292185 - RNA, 32 nt, Homo Sapiens
uuguucccgcaugcugucagccgcagucgcca

SEQ ID NO: 292186 - RNA, 32 nt, Homo Sapiens
uagcaaauauuuuuuccuuguuuuuucuuugu

SEQ ID NO: 292187 - RNA, 32 nt, Homo Sapiens
cacuucugcuaaggagggacccguguugcccc

SEQ ID NO: 292188 - RNA, 32 nt, Homo Sapiens
ugcagaaucaaucccgacuuccauaccugcug

SEQ ID NO: 292189 - RNA, 32 nt, Homo Sapiens
cccaagugggucugcaagacuguaccucugcc

SEQ ID NO: 292190 - RNA, 32 nt, Homo Sapiens
augccccugccgcccugacgcccgccagccug

SEQ ID NO: 292191 - RNA, 32 nt, Homo Sapiens
aaauaaagugguugacuagucuauguaacagc

SEQ ID NO: 292192 - RNA, 32 nt, Homo Sapiens
ugucuccuggccgucugcuccaggcgcagcug

SEQ ID NO: 292193 - RNA, 32 nt, Homo Sapiens
cugcugacauaguggauggacagauggaccaa

SEQ ID NO: 292194 - RNA, 32 nt, Homo Sapiens
uggcauacaccuguagucccagcuacucggga

SEQ ID NO: 292195 - RNA, 32 nt, Homo Sapiens
aaagcagugacaaagaaagaaguugucauucu

SEQ ID NO: 292196 - RNA, 32 nt, Homo Sapiens
aagggggaucaucaaggacauguaucucaaau

SEQ ID NO: 292197 - RNA, 32 nt, Homo Sapiens
uuuauuggccauaauugcuacucuucauacac

SEQ ID NO: 292198 - RNA, 32 nt, Homo Sapiens
cugacgccugcagcugagagcaggagcaggaa

SEQ ID NO: 292199 - RNA, 32 nt, Homo Sapiens
gcuuuguggugauaauuuuguaucuugguugc

SEQ ID NO: 292200 - RNA, 32 nt, Homo Sapiens
aaacuggagaagggcuggaccuggaccuggac

SEQ ID NO: 292201 - RNA, 32 nt, Homo Sapiens
ugggggacaaugauucuguucacauugggacc

SEQ ID NO: 292202 - RNA, 32 nt, Homo Sapiens
ccacuggaucuucauggagacaugggcaagca

SEQ ID NO: 292203 - RNA, 32 nt, Homo Sapiens
ccaguccugcccaaguacccaagcccuggggg

SEQ ID NO: 292204 - RNA, 32 nt, Homo Sapiens
gaauucuuuuaaaaguuuuuuuuuuuuuuuuc

SEQ ID NO: 292205 - RNA, 32 nt, Homo Sapiens
guauauugucugaaaugugucggcaguuuuuu

SEQ ID NO: 292206 - RNA, 32 nt, Homo Sapiens
uguaagcagcucagauaccaugugcuaucauu

SEQ ID NO: 292207 - RNA, 32 nt, Homo Sapiens
gccuuccgccagccgcgcccugcgccaccuac

SEQ ID NO: 292208 - RNA, 32 nt, Homo Sapiens
ccaucaccucaucucccuguggacuugggagc

SEQ ID NO: 292209 - RNA, 32 nt, Homo Sapiens
ccuacccacggucuccaucucaucuagugcug

SEQ ID NO: 292210 - RNA, 32 nt, Homo Sapiens
cuacuagcauuggcugcccugggggacgggcu

SEQ ID NO: 292211 - RNA, 32 nt, Homo Sapiens
caguguguaaaguguaaauccuuuuucuuuau

SEQ ID NO: 292212 - RNA, 32 nt, Homo Sapiens
uuacaaaaucauauacgauuuauuuaauucuc

SEQ ID NO: 292213 - RNA, 32 nt, Homo Sapiens
ugacagugauucuggagcugacgugaggcacc

SEQ ID NO: 292214 - RNA, 32 nt, Homo Sapiens
guuugcuguccggcugccuagggucugggaag

SEQ ID NO: 292215 - RNA, 32 nt, Homo Sapiens
uacccucuccugcgagacccaggggcuuuucc

SEQ ID NO: 292216 - RNA, 31 nt, Homo Sapiens
aaaaaugcaagguuuugguuauucuaauuug

SEQ ID NO: 292217 - RNA, 32 nt, Homo Sapiens
aggcaguugcuuaaagcaaauugcaaaacugg

SEQ ID NO: 292218 - RNA, 32 nt, Homo Sapiens
auauuauauaucuauucugcauagguauuuug

SEQ ID NO: 292219 - RNA, 32 nt, Homo Sapiens
gauauagaaaacaaaaugaacucuauauuaaa

SEQ ID NO: 292220 - RNA, 32 nt, Homo Sapiens
uaggaucauuuucugucuguuuuaaucaugua

SEQ ID NO: 292221 - RNA, 32 nt, Homo Sapiens
ggaauccugccaguuggugaagcccuguggca

SEQ ID NO: 292222 - RNA, 32 nt, Homo Sapiens
gagcuccugaaucacacuggcuccccagggcu

SEQ ID NO: 292223 - RNA, 32 nt, Homo Sapiens
acuaaacagcugccuccagcgugaagaaggug

SEQ ID NO: 292224 - RNA, 30 nt, Homo Sapiens
uugacaugacuccaggaccacagggagugc

SEQ ID NO: 292225 - RNA, 32 nt, Homo Sapiens
uucaguagagacagggcuuuugccaugucgcc

SEQ ID NO: 292226 - RNA, 32 nt, Homo Sapiens
agcaaauugguagauaguacauacuugccauu

SEQ ID NO: 292227 - RNA, 32 nt, Homo Sapiens
cgcggccucaaggcccugcgccugugccgcgc

SEQ ID NO: 292228 - RNA, 32 nt, Homo Sapiens
cgcaacccaagcagaugcaggcacaggccacc

SEQ ID NO: 292229 - RNA, 32 nt, Homo Sapiens
ccgcccgucucgccgcgcacgccucggcgacc

SEQ ID NO: 292230 - RNA, 31 nt, Homo Sapiens
ccccaguccccucagaaccaugcccauggau

SEQ ID NO: 292231 - RNA, 32 nt, Homo Sapiens
gcaaggaacaaccaccuggccuccauucucuu

SEQ ID NO: 292232 - RNA, 32 nt, Homo Sapiens
caacugccauccagccugucgccccgcccuuc

SEQ ID NO: 292233 - RNA, 32 nt, Homo Sapiens
agaguauuaugguaccucugaauuagccugua

SEQ ID NO: 292234 - RNA, 32 nt, Homo Sapiens
ggauuagcuaguuuucuaaaaaucgaauuauu

SEQ ID NO: 292235 - RNA, 32 nt, Homo Sapiens
gagaggacaguggagcccagacacgucuccuu

SEQ ID NO: 292236 - RNA, 32 nt, Homo Sapiens
ucucuguuguuugguucagggauuuuauuuuu

SEQ ID NO: 292237 - RNA, 29 nt, Homo Sapiens
ugggcucggggacgcaggcgcugcugcag

SEQ ID NO: 292238 - RNA, 32 nt, Homo Sapiens
uucacaaucauguaguucuaguuuacaugcca

SEQ ID NO: 292239 - RNA, 30 nt, Homo Sapiens
uauagccugcuuaugggggaaggugacgcc

SEQ ID NO: 292240 - RNA, 32 nt, Homo Sapiens
ggguuacucccucuuucuugccucuauuucuu

SEQ ID NO: 292241 - RNA, 32 nt, Homo Sapiens
aaaauaguuguaaacucuaaucuuauacuuau

SEQ ID NO: 292242 - RNA, 32 nt, Homo Sapiens
ggcccaugccaaucaaaguauaauagaaagca

SEQ ID NO: 292243 - RNA, 32 nt, Homo Sapiens
uuugauuuucauaaguuuauaucuuucacuaa

SEQ ID NO: 292244 - RNA, 32 nt, Homo Sapiens
aauggcccauacuucuggcccggcuggaugaa

SEQ ID NO: 292245 - RNA, 32 nt, Homo Sapiens
guaauuaaugguuuuuguuaguucacuucagc

SEQ ID NO: 292246 - RNA, 32 nt, Homo Sapiens
cccagucauuuaccuggaauuuuuuauacaua

SEQ ID NO: 292247 - RNA, 32 nt, Homo Sapiens
uuuucaccaaaauaaaaugagugagauuuaca

SEQ ID NO: 292248 - RNA, 32 nt, Homo Sapiens
ugacaagagucuuuuuauuugggagccagagg

SEQ ID NO: 292249 - RNA, 32 nt, Homo Sapiens
ugggcggccgcacacguguccaggcgucacgu

SEQ ID NO: 292250 - RNA, 32 nt, Homo Sapiens
cccccgccccacugacuuccuccaauaaaguc

SEQ ID NO: 292251 - RNA, 32 nt, Homo Sapiens
gcagcacccuccccccaccccucauuccuguc

SEQ ID NO: 292252 - RNA, 32 nt, Homo Sapiens
uuacucagcaaccaucauggaucugagugaca

SEQ ID NO: 292253 - RNA, 32 nt, Homo Sapiens
guugcugccgcugccuucagcaagacgcugcu

SEQ ID NO: 292254 - RNA, 32 nt, Homo Sapiens
ucauucucccccagcccgagcgugccucugcc

SEQ ID NO: 292255 - RNA, 32 nt, Homo Sapiens
ccaucucagucuuuccugaggacuugggaacu

SEQ ID NO: 292256 - RNA, 29 nt, Homo Sapiens
auuaaugagaagguggccuucagugucca

SEQ ID NO: 292257 - RNA, 32 nt, Homo Sapiens
cgagacccaguaggaagagagguuuaaaucag

SEQ ID NO: 292258 - RNA, 32 nt, Homo Sapiens
cagggggaggcuggcugcuugcuuagguggaa

SEQ ID NO: 292259 - RNA, 32 nt, Homo Sapiens
ggccaggggaggggcgggcagguaggugcagc

SEQ ID NO: 292260 - RNA, 32 nt, Homo Sapiens
cguguucgccgcggaggcgccguuaucccggg

SEQ ID NO: 292261 - RNA, 32 nt, Homo Sapiens
aaacuuaaaccugcugcccacccagagcagcu

SEQ ID NO: 292262 - RNA, 32 nt, Homo Sapiens
ucugcgugggaauggaagcagggcaucagcug

SEQ ID NO: 292263 - RNA, 32 nt, Homo Sapiens
uauuuaggauugcauuugcuuggcuccuagua

SEQ ID NO: 292264 - RNA, 32 nt, Homo Sapiens
aggaggagaagcugaggcuccagcagcaggag

SEQ ID NO: 292265 - RNA, 32 nt, Homo Sapiens
ccaaggguaauaaacguguacaaguacagugu

SEQ ID NO: 292266 - RNA, 32 nt, Homo Sapiens
uuucuggaucauuuuuuaaaugaccucuucua

SEQ ID NO: 292267 - RNA, 32 nt, Homo Sapiens
agccaggaaugggcggcagccgggccguuugg

SEQ ID NO: 292268 - RNA, 32 nt, Homo Sapiens
cuauacaaacauaaguuuauuuuauaugccca

SEQ ID NO: 292269 - RNA, 32 nt, Homo Sapiens
ggguuugggaaaccacuucagagauggcagca

SEQ ID NO: 292270 - RNA, 32 nt, Homo Sapiens
uaucuauagaaagaaugcuaaugacugguuug

SEQ ID NO: 292271 - RNA, 32 nt, Homo Sapiens
acuccaaaguuccauuggaaaagauaugguga

SEQ ID NO: 292272 - RNA, 32 nt, Homo Sapiens
aggucaaaaacaaaacaaaacagugacacuca

SEQ ID NO: 292273 - RNA, 32 nt, Homo Sapiens
ggugccaugcuuuaaaaaacccuaauauguga

SEQ ID NO: 292274 - RNA, 32 nt, Homo Sapiens
gaaagcugagacugaggaggugaaacugaaaa

SEQ ID NO: 292275 - RNA, 32 nt, Homo Sapiens
cggauucugcccgccguccccggagcccucgg

SEQ ID NO: 292276 - RNA, 32 nt, Homo Sapiens
ccggggcuggugcguggccggcagcucgcgaa

SEQ ID NO: 292277 - RNA, 32 nt, Homo Sapiens
cgaaucuuucuuucuuuuuuuuuuuaaagggc

SEQ ID NO: 292278 - RNA, 32 nt, Homo Sapiens
ccggcugcggcgccugggacgguugcgguggg

SEQ ID NO: 292279 - RNA, 32 nt, Homo Sapiens
ccuauuucaaccucugguuccugggaugagcc

SEQ ID NO: 292280 - RNA, 32 nt, Homo Sapiens
uuguuauuuuuuacuuugauaaguaaaccaaa

SEQ ID NO: 292281 - RNA, 32 nt, Homo Sapiens
acgcugaaauaaaacacacagaaaccaagaac

SEQ ID NO: 292282 - RNA, 32 nt, Homo Sapiens
uaugucugacuuugaaauaccauuuacaaugu

SEQ ID NO: 292283 - RNA, 32 nt, Homo Sapiens
acaaggucgggaguuugagaccagccugacua

SEQ ID NO: 292284 - RNA, 32 nt, Homo Sapiens
ccagccaagccacguggacugagagucauggg

SEQ ID NO: 292285 - RNA, 32 nt, Homo Sapiens
gucugcuuuccccaccuccuccccuccccugg

SEQ ID NO: 292286 - RNA, 32 nt, Homo Sapiens
uccccgccaggccacgccccagccacuuugcu

SEQ ID NO: 292287 - RNA, 32 nt, Homo Sapiens
auuuucuaaguuugggaagcagcauauugaga

SEQ ID NO: 292288 - RNA, 32 nt, Homo Sapiens
acuaaaaaacaaaggaaaugaguuauuaaugu

SEQ ID NO: 292289 - RNA, 32 nt, Homo Sapiens
gugcuuccgagugucagucaugugcugggguc

SEQ ID NO: 292290 - RNA, 32 nt, Homo Sapiens
ccagaccugccauggcgaccgcgaguccuagc

SEQ ID NO: 292291 - RNA, 32 nt, Homo Sapiens
ccgguacugaagaugcuccaguaauuggugac

SEQ ID NO: 292292 - RNA, 32 nt, Homo Sapiens
uacgcuggugguuaaggccagggccucuccua

SEQ ID NO: 292293 - RNA, 32 nt, Homo Sapiens
augccagcuacaggaccccgcucuacuccaug

SEQ ID NO: 292294 - RNA, 32 nt, Homo Sapiens
auaauucucuacauaaugcuccauuucauuga

SEQ ID NO: 292295 - RNA, 32 nt, Homo Sapiens
agcaguacaaauauuaacaauuauauuaacac

SEQ ID NO: 292296 - RNA, 32 nt, Homo Sapiens
cuaacgcugcugcugcugcugcugcugcuuaa

SEQ ID NO: 292297 - RNA, 32 nt, Homo Sapiens
uaugccuggccagccuccagcuccucagaccu

SEQ ID NO: 292298 - RNA, 32 nt, Homo Sapiens
auucagccaagucuauuugaaauagaaaacug

SEQ ID NO: 292299 - RNA, 32 nt, Homo Sapiens
auuguacaucuuuaaacaaaauguauauuaau

SEQ ID NO: 292300 - RNA, 32 nt, Homo Sapiens
aaacuuauaacucaagguuguaaaaauggcau

SEQ ID NO: 292301 - RNA, 32 nt, Homo Sapiens
gguagcggcggcagcggcugcggccaagcugg

SEQ ID NO: 292302 - RNA, 32 nt, Homo Sapiens
gugcagugguggcaguucagaaauaaagggcc

SEQ ID NO: 292303 - RNA, 32 nt, Homo Sapiens
agcgggagaaagaccugaaaaacuaccuacug

SEQ ID NO: 292304 - RNA, 32 nt, Homo Sapiens
cggcgccagcugagccgagcgguagcuggucu

SEQ ID NO: 292305 - RNA, 32 nt, Homo Sapiens
aaaugauaaagacuuuuaugugagauuuccuu

SEQ ID NO: 292306 - RNA, 32 nt, Homo Sapiens
auauacacacaugugccacaaacaagugcaca

SEQ ID NO: 292307 - RNA, 32 nt, Homo Sapiens
gccaaacagcuggcagaggccagcuagacaaa

SEQ ID NO: 292308 - RNA, 32 nt, Homo Sapiens
gcagcauggggcgccagugguccugagucuca

SEQ ID NO: 292309 - RNA, 32 nt, Homo Sapiens
gugacauucuauuuccaggaaaauccggaacc

SEQ ID NO: 292310 - RNA, 32 nt, Homo Sapiens
ggccccagcaccuugagguuaagcaaagagaa

SEQ ID NO: 292311 - RNA, 32 nt, Homo Sapiens
acagccucacaggaagugggggugaggagccu

SEQ ID NO: 292312 - RNA, 32 nt, Homo Sapiens
gaccauaaaaauuuguuucaggcuuaaaaguu

SEQ ID NO: 292313 - RNA, 32 nt, Homo Sapiens
ccggcgccugggcuugcugucuguucucggca

SEQ ID NO: 292314 - RNA, 32 nt, Homo Sapiens
uuaccagcaguauuggagauccacagcuaaga

SEQ ID NO: 292315 - RNA, 32 nt, Homo Sapiens
uguccuucuguggccuccauccccucaugggu

SEQ ID NO: 292316 - RNA, 32 nt, Homo Sapiens
cagguaccugucaugguuccugcccaccaaag

SEQ ID NO: 292317 - RNA, 32 nt, Homo Sapiens
ccuucugugugcucucuccacacgaaggauga

SEQ ID NO: 292318 - RNA, 32 nt, Homo Sapiens
aauuacagugaaauuuuuggugaaugugggua

SEQ ID NO: 292319 - RNA, 32 nt, Homo Sapiens
gcucugggugcgguuguagacauccuccaagg

SEQ ID NO: 292320 - RNA, 32 nt, Homo Sapiens
acucugugggagcuggagaggaugcuggagcu

SEQ ID NO: 292321 - RNA, 32 nt, Homo Sapiens
ugggaggcggguggaggagcagcagaggaagg

SEQ ID NO: 292322 - RNA, 32 nt, Homo Sapiens
agccuaggggagucccugugguccugaauucu

SEQ ID NO: 292323 - RNA, 31 nt, Homo Sapiens
uuucuuuuuauacaaggaaagcuuccuaaga

SEQ ID NO: 292324 - RNA, 32 nt, Homo Sapiens
cccucacccggcaccugcgugcacucuccggc

SEQ ID NO: 292325 - RNA, 32 nt, Homo Sapiens
ccugagaccaagggggugucuugugggcagug

SEQ ID NO: 292326 - RNA, 32 nt, Homo Sapiens
acauccccaggccuugcuggggugcaggggua

SEQ ID NO: 292327 - RNA, 32 nt, Homo Sapiens
agucaccgccgggaauccugugaucgcagaaa

SEQ ID NO: 292328 - RNA, 32 nt, Homo Sapiens
augauuucuuugccaaguuaauccacugauga

SEQ ID NO: 292329 - RNA, 32 nt, Homo Sapiens
uuucaauccauguuaguuccuguccagcaccc

SEQ ID NO: 292330 - RNA, 32 nt, Homo Sapiens
aggggacacacagcuuccaggaggagggaaug

SEQ ID NO: 292331 - RNA, 32 nt, Homo Sapiens
ugucaaagugacacgcaaccuccggcagguga

SEQ ID NO: 292332 - RNA, 32 nt, Homo Sapiens
uuauugccucuacgggucuggaucuauugaua

SEQ ID NO: 292333 - RNA, 32 nt, Homo Sapiens
cuaugauauugcaugaugcagaauaaugcuaa

SEQ ID NO: 292334 - RNA, 32 nt, Homo Sapiens
cuggccccugucauccucaugcugcucaauuc

SEQ ID NO: 292335 - RNA, 32 nt, Homo Sapiens
cuugagaggaagaaguugacgggaaggccagu

SEQ ID NO: 292336 - RNA, 32 nt, Homo Sapiens
acucgcccacugggagcgccguggcgccuggu

SEQ ID NO: 292337 - RNA, 32 nt, Homo Sapiens
ggccugcccucccuuuauuuuuccaguucuua

SEQ ID NO: 292338 - RNA, 32 nt, Homo Sapiens
aguuaguuuaauggugaagaugauuaacaggg

SEQ ID NO: 292339 - RNA, 32 nt, Homo Sapiens
uacugccaccgcugccacggcugcuggcccgg

SEQ ID NO: 292340 - RNA, 32 nt, Homo Sapiens
uaauggccagguauuuuaggaugugagaagga

SEQ ID NO: 292341 - RNA, 32 nt, Homo Sapiens
gaguguugaaaggaauuguuuacuuuggaaua

SEQ ID NO: 292342 - RNA, 32 nt, Homo Sapiens
gaaauauaggcaggauguucaacaucaguuua

SEQ ID NO: 292343 - RNA, 32 nt, Homo Sapiens
ccugacauucacagugucuuguuuccuagcaa

SEQ ID NO: 292344 - RNA, 32 nt, Homo Sapiens
guauuuauuucugauaauuaaaaauuacaggg

SEQ ID NO: 292345 - RNA, 32 nt, Homo Sapiens
gugugauggagagucucugccgugccaucugg

SEQ ID NO: 292346 - RNA, 32 nt, Homo Sapiens
ccaggggauggggcugggaggggcugugaggg

SEQ ID NO: 292347 - RNA, 32 nt, Homo Sapiens
accuugcucccuccaccuccccucgucaaggu

SEQ ID NO: 292348 - RNA, 32 nt, Homo Sapiens
uggaacccugcaccaaggcgaccgcugcucac

SEQ ID NO: 292349 - RNA, 32 nt, Homo Sapiens
auauuuuccucccaggcuguggcuuauuuucu

SEQ ID NO: 292350 - RNA, 32 nt, Homo Sapiens
ggagaagauuuaugucagcacacacuuacaga

SEQ ID NO: 292351 - RNA, 32 nt, Homo Sapiens
uacccuuacacacacacacacacacacacaca

SEQ ID NO: 292352 - RNA, 32 nt, Homo Sapiens
cuuuagcagauguuuuuaaaguuucuuuugua

SEQ ID NO: 292353 - RNA, 32 nt, Homo Sapiens
uaaaacuguauauauuuccaggcugcaucuuc

SEQ ID NO: 292354 - RNA, 32 nt, Homo Sapiens
aucggggcgggugauggagguggacaagagug

SEQ ID NO: 292355 - RNA, 32 nt, Homo Sapiens
gguuucuugacaauggggucaggccccagagg

SEQ ID NO: 292356 - RNA, 32 nt, Homo Sapiens
agaagaaacggagaccuauuugaaagaucaaa

SEQ ID NO: 292357 - RNA, 32 nt, Homo Sapiens
cucucucuuucuucuuucuccugccauccuag

SEQ ID NO: 292358 - RNA, 32 nt, Homo Sapiens
auuauuuguuuaacauuguaugucuuuauuuu

SEQ ID NO: 292359 - RNA, 32 nt, Homo Sapiens
cucugcugucuccccacuaggaucauuccaca

SEQ ID NO: 292360 - RNA, 32 nt, Homo Sapiens
uuaacacagcuauaacuugccgugguucucag

SEQ ID NO: 292361 - RNA, 32 nt, Homo Sapiens
aaucuguguguuagugucaucaucuguaaguc

SEQ ID NO: 292362 - RNA, 32 nt, Homo Sapiens
aguggaaagcaagacuuguaagggcagaguga

SEQ ID NO: 292363 - RNA, 32 nt, Homo Sapiens
gacucagacuggcuucuuggcuccucagcuug

SEQ ID NO: 292364 - RNA, 32 nt, Homo Sapiens
cacgcgcguuuguucuugcgcacgggagaguu

SEQ ID NO: 292365 - RNA, 32 nt, Homo Sapiens
gcaauugcuuugagauucuuggauagaagagg

SEQ ID NO: 292366 - RNA, 32 nt, Homo Sapiens
ggacaagguuccucccucuccugcagaguagg

SEQ ID NO: 292367 - RNA, 32 nt, Homo Sapiens
uggcgcagcacgugcgccuccacuagcucgag

SEQ ID NO: 292368 - RNA, 32 nt, Homo Sapiens
ccacccaucccaucuccaacccuagucuucca

SEQ ID NO: 292369 - RNA, 32 nt, Homo Sapiens
cuagaaauuauuauuccaaccacuagaauacc

SEQ ID NO: 292370 - RNA, 32 nt, Homo Sapiens
ggcccccaaccccuccucccucagacucagag

SEQ ID NO: 292371 - RNA, 32 nt, Homo Sapiens
uuuuagaagccuucagaagaggcuaaaauauc

SEQ ID NO: 292372 - RNA, 32 nt, Homo Sapiens
cccuccggggacccggccagccugaagaugcc

SEQ ID NO: 292373 - RNA, 32 nt, Homo Sapiens
ggccacuuuucucuuguaacuuuggaaaacaa

SEQ ID NO: 292374 - RNA, 32 nt, Homo Sapiens
uuuucacuaucuggaaaaugggcucaaugcaa

SEQ ID NO: 292375 - RNA, 32 nt, Homo Sapiens
aagcgggggcgggacugcgcgcggccgagcgg

SEQ ID NO: 292376 - RNA, 32 nt, Homo Sapiens
acucucuccugggguuugucuaucuuuguuuc

SEQ ID NO: 292377 - RNA, 32 nt, Homo Sapiens
ucggcgaggagcuuugaacgugucugaagggu

SEQ ID NO: 292378 - RNA, 31 nt, Homo Sapiens
cggacgcggcacuggcacucggcuucaguuu

SEQ ID NO: 292379 - RNA, 32 nt, Homo Sapiens
ugucagaaagaagaggaaaccggaggaacaga

SEQ ID NO: 292380 - RNA, 32 nt, Homo Sapiens
gugcgcugcaggccaucugccggcgcccugag

SEQ ID NO: 292381 - RNA, 32 nt, Homo Sapiens
gucaaauccaaugauuugauaaaagcguaaca

SEQ ID NO: 292382 - RNA, 32 nt, Homo Sapiens
cagaaucaucauauacacuagguuuugugcau

SEQ ID NO: 292383 - RNA, 28 nt, Homo Sapiens
acuucggggcggccucggacggccaugg

SEQ ID NO: 292384 - RNA, 32 nt, Homo Sapiens
ucuaucuguuugucugucugugugucugugac

SEQ ID NO: 292385 - RNA, 32 nt, Homo Sapiens
uccugccugccuucagcagagaauucaccgaa

SEQ ID NO: 292386 - RNA, 32 nt, Homo Sapiens
cauggaaaaauauuguuuggacauuacuuggg

SEQ ID NO: 292387 - RNA, 28 nt, Homo Sapiens
gagggagaggggccgccgggcuggccau

SEQ ID NO: 292388 - RNA, 32 nt, Homo Sapiens
uuuugaagaugaugaacuaaauguugaagaca

SEQ ID NO: 292389 - RNA, 32 nt, Homo Sapiens
guagaagcugucuggaggcccggccagagaau

SEQ ID NO: 292390 - RNA, 32 nt, Homo Sapiens
uccuaaugcuuuauccaucaccaccugggcuc

SEQ ID NO: 292391 - RNA, 32 nt, Homo Sapiens
uuuggcuauagcaaaaaagccuugaccaagag

SEQ ID NO: 292392 - RNA, 32 nt, Homo Sapiens
aaugacuuagacaaaaucacaaagguaaagug

SEQ ID NO: 292393 - RNA, 32 nt, Homo Sapiens
gacuauuuuccagccuucugucagucagcagu

SEQ ID NO: 292394 - RNA, 32 nt, Homo Sapiens
cgguccagugcccgcuccugagcugacuccug

SEQ ID NO: 292395 - RNA, 32 nt, Homo Sapiens
gcuggagugucugggauugguagcucucucca

SEQ ID NO: 292396 - RNA, 32 nt, Homo Sapiens
gauguuaugauugaacucuacagaaggaacau

SEQ ID NO: 292397 - RNA, 32 nt, Homo Sapiens
ggccugagaaaugugcuacugauaagaucguu

SEQ ID NO: 292398 - RNA, 32 nt, Homo Sapiens
guaaaauguauuauuacauaaaauguguuuuu

SEQ ID NO: 292399 - RNA, 32 nt, Homo Sapiens
gggcugcccucccgggcccgcaguggucgcgg

SEQ ID NO: 292400 - RNA, 32 nt, Homo Sapiens
ccaaauuuauggccguaucaaaugguagcuga

SEQ ID NO: 292401 - RNA, 31 nt, Homo Sapiens
aggcaggagccccagggccggcuuguguuug

SEQ ID NO: 292402 - RNA, 31 nt, Homo Sapiens
uguacucacccuguacgacaaacacauuaca

SEQ ID NO: 292403 - RNA, 32 nt, Homo Sapiens
cccaagcccccuccccugaccugggugugccu

SEQ ID NO: 292404 - RNA, 30 nt, Homo Sapiens
guagggggcaggcgcggaucccgccaccgc

SEQ ID NO: 292405 - RNA, 32 nt, Homo Sapiens
cacacuauuguagaaaguauuauuuaauuuaa

SEQ ID NO: 292406 - RNA, 32 nt, Homo Sapiens
gaaagauggagaagguuaaacaggucccccac

SEQ ID NO: 292407 - RNA, 32 nt, Homo Sapiens
ggagacagcaugucacccaggacucugccggu

SEQ ID NO: 292408 - RNA, 32 nt, Homo Sapiens
auacauuguauauauguacacccuacacuauu

SEQ ID NO: 292409 - RNA, 32 nt, Homo Sapiens
gaaauugacaacauggcgguaauuuaaguguu

SEQ ID NO: 292410 - RNA, 32 nt, Homo Sapiens
agggcgcagcgggccguucgcugagguguccg

SEQ ID NO: 292411 - RNA, 32 nt, Homo Sapiens
uucagccagggcuuccucucuuccucugcauu

SEQ ID NO: 292412 - RNA, 32 nt, Homo Sapiens
auuaucacaguaugcacacacacacacacaca

SEQ ID NO: 292413 - RNA, 32 nt, Homo Sapiens
gagcugggggccccuuugugcuguaaaccagu

SEQ ID NO: 292414 - RNA, 32 nt, Homo Sapiens
ucuccucucccggcccgggccacuagagaguu

SEQ ID NO: 292415 - RNA, 32 nt, Homo Sapiens
ggaaacugccagcaacgcaggcccccaggugc

SEQ ID NO: 292416 - RNA, 31 nt, Homo Sapiens
uaaauuauggccgcaucuccgcacacucucu

SEQ ID NO: 292417 - RNA, 32 nt, Homo Sapiens
gggguggucagugcccucugugcuuuauggac

SEQ ID NO: 292418 - RNA, 32 nt, Homo Sapiens
gauaaucaugauuauaccuuuauuuuuacagg

SEQ ID NO: 292419 - RNA, 32 nt, Homo Sapiens
caugaacuaaaauggcaugcuauuuggaaauu

SEQ ID NO: 292420 - RNA, 32 nt, Homo Sapiens
gaacuguauguucagcugguauuuuccauuuu

SEQ ID NO: 292421 - RNA, 32 nt, Homo Sapiens
ucguuucauuuucugcagcgcgccacgaggau

SEQ ID NO: 292422 - RNA, 32 nt, Homo Sapiens
ugguuuggugagaacagauguuagaacuuguu

SEQ ID NO: 292423 - RNA, 32 nt, Homo Sapiens
gaauaagcuccuuggggugcugcuggaugaug

SEQ ID NO: 292424 - RNA, 30 nt, Homo Sapiens
gcggggaugugcggugaccacccugguccu

SEQ ID NO: 292425 - RNA, 32 nt, Homo Sapiens
aaaauaccuguaaagaaaauagugaaucacug

SEQ ID NO: 292426 - RNA, 32 nt, Homo Sapiens
cuuaguagagaccuaaagauugcugacucaaa

SEQ ID NO: 292427 - RNA, 32 nt, Homo Sapiens
agccucacaaggaaacuggguuauuggaggcc

SEQ ID NO: 292428 - RNA, 32 nt, Homo Sapiens
gcuaagcgaggccuccuccucccgcagauccg

SEQ ID NO: 292429 - RNA, 32 nt, Homo Sapiens
aaauagccgggcgugguggcaggcgccuguaa

SEQ ID NO: 292430 - RNA, 32 nt, Homo Sapiens
gcacacgcagcucgcggccggagggggguagc

SEQ ID NO: 292431 - RNA, 32 nt, Homo Sapiens
uuuaaugcugcuuuugagcuucaagguaauag

SEQ ID NO: 292432 - RNA, 32 nt, Homo Sapiens
acgauaucaacaaccugugaugacagagagaa

SEQ ID NO: 292433 - RNA, 32 nt, Homo Sapiens
guaucccgugcuguuucccuggcagacacaca

SEQ ID NO: 292434 - RNA, 32 nt, Homo Sapiens
uauuugaaggaacuaaugaacaugacauguua

SEQ ID NO: 292435 - RNA, 32 nt, Homo Sapiens
gcguggccugguuuuauuuucauugugaaaua

SEQ ID NO: 292436 - RNA, 32 nt, Homo Sapiens
aaaaacagaaacaaaaacccagccucauucag

SEQ ID NO: 292437 - RNA, 32 nt, Homo Sapiens
uuuuucuguuuuguuugcaaaaugguaagggg

SEQ ID NO: 292438 - RNA, 32 nt, Homo Sapiens
accugauaaaaagcaacguaugguaaauauug

SEQ ID NO: 292439 - RNA, 32 nt, Homo Sapiens
cuuuauaagauaaauaaugucuauacauguuu

SEQ ID NO: 292440 - RNA, 32 nt, Homo Sapiens
cucuccacuucugggcugaagccuccccaagc

SEQ ID NO: 292441 - RNA, 32 nt, Homo Sapiens
gauaaauaaaaugugguauaaacauacaaugg

SEQ ID NO: 292442 - RNA, 32 nt, Homo Sapiens
uuuuuaaaaauauuuuuaguagagacaggguu

SEQ ID NO: 292443 - RNA, 32 nt, Homo Sapiens
uuccuggcaugucagucugaugaugcagacga

SEQ ID NO: 292444 - RNA, 32 nt, Homo Sapiens
uauccugagccugaggguguauguguguccag

SEQ ID NO: 292445 - RNA, 32 nt, Homo Sapiens
uauuaccaaaaauuccacuaugauugauguuc

SEQ ID NO: 292446 - RNA, 32 nt, Homo Sapiens
gcgaccgcggcuuggcggccaagcgcgacuuc

SEQ ID NO: 292447 - RNA, 32 nt, Homo Sapiens
gagcgccggccuccgagacggugagaaaaugg

SEQ ID NO: 292448 - RNA, 32 nt, Homo Sapiens
cagauacuucuugguuuacaagauggaggcug

SEQ ID NO: 292449 - RNA, 32 nt, Homo Sapiens
ccuccuucagcuucccauguggcacccacaga

SEQ ID NO: 292450 - RNA, 32 nt, Homo Sapiens
cccagccgcgcgccgggagcgcuccccggaau

SEQ ID NO: 292451 - RNA, 32 nt, Homo Sapiens
cucccggcaggcccgggcgggcagagcagcgg

SEQ ID NO: 292452 - RNA, 32 nt, Homo Sapiens
cuggccugucucccuagggaauuccugcuaug

SEQ ID NO: 292453 - RNA, 32 nt, Homo Sapiens
uaucaaaguccucuuacaauuuauuuuccgca

SEQ ID NO: 292454 - RNA, 32 nt, Homo Sapiens
guggccuacaguguuauguuugcuguaagaau

SEQ ID NO: 292455 - RNA, 32 nt, Homo Sapiens
agcaguaaccaggagccccuccccuccgugug

SEQ ID NO: 292456 - RNA, 32 nt, Homo Sapiens
ucucccuccucuaucccucucccagguguggg

SEQ ID NO: 292457 - RNA, 32 nt, Homo Sapiens
acagacggcagcaaacaaaaucaugcacaaug

SEQ ID NO: 292458 - RNA, 32 nt, Homo Sapiens
gggagcagggcucgggggcagcggccaggccc

SEQ ID NO: 292459 - RNA, 31 nt, Homo Sapiens
ccucagccagccugccugcccagcgaggccc

SEQ ID NO: 292460 - RNA, 32 nt, Homo Sapiens
aggagccguacucccagcggccccacaccacg

SEQ ID NO: 292461 - RNA, 32 nt, Homo Sapiens
uaccuacagagguucauacugaagaguagucu

SEQ ID NO: 292462 - RNA, 32 nt, Homo Sapiens
ucuuccacagaaauaugcaaaacaguucaucc

SEQ ID NO: 292463 - RNA, 32 nt, Homo Sapiens
cgcugcaggaauccggugucucaauguaugag

SEQ ID NO: 292464 - RNA, 32 nt, Homo Sapiens
aaaaguuccaaauaauccauagacagucaaag

SEQ ID NO: 292465 - RNA, 32 nt, Homo Sapiens
ugcgccugccuccccacccccagccgcgccgc

SEQ ID NO: 292466 - RNA, 32 nt, Homo Sapiens
gugaggccugcgcggcaggagggggugggagg

SEQ ID NO: 292467 - RNA, 32 nt, Homo Sapiens
ggcggccccucucuuccacagccccucuccca

SEQ ID NO: 292468 - RNA, 32 nt, Homo Sapiens
ggugggguccgucaggccgcccggggcuccuc

SEQ ID NO: 292469 - RNA, 32 nt, Homo Sapiens
uagucaaaccaccuuuuauguuuuauuauuuu

SEQ ID NO: 292470 - RNA, 32 nt, Homo Sapiens
cguggaucccacaugcacuggggcagggcagc

SEQ ID NO: 292471 - RNA, 32 nt, Homo Sapiens
caccauuaagccaaaaugaaucugaaaaaaga

SEQ ID NO: 292472 - RNA, 32 nt, Homo Sapiens
ccaggugaagauccgcuuuggcagcgacccug

SEQ ID NO: 292473 - RNA, 32 nt, Homo Sapiens
ggcagacagcuauauuuaguggugccucgaca

SEQ ID NO: 292474 - RNA, 32 nt, Homo Sapiens
uuaacuuugucaaaauccugcucacaauuuga

SEQ ID NO: 292475 - RNA, 32 nt, Homo Sapiens
gagcaucccccuccucucccuguuagaaaugu

SEQ ID NO: 292476 - RNA, 32 nt, Homo Sapiens
aguaaauucauggcuuaugcuucugguccuua

SEQ ID NO: 292477 - RNA, 32 nt, Homo Sapiens
cagaccuuuaccuagccccuccagguuuacag

SEQ ID NO: 292478 - RNA, 32 nt, Homo Sapiens
uuguccuuucccuucaguacccucucagcucc

SEQ ID NO: 292479 - RNA, 32 nt, Homo Sapiens
acuaaaaagcauccugcugcuguggagcaauu

SEQ ID NO: 292480 - RNA, 32 nt, Homo Sapiens
acaccaagccccacaaagccccuaaaggagga

SEQ ID NO: 292481 - RNA, 32 nt, Homo Sapiens
ccagagcauggaucccuccugauuccacucag

SEQ ID NO: 292482 - RNA, 32 nt, Homo Sapiens
aaaccuaaugaaauauaaaagcaaguugaguu

SEQ ID NO: 292483 - RNA, 32 nt, Homo Sapiens
ccgaccccugcgggcucagggcucuuuccauu

SEQ ID NO: 292484 - RNA, 32 nt, Homo Sapiens
gguccaaaccugggcuugucuccacuucacgu

SEQ ID NO: 292485 - RNA, 32 nt, Homo Sapiens
cacaccuuugacacgaucuauccaccacuaac

SEQ ID NO: 292486 - RNA, 32 nt, Homo Sapiens
ucccaaccggugccgccgccggagcuucuccg

SEQ ID NO: 292487 - RNA, 32 nt, Homo Sapiens
uucccaggaaccacggcugccuuuuuuucuua

SEQ ID NO: 292488 - RNA, 32 nt, Homo Sapiens
ggauuuugcuaagggggcaaaaagcccagaua

SEQ ID NO: 292489 - RNA, 32 nt, Homo Sapiens
auuuuguuuuuguauuuuuaguagaggcaggg

SEQ ID NO: 292490 - RNA, 32 nt, Homo Sapiens
ccacgcacccccacccugggacuuuggaugcu

SEQ ID NO: 292491 - RNA, 32 nt, Homo Sapiens
aauaugagguagcuuauuucgucaauuaauua

SEQ ID NO: 292492 - RNA, 32 nt, Homo Sapiens
cgagaacaagcacucuaauuccagugggcuuu

SEQ ID NO: 292493 - RNA, 32 nt, Homo Sapiens
ggggcccccagcuguggcucugccaugccggg

SEQ ID NO: 292494 - RNA, 32 nt, Homo Sapiens
aacaccacaacacgagcguguuucuugagagg

SEQ ID NO: 292495 - RNA, 32 nt, Homo Sapiens
gcuugaguauugcauuuccuuggccaaacaaa

SEQ ID NO: 292496 - RNA, 32 nt, Homo Sapiens
ccggcuuucguaaccgcacccugggacggccc

SEQ ID NO: 292497 - RNA, 32 nt, Homo Sapiens
gggcucagugagggagcagagagggacagcuc

SEQ ID NO: 292498 - RNA, 32 nt, Homo Sapiens
ucaggaaaacaucuuuauguauggaggcagaa

SEQ ID NO: 292499 - RNA, 32 nt, Homo Sapiens
ggagcagagaugagaccccuguggggccuaca

SEQ ID NO: 292500 - RNA, 32 nt, Homo Sapiens
ucaucuucgggacgcccagggcccgggugauu

SEQ ID NO: 292501 - RNA, 32 nt, Homo Sapiens
acgcacacguacuuaaaugaaagcauguggca

SEQ ID NO: 292502 - RNA, 32 nt, Homo Sapiens
ccaccuccuugaccagcauaucuguuuucuga

SEQ ID NO: 292503 - RNA, 32 nt, Homo Sapiens
agguuuaauuucaaauagaauauggacuuaaa

SEQ ID NO: 292504 - RNA, 32 nt, Homo Sapiens
agaaccaccaccgcgccgcgcuccacaaaagc

SEQ ID NO: 292505 - RNA, 32 nt, Homo Sapiens
cagcgagccuucccucucugccgcuuguccuu

SEQ ID NO: 292506 - RNA, 32 nt, Homo Sapiens
caacagcaacaaaaacauugugugaauauaug

SEQ ID NO: 292507 - RNA, 32 nt, Homo Sapiens
uggaauguaacaaaagcccaccaagaguuuug

SEQ ID NO: 292508 - RNA, 32 nt, Homo Sapiens
aaaaaauggugaaggggggaaauauuuugaac

SEQ ID NO: 292509 - RNA, 32 nt, Homo Sapiens
uugaaaaucugugacucaagaggcagugaaca

SEQ ID NO: 292510 - RNA, 32 nt, Homo Sapiens
gcccucacccuuucugccccagcuuccaccug

SEQ ID NO: 292511 - RNA, 32 nt, Homo Sapiens
ugacggcugauggggaggagccggcgggcgga

SEQ ID NO: 292512 - RNA, 32 nt, Homo Sapiens
uaaauuaaaaacaguauuugggggagaaacgu

SEQ ID NO: 292513 - RNA, 32 nt, Homo Sapiens
guccacgcgccgggcccgggugggaguggcug

SEQ ID NO: 292514 - RNA, 29 nt, Homo Sapiens
caggguaggggacagagcugcuggggccu

SEQ ID NO: 292515 - RNA, 32 nt, Homo Sapiens
uccccagauccgagaagccccggccaggcagc

SEQ ID NO: 292516 - RNA, 32 nt, Homo Sapiens
caccuggauuaacucagaaaaaguaaaguccu

SEQ ID NO: 292517 - RNA, 32 nt, Homo Sapiens
gggagcgcaccucaccggacugagcucacagg

SEQ ID NO: 292518 - RNA, 32 nt, Homo Sapiens
gcccaaauuuuuguuuuuaagcaaaaggauag

SEQ ID NO: 292519 - RNA, 32 nt, Homo Sapiens
ccccucuggcggcucugcuccucccgaaggau

SEQ ID NO: 292520 - RNA, 32 nt, Homo Sapiens
uuuuuccauuguaugcaaauugaaagaaaaag

SEQ ID NO: 292521 - RNA, 32 nt, Homo Sapiens
cagugacccucccgccuuagugucucaaagug

SEQ ID NO: 292522 - RNA, 32 nt, Homo Sapiens
uggcucaggucggccccuccccaacaccaccc

SEQ ID NO: 292523 - RNA, 32 nt, Homo Sapiens
uuccaguggagaaaaauaauuauucuucaaug

SEQ ID NO: 292524 - RNA, 32 nt, Homo Sapiens
gcuauccagugaauugaugaaugugagacauu

SEQ ID NO: 292525 - RNA, 32 nt, Homo Sapiens
uuucuccuccaugcaguuacacaaaaggaggg

SEQ ID NO: 292526 - RNA, 32 nt, Homo Sapiens
uaucccuccccuagcccuccauccccugacag

SEQ ID NO: 292527 - RNA, 25 nt, Homo Sapiens
augcuucccacucuagcuuccauac

SEQ ID NO: 292528 - RNA, 32 nt, Homo Sapiens
aguggagaugggggcgggggugguggugaaga

SEQ ID NO: 292529 - RNA, 32 nt, Homo Sapiens
ggcugggugugguggcucacgccuauaauccc

SEQ ID NO: 292530 - RNA, 32 nt, Homo Sapiens
gcgggcggcuccccgccucgccgcccgggaaa

SEQ ID NO: 292531 - RNA, 32 nt, Homo Sapiens
cacauguggucaucagaaaauaagccauuccu

SEQ ID NO: 292532 - RNA, 32 nt, Homo Sapiens
uuccuuuuuuaaaaaauaagguguucuuguuc

SEQ ID NO: 292533 - RNA, 32 nt, Homo Sapiens
cuuuaagacaaagguuaacuaauuauaauuca

SEQ ID NO: 292534 - RNA, 32 nt, Homo Sapiens
cccugagaauaaaaagccgcgagcccacagug

SEQ ID NO: 292535 - RNA, 32 nt, Homo Sapiens
caauccuagcuuuuaaaagaaacuauuuaaug

SEQ ID NO: 292536 - RNA, 32 nt, Homo Sapiens
ccaaggaggcucgguuccggaccgccaagaag

SEQ ID NO: 292537 - RNA, 32 nt, Homo Sapiens
ugcgggcauggccugagcuuucuggagagccu

SEQ ID NO: 292538 - RNA, 32 nt, Homo Sapiens
augugcucugcucuccucccgcaauccugcuc

SEQ ID NO: 292539 - RNA, 32 nt, Homo Sapiens
gacuuugugugcccucccccuccuuuguguau

SEQ ID NO: 292540 - RNA, 32 nt, Homo Sapiens
gcaccucaaggacuuuucugcuauuuacugcu

SEQ ID NO: 292541 - RNA, 32 nt, Homo Sapiens
gggagagcaacaccccagcuucuagcagcucu

SEQ ID NO: 292542 - RNA, 32 nt, Homo Sapiens
accaggagggcgggaccccccucuuccucucc

SEQ ID NO: 292543 - RNA, 32 nt, Homo Sapiens
uguguguacagcccccguccccgccccgcccc

SEQ ID NO: 292544 - RNA, 32 nt, Homo Sapiens
uuaacauuaauuagcauuuagcagaugaccau

SEQ ID NO: 292545 - RNA, 32 nt, Homo Sapiens
ugucaggugcuuugauuucuaagauaaaauau

SEQ ID NO: 292546 - RNA, 32 nt, Homo Sapiens
agagauccagagcccuacacuccacgaccugg

SEQ ID NO: 292547 - RNA, 30 nt, Homo Sapiens
uuaggugucugugccccaggacagacccua

SEQ ID NO: 292548 - RNA, 32 nt, Homo Sapiens
gggcucaccucuugguugauccucuuguacug

SEQ ID NO: 292549 - RNA, 32 nt, Homo Sapiens
uuuuauauuguuuuauacucagaaaaggaaaa

SEQ ID NO: 292550 - RNA, 32 nt, Homo Sapiens
cccucucucucccaggucccagccccuuuucc

SEQ ID NO: 292551 - RNA, 32 nt, Homo Sapiens
uccuuccaccaccagcaccggaccaccugcuc

SEQ ID NO: 292552 - RNA, 31 nt, Homo Sapiens
gauuccacaaagauacaguauuacuuagcua

SEQ ID NO: 292553 - RNA, 32 nt, Homo Sapiens
cuucuugucuggcauccugggggcaguggugu

SEQ ID NO: 292554 - RNA, 32 nt, Homo Sapiens
ccaucaguuaguagggugcaugucagaugauc

SEQ ID NO: 292555 - RNA, 31 nt, Homo Sapiens
ggcaagauggaggugacgggggugucggcac

SEQ ID NO: 292556 - RNA, 32 nt, Homo Sapiens
ugagcaagaaaguuuuggaaauuguguugcuu

SEQ ID NO: 292557 - RNA, 32 nt, Homo Sapiens
augguggaggucauuuacaucaacagaaagaa

SEQ ID NO: 292558 - RNA, 32 nt, Homo Sapiens
guugucucuuuauuucucccagcccuuugguc

SEQ ID NO: 292559 - RNA, 32 nt, Homo Sapiens
auaauagaugaccuaacugaaggaauccuugu

SEQ ID NO: 292560 - RNA, 32 nt, Homo Sapiens
cacuccagcauuuuucuucauguaucaccuuc

SEQ ID NO: 292561 - RNA, 32 nt, Homo Sapiens
ccacaugaaaauaaagagccauaguuucaaaa

SEQ ID NO: 292562 - RNA, 32 nt, Homo Sapiens
gggaccagguggggcggguggggagcuguccg

SEQ ID NO: 292563 - RNA, 32 nt, Homo Sapiens
ugcaauggaauuaaauggccaagcccaaggac

SEQ ID NO: 292564 - RNA, 32 nt, Homo Sapiens
aagcauuagcuacauuuccuguccuguucaca

SEQ ID NO: 292565 - RNA, 28 nt, Homo Sapiens
augccagggcggcccgcggggcagccuc

SEQ ID NO: 292566 - RNA, 32 nt, Homo Sapiens
ccugaugugcuggugcuguguccccaaaaccg

SEQ ID NO: 292567 - RNA, 32 nt, Homo Sapiens
gcucagcagacauucacucuggccgcugggac

SEQ ID NO: 292568 - RNA, 32 nt, Homo Sapiens
ugaaaaccgagccccagaggccaguaaaggag

SEQ ID NO: 292569 - RNA, 32 nt, Homo Sapiens
uagaaugccagaucuuccagauuaggcuaaau

SEQ ID NO: 292570 - RNA, 32 nt, Homo Sapiens
ccccuugucaggcugugaggugcucguguaga

SEQ ID NO: 292571 - RNA, 29 nt, Homo Sapiens
cuauuucugugccaauaccaccuacugua

SEQ ID NO: 292572 - RNA, 32 nt, Homo Sapiens
uccuuccccucgccucugccaggccccgcgcc

SEQ ID NO: 292573 - RNA, 32 nt, Homo Sapiens
cauauuuuugucuuguucuuccaauuggugua

SEQ ID NO: 292574 - RNA, 32 nt, Homo Sapiens
uggcccggggaaccgggagggcccggcgaucg

SEQ ID NO: 292575 - RNA, 31 nt, Homo Sapiens
ggauccagaaagaaaaacaaagguuaagaaa

SEQ ID NO: 292576 - RNA, 32 nt, Homo Sapiens
uagugaggccccagacuucacccccagcccac

SEQ ID NO: 292577 - RNA, 32 nt, Homo Sapiens
gauauaaauauuaaaguggacgagaugaccuu

SEQ ID NO: 292578 - RNA, 32 nt, Homo Sapiens
ggugugugcugaggaacaagaacccaggcuga

SEQ ID NO: 292579 - RNA, 32 nt, Homo Sapiens
cagggcaaagacugcagagcugcauccauauc

SEQ ID NO: 292580 - RNA, 32 nt, Homo Sapiens
cccugcuguauuugucuguguugacaacguga

SEQ ID NO: 292581 - RNA, 32 nt, Homo Sapiens
uuccugggcaugguggcccagcccucucuguc

SEQ ID NO: 292582 - RNA, 32 nt, Homo Sapiens
ucccaaugcuaucccucccccaucccccgacc

SEQ ID NO: 292583 - RNA, 32 nt, Homo Sapiens
augggcuccugagacccuccccaggcugcuua

SEQ ID NO: 292584 - RNA, 32 nt, Homo Sapiens
uuuaggaauggcucccugguggucuccuaaca

SEQ ID NO: 292585 - RNA, 32 nt, Homo Sapiens
ccugcguguucccaucugaagagguagccccg

SEQ ID NO: 292586 - RNA, 32 nt, Homo Sapiens
aucacuuugucaaacaucuccagcacuaaugu

SEQ ID NO: 292587 - RNA, 32 nt, Homo Sapiens
gagagauucuucauuucugcuuucugcccugu

SEQ ID NO: 292588 - RNA, 28 nt, Homo Sapiens
cacuaucuuuugaacauuaugaaaauau

SEQ ID NO: 292589 - RNA, 32 nt, Homo Sapiens
ucacgccagcugugccaacuucuggaucaacu

SEQ ID NO: 292590 - RNA, 31 nt, Homo Sapiens
aauuuuguugaagcauuucaagaugagcuau

SEQ ID NO: 292591 - RNA, 32 nt, Homo Sapiens
aagcagcgaggagcuucagcuuccucagggca

SEQ ID NO: 292592 - RNA, 32 nt, Homo Sapiens
ggcggcgguagcucuugugucuguggacucug

SEQ ID NO: 292593 - RNA, 32 nt, Homo Sapiens
gccuaacacuaccccacccccaacuaggagga

SEQ ID NO: 292594 - RNA, 32 nt, Homo Sapiens
acuggccuucccuuccccagggcccccaaggg

SEQ ID NO: 292595 - RNA, 32 nt, Homo Sapiens
cgagagccgggucccgcacgccccuggggucc

SEQ ID NO: 292596 - RNA, 32 nt, Homo Sapiens
gacagcccugaacgugagcacgcugaaggcuu

SEQ ID NO: 292597 - RNA, 32 nt, Homo Sapiens
ggggagcgucugagugcagaucaugaggcucu

SEQ ID NO: 292598 - RNA, 32 nt, Homo Sapiens
caccuccugugagaucagcaguggcauuagau

SEQ ID NO: 292599 - RNA, 32 nt, Homo Sapiens
cagcucucaggauugucauuuuccucuuugcc

SEQ ID NO: 292600 - RNA, 32 nt, Homo Sapiens
ucagcugggauuggcuucaaucugcaagucgc

SEQ ID NO: 292601 - RNA, 32 nt, Homo Sapiens
cuaagccuccuggccugugaugggagggucug

SEQ ID NO: 292602 - RNA, 29 nt, Homo Sapiens
ucauaaaugcaaaaaaaaaaaaaaaaaaa

SEQ ID NO: 292603 - RNA, 32 nt, Homo Sapiens
gcucccaugauuauggaggcugagaagucccu

SEQ ID NO: 292604 - RNA, 32 nt, Homo Sapiens
agcggggcacugggcggaccgcggcggcagca

SEQ ID NO: 292605 - RNA, 32 nt, Homo Sapiens
guaaugugaacaugcuucagaguguaccuuuu

SEQ ID NO: 292606 - RNA, 30 nt, Homo Sapiens
gggacccuggacuggaggugccggacccgg

SEQ ID NO: 292607 - RNA, 32 nt, Homo Sapiens
ucugcagaugcuagugugaguguguccugaca

SEQ ID NO: 292608 - RNA, 32 nt, Homo Sapiens
cuccggcagggagaggugcaggggagucaccg

SEQ ID NO: 292609 - RNA, 32 nt, Homo Sapiens
ggauauuguaaauuaugcauuuguauuaaugg

SEQ ID NO: 292610 - RNA, 32 nt, Homo Sapiens
cuuuguauuuugugucaugacuucucaagaga

SEQ ID NO: 292611 - RNA, 32 nt, Homo Sapiens
ggauuugaggguagaggcaggggaagaucugu

SEQ ID NO: 292612 - RNA, 32 nt, Homo Sapiens
acucacuugaguugaagaauguaaacuccaaa

SEQ ID NO: 292613 - RNA, 32 nt, Homo Sapiens
ucuaaauauggacugcucaggaaacgagacuu

SEQ ID NO: 292614 - RNA, 32 nt, Homo Sapiens
cugcugcucccuccuuccucgcucccagcugc

SEQ ID NO: 292615 - RNA, 32 nt, Homo Sapiens
ucacucaccccuccccugguuucuguggggca

SEQ ID NO: 292616 - RNA, 32 nt, Homo Sapiens
gggagaggugacccgggcgcccugcuagggug

SEQ ID NO: 292617 - RNA, 32 nt, Homo Sapiens
cucccgcggcugccagcgugcacugggcgcuc

SEQ ID NO: 292618 - RNA, 32 nt, Homo Sapiens
acaguggggaauccaagggucacaguaugggg

SEQ ID NO: 292619 - RNA, 31 nt, Homo Sapiens
gagaaacucggggccaccuccacuccaugug

SEQ ID NO: 292620 - RNA, 32 nt, Homo Sapiens
auggaagcaaauuaauaauaaaugcuguuugu

SEQ ID NO: 292621 - RNA, 32 nt, Homo Sapiens
cacugcccgugugacccguuccagguccccug

SEQ ID NO: 292622 - RNA, 32 nt, Homo Sapiens
cuuugagaggcugaggccgguagaucacgagg

SEQ ID NO: 292623 - RNA, 26 nt, Homo Sapiens
uauggccccgaucuccucccucucgu

SEQ ID NO: 292624 - RNA, 32 nt, Homo Sapiens
ucuugacaucuaaaccccggcgugugcagugc

SEQ ID NO: 292625 - RNA, 32 nt, Homo Sapiens
uuuuuaaaaugguuaugugcauuauucauaaa

SEQ ID NO: 292626 - RNA, 32 nt, Homo Sapiens
cuucucuugugauuuacuguacugcucaacac

SEQ ID NO: 292627 - RNA, 30 nt, Homo Sapiens
gccuuaaaaaauuuuaaaaaaaaaaaaaaa

SEQ ID NO: 292628 - RNA, 32 nt, Homo Sapiens
gguggggaccccaugggccagcccuugcagga

SEQ ID NO: 292629 - RNA, 32 nt, Homo Sapiens
ccugagcaaugaucccaccuccacccccuccc

SEQ ID NO: 292630 - RNA, 32 nt, Homo Sapiens
auuucuucauuuccauggauagcucauaguug

SEQ ID NO: 292631 - RNA, 32 nt, Homo Sapiens
ucuagguccuccaaagauugaaagcuuaauaa

SEQ ID NO: 292632 - RNA, 32 nt, Homo Sapiens
ggcucacgccuguaaucccagcccuaugggag

SEQ ID NO: 292633 - RNA, 32 nt, Homo Sapiens
gaucacuugagcccaggcguucgagacuggca

SEQ ID NO: 292634 - RNA, 32 nt, Homo Sapiens
cuuaagggugggggagauuauaaagaaccuuc

SEQ ID NO: 292635 - RNA, 32 nt, Homo Sapiens
uuuuguggcacaggauuauguaauauggaacu

SEQ ID NO: 292636 - RNA, 32 nt, Homo Sapiens
agaacaagcagaaagaggcucucugaaaugaa

SEQ ID NO: 292637 - RNA, 32 nt, Homo Sapiens
uuuuagcuuguguaaacuuauuuuaaaaggaa

SEQ ID NO: 292638 - RNA, 32 nt, Homo Sapiens
cauguuugaaaagguuuagaaaugugguugcu

SEQ ID NO: 292639 - RNA, 32 nt, Homo Sapiens
uugagagaggcggcggccgccgcgcccgggaa

SEQ ID NO: 292640 - RNA, 32 nt, Homo Sapiens
uacccccagcccggcccggaccugaggcgugg

SEQ ID NO: 292641 - RNA, 32 nt, Homo Sapiens
ucaccuuagggagcuuccagugauugauuuua

SEQ ID NO: 292642 - RNA, 32 nt, Homo Sapiens
auucuguacgugcauugugcucucucaugguc

SEQ ID NO: 292643 - RNA, 29 nt, Homo Sapiens
agcaauggcggcgggcggcggcgguagcu

SEQ ID NO: 292644 - RNA, 32 nt, Homo Sapiens
aauacugcugugucaguuuuguaaaaaaugua

SEQ ID NO: 292645 - RNA, 32 nt, Homo Sapiens
caagagaaaugacaauagguguugacaguuga

SEQ ID NO: 292646 - RNA, 32 nt, Homo Sapiens
caaccucagccagcaccagcgcauccacagcg

SEQ ID NO: 292647 - RNA, 32 nt, Homo Sapiens
uaagaggaaaauuauguuaugaagugcaggaa

SEQ ID NO: 292648 - RNA, 32 nt, Homo Sapiens
cccgcguccagaucuucagugucuauuggauu

SEQ ID NO: 292649 - RNA, 27 nt, Homo Sapiens
agggauggcucaaugacauagcuuugg

SEQ ID NO: 292650 - RNA, 32 nt, Homo Sapiens
gagagcugucccugagaccccggagagaagca

SEQ ID NO: 292651 - RNA, 32 nt, Homo Sapiens
gaaaaaguaaaaccucuguuuggagguaauau

SEQ ID NO: 292652 - RNA, 32 nt, Homo Sapiens
ugaagacugugaaaauguuuuucaguauuguc

SEQ ID NO: 292653 - RNA, 32 nt, Homo Sapiens
cccgcaccauggccggccccagccucgcuugc

SEQ ID NO: 292654 - RNA, 32 nt, Homo Sapiens
agcagggcugcugcugcacaccggggccagug

SEQ ID NO: 292655 - RNA, 32 nt, Homo Sapiens
cugaaagccagguacaacuacugcauuuauau

SEQ ID NO: 292656 - RNA, 32 nt, Homo Sapiens
uguuugucuguggggaaagaaaagcagaauac

SEQ ID NO: 292657 - RNA, 32 nt, Homo Sapiens
augaauaaaagcuuguucugugugacccagca

SEQ ID NO: 292658 - RNA, 32 nt, Homo Sapiens
agcgcagcagccccggcccuucccccguuuug

SEQ ID NO: 292659 - RNA, 31 nt, Homo Sapiens
ucuuggaacauauaaauuuuuugucaucuuc

SEQ ID NO: 292660 - RNA, 32 nt, Homo Sapiens
acccccaucucuacaaaaauaaagaaaauuua

SEQ ID NO: 292661 - RNA, 32 nt, Homo Sapiens
agaacacaauguuuaaucaaugggcugaacaa

SEQ ID NO: 292662 - RNA, 32 nt, Homo Sapiens
ccccagccuuuccauccugggaucauuugcag

SEQ ID NO: 292663 - RNA, 32 nt, Homo Sapiens
auuaaaagaagaacuagaccaauauaaagauu

SEQ ID NO: 292664 - RNA, 32 nt, Homo Sapiens
ugcgcagaagacuggaggaggcggagcgccac

SEQ ID NO: 292665 - RNA, 32 nt, Homo Sapiens
caucuguauaggaggcaagagaucugaguccu

SEQ ID NO: 292666 - RNA, 32 nt, Homo Sapiens
uggugucccguccaaugauguagccugaaagc

SEQ ID NO: 292667 - RNA, 32 nt, Homo Sapiens
aacuugugucucagugcaguucuugcucaccu

SEQ ID NO: 292668 - RNA, 32 nt, Homo Sapiens
cucaucucucccacucugcaccaucuaucacu

SEQ ID NO: 292669 - RNA, 32 nt, Homo Sapiens
aaagccuaaaauugcacuauuuucaccucauu

SEQ ID NO: 292670 - RNA, 32 nt, Homo Sapiens
ugguucuuuaaagauuuggagaagauauguaa

SEQ ID NO: 292671 - RNA, 32 nt, Homo Sapiens
auuaacuggccaacgaguuuuaggagugccaa

SEQ ID NO: 292672 - RNA, 32 nt, Homo Sapiens
uucaaagccuucccaguccccagcaccugccu

SEQ ID NO: 292673 - RNA, 32 nt, Homo Sapiens
cacugcauugccauccuccccaaagccguugg

SEQ ID NO: 292674 - RNA, 32 nt, Homo Sapiens
aaaaugaaaaucaacuucauguuuugaagaua

SEQ ID NO: 292675 - RNA, 32 nt, Homo Sapiens
uacagcacacuggcgcagaagauggaaaaccg

SEQ ID NO: 292676 - RNA, 32 nt, Homo Sapiens
uacuaaaaauuauuuuuguaaugauugagucu

SEQ ID NO: 292677 - RNA, 32 nt, Homo Sapiens
acaguagagagaugcaguugugaugauuucaa

SEQ ID NO: 292678 - RNA, 32 nt, Homo Sapiens
ugggcuuugcacuuacuaguugugucaccgcg

SEQ ID NO: 292679 - RNA, 32 nt, Homo Sapiens
cucucgggacccggccggcgacccguagcucg

SEQ ID NO: 292680 - RNA, 32 nt, Homo Sapiens
cugucccuucggcaccacggaccuuaaagccu

SEQ ID NO: 292681 - RNA, 32 nt, Homo Sapiens
cauguaagggaagcuggaauuaagggagcuga

SEQ ID NO: 292682 - RNA, 32 nt, Homo Sapiens
gaucguggcucaaaccugaccagacagcagag

SEQ ID NO: 292683 - RNA, 32 nt, Homo Sapiens
ggcccagcuccaagcccuccucugguugccug

SEQ ID NO: 292684 - RNA, 31 nt, Homo Sapiens
cccaccauggcccagcagcaaacagguagca

SEQ ID NO: 292685 - RNA, 32 nt, Homo Sapiens
uuuaguccagccucucgcucagauggggcaac

SEQ ID NO: 292686 - RNA, 32 nt, Homo Sapiens
uuauucucuaagguuauaucauauguaauuua

SEQ ID NO: 292687 - RNA, 32 nt, Homo Sapiens
caucucccugucauccuuuuucacccauaaaa

SEQ ID NO: 292688 - RNA, 32 nt, Homo Sapiens
uaucccagcuggaagcauggagaugcaggaag

SEQ ID NO: 292689 - RNA, 32 nt, Homo Sapiens
ucaucauauggggauugaaccacugaguuaua

SEQ ID NO: 292690 - RNA, 32 nt, Homo Sapiens
ggaauggauccgagucccaccuaaagaagcgg

SEQ ID NO: 292691 - RNA, 32 nt, Homo Sapiens
aagaguuuauacaggccuuaaauaucagacuu

SEQ ID NO: 292692 - RNA, 32 nt, Homo Sapiens
cgagcgggaugaugaugugccugcagauaugg

SEQ ID NO: 292693 - RNA, 32 nt, Homo Sapiens
ccgugcuggacucaggacugaagugcuguaaa

SEQ ID NO: 292694 - RNA, 32 nt, Homo Sapiens
gguaggggucugucccuggucuuccugguagg

SEQ ID NO: 292695 - RNA, 32 nt, Homo Sapiens
gagccucggcccggguuggccgcucggccucu

SEQ ID NO: 292696 - RNA, 31 nt, Homo Sapiens
cgauagcggcacuagcagcagcgggagugcc

SEQ ID NO: 292697 - RNA, 30 nt, Homo Sapiens
ggcugggucugugcugcuggccgacauguc

SEQ ID NO: 292698 - RNA, 32 nt, Homo Sapiens
gaaguaaacccagcugacuuguuuccugggac

SEQ ID NO: 292699 - RNA, 32 nt, Homo Sapiens
ccccacacugccuucaccaucuacaccaguga

SEQ ID NO: 292700 - RNA, 32 nt, Homo Sapiens
ucugucuccgcgggagucccgugcaagccauc

SEQ ID NO: 292701 - RNA, 32 nt, Homo Sapiens
agauucacagaaaguaaaucaagaauccaucc

SEQ ID NO: 292702 - RNA, 32 nt, Homo Sapiens
ucaggaaaguucucuugugcaacagcaaguag

SEQ ID NO: 292703 - RNA, 32 nt, Homo Sapiens
auauguuuuauauguagauauagaagagugca

SEQ ID NO: 292704 - RNA, 32 nt, Homo Sapiens
uugucacccgcggucgcuucgggcggggaucg

SEQ ID NO: 292705 - RNA, 32 nt, Homo Sapiens
ucucuuaaagggaccacauuuuuuaccuaaaa

SEQ ID NO: 292706 - RNA, 32 nt, Homo Sapiens
gcuggggccugggucggggacacgcggagguc

SEQ ID NO: 292707 - RNA, 32 nt, Homo Sapiens
auaagcuaauaccacuguagggauuuuguuuu

SEQ ID NO: 292708 - RNA, 32 nt, Homo Sapiens
gccaccgcgggcccugccguucccuccgccgc

SEQ ID NO: 292709 - RNA, 32 nt, Homo Sapiens
acagccugggcugcccuggcccgggauugaug

SEQ ID NO: 292710 - RNA, 32 nt, Homo Sapiens
acccauucaagcggcaggacgcacuugucuua

SEQ ID NO: 292711 - RNA, 30 nt, Homo Sapiens
gcggcauguacaaagagaccgucuacuccg

SEQ ID NO: 292712 - RNA, 32 nt, Homo Sapiens
agaggggaugagaggagaagucuuggcuucgc

SEQ ID NO: 292713 - RNA, 32 nt, Homo Sapiens
ggucccuccuuccuccuuccaagucugugccc

SEQ ID NO: 292714 - RNA, 32 nt, Homo Sapiens
aggcugcccgaggagaaggcggcggccgcggc

SEQ ID NO: 292715 - RNA, 32 nt, Homo Sapiens
cucauuccacccccauacacaugcauaagccc

SEQ ID NO: 292716 - RNA, 32 nt, Homo Sapiens
aucaucaucucuugcggacuucucugccuggu

SEQ ID NO: 292717 - RNA, 32 nt, Homo Sapiens
gugauugagugcccuccuggcuccugggcugg

SEQ ID NO: 292718 - RNA, 32 nt, Homo Sapiens
gacucugaaucauggcgaccacggccacgaug

SEQ ID NO: 292719 - RNA, 32 nt, Homo Sapiens
ggauggaugguggaagguggggacguuggugg

SEQ ID NO: 292720 - RNA, 32 nt, Homo Sapiens
uugauuuguaaaacaguaaauaauuguaucuu

SEQ ID NO: 292721 - RNA, 32 nt, Homo Sapiens
cgaagagggucagggaggcucucuaaagucau

SEQ ID NO: 292722 - RNA, 32 nt, Homo Sapiens
ccuuuguucagcaaagaaaccuuauacaaacu

SEQ ID NO: 292723 - RNA, 32 nt, Homo Sapiens
auucuuugccauagcuuacucuagucaaauaa

SEQ ID NO: 292724 - RNA, 32 nt, Homo Sapiens
gggagggacauacacggagcccgccccacacc

SEQ ID NO: 292725 - RNA, 32 nt, Homo Sapiens
ggagcccagggaacaccgccccugccugugcu

SEQ ID NO: 292726 - RNA, 32 nt, Homo Sapiens
cugcucgggcgcgggcggcggcgcggccauga

SEQ ID NO: 292727 - RNA, 32 nt, Homo Sapiens
uuacuugguucuuuuucuuuguggucuucacc

SEQ ID NO: 292728 - RNA, 32 nt, Homo Sapiens
ucugaccacccccuccuccccaucccacccuu

SEQ ID NO: 292729 - RNA, 32 nt, Homo Sapiens
gcaacaauuccaaaugcugaggaugugaguua

SEQ ID NO: 292730 - RNA, 31 nt, Homo Sapiens
guguccaggcuaguggacugaguuaacuccc

SEQ ID NO: 292731 - RNA, 31 nt, Homo Sapiens
aaguacgagccccacagagcaggaagccgau

SEQ ID NO: 292732 - RNA, 32 nt, Homo Sapiens
agucugcaacuuuaagcagcucuugcuaauca

SEQ ID NO: 292733 - RNA, 32 nt, Homo Sapiens
uuucucccauucuguagguugucuuuucacau

SEQ ID NO: 292734 - RNA, 32 nt, Homo Sapiens
agagcuuuggguuccaggaaaagcgcaggagg

SEQ ID NO: 292735 - RNA, 32 nt, Homo Sapiens
gaccgccucccgcucccucacccgccgcgggg

SEQ ID NO: 292736 - RNA, 32 nt, Homo Sapiens
ucugggucaguuccuuauucaagucugcagcc

SEQ ID NO: 292737 - RNA, 32 nt, Homo Sapiens
cagcugcugccagcccgcgggcacugaagucc

SEQ ID NO: 292738 - RNA, 29 nt, Homo Sapiens
agccaugugggucuuguuucugcucagcg

SEQ ID NO: 292739 - RNA, 32 nt, Homo Sapiens
ccaguaacuuauuuuaaauaugccuaguaaca

SEQ ID NO: 292740 - RNA, 32 nt, Homo Sapiens
cgcggcccgaacucaugcagcuccgagcgagc

SEQ ID NO: 292741 - RNA, 32 nt, Homo Sapiens
ggggcuugcuguggccucccuccagcuagugg

SEQ ID NO: 292742 - RNA, 32 nt, Homo Sapiens
agaacaaaacaaaauaaaaacagagcccuaga

SEQ ID NO: 292743 - RNA, 32 nt, Homo Sapiens
cagcuuccuaggacuuuuuuuuugguuaguag

SEQ ID NO: 292744 - RNA, 32 nt, Homo Sapiens
acgaccccugggggccugggccccaggaccag

SEQ ID NO: 292745 - RNA, 32 nt, Homo Sapiens
cgugucccugucauauuuuccacucuccacga

SEQ ID NO: 292746 - RNA, 32 nt, Homo Sapiens
auaucuugcccuauuuuaauucugcuauagaa

SEQ ID NO: 292747 - RNA, 31 nt, Homo Sapiens
gauuuuuaauaaauccggaauuguauuuauu

SEQ ID NO: 292748 - RNA, 32 nt, Homo Sapiens
uguaccuguauccuauggauauuggcuucccc

SEQ ID NO: 292749 - RNA, 32 nt, Homo Sapiens
acugagagggagaucaagugaaagggugcaag

SEQ ID NO: 292750 - RNA, 32 nt, Homo Sapiens
ugcucucccuccccuuucccccacgccccgac

SEQ ID NO: 292751 - RNA, 32 nt, Homo Sapiens
cugccaggccauccggcccccagacgccccuc

SEQ ID NO: 292752 - RNA, 32 nt, Homo Sapiens
gacucugggccuguagcugccaagcagguggc

SEQ ID NO: 292753 - RNA, 32 nt, Homo Sapiens
acuugcaaucccagcuauuugggaggcugagg

SEQ ID NO: 292754 - RNA, 32 nt, Homo Sapiens
gucaaaggccccagggcagucuggaggcuuag

SEQ ID NO: 292755 - RNA, 32 nt, Homo Sapiens
aagaaagucaaccaucauuacaaaaucaaugg

SEQ ID NO: 292756 - RNA, 32 nt, Homo Sapiens
gagccagagccggcaccccagcuccuuccucc

SEQ ID NO: 292757 - RNA, 32 nt, Homo Sapiens
ugagauccgagcccugugcauggacuugguga

SEQ ID NO: 292758 - RNA, 32 nt, Homo Sapiens
ccuggauuuucccccuugaccccaucagucua

SEQ ID NO: 292759 - RNA, 32 nt, Homo Sapiens
uaugugaaggcacauauguucuuuuagguucc

SEQ ID NO: 292760 - RNA, 32 nt, Homo Sapiens
guggaguaguuugcccaaccucacgcagcucu

SEQ ID NO: 292761 - RNA, 29 nt, Homo Sapiens
acauuauaaaguucagauguuucaucaau

SEQ ID NO: 292762 - RNA, 32 nt, Homo Sapiens
cugguuugggaaauaccaaagaggcuuugauu

SEQ ID NO: 292763 - RNA, 32 nt, Homo Sapiens
cuggcucccucccccagcgcucuccaguuucu

SEQ ID NO: 292764 - RNA, 32 nt, Homo Sapiens
uguacugcugaaaaugcaggcuuuuguaacag

SEQ ID NO: 292765 - RNA, 32 nt, Homo Sapiens
caccugagccccccggcuggcuccagauccca

SEQ ID NO: 292766 - RNA, 32 nt, Homo Sapiens
ccccuccucguccuguccagccgagggaccgc

SEQ ID NO: 292767 - RNA, 32 nt, Homo Sapiens
cacaucccuugcucgccauauuguaggugaca

SEQ ID NO: 292768 - RNA, 32 nt, Homo Sapiens
ggucuacuuaggacaauggagacuuuuucagu

SEQ ID NO: 292769 - RNA, 32 nt, Homo Sapiens
ggcccacggacuucugagagccaggaauccug

SEQ ID NO: 292770 - RNA, 32 nt, Homo Sapiens
gcggcgcuucggcuccucccgagccgccugcu

SEQ ID NO: 292771 - RNA, 32 nt, Homo Sapiens
auauuagaugagcugcagaaccacccccaagc

SEQ ID NO: 292772 - RNA, 30 nt, Homo Sapiens
gugguguggggcggguggaggcggcuggcg

SEQ ID NO: 292773 - RNA, 32 nt, Homo Sapiens
cccagcggggagagggggcugcugagaguaaa

SEQ ID NO: 292774 - RNA, 32 nt, Homo Sapiens
aguucauaaaaguccuauuaauccccauauuc

SEQ ID NO: 292775 - RNA, 32 nt, Homo Sapiens
aaguuucugaagacuuuguacauacagaagua

SEQ ID NO: 292776 - RNA, 32 nt, Homo Sapiens
gggaggggccagcagugagcugcaggcuuaga

SEQ ID NO: 292777 - RNA, 32 nt, Homo Sapiens
uuccuuuuuuauuuuuauuuuuuaucagaauc

SEQ ID NO: 292778 - RNA, 32 nt, Homo Sapiens
auuauuagaauccaauuaaugauucaauuaac

SEQ ID NO: 292779 - RNA, 32 nt, Homo Sapiens
uucagaaccaaaggaauagagaagggcuuuga

SEQ ID NO: 292780 - RNA, 32 nt, Homo Sapiens
ugggcggucgacgugagccugaucccagcuga

SEQ ID NO: 292781 - RNA, 32 nt, Homo Sapiens
augaugauaaccugcuauuauuaaacuuuuuc

SEQ ID NO: 292782 - RNA, 32 nt, Homo Sapiens
augagcacuaacuuggaguuaagauuugagag

SEQ ID NO: 292783 - RNA, 30 nt, Homo Sapiens
gggagaggaggcggcgagggucccggggcg

SEQ ID NO: 292784 - RNA, 32 nt, Homo Sapiens
agaaguguugcaaaugcuguacugacuuugua

SEQ ID NO: 292785 - RNA, 32 nt, Homo Sapiens
uuucccacauccguccucccccuucccaggcc

SEQ ID NO: 292786 - RNA, 32 nt, Homo Sapiens
uaaauauuuaguuucuuuuucuucauauuuau

SEQ ID NO: 292787 - RNA, 32 nt, Homo Sapiens
caggagggggaauugcacugaagauuuguccc

SEQ ID NO: 292788 - RNA, 32 nt, Homo Sapiens
uggccucugagccauggugucgagugaagagu

SEQ ID NO: 292789 - RNA, 32 nt, Homo Sapiens
ugguggaucugugcaaagaacccggcgagagu

SEQ ID NO: 292790 - RNA, 32 nt, Homo Sapiens
auugguaaaaacagcagcucauggaauuuuga

SEQ ID NO: 292791 - RNA, 32 nt, Homo Sapiens
ccggcgcuuugcccggccucuccgcgcggaga

SEQ ID NO: 292792 - RNA, 32 nt, Homo Sapiens
aauccaaaaugaaguuucaacaaggaggauaa

SEQ ID NO: 292793 - RNA, 32 nt, Homo Sapiens
cagggaauagcacugcuaaucuuacuuuauga

SEQ ID NO: 292794 - RNA, 32 nt, Homo Sapiens
uucucccaaacacaacuacaucauugccaauc

SEQ ID NO: 292795 - RNA, 32 nt, Homo Sapiens
ucuccuuacagaguuugagcggugcugaacug

SEQ ID NO: 292796 - RNA, 32 nt, Homo Sapiens
gccagugggcuuugaguuuaagcuccaccaac

SEQ ID NO: 292797 - RNA, 32 nt, Homo Sapiens
cuccugggccccacagaguccuugugcucagu

SEQ ID NO: 292798 - RNA, 32 nt, Homo Sapiens
gauuccaacagccagcucagugcugcagaguc

SEQ ID NO: 292799 - RNA, 32 nt, Homo Sapiens
caggccaaugaccugcguccgcgcuugcgcuc

SEQ ID NO: 292800 - RNA, 32 nt, Homo Sapiens
auuaaagauaaaauuacauuucagucuuuacu

SEQ ID NO: 292801 - RNA, 32 nt, Homo Sapiens
cuagguguggcaguccauguggcugccaggcc

SEQ ID NO: 292802 - RNA, 32 nt, Homo Sapiens
uaccaaaaacaauuuugagaaaguauucuguu

SEQ ID NO: 292803 - RNA, 32 nt, Homo Sapiens
cuccucuaggccgccggccgcgaagcgcugag

SEQ ID NO: 292804 - RNA, 32 nt, Homo Sapiens
gcaaggggcuggggcccucggcguggggccau

SEQ ID NO: 292805 - RNA, 32 nt, Homo Sapiens
ggaggugcggcagcugcugcucaggugccaug

SEQ ID NO: 292806 - RNA, 32 nt, Homo Sapiens
accagagcucacugccuauuugauggcuguaa

SEQ ID NO: 292807 - RNA, 32 nt, Homo Sapiens
cccauaaggagauaaauguuucuuuaugcacu

SEQ ID NO: 292808 - RNA, 32 nt, Homo Sapiens
aaaaagggaaugggggaagagaugcaugccuu

SEQ ID NO: 292809 - RNA, 32 nt, Homo Sapiens
uuuugaaacagcugcauccuucugggaguggc

SEQ ID NO: 292810 - RNA, 32 nt, Homo Sapiens
uuaaagugaauucauuauuaaaaacuauucau

SEQ ID NO: 292811 - RNA, 32 nt, Homo Sapiens
aaacaucguguaaaaugucuuguuaaugauuu

SEQ ID NO: 292812 - RNA, 32 nt, Homo Sapiens
cuucaacugggauaaaaaugucagugaauuuu

SEQ ID NO: 292813 - RNA, 31 nt, Homo Sapiens
aggucccugccgguccaccaggcggaggugg

SEQ ID NO: 292814 - RNA, 32 nt, Homo Sapiens
cugcccagcucuuccagcugauggcuccacau

SEQ ID NO: 292815 - RNA, 32 nt, Homo Sapiens
aauuuauuauugaaauuguacauauuugugga

SEQ ID NO: 292816 - RNA, 32 nt, Homo Sapiens
cgccgccucucuuuagucgccgccauggcgac

SEQ ID NO: 292817 - RNA, 32 nt, Homo Sapiens
gacauugggaaccugucaagaagugcuuuauc

SEQ ID NO: 292818 - RNA, 32 nt, Homo Sapiens
ugacucccggagagaagcauguugacuuuucc

SEQ ID NO: 292819 - RNA, 32 nt, Homo Sapiens
guuuccugcuccaguguaucucaaaagaccgg

SEQ ID NO: 292820 - RNA, 32 nt, Homo Sapiens
cuucucaaauguuuuccauaauacuguuugcg

SEQ ID NO: 292821 - RNA, 32 nt, Homo Sapiens
gccugccgcgcgcggugaguccgcgcagaccu

SEQ ID NO: 292822 - RNA, 32 nt, Homo Sapiens
uuucaucaugcccacaaucuauauuauuggcu

SEQ ID NO: 292823 - RNA, 32 nt, Homo Sapiens
cugagaguggaaugucaccaucgcccaggugg

SEQ ID NO: 292824 - RNA, 32 nt, Homo Sapiens
cucacucuuucccccaaaucuuccucuggagc

SEQ ID NO: 292825 - RNA, 32 nt, Homo Sapiens
aaaguaaaacaaaacagaaaauagcaacuguc

SEQ ID NO: 292826 - RNA, 30 nt, Homo Sapiens
cccucgaauauccccagcaaccacucucag

SEQ ID NO: 292827 - RNA, 32 nt, Homo Sapiens
gucccugucucuggugcccacagugagcuccu

SEQ ID NO: 292828 - RNA, 32 nt, Homo Sapiens
gucccgcggcagcuucuguugcucugggaccu

SEQ ID NO: 292829 - RNA, 32 nt, Homo Sapiens
acucccgggccggcccaagccggagcguggcg

SEQ ID NO: 292830 - RNA, 30 nt, Homo Sapiens
ucaggacuggacuguucccucuggacuaua

SEQ ID NO: 292831 - RNA, 32 nt, Homo Sapiens
aaugccaaagcaacagaagcagcaccagaaau

SEQ ID NO: 292832 - RNA, 32 nt, Homo Sapiens
gcuauaaaaugagaaagaauguucuaucaaau

SEQ ID NO: 292833 - RNA, 32 nt, Homo Sapiens
uuauauuauuuugaauccagaaauaaugaaau

SEQ ID NO: 292834 - RNA, 32 nt, Homo Sapiens
ccaaaagucugcuucacugagaugcuaccuug

SEQ ID NO: 292835 - RNA, 30 nt, Homo Sapiens
cagauugucugugacacucaagccccucuc

SEQ ID NO: 292836 - RNA, 32 nt, Homo Sapiens
aagagugcagguuguuauuaugcaaagccaca

SEQ ID NO: 292837 - RNA, 32 nt, Homo Sapiens
uuccagccagguggaacggggaggggugccac

SEQ ID NO: 292838 - RNA, 32 nt, Homo Sapiens
cgggccccggccagccccuuccgcgaggccua

SEQ ID NO: 292839 - RNA, 32 nt, Homo Sapiens
cacgugucuucuccagaaugugucugucuuug

SEQ ID NO: 292840 - RNA, 32 nt, Homo Sapiens
ucccagcuugaagaccccggcccuuggaacgc

SEQ ID NO: 292841 - RNA, 32 nt, Homo Sapiens
uuggcuagcuggcuuuuaauucuuaauuaaaa

SEQ ID NO: 292842 - RNA, 32 nt, Homo Sapiens
auguaagauauuuuaaauauuguacacuuugc

SEQ ID NO: 292843 - RNA, 32 nt, Homo Sapiens
aguccuuccuucccuuccccccaccuuuacaa

SEQ ID NO: 292844 - RNA, 32 nt, Homo Sapiens
gucccgcccucccgccagaggccuggacccaa

SEQ ID NO: 292845 - RNA, 32 nt, Homo Sapiens
aggggcgaaggggauggguggggggugccgcc

SEQ ID NO: 292846 - RNA, 32 nt, Homo Sapiens
uaaugagaucagccccuuaacggaguacucca

SEQ ID NO: 292847 - RNA, 32 nt, Homo Sapiens
aaagaagauggagaggcacauggucaggggac

SEQ ID NO: 292848 - RNA, 32 nt, Homo Sapiens
caucaccaguggaguuuuuuuauuuuuuauuu

SEQ ID NO: 292849 - RNA, 32 nt, Homo Sapiens
aggaauuaaugaaaguuuuuaugaaaauuucu

SEQ ID NO: 292850 - RNA, 32 nt, Homo Sapiens
uggaacggaauggaagugacucugccccuuau

SEQ ID NO: 292851 - RNA, 32 nt, Homo Sapiens
gagcaccaucacugccuauuucuaggggcuau

SEQ ID NO: 292852 - RNA, 32 nt, Homo Sapiens
gccuuggaugagaagugucuuaaauuuucuuc

SEQ ID NO: 292853 - RNA, 32 nt, Homo Sapiens
cccgcccagagcucaguagccagccugggucc

SEQ ID NO: 292854 - RNA, 32 nt, Homo Sapiens
cccugacgcccauuuccccccuuagagcagcg

SEQ ID NO: 292855 - RNA, 32 nt, Homo Sapiens
ugagucuaucaaucaacuuaugcagaacuggc

SEQ ID NO: 292856 - RNA, 32 nt, Homo Sapiens
cucgccccgcggagcccuccuaccccggcccg

SEQ ID NO: 292857 - RNA, 32 nt, Homo Sapiens
caacccaccuucuggaggcaacagauguucau

SEQ ID NO: 292858 - RNA, 32 nt, Homo Sapiens
ucucuccaucucugcgcugcugccggcugcgc

SEQ ID NO: 292859 - RNA, 32 nt, Homo Sapiens
aagaaagugaaaaagaagaugccuaauguggu

SEQ ID NO: 292860 - RNA, 32 nt, Homo Sapiens
cacugcacuccagcgugggcaacggagagacu

SEQ ID NO: 292861 - RNA, 32 nt, Homo Sapiens
guuccuacaugaagguuaaugucaguggugaa

SEQ ID NO: 292862 - RNA, 32 nt, Homo Sapiens
aaaauguauagaaaaaucaugucugugacuuc

SEQ ID NO: 292863 - RNA, 32 nt, Homo Sapiens
ccuaccuaaugcuauucccccauccuaguucu

SEQ ID NO: 292864 - RNA, 32 nt, Homo Sapiens
gcguccuugugacacuggccugucugaacuca

SEQ ID NO: 292865 - RNA, 32 nt, Homo Sapiens
ccgugguugccauggcggcgguugucgcggcg

SEQ ID NO: 292866 - RNA, 32 nt, Homo Sapiens
agaggaggaagcugcgccgcagcccgagccgc

SEQ ID NO: 292867 - RNA, 32 nt, Homo Sapiens
gggaggcccggcugcuggccaggcuccagcac

SEQ ID NO: 292868 - RNA, 30 nt, Homo Sapiens
uuucuccugagaacuggggaaaccgaccua

SEQ ID NO: 292869 - RNA, 32 nt, Homo Sapiens
ccuggcaaaaagaucaaauggggcugggacuu

SEQ ID NO: 292870 - RNA, 28 nt, Homo Sapiens
gccaugucggcgccgccggcccugcaga

SEQ ID NO: 292871 - RNA, 32 nt, Homo Sapiens
cucagaugcagggcgcugugcgggacgaagcc

SEQ ID NO: 292872 - RNA, 32 nt, Homo Sapiens
cuguaacccagcugcagcuucagucuuugcau

SEQ ID NO: 292873 - RNA, 32 nt, Homo Sapiens
acuagcugggcaugguggugaacgcuuguagu

SEQ ID NO: 292874 - RNA, 32 nt, Homo Sapiens
cacugguuggcguucuccuuaauguauuuagu

SEQ ID NO: 292875 - RNA, 32 nt, Homo Sapiens
acaagagcuacagcacgagaagccaguugggg

SEQ ID NO: 292876 - RNA, 32 nt, Homo Sapiens
guaaucucuuaauaaacugguucuucaaaaau

SEQ ID NO: 292877 - RNA, 32 nt, Homo Sapiens
guaaaucuuugugaacauucuguacugguucc

SEQ ID NO: 292878 - RNA, 32 nt, Homo Sapiens
guugacucacacggcuuuugcugaugacacgg

SEQ ID NO: 292879 - RNA, 32 nt, Homo Sapiens
cagccacuaaguaaauucaugcacuuuuacua

SEQ ID NO: 292880 - RNA, 32 nt, Homo Sapiens
uggcaaaaguguuagaauuugcuuuugugcca

SEQ ID NO: 292881 - RNA, 32 nt, Homo Sapiens
caggcaagcagcugcgcaaggagucccagaaa

SEQ ID NO: 292882 - RNA, 32 nt, Homo Sapiens
ggggcgucgcugcuggccgccgcgucccccga

SEQ ID NO: 292883 - RNA, 32 nt, Homo Sapiens
augucucuagaaugcuguugccacuuacgggg

SEQ ID NO: 292884 - RNA, 32 nt, Homo Sapiens
ucugcuuuacgacaggucacaaacaugucaga

SEQ ID NO: 292885 - RNA, 32 nt, Homo Sapiens
ucuauguagaaagugcacugugcugccaucgc

SEQ ID NO: 292886 - RNA, 32 nt, Homo Sapiens
aacccaucccccacccagcucccggccguccu

SEQ ID NO: 292887 - RNA, 32 nt, Homo Sapiens
uguguaugggagaggaauggaggaugccagga

SEQ ID NO: 292888 - RNA, 32 nt, Homo Sapiens
ugcagcgucccggcguccucuccgggcccagc

SEQ ID NO: 292889 - RNA, 32 nt, Homo Sapiens
acauggcugcuaauucaucagcuuaucauuga

SEQ ID NO: 292890 - RNA, 32 nt, Homo Sapiens
gagguugcagugagccgagaucgcaccagugc

SEQ ID NO: 292891 - RNA, 32 nt, Homo Sapiens
ucccuguucccucucugucuaggugucauggu

SEQ ID NO: 292892 - RNA, 32 nt, Homo Sapiens
agagacucuuuuaaacuuucugaagugcugau

SEQ ID NO: 292893 - RNA, 32 nt, Homo Sapiens
uugucugugugauuuucauacagguuauuuuu

SEQ ID NO: 292894 - RNA, 32 nt, Homo Sapiens
ccuguccuuuuguaagaauauuuauuuuuaua

SEQ ID NO: 292895 - RNA, 32 nt, Homo Sapiens
cguggacuagagaaacuuggccugcugugcag

SEQ ID NO: 292896 - RNA, 32 nt, Homo Sapiens
cugaaagacagagauaaaaauccauucucuga

SEQ ID NO: 292897 - RNA, 32 nt, Homo Sapiens
gagagaaggacuguuaugaaaaacagaagcac

SEQ ID NO: 292898 - RNA, 32 nt, Homo Sapiens
ggugaugggggaggggcaaggcuggucaggga

SEQ ID NO: 292899 - RNA, 29 nt, Homo Sapiens
ggccauggccaacucaggccuccagcucc

SEQ ID NO: 292900 - RNA, 32 nt, Homo Sapiens
acuugaacagagcuccaugggagcugguuagu

SEQ ID NO: 292901 - RNA, 32 nt, Homo Sapiens
gcuggcuugaguuucucaaaagccaucggaag

SEQ ID NO: 292902 - RNA, 32 nt, Homo Sapiens
auggaaaacaacacccaacaacaggaagaaau

SEQ ID NO: 292903 - RNA, 32 nt, Homo Sapiens
uuucucccuaaaacuauguucaucugccucuc

SEQ ID NO: 292904 - RNA, 32 nt, Homo Sapiens
caggucuuagagcauuauuccaaacucuagcu

SEQ ID NO: 292905 - RNA, 32 nt, Homo Sapiens
accuggggcuauuuuuuuuucuuaagguauga

SEQ ID NO: 292906 - RNA, 32 nt, Homo Sapiens
cuugcuugggucuuggaucaaacucuacuggg

SEQ ID NO: 292907 - RNA, 32 nt, Homo Sapiens
auuucagauuucuggaggagaaacuaacuuga

SEQ ID NO: 292908 - RNA, 32 nt, Homo Sapiens
guaguuuuuacaccccaccuacuacucucagu

SEQ ID NO: 292909 - RNA, 32 nt, Homo Sapiens
gucgucaguaugugauguuuauaauaccaaug

SEQ ID NO: 292910 - RNA, 32 nt, Homo Sapiens
acagucagagcaauuuuauuauuuucaucagu

SEQ ID NO: 292911 - RNA, 32 nt, Homo Sapiens
uuaucuuggugagaagacaaauuguaaaguag

SEQ ID NO: 292912 - RNA, 32 nt, Homo Sapiens
uauuccucuaaagguucaaauuaagguacuga

SEQ ID NO: 292913 - RNA, 32 nt, Homo Sapiens
gagccaggccucggggccucggagcaaccacc

SEQ ID NO: 292914 - RNA, 32 nt, Homo Sapiens
gaaauugaguauuuucugacauaagaauauau

SEQ ID NO: 292915 - RNA, 32 nt, Homo Sapiens
ccgcaccccccgccagccuacgccccaccgua

SEQ ID NO: 292916 - RNA, 32 nt, Homo Sapiens
gcauuuuggcgcucgaaguugaucuccccagc

SEQ ID NO: 292917 - RNA, 32 nt, Homo Sapiens
uuguaugaguggcggcauguugguagugccgg

SEQ ID NO: 292918 - RNA, 32 nt, Homo Sapiens
acugaggcugguuuccuuuucuuuucccacaa

SEQ ID NO: 292919 - RNA, 32 nt, Homo Sapiens
ucugacacgucuuuuucccaggguucguacuu

SEQ ID NO: 292920 - RNA, 32 nt, Homo Sapiens
aaggguucaucucuccucaagcccuuaaaauc

SEQ ID NO: 292921 - RNA, 32 nt, Homo Sapiens
guaucaacuccgugucccauugagcugaccuu

SEQ ID NO: 292922 - RNA, 32 nt, Homo Sapiens
gaggagugagugaguucucaccagcauuugac

SEQ ID NO: 292923 - RNA, 32 nt, Homo Sapiens
aguuguaucaaaucuugguacgcaguauuuuu

SEQ ID NO: 292924 - RNA, 32 nt, Homo Sapiens
guacagagacaaagaaauccccugccuguucc

SEQ ID NO: 292925 - RNA, 32 nt, Homo Sapiens
gaggccccggcucuccucuccccuguccugca

SEQ ID NO: 292926 - RNA, 32 nt, Homo Sapiens
ccguagccccgcgcgcccccagcccuuuaagc

SEQ ID NO: 292927 - RNA, 32 nt, Homo Sapiens
agcaaagcgugagcccccaaauccacaccugg

SEQ ID NO: 292928 - RNA, 32 nt, Homo Sapiens
agcaaugcaccuauucacauggagaaucuucc

SEQ ID NO: 292929 - RNA, 32 nt, Homo Sapiens
gaggucuccgcggcccgaggucuccgcccgca

SEQ ID NO: 292930 - RNA, 32 nt, Homo Sapiens
ccgaagguauuucuccagauccacagggagag

SEQ ID NO: 292931 - RNA, 32 nt, Homo Sapiens
aaggauuuucuuucaaaaacaaaucagaagca

SEQ ID NO: 292932 - RNA, 32 nt, Homo Sapiens
gaaaaucuaagaagcucccaguccucagagac

SEQ ID NO: 292933 - RNA, 32 nt, Homo Sapiens
guacuuuccagaauauaacaaauuucuuuaua

SEQ ID NO: 292934 - RNA, 32 nt, Homo Sapiens
uggacuaagguagagacaaaacuuuauugcac

SEQ ID NO: 292935 - RNA, 32 nt, Homo Sapiens
acucgcguucccuccagccccuggggcagaac

SEQ ID NO: 292936 - RNA, 32 nt, Homo Sapiens
auauacacaauauauguaauacacagcacuug

SEQ ID NO: 292937 - RNA, 32 nt, Homo Sapiens
ggcuucccuuuuuauuuuuuuacauuuccauu

SEQ ID NO: 292938 - RNA, 32 nt, Homo Sapiens
ccaugugucuucauuuauaacuuuuuguuuaa

SEQ ID NO: 292939 - RNA, 32 nt, Homo Sapiens
ucuguacuauacauuguuugguaauuacacau

SEQ ID NO: 292940 - RNA, 32 nt, Homo Sapiens
cgcaggcccuguggcuguuucccacagcugcu

SEQ ID NO: 292941 - RNA, 32 nt, Homo Sapiens
ucaaacacuaaggagcuuuuugacaucuguua

SEQ ID NO: 292942 - RNA, 32 nt, Homo Sapiens
gaaggggagagggaaacgugcccucuguuuga

SEQ ID NO: 292943 - RNA, 32 nt, Homo Sapiens
auuacucaggacuuaauguagcauugcacuuc

SEQ ID NO: 292944 - RNA, 32 nt, Homo Sapiens
gaagcagggagaugucagacugcuacacggag

SEQ ID NO: 292945 - RNA, 32 nt, Homo Sapiens
cuggggcgggcgacaugaugugcaaaccucag

SEQ ID NO: 292946 - RNA, 32 nt, Homo Sapiens
auugggauggguggagaaagacgacaagagag

SEQ ID NO: 292947 - RNA, 32 nt, Homo Sapiens
aucuauaguuauuuagacauguuuacaugcag

SEQ ID NO: 292948 - RNA, 32 nt, Homo Sapiens
ggcggggcgccccccaugcugcugcagcccgc

SEQ ID NO: 292949 - RNA, 32 nt, Homo Sapiens
uacaucccaagcagcaggcacacaagcaaagu

SEQ ID NO: 292950 - RNA, 32 nt, Homo Sapiens
gguugcacugugcagucgcuguguguuuuagg

SEQ ID NO: 292951 - RNA, 27 nt, Homo Sapiens
agaggccauuaaugguguuaagaaggc

SEQ ID NO: 292952 - RNA, 32 nt, Homo Sapiens
gcuugguucaucugcuuucuccucccuuuucc

SEQ ID NO: 292953 - RNA, 32 nt, Homo Sapiens
gcaugauguucuugucuuuggagcuuagccuu

SEQ ID NO: 292954 - RNA, 32 nt, Homo Sapiens
cccauagcacugggcucugauggcugcuccac

SEQ ID NO: 292955 - RNA, 32 nt, Homo Sapiens
agccaguggaacaaaguuuguaguuauuuugc

SEQ ID NO: 292956 - RNA, 32 nt, Homo Sapiens
aacagucaauuucaguucagcuaacauauauu

SEQ ID NO: 292957 - RNA, 32 nt, Homo Sapiens
uauacuguacuauauaauauaucaucuuuaga

SEQ ID NO: 292958 - RNA, 32 nt, Homo Sapiens
caaaaccuauucaaauggguucuaguucaauu

SEQ ID NO: 292959 - RNA, 32 nt, Homo Sapiens
auugccuucuaccaccugggcgacuacgcacg

SEQ ID NO: 292960 - RNA, 32 nt, Homo Sapiens
guuacacaaaacagugucuagugaagacgaca

SEQ ID NO: 292961 - RNA, 32 nt, Homo Sapiens
auacauuuuccacaaauuaucugcuuauuuaa

SEQ ID NO: 292962 - RNA, 32 nt, Homo Sapiens
aaaguuggcugagucagauauuauuauacacu

SEQ ID NO: 292963 - RNA, 32 nt, Homo Sapiens
uggacccacccccagcauuucugauuuugguc

SEQ ID NO: 292964 - RNA, 32 nt, Homo Sapiens
gcugagaggggagggagaguuugcggccacac

SEQ ID NO: 292965 - RNA, 32 nt, Homo Sapiens
cgaucccgccccaaccaacuucccgcugaggu

SEQ ID NO: 292966 - RNA, 32 nt, Homo Sapiens
aauaaagcaaauuuauaauaaaauuaaaauua

SEQ ID NO: 292967 - RNA, 32 nt, Homo Sapiens
uuaacccagauggucuuaauuuguaauuaauu

SEQ ID NO: 292968 - RNA, 32 nt, Homo Sapiens
gaacggccaaacugguaaccggcacgcuacug

SEQ ID NO: 292969 - RNA, 32 nt, Homo Sapiens
cggagcccuugagcgcgaggcgcggagccccc

SEQ ID NO: 292970 - RNA, 32 nt, Homo Sapiens
aguggaguuaaaccucuggcaugaagucuggg

SEQ ID NO: 292971 - RNA, 32 nt, Homo Sapiens
agaggggcacaguuucggcaggcgggugaggu

SEQ ID NO: 292972 - RNA, 32 nt, Homo Sapiens
cgcccccgcaguuccuuggagagcuuggagcc

SEQ ID NO: 292973 - RNA, 30 nt, Homo Sapiens
cagacaugcuugcucauucaaacucugcga

SEQ ID NO: 292974 - RNA, 32 nt, Homo Sapiens
ccgccugggcuugcagcccgccacuuuacuuu

SEQ ID NO: 292975 - RNA, 32 nt, Homo Sapiens
aguaaugguguggaagugacaccuggggucag

SEQ ID NO: 292976 - RNA, 32 nt, Homo Sapiens
gcccugguacuucuucaguccugggaugggac

SEQ ID NO: 292977 - RNA, 32 nt, Homo Sapiens
guacuuuuuuauuuuucuucaacuucucuuga

SEQ ID NO: 292978 - RNA, 32 nt, Homo Sapiens
cacccccuccaggcccggggcugaaacagccc

SEQ ID NO: 292979 - RNA, 32 nt, Homo Sapiens
agacagcggcgggggcugauagcaauuuuagu

SEQ ID NO: 292980 - RNA, 32 nt, Homo Sapiens
agcugcucuuguggguugauggagcguccucg

SEQ ID NO: 292981 - RNA, 32 nt, Homo Sapiens
ugugggcuggggggcggggcggggagcggcag

SEQ ID NO: 292982 - RNA, 32 nt, Homo Sapiens
ugccgccccuccaucuucuaccucugaauggc

SEQ ID NO: 292983 - RNA, 32 nt, Homo Sapiens
gggagcccgcggagccgaggaugcgggcgggc

SEQ ID NO: 292984 - RNA, 32 nt, Homo Sapiens
aaaucuuuuuacaguuucaaauuauguucaac

SEQ ID NO: 292985 - RNA, 32 nt, Homo Sapiens
cuuuguguaggaaguucauaguagcaauuuug

SEQ ID NO: 292986 - RNA, 32 nt, Homo Sapiens
gcgggcaggggcgggggaugaggcggacgacg

SEQ ID NO: 292987 - RNA, 32 nt, Homo Sapiens
acuuaggacuuccucugggcaccagggcagug

SEQ ID NO: 292988 - RNA, 32 nt, Homo Sapiens
cuuaaggcuuguacaagugucuucagacccac

SEQ ID NO: 292989 - RNA, 32 nt, Homo Sapiens
ggaagaggcaggauccuggagcaguuuuguga

SEQ ID NO: 292990 - RNA, 32 nt, Homo Sapiens
ucagaaaugucaauucuuaaacacuguggcaa

SEQ ID NO: 292991 - RNA, 32 nt, Homo Sapiens
cgacggccggggggcgggggccgaggcaggua

SEQ ID NO: 292992 - RNA, 32 nt, Homo Sapiens
acuuagaacaccgccgccccccugccccaccu

SEQ ID NO: 292993 - RNA, 32 nt, Homo Sapiens
ugggaaaugccugcugcccccagugacucuug

SEQ ID NO: 292994 - RNA, 32 nt, Homo Sapiens
gcaccuuaaaacauuuaaaaucuuauuacagg

SEQ ID NO: 292995 - RNA, 32 nt, Homo Sapiens
ggaggcugagcagcugcaguguuucuguccgg

SEQ ID NO: 292996 - RNA, 32 nt, Homo Sapiens
gauggaggcagacgcugccgagggggugugga

SEQ ID NO: 292997 - RNA, 32 nt, Homo Sapiens
ugcugugugacaucucucugguaacauuuuau

SEQ ID NO: 292998 - RNA, 32 nt, Homo Sapiens
aauauauguucuguauuaaaauuaaugugcuu

SEQ ID NO: 292999 - RNA, 32 nt, Homo Sapiens
agcagccuagggccuaggcccgggccaccaug

SEQ ID NO: 293000 - RNA, 32 nt, Homo Sapiens
uagguuguuuccaauuuuucauuauuaucagu

SEQ ID NO: 293001 - RNA, 32 nt, Homo Sapiens
cgcccccgcgcgccgcggcuccuguugacccg

SEQ ID NO: 293002 - RNA, 32 nt, Homo Sapiens
gacuuccugugggacaagcgcacgggccuggc

SEQ ID NO: 293003 - RNA, 32 nt, Homo Sapiens
cccgcgugucccggcucauccgcggccgcgcc

SEQ ID NO: 293004 - RNA, 28 nt, Homo Sapiens
aacaugcucuccaguuuggggugucuac

SEQ ID NO: 293005 - RNA, 32 nt, Homo Sapiens
uuuagccacucuguccuccccuuccggcaguc

SEQ ID NO: 293006 - RNA, 32 nt, Homo Sapiens
gcugagauugguuaaguuugcaaugaccaucu

SEQ ID NO: 293007 - RNA, 32 nt, Homo Sapiens
aaaguuuggcugaaauagcaccucaagugggg

SEQ ID NO: 293008 - RNA, 32 nt, Homo Sapiens
agagccgagggcccgcugccccacaccggucg

SEQ ID NO: 293009 - RNA, 32 nt, Homo Sapiens
cacuuguaaucacugcacuuugggaagcugag

SEQ ID NO: 293010 - RNA, 32 nt, Homo Sapiens
gguuacauagaccagcagcuacagcucuggaa

SEQ ID NO: 293011 - RNA, 32 nt, Homo Sapiens
acagaacccgaccaugcugacacuuugaucuu

SEQ ID NO: 293012 - RNA, 32 nt, Homo Sapiens
aaccuuauucuauuuaggaggaugaaguugaa

SEQ ID NO: 293013 - RNA, 32 nt, Homo Sapiens
aggcucgguggcggcgcccaggguggcccggg

SEQ ID NO: 293014 - RNA, 32 nt, Homo Sapiens
ccucccaucauucauggggggcugcuaccuga

SEQ ID NO: 293015 - RNA, 32 nt, Homo Sapiens
gugugcuuuuaaaaucagcuuuauucuaagca

SEQ ID NO: 293016 - RNA, 32 nt, Homo Sapiens
gugaauuugugcuuaagucaaugaauguguag

SEQ ID NO: 293017 - RNA, 32 nt, Homo Sapiens
guguccggagagcggugggcugaccuguuccu

SEQ ID NO: 293018 - RNA, 32 nt, Homo Sapiens
aguuuuaauuuuuuuuuuuucuuggcagagua

SEQ ID NO: 293019 - RNA, 31 nt, Homo Sapiens
cccggcgcgcgcagcccuagccgccggaugg

SEQ ID NO: 293020 - RNA, 32 nt, Homo Sapiens
gaaagacauucacuagaagcucugcccugcaa

SEQ ID NO: 293021 - RNA, 32 nt, Homo Sapiens
uuuugauaccuguauuuauaauaaaaaauguu

SEQ ID NO: 293022 - RNA, 31 nt, Homo Sapiens
ccauggaaauaaagucuguaucuuguguaac

SEQ ID NO: 293023 - RNA, 32 nt, Homo Sapiens
gcucuuuuaagugaguucuucagcuaagcauu

SEQ ID NO: 293024 - RNA, 32 nt, Homo Sapiens
uaucguugcugguaagccugggcuugcugugc

SEQ ID NO: 293025 - RNA, 32 nt, Homo Sapiens
gcagggaagaacuucuaggcucuuuggaguuu

SEQ ID NO: 293026 - RNA, 32 nt, Homo Sapiens
auacaaguuagaaaacaaaaauagaguguggc

SEQ ID NO: 293027 - RNA, 32 nt, Homo Sapiens
gaugccgccgccgcgccgcccuccgaggcugc

SEQ ID NO: 293028 - RNA, 32 nt, Homo Sapiens
cgaucaccaaaaugaaaagguggacuguagau

SEQ ID NO: 293029 - RNA, 32 nt, Homo Sapiens
cuuucacccucccaggaaacucuuucaaaccu

SEQ ID NO: 293030 - RNA, 32 nt, Homo Sapiens
gucccuuucccuaccuuuauauuugggguccu

SEQ ID NO: 293031 - RNA, 32 nt, Homo Sapiens
uuaaugacaggcaguaaauacccauuacuccu

SEQ ID NO: 293032 - RNA, 27 nt, Homo Sapiens
gcaccgcacgucuucagcccgaccguu

SEQ ID NO: 293033 - RNA, 32 nt, Homo Sapiens
aaucuaauuacaucuuuucauuuguuauauau

SEQ ID NO: 293034 - RNA, 32 nt, Homo Sapiens
uuugacaagcacacucugggagacagugauaa

SEQ ID NO: 293035 - RNA, 32 nt, Homo Sapiens
ugcgcugccccggccgccaguccgcccagaag

SEQ ID NO: 293036 - RNA, 32 nt, Homo Sapiens
guuuaucugagagcauuuaucuguaaauaugu

SEQ ID NO: 293037 - RNA, 32 nt, Homo Sapiens
agcccggguuuccugccugagccccgcucgag

SEQ ID NO: 293038 - RNA, 32 nt, Homo Sapiens
uggggcggccgcggcgcuuccgaucgcgacgc

SEQ ID NO: 293039 - RNA, 32 nt, Homo Sapiens
aaauuauaauaagggaaguuuauuuucugcgg

SEQ ID NO: 293040 - RNA, 32 nt, Homo Sapiens
gcgccaggaaggggcgggugacugcgaggcag

SEQ ID NO: 293041 - RNA, 32 nt, Homo Sapiens
caucacuaaggcagcccuccauggacccauga

SEQ ID NO: 293042 - RNA, 30 nt, Homo Sapiens
cccauggugucaccuggggaaacuggaacc

SEQ ID NO: 293043 - RNA, 32 nt, Homo Sapiens
uuucuuuucggauucuccgagaagggguggag

SEQ ID NO: 293044 - RNA, 32 nt, Homo Sapiens
uaaaaagcaugagacaucauggccaaaaaaaa

SEQ ID NO: 293045 - RNA, 32 nt, Homo Sapiens
gaggaggcugcgccagcuuuaggccccgcccu

SEQ ID NO: 293046 - RNA, 32 nt, Homo Sapiens
agcuucugcuugugacuucucuacuucaaaaa

SEQ ID NO: 293047 - RNA, 32 nt, Homo Sapiens
cucauuucgcguugcgucaccaaaaacagaca

SEQ ID NO: 293048 - RNA, 32 nt, Homo Sapiens
ugcccaaucgacaugagaagacgagcagaaga

SEQ ID NO: 293049 - RNA, 32 nt, Homo Sapiens
uuuaauuggccaugucgccaaaaauacagccu

SEQ ID NO: 293050 - RNA, 32 nt, Homo Sapiens
aacagagaaagaccauucccccugccuguccu

SEQ ID NO: 293051 - RNA, 32 nt, Homo Sapiens
ucuggcccaagcugcgugcccuuuaagccaag

SEQ ID NO: 293052 - RNA, 32 nt, Homo Sapiens
gcaaauuuguccguguucuguuuaaugaccuc

SEQ ID NO: 293053 - RNA, 32 nt, Homo Sapiens
augaaaacaccguagucugcuuuuccugaaag

SEQ ID NO: 293054 - RNA, 32 nt, Homo Sapiens
acugcuccccugccauggccacggccacagca

SEQ ID NO: 293055 - RNA, 32 nt, Homo Sapiens
uuuauucauuugugcuacuauuacaaaauauu

SEQ ID NO: 293056 - RNA, 32 nt, Homo Sapiens
uggugggccccggccccugaccccaaggcuuc

SEQ ID NO: 293057 - RNA, 32 nt, Homo Sapiens
uaaaaugaauuuucuuuuuuuuuaagacaaga

SEQ ID NO: 293058 - RNA, 29 nt, Homo Sapiens
cccuuuucuaucccaagaaauaauuucau

SEQ ID NO: 293059 - RNA, 32 nt, Homo Sapiens
cacaucagcccaggcccucccuacggguuuga

SEQ ID NO: 293060 - RNA, 32 nt, Homo Sapiens
ccuccucugcucuuagggaguuuaaagucuaa

SEQ ID NO: 293061 - RNA, 32 nt, Homo Sapiens
agaagaguguugaacagaagugguuauagagg

SEQ ID NO: 293062 - RNA, 32 nt, Homo Sapiens
uaagaagaugauacuguaaaucacaugcuccc

SEQ ID NO: 293063 - RNA, 32 nt, Homo Sapiens
acagccaacuuccaacaagaugugggcacaaa

SEQ ID NO: 293064 - RNA, 32 nt, Homo Sapiens
ggccccacagagcuuggacuuccuggaggaca

SEQ ID NO: 293065 - RNA, 32 nt, Homo Sapiens
agugaaucaguuuaaagaaaaacauaacguaa

SEQ ID NO: 293066 - RNA, 32 nt, Homo Sapiens
gagaguuccuuccagaccguuagcugucuccu

SEQ ID NO: 293067 - RNA, 31 nt, Homo Sapiens
guguuccauugugccauucagguuugcuguc

SEQ ID NO: 293068 - RNA, 32 nt, Homo Sapiens
gagggcauugcauuuccugggaggaagaggag

SEQ ID NO: 293069 - RNA, 32 nt, Homo Sapiens
gaucugaaacauacauaacaugucaacacaua

SEQ ID NO: 293070 - RNA, 32 nt, Homo Sapiens
acggaccaggccugggcuccagcugggacaac

SEQ ID NO: 293071 - RNA, 32 nt, Homo Sapiens
gucauuggaaauggaaaaauggcauuauauau

SEQ ID NO: 293072 - RNA, 30 nt, Homo Sapiens
ugcaugaagaaccuguggccggcgcgugcc

SEQ ID NO: 293073 - RNA, 32 nt, Homo Sapiens
gaacaguacgaucuuaagauugugaaagugga

SEQ ID NO: 293074 - RNA, 32 nt, Homo Sapiens
caagugaaccacuguuaugucugaugcuucac

SEQ ID NO: 293075 - RNA, 32 nt, Homo Sapiens
cacugaucaucuuuuuauguuauuuuccaauu

SEQ ID NO: 293076 - RNA, 32 nt, Homo Sapiens
ccuuguaauggaguuaguguccagucagcuga

SEQ ID NO: 293077 - RNA, 32 nt, Homo Sapiens
gacuuaacaacuauaaauguaguuuauguguu

SEQ ID NO: 293078 - RNA, 32 nt, Homo Sapiens
uucugggucaugaauagcacaaugaagcaagu

SEQ ID NO: 293079 - RNA, 32 nt, Homo Sapiens
auccaggguguaaauaucuguuagaacagaag

SEQ ID NO: 293080 - RNA, 32 nt, Homo Sapiens
agaggagggcccuccgcaggcccgcgcccggu

SEQ ID NO: 293081 - RNA, 32 nt, Homo Sapiens
augggaugauugccaguagcaguuggagccuu

SEQ ID NO: 293082 - RNA, 30 nt, Homo Sapiens
gccucagcuuccucuacccaucuucuuuuc

SEQ ID NO: 293083 - RNA, 32 nt, Homo Sapiens
cugcauuuguccaugaucagaaaauagcaaaa

SEQ ID NO: 293084 - RNA, 32 nt, Homo Sapiens
cccgggcuucccgugcgccucugccgcaggug

SEQ ID NO: 293085 - RNA, 32 nt, Homo Sapiens
auuuuuguguucccucaccacccauguaauau

SEQ ID NO: 293086 - RNA, 29 nt, Homo Sapiens
cgccauggcugcaggaggucccggcgcgg

SEQ ID NO: 293087 - RNA, 32 nt, Homo Sapiens
gcaagggcccgcagagcagccaucacgcauuc

SEQ ID NO: 293088 - RNA, 32 nt, Homo Sapiens
accuuaaugcccaggaugauccugucuaacac

SEQ ID NO: 293089 - RNA, 32 nt, Homo Sapiens
cggagagaugacugauuagaucagauuagauc

SEQ ID NO: 293090 - RNA, 32 nt, Homo Sapiens
ccuggagucugggggccuggaacaggagagcg

SEQ ID NO: 293091 - RNA, 32 nt, Homo Sapiens
aaucuagguuaaaauuuuaguuagcacauugu

SEQ ID NO: 293092 - RNA, 32 nt, Homo Sapiens
gaaaaaguaaaaaccucuguauggaaguaaua

SEQ ID NO: 293093 - RNA, 32 nt, Homo Sapiens
cacuucagaacaggucauuuuccugauauugg

SEQ ID NO: 293094 - RNA, 32 nt, Homo Sapiens
cacacuggcagagcggccagcacagguagcca

SEQ ID NO: 293095 - RNA, 32 nt, Homo Sapiens
gcgcccuguuugugccagcaggcaccagcgaa

SEQ ID NO: 293096 - RNA, 32 nt, Homo Sapiens
aaagcuguguguuugucuucauucccaccgag

SEQ ID NO: 293097 - RNA, 32 nt, Homo Sapiens
cacuaagcaaauuuauuuaaauucaugggaaa

SEQ ID NO: 293098 - RNA, 32 nt, Homo Sapiens
gaugagccugggcucauagugagaacccgucu

SEQ ID NO: 293099 - RNA, 32 nt, Homo Sapiens
ugaccuagcuagugccuggugcccagugaccu

SEQ ID NO: 293100 - RNA, 32 nt, Homo Sapiens
ccucagcgucccgaguaguuggcacuacaggu

SEQ ID NO: 293101 - RNA, 32 nt, Homo Sapiens
aguacacaugaacaaggccaguccuccauuuc

SEQ ID NO: 293102 - RNA, 32 nt, Homo Sapiens
uggaaaaugcuaaucaacuacccuuucuuuua

SEQ ID NO: 293103 - RNA, 32 nt, Homo Sapiens
ccgugaguucguuuuucugccaccucacuuug

SEQ ID NO: 293104 - RNA, 32 nt, Homo Sapiens
ucaccuggaggccggcauggggccugggcugc

SEQ ID NO: 293105 - RNA, 32 nt, Homo Sapiens
uuuaauaaaguuuauuuuuaaauaaaaaaaaa

SEQ ID NO: 293106 - RNA, 32 nt, Homo Sapiens
guugggugggugaggccagaagagacugccuc

SEQ ID NO: 293107 - RNA, 32 nt, Homo Sapiens
guguaguacagacagggcucaccgauccucuc

SEQ ID NO: 293108 - RNA, 32 nt, Homo Sapiens
aauuuacuuuuguuaguuuuuucaggcacaua

SEQ ID NO: 293109 - RNA, 32 nt, Homo Sapiens
uacguuuuugacauuuauuaaaugguaccaau

SEQ ID NO: 293110 - RNA, 32 nt, Homo Sapiens
agggcgcgccgcgcucgcucggcacgggcagc

SEQ ID NO: 293111 - RNA, 32 nt, Homo Sapiens
aaugggaaugggagagggcagcucuacaaagc

SEQ ID NO: 293112 - RNA, 32 nt, Homo Sapiens
ggacuacaagcaugcacagcugcacuuggcuu

SEQ ID NO: 293113 - RNA, 32 nt, Homo Sapiens
gaaaguguccugccucggggccccucagauca

SEQ ID NO: 293114 - RNA, 32 nt, Homo Sapiens
uaggaauaaucaaacuugccccugcccuuuca

SEQ ID NO: 293115 - RNA, 32 nt, Homo Sapiens
uacacuucuguuuauauuaaauccacaauauu

SEQ ID NO: 293116 - RNA, 32 nt, Homo Sapiens
aguugugugugcgcccgggacgcgggagggaa

SEQ ID NO: 293117 - RNA, 32 nt, Homo Sapiens
cauucuuucugcuuuuagaaauguagacauaa

SEQ ID NO: 293118 - RNA, 32 nt, Homo Sapiens
ccgcaagcugggugugcuuugagugugcagcc

SEQ ID NO: 293119 - RNA, 32 nt, Homo Sapiens
uguuugcucccucuucgcguuuugacuacccg

SEQ ID NO: 293120 - RNA, 32 nt, Homo Sapiens
ccaaaauguaaaauauaaguaauaauucucau

SEQ ID NO: 293121 - RNA, 32 nt, Homo Sapiens
ggagugcaauagcgcgaucugggcucacugca

SEQ ID NO: 293122 - RNA, 32 nt, Homo Sapiens
cccugcgcacccgcagccucccccgcugccuc

SEQ ID NO: 293123 - RNA, 32 nt, Homo Sapiens
gcuuuggggacuucagccuuccuuccagucug

SEQ ID NO: 293124 - RNA, 32 nt, Homo Sapiens
ccagagccaagagccucucaguagagggaggg

SEQ ID NO: 293125 - RNA, 32 nt, Homo Sapiens
caggggugguauauccugucugacggagggcg

SEQ ID NO: 293126 - RNA, 32 nt, Homo Sapiens
gaagaugaugaaauuguggaaugaugguugca

SEQ ID NO: 293127 - RNA, 32 nt, Homo Sapiens
cccugcaggagcuucccaagcuggucacagag

SEQ ID NO: 293128 - RNA, 32 nt, Homo Sapiens
gaugacacagaaauuggaaccaacaaaacugc

SEQ ID NO: 293129 - RNA, 32 nt, Homo Sapiens
gcaaaauggcacuucuguuuaccuguuauauu

SEQ ID NO: 293130 - RNA, 32 nt, Homo Sapiens
uagcaacaaagaagcuggaucucuggaggcuu

SEQ ID NO: 293131 - RNA, 32 nt, Homo Sapiens
ggcacagagugaacagaagaauaauuccauga

SEQ ID NO: 293132 - RNA, 32 nt, Homo Sapiens
ugaaugcguuuaaaacaaaaccacuuucugca

SEQ ID NO: 293133 - RNA, 32 nt, Homo Sapiens
caucuaauauuuuauaugccuuuuggagcugu

SEQ ID NO: 293134 - RNA, 32 nt, Homo Sapiens
ccaagcucucucacuaugaacagacaaguuug

SEQ ID NO: 293135 - RNA, 32 nt, Homo Sapiens
acaguccacccgcuccucggaguccccccgcg

SEQ ID NO: 293136 - RNA, 32 nt, Homo Sapiens
gauuuucuaaaauuauuggauuuguauuuugu

SEQ ID NO: 293137 - RNA, 32 nt, Homo Sapiens
cacgggcuuccacuucacagaccuccuuaugg

SEQ ID NO: 293138 - RNA, 32 nt, Homo Sapiens
acuucagucugcucagaacgaauguggaggcc

SEQ ID NO: 293139 - RNA, 32 nt, Homo Sapiens
cccaaggcagaagaauuuuucuuaguacagaa

SEQ ID NO: 293140 - RNA, 32 nt, Homo Sapiens
agugcgcagggcccgucuguccucugggggcu

SEQ ID NO: 293141 - RNA, 32 nt, Homo Sapiens
cacuuuuggagaccguaaaacaacagcgcccc

SEQ ID NO: 293142 - RNA, 32 nt, Homo Sapiens
uaauauggugucuaauuuuauguuguucagga

SEQ ID NO: 293143 - RNA, 32 nt, Homo Sapiens
cacagggucuugccccuucuccagggccugug

SEQ ID NO: 293144 - RNA, 32 nt, Homo Sapiens
aacagcugcggggaggguagggaccagacaga

SEQ ID NO: 293145 - RNA, 32 nt, Homo Sapiens
cagccucuccugccacucggggcccccguucc

SEQ ID NO: 293146 - RNA, 32 nt, Homo Sapiens
acaguucccuccucacagggucgcuauaacga

SEQ ID NO: 293147 - RNA, 32 nt, Homo Sapiens
uugaagguaucuuguuuguaaacauuugucag

SEQ ID NO: 293148 - RNA, 32 nt, Homo Sapiens
caaacccgauccgagcccuuggaccaaacucg

SEQ ID NO: 293149 - RNA, 32 nt, Homo Sapiens
cguguauuggcuuuucugggcagcaggaagga

SEQ ID NO: 293150 - RNA, 32 nt, Homo Sapiens
aucuagcccugccacuauuggcuacuuacccu

SEQ ID NO: 293151 - RNA, 32 nt, Homo Sapiens
auaaucaagccacacuaacuauagaaaaugag

SEQ ID NO: 293152 - RNA, 32 nt, Homo Sapiens
cuuugagucauacauuuucaugauuaugauua

SEQ ID NO: 293153 - RNA, 32 nt, Homo Sapiens
cguggaguuuaaaagaucaaguuaggaugcug

SEQ ID NO: 293154 - RNA, 32 nt, Homo Sapiens
uccaccaggccccucaucugaauaccaagcac

SEQ ID NO: 293155 - RNA, 32 nt, Homo Sapiens
agacaaugugcccaaaacaaagggaagaagag

SEQ ID NO: 293156 - RNA, 32 nt, Homo Sapiens
uuauuauacuuuaugacccaauaaagggagcu

SEQ ID NO: 293157 - RNA, 32 nt, Homo Sapiens
caugacacaaagcuuuugauaaguacuuuccu

SEQ ID NO: 293158 - RNA, 32 nt, Homo Sapiens
uaguauuucaugcugggaaugagacauaggcc

SEQ ID NO: 293159 - RNA, 32 nt, Homo Sapiens
ggccccgcggguggaucugcagggagccgagc

SEQ ID NO: 293160 - RNA, 32 nt, Homo Sapiens
acgcguagagccgcuuugcgcgugcgcaucac

SEQ ID NO: 293161 - RNA, 32 nt, Homo Sapiens
gggcagccuggagcuuccugcagccuccuacg

SEQ ID NO: 293162 - RNA, 32 nt, Homo Sapiens
cucaccugggcucgcugcuggagugagguuuu

SEQ ID NO: 293163 - RNA, 32 nt, Homo Sapiens
uugucucuccuccccaucguccccaucguccu

SEQ ID NO: 293164 - RNA, 32 nt, Homo Sapiens
aaaggugucacucugagagcucugcuuacaga

SEQ ID NO: 293165 - RNA, 32 nt, Homo Sapiens
ggcuuaauuagcaaaaucaugaugcucagcug

SEQ ID NO: 293166 - RNA, 32 nt, Homo Sapiens
ugcauuuucagaagcuuauaggcuauaagaag

SEQ ID NO: 293167 - RNA, 32 nt, Homo Sapiens
gccccaggcauuccgggcugcagauugacggg

SEQ ID NO: 293168 - RNA, 31 nt, Homo Sapiens
ggggggccuuccccgcgcagagcuccgaccg

SEQ ID NO: 293169 - RNA, 32 nt, Homo Sapiens
cccucuuaguuggugugugaggucuugguggg

SEQ ID NO: 293170 - RNA, 32 nt, Homo Sapiens
guuuuauccaaaucauguuaacuuaagaaaca

SEQ ID NO: 293171 - RNA, 32 nt, Homo Sapiens
cccauauauaaauuauuacuuuaaauuauaug

SEQ ID NO: 293172 - RNA, 32 nt, Homo Sapiens
cuugcuaauguuugagagugaacguuuaaacu

SEQ ID NO: 293173 - RNA, 32 nt, Homo Sapiens
acuugauccgugacugaaugagacuuuugagu

SEQ ID NO: 293174 - RNA, 32 nt, Homo Sapiens
uuggagcucccuccuuugcucuuccauccugu

SEQ ID NO: 293175 - RNA, 29 nt, Homo Sapiens
gggccucggggacagggcgccacucacag

SEQ ID NO: 293176 - RNA, 32 nt, Homo Sapiens
aagaaagaggaaaacuuugccuacaacuuugg

SEQ ID NO: 293177 - RNA, 32 nt, Homo Sapiens
cuugaacugaaaauauuuaauaaaauaaccuu

SEQ ID NO: 293178 - RNA, 32 nt, Homo Sapiens
gcaagcauauuucuuuuaaugacuccaguaaa

SEQ ID NO: 293179 - RNA, 32 nt, Homo Sapiens
gcuuuuaucuucugccuuggggaccugccaaa

SEQ ID NO: 293180 - RNA, 32 nt, Homo Sapiens
ccccgcccccaguccccaccccugcccccagc

SEQ ID NO: 293181 - RNA, 32 nt, Homo Sapiens
ucugacccugcagcuggugcucugugucuucg

SEQ ID NO: 293182 - RNA, 32 nt, Homo Sapiens
ucuggccguggcgcacgcggcugcugccgacc

SEQ ID NO: 293183 - RNA, 32 nt, Homo Sapiens
augaaauugugauuucuauauuauuaacguag

SEQ ID NO: 293184 - RNA, 32 nt, Homo Sapiens
ugcuuggaggauuuucuuacgcgugcguguuu

SEQ ID NO: 293185 - RNA, 32 nt, Homo Sapiens
caauuugugggaagaagagaagcgaggcuggg

SEQ ID NO: 293186 - RNA, 32 nt, Homo Sapiens
aauugucacaccuggaagcuuggugaauaauu

SEQ ID NO: 293187 - RNA, 32 nt, Homo Sapiens
cccuuuccuccuccuugaaaauacaucacuac

SEQ ID NO: 293188 - RNA, 31 nt, Homo Sapiens
ggccucccuggagagguguccacuccauccu

SEQ ID NO: 293189 - RNA, 32 nt, Homo Sapiens
uggagaaguuauugcagacagucaugaaccac

SEQ ID NO: 293190 - RNA, 32 nt, Homo Sapiens
aaaaggcuuugcagaccuccccugcccccaag

SEQ ID NO: 293191 - RNA, 32 nt, Homo Sapiens
uaguuuuacccauaaguaauauuuaaagauua

SEQ ID NO: 293192 - RNA, 32 nt, Homo Sapiens
cucggaguccuggcccucccccaccgccgccu

SEQ ID NO: 293193 - RNA, 32 nt, Homo Sapiens
uggggagcgggcccuggcugcccuggaggagc

SEQ ID NO: 293194 - RNA, 32 nt, Homo Sapiens
uuuuucuuucuuucuuuuuuuuuucauagaga

SEQ ID NO: 293195 - RNA, 32 nt, Homo Sapiens
cgcggcucccccuccggcuccuccuccgggga

SEQ ID NO: 293196 - RNA, 32 nt, Homo Sapiens
uguccuccccaucacuuuccugucccugagaa

SEQ ID NO: 293197 - RNA, 32 nt, Homo Sapiens
uaaauuuggggacaauuuuauguaucuguguu

SEQ ID NO: 293198 - RNA, 32 nt, Homo Sapiens
cuccacaggcagcccgaaugggcaugcagagc

SEQ ID NO: 293199 - RNA, 32 nt, Homo Sapiens
cuggggaguugguggcaacuuuccaagucaag

SEQ ID NO: 293200 - RNA, 32 nt, Homo Sapiens
aaucaagagacgggcgcaguccaacggaaagu

SEQ ID NO: 293201 - RNA, 32 nt, Homo Sapiens
cgagguguggagggcugguauugaguugugga

SEQ ID NO: 293202 - RNA, 32 nt, Homo Sapiens
cuaccugucaacaugaauguuucugugagcuc

SEQ ID NO: 293203 - RNA, 32 nt, Homo Sapiens
aggacaggcugcgggaggagcugcaggacuga

SEQ ID NO: 293204 - RNA, 32 nt, Homo Sapiens
gauuugaugcacuuugaauauugagauauuuu

SEQ ID NO: 293205 - RNA, 32 nt, Homo Sapiens
gggccaggugccacgcaggugucugaggacca

SEQ ID NO: 293206 - RNA, 32 nt, Homo Sapiens
aaagaaaucaaguuuuguuuugaaagaugccu

SEQ ID NO: 293207 - RNA, 32 nt, Homo Sapiens
aacugggguggguggggcagugcuuggcccag

SEQ ID NO: 293208 - RNA, 32 nt, Homo Sapiens
uucuuggauguauaaagugaacuuuuuggcuu

SEQ ID NO: 293209 - RNA, 32 nt, Homo Sapiens
cacaggagaaaguuaagaagcaucacagauau

SEQ ID NO: 293210 - RNA, 32 nt, Homo Sapiens
ucucugggccuucagcgcggguccuggugcug

SEQ ID NO: 293211 - RNA, 32 nt, Homo Sapiens
ggaggcggagccggagcgcggccauggcgggg

SEQ ID NO: 293212 - RNA, 32 nt, Homo Sapiens
gggggccgcccggccuugucuuucggcagugg

SEQ ID NO: 293213 - RNA, 32 nt, Homo Sapiens
agccccagccugccucccggcgcccagaugcc

SEQ ID NO: 293214 - RNA, 32 nt, Homo Sapiens
gcaauaaaaugguccaauaauagguaaaugca

SEQ ID NO: 293215 - RNA, 32 nt, Homo Sapiens
uguuuuuucuucauuccuauuguauucacaug

SEQ ID NO: 293216 - RNA, 32 nt, Homo Sapiens
gguccccaguguugcccuccccaguggcuggc

SEQ ID NO: 293217 - RNA, 32 nt, Homo Sapiens
cuauuccauacuaccggcccagccccucuucc

SEQ ID NO: 293218 - RNA, 32 nt, Homo Sapiens
ggaggagggggaggagggagcggagaucucgg

SEQ ID NO: 293219 - RNA, 32 nt, Homo Sapiens
cccaccccgccuuccacccaugugugucaacc

SEQ ID NO: 293220 - RNA, 32 nt, Homo Sapiens
ugguuuauuuuaaaugcguacauauugaccaa

SEQ ID NO: 293221 - RNA, 32 nt, Homo Sapiens
acagugaaugauuguggaugcauaaagaauaa

SEQ ID NO: 293222 - RNA, 32 nt, Homo Sapiens
cguccgggccgccccaggauucuggcuccggg

SEQ ID NO: 293223 - RNA, 29 nt, Homo Sapiens
gaccagccuggucaacauggcaaaagccc

SEQ ID NO: 293224 - RNA, 32 nt, Homo Sapiens
ggaguggugcuaggcaaggcuacuucaaugca

SEQ ID NO: 293225 - RNA, 32 nt, Homo Sapiens
ugccacugcacuccagccuggugacagaguga

SEQ ID NO: 293226 - RNA, 32 nt, Homo Sapiens
cggagcucaguguggcagcugcuggccucugg

SEQ ID NO: 293227 - RNA, 32 nt, Homo Sapiens
uaugccuggaauaagagauccuuuuucaaugu

SEQ ID NO: 293228 - RNA, 32 nt, Homo Sapiens
uuaaaacaacacuuugucuuuacaaugaaaca

SEQ ID NO: 293229 - RNA, 32 nt, Homo Sapiens
gaggagacuccagcagagcccugaagugugga

SEQ ID NO: 293230 - RNA, 32 nt, Homo Sapiens
gcagcgcggcagaggaaggcgaggcgagcuuu

SEQ ID NO: 293231 - RNA, 32 nt, Homo Sapiens
uccggaaguggaggcgggagcggcacggcagc

SEQ ID NO: 293232 - RNA, 32 nt, Homo Sapiens
ucuacuuccaaguacaccuugaauuaaguucu

SEQ ID NO: 293233 - RNA, 32 nt, Homo Sapiens
ggagcagaugagagagggucggggcuugcccu

SEQ ID NO: 293234 - RNA, 32 nt, Homo Sapiens
uccccagggugcccggcccgcacauggucgag

SEQ ID NO: 293235 - RNA, 32 nt, Homo Sapiens
aaaacaaaacuaaaacgacuuauuauuuauua

SEQ ID NO: 293236 - RNA, 32 nt, Homo Sapiens
ucaaaucuaauacaaucaaguacaauacuucc

SEQ ID NO: 293237 - RNA, 32 nt, Homo Sapiens
cccacucuuuugcgcuaacacuuccccucccu

SEQ ID NO: 293238 - RNA, 32 nt, Homo Sapiens
uggaagggaagaaguaucacuucuuucucaag

SEQ ID NO: 293239 - RNA, 32 nt, Homo Sapiens
cagcagggcuccugggauaacucaggcauagu

SEQ ID NO: 293240 - RNA, 32 nt, Homo Sapiens
cuauguaaaucauaaagaaaaacuaaaaauga

SEQ ID NO: 293241 - RNA, 32 nt, Homo Sapiens
aucauuuggaaaaauaaaggcaucugaaguac

SEQ ID NO: 293242 - RNA, 32 nt, Homo Sapiens
aggagaagcucccagauccuuguguccacuug

SEQ ID NO: 293243 - RNA, 32 nt, Homo Sapiens
aucuuuguaucuugucaccaaauaaucuuacc

SEQ ID NO: 293244 - RNA, 32 nt, Homo Sapiens
gagaaauguuuaaaucucugguauaaguuuac

SEQ ID NO: 293245 - RNA, 32 nt, Homo Sapiens
ucucaugucacguaucaauagaucaauuggua

SEQ ID NO: 293246 - RNA, 32 nt, Homo Sapiens
ccaaagaccugccugugugcuccggagaugaa

SEQ ID NO: 293247 - RNA, 32 nt, Homo Sapiens
uuuagucuucccauuuucuuccuauuacuuua

SEQ ID NO: 293248 - RNA, 32 nt, Homo Sapiens
cuuugugcaaugaauuaauguuauaaggaauu

SEQ ID NO: 293249 - RNA, 32 nt, Homo Sapiens
gaaaaucaauugguuaucuuauagagucuccu

SEQ ID NO: 293250 - RNA, 32 nt, Homo Sapiens
ccucacaaucaugguggaaggcaaggaggugc

SEQ ID NO: 293251 - RNA, 32 nt, Homo Sapiens
ccccaggugucugccccgcguuuccugccugc

SEQ ID NO: 293252 - RNA, 32 nt, Homo Sapiens
auuuaguuuuuuccacuucauuuuacaugcca

SEQ ID NO: 293253 - RNA, 32 nt, Homo Sapiens
auucuugucauggugaaaucugauugaguaac

SEQ ID NO: 293254 - RNA, 32 nt, Homo Sapiens
guaauuuuauucuccucuuccuuuuacccuag

SEQ ID NO: 293255 - RNA, 32 nt, Homo Sapiens
gaguagugcgcaguacaaaugucagcucugaa

SEQ ID NO: 293256 - RNA, 29 nt, Homo Sapiens
cagaaucuuaaaguauauuuucauauaac

SEQ ID NO: 293257 - RNA, 32 nt, Homo Sapiens
ucaacagacaccugaagucuagcaugugggag

SEQ ID NO: 293258 - RNA, 32 nt, Homo Sapiens
aguauggcuguugcaaaauuuaccaaauuugu

SEQ ID NO: 293259 - RNA, 32 nt, Homo Sapiens
guuuuugaggaaaaccugagguccccuaaucu

SEQ ID NO: 293260 - RNA, 32 nt, Homo Sapiens
uguugguugcuguuugucagccccagaauuuc

SEQ ID NO: 293261 - RNA, 32 nt, Homo Sapiens
uuaugccucuguaauugggguugacacaugaa

SEQ ID NO: 293262 - RNA, 32 nt, Homo Sapiens
ugccuguaauccuagcacuuugggaggccucu

SEQ ID NO: 293263 - RNA, 32 nt, Homo Sapiens
ucgcuuugggaauuauucauggcccugcucau

SEQ ID NO: 293264 - RNA, 32 nt, Homo Sapiens
cuuugauauaucauagucauuaaaagaccuuu

SEQ ID NO: 293265 - RNA, 32 nt, Homo Sapiens
gagccccgagaccugcagggaugugugcaccc

SEQ ID NO: 293266 - RNA, 32 nt, Homo Sapiens
ccacguccugcgcuccuggcugccgggcauuc

SEQ ID NO: 293267 - RNA, 32 nt, Homo Sapiens
gggcugcccccuuggggugccccccgcuccca

SEQ ID NO: 293268 - RNA, 32 nt, Homo Sapiens
ccucacuguguugucauguugugucuucacuu

SEQ ID NO: 293269 - RNA, 27 nt, Homo Sapiens
cgccuuccucuccgcagccccccggga

SEQ ID NO: 293270 - RNA, 32 nt, Homo Sapiens
aacaacgagcgcggagagggcagcggacugag

SEQ ID NO: 293271 - RNA, 31 nt, Homo Sapiens
uuagguggcuuaggccugcccuguggagcau

SEQ ID NO: 293272 - RNA, 32 nt, Homo Sapiens
gagaaggggaggauaaguaggcugggaaacuu

SEQ ID NO: 293273 - RNA, 32 nt, Homo Sapiens
cccgguggccugcuccucuccuccuugcccaa

SEQ ID NO: 293274 - RNA, 32 nt, Homo Sapiens
uccccacuuccuccugacaacccaggcacagc

SEQ ID NO: 293275 - RNA, 32 nt, Homo Sapiens
uaaaggaacugggauuauugagccuggagaag

SEQ ID NO: 293276 - RNA, 32 nt, Homo Sapiens
auguguuauagcaguuucauucaagaaaaguu

SEQ ID NO: 293277 - RNA, 32 nt, Homo Sapiens
caggaaaccuugaagaaaaucaguuucuagaa

SEQ ID NO: 293278 - RNA, 32 nt, Homo Sapiens
cuugccgggagagacuuuuuacaacucaucug

SEQ ID NO: 293279 - RNA, 32 nt, Homo Sapiens
uggccccgcggagcgaugcugcugcuggcugc

SEQ ID NO: 293280 - RNA, 32 nt, Homo Sapiens
uggccaucaugauguuaucauaucuuauuccc

SEQ ID NO: 293281 - RNA, 32 nt, Homo Sapiens
uguuaagcucuuuaugacuguuuuuguagugg

SEQ ID NO: 293282 - RNA, 32 nt, Homo Sapiens
ucuaugacuaaauccaaacugucaaaaccaga

SEQ ID NO: 293283 - RNA, 32 nt, Homo Sapiens
gggagaaagaacggguuguguccgccauguug

SEQ ID NO: 293284 - RNA, 32 nt, Homo Sapiens
ccugaguggucuuuuucaucucuuucgcgucc

SEQ ID NO: 293285 - RNA, 32 nt, Homo Sapiens
caggccacccucggcucucccacugcuggggc

SEQ ID NO: 293286 - RNA, 29 nt, Homo Sapiens
auagacuguuggaguucacugauuguuuu

SEQ ID NO: 293287 - RNA, 32 nt, Homo Sapiens
augcuaucuuugcucuucuccuacucugccuu

SEQ ID NO: 293288 - RNA, 32 nt, Homo Sapiens
ucaggcuccucccagguuauguuuucauagug

SEQ ID NO: 293289 - RNA, 32 nt, Homo Sapiens
aaagaauuugaaagaggcuuagugugaagggg

SEQ ID NO: 293290 - RNA, 32 nt, Homo Sapiens
gucgacugcacaugguuaaauaaaccuguacu

SEQ ID NO: 293291 - RNA, 32 nt, Homo Sapiens
gcccuuaaaaacaaugauuugugaguccagga

SEQ ID NO: 293292 - RNA, 32 nt, Homo Sapiens
acuuguuuccuuaguguaauagcagucauauc

SEQ ID NO: 293293 - RNA, 32 nt, Homo Sapiens
agacucuaguugcaagguaaagggcagcuugu

SEQ ID NO: 293294 - RNA, 32 nt, Homo Sapiens
cugaaucugccuuggagcacuccugguuuuau

SEQ ID NO: 293295 - RNA, 32 nt, Homo Sapiens
cucaguccauuuuaaccuguagcaaccuucug

SEQ ID NO: 293296 - RNA, 32 nt, Homo Sapiens
agagaaucauaaaaacaaaaaccucacuggca

SEQ ID NO: 293297 - RNA, 32 nt, Homo Sapiens
cucuugcuacgcuuuagcagagacugguggca

SEQ ID NO: 293298 - RNA, 32 nt, Homo Sapiens
agccugcaugcugagaggcucccuuuacacac

SEQ ID NO: 293299 - RNA, 32 nt, Homo Sapiens
agauaagaacagaaacuuuucuaagacccaca

SEQ ID NO: 293300 - RNA, 32 nt, Homo Sapiens
ccagaaguucccucugcccacgcaccuaccug

SEQ ID NO: 293301 - RNA, 32 nt, Homo Sapiens
ggagaccggcuggccgcgcgcgggaagccgcg

SEQ ID NO: 293302 - RNA, 32 nt, Homo Sapiens
ucuacaaaaaauuuaaaaauuagccaggugug

SEQ ID NO: 293303 - RNA, 32 nt, Homo Sapiens
cugauuuaaaacuuuggacauccugugaucug

SEQ ID NO: 293304 - RNA, 32 nt, Homo Sapiens
uacaucgucuucgucuuccuccugggcgccau

SEQ ID NO: 293305 - RNA, 32 nt, Homo Sapiens
ccgauagaugacugauggcaaaagauugugaa

SEQ ID NO: 293306 - RNA, 32 nt, Homo Sapiens
uuguccugcggcgggcccgauaagaaguccuc

SEQ ID NO: 293307 - RNA, 32 nt, Homo Sapiens
agaaagguaaccucaagaagaagcccaagggu

SEQ ID NO: 293308 - RNA, 32 nt, Homo Sapiens
uaacuguauuguaugcaaaucugugauuguug

SEQ ID NO: 293309 - RNA, 32 nt, Homo Sapiens
ggggccgcgggaaugcggaucgcagccggcag

SEQ ID NO: 293310 - RNA, 32 nt, Homo Sapiens
cucacacccacccuaccuagaaguacugggcu

SEQ ID NO: 293311 - RNA, 32 nt, Homo Sapiens
guauuuacauguuaucuucuuaauuuuagguu

SEQ ID NO: 293312 - RNA, 32 nt, Homo Sapiens
agugaucugcccgccacagcaggcugggauca

SEQ ID NO: 293313 - RNA, 32 nt, Homo Sapiens
uggaguugucacugcuuuuggccuggaguuug

SEQ ID NO: 293314 - RNA, 32 nt, Homo Sapiens
acaaggguuuaaggagcagugcucucuucucu

SEQ ID NO: 293315 - RNA, 32 nt, Homo Sapiens
aguaauggugacuucacauguuauuguaguua

SEQ ID NO: 293316 - RNA, 32 nt, Homo Sapiens
cucagccccuagcagagcgucuggcacacuag

SEQ ID NO: 293317 - RNA, 32 nt, Homo Sapiens
cgaaacuccaucucaaaaaauaaaauaaaaua

SEQ ID NO: 293318 - RNA, 32 nt, Homo Sapiens
gucuuaagguugaacguuugaauacuguaaaa

SEQ ID NO: 293319 - RNA, 32 nt, Homo Sapiens
aacuccuugauucuuggaugacugaacuuccu

SEQ ID NO: 293320 - RNA, 32 nt, Homo Sapiens
ucaauauaaccaauuguacaaggggaaguggu

SEQ ID NO: 293321 - RNA, 32 nt, Homo Sapiens
uaguucaugagagguuuccauguaacaagccu

SEQ ID NO: 293322 - RNA, 32 nt, Homo Sapiens
uuuccauuaaaauaaauggguauuggugguua

SEQ ID NO: 293323 - RNA, 32 nt, Homo Sapiens
ggugccgggagcgcgggcgcgcagagccgagg

SEQ ID NO: 293324 - RNA, 32 nt, Homo Sapiens
cucugacccaaggggaagcaugucgaagaaag

SEQ ID NO: 293325 - RNA, 30 nt, Homo Sapiens
cagauaugguugcagaagaaucagguccug

SEQ ID NO: 293326 - RNA, 32 nt, Homo Sapiens
aaaucccucacaggcccuaacauguuuccugg

SEQ ID NO: 293327 - RNA, 32 nt, Homo Sapiens
cgaucuucugcuucuuaaccguaccaguuuuc

SEQ ID NO: 293328 - RNA, 32 nt, Homo Sapiens
uggucuuuuuaaaaaauuguaacccucuagaa

SEQ ID NO: 293329 - RNA, 32 nt, Homo Sapiens
aaacaagacagagcucggauagagaguccagc

SEQ ID NO: 293330 - RNA, 32 nt, Homo Sapiens
ggauuccuccaaggaguccuuuacuagccuaa

SEQ ID NO: 293331 - RNA, 32 nt, Homo Sapiens
uauggggaaaaguuuauuuuuaauauuacuua

SEQ ID NO: 293332 - RNA, 32 nt, Homo Sapiens
cacacacacacacacacacacacacacugccu

SEQ ID NO: 293333 - RNA, 32 nt, Homo Sapiens
uugaugucauuacuccugaauuauuacauuuu

SEQ ID NO: 293334 - RNA, 30 nt, Homo Sapiens
gaggaaauuuuggaggcagaagcucuggcc

SEQ ID NO: 293335 - RNA, 32 nt, Homo Sapiens
ggcagaauauacacaacagaugcugaaggaga

SEQ ID NO: 293336 - RNA, 32 nt, Homo Sapiens
accccuggaguucugcuucugucuggaaucag

SEQ ID NO: 293337 - RNA, 32 nt, Homo Sapiens
ggcaggaugcgagcaaaagacccggcaaagag

SEQ ID NO: 293338 - RNA, 32 nt, Homo Sapiens
aaauaaagaacugagaacaaucucuuauacca

SEQ ID NO: 293339 - RNA, 32 nt, Homo Sapiens
aauaaauuguuuuuuucuuaaauuuucauugu

SEQ ID NO: 293340 - RNA, 32 nt, Homo Sapiens
accuauacaucccacacaccauccuccagguc

SEQ ID NO: 293341 - RNA, 32 nt, Homo Sapiens
cccgcacccgggccggccguccauagccagcc

SEQ ID NO: 293342 - RNA, 32 nt, Homo Sapiens
cauucauggagcaggcaaaaccagacgucugg

SEQ ID NO: 293343 - RNA, 32 nt, Homo Sapiens
cggccggggaagaggagacuugcgcgccgcaa

SEQ ID NO: 293344 - RNA, 32 nt, Homo Sapiens
ugugcggccaggaggggcggagggacgacgcg

SEQ ID NO: 293345 - RNA, 32 nt, Homo Sapiens
agcuggaacaaugugcucggcccccagugcuc

SEQ ID NO: 293346 - RNA, 32 nt, Homo Sapiens
aauaaacauuuuacuguuuuuauggauccuug

SEQ ID NO: 293347 - RNA, 32 nt, Homo Sapiens
uggaaugaggguuugagagagcagccaggaga

SEQ ID NO: 293348 - RNA, 32 nt, Homo Sapiens
uggggcgcggccgccugucugcaccggcagca

SEQ ID NO: 293349 - RNA, 32 nt, Homo Sapiens
cuagauggaaaauaaucuuugaggaaaaacaa

SEQ ID NO: 293350 - RNA, 32 nt, Homo Sapiens
cugcagaggccuuggguccaggcucuagguuc

SEQ ID NO: 293351 - RNA, 32 nt, Homo Sapiens
ucuuaugaauggauguugguuauacuuuuaau

SEQ ID NO: 293352 - RNA, 32 nt, Homo Sapiens
ccccguuuaacccacugugcuauaguugcggg

SEQ ID NO: 293353 - RNA, 32 nt, Homo Sapiens
gcuggagcggcgggcaguggcucuaggccgca

SEQ ID NO: 293354 - RNA, 32 nt, Homo Sapiens
acaccucugcugugggcacggggcugcugagg

SEQ ID NO: 293355 - RNA, 32 nt, Homo Sapiens
gguuuuggcauccccagcaucaccacucuccc

SEQ ID NO: 293356 - RNA, 32 nt, Homo Sapiens
gugguaaacaacaaagguggggugugugcuga

SEQ ID NO: 293357 - RNA, 32 nt, Homo Sapiens
uaugaucagggugaaauguacuuccugaugua

SEQ ID NO: 293358 - RNA, 32 nt, Homo Sapiens
uuacaccaaaaggucugcaggguguggucacu

SEQ ID NO: 293359 - RNA, 32 nt, Homo Sapiens
auaggaauuuucucuccuccuuucaaguuguu

SEQ ID NO: 293360 - RNA, 32 nt, Homo Sapiens
aaaugucucaagaaacaaagaucucgcuggug

SEQ ID NO: 293361 - RNA, 32 nt, Homo Sapiens
agaguuuguaaauucuggguucauuugugaug

SEQ ID NO: 293362 - RNA, 32 nt, Homo Sapiens
aauaccuaauaucauaguuguacaauaugaaa

SEQ ID NO: 293363 - RNA, 32 nt, Homo Sapiens
cagccuguuaucaauuacauugauaguaaauu

SEQ ID NO: 293364 - RNA, 32 nt, Homo Sapiens
cuuagccugcaccuccuguccugaagccccuu

SEQ ID NO: 293365 - RNA, 32 nt, Homo Sapiens
agcauggauagaguauugagauacuuuuucuu

SEQ ID NO: 293366 - RNA, 32 nt, Homo Sapiens
guugucugguugccauuguugaacuaaagccu

SEQ ID NO: 293367 - RNA, 32 nt, Homo Sapiens
gcgcgggcacacacgcacacagucuccuaggg

SEQ ID NO: 293368 - RNA, 32 nt, Homo Sapiens
cuggcuauaugguggggcgcgggcggugucgc

SEQ ID NO: 293369 - RNA, 32 nt, Homo Sapiens
gcggaggagcgcgcguucgggcgccgcggacg

SEQ ID NO: 293370 - RNA, 32 nt, Homo Sapiens
gucuguguuguccugacauguaaaaagcauau

SEQ ID NO: 293371 - RNA, 28 nt, Homo Sapiens
accaugccccacuuguuggugacuuuca

SEQ ID NO: 293372 - RNA, 32 nt, Homo Sapiens
uguauuuuuuaaacguuucuguucagagaacu

SEQ ID NO: 293373 - RNA, 32 nt, Homo Sapiens
ccaacuuccuucccugccuuuucccuccaagc

SEQ ID NO: 293374 - RNA, 32 nt, Homo Sapiens
uggcuuucaauccuuuguuucuaugccuacag

SEQ ID NO: 293375 - RNA, 32 nt, Homo Sapiens
cacccagguucagagggcacaagcagaaacag

SEQ ID NO: 293376 - RNA, 32 nt, Homo Sapiens
cccagaccugcuuucccggcccggcugaggcc

SEQ ID NO: 293377 - RNA, 32 nt, Homo Sapiens
ucuccuucucauuguuucuaauuagcuccuuu

SEQ ID NO: 293378 - RNA, 32 nt, Homo Sapiens
ugcuucuaggagcagaaaucuaucuugccaua

SEQ ID NO: 293379 - RNA, 32 nt, Homo Sapiens
uaggcuucaugacagggcugcagagcuuugac

SEQ ID NO: 293380 - RNA, 32 nt, Homo Sapiens
uugcacugggauuugaauguguguguuuccgu

SEQ ID NO: 293381 - RNA, 32 nt, Homo Sapiens
cccagccucgaagccaugggggcccccucgcc

SEQ ID NO: 293382 - RNA, 32 nt, Homo Sapiens
agcgcggcgcccgggccuggcgcggagccuga

SEQ ID NO: 293383 - RNA, 32 nt, Homo Sapiens
gaugaagagaaaagguuaaucuaaaugauaug

SEQ ID NO: 293384 - RNA, 32 nt, Homo Sapiens
aaaugucugugugcaauuguguuuccuuuacc

SEQ ID NO: 293385 - RNA, 30 nt, Homo Sapiens
auaaacuuuuuaaugggggagucaaagcuu

SEQ ID NO: 293386 - RNA, 32 nt, Homo Sapiens
gcaucaaaugagccaguuuauaucaucagcua

SEQ ID NO: 293387 - RNA, 32 nt, Homo Sapiens
uuucuuaucaauucuacuuuuauuuuugcuua

SEQ ID NO: 293388 - RNA, 32 nt, Homo Sapiens
uuguauuauuuuauuuucaugauauguauuuu

SEQ ID NO: 293389 - RNA, 31 nt, Homo Sapiens
uuggacuugugcucaggugaaguaguauuug

SEQ ID NO: 293390 - RNA, 32 nt, Homo Sapiens
cugguggaccugcaucaggagcaagaaacaaa

SEQ ID NO: 293391 - RNA, 32 nt, Homo Sapiens
cuaaggugguccugaagugcuguguuacuaga

SEQ ID NO: 293392 - RNA, 32 nt, Homo Sapiens
cgagggucaugagccagagagccccggggcgc

SEQ ID NO: 293393 - RNA, 32 nt, Homo Sapiens
ccauauuuugugagggccagaacuugcauuau

SEQ ID NO: 293394 - RNA, 32 nt, Homo Sapiens
uuucuacaugaugaccuucagcuccugcugcu

SEQ ID NO: 293395 - RNA, 32 nt, Homo Sapiens
uccccccacagcacuucccacuacugcuucug

SEQ ID NO: 293396 - RNA, 32 nt, Homo Sapiens
guuagcccuggccccauccuuccuauuucugu

SEQ ID NO: 293397 - RNA, 32 nt, Homo Sapiens
gaagccgccucgccacgcccaagcccugcaga

SEQ ID NO: 293398 - RNA, 32 nt, Homo Sapiens
cgaaggcgggguccgcgguccaggcugcugcc

SEQ ID NO: 293399 - RNA, 32 nt, Homo Sapiens
cuugcaacucuuuuugaauccauacaggucgu

SEQ ID NO: 293400 - RNA, 32 nt, Homo Sapiens
gagccaaauaagccucuuucuaaguuacccac

SEQ ID NO: 293401 - RNA, 32 nt, Homo Sapiens
cucucccagaaagcuccggugcuuggaccagc

SEQ ID NO: 293402 - RNA, 30 nt, Homo Sapiens
gggcagccgccgcugccgccgugggcgacu

SEQ ID NO: 293403 - RNA, 32 nt, Homo Sapiens
augucagguugccugcccaaugggagagguag

SEQ ID NO: 293404 - RNA, 32 nt, Homo Sapiens
ggggccauuggacggcagcugccugcaggugc

SEQ ID NO: 293405 - RNA, 32 nt, Homo Sapiens
ggucccuggcgagggcacuggcggcggcgggg

SEQ ID NO: 293406 - RNA, 32 nt, Homo Sapiens
gaauguuaucauggcuauuacacuuuuacuuc

SEQ ID NO: 293407 - RNA, 32 nt, Homo Sapiens
cuauaccucccuccccgagcuaagucccaggg

SEQ ID NO: 293408 - RNA, 32 nt, Homo Sapiens
cccccuccagggggcucugcucccaccccagg

SEQ ID NO: 293409 - RNA, 32 nt, Homo Sapiens
gauaaacuuugaaaaugauuuguagagaugaa

SEQ ID NO: 293410 - RNA, 32 nt, Homo Sapiens
ccucccucuccuugcuccuccuccugcaaugc

SEQ ID NO: 293411 - RNA, 32 nt, Homo Sapiens
gagguuccucaaaaaacaaaaaauagaaugau

SEQ ID NO: 293412 - RNA, 32 nt, Homo Sapiens
uggagcgcacggagcgcagaggcccggcagcc

SEQ ID NO: 293413 - RNA, 32 nt, Homo Sapiens
gcaacaucuauuuauuaaccaaguuuccuguc

SEQ ID NO: 293414 - RNA, 32 nt, Homo Sapiens
gaaaugaaaauuuuauacucuauguuucuguu

SEQ ID NO: 293415 - RNA, 32 nt, Homo Sapiens
ccgcuccggacgagccgagauguggcgccucu

SEQ ID NO: 293416 - RNA, 32 nt, Homo Sapiens
guuucugggcagguuuccugugucaguauucc

SEQ ID NO: 293417 - RNA, 32 nt, Homo Sapiens
cagggugaugacugugggagcaaaacugaccg

SEQ ID NO: 293418 - RNA, 32 nt, Homo Sapiens
uggagagcggacgcgggggcgagggugcgcgg

SEQ ID NO: 293419 - RNA, 32 nt, Homo Sapiens
ccccaggagagcccuccacagccugucaauaa

SEQ ID NO: 293420 - RNA, 31 nt, Homo Sapiens
caggugagggcgggcccgcggccucccuccc

SEQ ID NO: 293421 - RNA, 32 nt, Homo Sapiens
auagaguguuugcuuuugauaauggaaaauug

SEQ ID NO: 293422 - RNA, 32 nt, Homo Sapiens
auauaacuaauagagaagaaaggacagcuucc

SEQ ID NO: 293423 - RNA, 32 nt, Homo Sapiens
cgccuucgguagggggcgcccggggcccagcu

SEQ ID NO: 293424 - RNA, 32 nt, Homo Sapiens
gggcauagcuccccgcuucugccugcaccccu

SEQ ID NO: 293425 - RNA, 32 nt, Homo Sapiens
uucccuccagcauccuaggaacuuuauguaua

SEQ ID NO: 293426 - RNA, 32 nt, Homo Sapiens
uacacauagaagcauucaugccugcugcccug

SEQ ID NO: 293427 - RNA, 32 nt, Homo Sapiens
gugguuuuagccaaaugaaguguuaucaguaa

SEQ ID NO: 293428 - RNA, 32 nt, Homo Sapiens
gcaccccacccucccccaaagcccggaucccg

SEQ ID NO: 293429 - RNA, 32 nt, Homo Sapiens
uugcguaagcugaguucaagaccagccugggc

SEQ ID NO: 293430 - RNA, 32 nt, Homo Sapiens
uaguauacugucaguacuguacaucugcacac

SEQ ID NO: 293431 - RNA, 32 nt, Homo Sapiens
ggaaauccacagcagugauacaugugacgucc

SEQ ID NO: 293432 - RNA, 32 nt, Homo Sapiens
cuaaagaagaaaccuaauguagguuccauucu

SEQ ID NO: 293433 - RNA, 32 nt, Homo Sapiens
ugcaggguuuauauuuuguauagaaucacagu

SEQ ID NO: 293434 - RNA, 32 nt, Homo Sapiens
uaugccguuggaucagcuugcauuggaggugg

SEQ ID NO: 293435 - RNA, 32 nt, Homo Sapiens
gacagguggaaaagaaggaugaggaaggggcu

SEQ ID NO: 293436 - RNA, 32 nt, Homo Sapiens
cccgugggcuccggccggcuaagccgcggcgg

SEQ ID NO: 293437 - RNA, 32 nt, Homo Sapiens
acauugccacauauggaggaaauauucaauaa

SEQ ID NO: 293438 - RNA, 28 nt, Homo Sapiens
ucaaugcagacacccggcggcaguuccu

SEQ ID NO: 293439 - RNA, 32 nt, Homo Sapiens
acuuuggcauggauacaggauucuaaggaacc

SEQ ID NO: 293440 - RNA, 31 nt, Homo Sapiens
ggaggaggccaccagauucagaauucagaau

SEQ ID NO: 293441 - RNA, 32 nt, Homo Sapiens
aacaaaauauuuucauauuuauuucuuagaac

SEQ ID NO: 293442 - RNA, 32 nt, Homo Sapiens
uacguacauuccuuuuuccuuuuucugccucu

SEQ ID NO: 293443 - RNA, 32 nt, Homo Sapiens
uaggcuggccucucuugccuccccuuggccgg

SEQ ID NO: 293444 - RNA, 32 nt, Homo Sapiens
uggaguggacgaaaauguacauucacguugac

SEQ ID NO: 293445 - RNA, 27 nt, Homo Sapiens
ccuggcuucuccuucagcccauccacu

SEQ ID NO: 293446 - RNA, 32 nt, Homo Sapiens
cgaucacgaaacaaucacggugcgaaaugucc

SEQ ID NO: 293447 - RNA, 32 nt, Homo Sapiens
aguccuuaauaaauauugauuugauugacucu

SEQ ID NO: 293448 - RNA, 32 nt, Homo Sapiens
gaucgcaggcucggcguccuuggcagccaugg

SEQ ID NO: 293449 - RNA, 32 nt, Homo Sapiens
ucccaucuaccuccucuucauccaccaccaug

SEQ ID NO: 293450 - RNA, 32 nt, Homo Sapiens
ccuccguggguggcugcagagugugccggcac

SEQ ID NO: 293451 - RNA, 32 nt, Homo Sapiens
augggauacggaccaauggaagacugagaacu

SEQ ID NO: 293452 - RNA, 32 nt, Homo Sapiens
aaugugcauguaaauauauacucucaacauuu

SEQ ID NO: 293453 - RNA, 32 nt, Homo Sapiens
acgucguuacaaucgugauuuggaacggauga

SEQ ID NO: 293454 - RNA, 32 nt, Homo Sapiens
gccuuccggaggagacgggggcagcuuggcuu

SEQ ID NO: 293455 - RNA, 32 nt, Homo Sapiens
aaaaaaguguugcaaauguaaaacauugccau

SEQ ID NO: 293456 - RNA, 32 nt, Homo Sapiens
uugcaaguguucuauuugauggauuaaguaua

SEQ ID NO: 293457 - RNA, 32 nt, Homo Sapiens
gaacagacggaucggcagggcggggcggaacg

SEQ ID NO: 293458 - RNA, 32 nt, Homo Sapiens
gacaguacaggacaugaguccuggugagggac

SEQ ID NO: 293459 - RNA, 32 nt, Homo Sapiens
cagccucagaauuugggggcccauuacacacc

SEQ ID NO: 293460 - RNA, 32 nt, Homo Sapiens
ugaccccaggagggaggcaggggaggggugcg

SEQ ID NO: 293461 - RNA, 32 nt, Homo Sapiens
gugugauuuugugucugagaccacaccccagu

SEQ ID NO: 293462 - RNA, 32 nt, Homo Sapiens
uaagagacagaggagaaaguggagcggggagg

SEQ ID NO: 293463 - RNA, 32 nt, Homo Sapiens
gcccugugaaccugaugggaaccucucuguga

SEQ ID NO: 293464 - RNA, 32 nt, Homo Sapiens
caagcacccgaggcuccugcugcugcgcacgc

SEQ ID NO: 293465 - RNA, 32 nt, Homo Sapiens
uuuugauuuauuuuuauuuucucuuugugggu

SEQ ID NO: 293466 - RNA, 32 nt, Homo Sapiens
ugcacacuggccccggcccacggcacagcaau

SEQ ID NO: 293467 - RNA, 32 nt, Homo Sapiens
uuuuagccuugugaaguauucuuaauuauaac

SEQ ID NO: 293468 - RNA, 32 nt, Homo Sapiens
ggugacagcuuccuuuccuguguguacucugu

SEQ ID NO: 293469 - RNA, 32 nt, Homo Sapiens
uugcuuuucuuuguauuuuuccugcuuuaguc

SEQ ID NO: 293470 - RNA, 32 nt, Homo Sapiens
ugggauuacaugcaucuaagacuuuauccauu

SEQ ID NO: 293471 - RNA, 32 nt, Homo Sapiens
ugauagaauuugucauuuuucuuacaacagcc

SEQ ID NO: 293472 - RNA, 32 nt, Homo Sapiens
gaccugcgcucucagcugaccaucaucccgca

SEQ ID NO: 293473 - RNA, 32 nt, Homo Sapiens
ccaaaggagagccucgggugucacgacugcca

SEQ ID NO: 293474 - RNA, 32 nt, Homo Sapiens
uuucccugcccccauucugaacagauguguuc

SEQ ID NO: 293475 - RNA, 32 nt, Homo Sapiens
ggagcagccauugggagggaaccaucaguaag

SEQ ID NO: 293476 - RNA, 32 nt, Homo Sapiens
gaaggagaaugaauuuucuccucuagugauua

SEQ ID NO: 293477 - RNA, 32 nt, Homo Sapiens
gagauaauuaaugauuaaacuauuaaugauaa

SEQ ID NO: 293478 - RNA, 32 nt, Homo Sapiens
gaauuuagaauaaaaguggcacauuacauauc

SEQ ID NO: 293479 - RNA, 32 nt, Homo Sapiens
auaauagcagagcuauucucacccuggucuga

SEQ ID NO: 293480 - RNA, 32 nt, Homo Sapiens
acaaaagauccaucaagugcugacugcuuaaa

SEQ ID NO: 293481 - RNA, 32 nt, Homo Sapiens
agauauacaaauauauuauauauuuuucugag

SEQ ID NO: 293482 - RNA, 32 nt, Homo Sapiens
ggugggugcgcacgcucugucccugcgugacc

SEQ ID NO: 293483 - RNA, 32 nt, Homo Sapiens
cuuugcggccccaguacuugcuuaguuccgag

SEQ ID NO: 293484 - RNA, 32 nt, Homo Sapiens
uauccugagaaaccacaguaaauggauucaga

SEQ ID NO: 293485 - RNA, 32 nt, Homo Sapiens
auuccucauauagaaucaauaauuaccaauau

SEQ ID NO: 293486 - RNA, 32 nt, Homo Sapiens
acuugcuuuucuuuuucuuuuuuuauacccca

SEQ ID NO: 293487 - RNA, 32 nt, Homo Sapiens
agcaguguuuucugccaaguagcggacgcauu

SEQ ID NO: 293488 - RNA, 32 nt, Homo Sapiens
uuuggauaaguacacaaagcgucaaugcuguu

SEQ ID NO: 293489 - RNA, 32 nt, Homo Sapiens
cauccuuccuucccacccaucgcuguguguua

SEQ ID NO: 293490 - RNA, 32 nt, Homo Sapiens
uuuauuguaaaacucuuguaauuuauaguaau

SEQ ID NO: 293491 - RNA, 32 nt, Homo Sapiens
gcacgaaaagggugggacgggcaggcagcgcg

SEQ ID NO: 293492 - RNA, 32 nt, Homo Sapiens
gcugaggcggguggauugcuugagcccaggag

SEQ ID NO: 293493 - RNA, 32 nt, Homo Sapiens
aaucauacauacacucaacaaacauuaaaguu

SEQ ID NO: 293494 - RNA, 32 nt, Homo Sapiens
aguagaaaagcaaccuuuguauggaugugggg

SEQ ID NO: 293495 - RNA, 32 nt, Homo Sapiens
caggagggaggagacgcaaacacaauuggccg

SEQ ID NO: 293496 - RNA, 32 nt, Homo Sapiens
cuuaggagcacccaccaagcucuggguaagga

SEQ ID NO: 293497 - RNA, 32 nt, Homo Sapiens
uauccagacaccuucuccugacccaggcacca

SEQ ID NO: 293498 - RNA, 32 nt, Homo Sapiens
uagaacgagccacuaaccuauuagagaagagg

SEQ ID NO: 293499 - RNA, 32 nt, Homo Sapiens
uuguggcaggugccguggagccccacaaggcc

SEQ ID NO: 293500 - RNA, 31 nt, Homo Sapiens
agucuguguaacauuuuaauauuguuuguaa

SEQ ID NO: 293501 - RNA, 32 nt, Homo Sapiens
ggcugcccugucacuccucuaacacuucccuc

SEQ ID NO: 293502 - RNA, 32 nt, Homo Sapiens
cuacuuccaaaauacguuugugaacuucuuuc

SEQ ID NO: 293503 - RNA, 32 nt, Homo Sapiens
ccgucucugaccacaacccaagaaugggguga

SEQ ID NO: 293504 - RNA, 32 nt, Homo Sapiens
cccugccuccccacccuccccauggcccaccc

SEQ ID NO: 293505 - RNA, 32 nt, Homo Sapiens
cuuccuuuuuaaaaugcuuuccucuucuuguc

SEQ ID NO: 293506 - RNA, 32 nt, Homo Sapiens
cuccagucacugugccagcaggguggcugugc

SEQ ID NO: 293507 - RNA, 32 nt, Homo Sapiens
gaaaucacccgucuucugcgucgcucacgcug

SEQ ID NO: 293508 - RNA, 32 nt, Homo Sapiens
ccacauauggcacaacugucuaaugacacggu

SEQ ID NO: 293509 - RNA, 32 nt, Homo Sapiens
ggacagcccacccaggcggcggggucuuggug

SEQ ID NO: 293510 - RNA, 32 nt, Homo Sapiens
ggcuucucaauccccaaucuaccacuaguaag

SEQ ID NO: 293511 - RNA, 32 nt, Homo Sapiens
agcaaagagaccagcugacugucucucggccc

SEQ ID NO: 293512 - RNA, 32 nt, Homo Sapiens
gaagaaggaggcgggcggcccgggccucaggc

SEQ ID NO: 293513 - RNA, 32 nt, Homo Sapiens
gggugggagggagagcugguccaggggugagg

SEQ ID NO: 293514 - RNA, 32 nt, Homo Sapiens
caugucuuaaaauuauaauauggggaaaaacg

SEQ ID NO: 293515 - RNA, 32 nt, Homo Sapiens
aagugggaaccagugugcuuugaaaccaaauu

SEQ ID NO: 293516 - RNA, 32 nt, Homo Sapiens
gcagaaugagaucaggcauauuugugguugac

SEQ ID NO: 293517 - RNA, 32 nt, Homo Sapiens
uggggcuacgugcagagcugucgcggagccgg

SEQ ID NO: 293518 - RNA, 32 nt, Homo Sapiens
gauucuacaaagcucuuuugagcauuuagacu

SEQ ID NO: 293519 - RNA, 32 nt, Homo Sapiens
gucaaaaauaccaauguuaauaugauuaauuu

SEQ ID NO: 293520 - RNA, 32 nt, Homo Sapiens
agugugggcugaagaugguugguuucaugugg

SEQ ID NO: 293521 - RNA, 32 nt, Homo Sapiens
gccuggcuaauuuuuguacuuuucauagagau

SEQ ID NO: 293522 - RNA, 32 nt, Homo Sapiens
guuuacccucaagccgaugacuccauggcuac

SEQ ID NO: 293523 - RNA, 32 nt, Homo Sapiens
agugguaugagcauaaugacuguuuaaggaug

SEQ ID NO: 293524 - RNA, 32 nt, Homo Sapiens
cccccaagcagagcuuccucagagaaaguggu

SEQ ID NO: 293525 - RNA, 32 nt, Homo Sapiens
guuucauccuucccuuuccugcugcagggcga

SEQ ID NO: 293526 - RNA, 32 nt, Homo Sapiens
uagaaagaugagaucggagacaauguuguguu

SEQ ID NO: 293527 - RNA, 32 nt, Homo Sapiens
ggggccgguuuuccucagcucuaggcuguucu

SEQ ID NO: 293528 - RNA, 32 nt, Homo Sapiens
ucccacguggcugaggguauuugguguggguu

SEQ ID NO: 293529 - RNA, 32 nt, Homo Sapiens
ccauaagaggaccccugaaaugucccgugcag

SEQ ID NO: 293530 - RNA, 32 nt, Homo Sapiens
uaacgguuaagaaagcacuuaaacagaagcag

SEQ ID NO: 293531 - RNA, 32 nt, Homo Sapiens
guugugaccggcgggggacgccggugguggcg

SEQ ID NO: 293532 - RNA, 32 nt, Homo Sapiens
cuaucuccauccaaggcagauuuuuuccccua

SEQ ID NO: 293533 - RNA, 32 nt, Homo Sapiens
ugaacagccccucugcuuuuuauccuuauggc

SEQ ID NO: 293534 - RNA, 32 nt, Homo Sapiens
guggcacccgggguuaaacagcagaggcucca

SEQ ID NO: 293535 - RNA, 32 nt, Homo Sapiens
uuuaauuuuguuuuguuuuucuuacagcuuug

SEQ ID NO: 293536 - RNA, 32 nt, Homo Sapiens
uagagcacaaaacaggggauugucuagcgauu

SEQ ID NO: 293537 - RNA, 32 nt, Homo Sapiens
gguuucagcuggagcggcggcggcggcaacau

SEQ ID NO: 293538 - RNA, 32 nt, Homo Sapiens
uauuugggaacaaaaauugcgaagacucaucu

SEQ ID NO: 293539 - RNA, 32 nt, Homo Sapiens
acauguuuuuugcugaccuucuccuuauuauc

SEQ ID NO: 293540 - RNA, 32 nt, Homo Sapiens
gagagggcgagggagggaggguaggaccugua

SEQ ID NO: 293541 - RNA, 32 nt, Homo Sapiens
aacacugcuuaucaccaagaagcggggcgauc

SEQ ID NO: 293542 - RNA, 32 nt, Homo Sapiens
gcuuuuucucuuccucccugggcagaauguag

SEQ ID NO: 293543 - RNA, 32 nt, Homo Sapiens
ccaaaacaugucaaaaucaugaccucuuugaa

SEQ ID NO: 293544 - RNA, 32 nt, Homo Sapiens
acaucugcccuggccucuccugcuccagggca

SEQ ID NO: 293545 - RNA, 32 nt, Homo Sapiens
gagaugcggcgcggagcgccggagcagggcua

SEQ ID NO: 293546 - RNA, 32 nt, Homo Sapiens
cuacuucuucagugccucuuucaccaauauga

SEQ ID NO: 293547 - RNA, 32 nt, Homo Sapiens
accggcgggaggagguguacauccgcagcacg

SEQ ID NO: 293548 - RNA, 32 nt, Homo Sapiens
gaccugggacgccugggguggugagagguggu

SEQ ID NO: 293549 - RNA, 32 nt, Homo Sapiens
aaagcacuucaccuuucuggaaauaaaacuuu

SEQ ID NO: 293550 - RNA, 31 nt, Homo Sapiens
ucaucuuugcaggaaccaggaguccugagca

SEQ ID NO: 293551 - RNA, 32 nt, Homo Sapiens
uuuuuaaugucuuguggaaauuugcagagggg

SEQ ID NO: 293552 - RNA, 32 nt, Homo Sapiens
caaguuccacuuuaaauuauggaggccuuagg

SEQ ID NO: 293553 - RNA, 32 nt, Homo Sapiens
caguuucucccucuucaccccugcgccuccac

SEQ ID NO: 293554 - RNA, 32 nt, Homo Sapiens
cauuucuaguugccgaagugucugcuucaugg

SEQ ID NO: 293555 - RNA, 32 nt, Homo Sapiens
gucgacugcccccagcugcugucuaaagcaug

SEQ ID NO: 293556 - RNA, 32 nt, Homo Sapiens
uagagccucuuggagacaacauccuaagauac

SEQ ID NO: 293557 - RNA, 32 nt, Homo Sapiens
uugaagaucuucugccaacuauucuccauuca

SEQ ID NO: 293558 - RNA, 30 nt, Homo Sapiens
caaagagauaaaaggcgcgagucagcaggu

SEQ ID NO: 293559 - RNA, 32 nt, Homo Sapiens
accucauuaauaauuugcucacuugguaaaug

SEQ ID NO: 293560 - RNA, 32 nt, Homo Sapiens
uccuccccaucccaccccuuggaaacucccca

SEQ ID NO: 293561 - RNA, 32 nt, Homo Sapiens
ucgggcugggccucaaacacggcccccacugc

SEQ ID NO: 293562 - RNA, 32 nt, Homo Sapiens
cauacuucuuugaucuuuggaagaagaagaug

SEQ ID NO: 293563 - RNA, 32 nt, Homo Sapiens
gaaagcuccgcggagccgcagcggcgccucuc

SEQ ID NO: 293564 - RNA, 32 nt, Homo Sapiens
gccaggccugccagacgcucccgccccggcac

SEQ ID NO: 293565 - RNA, 32 nt, Homo Sapiens
uaugguaguacccacccgguauuccuaaaauc

SEQ ID NO: 293566 - RNA, 32 nt, Homo Sapiens
uugaggagugguuuuucuuuucuuggacacuu

SEQ ID NO: 293567 - RNA, 32 nt, Homo Sapiens
ugaacaaugagggauuaauagauucuucuuaa

SEQ ID NO: 293568 - RNA, 32 nt, Homo Sapiens
cggggccacguuguuauauguauugauauaca

SEQ ID NO: 293569 - RNA, 32 nt, Homo Sapiens
guggugguggagagggcagcugguguuaagaa

SEQ ID NO: 293570 - RNA, 32 nt, Homo Sapiens
cugaccuagguccccccuuucuucuguccccu

SEQ ID NO: 293571 - RNA, 32 nt, Homo Sapiens
auacuuaaaaauauuucuuaauugggauuugu

SEQ ID NO: 293572 - RNA, 32 nt, Homo Sapiens
uccacuaguauuauuucauuuuuuauuacucc

SEQ ID NO: 293573 - RNA, 32 nt, Homo Sapiens
gugacuggaaaagacuuggggaaaauccagcu

SEQ ID NO: 293574 - RNA, 32 nt, Homo Sapiens
ugcuggcagauguauuugaugguuacucuuuu

SEQ ID NO: 293575 - RNA, 32 nt, Homo Sapiens
gaaaaacauuuucuuuccuacauguaucucug

SEQ ID NO: 293576 - RNA, 32 nt, Homo Sapiens
uggagcaggguggagggcuugaugugauggug

SEQ ID NO: 293577 - RNA, 32 nt, Homo Sapiens
gauguaugguggcaugagaggcaugaagggau

SEQ ID NO: 293578 - RNA, 32 nt, Homo Sapiens
gaaacguauaucccuacaaaccuccccuccaa

SEQ ID NO: 293579 - RNA, 32 nt, Homo Sapiens
cauguucaauguuugaaagguauucaguaauc

SEQ ID NO: 293580 - RNA, 32 nt, Homo Sapiens
cauguuuggggauaaguuaaaugucugagcua

SEQ ID NO: 293581 - RNA, 32 nt, Homo Sapiens
uacaccaaacuccugcaacaugcaguugaccc

SEQ ID NO: 293582 - RNA, 32 nt, Homo Sapiens
cggaggcgcugggucgggaugccgaaccucuc

SEQ ID NO: 293583 - RNA, 32 nt, Homo Sapiens
gcaggucucccacagagcugcuuuucugcccg

SEQ ID NO: 293584 - RNA, 32 nt, Homo Sapiens
cagccucucgcaccaugugauuauuugccucg

SEQ ID NO: 293585 - RNA, 32 nt, Homo Sapiens
agaugagaauccagacauugcauguggagguc

SEQ ID NO: 293586 - RNA, 32 nt, Homo Sapiens
uuuuagaagcaucucugcuuuaagaacuaggc

SEQ ID NO: 293587 - RNA, 32 nt, Homo Sapiens
ugagagugaagaagacuaugcugaaacuaucg

SEQ ID NO: 293588 - RNA, 32 nt, Homo Sapiens
ccaacccccggaacgcgcacccgccccaacgc

SEQ ID NO: 293589 - RNA, 32 nt, Homo Sapiens
cggagaguggggaaguggagcggcagcucccu

SEQ ID NO: 293590 - RNA, 32 nt, Homo Sapiens
ugaagcuuguuuucuuuuuuucuucccauuuu

SEQ ID NO: 293591 - RNA, 32 nt, Homo Sapiens
ccagccgaauccaagccguguguacugcgugc

SEQ ID NO: 293592 - RNA, 32 nt, Homo Sapiens
gauaucugggucuggaacaggaggagaaaggg

SEQ ID NO: 293593 - RNA, 32 nt, Homo Sapiens
uuaaaagcugaauaaacuuugagaaauuauuu

SEQ ID NO: 293594 - RNA, 32 nt, Homo Sapiens
caggggguguugccagguguggcuggggaagg

SEQ ID NO: 293595 - RNA, 32 nt, Homo Sapiens
ucccaccuggggacauggcuagucccaaacua

SEQ ID NO: 293596 - RNA, 32 nt, Homo Sapiens
gaucgucacaugccggggagcaauguggaugg

SEQ ID NO: 293597 - RNA, 32 nt, Homo Sapiens
ugggacauacguauguguuuucuuaguaaaau

SEQ ID NO: 293598 - RNA, 32 nt, Homo Sapiens
accuacugugugcauagcauuccaccaggacu

SEQ ID NO: 293599 - RNA, 32 nt, Homo Sapiens
cuguccccauugcugccugccggcgcuccgca

SEQ ID NO: 293600 - RNA, 32 nt, Homo Sapiens
uuuaaaauaaaauacauuuauaacuggcaaug

SEQ ID NO: 293601 - RNA, 32 nt, Homo Sapiens
gauuucaccucuugaguauaaacuuuuuaaau

SEQ ID NO: 293602 - RNA, 32 nt, Homo Sapiens
ucaguugggccugaaggccccgggccaguguc

SEQ ID NO: 293603 - RNA, 32 nt, Homo Sapiens
gccuuuaucguuaggggcaaaagcagacaucu

SEQ ID NO: 293604 - RNA, 32 nt, Homo Sapiens
gggaauauaucucuauuugagaauagacccuu

SEQ ID NO: 293605 - RNA, 32 nt, Homo Sapiens
cgaaucucauuuccacgugagugaggauaaag

SEQ ID NO: 293606 - RNA, 32 nt, Homo Sapiens
gaaugaauccggagcugggcgcggugacucau

SEQ ID NO: 293607 - RNA, 32 nt, Homo Sapiens
aauuccaggugauucucuacaucugcagcuug

SEQ ID NO: 293608 - RNA, 32 nt, Homo Sapiens
cucccccgucgugcuuccuggggaagggggcg

SEQ ID NO: 293609 - RNA, 32 nt, Homo Sapiens
uuaaccaaggacuaauaggauaccuuuccauu

SEQ ID NO: 293610 - RNA, 32 nt, Homo Sapiens
uggcuucugagcagagacucccugcccaucaa

SEQ ID NO: 293611 - RNA, 27 nt, Homo Sapiens
uguggucuaauaaucugguauuaaauc

SEQ ID NO: 293612 - RNA, 32 nt, Homo Sapiens
agaggcaacugacuucauuugugccacacgca

SEQ ID NO: 293613 - RNA, 32 nt, Homo Sapiens
caagaauagcaucuguacaaaggggaaagaac

SEQ ID NO: 293614 - RNA, 32 nt, Homo Sapiens
uggcuccggggccagcaucccucgggggaucg

SEQ ID NO: 293615 - RNA, 32 nt, Homo Sapiens
acacagugaaguuuuuaggaaauacacacuaa

SEQ ID NO: 293616 - RNA, 32 nt, Homo Sapiens
acauacauacauauauaucugauaaaauugug

SEQ ID NO: 293617 - RNA, 32 nt, Homo Sapiens
gcaccacuugaaggagcucuaucaccagccug

SEQ ID NO: 293618 - RNA, 32 nt, Homo Sapiens
aagagcuggagcaacagccugcauccauuucc

SEQ ID NO: 293619 - RNA, 32 nt, Homo Sapiens
gcacagaccuacacucgcucuuucucuccggu

SEQ ID NO: 293620 - RNA, 32 nt, Homo Sapiens
acguuuguagaugaaacagaucacugugcugu

SEQ ID NO: 293621 - RNA, 32 nt, Homo Sapiens
gacaaauugcuuguacaauuugaaaugggccu

SEQ ID NO: 293622 - RNA, 32 nt, Homo Sapiens
caagcauuuuuccagcguuaccaucaaacuca

SEQ ID NO: 293623 - RNA, 32 nt, Homo Sapiens
gcccuguguaaccaccgagucccggccggagc

SEQ ID NO: 293624 - RNA, 32 nt, Homo Sapiens
acagugggcaucggguaagaaaacacacaugc

SEQ ID NO: 293625 - RNA, 32 nt, Homo Sapiens
ucccuuuuuuacagugaaccuguauucaguua

SEQ ID NO: 293626 - RNA, 32 nt, Homo Sapiens
aggauuuugcuuugauuguguuuaugucaugg

SEQ ID NO: 293627 - RNA, 32 nt, Homo Sapiens
cugccaugaauucuuggcuccuggacugugga

SEQ ID NO: 293628 - RNA, 32 nt, Homo Sapiens
gaacauccccuuccaguccauccacuucauca

SEQ ID NO: 293629 - RNA, 32 nt, Homo Sapiens
ucuuuccggaagcucauggagcacaagcagaa

SEQ ID NO: 293630 - RNA, 32 nt, Homo Sapiens
cagggucuauaaggagguaauaaugguuaagu

SEQ ID NO: 293631 - RNA, 32 nt, Homo Sapiens
gccgguccccuuucuucucaccacagugccca

SEQ ID NO: 293632 - RNA, 32 nt, Homo Sapiens
uuuccuuuaucccuccauacacagcaacugga

SEQ ID NO: 293633 - RNA, 32 nt, Homo Sapiens
ggaggggcuggggacuugugucugcggggauc

SEQ ID NO: 293634 - RNA, 31 nt, Homo Sapiens
ugugggugaaacacuccugugccagcugagc

SEQ ID NO: 293635 - RNA, 32 nt, Homo Sapiens
cggcggccaguucucuuccuccugcgcaccug

SEQ ID NO: 293636 - RNA, 32 nt, Homo Sapiens
ugacacccagcuuuaaaacaaacaaacaaaca

SEQ ID NO: 293637 - RNA, 32 nt, Homo Sapiens
ccauccugcauggcugagagccaggccucccg

SEQ ID NO: 293638 - RNA, 32 nt, Homo Sapiens
gccucagggacuuggaggauguagaaguggga

SEQ ID NO: 293639 - RNA, 32 nt, Homo Sapiens
agguaacagcuucagcuucagaaucggagcga

SEQ ID NO: 293640 - RNA, 31 nt, Homo Sapiens
gcuucugcaaggucucagggacgggcugcag

SEQ ID NO: 293641 - RNA, 32 nt, Homo Sapiens
ccaugacuguggaggggccaccccccaaagau

SEQ ID NO: 293642 - RNA, 32 nt, Homo Sapiens
uaacuaacauccaggcggccaugggccucucg

SEQ ID NO: 293643 - RNA, 32 nt, Homo Sapiens
guguugggggagagauggagggguguugacag

SEQ ID NO: 293644 - RNA, 32 nt, Homo Sapiens
ccugcggcggggggaggggggccucuuuagcu

SEQ ID NO: 293645 - RNA, 32 nt, Homo Sapiens
cggcgccgcgcucggcggccgccauugcagcu

SEQ ID NO: 293646 - RNA, 32 nt, Homo Sapiens
gaccccucccggcugggcggccccacagaccc

SEQ ID NO: 293647 - RNA, 32 nt, Homo Sapiens
acuggagcaggguagggaacaccuggcccacc

SEQ ID NO: 293648 - RNA, 30 nt, Homo Sapiens
guaucagaaauugccacccucuuaauuucu

SEQ ID NO: 293649 - RNA, 30 nt, Homo Sapiens
cugacacuuggaaugggggacaucuggauu

SEQ ID NO: 293650 - RNA, 32 nt, Homo Sapiens
cauggccacucccugcccccagccuggcuuga

SEQ ID NO: 293651 - RNA, 32 nt, Homo Sapiens
uucucacccagcucggcagccuuugcuacacc

SEQ ID NO: 293652 - RNA, 30 nt, Homo Sapiens
ucaacaugaagauagccacagugucagugc

SEQ ID NO: 293653 - RNA, 32 nt, Homo Sapiens
ugucugaaucaucauuguauuaaaccacucau

SEQ ID NO: 293654 - RNA, 32 nt, Homo Sapiens
uuggucccagaauugggaccggggccccgcug

SEQ ID NO: 293655 - RNA, 32 nt, Homo Sapiens
cagcugaaaaaggaaguugguuaugccaccuu

SEQ ID NO: 293656 - RNA, 29 nt, Homo Sapiens
agccaugucucucggcggagccuccgagc

SEQ ID NO: 293657 - RNA, 32 nt, Homo Sapiens
ucagcuuccccgggcgcguccaggacccgcug

SEQ ID NO: 293658 - RNA, 32 nt, Homo Sapiens
uuucuaguuguuguuuuucaauaaaagugucc

SEQ ID NO: 293659 - RNA, 31 nt, Homo Sapiens
aucaggauggcugaggaaaaggguggaaagc

SEQ ID NO: 293660 - RNA, 32 nt, Homo Sapiens
guguggcccaguuucucucugcucuccauuaa

SEQ ID NO: 293661 - RNA, 32 nt, Homo Sapiens
cucacccucgucuggaggggcaggaguuuugc

SEQ ID NO: 293662 - RNA, 32 nt, Homo Sapiens
gagaugaggacagagggaaccaagacucugaa

SEQ ID NO: 293663 - RNA, 32 nt, Homo Sapiens
agagaagaaugucagaugcagcagaagcuccc

SEQ ID NO: 293664 - RNA, 32 nt, Homo Sapiens
guugauauauacauuuaaauguagaaauuuau

SEQ ID NO: 293665 - RNA, 29 nt, Homo Sapiens
ucauucgagguccggguccggcuugcggg

SEQ ID NO: 293666 - RNA, 32 nt, Homo Sapiens
aaaugaaaaugggcacuucauguaucuggaag

SEQ ID NO: 293667 - RNA, 32 nt, Homo Sapiens
acccgggagacggcgcuugcagugagccgaga

SEQ ID NO: 293668 - RNA, 32 nt, Homo Sapiens
aguucuuaaccucaacuuuuguagaaguauuu

SEQ ID NO: 293669 - RNA, 29 nt, Homo Sapiens
uuaggccagaugcagagaaagcuaaaugu

SEQ ID NO: 293670 - RNA, 32 nt, Homo Sapiens
gcuuucuguaacuuguuuuaauuuagaacacu

SEQ ID NO: 293671 - RNA, 32 nt, Homo Sapiens
aggagggaacagaacagaguuggaaguagggg

SEQ ID NO: 293672 - RNA, 32 nt, Homo Sapiens
acgcagagcgcugcugggcugccgggucuccc

SEQ ID NO: 293673 - RNA, 32 nt, Homo Sapiens
uuggagacuauaagggagccucugcacccagg

SEQ ID NO: 293674 - RNA, 32 nt, Homo Sapiens
acaacaucucccugggcccuguuaucagucac

SEQ ID NO: 293675 - RNA, 32 nt, Homo Sapiens
gcgcgccgcgcccugugucuccggguggggca

SEQ ID NO: 293676 - RNA, 32 nt, Homo Sapiens
ggaugaaauauuugucaaaaucuuaacugaau

SEQ ID NO: 293677 - RNA, 32 nt, Homo Sapiens
caaugcaugcuucagggccacacccagcaguu

SEQ ID NO: 293678 - RNA, 31 nt, Homo Sapiens
acauugcaagugagugcaggagugagauuau

SEQ ID NO: 293679 - RNA, 32 nt, Homo Sapiens
cuuucuuuguuacauuaaccguuaguaaaaga

SEQ ID NO: 293680 - RNA, 32 nt, Homo Sapiens
uucaucuuaggggaucgcucuuccucaaacca

SEQ ID NO: 293681 - RNA, 32 nt, Homo Sapiens
aaacugugaaauguacuaaauaaaauguacau

SEQ ID NO: 293682 - RNA, 32 nt, Homo Sapiens
cagacuccaaguucuucaguuuugagacucag

SEQ ID NO: 293683 - RNA, 32 nt, Homo Sapiens
uccauucuagagggaaacaaaagggagagccc

SEQ ID NO: 293684 - RNA, 32 nt, Homo Sapiens
cccugcccucccgcccagcccgggccaccucg

SEQ ID NO: 293685 - RNA, 30 nt, Homo Sapiens
cugcaggcaccgcugccgccgccugaguag

SEQ ID NO: 293686 - RNA, 32 nt, Homo Sapiens
agaguguaagugugcagccuucaucagcuuau

SEQ ID NO: 293687 - RNA, 32 nt, Homo Sapiens
ggccaaagccaaagcuaggccuggccagaugc

SEQ ID NO: 293688 - RNA, 32 nt, Homo Sapiens
uuuaauacagaaaaaauugacagguauuauaa

SEQ ID NO: 293689 - RNA, 32 nt, Homo Sapiens
uaagaagaccugaguucuucucucaguuccaa

SEQ ID NO: 293690 - RNA, 32 nt, Homo Sapiens
uuaaaagugguuggggauccacaggaacgaca

SEQ ID NO: 293691 - RNA, 32 nt, Homo Sapiens
agggguuggacccagggcugaggcaggccccc

SEQ ID NO: 293692 - RNA, 32 nt, Homo Sapiens
aaauagaaggcaaccaugagauaauacaagcc

SEQ ID NO: 293693 - RNA, 32 nt, Homo Sapiens
auaggauuugcuggauuuacuaacaauuuccc

SEQ ID NO: 293694 - RNA, 32 nt, Homo Sapiens
gauaccugcgccgcacugcgccgcccgcccgu

SEQ ID NO: 293695 - RNA, 32 nt, Homo Sapiens
ugcaccagcuggggucccgguggugggggcac

SEQ ID NO: 293696 - RNA, 32 nt, Homo Sapiens
cugacagcgcagcuccugaggacuucugcggc

SEQ ID NO: 293697 - RNA, 32 nt, Homo Sapiens
ucuuucuggggaauccaauuauaguugcuuug

SEQ ID NO: 293698 - RNA, 32 nt, Homo Sapiens
cagaauuuacuuuaaaugucacguaaaaacaa

SEQ ID NO: 293699 - RNA, 32 nt, Homo Sapiens
aaauaauucaguguaauacaucugucaaaguu

SEQ ID NO: 293700 - RNA, 32 nt, Homo Sapiens
acuggugugagccacugugucuggccagaaaa

SEQ ID NO: 293701 - RNA, 32 nt, Homo Sapiens
cuaauuuuacuacacucuuuuguuauguauau

SEQ ID NO: 293702 - RNA, 32 nt, Homo Sapiens
ugaguacuucuagggagcaaauccauuauaga

SEQ ID NO: 293703 - RNA, 32 nt, Homo Sapiens
cauguaugaaaagaaagaaaggaggaccaaga

SEQ ID NO: 293704 - RNA, 32 nt, Homo Sapiens
uguguuuuuuguuuuuuuuuuaauaacucaaa

SEQ ID NO: 293705 - RNA, 32 nt, Homo Sapiens
gaugaaggaagauguggaaaucuuagccugcc

SEQ ID NO: 293706 - RNA, 30 nt, Homo Sapiens
cauccgggaggugguucgggauaaagagaa

SEQ ID NO: 293707 - RNA, 32 nt, Homo Sapiens
cuguuccaagaggccuuacacacacacacaaa

SEQ ID NO: 293708 - RNA, 32 nt, Homo Sapiens
gauacccuuccagucucacuuccaguggaagg

SEQ ID NO: 293709 - RNA, 32 nt, Homo Sapiens
ggguuagaauccaccuuuucuuuugguagaac

SEQ ID NO: 293710 - RNA, 32 nt, Homo Sapiens
cugaggaggcggauuaggggggcgcggagucu

SEQ ID NO: 293711 - RNA, 30 nt, Homo Sapiens
ucauguaaugucauugcagaagcagccuga

SEQ ID NO: 293712 - RNA, 32 nt, Homo Sapiens
uaaguaacucauguuuuucuuuagucaaucau

SEQ ID NO: 293713 - RNA, 32 nt, Homo Sapiens
uauuggccuggggcagagcagcuccuccccaa

SEQ ID NO: 293714 - RNA, 32 nt, Homo Sapiens
ggacuugagugggacauggaaccucgccugac

SEQ ID NO: 293715 - RNA, 32 nt, Homo Sapiens
aauuguaggagcaggauggaaauacuuugcug

SEQ ID NO: 293716 - RNA, 32 nt, Homo Sapiens
uauucugguggcugcugucaugagaugauaaa

SEQ ID NO: 293717 - RNA, 32 nt, Homo Sapiens
uuuuuaacaaaacaacuuuauauagcauacag

SEQ ID NO: 293718 - RNA, 32 nt, Homo Sapiens
gcggggucucggccggguccgcgcucugaagg

SEQ ID NO: 293719 - RNA, 28 nt, Homo Sapiens
ugauagugggaaaaacauuugagaccua

SEQ ID NO: 293720 - RNA, 32 nt, Homo Sapiens
agaugauguaaaaauauguauaugucuagaua

SEQ ID NO: 293721 - RNA, 32 nt, Homo Sapiens
cuuacugaacaacuuucugaaacacaaauuaa

SEQ ID NO: 293722 - RNA, 32 nt, Homo Sapiens
cagaccaguaggagggcggcuggcagcgggag

SEQ ID NO: 293723 - RNA, 32 nt, Homo Sapiens
ggccaaggcagacacugccaaagacagaguug

SEQ ID NO: 293724 - RNA, 32 nt, Homo Sapiens
uuacagguggggaaacaaaggccuugagggcu

SEQ ID NO: 293725 - RNA, 32 nt, Homo Sapiens
gaccuuguuuugcugucuucaucaucuuaccu

SEQ ID NO: 293726 - RNA, 32 nt, Homo Sapiens
cugaaaacuuauaaaaaauguuuagauacaua

SEQ ID NO: 293727 - RNA, 32 nt, Homo Sapiens
auacccagcuaauguuuuauuuuuuguagaga

SEQ ID NO: 293728 - RNA, 32 nt, Homo Sapiens
ccucccuccagcugcgagugcggccucggcug

SEQ ID NO: 293729 - RNA, 32 nt, Homo Sapiens
agggagacucaccaccaaggggauuaccacca

SEQ ID NO: 293730 - RNA, 32 nt, Homo Sapiens
aguucagucuucugcucgccccuuucccucac

SEQ ID NO: 293731 - RNA, 32 nt, Homo Sapiens
ccucucuccuucugucccacugcccucucccc

SEQ ID NO: 293732 - RNA, 32 nt, Homo Sapiens
ugugucccacuuucccacacuuggugcgcugg

SEQ ID NO: 293733 - RNA, 32 nt, Homo Sapiens
gaauaaacaucauaguuucuuggccacugaau

SEQ ID NO: 293734 - RNA, 32 nt, Homo Sapiens
gaagaagucaaccauaugaaacugaaaaaaua

SEQ ID NO: 293735 - RNA, 32 nt, Homo Sapiens
ugcucucucuuuuagaugaucuauucaaagug

SEQ ID NO: 293736 - RNA, 32 nt, Homo Sapiens
uuccuuuucacaaaacccaacuucucagggau

SEQ ID NO: 293737 - RNA, 32 nt, Homo Sapiens
ugaguggcagcugugcuccagcuccugcgggc

SEQ ID NO: 293738 - RNA, 32 nt, Homo Sapiens
uggccaaugugaacucauuaaaaggaaaacca

SEQ ID NO: 293739 - RNA, 32 nt, Homo Sapiens
ugggaccauaaccggccgccgccgccaccgcg

SEQ ID NO: 293740 - RNA, 32 nt, Homo Sapiens
gauucuaguuggagguuguacaugcuguccuu

SEQ ID NO: 293741 - RNA, 31 nt, Homo Sapiens
ccgcaggagccccgggaaucuggaggggccg

SEQ ID NO: 293742 - RNA, 32 nt, Homo Sapiens
uuggaauauuuccaccauuauguaaauauuuu

SEQ ID NO: 293743 - RNA, 32 nt, Homo Sapiens
auuugaucaguuccuauauuucuaggaguuug

SEQ ID NO: 293744 - RNA, 32 nt, Homo Sapiens
ggggaguguucucagcagcugccacacgugga

SEQ ID NO: 293745 - RNA, 32 nt, Homo Sapiens
ugaugcagaauuuuugcaugacaacauagaaa

SEQ ID NO: 293746 - RNA, 32 nt, Homo Sapiens
aagaucgauugggaauuuaaaaacgaauugua

SEQ ID NO: 293747 - RNA, 32 nt, Homo Sapiens
cagggagagcgcggccggcgcuccagcggucg

SEQ ID NO: 293748 - RNA, 32 nt, Homo Sapiens
agagcacaauguaguuauucuaaugcccaguu

SEQ ID NO: 293749 - RNA, 32 nt, Homo Sapiens
accugcgcagaggcggcugugcagggugagag

SEQ ID NO: 293750 - RNA, 32 nt, Homo Sapiens
acugaccucaggucgaggggcccgccagccau

SEQ ID NO: 293751 - RNA, 32 nt, Homo Sapiens
ucucaucagucuuuuucuuucccugccacccu

SEQ ID NO: 293752 - RNA, 32 nt, Homo Sapiens
auuuaaaagcaucaaaacaacaacaauggaaa

SEQ ID NO: 293753 - RNA, 32 nt, Homo Sapiens
aaaaauaccuuguauuugauaaaaauccauua

SEQ ID NO: 293754 - RNA, 32 nt, Homo Sapiens
ggagggugacgcccagcuccgccugcugggaa

SEQ ID NO: 293755 - RNA, 32 nt, Homo Sapiens
auggaugggugcucuguggugaauggguggcc

SEQ ID NO: 293756 - RNA, 32 nt, Homo Sapiens
cuggcuuguguuuuucugggacaguuuagaau

SEQ ID NO: 293757 - RNA, 32 nt, Homo Sapiens
uuugaccagaugcgagacauguuugaugacua

SEQ ID NO: 293758 - RNA, 32 nt, Homo Sapiens
uggaauuggaaaagcuuuugcuuguauggaua

SEQ ID NO: 293759 - RNA, 32 nt, Homo Sapiens
ccccccgggaugcgguagcggccgcugugcgg

SEQ ID NO: 293760 - RNA, 32 nt, Homo Sapiens
acauuaaguauuuauugagcuucugucauaug

SEQ ID NO: 293761 - RNA, 32 nt, Homo Sapiens
ugaguuaucugccuauggaaaugagccacccc

SEQ ID NO: 293762 - RNA, 32 nt, Homo Sapiens
aacugcggccccagagccuuuggccuaagcug

SEQ ID NO: 293763 - RNA, 32 nt, Homo Sapiens
gugcaggaacagaggcgucuuccuggguuugg

SEQ ID NO: 293764 - RNA, 32 nt, Homo Sapiens
uugcccuguccugcggggggccccacgaguuc

SEQ ID NO: 293765 - RNA, 32 nt, Homo Sapiens
cccugccaguggagccagcagugcccccagca

SEQ ID NO: 293766 - RNA, 32 nt, Homo Sapiens
ggugggguuucaucuuucuaggguugaaaacu

SEQ ID NO: 293767 - RNA, 32 nt, Homo Sapiens
agguggauccucugccagcaggugucuguccc

SEQ ID NO: 293768 - RNA, 32 nt, Homo Sapiens
acaauuuauagcagagccguuuuaagacagcc

SEQ ID NO: 293769 - RNA, 32 nt, Homo Sapiens
gccuauuuuuaaacuaguguaaucacccuagu

SEQ ID NO: 293770 - RNA, 32 nt, Homo Sapiens
ucugggccacuggcagccuucucuugcucaau

SEQ ID NO: 293771 - RNA, 32 nt, Homo Sapiens
agcacuugauaaagaacuguauuuaaucggua

SEQ ID NO: 293772 - RNA, 32 nt, Homo Sapiens
uugauuuccucccucugccccucccccagcca

SEQ ID NO: 293773 - RNA, 32 nt, Homo Sapiens
gccauuuucuuauaucuuuguuaaccucaugu

SEQ ID NO: 293774 - RNA, 32 nt, Homo Sapiens
gccugccugugcuggcccauggaacggagaca

SEQ ID NO: 293775 - RNA, 32 nt, Homo Sapiens
ggaggcagcuguccuccccagcccuguggaaa

SEQ ID NO: 293776 - RNA, 32 nt, Homo Sapiens
uaccugcccucccugccuuccccagggucccu

SEQ ID NO: 293777 - RNA, 30 nt, Homo Sapiens
aacagugucuguguugcccgagcugcugag

SEQ ID NO: 293778 - RNA, 32 nt, Homo Sapiens
agagaucauugagaaugcagucgaguucaucc

SEQ ID NO: 293779 - RNA, 32 nt, Homo Sapiens
uggcaugguucuucagcaaaauguugacaucu

SEQ ID NO: 293780 - RNA, 32 nt, Homo Sapiens
accuuuugaaugcuuugcugcuuagaaauuua

SEQ ID NO: 293781 - RNA, 32 nt, Homo Sapiens
uaauguaaacguaggguuuguaaaagucacaa

SEQ ID NO: 293782 - RNA, 32 nt, Homo Sapiens
ggaggacugccugcuugcuuucuggggacacu

SEQ ID NO: 293783 - RNA, 32 nt, Homo Sapiens
caggcuggagugcaguggugugaucuuggcuu

SEQ ID NO: 293784 - RNA, 32 nt, Homo Sapiens
uuguucucaggguuuggagaugauguucugga

SEQ ID NO: 293785 - RNA, 32 nt, Homo Sapiens
aacagaccucuuaaauugugacaugaagguau

SEQ ID NO: 293786 - RNA, 32 nt, Homo Sapiens
gccgcgccagccucagcccgcgcagaaugugc

SEQ ID NO: 293787 - RNA, 32 nt, Homo Sapiens
caacagcgccgcucccgcggcuccacccgacc

SEQ ID NO: 293788 - RNA, 32 nt, Homo Sapiens
gucaauuacccaucacauaaauaugaaacauu

SEQ ID NO: 293789 - RNA, 32 nt, Homo Sapiens
ggagagaauguaugagaucaaaaaagaacaaa

SEQ ID NO: 293790 - RNA, 32 nt, Homo Sapiens
acuaugccuuauaaaacaaaaugaaagcaggu

SEQ ID NO: 293791 - RNA, 32 nt, Homo Sapiens
gcccgggcccuggcccagccccggccuccaag

SEQ ID NO: 293792 - RNA, 32 nt, Homo Sapiens
accagcacuccagaaaucucucugccaucauu

SEQ ID NO: 293793 - RNA, 32 nt, Homo Sapiens
gaacacucagaaugaugagaggagaucugaga

SEQ ID NO: 293794 - RNA, 32 nt, Homo Sapiens
aagcaaguuauuccagaggaagaagcagcccu

SEQ ID NO: 293795 - RNA, 32 nt, Homo Sapiens
gguggaggaggauguuacuucauuuuauaaag

SEQ ID NO: 293796 - RNA, 32 nt, Homo Sapiens
auuaacacagaaauuaaccuaaggaaugaagg

SEQ ID NO: 293797 - RNA, 32 nt, Homo Sapiens
cucugguucaccauucagcaccagcugaagau

SEQ ID NO: 293798 - RNA, 32 nt, Homo Sapiens
uuugaguaacaagaagcaaauauccaaguucc

SEQ ID NO: 293799 - RNA, 32 nt, Homo Sapiens
gcgcugccccgggauuccccagccccgcgcgg

SEQ ID NO: 293800 - RNA, 27 nt, Homo Sapiens
uaauggcggagcguggcggggacgggg

SEQ ID NO: 293801 - RNA, 32 nt, Homo Sapiens
accaagcucaagacccuuccccugcccugggc

SEQ ID NO: 293802 - RNA, 32 nt, Homo Sapiens
cuuuucuuuuaaaaaauuuguagaucuaacag

SEQ ID NO: 293803 - RNA, 32 nt, Homo Sapiens
gcugaucgcuguuccuugagcaaggcgcuuac

SEQ ID NO: 293804 - RNA, 32 nt, Homo Sapiens
uuuugaaauauguuuuacuugaauguuacauu

SEQ ID NO: 293805 - RNA, 32 nt, Homo Sapiens
ccucaguaaagcuguaugaaauuuauagucau

SEQ ID NO: 293806 - RNA, 32 nt, Homo Sapiens
uuaagaugucugagagaccaucuccuaucuuu

SEQ ID NO: 293807 - RNA, 32 nt, Homo Sapiens
ugagcccaggccgccagcgccgcggccccgug

SEQ ID NO: 293808 - RNA, 29 nt, Homo Sapiens
gaccauggagagcgcgcuggcggugcccc

SEQ ID NO: 293809 - RNA, 32 nt, Homo Sapiens
guucuuggaccucucccuguuucuuccuuaga

SEQ ID NO: 293810 - RNA, 32 nt, Homo Sapiens
gauuuaaagacaccaaggaaaacuacaacugu

SEQ ID NO: 293811 - RNA, 32 nt, Homo Sapiens
uggcugcaaucacugcugcugcugucacccug

SEQ ID NO: 293812 - RNA, 32 nt, Homo Sapiens
aacagcuuguccaaagauuuaaauucuuauuu

SEQ ID NO: 293813 - RNA, 28 nt, Homo Sapiens
gagagaaaguguuaacauugagacucug

SEQ ID NO: 293814 - RNA, 32 nt, Homo Sapiens
caguaugugaauaagaaauucagcaaucagua

SEQ ID NO: 293815 - RNA, 32 nt, Homo Sapiens
aauaaaaaucucuuuuccacuccauugucgua

SEQ ID NO: 293816 - RNA, 32 nt, Homo Sapiens
aaacuuuugacugcuuccauguuagcaucugc

SEQ ID NO: 293817 - RNA, 32 nt, Homo Sapiens
cacccucaucagagcccuccucuggccugucc

SEQ ID NO: 293818 - RNA, 32 nt, Homo Sapiens
gugaauuuuuauuuuugcuuuguuuuuaauga

SEQ ID NO: 293819 - RNA, 29 nt, Homo Sapiens
acgcuccggguccgggggcgagcggucac

SEQ ID NO: 293820 - RNA, 32 nt, Homo Sapiens
uuguccccuucucuugauaaaucuucaguucc

SEQ ID NO: 293821 - RNA, 29 nt, Homo Sapiens
uuuucucucauccaauaauguaaaacuau

SEQ ID NO: 293822 - RNA, 32 nt, Homo Sapiens
auuggugaccugcggcaguauguacuucagug

SEQ ID NO: 293823 - RNA, 32 nt, Homo Sapiens
cauugcuuuuuaaauuuuucacgugcauaacc

SEQ ID NO: 293824 - RNA, 32 nt, Homo Sapiens
agugcgugcugcgcgugcguacgugaggucga

SEQ ID NO: 293825 - RNA, 32 nt, Homo Sapiens
ccgggcgccgagcgucuccgccgcccggaccu

SEQ ID NO: 293826 - RNA, 32 nt, Homo Sapiens
ugugaugguauuuggagguggggcuuuuggua

SEQ ID NO: 293827 - RNA, 32 nt, Homo Sapiens
acccaggcacucaccgccuccucccugguaca

SEQ ID NO: 293828 - RNA, 32 nt, Homo Sapiens
uaugagaggauuggcucccaucuuuuguuacu

SEQ ID NO: 293829 - RNA, 32 nt, Homo Sapiens
auauccuaucaggcuagauaucucaauaguag

SEQ ID NO: 293830 - RNA, 32 nt, Homo Sapiens
ugauguccguaggccuuaaaucugccuggcgu

SEQ ID NO: 293831 - RNA, 32 nt, Homo Sapiens
ucuauuucagugugaaacuaucuugaauuugc

SEQ ID NO: 293832 - RNA, 32 nt, Homo Sapiens
ugaaugcucaaauaaaccuguuaaaauuguaa

SEQ ID NO: 293833 - RNA, 32 nt, Homo Sapiens
ggcuggaccgggugcuggcugcgcgcgcugcu

SEQ ID NO: 293834 - RNA, 32 nt, Homo Sapiens
ccauggccacucccugcccccagccuggcugg

SEQ ID NO: 293835 - RNA, 32 nt, Homo Sapiens
cuuucucugaaucgcuaauuguccuuucaguu

SEQ ID NO: 293836 - RNA, 32 nt, Homo Sapiens
uggcaccuggggcugccaucuaucuugcugcg

SEQ ID NO: 293837 - RNA, 32 nt, Homo Sapiens
ggcggguggcaucggcucugcugcugcggagc

SEQ ID NO: 293838 - RNA, 32 nt, Homo Sapiens
ugcuaugcaaauaacauaguaguaauuucucu

SEQ ID NO: 293839 - RNA, 32 nt, Homo Sapiens
cauuagugaaacaaaaucagugauauaacauu

SEQ ID NO: 293840 - RNA, 31 nt, Homo Sapiens
uuuucucauuugauuuugcuugugcagaaaa

SEQ ID NO: 293841 - RNA, 32 nt, Homo Sapiens
cacucguucugugguugggguccugcaagaag

SEQ ID NO: 293842 - RNA, 32 nt, Homo Sapiens
guugcaggagaugaaggagcccugucuaugug

SEQ ID NO: 293843 - RNA, 32 nt, Homo Sapiens
cugcuggggguguguccuggguccuggagucu

SEQ ID NO: 293844 - RNA, 32 nt, Homo Sapiens
ucgucguucccggccccggccccccacccauc

SEQ ID NO: 293845 - RNA, 32 nt, Homo Sapiens
acuguggggccccagcagcacuguggccugca

SEQ ID NO: 293846 - RNA, 32 nt, Homo Sapiens
uucauugagaauaacuguuuuauguaagaauc

SEQ ID NO: 293847 - RNA, 32 nt, Homo Sapiens
caguaaauguucucgcuucagaacuuaauuca

SEQ ID NO: 293848 - RNA, 32 nt, Homo Sapiens
cuggcucugccucuccuuugcuuuccucggga

SEQ ID NO: 293849 - RNA, 32 nt, Homo Sapiens
ucuaaaauauuggauuuacuucuuauauugag

SEQ ID NO: 293850 - RNA, 32 nt, Homo Sapiens
cucuuucucuccccaacccccauucucaucug

SEQ ID NO: 293851 - RNA, 32 nt, Homo Sapiens
ccaaugguguuuuuaaacuguuucuguuuuua

SEQ ID NO: 293852 - RNA, 32 nt, Homo Sapiens
uugagugaaacacaauacuuaauguauuguac

SEQ ID NO: 293853 - RNA, 32 nt, Homo Sapiens
accuggcagggucuugguggccugcagcuucc

SEQ ID NO: 293854 - RNA, 32 nt, Homo Sapiens
uuucucuuuaauaaaaauccuuuuuguaaguu

SEQ ID NO: 293855 - RNA, 32 nt, Homo Sapiens
gccggcgcgaugcggcugggcccgaggaccgc

SEQ ID NO: 293856 - RNA, 32 nt, Homo Sapiens
aaggcucguguaacaauaacccaugagaacac

SEQ ID NO: 293857 - RNA, 32 nt, Homo Sapiens
uagcuuugauuucaaaggacacgcuuaccuug

SEQ ID NO: 293858 - RNA, 32 nt, Homo Sapiens
uugucucucccucuccuuguuagucuguuuua

SEQ ID NO: 293859 - RNA, 27 nt, Homo Sapiens
cugcccagacucuucagccccugcucc

SEQ ID NO: 293860 - RNA, 32 nt, Homo Sapiens
uuuguaaugguagcuuuuucuacaucuuacuc

SEQ ID NO: 293861 - RNA, 32 nt, Homo Sapiens
ugcgguacacuggaugguucugaagcuggccc

SEQ ID NO: 293862 - RNA, 32 nt, Homo Sapiens
ucgaaauuaccuucuucaguguaccagaaaua

SEQ ID NO: 293863 - RNA, 32 nt, Homo Sapiens
ucucuagccucccaacuuggucucacacaaca

SEQ ID NO: 293864 - RNA, 32 nt, Homo Sapiens
gcuugcagcuuucacgccgggcgaaggacccg

SEQ ID NO: 293865 - RNA, 32 nt, Homo Sapiens
caggcccccacacaccgucuccaaagguccgg

SEQ ID NO: 293866 - RNA, 32 nt, Homo Sapiens
uuucuuuuucuuuuuaaaugagaaggauccac

SEQ ID NO: 293867 - RNA, 32 nt, Homo Sapiens
gccugauuuuucaugacugcuuuuuccugccc

SEQ ID NO: 293868 - RNA, 32 nt, Homo Sapiens
caccugcucccucugcugggcugagacucaga

SEQ ID NO: 293869 - RNA, 32 nt, Homo Sapiens
uuucugaaaaggacaguaguuacucaccuaag

SEQ ID NO: 293870 - RNA, 32 nt, Homo Sapiens
gcgacaucacacucaucacagacaacaauggc

SEQ ID NO: 293871 - RNA, 32 nt, Homo Sapiens
ucuugacacucccaggcagcacagauagacgg

SEQ ID NO: 293872 - RNA, 30 nt, Homo Sapiens
gugacuugugucgugggggaaaacauaagg

SEQ ID NO: 293873 - RNA, 32 nt, Homo Sapiens
gugccucuccuccaccucucccuucucaaaau

SEQ ID NO: 293874 - RNA, 32 nt, Homo Sapiens
gaagcaggaacagaaugaccaauacacuccaa

SEQ ID NO: 293875 - RNA, 32 nt, Homo Sapiens
uuacucuaaaauaugugguagauaguaugcaa

SEQ ID NO: 293876 - RNA, 32 nt, Homo Sapiens
cgggauuucggcggccccggcgcucccuuucc

SEQ ID NO: 293877 - RNA, 32 nt, Homo Sapiens
gcccaucacuggacugcuggacaggcucagug

SEQ ID NO: 293878 - RNA, 32 nt, Homo Sapiens
agaaguagaaacaguaagacacugaauaaaau

SEQ ID NO: 293879 - RNA, 32 nt, Homo Sapiens
agacuucuauagaaagacugacagaaacaaaa

SEQ ID NO: 293880 - RNA, 32 nt, Homo Sapiens
cugguuguucuuccccuuguucagcccauugc

SEQ ID NO: 293881 - RNA, 29 nt, Homo Sapiens
auuuccucggagaccuguuuaacaagcaa

SEQ ID NO: 293882 - RNA, 32 nt, Homo Sapiens
caacaacuuuugcugccaggaugcccuugcuu

SEQ ID NO: 293883 - RNA, 32 nt, Homo Sapiens
gucuggcgcgcccucgcuuucccagagggcga

SEQ ID NO: 293884 - RNA, 32 nt, Homo Sapiens
ucaagcuggacagaauaauucccuaaugcuug

SEQ ID NO: 293885 - RNA, 32 nt, Homo Sapiens
cgcggaggcagcggaggcugcucggccgcaag

SEQ ID NO: 293886 - RNA, 32 nt, Homo Sapiens
gggacgcagcuagcgcgacccugagccggcgc

SEQ ID NO: 293887 - RNA, 32 nt, Homo Sapiens
agagaggccccgagaugccgagcaagaagaag

SEQ ID NO: 293888 - RNA, 32 nt, Homo Sapiens
gagauuuagggguggaggaagagcuuugggga

SEQ ID NO: 293889 - RNA, 32 nt, Homo Sapiens
acccugaugaagauccugaacuucaagaauga

SEQ ID NO: 293890 - RNA, 32 nt, Homo Sapiens
cacgggcagcaccaacuccuacaggaugggga

SEQ ID NO: 293891 - RNA, 32 nt, Homo Sapiens
acuggagagaaaccuuauaaguguaaugauug

SEQ ID NO: 293892 - RNA, 32 nt, Homo Sapiens
acacugagaaaguaaaauauauuucucuucaa

SEQ ID NO: 293893 - RNA, 32 nt, Homo Sapiens
ucaagcucccagcagcagcaacuucggacuca

SEQ ID NO: 293894 - RNA, 32 nt, Homo Sapiens
ggcucugcaccuguaggauauuggaaugcaca

SEQ ID NO: 293895 - RNA, 32 nt, Homo Sapiens
cauugguucuuacuuuuguaugcugccuccuc

SEQ ID NO: 293896 - RNA, 32 nt, Homo Sapiens
ugcccuguccacggacaccauccacgugcagu

SEQ ID NO: 293897 - RNA, 32 nt, Homo Sapiens
uaguuuucugguuuccaaaacuaaaauagauu

SEQ ID NO: 293898 - RNA, 32 nt, Homo Sapiens
caggacgugcgcuuccgggcggugcuuaugga

SEQ ID NO: 293899 - RNA, 32 nt, Homo Sapiens
guggagccugcagcugagucugugcccgagac

SEQ ID NO: 293900 - RNA, 32 nt, Homo Sapiens
acccuugagaucagcccuccccuccccaccuu

SEQ ID NO: 293901 - RNA, 32 nt, Homo Sapiens
ucagccauuucccccuccucagauggggcacc

SEQ ID NO: 293902 - RNA, 32 nt, Homo Sapiens
aaucaucuuggccacuuuaauaguuucugauu

SEQ ID NO: 293903 - RNA, 32 nt, Homo Sapiens
ggcaaaccauugcugugggaauagcagugacc

SEQ ID NO: 293904 - RNA, 32 nt, Homo Sapiens
ggccggaugugguggcucaugccuguaauccc

SEQ ID NO: 293905 - RNA, 32 nt, Homo Sapiens
gccccaguccagguaccuggaacuuaguccga

SEQ ID NO: 293906 - RNA, 30 nt, Homo Sapiens
ccgagggcgcccgugugcccagugcgcggc

SEQ ID NO: 293907 - RNA, 32 nt, Homo Sapiens
cucagagggcagaguggcagccaggcccacau

SEQ ID NO: 293908 - RNA, 32 nt, Homo Sapiens
gaaggagaccugguugccuuaugccuuuacuc

SEQ ID NO: 293909 - RNA, 32 nt, Homo Sapiens
ggcccaaaacaaaagccacaaacaguucauca

SEQ ID NO: 293910 - RNA, 32 nt, Homo Sapiens
ugaaauaaacacauuucuaacaauacaaggga

SEQ ID NO: 293911 - RNA, 32 nt, Homo Sapiens
cccugaaguuuuaaguucauuauucuuuauaa

SEQ ID NO: 293912 - RNA, 31 nt, Homo Sapiens
gaagcuggauaaaauuuuguuuuguuuuauu

SEQ ID NO: 293913 - RNA, 32 nt, Homo Sapiens
ggcagcccugccagcccucccagcggccacuc

SEQ ID NO: 293914 - RNA, 32 nt, Homo Sapiens
gaacuguguaucuauuucauaggguaaguuug

SEQ ID NO: 293915 - RNA, 32 nt, Homo Sapiens
gagucgcucccagauagcccucacgaguggcc

SEQ ID NO: 293916 - RNA, 32 nt, Homo Sapiens
aaaggauaaaauguuuuaauaguagagcagug

SEQ ID NO: 293917 - RNA, 32 nt, Homo Sapiens
uguuccucccugucaccugccuccucaucaug

SEQ ID NO: 293918 - RNA, 32 nt, Homo Sapiens
gccgcgcagcaggaagggagcggcugccacgg

SEQ ID NO: 293919 - RNA, 32 nt, Homo Sapiens
uuggacugugcagcucgggucaccuucucugu

SEQ ID NO: 293920 - RNA, 32 nt, Homo Sapiens
cguccagcacgcugagcggcccagaccuggcc

SEQ ID NO: 293921 - RNA, 32 nt, Homo Sapiens
uguuugcuuuaaaugguguugaugguuuagua

SEQ ID NO: 293922 - RNA, 32 nt, Homo Sapiens
auuuaccaaaguguaucugauuuuaaaaauuc

SEQ ID NO: 293923 - RNA, 32 nt, Homo Sapiens
ucuauuuuaccucccuucuccuaauuggcuuu

SEQ ID NO: 293924 - RNA, 32 nt, Homo Sapiens
caccaccacaccuggcuaauucuucuuaaaau

SEQ ID NO: 293925 - RNA, 32 nt, Homo Sapiens
gcaaugaucucuaugagggcguggugaguagg

SEQ ID NO: 293926 - RNA, 32 nt, Homo Sapiens
uggcggccuuggucgguccacagcuuccucaa

SEQ ID NO: 293927 - RNA, 31 nt, Homo Sapiens
agcuugugcaacaaagugagagccugucucu

SEQ ID NO: 293928 - RNA, 32 nt, Homo Sapiens
cucggccgggcacgguggacggugccucacau

SEQ ID NO: 293929 - RNA, 32 nt, Homo Sapiens
ugaaggcauaugcuggcccauaaacacccugu

SEQ ID NO: 293930 - RNA, 32 nt, Homo Sapiens
caauagcauacaaacucaauagcaaucaugac

SEQ ID NO: 293931 - RNA, 32 nt, Homo Sapiens
uuuccaugcaguguccugugcaugucuggguu

SEQ ID NO: 293932 - RNA, 32 nt, Homo Sapiens
cccagugccugacacaggaacugugcacaaua

SEQ ID NO: 293933 - RNA, 32 nt, Homo Sapiens
cgcgcucucgcaccuuccacagcacggcauuu

SEQ ID NO: 293934 - RNA, 32 nt, Homo Sapiens
guuucaacuuuagguaucaucuauugacuucu

SEQ ID NO: 293935 - RNA, 32 nt, Homo Sapiens
cgccugccgcccgccacccccaucuccacccc

SEQ ID NO: 293936 - RNA, 32 nt, Homo Sapiens
ccuccggauccgcccccuccccggucccgccc

SEQ ID NO: 293937 - RNA, 32 nt, Homo Sapiens
uaaagaccugugucucuccauguuuugcugcu

SEQ ID NO: 293938 - RNA, 30 nt, Homo Sapiens
acagaagaugacaucaagauaugcacuuug

SEQ ID NO: 293939 - RNA, 32 nt, Homo Sapiens
agaaaccggcggugucgacagguggcucucgc

SEQ ID NO: 293940 - RNA, 32 nt, Homo Sapiens
ggccagcuguacccggccccagugcccuuucg

SEQ ID NO: 293941 - RNA, 32 nt, Homo Sapiens
auggacagauaaaaaagauuuuacguuugucu

SEQ ID NO: 293942 - RNA, 32 nt, Homo Sapiens
ccuccuuccagaaggaaagagauuuuagcagg

SEQ ID NO: 293943 - RNA, 32 nt, Homo Sapiens
gagcucuucgcgcgcugugccggcgccgcggg

SEQ ID NO: 293944 - RNA, 32 nt, Homo Sapiens
uauaagauaaggaaauggagguccuggagguu

SEQ ID NO: 293945 - RNA, 32 nt, Homo Sapiens
augccagggcuugcaagaaguaaguuucuuca

SEQ ID NO: 293946 - RNA, 32 nt, Homo Sapiens
agagaaauuccacugaugaaaacuuucaugca

SEQ ID NO: 293947 - RNA, 32 nt, Homo Sapiens
cagaggaacuagcuguguuacugcaccagugu

SEQ ID NO: 293948 - RNA, 32 nt, Homo Sapiens
ccccuggacagcuuccucucaugccacccgug

SEQ ID NO: 293949 - RNA, 32 nt, Homo Sapiens
auuucagccccacauuauuuauagaaaaugua

SEQ ID NO: 293950 - RNA, 32 nt, Homo Sapiens
ggggaccccaggggccgcccccggccucuucu

SEQ ID NO: 293951 - RNA, 32 nt, Homo Sapiens
aaugcuuaacugucucgggaaaccucauuugu

SEQ ID NO: 293952 - RNA, 32 nt, Homo Sapiens
uccagugaacagagacucuucaccuucgaccc

SEQ ID NO: 293953 - RNA, 32 nt, Homo Sapiens
aaauuacuucuugaguaaucccagaauuguag

SEQ ID NO: 293954 - RNA, 32 nt, Homo Sapiens
ucuuguuaaaauuuauaugaaaaaaaccauca

SEQ ID NO: 293955 - RNA, 29 nt, Homo Sapiens
aacauuucauaugaauggaaguuuaauuu

SEQ ID NO: 293956 - RNA, 32 nt, Homo Sapiens
cgccccgggcccggccgcugugucgcccugag

SEQ ID NO: 293957 - RNA, 32 nt, Homo Sapiens
ccugccuguauuaauuuuaguuuugagucagg

SEQ ID NO: 293958 - RNA, 32 nt, Homo Sapiens
ugcucuuauuuuacuauuaugcguguugcugu

SEQ ID NO: 293959 - RNA, 32 nt, Homo Sapiens
aguugggugaagucuuuuuuuuuguuuguuuu

SEQ ID NO: 293960 - RNA, 32 nt, Homo Sapiens
agcuguggaaccccgggcccccugcugcgggc

SEQ ID NO: 293961 - RNA, 32 nt, Homo Sapiens
cuggugagaggcuagauggggcugggaugagg

SEQ ID NO: 293962 - RNA, 32 nt, Homo Sapiens
gcuuaaaaacaaaaagaaaccuauaauuauuc

SEQ ID NO: 293963 - RNA, 32 nt, Homo Sapiens
aguaggaaguaauugcaaacaggcuggauuug

SEQ ID NO: 293964 - RNA, 32 nt, Homo Sapiens
guuuccuucauuuugcagagcagaauauagau

SEQ ID NO: 293965 - RNA, 32 nt, Homo Sapiens
gaguggccaaaaaccgugaagauauuuguauc

SEQ ID NO: 293966 - RNA, 32 nt, Homo Sapiens
uugcuguuacuuugaagcauggaaauucuugu

SEQ ID NO: 293967 - RNA, 32 nt, Homo Sapiens
acaggagagauuaugcaauacaguccugaagu

SEQ ID NO: 293968 - RNA, 32 nt, Homo Sapiens
caaucauauaaaaacuuuaaugaauuaggaua

SEQ ID NO: 293969 - RNA, 32 nt, Homo Sapiens
aaggcacugaaaucaccauuccccucacaaua

SEQ ID NO: 293970 - RNA, 32 nt, Homo Sapiens
ggauaggcuuugccuccaggaugggcugcucc

SEQ ID NO: 293971 - RNA, 32 nt, Homo Sapiens
auguauauuuuugaucuuugaguguauucuau

SEQ ID NO: 293972 - RNA, 30 nt, Homo Sapiens
aaaccaugaaaauaaaaucaaccugaaucg

SEQ ID NO: 293973 - RNA, 32 nt, Homo Sapiens
gcccccagagccuguccccagcccuucggaag

SEQ ID NO: 293974 - RNA, 32 nt, Homo Sapiens
uuuucaguucccucccucccagccccccaauu

SEQ ID NO: 293975 - RNA, 32 nt, Homo Sapiens
uauucuauuuuaaagcacuuaugaguuacaug

SEQ ID NO: 293976 - RNA, 32 nt, Homo Sapiens
cccagggacuccuggggcugcuggccccgggu

SEQ ID NO: 293977 - RNA, 32 nt, Homo Sapiens
auuacuggaagguagaggugggaaacaagccu

SEQ ID NO: 293978 - RNA, 32 nt, Homo Sapiens
ccagcacgccagccagagagcagaacaugcaa

SEQ ID NO: 293979 - RNA, 32 nt, Homo Sapiens
cugugcuucuaaauccccaauucugcugaaag

SEQ ID NO: 293980 - RNA, 32 nt, Homo Sapiens
auuaacugcuacuuugaaaauauccuaucacg

SEQ ID NO: 293981 - RNA, 32 nt, Homo Sapiens
accccugcccucagcucucaccagcgacccuc

SEQ ID NO: 293982 - RNA, 32 nt, Homo Sapiens
gaucauuccucuggguuaucugcaucucaaaa

SEQ ID NO: 293983 - RNA, 27 nt, Homo Sapiens
uggccuccuuuccucagccccuuguuc

SEQ ID NO: 293984 - RNA, 32 nt, Homo Sapiens
aagggaggggagaugcugugugcguguucuga

SEQ ID NO: 293985 - RNA, 32 nt, Homo Sapiens
cccuugaaggugguagcccagcuccuguuccu

SEQ ID NO: 293986 - RNA, 32 nt, Homo Sapiens
uaucugacagugguuucaguguguaccuuauc

SEQ ID NO: 293987 - RNA, 32 nt, Homo Sapiens
auuccaaucuucugauuuccuuauuuucuuua

SEQ ID NO: 293988 - RNA, 32 nt, Homo Sapiens
gccgcaggagcgcgugcggcguggacuuugcc

SEQ ID NO: 293989 - RNA, 32 nt, Homo Sapiens
aauuuaaacuaguauuuuuuuagauuauuugu

SEQ ID NO: 293990 - RNA, 32 nt, Homo Sapiens
aacagcaucuuucaccaagauggguggcacca

SEQ ID NO: 293991 - RNA, 29 nt, Homo Sapiens
ugugacauauguaucuauacauccguauc

SEQ ID NO: 293992 - RNA, 32 nt, Homo Sapiens
accuccucgugcucagccuggcgccggagcug

SEQ ID NO: 293993 - RNA, 32 nt, Homo Sapiens
cggguggggagguggccaaggaugcuggagcu

SEQ ID NO: 293994 - RNA, 32 nt, Homo Sapiens
auuggcuccaucucugaaaccagccgccaagc

SEQ ID NO: 293995 - RNA, 32 nt, Homo Sapiens
auaaaagcuauuuuaaugcuggaugugaccac

SEQ ID NO: 293996 - RNA, 32 nt, Homo Sapiens
auaacaauuucuuuuccacaguuaacaacaca

SEQ ID NO: 293997 - RNA, 32 nt, Homo Sapiens
uuuggggcuuggaaaauagguuuuauaggugg

SEQ ID NO: 293998 - RNA, 32 nt, Homo Sapiens
ggcgccgaggcuccaccgcgcagccacagaag

SEQ ID NO: 293999 - RNA, 32 nt, Homo Sapiens
uaugugacuuuaaauuuucugacagucacauu

SEQ ID NO: 294000 - RNA, 32 nt, Homo Sapiens
guguuuucagaugaguuacuguuaacagguag

SEQ ID NO: 294001 - RNA, 32 nt, Homo Sapiens
agucaagcugacacucagcauucaccaucaca

SEQ ID NO: 294002 - RNA, 32 nt, Homo Sapiens
gaagaucggggucagaguaaggccuaacacau

SEQ ID NO: 294003 - RNA, 32 nt, Homo Sapiens
gugaggcggcagcuggggccggagccuuugga

SEQ ID NO: 294004 - RNA, 32 nt, Homo Sapiens
acaauaucagcaacuucguguuuauacugcac

SEQ ID NO: 294005 - RNA, 32 nt, Homo Sapiens
acggccauaacaauauuuaacuuuaaaagcug

SEQ ID NO: 294006 - RNA, 32 nt, Homo Sapiens
uauuuuauuuauagauauaucuagugcaucua

SEQ ID NO: 294007 - RNA, 32 nt, Homo Sapiens
uuuuuugggaguaaggacaaaccuggaauaga

SEQ ID NO: 294008 - RNA, 32 nt, Homo Sapiens
ugaguuuuuuaaaugucuagcauaucuguaaa

SEQ ID NO: 294009 - RNA, 32 nt, Homo Sapiens
uaaugaaaaugauguagacauuuuaagcauuu

SEQ ID NO: 294010 - RNA, 32 nt, Homo Sapiens
aucauggccccuugcuugauucugguuucuug

SEQ ID NO: 294011 - RNA, 32 nt, Homo Sapiens
ccuacuuaaagucuucauuuauauucuuucaa

SEQ ID NO: 294012 - RNA, 32 nt, Homo Sapiens
uugcugagugguguuccaucucauggaugcac

SEQ ID NO: 294013 - RNA, 32 nt, Homo Sapiens
ccuuggggaacaggcaggccugccaggauccc

SEQ ID NO: 294014 - RNA, 31 nt, Homo Sapiens
auuuauuuaaugaugaaagugccuuuuguug

SEQ ID NO: 294015 - RNA, 32 nt, Homo Sapiens
aggacccugagccccaggcgccagccacagga

SEQ ID NO: 294016 - RNA, 32 nt, Homo Sapiens
cgcuuugguguugguuucguucccgucuucag

SEQ ID NO: 294017 - RNA, 32 nt, Homo Sapiens
ucgcacccuugcccgcgccuggcggcccgaug

SEQ ID NO: 294018 - RNA, 32 nt, Homo Sapiens
cacacaggaccaggcugcgagaacagcaucau

SEQ ID NO: 294019 - RNA, 32 nt, Homo Sapiens
gcgggucucaggccgcugguuuauuccuggag

SEQ ID NO: 294020 - RNA, 32 nt, Homo Sapiens
cacuccugguucugcugggccuguggcugcca

SEQ ID NO: 294021 - RNA, 32 nt, Homo Sapiens
gucuuucaaagugccauguucuccuuguccaa

SEQ ID NO: 294022 - RNA, 32 nt, Homo Sapiens
auagagguugcucagaaccuucucagcaaaua

SEQ ID NO: 294023 - RNA, 32 nt, Homo Sapiens
gggagaaggaggaggcggcgaaucacuuauaa

SEQ ID NO: 294024 - RNA, 32 nt, Homo Sapiens
uauaguuuaaacaaagaugguaacagcccuuu

SEQ ID NO: 294025 - RNA, 32 nt, Homo Sapiens
acacgucuguugcacaaaugcauauugguuau

SEQ ID NO: 294026 - RNA, 32 nt, Homo Sapiens
cagcgaggacaaagcacuccuggccgccgccg

SEQ ID NO: 294027 - RNA, 32 nt, Homo Sapiens
ccgugucucacccacaccccccuggggacuuc

SEQ ID NO: 294028 - RNA, 32 nt, Homo Sapiens
caaguguuaguagcugggauuacaaaagcaug

SEQ ID NO: 294029 - RNA, 31 nt, Homo Sapiens
cgccgccauggcugccucccccgcgcggccu

SEQ ID NO: 294030 - RNA, 32 nt, Homo Sapiens
gauauggucugugauaacuaucuuacaaguug

SEQ ID NO: 294031 - RNA, 32 nt, Homo Sapiens
cuggggcugucauggcccacgcguuuugcaaa

SEQ ID NO: 294032 - RNA, 32 nt, Homo Sapiens
uggacgcaggucugacuuccuaccucacuccc

SEQ ID NO: 294033 - RNA, 32 nt, Homo Sapiens
auuaacauagaauguuuacugauaaguacuuu

SEQ ID NO: 294034 - RNA, 32 nt, Homo Sapiens
gaagcccacccccacaccugcaucugucuggg

SEQ ID NO: 294035 - RNA, 32 nt, Homo Sapiens
gcgaggccgggccgccggcguuugaccgcgcu

SEQ ID NO: 294036 - RNA, 32 nt, Homo Sapiens
acacuggcagaggcuccuuggaggaagugacu

SEQ ID NO: 294037 - RNA, 30 nt, Homo Sapiens
aaggcggccuggggcggcggaaggggcgcc

SEQ ID NO: 294038 - RNA, 32 nt, Homo Sapiens
agcuuaaugucagcaauuuucuuucugaacca

SEQ ID NO: 294039 - RNA, 32 nt, Homo Sapiens
cuguugucuuaaugccauuucauuucacaugg

SEQ ID NO: 294040 - RNA, 32 nt, Homo Sapiens
aaaguaaacacuuuaaguuugauguguuuuac

SEQ ID NO: 294041 - RNA, 32 nt, Homo Sapiens
aggacgcauuuccaauaaugcugaccauuggc

SEQ ID NO: 294042 - RNA, 32 nt, Homo Sapiens
cugucaagggcagaaugaaucuaugcuggaua

SEQ ID NO: 294043 - RNA, 32 nt, Homo Sapiens
agugacagcaugugucccacucagaaaugaga

SEQ ID NO: 294044 - RNA, 32 nt, Homo Sapiens
guaggcuuuuauuucuuuuuuauuuuuugaag

SEQ ID NO: 294045 - RNA, 32 nt, Homo Sapiens
uaugcaaucaucugggagauccuguuaaaaug

SEQ ID NO: 294046 - RNA, 28 nt, Homo Sapiens
ggaacaggggcuaccagaggcugauuuc

SEQ ID NO: 294047 - RNA, 32 nt, Homo Sapiens
ggcggcggcggcguacccggcccgagacggga

SEQ ID NO: 294048 - RNA, 25 nt, Homo Sapiens
augccucggggacgaaagagucggc

SEQ ID NO: 294049 - RNA, 32 nt, Homo Sapiens
ccccggaucuugcacgcgguguugagcauggu

SEQ ID NO: 294050 - RNA, 32 nt, Homo Sapiens
uggugugguggugcacgcuuguagucccaguu

SEQ ID NO: 294051 - RNA, 32 nt, Homo Sapiens
ugcaaaauuuguaguuaaauuugaccucaauu

SEQ ID NO: 294052 - RNA, 32 nt, Homo Sapiens
aaaucacaagcugcuugacuaucacauacaau

SEQ ID NO: 294053 - RNA, 32 nt, Homo Sapiens
aaaguuuguuuuuucuaaaguugugugauuau

SEQ ID NO: 294054 - RNA, 32 nt, Homo Sapiens
cauccaggcgggggguuggggggaaacuuggc

SEQ ID NO: 294055 - RNA, 32 nt, Homo Sapiens
gcaucgacguucuccuggggugugugccaagc

SEQ ID NO: 294056 - RNA, 32 nt, Homo Sapiens
agaggagacuguuugaugugguacaggggcag

SEQ ID NO: 294057 - RNA, 32 nt, Homo Sapiens
cagcgccggggacucaggagcggccgcagggg

SEQ ID NO: 294058 - RNA, 32 nt, Homo Sapiens
aggugaccuugaugagacacucuaugugcaag

SEQ ID NO: 294059 - RNA, 32 nt, Homo Sapiens
aucaggucaggcaaguccauccuguccugaga

SEQ ID NO: 294060 - RNA, 32 nt, Homo Sapiens
ucuuagagaaaguuuuacauacuuaagugggu

SEQ ID NO: 294061 - RNA, 32 nt, Homo Sapiens
gaaagaggcagaccauccaccaggccuuugag

SEQ ID NO: 294062 - RNA, 32 nt, Homo Sapiens
uuuucaccucuccaguuuuuccaagugauacu

SEQ ID NO: 294063 - RNA, 32 nt, Homo Sapiens
uauucauugugcauaucagggauacccucaag

SEQ ID NO: 294064 - RNA, 32 nt, Homo Sapiens
cagcccugccuggccgggggccccuccuccac

SEQ ID NO: 294065 - RNA, 31 nt, Homo Sapiens
cagcagcgggacuggccgccccgcgcccccu

SEQ ID NO: 294066 - RNA, 32 nt, Homo Sapiens
cuucaauuggcgcuuuguguuccgcuuugacu

SEQ ID NO: 294067 - RNA, 32 nt, Homo Sapiens
guuccugccugccuuuuaaaaaaaaaaaaaaa

SEQ ID NO: 294068 - RNA, 32 nt, Homo Sapiens
gcugcgcaccugugucccccaccuccacccuc

SEQ ID NO: 294069 - RNA, 32 nt, Homo Sapiens
auugucuuuauuuuuccaacuuggugugcaua

SEQ ID NO: 294070 - RNA, 32 nt, Homo Sapiens
uauucucaauuucaaugccagucucagaacuc

SEQ ID NO: 294071 - RNA, 32 nt, Homo Sapiens
auacuuaacugcacuugcuuuaucuccuuggg

SEQ ID NO: 294072 - RNA, 32 nt, Homo Sapiens
uguccccaccgcccacuuguuugaugucacug

SEQ ID NO: 294073 - RNA, 32 nt, Homo Sapiens
ccggggcugcggcggggacgcuucucuggagg

SEQ ID NO: 294074 - RNA, 32 nt, Homo Sapiens
cagugacaaggaaaaggaauucuccaaaaagc

SEQ ID NO: 294075 - RNA, 32 nt, Homo Sapiens
ugccgggcgcgguggcaaaugccuguaauccc

SEQ ID NO: 294076 - RNA, 32 nt, Homo Sapiens
aaugaugguuguaaguggacaugcaaaccaaa

SEQ ID NO: 294077 - RNA, 32 nt, Homo Sapiens
caucagaaguaacugagggucugacaguaaua

SEQ ID NO: 294078 - RNA, 32 nt, Homo Sapiens
aaugagaugaucuauuuuuuugcuagccaucu

SEQ ID NO: 294079 - RNA, 29 nt, Homo Sapiens
uucuaauaaaguuugucauucaguccuuc

SEQ ID NO: 294080 - RNA, 32 nt, Homo Sapiens
cugggauaugacgucuucaugccaggggcacu

SEQ ID NO: 294081 - RNA, 32 nt, Homo Sapiens
gcucuauacuuggcacucaauuagauucuggg

SEQ ID NO: 294082 - RNA, 32 nt, Homo Sapiens
gacggcuguauauaacauauuggguaaugcag

SEQ ID NO: 294083 - RNA, 28 nt, Homo Sapiens
auugaagauuuuaaacauuugguauuaa

SEQ ID NO: 294084 - RNA, 32 nt, Homo Sapiens
uaguauaaaaauuggcauaauguuggauugaa

SEQ ID NO: 294085 - RNA, 31 nt, Homo Sapiens
uaguuaguuacugcaauucagaauuaguuca

SEQ ID NO: 294086 - RNA, 32 nt, Homo Sapiens
gggugcugaguguguguugcuguucaugagug

SEQ ID NO: 294087 - RNA, 32 nt, Homo Sapiens
acauuuuugugauuacggaauacuuuaguuga

SEQ ID NO: 294088 - RNA, 32 nt, Homo Sapiens
ccccagcugucugcgcgucugacucuuguggc

SEQ ID NO: 294089 - RNA, 32 nt, Homo Sapiens
ugacucuccuggcaaugaaaccugggccacca

SEQ ID NO: 294090 - RNA, 32 nt, Homo Sapiens
gcaccacugcauuccagccuggcgacagagug

SEQ ID NO: 294091 - RNA, 32 nt, Homo Sapiens
aaugaggggcuuugacuagaugagcucugaag

SEQ ID NO: 294092 - RNA, 32 nt, Homo Sapiens
ugcagacgcuggcgcugucugccggagguguu

SEQ ID NO: 294093 - RNA, 32 nt, Homo Sapiens
gcauuagcuucccagcagcaggagcccccagu

SEQ ID NO: 294094 - RNA, 32 nt, Homo Sapiens
gucggggaugcgguggucuccucccuccuguc

SEQ ID NO: 294095 - RNA, 32 nt, Homo Sapiens
gcuuucccaagccuuggcaaaccagcuucagc

SEQ ID NO: 294096 - RNA, 32 nt, Homo Sapiens
uacauugcauuuauuuuauauucuugguugaa

SEQ ID NO: 294097 - RNA, 32 nt, Homo Sapiens
ggcuuaagaaugccuuuaagcgguuuuccacc

SEQ ID NO: 294098 - RNA, 30 nt, Homo Sapiens
cuuacagugaggaguaugcaaaaucuggaa

SEQ ID NO: 294099 - RNA, 32 nt, Homo Sapiens
uggggaggggagagaagguggucugcacccca

SEQ ID NO: 294100 - RNA, 32 nt, Homo Sapiens
ugguuuugcuuuuuuuuuuuuagacuguauua

SEQ ID NO: 294101 - RNA, 32 nt, Homo Sapiens
gcacaccauacuagaauucacacuggagagaa

SEQ ID NO: 294102 - RNA, 32 nt, Homo Sapiens
cugggcucuaaaguuggaggucagguuaccug

SEQ ID NO: 294103 - RNA, 30 nt, Homo Sapiens
cgcggcagucuggaccuagaagcucugucc

SEQ ID NO: 294104 - RNA, 32 nt, Homo Sapiens
cguggggccggggcuucugugcaccugggcuc

SEQ ID NO: 294105 - RNA, 32 nt, Homo Sapiens
ugcuccccauccccagcccaccacuggagcau

SEQ ID NO: 294106 - RNA, 32 nt, Homo Sapiens
agcugacaaccugcugggcacccgaagaccaa

SEQ ID NO: 294107 - RNA, 32 nt, Homo Sapiens
gugaggacgcagagugcaggcuguggccucgg

SEQ ID NO: 294108 - RNA, 32 nt, Homo Sapiens
cagacggcggggggugggucggcguuuaaguc

SEQ ID NO: 294109 - RNA, 32 nt, Homo Sapiens
auaaagccagcuuugugcuauugguucaguau

SEQ ID NO: 294110 - RNA, 32 nt, Homo Sapiens
uaaacagcaucauauuagaaacaaagaaaacg

SEQ ID NO: 294111 - RNA, 32 nt, Homo Sapiens
gaaagugugaaaacagaaagaaaccuaaaacu

SEQ ID NO: 294112 - RNA, 32 nt, Homo Sapiens
gugcgggcgagaagauggcggcggcgggggaa

SEQ ID NO: 294113 - RNA, 32 nt, Homo Sapiens
cacaaggcacaccagugcaagcagaugacaaa

SEQ ID NO: 294114 - RNA, 32 nt, Homo Sapiens
ggagaggaggagugauggggaccgccaccuuu

SEQ ID NO: 294115 - RNA, 32 nt, Homo Sapiens
auucagaaaucugcauuuuuuauucuuuuaua

SEQ ID NO: 294116 - RNA, 32 nt, Homo Sapiens
ggcaccagcuccggcuccauuguucccgcccg

SEQ ID NO: 294117 - RNA, 32 nt, Homo Sapiens
acaucuauguauuuuucuuauuuuauacguuu

SEQ ID NO: 294118 - RNA, 32 nt, Homo Sapiens
ggagacacucaucaaucccagcccuaguguag

SEQ ID NO: 294119 - RNA, 32 nt, Homo Sapiens
cucaggagggcuucuauggccaggaagugaug

SEQ ID NO: 294120 - RNA, 32 nt, Homo Sapiens
ccgcuccacuccucgggcuggcucuccugagg

SEQ ID NO: 294121 - RNA, 32 nt, Homo Sapiens
aauguagcauguuuuauguuaagggaccauau

SEQ ID NO: 294122 - RNA, 32 nt, Homo Sapiens
cggguugggccuggagcccccgggcgcagcgc

SEQ ID NO: 294123 - RNA, 32 nt, Homo Sapiens
cucauuuucugcaauggugauuaucggaccaa

SEQ ID NO: 294124 - RNA, 32 nt, Homo Sapiens
uaaggaaacaaacagcagcagauauuuagguu

SEQ ID NO: 294125 - RNA, 32 nt, Homo Sapiens
gcugggcugggcugguguggcugcugaagccc

SEQ ID NO: 294126 - RNA, 32 nt, Homo Sapiens
cuccgagccgagcgcgcggagcagcuggggcc

SEQ ID NO: 294127 - RNA, 32 nt, Homo Sapiens
ugggguuacugauaguccaggcaucaguucau

SEQ ID NO: 294128 - RNA, 32 nt, Homo Sapiens
aaaagacgccagaguucucgcugaagaaugug

SEQ ID NO: 294129 - RNA, 32 nt, Homo Sapiens
uagcccuguuggggacagaaaaguguguagac

SEQ ID NO: 294130 - RNA, 32 nt, Homo Sapiens
aaaauaggauuuccucuaggcuccucgaagag

SEQ ID NO: 294131 - RNA, 30 nt, Homo Sapiens
cggcggcccugcugaagcugcugcagcccu

SEQ ID NO: 294132 - RNA, 32 nt, Homo Sapiens
cagggucugugccagcccugucagugcugcuc

SEQ ID NO: 294133 - RNA, 32 nt, Homo Sapiens
uugggaggaaagagaggccuagaggaggaguu

SEQ ID NO: 294134 - RNA, 32 nt, Homo Sapiens
uggugccaaaaacacugggaaccgcuaaucua

SEQ ID NO: 294135 - RNA, 32 nt, Homo Sapiens
agaagcuuuugaccacggaguaccuggggauc

SEQ ID NO: 294136 - RNA, 32 nt, Homo Sapiens
uaaaggucuaaaauuaaaaauaaaauaccaaa

SEQ ID NO: 294137 - RNA, 32 nt, Homo Sapiens
cccaaccuggggagguugucgaccugcggauc

SEQ ID NO: 294138 - RNA, 32 nt, Homo Sapiens
gcagguggagggcaucaggcagggugagcccc

SEQ ID NO: 294139 - RNA, 31 nt, Homo Sapiens
ggaccacggcgcguccugccccggcuucccc

SEQ ID NO: 294140 - RNA, 29 nt, Homo Sapiens
gcauggauauguaugucuuuggcagauac

SEQ ID NO: 294141 - RNA, 32 nt, Homo Sapiens
gugcugggccuggccgaggggcggaggcacag

SEQ ID NO: 294142 - RNA, 32 nt, Homo Sapiens
ccacucuccugugauccaggugguccaggagc

SEQ ID NO: 294143 - RNA, 32 nt, Homo Sapiens
cccucgugaccagagagcgcgauuuggccgug

SEQ ID NO: 294144 - RNA, 32 nt, Homo Sapiens
gauuucauggcaccugcacuugaggcaagcac

SEQ ID NO: 294145 - RNA, 32 nt, Homo Sapiens
uggggaagguccccggcccccacagcccucug

SEQ ID NO: 294146 - RNA, 32 nt, Homo Sapiens
ccauggugaaggugucaguggcggcggcagcg

SEQ ID NO: 294147 - RNA, 32 nt, Homo Sapiens
uccucuccccagucugccccacuuccuggcuu

SEQ ID NO: 294148 - RNA, 32 nt, Homo Sapiens
acuaugaaguaauaagaaaauaaaaaguuaaa

SEQ ID NO: 294149 - RNA, 32 nt, Homo Sapiens
caggggaucuugcuggcaagguggucagugac

SEQ ID NO: 294150 - RNA, 32 nt, Homo Sapiens
agggggagaaccauggugucagacauccggaa

SEQ ID NO: 294151 - RNA, 32 nt, Homo Sapiens
uaccagguacuguguccgguaaaccaucuuag

SEQ ID NO: 294152 - RNA, 32 nt, Homo Sapiens
cuaguagaggaugcaguguacuguuaaaccaa

SEQ ID NO: 294153 - RNA, 32 nt, Homo Sapiens
cugguaagauugggaaucugagcauugccacu

SEQ ID NO: 294154 - RNA, 32 nt, Homo Sapiens
gcuggcuuuggguugauugcucuucuuuuucu

SEQ ID NO: 294155 - RNA, 32 nt, Homo Sapiens
accugacgcuaaaacuaaaaacaaggaaaugu

SEQ ID NO: 294156 - RNA, 32 nt, Homo Sapiens
cucaccugguucucucuccccaucacccugua

SEQ ID NO: 294157 - RNA, 32 nt, Homo Sapiens
guugcaguggcuuguucacaccugugggaaga

SEQ ID NO: 294158 - RNA, 32 nt, Homo Sapiens
uccuaguguuacuuaaauuaagaucaagguaa

SEQ ID NO: 294159 - RNA, 32 nt, Homo Sapiens
aaagaaugaagaucagggagaaaaaccggcca

SEQ ID NO: 294160 - RNA, 32 nt, Homo Sapiens
aacgccacccucggaagaagcccuggccgggg

SEQ ID NO: 294161 - RNA, 32 nt, Homo Sapiens
gcugcaggaaaucagggauuaucccuuaacag

SEQ ID NO: 294162 - RNA, 32 nt, Homo Sapiens
gcacuugcugucugcggagccagugugccauu

SEQ ID NO: 294163 - RNA, 32 nt, Homo Sapiens
cuacuuggaucaaacccuccccagagcccccg

SEQ ID NO: 294164 - RNA, 32 nt, Homo Sapiens
acuguggagugacaccaguaacacagccaaag

SEQ ID NO: 294165 - RNA, 32 nt, Homo Sapiens
agguggggaaaggaagucuuccugucacauau

SEQ ID NO: 294166 - RNA, 32 nt, Homo Sapiens
acacaguagggugagggugguaaaaugaauua

SEQ ID NO: 294167 - RNA, 32 nt, Homo Sapiens
acauguuauuaacuauggucucuuucaaauaa

SEQ ID NO: 294168 - RNA, 32 nt, Homo Sapiens
gguccgaggccugggaugagccaggacagcgg

SEQ ID NO: 294169 - RNA, 32 nt, Homo Sapiens
cucucucagagcauacugcugcuguaaugggc

SEQ ID NO: 294170 - RNA, 32 nt, Homo Sapiens
uuaguuaaaaacacuuuccuagcuggucauuu

SEQ ID NO: 294171 - RNA, 32 nt, Homo Sapiens
cuacuguugcguaacaaauuauagcaaacuga

SEQ ID NO: 294172 - RNA, 32 nt, Homo Sapiens
ucugggcgcuuggacauagacacgugguccca

SEQ ID NO: 294173 - RNA, 32 nt, Homo Sapiens
cuccucccaucuccuucccccagcccaauaaa

SEQ ID NO: 294174 - RNA, 32 nt, Homo Sapiens
ccaagaaaugcuuugucuucagccucuccagg

SEQ ID NO: 294175 - RNA, 32 nt, Homo Sapiens
caaugcuuuaauuauuuuuucuauucucauuu

SEQ ID NO: 294176 - RNA, 32 nt, Homo Sapiens
cuuugccaccgcgcgcccggcaucccugcggc

SEQ ID NO: 294177 - RNA, 32 nt, Homo Sapiens
gccccagagcuggacgugcugcugaugguaca

SEQ ID NO: 294178 - RNA, 30 nt, Homo Sapiens
cgcccgcccugcucugugacgcgcggcccg

SEQ ID NO: 294179 - RNA, 32 nt, Homo Sapiens
gcacgugggaaccgccgcagcuccacacucca

SEQ ID NO: 294180 - RNA, 32 nt, Homo Sapiens
uagccccgccugcugcuucucuaccuccccuc

SEQ ID NO: 294181 - RNA, 32 nt, Homo Sapiens
uaguugagucuugaaaaguaaauauuaacgcu

SEQ ID NO: 294182 - RNA, 32 nt, Homo Sapiens
augcagugggagaggggacacgcagggccugg

SEQ ID NO: 294183 - RNA, 32 nt, Homo Sapiens
ugccaaaggaagaagcucccagggcugcuucc

SEQ ID NO: 294184 - RNA, 32 nt, Homo Sapiens
ugaagcauucgagacagaaccuuguuauuucu

SEQ ID NO: 294185 - RNA, 32 nt, Homo Sapiens
uuuucuaugccuguuuuccucugaaacauguc

SEQ ID NO: 294186 - RNA, 32 nt, Homo Sapiens
aauguuguuucaugacuugauuuuucucauaa

SEQ ID NO: 294187 - RNA, 32 nt, Homo Sapiens
acuccaaugcugucauuccuuugucuacagca

SEQ ID NO: 294188 - RNA, 32 nt, Homo Sapiens
caaaaugcuguaagauuuauaccauugaucuu

SEQ ID NO: 294189 - RNA, 27 nt, Homo Sapiens
acacuacucuucuucaauuccucaguu

SEQ ID NO: 294190 - RNA, 32 nt, Homo Sapiens
ggcaagcgacucccaagcccagcccuguggug

SEQ ID NO: 294191 - RNA, 32 nt, Homo Sapiens
uuauaauugugacaccagaugcuuaggauccu

SEQ ID NO: 294192 - RNA, 32 nt, Homo Sapiens
uuggucccccacaaccugccccggccaggccu

SEQ ID NO: 294193 - RNA, 32 nt, Homo Sapiens
uuuuauggcucuucuaguuucuguagauuuuc

SEQ ID NO: 294194 - RNA, 32 nt, Homo Sapiens
cgucuccgcccggcagccacccaguccgggag

SEQ ID NO: 294195 - RNA, 32 nt, Homo Sapiens
gccuugaaaucgucucuguuaauccuugaugc

SEQ ID NO: 294196 - RNA, 32 nt, Homo Sapiens
agaaaucucacuucuggggaaaacaguugugg

SEQ ID NO: 294197 - RNA, 32 nt, Homo Sapiens
cguggacauccggagggacacacggccuuacg

SEQ ID NO: 294198 - RNA, 32 nt, Homo Sapiens
ucccuaugcgauuaugucucuuuacguugcua

SEQ ID NO: 294199 - RNA, 32 nt, Homo Sapiens
uuucucaugcaaucugucacugauggacaugu

SEQ ID NO: 294200 - RNA, 32 nt, Homo Sapiens
uuauaaaauuaagugaagugcaaauaaaagca

SEQ ID NO: 294201 - RNA, 32 nt, Homo Sapiens
uucuccuaugguuuccucucaucccucggcac

SEQ ID NO: 294202 - RNA, 32 nt, Homo Sapiens
uaucccugugguauuccuuuccugcuuugggg

SEQ ID NO: 294203 - RNA, 32 nt, Homo Sapiens
uugcaaacuccagcuuugccugugagaggaac

SEQ ID NO: 294204 - RNA, 32 nt, Homo Sapiens
guuuuaaauccuccuccuucccuuuuuucugg

SEQ ID NO: 294205 - RNA, 32 nt, Homo Sapiens
gcacucggagagcgguccuggcaggaaggccg

SEQ ID NO: 294206 - RNA, 32 nt, Homo Sapiens
cugauugcccucaguuugggguugcuuauugg

SEQ ID NO: 294207 - RNA, 32 nt, Homo Sapiens
gacgagacagcggggaucauggccgcgcaggu

SEQ ID NO: 294208 - RNA, 32 nt, Homo Sapiens
caguuaaggggagcaacagaggacaugaaaaa

SEQ ID NO: 294209 - RNA, 32 nt, Homo Sapiens
cacgccgggggcggggcacggcacgaaggcuc

SEQ ID NO: 294210 - RNA, 32 nt, Homo Sapiens
cugcuccgucuucgcucaccagacacucaggc

SEQ ID NO: 294211 - RNA, 32 nt, Homo Sapiens
auuggucuauacauuuuauagucuuggaaacu

SEQ ID NO: 294212 - RNA, 32 nt, Homo Sapiens
gcguuuccagcaugcccuuggaaaagacuccc

SEQ ID NO: 294213 - RNA, 32 nt, Homo Sapiens
gaauguuugugauauuuuaaauaucuacuaca

SEQ ID NO: 294214 - RNA, 32 nt, Homo Sapiens
gucagcacccccagccagcuggcccaggaccc

SEQ ID NO: 294215 - RNA, 32 nt, Homo Sapiens
agaauguacuguacaaccacaucuucaaaaug

SEQ ID NO: 294216 - RNA, 32 nt, Homo Sapiens
aggacucccacccucacccccacccccacagg

SEQ ID NO: 294217 - RNA, 32 nt, Homo Sapiens
cugauucucuacaugcucuuuuucugugauaa

SEQ ID NO: 294218 - RNA, 32 nt, Homo Sapiens
aucccagaacagagguguaaccuggcugcaua

SEQ ID NO: 294219 - RNA, 32 nt, Homo Sapiens
cucucucugugcccuccugcaauggcagccuu

SEQ ID NO: 294220 - RNA, 32 nt, Homo Sapiens
ugucuauucccucuuuuccccagccucuggca

SEQ ID NO: 294221 - RNA, 32 nt, Homo Sapiens
gugacucagagcuucacccacaaacucaggag

SEQ ID NO: 294222 - RNA, 32 nt, Homo Sapiens
agacgcgagcgggcgagguggcggcggcggcg

SEQ ID NO: 294223 - RNA, 32 nt, Homo Sapiens
guccaucugcccgccugcccaccugccuggcc

SEQ ID NO: 294224 - RNA, 32 nt, Homo Sapiens
ugucucugccccccuuccccagccagcauccc

SEQ ID NO: 294225 - RNA, 32 nt, Homo Sapiens
ggaaguguaaugguagaacauaaaacuuguau

SEQ ID NO: 294226 - RNA, 31 nt, Homo Sapiens
auuuucgagaauuuccagcaggcaaggcagu

SEQ ID NO: 294227 - RNA, 32 nt, Homo Sapiens
gccccacuccacucacuaaaggccagcgcacc

SEQ ID NO: 294228 - RNA, 32 nt, Homo Sapiens
cguccucauuuuauuggugaugaugaauggga

SEQ ID NO: 294229 - RNA, 32 nt, Homo Sapiens
gcaaguaacccuucuccucccuccccccucac

SEQ ID NO: 294230 - RNA, 32 nt, Homo Sapiens
ggcuggggucaggagaggagaauaggagugac

SEQ ID NO: 294231 - RNA, 32 nt, Homo Sapiens
cuccccgugccagcacugccgcuuccaccugg

SEQ ID NO: 294232 - RNA, 32 nt, Homo Sapiens
aaugccaggaggaaaggaagugacaaguacag

SEQ ID NO: 294233 - RNA, 32 nt, Homo Sapiens
ugcaacggggagugggugcgccagguggacca

SEQ ID NO: 294234 - RNA, 32 nt, Homo Sapiens
cacacauuccagccaggcccaggccagccccc

SEQ ID NO: 294235 - RNA, 32 nt, Homo Sapiens
uccuacaccaugcuccggggccuggggccucc

SEQ ID NO: 294236 - RNA, 32 nt, Homo Sapiens
cgcuacuagcugcacccgauuccucccagugc

SEQ ID NO: 294237 - RNA, 32 nt, Homo Sapiens
aagcagaucugugcaacgugcagggcaagcca

SEQ ID NO: 294238 - RNA, 32 nt, Homo Sapiens
uacgacaaaugauguagagccuuuccuauuuc

SEQ ID NO: 294239 - RNA, 32 nt, Homo Sapiens
gggcauuuacuguaugccaaguauuguaauaa

SEQ ID NO: 294240 - RNA, 32 nt, Homo Sapiens
cuucacuucuugccccacuuggggcagccucu

SEQ ID NO: 294241 - RNA, 32 nt, Homo Sapiens
auguucuuuugccucccauagccucuugcuuu

SEQ ID NO: 294242 - RNA, 32 nt, Homo Sapiens
caagaggaacuaaaaccagaggcauuauuacu

SEQ ID NO: 294243 - RNA, 32 nt, Homo Sapiens
acuuuucuaaugaaacaaaaauguuucucaaa

SEQ ID NO: 294244 - RNA, 32 nt, Homo Sapiens
cgucgccggugagcacgggcucccucucgcgu

SEQ ID NO: 294245 - RNA, 32 nt, Homo Sapiens
acccagccugcgccacuguguucuuaagaggc

SEQ ID NO: 294246 - RNA, 32 nt, Homo Sapiens
uauaacauauauaccaaugaacaugagauaua

SEQ ID NO: 294247 - RNA, 32 nt, Homo Sapiens
agggaaaaacagugcaagaugagaacaacaaa

SEQ ID NO: 294248 - RNA, 32 nt, Homo Sapiens
guaacacuuauuuuuauauaaaaagagacuga

SEQ ID NO: 294249 - RNA, 32 nt, Homo Sapiens
uuauaaaacacuuuuaauuauauauaugaggc

SEQ ID NO: 294250 - RNA, 32 nt, Homo Sapiens
caccuagcuugccacaaaaauucuuuggcgau

SEQ ID NO: 294251 - RNA, 32 nt, Homo Sapiens
cucauccuuuugcuucagauacugauaucuca

SEQ ID NO: 294252 - RNA, 32 nt, Homo Sapiens
cuuggugccuggccuggcacacaucaggaguu

SEQ ID NO: 294253 - RNA, 32 nt, Homo Sapiens
aucaagauucagaagaugaacuauacaucaga

SEQ ID NO: 294254 - RNA, 32 nt, Homo Sapiens
cggucuaggacuugccucaggaggaaggacag

SEQ ID NO: 294255 - RNA, 32 nt, Homo Sapiens
aggcccccaagccugcagucaucuugaccaag

SEQ ID NO: 294256 - RNA, 32 nt, Homo Sapiens
ugcuccaaacccacccaccaaggacucugaac

SEQ ID NO: 294257 - RNA, 32 nt, Homo Sapiens
cauuauuuuguaaaaauaaucuaugcaaaguu

SEQ ID NO: 294258 - RNA, 32 nt, Homo Sapiens
caaaaagcaaaagaagagaugagaagaggcac

SEQ ID NO: 294259 - RNA, 32 nt, Homo Sapiens
cccuaggaguggccucugcaccauagccugcg

SEQ ID NO: 294260 - RNA, 32 nt, Homo Sapiens
ucgaggcagaaucuugcucugucaccuaggcu

SEQ ID NO: 294261 - RNA, 32 nt, Homo Sapiens
cgcaggaggcacggcguccggaggccccaggg

SEQ ID NO: 294262 - RNA, 32 nt, Homo Sapiens
cgcgggcggguucccgcugcccccgcuaagcc

SEQ ID NO: 294263 - RNA, 27 nt, Homo Sapiens
cuggauaccuucuucuucuccccacuc

SEQ ID NO: 294264 - RNA, 32 nt, Homo Sapiens
gaugucucagaauacagacaagaacaaaggga

SEQ ID NO: 294265 - RNA, 29 nt, Homo Sapiens
uccauuuuauggauauaccauagguuguu

SEQ ID NO: 294266 - RNA, 32 nt, Homo Sapiens
ggggaaaagcguggccacaaaaacagaugcua

SEQ ID NO: 294267 - RNA, 32 nt, Homo Sapiens
aaugugaauuaaugugcuggacuggcccagag

SEQ ID NO: 294268 - RNA, 29 nt, Homo Sapiens
guuacauaaaguuucuaaaguuucaaaga

SEQ ID NO: 294269 - RNA, 32 nt, Homo Sapiens
ccauaggagaggaggguuccucuuaggucaga

SEQ ID NO: 294270 - RNA, 32 nt, Homo Sapiens
gaggaugagagcuucuccccagccuuccucug

SEQ ID NO: 294271 - RNA, 32 nt, Homo Sapiens
ugcagccugccucagcucaggcuaccacgcca

SEQ ID NO: 294272 - RNA, 32 nt, Homo Sapiens
agcauuagcagaaauaccuaauguagaugaca

SEQ ID NO: 294273 - RNA, 32 nt, Homo Sapiens
auuuuuuuuuucugugcugguugccacaucuu

SEQ ID NO: 294274 - RNA, 32 nt, Homo Sapiens
ucauucguguugcuggaacuggagcacuguca

SEQ ID NO: 294275 - RNA, 32 nt, Homo Sapiens
aggcuuucucuuaaauuagccuaacugaacug

SEQ ID NO: 294276 - RNA, 32 nt, Homo Sapiens
gggccgcgcuuccgcgcacgcgcggagaaacc

SEQ ID NO: 294277 - RNA, 32 nt, Homo Sapiens
ucaggcugggcacucgcugugcucuccccucc

SEQ ID NO: 294278 - RNA, 32 nt, Homo Sapiens
uaacuuccugcauuacccugggccgugguucc

SEQ ID NO: 294279 - RNA, 32 nt, Homo Sapiens
uacucaucggcacgcguccaccugcggaaccu

SEQ ID NO: 294280 - RNA, 32 nt, Homo Sapiens
augucagcaugguuccugaaauccauuuuugu

SEQ ID NO: 294281 - RNA, 32 nt, Homo Sapiens
cagggaacucuaucaagccauaccaaaaucag

SEQ ID NO: 294282 - RNA, 31 nt, Homo Sapiens
ggauguggauacugccugccggaggcugggc

SEQ ID NO: 294283 - RNA, 32 nt, Homo Sapiens
gccuggcgcgcgugcacacacacacacacaca

SEQ ID NO: 294284 - RNA, 32 nt, Homo Sapiens
guuugagaauccagcuuuguugguaucuccuu

SEQ ID NO: 294285 - RNA, 32 nt, Homo Sapiens
acaggugugggaaaagucagggcgaagacgcc

SEQ ID NO: 294286 - RNA, 32 nt, Homo Sapiens
uagcaccucccucugcccuuaacuggcuggaa

SEQ ID NO: 294287 - RNA, 32 nt, Homo Sapiens
uggcuuuuucuuuuuaagccaaguuagggaga

SEQ ID NO: 294288 - RNA, 32 nt, Homo Sapiens
uggacuccacacucaguggugcccugcaguug

SEQ ID NO: 294289 - RNA, 32 nt, Homo Sapiens
uuucucuaggucccauguuaauaugcaaguau

SEQ ID NO: 294290 - RNA, 32 nt, Homo Sapiens
auacacacauaaauaaagugaaugagaucaug

SEQ ID NO: 294291 - RNA, 32 nt, Homo Sapiens
uucagcuacuucacacugaguaccucaaaucu

SEQ ID NO: 294292 - RNA, 32 nt, Homo Sapiens
uggguucuuaauuuugaaggaccuccaaucac

SEQ ID NO: 294293 - RNA, 32 nt, Homo Sapiens
cacaguaggguugaaagagaauauaaggaaaa

SEQ ID NO: 294294 - RNA, 32 nt, Homo Sapiens
gauauguccucauuccauagagcauuagaagc

SEQ ID NO: 294295 - RNA, 32 nt, Homo Sapiens
gcuucccaucccaauuugaauggaccaagaaa

SEQ ID NO: 294296 - RNA, 32 nt, Homo Sapiens
aggaugcagcggggccuucugaugcccaauca

SEQ ID NO: 294297 - RNA, 32 nt, Homo Sapiens
ccucguguucuucucucauccuugccuuaaac

SEQ ID NO: 294298 - RNA, 32 nt, Homo Sapiens
guugaugaaacacaaauguauguuuuuauuga

SEQ ID NO: 294299 - RNA, 32 nt, Homo Sapiens
cuuccccacugccugcccacccguggagaugg

SEQ ID NO: 294300 - RNA, 32 nt, Homo Sapiens
cucccuccaucccaaccuggcucccucccacc

SEQ ID NO: 294301 - RNA, 32 nt, Homo Sapiens
agugcuaggggaagaugaaaugugcaguuuug

SEQ ID NO: 294302 - RNA, 32 nt, Homo Sapiens
uacaaggcgcagccagcuccucccgaacucaa

SEQ ID NO: 294303 - RNA, 32 nt, Homo Sapiens
auguguguguggugucugugugugugauguca

SEQ ID NO: 294304 - RNA, 32 nt, Homo Sapiens
gacaauggagugcucuuccucccucacucugc

SEQ ID NO: 294305 - RNA, 30 nt, Homo Sapiens
gguccaggcaggcugagugucucaugucuu

SEQ ID NO: 294306 - RNA, 32 nt, Homo Sapiens
ccaucccccuccccucccccgacuaaacucgg

SEQ ID NO: 294307 - RNA, 30 nt, Homo Sapiens
cagggagagaagccagacaugaguucaaca

SEQ ID NO: 294308 - RNA, 32 nt, Homo Sapiens
aaauucuguugaaagaaaaaugcuuucugaaa

SEQ ID NO: 294309 - RNA, 32 nt, Homo Sapiens
agaccuuccugcgagagcugccccagccgcuu

SEQ ID NO: 294310 - RNA, 31 nt, Homo Sapiens
aaaucaggauaaaaacagacaucaguggaau

SEQ ID NO: 294311 - RNA, 32 nt, Homo Sapiens
gacacagaaaaugucagacaacaaagaaagga

SEQ ID NO: 294312 - RNA, 32 nt, Homo Sapiens
acaccuuuacaauaguuuaaacagucauucau

SEQ ID NO: 294313 - RNA, 32 nt, Homo Sapiens
uucccugagcgcgggccgggucgguggggcgg

SEQ ID NO: 294314 - RNA, 32 nt, Homo Sapiens
ggugggacucugggcucagagagaggcccuug

SEQ ID NO: 294315 - RNA, 32 nt, Homo Sapiens
guugcuuuacuuuuugcuucaccgacauaguc

SEQ ID NO: 294316 - RNA, 32 nt, Homo Sapiens
gccggcgcgccgggcgccccgggaauuuauaa

SEQ ID NO: 294317 - RNA, 32 nt, Homo Sapiens
uaguuuaagcugucuuucugguaaaugcucuu

SEQ ID NO: 294318 - RNA, 32 nt, Homo Sapiens
gcagaggggcugggaaagagggggcaggggcu

SEQ ID NO: 294319 - RNA, 32 nt, Homo Sapiens
gcaagcaugcaaaaacacauugauaauauauu

SEQ ID NO: 294320 - RNA, 32 nt, Homo Sapiens
augaauuccagaaauaucacugaaauuauuga

SEQ ID NO: 294321 - RNA, 32 nt, Homo Sapiens
aguuaguugguaccucugaaaaaugagaaugg

SEQ ID NO: 294322 - RNA, 32 nt, Homo Sapiens
agaggagaaugguguggauaugguucugaguu

SEQ ID NO: 294323 - RNA, 32 nt, Homo Sapiens
acaugguuguacaaguaucaauggacaaaaag

SEQ ID NO: 294324 - RNA, 32 nt, Homo Sapiens
gcauuggucuaaacucuuucuguauagcaccu

SEQ ID NO: 294325 - RNA, 32 nt, Homo Sapiens
cauuuuaaaaaauuauauuaucuucuaagaac

SEQ ID NO: 294326 - RNA, 32 nt, Homo Sapiens
uuaaauagugagacauaaauagagugcuuuuu

SEQ ID NO: 294327 - RNA, 32 nt, Homo Sapiens
ucacuugaggucggaguuggagaucagccugg

SEQ ID NO: 294328 - RNA, 32 nt, Homo Sapiens
acgaucauaguucucuugaaaagcagacuuuc

SEQ ID NO: 294329 - RNA, 32 nt, Homo Sapiens
guugguggcgggggguuucggcgugccaacag

SEQ ID NO: 294330 - RNA, 32 nt, Homo Sapiens
caggcacagaucuggagccaggcgugcugaug

SEQ ID NO: 294331 - RNA, 32 nt, Homo Sapiens
auccaaagcuacugccuacucccuggccaauc

SEQ ID NO: 294332 - RNA, 32 nt, Homo Sapiens
uuuaaguacaggaucaagccuugcuugagauu

SEQ ID NO: 294333 - RNA, 32 nt, Homo Sapiens
cucuccugccuggccuggggacaugagccauu

SEQ ID NO: 294334 - RNA, 32 nt, Homo Sapiens
agccgggcgcgguggcgggcgccuguaguccc

SEQ ID NO: 294335 - RNA, 32 nt, Homo Sapiens
aucugggcaugguggcacgugccuguaguccc

SEQ ID NO: 294336 - RNA, 32 nt, Homo Sapiens
agcacggggacaggccgcuuccccacauccgc

SEQ ID NO: 294337 - RNA, 32 nt, Homo Sapiens
uaaagcagagauuguuucaaauggguguagua

SEQ ID NO: 294338 - RNA, 32 nt, Homo Sapiens
gcucuccucuuacuuugcugucuaaacuggag

SEQ ID NO: 294339 - RNA, 32 nt, Homo Sapiens
aguacgaaaaggaacguuguccacaggggauu

SEQ ID NO: 294340 - RNA, 32 nt, Homo Sapiens
uuuuugaugcagacauaaaaauagcaaucauu

SEQ ID NO: 294341 - RNA, 32 nt, Homo Sapiens
ucugcgccuagccaugagacgggaaggggagg

SEQ ID NO: 294342 - RNA, 32 nt, Homo Sapiens
cagaggauuuggcugccagcuugcuuguccaa

SEQ ID NO: 294343 - RNA, 29 nt, Homo Sapiens
gucuggggaggugguuggacgagguccug

SEQ ID NO: 294344 - RNA, 32 nt, Homo Sapiens
uccagccugggcaacauagugagaccccaucu

SEQ ID NO: 294345 - RNA, 32 nt, Homo Sapiens
acaagcaggaccaaaguuuuggacuguucccu

SEQ ID NO: 294346 - RNA, 32 nt, Homo Sapiens
aggaaggugggggguguccaguccucagggca

SEQ ID NO: 294347 - RNA, 32 nt, Homo Sapiens
uucaauaucccauuuucagcauuggacagauu

SEQ ID NO: 294348 - RNA, 32 nt, Homo Sapiens
gggggcuggcaucgccacggacccacacauuc

SEQ ID NO: 294349 - RNA, 32 nt, Homo Sapiens
agaauauuagcuuuacuguuuguuauggcuua

SEQ ID NO: 294350 - RNA, 32 nt, Homo Sapiens
ccucguucucucugcuggugaugcgguuguaa

SEQ ID NO: 294351 - RNA, 32 nt, Homo Sapiens
guugaacaucggggaauuuaugcugguaggaa

SEQ ID NO: 294352 - RNA, 32 nt, Homo Sapiens
aauagccacaaguggauaguggcuacuguguu

SEQ ID NO: 294353 - RNA, 32 nt, Homo Sapiens
uggauaaugcauuugauuuaucagugaagaug

SEQ ID NO: 294354 - RNA, 32 nt, Homo Sapiens
ccagcagcccacccuuuccucuccccacugcc

SEQ ID NO: 294355 - RNA, 28 nt, Homo Sapiens
gguagaguaguuaccaggagaugugaau

SEQ ID NO: 294356 - RNA, 32 nt, Homo Sapiens
cccaauucacauuggagcugguguugucugaa

SEQ ID NO: 294357 - RNA, 32 nt, Homo Sapiens
gcucaggagucaggcucugguucucgcuauga

SEQ ID NO: 294358 - RNA, 32 nt, Homo Sapiens
auuccaagacucaguauaaacaaguaccgagu

SEQ ID NO: 294359 - RNA, 32 nt, Homo Sapiens
uggcacagaaggaucuuaauucccaucucuau

SEQ ID NO: 294360 - RNA, 32 nt, Homo Sapiens
uagggaaggcaaaaacagaaccaaauaaaugu

SEQ ID NO: 294361 - RNA, 32 nt, Homo Sapiens
ccucugagcaccccccucccccucccucaauc

SEQ ID NO: 294362 - RNA, 32 nt, Homo Sapiens
gugggacucccggcccgggguucgccaacccc

SEQ ID NO: 294363 - RNA, 32 nt, Homo Sapiens
ucuccaguucuccuuucucaccacucuccugc

SEQ ID NO: 294364 - RNA, 32 nt, Homo Sapiens
cuuuuacaaccuggugcucagcuuccccauca

SEQ ID NO: 294365 - RNA, 32 nt, Homo Sapiens
ccuuccuuuccacaguguucuuucguccgaga

SEQ ID NO: 294366 - RNA, 32 nt, Homo Sapiens
cucuuaagucuuuggaggaaaucuugagcagu

SEQ ID NO: 294367 - RNA, 32 nt, Homo Sapiens
ucugggcagggccaacgggaggcucuuugcaa

SEQ ID NO: 294368 - RNA, 32 nt, Homo Sapiens
uaaccuuuauuacauuguaaauuaaacguaac

SEQ ID NO: 294369 - RNA, 31 nt, Homo Sapiens
gcgguggcgucgagccuguugagacuguuag

SEQ ID NO: 294370 - RNA, 32 nt, Homo Sapiens
gcgugugagguugggugauagccguuccuucc

SEQ ID NO: 294371 - RNA, 32 nt, Homo Sapiens
cguggcccgcggcuucccgcucgcgcagucug

SEQ ID NO: 294372 - RNA, 32 nt, Homo Sapiens
gcagucuaccugcacucggagccccggcccaa

SEQ ID NO: 294373 - RNA, 32 nt, Homo Sapiens
uucagagcauaagaaauugaggguccaagauc

SEQ ID NO: 294374 - RNA, 32 nt, Homo Sapiens
aagcuuuugucugagcaccuuuucauauagcu

SEQ ID NO: 294375 - RNA, 32 nt, Homo Sapiens
agaagaagaaaaaaucaaaaacaucauugaca

SEQ ID NO: 294376 - RNA, 32 nt, Homo Sapiens
cagugggaccccucccccauuauucuuucugu

SEQ ID NO: 294377 - RNA, 32 nt, Homo Sapiens
cccauuugaaaccaaaccugaccugaacuuac

SEQ ID NO: 294378 - RNA, 32 nt, Homo Sapiens
caucccauuuuccugcuucuuuggguugccaa

SEQ ID NO: 294379 - RNA, 32 nt, Homo Sapiens
gagucuuugguucgcgaagugccguuaggcca

SEQ ID NO: 294380 - RNA, 32 nt, Homo Sapiens
ugcucuuauggagccgagauccagucagggug

SEQ ID NO: 294381 - RNA, 32 nt, Homo Sapiens
aucuuuggagaaagugauacaagagcuucugc

SEQ ID NO: 294382 - RNA, 32 nt, Homo Sapiens
ucccagucaugguaucacuggcauggaccucu

SEQ ID NO: 294383 - RNA, 32 nt, Homo Sapiens
uuuuccaggaacuggaagauuaugauguuucu

SEQ ID NO: 294384 - RNA, 32 nt, Homo Sapiens
ucuuaugucauucguuagucuacauguuucua

SEQ ID NO: 294385 - RNA, 32 nt, Homo Sapiens
uucacaagccucccagaaccagcccuguccca

SEQ ID NO: 294386 - RNA, 32 nt, Homo Sapiens
caguuuuaucuggcagaggaaacauucuuauu

SEQ ID NO: 294387 - RNA, 32 nt, Homo Sapiens
aacccauguguuuguagagauuuuaggcgucu

SEQ ID NO: 294388 - RNA, 32 nt, Homo Sapiens
aaaagguagagcugacagaugcuuuccuuuga

SEQ ID NO: 294389 - RNA, 32 nt, Homo Sapiens
caagagaaugaauaaaacauuuaggcaggaga

SEQ ID NO: 294390 - RNA, 32 nt, Homo Sapiens
ccaagaaauggaggaagaaaacaaagaaucua

SEQ ID NO: 294391 - RNA, 32 nt, Homo Sapiens
gauaccggaaguagagucacggagaguauuaa

SEQ ID NO: 294392 - RNA, 32 nt, Homo Sapiens
uuucuuuuauugucacauuuuugugaaaaguc

SEQ ID NO: 294393 - RNA, 32 nt, Homo Sapiens
ggaagcgagcgcugcgcagucggguggucgcg

SEQ ID NO: 294394 - RNA, 32 nt, Homo Sapiens
agggcagcgcgaggcgggcgcugauuggcugc

SEQ ID NO: 294395 - RNA, 32 nt, Homo Sapiens
gucggagcaggagccaugggcggcgaaaccga

SEQ ID NO: 294396 - RNA, 32 nt, Homo Sapiens
ccuugucauguaccaucaauaaaguacccugu

SEQ ID NO: 294397 - RNA, 32 nt, Homo Sapiens
gcaccuaccuacaagaggcauuuucugaaagg

SEQ ID NO: 294398 - RNA, 32 nt, Homo Sapiens
gcacauacugaaugcauauauguagaaccaua

SEQ ID NO: 294399 - RNA, 32 nt, Homo Sapiens
cuggaaagauuuuuguuuucacugcuuguaug

SEQ ID NO: 294400 - RNA, 32 nt, Homo Sapiens
ccauccuuucccuuuuuaggucccugucuuau

SEQ ID NO: 294401 - RNA, 32 nt, Homo Sapiens
cugcgggccgucggccggcgauggcccuggau

SEQ ID NO: 294402 - RNA, 32 nt, Homo Sapiens
aaagugugaaacuaaaacuuuaugguuguacu

SEQ ID NO: 294403 - RNA, 32 nt, Homo Sapiens
ccaucaucauggcaucauugcauuccagccug

SEQ ID NO: 294404 - RNA, 32 nt, Homo Sapiens
aucuugucucagagcauccucaucucuuucuc

SEQ ID NO: 294405 - RNA, 32 nt, Homo Sapiens
agucagcauuuauucauguuuucccugauuuu

SEQ ID NO: 294406 - RNA, 32 nt, Homo Sapiens
acacuaaagagaaaugucuuuugugcuacagu

SEQ ID NO: 294407 - RNA, 32 nt, Homo Sapiens
ugauggugucauugugccccauaagccaaaga

SEQ ID NO: 294408 - RNA, 32 nt, Homo Sapiens
uuguagaaguaauaagaagaaagggaacacag

SEQ ID NO: 294409 - RNA, 32 nt, Homo Sapiens
ucagguacaaauacacuauagagucaaaauac

SEQ ID NO: 294410 - RNA, 32 nt, Homo Sapiens
uuccuccucucuaaaggguugaggcugagcua

SEQ ID NO: 294411 - RNA, 32 nt, Homo Sapiens
gggcauacugcagcagcccuauggaaaagugg

SEQ ID NO: 294412 - RNA, 32 nt, Homo Sapiens
agagcaugucauugucaaaggaaaucuguggc

SEQ ID NO: 294413 - RNA, 32 nt, Homo Sapiens
cagacauccaaguuuacaucauuguaauuauu

SEQ ID NO: 294414 - RNA, 32 nt, Homo Sapiens
gacuuugaggacucaaggguugaaggaugaga

SEQ ID NO: 294415 - RNA, 32 nt, Homo Sapiens
aaaaauauuuuuaugccacauuuuacaguagc

SEQ ID NO: 294416 - RNA, 32 nt, Homo Sapiens
agaugaaaccacacuggucagcuccuccugcc

SEQ ID NO: 294417 - RNA, 32 nt, Homo Sapiens
cugguguggcgaggcccggcucuccugcggug

SEQ ID NO: 294418 - RNA, 32 nt, Homo Sapiens
caggcgcgguagcucacgccuauaaucccaac

SEQ ID NO: 294419 - RNA, 32 nt, Homo Sapiens
caggcacgguagcucacgccuguaaucccaac

SEQ ID NO: 294420 - RNA, 32 nt, Homo Sapiens
cgugcaagagcuggaccccccacccccacccu

SEQ ID NO: 294421 - RNA, 32 nt, Homo Sapiens
ugggccuuaggacgggucucccuuaaacuggg

SEQ ID NO: 294422 - RNA, 32 nt, Homo Sapiens
uauagaauguggacugucauguugauaucauu

SEQ ID NO: 294423 - RNA, 32 nt, Homo Sapiens
auauuccacuauuugcagaggcuuauucaguu

SEQ ID NO: 294424 - RNA, 32 nt, Homo Sapiens
gaaugaguggucccggagaugugcuauaugaa

SEQ ID NO: 294425 - RNA, 32 nt, Homo Sapiens
cugggccgcccauuccuggcccucccgcugca

SEQ ID NO: 294426 - RNA, 32 nt, Homo Sapiens
uaaccugucauuccagaggaugcugagaaaug

SEQ ID NO: 294427 - RNA, 31 nt, Homo Sapiens
gaggaggcggaagaaaccagagccugggaga

SEQ ID NO: 294428 - RNA, 32 nt, Homo Sapiens
gucuaaucuccauggcuuugcaccaaauccuc

SEQ ID NO: 294429 - RNA, 32 nt, Homo Sapiens
ucacaagagauuacaaaauauacaaaaguuuc

SEQ ID NO: 294430 - RNA, 32 nt, Homo Sapiens
uuuaccugaacuagauuuuaucugaaaguagg

SEQ ID NO: 294431 - RNA, 32 nt, Homo Sapiens
guaaagggccaaacaguaaauauuuuagggcu

SEQ ID NO: 294432 - RNA, 32 nt, Homo Sapiens
aggaucuggggaaaccaugggcugggaagcug

SEQ ID NO: 294433 - RNA, 32 nt, Homo Sapiens
agaacuucacagagacucuguccuuccaugca

SEQ ID NO: 294434 - RNA, 32 nt, Homo Sapiens
gcuggggaggacacucggugccccacacccag

SEQ ID NO: 294435 - RNA, 28 nt, Homo Sapiens
guggcaguuacagggcccaggugagcug

SEQ ID NO: 294436 - RNA, 32 nt, Homo Sapiens
cccaagcaaaaucauggaauuauugguuauaa

SEQ ID NO: 294437 - RNA, 32 nt, Homo Sapiens
agcagcgcgggccccagcagccucggcagcca

SEQ ID NO: 294438 - RNA, 32 nt, Homo Sapiens
gucggggcaggccaggggaggggugaaguggu

SEQ ID NO: 294439 - RNA, 32 nt, Homo Sapiens
guccucgcaagccgagcgcccaggcgcgccag

SEQ ID NO: 294440 - RNA, 32 nt, Homo Sapiens
ccuuagauagguuuuucuuugaaaaccuggga

SEQ ID NO: 294441 - RNA, 32 nt, Homo Sapiens
uuugcauggaaauuaaguaggcuguuuauuua

SEQ ID NO: 294442 - RNA, 32 nt, Homo Sapiens
gaaaaagaagccacaagaaaacucaugcuuac

SEQ ID NO: 294443 - RNA, 32 nt, Homo Sapiens
aauggccacagccuccaggggcgcugacaccu

SEQ ID NO: 294444 - RNA, 32 nt, Homo Sapiens
uugcccccaucccucccucuccccuuuuggag

SEQ ID NO: 294445 - RNA, 32 nt, Homo Sapiens
ccaguaaagagauugauuuguuuguauggcuc

SEQ ID NO: 294446 - RNA, 30 nt, Homo Sapiens
aguggggaagagggacggauauuuuuaauu

SEQ ID NO: 294447 - RNA, 32 nt, Homo Sapiens
cuuuuccaaacacucacaguauauacaacagg

SEQ ID NO: 294448 - RNA, 32 nt, Homo Sapiens
aacauuuccagaacuuaauccaugagcauugg

SEQ ID NO: 294449 - RNA, 32 nt, Homo Sapiens
ucaaauuuaucccaaaguuuguuuccucaaug

SEQ ID NO: 294450 - RNA, 32 nt, Homo Sapiens
gcaaagucggaagcucugugcugcugcuggcc

SEQ ID NO: 294451 - RNA, 32 nt, Homo Sapiens
gcaacggaccggggcggggagucgggagacca

SEQ ID NO: 294452 - RNA, 32 nt, Homo Sapiens
uacucuguacucaagacugcuccucucugccg

SEQ ID NO: 294453 - RNA, 32 nt, Homo Sapiens
ccugcucuucaaccucuuuaucaguucugagg

SEQ ID NO: 294454 - RNA, 32 nt, Homo Sapiens
gcuucucacggggccuggcucaugguggaaaa

SEQ ID NO: 294455 - RNA, 32 nt, Homo Sapiens
acaagccugagccaccgugcccggcccugaau

SEQ ID NO: 294456 - RNA, 32 nt, Homo Sapiens
agcuuauaauuuucuuuuuuaauuuuugaagg

SEQ ID NO: 294457 - RNA, 32 nt, Homo Sapiens
gcccggccgggcggcggcugcaagaggaggcc

SEQ ID NO: 294458 - RNA, 32 nt, Homo Sapiens
cagagccucuggguggauguguagaaggcacu

SEQ ID NO: 294459 - RNA, 32 nt, Homo Sapiens
auagauuuuugggaguuugaccagagaugcaa

SEQ ID NO: 294460 - RNA, 32 nt, Homo Sapiens
uuucaguauuauuuauaguuggcacuugauug

SEQ ID NO: 294461 - RNA, 32 nt, Homo Sapiens
uaaaaccucccagcugaccucagacuaggcau

SEQ ID NO: 294462 - RNA, 32 nt, Homo Sapiens
auauacauauauauuuuuuaccaaaaugaauc

SEQ ID NO: 294463 - RNA, 32 nt, Homo Sapiens
caacuugcauaacgugaaaaagaaguaauuuu

SEQ ID NO: 294464 - RNA, 31 nt, Homo Sapiens
uggggaggggcgguguuaacucuuucugcuc

SEQ ID NO: 294465 - RNA, 32 nt, Homo Sapiens
accagcguggcggcugguguuggucagaugca

SEQ ID NO: 294466 - RNA, 32 nt, Homo Sapiens
ccauuuucuuuuucuuuuucuuuauuuuauuu

SEQ ID NO: 294467 - RNA, 32 nt, Homo Sapiens
ucugggcagcaggaaggaagggcgcagcgucc

SEQ ID NO: 294468 - RNA, 32 nt, Homo Sapiens
gaaauagcaaaacaggauuucugcuccucuug

SEQ ID NO: 294469 - RNA, 32 nt, Homo Sapiens
caagaucauaagcagccagaauacauacauga

SEQ ID NO: 294470 - RNA, 32 nt, Homo Sapiens
ccccggggcucccacacacucccccacccuca

SEQ ID NO: 294471 - RNA, 32 nt, Homo Sapiens
gcuacuuuauuuaacagcacagauuucuaugc

SEQ ID NO: 294472 - RNA, 32 nt, Homo Sapiens
guauguaauauuuggguugaucuauaaacacu

SEQ ID NO: 294473 - RNA, 32 nt, Homo Sapiens
uggagcccugagaggagaggggcagcccccca

SEQ ID NO: 294474 - RNA, 32 nt, Homo Sapiens
uuguggcgccggagacuaggugcggagcaagg

SEQ ID NO: 294475 - RNA, 32 nt, Homo Sapiens
gugggaggaaagggccugcgcaguccuggucc

SEQ ID NO: 294476 - RNA, 32 nt, Homo Sapiens
ugacggcuggagacgguucugguuucaacaac

SEQ ID NO: 294477 - RNA, 32 nt, Homo Sapiens
cucagcccaagcacuagaugugcagccccagc

SEQ ID NO: 294478 - RNA, 32 nt, Homo Sapiens
auaagcuguucuguaacauaguguagcaaaaa

SEQ ID NO: 294479 - RNA, 32 nt, Homo Sapiens
ggcagcggcgcugcgccuccucaguguucugc

SEQ ID NO: 294480 - RNA, 32 nt, Homo Sapiens
ggacccccggugcccgccgguccgcagacccu

SEQ ID NO: 294481 - RNA, 32 nt, Homo Sapiens
gggcggggccgccgcgcaagggggcgacgcau

SEQ ID NO: 294482 - RNA, 32 nt, Homo Sapiens
gaguuucgcucuugucgcccaggcuguagugc

SEQ ID NO: 294483 - RNA, 32 nt, Homo Sapiens
uccuaauaucacggucaguggacacccuguga

SEQ ID NO: 294484 - RNA, 32 nt, Homo Sapiens
aggagcuagcgcgcgggccccggcgccccgca

SEQ ID NO: 294485 - RNA, 32 nt, Homo Sapiens
ggaaaucugaagaccaggggacaaaugcuggu

SEQ ID NO: 294486 - RNA, 32 nt, Homo Sapiens
caacccgccgcgacguuacugcuccucugcug

SEQ ID NO: 294487 - RNA, 32 nt, Homo Sapiens
auggaguuaguagauuuaugauucugaucuac

SEQ ID NO: 294488 - RNA, 32 nt, Homo Sapiens
gucugcuuuccacagaaucaggcaugcuguua

SEQ ID NO: 294489 - RNA, 32 nt, Homo Sapiens
ugcguuauuaaaccccuagcuggcuggcaugc

SEQ ID NO: 294490 - RNA, 32 nt, Homo Sapiens
gaggagcgggcagaggcagcuccggcggccga

SEQ ID NO: 294491 - RNA, 32 nt, Homo Sapiens
guucuggccuucuguacugaucuguguuccug

SEQ ID NO: 294492 - RNA, 32 nt, Homo Sapiens
ggcugacguugccugaugugagagcaaguggc

SEQ ID NO: 294493 - RNA, 32 nt, Homo Sapiens
uugaggacagcauagaauaaaagcaagccccg

SEQ ID NO: 294494 - RNA, 32 nt, Homo Sapiens
auucaguuuucuuguccauaucuuuaaaagag

SEQ ID NO: 294495 - RNA, 32 nt, Homo Sapiens
ggaguggcucugccggggcauuggugggaccc

SEQ ID NO: 294496 - RNA, 32 nt, Homo Sapiens
ucguuccuauagaacacagaggacauaggaaa

SEQ ID NO: 294497 - RNA, 32 nt, Homo Sapiens
ucauuauuuacuuuuucuuacuuguuacugua

SEQ ID NO: 294498 - RNA, 32 nt, Homo Sapiens
uugaaggcucauauguaaaaauccaugccuuc

SEQ ID NO: 294499 - RNA, 32 nt, Homo Sapiens
acacccaggaccacuguccggcucuaacacag

SEQ ID NO: 294500 - RNA, 32 nt, Homo Sapiens
uuuccuacugaauguaccaaguuccaauuuuu

SEQ ID NO: 294501 - RNA, 32 nt, Homo Sapiens
agcccccagccucuccccuccuccuccuuguc

SEQ ID NO: 294502 - RNA, 32 nt, Homo Sapiens
augagaguggcaaauccuuuaauuauagcuaa

SEQ ID NO: 294503 - RNA, 32 nt, Homo Sapiens
ucugaaucaacaaaaucaggaauggaaaaaaa

SEQ ID NO: 294504 - RNA, 32 nt, Homo Sapiens
cuucaauagccaaaguuaauaauccuauauaa

SEQ ID NO: 294505 - RNA, 32 nt, Homo Sapiens
ugugggcacggcaucccgaggacagcagccau

SEQ ID NO: 294506 - RNA, 32 nt, Homo Sapiens
cugccgccuuacuguuuuuccuccucaagcaa

SEQ ID NO: 294507 - RNA, 32 nt, Homo Sapiens
ucaaaauuuuuacgugauaguauaaaccaaug

SEQ ID NO: 294508 - RNA, 32 nt, Homo Sapiens
gaggcucccaggcgcccggcgcagugggaagc

SEQ ID NO: 294509 - RNA, 32 nt, Homo Sapiens
gaguccauuggggugguuugcauuguaacuuu

SEQ ID NO: 294510 - RNA, 32 nt, Homo Sapiens
uacauuucugaauaaugacaaauugucauuau

SEQ ID NO: 294511 - RNA, 32 nt, Homo Sapiens
ugaaaauaugcaguacuguuuauauuuuguau

SEQ ID NO: 294512 - RNA, 32 nt, Homo Sapiens
uuuccccugagcucaggguuagggaugggcgc

SEQ ID NO: 294513 - RNA, 27 nt, Homo Sapiens
guucacagcuuccucagccccccagaa

SEQ ID NO: 294514 - RNA, 32 nt, Homo Sapiens
caagcccuacccggccagcagucgcuggccuc

SEQ ID NO: 294515 - RNA, 30 nt, Homo Sapiens
cggccaugggagaggccgaggugggcggcg

SEQ ID NO: 294516 - RNA, 32 nt, Homo Sapiens
gcgagcaccccaccccggccccggccccuccu

SEQ ID NO: 294517 - RNA, 32 nt, Homo Sapiens
acagcucacagagaaacgcaugugcuauugga

SEQ ID NO: 294518 - RNA, 32 nt, Homo Sapiens
ucaaaccuugauaugccuggacacugaaaagu

SEQ ID NO: 294519 - RNA, 32 nt, Homo Sapiens
acauugagaaauaaaaauguuguuuuguuguu

SEQ ID NO: 294520 - RNA, 32 nt, Homo Sapiens
gugagauguucccucugcuguaaaugcagguc

SEQ ID NO: 294521 - RNA, 32 nt, Homo Sapiens
uaauaucuuaugcuauuauucuguaaacauuu

SEQ ID NO: 294522 - RNA, 32 nt, Homo Sapiens
gcauauuuuauguaccaugguuauaugauuaa

SEQ ID NO: 294523 - RNA, 32 nt, Homo Sapiens
guucagggaagcugcccaggaagaagacuggc

SEQ ID NO: 294524 - RNA, 32 nt, Homo Sapiens
ugaaaaucgaucuauuugaagaaaaacagccc

SEQ ID NO: 294525 - RNA, 32 nt, Homo Sapiens
ucgacccucccuccccucacccccaaggugua

SEQ ID NO: 294526 - RNA, 32 nt, Homo Sapiens
gaauuuggagguuuuaaaauggugcuaauucu

SEQ ID NO: 294527 - RNA, 32 nt, Homo Sapiens
gagccgcgcggcuggccaggaccgccggcucc

SEQ ID NO: 294528 - RNA, 32 nt, Homo Sapiens
caguuaacaggaugcagacauggcagagguuu

SEQ ID NO: 294529 - RNA, 32 nt, Homo Sapiens
uuuucccacucugcgcuuggguuccggcagcg

SEQ ID NO: 294530 - RNA, 32 nt, Homo Sapiens
aagaaaauauaaacugacuaauauugucaagu

SEQ ID NO: 294531 - RNA, 32 nt, Homo Sapiens
aacauuugauauucagugcaauccauugcaug

SEQ ID NO: 294532 - RNA, 32 nt, Homo Sapiens
uggguucaugguuuuucucaaaucccaggcua

SEQ ID NO: 294533 - RNA, 32 nt, Homo Sapiens
uaccuguauaucuaauuuauauuuucauauau

SEQ ID NO: 294534 - RNA, 32 nt, Homo Sapiens
ccccaagccccucccucuuccauggagagaag

SEQ ID NO: 294535 - RNA, 32 nt, Homo Sapiens
gguuugcuggaacaugggcguuagagauggua

SEQ ID NO: 294536 - RNA, 32 nt, Homo Sapiens
cgcucccucaguccgaccccgggcgcuccccc

SEQ ID NO: 294537 - RNA, 32 nt, Homo Sapiens
uuccacaggaggagucagagagucaccaaggg

SEQ ID NO: 294538 - RNA, 32 nt, Homo Sapiens
gacuacccccgcaggggccugcgccaccccgu

SEQ ID NO: 294539 - RNA, 32 nt, Homo Sapiens
cuuccgcuggcccggggugcucccagccagcc

SEQ ID NO: 294540 - RNA, 32 nt, Homo Sapiens
acuugaccaaaauagaaguaaauuaaaguugu

SEQ ID NO: 294541 - RNA, 32 nt, Homo Sapiens
gauccauuuuaaaauuuguaauucaauaaagu

SEQ ID NO: 294542 - RNA, 32 nt, Homo Sapiens
cugucccuuguacaguuuucugucacuggugg

SEQ ID NO: 294543 - RNA, 32 nt, Homo Sapiens
aaguaaaacuaaaugaggaaggaaguaauguu

SEQ ID NO: 294544 - RNA, 32 nt, Homo Sapiens
ugggggaggccagcuuccuucugacaggaugg

SEQ ID NO: 294545 - RNA, 32 nt, Homo Sapiens
cauucucuagacaaaauccaucagggaaugcu

SEQ ID NO: 294546 - RNA, 32 nt, Homo Sapiens
gauaagcaaugaauuuaucuccaacuuccuaa

SEQ ID NO: 294547 - RNA, 32 nt, Homo Sapiens
acauuuauuacucacaagaccuuuuuccuccg

SEQ ID NO: 294548 - RNA, 32 nt, Homo Sapiens
gauaauuaauaugaaaaguaacuggcauguua

SEQ ID NO: 294549 - RNA, 32 nt, Homo Sapiens
acgaggucaggaguucgagaccauccuggcua

SEQ ID NO: 294550 - RNA, 32 nt, Homo Sapiens
agcggcaacugggcgcccagcggcguguacug

SEQ ID NO: 294551 - RNA, 32 nt, Homo Sapiens
cauuauuuacauacuuaagacauauuagcaag

SEQ ID NO: 294552 - RNA, 32 nt, Homo Sapiens
uauggcugccuuuuaaaauauuugauguguug

SEQ ID NO: 294553 - RNA, 32 nt, Homo Sapiens
gucugugcuggcuggaagagggcuugcuuagg

SEQ ID NO: 294554 - RNA, 32 nt, Homo Sapiens
aucaguuacaguaaagacuuugaaaaagaaau

SEQ ID NO: 294555 - RNA, 32 nt, Homo Sapiens
agaguggcccaccguggcacuagaaugcaagu

SEQ ID NO: 294556 - RNA, 32 nt, Homo Sapiens
acuacauugucaguuuuugucuuaauaaaacu

SEQ ID NO: 294557 - RNA, 32 nt, Homo Sapiens
gauguuuuuuaaaaauagauucaucuuggcac

SEQ ID NO: 294558 - RNA, 32 nt, Homo Sapiens
gucuagaaaaagaguuaagggaaaucuaaaca

SEQ ID NO: 294559 - RNA, 32 nt, Homo Sapiens
cuccaucccgcccuucccacagcauuccucca

SEQ ID NO: 294560 - RNA, 32 nt, Homo Sapiens
agaaccuuugacucugaaaggaucuuggauag

SEQ ID NO: 294561 - RNA, 32 nt, Homo Sapiens
gggccuggaaaauggaugagcacuucagaaca

SEQ ID NO: 294562 - RNA, 32 nt, Homo Sapiens
guauagguuuaaaagauaaaaucuuuaguuaa

SEQ ID NO: 294563 - RNA, 32 nt, Homo Sapiens
gucuugcugucuuuucugauguuguuaaacua

SEQ ID NO: 294564 - RNA, 32 nt, Homo Sapiens
cgccagagcagccucgacgcuauggaggagcc

SEQ ID NO: 294565 - RNA, 32 nt, Homo Sapiens
auuauuaaacaaucuuccuaaaugacuuguau

SEQ ID NO: 294566 - RNA, 32 nt, Homo Sapiens
guggucuuuaggauguugggauuuugagugaa

SEQ ID NO: 294567 - RNA, 32 nt, Homo Sapiens
gaagcccuaaaaugcuagaauaauaauaaaaa

SEQ ID NO: 294568 - RNA, 32 nt, Homo Sapiens
gugccccagagagcagggccugcccgggaagg

SEQ ID NO: 294569 - RNA, 32 nt, Homo Sapiens
uuuuguuuucuuucuuuuuuaacacuuaguaa

SEQ ID NO: 294570 - RNA, 32 nt, Homo Sapiens
uauuacaaggguauccugugcuaugcuggaca

SEQ ID NO: 294571 - RNA, 32 nt, Homo Sapiens
uggugguggcagcugggcaggucuccucuggg

SEQ ID NO: 294572 - RNA, 32 nt, Homo Sapiens
cugaaauguucccuauauuuuuggcuguaugg

SEQ ID NO: 294573 - RNA, 32 nt, Homo Sapiens
gaggccucgggcgggggcuggcccgggguucc

SEQ ID NO: 294574 - RNA, 32 nt, Homo Sapiens
cagcacgccccggccccgccccagcccuccug

SEQ ID NO: 294575 - RNA, 32 nt, Homo Sapiens
ucccccgggcccagccgcucguccgaggcccg

SEQ ID NO: 294576 - RNA, 28 nt, Homo Sapiens
gagugggggcggcugcguagcugugguc

SEQ ID NO: 294577 - RNA, 32 nt, Homo Sapiens
ugacuucucccuccccggccucagguuugcuu

SEQ ID NO: 294578 - RNA, 32 nt, Homo Sapiens
agcaaggaggcucuccuuccauccuaggaccc

SEQ ID NO: 294579 - RNA, 31 nt, Homo Sapiens
gcaacuauaaucucaaguucaguguggugag

SEQ ID NO: 294580 - RNA, 32 nt, Homo Sapiens
gccugaaagggagaagagggaaaaggaagcac

SEQ ID NO: 294581 - RNA, 32 nt, Homo Sapiens
cuugugaucugccugccuuggccucucaaagu

SEQ ID NO: 294582 - RNA, 32 nt, Homo Sapiens
ccuaagcacaauggggugccugcuugggcugg

SEQ ID NO: 294583 - RNA, 32 nt, Homo Sapiens
ggacccgagcgcgcucacuucgccgcaaagug

SEQ ID NO: 294584 - RNA, 32 nt, Homo Sapiens
auccaguaggcccugagcccuacuucauuggc

SEQ ID NO: 294585 - RNA, 29 nt, Homo Sapiens
uguuuauaaaguuuuauggauuuuuacag

SEQ ID NO: 294586 - RNA, 32 nt, Homo Sapiens
cgaccucaaguguccugaaagcuuacauuuuc

SEQ ID NO: 294587 - RNA, 32 nt, Homo Sapiens
cugcugccuggcggccaacgggccagguagga

SEQ ID NO: 294588 - RNA, 32 nt, Homo Sapiens
gacugccagaaagaccuuuugcaggaugugga

SEQ ID NO: 294589 - RNA, 32 nt, Homo Sapiens
uuugccugucugcccuccuggaugcuauuaaa

SEQ ID NO: 294590 - RNA, 31 nt, Homo Sapiens
cggccuuguaguuguacagugcuguugguuu

SEQ ID NO: 294591 - RNA, 32 nt, Homo Sapiens
gcucagagaagcuucucgcgcacaggaagucg

SEQ ID NO: 294592 - RNA, 32 nt, Homo Sapiens
guaagggcuagaaccucacacaugcugguuuu

SEQ ID NO: 294593 - RNA, 32 nt, Homo Sapiens
aaaaucagauauuuuuucaagaguuagggaaa

SEQ ID NO: 294594 - RNA, 32 nt, Homo Sapiens
acuaggccuuauaaaaagucaaagccucaaag

SEQ ID NO: 294595 - RNA, 32 nt, Homo Sapiens
ucccuugcugagaacaugcagaugaauaaccu

SEQ ID NO: 294596 - RNA, 30 nt, Homo Sapiens
guagcuggcaggcgccgacuuccgaaggcc

SEQ ID NO: 294597 - RNA, 32 nt, Homo Sapiens
ucucccugggguggcgggagggggagguuacu

SEQ ID NO: 294598 - RNA, 32 nt, Homo Sapiens
uuggcuauucuguuuaaaucugauaaucaguu

SEQ ID NO: 294599 - RNA, 30 nt, Homo Sapiens
ggccaacaguaaaugggggaggccuccuga

SEQ ID NO: 294600 - RNA, 32 nt, Homo Sapiens
cggggcacauacugccaucuccccucguccug

SEQ ID NO: 294601 - RNA, 32 nt, Homo Sapiens
gucugauccucuaucuuguccaaugguuuaaa

SEQ ID NO: 294602 - RNA, 32 nt, Homo Sapiens
acagcuuccucuuuugguuccauccuuaccac

SEQ ID NO: 294603 - RNA, 30 nt, Homo Sapiens
guuggaaucugugcuuugcagaagcaagag

SEQ ID NO: 294604 - RNA, 32 nt, Homo Sapiens
gauauuuuuguccuuuagauguucaaauacuc

SEQ ID NO: 294605 - RNA, 32 nt, Homo Sapiens
uccauucuccccugcgccuccuccucuguguu

SEQ ID NO: 294606 - RNA, 32 nt, Homo Sapiens
ucuccacgcccaacuccugucccaggacguca

SEQ ID NO: 294607 - RNA, 32 nt, Homo Sapiens
gacacagagucuugcucuguugcccaggcugg

SEQ ID NO: 294608 - RNA, 32 nt, Homo Sapiens
uucuccugcccccgcggcuggagcaucgucug

SEQ ID NO: 294609 - RNA, 32 nt, Homo Sapiens
ugaaaggaauaggaaauugaaccugggguuuu

SEQ ID NO: 294610 - RNA, 32 nt, Homo Sapiens
aucauaggagaugacauuuguuccugugacau

SEQ ID NO: 294611 - RNA, 32 nt, Homo Sapiens
uggaguauuuccccuucugccuuuacagcaau

SEQ ID NO: 294612 - RNA, 32 nt, Homo Sapiens
aagaccagucccacccaccuuucuggccucau

SEQ ID NO: 294613 - RNA, 32 nt, Homo Sapiens
uaauacuuuucuaaugcugacuuuuuaauaug

SEQ ID NO: 294614 - RNA, 30 nt, Homo Sapiens
cuuacgguuugugcugcuguuucuggggcu

SEQ ID NO: 294615 - RNA, 32 nt, Homo Sapiens
cauuaugaauguuuacuaauggcucguugcug

SEQ ID NO: 294616 - RNA, 32 nt, Homo Sapiens
uucuuacuaggauauauaaaacagggacucua

SEQ ID NO: 294617 - RNA, 32 nt, Homo Sapiens
guaagugacaggccuuaggacaaugggggcug

SEQ ID NO: 294618 - RNA, 32 nt, Homo Sapiens
ucacugcagggcgggggcggcaccgcuccccu

SEQ ID NO: 294619 - RNA, 32 nt, Homo Sapiens
cgggauaagggaacuuuuucgcuucaccacua

SEQ ID NO: 294620 - RNA, 32 nt, Homo Sapiens
gucaaagccaguuuuucuuuuaaaauugaauu

SEQ ID NO: 294621 - RNA, 30 nt, Homo Sapiens
aguucagagaagcuaagggucuugcucaug

SEQ ID NO: 294622 - RNA, 32 nt, Homo Sapiens
uggccggcgauggggaggagccggcuccggca

SEQ ID NO: 294623 - RNA, 32 nt, Homo Sapiens
ugaguuuaucauugacuuuaagagguagaaau

SEQ ID NO: 294624 - RNA, 32 nt, Homo Sapiens
uggucuugccagcauaggcuugcuaguuccuu

SEQ ID NO: 294625 - RNA, 32 nt, Homo Sapiens
gcgcccccuccucuccucccaccggccugccc

SEQ ID NO: 294626 - RNA, 32 nt, Homo Sapiens
uggaagaaaaggaaaaagucuuugaguuuuau

SEQ ID NO: 294627 - RNA, 32 nt, Homo Sapiens
cauuggcaaucauuuuaaaccaaaaagcugcu

SEQ ID NO: 294628 - RNA, 32 nt, Homo Sapiens
gucucuuuaaucuucaguuuuaucuuuaaucu

SEQ ID NO: 294629 - RNA, 32 nt, Homo Sapiens
aaaacucagaucucaaagcucugcuuguauuu

SEQ ID NO: 294630 - RNA, 32 nt, Homo Sapiens
cugcgccagaaaaguacagcauccucugauga

SEQ ID NO: 294631 - RNA, 32 nt, Homo Sapiens
guuguaauuaaauaaacauagauaaaauuguu

SEQ ID NO: 294632 - RNA, 32 nt, Homo Sapiens
uaugaaugacuaggauuaaucuaguguguuua

SEQ ID NO: 294633 - RNA, 32 nt, Homo Sapiens
gguuuugaaaauaaauauuuaaauuucacagu

SEQ ID NO: 294634 - RNA, 32 nt, Homo Sapiens
ucacuggaaauucaaauggaaccaucauucug

SEQ ID NO: 294635 - RNA, 32 nt, Homo Sapiens
uuugcagggaauuugcaggccucgauuauugg

SEQ ID NO: 294636 - RNA, 32 nt, Homo Sapiens
uuuaacauaaaacagggaugucacuuugaggg

SEQ ID NO: 294637 - RNA, 32 nt, Homo Sapiens
uuuucaguccccucucucuggaucagaaccag

SEQ ID NO: 294638 - RNA, 32 nt, Homo Sapiens
ggagucaaauucaaauacagguuuucugacau

SEQ ID NO: 294639 - RNA, 32 nt, Homo Sapiens
aguuaaagaacaaaccaugugacaaaauuguu

SEQ ID NO: 294640 - RNA, 31 nt, Homo Sapiens
ggcagcacaaagaacaagauauaacagcuga

SEQ ID NO: 294641 - RNA, 32 nt, Homo Sapiens
guucaauacauuuuagauuaggauugacaagu

SEQ ID NO: 294642 - RNA, 32 nt, Homo Sapiens
uggaccccagauucacagggcacaaaugcauu

SEQ ID NO: 294643 - RNA, 32 nt, Homo Sapiens
gcuccccuugcccuucccucccuaucacucca

SEQ ID NO: 294644 - RNA, 32 nt, Homo Sapiens
aggacacacacacacacacacacacacacacc

SEQ ID NO: 294645 - RNA, 32 nt, Homo Sapiens
caggacauggacaaauaggcucugccaucagg

SEQ ID NO: 294646 - RNA, 32 nt, Homo Sapiens
uccuuagaggaaucugggugccugcugucccu

SEQ ID NO: 294647 - RNA, 32 nt, Homo Sapiens
uauuaacauuuuauuguuguagaaguauuuua

SEQ ID NO: 294648 - RNA, 32 nt, Homo Sapiens
agaccccguccucauuucuguaaugauggauc

SEQ ID NO: 294649 - RNA, 32 nt, Homo Sapiens
ggacucccgcggcgggaggagccuguuccccu

SEQ ID NO: 294650 - RNA, 32 nt, Homo Sapiens
gugggaugggucuuugccuuucuggguaggga

SEQ ID NO: 294651 - RNA, 32 nt, Homo Sapiens
cagaacuccaaaguaagcuuugaaagcagcau

SEQ ID NO: 294652 - RNA, 32 nt, Homo Sapiens
ucuccuuccuucgucuagaaccuuccccacag

SEQ ID NO: 294653 - RNA, 32 nt, Homo Sapiens
agugacauuguuaauugucugcuuugcaauag

SEQ ID NO: 294654 - RNA, 32 nt, Homo Sapiens
ggaaugugguggccacgcgauggagcuggccg

SEQ ID NO: 294655 - RNA, 32 nt, Homo Sapiens
aacuugguggccugggucccuggagcccuguu

SEQ ID NO: 294656 - RNA, 32 nt, Homo Sapiens
uaaguuuuucuuucuacaucuuauauaaaugg

SEQ ID NO: 294657 - RNA, 32 nt, Homo Sapiens
agcgcucugcccggccgccgcuaccugcgggg

SEQ ID NO: 294658 - RNA, 32 nt, Homo Sapiens
gcggcgauggggaugccgcccgggggucuugg

SEQ ID NO: 294659 - RNA, 32 nt, Homo Sapiens
gacuugucaauacacaggcaguauucuaaaau

SEQ ID NO: 294660 - RNA, 32 nt, Homo Sapiens
ggguccugucccauccauccugaccuguucca

SEQ ID NO: 294661 - RNA, 32 nt, Homo Sapiens
uuuuuucuuuuaaauuuuagagcauuaacuuu

SEQ ID NO: 294662 - RNA, 32 nt, Homo Sapiens
aagaaguuuuuaaaaggcaagcaaaaacagaa

SEQ ID NO: 294663 - RNA, 32 nt, Homo Sapiens
gugcuacacuuggaauucugugcucugacucu

SEQ ID NO: 294664 - RNA, 32 nt, Homo Sapiens
cuggaauaaaauguggcucuggcaugguuaaa

SEQ ID NO: 294665 - RNA, 32 nt, Homo Sapiens
aguauucccagggucuuugcucuggagagucc

SEQ ID NO: 294666 - RNA, 32 nt, Homo Sapiens
gcaaaauauaggucuguccaaauucauacaac

SEQ ID NO: 294667 - RNA, 30 nt, Homo Sapiens
cugccuuuggacugcucugacuuuagcauc

SEQ ID NO: 294668 - RNA, 32 nt, Homo Sapiens
gaauuuucuuccucagaaaugcuccaccugua

SEQ ID NO: 294669 - RNA, 32 nt, Homo Sapiens
caguuaucuaucuguaaauuuauuuuuauuug

SEQ ID NO: 294670 - RNA, 32 nt, Homo Sapiens
ucacugcaaccacugcuuccuggguucaagug

SEQ ID NO: 294671 - RNA, 32 nt, Homo Sapiens
aggaagcauccacaccccaacucccggacauc

SEQ ID NO: 294672 - RNA, 32 nt, Homo Sapiens
gcuuccaggaggaugcggagccccagcgcggc

SEQ ID NO: 294673 - RNA, 32 nt, Homo Sapiens
ggcauguauuccucagaggcgaaacugccaaa

SEQ ID NO: 294674 - RNA, 32 nt, Homo Sapiens
gcagguugggcuccucucugcugcuggaccca

SEQ ID NO: 294675 - RNA, 32 nt, Homo Sapiens
aucguuuugugauuguaauauaucaaaguaua

SEQ ID NO: 294676 - RNA, 32 nt, Homo Sapiens
gagccccggccgccggcccggcaugggcgucu

SEQ ID NO: 294677 - RNA, 32 nt, Homo Sapiens
aaauauggggaguguauauaaaacuugcuuua

SEQ ID NO: 294678 - RNA, 32 nt, Homo Sapiens
cacgagcccgcggccggagugcgaggcggagg

SEQ ID NO: 294679 - RNA, 32 nt, Homo Sapiens
agauccugauaccaccuucaaggaaccucagg

SEQ ID NO: 294680 - RNA, 32 nt, Homo Sapiens
acaguuuaagacuuaaauucuucguccacagc

SEQ ID NO: 294681 - RNA, 32 nt, Homo Sapiens
uuugccacauucugcccuucccugaccccauu

SEQ ID NO: 294682 - RNA, 32 nt, Homo Sapiens
uuggggaccugcccacgcugucuccuggaggc

SEQ ID NO: 294683 - RNA, 32 nt, Homo Sapiens
ggccgugcgcggugcugugccgcgcccugcca

SEQ ID NO: 294684 - RNA, 32 nt, Homo Sapiens
accgauguccacuugggaccagauguccagcu

SEQ ID NO: 294685 - RNA, 32 nt, Homo Sapiens
uguaauuuauauauuucacuuguauucauuug

SEQ ID NO: 294686 - RNA, 32 nt, Homo Sapiens
cucaacgguggaaagaggaggaugcuguuuau

SEQ ID NO: 294687 - RNA, 32 nt, Homo Sapiens
aaggaacaagcugccaauaaugucugcaaaaa

SEQ ID NO: 294688 - RNA, 32 nt, Homo Sapiens
gcuaauuuuccacagagcaaugcuauggaaua

SEQ ID NO: 294689 - RNA, 29 nt, Homo Sapiens
gguuugcaggguuuauauuuuguauagaa

SEQ ID NO: 294690 - RNA, 32 nt, Homo Sapiens
uuucaaaaaugggaaaugcuauacuuauaaga

SEQ ID NO: 294691 - RNA, 32 nt, Homo Sapiens
gagggagcagugaauagcaauaggguguuucc

SEQ ID NO: 294692 - RNA, 32 nt, Homo Sapiens
gccagcugcccggcuggcaauggugugagugu

SEQ ID NO: 294693 - RNA, 32 nt, Homo Sapiens
gaauaauauuccauuguauggauauaccacau

SEQ ID NO: 294694 - RNA, 32 nt, Homo Sapiens
cacucuuacuuugucggccccauccacagccg

SEQ ID NO: 294695 - RNA, 32 nt, Homo Sapiens
ugccuguaaucccagcacuuugggagacugag

SEQ ID NO: 294696 - RNA, 32 nt, Homo Sapiens
gaacuauauuaguauguauguguaccuaaggg

SEQ ID NO: 294697 - RNA, 32 nt, Homo Sapiens
gcccagguggccuccuggcccgcccucaccuc

SEQ ID NO: 294698 - RNA, 32 nt, Homo Sapiens
agagacucuccaugggauuccaucugugucuu

SEQ ID NO: 294699 - RNA, 32 nt, Homo Sapiens
cacacaagcugaugauaaccacuuacuaugug

SEQ ID NO: 294700 - RNA, 32 nt, Homo Sapiens
uuucuagcuuugcaugacaccuggagcaaugc

SEQ ID NO: 294701 - RNA, 32 nt, Homo Sapiens
ucuacuuuucccuuuuuuguauuaugugacua

SEQ ID NO: 294702 - RNA, 32 nt, Homo Sapiens
ugguucuccucaccacccaccuuuucagccau

SEQ ID NO: 294703 - RNA, 32 nt, Homo Sapiens
uucuuuuauccuuuauauuucauuuguaaacu

SEQ ID NO: 294704 - RNA, 32 nt, Homo Sapiens
ggaaugggggaagaggaggagcaggaggcccu

SEQ ID NO: 294705 - RNA, 32 nt, Homo Sapiens
ccguggcuccaaggucggcagacagccaggga

SEQ ID NO: 294706 - RNA, 30 nt, Homo Sapiens
agccuuggucgcggcgugccggcgcugcag

SEQ ID NO: 294707 - RNA, 32 nt, Homo Sapiens
uggcucucacuacucaccuugucuuucagcuu

SEQ ID NO: 294708 - RNA, 32 nt, Homo Sapiens
acagcuggccagcagccccgccugacauggaa

SEQ ID NO: 294709 - RNA, 32 nt, Homo Sapiens
guucacauacauuuucuaauuguuaacuaauu

SEQ ID NO: 294710 - RNA, 32 nt, Homo Sapiens
gcccuuucaaccaugagauagugggauuuaac

SEQ ID NO: 294711 - RNA, 32 nt, Homo Sapiens
uggaggagguaaagguugaauuauauuuuccc

SEQ ID NO: 294712 - RNA, 32 nt, Homo Sapiens
caaaacgguuuuacugcagcuuuguuuguugu

SEQ ID NO: 294713 - RNA, 32 nt, Homo Sapiens
caccuguacuucgaugugaugcuggagaacuu

SEQ ID NO: 294714 - RNA, 32 nt, Homo Sapiens
gccugcccaagcacagugcagggggccuaagc

SEQ ID NO: 294715 - RNA, 32 nt, Homo Sapiens
gcagacuucuauuuccagaagugacagcacaa

SEQ ID NO: 294716 - RNA, 32 nt, Homo Sapiens
uucugaaaauucuguaucugagcacaucaaga

SEQ ID NO: 294717 - RNA, 32 nt, Homo Sapiens
uguauuugauaaaaauccauuacaugaaauaa

SEQ ID NO: 294718 - RNA, 32 nt, Homo Sapiens
agcggaggccgcggcgccgcccuccgaucuug

SEQ ID NO: 294719 - RNA, 32 nt, Homo Sapiens
gaaaggagagauuguuucauugugcaaucaau

SEQ ID NO: 294720 - RNA, 32 nt, Homo Sapiens
gccaagguuuccauuuucagggcuauaaaaag

SEQ ID NO: 294721 - RNA, 32 nt, Homo Sapiens
ucgugcuuuguacaguuuucuuucugguuuua

SEQ ID NO: 294722 - RNA, 32 nt, Homo Sapiens
uacaaacaauuucaaaaagaaaggugcaaacc

SEQ ID NO: 294723 - RNA, 32 nt, Homo Sapiens
gccuuuccagcaugcaggggcugcucagcguu

SEQ ID NO: 294724 - RNA, 32 nt, Homo Sapiens
ucuguauuuuuccacuucacuguaaaaauagu

SEQ ID NO: 294725 - RNA, 32 nt, Homo Sapiens
ggccagcagccuuccaguggcuucucccaaca

SEQ ID NO: 294726 - RNA, 32 nt, Homo Sapiens
ucuauuaacaauuucuuauguaauuuucaaga

SEQ ID NO: 294727 - RNA, 31 nt, Homo Sapiens
uucuugcuggagguuuuaaauagauuuagac

SEQ ID NO: 294728 - RNA, 32 nt, Homo Sapiens
uuguugucguuguuguaguuaaaggaauuuca

SEQ ID NO: 294729 - RNA, 32 nt, Homo Sapiens
auuuaauucuucaguguguauccaccacauuu

SEQ ID NO: 294730 - RNA, 32 nt, Homo Sapiens
gaggaggaacggugggggugggcagucacugc

SEQ ID NO: 294731 - RNA, 32 nt, Homo Sapiens
auggagcaaguuuuuucuuugauuucuaugaa

SEQ ID NO: 294732 - RNA, 32 nt, Homo Sapiens
ucuggaugucgugugagaagugaugguagcag

SEQ ID NO: 294733 - RNA, 32 nt, Homo Sapiens
aauaagugauggucaugguuauggguaggaaa

SEQ ID NO: 294734 - RNA, 32 nt, Homo Sapiens
guaaaggucacuuuucacauccuugacuuuuu

SEQ ID NO: 294735 - RNA, 32 nt, Homo Sapiens
auucuuuaaagacaguagaauauuggcuauuu

SEQ ID NO: 294736 - RNA, 32 nt, Homo Sapiens
cuggucacaccucacuauguccccucagcucc

SEQ ID NO: 294737 - RNA, 32 nt, Homo Sapiens
cgggcggugcuagcuccgcgcucccugccucg

SEQ ID NO: 294738 - RNA, 32 nt, Homo Sapiens
uuaugcaaaacacaaauaugauauuaguugcu

SEQ ID NO: 294739 - RNA, 32 nt, Homo Sapiens
cagcugacaacaccacccacggcccaugcaga

SEQ ID NO: 294740 - RNA, 32 nt, Homo Sapiens
guuugguaaugcugaggccaggccuuuuagag

SEQ ID NO: 294741 - RNA, 32 nt, Homo Sapiens
ucgucuuugauauuucugaagaaccgaauugu

SEQ ID NO: 294742 - RNA, 32 nt, Homo Sapiens
agacgguauuaggaugauaacaguauuuggaa

SEQ ID NO: 294743 - RNA, 32 nt, Homo Sapiens
caguuuaguaauuuauauucaccagucacuuc

SEQ ID NO: 294744 - RNA, 31 nt, Homo Sapiens
caccugccucccugccugcuucgcccuggac

SEQ ID NO: 294745 - RNA, 32 nt, Homo Sapiens
ucccagcucugcaagugugcccccuggaucaa

SEQ ID NO: 294746 - RNA, 32 nt, Homo Sapiens
gagguggcggggggaagcagagggaggugggc

SEQ ID NO: 294747 - RNA, 32 nt, Homo Sapiens
ggccugaggguacauuucuccaccugugcccc

SEQ ID NO: 294748 - RNA, 32 nt, Homo Sapiens
gagucgggagcacagcugcugcuggaaaugcu

SEQ ID NO: 294749 - RNA, 32 nt, Homo Sapiens
uucucuccaauuuuucuguaacucgggagcau

SEQ ID NO: 294750 - RNA, 32 nt, Homo Sapiens
cagaaaucaacugacaaauggcagauucauag

SEQ ID NO: 294751 - RNA, 32 nt, Homo Sapiens
ucuccuggcugccacccgcaccccccgccagc

SEQ ID NO: 294752 - RNA, 32 nt, Homo Sapiens
gaggaagaacuauuuggggucuguagguaaug

SEQ ID NO: 294753 - RNA, 32 nt, Homo Sapiens
gauuucuucugggaaauacagauggaaauaca

SEQ ID NO: 294754 - RNA, 32 nt, Homo Sapiens
uucauucggagaguccgcgauuccuagagccu

SEQ ID NO: 294755 - RNA, 32 nt, Homo Sapiens
cuguguucucagacagauuucagucauuagau

SEQ ID NO: 294756 - RNA, 32 nt, Homo Sapiens
aucuuauuuuaccaacaauaugauuaucuaua

SEQ ID NO: 294757 - RNA, 32 nt, Homo Sapiens
cuuugggcuccggugggaccaagcgaaauucc

SEQ ID NO: 294758 - RNA, 32 nt, Homo Sapiens
uuugaacuuuuaauuauaaguguuauggcuaa

SEQ ID NO: 294759 - RNA, 32 nt, Homo Sapiens
gccuagcgacaagggauuugcucgcacggcau

SEQ ID NO: 294760 - RNA, 32 nt, Homo Sapiens
ucaccgccccccaccccucacugcccccgauu

SEQ ID NO: 294761 - RNA, 31 nt, Homo Sapiens
cuaaguccucaauaaacccuaugucucauuu

SEQ ID NO: 294762 - RNA, 32 nt, Homo Sapiens
accuuggcccgaaggcucuagcaaggacccac

SEQ ID NO: 294763 - RNA, 32 nt, Homo Sapiens
uauaagugauugcugguuuuaguugcaacuuu

SEQ ID NO: 294764 - RNA, 32 nt, Homo Sapiens
auaauuuuuuguucuggaaggaucuagggggc

SEQ ID NO: 294765 - RNA, 32 nt, Homo Sapiens
caagaacuccugugucccauggucuccaccac

SEQ ID NO: 294766 - RNA, 29 nt, Homo Sapiens
ugcggccugguccgggccauguccgcgug

SEQ ID NO: 294767 - RNA, 28 nt, Homo Sapiens
cuugcuguuacaggcacaggugauuaaa

SEQ ID NO: 294768 - RNA, 32 nt, Homo Sapiens
gcgugaaaaaucaaaagcaaauuaguggccau

SEQ ID NO: 294769 - RNA, 32 nt, Homo Sapiens
agauguauuuuauuuauuuuuauccauagcuu

SEQ ID NO: 294770 - RNA, 32 nt, Homo Sapiens
gcacagcugggguggggaccucaggccugggg

SEQ ID NO: 294771 - RNA, 32 nt, Homo Sapiens
aagugauauuuuuauuuuuuuauucauaccac

SEQ ID NO: 294772 - RNA, 32 nt, Homo Sapiens
agccgggagagccgagugggaggggccgccgg

SEQ ID NO: 294773 - RNA, 32 nt, Homo Sapiens
aguucugcaauaagauucuaguucucucuuuu

SEQ ID NO: 294774 - RNA, 32 nt, Homo Sapiens
cccgcaccgccuccuucccagccccuagcgcu

SEQ ID NO: 294775 - RNA, 32 nt, Homo Sapiens
uaaaaugaauuuccuuccaaguagccuauuag

SEQ ID NO: 294776 - RNA, 32 nt, Homo Sapiens
auaucauuggcuuauuggaugaaacagugucu

SEQ ID NO: 294777 - RNA, 32 nt, Homo Sapiens
aguagcuaggauuacaggcgcccgccacuacg

SEQ ID NO: 294778 - RNA, 32 nt, Homo Sapiens
gagccuagagggcccucugaugccccacugag

SEQ ID NO: 294779 - RNA, 32 nt, Homo Sapiens
agggcugaaggggauguaucagagccucacgg

SEQ ID NO: 294780 - RNA, 32 nt, Homo Sapiens
uaaauggcgucgggggcgggaccuccgggauc

SEQ ID NO: 294781 - RNA, 32 nt, Homo Sapiens
uaaaugguccuuguaaaguacauugccaucuc

SEQ ID NO: 294782 - RNA, 32 nt, Homo Sapiens
cugaaggguggaugugcuggagggguggccca

SEQ ID NO: 294783 - RNA, 32 nt, Homo Sapiens
agcaaggggagcggccccggcgccgcccauau

SEQ ID NO: 294784 - RNA, 32 nt, Homo Sapiens
gcuguucauauuaugauucagaaucauuuucu

SEQ ID NO: 294785 - RNA, 32 nt, Homo Sapiens
aaauaacccaaguuaagagcaugacuuaaagu

SEQ ID NO: 294786 - RNA, 32 nt, Homo Sapiens
caggagaaaugugcaaaccucuguggauacca

SEQ ID NO: 294787 - RNA, 32 nt, Homo Sapiens
auggguccugcccugcccucccaggaguccag

SEQ ID NO: 294788 - RNA, 32 nt, Homo Sapiens
ccugacagccgagggacacgagcaucacucug

SEQ ID NO: 294789 - RNA, 32 nt, Homo Sapiens
ucaugcgccagaaccgcaccagaugggcccag

SEQ ID NO: 294790 - RNA, 32 nt, Homo Sapiens
uccagagaacuaaauaguaauaguuucauaga

SEQ ID NO: 294791 - RNA, 32 nt, Homo Sapiens
gcuuggcaguguauuucagcuuggacauuuua

SEQ ID NO: 294792 - RNA, 32 nt, Homo Sapiens
ucuaaggaaucaugaaccuugccuggacauuu

SEQ ID NO: 294793 - RNA, 32 nt, Homo Sapiens
ucugggaggaccaggucucuccgcuccucuug

SEQ ID NO: 294794 - RNA, 32 nt, Homo Sapiens
gcaucaggauugauaaacaaauguagaugauu

SEQ ID NO: 294795 - RNA, 32 nt, Homo Sapiens
aguguuguggauuuaacagaaauguacagcaa

SEQ ID NO: 294796 - RNA, 32 nt, Homo Sapiens
ccgcuggcaggggacaugggugucaugacugg

SEQ ID NO: 294797 - RNA, 32 nt, Homo Sapiens
cccggagcguggccagaauggugcuggaagga

SEQ ID NO: 294798 - RNA, 32 nt, Homo Sapiens
gaaggacauuuuacugcagugagaaugagggc

SEQ ID NO: 294799 - RNA, 32 nt, Homo Sapiens
aggcaccaugguggagaagggaucagauagcu

SEQ ID NO: 294800 - RNA, 32 nt, Homo Sapiens
uccuggcccucaggaagaagauagucacaugu

SEQ ID NO: 294801 - RNA, 32 nt, Homo Sapiens
uuucgcagggggugggaaugggguggggucac

SEQ ID NO: 294802 - RNA, 32 nt, Homo Sapiens
gguucuuuggagagaaauauuuucauguacgu

SEQ ID NO: 294803 - RNA, 32 nt, Homo Sapiens
gaucaaacagcaugcauggagucgagccugcu

SEQ ID NO: 294804 - RNA, 32 nt, Homo Sapiens
acaccugagaaaccacuuugaagaucgggguc

SEQ ID NO: 294805 - RNA, 32 nt, Homo Sapiens
agucuuuuuuuuuuuuuuuuuaaauacuaaau

SEQ ID NO: 294806 - RNA, 32 nt, Homo Sapiens
acuuagcacuguaugcauacuuaaaaagguuu

SEQ ID NO: 294807 - RNA, 32 nt, Homo Sapiens
gguccucccggcccggcccgaacaugcuggac

SEQ ID NO: 294808 - RNA, 32 nt, Homo Sapiens
gauaugccaaaauauuuaugucaauguccaaa

SEQ ID NO: 294809 - RNA, 32 nt, Homo Sapiens
gugacgugaugaaugugggaagggcuuuggug

SEQ ID NO: 294810 - RNA, 32 nt, Homo Sapiens
acgugccuguagucccagcuguccuggaggcu

SEQ ID NO: 294811 - RNA, 32 nt, Homo Sapiens
auuacucccucuauuaacccuucacuuacuag

SEQ ID NO: 294812 - RNA, 32 nt, Homo Sapiens
ugaaagucuugcggcacaaguaccucaucaac

SEQ ID NO: 294813 - RNA, 32 nt, Homo Sapiens
cgcacacgggcgucccugcagcagccacucug

SEQ ID NO: 294814 - RNA, 32 nt, Homo Sapiens
auuauuauucaguauaaauacauauugaggaa

SEQ ID NO: 294815 - RNA, 32 nt, Homo Sapiens
guccuucccugcuggcagucucuucucguugg

SEQ ID NO: 294816 - RNA, 32 nt, Homo Sapiens
acuuaagccuacuacagacuguuagaggccag

SEQ ID NO: 294817 - RNA, 30 nt, Homo Sapiens
ccgcugggcaggcggcgaggacuuggccga

SEQ ID NO: 294818 - RNA, 32 nt, Homo Sapiens
agggaagaauaaagagcugugggcaaaagagu

SEQ ID NO: 294819 - RNA, 32 nt, Homo Sapiens
gggaccaucgugguucucuagggcgcugugga

SEQ ID NO: 294820 - RNA, 32 nt, Homo Sapiens
acgacgcucccucugccagcuggucccgggaa

SEQ ID NO: 294821 - RNA, 32 nt, Homo Sapiens
gcagauucacagggccucugagcauuaucccc

SEQ ID NO: 294822 - RNA, 32 nt, Homo Sapiens
cugccacucuuccuccucccuaaauguucacu

SEQ ID NO: 294823 - RNA, 32 nt, Homo Sapiens
ccggcccgcgucugcugagcccugacgccgag

SEQ ID NO: 294824 - RNA, 32 nt, Homo Sapiens
ugugccucggaaccucucacgccugccacaag

SEQ ID NO: 294825 - RNA, 32 nt, Homo Sapiens
gcuuuucugucauauuucaaaauacacuuaaa

SEQ ID NO: 294826 - RNA, 32 nt, Homo Sapiens
ugguccgcccgccccggccucccagagugcug

SEQ ID NO: 294827 - RNA, 32 nt, Homo Sapiens
aagaguugcugauaguuugaucuagaaaccag

SEQ ID NO: 294828 - RNA, 32 nt, Homo Sapiens
cccaggaggcagcuggguugcauggagagguc

SEQ ID NO: 294829 - RNA, 32 nt, Homo Sapiens
cuccagcagggagaccugggggugaaggggug

SEQ ID NO: 294830 - RNA, 32 nt, Homo Sapiens
aagaugaaggcacacuccacaacuuccuucug

SEQ ID NO: 294831 - RNA, 32 nt, Homo Sapiens
ugacgcugcugcugcccggccucggggugagu

SEQ ID NO: 294832 - RNA, 32 nt, Homo Sapiens
uuauuaaaggaggcccauggggccucuuauug

SEQ ID NO: 294833 - RNA, 32 nt, Homo Sapiens
cucacugcaaccuccgccucccggguucaggg

SEQ ID NO: 294834 - RNA, 32 nt, Homo Sapiens
caggauuuuuaaaaaguaagagaguuucagag

SEQ ID NO: 294835 - RNA, 32 nt, Homo Sapiens
caaacucuuuaacaacuugaaauaaugugugg

SEQ ID NO: 294836 - RNA, 32 nt, Homo Sapiens
uuuaucuguauauuauguuuacuucuaaggau

SEQ ID NO: 294837 - RNA, 32 nt, Homo Sapiens
cgaagcggcccgcgaggcgcgggaggcaugaa

SEQ ID NO: 294838 - RNA, 32 nt, Homo Sapiens
agcccugcuuugcuacaggcuccaagaucucc

SEQ ID NO: 294839 - RNA, 31 nt, Homo Sapiens
ugucgcuugccggucccgccaccgccgccuc

SEQ ID NO: 294840 - RNA, 32 nt, Homo Sapiens
guccaggggcugaguucccacucaccugugua

SEQ ID NO: 294841 - RNA, 32 nt, Homo Sapiens
cucggcgucccgcucccuccgcggcucauggc

SEQ ID NO: 294842 - RNA, 32 nt, Homo Sapiens
gguggaggugcccguuccuggaccucagcgag

SEQ ID NO: 294843 - RNA, 32 nt, Homo Sapiens
ucccucaccgcacaacucucuuucaccacgcg

SEQ ID NO: 294844 - RNA, 32 nt, Homo Sapiens
ucgccugacugggcuccuccccgggcccgccc

SEQ ID NO: 294845 - RNA, 32 nt, Homo Sapiens
ugccuggaaucccagcacuuugggaggccgag

SEQ ID NO: 294846 - RNA, 32 nt, Homo Sapiens
uuucugccccuccaagcuuccuuuccagggcg

SEQ ID NO: 294847 - RNA, 32 nt, Homo Sapiens
ccaggagauggggugaagggacacagucuuga

SEQ ID NO: 294848 - RNA, 32 nt, Homo Sapiens
gcaacagagagaaaaagauuguauuacuuuaa

SEQ ID NO: 294849 - RNA, 32 nt, Homo Sapiens
auacaaggagaagggauuuaaacggggggaag

SEQ ID NO: 294850 - RNA, 32 nt, Homo Sapiens
gcccgcggcgccccgagcgcuuugugagcaga

SEQ ID NO: 294851 - RNA, 32 nt, Homo Sapiens
gaaguuacaccugagcguggucguugugaaga

SEQ ID NO: 294852 - RNA, 32 nt, Homo Sapiens
ucccagccaaccccgcucaacgcccaccccuc

SEQ ID NO: 294853 - RNA, 32 nt, Homo Sapiens
uugaguugaacuuuacugggggugucccuggc

SEQ ID NO: 294854 - RNA, 31 nt, Homo Sapiens
cucuggugacacuggccuagagccugacacu

SEQ ID NO: 294855 - RNA, 32 nt, Homo Sapiens
cggagccaucccggcgucugcugccaugaccg

SEQ ID NO: 294856 - RNA, 32 nt, Homo Sapiens
uuacuaaagauauuugccugagguuaggaguu

SEQ ID NO: 294857 - RNA, 31 nt, Homo Sapiens
ugacugcaaggacagagaggaguccugccca

SEQ ID NO: 294858 - RNA, 32 nt, Homo Sapiens
ugggguggggcacaggauguccugcugcuggg

SEQ ID NO: 294859 - RNA, 32 nt, Homo Sapiens
agcacagugcagauuucuuuuacaaaacacau

SEQ ID NO: 294860 - RNA, 32 nt, Homo Sapiens
cgcucggcagcaccuuccuucuuugccaggca

SEQ ID NO: 294861 - RNA, 32 nt, Homo Sapiens
gucuguguuguaauucauaacuuuugauacca

SEQ ID NO: 294862 - RNA, 31 nt, Homo Sapiens
uugacacuguaauaaacugaacugaacuuuc

SEQ ID NO: 294863 - RNA, 32 nt, Homo Sapiens
gacucugcaccuagaagcugauggggacguag

SEQ ID NO: 294864 - RNA, 32 nt, Homo Sapiens
uuuuuaacaagauuugugaacugaauaucaug

SEQ ID NO: 294865 - RNA, 32 nt, Homo Sapiens
uuccgcagcuccuggguggggugcagagugug

SEQ ID NO: 294866 - RNA, 32 nt, Homo Sapiens
caugcaaaggaauggaacagugccuggcacuu

SEQ ID NO: 294867 - RNA, 32 nt, Homo Sapiens
uguacauaccauagucccacuccccaguuaac

SEQ ID NO: 294868 - RNA, 32 nt, Homo Sapiens
aacaaaguucugcaugagaacaaaucugcaug

SEQ ID NO: 294869 - RNA, 32 nt, Homo Sapiens
ucaaugagauggccagguauguuuaucagcac

SEQ ID NO: 294870 - RNA, 32 nt, Homo Sapiens
gacuuguauuuuuucucugguggcauuccuuu

SEQ ID NO: 294871 - RNA, 32 nt, Homo Sapiens
uauuuuagauguuuaaauucugacuuuuggcu

SEQ ID NO: 294872 - RNA, 32 nt, Homo Sapiens
cggcguugccggcacgagacccgggcaggcau

SEQ ID NO: 294873 - RNA, 32 nt, Homo Sapiens
agcaucauguuccaugacuucauuucacccca

SEQ ID NO: 294874 - RNA, 32 nt, Homo Sapiens
gugccaguccccucacuaagcaccugcauuau

SEQ ID NO: 294875 - RNA, 32 nt, Homo Sapiens
cuucccugcauaauguucuucucucauggaga

SEQ ID NO: 294876 - RNA, 32 nt, Homo Sapiens
acuggccauguccugccauugaaacagugauu

SEQ ID NO: 294877 - RNA, 32 nt, Homo Sapiens
aggcuggguuucauuuccaucuucccacacau

SEQ ID NO: 294878 - RNA, 32 nt, Homo Sapiens
aacuucagauuuggagagaaacacgaaagucu

SEQ ID NO: 294879 - RNA, 32 nt, Homo Sapiens
accuuguccuuucucuccugugucucagucuc

SEQ ID NO: 294880 - RNA, 32 nt, Homo Sapiens
auuguguguuuguguccggguggcaguugggu

SEQ ID NO: 294881 - RNA, 32 nt, Homo Sapiens
ccauggauccugaaacugcaucuuggcccugu

SEQ ID NO: 294882 - RNA, 32 nt, Homo Sapiens
uuaaugucaauccuaauucagacaaauccgca

SEQ ID NO: 294883 - RNA, 32 nt, Homo Sapiens
gaguugucaaggaaccaaauggggauguaaac

SEQ ID NO: 294884 - RNA, 31 nt, Homo Sapiens
gcuuucuauugagcugagaaaucuuugaagu

SEQ ID NO: 294885 - RNA, 32 nt, Homo Sapiens
uucaguauuuuucccaauagcagguggucucu

SEQ ID NO: 294886 - RNA, 32 nt, Homo Sapiens
acucaagaugcugcgccgcgaggcccgccugc

SEQ ID NO: 294887 - RNA, 32 nt, Homo Sapiens
ggcuucccuacugugcuagcugaaacuggccu

SEQ ID NO: 294888 - RNA, 32 nt, Homo Sapiens
gcuguuucauacagcacuuagaugaauuauug

SEQ ID NO: 294889 - RNA, 32 nt, Homo Sapiens
gggcuaucggggaggagaagaauggccugcgg

SEQ ID NO: 294890 - RNA, 32 nt, Homo Sapiens
ccucuccccugucuaaaccaaaguauaaaaga

SEQ ID NO: 294891 - RNA, 32 nt, Homo Sapiens
gacagcgguggcgucucugugcccguuuagug

SEQ ID NO: 294892 - RNA, 32 nt, Homo Sapiens
gccugcccgauggccuggcccuggagucuuca

SEQ ID NO: 294893 - RNA, 32 nt, Homo Sapiens
aaaacuauuccaggacuaauucuuaaucggca

SEQ ID NO: 294894 - RNA, 32 nt, Homo Sapiens
guacgccggcccagcccgcagcgcgcccagcc

SEQ ID NO: 294895 - RNA, 32 nt, Homo Sapiens
guagagguugacaaauggagggggguguugag

SEQ ID NO: 294896 - RNA, 32 nt, Homo Sapiens
aaguucuccgcgccccgaggucuccgcgcccc

SEQ ID NO: 294897 - RNA, 32 nt, Homo Sapiens
guacuugaauaucuguaucauccaccuaucca

SEQ ID NO: 294898 - RNA, 32 nt, Homo Sapiens
agcccaugggcggggagaagggcuagcauccc

SEQ ID NO: 294899 - RNA, 32 nt, Homo Sapiens
uccaaacccaaguucuuggcacaucuguaaug

SEQ ID NO: 294900 - RNA, 32 nt, Homo Sapiens
cgaggugccgcccucgcccgggcccucugacc

SEQ ID NO: 294901 - RNA, 32 nt, Homo Sapiens
caucucgggcugggggcccaccccucucugug

SEQ ID NO: 294902 - RNA, 32 nt, Homo Sapiens
accuccuuuuuaauguaagggcugugagagug

SEQ ID NO: 294903 - RNA, 32 nt, Homo Sapiens
ggauuacucgcgucuggcuccaggcgccgaga

SEQ ID NO: 294904 - RNA, 32 nt, Homo Sapiens
gaacucccaagccccggccucagccuaaccag

SEQ ID NO: 294905 - RNA, 32 nt, Homo Sapiens
acuacugccugccugccugccugcuacgguga

SEQ ID NO: 294906 - RNA, 32 nt, Homo Sapiens
acuuauagacaguaucccuuguccucaagauu

SEQ ID NO: 294907 - RNA, 32 nt, Homo Sapiens
uugcaggcucugccgucggaaagccgcucauu

SEQ ID NO: 294908 - RNA, 32 nt, Homo Sapiens
gguuguuguauacaccuggaggcaucuguuau

SEQ ID NO: 294909 - RNA, 32 nt, Homo Sapiens
cugcuucuggaaagauuuucaccgagaaucgc

SEQ ID NO: 294910 - RNA, 32 nt, Homo Sapiens
caaaugaaacugaauuuuaaacuuuuugcaug

SEQ ID NO: 294911 - RNA, 32 nt, Homo Sapiens
gugagcuuugcaauuucacuuacuacuuuuau

SEQ ID NO: 294912 - RNA, 32 nt, Homo Sapiens
gugacuacuauuaagauuuuccaaggacugac

SEQ ID NO: 294913 - RNA, 32 nt, Homo Sapiens
agggucagcaacccaagaagccugacuuccaa

SEQ ID NO: 294914 - RNA, 32 nt, Homo Sapiens
caccucacugcaucugcagcucucgcucugcc

SEQ ID NO: 294915 - RNA, 32 nt, Homo Sapiens
cgcaccgaaggcgggcccggagugggaggcuc

SEQ ID NO: 294916 - RNA, 32 nt, Homo Sapiens
guuuuauuauaucuuauuaucaccuuuuaaug

SEQ ID NO: 294917 - RNA, 32 nt, Homo Sapiens
acagugauucggccgcgccgccgggggugggg

SEQ ID NO: 294918 - RNA, 32 nt, Homo Sapiens
ucacucccauucuccccuacaguuuuaugcuc

SEQ ID NO: 294919 - RNA, 28 nt, Homo Sapiens
auucugguaacuaccaggaggcuuccuu

SEQ ID NO: 294920 - RNA, 32 nt, Homo Sapiens
aaugacggacacguacuauccaaguguauggg

SEQ ID NO: 294921 - RNA, 32 nt, Homo Sapiens
ucggccugcuggugugguaguaaucugaucac

SEQ ID NO: 294922 - RNA, 32 nt, Homo Sapiens
ggaacuugccucauguguguguaugugugugu

SEQ ID NO: 294923 - RNA, 32 nt, Homo Sapiens
agaaaaacaaugaucauucugugaccuuuacc

SEQ ID NO: 294924 - RNA, 32 nt, Homo Sapiens
aguccuccagauuuuuccaagagcagcagaaa

SEQ ID NO: 294925 - RNA, 32 nt, Homo Sapiens
caccaccaccgccuccuacccuucuuaacagu

SEQ ID NO: 294926 - RNA, 32 nt, Homo Sapiens
aacuuacuaauagggauguuaaaaguaacaaa

SEQ ID NO: 294927 - RNA, 32 nt, Homo Sapiens
gagcagcagaguccgcacgcuccggcgagggg

SEQ ID NO: 294928 - RNA, 32 nt, Homo Sapiens
ggccccucucagcugcugggccccaccucccc

SEQ ID NO: 294929 - RNA, 32 nt, Homo Sapiens
cgucuaggaaaccaaaaacucccaggaugccc

SEQ ID NO: 294930 - RNA, 32 nt, Homo Sapiens
cccagcugcccccgcgcgcgucccucacguga

SEQ ID NO: 294931 - RNA, 32 nt, Homo Sapiens
cuccagauauaaaagcuguacauuugugggag

SEQ ID NO: 294932 - RNA, 32 nt, Homo Sapiens
accuccgccucccggguucaagugauucuccu

SEQ ID NO: 294933 - RNA, 32 nt, Homo Sapiens
ugggacuuugcgagcucugugacugucccacg

SEQ ID NO: 294934 - RNA, 32 nt, Homo Sapiens
gccaccucccacagcccuccacuggucuggcc

SEQ ID NO: 294935 - RNA, 32 nt, Homo Sapiens
cagaagggaaaggcggcuguuuggcucuuucu

SEQ ID NO: 294936 - RNA, 32 nt, Homo Sapiens
ccgggagugggaagagguggcaggaaggggau

SEQ ID NO: 294937 - RNA, 32 nt, Homo Sapiens
gugucucaucuuguuggguuugcaguaaaagu

SEQ ID NO: 294938 - RNA, 32 nt, Homo Sapiens
acagguuggggauguugacaugggggaggcug

SEQ ID NO: 294939 - RNA, 32 nt, Homo Sapiens
gaguagggccuccuuccuccccugccugcagc

SEQ ID NO: 294940 - RNA, 32 nt, Homo Sapiens
cacuggccccuacaauuuguauaaauauugaa

SEQ ID NO: 294941 - RNA, 32 nt, Homo Sapiens
uccagcgggcggggcugcugcuacucuuggga

SEQ ID NO: 294942 - RNA, 30 nt, Homo Sapiens
cuacuuuauguaauggggucgaaaucuuug

SEQ ID NO: 294943 - RNA, 32 nt, Homo Sapiens
ggaaauugacgaacacgugacgcggucgggcg

SEQ ID NO: 294944 - RNA, 32 nt, Homo Sapiens
ucauaagcaauucacacagacaacacaacuaa

SEQ ID NO: 294945 - RNA, 32 nt, Homo Sapiens
cccugaggggcugggcugggcugggcugagcc

SEQ ID NO: 294946 - RNA, 32 nt, Homo Sapiens
agaguuguuucugggagggacuuucauaucug

SEQ ID NO: 294947 - RNA, 32 nt, Homo Sapiens
ucuagugagaaugaaaugaugaagggucuuug

SEQ ID NO: 294948 - RNA, 32 nt, Homo Sapiens
cacagugcucaaguucugcuaagggacagacu

SEQ ID NO: 294949 - RNA, 32 nt, Homo Sapiens
auauuacaguauuugcauauaaccuuugcaca

SEQ ID NO: 294950 - RNA, 32 nt, Homo Sapiens
agagugagaagcugccagagaagcaggaggag

SEQ ID NO: 294951 - RNA, 32 nt, Homo Sapiens
gagauauccaacaaaauuaguaacuaugugaa

SEQ ID NO: 294952 - RNA, 32 nt, Homo Sapiens
gcugucugacuucaucaauaaaguauuuuuau

SEQ ID NO: 294953 - RNA, 32 nt, Homo Sapiens
auuuuuaaaaauuuuuauuuguuggccgggca

SEQ ID NO: 294954 - RNA, 32 nt, Homo Sapiens
guguagcucuguccacucugaauaccaagugu

SEQ ID NO: 294955 - RNA, 31 nt, Homo Sapiens
ccccagccccaccgcccaccccgcgcgccau

SEQ ID NO: 294956 - RNA, 32 nt, Homo Sapiens
acauaugccugccaaagggauguguuagaagg

SEQ ID NO: 294957 - RNA, 32 nt, Homo Sapiens
ccagcauguggagcacacuugguacacauuag

SEQ ID NO: 294958 - RNA, 32 nt, Homo Sapiens
ggguuucuuuucugcugggccaaggcgcuuug

SEQ ID NO: 294959 - RNA, 32 nt, Homo Sapiens
uuacgcugacuucuuuguaagaucuuugcuua

SEQ ID NO: 294960 - RNA, 32 nt, Homo Sapiens
acucugcuaaguuuucugagaugagggucuag

SEQ ID NO: 294961 - RNA, 32 nt, Homo Sapiens
cuuucaguggugcugucccuggaugggggcua

SEQ ID NO: 294962 - RNA, 32 nt, Homo Sapiens
gggcugggccgcgccggugcgggcuggcgacu

SEQ ID NO: 294963 - RNA, 32 nt, Homo Sapiens
cauccuuugcucugugcagagggaauuacauc

SEQ ID NO: 294964 - RNA, 31 nt, Homo Sapiens
ugcuuuuauuugacuuguuccaaauuaaaca

SEQ ID NO: 294965 - RNA, 32 nt, Homo Sapiens
uggauuuagggcugugcaggaugugcuuuguu

SEQ ID NO: 294966 - RNA, 32 nt, Homo Sapiens
cucccaagccuggccuuggccuuggcacaaag

SEQ ID NO: 294967 - RNA, 32 nt, Homo Sapiens
ccagacuccagaugaggaugucgggaugauac

SEQ ID NO: 294968 - RNA, 32 nt, Homo Sapiens
accuaggaagccccugaguccugagcgaaaac

SEQ ID NO: 294969 - RNA, 32 nt, Homo Sapiens
gugcaugacaacacuagagguaugggcgaagc

SEQ ID NO: 294970 - RNA, 32 nt, Homo Sapiens
agcccgcccucccgaauguacgccaggagcca

SEQ ID NO: 294971 - RNA, 32 nt, Homo Sapiens
uaaccucgccucggccuucgcuccacagugga

SEQ ID NO: 294972 - RNA, 32 nt, Homo Sapiens
uugcugaggguggggguugggagagggacugg

SEQ ID NO: 294973 - RNA, 32 nt, Homo Sapiens
ucaggaauggagucagaagaguaguuuccaga

SEQ ID NO: 294974 - RNA, 32 nt, Homo Sapiens
uucagucacaucuauuuuugauauuugugggu

SEQ ID NO: 294975 - RNA, 32 nt, Homo Sapiens
uucuuugaaacacuggaacuuuguuaagcugc

SEQ ID NO: 294976 - RNA, 32 nt, Homo Sapiens
aauugcccauucuuucuuacuucugacaacug

SEQ ID NO: 294977 - RNA, 32 nt, Homo Sapiens
uagcaagaauguggaggaacugucccaggaug

SEQ ID NO: 294978 - RNA, 32 nt, Homo Sapiens
gcgcagucaccauggcgaugcauuucaucuuc

SEQ ID NO: 294979 - RNA, 32 nt, Homo Sapiens
gguggcggguguggcugucacugcacagcgcc

SEQ ID NO: 294980 - RNA, 32 nt, Homo Sapiens
uuacauaauuuaauacagauugauguuaauac

SEQ ID NO: 294981 - RNA, 32 nt, Homo Sapiens
gggaggaggaggagaagaugcgcaguuaccuc

SEQ ID NO: 294982 - RNA, 32 nt, Homo Sapiens
ugcgggcgaucgccagcucgagugcagauucc

SEQ ID NO: 294983 - RNA, 32 nt, Homo Sapiens
caccuacgcgccccggggugaccuggcggggc

SEQ ID NO: 294984 - RNA, 32 nt, Homo Sapiens
ccagagcgcuagucccaggagcucggaauguu

SEQ ID NO: 294985 - RNA, 32 nt, Homo Sapiens
cuucaugaggcacuuaaagcuuauaaaagaac

SEQ ID NO: 294986 - RNA, 32 nt, Homo Sapiens
ugggacuugcagaaggccuggugcugcccugg

SEQ ID NO: 294987 - RNA, 32 nt, Homo Sapiens
acggcuucccucugcuggugccccugguggca

SEQ ID NO: 294988 - RNA, 32 nt, Homo Sapiens
augaagggggagagggcgcccgggccccccag

SEQ ID NO: 294989 - RNA, 32 nt, Homo Sapiens
uugugaaaaugaaucuguuaugauaaagaaaa

SEQ ID NO: 294990 - RNA, 32 nt, Homo Sapiens
gaguuacauguuguaaucaaguuugcacaaua

SEQ ID NO: 294991 - RNA, 32 nt, Homo Sapiens
gauuuauuuaauucucuucuguauuguaacuu

SEQ ID NO: 294992 - RNA, 32 nt, Homo Sapiens
uggagcgugaauucuguaaaaauguaucuuau

SEQ ID NO: 294993 - RNA, 32 nt, Homo Sapiens
ugaggcagacggcacccaggcugugaucuguc

SEQ ID NO: 294994 - RNA, 32 nt, Homo Sapiens
uuucuuuuucaauuucauaauuguaggucauu

SEQ ID NO: 294995 - RNA, 32 nt, Homo Sapiens
agggcugcagacacaggcuggugcugcaaggg

SEQ ID NO: 294996 - RNA, 32 nt, Homo Sapiens
agccuccugcacccucagcaagggaccagcuc

SEQ ID NO: 294997 - RNA, 32 nt, Homo Sapiens
gcagguggcaaggccuggcugggccuuccuuc

SEQ ID NO: 294998 - RNA, 32 nt, Homo Sapiens
gucuuuugcguguaccuguuuccccuuuuguu

SEQ ID NO: 294999 - RNA, 32 nt, Homo Sapiens
uacagauuaaccaguuacaaaaagguuagaaa

SEQ ID NO: 295000 - RNA, 32 nt, Homo Sapiens
ggccgaggcggcgaugaccgcggccgacaggg

SEQ ID NO: 295001 - RNA, 32 nt, Homo Sapiens
gaccugagcugcugugaaagccccugcacaau

SEQ ID NO: 295002 - RNA, 32 nt, Homo Sapiens
ugcucccagaccuccuucugcuucucagacuc

SEQ ID NO: 295003 - RNA, 31 nt, Homo Sapiens
ccucugcccgggagaaagcccaggccagccu

SEQ ID NO: 295004 - RNA, 32 nt, Homo Sapiens
cuguugccuaggcuggaguacaguggugcagu

SEQ ID NO: 295005 - RNA, 32 nt, Homo Sapiens
guaaccagauuuucuuuuuucccccuucucag

SEQ ID NO: 295006 - RNA, 32 nt, Homo Sapiens
cuguuauaauucuauaaauuuacaguaugauu

SEQ ID NO: 295007 - RNA, 32 nt, Homo Sapiens
ucuacaccaacccuuccgucuacccugcucac

SEQ ID NO: 295008 - RNA, 32 nt, Homo Sapiens
ucucuucaggaagucagaccuucccugguuua

SEQ ID NO: 295009 - RNA, 32 nt, Homo Sapiens
aaaauauauaaucuuuuuuuuacaaaguaugg

SEQ ID NO: 295010 - RNA, 32 nt, Homo Sapiens
cugagaaaggauaaaaucauguuagaggcgca

SEQ ID NO: 295011 - RNA, 32 nt, Homo Sapiens
acccagaaaggagaaaugauguuauaaaaaac

SEQ ID NO: 295012 - RNA, 32 nt, Homo Sapiens
gccgcgcgcacucgcgcacggacccgcacggg

SEQ ID NO: 295013 - RNA, 32 nt, Homo Sapiens
cuccacucacucgccuggagaaguaugcuuuc

SEQ ID NO: 295014 - RNA, 32 nt, Homo Sapiens
cugaggggaaggaggagaagcuccugaagcgg

SEQ ID NO: 295015 - RNA, 32 nt, Homo Sapiens
uguaaaugugggcaaagguguguuauguguuu

SEQ ID NO: 295016 - RNA, 32 nt, Homo Sapiens
ggacaggccugggcuggggcaguuggagguau

SEQ ID NO: 295017 - RNA, 32 nt, Homo Sapiens
acacacacacacacguggggauagcuggacau

SEQ ID NO: 295018 - RNA, 32 nt, Homo Sapiens
auugcauugggaaaagaagucuguuaauagug

SEQ ID NO: 295019 - RNA, 32 nt, Homo Sapiens
ucccauaggugguaaaggggucugagcucaca

SEQ ID NO: 295020 - RNA, 31 nt, Homo Sapiens
uuuguaaucgcuggcgugccccgcgcacagg

SEQ ID NO: 295021 - RNA, 32 nt, Homo Sapiens
cucagucaaaaauuuaaaaucuuaaaugugua

SEQ ID NO: 295022 - RNA, 32 nt, Homo Sapiens
ccucugcugagacugagacaagcagggcuuga

SEQ ID NO: 295023 - RNA, 32 nt, Homo Sapiens
auagauacugaauaucauaauccaaucuuugu

SEQ ID NO: 295024 - RNA, 32 nt, Homo Sapiens
cgcgugugccgccgcuuuccuccuccaucucu

SEQ ID NO: 295025 - RNA, 32 nt, Homo Sapiens
ggccaggccgccccgcugucccccuugcuguc

SEQ ID NO: 295026 - RNA, 32 nt, Homo Sapiens
gcuguggccgccacggcacgcgggaaugugaa

SEQ ID NO: 295027 - RNA, 32 nt, Homo Sapiens
uuucccaaguuuggcgauuugcugucggugcc

SEQ ID NO: 295028 - RNA, 32 nt, Homo Sapiens
gcccuugccccgcgccagcuucugcgcccgca

SEQ ID NO: 295029 - RNA, 32 nt, Homo Sapiens
guggguugugguuuuuguuguuguugucgcca

SEQ ID NO: 295030 - RNA, 32 nt, Homo Sapiens
ugggcuaggaguuagaggaagagagugacuca

SEQ ID NO: 295031 - RNA, 32 nt, Homo Sapiens
gggugguagaaaguguguucaggcugacacug

SEQ ID NO: 295032 - RNA, 32 nt, Homo Sapiens
ugguggauggagaggauauggggccugcagcc

SEQ ID NO: 295033 - RNA, 32 nt, Homo Sapiens
agaacugccggggccagggcugccauggucuc

SEQ ID NO: 295034 - RNA, 32 nt, Homo Sapiens
agccccuucucgcgcgcgggcgguuuguguga

SEQ ID NO: 295035 - RNA, 32 nt, Homo Sapiens
uguaucugcaucccugucauucguuucacggc

SEQ ID NO: 295036 - RNA, 32 nt, Homo Sapiens
cccaggcucacccccaccuugggccucaccuc

SEQ ID NO: 295037 - RNA, 32 nt, Homo Sapiens
ccgcagccgggcggguaggacugccaggacuc

SEQ ID NO: 295038 - RNA, 32 nt, Homo Sapiens
aacugugaaaagacacaucacacaaucaccuu

SEQ ID NO: 295039 - RNA, 32 nt, Homo Sapiens
ugcauccugcguaacugaaacucugugcccau

SEQ ID NO: 295040 - RNA, 32 nt, Homo Sapiens
auuagaagggauuuuucccgcaguugcgaagg

SEQ ID NO: 295041 - RNA, 32 nt, Homo Sapiens
ugucuugauauuaauacaugaaauuuuuauaa

SEQ ID NO: 295042 - RNA, 32 nt, Homo Sapiens
agauucuaaaauuuauuugggaccaugggaau

SEQ ID NO: 295043 - RNA, 32 nt, Homo Sapiens
cagagagguaggacaaaaugagugguguucaa

SEQ ID NO: 295044 - RNA, 32 nt, Homo Sapiens
uggguggcguuugggccuccccgccuucccca

SEQ ID NO: 295045 - RNA, 32 nt, Homo Sapiens
cccggcucucugcgcguccccaucccccgugg

SEQ ID NO: 295046 - RNA, 32 nt, Homo Sapiens
gacuuugcacguuaauuuuucuugcuucaaaa

SEQ ID NO: 295047 - RNA, 32 nt, Homo Sapiens
caguuccuauuauguggugaaauuuuguaaau

SEQ ID NO: 295048 - RNA, 32 nt, Homo Sapiens
ugucuucaagcuccugccccagcuuaccuaca

SEQ ID NO: 295049 - RNA, 32 nt, Homo Sapiens
cgggagcggcgcccaagucgggugcgccaugu

SEQ ID NO: 295050 - RNA, 31 nt, Homo Sapiens
uguacuacugagcuucgcugaguuaaguuau

SEQ ID NO: 295051 - RNA, 32 nt, Homo Sapiens
cauucccuugguagcuuuuucuccgggguccu

SEQ ID NO: 295052 - RNA, 32 nt, Homo Sapiens
agucuucaguccuguggucccuggacuggugg

SEQ ID NO: 295053 - RNA, 32 nt, Homo Sapiens
ggagaucgagaccaucuuggcuaacaugguga

SEQ ID NO: 295054 - RNA, 32 nt, Homo Sapiens
cccugacgccgcggaccgcagcuccucagccc

SEQ ID NO: 295055 - RNA, 32 nt, Homo Sapiens
ccuggccuuguacuugcuuguauuguaaaugu

SEQ ID NO: 295056 - RNA, 32 nt, Homo Sapiens
cuuaagaacuuacuuuagauucuuauugaauu

SEQ ID NO: 295057 - RNA, 32 nt, Homo Sapiens
uaaucaagcaagcagguuucugauggauguug

SEQ ID NO: 295058 - RNA, 32 nt, Homo Sapiens
ggggcagccuggcuccacggccuguacucggu

SEQ ID NO: 295059 - RNA, 32 nt, Homo Sapiens
ccucacuggagcggccccgcccugcccuugcc

SEQ ID NO: 295060 - RNA, 32 nt, Homo Sapiens
aauacuaaaaauuucaggucaguuuguuuuga

SEQ ID NO: 295061 - RNA, 32 nt, Homo Sapiens
ccucuguugagguuuuuauauuugugaucauu

SEQ ID NO: 295062 - RNA, 32 nt, Homo Sapiens
acuccgagggcuucuggagccaccggccgggc

SEQ ID NO: 295063 - RNA, 32 nt, Homo Sapiens
gcuugcacucccuguccugcugcccugugaag

SEQ ID NO: 295064 - RNA, 32 nt, Homo Sapiens
cucucuuugaggcuaagcaaggaggcguugua

SEQ ID NO: 295065 - RNA, 32 nt, Homo Sapiens
gaauuauggauccgcccucccggaauccuggc

SEQ ID NO: 295066 - RNA, 32 nt, Homo Sapiens
uggggcagcuccuggggagcaucagggaagag

SEQ ID NO: 295067 - RNA, 32 nt, Homo Sapiens
cuauuuauuacugaauuaauuccagagcuugu

SEQ ID NO: 295068 - RNA, 32 nt, Homo Sapiens
cucaagccuuauguuucuccaauguuacgcuc

SEQ ID NO: 295069 - RNA, 32 nt, Homo Sapiens
gcccuugcccucugccuuccacuuccuuccau

SEQ ID NO: 295070 - RNA, 32 nt, Homo Sapiens
cacuggcgaagccagagggaucugucuuucua

SEQ ID NO: 295071 - RNA, 32 nt, Homo Sapiens
aaauuugagguauggauaaaucuuucacauau

SEQ ID NO: 295072 - RNA, 32 nt, Homo Sapiens
aggcuaaugaagccucccgggguggggaggga

SEQ ID NO: 295073 - RNA, 32 nt, Homo Sapiens
ggccucaucuugucgcucuccuccauccgugc

SEQ ID NO: 295074 - RNA, 32 nt, Homo Sapiens
uugcauauaaauaacaugaucauaggcaaguu

SEQ ID NO: 295075 - RNA, 32 nt, Homo Sapiens
cuuucaguaugguuuuaaauuugggaacagug

SEQ ID NO: 295076 - RNA, 32 nt, Homo Sapiens
agaaaaaggcaggcccuuugugucuaccguuu

SEQ ID NO: 295077 - RNA, 32 nt, Homo Sapiens
acgggguuuccauuuuaaugggaacaauguag

SEQ ID NO: 295078 - RNA, 32 nt, Homo Sapiens
ucggcacacugcuuaucacuugaaaaauggag

SEQ ID NO: 295079 - RNA, 32 nt, Homo Sapiens
gaggaggaguggggaccgggcgggggguggag

SEQ ID NO: 295080 - RNA, 32 nt, Homo Sapiens
cuaauggccgggccgccucccgccgcacacaa

SEQ ID NO: 295081 - RNA, 32 nt, Homo Sapiens
cggccgguuugugaaacggacaagagagagac

SEQ ID NO: 295082 - RNA, 32 nt, Homo Sapiens
uuauacccuaaaaccuucuacacuagugccau

SEQ ID NO: 295083 - RNA, 32 nt, Homo Sapiens
aaaaaugauuuaauguuauguuagacuguugc

SEQ ID NO: 295084 - RNA, 32 nt, Homo Sapiens
ugcuaccguugacuuccaggcacgguuuggaa

SEQ ID NO: 295085 - RNA, 32 nt, Homo Sapiens
gugcagccaagcccggaacccagccaucagag

SEQ ID NO: 295086 - RNA, 32 nt, Homo Sapiens
ucccgcugggccgguuuaucgggaggagauug

SEQ ID NO: 295087 - RNA, 31 nt, Homo Sapiens
gcgagcgcagcggagccuggagagaaggcgc

SEQ ID NO: 295088 - RNA, 32 nt, Homo Sapiens
gguccccuuucuguugcuagauucagaguaga

SEQ ID NO: 295089 - RNA, 32 nt, Homo Sapiens
ugucuucuucaauaaauacugauucaaaguau

SEQ ID NO: 295090 - RNA, 32 nt, Homo Sapiens
acugcccauugccaccucccccuccgcccagu

SEQ ID NO: 295091 - RNA, 32 nt, Homo Sapiens
cugaaaauccgaagugccgcggaaaguggagg

SEQ ID NO: 295092 - RNA, 32 nt, Homo Sapiens
aguacucaaaaauuaaaguugacuuuuggcuu

SEQ ID NO: 295093 - RNA, 32 nt, Homo Sapiens
agaaaauagcaaaauuccuauuuccccuuguu

SEQ ID NO: 295094 - RNA, 32 nt, Homo Sapiens
ggaucuacaaggaaugucauuuuugugcaucc

SEQ ID NO: 295095 - RNA, 32 nt, Homo Sapiens
caauccuccccgcucugccgccgcccgcuggg

SEQ ID NO: 295096 - RNA, 32 nt, Homo Sapiens
cgaugcaaaaauacuucuaugguaccuauuac

SEQ ID NO: 295097 - RNA, 32 nt, Homo Sapiens
uuuaaugcuguaaaauauagucgcugaaauua

SEQ ID NO: 295098 - RNA, 32 nt, Homo Sapiens
gucugcauuuauauauuuuaaauagauuugau

SEQ ID NO: 295099 - RNA, 32 nt, Homo Sapiens
cuucgcuccuuccccucaggccguggcccugc

SEQ ID NO: 295100 - RNA, 32 nt, Homo Sapiens
accggggcuccggcccgggacccaggaccagc

SEQ ID NO: 295101 - RNA, 32 nt, Homo Sapiens
gggccgcgacuguggucguuuuuauaccuucc

SEQ ID NO: 295102 - RNA, 32 nt, Homo Sapiens
uagguuuuaugugaagauauuuccuuuuccau

SEQ ID NO: 295103 - RNA, 32 nt, Homo Sapiens
ggcgggacgugacgcagcgcccggggcgcgga

SEQ ID NO: 295104 - RNA, 32 nt, Homo Sapiens
gguggcgccuccccggcccgggacgguagccc

SEQ ID NO: 295105 - RNA, 32 nt, Homo Sapiens
cguccuucugggucagcugaggucucuguucc

SEQ ID NO: 295106 - RNA, 32 nt, Homo Sapiens
gccuuuuguuuucucuuuuuuccugucuaugc

SEQ ID NO: 295107 - RNA, 32 nt, Homo Sapiens
caugcuaggaucacaggaagacuuuguaagga

SEQ ID NO: 295108 - RNA, 32 nt, Homo Sapiens
aaggagaauauuacuacuagucagcaggaaaa

SEQ ID NO: 295109 - RNA, 28 nt, Homo Sapiens
uuaagggugggggagauuauaaagaacc

SEQ ID NO: 295110 - RNA, 32 nt, Homo Sapiens
cuuuuaauucuauuaucuguguuauuucuggc

SEQ ID NO: 295111 - RNA, 32 nt, Homo Sapiens
auuuccugauuuaauguagacuuugacuuuuu

SEQ ID NO: 295112 - RNA, 32 nt, Homo Sapiens
cuuuuuaaagacuggaacauucuguggauguu

SEQ ID NO: 295113 - RNA, 32 nt, Homo Sapiens
uagguggagaauccaucuucagaccuuuggac

SEQ ID NO: 295114 - RNA, 32 nt, Homo Sapiens
ccgccacugcugcugcugcugcugcugccgcu

SEQ ID NO: 295115 - RNA, 32 nt, Homo Sapiens
aacccaaagacacguggagcccagagcuuucc

SEQ ID NO: 295116 - RNA, 32 nt, Homo Sapiens
ugguuaaaugaugcuaaaauauuuucacaacc

SEQ ID NO: 295117 - RNA, 32 nt, Homo Sapiens
ggagcccggaugcuggcccggaggaagccgau

SEQ ID NO: 295118 - RNA, 32 nt, Homo Sapiens
ucugcuggggauccugauaagauggcaccuua

SEQ ID NO: 295119 - RNA, 32 nt, Homo Sapiens
caagcccuuuccgaccccauggagcuguauga

SEQ ID NO: 295120 - RNA, 32 nt, Homo Sapiens
uaaaucaaucccaguuugggaaaagauuauuu

SEQ ID NO: 295121 - RNA, 31 nt, Homo Sapiens
uugccuggccgccccguaccccgcgcccgcg

SEQ ID NO: 295122 - RNA, 32 nt, Homo Sapiens
gcgguagcucgggcucuccggaggagggggcg

SEQ ID NO: 295123 - RNA, 32 nt, Homo Sapiens
aggacgcggcccugagaggcugccgggccccg

SEQ ID NO: 295124 - RNA, 32 nt, Homo Sapiens
gauugggucaguccuucauguaauacaugcug

SEQ ID NO: 295125 - RNA, 32 nt, Homo Sapiens
cgugaaugaaucauuucuuuuauacaauauuc

SEQ ID NO: 295126 - RNA, 32 nt, Homo Sapiens
uaggaugaaaauaauagaauggcacuguaagu

SEQ ID NO: 295127 - RNA, 32 nt, Homo Sapiens
uuguccuguuaaugcgggaugagcgaucagaa

SEQ ID NO: 295128 - RNA, 32 nt, Homo Sapiens
ugggcgcgggcggcgucuccgcggcgggcauc

SEQ ID NO: 295129 - RNA, 32 nt, Homo Sapiens
gggaaccucagagaaucuaugaauaauggaag

SEQ ID NO: 295130 - RNA, 32 nt, Homo Sapiens
cguggcaugcccggcccgguuuacccaggaga

SEQ ID NO: 295131 - RNA, 32 nt, Homo Sapiens
uccaguccuugccuuccaaccaaaagaaaugg

SEQ ID NO: 295132 - RNA, 32 nt, Homo Sapiens
uuaucacuugguuuucuggaaaguagcuuacc

SEQ ID NO: 295133 - RNA, 32 nt, Homo Sapiens
uaaugaucucaaagcugagaauacaaggcuca

SEQ ID NO: 295134 - RNA, 32 nt, Homo Sapiens
uauaggaggcauuuggcauucuguggaauaag

SEQ ID NO: 295135 - RNA, 32 nt, Homo Sapiens
ccucagccugcccuuccaugaaccugucagcc

SEQ ID NO: 295136 - RNA, 32 nt, Homo Sapiens
uguuuuugacuucuaugauagucacugcauau

SEQ ID NO: 295137 - RNA, 32 nt, Homo Sapiens
uccaggccaucccauagccccuccucuucugg

SEQ ID NO: 295138 - RNA, 32 nt, Homo Sapiens
agacgagguggcagcggggaccacgugagaug

SEQ ID NO: 295139 - RNA, 32 nt, Homo Sapiens
ccagaagagcugcacguaucccuuucaugagu

SEQ ID NO: 295140 - RNA, 32 nt, Homo Sapiens
ggaccacaauggggcaggggucggggaaagga

SEQ ID NO: 295141 - RNA, 32 nt, Homo Sapiens
agcuuaaugaaguagccaacuaccuugauuug

SEQ ID NO: 295142 - RNA, 32 nt, Homo Sapiens
aauuaaacccggucuaaauccaaaugcuucuc

SEQ ID NO: 295143 - RNA, 32 nt, Homo Sapiens
auuuuuugccuuugauuuuugauaguuuauua

SEQ ID NO: 295144 - RNA, 32 nt, Homo Sapiens
uagaagccgucucuggcuauagauaaguagau

SEQ ID NO: 295145 - RNA, 32 nt, Homo Sapiens
aaucaauuugcaccuuuuuuuauuuuuauuuu

SEQ ID NO: 295146 - RNA, 32 nt, Homo Sapiens
ucuagaaaugacuuaaauuuguuuucauacau

SEQ ID NO: 295147 - RNA, 32 nt, Homo Sapiens
cuugcauuuagaagcugcuuuuccuaagacuu

SEQ ID NO: 295148 - RNA, 32 nt, Homo Sapiens
cuucaguccucugguuaugaccucaaguccua

SEQ ID NO: 295149 - RNA, 32 nt, Homo Sapiens
ucucuaguuuaaccucuugcuauuucaguaag

SEQ ID NO: 295150 - RNA, 32 nt, Homo Sapiens
agccggcgcgcccgggcgcgcaccuguguaug

SEQ ID NO: 295151 - RNA, 32 nt, Homo Sapiens
uugccucuaggugacuuuccaagaugcccccc

SEQ ID NO: 295152 - RNA, 32 nt, Homo Sapiens
aguagaguugcugguucuuaaugcacagaaca

SEQ ID NO: 295153 - RNA, 32 nt, Homo Sapiens
gaacgagccaucuuccuggcugcucagaagga

SEQ ID NO: 295154 - RNA, 32 nt, Homo Sapiens
ccagugccgggcgcuccccaccccucccccgg

SEQ ID NO: 295155 - RNA, 32 nt, Homo Sapiens
ggcaagaaggugaagauuacuaccucuuuuga

SEQ ID NO: 295156 - RNA, 32 nt, Homo Sapiens
aguuucacuguguuggccaggcuggucucaaa

SEQ ID NO: 295157 - RNA, 32 nt, Homo Sapiens
caaacuacuguggaagcugggaggcggcccuc

SEQ ID NO: 295158 - RNA, 32 nt, Homo Sapiens
ccaaagagccguuuccuccucgcccuucaguu

SEQ ID NO: 295159 - RNA, 32 nt, Homo Sapiens
aaaggauggugguuauuuuaaauauaaauagc

SEQ ID NO: 295160 - RNA, 32 nt, Homo Sapiens
cgccuguaaucccagcacuuugguugggugaa

SEQ ID NO: 295161 - RNA, 32 nt, Homo Sapiens
agacacccacagagacuucugccuccccuccu

SEQ ID NO: 295162 - RNA, 32 nt, Homo Sapiens
gcuauuuccuggaaacaaaugcaaagcaguau

SEQ ID NO: 295163 - RNA, 32 nt, Homo Sapiens
uuuucacacacacacacacacacacacacaca

SEQ ID NO: 295164 - RNA, 32 nt, Homo Sapiens
cuuggagggacuaagcuggggguggggacaug

SEQ ID NO: 295165 - RNA, 32 nt, Homo Sapiens
cucauaccuuuuauuucuuucaaagguuacac

SEQ ID NO: 295166 - RNA, 32 nt, Homo Sapiens
ugauuucagaaagcuagaaaguguaugugugg

SEQ ID NO: 295167 - RNA, 32 nt, Homo Sapiens
ggcucagaugaccccugagggcucuuccaguc

SEQ ID NO: 295168 - RNA, 32 nt, Homo Sapiens
uacagaaaaaauauuuauauacgacucuuuaa

SEQ ID NO: 295169 - RNA, 32 nt, Homo Sapiens
cugugaucuuuucaaguaucugaaauaaaaca

SEQ ID NO: 295170 - RNA, 32 nt, Homo Sapiens
augagagcuggcauuccaggcugcugagugcg

SEQ ID NO: 295171 - RNA, 32 nt, Homo Sapiens
uccgacggugggacgcgcucgcaguggccgua

SEQ ID NO: 295172 - RNA, 32 nt, Homo Sapiens
augucuggagcccuugauguccugcaaaugaa

SEQ ID NO: 295173 - RNA, 32 nt, Homo Sapiens
acaugaaggggagggaggguguggggaugccu

SEQ ID NO: 295174 - RNA, 32 nt, Homo Sapiens
uucuguaaggcacaaguguccuuggcuuucag

SEQ ID NO: 295175 - RNA, 32 nt, Homo Sapiens
gcaaguucaacaugaagaugauaugggccggg

SEQ ID NO: 295176 - RNA, 32 nt, Homo Sapiens
aaaugacagucuucucuuuguacuccucccug

SEQ ID NO: 295177 - RNA, 32 nt, Homo Sapiens
ucccagcgcgagagacccugccccgcccccuu

SEQ ID NO: 295178 - RNA, 32 nt, Homo Sapiens
uugacagugaaagaggguguuguuaguaauua

SEQ ID NO: 295179 - RNA, 32 nt, Homo Sapiens
aucauuggaagcaaucaguuuacucuucccca

SEQ ID NO: 295180 - RNA, 32 nt, Homo Sapiens
uaagagagaucuuauaaugcaacaucaaauuc

SEQ ID NO: 295181 - RNA, 32 nt, Homo Sapiens
gucguccaaccucagcucccuguccaacgccu

SEQ ID NO: 295182 - RNA, 32 nt, Homo Sapiens
cccucaagccccagagagccccucauccuucc

SEQ ID NO: 295183 - RNA, 30 nt, Homo Sapiens
uguccucccguuccgcugcccgcccugcca

SEQ ID NO: 295184 - RNA, 32 nt, Homo Sapiens
cuuccaguuagcaggaguggcuccacagucaa

SEQ ID NO: 295185 - RNA, 32 nt, Homo Sapiens
cuguacagccucuaggccccagccccggaggu

SEQ ID NO: 295186 - RNA, 32 nt, Homo Sapiens
cauccgagagugugucauauggucaaaagccu

SEQ ID NO: 295187 - RNA, 32 nt, Homo Sapiens
guucccaccucccaaggccgugucucugggga

SEQ ID NO: 295188 - RNA, 32 nt, Homo Sapiens
auuuacugagcacaacuccuguaaauuaaucu

SEQ ID NO: 295189 - RNA, 32 nt, Homo Sapiens
cuaauguuuuucacuauaacagagaauucauu

SEQ ID NO: 295190 - RNA, 32 nt, Homo Sapiens
gcacagaugaauggaaguugaugcacaccaac

SEQ ID NO: 295191 - RNA, 32 nt, Homo Sapiens
ucuuaaguaggcucuuuuuucucuaaauuaca

SEQ ID NO: 295192 - RNA, 32 nt, Homo Sapiens
aggagugaguggcgggcugggcggcggcggcc

SEQ ID NO: 295193 - RNA, 32 nt, Homo Sapiens
uugggggucaacacaagucaccucuuagcuuc

SEQ ID NO: 295194 - RNA, 32 nt, Homo Sapiens
uuaggcauauauauuuguacauauguguguau

SEQ ID NO: 295195 - RNA, 32 nt, Homo Sapiens
ugugggagggaucuggggcagcuggggcuucc

SEQ ID NO: 295196 - RNA, 32 nt, Homo Sapiens
acgcauacauauauauauuuuuacucugucuu

SEQ ID NO: 295197 - RNA, 32 nt, Homo Sapiens
uuuuagaggaaacuaauauuagucuuuguguu

SEQ ID NO: 295198 - RNA, 31 nt, Homo Sapiens
ccacuuauauauugugugauaugauuuugcu

SEQ ID NO: 295199 - RNA, 32 nt, Homo Sapiens
cagccgacucucuccuccuccucccggcacga

SEQ ID NO: 295200 - RNA, 32 nt, Homo Sapiens
ucaaagggacgccagccauccuuagugacagg

SEQ ID NO: 295201 - RNA, 32 nt, Homo Sapiens
caccgccccccggcuguccuccacgcugccgg

SEQ ID NO: 295202 - RNA, 32 nt, Homo Sapiens
agucuguaaucccagcacuuugggaggccaag

SEQ ID NO: 295203 - RNA, 31 nt, Homo Sapiens
gcgagcucgagcagccaaccccgggcgcguc

SEQ ID NO: 295204 - RNA, 32 nt, Homo Sapiens
ccugcuuacccggccuggcugcugacaggcgu

SEQ ID NO: 295205 - RNA, 32 nt, Homo Sapiens
uugaagcuuaaguuacccuuuaugguggaaaa

SEQ ID NO: 295206 - RNA, 32 nt, Homo Sapiens
cccguucccucccccuucuccugugggacaac

SEQ ID NO: 295207 - RNA, 32 nt, Homo Sapiens
caggccucaggaccccaccccucugaggccca

SEQ ID NO: 295208 - RNA, 32 nt, Homo Sapiens
cagcccucggcagacggccaauggcggcggug

SEQ ID NO: 295209 - RNA, 32 nt, Homo Sapiens
caauuguguauuuauagggauaccuuccucuu

SEQ ID NO: 295210 - RNA, 32 nt, Homo Sapiens
uuccaggagagagcgggauaccaagagaaccg

SEQ ID NO: 295211 - RNA, 32 nt, Homo Sapiens
uaugugagcuccugggcagccccgagcagagg

SEQ ID NO: 295212 - RNA, 32 nt, Homo Sapiens
cugaaaaacaaaggguuuaaggaugacauuuc

SEQ ID NO: 295213 - RNA, 32 nt, Homo Sapiens
cucagucguuggaguucucaaccaaaaaagca

SEQ ID NO: 295214 - RNA, 32 nt, Homo Sapiens
uguucuaaauguuuaagugcuucucuguuagg

SEQ ID NO: 295215 - RNA, 32 nt, Homo Sapiens
aaugacagugucuccauugucuucccuccauu

SEQ ID NO: 295216 - RNA, 32 nt, Homo Sapiens
ugcaguacuguaauucaaaaauaggaaucuuu

SEQ ID NO: 295217 - RNA, 32 nt, Homo Sapiens
auucugaggguggggggagggacaugaaauca

SEQ ID NO: 295218 - RNA, 32 nt, Homo Sapiens
uuggagcccucccugcuuccccuucuuucuuu

SEQ ID NO: 295219 - RNA, 32 nt, Homo Sapiens
ggggggcgcgguaagagguggcggcgggcaga

SEQ ID NO: 295220 - RNA, 32 nt, Homo Sapiens
agaaucugccccccaacuugcuaccagccugc

SEQ ID NO: 295221 - RNA, 32 nt, Homo Sapiens
gacgcccgcaggguggccuuagcggccggucg

SEQ ID NO: 295222 - RNA, 32 nt, Homo Sapiens
guaauauacucuaaaccuguuauuucugugcu

SEQ ID NO: 295223 - RNA, 29 nt, Homo Sapiens
auugaacuuuaucauugaaagcuguuugg

SEQ ID NO: 295224 - RNA, 32 nt, Homo Sapiens
aucggcacguaugauggugguuuggucagaug

SEQ ID NO: 295225 - RNA, 32 nt, Homo Sapiens
auugcagacauuuuuuaccaacauuaauuauu

SEQ ID NO: 295226 - RNA, 32 nt, Homo Sapiens
ugcccacugcccaguugagcagagguuugagc

SEQ ID NO: 295227 - RNA, 32 nt, Homo Sapiens
uuauagugggucugcugguaacaaauucucuc

SEQ ID NO: 295228 - RNA, 32 nt, Homo Sapiens
ccaagcgaacccugcgucgaggaggggccuuu

SEQ ID NO: 295229 - RNA, 32 nt, Homo Sapiens
aguggcagcagcgaggacucggggggcgcguc

SEQ ID NO: 295230 - RNA, 32 nt, Homo Sapiens
uaacuauuugaaauauguggugauaauuacug

SEQ ID NO: 295231 - RNA, 32 nt, Homo Sapiens
acugaaccagccacgaacagcccgccagaggc

SEQ ID NO: 295232 - RNA, 32 nt, Homo Sapiens
gaagaaucuaaugguggaaacauuggguacag

SEQ ID NO: 295233 - RNA, 32 nt, Homo Sapiens
guuuuuccuauuaugccuggaauuuagucaug

SEQ ID NO: 295234 - RNA, 30 nt, Homo Sapiens
ggccgggcgcccgggccuuugcuaucucgc

SEQ ID NO: 295235 - RNA, 32 nt, Homo Sapiens
gaagccauuuuucugcaauggaauuaaauggc

SEQ ID NO: 295236 - RNA, 32 nt, Homo Sapiens
ccugccgugaagccgccccugcaggucgcgug

SEQ ID NO: 295237 - RNA, 32 nt, Homo Sapiens
cagaauuuuuaaaacugcauuuuuaaucagug

SEQ ID NO: 295238 - RNA, 32 nt, Homo Sapiens
uuauugucucuugagauuccauauacuuuagg

SEQ ID NO: 295239 - RNA, 32 nt, Homo Sapiens
acacacaacaucacgaugacaaacacacauua

SEQ ID NO: 295240 - RNA, 32 nt, Homo Sapiens
acccagccuuggcgggcaucuuucaccaaagc

SEQ ID NO: 295241 - RNA, 32 nt, Homo Sapiens
uccugcaucuucugccuuuccaacagaagcgg

SEQ ID NO: 295242 - RNA, 32 nt, Homo Sapiens
uugagaaaaauaaaguuuuaaauguaucuaug

SEQ ID NO: 295243 - RNA, 32 nt, Homo Sapiens
caaggugaagcuuuuuauaaacuuuuuuagcc

SEQ ID NO: 295244 - RNA, 32 nt, Homo Sapiens
gaaggucugaccaccguuucgguuuuguuaau

SEQ ID NO: 295245 - RNA, 31 nt, Homo Sapiens
ggauuuuggauuagauaauagauuugggauc

SEQ ID NO: 295246 - RNA, 32 nt, Homo Sapiens
ggcugccgagaggcgggcucggcggccggaga

SEQ ID NO: 295247 - RNA, 32 nt, Homo Sapiens
gccuauggagggcuaaauuugcucaugugaaa

SEQ ID NO: 295248 - RNA, 32 nt, Homo Sapiens
auauuuaguauaaaguuuuugcuguuaaauau

SEQ ID NO: 295249 - RNA, 32 nt, Homo Sapiens
aauggguggcgcgccagccggucggcaggggu

SEQ ID NO: 295250 - RNA, 32 nt, Homo Sapiens
auccugccccaccccacccccacucccacgga

SEQ ID NO: 295251 - RNA, 32 nt, Homo Sapiens
gcacggugggcagcugcaauggcgcugucgug

SEQ ID NO: 295252 - RNA, 32 nt, Homo Sapiens
caaccaugauuugugaaccuucugggaaauuu

SEQ ID NO: 295253 - RNA, 32 nt, Homo Sapiens
aagccuuugaugcacaaaaugggacugcugaa

SEQ ID NO: 295254 - RNA, 32 nt, Homo Sapiens
auaguagaguuggcuuuuuuuuuuuuuuuuuu

SEQ ID NO: 295255 - RNA, 32 nt, Homo Sapiens
gaaugcacaauuuuuuaaauaugcaaauaaaa

SEQ ID NO: 295256 - RNA, 32 nt, Homo Sapiens
guccgucccguccaccguccgcagcugguagc

SEQ ID NO: 295257 - RNA, 32 nt, Homo Sapiens
ccucauuagcuggccugggguccagggcucga

SEQ ID NO: 295258 - RNA, 32 nt, Homo Sapiens
uugccucuauagagacagauuucuguccuauc

SEQ ID NO: 295259 - RNA, 30 nt, Homo Sapiens
aggaagaccugcggcggcgggaggagagcu

SEQ ID NO: 295260 - RNA, 32 nt, Homo Sapiens
ucaucagggcuagggggcuggugccgccucau

SEQ ID NO: 295261 - RNA, 32 nt, Homo Sapiens
gcuuaccuugguuggaagggaauagaaauguu

SEQ ID NO: 295262 - RNA, 32 nt, Homo Sapiens
ugugagauugugcccgcccuucugcuuuaauu

SEQ ID NO: 295263 - RNA, 32 nt, Homo Sapiens
ccaccucgcccggccaauccacugagcauuuc

SEQ ID NO: 295264 - RNA, 32 nt, Homo Sapiens
cuucaucggaagcggacagugugggacccccc

SEQ ID NO: 295265 - RNA, 32 nt, Homo Sapiens
ugguaagacuucccuucccagccgaugccaac

SEQ ID NO: 295266 - RNA, 32 nt, Homo Sapiens
ccucuuauuuagucuucauagauccccugggu

SEQ ID NO: 295267 - RNA, 32 nt, Homo Sapiens
aaguccugcaguuuuucuuuaaucugaaguuu

SEQ ID NO: 295268 - RNA, 32 nt, Homo Sapiens
caagcuugucugaggccacagagcagcguccc

SEQ ID NO: 295269 - RNA, 32 nt, Homo Sapiens
uggauuuguaaaaauauuuuucaugauaucug

SEQ ID NO: 295270 - RNA, 32 nt, Homo Sapiens
cucuugccuucuuuuaucugcacugugugaag

SEQ ID NO: 295271 - RNA, 32 nt, Homo Sapiens
uuggcaaguuggcaguuuguguccucucagcu

SEQ ID NO: 295272 - RNA, 32 nt, Homo Sapiens
cuaaucucaguuuccuauugguaaaugggaau

SEQ ID NO: 295273 - RNA, 32 nt, Homo Sapiens
gcugcgccuccaugccugcgcgcggggcggga

SEQ ID NO: 295274 - RNA, 31 nt, Homo Sapiens
uauuuuucaaagaaacaauguguauugaagu

SEQ ID NO: 295275 - RNA, 30 nt, Homo Sapiens
auugagcgcgcgcggucccgggaucuccga

SEQ ID NO: 295276 - RNA, 32 nt, Homo Sapiens
cgagcucgccccgguggguguggcccggccug

SEQ ID NO: 295277 - RNA, 32 nt, Homo Sapiens
uacaugaaagauugauagaauauuuuagauua

SEQ ID NO: 295278 - RNA, 32 nt, Homo Sapiens
agcccaagagauuguugcuuuguaacuuuuug

SEQ ID NO: 295279 - RNA, 32 nt, Homo Sapiens
cucucacacauacucacaaacacacacacaag

SEQ ID NO: 295280 - RNA, 32 nt, Homo Sapiens
gcucgccucagccccagcgccccucggcuacc

SEQ ID NO: 295281 - RNA, 32 nt, Homo Sapiens
cccgcaugccccauccggcagcuccuccggug

SEQ ID NO: 295282 - RNA, 32 nt, Homo Sapiens
ugaguuggcaaaugaauugcuuugaaauuagu

SEQ ID NO: 295283 - RNA, 32 nt, Homo Sapiens
ugcccucccagucucccaccccggccccaggc

SEQ ID NO: 295284 - RNA, 32 nt, Homo Sapiens
ccggcgccaugguggagaaggaggaggcuggc

SEQ ID NO: 295285 - RNA, 30 nt, Homo Sapiens
cccccagcccugccccucgcccugaugcga

SEQ ID NO: 295286 - RNA, 32 nt, Homo Sapiens
cacacacacacacacacacacacacacucacu

SEQ ID NO: 295287 - RNA, 32 nt, Homo Sapiens
uccagcaccccugagucucuccaggccaggcg

SEQ ID NO: 295288 - RNA, 32 nt, Homo Sapiens
auuuuuuguaaaagauugaauuacaguaaacc

SEQ ID NO: 295289 - RNA, 32 nt, Homo Sapiens
gcagugccgggcggcccccuggcucucugcgu

SEQ ID NO: 295290 - RNA, 32 nt, Homo Sapiens
cgcacuuggaaccucuacggauguguguuuuc

SEQ ID NO: 295291 - RNA, 32 nt, Homo Sapiens
uucugugaaaaauuauuuuaagugucuuauau

SEQ ID NO: 295292 - RNA, 32 nt, Homo Sapiens
cauaaaaccuucauuacacauaaagauacacg

SEQ ID NO: 295293 - RNA, 32 nt, Homo Sapiens
gaggacgagggucggcgggggcugcccccgug

SEQ ID NO: 295294 - RNA, 32 nt, Homo Sapiens
uuuuauuuuuuggcauugcaacuguggcauag

SEQ ID NO: 295295 - RNA, 32 nt, Homo Sapiens
uuauuauggaaaaauuaaaaugucuuuuuuac

SEQ ID NO: 295296 - RNA, 32 nt, Homo Sapiens
gagaacuaaauuaccaccaugcacuuccuauu

SEQ ID NO: 295297 - RNA, 32 nt, Homo Sapiens
gccggcugcaguuucucacuucccuguuccau

SEQ ID NO: 295298 - RNA, 32 nt, Homo Sapiens
agggccugcaagcagccagggucagagacagg

SEQ ID NO: 295299 - RNA, 32 nt, Homo Sapiens
gcggcugccgccucugcuggggucuaggcugu

SEQ ID NO: 295300 - RNA, 32 nt, Homo Sapiens
aucaaaagauaaaggggccgggugugguggcu

SEQ ID NO: 295301 - RNA, 31 nt, Homo Sapiens
caucaggcgaucugccugccuuggcauccca

SEQ ID NO: 295302 - RNA, 32 nt, Homo Sapiens
gccucuugaguuccucugcaguuuugacauuu

SEQ ID NO: 295303 - RNA, 32 nt, Homo Sapiens
agauaagaauguacauaauguuaccggagcug

SEQ ID NO: 295304 - RNA, 32 nt, Homo Sapiens
uaguaggggaggaaacaggcuuucuuacucug

SEQ ID NO: 295305 - RNA, 32 nt, Homo Sapiens
aguucaucugccuuuuaacccauucaccaaaa

SEQ ID NO: 295306 - RNA, 30 nt, Homo Sapiens
acuuuaacuaaaaauaaauauucauagcac

SEQ ID NO: 295307 - RNA, 32 nt, Homo Sapiens
aaaguuauauuuuauuugauaaauaaugguaa

SEQ ID NO: 295308 - RNA, 32 nt, Homo Sapiens
gcaaauuaccaugcccugaggacugugugaua

SEQ ID NO: 295309 - RNA, 32 nt, Homo Sapiens
ccauucaauaaauaacaaaaccaauaguauuu

SEQ ID NO: 295310 - RNA, 32 nt, Homo Sapiens
ucaauagaaaaauuauuuuagaacacauugua

SEQ ID NO: 295311 - RNA, 32 nt, Homo Sapiens
uuucugcccuguaaauaggaccagucuuacac

SEQ ID NO: 295312 - RNA, 32 nt, Homo Sapiens
uaucuuaaaggcauuauucuccagccuuaaga

SEQ ID NO: 295313 - RNA, 32 nt, Homo Sapiens
caauuaugcuaacauuuuuagcaguaguuuca

SEQ ID NO: 295314 - RNA, 32 nt, Homo Sapiens
ucagauaauauuugcuguucgucaagaauaug

SEQ ID NO: 295315 - RNA, 32 nt, Homo Sapiens
ugaauugcuguaaaaauaggauggcgaguuug

SEQ ID NO: 295316 - RNA, 32 nt, Homo Sapiens
gcagugaagaaggaagaaaugagagucuagac

SEQ ID NO: 295317 - RNA, 32 nt, Homo Sapiens
uugcccaagggcuuacugcugcuaaguggcug

SEQ ID NO: 295318 - RNA, 32 nt, Homo Sapiens
guguggaggaguuggggcccccugccuucagg

SEQ ID NO: 295319 - RNA, 27 nt, Homo Sapiens
ugguuugcuuucuucaggcucuagggc

SEQ ID NO: 295320 - RNA, 32 nt, Homo Sapiens
uuuacaugaagauggagugcuauggaaaugcc

SEQ ID NO: 295321 - RNA, 32 nt, Homo Sapiens
ucuccagaauacugagggucuaacccaccucu

SEQ ID NO: 295322 - RNA, 32 nt, Homo Sapiens
cauucgccagugccacuguuggaagcugcuug

SEQ ID NO: 295323 - RNA, 32 nt, Homo Sapiens
gccgaagaacagaaucacaggauguuuauugu

SEQ ID NO: 295324 - RNA, 32 nt, Homo Sapiens
caccuggcuuccacccuccccagcuccugcac

SEQ ID NO: 295325 - RNA, 32 nt, Homo Sapiens
ucacagaucaggaacacaacgugguggcacug

SEQ ID NO: 295326 - RNA, 32 nt, Homo Sapiens
gcuuucuuccuuucucuuuuuauuuuauugug

SEQ ID NO: 295327 - RNA, 32 nt, Homo Sapiens
aagcccgccugacagaaaccacggccacauuu

SEQ ID NO: 295328 - RNA, 32 nt, Homo Sapiens
ucaucuucuagucacucuuccauccauggcag

SEQ ID NO: 295329 - RNA, 32 nt, Homo Sapiens
gcacagcgaugguaagagacaccguggauauu

SEQ ID NO: 295330 - RNA, 32 nt, Homo Sapiens
ucacccuguugccuaugggaggagguggaagg

SEQ ID NO: 295331 - RNA, 32 nt, Homo Sapiens
cucuucuagccccuccaacaguucuucaugua

SEQ ID NO: 295332 - RNA, 32 nt, Homo Sapiens
agaugaggaaacugaggccuagagaagcucaa

SEQ ID NO: 295333 - RNA, 32 nt, Homo Sapiens
ggaauuaagugaaacagggaagguuguuaaac

SEQ ID NO: 295334 - RNA, 32 nt, Homo Sapiens
ucacgauguucaauugccuuugaaagagagua

SEQ ID NO: 295335 - RNA, 32 nt, Homo Sapiens
agaggucuaaggucaaaauaauaaucauaauu

SEQ ID NO: 295336 - RNA, 32 nt, Homo Sapiens
ggagcgcagacacccuucuucacacccgggac

SEQ ID NO: 295337 - RNA, 32 nt, Homo Sapiens
ugccuacucugcaacucggcuucugagccagg

SEQ ID NO: 295338 - RNA, 29 nt, Homo Sapiens
aaggggugaaguuuauaugggucuauuua

SEQ ID NO: 295339 - RNA, 30 nt, Homo Sapiens
uccuaauuuccuaggggggaaaauccuauu

SEQ ID NO: 295340 - RNA, 32 nt, Homo Sapiens
uguugcaucuucuguaggaccauuuaagucug

SEQ ID NO: 295341 - RNA, 32 nt, Homo Sapiens
gccgugacacucggcccuccaguguugcggag

SEQ ID NO: 295342 - RNA, 32 nt, Homo Sapiens
ugucauuuuuaaacugucaguaauuauuguca

SEQ ID NO: 295343 - RNA, 32 nt, Homo Sapiens
cuaccgccagguggcgccaggcccccacaguc

SEQ ID NO: 295344 - RNA, 32 nt, Homo Sapiens
cccuucuuccaaggagcagagagguggccacc

SEQ ID NO: 295345 - RNA, 29 nt, Homo Sapiens
ucuuagcggggcaugguacgguuucgugc

SEQ ID NO: 295346 - RNA, 32 nt, Homo Sapiens
cgugagccccuugccucaccccggccccuccc

SEQ ID NO: 295347 - RNA, 32 nt, Homo Sapiens
cugugcuuccauggagcugggugucaagagaa

SEQ ID NO: 295348 - RNA, 32 nt, Homo Sapiens
uacaguguguuguaauuuuguaaggccaacua

SEQ ID NO: 295349 - RNA, 30 nt, Homo Sapiens
ggucuucaggcgccugaugaguucauaguu

SEQ ID NO: 295350 - RNA, 32 nt, Homo Sapiens
uuguaucugcuguucgcuggcugggccuccgc

SEQ ID NO: 295351 - RNA, 32 nt, Homo Sapiens
ccaggggccgacccggcccguaguguggaagc

SEQ ID NO: 295352 - RNA, 32 nt, Homo Sapiens
cucuggcagcgggggguguagguguguugcac

SEQ ID NO: 295353 - RNA, 32 nt, Homo Sapiens
gcacgaggccccagccagcugucccgagucug

SEQ ID NO: 295354 - RNA, 32 nt, Homo Sapiens
aacagugggaccagcuucuuugcuggcuucgu

SEQ ID NO: 295355 - RNA, 32 nt, Homo Sapiens
cagaauugcuugaaccugggagguggagguug

SEQ ID NO: 295356 - RNA, 32 nt, Homo Sapiens
caaggucugugccucuccugcagccccgccac

SEQ ID NO: 295357 - RNA, 32 nt, Homo Sapiens
cauccagaccaaucuuccuguccgggcugcug

SEQ ID NO: 295358 - RNA, 32 nt, Homo Sapiens
gccccagagagaccgaggacgcagaccagugg

SEQ ID NO: 295359 - RNA, 32 nt, Homo Sapiens
aagguaaguuauggcaauacacugcuucaauu

SEQ ID NO: 295360 - RNA, 32 nt, Homo Sapiens
cuugaaaaaugaaaguauuuggacaugcagac

SEQ ID NO: 295361 - RNA, 32 nt, Homo Sapiens
aaaaagugucauugugguuuauuggaaccuau

SEQ ID NO: 295362 - RNA, 32 nt, Homo Sapiens
gcgugcgcgagcgcuuccccggcgcccagcac

SEQ ID NO: 295363 - RNA, 32 nt, Homo Sapiens
caucuuaaugaaauaacauucucugacugcac

SEQ ID NO: 295364 - RNA, 29 nt, Homo Sapiens
gucuguguauguauguauauaguguaaua

SEQ ID NO: 295365 - RNA, 30 nt, Homo Sapiens
ggcggguggcccaggcacgcagcggugagg

SEQ ID NO: 295366 - RNA, 32 nt, Homo Sapiens
gcucucguucucaguagcggcaucauggccag

SEQ ID NO: 295367 - RNA, 32 nt, Homo Sapiens
ucacucugugccaaacacaugcuugaaguugg

SEQ ID NO: 295368 - RNA, 32 nt, Homo Sapiens
gaaagcugcuaaauacgugucuggcagguaaa

SEQ ID NO: 295369 - RNA, 32 nt, Homo Sapiens
gaagcugucaaucccggagcaacuuucccaac

SEQ ID NO: 295370 - RNA, 32 nt, Homo Sapiens
cacaggugugugccaccacaccuggcuaauuu

SEQ ID NO: 295371 - RNA, 32 nt, Homo Sapiens
aaguagaugucuuuuuacugugacugcacgug

SEQ ID NO: 295372 - RNA, 32 nt, Homo Sapiens
cacguccgcgcgcgcccccggggcuugcguca

SEQ ID NO: 295373 - RNA, 32 nt, Homo Sapiens
gcggggucuggugggaggagcgguugcccagc

SEQ ID NO: 295374 - RNA, 32 nt, Homo Sapiens
auuuauaaauuaaaacauaguuaucuaguagu

SEQ ID NO: 295375 - RNA, 32 nt, Homo Sapiens
cucacccgcccgcuccgugggccgcucaccuu

SEQ ID NO: 295376 - RNA, 32 nt, Homo Sapiens
caucuguacuaaaaauacaagauuaccugggc

SEQ ID NO: 295377 - RNA, 32 nt, Homo Sapiens
uggagucuugugaaaguguaaugugcgauggc

SEQ ID NO: 295378 - RNA, 32 nt, Homo Sapiens
agaugcugccagcacacaggggcccuccugcu

SEQ ID NO: 295379 - RNA, 32 nt, Homo Sapiens
uccaaguucaucuccgccccggggcucuccug

SEQ ID NO: 295380 - RNA, 32 nt, Homo Sapiens
gaccgcggaggguggcgaggggcggccaggac

SEQ ID NO: 295381 - RNA, 32 nt, Homo Sapiens
aaccagagugagagggcagauaggcaggauuc

SEQ ID NO: 295382 - RNA, 32 nt, Homo Sapiens
gaaaagcuucggggugguuuugguccauuucu

SEQ ID NO: 295383 - RNA, 32 nt, Homo Sapiens
cuuuccuaucauggagugacggucccacacug

SEQ ID NO: 295384 - RNA, 32 nt, Homo Sapiens
caaugaugaaaaugaaacgaaaaggaaguccc

SEQ ID NO: 295385 - RNA, 32 nt, Homo Sapiens
gaccaaagggaagugaggcccaaggagcuuac

SEQ ID NO: 295386 - RNA, 32 nt, Homo Sapiens
cuccuccaccacgggaccccagcccugaccaa

SEQ ID NO: 295387 - RNA, 32 nt, Homo Sapiens
ggggguuggggaucgaggggcgggggucagcu

SEQ ID NO: 295388 - RNA, 32 nt, Homo Sapiens
cuuugcauaccagcuguaaaucuuacuuggcc

SEQ ID NO: 295389 - RNA, 32 nt, Homo Sapiens
cugaucuaacugugugguuugcacaaccucca

SEQ ID NO: 295390 - RNA, 32 nt, Homo Sapiens
cagcugcuguugcagguagaaaagcucaccaa

SEQ ID NO: 295391 - RNA, 32 nt, Homo Sapiens
agccgaguucuucccgcauuacugcuguuuaa

SEQ ID NO: 295392 - RNA, 32 nt, Homo Sapiens
ccgcugaggagcuuucuugggcugcccccauc

SEQ ID NO: 295393 - RNA, 32 nt, Homo Sapiens
uggcuaauuuuuguauuuuuuguagagauggg

SEQ ID NO: 295394 - RNA, 32 nt, Homo Sapiens
gggaagggagagugagcgcaugcugaaauuua

SEQ ID NO: 295395 - RNA, 32 nt, Homo Sapiens
agaaacccgacagagggaagaaaagagcuuuc

SEQ ID NO: 295396 - RNA, 32 nt, Homo Sapiens
ccgcuuaccugcgccuccucgagccuccggag

SEQ ID NO: 295397 - RNA, 32 nt, Homo Sapiens
accccuugacauuccuauauuggguuuagguc

SEQ ID NO: 295398 - RNA, 32 nt, Homo Sapiens
uuuaaacagggauaauaaaacuaauauugcag

SEQ ID NO: 295399 - RNA, 32 nt, Homo Sapiens
auagucaugaaauaccguacuuguuugaugac

SEQ ID NO: 295400 - RNA, 32 nt, Homo Sapiens
uuuccucaggagcugucugggguguugauggu

SEQ ID NO: 295401 - RNA, 32 nt, Homo Sapiens
uaucccugcccccagucccugccccgccagac

SEQ ID NO: 295402 - RNA, 32 nt, Homo Sapiens
cuuucuuaucccagugaucaccugccaaauga

SEQ ID NO: 295403 - RNA, 32 nt, Homo Sapiens
aaaaaguaaccaaaauguguauuugccccauc

SEQ ID NO: 295404 - RNA, 30 nt, Homo Sapiens
cuugcagagaagccagauucugcauuugcg

SEQ ID NO: 295405 - RNA, 32 nt, Homo Sapiens
cacugugacaacacaggaaaaguugguuuuca

SEQ ID NO: 295406 - RNA, 32 nt, Homo Sapiens
gucugucuugagucuaucgugcucuuauugcu

SEQ ID NO: 295407 - RNA, 30 nt, Homo Sapiens
ucuccugucugugcuccucggggcaucucc

SEQ ID NO: 295408 - RNA, 32 nt, Homo Sapiens
ucuaauuaauauauuuuucuaagggucaguug

SEQ ID NO: 295409 - RNA, 32 nt, Homo Sapiens
augcacaucuucucgccaccugcuuuuucccu

SEQ ID NO: 295410 - RNA, 32 nt, Homo Sapiens
gucugcguucccuccccugggccugacugagc

SEQ ID NO: 295411 - RNA, 32 nt, Homo Sapiens
gucuaaaguuucuggaacuuuccuccuuaccg

SEQ ID NO: 295412 - RNA, 32 nt, Homo Sapiens
cacuugugagaaccaagaauggcugaaagcag

SEQ ID NO: 295413 - RNA, 32 nt, Homo Sapiens
cacagaaagggaggaugggcgaugacaguugu

SEQ ID NO: 295414 - RNA, 32 nt, Homo Sapiens
ccgaaugcacggccuuguagggacgccccaga

SEQ ID NO: 295415 - RNA, 32 nt, Homo Sapiens
gagaguuugggaaagggagauggagaagaacu

SEQ ID NO: 295416 - RNA, 32 nt, Homo Sapiens
gauguuucuuauuauuuuggagguggagagga

SEQ ID NO: 295417 - RNA, 32 nt, Homo Sapiens
ugaggauagugguggggggucuggcaccaucu

SEQ ID NO: 295418 - RNA, 32 nt, Homo Sapiens
uccuggccugagaaauauucucuuaaaaugac

SEQ ID NO: 295419 - RNA, 32 nt, Homo Sapiens
caggaaguuauccauaugucugcuaguuagau

SEQ ID NO: 295420 - RNA, 32 nt, Homo Sapiens
aaucacgguuuuuaaccuguguuugucugccc

SEQ ID NO: 295421 - RNA, 32 nt, Homo Sapiens
gaaggcugacuauacauaaagugacuggaauu

SEQ ID NO: 295422 - RNA, 32 nt, Homo Sapiens
aacgacagccucacuucuguauggacugcuga

SEQ ID NO: 295423 - RNA, 32 nt, Homo Sapiens
uuaugcuuugaaaaauaauuauggggaaauac

SEQ ID NO: 295424 - RNA, 32 nt, Homo Sapiens
auaacagacuuccacagaagcuagacugacca

SEQ ID NO: 295425 - RNA, 32 nt, Homo Sapiens
gcgaugagcggccccgcccacccuaggccccg

SEQ ID NO: 295426 - RNA, 32 nt, Homo Sapiens
augcuuuaagcuuagucauaaacuacauuugc

SEQ ID NO: 295427 - RNA, 32 nt, Homo Sapiens
acacgaauuuaaaugugaugucuuuguauaua

SEQ ID NO: 295428 - RNA, 32 nt, Homo Sapiens
gagcacccuguugucuucugguaaaugugugc

SEQ ID NO: 295429 - RNA, 32 nt, Homo Sapiens
gcaagagugucucucuagauuccuccucucug

SEQ ID NO: 295430 - RNA, 32 nt, Homo Sapiens
agguguugccugugaguucugccucgcuggcc

SEQ ID NO: 295431 - RNA, 32 nt, Homo Sapiens
cucguuagacagugcuuuaauuuaauauugaa

SEQ ID NO: 295432 - RNA, 32 nt, Homo Sapiens
acgaaaggaaagggcucucaagggcucuucug

SEQ ID NO: 295433 - RNA, 32 nt, Homo Sapiens
gccuacuuuuuuaaagccaucaucuuaucuuc

SEQ ID NO: 295434 - RNA, 31 nt, Homo Sapiens
cgguugcugccggagccguuagagggaggag

SEQ ID NO: 295435 - RNA, 32 nt, Homo Sapiens
uaacuagccagacccaucccuuuauuucagcc

SEQ ID NO: 295436 - RNA, 32 nt, Homo Sapiens
guggccggagguguggcuguggagagcuggcc

SEQ ID NO: 295437 - RNA, 32 nt, Homo Sapiens
cagagacgccccaggccauguuagagcuuuga

SEQ ID NO: 295438 - RNA, 32 nt, Homo Sapiens
augaggagaagcucuccgaggacguggacgcc

SEQ ID NO: 295439 - RNA, 32 nt, Homo Sapiens
ccaggacucugcaggucacugcuagcuccaga

SEQ ID NO: 295440 - RNA, 32 nt, Homo Sapiens
uugguugggcuggagggaaaaggaguggcucc

SEQ ID NO: 295441 - RNA, 32 nt, Homo Sapiens
ucuuaccuccuggccuguacgaggcuuuguuu

SEQ ID NO: 295442 - RNA, 32 nt, Homo Sapiens
cuuuggugggguagucucggggcagcucagcg

SEQ ID NO: 295443 - RNA, 32 nt, Homo Sapiens
gaugguuugaccaagucucccaaagcugaaga

SEQ ID NO: 295444 - RNA, 32 nt, Homo Sapiens
cuauucugagaaaacaagcaaguucugagagc

SEQ ID NO: 295445 - RNA, 32 nt, Homo Sapiens
ucugccuuuccacagcuccuccaagauuccuc

SEQ ID NO: 295446 - RNA, 30 nt, Homo Sapiens
aaagcgucauggcugccgccggccaggaaa

SEQ ID NO: 295447 - RNA, 32 nt, Homo Sapiens
ugaccugcacagcuugguuagaccuagauuua

SEQ ID NO: 295448 - RNA, 32 nt, Homo Sapiens
cagauguucuuaauauuuuucuuacucuaaaa

SEQ ID NO: 295449 - RNA, 32 nt, Homo Sapiens
caauaaggauaaauaucauauacaucguuaug

SEQ ID NO: 295450 - RNA, 32 nt, Homo Sapiens
aucccccaccccccauucuaucuuugucaugu

SEQ ID NO: 295451 - RNA, 32 nt, Homo Sapiens
aagguguccagggccuuaauucugcaaacauu

SEQ ID NO: 295452 - RNA, 31 nt, Homo Sapiens
cugucauugcacugcccuggcacaugggcac

SEQ ID NO: 295453 - RNA, 32 nt, Homo Sapiens
auaaauaaauaaauaaagccucuggucagaug

SEQ ID NO: 295454 - RNA, 32 nt, Homo Sapiens
cacaccauuccggaagaacugcagcuucucaa

SEQ ID NO: 295455 - RNA, 32 nt, Homo Sapiens
uguuuuugcuuugcauuuucugauuuuauacc

SEQ ID NO: 295456 - RNA, 32 nt, Homo Sapiens
gagcauggccaucguggcuacaucagucccgg

SEQ ID NO: 295457 - RNA, 32 nt, Homo Sapiens
uuugccucccuggcugugucuuucuugaggga

SEQ ID NO: 295458 - RNA, 32 nt, Homo Sapiens
gccagcaucccaagagugaggcugguuucugg

SEQ ID NO: 295459 - RNA, 32 nt, Homo Sapiens
uucaggaguuugaaaauucaaaaaauaaauaa

SEQ ID NO: 295460 - RNA, 32 nt, Homo Sapiens
acccuggcagcaucccaccuccugaguccucu

SEQ ID NO: 295461 - RNA, 32 nt, Homo Sapiens
uuuuggagaugauugugcuauuauuguuugcc

SEQ ID NO: 295462 - RNA, 32 nt, Homo Sapiens
ucugauuuaaaguuguaauacaugauuucuca

SEQ ID NO: 295463 - RNA, 32 nt, Homo Sapiens
guccuccccccucccaguguagcuguggcuca

SEQ ID NO: 295464 - RNA, 32 nt, Homo Sapiens
uggugggcgguggcuccugggaaguugcgcag

SEQ ID NO: 295465 - RNA, 32 nt, Homo Sapiens
cacaaccauggccagcaucggcuucuugcugc

SEQ ID NO: 295466 - RNA, 32 nt, Homo Sapiens
cuuuuucguaacuuuugaaucuuaauauuuug

SEQ ID NO: 295467 - RNA, 32 nt, Homo Sapiens
aagccaaacaaggagcuuucugcagaaugaaa

SEQ ID NO: 295468 - RNA, 32 nt, Homo Sapiens
gcccuaccuaccucacaggguuguugugagga

SEQ ID NO: 295469 - RNA, 32 nt, Homo Sapiens
aggugggccccuccccagaagagcaggguugu

SEQ ID NO: 295470 - RNA, 32 nt, Homo Sapiens
agccaucaugcaagacgguaacacgaugcgca

SEQ ID NO: 295471 - RNA, 32 nt, Homo Sapiens
cccaguggggacggggcagggccuggccuggg

SEQ ID NO: 295472 - RNA, 32 nt, Homo Sapiens
cugaggggguugggcugcugccacgaggacug

SEQ ID NO: 295473 - RNA, 32 nt, Homo Sapiens
cucuauuaccccguuuuucagagacgagaggu

SEQ ID NO: 295474 - RNA, 32 nt, Homo Sapiens
ggucccucaccccacacccucccucugccccc

SEQ ID NO: 295475 - RNA, 32 nt, Homo Sapiens
cuagaagggcugggaagcucgcggccgggguu

SEQ ID NO: 295476 - RNA, 32 nt, Homo Sapiens
ugguuaugcuauuacauuuaaucuucaagguu

SEQ ID NO: 295477 - RNA, 32 nt, Homo Sapiens
acuaacuguuggacugacuuguguacacugug

SEQ ID NO: 295478 - RNA, 32 nt, Homo Sapiens
uucuuuaaauguuuuccuagaguguuuguuau

SEQ ID NO: 295479 - RNA, 32 nt, Homo Sapiens
guuaagccgagaucaugcuacugcacucuagc

SEQ ID NO: 295480 - RNA, 32 nt, Homo Sapiens
ggcgaccccgcggcgggcgcggagauguggcc

SEQ ID NO: 295481 - RNA, 32 nt, Homo Sapiens
auguugauaucaugaguuaauaugaguuugac

SEQ ID NO: 295482 - RNA, 32 nt, Homo Sapiens
ccauuggaaugucaaggccacacucagauccu

SEQ ID NO: 295483 - RNA, 32 nt, Homo Sapiens
cuauaacauagucauuuaugagggaucuuaca

SEQ ID NO: 295484 - RNA, 32 nt, Homo Sapiens
aguccggccccggcuccgggccccccaacccu

SEQ ID NO: 295485 - RNA, 32 nt, Homo Sapiens
uuauaauuggcacaguacuuugaauuaugcca

SEQ ID NO: 295486 - RNA, 32 nt, Homo Sapiens
gugauauaucaaaauacagucuacacaucuuu

SEQ ID NO: 295487 - RNA, 32 nt, Homo Sapiens
gguguugugggggcaggaagggcggggcaagc

SEQ ID NO: 295488 - RNA, 32 nt, Homo Sapiens
gcgucgcggcggagaggacgagaccgggacaa

SEQ ID NO: 295489 - RNA, 32 nt, Homo Sapiens
agagaccagccugggccaacguggugaaaccc

SEQ ID NO: 295490 - RNA, 32 nt, Homo Sapiens
gugugauuuguuuuuaaaaacuugcuucaugc

SEQ ID NO: 295491 - RNA, 32 nt, Homo Sapiens
uagaaguagagcuuuuuccagaccuccuaccu

SEQ ID NO: 295492 - RNA, 32 nt, Homo Sapiens
auuuucugucuccucacuuguccggggaagac

SEQ ID NO: 295493 - RNA, 32 nt, Homo Sapiens
ggcuggcggugguucugguggagcacgaggga

SEQ ID NO: 295494 - RNA, 32 nt, Homo Sapiens
aagggaaacacucuucccgugucuuccaguuu

SEQ ID NO: 295495 - RNA, 32 nt, Homo Sapiens
ucaauaacagauggugcugcuaauucccaaca

SEQ ID NO: 295496 - RNA, 32 nt, Homo Sapiens
uaagacccugucauuaauuccaugugucaaua

SEQ ID NO: 295497 - RNA, 32 nt, Homo Sapiens
ggcccuggccuggccuucgugcccuuuauuca

SEQ ID NO: 295498 - RNA, 32 nt, Homo Sapiens
cccuacagccucacuuccccagccucaccuug

SEQ ID NO: 295499 - RNA, 32 nt, Homo Sapiens
gggcuccagcgaagaaaaggcugcugacaagg

SEQ ID NO: 295500 - RNA, 32 nt, Homo Sapiens
gcauuauuuauuucuaugacuucuuuggauuu

SEQ ID NO: 295501 - RNA, 32 nt, Homo Sapiens
gucuugagaaaacagauaaugauaguguuuug

SEQ ID NO: 295502 - RNA, 32 nt, Homo Sapiens
ugccauuggccaugauuucagggagcuggcug

SEQ ID NO: 295503 - RNA, 32 nt, Homo Sapiens
gaggagcuggaacagauauagcuaccugguuc

SEQ ID NO: 295504 - RNA, 30 nt, Homo Sapiens
gagagaggcaggcuccugugagcccaggga

SEQ ID NO: 295505 - RNA, 32 nt, Homo Sapiens
gccacugcaaccaggaccggaguggaggcggc

SEQ ID NO: 295506 - RNA, 32 nt, Homo Sapiens
ccaugcccgcggcaccacaugugucuucucac

SEQ ID NO: 295507 - RNA, 32 nt, Homo Sapiens
aacauggaaaccuaagaaaugccagaacaacc

SEQ ID NO: 295508 - RNA, 32 nt, Homo Sapiens
cuguucuuuauuuuuaacgcugcaucuucgcg

SEQ ID NO: 295509 - RNA, 32 nt, Homo Sapiens
cucuccucaucacaguucccagcccccaccuu

SEQ ID NO: 295510 - RNA, 32 nt, Homo Sapiens
augauacuaauuuuuuguccauuugaaauaua

SEQ ID NO: 295511 - RNA, 32 nt, Homo Sapiens
gaagacuagcugcugcugcugcugcugcugca

SEQ ID NO: 295512 - RNA, 32 nt, Homo Sapiens
gugggggcuggaaccccuccccgggaggagug

SEQ ID NO: 295513 - RNA, 32 nt, Homo Sapiens
ugcggcccgcgcccccggcgucaccgccuccu

SEQ ID NO: 295514 - RNA, 32 nt, Homo Sapiens
acauggaaaugaaaauuauuuuaugucuagag

SEQ ID NO: 295515 - RNA, 32 nt, Homo Sapiens
cugccggcuccucaccucuuugggccucgcca

SEQ ID NO: 295516 - RNA, 32 nt, Homo Sapiens
aauguugcucggugcugacaguggaugaaugg

SEQ ID NO: 295517 - RNA, 32 nt, Homo Sapiens
gaagcuacaucauugaccugauguuuuagacu

SEQ ID NO: 295518 - RNA, 32 nt, Homo Sapiens
aaaauagggcucccccaccucccccauuucug

SEQ ID NO: 295519 - RNA, 32 nt, Homo Sapiens
ugaggucgucuggggagaagggcggaggcaaa

SEQ ID NO: 295520 - RNA, 32 nt, Homo Sapiens
uaacaagauccccagcagauguguguguaagc

SEQ ID NO: 295521 - RNA, 32 nt, Homo Sapiens
caacagaagugaagacaaaacaauaugcauca

SEQ ID NO: 295522 - RNA, 32 nt, Homo Sapiens
cugggugaggccgcauccuucaaggcccaugu

SEQ ID NO: 295523 - RNA, 32 nt, Homo Sapiens
ugcgaguccucgugagaccagugcuugucgug

SEQ ID NO: 295524 - RNA, 32 nt, Homo Sapiens
cagccccaacccccggccccgguggccucccc

SEQ ID NO: 295525 - RNA, 32 nt, Homo Sapiens
auuaacugcccauuuguguaauuuauaguuug

SEQ ID NO: 295526 - RNA, 32 nt, Homo Sapiens
gugggugucuuagguauugguguacagcugua

SEQ ID NO: 295527 - RNA, 32 nt, Homo Sapiens
cucgcccuaugagucagccaucggagaggaau

SEQ ID NO: 295528 - RNA, 32 nt, Homo Sapiens
uccaaugcugacaguaggauauugaaguucuc

SEQ ID NO: 295529 - RNA, 32 nt, Homo Sapiens
ugcugagucaucaucaucaucaucaucauugu

SEQ ID NO: 295530 - RNA, 32 nt, Homo Sapiens
gugguaaaaguaccacacaaacuaugggaucc

SEQ ID NO: 295531 - RNA, 32 nt, Homo Sapiens
ggcccugcagcuaagugaucuaauccaggauc

SEQ ID NO: 295532 - RNA, 32 nt, Homo Sapiens
aaagucugcgcggcgcggccaggcccggccga

SEQ ID NO: 295533 - RNA, 32 nt, Homo Sapiens
cugccccgcgcgcggagcugcgcgcacugggu

SEQ ID NO: 295534 - RNA, 32 nt, Homo Sapiens
cuucuccggaucaguacaugcaugucacauua

SEQ ID NO: 295535 - RNA, 32 nt, Homo Sapiens
auuuaauaaaaagaaagggugaaauaaacuga

SEQ ID NO: 295536 - RNA, 32 nt, Homo Sapiens
cuccuucggugguggcggcggcagcugcugcc

SEQ ID NO: 295537 - RNA, 32 nt, Homo Sapiens
gaggggcccagcugcauuucuguuaacauuuc

SEQ ID NO: 295538 - RNA, 32 nt, Homo Sapiens
ccuccccgccuggccagggcagggccacccca

SEQ ID NO: 295539 - RNA, 32 nt, Homo Sapiens
ccucuucugcccgcaccccgcgaccccucccg

SEQ ID NO: 295540 - RNA, 32 nt, Homo Sapiens
cagacccuuuugugucccaugcccacccuccc

SEQ ID NO: 295541 - RNA, 32 nt, Homo Sapiens
ugcgcggggcguugggucagcgggucugggac

SEQ ID NO: 295542 - RNA, 32 nt, Homo Sapiens
ccuuaugucaccucagcccucaucucaaugcc

SEQ ID NO: 295543 - RNA, 32 nt, Homo Sapiens
agaacugcucaucagccaaaacucaagccuug

SEQ ID NO: 295544 - RNA, 32 nt, Homo Sapiens
ugcuugcugggucuuuguaacccagcacuucc

SEQ ID NO: 295545 - RNA, 32 nt, Homo Sapiens
gcaguucaaauuaaagaagaugguuauuggag

SEQ ID NO: 295546 - RNA, 32 nt, Homo Sapiens
gcacgaagcacaggcggagcgcggcggcucuc

SEQ ID NO: 295547 - RNA, 32 nt, Homo Sapiens
uccccguuuaccucagagacgucuauuuuugu

SEQ ID NO: 295548 - RNA, 32 nt, Homo Sapiens
agcacuugaaccuccuuuguaccuguuugggg

SEQ ID NO: 295549 - RNA, 32 nt, Homo Sapiens
ugccaggaagcagccucagaauuugggggccc

SEQ ID NO: 295550 - RNA, 32 nt, Homo Sapiens
agaauaaauuuaauauuuuuaaggcauggaga

SEQ ID NO: 295551 - RNA, 32 nt, Homo Sapiens
cugccggcacuaggcgcagagccgccagcgcu

SEQ ID NO: 295552 - RNA, 32 nt, Homo Sapiens
cgccaccaguggcuucugcugcugcugcagag

SEQ ID NO: 295553 - RNA, 32 nt, Homo Sapiens
acaucuugcugcguucuguuugcugagguugg

SEQ ID NO: 295554 - RNA, 32 nt, Homo Sapiens
uggcugccucauggugggcccuggacaggugu

SEQ ID NO: 295555 - RNA, 32 nt, Homo Sapiens
cauugacguguaccaggcgucugugggguuug

SEQ ID NO: 295556 - RNA, 32 nt, Homo Sapiens
cuaaagugccugggcuugguggccaucaagag

SEQ ID NO: 295557 - RNA, 32 nt, Homo Sapiens
gguauuuuuucucuauuucacaaaauccaaac

SEQ ID NO: 295558 - RNA, 32 nt, Homo Sapiens
guccccuucccagcugaaagggguucggaauu

SEQ ID NO: 295559 - RNA, 32 nt, Homo Sapiens
cagaguaagagcucagccugguuugaauuuaa

SEQ ID NO: 295560 - RNA, 32 nt, Homo Sapiens
uucuucagcccauauucuauuauucucugaug

SEQ ID NO: 295561 - RNA, 29 nt, Homo Sapiens
ccagaguuggagaccaaccugggcaacau

SEQ ID NO: 295562 - RNA, 32 nt, Homo Sapiens
caauggagaaaugaagcagaggaaggaaacau

SEQ ID NO: 295563 - RNA, 32 nt, Homo Sapiens
agaccugaguguggcgccccccgccccacccu

SEQ ID NO: 295564 - RNA, 32 nt, Homo Sapiens
ccuuccaaaaauauugauggugauuugugcua

SEQ ID NO: 295565 - RNA, 32 nt, Homo Sapiens
cucucuuauaucagacugcagcuccuggugau

SEQ ID NO: 295566 - RNA, 32 nt, Homo Sapiens
acuuaagggaaaaguucuccuaucuugauuuc

SEQ ID NO: 295567 - RNA, 32 nt, Homo Sapiens
uuuuggaaaaauuuauggucuccauuaaaaua

SEQ ID NO: 295568 - RNA, 32 nt, Homo Sapiens
auguacuguacuuugcagaagugaaguuuuuc

SEQ ID NO: 295569 - RNA, 32 nt, Homo Sapiens
gcuagcucuucuccagaggaaaaguacuagga

SEQ ID NO: 295570 - RNA, 32 nt, Homo Sapiens
ucuccuauuuaaugugauggaagcacaacccc

SEQ ID NO: 295571 - RNA, 32 nt, Homo Sapiens
guauaaagugguuuuuuauuucugauuuucac

SEQ ID NO: 295572 - RNA, 32 nt, Homo Sapiens
acaucauuaugaacuccaugaauauguauaau

SEQ ID NO: 295573 - RNA, 32 nt, Homo Sapiens
gccaucaggcugggggcugugcuaugugggau

SEQ ID NO: 295574 - RNA, 32 nt, Homo Sapiens
ggucuccagcaagggauucgggcgaagacaaa

SEQ ID NO: 295575 - RNA, 32 nt, Homo Sapiens
acagcaaaauaaaggucugauauguuggcccc

SEQ ID NO: 295576 - RNA, 32 nt, Homo Sapiens
ggccaucuaugccugccauuuucuuuuugcuu

SEQ ID NO: 295577 - RNA, 32 nt, Homo Sapiens
ugcagccugucggcagagugucuuaacaccag

SEQ ID NO: 295578 - RNA, 32 nt, Homo Sapiens
augauguggugggacagaggaccucaguggcc

SEQ ID NO: 295579 - RNA, 32 nt, Homo Sapiens
guuuuaacuguagauuauauuaacuuaaauag

SEQ ID NO: 295580 - RNA, 32 nt, Homo Sapiens
ggguaccccagcugcugccacuccugcuggag

SEQ ID NO: 295581 - RNA, 32 nt, Homo Sapiens
aggcacccgcacccugccuugcuggaggagau

SEQ ID NO: 295582 - RNA, 32 nt, Homo Sapiens
cccaaccucugccagggcaaucucuaacuuca

SEQ ID NO: 295583 - RNA, 32 nt, Homo Sapiens
uccuuggaaugggccauuaacuaccauuuaug

SEQ ID NO: 295584 - RNA, 26 nt, Homo Sapiens
gaugcccgugcagcugucugagcacc

SEQ ID NO: 295585 - RNA, 32 nt, Homo Sapiens
guuucuuuguauaguacuaacuucugaaaugu

SEQ ID NO: 295586 - RNA, 32 nt, Homo Sapiens
aucagccaagaguuuuccugugguuccagccc

SEQ ID NO: 295587 - RNA, 32 nt, Homo Sapiens
agcuaggaauggggcugaucuggcccccaagc

SEQ ID NO: 295588 - RNA, 32 nt, Homo Sapiens
cacuucccucucuccccuggcccgcaaaguuu

SEQ ID NO: 295589 - RNA, 32 nt, Homo Sapiens
uaauguauuuguaucugugcauauuaucuaca

SEQ ID NO: 295590 - RNA, 32 nt, Homo Sapiens
cuugccggaagcugcgaggagacgaggcccac

SEQ ID NO: 295591 - RNA, 28 nt, Homo Sapiens
augcugcagagcugacauuugaauccag

SEQ ID NO: 295592 - RNA, 32 nt, Homo Sapiens
gcuuugcacagcagcuccugcaacugacccag

SEQ ID NO: 295593 - RNA, 32 nt, Homo Sapiens
acuagcucgacacagucugcaguccaggcgug

SEQ ID NO: 295594 - RNA, 32 nt, Homo Sapiens
acaaaaaaaaaauuauuuuuccagucuaccgu

SEQ ID NO: 295595 - RNA, 32 nt, Homo Sapiens
guuccuauuucccccuccucccagcuccugga

SEQ ID NO: 295596 - RNA, 30 nt, Homo Sapiens
aaagcaugagccaagcucccuacuguguca

SEQ ID NO: 295597 - RNA, 32 nt, Homo Sapiens
guguguggugauccauggggugcugcaggcaa

SEQ ID NO: 295598 - RNA, 32 nt, Homo Sapiens
ccuagugaaaucaaugaaacucuugagucuug

SEQ ID NO: 295599 - RNA, 32 nt, Homo Sapiens
aacuuugugacugucuuugagugaccuagucu

SEQ ID NO: 295600 - RNA, 32 nt, Homo Sapiens
agccccugcccccgaggcuucugugggugcag

SEQ ID NO: 295601 - RNA, 32 nt, Homo Sapiens
ccgggacccccacgggagaucccggccggaga

SEQ ID NO: 295602 - RNA, 32 nt, Homo Sapiens
uuauuaaaagucuuccuucaccaccgagauau

SEQ ID NO: 295603 - RNA, 32 nt, Homo Sapiens
guccaauagucaauuuauucuaagcgaacauu

SEQ ID NO: 295604 - RNA, 32 nt, Homo Sapiens
ucuuagggcaucgcuccuccucacgccacaaa

SEQ ID NO: 295605 - RNA, 32 nt, Homo Sapiens
cuggcauauggacugaaagaaacuaugcuauu

SEQ ID NO: 295606 - RNA, 32 nt, Homo Sapiens
gcgacgcagguguaccucccccugccuuccaa

SEQ ID NO: 295607 - RNA, 32 nt, Homo Sapiens
ccucccagggccuggucuggccccacacggcc

SEQ ID NO: 295608 - RNA, 32 nt, Homo Sapiens
cugaaaagugcugucacgucagcggaaggagg

SEQ ID NO: 295609 - RNA, 32 nt, Homo Sapiens
uccuccuuuucucgcagaugaaaucuuaugau

SEQ ID NO: 295610 - RNA, 32 nt, Homo Sapiens
gacgggggcaccagucaguucucccuugaagu

SEQ ID NO: 295611 - RNA, 32 nt, Homo Sapiens
auucagcaaucccccaucguuacccauuucuu

SEQ ID NO: 295612 - RNA, 32 nt, Homo Sapiens
gaaaagaagaaagcggcugguggaggcgggcc

SEQ ID NO: 295613 - RNA, 32 nt, Homo Sapiens
uauugccauccucuccuauuuaucucugagga

SEQ ID NO: 295614 - RNA, 32 nt, Homo Sapiens
aauaccucacaugguuguuuuuacacaugaaa

SEQ ID NO: 295615 - RNA, 32 nt, Homo Sapiens
gugaugauugagauguucucacugugauuuca

SEQ ID NO: 295616 - RNA, 29 nt, Homo Sapiens
uggagcaucuugauagauggcaaauccag

SEQ ID NO: 295617 - RNA, 32 nt, Homo Sapiens
guuuuccuuugaguccucuggagcugccuucu

SEQ ID NO: 295618 - RNA, 32 nt, Homo Sapiens
cuucuucaaccaugaugaaaacauaauaucug

SEQ ID NO: 295619 - RNA, 32 nt, Homo Sapiens
uacauaugaguuacaguugcuaauccuuuccc

SEQ ID NO: 295620 - RNA, 32 nt, Homo Sapiens
ggcacacucccucuccuuggggugagggacag

SEQ ID NO: 295621 - RNA, 32 nt, Homo Sapiens
gcuguguugcugcccagccgcuccaucauguc

SEQ ID NO: 295622 - RNA, 32 nt, Homo Sapiens
cauauucuccaagucuauucugcuuuaaaaag

SEQ ID NO: 295623 - RNA, 32 nt, Homo Sapiens
acaguuuuauuacaauguaacaaaaguugaaa

SEQ ID NO: 295624 - RNA, 32 nt, Homo Sapiens
acaugugguuguaaaaccuuaacuuucuuucu

SEQ ID NO: 295625 - RNA, 32 nt, Homo Sapiens
ugccuggaggaagcugcuggggugcggggggc

SEQ ID NO: 295626 - RNA, 32 nt, Homo Sapiens
aauuacucaaucuccuaugaccaucuauacau

SEQ ID NO: 295627 - RNA, 32 nt, Homo Sapiens
agcaucugcuggaaguuguuggaccagcaggg

SEQ ID NO: 295628 - RNA, 32 nt, Homo Sapiens
cuuggaugggagcaccuggugccucgggacug

SEQ ID NO: 295629 - RNA, 32 nt, Homo Sapiens
ugugaguggaggugugugugaugugugucagc

SEQ ID NO: 295630 - RNA, 32 nt, Homo Sapiens
uucagggaagcaguguuugaaauagauagcgg

SEQ ID NO: 295631 - RNA, 32 nt, Homo Sapiens
gaccccguuggggacauguugcgcuacccccu

SEQ ID NO: 295632 - RNA, 32 nt, Homo Sapiens
uggcaccuuguacacuugugccguaagaccaa

SEQ ID NO: 295633 - RNA, 32 nt, Homo Sapiens
aagaagucaacacaugggaccuuugugucaca

SEQ ID NO: 295634 - RNA, 32 nt, Homo Sapiens
uuuccucccccauccuucuccuagcuccgcgc

SEQ ID NO: 295635 - RNA, 32 nt, Homo Sapiens
agcggaaaauuucaaaaauguuucaaauuccu

SEQ ID NO: 295636 - RNA, 32 nt, Homo Sapiens
gcaacuugaagaagguaugaaagaaauauugc

SEQ ID NO: 295637 - RNA, 32 nt, Homo Sapiens
uaaaagaacaaaaacuguaaaaaggaaguagu

SEQ ID NO: 295638 - RNA, 32 nt, Homo Sapiens
cagauacaaagauggguuuggccaaugggcau

SEQ ID NO: 295639 - RNA, 32 nt, Homo Sapiens
uccaugcauugcucugucucaguuuuguucac

SEQ ID NO: 295640 - RNA, 32 nt, Homo Sapiens
gagggaaacagaaaggggcagcucuuguggac

SEQ ID NO: 295641 - RNA, 32 nt, Homo Sapiens
guuuuuguugaaauguggcuucaucacuauuc

SEQ ID NO: 295642 - RNA, 30 nt, Homo Sapiens
aaguuuuauaaaagacaaaauguauaucaa

SEQ ID NO: 295643 - RNA, 30 nt, Homo Sapiens
ccauguuggccaggcuguucucgaacuccu

SEQ ID NO: 295644 - RNA, 31 nt, Homo Sapiens
cauucuggcgguggggaaacggccuccuagg

SEQ ID NO: 295645 - RNA, 32 nt, Homo Sapiens
caauaaaaacucacugggucuuucaugucuuu

SEQ ID NO: 295646 - RNA, 29 nt, Homo Sapiens
aguguauucuguuucaggcaagcuuauuc

SEQ ID NO: 295647 - RNA, 32 nt, Homo Sapiens
uuccacucucuuccuugucuucuuucuggaau

SEQ ID NO: 295648 - RNA, 28 nt, Homo Sapiens
aguguuaaagauuaggauugaagucacu

SEQ ID NO: 295649 - RNA, 32 nt, Homo Sapiens
cuccauuguaaauccauagucaucuuuuuaag

SEQ ID NO: 295650 - RNA, 32 nt, Homo Sapiens
ucugggcaccucagcaucuguggacuugagcg

SEQ ID NO: 295651 - RNA, 32 nt, Homo Sapiens
ccacucuuuucucugugcauuuugaaaauuag

SEQ ID NO: 295652 - RNA, 32 nt, Homo Sapiens
cuccuuucugagugcaagcugcacugugagcu

SEQ ID NO: 295653 - RNA, 32 nt, Homo Sapiens
aggauggggacuuggcacccccugcaucacca

SEQ ID NO: 295654 - RNA, 32 nt, Homo Sapiens
cuuucaccaaaauauacucguauuuuuuauau

SEQ ID NO: 295655 - RNA, 32 nt, Homo Sapiens
auuucauggauucaaguuuaucaauguccuuu

SEQ ID NO: 295656 - RNA, 32 nt, Homo Sapiens
guuggggacagaugaaggaagaaugggugaaa

SEQ ID NO: 295657 - RNA, 32 nt, Homo Sapiens
cuguuuuguuaaaauauaucuuuuagugugcu

SEQ ID NO: 295658 - RNA, 32 nt, Homo Sapiens
uaccgcuggaggacuaaagggcccuguggcag

SEQ ID NO: 295659 - RNA, 32 nt, Homo Sapiens
gggugccccccgcucccagguuccccucuggu

SEQ ID NO: 295660 - RNA, 32 nt, Homo Sapiens
auguacacaguuuaaacacaucaauaaauacu

SEQ ID NO: 295661 - RNA, 32 nt, Homo Sapiens
acccacaugccgaaggguggccaggcaggcag

SEQ ID NO: 295662 - RNA, 32 nt, Homo Sapiens
uuuacgguuugugaaaaauguguacuguggaa

SEQ ID NO: 295663 - RNA, 32 nt, Homo Sapiens
aagucacaaccugucaggcugcaccaccucau

SEQ ID NO: 295664 - RNA, 32 nt, Homo Sapiens
cuacuuuccgucugcggugguuccgccgaccc

SEQ ID NO: 295665 - RNA, 32 nt, Homo Sapiens
ggcagggcagacgccgugugucuguuucacgg

SEQ ID NO: 295666 - RNA, 32 nt, Homo Sapiens
ggguuuuggaaccacuauuuucucaucacgac

SEQ ID NO: 295667 - RNA, 32 nt, Homo Sapiens
gucuccucauucaaacaguuauuuuggaaggu

SEQ ID NO: 295668 - RNA, 32 nt, Homo Sapiens
gaauucuugggaagaaggaucaaagugaaaag

SEQ ID NO: 295669 - RNA, 28 nt, Homo Sapiens
aaguuguagauucuuauguguuuuugua

SEQ ID NO: 295670 - RNA, 32 nt, Homo Sapiens
aaaaggcccccuccccgcugccggguggagag

SEQ ID NO: 295671 - RNA, 32 nt, Homo Sapiens
guucugagcaucauccuuuccccuccccucuc

SEQ ID NO: 295672 - RNA, 32 nt, Homo Sapiens
uaagagagaagcuggaccuggguggagacagg

SEQ ID NO: 295673 - RNA, 32 nt, Homo Sapiens
ggcugcggcggccucggagcgcggcggagcca

SEQ ID NO: 295674 - RNA, 32 nt, Homo Sapiens
cccauucgcuguugggucuucugcuagggagg

SEQ ID NO: 295675 - RNA, 32 nt, Homo Sapiens
ggccgcgcuccucagcugggaaggaggugguc

SEQ ID NO: 295676 - RNA, 32 nt, Homo Sapiens
acacucuguauauuucgagcuaccucccacac

SEQ ID NO: 295677 - RNA, 32 nt, Homo Sapiens
uuuuuuuuuuuuuuuuuaaacuauggccaaac

SEQ ID NO: 295678 - RNA, 32 nt, Homo Sapiens
gcuaugggcuaccauggccagggacccucaga

SEQ ID NO: 295679 - RNA, 32 nt, Homo Sapiens
aacagaccccccacccaccuccacagccagga

SEQ ID NO: 295680 - RNA, 32 nt, Homo Sapiens
acaaagaaagacugaggagcuauuccaguuaa

SEQ ID NO: 295681 - RNA, 32 nt, Homo Sapiens
gcuggcugcccccggcggugccagauucgggc

SEQ ID NO: 295682 - RNA, 32 nt, Homo Sapiens
gaauacaauuuaacugcaugcaaaugccuccu

SEQ ID NO: 295683 - RNA, 32 nt, Homo Sapiens
gugccauguauauaagaacauuacaauauauc

SEQ ID NO: 295684 - RNA, 32 nt, Homo Sapiens
ccucuccccaguuccugaaauccugaguguug

SEQ ID NO: 295685 - RNA, 32 nt, Homo Sapiens
gagaguggucccugcccuuccgcgccucgagc

SEQ ID NO: 295686 - RNA, 32 nt, Homo Sapiens
ucaaaauuacaaugcauuuauggugucugggg

SEQ ID NO: 295687 - RNA, 32 nt, Homo Sapiens
cuaaaauaauuucccuguauuaugcuucaugg

SEQ ID NO: 295688 - RNA, 32 nt, Homo Sapiens
acugcauuuuaaaauuguaauuaugaaauacc

SEQ ID NO: 295689 - RNA, 32 nt, Homo Sapiens
aaagaagcuggcagaaauaaaaaugaaggggu

SEQ ID NO: 295690 - RNA, 32 nt, Homo Sapiens
ccccuucaucaagcuaacuaccucugcucuuu

SEQ ID NO: 295691 - RNA, 32 nt, Homo Sapiens
cgccgccggccgccugggaccuugcggugagg

SEQ ID NO: 295692 - RNA, 32 nt, Homo Sapiens
gccuuguugugaugaauuaacucacuguuagg

SEQ ID NO: 295693 - RNA, 32 nt, Homo Sapiens
auaguuucuugccacaaauuuuguuuuuucaa

SEQ ID NO: 295694 - RNA, 32 nt, Homo Sapiens
aacaaagagcaugagucuuuuuccaagaaaac

SEQ ID NO: 295695 - RNA, 32 nt, Homo Sapiens
ggggggcuucugugguugcucccacccugggu

SEQ ID NO: 295696 - RNA, 32 nt, Homo Sapiens
auacuuugcugaauauuguagauuguaggcaa

SEQ ID NO: 295697 - RNA, 32 nt, Homo Sapiens
aagcagcagcaguucauuaucuaguaguggag

SEQ ID NO: 295698 - RNA, 32 nt, Homo Sapiens
agaucuguauaaauaagagcaugauuugaaaa

SEQ ID NO: 295699 - RNA, 32 nt, Homo Sapiens
gagggcgcuggcucugcagaucagaacaacgg

SEQ ID NO: 295700 - RNA, 32 nt, Homo Sapiens
aacaauacaaauauuuuuuuuaaaucauggca

SEQ ID NO: 295701 - RNA, 32 nt, Homo Sapiens
gcuacauauaauuuuauagacauaauaaagaa

SEQ ID NO: 295702 - RNA, 32 nt, Homo Sapiens
agaagcgguuaucuuucuuuuuuacuuugcac

SEQ ID NO: 295703 - RNA, 32 nt, Homo Sapiens
uugcagauauauauuuuuuaaauggcacuaug

SEQ ID NO: 295704 - RNA, 32 nt, Homo Sapiens
cagcgucuuauuuuaccuuguucucccacuuc

SEQ ID NO: 295705 - RNA, 32 nt, Homo Sapiens
auugcaaaaguacuagaugguguauaacucua

SEQ ID NO: 295706 - RNA, 32 nt, Homo Sapiens
aagugaaugugaaaccacagauauuucauuaa

SEQ ID NO: 295707 - RNA, 31 nt, Homo Sapiens
gacgggguuucacuguguuagccaggacggc

SEQ ID NO: 295708 - RNA, 32 nt, Homo Sapiens
caucuguaaccccagcacuuugggaggcugag

SEQ ID NO: 295709 - RNA, 32 nt, Homo Sapiens
cugauauuuccacaauguauauacacuauccu

SEQ ID NO: 295710 - RNA, 32 nt, Homo Sapiens
aguugaagagucgggauagaugagaugaccuu

SEQ ID NO: 295711 - RNA, 32 nt, Homo Sapiens
uccagcuccagaagcuguuggaguugaggauu

SEQ ID NO: 295712 - RNA, 32 nt, Homo Sapiens
gugcaguggcucagucucggcuuacugcaagc

SEQ ID NO: 295713 - RNA, 32 nt, Homo Sapiens
gucuguuacuuaaaauuuuguggagugacaua

SEQ ID NO: 295714 - RNA, 32 nt, Homo Sapiens
ccuccaguauuugguauacagaaggugaaaag

SEQ ID NO: 295715 - RNA, 32 nt, Homo Sapiens
uucuaaaguauuuauguauuaaccugaccaua

SEQ ID NO: 295716 - RNA, 32 nt, Homo Sapiens
auggaucauacacaauagguuuuuaaaaauua

SEQ ID NO: 295717 - RNA, 32 nt, Homo Sapiens
cguagagguacgcuuuuuuccucaggcuuaaa

SEQ ID NO: 295718 - RNA, 32 nt, Homo Sapiens
ugcacuaaauuaacaagcauguuaguugcugg

SEQ ID NO: 295719 - RNA, 32 nt, Homo Sapiens
ccacugucccaacuccucuccucuuagagaaa

SEQ ID NO: 295720 - RNA, 32 nt, Homo Sapiens
gguugagcagcacugagagagccccgauucau

SEQ ID NO: 295721 - RNA, 32 nt, Homo Sapiens
aaaguuacaagaagagggggccaggcacagug

SEQ ID NO: 295722 - RNA, 32 nt, Homo Sapiens
gaacuuuccuuucauaucaucuucccaauguu

SEQ ID NO: 295723 - RNA, 32 nt, Homo Sapiens
cugaaguaugugguaauuuuuauagaaucauu

SEQ ID NO: 295724 - RNA, 32 nt, Homo Sapiens
guggggaggucccagaggugggaggcuggcau

SEQ ID NO: 295725 - RNA, 30 nt, Homo Sapiens
uagagucgaagcagcaugcaaaaaauaaua

SEQ ID NO: 295726 - RNA, 32 nt, Homo Sapiens
gccaaguacgaagcagcagccaucgcgggcug

SEQ ID NO: 295727 - RNA, 32 nt, Homo Sapiens
ugcguuaaggauuuauacauauagaguaaaag

SEQ ID NO: 295728 - RNA, 32 nt, Homo Sapiens
uuucaacaaauuacaguuuuauuguuaaaaca

SEQ ID NO: 295729 - RNA, 32 nt, Homo Sapiens
guaagguuuuuguagugauuuuuaugccaccu

SEQ ID NO: 295730 - RNA, 32 nt, Homo Sapiens
cccugugccuggaagcggggugguguccaggg

SEQ ID NO: 295731 - RNA, 32 nt, Homo Sapiens
cuucaaauuuuucccucuaauaggaaacagua

SEQ ID NO: 295732 - RNA, 32 nt, Homo Sapiens
cccucccucagcccccucccccaucucagucc

SEQ ID NO: 295733 - RNA, 32 nt, Homo Sapiens
aggcaacauuuucuugagauaauuacccaagu

SEQ ID NO: 295734 - RNA, 32 nt, Homo Sapiens
aggagaauaugauaaaacacugcccucuugug

SEQ ID NO: 295735 - RNA, 32 nt, Homo Sapiens
ggcuuacucagagauuugauugcucaacaugc

SEQ ID NO: 295736 - RNA, 32 nt, Homo Sapiens
gacguggggcacugucagcaucagccucauaa

SEQ ID NO: 295737 - RNA, 32 nt, Homo Sapiens
agauaacaagauaccaaucuuauauuguauuu

SEQ ID NO: 295738 - RNA, 32 nt, Homo Sapiens
uuccgcgcggcggaagagcgcgcgccagcuuc

SEQ ID NO: 295739 - RNA, 32 nt, Homo Sapiens
gaagccaggagcggggucugcagcagggcagu

SEQ ID NO: 295740 - RNA, 32 nt, Homo Sapiens
uuccuggcccuccuugcccucaugucucgccu

SEQ ID NO: 295741 - RNA, 32 nt, Homo Sapiens
acggccugcggugugacacccagccccugcca

SEQ ID NO: 295742 - RNA, 32 nt, Homo Sapiens
cccgggcggccagcugggcucggagcggaacg

SEQ ID NO: 295743 - RNA, 32 nt, Homo Sapiens
cuaagccaugaaaccagagacaaaaucucuau

SEQ ID NO: 295744 - RNA, 32 nt, Homo Sapiens
uuuccuuuuuauuaugugccaaucuucuucug

SEQ ID NO: 295745 - RNA, 32 nt, Homo Sapiens
gcuccucucugugccgggggugggugauccag

SEQ ID NO: 295746 - RNA, 32 nt, Homo Sapiens
gagaagguggagaggaggaugggccucaggag

SEQ ID NO: 295747 - RNA, 32 nt, Homo Sapiens
aucugggauuuuugggucagaauuuuaaauuc

SEQ ID NO: 295748 - RNA, 32 nt, Homo Sapiens
guguuucaucugccuaggccuacucauuauuu

SEQ ID NO: 295749 - RNA, 32 nt, Homo Sapiens
gcugcgaggugcucaccucacagagucuggag

SEQ ID NO: 295750 - RNA, 32 nt, Homo Sapiens
uggaaaaggugauggugcuggggugugaguug

SEQ ID NO: 295751 - RNA, 32 nt, Homo Sapiens
aaguauauuuaacgucgguaguucugcuuuau

SEQ ID NO: 295752 - RNA, 32 nt, Homo Sapiens
gagggggccccgggaaggggccuccccuacau

SEQ ID NO: 295753 - RNA, 32 nt, Homo Sapiens
aaacaguguacaaaaucauuaaacugggccgg

SEQ ID NO: 295754 - RNA, 32 nt, Homo Sapiens
ggaggcuggugaaggggagcggggaggggcag

SEQ ID NO: 295755 - RNA, 32 nt, Homo Sapiens
uagcuuuuucuuucuggaguuuaaguacagug

SEQ ID NO: 295756 - RNA, 32 nt, Homo Sapiens
auugucauuuauaguccaauuuuuuaucuuaa

SEQ ID NO: 295757 - RNA, 32 nt, Homo Sapiens
aggcccgccccuccccucgugauggucauugu

SEQ ID NO: 295758 - RNA, 32 nt, Homo Sapiens
ggagccccgucuccaggaaaaggagagggguu

SEQ ID NO: 295759 - RNA, 32 nt, Homo Sapiens
caacgagagccuucgcugacuccaccgaagag

SEQ ID NO: 295760 - RNA, 32 nt, Homo Sapiens
gcugaagugggaagauccaggaguugaagacc

SEQ ID NO: 295761 - RNA, 32 nt, Homo Sapiens
ucagcugccccucccugccaucagcagguggg

SEQ ID NO: 295762 - RNA, 32 nt, Homo Sapiens
auucaugccccccacacccccucaggcccugu

SEQ ID NO: 295763 - RNA, 32 nt, Homo Sapiens
gaacuagcuuucacuuggcaauuacuacaugc

SEQ ID NO: 295764 - RNA, 32 nt, Homo Sapiens
gccugggaugagccccggcagcgccuuggccc

SEQ ID NO: 295765 - RNA, 32 nt, Homo Sapiens
aagacacgucacgcauccuuucugggguagua

SEQ ID NO: 295766 - RNA, 32 nt, Homo Sapiens
gucucgcccccgaaacaugacucgcgauuuca

SEQ ID NO: 295767 - RNA, 32 nt, Homo Sapiens
cuggucaccuuacgcaagagccaggcugaaac

SEQ ID NO: 295768 - RNA, 32 nt, Homo Sapiens
gcugacccuccuccccgggguggcguggggcu

SEQ ID NO: 295769 - RNA, 32 nt, Homo Sapiens
ggaugaccugauucaccuccagcccagggaau

SEQ ID NO: 295770 - RNA, 32 nt, Homo Sapiens
aaugguaaacauuuuuauucugggauucgguc

SEQ ID NO: 295771 - RNA, 32 nt, Homo Sapiens
gugugaccaguuuugauauuuauuuaugcuaa

SEQ ID NO: 295772 - RNA, 32 nt, Homo Sapiens
accggucgcucgcgcgcagcccggcgucgccc

SEQ ID NO: 295773 - RNA, 32 nt, Homo Sapiens
guaguuuagugccugggagaauccauuacuga

SEQ ID NO: 295774 - RNA, 32 nt, Homo Sapiens
acaccuauaugcgacacaaaaugagaccuuuc

SEQ ID NO: 295775 - RNA, 32 nt, Homo Sapiens
uaucaaauaaagugauuauuuuuuacaacccu

SEQ ID NO: 295776 - RNA, 32 nt, Homo Sapiens
cugcaagugcccgcccugccccugccccaacc

SEQ ID NO: 295777 - RNA, 32 nt, Homo Sapiens
ccccauuccauucauacagacacacacguacg

SEQ ID NO: 295778 - RNA, 32 nt, Homo Sapiens
gacuuagcuuucacuacacuacaggauaugau

SEQ ID NO: 295779 - RNA, 32 nt, Homo Sapiens
auuacugguuuugaaucuuaaccaaaucagau

SEQ ID NO: 295780 - RNA, 32 nt, Homo Sapiens
cacaauccugagacuuucccccgggaggcaca

SEQ ID NO: 295781 - RNA, 32 nt, Homo Sapiens
gaucucugugacuuaaaucuggccuuucuggc

SEQ ID NO: 295782 - RNA, 32 nt, Homo Sapiens
gaaccucaaacuaggaggaaaagacagagccu

SEQ ID NO: 295783 - RNA, 32 nt, Homo Sapiens
accccaaauuccuaguauggcaucugccccuc

SEQ ID NO: 295784 - RNA, 32 nt, Homo Sapiens
uaagaaauauauauuugaucuuccuaucuagu

SEQ ID NO: 295785 - RNA, 32 nt, Homo Sapiens
aguguguuuuuucuucguucuguaauaaacag

SEQ ID NO: 295786 - RNA, 32 nt, Homo Sapiens
cucaugagacuuauucacuaucaugagaacag

SEQ ID NO: 295787 - RNA, 32 nt, Homo Sapiens
cgcacgugggccgcggcgcuccgaccuccgcu

SEQ ID NO: 295788 - RNA, 32 nt, Homo Sapiens
cuauuaugaagaugaacaguuuuuagaguauc

SEQ ID NO: 295789 - RNA, 32 nt, Homo Sapiens
ggacgccggccgcgggcugcuuucgucggcuc

SEQ ID NO: 295790 - RNA, 31 nt, Homo Sapiens
guguaaucauauuggugcuauuccuuggaag

SEQ ID NO: 295791 - RNA, 32 nt, Homo Sapiens
guuccaaguucgggcucuggcagcccagccgc

SEQ ID NO: 295792 - RNA, 32 nt, Homo Sapiens
cagcccugccacugccccggcgugcuccaugg

SEQ ID NO: 295793 - RNA, 32 nt, Homo Sapiens
gagaauugcuuggaccuaggagguggagguug

SEQ ID NO: 295794 - RNA, 32 nt, Homo Sapiens
ucugugggcaccgaggcccaggagcuucaaaa

SEQ ID NO: 295795 - RNA, 32 nt, Homo Sapiens
aaauuggcaaaccccuuuacauauagcugcug

SEQ ID NO: 295796 - RNA, 32 nt, Homo Sapiens
gugguccaccacccucaggaugagguccaggu

SEQ ID NO: 295797 - RNA, 32 nt, Homo Sapiens
ccgggggaaggggguuggaacugcaaacgcag

SEQ ID NO: 295798 - RNA, 30 nt, Homo Sapiens
caaaggggaggugggaaaagaaauguagug

SEQ ID NO: 295799 - RNA, 32 nt, Homo Sapiens
ucaagagauaauguacaaugucagaaaaggga

SEQ ID NO: 295800 - RNA, 32 nt, Homo Sapiens
augacuaaaaggaaggggauaugcuaaggcuc

SEQ ID NO: 295801 - RNA, 32 nt, Homo Sapiens
ugccauguuuugauaaaguacugaaucaccac

SEQ ID NO: 295802 - RNA, 32 nt, Homo Sapiens
uuuuuuucuuuuucuuuuucuuucuuuguuuc

SEQ ID NO: 295803 - RNA, 32 nt, Homo Sapiens
uuaagccaaaagacaaaaaaaauuuuacuacu

SEQ ID NO: 295804 - RNA, 32 nt, Homo Sapiens
auuacaccaaauaaauauauuuuuguacaaaa

SEQ ID NO: 295805 - RNA, 31 nt, Homo Sapiens
cgggcacagaagaaaaagaauuauuccauca

SEQ ID NO: 295806 - RNA, 32 nt, Homo Sapiens
aauccuggaaaacccuguaccccuccuccuca

SEQ ID NO: 295807 - RNA, 30 nt, Homo Sapiens
cgggccguccucggcggcagugucaggagc

SEQ ID NO: 295808 - RNA, 30 nt, Homo Sapiens
uaguaagagaagcucuuuguaucugaacau

SEQ ID NO: 295809 - RNA, 32 nt, Homo Sapiens
aaggcagccgggcgcaguggcucacgccugua

SEQ ID NO: 295810 - RNA, 32 nt, Homo Sapiens
ccaccccugaggcuugcccagcccccaggccc

SEQ ID NO: 295811 - RNA, 32 nt, Homo Sapiens
gcauuuugagucaaauaaaugauccugacuga

SEQ ID NO: 295812 - RNA, 32 nt, Homo Sapiens
aucacugguccagguuaauguacaaaauuuuc

SEQ ID NO: 295813 - RNA, 32 nt, Homo Sapiens
guugauucaaaagaaagugauucuauuuuuua

SEQ ID NO: 295814 - RNA, 32 nt, Homo Sapiens
uuauugagaaugagaagaacuuuagaugauga

SEQ ID NO: 295815 - RNA, 32 nt, Homo Sapiens
ggguggugguggcugugguaauguauguacag

SEQ ID NO: 295816 - RNA, 32 nt, Homo Sapiens
ggaucuuacugaaagcacccuggggagauuga

SEQ ID NO: 295817 - RNA, 32 nt, Homo Sapiens
ggccaggguucaagaagugcugucagaaauca

SEQ ID NO: 295818 - RNA, 32 nt, Homo Sapiens
cuuaacuggcccagcccucucugcuucgugau

SEQ ID NO: 295819 - RNA, 32 nt, Homo Sapiens
caccaugcuggccaugcuggucucgaacuccu

SEQ ID NO: 295820 - RNA, 32 nt, Homo Sapiens
aaaauuaucuucugcuguuuguuuuccauuuc

SEQ ID NO: 295821 - RNA, 32 nt, Homo Sapiens
gacggaacuacaacauguaccauccacgagaa

SEQ ID NO: 295822 - RNA, 32 nt, Homo Sapiens
agaggggccaauaaacaugaaaaaaucccagc

SEQ ID NO: 295823 - RNA, 32 nt, Homo Sapiens
ugggagaacaaaaagcugauguauagcccugu

SEQ ID NO: 295824 - RNA, 32 nt, Homo Sapiens
cuaagaaccguuuggaaauaaaucacauagag

SEQ ID NO: 295825 - RNA, 32 nt, Homo Sapiens
gaagaagcagcguuagggacuuugggcuguga

SEQ ID NO: 295826 - RNA, 32 nt, Homo Sapiens
gaucaaugagagcccugagcuucuuucccugc

SEQ ID NO: 295827 - RNA, 32 nt, Homo Sapiens
ccaccuccuggcaccucccuccccuggggccg

SEQ ID NO: 295828 - RNA, 32 nt, Homo Sapiens
ugaaguuguaaaaagaaaaggaaugaaauaac

SEQ ID NO: 295829 - RNA, 32 nt, Homo Sapiens
uaaggaagugacugcagaaagcucacagcgac

SEQ ID NO: 295830 - RNA, 32 nt, Homo Sapiens
cuuaggaaccuggccugggccaggggccugac

SEQ ID NO: 295831 - RNA, 32 nt, Homo Sapiens
aacuggaccccggccagcgcccaccccagccu

SEQ ID NO: 295832 - RNA, 32 nt, Homo Sapiens
acuggguagcagagccgggaagguggguggcc

SEQ ID NO: 295833 - RNA, 32 nt, Homo Sapiens
aggaagggaggcccaugguggagcacucacuc

SEQ ID NO: 295834 - RNA, 32 nt, Homo Sapiens
uacagauaauuucacuuuccucuuccaggggc

SEQ ID NO: 295835 - RNA, 32 nt, Homo Sapiens
ugaacuguguuuaugaaaauuuucugguuugc

SEQ ID NO: 295836 - RNA, 32 nt, Homo Sapiens
gucccagcugucucacguuguuuauucugcgu

SEQ ID NO: 295837 - RNA, 32 nt, Homo Sapiens
ucacugaagcuacaggaauccaagaaccagug

SEQ ID NO: 295838 - RNA, 32 nt, Homo Sapiens
uuuuucauuguggucuuaacacuuuuauauaa

SEQ ID NO: 295839 - RNA, 32 nt, Homo Sapiens
uuuaaugaaacuuuucugaaaaggaauucuga

SEQ ID NO: 295840 - RNA, 32 nt, Homo Sapiens
auuucuagggaagaaggagagugcuuuguuaa

SEQ ID NO: 295841 - RNA, 32 nt, Homo Sapiens
uggggaauagcaacucagucccugcccuugug

SEQ ID NO: 295842 - RNA, 32 nt, Homo Sapiens
aaaccaugcuuccuuuggauagacuucuccag

SEQ ID NO: 295843 - RNA, 32 nt, Homo Sapiens
ugcaaaggacagugauuagacacgaaguggcu

SEQ ID NO: 295844 - RNA, 32 nt, Homo Sapiens
ucccacuuucaacaagagccucugccauccac

SEQ ID NO: 295845 - RNA, 32 nt, Homo Sapiens
uggagcggaggacccgagcggcugaggagaga

SEQ ID NO: 295846 - RNA, 32 nt, Homo Sapiens
agcccccaggccaucaucuaugcugauggagg

SEQ ID NO: 295847 - RNA, 32 nt, Homo Sapiens
agaccaugugccgaggucgugugcuaggaagc

SEQ ID NO: 295848 - RNA, 32 nt, Homo Sapiens
uucuuugaaacacauaaccaaaaugguuugau

SEQ ID NO: 295849 - RNA, 32 nt, Homo Sapiens
aggcggggguggacagggaggcagcuugugaa

SEQ ID NO: 295850 - RNA, 32 nt, Homo Sapiens
acugaucagaggugaagggacagagagaggag

SEQ ID NO: 295851 - RNA, 29 nt, Homo Sapiens
guaaggucauauggauuggcucuaguuca

SEQ ID NO: 295852 - RNA, 32 nt, Homo Sapiens
acagaugagaauacugaggccuggacagguga

SEQ ID NO: 295853 - RNA, 32 nt, Homo Sapiens
cccaccccgccuucagagcccucccccuugga

SEQ ID NO: 295854 - RNA, 32 nt, Homo Sapiens
aggcaaacuuguguuuauccaaaccugauccc

SEQ ID NO: 295855 - RNA, 32 nt, Homo Sapiens
ggcagcaauuuaaauguuaugacuauguaaac

SEQ ID NO: 295856 - RNA, 32 nt, Homo Sapiens
uuuucuuuucuuuuuuaaaaauauguggcugu

SEQ ID NO: 295857 - RNA, 29 nt, Homo Sapiens
cuuuggucauaugagaagcaggugcgcag

SEQ ID NO: 295858 - RNA, 32 nt, Homo Sapiens
cgccacagccccgcgccgcgcagggucuugcc

SEQ ID NO: 295859 - RNA, 32 nt, Homo Sapiens
cuaguaucugguuuugcugaucucauuuugga

SEQ ID NO: 295860 - RNA, 32 nt, Homo Sapiens
uaccccauuggaggcuuuuaauuuuauuugua

SEQ ID NO: 295861 - RNA, 30 nt, Homo Sapiens
gaccuggagaagcugcgggcgucgggcgcg

SEQ ID NO: 295862 - RNA, 32 nt, Homo Sapiens
uuuugcuuaugguagugggcuaacauaacagc

SEQ ID NO: 295863 - RNA, 32 nt, Homo Sapiens
ccucccccaaccccaugacaggccccggugug

SEQ ID NO: 295864 - RNA, 32 nt, Homo Sapiens
ugaggagcgguccuuccacaccagccgcaacc

SEQ ID NO: 295865 - RNA, 32 nt, Homo Sapiens
ucaaggucuggaggagacagagggauccaucc

SEQ ID NO: 295866 - RNA, 32 nt, Homo Sapiens
uguucagcccuuacacugccaagccauccuuu

SEQ ID NO: 295867 - RNA, 32 nt, Homo Sapiens
gcagugcacuccuggagccaagagggaagggc

SEQ ID NO: 295868 - RNA, 32 nt, Homo Sapiens
auggauucuuugagagccaggguagaucauau

SEQ ID NO: 295869 - RNA, 32 nt, Homo Sapiens
ucuuaguuuccacaguaagguuugccugugua

SEQ ID NO: 295870 - RNA, 29 nt, Homo Sapiens
uucugaauagugauaucacauaaaaauac

SEQ ID NO: 295871 - RNA, 32 nt, Homo Sapiens
gcagugcuuugucccauugcugugauuuuuag

SEQ ID NO: 295872 - RNA, 32 nt, Homo Sapiens
cagccauagguacagguauugcaggugcagcc

SEQ ID NO: 295873 - RNA, 32 nt, Homo Sapiens
ugguaauaugugaacuaacagaaaaaaauagc

SEQ ID NO: 295874 - RNA, 32 nt, Homo Sapiens
ggucgucugcccguggacuuggccgaggagcg

SEQ ID NO: 295875 - RNA, 32 nt, Homo Sapiens
gcgacucagcggggugucguucggccggcgug

SEQ ID NO: 295876 - RNA, 32 nt, Homo Sapiens
gcagccucgaggcgcgcacccccgcccggcag

SEQ ID NO: 295877 - RNA, 32 nt, Homo Sapiens
aagaggaagaacuauuuggggucuguagguaa

SEQ ID NO: 295878 - RNA, 32 nt, Homo Sapiens
ucggagcacggugacggcgccaugucccuaau

SEQ ID NO: 295879 - RNA, 31 nt, Homo Sapiens
ccgugggguaucugccugcccccugucacug

SEQ ID NO: 295880 - RNA, 32 nt, Homo Sapiens
agcuggaaaaggagaagugaaggaugaccgcc

SEQ ID NO: 295881 - RNA, 32 nt, Homo Sapiens
ucuguuacuaauugagcccuagcugggugcca

SEQ ID NO: 295882 - RNA, 32 nt, Homo Sapiens
cacaaaucuucaguauuuucuccacuucauuu

SEQ ID NO: 295883 - RNA, 32 nt, Homo Sapiens
guaguuuuccuucuuuacaauguauuaaacuc

SEQ ID NO: 295884 - RNA, 32 nt, Homo Sapiens
aguccccucacagauggauaaaugaggcugau

SEQ ID NO: 295885 - RNA, 32 nt, Homo Sapiens
uauuggauaauuauugguaauuuuauggccug

SEQ ID NO: 295886 - RNA, 32 nt, Homo Sapiens
caagauguggaggugaagacagugauauugau

SEQ ID NO: 295887 - RNA, 32 nt, Homo Sapiens
guacauuucuuuucaaaaagugccaaauuugu

SEQ ID NO: 295888 - RNA, 32 nt, Homo Sapiens
cuaacucccagggcaucaaagaagauaaaagc

SEQ ID NO: 295889 - RNA, 30 nt, Homo Sapiens
ggagaggacggcccugccugccucuuggcc

SEQ ID NO: 295890 - RNA, 32 nt, Homo Sapiens
uaaaaucuuccauuuuaaaugaagcuauccaa

SEQ ID NO: 295891 - RNA, 32 nt, Homo Sapiens
uguuguuaguuugugcugagaauggucguccg

SEQ ID NO: 295892 - RNA, 32 nt, Homo Sapiens
acuuuuuaaacuuguuagaaaucccuggaggc

SEQ ID NO: 295893 - RNA, 32 nt, Homo Sapiens
ccccgagaugagauccggaagcugauggaaag

SEQ ID NO: 295894 - RNA, 32 nt, Homo Sapiens
gacauucuuuuccugcuucuccugauugaacu

SEQ ID NO: 295895 - RNA, 32 nt, Homo Sapiens
augggagcauuggaccagagcauuccgaggcc

SEQ ID NO: 295896 - RNA, 32 nt, Homo Sapiens
uucaauccugauuagugucuccagucaagcuc

SEQ ID NO: 295897 - RNA, 32 nt, Homo Sapiens
acccuucaacugagcaguuucacuaguggaaa

SEQ ID NO: 295898 - RNA, 32 nt, Homo Sapiens
acacuggcugguggagaagccaucuagcauau

SEQ ID NO: 295899 - RNA, 32 nt, Homo Sapiens
auucuuccacccggcaccggcuccgcaaugaa

SEQ ID NO: 295900 - RNA, 32 nt, Homo Sapiens
aagaagccuggggagucggggagguagggaga

SEQ ID NO: 295901 - RNA, 32 nt, Homo Sapiens
ugugcacauauuuuuguaaaauuauacauaaa

SEQ ID NO: 295902 - RNA, 32 nt, Homo Sapiens
agcaaguuaacacucuaagagaauuauuuuga

SEQ ID NO: 295903 - RNA, 32 nt, Homo Sapiens
caggucaaaguaaaaugugaguugacagcuca

SEQ ID NO: 295904 - RNA, 32 nt, Homo Sapiens
acagaaaucagugccaagcaugcgauauucag

SEQ ID NO: 295905 - RNA, 32 nt, Homo Sapiens
cugcauagagcucuccuugaaaacagaggggu

SEQ ID NO: 295906 - RNA, 32 nt, Homo Sapiens
cuugccauguccgcgccggagccccgguccgc

SEQ ID NO: 295907 - RNA, 32 nt, Homo Sapiens
gacccccucccccggcuccccccaucagugca

SEQ ID NO: 295908 - RNA, 32 nt, Homo Sapiens
cuagcuggccuggcccuguugagucugcacag

SEQ ID NO: 295909 - RNA, 32 nt, Homo Sapiens
aaagugaagaaugaaaaauauguaagagucug

SEQ ID NO: 295910 - RNA, 32 nt, Homo Sapiens
cccauaacuaaauaugcucuguguaaaguccu

SEQ ID NO: 295911 - RNA, 32 nt, Homo Sapiens
cuaucauucgucuucuuuuccaaacuacacau

SEQ ID NO: 295912 - RNA, 31 nt, Homo Sapiens
uauuuuccaaagaaaagaucaauauuggaac

SEQ ID NO: 295913 - RNA, 32 nt, Homo Sapiens
uagaaaaagaaaaaaggcuggguuuacuauug

SEQ ID NO: 295914 - RNA, 32 nt, Homo Sapiens
gggccggacuccccggcguucccuucaccaca

SEQ ID NO: 295915 - RNA, 31 nt, Homo Sapiens
aacaggcagcucagccaacccgcuggguagc

SEQ ID NO: 295916 - RNA, 32 nt, Homo Sapiens
gucuucagaugagaauggagucugaauggccu

SEQ ID NO: 295917 - RNA, 32 nt, Homo Sapiens
cuccgccgccagcgcguggucccggcccccuc

SEQ ID NO: 295918 - RNA, 32 nt, Homo Sapiens
ugccgggcugccuuugccccagcccccagcaa

SEQ ID NO: 295919 - RNA, 32 nt, Homo Sapiens
ugaguuccugagcgaguggacccggcagcggg

SEQ ID NO: 295920 - RNA, 32 nt, Homo Sapiens
uugcuauuugauguggaaauaacuaauaacuu

SEQ ID NO: 295921 - RNA, 32 nt, Homo Sapiens
aagacaauuucuucacuugagcccuuaaaaaa

SEQ ID NO: 295922 - RNA, 32 nt, Homo Sapiens
ccaccugacaauggcagcuagacuggagugag

SEQ ID NO: 295923 - RNA, 32 nt, Homo Sapiens
auguugcuuucagauccuucaauuuuaaguaa

SEQ ID NO: 295924 - RNA, 32 nt, Homo Sapiens
auauccuccuucuccuuaaccagcuucucagc

SEQ ID NO: 295925 - RNA, 32 nt, Homo Sapiens
ccgcucugcccacggcuguguacgacaucaga

SEQ ID NO: 295926 - RNA, 32 nt, Homo Sapiens
acccgggaggugaaggaugcagugagccaaga

SEQ ID NO: 295927 - RNA, 32 nt, Homo Sapiens
gcccccaagcaccugcgcgucccggcccggcc

SEQ ID NO: 295928 - RNA, 32 nt, Homo Sapiens
uauuucuuuaaucaauguguucucuucgguga

SEQ ID NO: 295929 - RNA, 32 nt, Homo Sapiens
gugaauuucuucagacuuccaugcagugucug

SEQ ID NO: 295930 - RNA, 32 nt, Homo Sapiens
ucccuacugguuuauucacuuuggaggcgccu

SEQ ID NO: 295931 - RNA, 32 nt, Homo Sapiens
agcggaggagccuggcggccacccccucuucc

SEQ ID NO: 295932 - RNA, 32 nt, Homo Sapiens
aggcucuggggaaggggggucuguagacacau

SEQ ID NO: 295933 - RNA, 32 nt, Homo Sapiens
cgugcccggcgcccggcgagaggucuucgaga

SEQ ID NO: 295934 - RNA, 32 nt, Homo Sapiens
gcuacagagaguuugucacugaagauuaagca

SEQ ID NO: 295935 - RNA, 32 nt, Homo Sapiens
aaagagcccccuccuccccucucuccugggcc

SEQ ID NO: 295936 - RNA, 32 nt, Homo Sapiens
gaucacuuuaggccugguguguucaagaccag

SEQ ID NO: 295937 - RNA, 32 nt, Homo Sapiens
augucagauaaggcaacugggcuggucuuacu

SEQ ID NO: 295938 - RNA, 32 nt, Homo Sapiens
uagaacacagaaagccuaucaaagaccuugug

SEQ ID NO: 295939 - RNA, 32 nt, Homo Sapiens
aagauuuuucuuuuuccacaauguaaauaacu

SEQ ID NO: 295940 - RNA, 32 nt, Homo Sapiens
gucugcggcagugcugggguggcaccaggugg

SEQ ID NO: 295941 - RNA, 32 nt, Homo Sapiens
cccaucucggccggcccggagcucgcccacgc

SEQ ID NO: 295942 - RNA, 32 nt, Homo Sapiens
ccauauugucacuccuucuacuugcuuuaaaa

SEQ ID NO: 295943 - RNA, 32 nt, Homo Sapiens
auggugcuguagggccaggcucccucugaggg

SEQ ID NO: 295944 - RNA, 32 nt, Homo Sapiens
ggcgcgaagcccggguggcccgagggcgcgau

SEQ ID NO: 295945 - RNA, 32 nt, Homo Sapiens
aaauugucuuuauuacuuuguacacugcuuuc

SEQ ID NO: 295946 - RNA, 32 nt, Homo Sapiens
uuuggaagucugcuuaauaaaagcagaaauuc

SEQ ID NO: 295947 - RNA, 32 nt, Homo Sapiens
auuuuacauuuuaucaggauaauuaucugugg

SEQ ID NO: 295948 - RNA, 32 nt, Homo Sapiens
uggcucuuguguguggccccaguuucuagcgg

SEQ ID NO: 295949 - RNA, 32 nt, Homo Sapiens
gagcagagggaccucccccagcucucuuagca

SEQ ID NO: 295950 - RNA, 32 nt, Homo Sapiens
cuauuucuucagccccuucucuggcccagacc

SEQ ID NO: 295951 - RNA, 32 nt, Homo Sapiens
uacaggcacgcaccaccacaccuggcuaauuu

SEQ ID NO: 295952 - RNA, 32 nt, Homo Sapiens
caguuagaauuaacauuaauuacaauuaacaa

SEQ ID NO: 295953 - RNA, 32 nt, Homo Sapiens
ucacucgugugaggcugacaugcucacacauu

SEQ ID NO: 295954 - RNA, 32 nt, Homo Sapiens
aaccuggcgaaaagauacuuugaaauguaaca

SEQ ID NO: 295955 - RNA, 32 nt, Homo Sapiens
gcuuuuccuccuuuuuaccaucuacuuauguc

SEQ ID NO: 295956 - RNA, 32 nt, Homo Sapiens
gcagucaacuccaggguuugggcuugauuccu

SEQ ID NO: 295957 - RNA, 32 nt, Homo Sapiens
uuugggcccagccccagggcgcaaggccgcuu

SEQ ID NO: 295958 - RNA, 32 nt, Homo Sapiens
cuccaccuccaagcucagacagggcccaggcu

SEQ ID NO: 295959 - RNA, 32 nt, Homo Sapiens
aaagucccacuuugauuauugcuuauuugaaa

SEQ ID NO: 295960 - RNA, 32 nt, Homo Sapiens
cuaucuucuagaauauaugcaagaugcuagga

SEQ ID NO: 295961 - RNA, 30 nt, Homo Sapiens
cagcuccaugcucgcuacgucuugaaccuu

SEQ ID NO: 295962 - RNA, 32 nt, Homo Sapiens
ccuugcuucucgucugggacccugugccccuc

SEQ ID NO: 295963 - RNA, 32 nt, Homo Sapiens
uuagaaaauauuuggcuguagucucaaauuuu

SEQ ID NO: 295964 - RNA, 32 nt, Homo Sapiens
uuaauugaaagaagaaacaacaacaaaaaagc

SEQ ID NO: 295965 - RNA, 32 nt, Homo Sapiens
guugaauguauuuuugcaggcaucauauuguu

SEQ ID NO: 295966 - RNA, 32 nt, Homo Sapiens
gaugauggaucuuuaauccacuugacuaagug

SEQ ID NO: 295967 - RNA, 32 nt, Homo Sapiens
cccugcucucugggcugucucuagggagucug

SEQ ID NO: 295968 - RNA, 32 nt, Homo Sapiens
ugcucuuuucuccgcccacgcgggcguggcag

SEQ ID NO: 295969 - RNA, 32 nt, Homo Sapiens
ccagagcccucccucccagccccaugauuacc

SEQ ID NO: 295970 - RNA, 32 nt, Homo Sapiens
agccaggugugguggcucacgccuguaauccc

SEQ ID NO: 295971 - RNA, 32 nt, Homo Sapiens
aguguuucaucagguccuuccaucucugggag

SEQ ID NO: 295972 - RNA, 32 nt, Homo Sapiens
cuggagccaucccacucccuuuccccucuucc

SEQ ID NO: 295973 - RNA, 32 nt, Homo Sapiens
uucagauaucaccucacccagccucagaaguu

SEQ ID NO: 295974 - RNA, 32 nt, Homo Sapiens
cggugauccgcggcggcggcagcggcgcuucc

SEQ ID NO: 295975 - RNA, 32 nt, Homo Sapiens
agaugggauuuggaagacaagugaaugcaaug

SEQ ID NO: 295976 - RNA, 32 nt, Homo Sapiens
ccgcucuuuguuuuuucccuguaucagaauua

SEQ ID NO: 295977 - RNA, 32 nt, Homo Sapiens
gcuagagucaggccugcauccaaaucaggggu

SEQ ID NO: 295978 - RNA, 32 nt, Homo Sapiens
ugcuucaagauucaaauucagaaauauacuau

SEQ ID NO: 295979 - RNA, 32 nt, Homo Sapiens
uuauuuucccacaauucuuuugaaagauggua

SEQ ID NO: 295980 - RNA, 32 nt, Homo Sapiens
gcucucuagacaacuccauguacuuggugcuu

SEQ ID NO: 295981 - RNA, 32 nt, Homo Sapiens
ugugguguuuuaaagcaguguugcauuuuaau

SEQ ID NO: 295982 - RNA, 32 nt, Homo Sapiens
ccacguugacauuugagggaucacagcgugug

SEQ ID NO: 295983 - RNA, 32 nt, Homo Sapiens
gaagcauauuugcaaucauugcagcuucuucu

SEQ ID NO: 295984 - RNA, 32 nt, Homo Sapiens
uguggauguggaugcagauuugaaccauguca

SEQ ID NO: 295985 - RNA, 32 nt, Homo Sapiens
gggaggcuggccaaaauaagucuuaaaacugc

SEQ ID NO: 295986 - RNA, 32 nt, Homo Sapiens
caccuuccuaugcucaaguccuccucagacac

SEQ ID NO: 295987 - RNA, 32 nt, Homo Sapiens
gagaggaggaggagggagaaauggccaccaca

SEQ ID NO: 295988 - RNA, 32 nt, Homo Sapiens
uuuguauccaacauguuuuaaauccuuaaaug

SEQ ID NO: 295989 - RNA, 32 nt, Homo Sapiens
agauugguggcagccucaggauguauggggcc

SEQ ID NO: 295990 - RNA, 32 nt, Homo Sapiens
cuaucauguccuugucaugaaaagcacuaaaa

SEQ ID NO: 295991 - RNA, 32 nt, Homo Sapiens
uuuaagcuuuaagcauaacauacugacagagc

SEQ ID NO: 295992 - RNA, 32 nt, Homo Sapiens
uacuuugccaaagacuugaggacccuguaugu

SEQ ID NO: 295993 - RNA, 32 nt, Homo Sapiens
ggcaccgccccgcuccccccaccaggacagaa

SEQ ID NO: 295994 - RNA, 32 nt, Homo Sapiens
gggaaggggggccgggccuggauccggcgggg

SEQ ID NO: 295995 - RNA, 32 nt, Homo Sapiens
cauguuuuguguguuugccacaaaacauugcu

SEQ ID NO: 295996 - RNA, 32 nt, Homo Sapiens
agcgaggguugccauagcuuuuuuauguaggg

SEQ ID NO: 295997 - RNA, 32 nt, Homo Sapiens
ugcuugggcagagguggugcugcugggugugc

SEQ ID NO: 295998 - RNA, 32 nt, Homo Sapiens
gaaugcuagcucucuugaauuuggauauuggu

SEQ ID NO: 295999 - RNA, 31 nt, Homo Sapiens
gcccugagucacugccugcgcagcuccggcc

SEQ ID NO: 296000 - RNA, 32 nt, Homo Sapiens
auuugguucuuugcccuaauguuucauuugac

SEQ ID NO: 296001 - RNA, 32 nt, Homo Sapiens
auagucaugauugauuaaacaauuggccauaa

SEQ ID NO: 296002 - RNA, 32 nt, Homo Sapiens
auggacauuuuucuucuaagauggaacuuauu

SEQ ID NO: 296003 - RNA, 32 nt, Homo Sapiens
ugggcgccggccccgcucugcaggaugggcac

SEQ ID NO: 296004 - RNA, 32 nt, Homo Sapiens
caccuggagagccgcccaccgucucugcccgc

SEQ ID NO: 296005 - RNA, 32 nt, Homo Sapiens
acagaaagggaaggguuccaagccucuaaaaa

SEQ ID NO: 296006 - RNA, 31 nt, Homo Sapiens
aagguuuuucacugccugccucuugcggaac

SEQ ID NO: 296007 - RNA, 32 nt, Homo Sapiens
aauacuguuguucaauuuuguaggguguuccu

SEQ ID NO: 296008 - RNA, 32 nt, Homo Sapiens
agcagaccuggguguggugcugccuggcacug

SEQ ID NO: 296009 - RNA, 32 nt, Homo Sapiens
ggagggcuguucgggccagcgcccgccggcug

SEQ ID NO: 296010 - RNA, 32 nt, Homo Sapiens
cgcgugaccacaugggcagcucuguucacaaa

SEQ ID NO: 296011 - RNA, 32 nt, Homo Sapiens
ucuacucagcauauccuaaaccccaauacauc

SEQ ID NO: 296012 - RNA, 32 nt, Homo Sapiens
aaucuaacguugaguaaaugugauagugauga

SEQ ID NO: 296013 - RNA, 32 nt, Homo Sapiens
uaccauaucuucuggcuaaccauauucaagau

SEQ ID NO: 296014 - RNA, 31 nt, Homo Sapiens
ccacacggagcaugcccgagagccuggacag

SEQ ID NO: 296015 - RNA, 32 nt, Homo Sapiens
uaaguaguguuuuccuuggugaaugaagucau

SEQ ID NO: 296016 - RNA, 32 nt, Homo Sapiens
gccacgcucucguuuugucaggcagcuaugca

SEQ ID NO: 296017 - RNA, 32 nt, Homo Sapiens
ggccgggcaugggugggggcgccgggccguca

SEQ ID NO: 296018 - RNA, 32 nt, Homo Sapiens
acucgcccucccuccucgcucggugacucuuu

SEQ ID NO: 296019 - RNA, 32 nt, Homo Sapiens
uuaaagcauuuuuuauguuauuuucaaacuuu

SEQ ID NO: 296020 - RNA, 32 nt, Homo Sapiens
ccgcuguaggagcagagcuuccgggcugcgcu

SEQ ID NO: 296021 - RNA, 32 nt, Homo Sapiens
auaccaaaauuccuuuugauaauuuuuuaagu

SEQ ID NO: 296022 - RNA, 32 nt, Homo Sapiens
gaugaccggccgcccagccccagcacggcccg

SEQ ID NO: 296023 - RNA, 32 nt, Homo Sapiens
auuuaaaucuaaaaaugcuccuacuuuaagua

SEQ ID NO: 296024 - RNA, 32 nt, Homo Sapiens
gcgcaccgcucccgggcucccucccagcgcgc

SEQ ID NO: 296025 - RNA, 31 nt, Homo Sapiens
ccagaagcucagccgggguccacucucaggg

SEQ ID NO: 296026 - RNA, 30 nt, Homo Sapiens
ccguggucugagguccgcggcagggucccg

SEQ ID NO: 296027 - RNA, 32 nt, Homo Sapiens
cucagccgaggcugcuccgcggcggccgcagc

SEQ ID NO: 296028 - RNA, 32 nt, Homo Sapiens
guaccauugguaguuguuuaugaaauuaccag

SEQ ID NO: 296029 - RNA, 32 nt, Homo Sapiens
uccaguccguggugcuggccaacugaccgucu

SEQ ID NO: 296030 - RNA, 32 nt, Homo Sapiens
gauaucuccaugaugauaguugaauguugcaa

SEQ ID NO: 296031 - RNA, 32 nt, Homo Sapiens
cugaggagcuggucugggucaccguccucagc

SEQ ID NO: 296032 - RNA, 32 nt, Homo Sapiens
cugucgaagaaacaaaaaauaauagcaaaaaa

SEQ ID NO: 296033 - RNA, 32 nt, Homo Sapiens
acugagguggguguugaagagcccccuagggg

SEQ ID NO: 296034 - RNA, 32 nt, Homo Sapiens
ggcuccuggcagcggcuuuuguggaagacuca

SEQ ID NO: 296035 - RNA, 32 nt, Homo Sapiens
gauggcucggcucuaaccauggccguagccaa

SEQ ID NO: 296036 - RNA, 32 nt, Homo Sapiens
ugugggacggcgugaaugugggguggaaggga

SEQ ID NO: 296037 - RNA, 30 nt, Homo Sapiens
gcccacgcccuugccacccugcuguuccgc

SEQ ID NO: 296038 - RNA, 32 nt, Homo Sapiens
cgguucuucccccuccucccagagcugggcua

SEQ ID NO: 296039 - RNA, 32 nt, Homo Sapiens
uggauggaagcuguggcugggcgugggaaggc

SEQ ID NO: 296040 - RNA, 32 nt, Homo Sapiens
gcggguuggccucugugagcugggaagucauc

SEQ ID NO: 296041 - RNA, 32 nt, Homo Sapiens
agcaugcucaguauugagacacugucaagauu

SEQ ID NO: 296042 - RNA, 32 nt, Homo Sapiens
ucuugccagaucuuugcgaauuacaaugcaua

SEQ ID NO: 296043 - RNA, 32 nt, Homo Sapiens
ucauggaggggagggaggcaauaagcaaagaa

SEQ ID NO: 296044 - RNA, 32 nt, Homo Sapiens
gccugccccacacggacucccgggccacgccc

SEQ ID NO: 296045 - RNA, 32 nt, Homo Sapiens
acaggccuggggaucgucuggcacagcccacu

SEQ ID NO: 296046 - RNA, 32 nt, Homo Sapiens
gcaaugcugcugcggcagcucugcccacuaau

SEQ ID NO: 296047 - RNA, 32 nt, Homo Sapiens
gcagggagacaggaggcagagaagagggcgcu

SEQ ID NO: 296048 - RNA, 32 nt, Homo Sapiens
acagggugugcucccacgagacuuucagcauc

SEQ ID NO: 296049 - RNA, 32 nt, Homo Sapiens
agaagccggacccauccccgagguccccagcg

SEQ ID NO: 296050 - RNA, 32 nt, Homo Sapiens
ucagcuguuucuuuucgggcaguccccugguc

SEQ ID NO: 296051 - RNA, 32 nt, Homo Sapiens
uuugcuuucuucccuuuuugaccuuuaguuuu

SEQ ID NO: 296052 - RNA, 32 nt, Homo Sapiens
acaaauuaacuaaggaaauauuucaaucucuu

SEQ ID NO: 296053 - RNA, 32 nt, Homo Sapiens
uuuuaacugguguggcagcuuuucugguaagu

SEQ ID NO: 296054 - RNA, 30 nt, Homo Sapiens
gugcuacugccggaagcgccggcgcgcuug

SEQ ID NO: 296055 - RNA, 32 nt, Homo Sapiens
uuuggauccagaugugaugggcugacaacaaa

SEQ ID NO: 296056 - RNA, 32 nt, Homo Sapiens
ggaaaguuaagcuugugaagugagucacacaa

SEQ ID NO: 296057 - RNA, 32 nt, Homo Sapiens
cacaggggccggcaccacgggguuaucgaagc

SEQ ID NO: 296058 - RNA, 32 nt, Homo Sapiens
acaaaacaaaacaaaacaaaauuaacugcuua

SEQ ID NO: 296059 - RNA, 32 nt, Homo Sapiens
acugccuggaaggggccgcgcguguguucaug

SEQ ID NO: 296060 - RNA, 32 nt, Homo Sapiens
cugagagggagaggagcagagaugcugcugag

SEQ ID NO: 296061 - RNA, 32 nt, Homo Sapiens
ccucuuucugcaccuuagaucaucucuacaac

SEQ ID NO: 296062 - RNA, 32 nt, Homo Sapiens
aauuaaauauccacaauucaaaagcaccuaaa

SEQ ID NO: 296063 - RNA, 32 nt, Homo Sapiens
uuccuuuccuuccugugggcccucuuucaaag

SEQ ID NO: 296064 - RNA, 32 nt, Homo Sapiens
aaaaagaaaaagacaagaaagaaguauggacu

SEQ ID NO: 296065 - RNA, 32 nt, Homo Sapiens
guugagaaauacccaggaacacucugauugag

SEQ ID NO: 296066 - RNA, 30 nt, Homo Sapiens
guugcccuuucuuugggggaaacagcuguu

SEQ ID NO: 296067 - RNA, 32 nt, Homo Sapiens
aaggcugaaaauaauguagaaaacuuuauuuu

SEQ ID NO: 296068 - RNA, 32 nt, Homo Sapiens
uaguugcuaugaaaauaucauggaauaauagg

SEQ ID NO: 296069 - RNA, 32 nt, Homo Sapiens
gggggcccaucccugcccaccuccuggagaac

SEQ ID NO: 296070 - RNA, 32 nt, Homo Sapiens
agaccuggagggugggggccccagaagcucag

SEQ ID NO: 296071 - RNA, 32 nt, Homo Sapiens
ggucgguggguagaagaaaucaacugcuuagc

SEQ ID NO: 296072 - RNA, 32 nt, Homo Sapiens
gcugcccccuccccacccugccacucuugaca

SEQ ID NO: 296073 - RNA, 32 nt, Homo Sapiens
cccgagacgcggcgcgcacgcuccggccugcg

SEQ ID NO: 296074 - RNA, 32 nt, Homo Sapiens
uggccaucuaucuuuucaguguacaagucacu

SEQ ID NO: 296075 - RNA, 32 nt, Homo Sapiens
guaauuuucuuacuuaauguuacuucuuguua

SEQ ID NO: 296076 - RNA, 32 nt, Homo Sapiens
cacgaggcugucaucaccgccaugcccaagaa

SEQ ID NO: 296077 - RNA, 32 nt, Homo Sapiens
ccagacacagaaaaugacucauggaaggugca

SEQ ID NO: 296078 - RNA, 32 nt, Homo Sapiens
ucuguagggccaccccacagcucuuuccuucc

SEQ ID NO: 296079 - RNA, 32 nt, Homo Sapiens
uugaggcugcagugagccaucaucauggcauc

SEQ ID NO: 296080 - RNA, 32 nt, Homo Sapiens
gacccgcgggcucggguugccguuucccgccc

SEQ ID NO: 296081 - RNA, 32 nt, Homo Sapiens
gaugacccugaacucaugcuguugguuucaua

SEQ ID NO: 296082 - RNA, 32 nt, Homo Sapiens
ugcagccgcaggcccugcacuacgcgcuggcc

SEQ ID NO: 296083 - RNA, 32 nt, Homo Sapiens
ucccauucuguauucuuguacaaaagaucuca

SEQ ID NO: 296084 - RNA, 32 nt, Homo Sapiens
guuugaaaaaacaaaaacguggccuuggaauu

SEQ ID NO: 296085 - RNA, 32 nt, Homo Sapiens
ccccaccucccgcuccuuggccuguccccaga

SEQ ID NO: 296086 - RNA, 32 nt, Homo Sapiens
caucaccgcucgcaccccagccgcccggcccg

SEQ ID NO: 296087 - RNA, 32 nt, Homo Sapiens
uucugccuggagacaaggugcuaacauagauu

SEQ ID NO: 296088 - RNA, 32 nt, Homo Sapiens
gaaaaaugcaaauauagagcaaaucccuaaac

SEQ ID NO: 296089 - RNA, 32 nt, Homo Sapiens
aaaauccucaggaauguacacuuuacauacua

SEQ ID NO: 296090 - RNA, 32 nt, Homo Sapiens
ugagggaagaagaggaagcgggaggagcuugg

SEQ ID NO: 296091 - RNA, 32 nt, Homo Sapiens
uccagugagaaaccaugggauccugauggaga

SEQ ID NO: 296092 - RNA, 32 nt, Homo Sapiens
auuccuugucauuguaaauuaccuuugugugu

SEQ ID NO: 296093 - RNA, 32 nt, Homo Sapiens
gcaggaggggauaaucuugaaguaaaaaugua

SEQ ID NO: 296094 - RNA, 32 nt, Homo Sapiens
aucauuuuaguuugcagauggaucguaaauau

SEQ ID NO: 296095 - RNA, 32 nt, Homo Sapiens
acuugaaauuuauuuguaugauauaaaguuau

SEQ ID NO: 296096 - RNA, 32 nt, Homo Sapiens
uaccuuugaagaggcuucgugcaggacuuuga

SEQ ID NO: 296097 - RNA, 32 nt, Homo Sapiens
uauuacagguauaaaagugaugaccuaucaug

SEQ ID NO: 296098 - RNA, 32 nt, Homo Sapiens
agcccggcagccacgcucuccggcgcgccgcc

SEQ ID NO: 296099 - RNA, 32 nt, Homo Sapiens
agucgcgcugggggugggcgcgcgcugaggcg

SEQ ID NO: 296100 - RNA, 32 nt, Homo Sapiens
gaaacugcuaggaaacaaacgugaugccaaga

SEQ ID NO: 296101 - RNA, 32 nt, Homo Sapiens
gccuggggccccagggcgcccgggcucuggcu

SEQ ID NO: 296102 - RNA, 32 nt, Homo Sapiens
ucuggucugcuguggggggcaugcaggacggc

SEQ ID NO: 296103 - RNA, 32 nt, Homo Sapiens
uuuguucccucauggaacuauaacaccuuaga

SEQ ID NO: 296104 - RNA, 32 nt, Homo Sapiens
aaagaggccgcccggcggggcccgcaggcgau

SEQ ID NO: 296105 - RNA, 32 nt, Homo Sapiens
cuucacuacuucuguagucucaucuugaguaa

SEQ ID NO: 296106 - RNA, 32 nt, Homo Sapiens
acgugggcccccagccucccccucggccgccu

SEQ ID NO: 296107 - RNA, 32 nt, Homo Sapiens
gagaaccccuccccaccuaccccuuccuuccu

SEQ ID NO: 296108 - RNA, 32 nt, Homo Sapiens
gcguggguccuccaaugaccuuccugccccug

SEQ ID NO: 296109 - RNA, 32 nt, Homo Sapiens
uuuugagacuccagugagacgcuguuuucacc

SEQ ID NO: 296110 - RNA, 30 nt, Homo Sapiens
cacugugucuguggugccagaggcguccgu

SEQ ID NO: 296111 - RNA, 32 nt, Homo Sapiens
cauugcugaccagcugaguccuugagggcagu

SEQ ID NO: 296112 - RNA, 32 nt, Homo Sapiens
gaaggugcucccuggauauacucugugaaccu

SEQ ID NO: 296113 - RNA, 29 nt, Homo Sapiens
gccuauuuggauuuuagaggcaacacauu

SEQ ID NO: 296114 - RNA, 32 nt, Homo Sapiens
ccccaaagaggcuccaggaucaggagugaaag

SEQ ID NO: 296115 - RNA, 29 nt, Homo Sapiens
aaaaagugaaggaaauauuuucaggaagu

SEQ ID NO: 296116 - RNA, 32 nt, Homo Sapiens
gcuccaaguugagacucggccgcagcggcguc

SEQ ID NO: 296117 - RNA, 32 nt, Homo Sapiens
aaggcccuccucuguggcuggcagccucugac

SEQ ID NO: 296118 - RNA, 32 nt, Homo Sapiens
uugggcggcugguggcggcugggacgguuggg

SEQ ID NO: 296119 - RNA, 32 nt, Homo Sapiens
aaauuacuuuugucucauauauacauugcuaa

SEQ ID NO: 296120 - RNA, 32 nt, Homo Sapiens
gugggaaggaaaccucucuacugaguuguggg

SEQ ID NO: 296121 - RNA, 32 nt, Homo Sapiens
augcuggauucuuaagugauaucuucugauuu

SEQ ID NO: 296122 - RNA, 32 nt, Homo Sapiens
cugacauguuucacaacaggcauuccagaauu

SEQ ID NO: 296123 - RNA, 32 nt, Homo Sapiens
gaauuucugagaacaauggguguuagcaacuu

SEQ ID NO: 296124 - RNA, 28 nt, Homo Sapiens
ucuauaaaagauuauuugaaagacaaaa

SEQ ID NO: 296125 - RNA, 32 nt, Homo Sapiens
auccauugacauucaaucguugcuagguaagg

SEQ ID NO: 296126 - RNA, 32 nt, Homo Sapiens
guauauaccugcacugauauucuuaucaaaaa

SEQ ID NO: 296127 - RNA, 32 nt, Homo Sapiens
ccacgccuccgcuucagcaucuccacgcucug

SEQ ID NO: 296128 - RNA, 32 nt, Homo Sapiens
uuuguuuaaaauugaaauuaguuauuuucuuc

SEQ ID NO: 296129 - RNA, 32 nt, Homo Sapiens
gagcauccucacuccgcccaguucggugccag

SEQ ID NO: 296130 - RNA, 32 nt, Homo Sapiens
aguaugcucccuugguuuuucuuaaucuuugu

SEQ ID NO: 296131 - RNA, 32 nt, Homo Sapiens
acuagcuuuuaaaaauacaguacaaagacuuu

SEQ ID NO: 296132 - RNA, 32 nt, Homo Sapiens
gcacacacgcguuacguauauaucgaggugac

SEQ ID NO: 296133 - RNA, 32 nt, Homo Sapiens
uucuugugaacagggucugguguggaccucca

SEQ ID NO: 296134 - RNA, 32 nt, Homo Sapiens
gguggcccugcagcugcuggagacggcggugg

SEQ ID NO: 296135 - RNA, 32 nt, Homo Sapiens
aaaccauuugaaguguaccuguguacauaacu

SEQ ID NO: 296136 - RNA, 32 nt, Homo Sapiens
augagaguguuuccagaagagauuaguguaua

SEQ ID NO: 296137 - RNA, 32 nt, Homo Sapiens
ccuuuaaaacuugauccgauagcuuuaaugcg

SEQ ID NO: 296138 - RNA, 32 nt, Homo Sapiens
cagccggggccaccaaacagaagugcuucuga

SEQ ID NO: 296139 - RNA, 32 nt, Homo Sapiens
agugcauaaaauguuauuuuugcauggcauga

SEQ ID NO: 296140 - RNA, 29 nt, Homo Sapiens
ggggggagggugguggccauuacuagagg

SEQ ID NO: 296141 - RNA, 32 nt, Homo Sapiens
gcugaggcuuggccaucuagcauuccauacaa

SEQ ID NO: 296142 - RNA, 32 nt, Homo Sapiens
cuccccuuggccaggacaugcugcugcuacug

SEQ ID NO: 296143 - RNA, 32 nt, Homo Sapiens
uuccugaaucucuguccugccacacauggucc

SEQ ID NO: 296144 - RNA, 32 nt, Homo Sapiens
gcggagacuuggggcggggggcgggcaauaaa

SEQ ID NO: 296145 - RNA, 32 nt, Homo Sapiens
uguggccaugggugcugguguggguguggcug

SEQ ID NO: 296146 - RNA, 32 nt, Homo Sapiens
uauuguacaaguaauaaauguauuguugagau

SEQ ID NO: 296147 - RNA, 32 nt, Homo Sapiens
gggugaaauguuuccagagaaauauccaggac

SEQ ID NO: 296148 - RNA, 32 nt, Homo Sapiens
guacaaaaacaaagacauauagccaauacaaa

SEQ ID NO: 296149 - RNA, 32 nt, Homo Sapiens
caauuuggguggcaguguuugguacugaaguu

SEQ ID NO: 296150 - RNA, 31 nt, Homo Sapiens
cugguugcaaggugugaccgcaggaauccug

SEQ ID NO: 296151 - RNA, 32 nt, Homo Sapiens
gcggcagugagcucggccggcaaccgagggac

SEQ ID NO: 296152 - RNA, 32 nt, Homo Sapiens
cacacgcacacacgcacacacacacacacggu

SEQ ID NO: 296153 - RNA, 32 nt, Homo Sapiens
caucgcgugccugucuccucccccugagaucg

SEQ ID NO: 296154 - RNA, 32 nt, Homo Sapiens
cuaggagagaagugcugaauguuccgugugga

SEQ ID NO: 296155 - RNA, 32 nt, Homo Sapiens
cuggccaggcccugggucuugccaugugcugg

SEQ ID NO: 296156 - RNA, 32 nt, Homo Sapiens
gagcugccauuccacacccaucacauguggca

SEQ ID NO: 296157 - RNA, 32 nt, Homo Sapiens
aaccauuuucucauuuggaaauccauaccaug

SEQ ID NO: 296158 - RNA, 32 nt, Homo Sapiens
cuccucccauccccuguguccucuaggccucc

SEQ ID NO: 296159 - RNA, 32 nt, Homo Sapiens
gaucagcugacaccauccagaucgguaaacug

SEQ ID NO: 296160 - RNA, 32 nt, Homo Sapiens
gacgccugcagaccaucccagacgccggagcc

SEQ ID NO: 296161 - RNA, 32 nt, Homo Sapiens
cucacucaucaucaaagacaugcaaaucacaa

SEQ ID NO: 296162 - RNA, 32 nt, Homo Sapiens
cuggucuggugcccccgaaccuggucugaugc

SEQ ID NO: 296163 - RNA, 32 nt, Homo Sapiens
auaauuuauuacaagcauaacauggagcucuu

SEQ ID NO: 296164 - RNA, 32 nt, Homo Sapiens
ccuggccccgcccccgcccgcugcugaccacg

SEQ ID NO: 296165 - RNA, 32 nt, Homo Sapiens
cuacaucuaauuuuagaagccuggcuacaaua

SEQ ID NO: 296166 - RNA, 32 nt, Homo Sapiens
gcauuguacacuaucuaucugccuuuaccuac

SEQ ID NO: 296167 - RNA, 28 nt, Homo Sapiens
guguugugugugaauauguguuacaccu

SEQ ID NO: 296168 - RNA, 32 nt, Homo Sapiens
ccucaaggugccuacuuugcugguucccuuuc

SEQ ID NO: 296169 - RNA, 32 nt, Homo Sapiens
guugggggugugguagcgcagcugcuaccuag

SEQ ID NO: 296170 - RNA, 32 nt, Homo Sapiens
acccacuucacagaugaagcaaacugaggccc

SEQ ID NO: 296171 - RNA, 32 nt, Homo Sapiens
uuucaugaaaauuuauuucacugguuucaugu

SEQ ID NO: 296172 - RNA, 32 nt, Homo Sapiens
auuauguguauauaaaucuuugaaauaucuuu

SEQ ID NO: 296173 - RNA, 32 nt, Homo Sapiens
auaaacuuuuauauuucuacuaaaaaaaaaaa

SEQ ID NO: 296174 - RNA, 32 nt, Homo Sapiens
aauaagccccacuacuaccagcucuucugcua

SEQ ID NO: 296175 - RNA, 32 nt, Homo Sapiens
gccuccccucccuccagacccggagcggccuc

SEQ ID NO: 296176 - RNA, 32 nt, Homo Sapiens
uggggggagaacuuacauugugaaacuucugu

SEQ ID NO: 296177 - RNA, 32 nt, Homo Sapiens
gggcacuggggcguauuagggcccguucacuu

SEQ ID NO: 296178 - RNA, 32 nt, Homo Sapiens
gaaccagcgcuaccacauccacgccaaccugu

SEQ ID NO: 296179 - RNA, 31 nt, Homo Sapiens
cugcacacugcaugccugccccuucugcugc

SEQ ID NO: 296180 - RNA, 32 nt, Homo Sapiens
gugcuggcuggaagagggcuugcuuagggcag

SEQ ID NO: 296181 - RNA, 32 nt, Homo Sapiens
uaccccugacuucuguuuagucuccuuuuuaa

SEQ ID NO: 296182 - RNA, 32 nt, Homo Sapiens
uuagagcuuucucaaccugcagcccucaucuc

SEQ ID NO: 296183 - RNA, 32 nt, Homo Sapiens
ccccgggagcaucaccgcuuucuggaccuguc

SEQ ID NO: 296184 - RNA, 32 nt, Homo Sapiens
gguggccucuucauuauuuauugccaagaucu

SEQ ID NO: 296185 - RNA, 32 nt, Homo Sapiens
uaauauuaggaaacauuacagcccuuaucuag

SEQ ID NO: 296186 - RNA, 32 nt, Homo Sapiens
auaacuuauuuuaagaaucaaccuggacacag

SEQ ID NO: 296187 - RNA, 32 nt, Homo Sapiens
cgcagcgcuagucccgggcccgcgagcaccgg

SEQ ID NO: 296188 - RNA, 32 nt, Homo Sapiens
ggugcugagaauaaaggcaaccaguagccaau

SEQ ID NO: 296189 - RNA, 29 nt, Homo Sapiens
gcauagauaugcaugucuauauaauuaua

SEQ ID NO: 296190 - RNA, 32 nt, Homo Sapiens
ugacccaaacucccaaauugucaaguccugcu

SEQ ID NO: 296191 - RNA, 32 nt, Homo Sapiens
uuuaaagggcuccaaucagggauuugcaggag

SEQ ID NO: 296192 - RNA, 32 nt, Homo Sapiens
caagguggaagacaagugcuucccugaugagc

SEQ ID NO: 296193 - RNA, 32 nt, Homo Sapiens
gagcugccccaaguccuuuccacacacaccug

SEQ ID NO: 296194 - RNA, 30 nt, Homo Sapiens
gaggguuucugugcugucagacuucauugu

SEQ ID NO: 296195 - RNA, 32 nt, Homo Sapiens
cagaugcccaacccgacugcccuaccagccug

SEQ ID NO: 296196 - RNA, 32 nt, Homo Sapiens
guguuucugcuccccucccacccaagaugcug

SEQ ID NO: 296197 - RNA, 32 nt, Homo Sapiens
cugggagagcugggacgggcggcggccgggug

SEQ ID NO: 296198 - RNA, 32 nt, Homo Sapiens
uggagaaaggaagaaacuuauaauaaauggga

SEQ ID NO: 296199 - RNA, 32 nt, Homo Sapiens
gucuucuagcuucauucaugucucugcaaaug

SEQ ID NO: 296200 - RNA, 32 nt, Homo Sapiens
gugccccugccagcugcacgggcagcucuaug

SEQ ID NO: 296201 - RNA, 32 nt, Homo Sapiens
aaggcgggacacgaccccggcgcgcccuagcc

SEQ ID NO: 296202 - RNA, 32 nt, Homo Sapiens
cacuccccacccaagagauugguggaauaaaa

SEQ ID NO: 296203 - RNA, 32 nt, Homo Sapiens
uuuuguaaauguuagacuuuuaucauaccugu

SEQ ID NO: 296204 - RNA, 32 nt, Homo Sapiens
gugaaacuugacauuucuuuuauacuuuacuc

SEQ ID NO: 296205 - RNA, 32 nt, Homo Sapiens
uaccaguuuauuucacuucucuaaauucaaug

SEQ ID NO: 296206 - RNA, 32 nt, Homo Sapiens
cggugacagcauaugccgcgagcugggcuuua

SEQ ID NO: 296207 - RNA, 32 nt, Homo Sapiens
agguacccugcagcugucuccucagccacccu

SEQ ID NO: 296208 - RNA, 32 nt, Homo Sapiens
ggaacagcucuggaagugacuccucuguccuc

SEQ ID NO: 296209 - RNA, 32 nt, Homo Sapiens
ggaaugcccgcgacagaguccacauugccugu

SEQ ID NO: 296210 - RNA, 32 nt, Homo Sapiens
aauccuugacaaaagaaaaagugguuuugaug

SEQ ID NO: 296211 - RNA, 32 nt, Homo Sapiens
ggaaggguggagaggagcuggguugaagcgga

SEQ ID NO: 296212 - RNA, 32 nt, Homo Sapiens
cccaucccacccagggaucgccaccucugccc

SEQ ID NO: 296213 - RNA, 32 nt, Homo Sapiens
ccaaggucacagaaacaaaacccacaggggcu

SEQ ID NO: 296214 - RNA, 32 nt, Homo Sapiens
cccgucgccgcgcggcuucccggagccgacug

SEQ ID NO: 296215 - RNA, 32 nt, Homo Sapiens
gcccagcaagcacucgggcuccucccacagug

SEQ ID NO: 296216 - RNA, 32 nt, Homo Sapiens
gaacaucaggguguggcauuuuguucccuuuu

SEQ ID NO: 296217 - RNA, 32 nt, Homo Sapiens
gacagguguaugggcucugugggcucuguccc

SEQ ID NO: 296218 - RNA, 32 nt, Homo Sapiens
aaaaucuucgcggaucuuugauaucguacuga

SEQ ID NO: 296219 - RNA, 32 nt, Homo Sapiens
aaacgggcaaaauaauugugcuggauucucac

SEQ ID NO: 296220 - RNA, 32 nt, Homo Sapiens
aaugaguacuaaaauacagcuuugugccuuuu

SEQ ID NO: 296221 - RNA, 32 nt, Homo Sapiens
accaggaccccggcccugcacggacccucaca

SEQ ID NO: 296222 - RNA, 32 nt, Homo Sapiens
aguguucagacaugccaggaguccagccucac

SEQ ID NO: 296223 - RNA, 32 nt, Homo Sapiens
agcugcuaaaacuacauguggccagcuccauu

SEQ ID NO: 296224 - RNA, 32 nt, Homo Sapiens
uucacugcagggcgggggcggcaccgcucccc

SEQ ID NO: 296225 - RNA, 32 nt, Homo Sapiens
cugaugcuuauccuuucaucugugugauuguu

SEQ ID NO: 296226 - RNA, 32 nt, Homo Sapiens
cccgaggcacgcggcccgggcagcucggugug

SEQ ID NO: 296227 - RNA, 32 nt, Homo Sapiens
accagacuuuaaauaaaacaaacaugaaaccu

SEQ ID NO: 296228 - RNA, 32 nt, Homo Sapiens
guuagagaauaaaugggauuugcaugaacucc

SEQ ID NO: 296229 - RNA, 32 nt, Homo Sapiens
gcuuuaaaauaaaacgccuauaaagauugugc

SEQ ID NO: 296230 - RNA, 32 nt, Homo Sapiens
cacgugggaauagggacaagaacacucauugc

SEQ ID NO: 296231 - RNA, 32 nt, Homo Sapiens
auuuuuguucuucauaauuaucacuaauaagc

SEQ ID NO: 296232 - RNA, 32 nt, Homo Sapiens
ccauuccaucucuugaaaaaauguagucuuug

SEQ ID NO: 296233 - RNA, 32 nt, Homo Sapiens
gacuucagccuggucaugcuugcucugccacu

SEQ ID NO: 296234 - RNA, 32 nt, Homo Sapiens
cucccucagugugccccguggugucaccggga

SEQ ID NO: 296235 - RNA, 32 nt, Homo Sapiens
aguauuuuuuaaaaaacuguccuaucucauuu

SEQ ID NO: 296236 - RNA, 32 nt, Homo Sapiens
uugccuuugauuuuuuuuuuuaaauucugugu

SEQ ID NO: 296237 - RNA, 32 nt, Homo Sapiens
cuccugccaccaguccucuccucugcccuccc

SEQ ID NO: 296238 - RNA, 32 nt, Homo Sapiens
uaucccuauuaggaaccuuguuucccaccgaa

SEQ ID NO: 296239 - RNA, 32 nt, Homo Sapiens
gccccacccaccggccgcuccuccccucuccc

SEQ ID NO: 296240 - RNA, 32 nt, Homo Sapiens
aagaccuggucgucgucuugacuuuggcaaau

SEQ ID NO: 296241 - RNA, 32 nt, Homo Sapiens
cucccggguucaaucaauucuccuaccucaac

SEQ ID NO: 296242 - RNA, 32 nt, Homo Sapiens
agcugaagauuaaaacaauacuguacaggucc

SEQ ID NO: 296243 - RNA, 32 nt, Homo Sapiens
uccugucaccauaggcaauaccuuuuuucuua

SEQ ID NO: 296244 - RNA, 32 nt, Homo Sapiens
gaagagcuuaggauguuguaacuucuucacac

SEQ ID NO: 296245 - RNA, 32 nt, Homo Sapiens
cggaucggcgccagacggaaaccuagcgguga

SEQ ID NO: 296246 - RNA, 32 nt, Homo Sapiens
cccguccuuucugaagaagagcaagaagaaga

SEQ ID NO: 296247 - RNA, 32 nt, Homo Sapiens
cccucugcguguccuuguuuuuguguaaugcg

SEQ ID NO: 296248 - RNA, 32 nt, Homo Sapiens
ccugaacguugucacauaaaccccaaggcagc

SEQ ID NO: 296249 - RNA, 32 nt, Homo Sapiens
aagggggagacggggcugccccuuagugucgg

SEQ ID NO: 296250 - RNA, 32 nt, Homo Sapiens
uugucaccuuggauuuaugagugaaaaguguu

SEQ ID NO: 296251 - RNA, 32 nt, Homo Sapiens
ccccacugcuccuggaguucucaucggauucc

SEQ ID NO: 296252 - RNA, 32 nt, Homo Sapiens
acauacccacccagggauacauggcguucucu

SEQ ID NO: 296253 - RNA, 32 nt, Homo Sapiens
uacaacuaaaauguauuuauaauaaaaugccu

SEQ ID NO: 296254 - RNA, 32 nt, Homo Sapiens
cgacgaagaguaggaaaagagaagggcugcuc

SEQ ID NO: 296255 - RNA, 32 nt, Homo Sapiens
uccucauuuuuucucuugccacugccauguaa

SEQ ID NO: 296256 - RNA, 32 nt, Homo Sapiens
gcugugcauccggagaugugaguuuggggcug

SEQ ID NO: 296257 - RNA, 32 nt, Homo Sapiens
acucaaaaacuuaugccuggagcuguauccug

SEQ ID NO: 296258 - RNA, 32 nt, Homo Sapiens
uauuuacuaauucugaaaguuuucucacacuc

SEQ ID NO: 296259 - RNA, 32 nt, Homo Sapiens
ugaaagaaucuggaagaggagcuccugugucc

SEQ ID NO: 296260 - RNA, 32 nt, Homo Sapiens
aaacaauuugaaagaauacaaaaauaugugaa

SEQ ID NO: 296261 - RNA, 32 nt, Homo Sapiens
cccucacuggcugcagcugaucuguuuccuua

SEQ ID NO: 296262 - RNA, 32 nt, Homo Sapiens
cccucucccuccccgcaacccugccccaccuu

SEQ ID NO: 296263 - RNA, 32 nt, Homo Sapiens
cuuaacccaauuaggauauccugcuuugggua

SEQ ID NO: 296264 - RNA, 32 nt, Homo Sapiens
agagagugggcgcucucgcggccgcugacgau

SEQ ID NO: 296265 - RNA, 32 nt, Homo Sapiens
uggguaaggaggagagagcggucugcugcaaa

SEQ ID NO: 296266 - RNA, 32 nt, Homo Sapiens
augccucugcugugggcuuuggguuugucagg

SEQ ID NO: 296267 - RNA, 28 nt, Homo Sapiens
ggggugggggcuaccaggaaaccuuugc

SEQ ID NO: 296268 - RNA, 32 nt, Homo Sapiens
uuugggguggguggaggaggagggcacguguc

SEQ ID NO: 296269 - RNA, 32 nt, Homo Sapiens
ucgucccccuaagcccaccccuccucacccag

SEQ ID NO: 296270 - RNA, 32 nt, Homo Sapiens
cgccugcaacgcgcccuggcacucaccggugg

SEQ ID NO: 296271 - RNA, 32 nt, Homo Sapiens
gcugcuuuacacaauaaucaaagcuaccuuuu

SEQ ID NO: 296272 - RNA, 32 nt, Homo Sapiens
auuagguuuuacugccuauugagacaaccagg

SEQ ID NO: 296273 - RNA, 32 nt, Homo Sapiens
cucuugugcaggauuaaaugugaacagcagag

SEQ ID NO: 296274 - RNA, 32 nt, Homo Sapiens
gggggccgcaguggcgacucggcgcucggaag

SEQ ID NO: 296275 - RNA, 32 nt, Homo Sapiens
ggguaaggggauacacauuuggaagcuauugu

SEQ ID NO: 296276 - RNA, 32 nt, Homo Sapiens
acuacaugaugugggagggcugucuguucauu

SEQ ID NO: 296277 - RNA, 31 nt, Homo Sapiens
auuaaacgggagguuuuaagaagcgucugcc

SEQ ID NO: 296278 - RNA, 32 nt, Homo Sapiens
uuggugaaggucuugggaaccacagucuccuc

SEQ ID NO: 296279 - RNA, 32 nt, Homo Sapiens
gagccaccgcgcccuccugcccacgggaggac

SEQ ID NO: 296280 - RNA, 28 nt, Homo Sapiens
aggugggggcccaccaggaugagcaagc

SEQ ID NO: 296281 - RNA, 32 nt, Homo Sapiens
uacguugcaaggauuagccaaaucuucuuauu

SEQ ID NO: 296282 - RNA, 32 nt, Homo Sapiens
uguguacaaaaauuaguugcauuucuauacac

SEQ ID NO: 296283 - RNA, 32 nt, Homo Sapiens
gccccccucauuugcauggcuccucccccacu

SEQ ID NO: 296284 - RNA, 32 nt, Homo Sapiens
gcagcuggagcuggacagcacacgccaugccg

SEQ ID NO: 296285 - RNA, 32 nt, Homo Sapiens
agauccugcaguacuuuaagcauuagaguuac

SEQ ID NO: 296286 - RNA, 32 nt, Homo Sapiens
uuccgggaauauaauauuucuugaaugaacaa

SEQ ID NO: 296287 - RNA, 32 nt, Homo Sapiens
ugaaggcaagcggugauuguuuguagacggcg

SEQ ID NO: 296288 - RNA, 32 nt, Homo Sapiens
cggugcagcaacagcaggagcggcugcggaag

SEQ ID NO: 296289 - RNA, 32 nt, Homo Sapiens
gaagggccugcauuugucacacuuccucggac

SEQ ID NO: 296290 - RNA, 31 nt, Homo Sapiens
ggccgcuggcacugcggccgcuccgcaggca

SEQ ID NO: 296291 - RNA, 32 nt, Homo Sapiens
aagcaggcagaaaaacaugaaaaggagagacu

SEQ ID NO: 296292 - RNA, 32 nt, Homo Sapiens
uaccuguacuagaauauauuaaguauauucac

SEQ ID NO: 296293 - RNA, 32 nt, Homo Sapiens
gacagagucucacucugucacccaggcugcag

SEQ ID NO: 296294 - RNA, 32 nt, Homo Sapiens
guacuuaaaauguauucacaaacuacuguugu

SEQ ID NO: 296295 - RNA, 32 nt, Homo Sapiens
agagggcgcgccgacgcucaggcgaacggagc

SEQ ID NO: 296296 - RNA, 32 nt, Homo Sapiens
ugggggagauggggcgccgggaguggugcaug

SEQ ID NO: 296297 - RNA, 32 nt, Homo Sapiens
auguuaagaacaaaagaaguauggaaacuucc

SEQ ID NO: 296298 - RNA, 32 nt, Homo Sapiens
gcgguugcccgccucgccgccggccacagccc

SEQ ID NO: 296299 - RNA, 32 nt, Homo Sapiens
agcaccccgcaugcacuacccccauuucagua

SEQ ID NO: 296300 - RNA, 32 nt, Homo Sapiens
uguagaauggggcaaucaauggcugucuugcu

SEQ ID NO: 296301 - RNA, 32 nt, Homo Sapiens
ucuuauccuaauuaauuuuucuuuagcccuua

SEQ ID NO: 296302 - RNA, 32 nt, Homo Sapiens
uguuaaaaucauagaaagaucuuuuauuucuu

SEQ ID NO: 296303 - RNA, 32 nt, Homo Sapiens
ugguugcaaaacaaaauguugguugcuguuug

SEQ ID NO: 296304 - RNA, 32 nt, Homo Sapiens
cccacccucuaccccacccccaccuucgcuca

SEQ ID NO: 296305 - RNA, 32 nt, Homo Sapiens
ccauuuucccccuguguuuucacgcaggucau

SEQ ID NO: 296306 - RNA, 32 nt, Homo Sapiens
gcaaaagucuuaggugaacaaucaacuaguau

SEQ ID NO: 296307 - RNA, 25 nt, Homo Sapiens
auggcggaucggcucacgcagcuuc

SEQ ID NO: 296308 - RNA, 32 nt, Homo Sapiens
ccaugggaucuugagggaccaagcugcuggga

SEQ ID NO: 296309 - RNA, 32 nt, Homo Sapiens
aacgcagucagagggaaauacggcgugugucu

SEQ ID NO: 296310 - RNA, 32 nt, Homo Sapiens
agugauauaugauacacauuuuuuguguaugu

SEQ ID NO: 296311 - RNA, 32 nt, Homo Sapiens
acauucaggaagaguugugccacaaaaaggaa

SEQ ID NO: 296312 - RNA, 32 nt, Homo Sapiens
cuugaaccaaaauggugaagcuguaagggaug

SEQ ID NO: 296313 - RNA, 31 nt, Homo Sapiens
agacucguuuaaaaacaaguauauuaaaugg

SEQ ID NO: 296314 - RNA, 32 nt, Homo Sapiens
gccccaggccccaaggccacgucugugcuucc

SEQ ID NO: 296315 - RNA, 32 nt, Homo Sapiens
ugcugauggcuggggcucucgggcaugcuugg

SEQ ID NO: 296316 - RNA, 32 nt, Homo Sapiens
gaaaauaguuguuagcuuccaaggcuacugcu

SEQ ID NO: 296317 - RNA, 32 nt, Homo Sapiens
cgagccgcuucuaccugcugcugcugggcgug

SEQ ID NO: 296318 - RNA, 32 nt, Homo Sapiens
gaggccaugggcgcggcuccgcgugcgccugu

SEQ ID NO: 296319 - RNA, 32 nt, Homo Sapiens
ucccgaggaggccuggcccacccaccccacuc

SEQ ID NO: 296320 - RNA, 29 nt, Homo Sapiens
ucuuccauauuuauguaccauauuauacc

SEQ ID NO: 296321 - RNA, 32 nt, Homo Sapiens
aauguggcaaagcuuuuaaacgaucuucaacc

SEQ ID NO: 296322 - RNA, 32 nt, Homo Sapiens
cagaaccccacuuuuaccacaggagagccagu

SEQ ID NO: 296323 - RNA, 32 nt, Homo Sapiens
gcagggcagcggguauucuccucccaccuaag

SEQ ID NO: 296324 - RNA, 32 nt, Homo Sapiens
uaugagaaauaccacauuagaccaguagaauc

SEQ ID NO: 296325 - RNA, 32 nt, Homo Sapiens
uugaaucugcucucauugaugugcugguuuau

SEQ ID NO: 296326 - RNA, 32 nt, Homo Sapiens
aaugacauagugaagaucaaauccauauuacc

SEQ ID NO: 296327 - RNA, 32 nt, Homo Sapiens
gacugguuggguccggccuccgaggccuguac

SEQ ID NO: 296328 - RNA, 32 nt, Homo Sapiens
cccuagaauugacucuaggagcagugacccug

SEQ ID NO: 296329 - RNA, 32 nt, Homo Sapiens
gucgaaauacuagugacucugccgagugcccu

SEQ ID NO: 296330 - RNA, 32 nt, Homo Sapiens
cacacuaccucucugauuuuguuuccuuaucu

SEQ ID NO: 296331 - RNA, 32 nt, Homo Sapiens
uacaggggccagcagcugcgcccgccccaccu

SEQ ID NO: 296332 - RNA, 32 nt, Homo Sapiens
uccuggcagcuaggccugaauagagcugugca

SEQ ID NO: 296333 - RNA, 32 nt, Homo Sapiens
ugaccccuccucugggggcucugccaguugug

SEQ ID NO: 296334 - RNA, 32 nt, Homo Sapiens
aaaacuugucagaauauauaaaagcuuagauu

SEQ ID NO: 296335 - RNA, 32 nt, Homo Sapiens
cccuagugguuuugguggaggcugcacagauu

SEQ ID NO: 296336 - RNA, 30 nt, Homo Sapiens
aucacuguggcagccgucgcccugaagaag

SEQ ID NO: 296337 - RNA, 32 nt, Homo Sapiens
ucaucaacggccaggaccaaggcgcugccugc

SEQ ID NO: 296338 - RNA, 32 nt, Homo Sapiens
ggaagugucugccuuuauguccuuucuucuga

SEQ ID NO: 296339 - RNA, 32 nt, Homo Sapiens
uggaggcuggagcuggacuggcggcggcggca

SEQ ID NO: 296340 - RNA, 32 nt, Homo Sapiens
gaaagaaugaauuucaggauuuaucacuaaau

SEQ ID NO: 296341 - RNA, 32 nt, Homo Sapiens
cuguaguuguagugacuccucccaaaacaacc

SEQ ID NO: 296342 - RNA, 32 nt, Homo Sapiens
gcucccccacccacccauucccgcccuuugca

SEQ ID NO: 296343 - RNA, 32 nt, Homo Sapiens
ccaggacucgggccagccuccuccccccagcc

SEQ ID NO: 296344 - RNA, 32 nt, Homo Sapiens
ccucccccauccccaccucagugccugcgggg

SEQ ID NO: 296345 - RNA, 32 nt, Homo Sapiens
uagggguggggccacacaaaucuccaggagcc

SEQ ID NO: 296346 - RNA, 32 nt, Homo Sapiens
accuggucagcggaugcacuuuagcagaugga

SEQ ID NO: 296347 - RNA, 32 nt, Homo Sapiens
gaauuaauuccuuaaagucuaguuaggguccu

SEQ ID NO: 296348 - RNA, 32 nt, Homo Sapiens
ucagaaagggaagcagaacugagggcugggau

SEQ ID NO: 296349 - RNA, 32 nt, Homo Sapiens
ugugugugcaggggugcacauguuuggccaca

SEQ ID NO: 296350 - RNA, 32 nt, Homo Sapiens
uuucaacgaggccuucccugcuuauuuaaaag

SEQ ID NO: 296351 - RNA, 32 nt, Homo Sapiens
agggcugggcggcggcggcggcggcggucaug

SEQ ID NO: 296352 - RNA, 32 nt, Homo Sapiens
ucucugcgcaguacggccgccgggaccgcagc

SEQ ID NO: 296353 - RNA, 32 nt, Homo Sapiens
agcagccugugcuggagcccgggaaacaaggc

SEQ ID NO: 296354 - RNA, 32 nt, Homo Sapiens
uacaucuuuuuuucuuuuuauuuucgaaaaaa

SEQ ID NO: 296355 - RNA, 32 nt, Homo Sapiens
ucucacacucucaguuacaaauguagaggaca

SEQ ID NO: 296356 - RNA, 32 nt, Homo Sapiens
cuugguuccuucccaauccaguggacuucgca

SEQ ID NO: 296357 - RNA, 32 nt, Homo Sapiens
ccgggaagguggaagcgccgggccuggaagag

SEQ ID NO: 296358 - RNA, 32 nt, Homo Sapiens
uuaaaauaagaauugaaugucaauaugagaua

SEQ ID NO: 296359 - RNA, 32 nt, Homo Sapiens
caggcgucugcacaaucccuaauggcccccag

SEQ ID NO: 296360 - RNA, 32 nt, Homo Sapiens
gggagcaggaccaccaguguccgcugcagagg

SEQ ID NO: 296361 - RNA, 32 nt, Homo Sapiens
caccccauggcccagggcugcccgugccagcc

SEQ ID NO: 296362 - RNA, 32 nt, Homo Sapiens
aagugaaauagauaagaagccugccacauuuu

SEQ ID NO: 296363 - RNA, 32 nt, Homo Sapiens
gcagucugugggagcccggccgcgcccagccc

SEQ ID NO: 296364 - RNA, 31 nt, Homo Sapiens
cccucacagcgcagcacccacagcaucacga

SEQ ID NO: 296365 - RNA, 31 nt, Homo Sapiens
uguguguauuuguguguuucaguguuucauc

SEQ ID NO: 296366 - RNA, 32 nt, Homo Sapiens
uuacauggccuuggucuagaggaggcaggcuu

SEQ ID NO: 296367 - RNA, 32 nt, Homo Sapiens
cgcacgcccuccccagcuucugcugcucgccg

SEQ ID NO: 296368 - RNA, 32 nt, Homo Sapiens
ucucucacucuaauaaacuuggcacuucuccg

SEQ ID NO: 296369 - RNA, 32 nt, Homo Sapiens
cggagucggcgguguuguagguagcgguaccu

SEQ ID NO: 296370 - RNA, 32 nt, Homo Sapiens
caggcaaacacuuugaaucauaaggauuuuua

SEQ ID NO: 296371 - RNA, 32 nt, Homo Sapiens
ggaggggcucugcguucuguaguggcgcugcu

SEQ ID NO: 296372 - RNA, 32 nt, Homo Sapiens
auacuggccuggugccagcagauggcuuuucu

SEQ ID NO: 296373 - RNA, 32 nt, Homo Sapiens
uggcuguggagagccagaagggccaggugcgc

SEQ ID NO: 296374 - RNA, 29 nt, Homo Sapiens
ccgaguccggucccagguauggagcagag

SEQ ID NO: 296375 - RNA, 32 nt, Homo Sapiens
augaaggggcaaaaguauuugcucuuagucua

SEQ ID NO: 296376 - RNA, 32 nt, Homo Sapiens
guuuuuuguuuuuucuucuggggaggucuaga

SEQ ID NO: 296377 - RNA, 32 nt, Homo Sapiens
ucugauccagacccucggcaccugcuacuuac

SEQ ID NO: 296378 - RNA, 30 nt, Homo Sapiens
ucuagguagagacgauacaagagugguaca

SEQ ID NO: 296379 - RNA, 32 nt, Homo Sapiens
ucacacauaacacuaagcguaaaucuaaucaa

SEQ ID NO: 296380 - RNA, 32 nt, Homo Sapiens
augaggucaggagauugagaccauccuggcca

SEQ ID NO: 296381 - RNA, 32 nt, Homo Sapiens
uuuugcuggugaucaacaagugaggccgcugc

SEQ ID NO: 296382 - RNA, 32 nt, Homo Sapiens
aagcagggacuaaaagccccacuucgucuuac

SEQ ID NO: 296383 - RNA, 32 nt, Homo Sapiens
accagugaauugaaagcacaucugaaagaugc

SEQ ID NO: 296384 - RNA, 32 nt, Homo Sapiens
agaaggcgcgucugucuggcaucuuggccgug

SEQ ID NO: 296385 - RNA, 32 nt, Homo Sapiens
cagcucugggggcagagcugucuuccccaucu

SEQ ID NO: 296386 - RNA, 32 nt, Homo Sapiens
augaaucuaaaguaggagcaucaguuauuacu

SEQ ID NO: 296387 - RNA, 32 nt, Homo Sapiens
cgcuccuccgcagccugggguacgcgugaagc

SEQ ID NO: 296388 - RNA, 32 nt, Homo Sapiens
ugauccacugcuggacagacccggggcagccu

SEQ ID NO: 296389 - RNA, 32 nt, Homo Sapiens
ggcuuccgcgcgccgcccgccaccaauccucu

SEQ ID NO: 296390 - RNA, 32 nt, Homo Sapiens
cagcaaaaaaaauuaaauuuaaagagguccac

SEQ ID NO: 296391 - RNA, 31 nt, Homo Sapiens
agauugcagcgcagcuguguuggaggcagga

SEQ ID NO: 296392 - RNA, 32 nt, Homo Sapiens
cgagugcgucugcgaacucccggagcggaguc

SEQ ID NO: 296393 - RNA, 32 nt, Homo Sapiens
guguucacagauucuuuuuuuuuuuuuaauug

SEQ ID NO: 296394 - RNA, 32 nt, Homo Sapiens
uaguauuggccauuuguauucuuauacucuua

SEQ ID NO: 296395 - RNA, 32 nt, Homo Sapiens
ugagagccaugcagggcgucugcagcccaggc

SEQ ID NO: 296396 - RNA, 32 nt, Homo Sapiens
uuccuucucuggaauaguuacuuuacaacacg

SEQ ID NO: 296397 - RNA, 32 nt, Homo Sapiens
ucuaccaaggcccuuccuugagcauuuauuau

SEQ ID NO: 296398 - RNA, 32 nt, Homo Sapiens
gccgcgucuccauggcgacgcgggacgcggcg

SEQ ID NO: 296399 - RNA, 32 nt, Homo Sapiens
ggaggagccagcggccggggagguucuagucu

SEQ ID NO: 296400 - RNA, 32 nt, Homo Sapiens
gaagucaggaccacccagggucucccagagug

SEQ ID NO: 296401 - RNA, 32 nt, Homo Sapiens
aggaacagaugaggugugaguggacuucccag

SEQ ID NO: 296402 - RNA, 32 nt, Homo Sapiens
uacacauacauauauauacacacacgcauuug

SEQ ID NO: 296403 - RNA, 32 nt, Homo Sapiens
aggguugauauuaacaaaggaauguacuuaga

SEQ ID NO: 296404 - RNA, 32 nt, Homo Sapiens
ucugccuugaggaauuaugucaacacucauac

SEQ ID NO: 296405 - RNA, 28 nt, Homo Sapiens
ccaaaggggcggcucuugugguuucaaa

SEQ ID NO: 296406 - RNA, 27 nt, Homo Sapiens
ucccuguccccuuucagcccaccaguc

SEQ ID NO: 296407 - RNA, 32 nt, Homo Sapiens
uaccaguaaaauuaucuuucugauagugaaaa

SEQ ID NO: 296408 - RNA, 32 nt, Homo Sapiens
uuacucaucuucuuaccugauaucccaugaug

SEQ ID NO: 296409 - RNA, 32 nt, Homo Sapiens
aagaugaaauauuuuuuaggcauaaaauaugc

SEQ ID NO: 296410 - RNA, 32 nt, Homo Sapiens
aggaagcaaggaggcagagaccaagaggacau

SEQ ID NO: 296411 - RNA, 32 nt, Homo Sapiens
gagaaauuguagugaugaaaugugcagucuaa

SEQ ID NO: 296412 - RNA, 32 nt, Homo Sapiens
gcauuuguuuucuucaguagaaugggaaugug

SEQ ID NO: 296413 - RNA, 32 nt, Homo Sapiens
acaacaggaauugggugaagaugcuucucacc

SEQ ID NO: 296414 - RNA, 32 nt, Homo Sapiens
gguguuuugucaaagcagguuauucagugauu

SEQ ID NO: 296415 - RNA, 32 nt, Homo Sapiens
uucucuguccaaugcccacccggagcugggag

SEQ ID NO: 296416 - RNA, 32 nt, Homo Sapiens
caaaucagcaaccauuguuguuaugaucugca

SEQ ID NO: 296417 - RNA, 32 nt, Homo Sapiens
agugagaggccuccgcugguugccaggcuugg

SEQ ID NO: 296418 - RNA, 32 nt, Homo Sapiens
ucauccuagaaaaauaaaguaauguuuuugac

SEQ ID NO: 296419 - RNA, 32 nt, Homo Sapiens
aauugucuagaauucaggugcaggucuuugcc

SEQ ID NO: 296420 - RNA, 32 nt, Homo Sapiens
guucauuuauuuuucuucauugcaguggauug

SEQ ID NO: 296421 - RNA, 32 nt, Homo Sapiens
cauugagaaaggaaagugaguccagagaaguu

SEQ ID NO: 296422 - RNA, 32 nt, Homo Sapiens
cccugaggcagaccaggccaggcuuccccucc

SEQ ID NO: 296423 - RNA, 32 nt, Homo Sapiens
cuugggagguugaggcaagagaaucacuugaa

SEQ ID NO: 296424 - RNA, 32 nt, Homo Sapiens
gagugcccgcggcgcgcggcgcagcgaugcgu

SEQ ID NO: 296425 - RNA, 32 nt, Homo Sapiens
uauuuuggacgaaggccgcgcagccggguccc

SEQ ID NO: 296426 - RNA, 32 nt, Homo Sapiens
gagugcgguggcgugaucauggcucauugcag

SEQ ID NO: 296427 - RNA, 32 nt, Homo Sapiens
gacgagauuuguuuuucucuucucuggcugau

SEQ ID NO: 296428 - RNA, 32 nt, Homo Sapiens
caaauagaaagauaauucuagauccggaauac

SEQ ID NO: 296429 - RNA, 32 nt, Homo Sapiens
ggcagcagguagcucuucccagccccugagcc

SEQ ID NO: 296430 - RNA, 32 nt, Homo Sapiens
aaacuccaccauauucuagaaauauuagucag

SEQ ID NO: 296431 - RNA, 32 nt, Homo Sapiens
ggagcugcaauaaaucgauaacacagaaaaaa

SEQ ID NO: 296432 - RNA, 31 nt, Homo Sapiens
ccccagagggcggcuggaggggcucagaaac

SEQ ID NO: 296433 - RNA, 32 nt, Homo Sapiens
agauauuggacaaagaaccuucucuauggggc

SEQ ID NO: 296434 - RNA, 32 nt, Homo Sapiens
auaaugucuucucuuuaauauucacauaaggc

SEQ ID NO: 296435 - RNA, 32 nt, Homo Sapiens
ucugaagaagauuguagaaaagagacuaagau

SEQ ID NO: 296436 - RNA, 32 nt, Homo Sapiens
auggaaguggcagugaaaaauauguugagugu

SEQ ID NO: 296437 - RNA, 32 nt, Homo Sapiens
caggcagugcugccaguguccaggcauauggc

SEQ ID NO: 296438 - RNA, 32 nt, Homo Sapiens
cuccguaagaacucagaugccugggaagccca

SEQ ID NO: 296439 - RNA, 32 nt, Homo Sapiens
caucaccaagggugggaugggagggcagaggg

SEQ ID NO: 296440 - RNA, 32 nt, Homo Sapiens
ucaucugaacaaagcggugacuggcuuugccu

SEQ ID NO: 296441 - RNA, 32 nt, Homo Sapiens
aguuggaaacaguaaagguuguaagcuuugug

SEQ ID NO: 296442 - RNA, 32 nt, Homo Sapiens
ugcauaugugcauuuuaauuucaaaaagucuu

SEQ ID NO: 296443 - RNA, 32 nt, Homo Sapiens
ucugaugccaccacaaaacaaacauguucacu

SEQ ID NO: 296444 - RNA, 32 nt, Homo Sapiens
uuugcuuccagaagcaagaaaaguuucuucuc

SEQ ID NO: 296445 - RNA, 32 nt, Homo Sapiens
auuaucaugucuauuuuugaugacucaucaau

SEQ ID NO: 296446 - RNA, 32 nt, Homo Sapiens
uaaacuuugccgcuccuuccgcggcgcucccg

SEQ ID NO: 296447 - RNA, 32 nt, Homo Sapiens
aucacucgcagcuaaguuuuuguauuuuuagu

SEQ ID NO: 296448 - RNA, 32 nt, Homo Sapiens
uacgugccgucucuccuucccguuuccuuuca

SEQ ID NO: 296449 - RNA, 32 nt, Homo Sapiens
caggcauggggauauaauagugugaugaacca

SEQ ID NO: 296450 - RNA, 32 nt, Homo Sapiens
uuacagaaaaggaaauggugggaauucagugu

SEQ ID NO: 296451 - RNA, 32 nt, Homo Sapiens
aacauugccugccaauggugguguuaaauuug

SEQ ID NO: 296452 - RNA, 32 nt, Homo Sapiens
uucugccucacagcaaauaaauaagguaguga

SEQ ID NO: 296453 - RNA, 32 nt, Homo Sapiens
aggcagucggagcaccucguggagcggcugcu

SEQ ID NO: 296454 - RNA, 29 nt, Homo Sapiens
aauacuuuuuaacuuagaggcaauggaaa

SEQ ID NO: 296455 - RNA, 32 nt, Homo Sapiens
uuucauuguauauaggucuuauuucauaaaca

SEQ ID NO: 296456 - RNA, 32 nt, Homo Sapiens
uccuuccuucccagcccuuguggcucugucca

SEQ ID NO: 296457 - RNA, 32 nt, Homo Sapiens
agcgcgcacggccugccagcccggggcgccag

SEQ ID NO: 296458 - RNA, 30 nt, Homo Sapiens
uucaucucuguaaccccagaagcucuccag

SEQ ID NO: 296459 - RNA, 32 nt, Homo Sapiens
ggcuccccuucagcaggcuggcauuccaagca

SEQ ID NO: 296460 - RNA, 32 nt, Homo Sapiens
acacaucuauuauguaaugcuguagaccuguc

SEQ ID NO: 296461 - RNA, 32 nt, Homo Sapiens
ucuccaguucccuccuggucaccugcugccug

SEQ ID NO: 296462 - RNA, 32 nt, Homo Sapiens
ugacaguuuuaacugacaacuuugauaacaga

SEQ ID NO: 296463 - RNA, 32 nt, Homo Sapiens
uggugcuggaccugcaucauccucguggguac

SEQ ID NO: 296464 - RNA, 32 nt, Homo Sapiens
ccacugcugugaccacgacacugcuggggcag

SEQ ID NO: 296465 - RNA, 32 nt, Homo Sapiens
cccugccccccucuccugugagacuggcugcg

SEQ ID NO: 296466 - RNA, 32 nt, Homo Sapiens
cccuugagaagggguggucagagggaaacaug

SEQ ID NO: 296467 - RNA, 32 nt, Homo Sapiens
cguuuuuaauaggauuuuuagacacugagggu

SEQ ID NO: 296468 - RNA, 32 nt, Homo Sapiens
acagaccaguguuccuuauugacaguguucaa

SEQ ID NO: 296469 - RNA, 32 nt, Homo Sapiens
uggccuuuggaacaccaagcucugugcugaag

SEQ ID NO: 296470 - RNA, 32 nt, Homo Sapiens
uguagauuaggcuacauaaaaugggcugaggg

SEQ ID NO: 296471 - RNA, 32 nt, Homo Sapiens
ugucccuucccuccccuuugcuggccuacucu

SEQ ID NO: 296472 - RNA, 32 nt, Homo Sapiens
gcagauucccacugccgcugcccgcucagccc

SEQ ID NO: 296473 - RNA, 32 nt, Homo Sapiens
uauggaaauggcauuggggcacucaccuuaau

SEQ ID NO: 296474 - RNA, 32 nt, Homo Sapiens
aaagccaaagauugacccaguuacuugagggu

SEQ ID NO: 296475 - RNA, 32 nt, Homo Sapiens
cugaacccauuguuucuuucugaagagacuuu

SEQ ID NO: 296476 - RNA, 32 nt, Homo Sapiens
cuugcccggccaccacccaugcccuccauagg

SEQ ID NO: 296477 - RNA, 32 nt, Homo Sapiens
gacauauaguuauacauauuuauggaguguga

SEQ ID NO: 296478 - RNA, 32 nt, Homo Sapiens
acugcuaagaucuggaaguaccaccuggacuc

SEQ ID NO: 296479 - RNA, 32 nt, Homo Sapiens
cugaacaggcacagcccucccaucuucccaau

SEQ ID NO: 296480 - RNA, 32 nt, Homo Sapiens
ccaccgguacugccagcucccguugggccagg

SEQ ID NO: 296481 - RNA, 32 nt, Homo Sapiens
cagagcgcucgggcugccuaggcggcaccucg

SEQ ID NO: 296482 - RNA, 28 nt, Homo Sapiens
auuuuuaaagauuaaucugaauuaagcu

SEQ ID NO: 296483 - RNA, 32 nt, Homo Sapiens
gcaguugccuugggucccacugucaccaaggc

SEQ ID NO: 296484 - RNA, 32 nt, Homo Sapiens
ccagggugggugucccugggagcccuggaaau

SEQ ID NO: 296485 - RNA, 32 nt, Homo Sapiens
cgccccguccugccuccgccccgcccccgcuu

SEQ ID NO: 296486 - RNA, 32 nt, Homo Sapiens
ucaccuccccccgcaucccccaucugcagccc

SEQ ID NO: 296487 - RNA, 32 nt, Homo Sapiens
uccgaagccccuugucccuuucuuggggauug

SEQ ID NO: 296488 - RNA, 32 nt, Homo Sapiens
ucucugauaaaacugguuuuagacaaaaaaua

SEQ ID NO: 296489 - RNA, 32 nt, Homo Sapiens
cuguaacaauaacaagaccacuuuuuaagauu

SEQ ID NO: 296490 - RNA, 32 nt, Homo Sapiens
guauguggcaggcaguacccuguauuagguag

SEQ ID NO: 296491 - RNA, 31 nt, Homo Sapiens
ugguggcagcgcagagcccaaucauuccaac

SEQ ID NO: 296492 - RNA, 30 nt, Homo Sapiens
gcccuggggcccgugcccccaccaggccag

SEQ ID NO: 296493 - RNA, 32 nt, Homo Sapiens
ggaauaaagggagagagcaguguggaaaccac

SEQ ID NO: 296494 - RNA, 32 nt, Homo Sapiens
ucuggaagauauauuuuucauuugcauauugc

SEQ ID NO: 296495 - RNA, 32 nt, Homo Sapiens
ucacagacuauugaaccuggaacuggcuuuga

SEQ ID NO: 296496 - RNA, 32 nt, Homo Sapiens
agaacuguaaaugaagacgaauccacauggca

SEQ ID NO: 296497 - RNA, 32 nt, Homo Sapiens
uggagugcagugccgcgaucucggcucacugc

SEQ ID NO: 296498 - RNA, 32 nt, Homo Sapiens
cagugagacuccagcacagacacaugguggaa

SEQ ID NO: 296499 - RNA, 31 nt, Homo Sapiens
ggagcucuaagugguccaggaguccaaguaa

SEQ ID NO: 296500 - RNA, 32 nt, Homo Sapiens
gugcccugugcccuguuugcuacuucacugcc

SEQ ID NO: 296501 - RNA, 32 nt, Homo Sapiens
auuugacugaucucaauaaacuguuugcuuga

SEQ ID NO: 296502 - RNA, 32 nt, Homo Sapiens
ucuucuuuaggaccugggcgcugacucacucc

SEQ ID NO: 296503 - RNA, 32 nt, Homo Sapiens
gagagaagcggagggcgggcuggguuugaauc

SEQ ID NO: 296504 - RNA, 32 nt, Homo Sapiens
uucuauuuguuauugcuacuaugugaaacuuu

SEQ ID NO: 296505 - RNA, 32 nt, Homo Sapiens
cacugcacuccagccugggugauggagcaaga

SEQ ID NO: 296506 - RNA, 32 nt, Homo Sapiens
ggcagggacaucaucucuuccaucuuuggguc

SEQ ID NO: 296507 - RNA, 32 nt, Homo Sapiens
uggaaacuauaaauugaauuaugugcugaagg

SEQ ID NO: 296508 - RNA, 32 nt, Homo Sapiens
acagaaauacuuaaaaugaggaauaagaaugg

SEQ ID NO: 296509 - RNA, 32 nt, Homo Sapiens
acuguaucucaugucuuucacuugcuuggugc

SEQ ID NO: 296510 - RNA, 32 nt, Homo Sapiens
uccucccccgagaccacccccacccuggggaa

SEQ ID NO: 296511 - RNA, 32 nt, Homo Sapiens
aucucucucaaguuuaaaguuccacagaucuc

SEQ ID NO: 296512 - RNA, 32 nt, Homo Sapiens
uuaccaguucccuuucuugcagucagcuucau

SEQ ID NO: 296513 - RNA, 32 nt, Homo Sapiens
uuggaaaagaaaccuuccuuucuggaguuugc

SEQ ID NO: 296514 - RNA, 32 nt, Homo Sapiens
ggagaaagccuauuuucuuuucguuuagauac

SEQ ID NO: 296515 - RNA, 32 nt, Homo Sapiens
uaggggaaaugggaagaggauugccauggccu

SEQ ID NO: 296516 - RNA, 32 nt, Homo Sapiens
ugagacaggaccagauguguucuuuucuccuu

SEQ ID NO: 296517 - RNA, 32 nt, Homo Sapiens
cccacgggaaaggagcugcuuucuucccucac

SEQ ID NO: 296518 - RNA, 29 nt, Homo Sapiens
ucuucugugacuuagucuguuguaguggu

SEQ ID NO: 296519 - RNA, 32 nt, Homo Sapiens
accugacaagcugccacggggaacugcagcuu

SEQ ID NO: 296520 - RNA, 32 nt, Homo Sapiens
acacacacgcgcgcgcacacacaugcuuuuuu

SEQ ID NO: 296521 - RNA, 32 nt, Homo Sapiens
ccggggcugcgcgguuugcaccgccaggccga

SEQ ID NO: 296522 - RNA, 32 nt, Homo Sapiens
agagaagggacacaccccugagagaugcucac

SEQ ID NO: 296523 - RNA, 32 nt, Homo Sapiens
acagcacagguucagggaaaagaguucgcuac

SEQ ID NO: 296524 - RNA, 32 nt, Homo Sapiens
ucuuauuugucaaaaaauucacacaaagauca

SEQ ID NO: 296525 - RNA, 32 nt, Homo Sapiens
ccaggcggcgguggaaaggcuaaaggaggaca

SEQ ID NO: 296526 - RNA, 32 nt, Homo Sapiens
auuguuuacagucauuggaauaaggcauggcu

SEQ ID NO: 296527 - RNA, 32 nt, Homo Sapiens
ucuuccguauccucgcuccguuccgccuuaaa

SEQ ID NO: 296528 - RNA, 32 nt, Homo Sapiens
agguuuguucuuuugcucuuugcaauaacucu

SEQ ID NO: 296529 - RNA, 32 nt, Homo Sapiens
gcuguuuuguuuuguuuuuuuaugugugacuu

SEQ ID NO: 296530 - RNA, 32 nt, Homo Sapiens
uguauguaauugaagauuuauaaagaaaagcu

SEQ ID NO: 296531 - RNA, 32 nt, Homo Sapiens
uuaguagaucaaacagaauaguaggaaacaag

SEQ ID NO: 296532 - RNA, 32 nt, Homo Sapiens
cugggcggcgacggagcggcgaaugccgggcc

SEQ ID NO: 296533 - RNA, 32 nt, Homo Sapiens
ugcccccagaaucugggcuucuucacccauuu

SEQ ID NO: 296534 - RNA, 32 nt, Homo Sapiens
uauauaaguauuuuuuguguauuaugacuacg

SEQ ID NO: 296535 - RNA, 28 nt, Homo Sapiens
cucaccaugggugccaggaugcuucgca

SEQ ID NO: 296536 - RNA, 32 nt, Homo Sapiens
uugugaugugauguaauuggaauagagcuguu

SEQ ID NO: 296537 - RNA, 32 nt, Homo Sapiens
uuaggaaucuauuugaaauauucauuaccuau

SEQ ID NO: 296538 - RNA, 31 nt, Homo Sapiens
uuuagacugccgguuugugaggguuggcucu

SEQ ID NO: 296539 - RNA, 32 nt, Homo Sapiens
caggagguggagccggccgggugcucgaggga

SEQ ID NO: 296540 - RNA, 32 nt, Homo Sapiens
agcaggaggcgagguccgccggagcucugaac

SEQ ID NO: 296541 - RNA, 32 nt, Homo Sapiens
uauccuuuuaccuuuaccuugucuuugucauu

SEQ ID NO: 296542 - RNA, 32 nt, Homo Sapiens
aaauguuuuuaagaauuuuucuuuuuauuaaa

SEQ ID NO: 296543 - RNA, 32 nt, Homo Sapiens
guggcaguuucccccaugcuguucucaugaua

SEQ ID NO: 296544 - RNA, 32 nt, Homo Sapiens
cacggcccgcggcucagccucggccgucugcc

SEQ ID NO: 296545 - RNA, 32 nt, Homo Sapiens
aaacacuaaggagcuaugagugucacaucaua

SEQ ID NO: 296546 - RNA, 32 nt, Homo Sapiens
ugcucucugccacacgugggcuuccucaggcu

SEQ ID NO: 296547 - RNA, 32 nt, Homo Sapiens
ucuggauagauuacagauauaauaaccauguu

SEQ ID NO: 296548 - RNA, 32 nt, Homo Sapiens
gcggaggccgcggcgcugguguggauucgcgg

SEQ ID NO: 296549 - RNA, 32 nt, Homo Sapiens
guggugugggccgcgugcggcgucuucuccau

SEQ ID NO: 296550 - RNA, 31 nt, Homo Sapiens
gccaggagcugugagaaccagggccagccac

SEQ ID NO: 296551 - RNA, 32 nt, Homo Sapiens
accgccuuuacuaccucuaccugcagaagacg

SEQ ID NO: 296552 - RNA, 32 nt, Homo Sapiens
ccucuucucagccccagcucgugcccuguuuu

SEQ ID NO: 296553 - RNA, 32 nt, Homo Sapiens
cauuugagccacaguuuuuagaucagcaccug

SEQ ID NO: 296554 - RNA, 32 nt, Homo Sapiens
uccuuaacuuuguauccuggcuuauaacaggc

SEQ ID NO: 296555 - RNA, 32 nt, Homo Sapiens
caaaaagguagugugauaguauaaguaucuaa

SEQ ID NO: 296556 - RNA, 32 nt, Homo Sapiens
ucucccuccuggacuguccccauccccccucc

SEQ ID NO: 296557 - RNA, 32 nt, Homo Sapiens
uggcucacaccuguaaucccagcacuuuugga

SEQ ID NO: 296558 - RNA, 32 nt, Homo Sapiens
agcgcaaaccacggcuccugcugcugaggaaa

SEQ ID NO: 296559 - RNA, 32 nt, Homo Sapiens
agcggcgaguggcuccgucuccgcggacagag

SEQ ID NO: 296560 - RNA, 32 nt, Homo Sapiens
cccauuuuuaaauaugcaauucaguggauuaa

SEQ ID NO: 296561 - RNA, 32 nt, Homo Sapiens
auaaggccuaaauugaaauuguuaaccaagga

SEQ ID NO: 296562 - RNA, 32 nt, Homo Sapiens
cccucgcgcccuagccgcccugccgggcuauu

SEQ ID NO: 296563 - RNA, 32 nt, Homo Sapiens
auggcauggugcccugccugcccccgggcgcc

SEQ ID NO: 296564 - RNA, 32 nt, Homo Sapiens
auaggagagagaaagauuauauaugcacauau

SEQ ID NO: 296565 - RNA, 32 nt, Homo Sapiens
aauuagugcauacaucaugucauuucaccucc

SEQ ID NO: 296566 - RNA, 32 nt, Homo Sapiens
cauuuuggaaaguuaaaaauugauucuuauuu

SEQ ID NO: 296567 - RNA, 32 nt, Homo Sapiens
uggcuuggccccaggaauuuccugugacucca

SEQ ID NO: 296568 - RNA, 32 nt, Homo Sapiens
uucugaaaauaugcaauagccuaugauuuucc

SEQ ID NO: 296569 - RNA, 32 nt, Homo Sapiens
ccugcuucucuuuuccucgcagaugauaaaag

SEQ ID NO: 296570 - RNA, 32 nt, Homo Sapiens
agaugccuccugacaaggucuugauuccuggu

SEQ ID NO: 296571 - RNA, 32 nt, Homo Sapiens
cugccaaugcucccggccaaauaaaaaaccuc

SEQ ID NO: 296572 - RNA, 32 nt, Homo Sapiens
ggguguggggaucagacaggcuuuuguaugug

SEQ ID NO: 296573 - RNA, 32 nt, Homo Sapiens
gcaccuuacgacccucccugcagggcugggcu

SEQ ID NO: 296574 - RNA, 32 nt, Homo Sapiens
cauguggcguauacuugguaaauauuuuguua

SEQ ID NO: 296575 - RNA, 32 nt, Homo Sapiens
uaucuuuuacuuucagucuaacacagcacugc

SEQ ID NO: 296576 - RNA, 32 nt, Homo Sapiens
cagcuuacaccuguaaucugagcgcuuuggga

SEQ ID NO: 296577 - RNA, 32 nt, Homo Sapiens
ugcucccggaaaugcaaaugagacuccuggaa

SEQ ID NO: 296578 - RNA, 32 nt, Homo Sapiens
agaccaggaguuccaaaccagcccuggcaaca

SEQ ID NO: 296579 - RNA, 32 nt, Homo Sapiens
agcuugggaagcagcuccugcugggagcaugg

SEQ ID NO: 296580 - RNA, 32 nt, Homo Sapiens
aaccugaaauucugucugauaccaagauugaa

SEQ ID NO: 296581 - RNA, 32 nt, Homo Sapiens
cgagcggagccccggccuccccgacuccgcuc

SEQ ID NO: 296582 - RNA, 32 nt, Homo Sapiens
cugccgcgcgcccucgcgccuguccacauccc

SEQ ID NO: 296583 - RNA, 32 nt, Homo Sapiens
ugaaguugaugaugaugguuagauggccucac

SEQ ID NO: 296584 - RNA, 32 nt, Homo Sapiens
ugucugcugacgcccccuggccugcagugacc

SEQ ID NO: 296585 - RNA, 32 nt, Homo Sapiens
gcugucgccggcuccgagcugcggccgagccc

SEQ ID NO: 296586 - RNA, 32 nt, Homo Sapiens
uucagcagaaaacuuuuuauacucuaauucuu

SEQ ID NO: 296587 - RNA, 32 nt, Homo Sapiens
uuuuuuuuuuucuggaaauaggggcauuguga

SEQ ID NO: 296588 - RNA, 32 nt, Homo Sapiens
aagaugaaaauggaaguggcaauauaagggga

SEQ ID NO: 296589 - RNA, 32 nt, Homo Sapiens
agugggccccugcgcccuccccggccagcuga

SEQ ID NO: 296590 - RNA, 32 nt, Homo Sapiens
gaguccccaggaauuucuggcuccugccuuca

SEQ ID NO: 296591 - RNA, 32 nt, Homo Sapiens
gguggauaugguggcgguguuggaggauauga

SEQ ID NO: 296592 - RNA, 32 nt, Homo Sapiens
ggucaguuuguuucauuaucacauuuguagga

SEQ ID NO: 296593 - RNA, 32 nt, Homo Sapiens
ugggggccuccaugggcgccugagggccaggc

SEQ ID NO: 296594 - RNA, 32 nt, Homo Sapiens
gggggguccccgcuacugcucucugaauccau

SEQ ID NO: 296595 - RNA, 32 nt, Homo Sapiens
gagggugguguugcgcggggcugggauuaggg

SEQ ID NO: 296596 - RNA, 32 nt, Homo Sapiens
caaggggagcuuugggagcacaaagcccauga

SEQ ID NO: 296597 - RNA, 32 nt, Homo Sapiens
gcggaggguuuaauuuaccauagucguacaca

SEQ ID NO: 296598 - RNA, 32 nt, Homo Sapiens
cccaugcaugaaaaauaaaauaaaauaaaacg

SEQ ID NO: 296599 - RNA, 32 nt, Homo Sapiens
ccugguuuuguaaauaaauuuguauuguaaua

SEQ ID NO: 296600 - RNA, 32 nt, Homo Sapiens
uggccgcacccacagcgccgggauccuaggac

SEQ ID NO: 296601 - RNA, 32 nt, Homo Sapiens
aggaaaaucuucauacugaauucuucuguugc

SEQ ID NO: 296602 - RNA, 32 nt, Homo Sapiens
cuugucccaaaauaaauccuuucagaauguag

SEQ ID NO: 296603 - RNA, 32 nt, Homo Sapiens
ugauguccuuuuauuuuuuucuuugaaaacug

SEQ ID NO: 296604 - RNA, 32 nt, Homo Sapiens
gcucgucccgcacccgggccggccguccauag

SEQ ID NO: 296605 - RNA, 32 nt, Homo Sapiens
ucagcucucaaaaaaggcacaaacaauugaag

SEQ ID NO: 296606 - RNA, 32 nt, Homo Sapiens
acuuccuucccaaagaaaauagauccuccaug

SEQ ID NO: 296607 - RNA, 32 nt, Homo Sapiens
gccucggcgggugcacagguggucucagagcu

SEQ ID NO: 296608 - RNA, 32 nt, Homo Sapiens
aaaggugacaccuggagaccaaaugcaggaug

SEQ ID NO: 296609 - RNA, 31 nt, Homo Sapiens
cuggcgcgccgcagccauggccaucgcucac

SEQ ID NO: 296610 - RNA, 32 nt, Homo Sapiens
cuccugagggcuguggcggcggcggcccggga

SEQ ID NO: 296611 - RNA, 32 nt, Homo Sapiens
ucucugcgaccgccgcgcccgcucccgaccgu

SEQ ID NO: 296612 - RNA, 32 nt, Homo Sapiens
gcggagcccggaugcuggcccggaggaagccg

SEQ ID NO: 296613 - RNA, 30 nt, Homo Sapiens
gugaggcgcgcgcggagucggaggaagagg

SEQ ID NO: 296614 - RNA, 32 nt, Homo Sapiens
gcaaauccaagagcuccaaguacuauuuugac

SEQ ID NO: 296615 - RNA, 32 nt, Homo Sapiens
uggccuggaaauauuuuguaacacuuuaaagg

SEQ ID NO: 296616 - RNA, 22 nt, Homo Sapiens
gaggaagcaaagaaaaugauau

SEQ ID NO: 296617 - RNA, 32 nt, Homo Sapiens
guacccccaguuuauuucuacugugcuuuauu

SEQ ID NO: 296618 - RNA, 32 nt, Homo Sapiens
aauauauaguaaaagcuacaacaaagaaaaug

SEQ ID NO: 296619 - RNA, 32 nt, Homo Sapiens
auggaaaucauaauugucaucuucuucauggu

SEQ ID NO: 296620 - RNA, 32 nt, Homo Sapiens
uagcucaugccuguaucccagcccuuugggag

SEQ ID NO: 296621 - RNA, 32 nt, Homo Sapiens
accugagccgcggcgcuaggaugggaaacagu

SEQ ID NO: 296622 - RNA, 32 nt, Homo Sapiens
aaacaacgcgggcacaguggacuucagagaag

SEQ ID NO: 296623 - RNA, 32 nt, Homo Sapiens
cggcaggcgggugcgcggagggcugguacccc

SEQ ID NO: 296624 - RNA, 32 nt, Homo Sapiens
aaggccugcuccaugacacaggaugcuacaug

SEQ ID NO: 296625 - RNA, 32 nt, Homo Sapiens
cugucuccucugcuccucccaccucaucccua

SEQ ID NO: 296626 - RNA, 32 nt, Homo Sapiens
ggcugagucucugacagcugugagugugugug

SEQ ID NO: 296627 - RNA, 32 nt, Homo Sapiens
gcccugcucccucucagcaccugggcggacgg

SEQ ID NO: 296628 - RNA, 32 nt, Homo Sapiens
auuuuggcuggcaacugacggacgcagcgggc

SEQ ID NO: 296629 - RNA, 31 nt, Homo Sapiens
ggagacaugcugccccugcugcugcugcccc

SEQ ID NO: 296630 - RNA, 32 nt, Homo Sapiens
ggaugguggcccuuggccuccuggugcagagc

SEQ ID NO: 296631 - RNA, 32 nt, Homo Sapiens
ccuuugauaucaugaauaaacuuacacuggac

SEQ ID NO: 296632 - RNA, 32 nt, Homo Sapiens
gcaauuuuacuuugucuagcuucuaauguggu

SEQ ID NO: 296633 - RNA, 32 nt, Homo Sapiens
aaaaaccucacagauaagcaaaguauauaguu

SEQ ID NO: 296634 - RNA, 32 nt, Homo Sapiens
cgcgcgggcaagauggugugcgcucgggcggc

SEQ ID NO: 296635 - RNA, 32 nt, Homo Sapiens
caggagaaccucagucugacgacauugaagcu

SEQ ID NO: 296636 - RNA, 32 nt, Homo Sapiens
gagcuguuguaguuacaguaaauacacuguga

SEQ ID NO: 296637 - RNA, 32 nt, Homo Sapiens
uuauuucuucuacagcacagauucacuggcug

SEQ ID NO: 296638 - RNA, 32 nt, Homo Sapiens
ccuccagccucccagcagcauggcuuucaccg

SEQ ID NO: 296639 - RNA, 32 nt, Homo Sapiens
ucgauucuaaucuuuucaugcugcacacgauu

SEQ ID NO: 296640 - RNA, 29 nt, Homo Sapiens
guggcgaucauggcaaguuagaaguuuuc

SEQ ID NO: 296641 - RNA, 28 nt, Homo Sapiens
guaguagguguguguauguguuucuaga

SEQ ID NO: 296642 - RNA, 32 nt, Homo Sapiens
cugugguggagaauguagcgcaacccagugga

SEQ ID NO: 296643 - RNA, 32 nt, Homo Sapiens
gcugauuaauuagaaaaauuaauauuucagug

SEQ ID NO: 296644 - RNA, 29 nt, Homo Sapiens
ugcagucggggacaaggagcuuccgucug

SEQ ID NO: 296645 - RNA, 32 nt, Homo Sapiens
cuccuguaccguggcuguggcccgagucccag

SEQ ID NO: 296646 - RNA, 32 nt, Homo Sapiens
gaugcuaugcuuuuuccaaccaagccagaaac

SEQ ID NO: 296647 - RNA, 32 nt, Homo Sapiens
uuauuuuauuuuugguugucauggugauugaa

SEQ ID NO: 296648 - RNA, 32 nt, Homo Sapiens
uuccaagugucuuuuuaguguggcuuuaguau

SEQ ID NO: 296649 - RNA, 32 nt, Homo Sapiens
cgacaggcucugcgugugcagcucucugcguc

SEQ ID NO: 296650 - RNA, 32 nt, Homo Sapiens
gaugggcaccugggggguucugguuuuuacuu

SEQ ID NO: 296651 - RNA, 32 nt, Homo Sapiens
agggccucuuucaucugugcucuuccaggaug

SEQ ID NO: 296652 - RNA, 29 nt, Homo Sapiens
aaugugccugagauucggauggggagcuc

SEQ ID NO: 296653 - RNA, 32 nt, Homo Sapiens
accacugggccgcagcgaccacaggggaguuc

SEQ ID NO: 296654 - RNA, 32 nt, Homo Sapiens
ccuccccggcgccgcgcgggcagguucgacca

SEQ ID NO: 296655 - RNA, 32 nt, Homo Sapiens
cgcugagccugccuuuuaaaauauauguguau

SEQ ID NO: 296656 - RNA, 32 nt, Homo Sapiens
ccccucagcggucgccacucucuucucuguug

SEQ ID NO: 296657 - RNA, 32 nt, Homo Sapiens
accugcccugucagcccaguuccccaggcauc

SEQ ID NO: 296658 - RNA, 30 nt, Homo Sapiens
uccgcacggaggcuccugggucccgcgcgc

SEQ ID NO: 296659 - RNA, 32 nt, Homo Sapiens
aacaaaaagaaaucuugucuuaccacaguguu

SEQ ID NO: 296660 - RNA, 32 nt, Homo Sapiens
aagguaccauggcgggacguggcgccauggug

SEQ ID NO: 296661 - RNA, 32 nt, Homo Sapiens
aaugaagagaagucaacaaauauuuugguacu

SEQ ID NO: 296662 - RNA, 32 nt, Homo Sapiens
ccccccgugcccuagccgggggccccccgaug

SEQ ID NO: 296663 - RNA, 32 nt, Homo Sapiens
ggccauccaagcccaaggaccugggauaaacu

SEQ ID NO: 296664 - RNA, 32 nt, Homo Sapiens
gagguccaaggucaaggcaccagcaaauuugg

SEQ ID NO: 296665 - RNA, 32 nt, Homo Sapiens
guucaugcaaccuccgccuccuggguucaagc

SEQ ID NO: 296666 - RNA, 32 nt, Homo Sapiens
ugacuaagagagccuuccuaggucuggaaggu

SEQ ID NO: 296667 - RNA, 32 nt, Homo Sapiens
cggccggggaccagcccugguccagcgccucc

SEQ ID NO: 296668 - RNA, 32 nt, Homo Sapiens
cauauuguucuucagagaccucacuacccaca

SEQ ID NO: 296669 - RNA, 32 nt, Homo Sapiens
acuugcuaggacuuaauuggcuuuggcaaagc

SEQ ID NO: 296670 - RNA, 32 nt, Homo Sapiens
cacggcccgcuuuccuucuccuccaugcuggg

SEQ ID NO: 296671 - RNA, 32 nt, Homo Sapiens
uuaugcauaaaauaaagaaauucuuagauuaa

SEQ ID NO: 296672 - RNA, 32 nt, Homo Sapiens
cauacucuagaaucuugucugucacucacuac

SEQ ID NO: 296673 - RNA, 32 nt, Homo Sapiens
cacaguagaaaagacacaugucuggauuuucu

SEQ ID NO: 296674 - RNA, 31 nt, Homo Sapiens
cgagggugaaacaaaauccaacccugucaga

SEQ ID NO: 296675 - RNA, 32 nt, Homo Sapiens
gcucaaagccagcaggguuggggguccgccuc

SEQ ID NO: 296676 - RNA, 32 nt, Homo Sapiens
cagugcucuagggcugccauuacacggucuug

SEQ ID NO: 296677 - RNA, 32 nt, Homo Sapiens
ccgcgcccgagcugccuucgcgugcccccgcc

SEQ ID NO: 296678 - RNA, 32 nt, Homo Sapiens
ggagggcuugggugccugggcugggugugggg

SEQ ID NO: 296679 - RNA, 32 nt, Homo Sapiens
gucaacuucugaagugacuuugaaggcagggc

SEQ ID NO: 296680 - RNA, 32 nt, Homo Sapiens
uuuugucugaccaggugggcuggaggggacaa

SEQ ID NO: 296681 - RNA, 32 nt, Homo Sapiens
gaucugcucauauucuaaaggcagacguaauu

SEQ ID NO: 296682 - RNA, 32 nt, Homo Sapiens
cagacagaccaucucccugugguuguuugacu

SEQ ID NO: 296683 - RNA, 32 nt, Homo Sapiens
caagagugcucuuuuuaucaccuucuggaaau

SEQ ID NO: 296684 - RNA, 32 nt, Homo Sapiens
acagauaucuuugaagacacaaacacucaccu

SEQ ID NO: 296685 - RNA, 32 nt, Homo Sapiens
cucccugaccagcagacucaccucccaagaac

SEQ ID NO: 296686 - RNA, 30 nt, Homo Sapiens
guaagcuauagaauuuagauaugcaccucu

SEQ ID NO: 296687 - RNA, 32 nt, Homo Sapiens
caucaagggcuccuuacccacccccuuccuca

SEQ ID NO: 296688 - RNA, 32 nt, Homo Sapiens
gcucugcccucccucccccgaaguucucugug

SEQ ID NO: 296689 - RNA, 30 nt, Homo Sapiens
acaggucuuuccgugccggcgguggaggug

SEQ ID NO: 296690 - RNA, 32 nt, Homo Sapiens
cagaugccacucccagcacaugauaagaagug

SEQ ID NO: 296691 - RNA, 32 nt, Homo Sapiens
uuauauaaaaauuuauuaaauauaaauauccc

SEQ ID NO: 296692 - RNA, 32 nt, Homo Sapiens
aaaacccaaaacaguaaaaauccuggaagaca

SEQ ID NO: 296693 - RNA, 32 nt, Homo Sapiens
gguugauagaaagcacaggagauaacuuauga

SEQ ID NO: 296694 - RNA, 32 nt, Homo Sapiens
uuuaaaaaauguuuuguaaauccagguguauu

SEQ ID NO: 296695 - RNA, 32 nt, Homo Sapiens
cgcagauuuuuaaacuuuauuuucauaauuuc

SEQ ID NO: 296696 - RNA, 32 nt, Homo Sapiens
gggguucauuggcucagcuugggucagggcag

SEQ ID NO: 296697 - RNA, 32 nt, Homo Sapiens
gucaccccuuucugucccacuacaucugggac

SEQ ID NO: 296698 - RNA, 32 nt, Homo Sapiens
aggguuggccaggcccagucacaggggcagug

SEQ ID NO: 296699 - RNA, 32 nt, Homo Sapiens
cccggcgccaucugcuggacccguuccggcug

SEQ ID NO: 296700 - RNA, 32 nt, Homo Sapiens
aaacaguagaauuguguuacaaaggggugaaa

SEQ ID NO: 296701 - RNA, 32 nt, Homo Sapiens
ugccagugcuguagggacccaggcugcccagg

SEQ ID NO: 296702 - RNA, 32 nt, Homo Sapiens
gaaauguaucucugugcggcuauacauauaca

SEQ ID NO: 296703 - RNA, 32 nt, Homo Sapiens
uuuuuuuguuuuguuuuuuaaucuuuuagugu

SEQ ID NO: 296704 - RNA, 32 nt, Homo Sapiens
gucaaggaagcaguggcaauucuagauaucug

SEQ ID NO: 296705 - RNA, 32 nt, Homo Sapiens
gaagagaacacaggcuuuugccacugugugag

SEQ ID NO: 296706 - RNA, 32 nt, Homo Sapiens
uguccguaggacccgggcauucaggacgguag

SEQ ID NO: 296707 - RNA, 32 nt, Homo Sapiens
ugccugucguugcugguggcggcauggucuuc

SEQ ID NO: 296708 - RNA, 32 nt, Homo Sapiens
ggcgcaggcagacgauccugaugcucgaccac

SEQ ID NO: 296709 - RNA, 32 nt, Homo Sapiens
gugggcugacaguucaaggaugcacuguauag

SEQ ID NO: 296710 - RNA, 32 nt, Homo Sapiens
ucuuuuaaguauuaccauuauggugcuacuga

SEQ ID NO: 296711 - RNA, 32 nt, Homo Sapiens
gggugucccuggcucccaggccaggcagcugc

SEQ ID NO: 296712 - RNA, 32 nt, Homo Sapiens
cagaaguuaguggucauucuuuccuguagaua

SEQ ID NO: 296713 - RNA, 32 nt, Homo Sapiens
gagaacuuuccccccuucuccucccugccucu

SEQ ID NO: 296714 - RNA, 32 nt, Homo Sapiens
gcacccaggucgggcggugggggcgagcggag

SEQ ID NO: 296715 - RNA, 32 nt, Homo Sapiens
ugcccuccugccacccaagcugcugcuggacc

SEQ ID NO: 296716 - RNA, 32 nt, Homo Sapiens
gaaaaccaggacuagcucuacugucgggggca

SEQ ID NO: 296717 - RNA, 32 nt, Homo Sapiens
gcaggacacacacacagacacacacacacaca

SEQ ID NO: 296718 - RNA, 32 nt, Homo Sapiens
uggcuguccuuccccuuccccguccccugcag

SEQ ID NO: 296719 - RNA, 32 nt, Homo Sapiens
cuguugucccugcacucuuuaagggaguguac

SEQ ID NO: 296720 - RNA, 32 nt, Homo Sapiens
cugcaaaggacauggucuuguccuuuuuuaug

SEQ ID NO: 296721 - RNA, 32 nt, Homo Sapiens
cuauaaucaguucaaugcuuuauuuuuaaaaa

SEQ ID NO: 296722 - RNA, 32 nt, Homo Sapiens
acugacgugaaccaguaucuuuuaccaccaaa

SEQ ID NO: 296723 - RNA, 32 nt, Homo Sapiens
cuaaagaaaaaauacgggauauggagacugga

SEQ ID NO: 296724 - RNA, 32 nt, Homo Sapiens
uggccugaggaaagauucaacugccucucuuu

SEQ ID NO: 296725 - RNA, 32 nt, Homo Sapiens
guugaaaguucccuucuccacccaggggcagu

SEQ ID NO: 296726 - RNA, 32 nt, Homo Sapiens
uggcccacagccccagagagccugucugugca

SEQ ID NO: 296727 - RNA, 32 nt, Homo Sapiens
uacgaaagcuggaagcgugcgagggggguggg

SEQ ID NO: 296728 - RNA, 30 nt, Homo Sapiens
caaagaugaugauggguuguggggagucag

SEQ ID NO: 296729 - RNA, 32 nt, Homo Sapiens
acaaaguguucuuuuuauuugacugacaauuc

SEQ ID NO: 296730 - RNA, 32 nt, Homo Sapiens
ccagccugggucucagccccgcguacggccuu

SEQ ID NO: 296731 - RNA, 32 nt, Homo Sapiens
auuuuuaaaggaguuggaggagagggaggggg

SEQ ID NO: 296732 - RNA, 32 nt, Homo Sapiens
augcuguugucauggagcugugggaguuggca

SEQ ID NO: 296733 - RNA, 32 nt, Homo Sapiens
gcucuucaucucuccuucuguacauuucucag

SEQ ID NO: 296734 - RNA, 32 nt, Homo Sapiens
ucugagggaagaagggaauguuaaaaccugag

SEQ ID NO: 296735 - RNA, 32 nt, Homo Sapiens
uuuacacugauuaaaucauaaauauuuucagu

SEQ ID NO: 296736 - RNA, 32 nt, Homo Sapiens
cggagggagaggcgaugcugcaaaguguuuuc

SEQ ID NO: 296737 - RNA, 32 nt, Homo Sapiens
guccuuucuuaccaccugugcaccccacuugg

SEQ ID NO: 296738 - RNA, 32 nt, Homo Sapiens
ccaaugcccucccccaccccccacccccguga

SEQ ID NO: 296739 - RNA, 32 nt, Homo Sapiens
cucuuuggauacaauaacaggaccuuaccuca

SEQ ID NO: 296740 - RNA, 32 nt, Homo Sapiens
acuccuuccuuucuaucauuccccugcccacc

SEQ ID NO: 296741 - RNA, 32 nt, Homo Sapiens
accuuuggauagaacagaagcugagcaagaga

SEQ ID NO: 296742 - RNA, 32 nt, Homo Sapiens
cugaugaaaguuaacauuuuauaauacuuuuu

SEQ ID NO: 296743 - RNA, 32 nt, Homo Sapiens
uugaggggcgcggggaggagcuucgcgugcgg

SEQ ID NO: 296744 - RNA, 32 nt, Homo Sapiens
ccuggcguccugucggguccgcgcuggaggag

SEQ ID NO: 296745 - RNA, 32 nt, Homo Sapiens
aaaaaacaacaacaacaaaaaacaaguccaaa

SEQ ID NO: 296746 - RNA, 27 nt, Homo Sapiens
ugacugagaaggauugauaucauggcu

SEQ ID NO: 296747 - RNA, 32 nt, Homo Sapiens
gaaagcacagaaaggaaaaccaagguucucau

SEQ ID NO: 296748 - RNA, 32 nt, Homo Sapiens
uauacacauacauauauauacacacacgcauu

SEQ ID NO: 296749 - RNA, 32 nt, Homo Sapiens
acuacagagucuugcucugucgcccaggcugg

SEQ ID NO: 296750 - RNA, 32 nt, Homo Sapiens
uguuuccuaaauguauuugaccucaguauccu

SEQ ID NO: 296751 - RNA, 32 nt, Homo Sapiens
ccaauaacuauagcaccuuuuaugaugaccag

SEQ ID NO: 296752 - RNA, 32 nt, Homo Sapiens
aaggcugcagugagccgagauugcaccacugc

SEQ ID NO: 296753 - RNA, 32 nt, Homo Sapiens
gaggcugcagugagccgagauugcgccacugc

SEQ ID NO: 296754 - RNA, 32 nt, Homo Sapiens
gcgccggugggagcucgggccgugcccgcuga

SEQ ID NO: 296755 - RNA, 32 nt, Homo Sapiens
cgauuaaaaaaauuauuuuguuacuucgaagu

SEQ ID NO: 296756 - RNA, 32 nt, Homo Sapiens
uccccccguccuccuggaggcaguauaggaga

SEQ ID NO: 296757 - RNA, 29 nt, Homo Sapiens
ugaauuaauguugaauauuuucuacuguc

SEQ ID NO: 296758 - RNA, 32 nt, Homo Sapiens
aacucaagcugaucuuuccuaucuagccugcu

SEQ ID NO: 296759 - RNA, 32 nt, Homo Sapiens
gagcggggagggaauccuagcuuauuuucccu

SEQ ID NO: 296760 - RNA, 32 nt, Homo Sapiens
gaugguauccuauuuucuuguuuauacguuca

SEQ ID NO: 296761 - RNA, 32 nt, Homo Sapiens
uacugauucuacaaaauagaaacuacuucauu

SEQ ID NO: 296762 - RNA, 32 nt, Homo Sapiens
ugugcacccagcuccagugucucagcucacuu

SEQ ID NO: 296763 - RNA, 32 nt, Homo Sapiens
ugacugacggcgccggccgccccugcccgucg

SEQ ID NO: 296764 - RNA, 32 nt, Homo Sapiens
ccgucccccagcugcgcaacccuaggaacucu

SEQ ID NO: 296765 - RNA, 32 nt, Homo Sapiens
cuaauuuuugcaguauggauaggcugagaauu

SEQ ID NO: 296766 - RNA, 32 nt, Homo Sapiens
uacuucauuuuaauguaaaaagucuuuucugg

SEQ ID NO: 296767 - RNA, 32 nt, Homo Sapiens
aggcaaaaauuguuuaucaaaaauauguuccg

SEQ ID NO: 296768 - RNA, 32 nt, Homo Sapiens
augaaaauuucuuuuauuggaggaaguauuga

SEQ ID NO: 296769 - RNA, 32 nt, Homo Sapiens
agaucagugcuucuuuccuagacaaggcugaa

SEQ ID NO: 296770 - RNA, 32 nt, Homo Sapiens
gccuuccuccuccagguuggguuccacucccu

SEQ ID NO: 296771 - RNA, 32 nt, Homo Sapiens
gccuuccaugcagcuucccagccccuccccuc

SEQ ID NO: 296772 - RNA, 32 nt, Homo Sapiens
gaaaagucuucagagguuggaacuugggaaaa

SEQ ID NO: 296773 - RNA, 32 nt, Homo Sapiens
guauaaaacagaaagcacuaggauacaaauga

SEQ ID NO: 296774 - RNA, 32 nt, Homo Sapiens
gaggcuaugggaaacauagaaaugguauguau

SEQ ID NO: 296775 - RNA, 31 nt, Homo Sapiens
ugcugccagugaaagcucagagcuugacacc

SEQ ID NO: 296776 - RNA, 32 nt, Homo Sapiens
uugcccaaauguuguaucuauuuuaaauaguu

SEQ ID NO: 296777 - RNA, 32 nt, Homo Sapiens
cuuguguugcaaguugguccacagcaucuccg

SEQ ID NO: 296778 - RNA, 32 nt, Homo Sapiens
ccacugcacuccagccugggugucagagcaag

SEQ ID NO: 296779 - RNA, 32 nt, Homo Sapiens
acucacagucugaguucuuguccgccugucac

SEQ ID NO: 296780 - RNA, 32 nt, Homo Sapiens
caggggaggcaguggcaccucccucucccugc

SEQ ID NO: 296781 - RNA, 32 nt, Homo Sapiens
ggccaggcgcgguagcucacgccuguaauccc

SEQ ID NO: 296782 - RNA, 32 nt, Homo Sapiens
uaacucuaccccacccuacaaaaugcauaugg

SEQ ID NO: 296783 - RNA, 32 nt, Homo Sapiens
auauaagauucauauuuacuucuuauacauuu

SEQ ID NO: 296784 - RNA, 32 nt, Homo Sapiens
uggcaauaaguacaaugacaacuuuuuuggau

SEQ ID NO: 296785 - RNA, 32 nt, Homo Sapiens
acauaugcuauaauuuagaauuuucuuaugaa

SEQ ID NO: 296786 - RNA, 32 nt, Homo Sapiens
ugacugugagaaaacuuuugcccauaauucag

SEQ ID NO: 296787 - RNA, 32 nt, Homo Sapiens
uguuugcauguaagaugagaugagaucaauac

SEQ ID NO: 296788 - RNA, 31 nt, Homo Sapiens
gccagcaugcccggcguggcccgccugccgc

SEQ ID NO: 296789 - RNA, 32 nt, Homo Sapiens
ggcgcgggcgcggcgcucggaguccguucggg

SEQ ID NO: 296790 - RNA, 32 nt, Homo Sapiens
gauguuaaacauuggcuccuguguuugcacca

SEQ ID NO: 296791 - RNA, 32 nt, Homo Sapiens
cugcaauuuauguagcugguccugcuugcaag

SEQ ID NO: 296792 - RNA, 32 nt, Homo Sapiens
acauuuuuguuguugcagaaacugugucagag

SEQ ID NO: 296793 - RNA, 32 nt, Homo Sapiens
guucgcauauccacccaacauggaggagcccc

SEQ ID NO: 296794 - RNA, 32 nt, Homo Sapiens
gacccuagaguagcccugguguuauauuuuag

SEQ ID NO: 296795 - RNA, 32 nt, Homo Sapiens
gaaaguaauugguauucuuaauauccugggug

SEQ ID NO: 296796 - RNA, 32 nt, Homo Sapiens
aacaagcccacccaccauggcgagccccacuc

SEQ ID NO: 296797 - RNA, 32 nt, Homo Sapiens
acuucaucuauuuacacaucauuugcuugaac

SEQ ID NO: 296798 - RNA, 32 nt, Homo Sapiens
auaaaagaauaaaauucgacuuuuaaaccucu

SEQ ID NO: 296799 - RNA, 32 nt, Homo Sapiens
gccgugauccugagccaaggaggugaggagca

SEQ ID NO: 296800 - RNA, 32 nt, Homo Sapiens
ccugcagggcuggggcucucgggacagaugca

SEQ ID NO: 296801 - RNA, 32 nt, Homo Sapiens
cgagccuaaacacaaaauucauugauguguca

SEQ ID NO: 296802 - RNA, 32 nt, Homo Sapiens
gcaauggagcagcacaccuggugcguggggau

SEQ ID NO: 296803 - RNA, 32 nt, Homo Sapiens
uucaguaagucuguuuuuaguuucauauacuu

SEQ ID NO: 296804 - RNA, 32 nt, Homo Sapiens
cuuaauaaaaauuuuuuuguauaaaaaaaaaa

SEQ ID NO: 296805 - RNA, 32 nt, Homo Sapiens
uuuauaaaaugaauuaccagagaaacagagau

SEQ ID NO: 296806 - RNA, 32 nt, Homo Sapiens
acccugugguauugccccucuguccguagugu

SEQ ID NO: 296807 - RNA, 32 nt, Homo Sapiens
ugaugggcacaguacgcagagcaagcucggga

SEQ ID NO: 296808 - RNA, 32 nt, Homo Sapiens
caaaugaagguggggcggggcagugaggggug

SEQ ID NO: 296809 - RNA, 32 nt, Homo Sapiens
accuggacggcgagcgccuggugcuggggagu

SEQ ID NO: 296810 - RNA, 32 nt, Homo Sapiens
gaagacgaugcgaaggauauagagacuucagu

SEQ ID NO: 296811 - RNA, 32 nt, Homo Sapiens
gccagacccgcagccuggacccggcccugauc

SEQ ID NO: 296812 - RNA, 32 nt, Homo Sapiens
gccccaccaggagcucagcucuguggaguuuu

SEQ ID NO: 296813 - RNA, 32 nt, Homo Sapiens
ggaucuuuuuccuuuuucacuaucugcaucuu

SEQ ID NO: 296814 - RNA, 32 nt, Homo Sapiens
aaucaagcagcuugcauagaaauuguaugaug

SEQ ID NO: 296815 - RNA, 32 nt, Homo Sapiens
uuugaagucuccauucguuguacaccagagaa

SEQ ID NO: 296816 - RNA, 32 nt, Homo Sapiens
guccaaguccgcauuugagccuuguucugggg

SEQ ID NO: 296817 - RNA, 32 nt, Homo Sapiens
uacacauaggaagaaaggcauaaaaauaaaug

SEQ ID NO: 296818 - RNA, 32 nt, Homo Sapiens
uuacuucuauagaagggggcgcccucacagau

SEQ ID NO: 296819 - RNA, 32 nt, Homo Sapiens
auucucagcuucucgaaccccauggccuuguc

SEQ ID NO: 296820 - RNA, 31 nt, Homo Sapiens
gagaaggagggagcggguacggccuccuagc

SEQ ID NO: 296821 - RNA, 32 nt, Homo Sapiens
aagcagcagcagcagcagcagcccucgccguu

SEQ ID NO: 296822 - RNA, 32 nt, Homo Sapiens
ccauuaggggaaaaggaaggggugugguuugu

SEQ ID NO: 296823 - RNA, 32 nt, Homo Sapiens
uaguauaguauguaucucuguaagccacuaca

SEQ ID NO: 296824 - RNA, 32 nt, Homo Sapiens
ucuucucugcucccaacccccaucucauagca

SEQ ID NO: 296825 - RNA, 32 nt, Homo Sapiens
uauuuuauugccucugaguaucauauuaaaug

SEQ ID NO: 296826 - RNA, 32 nt, Homo Sapiens
accuguugcauuaaacuuguuuucuguugauu

SEQ ID NO: 296827 - RNA, 32 nt, Homo Sapiens
agcuaauguauuaaugugacauggaggaacuc

SEQ ID NO: 296828 - RNA, 32 nt, Homo Sapiens
ggagagaaauggcugaaaguggaaacccggag

SEQ ID NO: 296829 - RNA, 32 nt, Homo Sapiens
auaaugguguccagucuuuuuaaacuuguaaa

SEQ ID NO: 296830 - RNA, 32 nt, Homo Sapiens
cagucaacuuucagcuuuucuacauuuaggua

SEQ ID NO: 296831 - RNA, 32 nt, Homo Sapiens
caccucuggggauaagcugaggugacuaaaug

SEQ ID NO: 296832 - RNA, 32 nt, Homo Sapiens
cgucccagcaccacuucagcuccggagcauug

SEQ ID NO: 296833 - RNA, 32 nt, Homo Sapiens
gcggggaggagcuucccgcggccugcuccgcc

SEQ ID NO: 296834 - RNA, 32 nt, Homo Sapiens
aagaauugggggugggggagauggcuucccca

SEQ ID NO: 296835 - RNA, 32 nt, Homo Sapiens
acuuuuuugcucugcugugcugugggcuggca

SEQ ID NO: 296836 - RNA, 32 nt, Homo Sapiens
aguagaguuuaacguguauaagcuaaaaguga

SEQ ID NO: 296837 - RNA, 32 nt, Homo Sapiens
gcucucuggguuccuuggugcuaggaggagcc

SEQ ID NO: 296838 - RNA, 32 nt, Homo Sapiens
aucuugucuggcaauaaugccuagaugauuuc

SEQ ID NO: 296839 - RNA, 32 nt, Homo Sapiens
cuuguuggugcuguaggcacccgccaggagca

SEQ ID NO: 296840 - RNA, 32 nt, Homo Sapiens
uuauguuauagcaacaucucuuuucuaaaaua

SEQ ID NO: 296841 - RNA, 32 nt, Homo Sapiens
gcggcgaccgcccuccgcgaaaauaguuuguu

SEQ ID NO: 296842 - RNA, 32 nt, Homo Sapiens
ggagguguggagaggagggagggcagguuccu

SEQ ID NO: 296843 - RNA, 32 nt, Homo Sapiens
aaauguaaauuaaaacugcaaugagacaucau

SEQ ID NO: 296844 - RNA, 32 nt, Homo Sapiens
guuuuuagucuguguaguuaauuuaauuugca

SEQ ID NO: 296845 - RNA, 32 nt, Homo Sapiens
uaucaacaacuaauuuucaguuugucacaaaa

SEQ ID NO: 296846 - RNA, 32 nt, Homo Sapiens
aaacuguuuucuuuuucuuucuuaaaaaaaaa

SEQ ID NO: 296847 - RNA, 30 nt, Homo Sapiens
aaguuucgucuaaugggggcagucuccccu

SEQ ID NO: 296848 - RNA, 32 nt, Homo Sapiens
caaaggcgaagccagcaguuucuucugcugcc

SEQ ID NO: 296849 - RNA, 32 nt, Homo Sapiens
ccuucacucauugaacaagcucuuccugauua

SEQ ID NO: 296850 - RNA, 32 nt, Homo Sapiens
gugcagaaggucaguccuaccuuuuucuuucu

SEQ ID NO: 296851 - RNA, 32 nt, Homo Sapiens
auuauugccacuuuuccagcgcuaaaggcugu

SEQ ID NO: 296852 - RNA, 32 nt, Homo Sapiens
gcccuccccuccccacagcugcucuacaggga

SEQ ID NO: 296853 - RNA, 32 nt, Homo Sapiens
gcuucccucggcggcccgggcuccgcucaucc

SEQ ID NO: 296854 - RNA, 32 nt, Homo Sapiens
gagcagcucaggguggagcagcugcagccaug

SEQ ID NO: 296855 - RNA, 32 nt, Homo Sapiens
gcacaagcacaccguaucagcagcuuaucagg

SEQ ID NO: 296856 - RNA, 32 nt, Homo Sapiens
guucgucucuggcuccuccuccgccacagcag

SEQ ID NO: 296857 - RNA, 32 nt, Homo Sapiens
aucaagguaacuugcucccuucugccuacagg

SEQ ID NO: 296858 - RNA, 32 nt, Homo Sapiens
aguguguauaaaauguacguuuuaaaaaagga

SEQ ID NO: 296859 - RNA, 32 nt, Homo Sapiens
acagccuuccuguuaggcccaggccuccaugg

SEQ ID NO: 296860 - RNA, 32 nt, Homo Sapiens
ccagguccuugcugcuugcugcugggaaagga

SEQ ID NO: 296861 - RNA, 32 nt, Homo Sapiens
gguguuuagacaauuuauauuuaauaaaaugg

SEQ ID NO: 296862 - RNA, 32 nt, Homo Sapiens
aagcauguauguauauuuuguaaauaccucuu

SEQ ID NO: 296863 - RNA, 32 nt, Homo Sapiens
ugagccuuucugcgcccgcgggcaccaugagc

SEQ ID NO: 296864 - RNA, 32 nt, Homo Sapiens
uugccucuauggcuuuaucucccuuuuccaga

SEQ ID NO: 296865 - RNA, 32 nt, Homo Sapiens
uuucauauuuuccuaaaguuucguuucuguuu

SEQ ID NO: 296866 - RNA, 32 nt, Homo Sapiens
gcacuuuggggagcagauauuaacuuauuuuu

SEQ ID NO: 296867 - RNA, 32 nt, Homo Sapiens
uuuggagaggaugguauucaggcuuucucaug

SEQ ID NO: 296868 - RNA, 31 nt, Homo Sapiens
cccacacugcccucccugccccggcccaugc

SEQ ID NO: 296869 - RNA, 32 nt, Homo Sapiens
gggcgccgggcacaacgacaucgagcucuaca

SEQ ID NO: 296870 - RNA, 32 nt, Homo Sapiens
ugggugaggugacaucucauccccucacugaa

SEQ ID NO: 296871 - RNA, 32 nt, Homo Sapiens
cucuaacuucucugaaaucaucuccuauuaag

SEQ ID NO: 296872 - RNA, 32 nt, Homo Sapiens
guugauguugcaucuaaagaugcuauaagaca

SEQ ID NO: 296873 - RNA, 32 nt, Homo Sapiens
gacccucucccggccccuccccuucuuugucu

SEQ ID NO: 296874 - RNA, 32 nt, Homo Sapiens
uccucucuuuugcucauccaccuucacaccac

SEQ ID NO: 296875 - RNA, 32 nt, Homo Sapiens
aauccacacggucaucaugggcaaauuaguuu

SEQ ID NO: 296876 - RNA, 32 nt, Homo Sapiens
ucccauagucccagccccugggccugguacau

SEQ ID NO: 296877 - RNA, 32 nt, Homo Sapiens
uagaaaaauggcaacacagaugguagcugcac

SEQ ID NO: 296878 - RNA, 32 nt, Homo Sapiens
cagcccaauauggagaugcagaugaacuggga

SEQ ID NO: 296879 - RNA, 32 nt, Homo Sapiens
uaacuuccuuuuucuuuuuuugugggggacac

SEQ ID NO: 296880 - RNA, 32 nt, Homo Sapiens
uacagcgggggaggagaggacacacuguuuuu

SEQ ID NO: 296881 - RNA, 32 nt, Homo Sapiens
uuggcagagcuuuuaccuguuauucuuugccc

SEQ ID NO: 296882 - RNA, 32 nt, Homo Sapiens
auccugauccugaagcaccccauggagcaggc

SEQ ID NO: 296883 - RNA, 32 nt, Homo Sapiens
gaucgggggcgcgaggccucacggagcucgua

SEQ ID NO: 296884 - RNA, 30 nt, Homo Sapiens
aauacaacuguauugggggaaauucagcca

SEQ ID NO: 296885 - RNA, 32 nt, Homo Sapiens
agagagguuuuuuauuuuuuuaauauuucuau

SEQ ID NO: 296886 - RNA, 32 nt, Homo Sapiens
uucuuuagcuuuuggacucuuggaccuacacu

SEQ ID NO: 296887 - RNA, 32 nt, Homo Sapiens
cgucugagcccauggcgaggggacccgccgcc

SEQ ID NO: 296888 - RNA, 32 nt, Homo Sapiens
ucuuaaaacuggggacaugagccugagcagaa

SEQ ID NO: 296889 - RNA, 32 nt, Homo Sapiens
uuugaggauuuugauccaagcugguccacuca

SEQ ID NO: 296890 - RNA, 32 nt, Homo Sapiens
aagugggcgcagagcccuccugcucacacagc

SEQ ID NO: 296891 - RNA, 32 nt, Homo Sapiens
uauuauagaauauuuuugacaauaaaacuaug

SEQ ID NO: 296892 - RNA, 32 nt, Homo Sapiens
gggcccaugucgcuugaauauuauuuuugauu

SEQ ID NO: 296893 - RNA, 32 nt, Homo Sapiens
gguucaucaccuccgaauauuccugugacagg

SEQ ID NO: 296894 - RNA, 32 nt, Homo Sapiens
cagauauauuagaauaagaauauuuuggguuu

SEQ ID NO: 296895 - RNA, 32 nt, Homo Sapiens
uuaggaggggguagccuuucuggucuuugcac

SEQ ID NO: 296896 - RNA, 32 nt, Homo Sapiens
uuauuaagguaacuacugcuaauguugaucag

SEQ ID NO: 296897 - RNA, 32 nt, Homo Sapiens
aacaguuguauauaaaugcagugacacauuug

SEQ ID NO: 296898 - RNA, 32 nt, Homo Sapiens
guucagaugaggaugguaguugugaguuuggg

SEQ ID NO: 296899 - RNA, 32 nt, Homo Sapiens
acagaaaaauaguaugaaaauaaaauaaaugu

SEQ ID NO: 296900 - RNA, 32 nt, Homo Sapiens
aaguguccgagacuuaacgaaaauaguauuuc

SEQ ID NO: 296901 - RNA, 32 nt, Homo Sapiens
gcagggccuuggcuaccacacgcggcaucgcu

SEQ ID NO: 296902 - RNA, 32 nt, Homo Sapiens
uaaggcugccuggcugccccaaaccccagaca

SEQ ID NO: 296903 - RNA, 32 nt, Homo Sapiens
gagccagcucucaggacuguggcuggaggcug

SEQ ID NO: 296904 - RNA, 32 nt, Homo Sapiens
auauagcaggacggccgccuucugcugucaga

SEQ ID NO: 296905 - RNA, 32 nt, Homo Sapiens
caucaaauuuagaagaaaaagcccuuugacuu

SEQ ID NO: 296906 - RNA, 30 nt, Homo Sapiens
acgcagaugucugcugcagagcugggcuga

SEQ ID NO: 296907 - RNA, 32 nt, Homo Sapiens
auuuucucaacucgacucucauuucuucccug

SEQ ID NO: 296908 - RNA, 32 nt, Homo Sapiens
agugucacugagcuguguuuugucugagccuc

SEQ ID NO: 296909 - RNA, 32 nt, Homo Sapiens
uucugguaauuuccucuucuugaucugggugu

SEQ ID NO: 296910 - RNA, 32 nt, Homo Sapiens
uguccacccacccuccaauaagcuggagcgac

SEQ ID NO: 296911 - RNA, 32 nt, Homo Sapiens
uuuccuaaugauuugcagagauaacugcacaa

SEQ ID NO: 296912 - RNA, 32 nt, Homo Sapiens
gaagugcgcugccuccacggccccuugcccuu

SEQ ID NO: 296913 - RNA, 32 nt, Homo Sapiens
gcaaguuggugcccccaggaaccuggccaggg

SEQ ID NO: 296914 - RNA, 32 nt, Homo Sapiens
gugaugggaauuuuuucuuuauuuuuuagguu

SEQ ID NO: 296915 - RNA, 32 nt, Homo Sapiens
ccagcuuaaugccucuaauuuuaaugccaaca

SEQ ID NO: 296916 - RNA, 32 nt, Homo Sapiens
augugccucacaggcuguuugggcauuaauuu

SEQ ID NO: 296917 - RNA, 32 nt, Homo Sapiens
uuuauguccacuuuuugagugguacuuaaaug

SEQ ID NO: 296918 - RNA, 32 nt, Homo Sapiens
aagcuguuggagccggccggcgcucacuuguc

SEQ ID NO: 296919 - RNA, 32 nt, Homo Sapiens
gcacacugaggggacgcggggcugggccaugg

SEQ ID NO: 296920 - RNA, 32 nt, Homo Sapiens
gcccgcggggagagaggaggagagaaguggcc

SEQ ID NO: 296921 - RNA, 32 nt, Homo Sapiens
ccaugacuucauuugcacuuugacagagcaga

SEQ ID NO: 296922 - RNA, 32 nt, Homo Sapiens
aggauaaguuuauguaugucacagaugacugg

SEQ ID NO: 296923 - RNA, 32 nt, Homo Sapiens
auaaucaauucaaucuccaugacgguauugac

SEQ ID NO: 296924 - RNA, 32 nt, Homo Sapiens
uuuucuuuguaccugaugugaauucuagcaac

SEQ ID NO: 296925 - RNA, 32 nt, Homo Sapiens
auccgucacgggucuuccuguuuuguauuuaa

SEQ ID NO: 296926 - RNA, 32 nt, Homo Sapiens
cgagacuccucgcuccuccucgccucgccucg

SEQ ID NO: 296927 - RNA, 32 nt, Homo Sapiens
auguuuuauccauuugauaauuuuacaguaag

SEQ ID NO: 296928 - RNA, 32 nt, Homo Sapiens
gcccaggugcgcggcgcagagccuuugggaau

SEQ ID NO: 296929 - RNA, 30 nt, Homo Sapiens
cugcugcugcaagguggggaaacuguaagu

SEQ ID NO: 296930 - RNA, 32 nt, Homo Sapiens
uuuaacugauuaaaaauaccuucuauguauua

SEQ ID NO: 296931 - RNA, 32 nt, Homo Sapiens
acuccaggcaccaucuguucuccccagggacc

SEQ ID NO: 296932 - RNA, 32 nt, Homo Sapiens
uucuggcaucccagcccucaguguccaagacc

SEQ ID NO: 296933 - RNA, 32 nt, Homo Sapiens
ccauuggaaggggaaacgcacguugcuguccc

SEQ ID NO: 296934 - RNA, 32 nt, Homo Sapiens
uuugcuuccuucuugcccagcgcuggguucuc

SEQ ID NO: 296935 - RNA, 32 nt, Homo Sapiens
agucagggaaaggggcacugaccuguagugaa

SEQ ID NO: 296936 - RNA, 32 nt, Homo Sapiens
ggucccaaccaccacuguaauuuucaagccua

SEQ ID NO: 296937 - RNA, 32 nt, Homo Sapiens
ccacacucagcaugcaggguuaccugcuguca

SEQ ID NO: 296938 - RNA, 32 nt, Homo Sapiens
cucacugcaaccuccgccucucggguucaagc

SEQ ID NO: 296939 - RNA, 32 nt, Homo Sapiens
cucauugcaaccuccgccucccggguucaagc

SEQ ID NO: 296940 - RNA, 32 nt, Homo Sapiens
cuggcucaaaacuaccuacuucuuucucaggc

SEQ ID NO: 296941 - RNA, 32 nt, Homo Sapiens
cuugggggcuccuggccugaggcuggcggugg

SEQ ID NO: 296942 - RNA, 32 nt, Homo Sapiens
cuugcaaauggcaggcuauggaacuucucagc

SEQ ID NO: 296943 - RNA, 32 nt, Homo Sapiens
aaacauauaacacaaugugguaguaguaggug

SEQ ID NO: 296944 - RNA, 32 nt, Homo Sapiens
ggcugggagcagcgcagccuccggaggaggag

SEQ ID NO: 296945 - RNA, 32 nt, Homo Sapiens
gcggaggcgaagagguggcagcgcgagcuggg

SEQ ID NO: 296946 - RNA, 32 nt, Homo Sapiens
ccacugccuggcuaauuuuuuauauuuuuggu

SEQ ID NO: 296947 - RNA, 32 nt, Homo Sapiens
ugaaugaaaaauacuguggacacuuaaauaau

SEQ ID NO: 296948 - RNA, 32 nt, Homo Sapiens
ccaaucuguauauaguauaauuuacauucaag

SEQ ID NO: 296949 - RNA, 32 nt, Homo Sapiens
aacuggugguacugaaaauuugaauacagaaa

SEQ ID NO: 296950 - RNA, 32 nt, Homo Sapiens
uggcuuuguuuguuuguuuucuucuucaguga

SEQ ID NO: 296951 - RNA, 31 nt, Homo Sapiens
cccagcaugcgggcaggcccaggccccaccg

SEQ ID NO: 296952 - RNA, 27 nt, Homo Sapiens
uggacagccuccuucagcccuucugua

SEQ ID NO: 296953 - RNA, 32 nt, Homo Sapiens
uauuagggggagaggugaagggaaauccaggc

SEQ ID NO: 296954 - RNA, 32 nt, Homo Sapiens
auauauugcugcauuuuauagaauaguaaagg

SEQ ID NO: 296955 - RNA, 32 nt, Homo Sapiens
ccucaucguauggccuuuuucuuacaagcacc

SEQ ID NO: 296956 - RNA, 32 nt, Homo Sapiens
ugagaaauuuaaaaauaagcauucuaacacuu

SEQ ID NO: 296957 - RNA, 32 nt, Homo Sapiens
uguugaaaaaucauuaccuguggaaugacuag

SEQ ID NO: 296958 - RNA, 32 nt, Homo Sapiens
auaaaguguuucauuaugaccagaucucugau

SEQ ID NO: 296959 - RNA, 32 nt, Homo Sapiens
uuuguuuggcuucuaacgcguugggacugagu

SEQ ID NO: 296960 - RNA, 32 nt, Homo Sapiens
uaaaaaugguuuggagcauuaguauuuugacu

SEQ ID NO: 296961 - RNA, 32 nt, Homo Sapiens
aauguuugaaauauauaauagcacuggagauu

SEQ ID NO: 296962 - RNA, 32 nt, Homo Sapiens
auauuuucugugacuugaaauaaacuuugaac

SEQ ID NO: 296963 - RNA, 32 nt, Homo Sapiens
auaaagcauaugccuucauauaaagaauaggg

SEQ ID NO: 296964 - RNA, 32 nt, Homo Sapiens
uggucacuuggguuaaaacguuuggaccucug

SEQ ID NO: 296965 - RNA, 32 nt, Homo Sapiens
cacucagacuguuuugcuaaaaaacaauaagu

SEQ ID NO: 296966 - RNA, 32 nt, Homo Sapiens
aggguuugugacagggcggggguggcggcggc

SEQ ID NO: 296967 - RNA, 32 nt, Homo Sapiens
uguuuaguuaguaucaucugguaaaauaguua

SEQ ID NO: 296968 - RNA, 32 nt, Homo Sapiens
aguuacugauuugcuuucugucacuauggauu

SEQ ID NO: 296969 - RNA, 32 nt, Homo Sapiens
aaggauuauaaaucaugcugcuaugaagacac

SEQ ID NO: 296970 - RNA, 32 nt, Homo Sapiens
gugacaagauaaaacugggcacagcucuuaaa

SEQ ID NO: 296971 - RNA, 32 nt, Homo Sapiens
acuguugaguacuguuaaguacuguuaaucuu

SEQ ID NO: 296972 - RNA, 32 nt, Homo Sapiens
uccugcuuuauauauuugauacguagggguuc

SEQ ID NO: 296973 - RNA, 31 nt, Homo Sapiens
uccugcguccgcaccuggccccgcgcgcccc

SEQ ID NO: 296974 - RNA, 32 nt, Homo Sapiens
cacauagcugucuagaguagcuuaccagaagc

SEQ ID NO: 296975 - RNA, 31 nt, Homo Sapiens
ugaguggggagacaccucagagccccgcaaa

SEQ ID NO: 296976 - RNA, 32 nt, Homo Sapiens
ccuaaccgcaacccgcgccgcgccgcgccgau

SEQ ID NO: 296977 - RNA, 32 nt, Homo Sapiens
uccaacacugaauguaucugcacugugaggag

SEQ ID NO: 296978 - RNA, 32 nt, Homo Sapiens
cccgccugcccgccgcccggcgcggccugcuu

SEQ ID NO: 296979 - RNA, 32 nt, Homo Sapiens
aauuagccgggcgugguggugcaugccuguag

SEQ ID NO: 296980 - RNA, 32 nt, Homo Sapiens
cauucuuauuucuuuugacauuuuggaaauaa

SEQ ID NO: 296981 - RNA, 32 nt, Homo Sapiens
cgcugcucgggcccuccuggggagcccccgcu

SEQ ID NO: 296982 - RNA, 32 nt, Homo Sapiens
gucugggcgcgguggcucacgccuguaauccc

SEQ ID NO: 296983 - RNA, 32 nt, Homo Sapiens
aaugcugguuuaucuuuguagauuguaaucga

SEQ ID NO: 296984 - RNA, 32 nt, Homo Sapiens
caaaaagaagaaaaaagaaaggaaaagaucuu

SEQ ID NO: 296985 - RNA, 32 nt, Homo Sapiens
ucacugaccugccuguagccccagugacagcu

SEQ ID NO: 296986 - RNA, 31 nt, Homo Sapiens
gguuaugggugcucaacagugugaauguacu

SEQ ID NO: 296987 - RNA, 32 nt, Homo Sapiens
gcaggugguuggaaaagaaauggcuuccuggu

SEQ ID NO: 296988 - RNA, 32 nt, Homo Sapiens
ggagguuugagccccauucugccuuggaaaua

SEQ ID NO: 296989 - RNA, 32 nt, Homo Sapiens
ggcacagaccucuguuccugagcagagaagca

SEQ ID NO: 296990 - RNA, 32 nt, Homo Sapiens
aagcccuacuguaagguuuagcacugggugua

SEQ ID NO: 296991 - RNA, 32 nt, Homo Sapiens
uuaacuccucaccaagcuucccacgacccugg

SEQ ID NO: 296992 - RNA, 32 nt, Homo Sapiens
caggcgugguggcgcgcaccugcagucccagc

SEQ ID NO: 296993 - RNA, 32 nt, Homo Sapiens
agguauggauggaaacaagcucuauggaaaau

SEQ ID NO: 296994 - RNA, 32 nt, Homo Sapiens
cccuaggucuccuuggccccaggagugcucuu

SEQ ID NO: 296995 - RNA, 32 nt, Homo Sapiens
cagcacucuaauucacauccucagcaucccug

SEQ ID NO: 296996 - RNA, 32 nt, Homo Sapiens
ugcauaacaauagagaugaaacacgaagagug

SEQ ID NO: 296997 - RNA, 32 nt, Homo Sapiens
ccucgucccucccccucccgacaccauguccu

SEQ ID NO: 296998 - RNA, 31 nt, Homo Sapiens
acuagagaaaagaaaauguuauaaggaaagu

SEQ ID NO: 296999 - RNA, 32 nt, Homo Sapiens
gagagcaaaugcuauuugauaacaguuacucc

SEQ ID NO: 297000 - RNA, 32 nt, Homo Sapiens
cgccgacucugcaccacgcaggggaagagaaa

SEQ ID NO: 297001 - RNA, 32 nt, Homo Sapiens
ggggucuggcaaacaggcuggguuugauuguc

SEQ ID NO: 297002 - RNA, 32 nt, Homo Sapiens
aacagucucaccagacuucucauaaugcucuu

SEQ ID NO: 297003 - RNA, 32 nt, Homo Sapiens
ucuccugcugugaaggccaaguaugacuucac

SEQ ID NO: 297004 - RNA, 32 nt, Homo Sapiens
guggagcaagguggccacauagaacccuccag

SEQ ID NO: 297005 - RNA, 31 nt, Homo Sapiens
agaacuccuuggaugaaguccacuacagacc

SEQ ID NO: 297006 - RNA, 32 nt, Homo Sapiens
uucccaggaucucuccuucccuggaucccucc

SEQ ID NO: 297007 - RNA, 32 nt, Homo Sapiens
gcucacccaccuguguagugggcuuggggcua

SEQ ID NO: 297008 - RNA, 32 nt, Homo Sapiens
cuggccuuuucucccagaaucugaaggaguuc

SEQ ID NO: 297009 - RNA, 32 nt, Homo Sapiens
ccaccugcaccccuggcgggggcuugcacuaa

SEQ ID NO: 297010 - RNA, 32 nt, Homo Sapiens
uuaggacucagauuuucuuuuaucuuuucuuu

SEQ ID NO: 297011 - RNA, 32 nt, Homo Sapiens
uuauagaaaaucaacacuaauguuuuuagauu

SEQ ID NO: 297012 - RNA, 32 nt, Homo Sapiens
gucgaggaaaauugauaccugcaguaacccau

SEQ ID NO: 297013 - RNA, 32 nt, Homo Sapiens
auuuguaggaaggucucauucuuccaagcuga

SEQ ID NO: 297014 - RNA, 32 nt, Homo Sapiens
cgccggugcuggacgugucgcugcugcugcug

SEQ ID NO: 297015 - RNA, 32 nt, Homo Sapiens
ggaugcgguguugguaaagguuuccaggacug

SEQ ID NO: 297016 - RNA, 32 nt, Homo Sapiens
guggcuucucugaccuggagcugaugggccgu

SEQ ID NO: 297017 - RNA, 32 nt, Homo Sapiens
agucuuuaauuucaaaaacuucaaauuagccu

SEQ ID NO: 297018 - RNA, 32 nt, Homo Sapiens
uaaagcuagagcacccaagcuucugccuucug

SEQ ID NO: 297019 - RNA, 32 nt, Homo Sapiens
cgaagcugcccccaggaugaccacgcuggccg

SEQ ID NO: 297020 - RNA, 32 nt, Homo Sapiens
cgugguggaaccccucccguguggcguggugc

SEQ ID NO: 297021 - RNA, 32 nt, Homo Sapiens
ggaggcgcugagccgcgccacgcugcaacggg

SEQ ID NO: 297022 - RNA, 32 nt, Homo Sapiens
ugucucuccuucucugaccgcggccgcagccc

SEQ ID NO: 297023 - RNA, 32 nt, Homo Sapiens
guaaguaaauuaaaccucuuuaauucaucaau

SEQ ID NO: 297024 - RNA, 32 nt, Homo Sapiens
uggagggagguaggcacugccucagucuucau

SEQ ID NO: 297025 - RNA, 32 nt, Homo Sapiens
gcuuuguggccuuugcaguacuauuuauaaaa

SEQ ID NO: 297026 - RNA, 32 nt, Homo Sapiens
aggacucagacaccccaacugcaaacuucaga

SEQ ID NO: 297027 - RNA, 32 nt, Homo Sapiens
ugucauugaaggaaaaaugauagccauauuaa

SEQ ID NO: 297028 - RNA, 32 nt, Homo Sapiens
ccgcacggccccaacacgcggacuucgagcgg

SEQ ID NO: 297029 - RNA, 32 nt, Homo Sapiens
guccacauuaugucagcuuucucauauugaga

SEQ ID NO: 297030 - RNA, 32 nt, Homo Sapiens
gaugaaucuacagaauuagaucaauaaggauc

SEQ ID NO: 297031 - RNA, 32 nt, Homo Sapiens
gaagcaucccaggccuggccucagaggaggga

SEQ ID NO: 297032 - RNA, 32 nt, Homo Sapiens
acgaccucugugaaguuggagaggcgguaacg

SEQ ID NO: 297033 - RNA, 32 nt, Homo Sapiens
gcuaugugaauucugcuccaauuaaaacacaa

SEQ ID NO: 297034 - RNA, 32 nt, Homo Sapiens
ccgacuguacagagaccucuggucccugaccc

SEQ ID NO: 297035 - RNA, 31 nt, Homo Sapiens
gccauagcuucugucgcuccaucgcccgcac

SEQ ID NO: 297036 - RNA, 32 nt, Homo Sapiens
gcuuguacuaaaauaauaaaaacuacucuuau

SEQ ID NO: 297037 - RNA, 32 nt, Homo Sapiens
gcacuuuguccgguuuuccaguucuugcacaa

SEQ ID NO: 297038 - RNA, 32 nt, Homo Sapiens
gagaggaugaacugguuuaucacaaaucugau

SEQ ID NO: 297039 - RNA, 32 nt, Homo Sapiens
gacaagcugaaaccauacaugcagucuuuaug

SEQ ID NO: 297040 - RNA, 32 nt, Homo Sapiens
cuguggcuagauauauacacacacauauauau

SEQ ID NO: 297041 - RNA, 32 nt, Homo Sapiens
ccagagagggaagagaaccaggggcccuuuuc

SEQ ID NO: 297042 - RNA, 32 nt, Homo Sapiens
gagcgcggcuggaagcgcgcaugcgcuguggc

SEQ ID NO: 297043 - RNA, 32 nt, Homo Sapiens
ucuccgccgcgugcgcccuccucgaccagcag

SEQ ID NO: 297044 - RNA, 32 nt, Homo Sapiens
gugacugcccuaaggaaugaaaagcaagggcc

SEQ ID NO: 297045 - RNA, 32 nt, Homo Sapiens
uucaaccugauacauuuacauagugcaaaacu

SEQ ID NO: 297046 - RNA, 32 nt, Homo Sapiens
cuuugugaauuaacacaguguuucaauucugu

SEQ ID NO: 297047 - RNA, 32 nt, Homo Sapiens
ucaauuuuuuaaaacuaacacaccauucuuua

SEQ ID NO: 297048 - RNA, 32 nt, Homo Sapiens
ccagggggcggcggccccgggcggagcgcuuu

SEQ ID NO: 297049 - RNA, 32 nt, Homo Sapiens
ccuguagagagaacacagugugaauguuuccc

SEQ ID NO: 297050 - RNA, 32 nt, Homo Sapiens
ucaagggccccauugaaccaaugggauugcuu

SEQ ID NO: 297051 - RNA, 32 nt, Homo Sapiens
gaaggcccccaccggccggagaacgaaacccu

SEQ ID NO: 297052 - RNA, 32 nt, Homo Sapiens
ucauugugacuuuaacaaacauuaucuuccca

SEQ ID NO: 297053 - RNA, 32 nt, Homo Sapiens
gcgucucccgccuccaggaucuccucucaccu

SEQ ID NO: 297054 - RNA, 32 nt, Homo Sapiens
aggaagaggagcuuccaguccugacucccacu

SEQ ID NO: 297055 - RNA, 32 nt, Homo Sapiens
ggugcacaagguggggcgccaguugugggauu

SEQ ID NO: 297056 - RNA, 32 nt, Homo Sapiens
aaugcaccaaggaaaggaaagaugagccuccu

SEQ ID NO: 297057 - RNA, 32 nt, Homo Sapiens
ccucuuccacccacccauuccuucaccuggcu

SEQ ID NO: 297058 - RNA, 32 nt, Homo Sapiens
uuuuaauucugagauuuccccaagcuguggau

SEQ ID NO: 297059 - RNA, 32 nt, Homo Sapiens
gagcacauugccauccuggaggaccuaagcuc

SEQ ID NO: 297060 - RNA, 32 nt, Homo Sapiens
guuuuaaaauauauuuuguguaaaauaccuua

SEQ ID NO: 297061 - RNA, 32 nt, Homo Sapiens
cgccugggccgcgcggucgaggccugucagcc

SEQ ID NO: 297062 - RNA, 32 nt, Homo Sapiens
accaguguuguccaagguugcuagcaggaaau

SEQ ID NO: 297063 - RNA, 32 nt, Homo Sapiens
guucccacacugccuccacgagucuggagggc

SEQ ID NO: 297064 - RNA, 32 nt, Homo Sapiens
agugcucacugcagcucagaucaguccucagg

SEQ ID NO: 297065 - RNA, 32 nt, Homo Sapiens
cuucuucugucaacaaggccuccacagucacc

SEQ ID NO: 297066 - RNA, 32 nt, Homo Sapiens
ugucuauaaucccagcacuuugggagguugag

SEQ ID NO: 297067 - RNA, 32 nt, Homo Sapiens
ugcucuucaauccugaucuuccgaguuugucg

SEQ ID NO: 297068 - RNA, 31 nt, Homo Sapiens
gcauuugugaaggauuccagagccuuuccca

SEQ ID NO: 297069 - RNA, 32 nt, Homo Sapiens
ggaauguggcacaugcagauacaaaugugugc

SEQ ID NO: 297070 - RNA, 32 nt, Homo Sapiens
aaaaauauugaaaaaugugcaaagccuucaaa

SEQ ID NO: 297071 - RNA, 32 nt, Homo Sapiens
acuacauuaguacacagcaccagaauguauau

SEQ ID NO: 297072 - RNA, 32 nt, Homo Sapiens
uuugaguaauuuugggcaagcuaacaucucug

SEQ ID NO: 297073 - RNA, 32 nt, Homo Sapiens
agcuuuucacuugugccauuaagcaagcacug

SEQ ID NO: 297074 - RNA, 32 nt, Homo Sapiens
ucucaugcuuuaaaacucuaaacuauaucccu

SEQ ID NO: 297075 - RNA, 32 nt, Homo Sapiens
ugggaucacgcaacuuuccuauuuuucuccca

SEQ ID NO: 297076 - RNA, 32 nt, Homo Sapiens
gcuuuuguuuccauugcuuuugguguuuuaga

SEQ ID NO: 297077 - RNA, 32 nt, Homo Sapiens
acuuuuuaaaauguacauaaagaauuuaagaa

SEQ ID NO: 297078 - RNA, 32 nt, Homo Sapiens
uguccuguggaggggccgggucuuggcagggg

SEQ ID NO: 297079 - RNA, 32 nt, Homo Sapiens
acuggcagacugccucagggccuggacugcgg

SEQ ID NO: 297080 - RNA, 32 nt, Homo Sapiens
ugaaugaauugggaaacacccagaacuuuaug

SEQ ID NO: 297081 - RNA, 32 nt, Homo Sapiens
ucuauuacaaauauauaucggagugacggugc

SEQ ID NO: 297082 - RNA, 32 nt, Homo Sapiens
caugugcccuguaucacagaagauucaggaaa

SEQ ID NO: 297083 - RNA, 32 nt, Homo Sapiens
aguccaugaccugagcuuuggccaugguagug

SEQ ID NO: 297084 - RNA, 32 nt, Homo Sapiens
caguggcgcgacuguguacgccgccagcuggg

SEQ ID NO: 297085 - RNA, 31 nt, Homo Sapiens
ucaguucucaaugaauggucauugauuuacu

SEQ ID NO: 297086 - RNA, 32 nt, Homo Sapiens
agugagaaagguuuuuucauggcauuaauaag

SEQ ID NO: 297087 - RNA, 32 nt, Homo Sapiens
accucuuggaauacucuucagaggagcuggac

SEQ ID NO: 297088 - RNA, 32 nt, Homo Sapiens
cuaaccaauuuaaaggaucuuaaaagcuucuc

SEQ ID NO: 297089 - RNA, 32 nt, Homo Sapiens
acggaccccuugagaagggauucuucaagccc

SEQ ID NO: 297090 - RNA, 32 nt, Homo Sapiens
guugcugagagagcuucuucucugugacaugu

SEQ ID NO: 297091 - RNA, 32 nt, Homo Sapiens
uggguuuaugagugugcauggugucuguguga

SEQ ID NO: 297092 - RNA, 32 nt, Homo Sapiens
uucuggaagagauugcaucugaggaaauucag

SEQ ID NO: 297093 - RNA, 32 nt, Homo Sapiens
auauauaaaaauugggucuuagauuuugauuu

SEQ ID NO: 297094 - RNA, 32 nt, Homo Sapiens
uuuaagagaauugccugaaacaucuguauuau

SEQ ID NO: 297095 - RNA, 32 nt, Homo Sapiens
ggcagacaaauccugcccugauucuggggacc

SEQ ID NO: 297096 - RNA, 32 nt, Homo Sapiens
ccuuuucugccauuuuaauuuuccauuuaauu

SEQ ID NO: 297097 - RNA, 32 nt, Homo Sapiens
uuuuauagcaaccuauuacuaaagauauuugc

SEQ ID NO: 297098 - RNA, 32 nt, Homo Sapiens
ucagccccacucugcuggcuaguccuggcucu

SEQ ID NO: 297099 - RNA, 32 nt, Homo Sapiens
uuuccugcgcuuucuccuuuuccugugaaauc

SEQ ID NO: 297100 - RNA, 32 nt, Homo Sapiens
aagcuuguuaggauguccugugcugcuuguga

SEQ ID NO: 297101 - RNA, 29 nt, Homo Sapiens
gaauguuggagauucagaggcugaaucag

SEQ ID NO: 297102 - RNA, 32 nt, Homo Sapiens
uccugcagccccagcccagccccacuccucug

SEQ ID NO: 297103 - RNA, 32 nt, Homo Sapiens
cuuucuguccuuuuaaguguaccuggaauucu

SEQ ID NO: 297104 - RNA, 32 nt, Homo Sapiens
augcaguuuuugaggagucuuuuacacuggga

SEQ ID NO: 297105 - RNA, 32 nt, Homo Sapiens
uauauauauacacacacacacacacacauaca

SEQ ID NO: 297106 - RNA, 32 nt, Homo Sapiens
gaacucacgacggcaccacuaggccagaggcg

SEQ ID NO: 297107 - RNA, 32 nt, Homo Sapiens
gccuccaaggcacaguggcugggcagagcugg

SEQ ID NO: 297108 - RNA, 32 nt, Homo Sapiens
aguggaucgagguggggguagccaggggcgcu

SEQ ID NO: 297109 - RNA, 32 nt, Homo Sapiens
uggcaagaggaugaucaucuaccucacugaua

SEQ ID NO: 297110 - RNA, 32 nt, Homo Sapiens
ggguugggggaucggcaguugggaggggcgcu

SEQ ID NO: 297111 - RNA, 32 nt, Homo Sapiens
agcucucugcgggaaccugguaugggccauga

SEQ ID NO: 297112 - RNA, 32 nt, Homo Sapiens
cauuuaaagagauaaccuuuuuguguccuggc

SEQ ID NO: 297113 - RNA, 32 nt, Homo Sapiens
agacacggaucugagaaucuuuauugagaaag

SEQ ID NO: 297114 - RNA, 32 nt, Homo Sapiens
auaucauguaaugugggaggcagggcuaugcg

SEQ ID NO: 297115 - RNA, 30 nt, Homo Sapiens
cuggucgggggcgggggcggcaggagcaga

SEQ ID NO: 297116 - RNA, 32 nt, Homo Sapiens
guuguuuuugaaaaggaaauaaacuuugauga

SEQ ID NO: 297117 - RNA, 32 nt, Homo Sapiens
uuccggcaggcgcugcgcugcuggggggcgcg

SEQ ID NO: 297118 - RNA, 32 nt, Homo Sapiens
gaguccauuaaaccucuuuccuuuauaaauua

SEQ ID NO: 297119 - RNA, 32 nt, Homo Sapiens
cuggaggcuccacucuccuuagguucauaguc

SEQ ID NO: 297120 - RNA, 32 nt, Homo Sapiens
caagggaggcggauuucccugguaguguagcu

SEQ ID NO: 297121 - RNA, 32 nt, Homo Sapiens
guugguuaaacauaucucugguacaucaaggg

SEQ ID NO: 297122 - RNA, 32 nt, Homo Sapiens
agggcacgagggccaccugugcucuggcaggc

SEQ ID NO: 297123 - RNA, 32 nt, Homo Sapiens
auaucuaaauuaauugaacuuuucauacagaa

SEQ ID NO: 297124 - RNA, 32 nt, Homo Sapiens
acuuuauagcuuauucuacuuauucuuauguu

SEQ ID NO: 297125 - RNA, 32 nt, Homo Sapiens
auuacuuggguuauuucuugaaugaacauaca

SEQ ID NO: 297126 - RNA, 32 nt, Homo Sapiens
acuagacgaaaaccauaccucucuucaaucaa

SEQ ID NO: 297127 - RNA, 32 nt, Homo Sapiens
ccgauuccagcauggggcaugcuacuuaauau

SEQ ID NO: 297128 - RNA, 32 nt, Homo Sapiens
uugaagaauaauacgaugaaaacuaacauccu

SEQ ID NO: 297129 - RNA, 32 nt, Homo Sapiens
uugguuagugauuucuuucucauccucauggu

SEQ ID NO: 297130 - RNA, 32 nt, Homo Sapiens
uaaucaguaucacuuucugugcuuaacuauuu

SEQ ID NO: 297131 - RNA, 32 nt, Homo Sapiens
ugacauaguuuaggaacagagagguaaaugaa

SEQ ID NO: 297132 - RNA, 32 nt, Homo Sapiens
auuugucuuuugcuauauucuccaagauuauc

SEQ ID NO: 297133 - RNA, 32 nt, Homo Sapiens
cagacccaggccauggcuaagguggcacucgg

SEQ ID NO: 297134 - RNA, 32 nt, Homo Sapiens
uguacagccugaucaaagccaaggcuaguucc

SEQ ID NO: 297135 - RNA, 32 nt, Homo Sapiens
ccuauauguugcccgccgcggccucuggggca

SEQ ID NO: 297136 - RNA, 32 nt, Homo Sapiens
ucuuugcccuguaggacaagaaagccuuacgg

SEQ ID NO: 297137 - RNA, 32 nt, Homo Sapiens
gaggggcccugcauggcacgggaugagucccu

SEQ ID NO: 297138 - RNA, 32 nt, Homo Sapiens
aaugagucugcaccugguaccuauguuguuca

SEQ ID NO: 297139 - RNA, 29 nt, Homo Sapiens
aauaucauagugaccuauguuacagaaau

SEQ ID NO: 297140 - RNA, 32 nt, Homo Sapiens
aggcccauuuuucucugucccuacuauuuugg

SEQ ID NO: 297141 - RNA, 30 nt, Homo Sapiens
gaaaagaaugcagcagccuaacuuaguguu

SEQ ID NO: 297142 - RNA, 32 nt, Homo Sapiens
gaggagcaggcagcaggcuuaucccuucacca

SEQ ID NO: 297143 - RNA, 32 nt, Homo Sapiens
uccgggcucuggcugggacccgaccgcugccg

SEQ ID NO: 297144 - RNA, 32 nt, Homo Sapiens
cagcagcugcacgcgccguggcuccggaucuc

SEQ ID NO: 297145 - RNA, 32 nt, Homo Sapiens
auaugagcaaucuauuuuauaugaacuuuuuu

SEQ ID NO: 297146 - RNA, 32 nt, Homo Sapiens
agcacuguguacccauuaagauauggcauuau

SEQ ID NO: 297147 - RNA, 32 nt, Homo Sapiens
gcauagggguacauuuacauucuguaagagau

SEQ ID NO: 297148 - RNA, 30 nt, Homo Sapiens
gccuccaucccugucccccaucuuggugcu

SEQ ID NO: 297149 - RNA, 32 nt, Homo Sapiens
uucucccuuacccacaccuauccuuuugaggg

SEQ ID NO: 297150 - RNA, 32 nt, Homo Sapiens
ccaccagcccccucacuaauagcggccacccc

SEQ ID NO: 297151 - RNA, 32 nt, Homo Sapiens
gcucgcggggagcggcuagcccugagucccug

SEQ ID NO: 297152 - RNA, 32 nt, Homo Sapiens
ugggagguggagguugcagugagcugagaugg

SEQ ID NO: 297153 - RNA, 32 nt, Homo Sapiens
cagcucugcccgugucuuccgaagauaccaag

SEQ ID NO: 297154 - RNA, 32 nt, Homo Sapiens
uggagugggcagcugggggcuggguucauaca

SEQ ID NO: 297155 - RNA, 32 nt, Homo Sapiens
gugggcuucaggugcaaggguaccugugccac

SEQ ID NO: 297156 - RNA, 32 nt, Homo Sapiens
ucaucgggguccuccagcgucuguuaccgagc

SEQ ID NO: 297157 - RNA, 32 nt, Homo Sapiens
uuuacagaagaaaaaaugugauaaagcgauca

SEQ ID NO: 297158 - RNA, 32 nt, Homo Sapiens
uguccuaaacauucuucagugaaaauaauuuu

SEQ ID NO: 297159 - RNA, 32 nt, Homo Sapiens
aauuugucauuacuguagugaacagaugcauu

SEQ ID NO: 297160 - RNA, 32 nt, Homo Sapiens
auucaguaguacugaggguugggacuucaaca

SEQ ID NO: 297161 - RNA, 31 nt, Homo Sapiens
ucagcaccagaagucaacugaguuaaggcag

SEQ ID NO: 297162 - RNA, 32 nt, Homo Sapiens
aauucugacaacauuaccaaaggcccacauaa

SEQ ID NO: 297163 - RNA, 32 nt, Homo Sapiens
guacuuggagggcucagggcaguggcuucuuu

SEQ ID NO: 297164 - RNA, 32 nt, Homo Sapiens
caaugagcccaaagacccccucgcuuugggaa

SEQ ID NO: 297165 - RNA, 32 nt, Homo Sapiens
ucuccguauaugugcucuggcuccucagcuga

SEQ ID NO: 297166 - RNA, 32 nt, Homo Sapiens
cuguugucuuuuguggaaaaugaguguguuug

SEQ ID NO: 297167 - RNA, 32 nt, Homo Sapiens
cccggcucccagugugcgcccggccggcccug

SEQ ID NO: 297168 - RNA, 32 nt, Homo Sapiens
aggagcuucagcgccagccaggggcaguuuau

SEQ ID NO: 297169 - RNA, 32 nt, Homo Sapiens
cauguccacuaccaagcuucuucuauguuaaa

SEQ ID NO: 297170 - RNA, 32 nt, Homo Sapiens
acauccugagcacucggccccauccccccaca

SEQ ID NO: 297171 - RNA, 32 nt, Homo Sapiens
agguggacguaccucuccaggagccuuugccu

SEQ ID NO: 297172 - RNA, 32 nt, Homo Sapiens
ucauucucugccuccuggacccucauccuagc

SEQ ID NO: 297173 - RNA, 32 nt, Homo Sapiens
auguccccgcaugcagaauccucucuuucuuc

SEQ ID NO: 297174 - RNA, 32 nt, Homo Sapiens
gccagacccugccccaccucacuucccucccu

SEQ ID NO: 297175 - RNA, 32 nt, Homo Sapiens
gagauggggucucacuaugucgcccaggguag

SEQ ID NO: 297176 - RNA, 32 nt, Homo Sapiens
cagcuacaguaucugaucuacuuugcuuuuag

SEQ ID NO: 297177 - RNA, 32 nt, Homo Sapiens
ccccaggcucugcucugcccugcccugcaccc

SEQ ID NO: 297178 - RNA, 32 nt, Homo Sapiens
gacauguaacaagcacaccggccugcuguucu

SEQ ID NO: 297179 - RNA, 32 nt, Homo Sapiens
aagccuccggaacgcguuuuggccugauuuga

SEQ ID NO: 297180 - RNA, 32 nt, Homo Sapiens
gcggaaaagagaacagaagagaauccagaagu

SEQ ID NO: 297181 - RNA, 32 nt, Homo Sapiens
agcauaugaagauaugggaauucagaagaguu

SEQ ID NO: 297182 - RNA, 32 nt, Homo Sapiens
ccaggagggugggacaggccugucaggccucu

SEQ ID NO: 297183 - RNA, 32 nt, Homo Sapiens
cuguggagggaguguucaaaauacuacugacg

SEQ ID NO: 297184 - RNA, 32 nt, Homo Sapiens
cccuuuucugucaccaaccaaccacauagccu

SEQ ID NO: 297185 - RNA, 32 nt, Homo Sapiens
guuaacaucuucugucuuuauaaucuacuccu

SEQ ID NO: 297186 - RNA, 32 nt, Homo Sapiens
cugacccugcauaaagggccaaaggagggcug

SEQ ID NO: 297187 - RNA, 31 nt, Homo Sapiens
ggaacccucaaugagguuuucaagaugaaga

SEQ ID NO: 297188 - RNA, 32 nt, Homo Sapiens
uuuuguugacuucugacauuccacuuuccuag

SEQ ID NO: 297189 - RNA, 32 nt, Homo Sapiens
cucagggaucuuucuucccagcccuggagccu

SEQ ID NO: 297190 - RNA, 32 nt, Homo Sapiens
agaggauaaaaagccuuuuuaaacgcaguauu

SEQ ID NO: 297191 - RNA, 32 nt, Homo Sapiens
agggaaggagaccccugcaggcucccuccacc

SEQ ID NO: 297192 - RNA, 32 nt, Homo Sapiens
cuccauguagccccggcuccccgggcggccgc

SEQ ID NO: 297193 - RNA, 32 nt, Homo Sapiens
gggagaggaaauugcagacauagcugaaggcg

SEQ ID NO: 297194 - RNA, 32 nt, Homo Sapiens
gccagguggggaagggugggggugggccuggu

SEQ ID NO: 297195 - RNA, 31 nt, Homo Sapiens
aacaagugaaacauucuuugguguggugagg

SEQ ID NO: 297196 - RNA, 32 nt, Homo Sapiens
guggguaauaacaaaauccuccaagcuaaaca

SEQ ID NO: 297197 - RNA, 32 nt, Homo Sapiens
aaaauggugguaggguugggggauaaacucgc

SEQ ID NO: 297198 - RNA, 27 nt, Homo Sapiens
cccguccccucccucagcccccacucg

SEQ ID NO: 297199 - RNA, 32 nt, Homo Sapiens
cacacggaggaugucuuggacaugugagaugu

SEQ ID NO: 297200 - RNA, 32 nt, Homo Sapiens
gcuuucugccagccaauaucucucccucgugu

SEQ ID NO: 297201 - RNA, 32 nt, Homo Sapiens
guugcacgucaucauagaauucauacuggaga

SEQ ID NO: 297202 - RNA, 32 nt, Homo Sapiens
gucuucucaaggauuuugcaucugccauuauc

SEQ ID NO: 297203 - RNA, 32 nt, Homo Sapiens
agucuguuauuccucuuggauuuuuugaaaua

SEQ ID NO: 297204 - RNA, 32 nt, Homo Sapiens
cauauucugucaacacaaaucuaugaauuuag

SEQ ID NO: 297205 - RNA, 32 nt, Homo Sapiens
ccugggggcccuggccuggcccgggugcaggc

SEQ ID NO: 297206 - RNA, 32 nt, Homo Sapiens
gcuggagccaggccuuccuccugggcgccucc

SEQ ID NO: 297207 - RNA, 32 nt, Homo Sapiens
ccaccacuguauuuugaccaaauaaugacaac

SEQ ID NO: 297208 - RNA, 32 nt, Homo Sapiens
cagguuuguaauucacauccacaacccuaagc

SEQ ID NO: 297209 - RNA, 32 nt, Homo Sapiens
cggagcagcuggaggcgaccagcgccgggcga

SEQ ID NO: 297210 - RNA, 32 nt, Homo Sapiens
uuugcuaucuaccuauuuacuaacauaaauga

SEQ ID NO: 297211 - RNA, 32 nt, Homo Sapiens
ccacugcggguggaaggagaagggcagggugg

SEQ ID NO: 297212 - RNA, 32 nt, Homo Sapiens
acgccucccuccugugccgccggcagcaugga

SEQ ID NO: 297213 - RNA, 32 nt, Homo Sapiens
auacuguuacacaaagaacacucuauauaacu

SEQ ID NO: 297214 - RNA, 32 nt, Homo Sapiens
aaagacauuuuaauguaugguuagguuuuaua

SEQ ID NO: 297215 - RNA, 32 nt, Homo Sapiens
uuuuucccaucccuucuucuugcucagagagg

SEQ ID NO: 297216 - RNA, 32 nt, Homo Sapiens
caaucagugcacauccugugucaucaauguaa

SEQ ID NO: 297217 - RNA, 32 nt, Homo Sapiens
cacaccucuccauggacuccagcgugccaucc

SEQ ID NO: 297218 - RNA, 32 nt, Homo Sapiens
uauauaggaugugaggggaggggugagaacaa

SEQ ID NO: 297219 - RNA, 32 nt, Homo Sapiens
agcuacgcccggaccgagaagccccggcaugg

SEQ ID NO: 297220 - RNA, 32 nt, Homo Sapiens
ccugucugaggcauagaggcaggcaagccgug

SEQ ID NO: 297221 - RNA, 32 nt, Homo Sapiens
ucucuucucccuccccuucuugugagauuuuu

SEQ ID NO: 297222 - RNA, 32 nt, Homo Sapiens
ucuuuaaaaaaguuguugcucaugaauauuau

SEQ ID NO: 297223 - RNA, 32 nt, Homo Sapiens
uggaauuucuauuuaaggggcucauuaaagca

SEQ ID NO: 297224 - RNA, 29 nt, Homo Sapiens
uuaauaaauguaguauauuuucugagaug

SEQ ID NO: 297225 - RNA, 32 nt, Homo Sapiens
aggaggaagaggaggagcgcagucggagcgcg

SEQ ID NO: 297226 - RNA, 29 nt, Homo Sapiens
guuaauucuaucccacaaaacugcuaaaa

SEQ ID NO: 297227 - RNA, 30 nt, Homo Sapiens
accggcgagaagcuugugaaguuccaaucu

SEQ ID NO: 297228 - RNA, 30 nt, Homo Sapiens
ucccggcccugcucacagcagcgcccucgg

SEQ ID NO: 297229 - RNA, 32 nt, Homo Sapiens
uugguaucuuaagaucaauguacuggagcagc

SEQ ID NO: 297230 - RNA, 32 nt, Homo Sapiens
uuuaguaaacaaaagaaaggcuauaauguaga

SEQ ID NO: 297231 - RNA, 32 nt, Homo Sapiens
cccauucacuccauccugugagucccacuccc

SEQ ID NO: 297232 - RNA, 32 nt, Homo Sapiens
ugaaaggacaucgccaccuggugcucaugagg

SEQ ID NO: 297233 - RNA, 32 nt, Homo Sapiens
gaucuaauauuuuaauuaaagccuucuaaugu

SEQ ID NO: 297234 - RNA, 32 nt, Homo Sapiens
cuuggggaccgagucucggcgccgccggggaa

SEQ ID NO: 297235 - RNA, 32 nt, Homo Sapiens
aacuuuucucaguuuacuucuaaguaaucaca

SEQ ID NO: 297236 - RNA, 32 nt, Homo Sapiens
uggagacuggaacacaaccauagccuguuucg

SEQ ID NO: 297237 - RNA, 32 nt, Homo Sapiens
guagaauacuaaaaggaaaaugucauguuaag

SEQ ID NO: 297238 - RNA, 32 nt, Homo Sapiens
ugguauuuuaauaaguuuucaaagauaauugg

SEQ ID NO: 297239 - RNA, 32 nt, Homo Sapiens
gccugggcgccucagccgccucacuccugguu

SEQ ID NO: 297240 - RNA, 32 nt, Homo Sapiens
auaucuaaaacuuuuauacugcacuuuuuaaa

SEQ ID NO: 297241 - RNA, 32 nt, Homo Sapiens
guggccguucauccagacgacucgcgauacac

SEQ ID NO: 297242 - RNA, 31 nt, Homo Sapiens
ccuccgagagcgcgggcuccaagggcaauaa

SEQ ID NO: 297243 - RNA, 32 nt, Homo Sapiens
uccagggccucccacacucauuggccagauug

SEQ ID NO: 297244 - RNA, 32 nt, Homo Sapiens
ugaauaaacccauuuuaauagaaaaagucaau

SEQ ID NO: 297245 - RNA, 32 nt, Homo Sapiens
cacugaggggagaggacuggggugcuccgcug

SEQ ID NO: 297246 - RNA, 31 nt, Homo Sapiens
aaaaaucagucaauauuuccaaauaauugca

SEQ ID NO: 297247 - RNA, 32 nt, Homo Sapiens
auacaguagugucaucacucuuuuaagaucuu

SEQ ID NO: 297248 - RNA, 32 nt, Homo Sapiens
caggcuugaggggugcuuggggccaggcuacg

SEQ ID NO: 297249 - RNA, 32 nt, Homo Sapiens
uguuacauuuagcaauuauaacauuguuuuau

SEQ ID NO: 297250 - RNA, 32 nt, Homo Sapiens
ugcuguugcuuaaaccacuuaaacgaagaguu

SEQ ID NO: 297251 - RNA, 32 nt, Homo Sapiens
guugauuucuaguuauuuauucugggaaugua

SEQ ID NO: 297252 - RNA, 32 nt, Homo Sapiens
ccuaggcuaccauggacugaagggcagucccc

SEQ ID NO: 297253 - RNA, 32 nt, Homo Sapiens
uguuaauucugucacagccuguauauuuuagu

SEQ ID NO: 297254 - RNA, 32 nt, Homo Sapiens
acaagaaugcuguaaagugucuucuaaaauga

SEQ ID NO: 297255 - RNA, 32 nt, Homo Sapiens
gcaggcauguguuucaucaucauccagagccu

SEQ ID NO: 297256 - RNA, 32 nt, Homo Sapiens
augcauuauucaucacuguucuaaucaaacaa

SEQ ID NO: 297257 - RNA, 32 nt, Homo Sapiens
aacaugcuucgugccaucaugauccuugccuu

SEQ ID NO: 297258 - RNA, 32 nt, Homo Sapiens
ccaucuuuucaaagauacaacaaaagcagaag

SEQ ID NO: 297259 - RNA, 32 nt, Homo Sapiens
uuauucccuuuuccucuuaaagagcugcucug

SEQ ID NO: 297260 - RNA, 32 nt, Homo Sapiens
uggaauugauaacauggucuuaacucaccgaa

SEQ ID NO: 297261 - RNA, 32 nt, Homo Sapiens
uccccgggggagaggaccgccggccucagcua

SEQ ID NO: 297262 - RNA, 32 nt, Homo Sapiens
uucaggcccucccaaauugcccuugcccuacc

SEQ ID NO: 297263 - RNA, 32 nt, Homo Sapiens
auuuuguauuguacauauuuccuccuacuggg

SEQ ID NO: 297264 - RNA, 32 nt, Homo Sapiens
agaugagaaauggaagcagaggguucaaaucc

SEQ ID NO: 297265 - RNA, 32 nt, Homo Sapiens
uuuguuuucauagacuucaauucauaaacuuu

SEQ ID NO: 297266 - RNA, 32 nt, Homo Sapiens
gcagacaugcuguccggacacacacacgcaug

SEQ ID NO: 297267 - RNA, 32 nt, Homo Sapiens
cuaaguauacuaguaaaaacugaagcauauuc

SEQ ID NO: 297268 - RNA, 32 nt, Homo Sapiens
cucauccccccgcuccccaaaguguuguugcu

SEQ ID NO: 297269 - RNA, 32 nt, Homo Sapiens
gaacaccagguccggcagcaucugucuuuucc

SEQ ID NO: 297270 - RNA, 32 nt, Homo Sapiens
uauaccuuguccacuuccaguacuggacgugc

SEQ ID NO: 297271 - RNA, 32 nt, Homo Sapiens
cucacaucugcaauuccaacccucugggaggc

SEQ ID NO: 297272 - RNA, 32 nt, Homo Sapiens
cuuggcucuguccacacccccagaaucagguc

SEQ ID NO: 297273 - RNA, 32 nt, Homo Sapiens
ucuccaccacgcugccucaggcccuaggcugg

SEQ ID NO: 297274 - RNA, 32 nt, Homo Sapiens
aaagcuaguaagucacuuaagggguagauagu

SEQ ID NO: 297275 - RNA, 31 nt, Homo Sapiens
cuuagagcaaauugucucuuaugauuauucc

SEQ ID NO: 297276 - RNA, 32 nt, Homo Sapiens
accgaaaugcuguccagcaggaagaucuguuu

SEQ ID NO: 297277 - RNA, 32 nt, Homo Sapiens
aagccggcgcccaguaguggcuccagagccca

SEQ ID NO: 297278 - RNA, 32 nt, Homo Sapiens
agaaagcacucaacugguuugacauugcuaag

SEQ ID NO: 297279 - RNA, 32 nt, Homo Sapiens
uguauacaauuguggauuuaauugugaaaugu

SEQ ID NO: 297280 - RNA, 32 nt, Homo Sapiens
ccccucauccugccuccauuucccggccacgc

SEQ ID NO: 297281 - RNA, 32 nt, Homo Sapiens
aguaagcagucauauugcuaauuugcuaacuc

SEQ ID NO: 297282 - RNA, 32 nt, Homo Sapiens
uugaccccuuuguccaggauccugcucugcaa

SEQ ID NO: 297283 - RNA, 32 nt, Homo Sapiens
cugggcucagacggcuggcuucugccuacccg

SEQ ID NO: 297284 - RNA, 32 nt, Homo Sapiens
ccaucauggccugaacccuggaggaagaggaa

SEQ ID NO: 297285 - RNA, 32 nt, Homo Sapiens
cagacccgcgucugcgccccucuccccgcacc

SEQ ID NO: 297286 - RNA, 32 nt, Homo Sapiens
accuucuaaaagauauauucauaguuauuaau

SEQ ID NO: 297287 - RNA, 32 nt, Homo Sapiens
ucggggugggagugcagaggcaaccaaaaagg

SEQ ID NO: 297288 - RNA, 32 nt, Homo Sapiens
caaccuuaggcaguaauagacaucacaaacug

SEQ ID NO: 297289 - RNA, 32 nt, Homo Sapiens
guccggccgggcgggagccggggugaccaucc

SEQ ID NO: 297290 - RNA, 32 nt, Homo Sapiens
cacagguguugaguggggcacaggguacuguc

SEQ ID NO: 297291 - RNA, 32 nt, Homo Sapiens
gucugccccccagcuuaaccacuuccuuuggu

SEQ ID NO: 297292 - RNA, 32 nt, Homo Sapiens
ugaggucaggaguucaagacuagccuggccaa

SEQ ID NO: 297293 - RNA, 32 nt, Homo Sapiens
uagaagagccaaccaacagagaagggaaagca

SEQ ID NO: 297294 - RNA, 32 nt, Homo Sapiens
ugcuuuguguuugggaggacaugaugggggug

SEQ ID NO: 297295 - RNA, 32 nt, Homo Sapiens
uggccuacaaggauuucgcauucuggguauug

SEQ ID NO: 297296 - RNA, 32 nt, Homo Sapiens
uauacguuauacacugcagagguaaugcacug

SEQ ID NO: 297297 - RNA, 32 nt, Homo Sapiens
aacugaggcuggugggggcuggucggggccac

SEQ ID NO: 297298 - RNA, 32 nt, Homo Sapiens
uuugauagcuaauguuuaauuguuuggaucug

SEQ ID NO: 297299 - RNA, 32 nt, Homo Sapiens
ucgggucucggggcucuaggcccugcugugcc

SEQ ID NO: 297300 - RNA, 32 nt, Homo Sapiens
gagcagaaccaucagagauggacaggcaaacu

SEQ ID NO: 297301 - RNA, 32 nt, Homo Sapiens
uacugugcccagccugcaauuauucuuuauau

SEQ ID NO: 297302 - RNA, 32 nt, Homo Sapiens
guaauaaaaaauuuuaaaaggacuuuauuaaa

SEQ ID NO: 297303 - RNA, 32 nt, Homo Sapiens
uuuuuucagguggauuuuuaccuuuguuccuu

SEQ ID NO: 297304 - RNA, 32 nt, Homo Sapiens
aggucaaggcuguagugagcugugauugagcc

SEQ ID NO: 297305 - RNA, 32 nt, Homo Sapiens
gggcagccauccaucccuucaagcauucauga

SEQ ID NO: 297306 - RNA, 32 nt, Homo Sapiens
augggcauucuaugauuuagacuucaaggaau

SEQ ID NO: 297307 - RNA, 32 nt, Homo Sapiens
aguuucaauuuguuuccccacaaaacaaagca

SEQ ID NO: 297308 - RNA, 32 nt, Homo Sapiens
gggcagggccuggcccuggacuggguuggcag

SEQ ID NO: 297309 - RNA, 32 nt, Homo Sapiens
ggaguuacaaauagguagauuucauguccguu

SEQ ID NO: 297310 - RNA, 32 nt, Homo Sapiens
ggcccggggcugggccggcgucgaacgcagcg

SEQ ID NO: 297311 - RNA, 32 nt, Homo Sapiens
auuuuuauagaguagggguacaaggacaguug

SEQ ID NO: 297312 - RNA, 32 nt, Homo Sapiens
cuguuuagguggugcugguuuauguucuagga

SEQ ID NO: 297313 - RNA, 29 nt, Homo Sapiens
cugagguuggguuucagaccaagacacug

SEQ ID NO: 297314 - RNA, 32 nt, Homo Sapiens
agugcacuuguaacugacuuggacacggaaua

SEQ ID NO: 297315 - RNA, 32 nt, Homo Sapiens
gagccgaggaacugcgggggcuggggaggaag

SEQ ID NO: 297316 - RNA, 30 nt, Homo Sapiens
ugcagcugagguggcauuugaagcugccua

SEQ ID NO: 297317 - RNA, 32 nt, Homo Sapiens
aguuccuuucaaccucuuucugauagauuucc

SEQ ID NO: 297318 - RNA, 32 nt, Homo Sapiens
aaggaacaccuggccugcccaggguggaaaac

SEQ ID NO: 297319 - RNA, 32 nt, Homo Sapiens
aagacaaaaugaaucucuccgcugugcacaug

SEQ ID NO: 297320 - RNA, 32 nt, Homo Sapiens
uagggaacaccuggcccacccggagcggaaaa

SEQ ID NO: 297321 - RNA, 32 nt, Homo Sapiens
caagucuuuuaguagaaauuugaaagaagugu

SEQ ID NO: 297322 - RNA, 32 nt, Homo Sapiens
ucaaccucugcagaacuucaagaagccaaaua

SEQ ID NO: 297323 - RNA, 32 nt, Homo Sapiens
uucuuaaaaucaaauguaaaucaauuacagau

SEQ ID NO: 297324 - RNA, 32 nt, Homo Sapiens
uugacaaucauaguauguuuuauuuuccugag

SEQ ID NO: 297325 - RNA, 32 nt, Homo Sapiens
aaagauguugcucuaagugcuguuuguuaguu

SEQ ID NO: 297326 - RNA, 32 nt, Homo Sapiens
aaaagaauauauugccaaauauuaagaagcuc

SEQ ID NO: 297327 - RNA, 32 nt, Homo Sapiens
ugaccucagagcuccaggaucaucaguaaauu

SEQ ID NO: 297328 - RNA, 32 nt, Homo Sapiens
ccgggauaagggccuccccaguccucuccggg

SEQ ID NO: 297329 - RNA, 32 nt, Homo Sapiens
uauuauuuuauuuauugaucaaucucucugcg

SEQ ID NO: 297330 - RNA, 32 nt, Homo Sapiens
auaauaucuaucuauuuauuacacagugggcu

SEQ ID NO: 297331 - RNA, 32 nt, Homo Sapiens
gccgggggccuggcccggcccgcacucagacu

SEQ ID NO: 297332 - RNA, 32 nt, Homo Sapiens
ggauucucuuaaaauauaaccaaagggacaga

SEQ ID NO: 297333 - RNA, 32 nt, Homo Sapiens
ugagccagcaaaaacaauaaaggucagucaca

SEQ ID NO: 297334 - RNA, 32 nt, Homo Sapiens
gcgguccucgggcgcgcaccgcucucuuacac

SEQ ID NO: 297335 - RNA, 32 nt, Homo Sapiens
agcgcaggccgcggccggcgggccucagcucc

SEQ ID NO: 297336 - RNA, 32 nt, Homo Sapiens
cugucucaaaaaaacaaacaaacaaacaaaca

SEQ ID NO: 297337 - RNA, 32 nt, Homo Sapiens
aaaacaucauuuccaggcagggaaacaaacag

SEQ ID NO: 297338 - RNA, 27 nt, Homo Sapiens
ccuauguuaauaaaaaugaacaaaauu

SEQ ID NO: 297339 - RNA, 32 nt, Homo Sapiens
uccuuggcggccgccgguucccgggaaguuac

SEQ ID NO: 297340 - RNA, 32 nt, Homo Sapiens
ggaaauaggccauagggccccuacuacugcca

SEQ ID NO: 297341 - RNA, 32 nt, Homo Sapiens
uaauauguggauauauuuucauagagguauaa

SEQ ID NO: 297342 - RNA, 30 nt, Homo Sapiens
gcgcaauggaggaggaggaugaggaagcgc

SEQ ID NO: 297343 - RNA, 32 nt, Homo Sapiens
auggaauaauuucuaauuuucggagaaggcaa

SEQ ID NO: 297344 - RNA, 32 nt, Homo Sapiens
aggccaugacuucuacaagcagauuucuuuuc

SEQ ID NO: 297345 - RNA, 32 nt, Homo Sapiens
cagcuggaguucuggaacuuuccuccucgggg

SEQ ID NO: 297346 - RNA, 32 nt, Homo Sapiens
ccaggcagcaggggggcgccugggucagcguc

SEQ ID NO: 297347 - RNA, 32 nt, Homo Sapiens
ccagaucccaggccucuaggccccacaucaac

SEQ ID NO: 297348 - RNA, 30 nt, Homo Sapiens
cugggcaggcugcgcgcggguguucaugca

SEQ ID NO: 297349 - RNA, 32 nt, Homo Sapiens
aaacugagagguauacaugaggcuaguguuug

SEQ ID NO: 297350 - RNA, 32 nt, Homo Sapiens
cagaugucagacuucuggucuugcuucuccac

SEQ ID NO: 297351 - RNA, 32 nt, Homo Sapiens
aauaaaauaaaauaaaaccaauuuuuaaaaaa

SEQ ID NO: 297352 - RNA, 32 nt, Homo Sapiens
aagccuaagaucuauuuauaauagauuauuag

SEQ ID NO: 297353 - RNA, 32 nt, Homo Sapiens
auauucacaggcuuugggguuaugacaucgug

SEQ ID NO: 297354 - RNA, 32 nt, Homo Sapiens
ugucccccuggaguugggcaagguggaguggc

SEQ ID NO: 297355 - RNA, 32 nt, Homo Sapiens
gcccgccccguggagauaccgccccagcgggg

SEQ ID NO: 297356 - RNA, 32 nt, Homo Sapiens
cauaaaggacaaugagaaguauuuuauaguga

SEQ ID NO: 297357 - RNA, 32 nt, Homo Sapiens
uuugugauguugggauuguugcuggugaguag

SEQ ID NO: 297358 - RNA, 32 nt, Homo Sapiens
agugagcaaaggaaaauuuuaagccaggauag

SEQ ID NO: 297359 - RNA, 32 nt, Homo Sapiens
ggucguuggaaugaauuuugaaacuucucaga

SEQ ID NO: 297360 - RNA, 32 nt, Homo Sapiens
acccugagauacuucccaaagcccuuauguuu

SEQ ID NO: 297361 - RNA, 32 nt, Homo Sapiens
cuuucccuguguuugugucauaauaguaaaaa

SEQ ID NO: 297362 - RNA, 31 nt, Homo Sapiens
guggugaugacucuuaaggagcaugcugccu

SEQ ID NO: 297363 - RNA, 32 nt, Homo Sapiens
aagucuccuuccccuuuccccacucccuggcu

SEQ ID NO: 297364 - RNA, 32 nt, Homo Sapiens
uacuucaaaaauauuaggaaaaucugucuuau

SEQ ID NO: 297365 - RNA, 32 nt, Homo Sapiens
ggaccucacagcaaagugcucacuucccucuu

SEQ ID NO: 297366 - RNA, 32 nt, Homo Sapiens
gagagaggauguggaaagcacuuuuuggcuga

SEQ ID NO: 297367 - RNA, 32 nt, Homo Sapiens
uccacuaggauccgccauaacccuggugucau

SEQ ID NO: 297368 - RNA, 32 nt, Homo Sapiens
accccucagagaaggagaagauaauauacuga

SEQ ID NO: 297369 - RNA, 32 nt, Homo Sapiens
acuuccagugucauucuccaccauuucugcag

SEQ ID NO: 297370 - RNA, 32 nt, Homo Sapiens
uuuacagaacuaaauugccgcagacaggaguu

SEQ ID NO: 297371 - RNA, 32 nt, Homo Sapiens
agcugcagaaaaggagggaggacuggcugggg

SEQ ID NO: 297372 - RNA, 32 nt, Homo Sapiens
ggagacuaacugugagcuacuaacacgggugg

SEQ ID NO: 297373 - RNA, 32 nt, Homo Sapiens
ggcugagaugagaaugcggauuaaaaugccug

SEQ ID NO: 297374 - RNA, 32 nt, Homo Sapiens
gcucggcagccgcugucuggugacggugagcg

SEQ ID NO: 297375 - RNA, 32 nt, Homo Sapiens
ugaccuagcugucgcgagccugccgcgaggag

SEQ ID NO: 297376 - RNA, 32 nt, Homo Sapiens
ugacaggagcccaagccaaaucugcuggccca

SEQ ID NO: 297377 - RNA, 32 nt, Homo Sapiens
aucaccagaaacaacugcuuauggaaaagaaa

SEQ ID NO: 297378 - RNA, 32 nt, Homo Sapiens
gcaccuuugucaaaaagcaacugaucauauuu

SEQ ID NO: 297379 - RNA, 32 nt, Homo Sapiens
gacuggugagaauggggcugaguggaggaggu

SEQ ID NO: 297380 - RNA, 32 nt, Homo Sapiens
gacaauaauugcuauuugaaauauaugcuucu

SEQ ID NO: 297381 - RNA, 32 nt, Homo Sapiens
cucccugacuuuagaggcuggugcugugucgg

SEQ ID NO: 297382 - RNA, 32 nt, Homo Sapiens
augcuuauuaaacucccacuggugcagaaacc

SEQ ID NO: 297383 - RNA, 32 nt, Homo Sapiens
cuggacauguccccuacccucuucccaagagg

SEQ ID NO: 297384 - RNA, 32 nt, Homo Sapiens
ccacacugguaagggaggagaauuugugcuuc

SEQ ID NO: 297385 - RNA, 32 nt, Homo Sapiens
ucccagcacuuuggcaggccgaggcgggugga

SEQ ID NO: 297386 - RNA, 32 nt, Homo Sapiens
aggccuaaauuuucggcuccauuuguauccuu

SEQ ID NO: 297387 - RNA, 32 nt, Homo Sapiens
cgguagcugcgacuggcgagcccgagagcgcc

SEQ ID NO: 297388 - RNA, 32 nt, Homo Sapiens
ccucagccacccaaguggcugggacuacagau

SEQ ID NO: 297389 - RNA, 32 nt, Homo Sapiens
ccuacagaauacuggacauacggauucagaau

SEQ ID NO: 297390 - RNA, 32 nt, Homo Sapiens
agguggucgggauacaucuugguuuuauguau

SEQ ID NO: 297391 - RNA, 32 nt, Homo Sapiens
ggagggggugagguggaauggggugggggaac

SEQ ID NO: 297392 - RNA, 32 nt, Homo Sapiens
gauuuuauagcuuuugagcuaacauaacuuuu

SEQ ID NO: 297393 - RNA, 32 nt, Homo Sapiens
cucugccccucuguccgggggacacgcgcaug

SEQ ID NO: 297394 - RNA, 32 nt, Homo Sapiens
gggaccuacagcugcgcgguggggacggcccg

SEQ ID NO: 297395 - RNA, 32 nt, Homo Sapiens
gcugcggaaccgggggcgcgcgggcgcagcgc

SEQ ID NO: 297396 - RNA, 32 nt, Homo Sapiens
guggacuggcuccucagggauccaugugagag

SEQ ID NO: 297397 - RNA, 32 nt, Homo Sapiens
uuuguauuugaaaaucucugugaauaaauucu

SEQ ID NO: 297398 - RNA, 32 nt, Homo Sapiens
agugcgggguuagggauuccccgggagagagg

SEQ ID NO: 297399 - RNA, 32 nt, Homo Sapiens
agucaaugcugauaguuuacuggcaacauuaa

SEQ ID NO: 297400 - RNA, 32 nt, Homo Sapiens
ccacaaugguuguaauguuugcuggcagcaag

SEQ ID NO: 297401 - RNA, 32 nt, Homo Sapiens
caaccccggggcccgcgccgcugccuagcgcu

SEQ ID NO: 297402 - RNA, 32 nt, Homo Sapiens
uuauucuuucacccccucuccuccugcucagc

SEQ ID NO: 297403 - RNA, 32 nt, Homo Sapiens
ccgcugcagccagcaguuguaaaauuguuagu

SEQ ID NO: 297404 - RNA, 32 nt, Homo Sapiens
uaaacuuuacacaguauauagacacauuuucu

SEQ ID NO: 297405 - RNA, 32 nt, Homo Sapiens
uauucugcaucagaaaaacaaacaaaacaaaa

SEQ ID NO: 297406 - RNA, 32 nt, Homo Sapiens
gccuugugggcaacaugaugcaugggaaauga

SEQ ID NO: 297407 - RNA, 32 nt, Homo Sapiens
gagauucccacuuuauaaauucugacauuuaa

SEQ ID NO: 297408 - RNA, 32 nt, Homo Sapiens
auuagucaguacaggcuggguuaugccgcugu

SEQ ID NO: 297409 - RNA, 32 nt, Homo Sapiens
ccugcgcucacggggacuggagggagccaggu

SEQ ID NO: 297410 - RNA, 32 nt, Homo Sapiens
aguucuauuucuaucugcaaauaguuucaaau

SEQ ID NO: 297411 - RNA, 32 nt, Homo Sapiens
gccaccacgaccagcuaauuucuucuauuuuu

SEQ ID NO: 297412 - RNA, 32 nt, Homo Sapiens
cuucagguuacggaagacaugaugcagagcaa

SEQ ID NO: 297413 - RNA, 32 nt, Homo Sapiens
ucuuccuggucaaugacuggcuuucgguggag

SEQ ID NO: 297414 - RNA, 32 nt, Homo Sapiens
ccuggccgggcacaguggcucacgcaccaaca

SEQ ID NO: 297415 - RNA, 32 nt, Homo Sapiens
cuuucuccucaaugauuuucuuaauggcaucu

SEQ ID NO: 297416 - RNA, 32 nt, Homo Sapiens
cagaguuagguauaaagacauaaaaaugugug

SEQ ID NO: 297417 - RNA, 29 nt, Homo Sapiens
cacauggcaggugagugaaaacguuauaa

SEQ ID NO: 297418 - RNA, 32 nt, Homo Sapiens
cgccgcagcucaccgggcgccacauggaccca

SEQ ID NO: 297419 - RNA, 32 nt, Homo Sapiens
gucucccuucccuccagcccaugccaggagcu

SEQ ID NO: 297420 - RNA, 31 nt, Homo Sapiens
cgcuuaaugaacugcugcaucgggcugggag

SEQ ID NO: 297421 - RNA, 32 nt, Homo Sapiens
auugugagcuccuggagggcaggagcuguguc

SEQ ID NO: 297422 - RNA, 32 nt, Homo Sapiens
uuuucaacuauuauuucuuuuuagguuucucu

SEQ ID NO: 297423 - RNA, 32 nt, Homo Sapiens
gacugcaggaggagggcaggguugggugggca

SEQ ID NO: 297424 - RNA, 32 nt, Homo Sapiens
gacaaggucuugcuuugucacccaggcuggag

SEQ ID NO: 297425 - RNA, 32 nt, Homo Sapiens
ugagcauuguggaauauccuuuccuaggcaca

SEQ ID NO: 297426 - RNA, 32 nt, Homo Sapiens
cugggagucguuagugagaguuucacucuugu

SEQ ID NO: 297427 - RNA, 32 nt, Homo Sapiens
uuacggcucuuugacacaauuuucaucaguga

SEQ ID NO: 297428 - RNA, 32 nt, Homo Sapiens
aucauaaagaauugaucaauauguaaauaugu

SEQ ID NO: 297429 - RNA, 32 nt, Homo Sapiens
ccggccucuggcuccggagcugcgggcacgcc

SEQ ID NO: 297430 - RNA, 32 nt, Homo Sapiens
agccuaccucaucccaggccugccccuccgug

SEQ ID NO: 297431 - RNA, 32 nt, Homo Sapiens
aggauuuccgcuggcuucagguuccggucagg

SEQ ID NO: 297432 - RNA, 32 nt, Homo Sapiens
agcccguguuuguccugccaucuggcacugca

SEQ ID NO: 297433 - RNA, 32 nt, Homo Sapiens
gccagucccgcuccgcgccgcgccgcuccgcu

SEQ ID NO: 297434 - RNA, 32 nt, Homo Sapiens
auagguccaguuaaagaacuacaggguagcca

SEQ ID NO: 297435 - RNA, 32 nt, Homo Sapiens
gcucaggguccagacuuuauucuuauucccag

SEQ ID NO: 297436 - RNA, 30 nt, Homo Sapiens
gcucaggcgcccgcgcccuugaccuucggc

SEQ ID NO: 297437 - RNA, 32 nt, Homo Sapiens
uguuuuaauauauuuuugugacuuucaaaaaa

SEQ ID NO: 297438 - RNA, 32 nt, Homo Sapiens
gcugccuagaggacccucccccugccuugcag

SEQ ID NO: 297439 - RNA, 32 nt, Homo Sapiens
ucacccuuucccuuuauuccuugccuggacca

SEQ ID NO: 297440 - RNA, 32 nt, Homo Sapiens
acucaauguauauaucuuauaucauaagaugu

SEQ ID NO: 297441 - RNA, 32 nt, Homo Sapiens
cccccagcaggccccaggguccaccaggcucu

SEQ ID NO: 297442 - RNA, 32 nt, Homo Sapiens
aagugaaaaaaguuaaaaaagaaaugggggca

SEQ ID NO: 297443 - RNA, 32 nt, Homo Sapiens
aaaguaauauaaauaauagguuuguucuguau

SEQ ID NO: 297444 - RNA, 32 nt, Homo Sapiens
cugcaugcugcaugagacccaggguccugcuu

SEQ ID NO: 297445 - RNA, 32 nt, Homo Sapiens
uguuaaguacaaucuuaccucaaaauuguuaa

SEQ ID NO: 297446 - RNA, 32 nt, Homo Sapiens
acacugauuuugaaauacuaagaucagacuuu

SEQ ID NO: 297447 - RNA, 32 nt, Homo Sapiens
gggacugguugggccagggaugaauauuugag

SEQ ID NO: 297448 - RNA, 32 nt, Homo Sapiens
cuugccugccagcugcucccgagguggccuug

SEQ ID NO: 297449 - RNA, 32 nt, Homo Sapiens
gaggggaguggauucuugcugcugguaugaga

SEQ ID NO: 297450 - RNA, 32 nt, Homo Sapiens
gucuguaagagagacagagaccaagaacuugc

SEQ ID NO: 297451 - RNA, 31 nt, Homo Sapiens
gcuaggauggagcagguugcggagggagcaa

SEQ ID NO: 297452 - RNA, 32 nt, Homo Sapiens
uugacugaacaaaagaacuguggacaacaaua

SEQ ID NO: 297453 - RNA, 32 nt, Homo Sapiens
ccacaccugcaccuccuucucaccugcuccuc

SEQ ID NO: 297454 - RNA, 32 nt, Homo Sapiens
gccgcccucgcacccuugcccgcgccuggcgg

SEQ ID NO: 297455 - RNA, 32 nt, Homo Sapiens
gugugaaaaaauacccucugacuguauuugag

SEQ ID NO: 297456 - RNA, 32 nt, Homo Sapiens
agcuaaaaguuccauaguacuaaggaaauaaa

SEQ ID NO: 297457 - RNA, 32 nt, Homo Sapiens
cuagaagagaugcguuagagaauagaaucagc

SEQ ID NO: 297458 - RNA, 32 nt, Homo Sapiens
auaaucguuauguaccuucagguguuagagug

SEQ ID NO: 297459 - RNA, 32 nt, Homo Sapiens
uguccgcgccgcgccucggcagccggaacagg

SEQ ID NO: 297460 - RNA, 32 nt, Homo Sapiens
uagaauguauaauuuuguacuacauuuauuuu

SEQ ID NO: 297461 - RNA, 32 nt, Homo Sapiens
ccauuggugguacauuuauuuuagccacggau

SEQ ID NO: 297462 - RNA, 32 nt, Homo Sapiens
uggcagugguggcuuuguaaaauagaagggga

SEQ ID NO: 297463 - RNA, 32 nt, Homo Sapiens
aaagcuugugaaaaaauaaagaaaaugaacug

SEQ ID NO: 297464 - RNA, 32 nt, Homo Sapiens
caagggcaucgcgcccauauuccuccuggagg

SEQ ID NO: 297465 - RNA, 32 nt, Homo Sapiens
aaaaaaacaaaauaaauaaaauuagacuuccu

SEQ ID NO: 297466 - RNA, 32 nt, Homo Sapiens
uuggagaaguauuuauuuucaaauaucaaauu

SEQ ID NO: 297467 - RNA, 32 nt, Homo Sapiens
guacccgcagccgccagugugugcucaccaug

SEQ ID NO: 297468 - RNA, 32 nt, Homo Sapiens
ggcuugauccugagcgcguguuaggaaggaga

SEQ ID NO: 297469 - RNA, 32 nt, Homo Sapiens
aucucaugcgagucaucaauaggacaaaaaag

SEQ ID NO: 297470 - RNA, 32 nt, Homo Sapiens
acaaauacaaugcagagcucauuuucaguuaa

SEQ ID NO: 297471 - RNA, 32 nt, Homo Sapiens
cuguggccucggucuccuccccaugaaguggg

SEQ ID NO: 297472 - RNA, 32 nt, Homo Sapiens
aaaagacugcagcaaagauaaacuauauguug

SEQ ID NO: 297473 - RNA, 32 nt, Homo Sapiens
ccuacaaagagcuuuugugucuuugacaucua

SEQ ID NO: 297474 - RNA, 32 nt, Homo Sapiens
gcaccuuuagaacuauuaauagcaaccugcau

SEQ ID NO: 297475 - RNA, 30 nt, Homo Sapiens
auguuguggcucccgcagccggcgcugggg

SEQ ID NO: 297476 - RNA, 32 nt, Homo Sapiens
aagacuaagaacucaacaucccuguggauccu

SEQ ID NO: 297477 - RNA, 32 nt, Homo Sapiens
ccccccggacgccgcccagcuugcuuguguau

SEQ ID NO: 297478 - RNA, 32 nt, Homo Sapiens
aaaugagucaauauacauaacguguaaaacag

SEQ ID NO: 297479 - RNA, 32 nt, Homo Sapiens
ugccucaccccggccccucccacgcugagaga

SEQ ID NO: 297480 - RNA, 32 nt, Homo Sapiens
guaucggugcgccccaccggccugcagccccu

SEQ ID NO: 297481 - RNA, 32 nt, Homo Sapiens
ccuauuucucuuaaaauaaaauccauuauucu

SEQ ID NO: 297482 - RNA, 32 nt, Homo Sapiens
uagcaaauuuaaaagaaauuguuggaagaauc

SEQ ID NO: 297483 - RNA, 32 nt, Homo Sapiens
uuucuacaccacucacagguuguacaacugcc

SEQ ID NO: 297484 - RNA, 32 nt, Homo Sapiens
aagaggcugugaguccacggaggauccucaga

SEQ ID NO: 297485 - RNA, 32 nt, Homo Sapiens
aguggaacaaagaaugauuuugaaagcuccac

SEQ ID NO: 297486 - RNA, 32 nt, Homo Sapiens
cgacgacggaccagcucccucucccuucuauc

SEQ ID NO: 297487 - RNA, 32 nt, Homo Sapiens
auucauagggaaagguuuuguauuuuuuaaaa

SEQ ID NO: 297488 - RNA, 32 nt, Homo Sapiens
uacuuuacaaaauaaccugaaacaguauagau

SEQ ID NO: 297489 - RNA, 32 nt, Homo Sapiens
gauuugauuucuuuuucuuuuuuuaaguuuca

SEQ ID NO: 297490 - RNA, 32 nt, Homo Sapiens
aggaagggagggcagagggggcuguggccguc

SEQ ID NO: 297491 - RNA, 32 nt, Homo Sapiens
ugcuauauuauguaaaugaauuauauaugcug

SEQ ID NO: 297492 - RNA, 32 nt, Homo Sapiens
uggcuccagaaaugucuaaaugcugaaaaaac

SEQ ID NO: 297493 - RNA, 32 nt, Homo Sapiens
uacacaauagcagagaauauaaacugaaaaaa

SEQ ID NO: 297494 - RNA, 32 nt, Homo Sapiens
uuaaaacugauccuaacuaaaaacagacuuga

SEQ ID NO: 297495 - RNA, 32 nt, Homo Sapiens
acguguccagguccgcggccccgggagcuugg

SEQ ID NO: 297496 - RNA, 32 nt, Homo Sapiens
uuaggguucuuugcaaugugguaucuagcugu

SEQ ID NO: 297497 - RNA, 32 nt, Homo Sapiens
cccaccaucuucugcaguugccucuuuguugg

SEQ ID NO: 297498 - RNA, 32 nt, Homo Sapiens
guaagauauaaaauggaaaaaggcuaaguaau

SEQ ID NO: 297499 - RNA, 32 nt, Homo Sapiens
aacaagccauaguggagagaacugaauaaaca

SEQ ID NO: 297500 - RNA, 32 nt, Homo Sapiens
uccguauuuuuaacagaagacagugcaacaac

SEQ ID NO: 297501 - RNA, 32 nt, Homo Sapiens
gccucagcgaguuccugcuacucuucaccacu

SEQ ID NO: 297502 - RNA, 31 nt, Homo Sapiens
aauacugaauuaucgaacacuugccaggcac

SEQ ID NO: 297503 - RNA, 32 nt, Homo Sapiens
cuuuguggaaagggggcugcuagugacacccu

SEQ ID NO: 297504 - RNA, 32 nt, Homo Sapiens
ggccuucgaggugccuuaggccgcuugccuug

SEQ ID NO: 297505 - RNA, 32 nt, Homo Sapiens
ggaucaugagaggagggacuccaucuugagcc

SEQ ID NO: 297506 - RNA, 32 nt, Homo Sapiens
ccacgcguccggugacggacccccgccgcccg

SEQ ID NO: 297507 - RNA, 32 nt, Homo Sapiens
aaguucauuagggaaauuaucuucccagucca

SEQ ID NO: 297508 - RNA, 32 nt, Homo Sapiens
cgagauuucaccaccugacuccccucaaaacc

SEQ ID NO: 297509 - RNA, 32 nt, Homo Sapiens
agggcaacccaccaucuacccacuuacuaacc

SEQ ID NO: 297510 - RNA, 32 nt, Homo Sapiens
guugggaaaacaugaggaauggcugacuccaa

SEQ ID NO: 297511 - RNA, 32 nt, Homo Sapiens
uuagaauuucuuuuuaguaucuauaguaucuu

SEQ ID NO: 297512 - RNA, 32 nt, Homo Sapiens
agaacaaggaggagguggugaucauggagaca

SEQ ID NO: 297513 - RNA, 32 nt, Homo Sapiens
gugccaguguggaagcugccucccaucucaac

SEQ ID NO: 297514 - RNA, 32 nt, Homo Sapiens
ccccagcucccaccccacagcccacucucagg

SEQ ID NO: 297515 - RNA, 27 nt, Homo Sapiens
ccaugggcagcccccgcuccgcgcuga

SEQ ID NO: 297516 - RNA, 32 nt, Homo Sapiens
auggauccucaauaagauugcagcccaguuuu

SEQ ID NO: 297517 - RNA, 32 nt, Homo Sapiens
uuuucuaguauuauuuuuguauugauuugugu

SEQ ID NO: 297518 - RNA, 32 nt, Homo Sapiens
uacaacuuucaacauugucauuuuuucuuaga

SEQ ID NO: 297519 - RNA, 31 nt, Homo Sapiens
gugggauucaugcaaauuuuucaccaaaaaa

SEQ ID NO: 297520 - RNA, 32 nt, Homo Sapiens
cguuuucccgcuuugcaauuuccuccuuuugc

SEQ ID NO: 297521 - RNA, 32 nt, Homo Sapiens
cgccucccggcgcucccuccccgacuccuaag

SEQ ID NO: 297522 - RNA, 32 nt, Homo Sapiens
uauucacuuguaaaaaugauuguaacagauaa

SEQ ID NO: 297523 - RNA, 32 nt, Homo Sapiens
ggaagggaaaaggaagcagaugaaaggcuuaa

SEQ ID NO: 297524 - RNA, 32 nt, Homo Sapiens
gcgcgacucggcugcacuccucacgcgccugu

SEQ ID NO: 297525 - RNA, 32 nt, Homo Sapiens
ccaggguuauucuccuccucgagucacaguca

SEQ ID NO: 297526 - RNA, 32 nt, Homo Sapiens
gaucucaggcucugccggcccgcggcccgcgg

SEQ ID NO: 297527 - RNA, 30 nt, Homo Sapiens
auuaucgacacguucacccaucuuaucaag

SEQ ID NO: 297528 - RNA, 32 nt, Homo Sapiens
uuggcuagauuaucuuagacgaauuuuacaau

SEQ ID NO: 297529 - RNA, 32 nt, Homo Sapiens
gugagcuuccaccuugguggguuuggggaauu

SEQ ID NO: 297530 - RNA, 32 nt, Homo Sapiens
acuuccaccuuuugccuauugaaauaaugcug

SEQ ID NO: 297531 - RNA, 32 nt, Homo Sapiens
gucauuuuacuuuuuuguauacauauguguaa

SEQ ID NO: 297532 - RNA, 32 nt, Homo Sapiens
uaaucaccguggaauuucucauuuucauuauu

SEQ ID NO: 297533 - RNA, 32 nt, Homo Sapiens
guuuuguuuuucugcugaaugccugcucccag

SEQ ID NO: 297534 - RNA, 31 nt, Homo Sapiens
cccgcccaagccaccagggagccaaucucag

SEQ ID NO: 297535 - RNA, 32 nt, Homo Sapiens
ccgugagcucacggaccgacggaccgacgggc

SEQ ID NO: 297536 - RNA, 32 nt, Homo Sapiens
gggcggcgggcggcaaaggagcagccaugagg

SEQ ID NO: 297537 - RNA, 32 nt, Homo Sapiens
gaagugccugccugcuggcauuggccagacca

SEQ ID NO: 297538 - RNA, 32 nt, Homo Sapiens
ggcuguuugcugucuccucaacucaaccuagu

SEQ ID NO: 297539 - RNA, 32 nt, Homo Sapiens
gcgcaguguccgccuggcggauuugggucagc

SEQ ID NO: 297540 - RNA, 32 nt, Homo Sapiens
gggcacuagggucccagggugggcucaggguu

SEQ ID NO: 297541 - RNA, 32 nt, Homo Sapiens
cgcacagggauggcggcggaggcggccgauuu

SEQ ID NO: 297542 - RNA, 28 nt, Homo Sapiens
aggauggggcggccguggugaggaaccc

SEQ ID NO: 297543 - RNA, 32 nt, Homo Sapiens
gaaauuaauuuucugagcuccugagaaacuug

SEQ ID NO: 297544 - RNA, 32 nt, Homo Sapiens
uagcagaguggagagggugugugaaaugccgg

SEQ ID NO: 297545 - RNA, 32 nt, Homo Sapiens
aacagaauauuuugacuaauccucuauuuuuu

SEQ ID NO: 297546 - RNA, 32 nt, Homo Sapiens
gacaucagaaaagcaggcccuagagagaagua

SEQ ID NO: 297547 - RNA, 32 nt, Homo Sapiens
ugcccggagaacucaggaggccugcagaagag

SEQ ID NO: 297548 - RNA, 32 nt, Homo Sapiens
cccuuauuuuguuuuuguuuucuaauauacuu

SEQ ID NO: 297549 - RNA, 32 nt, Homo Sapiens
cugcaagugacgagaaagauucuguuucgaau

SEQ ID NO: 297550 - RNA, 32 nt, Homo Sapiens
auacacagaaccuggugaagagcuggaggcag

SEQ ID NO: 297551 - RNA, 32 nt, Homo Sapiens
gcggcucgcucugucgccggcgcgggauuggg

SEQ ID NO: 297552 - RNA, 32 nt, Homo Sapiens
gagaaugagaagucucuagaaaaugaaacacu

SEQ ID NO: 297553 - RNA, 32 nt, Homo Sapiens
ugaucaguuuauggaagaaaaggaaaccaaac

SEQ ID NO: 297554 - RNA, 32 nt, Homo Sapiens
aagagcaauuggugaagaguguguguacuauu

SEQ ID NO: 297555 - RNA, 32 nt, Homo Sapiens
gagggugaucaagcuggagaccaucugcuccu

SEQ ID NO: 297556 - RNA, 32 nt, Homo Sapiens
aggcacauuugugacaaacaacuacuugauau

SEQ ID NO: 297557 - RNA, 32 nt, Homo Sapiens
gcacugaggcucuggaacuucugcccagcucu

SEQ ID NO: 297558 - RNA, 32 nt, Homo Sapiens
agugucugacuauacugggggaagaggagcca

SEQ ID NO: 297559 - RNA, 32 nt, Homo Sapiens
agcauugcauuaccaucguggaauaaucuagc

SEQ ID NO: 297560 - RNA, 32 nt, Homo Sapiens
aaaagagaauccaguuguuguggcugaaaaaa

SEQ ID NO: 297561 - RNA, 32 nt, Homo Sapiens
ggucugugcagggcugcucagcucuugaggau

SEQ ID NO: 297562 - RNA, 32 nt, Homo Sapiens
agucagaaaaagaacgggaaugcuguucagga

SEQ ID NO: 297563 - RNA, 32 nt, Homo Sapiens
uggaaauccagcugguuauccaaauccuaagg

SEQ ID NO: 297564 - RNA, 29 nt, Homo Sapiens
caagaugucuguguugaagaagaacagga

SEQ ID NO: 297565 - RNA, 30 nt, Homo Sapiens
agucccagugcugcugcagcucugagcauu

SEQ ID NO: 297566 - RNA, 32 nt, Homo Sapiens
agacgugccgccgugccacaccuucccuaacu

SEQ ID NO: 297567 - RNA, 32 nt, Homo Sapiens
cauucaggccugcugcaggagcucugagaaca

SEQ ID NO: 297568 - RNA, 32 nt, Homo Sapiens
cuuugcuuggguuuccuuuguaugcuucagcc

SEQ ID NO: 297569 - RNA, 32 nt, Homo Sapiens
uugacaagauuccacaggccauaagauuuucu

SEQ ID NO: 297570 - RNA, 32 nt, Homo Sapiens
cggcccacuccagcggcgacuuugagggauuc

SEQ ID NO: 297571 - RNA, 32 nt, Homo Sapiens
aaaugcaagaauuguggaugcucagaaaaaug

SEQ ID NO: 297572 - RNA, 32 nt, Homo Sapiens
caccccagagggcagggcuaggcgagagccug

SEQ ID NO: 297573 - RNA, 32 nt, Homo Sapiens
acuauuuugugugcuccgcgugcuauagcuuu

SEQ ID NO: 297574 - RNA, 32 nt, Homo Sapiens
augggaaaagagaagacuguuuuacaccugga

SEQ ID NO: 297575 - RNA, 32 nt, Homo Sapiens
auuucaaaaugguagaauaaauuacagaauuu

SEQ ID NO: 297576 - RNA, 32 nt, Homo Sapiens
augcacccgccaaggacacacccaccgaggcc

SEQ ID NO: 297577 - RNA, 32 nt, Homo Sapiens
ugaucccuccccacucaggggcgggaccccag

SEQ ID NO: 297578 - RNA, 32 nt, Homo Sapiens
gugcaggcaggcuggccuggggucaggccggg

SEQ ID NO: 297579 - RNA, 32 nt, Homo Sapiens
aucucguagaauuaucuuaauaaaauaauggc

SEQ ID NO: 297580 - RNA, 32 nt, Homo Sapiens
uauugauguuuuacugcaaaucuuaugggucu

SEQ ID NO: 297581 - RNA, 32 nt, Homo Sapiens
aaugguuuuccuacucgugaucucuaacaaaa

SEQ ID NO: 297582 - RNA, 32 nt, Homo Sapiens
gugucuuuaugaagcuuucaguuuuuucucac

SEQ ID NO: 297583 - RNA, 32 nt, Homo Sapiens
cgugcuauaugauuuuuuguuacauuguuaca

SEQ ID NO: 297584 - RNA, 32 nt, Homo Sapiens
agcgacgcgggaaguccggacgcaguagcucc

SEQ ID NO: 297585 - RNA, 32 nt, Homo Sapiens
ugcagggcuccuccccaccuccccacuucugc

SEQ ID NO: 297586 - RNA, 32 nt, Homo Sapiens
cacacagaggggcuuguugaggccaccggagg

SEQ ID NO: 297587 - RNA, 32 nt, Homo Sapiens
uguguuuguauacagccuuguuuaauguuuug

SEQ ID NO: 297588 - RNA, 32 nt, Homo Sapiens
ccugcuccgaggagcuggccugauguccucgg

SEQ ID NO: 297589 - RNA, 32 nt, Homo Sapiens
acuacagaauccguccuuucauuucaacuuau

SEQ ID NO: 297590 - RNA, 32 nt, Homo Sapiens
cuuguuaagauuuuucuuucugggcgggcgcg

SEQ ID NO: 297591 - RNA, 32 nt, Homo Sapiens
cuuugccgagcgcagagcugcagccgccgagc

SEQ ID NO: 297592 - RNA, 29 nt, Homo Sapiens
acccauaaauacauguuguaaaaaauuca

SEQ ID NO: 297593 - RNA, 32 nt, Homo Sapiens
gugacuguacuauuucuaguauagugaacuac

SEQ ID NO: 297594 - RNA, 32 nt, Homo Sapiens
ggaacagcccucagccagcagugagcccuuag

SEQ ID NO: 297595 - RNA, 32 nt, Homo Sapiens
ggcggcgagcggcgcgcacaauccucgcucgg

SEQ ID NO: 297596 - RNA, 32 nt, Homo Sapiens
ccggccuugggagaggacacgggcaugggcug

SEQ ID NO: 297597 - RNA, 32 nt, Homo Sapiens
aagagcgugcgcgcgcccgaggacguacguca

SEQ ID NO: 297598 - RNA, 32 nt, Homo Sapiens
ugaacucauccuuuuuuauggcugcacaguau

SEQ ID NO: 297599 - RNA, 32 nt, Homo Sapiens
cagcaucuggcugcccgggggaggaaggacac

SEQ ID NO: 297600 - RNA, 29 nt, Homo Sapiens
cagaggcggggacagcuggccaccguguc

SEQ ID NO: 297601 - RNA, 32 nt, Homo Sapiens
uggggucgguuugagaagauauagaaauucua

SEQ ID NO: 297602 - RNA, 32 nt, Homo Sapiens
gccaccuccaaugcacaaggugucucaucuga

SEQ ID NO: 297603 - RNA, 32 nt, Homo Sapiens
guuuucuucauccaugaaauccaaguaauacu

SEQ ID NO: 297604 - RNA, 32 nt, Homo Sapiens
agugucuucuauugagaguacuacuauuaauu

SEQ ID NO: 297605 - RNA, 32 nt, Homo Sapiens
cuucgcccgccccucgccccagcccaguccaa

SEQ ID NO: 297606 - RNA, 32 nt, Homo Sapiens
cacaugaguuucuucuuuuuuauuuaguaaua

SEQ ID NO: 297607 - RNA, 32 nt, Homo Sapiens
ccacauacugcaugcacacacacacaccuaca

SEQ ID NO: 297608 - RNA, 32 nt, Homo Sapiens
gagggagagggagaggggacccgaggcugagg

SEQ ID NO: 297609 - RNA, 32 nt, Homo Sapiens
gggugagucaacauaaggagugcaggccaccu

SEQ ID NO: 297610 - RNA, 32 nt, Homo Sapiens
acacaagcaacacuauuguaacagaagaaaua

SEQ ID NO: 297611 - RNA, 32 nt, Homo Sapiens
ggccggugacaucuagcggggaggugggcggc

SEQ ID NO: 297612 - RNA, 32 nt, Homo Sapiens
cuggcccaggagacccuggcccugcccugugc

SEQ ID NO: 297613 - RNA, 32 nt, Homo Sapiens
ccugcgcgcucgcggcuugccgcggcccggag

SEQ ID NO: 297614 - RNA, 32 nt, Homo Sapiens
aucagcaaccaggaagaagcugagagacagcc

SEQ ID NO: 297615 - RNA, 32 nt, Homo Sapiens
cuguucccggcggccucuccggcuucccuaaa

SEQ ID NO: 297616 - RNA, 32 nt, Homo Sapiens
ucuguaucuucaguauauauauuuuguuuguu

SEQ ID NO: 297617 - RNA, 32 nt, Homo Sapiens
cauucuuggaaaguacguagacugaauaaguc

SEQ ID NO: 297618 - RNA, 32 nt, Homo Sapiens
cuaggcuccuggauguugcugcauucuaagcu

SEQ ID NO: 297619 - RNA, 32 nt, Homo Sapiens
uaaggcaugguuuucuauuaagccuuuaaugc

SEQ ID NO: 297620 - RNA, 32 nt, Homo Sapiens
caagacucauuuucuucauguuuggaauagug

SEQ ID NO: 297621 - RNA, 32 nt, Homo Sapiens
gccgggccuggccagcagugcacagugccugg

SEQ ID NO: 297622 - RNA, 32 nt, Homo Sapiens
ugucuuuauagcagcauaauuuauaauccuuu

SEQ ID NO: 297623 - RNA, 32 nt, Homo Sapiens
ucauucuucuaaaaguggauauuuuucuguaa

SEQ ID NO: 297624 - RNA, 32 nt, Homo Sapiens
caugaagaauacuggaauauaggagguagggu

SEQ ID NO: 297625 - RNA, 32 nt, Homo Sapiens
guggaggaaaauuaccaacuugcaaccaguag

SEQ ID NO: 297626 - RNA, 32 nt, Homo Sapiens
uuagaggaagaaaaaagguuagggaaguguca

SEQ ID NO: 297627 - RNA, 32 nt, Homo Sapiens
uugauguacugaaauaugaacuguauaaaaag

SEQ ID NO: 297628 - RNA, 32 nt, Homo Sapiens
cacauuggagcccuccugcugcuuuggugccu

SEQ ID NO: 297629 - RNA, 32 nt, Homo Sapiens
ggagggcucagguccagcucccacgucaggua

SEQ ID NO: 297630 - RNA, 32 nt, Homo Sapiens
gagcaaaggacacgggacugcaaaucuuccua

SEQ ID NO: 297631 - RNA, 32 nt, Homo Sapiens
uccuguccccacucacaggcccacgcagcgag

SEQ ID NO: 297632 - RNA, 32 nt, Homo Sapiens
auggucacauucaaguucccuaaugcucuuag

SEQ ID NO: 297633 - RNA, 32 nt, Homo Sapiens
uugagucuguuuccucauuuguacagaggcua

SEQ ID NO: 297634 - RNA, 32 nt, Homo Sapiens
gguaccugacgcccgcuaacuaagcagaggcu

SEQ ID NO: 297635 - RNA, 32 nt, Homo Sapiens
ccugcugugcuguuuuucccccacaugaggag

SEQ ID NO: 297636 - RNA, 32 nt, Homo Sapiens
gaacauggaaagaaaauuuaauaacuuuuuaa

SEQ ID NO: 297637 - RNA, 32 nt, Homo Sapiens
gccugaguuuacugaggacucaaugugcuugc

SEQ ID NO: 297638 - RNA, 32 nt, Homo Sapiens
gcccagcccugccuguccccagccagcacugc

SEQ ID NO: 297639 - RNA, 32 nt, Homo Sapiens
aacccugcaaauguaauaaauauggaaaaaca

SEQ ID NO: 297640 - RNA, 32 nt, Homo Sapiens
ccgcucuuuggacacgccgacccggcgcuccc

SEQ ID NO: 297641 - RNA, 32 nt, Homo Sapiens
gacuguacuuuuuguauuuuuuguguauguuu

SEQ ID NO: 297642 - RNA, 32 nt, Homo Sapiens
uuuugacuuucaagcacuaugauucaagaaau

SEQ ID NO: 297643 - RNA, 32 nt, Homo Sapiens
cuuugggcacuccucggaggccccaccucgca

SEQ ID NO: 297644 - RNA, 32 nt, Homo Sapiens
ugguggccauugugcuuggggccuucauuguc

SEQ ID NO: 297645 - RNA, 32 nt, Homo Sapiens
gggacuguggagccccuggcaggcuggccugg

SEQ ID NO: 297646 - RNA, 32 nt, Homo Sapiens
cagcaggugcagugcugucaccuggcugaaga

SEQ ID NO: 297647 - RNA, 29 nt, Homo Sapiens
gucaauguauuuuaagcuucaguguguua

SEQ ID NO: 297648 - RNA, 32 nt, Homo Sapiens
aauugaaggcauaaguuggucuuagguuguau

SEQ ID NO: 297649 - RNA, 32 nt, Homo Sapiens
ggaagguagaggggccaacaaacaagauuggg

SEQ ID NO: 297650 - RNA, 32 nt, Homo Sapiens
aauguugccaauggagguccugcacccgaugu

SEQ ID NO: 297651 - RNA, 32 nt, Homo Sapiens
agaagaggggagaguggagggccgcugaauaa

SEQ ID NO: 297652 - RNA, 32 nt, Homo Sapiens
aacaugucuguuguaacuauguuucuuaaaua

SEQ ID NO: 297653 - RNA, 32 nt, Homo Sapiens
uaugaaugaaaaaauaaacgagugaauguuga

SEQ ID NO: 297654 - RNA, 32 nt, Homo Sapiens
uagaguuuugauugaaaguauuuuuucaaacc

SEQ ID NO: 297655 - RNA, 32 nt, Homo Sapiens
aauggacuuccacuuucaucaacuuuccaucu

SEQ ID NO: 297656 - RNA, 32 nt, Homo Sapiens
gaagaacaaaauuuauuuauguauugacauuu

SEQ ID NO: 297657 - RNA, 32 nt, Homo Sapiens
gccagggguagcggcgaggacacgccaacacc

SEQ ID NO: 297658 - RNA, 32 nt, Homo Sapiens
agacauugaagauaugugguccuccugaaagu

SEQ ID NO: 297659 - RNA, 32 nt, Homo Sapiens
uuugaaaauuuuuaaauaagagcauuaaaaga

SEQ ID NO: 297660 - RNA, 30 nt, Homo Sapiens
ugugagguagguggcauggcagagggggcu

SEQ ID NO: 297661 - RNA, 28 nt, Homo Sapiens
agugauaagaguuaacauuuggcuauac

SEQ ID NO: 297662 - RNA, 32 nt, Homo Sapiens
gcccacccgccuuccacgcgggccgcggcucc

SEQ ID NO: 297663 - RNA, 32 nt, Homo Sapiens
cugcuugucuuacuauuccugcuuggauacac

SEQ ID NO: 297664 - RNA, 32 nt, Homo Sapiens
aggucauuccaugugugauaguagacaccugg

SEQ ID NO: 297665 - RNA, 32 nt, Homo Sapiens
gccagagcugucuaguuucauucauucuuuca

SEQ ID NO: 297666 - RNA, 32 nt, Homo Sapiens
gucgaguuuuaaguuagaagacuuccagaaaa

SEQ ID NO: 297667 - RNA, 32 nt, Homo Sapiens
cggggggaggggggcgggcggggugggaagug

SEQ ID NO: 297668 - RNA, 32 nt, Homo Sapiens
guuuauagugcugguaguaucaccuuuugcca

SEQ ID NO: 297669 - RNA, 32 nt, Homo Sapiens
gaggaggacgcgggcgugcgcugcugggagcc

SEQ ID NO: 297670 - RNA, 32 nt, Homo Sapiens
gcuugcccucaccagcggccgucagccgacac

SEQ ID NO: 297671 - RNA, 32 nt, Homo Sapiens
gguuggaaauauguacauaauugcauaaggug

SEQ ID NO: 297672 - RNA, 32 nt, Homo Sapiens
ggaggccgaagaccucucucaaugcacagggc

SEQ ID NO: 297673 - RNA, 32 nt, Homo Sapiens
caccuguaaucccagcacuuugggaggcggag

SEQ ID NO: 297674 - RNA, 32 nt, Homo Sapiens
uugggauuuuuuuuuuuuuuuaaauacuuuag

SEQ ID NO: 297675 - RNA, 32 nt, Homo Sapiens
uuuuguaaauuaauucggcgugugcuacauga

SEQ ID NO: 297676 - RNA, 32 nt, Homo Sapiens
aagcgccuggguggaggcaggguagggcaggg

SEQ ID NO: 297677 - RNA, 32 nt, Homo Sapiens
ccucuuccccuugccuugaagggaccucaccu

SEQ ID NO: 297678 - RNA, 32 nt, Homo Sapiens
guccgcccggcgagcaggacaggcugcuuugg

SEQ ID NO: 297679 - RNA, 32 nt, Homo Sapiens
cuguuuuucuucauaaaguucugcguuuggca

SEQ ID NO: 297680 - RNA, 32 nt, Homo Sapiens
uccgggcgcugcccgcgcggucgccggcauga

SEQ ID NO: 297681 - RNA, 32 nt, Homo Sapiens
ugugagugauauauuucuauguuuuuaaugua

SEQ ID NO: 297682 - RNA, 32 nt, Homo Sapiens
accuauugucucacaagaaucucaucacucag

SEQ ID NO: 297683 - RNA, 32 nt, Homo Sapiens
cuuacacuguggacgcucucucgcgcccgcca

SEQ ID NO: 297684 - RNA, 32 nt, Homo Sapiens
gaacuuuaauuccuccugaggaacucuacuuu

SEQ ID NO: 297685 - RNA, 32 nt, Homo Sapiens
agcagagcccgcgcgccgcccgcuccgggugc

SEQ ID NO: 297686 - RNA, 32 nt, Homo Sapiens
aauggggggcucuggcuuggugagauggggga

SEQ ID NO: 297687 - RNA, 32 nt, Homo Sapiens
ccucguggguggcaggagagcggacuuagagc

SEQ ID NO: 297688 - RNA, 32 nt, Homo Sapiens
agcuguggagagagggacagaggcuggagaag

SEQ ID NO: 297689 - RNA, 32 nt, Homo Sapiens
cagccaccccaaagcccuccuccuccuuaacc

SEQ ID NO: 297690 - RNA, 32 nt, Homo Sapiens
uggagugcagugccgcaaucucagcucgccgc

SEQ ID NO: 297691 - RNA, 32 nt, Homo Sapiens
agcaugucacuccagcagcacaggggacgcaa

SEQ ID NO: 297692 - RNA, 32 nt, Homo Sapiens
agccccacagcugccccccuccccucccuuuu

SEQ ID NO: 297693 - RNA, 32 nt, Homo Sapiens
gcaucugggcugcagggccagagcuagucuga

SEQ ID NO: 297694 - RNA, 32 nt, Homo Sapiens
ugacaccaaacacacaaggaauaaaacaaaca

SEQ ID NO: 297695 - RNA, 32 nt, Homo Sapiens
gcaaguccccugaagcucccaacccagccuga

SEQ ID NO: 297696 - RNA, 30 nt, Homo Sapiens
gaggugggaggauugcuugagucugcgagg

SEQ ID NO: 297697 - RNA, 32 nt, Homo Sapiens
ugaggccgcccgggauggcgcaggggcggcgg

SEQ ID NO: 297698 - RNA, 32 nt, Homo Sapiens
ugugauaguagcuucaguauguuuccucaccc

SEQ ID NO: 297699 - RNA, 32 nt, Homo Sapiens
ucugaaauaucccggggguggggggugggggu

SEQ ID NO: 297700 - RNA, 32 nt, Homo Sapiens
ucugcuauuugcuguuauuuuaucugcuaugc

SEQ ID NO: 297701 - RNA, 32 nt, Homo Sapiens
accaguugacuucugcauuaaccugcaugauc

SEQ ID NO: 297702 - RNA, 32 nt, Homo Sapiens
gguggggaaggggccaucuguggaagaaacac

SEQ ID NO: 297703 - RNA, 32 nt, Homo Sapiens
guaugccgcucucucccggcgcggccgccgcc

SEQ ID NO: 297704 - RNA, 31 nt, Homo Sapiens
aggguauuuuaauaaaucuugguuucauguc

SEQ ID NO: 297705 - RNA, 32 nt, Homo Sapiens
ugagacaugaacaacaggagggagggaaagag

SEQ ID NO: 297706 - RNA, 32 nt, Homo Sapiens
gccaagcacggcagaggacugcaggccaucag

SEQ ID NO: 297707 - RNA, 32 nt, Homo Sapiens
guggcagcgcauguaugggcgcugcuccggca

SEQ ID NO: 297708 - RNA, 32 nt, Homo Sapiens
aggguggcguuuugggggcgcuucuugagacg

SEQ ID NO: 297709 - RNA, 32 nt, Homo Sapiens
acccaggagguagaggcugcagugagccggga

SEQ ID NO: 297710 - RNA, 32 nt, Homo Sapiens
gaggaugagggaggucggggcugcagugagcc

SEQ ID NO: 297711 - RNA, 32 nt, Homo Sapiens
cagauaccaacauuauuauauuuuaaaaucac

SEQ ID NO: 297712 - RNA, 32 nt, Homo Sapiens
ucagauuuuaccuguuugcugcugagaacauc

SEQ ID NO: 297713 - RNA, 32 nt, Homo Sapiens
agcucagcccucauuccuccccgagcucauau

SEQ ID NO: 297714 - RNA, 32 nt, Homo Sapiens
accaaugaauguuuauaccuuuuguuuuccuu

SEQ ID NO: 297715 - RNA, 32 nt, Homo Sapiens
cacugaaauaaaugcuuuagugaagcagaaua

SEQ ID NO: 297716 - RNA, 32 nt, Homo Sapiens
auaugcuuacugauauauuuuacaauuuuuua

SEQ ID NO: 297717 - RNA, 32 nt, Homo Sapiens
uccuaauguauuugguacuauaguguaugaac

SEQ ID NO: 297718 - RNA, 32 nt, Homo Sapiens
auaaauacaagaguuucaaaacauacaagaga

SEQ ID NO: 297719 - RNA, 32 nt, Homo Sapiens
auccugaauuugccuacuaucuaaucagcaau

SEQ ID NO: 297720 - RNA, 32 nt, Homo Sapiens
guuugacuucguauugacccuuaucuguaaaa

SEQ ID NO: 297721 - RNA, 32 nt, Homo Sapiens
gugcacagccccagccacuccuccccacugca

SEQ ID NO: 297722 - RNA, 32 nt, Homo Sapiens
guaagcccuuaauaaauauaaaauaucauuau

SEQ ID NO: 297723 - RNA, 32 nt, Homo Sapiens
guggccgccuccccgaacccagcugccgucaa

SEQ ID NO: 297724 - RNA, 32 nt, Homo Sapiens
auaauuacauucaaaguauacuuuuuucuuga

SEQ ID NO: 297725 - RNA, 32 nt, Homo Sapiens
gccuggggaaugugaguguucagacaugccag

SEQ ID NO: 297726 - RNA, 32 nt, Homo Sapiens
uggaggucccacuuaccuaguuaguaauaaca

SEQ ID NO: 297727 - RNA, 32 nt, Homo Sapiens
agaaaaauguuuuacgguggcugcuuguacuu

SEQ ID NO: 297728 - RNA, 32 nt, Homo Sapiens
cagucuugcucugucugucacccaggcuggag

SEQ ID NO: 297729 - RNA, 32 nt, Homo Sapiens
gcaccaucaagcauaucagucuaccuuucuuu

SEQ ID NO: 297730 - RNA, 31 nt, Homo Sapiens
aaggucaucaaacauuugccaagugaguuga

SEQ ID NO: 297731 - RNA, 32 nt, Homo Sapiens
aaugaguuuuugauuuuuuuuaaaacccucaa

SEQ ID NO: 297732 - RNA, 32 nt, Homo Sapiens
ucuguauuguacacaaaagcuaauaauuuugu

SEQ ID NO: 297733 - RNA, 32 nt, Homo Sapiens
cuugaguguuuguacucauggucuuguucuag

SEQ ID NO: 297734 - RNA, 32 nt, Homo Sapiens
aacccugaaaccaggacgagaaguugacaaca

SEQ ID NO: 297735 - RNA, 32 nt, Homo Sapiens
caugccuggcuaauuuuuauauuuucaguaga

SEQ ID NO: 297736 - RNA, 32 nt, Homo Sapiens
aaguacucuuugauguuucugguaaucaugga

SEQ ID NO: 297737 - RNA, 32 nt, Homo Sapiens
ccaaacaccaguccccggcagcucguugcgca

SEQ ID NO: 297738 - RNA, 32 nt, Homo Sapiens
aaagggacggggugcagacggcagggccagua

SEQ ID NO: 297739 - RNA, 32 nt, Homo Sapiens
ucuuuugugcuguuaaauauauauucuauucu

SEQ ID NO: 297740 - RNA, 32 nt, Homo Sapiens
ccagucugcuaaggaagagaaagcccaugugu

SEQ ID NO: 297741 - RNA, 32 nt, Homo Sapiens
gcacugugcccacccacuugcuccacaacguc

SEQ ID NO: 297742 - RNA, 32 nt, Homo Sapiens
ggucuucccuuaaaacuuugggcuguuggcug

SEQ ID NO: 297743 - RNA, 32 nt, Homo Sapiens
uuuuuaucgcuaaaugacuugcagaugaaaaa

SEQ ID NO: 297744 - RNA, 32 nt, Homo Sapiens
gcccaagccggugagaaugugaaacaguuucu

SEQ ID NO: 297745 - RNA, 32 nt, Homo Sapiens
ccaucuguccuuccucacagcacccucagcac

SEQ ID NO: 297746 - RNA, 32 nt, Homo Sapiens
auuuauuauagcaguaaucuuguguuucuccu

SEQ ID NO: 297747 - RNA, 32 nt, Homo Sapiens
ucuugcuacacagaaauaacaaacacguuauu

SEQ ID NO: 297748 - RNA, 32 nt, Homo Sapiens
caaagggaggucgggaucucgguuuuccggcc

SEQ ID NO: 297749 - RNA, 32 nt, Homo Sapiens
caccuaccgacccauucuccuucugcuucucu

SEQ ID NO: 297750 - RNA, 32 nt, Homo Sapiens
ucaagugcauuacauuuauugugcacuuuauu

SEQ ID NO: 297751 - RNA, 32 nt, Homo Sapiens
uugaugaaaugaauguuuuuguauaauggccu

SEQ ID NO: 297752 - RNA, 32 nt, Homo Sapiens
agcagccacccccgccaccuccugaaacagug

SEQ ID NO: 297753 - RNA, 32 nt, Homo Sapiens
uugccccucuaccuggcucugucaauccaaga

SEQ ID NO: 297754 - RNA, 32 nt, Homo Sapiens
ugcuccucccauccccgcauggaaaguuaggc

SEQ ID NO: 297755 - RNA, 32 nt, Homo Sapiens
uuguaaagcaucaaaagaaguaacaucucaag

SEQ ID NO: 297756 - RNA, 32 nt, Homo Sapiens
uuuuaauaguauuuauuuuagaaagucuacua

SEQ ID NO: 297757 - RNA, 32 nt, Homo Sapiens
gugcugcuuguacagccugcagagccgugagc

SEQ ID NO: 297758 - RNA, 32 nt, Homo Sapiens
aaggcauuccauuucuaaagcuuauuuagccg

SEQ ID NO: 297759 - RNA, 32 nt, Homo Sapiens
aucuuugcaucauauuggacucuugaaggcaa

SEQ ID NO: 297760 - RNA, 32 nt, Homo Sapiens
uauauuccuauaguauuuaucuacuuaggaua

SEQ ID NO: 297761 - RNA, 32 nt, Homo Sapiens
agccacugcacuccagccugggugaugaagac

SEQ ID NO: 297762 - RNA, 32 nt, Homo Sapiens
aauauuccuuugucauuuauagguuuguaaua

SEQ ID NO: 297763 - RNA, 32 nt, Homo Sapiens
augaaaucugcucugggacauuuugggggaau

SEQ ID NO: 297764 - RNA, 30 nt, Homo Sapiens
agcgcuuccgggucgccgccggcagcagcc

SEQ ID NO: 297765 - RNA, 32 nt, Homo Sapiens
uuggccucuuucgcccccuucuuuccagacug

SEQ ID NO: 297766 - RNA, 32 nt, Homo Sapiens
ucacccugagcaugcagagagagcagcuuuua

SEQ ID NO: 297767 - RNA, 32 nt, Homo Sapiens
guuauccaggacuugauauucauaauucagug

SEQ ID NO: 297768 - RNA, 32 nt, Homo Sapiens
aagcagagucuggguugguguggauagcaaag

SEQ ID NO: 297769 - RNA, 32 nt, Homo Sapiens
caccuacacagucacgcaaacacacacuaauu

SEQ ID NO: 297770 - RNA, 32 nt, Homo Sapiens
uuuugcuucuuuugugauacaauuuguccucu

SEQ ID NO: 297771 - RNA, 32 nt, Homo Sapiens
gauagccauugguauucaucuauuuuaacucu

SEQ ID NO: 297772 - RNA, 32 nt, Homo Sapiens
acaagcccuucuucagcacuacaggguuagcc

SEQ ID NO: 297773 - RNA, 32 nt, Homo Sapiens
agagaggccugagggagggauuccaugcugcc

SEQ ID NO: 297774 - RNA, 32 nt, Homo Sapiens
aggaaauaaaauguuaggcuuuaaaaaucccu

SEQ ID NO: 297775 - RNA, 32 nt, Homo Sapiens
uggccaucgugguguccaggucgggcaacacc

SEQ ID NO: 297776 - RNA, 32 nt, Homo Sapiens
ucccggcgaugcggcccggccugugagcggcc

SEQ ID NO: 297777 - RNA, 32 nt, Homo Sapiens
ugggaacagaucugaugaugccaggagguucc

SEQ ID NO: 297778 - RNA, 32 nt, Homo Sapiens
uucguuggggaagagggagugaggccuaggca

SEQ ID NO: 297779 - RNA, 32 nt, Homo Sapiens
aggagaagagaaaaauccccccuggccaggca

SEQ ID NO: 297780 - RNA, 32 nt, Homo Sapiens
auucgauugcauuucccacuccccucuuccac

SEQ ID NO: 297781 - RNA, 32 nt, Homo Sapiens
aacaggucaaaauaaaaguugaacuugaguua

SEQ ID NO: 297782 - RNA, 32 nt, Homo Sapiens
gcaauauuugaaaugguaaaaauggaaagaag

SEQ ID NO: 297783 - RNA, 32 nt, Homo Sapiens
aauauuagacauucuguaggagucuuagguuu

SEQ ID NO: 297784 - RNA, 32 nt, Homo Sapiens
cccucuuccuuccuuucccagaucuucaauau

SEQ ID NO: 297785 - RNA, 32 nt, Homo Sapiens
gagagcauccugccgaccacagcccuccccac

SEQ ID NO: 297786 - RNA, 32 nt, Homo Sapiens
agcugccuccucaggauccggucgucggggau

SEQ ID NO: 297787 - RNA, 32 nt, Homo Sapiens
auuuuagagauuucucuuuuuuaaauggaauu

SEQ ID NO: 297788 - RNA, 30 nt, Homo Sapiens
agcggauguguuuugggggaaacagagaga

SEQ ID NO: 297789 - RNA, 32 nt, Homo Sapiens
gcguccgcggcgcuuggcgccacagucacuuu

SEQ ID NO: 297790 - RNA, 32 nt, Homo Sapiens
uguguuugauuguagaagcuuccaguuaauaa

SEQ ID NO: 297791 - RNA, 32 nt, Homo Sapiens
guaauauagaaagcgagauacaagaugauuca

SEQ ID NO: 297792 - RNA, 32 nt, Homo Sapiens
gcuucucaguguggggcaggugucucaggacg

SEQ ID NO: 297793 - RNA, 32 nt, Homo Sapiens
uuaucugucuucugauuuuuuauauccuguuu

SEQ ID NO: 297794 - RNA, 32 nt, Homo Sapiens
gcucugacuuucagcaucaugcaggggcuuau

SEQ ID NO: 297795 - RNA, 32 nt, Homo Sapiens
ggugugucuacugugagggugggcccugagga

SEQ ID NO: 297796 - RNA, 28 nt, Homo Sapiens
cgccaaggggaagcaaggaugacugaca

SEQ ID NO: 297797 - RNA, 32 nt, Homo Sapiens
uccgagugccaggcgccggccggcugcgaaga

SEQ ID NO: 297798 - RNA, 32 nt, Homo Sapiens
gacucuugauuucaaaagguuccacagaacua

SEQ ID NO: 297799 - RNA, 32 nt, Homo Sapiens
uuggcccaguguuucuccaggcuggggacugu

SEQ ID NO: 297800 - RNA, 32 nt, Homo Sapiens
ggggccuggauuuuuguaaauaaauuucccaa

SEQ ID NO: 297801 - RNA, 32 nt, Homo Sapiens
auguccuugggucucuuaccuuccucagcccu

SEQ ID NO: 297802 - RNA, 32 nt, Homo Sapiens
uccaguaaagagcuguaauauauuuuaccugg

SEQ ID NO: 297803 - RNA, 32 nt, Homo Sapiens
ucugacaccaccccggccugccucuuuguugc

SEQ ID NO: 297804 - RNA, 32 nt, Homo Sapiens
gacuauuugaagaucaaagauuugggucaucu

SEQ ID NO: 297805 - RNA, 32 nt, Homo Sapiens
uccaugcugccaucugguggugauuucgguca

SEQ ID NO: 297806 - RNA, 32 nt, Homo Sapiens
aggcagguucccucgacccaggacccccuguu

SEQ ID NO: 297807 - RNA, 32 nt, Homo Sapiens
gcugcagugaggugggggcgggugggcaggga

SEQ ID NO: 297808 - RNA, 32 nt, Homo Sapiens
guacuauccaaauuagaagcggauuuggaaau

SEQ ID NO: 297809 - RNA, 32 nt, Homo Sapiens
guccaucugcaccaggcucugccuucacuccc

SEQ ID NO: 297810 - RNA, 32 nt, Homo Sapiens
accgccccggugugcguacccaggcgcacgug

SEQ ID NO: 297811 - RNA, 32 nt, Homo Sapiens
ccucggagccccagccuuucacccagcgccuc

SEQ ID NO: 297812 - RNA, 32 nt, Homo Sapiens
ccaggucgcagggcuccuggagcugcaggcgg

SEQ ID NO: 297813 - RNA, 32 nt, Homo Sapiens
gagugcuccccucccccugcaggucccccucc

SEQ ID NO: 297814 - RNA, 32 nt, Homo Sapiens
aggcacacauugauuacgaaaggauacaucag

SEQ ID NO: 297815 - RNA, 26 nt, Homo Sapiens
gaugcgcguccuccucgccgcgcugg

SEQ ID NO: 297816 - RNA, 32 nt, Homo Sapiens
acugauaaugaaauaaaucauguuaauccuaa

SEQ ID NO: 297817 - RNA, 32 nt, Homo Sapiens
uguggacagaggggcagggggcugggagaagg

SEQ ID NO: 297818 - RNA, 32 nt, Homo Sapiens
aagccaugccccuggggugaggggaggcaucu

SEQ ID NO: 297819 - RNA, 32 nt, Homo Sapiens
accgcucgcgcgcgugcaucccgcaccauccc

SEQ ID NO: 297820 - RNA, 32 nt, Homo Sapiens
ggaacuuuggcaaagcacuuuugacaaguugu

SEQ ID NO: 297821 - RNA, 32 nt, Homo Sapiens
ccugacaccccauugcuaguaaguaguagaac

SEQ ID NO: 297822 - RNA, 32 nt, Homo Sapiens
gguggggcgaggcagccagagcccuuggacug

SEQ ID NO: 297823 - RNA, 32 nt, Homo Sapiens
gaacaucagaagaaacaaacuccagacgcacc

SEQ ID NO: 297824 - RNA, 32 nt, Homo Sapiens
cacaaauaaaauguauuagugaauaaaugcuu

SEQ ID NO: 297825 - RNA, 28 nt, Homo Sapiens
aauacauuuuaacuuaauguaaugcaua

SEQ ID NO: 297826 - RNA, 32 nt, Homo Sapiens
uuugguggagacgggguuucgcuguguuggcc

SEQ ID NO: 297827 - RNA, 32 nt, Homo Sapiens
cccuuauuuuguggcagaugcuaugaaagaug

SEQ ID NO: 297828 - RNA, 32 nt, Homo Sapiens
cgagguggcggggcgccccgccugcagaaccc

SEQ ID NO: 297829 - RNA, 32 nt, Homo Sapiens
augaagcuuaaugauuuuuagaauaccauuaa

SEQ ID NO: 297830 - RNA, 32 nt, Homo Sapiens
ugccaugguguuggaggggcaggccuuuuuga

SEQ ID NO: 297831 - RNA, 32 nt, Homo Sapiens
ccccaccaugucccggguuucuuucuucgaga

SEQ ID NO: 297832 - RNA, 32 nt, Homo Sapiens
ggguucagcaaaaugaauauacuuccuggcuu

SEQ ID NO: 297833 - RNA, 32 nt, Homo Sapiens
guacaaaaucaucauauuaauauuugaguuau

SEQ ID NO: 297834 - RNA, 30 nt, Homo Sapiens
agaaaugggaaagggggggaaacugauuuu

SEQ ID NO: 297835 - RNA, 32 nt, Homo Sapiens
uuuugaauuucuuuccucugccugcuagacaa

SEQ ID NO: 297836 - RNA, 32 nt, Homo Sapiens
gcagaguucaaguuuauguuacugccaggguc

SEQ ID NO: 297837 - RNA, 32 nt, Homo Sapiens
ccccagggagacggaucugggcuccgggaggg

SEQ ID NO: 297838 - RNA, 32 nt, Homo Sapiens
agcuucuaguaaaaguuuuuuuuuuuaaaccu

SEQ ID NO: 297839 - RNA, 32 nt, Homo Sapiens
uucuaguugcuuauugcagcuuugucuccuca

SEQ ID NO: 297840 - RNA, 32 nt, Homo Sapiens
cgccgaaccugccuggcuagccggcgaguuga

SEQ ID NO: 297841 - RNA, 32 nt, Homo Sapiens
cccccaaaacugugucccccuggcugcccugu

SEQ ID NO: 297842 - RNA, 32 nt, Homo Sapiens
uuuuguuuuguuuucagcaucuuucucugaug

SEQ ID NO: 297843 - RNA, 32 nt, Homo Sapiens
ccuuacaucugugcagagugggagaugggggg

SEQ ID NO: 297844 - RNA, 32 nt, Homo Sapiens
uaauuauugcugucuuuuuuuuaaaaaaaaaa

SEQ ID NO: 297845 - RNA, 32 nt, Homo Sapiens
uaaggcagcauuuugcuaugcucuguuguucc

SEQ ID NO: 297846 - RNA, 32 nt, Homo Sapiens
uuccuucaguuccucacccaucagccaguggg

SEQ ID NO: 297847 - RNA, 32 nt, Homo Sapiens
gggguuuaaagcuacagaggcacugaccuuuu

SEQ ID NO: 297848 - RNA, 32 nt, Homo Sapiens
aagauuuuuguuaaaguuucucuccuuuaaaa

SEQ ID NO: 297849 - RNA, 32 nt, Homo Sapiens
caccccuugggugguuugcaaucugagacuuc

SEQ ID NO: 297850 - RNA, 32 nt, Homo Sapiens
uuuucuuuauuuucuucagcauuuaaucacug

SEQ ID NO: 297851 - RNA, 32 nt, Homo Sapiens
ccgaacuggccggcugggcgcgcgcucuugcg

SEQ ID NO: 297852 - RNA, 32 nt, Homo Sapiens
auucaaggggagaggaaguaagcaucaccuca

SEQ ID NO: 297853 - RNA, 32 nt, Homo Sapiens
gcuuuugcuggcauucuuuguaaaaaagauca

SEQ ID NO: 297854 - RNA, 32 nt, Homo Sapiens
gccaacagccaccagcagccaggagacaggcc

SEQ ID NO: 297855 - RNA, 32 nt, Homo Sapiens
gcgucacgugacuccccucgggcuuguccccu

SEQ ID NO: 297856 - RNA, 32 nt, Homo Sapiens
uuggaguacaagccuuuuuaggcaucgaaaaa

SEQ ID NO: 297857 - RNA, 32 nt, Homo Sapiens
ggacgcuuuugagugggcccugcccggggagc

SEQ ID NO: 297858 - RNA, 32 nt, Homo Sapiens
ucugcccgcucccggaggggucgggcagugcc

SEQ ID NO: 297859 - RNA, 32 nt, Homo Sapiens
cugucucccaacaaaggauacaugcagaagga

SEQ ID NO: 297860 - RNA, 32 nt, Homo Sapiens
gcuccgcccugcuuggccccagcuugucuguc

SEQ ID NO: 297861 - RNA, 32 nt, Homo Sapiens
aaguuuuccucccuccccgaaccccguuuucu

SEQ ID NO: 297862 - RNA, 32 nt, Homo Sapiens
ggggaggacaggggcugcugccccgcuccugg

SEQ ID NO: 297863 - RNA, 32 nt, Homo Sapiens
uaacuuuguaaaaagcauguauguauuuauag

SEQ ID NO: 297864 - RNA, 32 nt, Homo Sapiens
uuguauacaaauaaguacauaacaguuacuug

SEQ ID NO: 297865 - RNA, 32 nt, Homo Sapiens
aauuuuacaaauauaagaugcauacuccauuc

SEQ ID NO: 297866 - RNA, 32 nt, Homo Sapiens
cacuggagucuggggcuuggugcagguggugc

SEQ ID NO: 297867 - RNA, 32 nt, Homo Sapiens
ccuuagccugcguuuggucuccaggugccacc

SEQ ID NO: 297868 - RNA, 32 nt, Homo Sapiens
uccccuggggcagcugcccacccgugcccugg

SEQ ID NO: 297869 - RNA, 31 nt, Homo Sapiens
cuccugugaacaaaauucagagccuguuugu

SEQ ID NO: 297870 - RNA, 32 nt, Homo Sapiens
uuggcuuuauuuuuaaacugcuuuagauauua

SEQ ID NO: 297871 - RNA, 31 nt, Homo Sapiens
gcggcgagggcgguggggcugccuguccucg

SEQ ID NO: 297872 - RNA, 32 nt, Homo Sapiens
cucaaaacuguuuuccucucuccuccccccuc

SEQ ID NO: 297873 - RNA, 32 nt, Homo Sapiens
uuucccaggaagcucauugaguugugugcggg

SEQ ID NO: 297874 - RNA, 32 nt, Homo Sapiens
caagaccugacccgcacgcagauggaacucaa

SEQ ID NO: 297875 - RNA, 32 nt, Homo Sapiens
agagccagccggaagacaaguaccucugaaga

SEQ ID NO: 297876 - RNA, 32 nt, Homo Sapiens
ccaugacccuggaugugcaaacuguagucguu

SEQ ID NO: 297877 - RNA, 32 nt, Homo Sapiens
uggccagcucugcugugugauccugaaggccc

SEQ ID NO: 297878 - RNA, 32 nt, Homo Sapiens
acucuaccccacugccuagaagugcggguccc

SEQ ID NO: 297879 - RNA, 32 nt, Homo Sapiens
aaugggaaauuugauuuuauuacaaaauaaaa

SEQ ID NO: 297880 - RNA, 32 nt, Homo Sapiens
aaugagcacuguacuguggcaguucccuuugg

SEQ ID NO: 297881 - RNA, 32 nt, Homo Sapiens
gguguggugaguggcaaguaagggcagaauuu

SEQ ID NO: 297882 - RNA, 32 nt, Homo Sapiens
ggcccuggcucuggaggagaaugccaccuccc

SEQ ID NO: 297883 - RNA, 32 nt, Homo Sapiens
uuguaaaagggaagaaagaagaagaggaggcu

SEQ ID NO: 297884 - RNA, 32 nt, Homo Sapiens
uugggggcccagcccaaaguucuugucaccuc

SEQ ID NO: 297885 - RNA, 32 nt, Homo Sapiens
agggagugcagcaggaaggaacaaagacaggc

SEQ ID NO: 297886 - RNA, 32 nt, Homo Sapiens
uuguuauuuuuuaaaggagaaugccaauuuau

SEQ ID NO: 297887 - RNA, 26 nt, Homo Sapiens
uuuggccaaaaauaaacuuugaaaag

SEQ ID NO: 297888 - RNA, 32 nt, Homo Sapiens
aauuuuuauaugcccaguaccuggcucacgag

SEQ ID NO: 297889 - RNA, 32 nt, Homo Sapiens
cagccggcagcagcccaggcccggggacuggg

SEQ ID NO: 297890 - RNA, 32 nt, Homo Sapiens
cccucaagcacuaggaccgugcggaauccagg

SEQ ID NO: 297891 - RNA, 32 nt, Homo Sapiens
ggcuucccacccaagucccccaucugcuaaaa

SEQ ID NO: 297892 - RNA, 32 nt, Homo Sapiens
gaggcauaucauaaauugauaauuuugcaaaa

SEQ ID NO: 297893 - RNA, 32 nt, Homo Sapiens
ggcagauguggcuggaggucagggcucuucug

SEQ ID NO: 297894 - RNA, 32 nt, Homo Sapiens
cagcaagcagugcccucuggacagcuugacuc

SEQ ID NO: 297895 - RNA, 32 nt, Homo Sapiens
agcuggucgcaguggccggauaguguggccug

SEQ ID NO: 297896 - RNA, 32 nt, Homo Sapiens
cccgcuggaggaagagguguuucgcgacugcg

SEQ ID NO: 297897 - RNA, 32 nt, Homo Sapiens
accugccgcaugcugcacacaucuaccuacgu

SEQ ID NO: 297898 - RNA, 32 nt, Homo Sapiens
guucuguguugcaacauauaucuuuagugcug

SEQ ID NO: 297899 - RNA, 32 nt, Homo Sapiens
gagccaccacgcccggcccguauccggcuuua

SEQ ID NO: 297900 - RNA, 32 nt, Homo Sapiens
agguugucuaaucaaguugguuaugucucaug

SEQ ID NO: 297901 - RNA, 32 nt, Homo Sapiens
uuggguuuugguuuuuguuuuuuuuuuuugcc

SEQ ID NO: 297902 - RNA, 32 nt, Homo Sapiens
uacuuuugaagaagcaaaugucuagagccuua

SEQ ID NO: 297903 - RNA, 32 nt, Homo Sapiens
ggcuacuaugcguuauaaucuaaucacaauuu

SEQ ID NO: 297904 - RNA, 32 nt, Homo Sapiens
auuauggaguuccauacaaauaucuaguuuuu

SEQ ID NO: 297905 - RNA, 32 nt, Homo Sapiens
uggcuuuccuucccuucccaccacaucuguuu

SEQ ID NO: 297906 - RNA, 32 nt, Homo Sapiens
acaaaaaccacaaacagacaaacaagaaaaaa

SEQ ID NO: 297907 - RNA, 32 nt, Homo Sapiens
ccuagaagggaagggagagacuuacuuuggau

SEQ ID NO: 297908 - RNA, 32 nt, Homo Sapiens
cuuggagacccucagcuuacuccacgcagauc

SEQ ID NO: 297909 - RNA, 32 nt, Homo Sapiens
uaaccacccaccccuaccuggaauggaggcug

SEQ ID NO: 297910 - RNA, 32 nt, Homo Sapiens
gaggaagcagcggcgaggucugcgggaggcau

SEQ ID NO: 297911 - RNA, 32 nt, Homo Sapiens
cucuucaccaggggcucccaguccuuccaucu

SEQ ID NO: 297912 - RNA, 32 nt, Homo Sapiens
gacguauuuguacagcagcuaaaggugcaauc

SEQ ID NO: 297913 - RNA, 32 nt, Homo Sapiens
gacaaaaguuucuuaagauaaaacagaucacu

SEQ ID NO: 297914 - RNA, 32 nt, Homo Sapiens
ugaggggcccacuguuuggagaggaugguauu

SEQ ID NO: 297915 - RNA, 32 nt, Homo Sapiens
gcccgggagagccacacugugggcuuaaugug

SEQ ID NO: 297916 - RNA, 32 nt, Homo Sapiens
auaaaagcacauggcgguugaaucuuaagguu

SEQ ID NO: 297917 - RNA, 32 nt, Homo Sapiens
cacagcaaaaugaagguguacacauaagaucu

SEQ ID NO: 297918 - RNA, 32 nt, Homo Sapiens
auucauuuguuugucaaggacucucaaugcau

SEQ ID NO: 297919 - RNA, 32 nt, Homo Sapiens
agguuuuucuuuucuuuuuucuuuuuuaaaau

SEQ ID NO: 297920 - RNA, 32 nt, Homo Sapiens
acuuuggcguuaagaugcaggggggugaacca

SEQ ID NO: 297921 - RNA, 32 nt, Homo Sapiens
gucacccuagcccucucccucuaggcucugcc

SEQ ID NO: 297922 - RNA, 32 nt, Homo Sapiens
acccaggggcccccgaggagaagugcaggccc

SEQ ID NO: 297923 - RNA, 32 nt, Homo Sapiens
ucugaaaaaaucauacaacuuugugcuucuau

SEQ ID NO: 297924 - RNA, 32 nt, Homo Sapiens
caugcagccgaggcccgggccccucaggacuc

SEQ ID NO: 297925 - RNA, 30 nt, Homo Sapiens
uuuuucgaucggggaaacagaccuaaucca

SEQ ID NO: 297926 - RNA, 29 nt, Homo Sapiens
auuguuucuuguuucaggaaugguuaauu

SEQ ID NO: 297927 - RNA, 32 nt, Homo Sapiens
ggguauuaaugauacaaauaugauguguggag

SEQ ID NO: 297928 - RNA, 32 nt, Homo Sapiens
ccggggaggagaaauugggcugaugugagcuc

SEQ ID NO: 297929 - RNA, 32 nt, Homo Sapiens
caauaauuguuaccaaagagauaaaaauaaaa

SEQ ID NO: 297930 - RNA, 30 nt, Homo Sapiens
cauccuccuggaaugggggaaccuuccuua

SEQ ID NO: 297931 - RNA, 32 nt, Homo Sapiens
aucaaacgaugaugcaggcuauucauuaugug

SEQ ID NO: 297932 - RNA, 32 nt, Homo Sapiens
ccuucccccgacccggaggcacuuccuugggg

SEQ ID NO: 297933 - RNA, 32 nt, Homo Sapiens
gugcaaaggacgcagugccauaucagagagga

SEQ ID NO: 297934 - RNA, 32 nt, Homo Sapiens
ggcugaugcaagaggaucgcuugagcccagga

SEQ ID NO: 297935 - RNA, 32 nt, Homo Sapiens
aaaaauucacaagcuaacuuccacuaauccau

SEQ ID NO: 297936 - RNA, 32 nt, Homo Sapiens
gcugaagaaaaaagcucaaaugaucuagucac

SEQ ID NO: 297937 - RNA, 32 nt, Homo Sapiens
aagcaauauuuaaugucuuugcaacuuuaugc

SEQ ID NO: 297938 - RNA, 32 nt, Homo Sapiens
cccgcuugccgaacaaggaagcucucccaccc

SEQ ID NO: 297939 - RNA, 32 nt, Homo Sapiens
uagcccaggaggaggucgugggacggggaggg

SEQ ID NO: 297940 - RNA, 32 nt, Homo Sapiens
ucaguucuucuuuaaccacauuuuguuauauc

SEQ ID NO: 297941 - RNA, 32 nt, Homo Sapiens
ggcugugaaggggacgguguccccgcacguuu

SEQ ID NO: 297942 - RNA, 32 nt, Homo Sapiens
cugcuccuggcuggcccggccuaauaaagcag

SEQ ID NO: 297943 - RNA, 32 nt, Homo Sapiens
cggcagccucagcuccugcuccccgugccgcc

SEQ ID NO: 297944 - RNA, 32 nt, Homo Sapiens
cagugcacaaaguggggaaggcuguacugggu

SEQ ID NO: 297945 - RNA, 32 nt, Homo Sapiens
gcaugcgcgcucucucaugcacacgcacgcau

SEQ ID NO: 297946 - RNA, 32 nt, Homo Sapiens
gaagugcacgcgaaacagacacagcggcuuca

SEQ ID NO: 297947 - RNA, 32 nt, Homo Sapiens
caggcgcgguagcccacgucuguaaucccugc

SEQ ID NO: 297948 - RNA, 32 nt, Homo Sapiens
uuuuacaucuuuuuuucuuuuuauuuucgaaa

SEQ ID NO: 297949 - RNA, 32 nt, Homo Sapiens
aguuucaccauguuggccaggcuggucucaaa

SEQ ID NO: 297950 - RNA, 32 nt, Homo Sapiens
uuaccaagaugggaaaugugccuggggcuuuc

SEQ ID NO: 297951 - RNA, 32 nt, Homo Sapiens
ucuagcaguugugacgccaaaaucacgucucc

SEQ ID NO: 297952 - RNA, 32 nt, Homo Sapiens
aaaguaacccaagggagggagcuacccucuag

SEQ ID NO: 297953 - RNA, 32 nt, Homo Sapiens
gggggucggggcucgcggcgucgcacugaaac

SEQ ID NO: 297954 - RNA, 32 nt, Homo Sapiens
cuuaaggcugggugcaguggcucacgccugua

SEQ ID NO: 297955 - RNA, 32 nt, Homo Sapiens
cccgacaucuucuggcccucuggccagcacgc

SEQ ID NO: 297956 - RNA, 32 nt, Homo Sapiens
uacuuuugauuaaaugauucugauggugggca

SEQ ID NO: 297957 - RNA, 32 nt, Homo Sapiens
cagaacagaagaccucgcugcccugggacaag

SEQ ID NO: 297958 - RNA, 32 nt, Homo Sapiens
gccucggccccaggccauccagcccuguggac

SEQ ID NO: 297959 - RNA, 32 nt, Homo Sapiens
gcauggugguagcagccagagacagcagcuga

SEQ ID NO: 297960 - RNA, 32 nt, Homo Sapiens
gggaugauacaguagcacuuuacaaauggcuc

SEQ ID NO: 297961 - RNA, 32 nt, Homo Sapiens
agcgccgggaacgccgcgacccggggccggug

SEQ ID NO: 297962 - RNA, 32 nt, Homo Sapiens
uagagucaagggggcugaaacacacugugagc

SEQ ID NO: 297963 - RNA, 32 nt, Homo Sapiens
gacuggccuagcagccaggcccggcccaggga

SEQ ID NO: 297964 - RNA, 32 nt, Homo Sapiens
augauagucuuacuaaaugcagaaauaagaau

SEQ ID NO: 297965 - RNA, 32 nt, Homo Sapiens
acucaggaaaaagaagggggaaaggacucugu

SEQ ID NO: 297966 - RNA, 32 nt, Homo Sapiens
ccaaggggcgguucucacugcagguggcagca

SEQ ID NO: 297967 - RNA, 32 nt, Homo Sapiens
gauggagaggggcuacgcagcugccccagccc

SEQ ID NO: 297968 - RNA, 32 nt, Homo Sapiens
gaacuucuuuuuucuuuuuuuuauuauuauac

SEQ ID NO: 297969 - RNA, 32 nt, Homo Sapiens
acuccaaguauuucacaaaugcaucugccauu

SEQ ID NO: 297970 - RNA, 32 nt, Homo Sapiens
gccagcuagagauucagcaucuccaggauccu

SEQ ID NO: 297971 - RNA, 32 nt, Homo Sapiens
ggcugccccaggccuuccggccauacaaccau

SEQ ID NO: 297972 - RNA, 32 nt, Homo Sapiens
ggugcaaauauauacacacccuuguaagugca

SEQ ID NO: 297973 - RNA, 32 nt, Homo Sapiens
auucuuuuucuuuuccccucuaaaccuguuuc

SEQ ID NO: 297974 - RNA, 32 nt, Homo Sapiens
cacuacucuggccaccuuuuguccuuagccuc

SEQ ID NO: 297975 - RNA, 32 nt, Homo Sapiens
agggcgggaagaugccgcgcgucgugcccgac

SEQ ID NO: 297976 - RNA, 30 nt, Homo Sapiens
ucagcuguuauugcugcagggccaagcccu

SEQ ID NO: 297977 - RNA, 32 nt, Homo Sapiens
cuguuauucuuugcccucaaauacaguauugu

SEQ ID NO: 297978 - RNA, 32 nt, Homo Sapiens
auggcuguaccggauugcucuccagcuggucu

SEQ ID NO: 297979 - RNA, 32 nt, Homo Sapiens
ggcaucauuucccuuaccugguuuauaaagau

SEQ ID NO: 297980 - RNA, 32 nt, Homo Sapiens
ggcuuggcuuugucagaacuuguacaaucuuc

SEQ ID NO: 297981 - RNA, 32 nt, Homo Sapiens
gaaaauaugugcauuuucaaguaaaugacuuu

SEQ ID NO: 297982 - RNA, 32 nt, Homo Sapiens
ucuuacagcuggaaugagggguggggagauuu

SEQ ID NO: 297983 - RNA, 32 nt, Homo Sapiens
agaaaucugcacgguauaaugaaaauauuaag

SEQ ID NO: 297984 - RNA, 32 nt, Homo Sapiens
gcuagaaaaucauguuccuuguccugaguaag

SEQ ID NO: 297985 - RNA, 32 nt, Homo Sapiens
caaagggaagcagccuggaagaaacaguccag

SEQ ID NO: 297986 - RNA, 32 nt, Homo Sapiens
cagccggcuccgccagcgcugccgccgcccuc

SEQ ID NO: 297987 - RNA, 32 nt, Homo Sapiens
agguaaccaacgggagucgacuuaucuaugcc

SEQ ID NO: 297988 - RNA, 32 nt, Homo Sapiens
guccaccuggagacacugggggugggaggccc

SEQ ID NO: 297989 - RNA, 32 nt, Homo Sapiens
uaaagaaagucuuuuaggacaccacccguccc

SEQ ID NO: 297990 - RNA, 32 nt, Homo Sapiens
cagagccugagauccggcaccccaucccccuc

SEQ ID NO: 297991 - RNA, 32 nt, Homo Sapiens
ccacccccgggacguggggucacuuccuucau

SEQ ID NO: 297992 - RNA, 32 nt, Homo Sapiens
cggccccguccggcccgggcuggcauggguug

SEQ ID NO: 297993 - RNA, 32 nt, Homo Sapiens
ccuguagcugcugcugcuggcuccacuccugc

SEQ ID NO: 297994 - RNA, 32 nt, Homo Sapiens
uugagucuuucugcucaaagaaugaagcucca

SEQ ID NO: 297995 - RNA, 32 nt, Homo Sapiens
agguagaaaaggaaaaggaauaaucaguagga

SEQ ID NO: 297996 - RNA, 32 nt, Homo Sapiens
ggcgauauugucaacaguauuugaaggguguu

SEQ ID NO: 297997 - RNA, 32 nt, Homo Sapiens
uacccuugcucuuuccucucuuagcccuuaga

SEQ ID NO: 297998 - RNA, 32 nt, Homo Sapiens
acuuguugagaaccuuuagccagcgccggcgu

SEQ ID NO: 297999 - RNA, 32 nt, Homo Sapiens
cuggccugcccaggaccugagaaggggcagcu

SEQ ID NO: 298000 - RNA, 32 nt, Homo Sapiens
cagggcccugcagcuggcgggagaggugucug

SEQ ID NO: 298001 - RNA, 32 nt, Homo Sapiens
ggcaugcaacgcgugcagggaguucaggugcc

SEQ ID NO: 298002 - RNA, 32 nt, Homo Sapiens
aucaucacuauuauugcucaccacuguauccc

SEQ ID NO: 298003 - RNA, 32 nt, Homo Sapiens
gaagcgguuccgaaggcucgcggggagcggcu

SEQ ID NO: 298004 - RNA, 32 nt, Homo Sapiens
ccucucugggacuugucuucuggccccucacu

SEQ ID NO: 298005 - RNA, 32 nt, Homo Sapiens
ugaagaagaugaugaugauaucugaauucacc

SEQ ID NO: 298006 - RNA, 32 nt, Homo Sapiens
guuaccuucacuuuucaaaauauuguagaagg

SEQ ID NO: 298007 - RNA, 32 nt, Homo Sapiens
aguccuccccgcgccgccuccucuguauggca

SEQ ID NO: 298008 - RNA, 32 nt, Homo Sapiens
aaugaacuuugaugaaguacagucugaguuac

SEQ ID NO: 298009 - RNA, 32 nt, Homo Sapiens
ccggcucugaggugguggaggcggcggaggcg

SEQ ID NO: 298010 - RNA, 32 nt, Homo Sapiens
aaggcauuucauucuuuuuauuuuauuuuauu

SEQ ID NO: 298011 - RNA, 32 nt, Homo Sapiens
uuuguucauuguccaaaauaaacuacauaaau

SEQ ID NO: 298012 - RNA, 32 nt, Homo Sapiens
ccugcaccccuccggccccgucucucuuggac

SEQ ID NO: 298013 - RNA, 32 nt, Homo Sapiens
gaugcgcgucccccggcccugcggcugcuccg

SEQ ID NO: 298014 - RNA, 32 nt, Homo Sapiens
gcuuuaaguaauauagcauuaagcaaaugguc

SEQ ID NO: 298015 - RNA, 32 nt, Homo Sapiens
uuggggacagcaugagcuugcuguuguacaca

SEQ ID NO: 298016 - RNA, 32 nt, Homo Sapiens
gcaggagcggccuggcacauggaccggccuga

SEQ ID NO: 298017 - RNA, 32 nt, Homo Sapiens
gugccccucccuccccgugcuucaugugacuc

SEQ ID NO: 298018 - RNA, 32 nt, Homo Sapiens
uuuucaacauuuuucuguaucguauuuauuau

SEQ ID NO: 298019 - RNA, 30 nt, Homo Sapiens
gggccgcaucucggcggcggcgagggcuga

SEQ ID NO: 298020 - RNA, 32 nt, Homo Sapiens
uuccuuucuccuuuccucucuacugcucaaga

SEQ ID NO: 298021 - RNA, 32 nt, Homo Sapiens
cccucaguuucuuucuagcucaucucacucug

SEQ ID NO: 298022 - RNA, 32 nt, Homo Sapiens
ugccagggugguuuucaggagcucuggugaag

SEQ ID NO: 298023 - RNA, 32 nt, Homo Sapiens
acaaacagaacaguuacauucugccuuccuac

SEQ ID NO: 298024 - RNA, 32 nt, Homo Sapiens
acauguaauaaaacuuauucaagcuauauaua

SEQ ID NO: 298025 - RNA, 32 nt, Homo Sapiens
gcaugugugcgcgccugugcucaugcacgccc

SEQ ID NO: 298026 - RNA, 29 nt, Homo Sapiens
cgcguucggggaccgggaaccggggaccg

SEQ ID NO: 298027 - RNA, 32 nt, Homo Sapiens
acggugggcggggagagcucgaggggaggccc

SEQ ID NO: 298028 - RNA, 32 nt, Homo Sapiens
uaauaccugugcugccugucaguuaauuaaua

SEQ ID NO: 298029 - RNA, 32 nt, Homo Sapiens
gcagcgaagccucggggcccaagccccucccc

SEQ ID NO: 298030 - RNA, 32 nt, Homo Sapiens
cuaaguauuauaugaagugcccaugauucugu

SEQ ID NO: 298031 - RNA, 32 nt, Homo Sapiens
gucaguaucuuuuggguccaagaaacuuuguc

SEQ ID NO: 298032 - RNA, 32 nt, Homo Sapiens
ggcgugaggaggaggaggaagggcaugagccg

SEQ ID NO: 298033 - RNA, 32 nt, Homo Sapiens
acauacaauaauuuauacuggagaaaaacuuu

SEQ ID NO: 298034 - RNA, 32 nt, Homo Sapiens
aggugguggaaugucuauguuuuugauuuuac

SEQ ID NO: 298035 - RNA, 32 nt, Homo Sapiens
ccuaagugcucgccgcgguagccggccgacgc

SEQ ID NO: 298036 - RNA, 32 nt, Homo Sapiens
gaaaucacaauuuauguucugcaauauccugc

SEQ ID NO: 298037 - RNA, 32 nt, Homo Sapiens
cggccgcggcggcagcagcagcgccagcccca

SEQ ID NO: 298038 - RNA, 32 nt, Homo Sapiens
ugcuacccccgaugcuggccauggccuggcgg

SEQ ID NO: 298039 - RNA, 32 nt, Homo Sapiens
cuuuggcagccuggucccucuuucgcaaauuc

SEQ ID NO: 298040 - RNA, 32 nt, Homo Sapiens
aaagcugguccccuuccacggcccuagccaag

SEQ ID NO: 298041 - RNA, 32 nt, Homo Sapiens
uagagaugaugaaggaucgcuacaucacuuug

SEQ ID NO: 298042 - RNA, 32 nt, Homo Sapiens
uccaaggaggucgggauggggcuuguagcaga

SEQ ID NO: 298043 - RNA, 32 nt, Homo Sapiens
guauuaagaguacugcaguccgaaacauagau

SEQ ID NO: 298044 - RNA, 32 nt, Homo Sapiens
uucuccucauccauuucuuuuauaccuuuccu

SEQ ID NO: 298045 - RNA, 32 nt, Homo Sapiens
ccagggcgcccgggcucuggcuuccucauuga

SEQ ID NO: 298046 - RNA, 32 nt, Homo Sapiens
aaaaaaggaaagaaacaaaacuucccuacaau

SEQ ID NO: 298047 - RNA, 32 nt, Homo Sapiens
uaaaucacacccaaaauuccagcugcaggaga

SEQ ID NO: 298048 - RNA, 32 nt, Homo Sapiens
agugcuuccccucccuccggcccgugcugguc

SEQ ID NO: 298049 - RNA, 32 nt, Homo Sapiens
ucccgggcccucagcccucgggccgggcacca

SEQ ID NO: 298050 - RNA, 32 nt, Homo Sapiens
uaggcuacuguaacacuugccuguaaucagug

SEQ ID NO: 298051 - RNA, 32 nt, Homo Sapiens
cccacuggaaagggcucugacccccuggccca

SEQ ID NO: 298052 - RNA, 32 nt, Homo Sapiens
cuugauguucuucuguguaacaggugaugucc

SEQ ID NO: 298053 - RNA, 32 nt, Homo Sapiens
ugcugcuguuuugcuauucuuaaacuuaggcc

SEQ ID NO: 298054 - RNA, 32 nt, Homo Sapiens
agaaucugcucgaagaagagaauuagaccugc

SEQ ID NO: 298055 - RNA, 32 nt, Homo Sapiens
uguguucucccugcucgggggcccauguuuuu

SEQ ID NO: 298056 - RNA, 32 nt, Homo Sapiens
uucauuagcuuaugauauuugcugccgagaug

SEQ ID NO: 298057 - RNA, 32 nt, Homo Sapiens
cacccacaccuaugcucaugcacauguuccca

SEQ ID NO: 298058 - RNA, 30 nt, Homo Sapiens
ggcuggcaagagcugccgccggugcuggga

SEQ ID NO: 298059 - RNA, 32 nt, Homo Sapiens
ugugcgcucccuccuugccucccccuccagcc

SEQ ID NO: 298060 - RNA, 32 nt, Homo Sapiens
ucgccggcgcaucagcgcugcuucggacuguu

SEQ ID NO: 298061 - RNA, 32 nt, Homo Sapiens
gcgcucccuccuugccucccccuccagccucc

SEQ ID NO: 298062 - RNA, 32 nt, Homo Sapiens
ggcgcccugcguccggcagaggaggcgagcau

SEQ ID NO: 298063 - RNA, 32 nt, Homo Sapiens
cagcgaugggaagaggccagggacuguaaccc

SEQ ID NO: 298064 - RNA, 32 nt, Homo Sapiens
ggagagugguugcuguuaauauuaucuuaucu

SEQ ID NO: 298065 - RNA, 32 nt, Homo Sapiens
cauuugugagagauuauuguaaaaugagagcg

SEQ ID NO: 298066 - RNA, 32 nt, Homo Sapiens
ugucggccggucugagaaauaaagggacagag

SEQ ID NO: 298067 - RNA, 32 nt, Homo Sapiens
guuaacacuauuuuuccaacaucaugugaccu

SEQ ID NO: 298068 - RNA, 32 nt, Homo Sapiens
cugagaccaacccaucaccucaguuguuuuuu

SEQ ID NO: 298069 - RNA, 32 nt, Homo Sapiens
gacggcguuagcccggcccucggccccucuuu

SEQ ID NO: 298070 - RNA, 32 nt, Homo Sapiens
gggaggcagcgccuaggccagcacggagcugu

SEQ ID NO: 298071 - RNA, 32 nt, Homo Sapiens
uauuuucauuggcugucacugcugccggccuu

SEQ ID NO: 298072 - RNA, 32 nt, Homo Sapiens
agucccaacgcuagagcagcccuucucagcuc

SEQ ID NO: 298073 - RNA, 32 nt, Homo Sapiens
aaagacuuugggagacaagacuuggucccccu

SEQ ID NO: 298074 - RNA, 32 nt, Homo Sapiens
uucuuaaaaaucagcuauuuagagguggauaa

SEQ ID NO: 298075 - RNA, 32 nt, Homo Sapiens
cuggggcgucagcuaaaccugagcuuccaaga

SEQ ID NO: 298076 - RNA, 32 nt, Homo Sapiens
aaucuuacaaaauaaaugcugugugugaacac

SEQ ID NO: 298077 - RNA, 32 nt, Homo Sapiens
acaggccccucagugggcacuggccauaccca

SEQ ID NO: 298078 - RNA, 32 nt, Homo Sapiens
uguuguaggacuugauuuuguaaagcaaugcc

SEQ ID NO: 298079 - RNA, 32 nt, Homo Sapiens
auuuuacaaaaccugauugugagaauuauuca

SEQ ID NO: 298080 - RNA, 28 nt, Homo Sapiens
ugcucugugaccgccaggaugacugugg

SEQ ID NO: 298081 - RNA, 32 nt, Homo Sapiens
uuagaauuuuuccucaagauugaggauacagg

SEQ ID NO: 298082 - RNA, 32 nt, Homo Sapiens
gcacuaagugaccgcuucagcggugagauccc

SEQ ID NO: 298083 - RNA, 32 nt, Homo Sapiens
aaaagaguacuuugaucaugagacauagguau

SEQ ID NO: 298084 - RNA, 32 nt, Homo Sapiens
caaaauaaaaauuuacuauuuccuuuauauac

SEQ ID NO: 298085 - RNA, 32 nt, Homo Sapiens
auuuugcacauuuuuguuagcuuuacauuauu

SEQ ID NO: 298086 - RNA, 32 nt, Homo Sapiens
cagaagcugggccagcacuguggacuccuccu

SEQ ID NO: 298087 - RNA, 32 nt, Homo Sapiens
ccacccuguccugugguccuguguacaggguu

SEQ ID NO: 298088 - RNA, 32 nt, Homo Sapiens
aaaccuguaguacaacuucuccccucaagcug

SEQ ID NO: 298089 - RNA, 32 nt, Homo Sapiens
gaugccuucccacccagguaaccccguggaac

SEQ ID NO: 298090 - RNA, 32 nt, Homo Sapiens
aggagaugaugugauggaacacacacacacgc

SEQ ID NO: 298091 - RNA, 32 nt, Homo Sapiens
cugcugaggucacacagcuguuggugguuggg

SEQ ID NO: 298092 - RNA, 32 nt, Homo Sapiens
gcagaagauagauacagccuuuucagaagauc

SEQ ID NO: 298093 - RNA, 32 nt, Homo Sapiens
uucuugcccagcuggguccaacacuuguucag

SEQ ID NO: 298094 - RNA, 32 nt, Homo Sapiens
uuccaauaaaagacacaggcauggcuaacacc

SEQ ID NO: 298095 - RNA, 32 nt, Homo Sapiens
caacguauauucaaguaaucugcaugaaauaa

SEQ ID NO: 298096 - RNA, 32 nt, Homo Sapiens
ggcgggaggaguggcagcggccaggcagccca

SEQ ID NO: 298097 - RNA, 32 nt, Homo Sapiens
guucaauguuuccuaaaccuucaauuuuggcc

SEQ ID NO: 298098 - RNA, 32 nt, Homo Sapiens
guguugagcuaaaaauauaauuuuuuaaaaau

SEQ ID NO: 298099 - RNA, 32 nt, Homo Sapiens
uuucuguaugcagcugcaucaggcccagacaa

SEQ ID NO: 298100 - RNA, 32 nt, Homo Sapiens
cuaguuggaaacaaaguuaguguugacuacug

SEQ ID NO: 298101 - RNA, 31 nt, Homo Sapiens
auuuugugaaacacucuuuugucuacaaaau

SEQ ID NO: 298102 - RNA, 32 nt, Homo Sapiens
acuucugaauguuuaggcagugcuaguaauuu

SEQ ID NO: 298103 - RNA, 32 nt, Homo Sapiens
cuuuaugauuuauguuaauucauuaauuuagu

SEQ ID NO: 298104 - RNA, 32 nt, Homo Sapiens
cugccagacuacugccagacugagaaacccag

SEQ ID NO: 298105 - RNA, 32 nt, Homo Sapiens
gggcggcagcgggagcgcgcccgcuuuuccua

SEQ ID NO: 298106 - RNA, 32 nt, Homo Sapiens
ucucaaaaagaaaaaagaagacacaagagagg

SEQ ID NO: 298107 - RNA, 32 nt, Homo Sapiens
ggucuuuguguuuucuuccucauggaauugaa

SEQ ID NO: 298108 - RNA, 32 nt, Homo Sapiens
aauuucagaaugugucucugguacagaauagu

SEQ ID NO: 298109 - RNA, 32 nt, Homo Sapiens
cuggggcguccccagccuccccguccucuguc

SEQ ID NO: 298110 - RNA, 32 nt, Homo Sapiens
cccggcgcgagccccagguccuggcagcagcc

SEQ ID NO: 298111 - RNA, 32 nt, Homo Sapiens
auggucuaucugaugcugaaaaugucucuagu

SEQ ID NO: 298112 - RNA, 32 nt, Homo Sapiens
ccaucaguuagagcugacacaaaccugccugg

SEQ ID NO: 298113 - RNA, 32 nt, Homo Sapiens
ugguggaugggauggcuguaucuagacaaaau

SEQ ID NO: 298114 - RNA, 32 nt, Homo Sapiens
gaaaggaaguaguugccuuuggucauccaucu

SEQ ID NO: 298115 - RNA, 32 nt, Homo Sapiens
auguaacacacaauacaugcaugcauuguauu

SEQ ID NO: 298116 - RNA, 32 nt, Homo Sapiens
ugggucaacacagauuuacuggauuccaaaau

SEQ ID NO: 298117 - RNA, 32 nt, Homo Sapiens
caucugcggccauggcggcgacuacugccaac

SEQ ID NO: 298118 - RNA, 32 nt, Homo Sapiens
cucgcuacaccugagccaggcucuugccaacu

SEQ ID NO: 298119 - RNA, 32 nt, Homo Sapiens
agacugacaacccuccuucuucuuccuaaccu

SEQ ID NO: 298120 - RNA, 32 nt, Homo Sapiens
uuuucuuuuuccucacuaaagugccucaaaau

SEQ ID NO: 298121 - RNA, 32 nt, Homo Sapiens
uauuaagcaucagaauuuauauggaaaaaaua

SEQ ID NO: 298122 - RNA, 32 nt, Homo Sapiens
cugggauaugggggcgggggcggggcagggca

SEQ ID NO: 298123 - RNA, 32 nt, Homo Sapiens
uaauauuauaacaaccugaaaauaauggaaaa

SEQ ID NO: 298124 - RNA, 32 nt, Homo Sapiens
gcccuccccggcuccuccggaccuccucggca

SEQ ID NO: 298125 - RNA, 32 nt, Homo Sapiens
ugccguagcuucagccaggcaagaaagcuucc

SEQ ID NO: 298126 - RNA, 32 nt, Homo Sapiens
gaggacaccgccucggccccacguccuuagag

SEQ ID NO: 298127 - RNA, 32 nt, Homo Sapiens
acucccuuuaaccuguauucucuuuccuccca

SEQ ID NO: 298128 - RNA, 32 nt, Homo Sapiens
uuccuguagugggguuaguaggugggggguuu

SEQ ID NO: 298129 - RNA, 32 nt, Homo Sapiens
ugcaaaaauaucuauguggaagagaagaguug

SEQ ID NO: 298130 - RNA, 32 nt, Homo Sapiens
gauguaccuuuucuggugggacugccaaaccc

SEQ ID NO: 298131 - RNA, 30 nt, Homo Sapiens
cuucaucgaggaggcaugcaagcgagacau

SEQ ID NO: 298132 - RNA, 30 nt, Homo Sapiens
gcaucccccagcugcucccaucuugcugga

SEQ ID NO: 298133 - RNA, 32 nt, Homo Sapiens
gccccagucgagaggaaagagaaucgggccac

SEQ ID NO: 298134 - RNA, 32 nt, Homo Sapiens
acauuucaagaaagaggcucuggggcuaagua

SEQ ID NO: 298135 - RNA, 32 nt, Homo Sapiens
cgcccgcgccgggagcagccggaggacucgcg

SEQ ID NO: 298136 - RNA, 32 nt, Homo Sapiens
uaucuauccaagugauacaauucauagggggc

SEQ ID NO: 298137 - RNA, 32 nt, Homo Sapiens
cucccuaaaaagacaguggaaauaaauuugaa

SEQ ID NO: 298138 - RNA, 32 nt, Homo Sapiens
caccugccggcgacacuccugccgguaguuua

SEQ ID NO: 298139 - RNA, 32 nt, Homo Sapiens
guuaaggaauccagauguuacugcaauaacca

SEQ ID NO: 298140 - RNA, 32 nt, Homo Sapiens
ccuucuguauuuuuuagggacucucagccucc

SEQ ID NO: 298141 - RNA, 32 nt, Homo Sapiens
ucuuucuuuuucugccagaaaaucuauuuuaa

SEQ ID NO: 298142 - RNA, 32 nt, Homo Sapiens
aaaguguaauuucuuagagccaaaaaacugga

SEQ ID NO: 298143 - RNA, 32 nt, Homo Sapiens
cccuuugcgcgccgccugcagcgcagcuuccc

SEQ ID NO: 298144 - RNA, 32 nt, Homo Sapiens
uugguugccguggucuuuacugcuuuucuccc

SEQ ID NO: 298145 - RNA, 31 nt, Homo Sapiens
cugcccagacccucagcgucgacgcugcgca

SEQ ID NO: 298146 - RNA, 32 nt, Homo Sapiens
acacacccugggggcagcucucugccagcccc

SEQ ID NO: 298147 - RNA, 32 nt, Homo Sapiens
agucaaauguguuagcagcaugcagaacaaaa

SEQ ID NO: 298148 - RNA, 32 nt, Homo Sapiens
cccugaggucuccuguuuuucuugcugugugu

SEQ ID NO: 298149 - RNA, 32 nt, Homo Sapiens
cuuacaugagaagugacgauggucaugacaga

SEQ ID NO: 298150 - RNA, 32 nt, Homo Sapiens
gaacauuccuuccuucucccaucuggauuccu

SEQ ID NO: 298151 - RNA, 32 nt, Homo Sapiens
ugguuaauauauauguagauauauauuuuagc

SEQ ID NO: 298152 - RNA, 32 nt, Homo Sapiens
gcaggucccgguuuucaggcaccugcucagcu

SEQ ID NO: 298153 - RNA, 32 nt, Homo Sapiens
ggcuggaggaggagcuggaagaggccgugggc

SEQ ID NO: 298154 - RNA, 32 nt, Homo Sapiens
ccggaaagggaaggagggggcggggacaccau

SEQ ID NO: 298155 - RNA, 32 nt, Homo Sapiens
cggugugccccgcugcgaggggccccccaugg

SEQ ID NO: 298156 - RNA, 32 nt, Homo Sapiens
acauuaccacuuuaacacauagaaaccuuuuc

SEQ ID NO: 298157 - RNA, 32 nt, Homo Sapiens
gucuguacuaaaaauacaaaauuuagcuuggc

SEQ ID NO: 298158 - RNA, 32 nt, Homo Sapiens
ccgauccuuuuguaguucauacacaugacaau

SEQ ID NO: 298159 - RNA, 32 nt, Homo Sapiens
uccaagcugaccaaauucugagcugcugagcu

SEQ ID NO: 298160 - RNA, 32 nt, Homo Sapiens
gcgugggacaagggcuguguugucacagcagg

SEQ ID NO: 298161 - RNA, 32 nt, Homo Sapiens
agagggaggaucggucauggcagccacaccug

SEQ ID NO: 298162 - RNA, 32 nt, Homo Sapiens
cuauguaaucuugaccucuuugggcuuuaguu

SEQ ID NO: 298163 - RNA, 32 nt, Homo Sapiens
ggggcaguggagguugaggagaauguauaugc

SEQ ID NO: 298164 - RNA, 32 nt, Homo Sapiens
aauggugugucuauaauuguuaaaucuaagug

SEQ ID NO: 298165 - RNA, 32 nt, Homo Sapiens
accauccuggcuaacacagugaaaccccaucu

SEQ ID NO: 298166 - RNA, 32 nt, Homo Sapiens
gagaucagaacugauucucaccaggugugaga

SEQ ID NO: 298167 - RNA, 32 nt, Homo Sapiens
acgggcuucuaaagagaccugcucauacuugc

SEQ ID NO: 298168 - RNA, 32 nt, Homo Sapiens
uacaggugcaaccugauguggauggccuggag

SEQ ID NO: 298169 - RNA, 28 nt, Homo Sapiens
gacauugggcggccuccgucguggcccc

SEQ ID NO: 298170 - RNA, 32 nt, Homo Sapiens
aaagaaucauuauuuauuaaauuuuuggaagc

SEQ ID NO: 298171 - RNA, 32 nt, Homo Sapiens
cccggccaagccacgccuccgcgccagacgcc

SEQ ID NO: 298172 - RNA, 32 nt, Homo Sapiens
ggaauuagcagcuaugacuccaacagacagga

SEQ ID NO: 298173 - RNA, 32 nt, Homo Sapiens
cugcagcaaggagaggcggcggcggccucggc

SEQ ID NO: 298174 - RNA, 30 nt, Homo Sapiens
ugacucugcaaaaugggggugucccccgau

SEQ ID NO: 298175 - RNA, 32 nt, Homo Sapiens
uaccucagugauuuuaaaagccauagaagaaa

SEQ ID NO: 298176 - RNA, 32 nt, Homo Sapiens
ccuccgccgcagagagcgcccggacugcgugg

SEQ ID NO: 298177 - RNA, 32 nt, Homo Sapiens
cuuaaaaacacacacacacacacacacacacg

SEQ ID NO: 298178 - RNA, 32 nt, Homo Sapiens
ugcugugccccuguagccucagcacccagcac

SEQ ID NO: 298179 - RNA, 32 nt, Homo Sapiens
gaacucaucucuaaccugcaaaauaguacaaa

SEQ ID NO: 298180 - RNA, 32 nt, Homo Sapiens
agugcauagauaugaagacuugaugaaaccug

SEQ ID NO: 298181 - RNA, 32 nt, Homo Sapiens
ugggaggccggcgcgcagaucuggcggugagc

SEQ ID NO: 298182 - RNA, 32 nt, Homo Sapiens
ggaagcagugggaggccaguugguuuugaguu

SEQ ID NO: 298183 - RNA, 32 nt, Homo Sapiens
ugacuguccugaaaaccagaaaagcaaagaaa

SEQ ID NO: 298184 - RNA, 32 nt, Homo Sapiens
ggacugcuaugaaaacagguuguacuucucca

SEQ ID NO: 298185 - RNA, 32 nt, Homo Sapiens
cggggcugggcgggcuguguccgcugcaucau

SEQ ID NO: 298186 - RNA, 32 nt, Homo Sapiens
agaaaagguguccuuuuguaaaaucagcaauu

SEQ ID NO: 298187 - RNA, 32 nt, Homo Sapiens
cuuggguggguucagcacuagcucgggacggu

SEQ ID NO: 298188 - RNA, 32 nt, Homo Sapiens
gaacugugggagcugguggcucugcccugaca

SEQ ID NO: 298189 - RNA, 32 nt, Homo Sapiens
acccgagccagccggcgggcgucccggaggcg

SEQ ID NO: 298190 - RNA, 32 nt, Homo Sapiens
uacuguauauauaauacugacugagaauauaa

SEQ ID NO: 298191 - RNA, 32 nt, Homo Sapiens
gugccucccacccaugagauggguguccuaag

SEQ ID NO: 298192 - RNA, 32 nt, Homo Sapiens
gucagggaguagugaguuuguauuuugaguag

SEQ ID NO: 298193 - RNA, 32 nt, Homo Sapiens
uguacagaauaaaaaaguucauagaaacagca

SEQ ID NO: 298194 - RNA, 32 nt, Homo Sapiens
ggcggcgcgcgguccaagguagccccgagcgu

SEQ ID NO: 298195 - RNA, 32 nt, Homo Sapiens
agccugcaaccaggacgcucuccaggaggcgg

SEQ ID NO: 298196 - RNA, 32 nt, Homo Sapiens
gccccacacagaccaggccuuaaaugucgguc

SEQ ID NO: 298197 - RNA, 32 nt, Homo Sapiens
uucuccugacuggcaggaugaccuuagccaag

SEQ ID NO: 298198 - RNA, 30 nt, Homo Sapiens
cgauaggggccaugggagccggcgccaagu

SEQ ID NO: 298199 - RNA, 32 nt, Homo Sapiens
gagccugaccccagccguccccggggaggcuc

SEQ ID NO: 298200 - RNA, 32 nt, Homo Sapiens
aacuaugguauuauuuuaauguuacuuuaaaa

SEQ ID NO: 298201 - RNA, 32 nt, Homo Sapiens
gauucgcgcugccuccgccgccgcggggcagc

SEQ ID NO: 298202 - RNA, 32 nt, Homo Sapiens
ccgcccccaguuuggaccguguagauauaacu

SEQ ID NO: 298203 - RNA, 32 nt, Homo Sapiens
augacuagcccauuuuuuguccuuuauucaac

SEQ ID NO: 298204 - RNA, 32 nt, Homo Sapiens
ccucagccucgcgagcagcugggacuacaggu

SEQ ID NO: 298205 - RNA, 32 nt, Homo Sapiens
cacggugcagcaggccguggggacugccaugc

SEQ ID NO: 298206 - RNA, 31 nt, Homo Sapiens
aaaaucuauugagucaauuucuaguauuaau

SEQ ID NO: 298207 - RNA, 32 nt, Homo Sapiens
aguuuauauucuauguuaucagucucucuuuc

SEQ ID NO: 298208 - RNA, 32 nt, Homo Sapiens
uuagugaaacaaaaucagugauauaacauugc

SEQ ID NO: 298209 - RNA, 32 nt, Homo Sapiens
ucaggcugccuggcucuccgagugaggacgca

SEQ ID NO: 298210 - RNA, 32 nt, Homo Sapiens
accugugcugagugacuugaaugccaucuaau

SEQ ID NO: 298211 - RNA, 32 nt, Homo Sapiens
cgcuggucuugaagcccagaccucaagugauc

SEQ ID NO: 298212 - RNA, 32 nt, Homo Sapiens
gguaucucuggccacauuuguucuaaugucug

SEQ ID NO: 298213 - RNA, 31 nt, Homo Sapiens
gauuugaaauaaacaaugauuauaccaugau

SEQ ID NO: 298214 - RNA, 29 nt, Homo Sapiens
ucccccauagugacugugccauaggaaag

SEQ ID NO: 298215 - RNA, 32 nt, Homo Sapiens
gcauaccugccagcucguaugccucuggcaug

SEQ ID NO: 298216 - RNA, 32 nt, Homo Sapiens
ggcugacagaugcaggauguacagcucugggu

SEQ ID NO: 298217 - RNA, 32 nt, Homo Sapiens
acaugucuaucaaacccagacuugcuuccaua

SEQ ID NO: 298218 - RNA, 32 nt, Homo Sapiens
gcaccccgccccaugccccaguccuuuccuac

SEQ ID NO: 298219 - RNA, 32 nt, Homo Sapiens
uuaagcugcagugaaaaguaaauauuguacag

SEQ ID NO: 298220 - RNA, 32 nt, Homo Sapiens
cugcaucucaaucccuguggccccaggagcag

SEQ ID NO: 298221 - RNA, 32 nt, Homo Sapiens
uuguacaaagccggcugcccagccccagccuc

SEQ ID NO: 298222 - RNA, 32 nt, Homo Sapiens
gcuggagcagagucacugggcggccgccgagg

SEQ ID NO: 298223 - RNA, 32 nt, Homo Sapiens
cuucccugccagcccaccugccuucugccccg

SEQ ID NO: 298224 - RNA, 32 nt, Homo Sapiens
cggccgccccggcuccucgccucccccacuuc

SEQ ID NO: 298225 - RNA, 32 nt, Homo Sapiens
gggauucccuggauucauuauaugagauggug

SEQ ID NO: 298226 - RNA, 32 nt, Homo Sapiens
uuuuuaagucauuuuuuuuucuugaaauggau

SEQ ID NO: 298227 - RNA, 32 nt, Homo Sapiens
ugcauauucugugugacaaagcaagaagcugg

SEQ ID NO: 298228 - RNA, 32 nt, Homo Sapiens
aaucugugggucuguggauucacggggcuuuc

SEQ ID NO: 298229 - RNA, 32 nt, Homo Sapiens
gucaccuccgagucacucuguuccuugacugu

SEQ ID NO: 298230 - RNA, 32 nt, Homo Sapiens
aucuaguugucacuuuauuuuggaccugcugu

SEQ ID NO: 298231 - RNA, 32 nt, Homo Sapiens
cuggugguaguggggaggcaaguuguguuaug

SEQ ID NO: 298232 - RNA, 32 nt, Homo Sapiens
cccgagcccgugccgccugcugagcggggucu

SEQ ID NO: 298233 - RNA, 32 nt, Homo Sapiens
ucauccccaucccugcucacacguuuaccugc

SEQ ID NO: 298234 - RNA, 32 nt, Homo Sapiens
gucugggaccugccuccaccccauccagggau

SEQ ID NO: 298235 - RNA, 32 nt, Homo Sapiens
gggucucuugucagggcuugaauuuuauuuug

SEQ ID NO: 298236 - RNA, 32 nt, Homo Sapiens
ucucccucgcuggcagaagggaagccggcccg

SEQ ID NO: 298237 - RNA, 32 nt, Homo Sapiens
uuuuaauaauuauguucagccuaugaugaagu

SEQ ID NO: 298238 - RNA, 32 nt, Homo Sapiens
cugaucuuggaaagagguucugcacuccugga

SEQ ID NO: 298239 - RNA, 32 nt, Homo Sapiens
uugaauuaucccaauaaccuuacaaguuaggu

SEQ ID NO: 298240 - RNA, 32 nt, Homo Sapiens
ugccucuguccccuuccccacccacugccuga

SEQ ID NO: 298241 - RNA, 32 nt, Homo Sapiens
uaaccucuuugcgucucgcuucugaaucguau

SEQ ID NO: 298242 - RNA, 32 nt, Homo Sapiens
uaagaugccugccuacauauuuggggacuggg

SEQ ID NO: 298243 - RNA, 32 nt, Homo Sapiens
auuggucaaugaggccauuuuuacauuuauua

SEQ ID NO: 298244 - RNA, 32 nt, Homo Sapiens
uucuuuuucgguucucuuuugucugaccucuc

SEQ ID NO: 298245 - RNA, 32 nt, Homo Sapiens
gcugcaacuauuguuauuaacucuguauagcu

SEQ ID NO: 298246 - RNA, 32 nt, Homo Sapiens
uagugcacuugaagcgggagggcggaugggau

SEQ ID NO: 298247 - RNA, 32 nt, Homo Sapiens
cuucauagguagugcuugugucuugaugugug

SEQ ID NO: 298248 - RNA, 32 nt, Homo Sapiens
ccccgaacauguuuuucuucucccucagucug

SEQ ID NO: 298249 - RNA, 32 nt, Homo Sapiens
ggggcccgcgcgcggugccucugccugacggu

SEQ ID NO: 298250 - RNA, 32 nt, Homo Sapiens
cgccucuucauucuccccugcuccaucuguaa

SEQ ID NO: 298251 - RNA, 32 nt, Homo Sapiens
ugggaaaggggaguaggugggggaacacugag

SEQ ID NO: 298252 - RNA, 32 nt, Homo Sapiens
cagugucuauugugggaggagagaccgaaauu

SEQ ID NO: 298253 - RNA, 32 nt, Homo Sapiens
ugauauuacuauuugcaaugacuuuuugaaua

SEQ ID NO: 298254 - RNA, 32 nt, Homo Sapiens
cuggccucugugccccagcagugccuugugca

SEQ ID NO: 298255 - RNA, 32 nt, Homo Sapiens
cgcacgaaacaguaucuguuugaggcauaauc

SEQ ID NO: 298256 - RNA, 32 nt, Homo Sapiens
gaacauaaaaauuguuugggucaaauuugaau

SEQ ID NO: 298257 - RNA, 31 nt, Homo Sapiens
gcgccuaggagcugccugccccagcuggggu

SEQ ID NO: 298258 - RNA, 32 nt, Homo Sapiens
ggccgggcgcguccuacgcagcagccgcgagc

SEQ ID NO: 298259 - RNA, 32 nt, Homo Sapiens
aaaguuugaagaacacugguaauguguggagu

SEQ ID NO: 298260 - RNA, 32 nt, Homo Sapiens
uguuggaagaggcugagacauucuucaccucc

SEQ ID NO: 298261 - RNA, 32 nt, Homo Sapiens
acaccucuccuuuacauaguugggaaccucau

SEQ ID NO: 298262 - RNA, 32 nt, Homo Sapiens
uagcacaaaacuacuuacucugauggaccaau

SEQ ID NO: 298263 - RNA, 32 nt, Homo Sapiens
uccucagcagugcagccccggcgcggagcagg

SEQ ID NO: 298264 - RNA, 32 nt, Homo Sapiens
cuuuuaaauuuaugauuugauuugaauacuau

SEQ ID NO: 298265 - RNA, 32 nt, Homo Sapiens
ggugacugggagauguacccagugucuuggca

SEQ ID NO: 298266 - RNA, 32 nt, Homo Sapiens
uuggucaccaaaaauacaaaauacacacaaug

SEQ ID NO: 298267 - RNA, 32 nt, Homo Sapiens
ggaaacggccccauuuacugaccccgcccccu

SEQ ID NO: 298268 - RNA, 32 nt, Homo Sapiens
ccgucccgccgggcacucggagggcagcgcgc

SEQ ID NO: 298269 - RNA, 32 nt, Homo Sapiens
gcucagccaccucaccugccuaucauuccugc

SEQ ID NO: 298270 - RNA, 32 nt, Homo Sapiens
ucccuguuaguugaaaauauaucaauuugcuc

SEQ ID NO: 298271 - RNA, 32 nt, Homo Sapiens
gaaacauacugucaaggcguaguugcauuugg

SEQ ID NO: 298272 - RNA, 32 nt, Homo Sapiens
ccacaggugucugcaauugaacuccaaggugc

SEQ ID NO: 298273 - RNA, 31 nt, Homo Sapiens
gaagagaacauauggcacaugaguuaagauu

SEQ ID NO: 298274 - RNA, 32 nt, Homo Sapiens
gacaagaagccuaacagcaacuucuacauuaa

SEQ ID NO: 298275 - RNA, 32 nt, Homo Sapiens
uuccccaccugcccggugcccgaggaggcagc

SEQ ID NO: 298276 - RNA, 32 nt, Homo Sapiens
uaguacuugacaaaaguuuucauuuugccuug

SEQ ID NO: 298277 - RNA, 32 nt, Homo Sapiens
ggcauccccuccccaucuccccuuugucuucc

SEQ ID NO: 298278 - RNA, 32 nt, Homo Sapiens
gccuugauaacauagacccuuccacugacacc

SEQ ID NO: 298279 - RNA, 32 nt, Homo Sapiens
uuagagcaguugcaugcucuccugcuguuaaa

SEQ ID NO: 298280 - RNA, 32 nt, Homo Sapiens
ucaagugauccuccugccucagccccugagua

SEQ ID NO: 298281 - RNA, 32 nt, Homo Sapiens
uggccgcggcugcugcugcugcuacugccacc

SEQ ID NO: 298282 - RNA, 27 nt, Homo Sapiens
accuuccuagucugcagccccccauga

SEQ ID NO: 298283 - RNA, 32 nt, Homo Sapiens
gccucuuauuuucucaguccuucugaauuaca

SEQ ID NO: 298284 - RNA, 32 nt, Homo Sapiens
gcuccgacccggcacgcagucccggcccgagc

SEQ ID NO: 298285 - RNA, 32 nt, Homo Sapiens
auugggauggcgcuaggcauacaaguaggggu

SEQ ID NO: 298286 - RNA, 32 nt, Homo Sapiens
cccugccccacuucccuggcagguacaagggc

SEQ ID NO: 298287 - RNA, 32 nt, Homo Sapiens
cgagcaggccgcccugcccgcggcccuagcgc

SEQ ID NO: 298288 - RNA, 32 nt, Homo Sapiens
acagccucccugaugcccuggaugccaggaaa

SEQ ID NO: 298289 - RNA, 32 nt, Homo Sapiens
gcggcgcccucccagcucccugccucuguuuc

SEQ ID NO: 298290 - RNA, 31 nt, Homo Sapiens
gacaggagcaggaggaaguccacuucuguac

SEQ ID NO: 298291 - RNA, 32 nt, Homo Sapiens
gccgaaggcagaccugcagcagguccugguga

SEQ ID NO: 298292 - RNA, 32 nt, Homo Sapiens
uccccccauuuucucuauucuuuccaugacac

SEQ ID NO: 298293 - RNA, 32 nt, Homo Sapiens
ugugugucuagauacugaauugagauucuguu

SEQ ID NO: 298294 - RNA, 32 nt, Homo Sapiens
auuucuuucuaaaucuaauagucuauaaaaau

SEQ ID NO: 298295 - RNA, 32 nt, Homo Sapiens
auugguacuguaaaauaagcuguggucuauuu

SEQ ID NO: 298296 - RNA, 32 nt, Homo Sapiens
uuuugguaucaggaugaugcuggccucauaaa

SEQ ID NO: 298297 - RNA, 32 nt, Homo Sapiens
caaguucuuacuccaucauacauauugggaau

SEQ ID NO: 298298 - RNA, 32 nt, Homo Sapiens
guuuuguuuuuggcaccuuacuugaccauuug

SEQ ID NO: 298299 - RNA, 32 nt, Homo Sapiens
auauagaaaagguacaguaaaaauaugguaua

SEQ ID NO: 298300 - RNA, 32 nt, Homo Sapiens
cugucaagaaugcucucugggcgcuguucuug

SEQ ID NO: 298301 - RNA, 32 nt, Homo Sapiens
aacuucaccagcaaauacaacaugaagguccu

SEQ ID NO: 298302 - RNA, 32 nt, Homo Sapiens
ccuucuggcggcaccucccgggugcuguguug

SEQ ID NO: 298303 - RNA, 32 nt, Homo Sapiens
aaauuuuauggucacaaguuaucccuccucag

SEQ ID NO: 298304 - RNA, 32 nt, Homo Sapiens
aaucagaauuuuacgacaguuugcagaacacu

SEQ ID NO: 298305 - RNA, 32 nt, Homo Sapiens
aggacccugcuuggggaccccaaguuugugga

SEQ ID NO: 298306 - RNA, 32 nt, Homo Sapiens
uguuguggccuuuguacuuaugcuggaaaucc

SEQ ID NO: 298307 - RNA, 32 nt, Homo Sapiens
gaaugcucuuuacuucauggacuuccacugcc

SEQ ID NO: 298308 - RNA, 32 nt, Homo Sapiens
aauuuuauauauaauuauugaggacuacacac

SEQ ID NO: 298309 - RNA, 30 nt, Homo Sapiens
cuuaguuuuaucccugcuacuggcuuuauu

SEQ ID NO: 298310 - RNA, 32 nt, Homo Sapiens
accuccuggcaggcuuccuucugggacagggg

SEQ ID NO: 298311 - RNA, 32 nt, Homo Sapiens
uucacuggcaugggcuaaccacuucuuuuuca

SEQ ID NO: 298312 - RNA, 32 nt, Homo Sapiens
auaauuuagguucugcagaaauaugauucuua

SEQ ID NO: 298313 - RNA, 32 nt, Homo Sapiens
gugacagagugagacuccaucacgcacacgca

SEQ ID NO: 298314 - RNA, 32 nt, Homo Sapiens
guuggugggcacccuaaauauuuguaaguugg

SEQ ID NO: 298315 - RNA, 32 nt, Homo Sapiens
ucauacuaaaauuuauaaggccgauaauuuuu

SEQ ID NO: 298316 - RNA, 32 nt, Homo Sapiens
uccuggcuauagucuuuuuugauuugggcuac

SEQ ID NO: 298317 - RNA, 32 nt, Homo Sapiens
aaaguguaaaaauuaugagagacuuuauucgu

SEQ ID NO: 298318 - RNA, 32 nt, Homo Sapiens
cucuugggacagaaacaccuuuuacacuuugg

SEQ ID NO: 298319 - RNA, 32 nt, Homo Sapiens
caaaaauaucuaaacucgaugagauggagggu

SEQ ID NO: 298320 - RNA, 32 nt, Homo Sapiens
accaugcuuucuuguaguacugauugaaacuu

SEQ ID NO: 298321 - RNA, 32 nt, Homo Sapiens
gaagcugugacuaaacucuacgcugcggugag

SEQ ID NO: 298322 - RNA, 32 nt, Homo Sapiens
acugcgccuggccagcaaaugcuuuuugugca

SEQ ID NO: 298323 - RNA, 32 nt, Homo Sapiens
uaauggauaaacuguggaacauccagaaaacu

SEQ ID NO: 298324 - RNA, 32 nt, Homo Sapiens
acuuuaggaaagaaaaguuucuuuugaugcua

SEQ ID NO: 298325 - RNA, 32 nt, Homo Sapiens
accccuucaaaauaauuuuaauacaaaggaug

SEQ ID NO: 298326 - RNA, 32 nt, Homo Sapiens
gaguuuugcucuugccguccaggcuggagugc

SEQ ID NO: 298327 - RNA, 32 nt, Homo Sapiens
caggggccuggggcuccugggauuucugugug

SEQ ID NO: 298328 - RNA, 32 nt, Homo Sapiens
uugagcaggagacaauguaagcagcugugggg

SEQ ID NO: 298329 - RNA, 32 nt, Homo Sapiens
uggagcagagaugacuccauggagcuuguggg

SEQ ID NO: 298330 - RNA, 32 nt, Homo Sapiens
cagauuucuuugagaaaucuuuguagaguuaa

SEQ ID NO: 298331 - RNA, 32 nt, Homo Sapiens
cuuugaagaaggcaaggcugauaauaugacaa

SEQ ID NO: 298332 - RNA, 32 nt, Homo Sapiens
ugaugauguuugaauccuuucuucuuugugug

SEQ ID NO: 298333 - RNA, 32 nt, Homo Sapiens
uugaucuuaagguauuuacauguauguggaaa

SEQ ID NO: 298334 - RNA, 32 nt, Homo Sapiens
aaaacgguuuauuuuucuucucuauuacauau

SEQ ID NO: 298335 - RNA, 32 nt, Homo Sapiens
acguagacagaccccacccucacccaggccag

SEQ ID NO: 298336 - RNA, 32 nt, Homo Sapiens
ucauuucugaauaaguaaaucuaaauaagaau

SEQ ID NO: 298337 - RNA, 32 nt, Homo Sapiens
aauguauaaaaauuaucaaaaagauaaugugc

SEQ ID NO: 298338 - RNA, 32 nt, Homo Sapiens
cggggagugcucucggccgccgcgucuccugc

SEQ ID NO: 298339 - RNA, 32 nt, Homo Sapiens
ucuuauccccuuuuccucugucuuccaaaugc

SEQ ID NO: 298340 - RNA, 32 nt, Homo Sapiens
gacugaaaauaugauggaccgaauugugacug

SEQ ID NO: 298341 - RNA, 32 nt, Homo Sapiens
uguucaaaauacauuagcagaggccaugaaag

SEQ ID NO: 298342 - RNA, 32 nt, Homo Sapiens
uuucuuucucucagcaucuccacccaaccagc

SEQ ID NO: 298343 - RNA, 32 nt, Homo Sapiens
gcuucccccagccccugcgcccggcccgaacg

SEQ ID NO: 298344 - RNA, 32 nt, Homo Sapiens
guugaaugguaguucugucuguagguauuuga

SEQ ID NO: 298345 - RNA, 32 nt, Homo Sapiens
cccgcuacugcgguucccgccggcgcccgcga

SEQ ID NO: 298346 - RNA, 32 nt, Homo Sapiens
gcuggggaauaauaggggaaauggcuguuuuu

SEQ ID NO: 298347 - RNA, 32 nt, Homo Sapiens
cuggcugcugcuccaccacgggcccccuggcc

SEQ ID NO: 298348 - RNA, 32 nt, Homo Sapiens
gaggacugcgagcacagcggcggccggguggc

SEQ ID NO: 298349 - RNA, 32 nt, Homo Sapiens
uauucuacuaugcauuaaaucuugaacuuuau

SEQ ID NO: 298350 - RNA, 32 nt, Homo Sapiens
gcaagugcguuugguaaagaucauccaaggua

SEQ ID NO: 298351 - RNA, 32 nt, Homo Sapiens
aaagcaacagugucugcaaauaaagcaaaaca

SEQ ID NO: 298352 - RNA, 32 nt, Homo Sapiens
ucaucucaaacacaauaaacaugcuccugaag

SEQ ID NO: 298353 - RNA, 31 nt, Homo Sapiens
cccagcugaacugccccuccaagggacagga

SEQ ID NO: 298354 - RNA, 32 nt, Homo Sapiens
gucugagugucuaaaaucugcuaaacauuccu

SEQ ID NO: 298355 - RNA, 32 nt, Homo Sapiens
ggccccuagcacgcgccccagccccggagcag

SEQ ID NO: 298356 - RNA, 32 nt, Homo Sapiens
uuuccccagauaugggguucuauucagccaua

SEQ ID NO: 298357 - RNA, 32 nt, Homo Sapiens
cccagccugcgggggcucucuaucggggucuu

SEQ ID NO: 298358 - RNA, 32 nt, Homo Sapiens
guuuuucuggucugaccaucgcaacccucaug

SEQ ID NO: 298359 - RNA, 32 nt, Homo Sapiens
gugcccugucgagacuccauuuugucacagcc

SEQ ID NO: 298360 - RNA, 31 nt, Homo Sapiens
guggaugguaauugccugccucgcgcuagca

SEQ ID NO: 298361 - RNA, 32 nt, Homo Sapiens
acuaauacaccuggagugcagaaucugcugga

SEQ ID NO: 298362 - RNA, 32 nt, Homo Sapiens
uuaauuuuugucuucucauuccugcuucccuc

SEQ ID NO: 298363 - RNA, 32 nt, Homo Sapiens
agacagcccgaggaaccacggguucuggagcu

SEQ ID NO: 298364 - RNA, 32 nt, Homo Sapiens
cuguggacaggagcauuuugcauauuuuccau

SEQ ID NO: 298365 - RNA, 32 nt, Homo Sapiens
ccugugaaugauaauaauaaauuguuuuuaac

SEQ ID NO: 298366 - RNA, 32 nt, Homo Sapiens
acagugauccugaugucuguugugagcugcac

SEQ ID NO: 298367 - RNA, 32 nt, Homo Sapiens
ggggaagaggggcugcacuuccugagcuggug

SEQ ID NO: 298368 - RNA, 32 nt, Homo Sapiens
aggacaaagacccccagcauguguguacccug

SEQ ID NO: 298369 - RNA, 32 nt, Homo Sapiens
uggaagucaggaggaagggaagaugugagugu

SEQ ID NO: 298370 - RNA, 32 nt, Homo Sapiens
ugccuugaaguuuaccuugugcuggagagccu

SEQ ID NO: 298371 - RNA, 32 nt, Homo Sapiens
aagagagacguggggcagcggcugugaccgca

SEQ ID NO: 298372 - RNA, 32 nt, Homo Sapiens
gcuuagcaccgucugguucauugucuugaacu

SEQ ID NO: 298373 - RNA, 32 nt, Homo Sapiens
cagauacuuccaccugcgugucaaucuccggc

SEQ ID NO: 298374 - RNA, 32 nt, Homo Sapiens
gaauucuucauccuccacgguucacuagcucc

SEQ ID NO: 298375 - RNA, 32 nt, Homo Sapiens
gcacuuuuuuauuaauauuuuccuuuguuaaa

SEQ ID NO: 298376 - RNA, 29 nt, Homo Sapiens
uaaugauuaugaagauauuuucugauugc

SEQ ID NO: 298377 - RNA, 32 nt, Homo Sapiens
uauaacaauuuaugauagacuagauggcuuau

SEQ ID NO: 298378 - RNA, 32 nt, Homo Sapiens
uuauccuugggaaugauuucauauuguugaau

SEQ ID NO: 298379 - RNA, 32 nt, Homo Sapiens
aaggcuguagguggagagaugggcuuauuuug

SEQ ID NO: 298380 - RNA, 31 nt, Homo Sapiens
gcggcggagccccccaaauggccuggccaga

SEQ ID NO: 298381 - RNA, 32 nt, Homo Sapiens
ggcccggccccucgaggcaccgccuuucaauu

SEQ ID NO: 298382 - RNA, 32 nt, Homo Sapiens
gcuauaaauaauaacauuuuauuuucucuuuc

SEQ ID NO: 298383 - RNA, 32 nt, Homo Sapiens
cacugggcagugaaaggucagguuggugguaa

SEQ ID NO: 298384 - RNA, 32 nt, Homo Sapiens
gugggggcgggugggcagggaaugggagaggg

SEQ ID NO: 298385 - RNA, 32 nt, Homo Sapiens
cccggagccagagcuucuuguacuacacagaa

SEQ ID NO: 298386 - RNA, 32 nt, Homo Sapiens
ggcaguuaaacagccaaguuuaugacacuagc

SEQ ID NO: 298387 - RNA, 32 nt, Homo Sapiens
guguuuacauaaauuuauaaugaaaauaaaca

SEQ ID NO: 298388 - RNA, 32 nt, Homo Sapiens
uuuuaaaagugcugcaaaaauauuuuacaaac

SEQ ID NO: 298389 - RNA, 32 nt, Homo Sapiens
uauaaaggcaaaauacuggagcacuaaugccc

SEQ ID NO: 298390 - RNA, 32 nt, Homo Sapiens
guugccucaucuuuccucuccucccucuuggg

SEQ ID NO: 298391 - RNA, 32 nt, Homo Sapiens
cccgagcaguuuucgcugcugcuacggcuguu

SEQ ID NO: 298392 - RNA, 32 nt, Homo Sapiens
aauggugaauuuuggagagcuccccagcucuc

SEQ ID NO: 298393 - RNA, 32 nt, Homo Sapiens
cucucucugaagaugcuaggaagaaucugcuc

SEQ ID NO: 298394 - RNA, 32 nt, Homo Sapiens
ucuggccccagcugugaacuccaccuggcuua

SEQ ID NO: 298395 - RNA, 32 nt, Homo Sapiens
auccuuucaaaauucuuaaaucuucuguuccu

SEQ ID NO: 298396 - RNA, 32 nt, Homo Sapiens
gggucugccugccuguuucugucugggugucu

SEQ ID NO: 298397 - RNA, 32 nt, Homo Sapiens
cugcaucccucuauuuuuccaucccuccauuc

SEQ ID NO: 298398 - RNA, 32 nt, Homo Sapiens
acuuuggccccgagcgccagagcgccagagcg

SEQ ID NO: 298399 - RNA, 32 nt, Homo Sapiens
ucugguggccccacagagguguccuggcucag

SEQ ID NO: 298400 - RNA, 24 nt, Homo Sapiens
uccaauaaagcaguuuauuuucug

SEQ ID NO: 298401 - RNA, 32 nt, Homo Sapiens
ggaaauauuuuugucuaaaagagugauuucug

SEQ ID NO: 298402 - RNA, 32 nt, Homo Sapiens
gcgucuccaauugaccguuccauccuucccac

SEQ ID NO: 298403 - RNA, 32 nt, Homo Sapiens
ugcguuugaaggcuuccacacccucuacucca

SEQ ID NO: 298404 - RNA, 32 nt, Homo Sapiens
cuauuuuaaaacuaaaaaaaacuuugaauugg

SEQ ID NO: 298405 - RNA, 32 nt, Homo Sapiens
ugccaggcaggcccuccugggguacaggaagc

SEQ ID NO: 298406 - RNA, 32 nt, Homo Sapiens
accaauccccgggaaccucaggcccgcggaug

SEQ ID NO: 298407 - RNA, 32 nt, Homo Sapiens
cuucagccaugagaagcagugaugacuauccc

SEQ ID NO: 298408 - RNA, 31 nt, Homo Sapiens
aguggugaugaaguccaggugcuguuagugg

SEQ ID NO: 298409 - RNA, 30 nt, Homo Sapiens
caugguuucuuaaugggguagaagcagguc

SEQ ID NO: 298410 - RNA, 32 nt, Homo Sapiens
guguuagcuuuucugguuuauuucauaguuug

SEQ ID NO: 298411 - RNA, 32 nt, Homo Sapiens
cuauagggguagcucuuuccaacagcccaagu

SEQ ID NO: 298412 - RNA, 32 nt, Homo Sapiens
uggguacguucgugccgcgucugucccagagc

SEQ ID NO: 298413 - RNA, 32 nt, Homo Sapiens
agcagcuagaacucaagugacuaggugggccc

SEQ ID NO: 298414 - RNA, 32 nt, Homo Sapiens
aauuguauuuuugaaucaaggaggauaaagau

SEQ ID NO: 298415 - RNA, 32 nt, Homo Sapiens
guaugaaauauguauaaauauaugaugcugag

SEQ ID NO: 298416 - RNA, 30 nt, Homo Sapiens
accccugcuugaaugggggcaccugccggg

SEQ ID NO: 298417 - RNA, 32 nt, Homo Sapiens
gcguuaucuccucccggugagaacgaaccgca

SEQ ID NO: 298418 - RNA, 32 nt, Homo Sapiens
uauguguuuguuucccuauaugcagucuuuaa

SEQ ID NO: 298419 - RNA, 32 nt, Homo Sapiens
ccccuuggcaggugggggcuuaggcauccaua

SEQ ID NO: 298420 - RNA, 32 nt, Homo Sapiens
cugauaucucuggaaccagagcagcccuggac

SEQ ID NO: 298421 - RNA, 32 nt, Homo Sapiens
uguugaugcugcugguucuggaccuuuuguau

SEQ ID NO: 298422 - RNA, 32 nt, Homo Sapiens
agucggcgccuggcggguguugugacgcgcaa

SEQ ID NO: 298423 - RNA, 28 nt, Homo Sapiens
gcaugguaauaaaauuauggauaugugu

SEQ ID NO: 298424 - RNA, 32 nt, Homo Sapiens
ccuugccccuccccacccagauucuuucaucu

SEQ ID NO: 298425 - RNA, 32 nt, Homo Sapiens
gugccucaacugauucugacuucaggaaaagu

SEQ ID NO: 298426 - RNA, 32 nt, Homo Sapiens
acagucuguuugcaugaugccuuguacguagu

SEQ ID NO: 298427 - RNA, 32 nt, Homo Sapiens
gauuaauugggaauaucugaguauuaaguacu

SEQ ID NO: 298428 - RNA, 32 nt, Homo Sapiens
cuuccuuccuucccccaggaacacggaggcca

SEQ ID NO: 298429 - RNA, 30 nt, Homo Sapiens
gacggguuucaccauguuagccaggauggu

SEQ ID NO: 298430 - RNA, 32 nt, Homo Sapiens
cccugcagcggccccaggcucaccccccgcau

SEQ ID NO: 298431 - RNA, 32 nt, Homo Sapiens
aaacaaguuggcuagaagaaaguaaaaagaac

SEQ ID NO: 298432 - RNA, 32 nt, Homo Sapiens
ugccaguuauuuuuauugucuuuuacuuuucu

SEQ ID NO: 298433 - RNA, 32 nt, Homo Sapiens
agccaagucaacagugucucugggguggcauc

SEQ ID NO: 298434 - RNA, 32 nt, Homo Sapiens
acuucacccccgcgugcugcugguuaaugucc

SEQ ID NO: 298435 - RNA, 32 nt, Homo Sapiens
gagggcugccagcagccccgucugcccaccau

SEQ ID NO: 298436 - RNA, 32 nt, Homo Sapiens
uucauuugaaaauuauuauguuguaauuuuuc

SEQ ID NO: 298437 - RNA, 29 nt, Homo Sapiens
caaguuuggggacaggcuucacccaacac

SEQ ID NO: 298438 - RNA, 32 nt, Homo Sapiens
agggggaugggcagggugcucucuggaccccc

SEQ ID NO: 298439 - RNA, 32 nt, Homo Sapiens
gcuagagcuggagauguaauugguuuuugaga

SEQ ID NO: 298440 - RNA, 32 nt, Homo Sapiens
gcuuuuaacucuagaauuugggcuuggaccag

SEQ ID NO: 298441 - RNA, 32 nt, Homo Sapiens
auggugauacucaaguaugauacaaaaagaac

SEQ ID NO: 298442 - RNA, 32 nt, Homo Sapiens
ugaaaauguauuuccuuuuguuuaaugcuuug

SEQ ID NO: 298443 - RNA, 32 nt, Homo Sapiens
ucccaugucuucugcuguaauuauccugugca

SEQ ID NO: 298444 - RNA, 32 nt, Homo Sapiens
gagugaaggagucagaaugccuuaauacaaac

SEQ ID NO: 298445 - RNA, 32 nt, Homo Sapiens
ggcgccagggcugaugcugggguguggguuuu

SEQ ID NO: 298446 - RNA, 32 nt, Homo Sapiens
uauugcguggaccuguccuuucuguggacugu

SEQ ID NO: 298447 - RNA, 32 nt, Homo Sapiens
acauauuuucaggauggugcgucaggauaucu

SEQ ID NO: 298448 - RNA, 32 nt, Homo Sapiens
ucuauggguuugcugcagcauaauccuugcca

SEQ ID NO: 298449 - RNA, 32 nt, Homo Sapiens
ugucuuuuuuauucuuauuuccucucucauaa

SEQ ID NO: 298450 - RNA, 32 nt, Homo Sapiens
uauccauuuucagaugaauauuacauagaggg

SEQ ID NO: 298451 - RNA, 32 nt, Homo Sapiens
agccugcucuuaacaccuguguuuccuuuuca

SEQ ID NO: 298452 - RNA, 32 nt, Homo Sapiens
cauuuuuuaaaauuauauuuaauuuuuuuauu

SEQ ID NO: 298453 - RNA, 32 nt, Homo Sapiens
caagcugcccucacuacagagaccuuggacaa

SEQ ID NO: 298454 - RNA, 32 nt, Homo Sapiens
ugugugccucaguggagacaagugggaaaaca

SEQ ID NO: 298455 - RNA, 32 nt, Homo Sapiens
uuaucaguuuaaaaggauuccuuuaagcaugu

SEQ ID NO: 298456 - RNA, 32 nt, Homo Sapiens
cggccccucuccugcaggggccccacacaggc

SEQ ID NO: 298457 - RNA, 30 nt, Homo Sapiens
accccuggugucccugccuggcccuccucu

SEQ ID NO: 298458 - RNA, 32 nt, Homo Sapiens
aguagauucagauugaaguuuuuggucagaaa

SEQ ID NO: 298459 - RNA, 32 nt, Homo Sapiens
ucugggagaagaaccccccacccccaccccug

SEQ ID NO: 298460 - RNA, 32 nt, Homo Sapiens
acaguuauaucauagacuugcuuucuggcacu

SEQ ID NO: 298461 - RNA, 32 nt, Homo Sapiens
aagcccugacuuccccggggccccaggcugug

SEQ ID NO: 298462 - RNA, 32 nt, Homo Sapiens
cucagcugcuccauucccuaaugguuugcccu

SEQ ID NO: 298463 - RNA, 32 nt, Homo Sapiens
cuccaaguacucaagcuugcuugaggcuugag

SEQ ID NO: 298464 - RNA, 32 nt, Homo Sapiens
caauaaaggacaggcuggugcuaacauaaaau

SEQ ID NO: 298465 - RNA, 32 nt, Homo Sapiens
cuccugggagaugcagcuuuuguuuccgcugc

SEQ ID NO: 298466 - RNA, 32 nt, Homo Sapiens
ccaggacuguucagggaggagccccggucaga

SEQ ID NO: 298467 - RNA, 32 nt, Homo Sapiens
ucucaagguauuuuauauuuuuagucagaaaa

SEQ ID NO: 298468 - RNA, 30 nt, Homo Sapiens
uauauuuuuuggucgggggaaaaauugacc

SEQ ID NO: 298469 - RNA, 32 nt, Homo Sapiens
caggagguaccgcugucuccucacaaucggcc

SEQ ID NO: 298470 - RNA, 32 nt, Homo Sapiens
cccuuggggcugucuuccuucuccugaaaucc

SEQ ID NO: 298471 - RNA, 32 nt, Homo Sapiens
gcugccagaccugcucuugcugcugcucaggu

SEQ ID NO: 298472 - RNA, 29 nt, Homo Sapiens
guucuuucuauuuucagagguuauuguau

SEQ ID NO: 298473 - RNA, 32 nt, Homo Sapiens
uccuccagacacucucuguuucuccuggaugg

SEQ ID NO: 298474 - RNA, 27 nt, Homo Sapiens
uauuggucuccucucagccccugaucc

SEQ ID NO: 298475 - RNA, 32 nt, Homo Sapiens
augugggaggggcuuuuauucugccaagucau

SEQ ID NO: 298476 - RNA, 32 nt, Homo Sapiens
aagucacugauauauauuuguuugacugcauu

SEQ ID NO: 298477 - RNA, 32 nt, Homo Sapiens
gaagccuuugauuccuagccacagcacucagu

SEQ ID NO: 298478 - RNA, 32 nt, Homo Sapiens
gguccuggaggccucuugggggugggaccuuu

SEQ ID NO: 298479 - RNA, 32 nt, Homo Sapiens
ucuggcagccccagccgccccagccucacgcu

SEQ ID NO: 298480 - RNA, 32 nt, Homo Sapiens
uccagccgcgagaggcgggcuccagccgcggc

SEQ ID NO: 298481 - RNA, 32 nt, Homo Sapiens
uuuauuugaagugaagaacuuauuuaagaauu

SEQ ID NO: 298482 - RNA, 28 nt, Homo Sapiens
gccagugacuucaccaggauuugagaac

SEQ ID NO: 298483 - RNA, 32 nt, Homo Sapiens
uaugugcauggagcccuggggguugggcuuua

SEQ ID NO: 298484 - RNA, 32 nt, Homo Sapiens
ucaggcuggcuuggguccugcugcuccaaccc

SEQ ID NO: 298485 - RNA, 32 nt, Homo Sapiens
accaauauuguacaguuuuuauugcuuguugg

SEQ ID NO: 298486 - RNA, 32 nt, Homo Sapiens
caaaaggagaauaauauuuuauagcaugugaa

SEQ ID NO: 298487 - RNA, 32 nt, Homo Sapiens
uaaaugcacauauauuuacaaugacaucccug

SEQ ID NO: 298488 - RNA, 32 nt, Homo Sapiens
uuuuuugaagaguuagaguauauuuuaggcuu

SEQ ID NO: 298489 - RNA, 32 nt, Homo Sapiens
auauggguauauuacuauuaaaacagaauacc

SEQ ID NO: 298490 - RNA, 32 nt, Homo Sapiens
aucggguacuuugcuuguugaauaaugcacuu

SEQ ID NO: 298491 - RNA, 32 nt, Homo Sapiens
uuaaacccauccccuccgauuccccuccuccc

SEQ ID NO: 298492 - RNA, 32 nt, Homo Sapiens
auuucuuauuaaaauauguaguuuuuaagacu

SEQ ID NO: 298493 - RNA, 32 nt, Homo Sapiens
aagcaagcuuuugccaaugaucuuuaauggag

SEQ ID NO: 298494 - RNA, 32 nt, Homo Sapiens
gagaggcugccgggccccggcgcggccccccg

SEQ ID NO: 298495 - RNA, 32 nt, Homo Sapiens
uauuacucaaaauaaaguuucuuucacuuuaa

SEQ ID NO: 298496 - RNA, 32 nt, Homo Sapiens
gaggacaucagcaaauuucuauuuagaacuua

SEQ ID NO: 298497 - RNA, 32 nt, Homo Sapiens
uucgguuuguauuuagugucuugaauguaaga

SEQ ID NO: 298498 - RNA, 32 nt, Homo Sapiens
acaaaacaaauuaaaucucuauuguuaacuuu

SEQ ID NO: 298499 - RNA, 32 nt, Homo Sapiens
aaacaucuagaauaccguuuuagcaauugaag

SEQ ID NO: 298500 - RNA, 32 nt, Homo Sapiens
uaaagggucaggcuccuuuuuaguucagagau

SEQ ID NO: 298501 - RNA, 32 nt, Homo Sapiens
aggagcacucaaauagggagccaggagccagg

SEQ ID NO: 298502 - RNA, 32 nt, Homo Sapiens
gggaaaucaggguuacaaaucuucuugaucca

SEQ ID NO: 298503 - RNA, 32 nt, Homo Sapiens
cauagauuuuuccaccaucagaguucauuuuu

SEQ ID NO: 298504 - RNA, 32 nt, Homo Sapiens
uaucuuuccuccuguuguacuuucucagagac

SEQ ID NO: 298505 - RNA, 32 nt, Homo Sapiens
gagacgucuucccgccguccccggcuccagga

SEQ ID NO: 298506 - RNA, 32 nt, Homo Sapiens
agaaaucaugaaugucaugaaugugggaaaac

SEQ ID NO: 298507 - RNA, 32 nt, Homo Sapiens
gcuacuggggacgggggcucucccacgacccc

SEQ ID NO: 298508 - RNA, 32 nt, Homo Sapiens
cccagccuaccuugucuguuugugucugggag

SEQ ID NO: 298509 - RNA, 32 nt, Homo Sapiens
aggcccaaggucggggaggggagggaaaagca

SEQ ID NO: 298510 - RNA, 32 nt, Homo Sapiens
gaugggauuggcuggucugugcucugcuaggu

SEQ ID NO: 298511 - RNA, 32 nt, Homo Sapiens
uugccgggacauccccagucucgggggaagaa

SEQ ID NO: 298512 - RNA, 32 nt, Homo Sapiens
uuuucuauuuggggggcagggaacugucauuc

SEQ ID NO: 298513 - RNA, 32 nt, Homo Sapiens
uugugaggacugagaagaacaaugucaaaugu

SEQ ID NO: 298514 - RNA, 32 nt, Homo Sapiens
uaauuauaguaguggccuuguuuuacaaaccu

SEQ ID NO: 298515 - RNA, 32 nt, Homo Sapiens
uggagccccggcggggggcauggggcaggagg

SEQ ID NO: 298516 - RNA, 32 nt, Homo Sapiens
cacucugcaaauaacccacauccuuuucuuca

SEQ ID NO: 298517 - RNA, 32 nt, Homo Sapiens
cauuuauaacagaugcagaaaucaauuaagau

SEQ ID NO: 298518 - RNA, 32 nt, Homo Sapiens
auaaagcacaaggucaaggaagcuagagucug

SEQ ID NO: 298519 - RNA, 32 nt, Homo Sapiens
cucugcugccagcgccaccucguccagguuuu

SEQ ID NO: 298520 - RNA, 32 nt, Homo Sapiens
gugugugguuggaaaacuuuuguuuuuugggg

SEQ ID NO: 298521 - RNA, 32 nt, Homo Sapiens
agggcgcggagcagagucccgggcaggagaac

SEQ ID NO: 298522 - RNA, 32 nt, Homo Sapiens
ccuggaaccuucuguagcuaagagggaauccu

SEQ ID NO: 298523 - RNA, 32 nt, Homo Sapiens
caauauuuuguauuagggaacuuuuaauugac

SEQ ID NO: 298524 - RNA, 32 nt, Homo Sapiens
ccaugacacaaguuuaccuguauaacaaaccu

SEQ ID NO: 298525 - RNA, 32 nt, Homo Sapiens
gcauucaguuguagcaucaaauccacaccuag

SEQ ID NO: 298526 - RNA, 32 nt, Homo Sapiens
uggcauccuggcuugccuccaguuuuaggucc

SEQ ID NO: 298527 - RNA, 30 nt, Homo Sapiens
cgccgaggcaggcgagagcuguccccucgc

SEQ ID NO: 298528 - RNA, 32 nt, Homo Sapiens
auugugccuaccucagauagacagugccagaa

SEQ ID NO: 298529 - RNA, 32 nt, Homo Sapiens
auuaacuggcuagaagacauucaucuauuuuu

SEQ ID NO: 298530 - RNA, 32 nt, Homo Sapiens
caagucugcuaaggaagcuguggccagaagca

SEQ ID NO: 298531 - RNA, 32 nt, Homo Sapiens
ggaacacagcuauuucccuaugcaagguacag

SEQ ID NO: 298532 - RNA, 32 nt, Homo Sapiens
agcggggccagcugcucacccccuuucccggg

SEQ ID NO: 298533 - RNA, 32 nt, Homo Sapiens
uagccucucccucucccccagcuaguccccug

SEQ ID NO: 298534 - RNA, 32 nt, Homo Sapiens
aagggucauaaaauaaucauaaaauaauaaau

SEQ ID NO: 298535 - RNA, 32 nt, Homo Sapiens
uaaacgaagauaagcaaacuacaaaccaggaa

SEQ ID NO: 298536 - RNA, 32 nt, Homo Sapiens
cugaagacaguagccaagauuauucacacaua

SEQ ID NO: 298537 - RNA, 32 nt, Homo Sapiens
uuaguaauuuaaagaaagaacacuaacauagc

SEQ ID NO: 298538 - RNA, 32 nt, Homo Sapiens
acacacacgagcaugcacaggcagagaacaca

SEQ ID NO: 298539 - RNA, 32 nt, Homo Sapiens
cuuuguuuuaaucuucucacaaugaagcugcu

SEQ ID NO: 298540 - RNA, 32 nt, Homo Sapiens
accgaucucccuccuccucaccccaagugaag

SEQ ID NO: 298541 - RNA, 32 nt, Homo Sapiens
ucaggacuucggguccccucaccccgggcgga

SEQ ID NO: 298542 - RNA, 32 nt, Homo Sapiens
aauuuucauauuaaacaaaaacaaagaaaaaa

SEQ ID NO: 298543 - RNA, 32 nt, Homo Sapiens
auccggaggaagcugcaaaagaaggacccagc

SEQ ID NO: 298544 - RNA, 32 nt, Homo Sapiens
auguuagugugcccucuccagggagacugcca

SEQ ID NO: 298545 - RNA, 32 nt, Homo Sapiens
ggacugcugacuaaaaaucaauugaggaucac

SEQ ID NO: 298546 - RNA, 32 nt, Homo Sapiens
aggaauaaaaauuugaguuucaaaaaaaaaaa

SEQ ID NO: 298547 - RNA, 32 nt, Homo Sapiens
guauaaugacuguucagugaauaucagacuuc

SEQ ID NO: 298548 - RNA, 32 nt, Homo Sapiens
gagguaaugcuguggcauauugcuucugccuc

SEQ ID NO: 298549 - RNA, 32 nt, Homo Sapiens
uuaggauucaggccaaacugguaaaugacgaa

SEQ ID NO: 298550 - RNA, 32 nt, Homo Sapiens
gaaauaugaaacaaaaucucugcacaaaagag

SEQ ID NO: 298551 - RNA, 32 nt, Homo Sapiens
gugucuuuaccuuucucauauuaacucaccuc

SEQ ID NO: 298552 - RNA, 32 nt, Homo Sapiens
ugauuuauuuuuccucucccaaccauaagaag

SEQ ID NO: 298553 - RNA, 32 nt, Homo Sapiens
ugaagucuagaaagaauuguuuuaaauugcuu

SEQ ID NO: 298554 - RNA, 32 nt, Homo Sapiens
cauguggucuagucugcugagguucugucguc

SEQ ID NO: 298555 - RNA, 32 nt, Homo Sapiens
uaaaugggcuaaaauuacauuagauaaacuaa

SEQ ID NO: 298556 - RNA, 32 nt, Homo Sapiens
uuuucuaaaaauuuuguaaaggcacugucaga

SEQ ID NO: 298557 - RNA, 32 nt, Homo Sapiens
agaucuggaaauaaauaauucauaauaaaaaa

SEQ ID NO: 298558 - RNA, 32 nt, Homo Sapiens
aucaugacgcaguccugagguuuaauggggca

SEQ ID NO: 298559 - RNA, 32 nt, Homo Sapiens
gauaggaaacaaguauuucucuucugguauac

SEQ ID NO: 298560 - RNA, 32 nt, Homo Sapiens
ugggagguggagguugcagugagccaagaucg

SEQ ID NO: 298561 - RNA, 32 nt, Homo Sapiens
auuaaaaaauguuuuucuugaauguaaaagau

SEQ ID NO: 298562 - RNA, 32 nt, Homo Sapiens
ccagcaucuaguguggaaacaagcuuucucac

SEQ ID NO: 298563 - RNA, 32 nt, Homo Sapiens
augcccuuugcccuccucccucgccuccagug

SEQ ID NO: 298564 - RNA, 32 nt, Homo Sapiens
acacgcagacacagacaccacacacacacaua

SEQ ID NO: 298565 - RNA, 32 nt, Homo Sapiens
gagauuagacacauuuuauaaugggggagaug

SEQ ID NO: 298566 - RNA, 32 nt, Homo Sapiens
cucugcccaagcccuuccuccccuccaucaag

SEQ ID NO: 298567 - RNA, 32 nt, Homo Sapiens
uuuucccuuuuuuuuuuuuuuaaccguaagug

SEQ ID NO: 298568 - RNA, 32 nt, Homo Sapiens
auuuggguggggguugggauccugucugaagu

SEQ ID NO: 298569 - RNA, 32 nt, Homo Sapiens
ccaugcauauccucacuuguggcuuggagguu

SEQ ID NO: 298570 - RNA, 32 nt, Homo Sapiens
ggcagguuugugggauacccaggcaacuacca

SEQ ID NO: 298571 - RNA, 32 nt, Homo Sapiens
aagacuucauacauuuauauauguaaauaugg

SEQ ID NO: 298572 - RNA, 32 nt, Homo Sapiens
uuaccauguccuauaaaugaccucuagccauu

SEQ ID NO: 298573 - RNA, 32 nt, Homo Sapiens
augauguugugauuuuucaauacaguguggaa

SEQ ID NO: 298574 - RNA, 32 nt, Homo Sapiens
aggcuaaggcuggguccuccccucugagguuu

SEQ ID NO: 298575 - RNA, 32 nt, Homo Sapiens
augugggaagugcuuucaaucuucuuuguuag

SEQ ID NO: 298576 - RNA, 32 nt, Homo Sapiens
cucagugacauuucuaucacaaucauuuuaug

SEQ ID NO: 298577 - RNA, 32 nt, Homo Sapiens
aauacaaaaaaaggggaaaacacacacacgga

SEQ ID NO: 298578 - RNA, 32 nt, Homo Sapiens
cucccagguucaaucgguuuuccugccucagc

SEQ ID NO: 298579 - RNA, 32 nt, Homo Sapiens
acuagaaagcuaccuccaauuucucggccuca

SEQ ID NO: 298580 - RNA, 32 nt, Homo Sapiens
cggacggcccugccggugggcuggcggacuug

SEQ ID NO: 298581 - RNA, 32 nt, Homo Sapiens
uguacuuccccucucuacuuccucccuccagu

SEQ ID NO: 298582 - RNA, 30 nt, Homo Sapiens
acuggugggaucugcggcggcucccagaug

SEQ ID NO: 298583 - RNA, 32 nt, Homo Sapiens
aguccagccagccccaggggucccucccagcc

SEQ ID NO: 298584 - RNA, 32 nt, Homo Sapiens
cacugcaaagggcagcuaguauucccauccuu

SEQ ID NO: 298585 - RNA, 32 nt, Homo Sapiens
uuugccuggaauuguucuguaccucuuuguag

SEQ ID NO: 298586 - RNA, 32 nt, Homo Sapiens
ggccgcccgcggcgaucucgaucccgcugacc

SEQ ID NO: 298587 - RNA, 32 nt, Homo Sapiens
agcagaguccggcugccuggggcgggcggcgc

SEQ ID NO: 298588 - RNA, 30 nt, Homo Sapiens
uuccuagccagcuugcaccaucuuauccaa

SEQ ID NO: 298589 - RNA, 32 nt, Homo Sapiens
uuccuaugucauuucugcuucagcucuuugcu

SEQ ID NO: 298590 - RNA, 32 nt, Homo Sapiens
auauuguauuuuuauuugauagcuugggauuu

SEQ ID NO: 298591 - RNA, 32 nt, Homo Sapiens
gaaaucugacccccaccugucauguuggcucc

SEQ ID NO: 298592 - RNA, 32 nt, Homo Sapiens
uguuuuuccagaugauucugucguaaagugau

SEQ ID NO: 298593 - RNA, 32 nt, Homo Sapiens
caggauuuacgggaagcauggugcuggcauuu

SEQ ID NO: 298594 - RNA, 32 nt, Homo Sapiens
ggaagauucuaccucugaaguaaauuauauca

SEQ ID NO: 298595 - RNA, 32 nt, Homo Sapiens
gucaggaggaagaugacuaaggggagggaucc

SEQ ID NO: 298596 - RNA, 32 nt, Homo Sapiens
aacauuuuauuccuacuuucagaagaaaaaua

SEQ ID NO: 298597 - RNA, 32 nt, Homo Sapiens
agccugaccaacauggagaaaccccgucccua

SEQ ID NO: 298598 - RNA, 32 nt, Homo Sapiens
ggggagucagccuggggacaguucuucuccag

SEQ ID NO: 298599 - RNA, 32 nt, Homo Sapiens
acuacauacaagcauaagcaaaacuuaacuug

SEQ ID NO: 298600 - RNA, 32 nt, Homo Sapiens
guggccccauccccgccucucccugcccugug

SEQ ID NO: 298601 - RNA, 32 nt, Homo Sapiens
agauaucagggaaaguaaaaaguaaaagaaac

SEQ ID NO: 298602 - RNA, 32 nt, Homo Sapiens
uccuuacuccgucuuugaagccagcauccuag

SEQ ID NO: 298603 - RNA, 32 nt, Homo Sapiens
uuaaaaacccuacaaauuaguauaugauuguu

SEQ ID NO: 298604 - RNA, 32 nt, Homo Sapiens
gggagugggcggugaggccugguccacgugcg

SEQ ID NO: 298605 - RNA, 32 nt, Homo Sapiens
aauaauaugaagggaaucauggaucaguuuuc

SEQ ID NO: 298606 - RNA, 30 nt, Homo Sapiens
uaugaauguuucugagaagaagcucuaaau

SEQ ID NO: 298607 - RNA, 32 nt, Homo Sapiens
augcagaauguuuguaaacugauuccaaaauu

SEQ ID NO: 298608 - RNA, 32 nt, Homo Sapiens
ugcaauugauaaaaggcuuugcaucuguuuuu

SEQ ID NO: 298609 - RNA, 32 nt, Homo Sapiens
uucccccaaucuguuuagaaauccuuuuaaag

SEQ ID NO: 298610 - RNA, 32 nt, Homo Sapiens
agugcuuccugcagucaggcacuuccugcccg

SEQ ID NO: 298611 - RNA, 32 nt, Homo Sapiens
ugucagccgccucggcgcccccaggaccccuc

SEQ ID NO: 298612 - RNA, 32 nt, Homo Sapiens
cauccucucccucugucccucugucccucuga

SEQ ID NO: 298613 - RNA, 32 nt, Homo Sapiens
uauagcagcuccgguuaccuguuuuaaacaug

SEQ ID NO: 298614 - RNA, 32 nt, Homo Sapiens
agagaggcggccugacuuaccuggauggacuu

SEQ ID NO: 298615 - RNA, 32 nt, Homo Sapiens
uucagccugcugcugcugcugcuguugcggcu

SEQ ID NO: 298616 - RNA, 32 nt, Homo Sapiens
aagcguuuauuuauacaucucuguaaaaggau

SEQ ID NO: 298617 - RNA, 32 nt, Homo Sapiens
uacuuccagaauuaaaaacauuauuuuuguuu

SEQ ID NO: 298618 - RNA, 32 nt, Homo Sapiens
uuucaagcugaauaaccauacuuauuuuauuu

SEQ ID NO: 298619 - RNA, 32 nt, Homo Sapiens
gaguaauaaaggaaaaggguuuggucacaaac

SEQ ID NO: 298620 - RNA, 32 nt, Homo Sapiens
accaauucaucccacuucacuguuugaagaaa

SEQ ID NO: 298621 - RNA, 32 nt, Homo Sapiens
cuaggaaguauuuuaaauauuuaugaaaauau

SEQ ID NO: 298622 - RNA, 32 nt, Homo Sapiens
ucuauuugcuaagggacucugccacagaaaag

SEQ ID NO: 298623 - RNA, 32 nt, Homo Sapiens
cacugagggauguuuuccccccuugcuugugc

SEQ ID NO: 298624 - RNA, 32 nt, Homo Sapiens
ggaauggagggucagggcuaggcggcgggagg

SEQ ID NO: 298625 - RNA, 32 nt, Homo Sapiens
gcaucaagcaagccaguguggagcaugaccug

SEQ ID NO: 298626 - RNA, 32 nt, Homo Sapiens
gccuucagcauugccuaggaacacgaagcacg

SEQ ID NO: 298627 - RNA, 32 nt, Homo Sapiens
uggaggagaaaacacaugaggguguggucagg

SEQ ID NO: 298628 - RNA, 32 nt, Homo Sapiens
caucaugcaucacucucccuucugccuccuuc

SEQ ID NO: 298629 - RNA, 32 nt, Homo Sapiens
acaaacaaacaaacagaaguaacgaagcuaag

SEQ ID NO: 298630 - RNA, 32 nt, Homo Sapiens
uuaauaauacuagcaauucucccacaguuguu

SEQ ID NO: 298631 - RNA, 32 nt, Homo Sapiens
aaacuacauaaugauguacugguaaacuagaa

SEQ ID NO: 298632 - RNA, 32 nt, Homo Sapiens
acaugcaaggaccugagggaaccaggauuccu

SEQ ID NO: 298633 - RNA, 32 nt, Homo Sapiens
guuuauuuuucuauguucuguuuuguagccuu

SEQ ID NO: 298634 - RNA, 32 nt, Homo Sapiens
ugcaaccucugugccaggcucuggggacacug

SEQ ID NO: 298635 - RNA, 32 nt, Homo Sapiens
ggcuucugggagaggaggaauuucugcauggg

SEQ ID NO: 298636 - RNA, 30 nt, Homo Sapiens
caggacaacaucccugcugcucuuuaggaa

SEQ ID NO: 298637 - RNA, 32 nt, Homo Sapiens
ccuuccauguuguaaauagggauuguauucuu

SEQ ID NO: 298638 - RNA, 32 nt, Homo Sapiens
gcggagggcagagcccgcucucccagggagga

SEQ ID NO: 298639 - RNA, 32 nt, Homo Sapiens
uaggaaaugcuguuaucucacauuauaaauuu

SEQ ID NO: 298640 - RNA, 32 nt, Homo Sapiens
agcccuucuacuuucuuucucacccacccugu

SEQ ID NO: 298641 - RNA, 32 nt, Homo Sapiens
ugugggcuuucugcggccgcugagggcgcguc

SEQ ID NO: 298642 - RNA, 32 nt, Homo Sapiens
ccggggauggcggcagagggggaccagcucag

SEQ ID NO: 298643 - RNA, 32 nt, Homo Sapiens
ggggcagacaacgcugcagagcccagggagcc

SEQ ID NO: 298644 - RNA, 32 nt, Homo Sapiens
gaaauuguuuuuauuucauguaaaauaaggga

SEQ ID NO: 298645 - RNA, 32 nt, Homo Sapiens
gcuggaguuacuaagaucuacagucagagcga

SEQ ID NO: 298646 - RNA, 32 nt, Homo Sapiens
aucaugucaucucuucaguaacuguuaaagug

SEQ ID NO: 298647 - RNA, 32 nt, Homo Sapiens
gaggagggaaacugaggcccgaggcagauacc

SEQ ID NO: 298648 - RNA, 32 nt, Homo Sapiens
cccuccuagguagaggcgaaggaccggggaga

SEQ ID NO: 298649 - RNA, 32 nt, Homo Sapiens
uuuaagaaauuuaccuuaaaucuuguucuguu

SEQ ID NO: 298650 - RNA, 32 nt, Homo Sapiens
aucuucacccaugcagaauagcaagagugggc

SEQ ID NO: 298651 - RNA, 32 nt, Homo Sapiens
agcuucugcuucccuuucccuucccagcuaca

SEQ ID NO: 298652 - RNA, 32 nt, Homo Sapiens
ggggacauuuuucauuaagaguucaguaagac

SEQ ID NO: 298653 - RNA, 32 nt, Homo Sapiens
aauuguugacauuucaggcaaauuuggccaau

SEQ ID NO: 298654 - RNA, 32 nt, Homo Sapiens
ugcccacgcgcgcgcuggccgcccucaagugc

SEQ ID NO: 298655 - RNA, 32 nt, Homo Sapiens
ugccucccaaacuugaggaaaaggucagauuc

SEQ ID NO: 298656 - RNA, 32 nt, Homo Sapiens
auggggcaggcugggguguggguguggccugg

SEQ ID NO: 298657 - RNA, 32 nt, Homo Sapiens
cuucucaaucacauuucaauguuuguggagag

SEQ ID NO: 298658 - RNA, 32 nt, Homo Sapiens
ggugauuuuuucuuaccuuggaugccugagac

SEQ ID NO: 298659 - RNA, 32 nt, Homo Sapiens
ggaagaaaucugaaaguuacuacauuuaagcu

SEQ ID NO: 298660 - RNA, 32 nt, Homo Sapiens
agccagcagaggccuccacccagugcugggag

SEQ ID NO: 298661 - RNA, 32 nt, Homo Sapiens
accacaaaauuucaaagggacucauacaauuu

SEQ ID NO: 298662 - RNA, 32 nt, Homo Sapiens
cacuggagcuuuuuuuuuuuuacaacgugaca

SEQ ID NO: 298663 - RNA, 32 nt, Homo Sapiens
cccaggcagggccaacccuucuccucuuguaa

SEQ ID NO: 298664 - RNA, 32 nt, Homo Sapiens
ggugcugauguuucaagaauuguguuuuuaua

SEQ ID NO: 298665 - RNA, 32 nt, Homo Sapiens
aaauuagcugggugcgguggcaggugccugua

SEQ ID NO: 298666 - RNA, 32 nt, Homo Sapiens
ucuauugcugcugcaacaaacagcuacagacu

SEQ ID NO: 298667 - RNA, 32 nt, Homo Sapiens
cuguucacagaaaaagcaugaugggaaaauau

SEQ ID NO: 298668 - RNA, 31 nt, Homo Sapiens
uguaaucccagcuacucaggagucugaggag

SEQ ID NO: 298669 - RNA, 32 nt, Homo Sapiens
ggcucaggcuguucuuccuccuccuagaaugu

SEQ ID NO: 298670 - RNA, 32 nt, Homo Sapiens
cugcaaccuccgccuccuggguuccaacgauu

SEQ ID NO: 298671 - RNA, 32 nt, Homo Sapiens
auauugauguaugauaaagaugaucuaauuug

SEQ ID NO: 298672 - RNA, 32 nt, Homo Sapiens
gcggggcuccccagccaucaccauccugugua

SEQ ID NO: 298673 - RNA, 32 nt, Homo Sapiens
ggugaaaauaaauguuaaugaauuaccacuuu

SEQ ID NO: 298674 - RNA, 31 nt, Homo Sapiens
uagcaaguagcuaccccaggagucuaaaauc

SEQ ID NO: 298675 - RNA, 32 nt, Homo Sapiens
ugaaauguccgucauaucucagagcauauaga

SEQ ID NO: 298676 - RNA, 32 nt, Homo Sapiens
ggcugagcaggacgccgcuggugcuggccgcc

SEQ ID NO: 298677 - RNA, 32 nt, Homo Sapiens
augugauuccugcauuuuuuuaccuuaaaucu

SEQ ID NO: 298678 - RNA, 32 nt, Homo Sapiens
agacacgugcuguuccaccucccuucagacua

SEQ ID NO: 298679 - RNA, 32 nt, Homo Sapiens
cugaggcagcgaacugguuuguggccuguuug

SEQ ID NO: 298680 - RNA, 27 nt, Homo Sapiens
agaugccggggccgccggcguugcggc

SEQ ID NO: 298681 - RNA, 32 nt, Homo Sapiens
gauauagaaguacaaauggauguaucauaggg

SEQ ID NO: 298682 - RNA, 32 nt, Homo Sapiens
gauuugcuuuaaagucuuguguaagagagaag

SEQ ID NO: 298683 - RNA, 32 nt, Homo Sapiens
aggcuccgccccagcccucagccccaggcccc

SEQ ID NO: 298684 - RNA, 32 nt, Homo Sapiens
uuugggcuggaacauguaaaagggugaaaguu

SEQ ID NO: 298685 - RNA, 32 nt, Homo Sapiens
caggaggggagaaauguuauuguuugaacaga

SEQ ID NO: 298686 - RNA, 32 nt, Homo Sapiens
aacugaguauaaucacaagggccucuguaaag

SEQ ID NO: 298687 - RNA, 32 nt, Homo Sapiens
gguggccacagacugacccccaucugagcugg

SEQ ID NO: 298688 - RNA, 32 nt, Homo Sapiens
aagugauuuuuggaugguuauugauaucuuug

SEQ ID NO: 298689 - RNA, 32 nt, Homo Sapiens
caggaaacccucagaaagggggcuggaggauu

SEQ ID NO: 298690 - RNA, 32 nt, Homo Sapiens
ugacccauugcuguucucuguaucgugaucua

SEQ ID NO: 298691 - RNA, 32 nt, Homo Sapiens
ugauucguggaccagcagcauugugucaccug

SEQ ID NO: 298692 - RNA, 32 nt, Homo Sapiens
cauguuccacaucagucaaugcaacuuaggac

SEQ ID NO: 298693 - RNA, 32 nt, Homo Sapiens
ugcguuucuuccacugagucuuucuuagauua

SEQ ID NO: 298694 - RNA, 32 nt, Homo Sapiens
ggaauuuucuaauauaaugacuuauaugcuga

SEQ ID NO: 298695 - RNA, 31 nt, Homo Sapiens
ggcacgagggcggagccgagcgggcguccgu

SEQ ID NO: 298696 - RNA, 32 nt, Homo Sapiens
caauuuggggaacagaagggcuuuuguuuugg

SEQ ID NO: 298697 - RNA, 32 nt, Homo Sapiens
cgcaucuguugagccaccggcgcgcgcacgcg

SEQ ID NO: 298698 - RNA, 32 nt, Homo Sapiens
aagaugaugaauugugucaggaccaagauccc

SEQ ID NO: 298699 - RNA, 32 nt, Homo Sapiens
ucuucaaauaccauaguucaagaguagcuguu

SEQ ID NO: 298700 - RNA, 32 nt, Homo Sapiens
caccuguuccuggccaggcucuaggccaggcu

SEQ ID NO: 298701 - RNA, 32 nt, Homo Sapiens
ucagcaacagagcaaaauaaagguuagauaag

SEQ ID NO: 298702 - RNA, 32 nt, Homo Sapiens
gggcaacaacucagccagccugauggcagccu

SEQ ID NO: 298703 - RNA, 32 nt, Homo Sapiens
ucuaauguuuuaagaagguuuaugaauuugug

SEQ ID NO: 298704 - RNA, 31 nt, Homo Sapiens
accuuugucugggcguuaccaagggcuggaa

SEQ ID NO: 298705 - RNA, 32 nt, Homo Sapiens
uuauuuucaaggauaguuuauuuuaaauggca

SEQ ID NO: 298706 - RNA, 32 nt, Homo Sapiens
gccguucaugcuuccuccccagccuucugcag

SEQ ID NO: 298707 - RNA, 30 nt, Homo Sapiens
ggccagcgcaggcgcucaggccucggaggc

SEQ ID NO: 298708 - RNA, 32 nt, Homo Sapiens
ccaggaaggggaggggcgagcacaguccugcc

SEQ ID NO: 298709 - RNA, 32 nt, Homo Sapiens
caaaguacaacacuccaagauggguucaucuu

SEQ ID NO: 298710 - RNA, 32 nt, Homo Sapiens
cucuccgggcccagcucuuugcucgcgucugc

SEQ ID NO: 298711 - RNA, 32 nt, Homo Sapiens
acaggugcccacaauggcugcagaucugcccg

SEQ ID NO: 298712 - RNA, 32 nt, Homo Sapiens
caauaagcucuuuggucuucuuaagauggcua

SEQ ID NO: 298713 - RNA, 32 nt, Homo Sapiens
auccagaagaaccaccugcucacucugucccu

SEQ ID NO: 298714 - RNA, 32 nt, Homo Sapiens
uuuuguauuugaauaguuauguuucacugaug

SEQ ID NO: 298715 - RNA, 32 nt, Homo Sapiens
gccuagcaugguggcgagcaccuguaguccca

SEQ ID NO: 298716 - RNA, 32 nt, Homo Sapiens
ccacucucccgggccgcccaccacaggcucuu

SEQ ID NO: 298717 - RNA, 32 nt, Homo Sapiens
agccucccggcggccucugcaggcccaagucg

SEQ ID NO: 298718 - RNA, 32 nt, Homo Sapiens
ucaacaagcugaucacaaaauuccugugaaag

SEQ ID NO: 298719 - RNA, 32 nt, Homo Sapiens
gaaagcaucacuucuuuuuuauguugugggaa

SEQ ID NO: 298720 - RNA, 28 nt, Homo Sapiens
cugauugauuaaaaaauuucccaaagug

SEQ ID NO: 298721 - RNA, 32 nt, Homo Sapiens
ccgcgcccgccgagccgcucacgcccugccca

SEQ ID NO: 298722 - RNA, 32 nt, Homo Sapiens
aagaugggaaacacuuuuuuuauuaaguuuuu

SEQ ID NO: 298723 - RNA, 32 nt, Homo Sapiens
aguaaucugcuguuuaccuccaguuauaugug

SEQ ID NO: 298724 - RNA, 32 nt, Homo Sapiens
gggaaaugcuguuccauaucagcccucugcuc

SEQ ID NO: 298725 - RNA, 32 nt, Homo Sapiens
caaggccacagagcuaugggugucagcaccag

SEQ ID NO: 298726 - RNA, 32 nt, Homo Sapiens
gauaaauuagcuucuuuuuaaauuucaucaua

SEQ ID NO: 298727 - RNA, 32 nt, Homo Sapiens
agaccuucuguccaccagcugagaaggacaag

SEQ ID NO: 298728 - RNA, 32 nt, Homo Sapiens
cacgccguggggucggucaacacacacucacg

SEQ ID NO: 298729 - RNA, 32 nt, Homo Sapiens
agcugguuucuccggcuucucguccugacgac

SEQ ID NO: 298730 - RNA, 32 nt, Homo Sapiens
ugcggggcccugccccaccuucagaggacacu

SEQ ID NO: 298731 - RNA, 32 nt, Homo Sapiens
uaccaucagggugaguugcaccacuuguacuc

SEQ ID NO: 298732 - RNA, 32 nt, Homo Sapiens
ucccucugaugugugaauguccucuaggaaca

SEQ ID NO: 298733 - RNA, 32 nt, Homo Sapiens
uauucagucaauaaaaaugauuuaccauuaua

SEQ ID NO: 298734 - RNA, 32 nt, Homo Sapiens
agaugggacuggggucgcgcggccuucuccuu

SEQ ID NO: 298735 - RNA, 32 nt, Homo Sapiens
aaaauugauaaaccucuagcuagauuaagaaa

SEQ ID NO: 298736 - RNA, 32 nt, Homo Sapiens
gucuacaaaaauagauuacagcuuauuuuauu

SEQ ID NO: 298737 - RNA, 32 nt, Homo Sapiens
gccgcgucggagccccagcagacuuugagagg

SEQ ID NO: 298738 - RNA, 32 nt, Homo Sapiens
ucuccuguucuucauaauccacuacugcagca

SEQ ID NO: 298739 - RNA, 32 nt, Homo Sapiens
caaaaucacacaugucaucuuugucaagggca

SEQ ID NO: 298740 - RNA, 32 nt, Homo Sapiens
aguuuuuagugagugcuguaggauuaauucga

SEQ ID NO: 298741 - RNA, 32 nt, Homo Sapiens
cgagcacuccugaggagggaagaacacuccuc

SEQ ID NO: 298742 - RNA, 32 nt, Homo Sapiens
gccccgcacccacgccuggaccgcggagacgc

SEQ ID NO: 298743 - RNA, 32 nt, Homo Sapiens
aauaugcagaggaaccugggggcuuagaggga

SEQ ID NO: 298744 - RNA, 32 nt, Homo Sapiens
auugaagggauuuuaaaggaaauguugcugug

SEQ ID NO: 298745 - RNA, 32 nt, Homo Sapiens
acccagagggaagaaggaacaguggaggcggg

SEQ ID NO: 298746 - RNA, 32 nt, Homo Sapiens
cucaccuaguguuccuugggccaugaagauca

SEQ ID NO: 298747 - RNA, 32 nt, Homo Sapiens
acuguauaugacucacuucugugccccccagc

SEQ ID NO: 298748 - RNA, 32 nt, Homo Sapiens
gagggcccggcacaggcccacccugguccaaa

SEQ ID NO: 298749 - RNA, 32 nt, Homo Sapiens
cuggcccugcgcgcucggcgcgggcugcagcu

SEQ ID NO: 298750 - RNA, 32 nt, Homo Sapiens
augcauuugccauaaauaauucagaaacacuu

SEQ ID NO: 298751 - RNA, 32 nt, Homo Sapiens
uguuggcuacacagaccccuccccucguguca

SEQ ID NO: 298752 - RNA, 32 nt, Homo Sapiens
ccgggccccgcguccuccccccggccacccuu

SEQ ID NO: 298753 - RNA, 32 nt, Homo Sapiens
cagagacguggcgcgaggcccgggcccugagc

SEQ ID NO: 298754 - RNA, 32 nt, Homo Sapiens
gggaagcucuuuucuaggagugucucaguucu

SEQ ID NO: 298755 - RNA, 32 nt, Homo Sapiens
aguaaguacaaauacaaugcagagcucauuuu

SEQ ID NO: 298756 - RNA, 32 nt, Homo Sapiens
aggggcgggggcaggacgcgcaacuccggccg

SEQ ID NO: 298757 - RNA, 32 nt, Homo Sapiens
aggcuggcguaucaccugagguugggaguuca

SEQ ID NO: 298758 - RNA, 32 nt, Homo Sapiens
cccuggaaaaggaggaggcguggugggacugc

SEQ ID NO: 298759 - RNA, 32 nt, Homo Sapiens
agcaggccaauagaaagacaauauuuuuuauu

SEQ ID NO: 298760 - RNA, 32 nt, Homo Sapiens
cccagggguccucccucuuaacccauguaggu

SEQ ID NO: 298761 - RNA, 32 nt, Homo Sapiens
acaguuuuuccacacgcccugacaccguccug

SEQ ID NO: 298762 - RNA, 32 nt, Homo Sapiens
gaccauauucucaauuauuuggauaugcaaac

SEQ ID NO: 298763 - RNA, 32 nt, Homo Sapiens
ggccgcucguucugugcccccggcccggccac

SEQ ID NO: 298764 - RNA, 32 nt, Homo Sapiens
agccuccggcccggagcgcggcagcccccugc

SEQ ID NO: 298765 - RNA, 32 nt, Homo Sapiens
gauugaacagauaaauauuuagcuugucauaa

SEQ ID NO: 298766 - RNA, 32 nt, Homo Sapiens
caucuuccccacccuguccccagccccuaaac

SEQ ID NO: 298767 - RNA, 32 nt, Homo Sapiens
gagugaccgcggcugcuccagcgcugacgccg

SEQ ID NO: 298768 - RNA, 32 nt, Homo Sapiens
gcccccugccagcucaccgugcccagccuccu

SEQ ID NO: 298769 - RNA, 32 nt, Homo Sapiens
ucguuugagcccaggaggucaaggcugcagug

SEQ ID NO: 298770 - RNA, 32 nt, Homo Sapiens
aauuauguuuaguuaggaaaaaggaaagucau

SEQ ID NO: 298771 - RNA, 32 nt, Homo Sapiens
gaggcggucacccgggcuacggcggccggcag

SEQ ID NO: 298772 - RNA, 32 nt, Homo Sapiens
aacgaucuuccggaagacacgccugugugucc

SEQ ID NO: 298773 - RNA, 32 nt, Homo Sapiens
gucauuuuggucuaaagagcugacuuguuuga

SEQ ID NO: 298774 - RNA, 32 nt, Homo Sapiens
cugaugcucccuccccugcccugguccaggga

SEQ ID NO: 298775 - RNA, 32 nt, Homo Sapiens
cgcggccggccgcugcugcuccgggagcccag

SEQ ID NO: 298776 - RNA, 32 nt, Homo Sapiens
gucuaccaacuccucauagugagccagaagca

SEQ ID NO: 298777 - RNA, 32 nt, Homo Sapiens
aaugacaauauuuauguugccuuuagcuucuu

SEQ ID NO: 298778 - RNA, 32 nt, Homo Sapiens
acuguggggagucaaggcacccugguguggga

SEQ ID NO: 298779 - RNA, 32 nt, Homo Sapiens
gguugaggggugaaggggagggggcuugcaag

SEQ ID NO: 298780 - RNA, 32 nt, Homo Sapiens
gguuaaguuuguuaaacuuaguugaaacuggg

SEQ ID NO: 298781 - RNA, 32 nt, Homo Sapiens
uuccuuucagccuuuucucaccacccauacuc

SEQ ID NO: 298782 - RNA, 32 nt, Homo Sapiens
ccacgcugcgcuuccgaugcccccgcuugccg

SEQ ID NO: 298783 - RNA, 32 nt, Homo Sapiens
aaaugucacuuccucaucaguuucacuucugg

SEQ ID NO: 298784 - RNA, 32 nt, Homo Sapiens
augccgcggcgguggagcuguggcagcauuuc

SEQ ID NO: 298785 - RNA, 32 nt, Homo Sapiens
uccuguggggccuucaccagccugcugggguc

SEQ ID NO: 298786 - RNA, 32 nt, Homo Sapiens
ccagacauacccacagcauuauauguaacauc

SEQ ID NO: 298787 - RNA, 32 nt, Homo Sapiens
aagccuaaaaauuguuucaaaauaaaaaccaa

SEQ ID NO: 298788 - RNA, 32 nt, Homo Sapiens
uaagauacugaauggaaaacuccauugugugu

SEQ ID NO: 298789 - RNA, 32 nt, Homo Sapiens
ccagaccagcucugugaucagaaggaaauugg

SEQ ID NO: 298790 - RNA, 32 nt, Homo Sapiens
ccaggggguuaacaugcccacccucuuaucuc

SEQ ID NO: 298791 - RNA, 32 nt, Homo Sapiens
uagcaggagcaugcgcuuccuuccucacuucc

SEQ ID NO: 298792 - RNA, 32 nt, Homo Sapiens
uuccuggaugacugaguucuggaauauucugu

SEQ ID NO: 298793 - RNA, 32 nt, Homo Sapiens
cuacucugcuccacccaggcuccggaggaccu

SEQ ID NO: 298794 - RNA, 29 nt, Homo Sapiens
ccuccccgggugaugucugcaaagucugu

SEQ ID NO: 298795 - RNA, 32 nt, Homo Sapiens
ucaucgcaguguguuauaugacaggacaaagc

SEQ ID NO: 298796 - RNA, 32 nt, Homo Sapiens
caagccccacuuugugcuuucgaagcuuauga

SEQ ID NO: 298797 - RNA, 31 nt, Homo Sapiens
cuugguguuaaaagauuucaagauuggcauu

SEQ ID NO: 298798 - RNA, 32 nt, Homo Sapiens
augcgaaagagccugguaaaacgauauggacu

SEQ ID NO: 298799 - RNA, 28 nt, Homo Sapiens
gacaugaccgcggcgccgggagggucag

SEQ ID NO: 298800 - RNA, 32 nt, Homo Sapiens
ucuguguccuccgggaccccagcccucaggau

SEQ ID NO: 298801 - RNA, 32 nt, Homo Sapiens
gugauuguuauggaauugucaccuggaaagaa

SEQ ID NO: 298802 - RNA, 32 nt, Homo Sapiens
ugggcaucaccuccuaccccagcccccauccu

SEQ ID NO: 298803 - RNA, 32 nt, Homo Sapiens
gcgcaggagacacaggcgcuggcugccccguc

SEQ ID NO: 298804 - RNA, 32 nt, Homo Sapiens
cgacccuugagugacaguucuauuugauugcc

SEQ ID NO: 298805 - RNA, 32 nt, Homo Sapiens
cucggaccccucacuggggacagggccagugu

SEQ ID NO: 298806 - RNA, 32 nt, Homo Sapiens
auuugauuuuauucucuacacacaccucuucu

SEQ ID NO: 298807 - RNA, 32 nt, Homo Sapiens
ucagagaagcuagacagaaggaccucuguggc

SEQ ID NO: 298808 - RNA, 32 nt, Homo Sapiens
cagccggcuggacuuucggacucuuggacuuu

SEQ ID NO: 298809 - RNA, 32 nt, Homo Sapiens
cacagaaaacaaaaccucccaauaaaacgguu

SEQ ID NO: 298810 - RNA, 32 nt, Homo Sapiens
cuaccugaauguuguaccaucuuuggguaggc

SEQ ID NO: 298811 - RNA, 32 nt, Homo Sapiens
acaaauaaauucucaggccuagguggggcaug

SEQ ID NO: 298812 - RNA, 32 nt, Homo Sapiens
ggaaggaacaaaugaggguguaauugaguuuc

SEQ ID NO: 298813 - RNA, 32 nt, Homo Sapiens
cagagacuuaauuuuuuaaaucuuaagauuug

SEQ ID NO: 298814 - RNA, 32 nt, Homo Sapiens
accugcaaucccaacauuuugggaggccaagg

SEQ ID NO: 298815 - RNA, 32 nt, Homo Sapiens
acacguauuaguuguucuuaauuuuuuuccca

SEQ ID NO: 298816 - RNA, 32 nt, Homo Sapiens
ugguggaaagaacaccugaugaauagauacag

SEQ ID NO: 298817 - RNA, 32 nt, Homo Sapiens
cuucauuuuuauuuuuaagccaucguuccccu

SEQ ID NO: 298818 - RNA, 32 nt, Homo Sapiens
gaagacagcugaggaugccaaggacuucuuca

SEQ ID NO: 298819 - RNA, 32 nt, Homo Sapiens
ccggccuccgcgguacccacugccggccuccg

SEQ ID NO: 298820 - RNA, 32 nt, Homo Sapiens
caucuggagucccuccucccccacgccuccau

SEQ ID NO: 298821 - RNA, 32 nt, Homo Sapiens
aaaaaaggcugaaggcagcuguagcuccacac

SEQ ID NO: 298822 - RNA, 32 nt, Homo Sapiens
uuuucaaugccaaagaagaacuguaaugcugu

SEQ ID NO: 298823 - RNA, 32 nt, Homo Sapiens
ggggccugccagcccugccugccaggucccuu

SEQ ID NO: 298824 - RNA, 32 nt, Homo Sapiens
aacgcuggguccccggcgccgcgggagcuggg

SEQ ID NO: 298825 - RNA, 32 nt, Homo Sapiens
gcauuaaggcauucccgcucuccgcggaacug

SEQ ID NO: 298826 - RNA, 32 nt, Homo Sapiens
uuuaaauacuuguucuuaauucacugguuuuc

SEQ ID NO: 298827 - RNA, 32 nt, Homo Sapiens
cacccugaccagcagagauugcugcagaaaua

SEQ ID NO: 298828 - RNA, 32 nt, Homo Sapiens
ugagguuacccggcccggcccuuccucgcuuc

SEQ ID NO: 298829 - RNA, 32 nt, Homo Sapiens
uaacaggagaauuuaaugauuugccucaggaa

SEQ ID NO: 298830 - RNA, 32 nt, Homo Sapiens
uuaaugaugguugauggguucuaauuuuggau

SEQ ID NO: 298831 - RNA, 32 nt, Homo Sapiens
caaggacgcgugggccucggaggggcuccucg

SEQ ID NO: 298832 - RNA, 32 nt, Homo Sapiens
uuacagcccuuaaaauuuuagcuuaaggacau

SEQ ID NO: 298833 - RNA, 32 nt, Homo Sapiens
uaaaacuugagguagguagcuacauuaaauaa

SEQ ID NO: 298834 - RNA, 32 nt, Homo Sapiens
cccgagacgcuggucuggcccgcacccagccg

SEQ ID NO: 298835 - RNA, 32 nt, Homo Sapiens
aguuacccaggcugcaggccccggcccugggg

SEQ ID NO: 298836 - RNA, 32 nt, Homo Sapiens
ucuuuccagagcagcugaaaaucucagcaugg

SEQ ID NO: 298837 - RNA, 32 nt, Homo Sapiens
uuuauguagauuucuuuuuaaauguuuugucc

SEQ ID NO: 298838 - RNA, 32 nt, Homo Sapiens
ugcaaauagugucaaaaguaaauuaagcagau

SEQ ID NO: 298839 - RNA, 32 nt, Homo Sapiens
ugaucccaggacugaagacaguugugggauau

SEQ ID NO: 298840 - RNA, 32 nt, Homo Sapiens
gaugucuuuuaccauuugauaauuuuaaacau

SEQ ID NO: 298841 - RNA, 32 nt, Homo Sapiens
ucaaauauaugauacguggacauuuccucaua

SEQ ID NO: 298842 - RNA, 32 nt, Homo Sapiens
aacacauuuucauugguauauuauuuaaggaa

SEQ ID NO: 298843 - RNA, 32 nt, Homo Sapiens
ccaacucagcugagagcuaaagagacuagaaa

SEQ ID NO: 298844 - RNA, 32 nt, Homo Sapiens
ggccagccauugccuggcauuugguaguauag

SEQ ID NO: 298845 - RNA, 32 nt, Homo Sapiens
gcaaacacaaaacccaaggcagcuuagggaua

SEQ ID NO: 298846 - RNA, 32 nt, Homo Sapiens
guucagaguuuuaaauugagagcauuaaacau

SEQ ID NO: 298847 - RNA, 32 nt, Homo Sapiens
cugucucuccaggcacggggugucaggaggga

SEQ ID NO: 298848 - RNA, 32 nt, Homo Sapiens
uucacuagguaaagaaucauggacagaacuua

SEQ ID NO: 298849 - RNA, 30 nt, Homo Sapiens
cugccagccggacgcagccguccggacccc

SEQ ID NO: 298850 - RNA, 32 nt, Homo Sapiens
auacauagaaauugaacacacuuuuuaacagc

SEQ ID NO: 298851 - RNA, 32 nt, Homo Sapiens
aaaggaagggaagggagggaggucuguucuau

SEQ ID NO: 298852 - RNA, 32 nt, Homo Sapiens
gauuaaaaaauaaaauaaaauaaaaauuggcc

SEQ ID NO: 298853 - RNA, 32 nt, Homo Sapiens
guuuuacaauguuuauuucuuaaauaaaaacu

SEQ ID NO: 298854 - RNA, 32 nt, Homo Sapiens
ggccgcucguccccgcgccacgguccgcccac

SEQ ID NO: 298855 - RNA, 32 nt, Homo Sapiens
ugcuggggcuccugccuggugugggagugcca

SEQ ID NO: 298856 - RNA, 32 nt, Homo Sapiens
guagaccuuguaccggcugaaaccgcauagcu

SEQ ID NO: 298857 - RNA, 32 nt, Homo Sapiens
acgcugcggcccggcccggcggguaaauaaca

SEQ ID NO: 298858 - RNA, 32 nt, Homo Sapiens
gccugaaauaccaugauuguuuauggaaagua

SEQ ID NO: 298859 - RNA, 32 nt, Homo Sapiens
gugcaccaagagcaaccucacacggugugggc

SEQ ID NO: 298860 - RNA, 32 nt, Homo Sapiens
uuacaaaugcccuuguaauuaccacucugaag

SEQ ID NO: 298861 - RNA, 32 nt, Homo Sapiens
auggucagaugugucauguuuuucauuuccuc

SEQ ID NO: 298862 - RNA, 32 nt, Homo Sapiens
cuggggucggcgacggcugcucuuuucguucu

SEQ ID NO: 298863 - RNA, 32 nt, Homo Sapiens
uugcgaggguaagauucauaguaggaauauug

SEQ ID NO: 298864 - RNA, 32 nt, Homo Sapiens
agucacugcacuggaggggaaugcgcaccccu

SEQ ID NO: 298865 - RNA, 32 nt, Homo Sapiens
uuauucaauucuguaugaacaccuggaagcaa

SEQ ID NO: 298866 - RNA, 32 nt, Homo Sapiens
ucgcaccccccuccuccucccuggcccagaga

SEQ ID NO: 298867 - RNA, 31 nt, Homo Sapiens
ccgccagcgcagccucagaugcuugcuccug

SEQ ID NO: 298868 - RNA, 32 nt, Homo Sapiens
uucagagcccuuaguugagagccccugccgcc

SEQ ID NO: 298869 - RNA, 32 nt, Homo Sapiens
uguggguugcugucauuucaguaauguguaug

SEQ ID NO: 298870 - RNA, 32 nt, Homo Sapiens
agucuguagauauaaucugaaaagauuguagg

SEQ ID NO: 298871 - RNA, 32 nt, Homo Sapiens
uuagguuagaucugggacuacaaauagcuucu

SEQ ID NO: 298872 - RNA, 32 nt, Homo Sapiens
uuuucauugccuucuccuuucaaaguguacgu

SEQ ID NO: 298873 - RNA, 32 nt, Homo Sapiens
uuuugggguguaggguggcagcuccccaaggc

SEQ ID NO: 298874 - RNA, 32 nt, Homo Sapiens
cugcugcccccaccccaguacuagccuagcuu

SEQ ID NO: 298875 - RNA, 32 nt, Homo Sapiens
guacucaacuguguuuaauacucugaauuuua

SEQ ID NO: 298876 - RNA, 32 nt, Homo Sapiens
ggucccaucuucugcccgcuccuccaggaaau

SEQ ID NO: 298877 - RNA, 32 nt, Homo Sapiens
ggggcucagggccagugcucacucuuauuggu

SEQ ID NO: 298878 - RNA, 32 nt, Homo Sapiens
gcgcggggaaggcggcggccaagaugcgcucc

SEQ ID NO: 298879 - RNA, 32 nt, Homo Sapiens
cggagggaagauggcggcaggggccggauauu

SEQ ID NO: 298880 - RNA, 32 nt, Homo Sapiens
gaacgcgguagccugcuugguggagaccgggu

SEQ ID NO: 298881 - RNA, 32 nt, Homo Sapiens
auuaccccagggccaucugugcuccaugcccg

SEQ ID NO: 298882 - RNA, 32 nt, Homo Sapiens
gagcaggggaacaaaauaagggccuagaaacu

SEQ ID NO: 298883 - RNA, 32 nt, Homo Sapiens
cauucuguuuuaagcucauggaucaauggauu

SEQ ID NO: 298884 - RNA, 32 nt, Homo Sapiens
ccccccagugacccucgucccucccccucccg

SEQ ID NO: 298885 - RNA, 32 nt, Homo Sapiens
uuuacuuuuuaaaugcuugaguuucccauuuu

SEQ ID NO: 298886 - RNA, 32 nt, Homo Sapiens
uucuuugguuucuggggugaacucuacccaug

SEQ ID NO: 298887 - RNA, 32 nt, Homo Sapiens
ccccacagacugccccagccaacgagauugcu

SEQ ID NO: 298888 - RNA, 32 nt, Homo Sapiens
gcaccaugugcuucuccuuuggugagacuuaa

SEQ ID NO: 298889 - RNA, 32 nt, Homo Sapiens
uggcucgcucccacaccgccccgguguuggcc

SEQ ID NO: 298890 - RNA, 32 nt, Homo Sapiens
gucacgcccgcauaaggguugcuugagggcuc

SEQ ID NO: 298891 - RNA, 32 nt, Homo Sapiens
cguuuggccccggccuggccaggagaggccca

SEQ ID NO: 298892 - RNA, 32 nt, Homo Sapiens
auuuugaggaucuggacuccguuuccugccuu

SEQ ID NO: 298893 - RNA, 32 nt, Homo Sapiens
caacguagagcgcgugcugaagaguguggcug

SEQ ID NO: 298894 - RNA, 32 nt, Homo Sapiens
uccuuugggcuucagcugccaguguccugagc

SEQ ID NO: 298895 - RNA, 32 nt, Homo Sapiens
gacauuuuuuauuuucauuuuauaucuuuugu

SEQ ID NO: 298896 - RNA, 32 nt, Homo Sapiens
ucgcacccgagcugacacacgauggaaauaga

SEQ ID NO: 298897 - RNA, 32 nt, Homo Sapiens
ggggacacaccuacucugcuccccucucacac

SEQ ID NO: 298898 - RNA, 32 nt, Homo Sapiens
cagugcccuaaaaugguguucuuaugaccugc

SEQ ID NO: 298899 - RNA, 32 nt, Homo Sapiens
gaacugaaacuucuuuggggcuugucuugaga

SEQ ID NO: 298900 - RNA, 32 nt, Homo Sapiens
ggcuccagcuggccaccgugccccacaagaug

SEQ ID NO: 298901 - RNA, 32 nt, Homo Sapiens
gacagcaggagaaggguuggcuguggaucaag

SEQ ID NO: 298902 - RNA, 32 nt, Homo Sapiens
ggaaauggucugaggcagguggugggacuaga

SEQ ID NO: 298903 - RNA, 32 nt, Homo Sapiens
cgccggcgcugggcuuggccagucggcaguga

SEQ ID NO: 298904 - RNA, 32 nt, Homo Sapiens
uguuuauguauauaaucuuauucuguagucau

SEQ ID NO: 298905 - RNA, 32 nt, Homo Sapiens
ccuccacuaggagcuucugugcuuugggagaa

SEQ ID NO: 298906 - RNA, 32 nt, Homo Sapiens
ugauuuaaaaguaaccccuuugaaacauaagc

SEQ ID NO: 298907 - RNA, 32 nt, Homo Sapiens
gcuugcgggguugaguggcccgagcuaagggu

SEQ ID NO: 298908 - RNA, 32 nt, Homo Sapiens
cauggggguucagucuguggaugguaacuacu

SEQ ID NO: 298909 - RNA, 32 nt, Homo Sapiens
aaauuaaaaaaauaaacauugucuuggagggu

SEQ ID NO: 298910 - RNA, 32 nt, Homo Sapiens
guuaaggccagucuuaacccacuggaugaaaa

SEQ ID NO: 298911 - RNA, 32 nt, Homo Sapiens
accuggcuaaaagaauguauuuuuguggaugg

SEQ ID NO: 298912 - RNA, 32 nt, Homo Sapiens
uacuuuuuauauauuuauuauuauuaaauauu

SEQ ID NO: 298913 - RNA, 32 nt, Homo Sapiens
gggugacagaucuuguuucugaagaugguuua

SEQ ID NO: 298914 - RNA, 32 nt, Homo Sapiens
ggaucccagcugccuuccugggcuugugccau

SEQ ID NO: 298915 - RNA, 32 nt, Homo Sapiens
ucagaggguaugaacaggaagaauuaaaugca

SEQ ID NO: 298916 - RNA, 32 nt, Homo Sapiens
cacugcacuccagccugggugacagagcgaga

SEQ ID NO: 298917 - RNA, 32 nt, Homo Sapiens
gugugaaacagaauauaugaaauguguaggga

SEQ ID NO: 298918 - RNA, 32 nt, Homo Sapiens
uaaauuugauuuuuuucuuaacucuaaauauu

SEQ ID NO: 298919 - RNA, 32 nt, Homo Sapiens
ggaaagcucgucugcugugcagccggcgcaga

SEQ ID NO: 298920 - RNA, 32 nt, Homo Sapiens
ccccggccccgcgcccgccauggagaagacug

SEQ ID NO: 298921 - RNA, 32 nt, Homo Sapiens
ggagaguccccaaggcccccagcccuggggau

SEQ ID NO: 298922 - RNA, 32 nt, Homo Sapiens
gaaccugcggggcuggggcgcgcgccaugggc

SEQ ID NO: 298923 - RNA, 32 nt, Homo Sapiens
guggugucugguuuuuguuugauuugguuggu

SEQ ID NO: 298924 - RNA, 32 nt, Homo Sapiens
uuggaauuauaaauauuuuccgucacuuaaau

SEQ ID NO: 298925 - RNA, 32 nt, Homo Sapiens
aagcaauuacaauacaucuaagcuauacuggg

SEQ ID NO: 298926 - RNA, 32 nt, Homo Sapiens
ggacuuccugucauuuguuggccauucacgca

SEQ ID NO: 298927 - RNA, 32 nt, Homo Sapiens
agccaucauguuucuaagagacuuggagacac

SEQ ID NO: 298928 - RNA, 32 nt, Homo Sapiens
auccaaaauaguuuuuacaaguaaaauguaga

SEQ ID NO: 298929 - RNA, 32 nt, Homo Sapiens
uggaaacuaucaaauauaaauauacuuuaacu

SEQ ID NO: 298930 - RNA, 32 nt, Homo Sapiens
agaaaaacuaugugaugaaacuuugaaaaaga

SEQ ID NO: 298931 - RNA, 32 nt, Homo Sapiens
cuccguggggccgucuucccggcgaguccgcg

SEQ ID NO: 298932 - RNA, 32 nt, Homo Sapiens
uauuuuacuucuuuuagcuguuuaacuuugua

SEQ ID NO: 298933 - RNA, 32 nt, Homo Sapiens
aauccauacugauauaaugauagauaaucgau

SEQ ID NO: 298934 - RNA, 32 nt, Homo Sapiens
uuuuagaggacacguaggcgguaccacuaagg

SEQ ID NO: 298935 - RNA, 32 nt, Homo Sapiens
gcagaagcaaaacagauuaaguagauagauuu

SEQ ID NO: 298936 - RNA, 32 nt, Homo Sapiens
caagguuggugccccccuccacccuaggaugu

SEQ ID NO: 298937 - RNA, 32 nt, Homo Sapiens
agaagucacuguauuuuugaaacuucuaacgu

SEQ ID NO: 298938 - RNA, 32 nt, Homo Sapiens
cugcucuuauucaaauagauauagcauuauaa

SEQ ID NO: 298939 - RNA, 32 nt, Homo Sapiens
ccacaccccgucugccccuugaccccacacgc

SEQ ID NO: 298940 - RNA, 32 nt, Homo Sapiens
ugaguggggaggagggggcaucuucugaacag

SEQ ID NO: 298941 - RNA, 32 nt, Homo Sapiens
auccagccuccacucguguccaugguguccuc

SEQ ID NO: 298942 - RNA, 32 nt, Homo Sapiens
agauuauagaaauuauuaaaaaagaaaaaucu

SEQ ID NO: 298943 - RNA, 32 nt, Homo Sapiens
cacgaagaugaacugggcacccgcaacgugcu

SEQ ID NO: 298944 - RNA, 32 nt, Homo Sapiens
gccuggcugccagggagggugggccucuuggu

SEQ ID NO: 298945 - RNA, 30 nt, Homo Sapiens
cugucugucugugcccaagcccuuccacca

SEQ ID NO: 298946 - RNA, 32 nt, Homo Sapiens
uaaguguaauauauuuguucaguuauaagaug

SEQ ID NO: 298947 - RNA, 32 nt, Homo Sapiens
aacuaccuaaaauaaagauuauagagccagag

SEQ ID NO: 298948 - RNA, 32 nt, Homo Sapiens
ggucgacucucugucuccuccccuccccccgc

SEQ ID NO: 298949 - RNA, 32 nt, Homo Sapiens
agguucugaaguucuucaguacauugcuguag

SEQ ID NO: 298950 - RNA, 32 nt, Homo Sapiens
uccugagaucuggguuuaacgaucugggcuuu

SEQ ID NO: 298951 - RNA, 32 nt, Homo Sapiens
gcuuuuuaacuuagaauuagaauagaucaaau

SEQ ID NO: 298952 - RNA, 32 nt, Homo Sapiens
aagugucugggcuccuggcccagggguccgug

SEQ ID NO: 298953 - RNA, 32 nt, Homo Sapiens
gauggagagcaccagcaaagccuuagggccca

SEQ ID NO: 298954 - RNA, 32 nt, Homo Sapiens
gccacagagaauaagcugaacuuguaugguuu

SEQ ID NO: 298955 - RNA, 32 nt, Homo Sapiens
auauaaacaacaaaaccuuggaaguaguuucu

SEQ ID NO: 298956 - RNA, 27 nt, Homo Sapiens
acaggguccuucuugggacucagccag

SEQ ID NO: 298957 - RNA, 31 nt, Homo Sapiens
uacacgguguacauuuccagagccuugugua

SEQ ID NO: 298958 - RNA, 32 nt, Homo Sapiens
augaauauauugccuguuuugugaauacugac

SEQ ID NO: 298959 - RNA, 32 nt, Homo Sapiens
ccauucauuaugugguaacuguauugaacuua

SEQ ID NO: 298960 - RNA, 32 nt, Homo Sapiens
auuauuuuuuaaaugcuuuauaaaucuucaug

SEQ ID NO: 298961 - RNA, 32 nt, Homo Sapiens
acugcgucaaguccccuggccagcgccagccc

SEQ ID NO: 298962 - RNA, 32 nt, Homo Sapiens
gcgcuggccuaccuccugaggaccucagccac

SEQ ID NO: 298963 - RNA, 32 nt, Homo Sapiens
ucaaagacgaccuuuaccuccugccuuuggau

SEQ ID NO: 298964 - RNA, 32 nt, Homo Sapiens
ccccuccccgggccucucuccucuugccuacg

SEQ ID NO: 298965 - RNA, 32 nt, Homo Sapiens
cucccauccuggaugacuaugacugugaggag

SEQ ID NO: 298966 - RNA, 32 nt, Homo Sapiens
acagcgggagcggcagcaagucguccggaccg

SEQ ID NO: 298967 - RNA, 32 nt, Homo Sapiens
cuuaacuaaaauuacuuuuuacuuuaagcuug

SEQ ID NO: 298968 - RNA, 32 nt, Homo Sapiens
gcuuuccuaaggggguggacaugauggcugcc

SEQ ID NO: 298969 - RNA, 32 nt, Homo Sapiens
agugaggcugugagaaggcagcuccugccaca

SEQ ID NO: 298970 - RNA, 32 nt, Homo Sapiens
aacuuuuauaaauuauuuuaacaaagauuaaa

SEQ ID NO: 298971 - RNA, 32 nt, Homo Sapiens
gcucaucacccuuccacauccuccuccucguu

SEQ ID NO: 298972 - RNA, 32 nt, Homo Sapiens
cuuuucuccuucgaguccccaacagcaaagca

SEQ ID NO: 298973 - RNA, 32 nt, Homo Sapiens
ccgucccggccaagccggggccccgaagccag

SEQ ID NO: 298974 - RNA, 32 nt, Homo Sapiens
cccuucugaaguucgggacgcggcggcugcag

SEQ ID NO: 298975 - RNA, 32 nt, Homo Sapiens
aggggauagaggaggagggugugggugucagg

SEQ ID NO: 298976 - RNA, 32 nt, Homo Sapiens
auuguaaauuuaaugaacaaucaagguucaca

SEQ ID NO: 298977 - RNA, 29 nt, Homo Sapiens
acuuuguaaaguuuguauuuauuccccuu

SEQ ID NO: 298978 - RNA, 32 nt, Homo Sapiens
aggugagagccagagagcgagcagagggggcg

SEQ ID NO: 298979 - RNA, 32 nt, Homo Sapiens
ccugucccuaaacuaauguacuccaugucuua

SEQ ID NO: 298980 - RNA, 32 nt, Homo Sapiens
cugauuccucuaucucccccagcccuaggcaa

SEQ ID NO: 298981 - RNA, 32 nt, Homo Sapiens
acugcugcgguuccuggguggcggcggcaugg

SEQ ID NO: 298982 - RNA, 31 nt, Homo Sapiens
cccuccugugugaaaaucuccacucccaaug

SEQ ID NO: 298983 - RNA, 32 nt, Homo Sapiens
ccagaaauccagccucuuucuggagaccccaa

SEQ ID NO: 298984 - RNA, 32 nt, Homo Sapiens
aaaacuucucccuugguuaccuguuaucuuuu

SEQ ID NO: 298985 - RNA, 32 nt, Homo Sapiens
uguguucuuuuccugucaauuuucauagaccu

SEQ ID NO: 298986 - RNA, 32 nt, Homo Sapiens
gcuucagcaccucggccguccugggccgccgg

SEQ ID NO: 298987 - RNA, 32 nt, Homo Sapiens
aggucaguccccagcccucuggguuggccugc

SEQ ID NO: 298988 - RNA, 32 nt, Homo Sapiens
gaaaccacaauuugucaaauauguuugccaua

SEQ ID NO: 298989 - RNA, 32 nt, Homo Sapiens
gacggggcuccggcccgggauaaccaacucuc

SEQ ID NO: 298990 - RNA, 32 nt, Homo Sapiens
cccucuacccucggcacccugggugggaaagg

SEQ ID NO: 298991 - RNA, 32 nt, Homo Sapiens
aaaaaagcccaguggaggaaagagcuagauga

SEQ ID NO: 298992 - RNA, 32 nt, Homo Sapiens
ggcgugggaccgggcagcucggucgcuccgca

SEQ ID NO: 298993 - RNA, 32 nt, Homo Sapiens
agugcaccugagauuugauaagaucauuaaau

SEQ ID NO: 298994 - RNA, 30 nt, Homo Sapiens
accucggccgaggccugcgcccugacaugc

SEQ ID NO: 298995 - RNA, 32 nt, Homo Sapiens
auuacccagucuuagauaguucuuuauagcau

SEQ ID NO: 298996 - RNA, 32 nt, Homo Sapiens
gucacccaaaguaaagacucuaucuugaaagg

SEQ ID NO: 298997 - RNA, 32 nt, Homo Sapiens
cgcugugcucugcggucgcagcugcagccgcu

SEQ ID NO: 298998 - RNA, 30 nt, Homo Sapiens
cgggugugugcagggcugggucccgcugcc

SEQ ID NO: 298999 - RNA, 32 nt, Homo Sapiens
gaaaauuaaguacuguauauagguguacuuug

SEQ ID NO: 299000 - RNA, 32 nt, Homo Sapiens
ggcgaggugggcugcgcgucugcaagaaagug

SEQ ID NO: 299001 - RNA, 32 nt, Homo Sapiens
guucccuucuauuuauuauaaagaaauuuuuc

SEQ ID NO: 299002 - RNA, 32 nt, Homo Sapiens
gugggaauguagaaaacguacuccaugaucug

SEQ ID NO: 299003 - RNA, 32 nt, Homo Sapiens
cacggcgggagaggacccucggagcccucugc

SEQ ID NO: 299004 - RNA, 32 nt, Homo Sapiens
caagucucuaaagaaaggcugagaacacccag

SEQ ID NO: 299005 - RNA, 32 nt, Homo Sapiens
ucuccgcgaagcgggaaagcgcggcggccgcc

SEQ ID NO: 299006 - RNA, 32 nt, Homo Sapiens
cuuaagaaaaaauuaagaaaaugaaauaaguu

SEQ ID NO: 299007 - RNA, 32 nt, Homo Sapiens
uacaaacuaaaauguagaugaauuaaccucuc

SEQ ID NO: 299008 - RNA, 32 nt, Homo Sapiens
ucugagaggagcugagcccuguuguggcccau

SEQ ID NO: 299009 - RNA, 32 nt, Homo Sapiens
aaaguaaggaacaauaccugggaaauaauuaa

SEQ ID NO: 299010 - RNA, 32 nt, Homo Sapiens
cuuugacucagaggcugggagcauagcagagg

SEQ ID NO: 299011 - RNA, 32 nt, Homo Sapiens
gauguuucaguuccuccauuuaacagauauga

SEQ ID NO: 299012 - RNA, 32 nt, Homo Sapiens
ugaccacacuggggugggugggcccccagcac

SEQ ID NO: 299013 - RNA, 32 nt, Homo Sapiens
ugaaaacauuacuuguacaaucuccuaucaga

SEQ ID NO: 299014 - RNA, 32 nt, Homo Sapiens
ucuguuugggggcuucuguuuuguuuggcgag

SEQ ID NO: 299015 - RNA, 32 nt, Homo Sapiens
ugcguggagacccaggagccucgggggaucug

SEQ ID NO: 299016 - RNA, 32 nt, Homo Sapiens
cacaaggacauggacguggacauccuggcccu

SEQ ID NO: 299017 - RNA, 32 nt, Homo Sapiens
cccggagcugacucgccuccagugaguccaua

SEQ ID NO: 299018 - RNA, 32 nt, Homo Sapiens
caggggagcaccuggugacacugaggacaccu

SEQ ID NO: 299019 - RNA, 32 nt, Homo Sapiens
cuagucuacgcacagccaaaacuuaaaaacuc

SEQ ID NO: 299020 - RNA, 32 nt, Homo Sapiens
uacaaugcaauaauaauagaaauaaagggcac

SEQ ID NO: 299021 - RNA, 32 nt, Homo Sapiens
ugagaugccccgagcccaggcagcuauuucag

SEQ ID NO: 299022 - RNA, 32 nt, Homo Sapiens
gacagccucccggcccggggaggacaagucgc

SEQ ID NO: 299023 - RNA, 32 nt, Homo Sapiens
gaaccuaucucuaucccugucugauagaggga

SEQ ID NO: 299024 - RNA, 32 nt, Homo Sapiens
cauggcugguugcagguucccuuuuuccuucc

SEQ ID NO: 299025 - RNA, 32 nt, Homo Sapiens
ucucuaugacaauaauacaaaccaauuuaagu

SEQ ID NO: 299026 - RNA, 30 nt, Homo Sapiens
cuggggccugggggaggcuauaggauauaa

SEQ ID NO: 299027 - RNA, 32 nt, Homo Sapiens
ugcugugcuuucgucccacagcuuucugccca

SEQ ID NO: 299028 - RNA, 32 nt, Homo Sapiens
ccccagauauccucaccucagggccuccuuuu

SEQ ID NO: 299029 - RNA, 32 nt, Homo Sapiens
ugggauucugggauuuuguuucccuccccccu

SEQ ID NO: 299030 - RNA, 32 nt, Homo Sapiens
gcagccaagaaaaaguuaaaagaauauuggcg

SEQ ID NO: 299031 - RNA, 32 nt, Homo Sapiens
gggaagggggugcccugaaaccaaacuggaag

SEQ ID NO: 299032 - RNA, 32 nt, Homo Sapiens
auccugcugucuucuccuucccugugcccuga

SEQ ID NO: 299033 - RNA, 32 nt, Homo Sapiens
aaugucuucuaaaauacuucacucacauugua

SEQ ID NO: 299034 - RNA, 32 nt, Homo Sapiens
agaaagcauagacgucucagguuauucguuac

SEQ ID NO: 299035 - RNA, 32 nt, Homo Sapiens
uauauugaaaguaaauauaaucaauuauguac

SEQ ID NO: 299036 - RNA, 31 nt, Homo Sapiens
ccucaggugaucugccugccccggccuccca

SEQ ID NO: 299037 - RNA, 32 nt, Homo Sapiens
uucuugucaacacccucuuaagcagcaccaga

SEQ ID NO: 299038 - RNA, 32 nt, Homo Sapiens
uucugcaguacggcugccccgacgagugcgug

SEQ ID NO: 299039 - RNA, 32 nt, Homo Sapiens
aauuuaacaucuuuuucuuuugcacaucuucc

SEQ ID NO: 299040 - RNA, 32 nt, Homo Sapiens
auuugaccuucuaagaucaaguaagggacacu

SEQ ID NO: 299041 - RNA, 32 nt, Homo Sapiens
ugacagucaugaaagguaaggcaaauuuuaag

SEQ ID NO: 299042 - RNA, 32 nt, Homo Sapiens
gugcccgcgccauggggugcucugugggcuuc

SEQ ID NO: 299043 - RNA, 32 nt, Homo Sapiens
uggcaaaguaacugagaguuugguaaaagaau

SEQ ID NO: 299044 - RNA, 32 nt, Homo Sapiens
guguaugguagguuacccucuauuugcagcuu

SEQ ID NO: 299045 - RNA, 32 nt, Homo Sapiens
ugccucacgguggccuccccaggccacgaauc

SEQ ID NO: 299046 - RNA, 32 nt, Homo Sapiens
aaaaaaucuuugcaugauaaauuaacaucuua

SEQ ID NO: 299047 - RNA, 32 nt, Homo Sapiens
gagcgccccgggccaccgcgcaaccaaguguu

SEQ ID NO: 299048 - RNA, 32 nt, Homo Sapiens
ggggucaggagcggcccccuccccucaccucu

SEQ ID NO: 299049 - RNA, 32 nt, Homo Sapiens
cgggcugcacgcacuucucccgcggcccagaa

SEQ ID NO: 299050 - RNA, 32 nt, Homo Sapiens
ugcaaagacaaaugcaugauuuauuaugucug

SEQ ID NO: 299051 - RNA, 32 nt, Homo Sapiens
gcgccugagccuggggaagcugcagcggcuga

SEQ ID NO: 299052 - RNA, 32 nt, Homo Sapiens
cagagccucacagaccccaccagcuacuaccu

SEQ ID NO: 299053 - RNA, 32 nt, Homo Sapiens
uuuucaauuguuaaauauguuuuauucaggug

SEQ ID NO: 299054 - RNA, 32 nt, Homo Sapiens
acacuguuccagcccaucugucucacccucuc

SEQ ID NO: 299055 - RNA, 32 nt, Homo Sapiens
agaggacacuguauuuguccucucuggagaac

SEQ ID NO: 299056 - RNA, 32 nt, Homo Sapiens
cauggagaguuggucaggcugcugcugggaga

SEQ ID NO: 299057 - RNA, 32 nt, Homo Sapiens
uuuguuuguaaaaauucugaauugaaacuuug

SEQ ID NO: 299058 - RNA, 32 nt, Homo Sapiens
cagugcccaucccagcccauuucugcccacca

SEQ ID NO: 299059 - RNA, 32 nt, Homo Sapiens
cggagcgaacccgagagcguggagcgggcugg

SEQ ID NO: 299060 - RNA, 32 nt, Homo Sapiens
auuucuuccuguucucuuuuucuagcuuccac

SEQ ID NO: 299061 - RNA, 32 nt, Homo Sapiens
aacacccugggaagaggccgauuuggcggaca

SEQ ID NO: 299062 - RNA, 32 nt, Homo Sapiens
gagaggcuugcugcggacucaggcuggcgaau

SEQ ID NO: 299063 - RNA, 32 nt, Homo Sapiens
gcugggaagggagaugucagguggggugaugg

SEQ ID NO: 299064 - RNA, 32 nt, Homo Sapiens
gcuuuccauagucucaacuguauugugucauc

SEQ ID NO: 299065 - RNA, 32 nt, Homo Sapiens
aucagccauagucuggccucaggcccuggcau

SEQ ID NO: 299066 - RNA, 32 nt, Homo Sapiens
caguucccacgugcgcaacucugcccuuggcu

SEQ ID NO: 299067 - RNA, 32 nt, Homo Sapiens
gaguggccuucuuugaagagcucuacagguga

SEQ ID NO: 299068 - RNA, 32 nt, Homo Sapiens
aaauuacaucuucuuuuaauguaucuuuguuc

SEQ ID NO: 299069 - RNA, 32 nt, Homo Sapiens
aaaggugguucaauuugaguuuguuuucauga

SEQ ID NO: 299070 - RNA, 32 nt, Homo Sapiens
uagagucagagguuccgguugagaucaaguug

SEQ ID NO: 299071 - RNA, 32 nt, Homo Sapiens
ucucggaguuaaggcgaauuguucaagaacac

SEQ ID NO: 299072 - RNA, 32 nt, Homo Sapiens
gcagcaucaaggcuggccgccgcuccuccuac

SEQ ID NO: 299073 - RNA, 32 nt, Homo Sapiens
caauuuacugaaugauuccuagaugccuggcc

SEQ ID NO: 299074 - RNA, 32 nt, Homo Sapiens
gaucgagaaaucaaaugaaguucuccugacuc

SEQ ID NO: 299075 - RNA, 32 nt, Homo Sapiens
aggaugcaggacuugggguugaggugagucau

SEQ ID NO: 299076 - RNA, 32 nt, Homo Sapiens
aagcauguaaaauaaacuggucuucaugaaaa

SEQ ID NO: 299077 - RNA, 32 nt, Homo Sapiens
agaggaggcagacugaggcagcaggccccgcc

SEQ ID NO: 299078 - RNA, 32 nt, Homo Sapiens
ggugaggaauugggaggaugacacuuagucca

SEQ ID NO: 299079 - RNA, 32 nt, Homo Sapiens
cccgaccccgccauggccccccggccccuccu

SEQ ID NO: 299080 - RNA, 32 nt, Homo Sapiens
gucacacucccucucugcucuccugucccuug

SEQ ID NO: 299081 - RNA, 32 nt, Homo Sapiens
cccaggaccugccuagugccaguuugguaguc

SEQ ID NO: 299082 - RNA, 32 nt, Homo Sapiens
agagguggcgccuccccggcccgggacgguag

SEQ ID NO: 299083 - RNA, 32 nt, Homo Sapiens
cccguguccagaugaaugcaguccauguuuau

SEQ ID NO: 299084 - RNA, 32 nt, Homo Sapiens
guuaaagaaugggaaacaucuucacuuguuuu

SEQ ID NO: 299085 - RNA, 32 nt, Homo Sapiens
cauggcuucccggccccauggggaccccucuc

SEQ ID NO: 299086 - RNA, 32 nt, Homo Sapiens
aaaugagagccugggcuuggugucgagggagc

SEQ ID NO: 299087 - RNA, 32 nt, Homo Sapiens
cuguguuccugcuuccucuccuuugcugaaac

SEQ ID NO: 299088 - RNA, 32 nt, Homo Sapiens
caaguacccugcuccagagcgccugcaggaau

SEQ ID NO: 299089 - RNA, 32 nt, Homo Sapiens
cugauuuaaagagaaggugauauuuuaauugu

SEQ ID NO: 299090 - RNA, 32 nt, Homo Sapiens
aaugaagcugugaacuccauggcugagcuaug

SEQ ID NO: 299091 - RNA, 32 nt, Homo Sapiens
aagcugcagcuggucuguuuccaggucagaaa

SEQ ID NO: 299092 - RNA, 32 nt, Homo Sapiens
uuugucugacaguaguauaaagaauaaugaua

SEQ ID NO: 299093 - RNA, 32 nt, Homo Sapiens
uuuagacuaccagcaaagauuaaagcaugaaa

SEQ ID NO: 299094 - RNA, 32 nt, Homo Sapiens
uuuuggugcgggagcguuuugguuggggacag

SEQ ID NO: 299095 - RNA, 32 nt, Homo Sapiens
uuccuucuugaagauuaagugauugauguuaa

SEQ ID NO: 299096 - RNA, 32 nt, Homo Sapiens
ucacugggcuccugggccgcucccgggccagc

SEQ ID NO: 299097 - RNA, 32 nt, Homo Sapiens
agagacagaagccccagccccagaaccuggag

SEQ ID NO: 299098 - RNA, 32 nt, Homo Sapiens
cucaaaugaaugaaaggaggauguuaaaguuc

SEQ ID NO: 299099 - RNA, 32 nt, Homo Sapiens
aaccuuccaaaaauuacuuaguauugcaaagu

SEQ ID NO: 299100 - RNA, 32 nt, Homo Sapiens
gugggggaugcauccagagaaaauugcuucuu

SEQ ID NO: 299101 - RNA, 32 nt, Homo Sapiens
auuauggagagccccgcgacucucauggcaua

SEQ ID NO: 299102 - RNA, 32 nt, Homo Sapiens
cugcccuaucagaugcugcugcaugcggccac

SEQ ID NO: 299103 - RNA, 32 nt, Homo Sapiens
auauuaggcagaugggauuggcuggucugugc

SEQ ID NO: 299104 - RNA, 32 nt, Homo Sapiens
agcccccggggcucagcccgcucagagacaug

SEQ ID NO: 299105 - RNA, 32 nt, Homo Sapiens
uaagacagagucaggagaacuguuccuugugg

SEQ ID NO: 299106 - RNA, 32 nt, Homo Sapiens
acauaaauauucaaaucagcuuaucauacaug

SEQ ID NO: 299107 - RNA, 32 nt, Homo Sapiens
uaucuuuucuauuucaaguuaauuacaaacag

SEQ ID NO: 299108 - RNA, 32 nt, Homo Sapiens
guggcccugagcauggcaagggggucugucuc

SEQ ID NO: 299109 - RNA, 32 nt, Homo Sapiens
agacaaggaaacugaggccagagggaggagag

SEQ ID NO: 299110 - RNA, 32 nt, Homo Sapiens
ugggcugcacucuacccuguacacugccuugu

SEQ ID NO: 299111 - RNA, 32 nt, Homo Sapiens
ccacgugaucaguuguaagauuacaaugcugc

SEQ ID NO: 299112 - RNA, 32 nt, Homo Sapiens
ccuuuggugcucccuccuccccauguaccauu

SEQ ID NO: 299113 - RNA, 32 nt, Homo Sapiens
cucugagggcaaacugcugaaaaacaaagggu

SEQ ID NO: 299114 - RNA, 32 nt, Homo Sapiens
agacugaagagggacaacuuuuuccuaugagg

SEQ ID NO: 299115 - RNA, 32 nt, Homo Sapiens
aaaaacaagcagccuuuugcuugguuggaauc

SEQ ID NO: 299116 - RNA, 32 nt, Homo Sapiens
cugaggaguccuguguucccccgcaaggagca

SEQ ID NO: 299117 - RNA, 32 nt, Homo Sapiens
gaagauggaaacaaaaucuauuauuaugcuac

SEQ ID NO: 299118 - RNA, 32 nt, Homo Sapiens
cugaccucacuacuccccugcucacagcccuc

SEQ ID NO: 299119 - RNA, 32 nt, Homo Sapiens
gccguguccauauaaagcgggucggcggcccc

SEQ ID NO: 299120 - RNA, 32 nt, Homo Sapiens
cccucacugcccgugggcacagugaggagacc

SEQ ID NO: 299121 - RNA, 32 nt, Homo Sapiens
ggaucccucuucccuucccuuuugcuccucua

SEQ ID NO: 299122 - RNA, 32 nt, Homo Sapiens
gaccucgcguccucucgauugcucucucgccu

SEQ ID NO: 299123 - RNA, 32 nt, Homo Sapiens
gcguuccguggcgcccccuggagggaggaagg

SEQ ID NO: 299124 - RNA, 32 nt, Homo Sapiens
ucccucggccuggcccgcuaugcccugcacac

SEQ ID NO: 299125 - RNA, 32 nt, Homo Sapiens
cgucucccgccuucuccgcagccccgcaggcc

SEQ ID NO: 299126 - RNA, 32 nt, Homo Sapiens
cuggaacuauuguauagaagauaauaugauug

SEQ ID NO: 299127 - RNA, 32 nt, Homo Sapiens
guuucaaaugcuugcuugcuuuccuuguuuuc

SEQ ID NO: 299128 - RNA, 32 nt, Homo Sapiens
gcaccacagacagauagcaagaagggaaagac

SEQ ID NO: 299129 - RNA, 32 nt, Homo Sapiens
uuacucaaagauuucuccuggcuguuguccag

SEQ ID NO: 299130 - RNA, 32 nt, Homo Sapiens
uuaggacugccaggugaugcauguguggcgag

SEQ ID NO: 299131 - RNA, 32 nt, Homo Sapiens
auacaucugcuucuaacauaucgcauguuuau

SEQ ID NO: 299132 - RNA, 32 nt, Homo Sapiens
ugcaugaaacaaaauagcaagagaggguuaua

SEQ ID NO: 299133 - RNA, 32 nt, Homo Sapiens
gauuuuaugcuguugucauuuuucucagcauc

SEQ ID NO: 299134 - RNA, 32 nt, Homo Sapiens
uaaaacuucucuauguuucuguaaugaacaca

SEQ ID NO: 299135 - RNA, 32 nt, Homo Sapiens
gaauuauuuucagaaauggaucuuugaauagc

SEQ ID NO: 299136 - RNA, 32 nt, Homo Sapiens
gggauaaucuagaggcaggauuuuggacauug

SEQ ID NO: 299137 - RNA, 32 nt, Homo Sapiens
ggagaaaguauuuaauaaaaccuguuaauuuu

SEQ ID NO: 299138 - RNA, 32 nt, Homo Sapiens
acuguuuguauggcagcccauguucucuaaug

SEQ ID NO: 299139 - RNA, 32 nt, Homo Sapiens
aauagcaguguuuccuggaggacccccauuug

SEQ ID NO: 299140 - RNA, 32 nt, Homo Sapiens
ugacugggcuaccucagcauacauuucugcca

SEQ ID NO: 299141 - RNA, 32 nt, Homo Sapiens
ucugguuuauaacuacuaaaaauaucauaggg

SEQ ID NO: 299142 - RNA, 32 nt, Homo Sapiens
guuuuggauuuuucuuuugucuuauuuuaaaa

SEQ ID NO: 299143 - RNA, 32 nt, Homo Sapiens
aggccaaagaaccuggagucugauguccaagg

SEQ ID NO: 299144 - RNA, 32 nt, Homo Sapiens
acucuaagaacaaauggaugaaugaauaucca

SEQ ID NO: 299145 - RNA, 32 nt, Homo Sapiens
agaauguguaaguuaaaucacuuuggcaaaua

SEQ ID NO: 299146 - RNA, 32 nt, Homo Sapiens
cucuauggcucgccccccggcgcggggcuccg

SEQ ID NO: 299147 - RNA, 32 nt, Homo Sapiens
gccguuccggccaggaguuugccgacugcaga

SEQ ID NO: 299148 - RNA, 32 nt, Homo Sapiens
cguuuaaucugugcaaugcacguaggaguuua

SEQ ID NO: 299149 - RNA, 32 nt, Homo Sapiens
ccuaacacuagcagagauuaaucacuacauua

SEQ ID NO: 299150 - RNA, 32 nt, Homo Sapiens
aaagggguucgugacuuguccaaacucacaca

SEQ ID NO: 299151 - RNA, 32 nt, Homo Sapiens
ugucccaaaaagauguauaagaauguacuaau

SEQ ID NO: 299152 - RNA, 32 nt, Homo Sapiens
uggugcugauggagggcgggagauggagcuga

SEQ ID NO: 299153 - RNA, 32 nt, Homo Sapiens
accauggccugccugcccugccuccgucccaa

SEQ ID NO: 299154 - RNA, 32 nt, Homo Sapiens
cugccugggccucugugccagccccgggggcc

SEQ ID NO: 299155 - RNA, 32 nt, Homo Sapiens
ugauccuuucccuccucucacccuccagugug

SEQ ID NO: 299156 - RNA, 32 nt, Homo Sapiens
uaggucacagcagaagcagccaaaauggaucc

SEQ ID NO: 299157 - RNA, 32 nt, Homo Sapiens
ggugugaggaggaggcucccgaggggaagggg

SEQ ID NO: 299158 - RNA, 32 nt, Homo Sapiens
gcggcugccccucggcgggcgccccgccaugu

SEQ ID NO: 299159 - RNA, 32 nt, Homo Sapiens
gggucaugccgcuuauugaaaccaucagcagg

SEQ ID NO: 299160 - RNA, 32 nt, Homo Sapiens
guuucaacacaggagacuuuaagcaaguucca

SEQ ID NO: 299161 - RNA, 32 nt, Homo Sapiens
accccacuuguuugcaagacgucugcaugucc

SEQ ID NO: 299162 - RNA, 32 nt, Homo Sapiens
acucagccaaggacuuccugugggucccaggu

SEQ ID NO: 299163 - RNA, 32 nt, Homo Sapiens
uguguggucauaucuagucacuugcuuucuac

SEQ ID NO: 299164 - RNA, 32 nt, Homo Sapiens
agccuccagggcccgggcgcguuugcaggcca

SEQ ID NO: 299165 - RNA, 32 nt, Homo Sapiens
acuaaugagccugggaggguggcagggaggag

SEQ ID NO: 299166 - RNA, 32 nt, Homo Sapiens
auccauacagaaaaugaauguaauguggauaa

SEQ ID NO: 299167 - RNA, 30 nt, Homo Sapiens
ugaucugucuguggcaaaaguuuaaucaga

SEQ ID NO: 299168 - RNA, 32 nt, Homo Sapiens
uuauguaucuucugcuuccugacagcuucuuu

SEQ ID NO: 299169 - RNA, 32 nt, Homo Sapiens
ugguugacuuugcauuaaaaacguugucacau

SEQ ID NO: 299170 - RNA, 32 nt, Homo Sapiens
gcagcgcugccuccgagaccgagagugggugg

SEQ ID NO: 299171 - RNA, 32 nt, Homo Sapiens
acuggcugccagcuauuuuuacuagaacacag

SEQ ID NO: 299172 - RNA, 32 nt, Homo Sapiens
gccacgcgcuccacgccgcggcccucccauuu

SEQ ID NO: 299173 - RNA, 32 nt, Homo Sapiens
ugcggcgcgggaaguuuggauccugguuccgu

SEQ ID NO: 299174 - RNA, 32 nt, Homo Sapiens
guuugcugcacaguucaugacucuguaggcac

SEQ ID NO: 299175 - RNA, 32 nt, Homo Sapiens
ucuguugauuuuuucuuuugcuuuauggguuu

SEQ ID NO: 299176 - RNA, 32 nt, Homo Sapiens
uucauacguucuauuuuuuucuugugauuuuu

SEQ ID NO: 299177 - RNA, 32 nt, Homo Sapiens
cauuuucauaaaauaugaagggauaacuacaa

SEQ ID NO: 299178 - RNA, 32 nt, Homo Sapiens
aaccaccccagcaaaugucuuggaaagaaaaa

SEQ ID NO: 299179 - RNA, 32 nt, Homo Sapiens
gugggugaaaggggcccaacccugcccacuuc

SEQ ID NO: 299180 - RNA, 32 nt, Homo Sapiens
cugccacccuuccacacacacacacacacaca

SEQ ID NO: 299181 - RNA, 29 nt, Homo Sapiens
uggauuccggguagcagaggcagcgccgc

SEQ ID NO: 299182 - RNA, 32 nt, Homo Sapiens
gucuaagaaauaguuauuugcauugugaaggg

SEQ ID NO: 299183 - RNA, 32 nt, Homo Sapiens
gcauacucaaauuuauacaaccuuuccuuuau

SEQ ID NO: 299184 - RNA, 27 nt, Homo Sapiens
uaggguaaauuaaaacuuugcacauua

SEQ ID NO: 299185 - RNA, 32 nt, Homo Sapiens
uacuuggaucuucccggcgugugugugccuua

SEQ ID NO: 299186 - RNA, 32 nt, Homo Sapiens
agaagaguuacagccgugaaaauuacucagca

SEQ ID NO: 299187 - RNA, 32 nt, Homo Sapiens
gugcagccaaacuuaaggcaccggcaaguguu

SEQ ID NO: 299188 - RNA, 32 nt, Homo Sapiens
auucauguuucauggcuugugacuguccccaa

SEQ ID NO: 299189 - RNA, 32 nt, Homo Sapiens
ggacccagcagcuacaccccuacaggcuucca

SEQ ID NO: 299190 - RNA, 32 nt, Homo Sapiens
caguucgguggcggcccggggcggauuucaug

SEQ ID NO: 299191 - RNA, 32 nt, Homo Sapiens
auugcucugagcucagccaaguaggagaggcu

SEQ ID NO: 299192 - RNA, 32 nt, Homo Sapiens
uccgcgcaccggccaccgccagucuccgagcc

SEQ ID NO: 299193 - RNA, 32 nt, Homo Sapiens
ucugaagagaaggccagaagauacaaagacag

SEQ ID NO: 299194 - RNA, 32 nt, Homo Sapiens
caaaaccuuuuggguuucauuaauuguccuug

SEQ ID NO: 299195 - RNA, 28 nt, Homo Sapiens
aggacccggcccccgaggugcggacgag

SEQ ID NO: 299196 - RNA, 30 nt, Homo Sapiens
aucuuucaggaaagacggauugcauuagaa

SEQ ID NO: 299197 - RNA, 31 nt, Homo Sapiens
gggaagugaugcugccugcccacgagcccug

SEQ ID NO: 299198 - RNA, 32 nt, Homo Sapiens
gcgcgacgggcgcgggggucgcugcuccugag

SEQ ID NO: 299199 - RNA, 32 nt, Homo Sapiens
aggaauugaaggaguuggucuccaccuagaga

SEQ ID NO: 299200 - RNA, 32 nt, Homo Sapiens
uccugccucagcccccugaguaccucagauga

SEQ ID NO: 299201 - RNA, 32 nt, Homo Sapiens
ugcauuuccuuccucauugcuuuuacccaguc

SEQ ID NO: 299202 - RNA, 32 nt, Homo Sapiens
uuaaauaaauugugcaugauggaauaauagga

SEQ ID NO: 299203 - RNA, 32 nt, Homo Sapiens
uaauccuguauauuaugguguaaugcacaauu

SEQ ID NO: 299204 - RNA, 32 nt, Homo Sapiens
aggccgccgagacccucaggggcugcggcccu

SEQ ID NO: 299205 - RNA, 32 nt, Homo Sapiens
gugguaaaaaagacaaaauauaauucaaacau

SEQ ID NO: 299206 - RNA, 32 nt, Homo Sapiens
gagauuuggccauguugcccaggcuggucucg

SEQ ID NO: 299207 - RNA, 32 nt, Homo Sapiens
acucuguaagaaauaaauuugcuaacaaucau

SEQ ID NO: 299208 - RNA, 32 nt, Homo Sapiens
cucccuuccaacaacaaccagcuccaacugac

SEQ ID NO: 299209 - RNA, 32 nt, Homo Sapiens
ccgggcuucccccaagaccacgcuuagcggug

SEQ ID NO: 299210 - RNA, 32 nt, Homo Sapiens
uuaagcugccagccagagagggagucauuuca

SEQ ID NO: 299211 - RNA, 32 nt, Homo Sapiens
acuuucuacucauuuuaaugauuguuuaaagg

SEQ ID NO: 299212 - RNA, 32 nt, Homo Sapiens
gccccgcgcuucagcccuccccgcacagccua

SEQ ID NO: 299213 - RNA, 32 nt, Homo Sapiens
gcauauacuucuguuuauaaaaguaucaguuu

SEQ ID NO: 299214 - RNA, 32 nt, Homo Sapiens
auuuuacugcacaaugugaaguuuacauuuua

SEQ ID NO: 299215 - RNA, 32 nt, Homo Sapiens
auucugcauacuuaucaugacuucaagcaucc

SEQ ID NO: 299216 - RNA, 32 nt, Homo Sapiens
ggcccugcccuucuccguuccagccuggacag

SEQ ID NO: 299217 - RNA, 32 nt, Homo Sapiens
cucaaagaaaagacauucagguguuucucaac

SEQ ID NO: 299218 - RNA, 32 nt, Homo Sapiens
caagcaagugaaauaaacaaugauuugcuuuu

SEQ ID NO: 299219 - RNA, 32 nt, Homo Sapiens
aaaccaauccucagccacuuugguguuuucuc

SEQ ID NO: 299220 - RNA, 32 nt, Homo Sapiens
gccucuccccgcccggcccucccucagcgcgc

SEQ ID NO: 299221 - RNA, 32 nt, Homo Sapiens
gaacuaagauuuacuuuuuuuuccauagcugg

SEQ ID NO: 299222 - RNA, 32 nt, Homo Sapiens
uugggagggcuuagagcuggauaauauaaguu

SEQ ID NO: 299223 - RNA, 32 nt, Homo Sapiens
guuuugaugaggaaacauuugccacugaggag

SEQ ID NO: 299224 - RNA, 32 nt, Homo Sapiens
cucgaucagguggucccucacucccugaccca

SEQ ID NO: 299225 - RNA, 32 nt, Homo Sapiens
gcagccugucuccuaggcacuccccacuucaa

SEQ ID NO: 299226 - RNA, 32 nt, Homo Sapiens
gugaggaagcaugguggggucuccuccacagg

SEQ ID NO: 299227 - RNA, 32 nt, Homo Sapiens
caccaguagguggucaugguccaguuccuugc

SEQ ID NO: 299228 - RNA, 32 nt, Homo Sapiens
caugcacaccucccggccccuccucagcagcg

SEQ ID NO: 299229 - RNA, 32 nt, Homo Sapiens
ugcuggcccggcgcggccccagccuuuccccg

SEQ ID NO: 299230 - RNA, 32 nt, Homo Sapiens
uucaggaagcauaaagcaauugugaaauacag

SEQ ID NO: 299231 - RNA, 32 nt, Homo Sapiens
ugccauugguucagcacuguccugcugcuccc

SEQ ID NO: 299232 - RNA, 32 nt, Homo Sapiens
uauaauguauacuuuuacuuugaaauacuaaa

SEQ ID NO: 299233 - RNA, 32 nt, Homo Sapiens
gggcucgggaucugcagcaucuauguggauca

SEQ ID NO: 299234 - RNA, 32 nt, Homo Sapiens
ggaguaaaacgaagguguuuauccugugagcc

SEQ ID NO: 299235 - RNA, 32 nt, Homo Sapiens
ccucccacagacaacuaagugcuuauucaaag

SEQ ID NO: 299236 - RNA, 32 nt, Homo Sapiens
ucucagguuuguucugagacaccugaugaccu

SEQ ID NO: 299237 - RNA, 32 nt, Homo Sapiens
augguuuucagaugaaauuguuccaucucaga

SEQ ID NO: 299238 - RNA, 32 nt, Homo Sapiens
uagaauuuauuacuccagaacagaaagaccuu

SEQ ID NO: 299239 - RNA, 32 nt, Homo Sapiens
gucuugucuacccacccucccucccccauccu

SEQ ID NO: 299240 - RNA, 32 nt, Homo Sapiens
aaaaaugugaauaugauguggggaugggccuc

SEQ ID NO: 299241 - RNA, 32 nt, Homo Sapiens
aaauaaauugguucuacgcuggaauuagcugu

SEQ ID NO: 299242 - RNA, 32 nt, Homo Sapiens
ugguucacauuuauuuuuaacaucaggauaug

SEQ ID NO: 299243 - RNA, 32 nt, Homo Sapiens
acacagagcugcccaggcuuucuggaagcuuc

SEQ ID NO: 299244 - RNA, 32 nt, Homo Sapiens
gcuugagaagaggagccaaaacaucauaguug

SEQ ID NO: 299245 - RNA, 32 nt, Homo Sapiens
cagguuagcaauugggaauggcugggaggggg

SEQ ID NO: 299246 - RNA, 32 nt, Homo Sapiens
cugccaugcagcugagagccaagcccugcugc

SEQ ID NO: 299247 - RNA, 32 nt, Homo Sapiens
caccugagccccacugccugucccuccccauc

SEQ ID NO: 299248 - RNA, 30 nt, Homo Sapiens
ccugggcaauaggguaagauccugucucug

SEQ ID NO: 299249 - RNA, 32 nt, Homo Sapiens
aaacauagccuccuuccccacccagcuggcca

SEQ ID NO: 299250 - RNA, 32 nt, Homo Sapiens
gguacuugggaauccggaggcugggguuuuag

SEQ ID NO: 299251 - RNA, 32 nt, Homo Sapiens
cuuagaaguauuuuguuuuuggaugugugaau

SEQ ID NO: 299252 - RNA, 32 nt, Homo Sapiens
agauuucgcagcccccuucucaucuccaccca

SEQ ID NO: 299253 - RNA, 32 nt, Homo Sapiens
aaugguggcuaaaaggaacacuuuuuguguga

SEQ ID NO: 299254 - RNA, 32 nt, Homo Sapiens
guggggguacuagaagcugaucugauuggucc

SEQ ID NO: 299255 - RNA, 32 nt, Homo Sapiens
acaaagguggcacuuuuuuauguuaaccuuaa

SEQ ID NO: 299256 - RNA, 32 nt, Homo Sapiens
ugucucauggagauuuuuguuuucuguuccca

SEQ ID NO: 299257 - RNA, 32 nt, Homo Sapiens
auugaaucaugggggcaguuucccucaugcua

SEQ ID NO: 299258 - RNA, 32 nt, Homo Sapiens
aauuucuaacuuucagaaaaugccauacucug

SEQ ID NO: 299259 - RNA, 32 nt, Homo Sapiens
guggaggaggaguggccggaugccccacacac

SEQ ID NO: 299260 - RNA, 32 nt, Homo Sapiens
gcggaggaggaagaggguagacaggggcgacc

SEQ ID NO: 299261 - RNA, 32 nt, Homo Sapiens
ccacgaugcucugauuuaauucuagaaacaau

SEQ ID NO: 299262 - RNA, 32 nt, Homo Sapiens
caucagacgccaacuggccuucugcccugcag

SEQ ID NO: 299263 - RNA, 32 nt, Homo Sapiens
aacuuggccccggacuguggggccccaccugu

SEQ ID NO: 299264 - RNA, 32 nt, Homo Sapiens
ugugcucuccccuguuuacccgauguauggaa

SEQ ID NO: 299265 - RNA, 32 nt, Homo Sapiens
ggggccgggacaggggugacagacacagagug

SEQ ID NO: 299266 - RNA, 32 nt, Homo Sapiens
aucugugcucuuggugaggagagcaagaggaa

SEQ ID NO: 299267 - RNA, 32 nt, Homo Sapiens
uaacucacaaauaacauaaaauauugggcgcu

SEQ ID NO: 299268 - RNA, 32 nt, Homo Sapiens
gcuauuguguggaugccgcgcgugucuucucu

SEQ ID NO: 299269 - RNA, 32 nt, Homo Sapiens
aggccaaagaccccaagcugcccgccagcucu

SEQ ID NO: 299270 - RNA, 32 nt, Homo Sapiens
uuuuuucuguuuucuuuuuuuccccuuucccc

SEQ ID NO: 299271 - RNA, 32 nt, Homo Sapiens
gucccaggaaauguauguguuuuuaaacccuu

SEQ ID NO: 299272 - RNA, 32 nt, Homo Sapiens
gacauguguaaaccucucucacaaugagcucu

SEQ ID NO: 299273 - RNA, 32 nt, Homo Sapiens
gugguguacaccuggacuguggugggcuccga

SEQ ID NO: 299274 - RNA, 32 nt, Homo Sapiens
ggcccaguucuuccucccagcugggucuacag

SEQ ID NO: 299275 - RNA, 32 nt, Homo Sapiens
cacacuaaaugaaucucuugggugcaguuguu

SEQ ID NO: 299276 - RNA, 32 nt, Homo Sapiens
aggagguacuuugucccaaaaagauguauaag

SEQ ID NO: 299277 - RNA, 32 nt, Homo Sapiens
cauacuccccggugcccgccucgugacgugcc

SEQ ID NO: 299278 - RNA, 32 nt, Homo Sapiens
aagugugaacaaacaagcaacaguuuaugacc

SEQ ID NO: 299279 - RNA, 32 nt, Homo Sapiens
uucuuuuucuuuccuuuuuuuuuuuuuuguug

SEQ ID NO: 299280 - RNA, 32 nt, Homo Sapiens
ugaggauccagccagugaccacggccacuccc

SEQ ID NO: 299281 - RNA, 32 nt, Homo Sapiens
gacagcaaggcagacaguggcuggcagggggg

SEQ ID NO: 299282 - RNA, 32 nt, Homo Sapiens
ucacgccucuucugcccuucaucacugugauc

SEQ ID NO: 299283 - RNA, 32 nt, Homo Sapiens
gcugaggcagaaaaaacagagcaggagaagac

SEQ ID NO: 299284 - RNA, 32 nt, Homo Sapiens
aauaccugcaaaguacaagaagcuacaucucu

SEQ ID NO: 299285 - RNA, 32 nt, Homo Sapiens
accgacugcgcugagcugcuuauuuauugaaa

SEQ ID NO: 299286 - RNA, 32 nt, Homo Sapiens
agcaggggcagggcuggcgcugcggcgggaga

SEQ ID NO: 299287 - RNA, 32 nt, Homo Sapiens
uggccacuuuccccgcagcugcagggccucgc

SEQ ID NO: 299288 - RNA, 32 nt, Homo Sapiens
cccgcccgggcuggaggcgccgagcaccgagc

SEQ ID NO: 299289 - RNA, 32 nt, Homo Sapiens
cuauuuuuaauauuuuugggaaaauuuuucca

SEQ ID NO: 299290 - RNA, 32 nt, Homo Sapiens
aucuggcccucccugugugacccgccuucgag

SEQ ID NO: 299291 - RNA, 32 nt, Homo Sapiens
uuucgauaauuaaaagaaucauuugaaauauu

SEQ ID NO: 299292 - RNA, 32 nt, Homo Sapiens
uuuggagacggaauaaauguuuucucauucag

SEQ ID NO: 299293 - RNA, 32 nt, Homo Sapiens
ccggggccgagggcggcggggaccgcgguuug

SEQ ID NO: 299294 - RNA, 32 nt, Homo Sapiens
aucuaaaauaaccaauaauccaaaaaaguuca

SEQ ID NO: 299295 - RNA, 32 nt, Homo Sapiens
aggaucuggaaccucucccaccccuccugcag

SEQ ID NO: 299296 - RNA, 32 nt, Homo Sapiens
ucaccgagagcauaucuaaaaaacacucugca

SEQ ID NO: 299297 - RNA, 32 nt, Homo Sapiens
auagcauggaugcagaauaagcaguugggaga

SEQ ID NO: 299298 - RNA, 32 nt, Homo Sapiens
aacacugacagcugugccuagccccggaugcc

SEQ ID NO: 299299 - RNA, 32 nt, Homo Sapiens
gguacauggaaucucaauuuaauuguaaaagu

SEQ ID NO: 299300 - RNA, 32 nt, Homo Sapiens
guuaucugcuaaccgaaaucuaccacagcaga

SEQ ID NO: 299301 - RNA, 32 nt, Homo Sapiens
ggccacuuuacaaaggaaauuugaauaaaugg

SEQ ID NO: 299302 - RNA, 32 nt, Homo Sapiens
uccuuguguaaauaaacuuguuucuggcagug

SEQ ID NO: 299303 - RNA, 32 nt, Homo Sapiens
caaaaagccucccagacacaagacaucuuaac

SEQ ID NO: 299304 - RNA, 32 nt, Homo Sapiens
cuggagagcugugugagcuggaugcugaugca

SEQ ID NO: 299305 - RNA, 32 nt, Homo Sapiens
cgcagcccgagcucccggacccggaagaagcg

SEQ ID NO: 299306 - RNA, 32 nt, Homo Sapiens
augggcccagccccacauggccugcagacagu

SEQ ID NO: 299307 - RNA, 32 nt, Homo Sapiens
auaaagagaaacaguacaaagagagaaauuuu

SEQ ID NO: 299308 - RNA, 30 nt, Homo Sapiens
auggaauagggcccugccuugccuugccuu

SEQ ID NO: 299309 - RNA, 32 nt, Homo Sapiens
gggggccaucaccgccuguguauauaacguuu

SEQ ID NO: 299310 - RNA, 32 nt, Homo Sapiens
uguuuaaagaguuuaaauuuugaaggcguuug

SEQ ID NO: 299311 - RNA, 32 nt, Homo Sapiens
gagcauccaaccccuugaacucaaaccugucg

SEQ ID NO: 299312 - RNA, 32 nt, Homo Sapiens
ugaaaugacucagaggacaacaaagucuaacu

SEQ ID NO: 299313 - RNA, 32 nt, Homo Sapiens
cagcuucggaagcuacccuaggaucucgucaa

SEQ ID NO: 299314 - RNA, 32 nt, Homo Sapiens
gauaaucaagacaagaugggaggagccuuuuu

SEQ ID NO: 299315 - RNA, 32 nt, Homo Sapiens
gacgcuagcccgcggcgccgcgacgucugcac

SEQ ID NO: 299316 - RNA, 32 nt, Homo Sapiens
uggaauauaaacuugguuuacuguauagugug

SEQ ID NO: 299317 - RNA, 32 nt, Homo Sapiens
gcacgacggcccagcccuggccccggcugcgg

SEQ ID NO: 299318 - RNA, 32 nt, Homo Sapiens
auauauuuaaaauaaauauauacaguaaauau

SEQ ID NO: 299319 - RNA, 32 nt, Homo Sapiens
aacccucuccuaaaagugacugucacugaccu

SEQ ID NO: 299320 - RNA, 32 nt, Homo Sapiens
gcgucuucccggucuccuuucccggccgcaca

SEQ ID NO: 299321 - RNA, 32 nt, Homo Sapiens
uuguagcuuuucuuaacacaaaagcaccccuu

SEQ ID NO: 299322 - RNA, 32 nt, Homo Sapiens
uuucucucuggccucuccauccuccagacaau

SEQ ID NO: 299323 - RNA, 32 nt, Homo Sapiens
aaaggaggcucacuugaauccagcucagugcu

SEQ ID NO: 299324 - RNA, 32 nt, Homo Sapiens
uguuguuggauauaaauaggaauuuuacacau

SEQ ID NO: 299325 - RNA, 32 nt, Homo Sapiens
aagaugguaggcaggauucuuuccaagaaccc

SEQ ID NO: 299326 - RNA, 32 nt, Homo Sapiens
cggacuguccccagcccuggccucuccaugca

SEQ ID NO: 299327 - RNA, 32 nt, Homo Sapiens
agcacuuaugcucugugacaguauuguguguc

SEQ ID NO: 299328 - RNA, 32 nt, Homo Sapiens
uuucugugcucccuccucccucgcaccaaacu

SEQ ID NO: 299329 - RNA, 32 nt, Homo Sapiens
cuauguuuauagaacauggugaagauacaagg

SEQ ID NO: 299330 - RNA, 32 nt, Homo Sapiens
cagucugggcgacaggagcaagacucugucuc

SEQ ID NO: 299331 - RNA, 32 nt, Homo Sapiens
ccaggcucccauauguaccccaucccccauac

SEQ ID NO: 299332 - RNA, 32 nt, Homo Sapiens
cucaaaagucacauggcaucacuuccugcaca

SEQ ID NO: 299333 - RNA, 32 nt, Homo Sapiens
uucgucuguauccgcagaguaguugcauguca

SEQ ID NO: 299334 - RNA, 32 nt, Homo Sapiens
ucaguaagcugaugguacaugcauuuucuaga

SEQ ID NO: 299335 - RNA, 32 nt, Homo Sapiens
aacacccgaagacaccgcaggagccugugaaa

SEQ ID NO: 299336 - RNA, 32 nt, Homo Sapiens
cccgcguggccgucucggcgccugcgugaccu

SEQ ID NO: 299337 - RNA, 32 nt, Homo Sapiens
uuuuccccaucccucugcacuuucuauuugaa

SEQ ID NO: 299338 - RNA, 32 nt, Homo Sapiens
gcagcaagaagcugcgggcccgcgaggcccug

SEQ ID NO: 299339 - RNA, 32 nt, Homo Sapiens
aaugggguuuggcaaugggaaggcaaacaaau

SEQ ID NO: 299340 - RNA, 32 nt, Homo Sapiens
ugcuaaugccagcagaugcuccuguccucucc

SEQ ID NO: 299341 - RNA, 30 nt, Homo Sapiens
ugauugugacacugaauaaaugucuuuuuu

SEQ ID NO: 299342 - RNA, 32 nt, Homo Sapiens
gccaggaggaacaugaggugaggcagggccug

SEQ ID NO: 299343 - RNA, 32 nt, Homo Sapiens
gccuuuaaucgugguucaaaucuuauucagca

SEQ ID NO: 299344 - RNA, 32 nt, Homo Sapiens
ugaaccugacuauggaaaagaugugacucccc

SEQ ID NO: 299345 - RNA, 32 nt, Homo Sapiens
aaauuuuaacuccggggagccauaaucugcaa

SEQ ID NO: 299346 - RNA, 32 nt, Homo Sapiens
gcaaggaaacaaugaccgauaaaacagagaag

SEQ ID NO: 299347 - RNA, 32 nt, Homo Sapiens
ugcucggcggccucguacucacgcugacuuca

SEQ ID NO: 299348 - RNA, 32 nt, Homo Sapiens
cuuggauagcagcuggauguuccugaaaccuc

SEQ ID NO: 299349 - RNA, 32 nt, Homo Sapiens
ccuggccccccguauccccagcccuuggcaac

SEQ ID NO: 299350 - RNA, 32 nt, Homo Sapiens
uuauuaauauuuuggcguucuuuuuggagagg

SEQ ID NO: 299351 - RNA, 32 nt, Homo Sapiens
gggagagcgggaauucuccuccccuuggagga

SEQ ID NO: 299352 - RNA, 32 nt, Homo Sapiens
cccgaaacgcggcgcggucgggccccuucguc

SEQ ID NO: 299353 - RNA, 32 nt, Homo Sapiens
ggcacuaauuauucuucagugccuagauuucc

SEQ ID NO: 299354 - RNA, 32 nt, Homo Sapiens
uacugauuucuuuuccuuuggguagauaccag

SEQ ID NO: 299355 - RNA, 32 nt, Homo Sapiens
gguucuagaguuucagaaacaaaagaaacaga

SEQ ID NO: 299356 - RNA, 32 nt, Homo Sapiens
uccccauagccagggauuguaucuaagcugcc

SEQ ID NO: 299357 - RNA, 32 nt, Homo Sapiens
gcaacugaaaacaaaaucuggaaguguggcug

SEQ ID NO: 299358 - RNA, 32 nt, Homo Sapiens
ccccgucacgggaugggcccccauugggguuc

SEQ ID NO: 299359 - RNA, 32 nt, Homo Sapiens
auuaggaaguuucaucagauuguauaaaauua

SEQ ID NO: 299360 - RNA, 32 nt, Homo Sapiens
auaaauuuauuggcauuuucuuucuccuaaaa

SEQ ID NO: 299361 - RNA, 32 nt, Homo Sapiens
cggggacagcuauauugacuugcccaggacgu

SEQ ID NO: 299362 - RNA, 31 nt, Homo Sapiens
ccgucaucccaccccaccugagucaccccaa

SEQ ID NO: 299363 - RNA, 32 nt, Homo Sapiens
gccucuucagaccaagcagaggggaauuugug

SEQ ID NO: 299364 - RNA, 32 nt, Homo Sapiens
gaaguucuguuguucauccuuaccucagcagg

SEQ ID NO: 299365 - RNA, 32 nt, Homo Sapiens
cucuuuaaucuucaguuuuaucuuuaaucucc

SEQ ID NO: 299366 - RNA, 30 nt, Homo Sapiens
gcgagauggacgggacagaaggcagugccg

SEQ ID NO: 299367 - RNA, 32 nt, Homo Sapiens
ugaagguuagggaaagcagaggggggcacuuu

SEQ ID NO: 299368 - RNA, 32 nt, Homo Sapiens
aauagcugugggcuuucuggaacugcuggcug

SEQ ID NO: 299369 - RNA, 32 nt, Homo Sapiens
gcuaauggggucagaccccaccccgucuaccc

SEQ ID NO: 299370 - RNA, 32 nt, Homo Sapiens
aggacagcugucuuugguuugcuuuccagcag

SEQ ID NO: 299371 - RNA, 32 nt, Homo Sapiens
gaaauccaguauaguuugccauuaauuuauug

SEQ ID NO: 299372 - RNA, 32 nt, Homo Sapiens
guccaggcggcauggagaaggacggccugugc

SEQ ID NO: 299373 - RNA, 32 nt, Homo Sapiens
auuuuauauucagguuuguccuugcccagccc

SEQ ID NO: 299374 - RNA, 32 nt, Homo Sapiens
gaagggugcgggagcgcacgcuacgggcagcg

SEQ ID NO: 299375 - RNA, 31 nt, Homo Sapiens
gcuacauaucuagccauucacagauguggau

SEQ ID NO: 299376 - RNA, 32 nt, Homo Sapiens
uggaggaucaaggaagcagagauggacgguga

SEQ ID NO: 299377 - RNA, 32 nt, Homo Sapiens
guucuguucuaucuaccccucauuucacgcuc

SEQ ID NO: 299378 - RNA, 32 nt, Homo Sapiens
ugugguuucuccacuccuccccgcucaugucc

SEQ ID NO: 299379 - RNA, 32 nt, Homo Sapiens
ccugccccgccagaccaccuccuuuccuuccc

SEQ ID NO: 299380 - RNA, 32 nt, Homo Sapiens
ggcucaagugauccuccugccucagccccuga

SEQ ID NO: 299381 - RNA, 32 nt, Homo Sapiens
uagacaaggccccugcccuuuuaggggagaca

SEQ ID NO: 299382 - RNA, 32 nt, Homo Sapiens
aucugugguugagguuuagacuacgggaggag

SEQ ID NO: 299383 - RNA, 32 nt, Homo Sapiens
auuuuuuaaggguauaugcaaaaacaggcacc

SEQ ID NO: 299384 - RNA, 32 nt, Homo Sapiens
uccccacucccuucuuuuucuauucuuuugug

SEQ ID NO: 299385 - RNA, 32 nt, Homo Sapiens
cacuggguggguugugaaggucacagucccug

SEQ ID NO: 299386 - RNA, 32 nt, Homo Sapiens
ggcgcgucggaacagggcgggaggcggcggcg

SEQ ID NO: 299387 - RNA, 32 nt, Homo Sapiens
cuuacccugccagcuuggcugugaucacagcc

SEQ ID NO: 299388 - RNA, 32 nt, Homo Sapiens
aauuaucucuuugcaccuaauuaucauggcau

SEQ ID NO: 299389 - RNA, 32 nt, Homo Sapiens
gugcugcauaaauaaucagggauucuguacgu

SEQ ID NO: 299390 - RNA, 32 nt, Homo Sapiens
guguuucugaugcagugguagcauugguucaa

SEQ ID NO: 299391 - RNA, 32 nt, Homo Sapiens
auuuuuaaugaaaugauuucauugauucauga

SEQ ID NO: 299392 - RNA, 32 nt, Homo Sapiens
caucauauuaauuuauauuuccaucuucagcc

SEQ ID NO: 299393 - RNA, 32 nt, Homo Sapiens
uaagaggcauacaauauguaauaaucacauua

SEQ ID NO: 299394 - RNA, 32 nt, Homo Sapiens
cggugccuccugcgcguccccccggaggggaa

SEQ ID NO: 299395 - RNA, 32 nt, Homo Sapiens
cucagcccuggccucuucgcuuuccagcacca

SEQ ID NO: 299396 - RNA, 32 nt, Homo Sapiens
gcggcuaggacacacaguggcuucgcucagcc

SEQ ID NO: 299397 - RNA, 32 nt, Homo Sapiens
cuuucccucauccuccuucucaaaaaggauca

SEQ ID NO: 299398 - RNA, 32 nt, Homo Sapiens
cuuaaaauauauuauuuuucccuauguguuga

SEQ ID NO: 299399 - RNA, 32 nt, Homo Sapiens
uccgguggugguuuuuguuuccuuuaacacau

SEQ ID NO: 299400 - RNA, 32 nt, Homo Sapiens
cuugguagcacuuuaaaaaauuuuuugauuaa

SEQ ID NO: 299401 - RNA, 30 nt, Homo Sapiens
uaaagcuccaugagcuggguuggaaagcug

SEQ ID NO: 299402 - RNA, 32 nt, Homo Sapiens
uguccccuccccagccauccuccccgccuugg

SEQ ID NO: 299403 - RNA, 32 nt, Homo Sapiens
gaggccuggcccacccaccccacucucugcau

SEQ ID NO: 299404 - RNA, 32 nt, Homo Sapiens
agcucgccugaguaugggguggugucauggag

SEQ ID NO: 299405 - RNA, 32 nt, Homo Sapiens
guuggggaaccuggaccgcgcggcgccggguu

SEQ ID NO: 299406 - RNA, 32 nt, Homo Sapiens
uuuauuguuuuaaagucagagaucauccaucc

SEQ ID NO: 299407 - RNA, 32 nt, Homo Sapiens
gccccugugaguuuguacagucuugcagcagg

SEQ ID NO: 299408 - RNA, 32 nt, Homo Sapiens
uacuuuacuguaaggacaguuucgguaguuaa

SEQ ID NO: 299409 - RNA, 30 nt, Homo Sapiens
uccacggcgcccgcgcgggcuccggcuucc

SEQ ID NO: 299410 - RNA, 32 nt, Homo Sapiens
gugcaguggugcaaucauagcucacugcugcc

SEQ ID NO: 299411 - RNA, 32 nt, Homo Sapiens
uguucuuugaaaacaugccaccucaaggcugg

SEQ ID NO: 299412 - RNA, 32 nt, Homo Sapiens
ccggcccggucgacccgccgccgccgagcaug

SEQ ID NO: 299413 - RNA, 32 nt, Homo Sapiens
cuggagcaauguugcuuaggaugugugcaugu

SEQ ID NO: 299414 - RNA, 32 nt, Homo Sapiens
ugaugggauuggcaauguuccuggcagauguu

SEQ ID NO: 299415 - RNA, 32 nt, Homo Sapiens
gcagggaaagagaccuuuaaauauuuugcuau

SEQ ID NO: 299416 - RNA, 32 nt, Homo Sapiens
uuuauuacccggcacgcuguguccuuugcaga

SEQ ID NO: 299417 - RNA, 32 nt, Homo Sapiens
ccagcucgcccucccccuacccggggccgcag

SEQ ID NO: 299418 - RNA, 32 nt, Homo Sapiens
ugagggugcagggcgcccucucuuggccugga

SEQ ID NO: 299419 - RNA, 32 nt, Homo Sapiens
uuuguguuuaguucauccaaagguguuacccu

SEQ ID NO: 299420 - RNA, 32 nt, Homo Sapiens
aaagacucagaauuguaaucgcgaagggaaag

SEQ ID NO: 299421 - RNA, 32 nt, Homo Sapiens
auagggguguucuccacagguacuggagcuuc

SEQ ID NO: 299422 - RNA, 32 nt, Homo Sapiens
uccucaccgcggcucgcugggcccaggcuggc

SEQ ID NO: 299423 - RNA, 32 nt, Homo Sapiens
uucaaggaagcagccuggcuaaagcaaugacu

SEQ ID NO: 299424 - RNA, 32 nt, Homo Sapiens
ccaaaguuuccauggcagcgugacuacacacc

SEQ ID NO: 299425 - RNA, 32 nt, Homo Sapiens
uuacucgccuugcugauugucuauuuuugcgu

SEQ ID NO: 299426 - RNA, 32 nt, Homo Sapiens
uccuuuggccuguugaauuugcugaagaacau

SEQ ID NO: 299427 - RNA, 32 nt, Homo Sapiens
caguuaagagaaaaaaucaaacaagcagaaaa

SEQ ID NO: 299428 - RNA, 32 nt, Homo Sapiens
ccacaaggucaccaccugcuggcgccauggug

SEQ ID NO: 299429 - RNA, 32 nt, Homo Sapiens
uuagcaguuccaaaucuuuguuuuuguauuug

SEQ ID NO: 299430 - RNA, 32 nt, Homo Sapiens
ccacuuuuaccacaggagagccagucauuaaa

SEQ ID NO: 299431 - RNA, 32 nt, Homo Sapiens
uagcuuaugaacuguugcuucuacuuagcccu

SEQ ID NO: 299432 - RNA, 32 nt, Homo Sapiens
ucuuauuucacagauagcaauauuauauuucu

SEQ ID NO: 299433 - RNA, 32 nt, Homo Sapiens
ccuccugcagccccuccucaccugggcucgcu

SEQ ID NO: 299434 - RNA, 32 nt, Homo Sapiens
aguugucagucuaagugaugcuauuccaagag

SEQ ID NO: 299435 - RNA, 32 nt, Homo Sapiens
aaaaaaaaaaagacagagagaaacgggcuggg

SEQ ID NO: 299436 - RNA, 32 nt, Homo Sapiens
gugugccuguuaaugcaguccuguuccucagc

SEQ ID NO: 299437 - RNA, 32 nt, Homo Sapiens
cagacuugacaguccuaggaagguugacauaa

SEQ ID NO: 299438 - RNA, 30 nt, Homo Sapiens
ugaggauggcagagaccagugccuugccca

SEQ ID NO: 299439 - RNA, 32 nt, Homo Sapiens
ccguuucccucauauauuuuggacaagauuua

SEQ ID NO: 299440 - RNA, 32 nt, Homo Sapiens
agccccuuucccaucccccacccaccugccau

SEQ ID NO: 299441 - RNA, 32 nt, Homo Sapiens
gacugugugucuuuuuacccugaaguuaguug

SEQ ID NO: 299442 - RNA, 32 nt, Homo Sapiens
gaacgugccaggcauuuucucaucucagaauu

SEQ ID NO: 299443 - RNA, 32 nt, Homo Sapiens
gcgauauacuaaauguauauaguacauuuaua

SEQ ID NO: 299444 - RNA, 32 nt, Homo Sapiens
ccccaccaccucagaagugugugugaguggug

SEQ ID NO: 299445 - RNA, 32 nt, Homo Sapiens
auggacagcacaaaggcucaagggcagcaucc

SEQ ID NO: 299446 - RNA, 32 nt, Homo Sapiens
auggaguuaaagaaaauugaccaggcguggug

SEQ ID NO: 299447 - RNA, 29 nt, Homo Sapiens
ucuagcauauguauaaugcuauaguuaaa

SEQ ID NO: 299448 - RNA, 32 nt, Homo Sapiens
aaaacacuccaguuacuuuucccuuuaggccu

SEQ ID NO: 299449 - RNA, 32 nt, Homo Sapiens
gggagggugucugcacuaaggauuuagaaaca

SEQ ID NO: 299450 - RNA, 32 nt, Homo Sapiens
agauccuaguggcuuugccauucaaaccacuc

SEQ ID NO: 299451 - RNA, 32 nt, Homo Sapiens
ggggaagcgauuacuuuuuuuaauuuuaaauu

SEQ ID NO: 299452 - RNA, 32 nt, Homo Sapiens
gacuagaugcaaacccuggaaaggauuaaggc

SEQ ID NO: 299453 - RNA, 32 nt, Homo Sapiens
aggaggaaggggaggguucaccgacuuacagc

SEQ ID NO: 299454 - RNA, 32 nt, Homo Sapiens
uuggcaugggauggggaugaaguaaggagagg

SEQ ID NO: 299455 - RNA, 32 nt, Homo Sapiens
ggacggcccugaugcuggccugugagggggcc

SEQ ID NO: 299456 - RNA, 32 nt, Homo Sapiens
cggugggggagugggagaagggcaaucagguu

SEQ ID NO: 299457 - RNA, 32 nt, Homo Sapiens
gagaaggggcagugugguugguccuggcuaaa

SEQ ID NO: 299458 - RNA, 32 nt, Homo Sapiens
ggacuggccccuaggcugcugcugugacccuu

SEQ ID NO: 299459 - RNA, 32 nt, Homo Sapiens
ugaagagauuguguaacuuugcagugagugca

SEQ ID NO: 299460 - RNA, 32 nt, Homo Sapiens
ugaugccaccacaaaacaaacauguucacuag

SEQ ID NO: 299461 - RNA, 32 nt, Homo Sapiens
accuccgccucccagguucaaguaauucuccu

SEQ ID NO: 299462 - RNA, 32 nt, Homo Sapiens
aaaggaaaaacaaaacaaaaaccaucaaaaga

SEQ ID NO: 299463 - RNA, 32 nt, Homo Sapiens
ggcuguucucgaacuccugaccucaggugauc

SEQ ID NO: 299464 - RNA, 32 nt, Homo Sapiens
auucaggggcuuugggcccaagaacugcagau

SEQ ID NO: 299465 - RNA, 32 nt, Homo Sapiens
cuuccuuuugguuuuucaguacuguuucauag

SEQ ID NO: 299466 - RNA, 32 nt, Homo Sapiens
ccuuuccugcagugaggcgccguccgccuucc

SEQ ID NO: 299467 - RNA, 32 nt, Homo Sapiens
aucagucuacacaacagcagacuaauuuuuuu

SEQ ID NO: 299468 - RNA, 32 nt, Homo Sapiens
gguagcugugugcagucacugcagcuugccag

SEQ ID NO: 299469 - RNA, 32 nt, Homo Sapiens
aguggggcgggggagcgagguggcgccgggga

SEQ ID NO: 299470 - RNA, 32 nt, Homo Sapiens
aagccaagaaacaaaggugggguggaugaggc

SEQ ID NO: 299471 - RNA, 32 nt, Homo Sapiens
gccugcuguuucccggggagaucaugaaacga

SEQ ID NO: 299472 - RNA, 32 nt, Homo Sapiens
guauccccuucucccggccccagccugccucc

SEQ ID NO: 299473 - RNA, 32 nt, Homo Sapiens
aguggacugauauauaucacacccagguauca

SEQ ID NO: 299474 - RNA, 32 nt, Homo Sapiens
aggcucccccggucgcucuccuccggcggucg

SEQ ID NO: 299475 - RNA, 32 nt, Homo Sapiens
cccucgagggcuuguguccauuuggccuuuua

SEQ ID NO: 299476 - RNA, 32 nt, Homo Sapiens
augggguugggagaggugagggcaggauuaag

SEQ ID NO: 299477 - RNA, 32 nt, Homo Sapiens
gugguggcggggggucuugggggccucucagc

SEQ ID NO: 299478 - RNA, 32 nt, Homo Sapiens
caaaguucuggagucuuuccaggccgugggga

SEQ ID NO: 299479 - RNA, 32 nt, Homo Sapiens
gaaguagcaagaagggagaugccaagugacaa

SEQ ID NO: 299480 - RNA, 32 nt, Homo Sapiens
uggggcccgcagccgccucccacgccaggcug

SEQ ID NO: 299481 - RNA, 32 nt, Homo Sapiens
aaauugucaccccacagcugcccgccguggaa

SEQ ID NO: 299482 - RNA, 32 nt, Homo Sapiens
uuagagauagacaaucacuacaagucagcucc

SEQ ID NO: 299483 - RNA, 32 nt, Homo Sapiens
cuccccuucccuccccagauauuuaugugaaa

SEQ ID NO: 299484 - RNA, 32 nt, Homo Sapiens
cagcgucccccgccgcgccaguccccgcuagu

SEQ ID NO: 299485 - RNA, 32 nt, Homo Sapiens
uuauucuguuguagucauuaggugcccuucuc

SEQ ID NO: 299486 - RNA, 32 nt, Homo Sapiens
ggccgguugcgguggcucaugccuguaauccu

SEQ ID NO: 299487 - RNA, 32 nt, Homo Sapiens
gaagaucacaggaaagauuaggacagacagcu

SEQ ID NO: 299488 - RNA, 32 nt, Homo Sapiens
guucuaugaugaacgcuuugcugacagcaggu

SEQ ID NO: 299489 - RNA, 32 nt, Homo Sapiens
gugccauuaauaauauuacuauuguuaacacc

SEQ ID NO: 299490 - RNA, 32 nt, Homo Sapiens
ccagugggccagugguagccugucccagacaa

SEQ ID NO: 299491 - RNA, 32 nt, Homo Sapiens
gaaucaugaaguucuuuugccagauaaauauu

SEQ ID NO: 299492 - RNA, 32 nt, Homo Sapiens
acaccccugccagccucccuggacaccaccga

SEQ ID NO: 299493 - RNA, 32 nt, Homo Sapiens
gagcaacggagcaaaggcuuucgggaguguga

SEQ ID NO: 299494 - RNA, 32 nt, Homo Sapiens
ugagugcaggagcucauucuccccucacugcu

SEQ ID NO: 299495 - RNA, 32 nt, Homo Sapiens
uucaccccgcggccgaucgucccccauaccuc

SEQ ID NO: 299496 - RNA, 32 nt, Homo Sapiens
gccugcguguggugggcaagcuccucaaaugg

SEQ ID NO: 299497 - RNA, 32 nt, Homo Sapiens
ugcuacagaaugcauaagacaccugggucaga

SEQ ID NO: 299498 - RNA, 32 nt, Homo Sapiens
gucacuguguuuggaacagcucccucaguuuc

SEQ ID NO: 299499 - RNA, 32 nt, Homo Sapiens
uuaugggcaguggauggaagaaaauaaaauaa

SEQ ID NO: 299500 - RNA, 32 nt, Homo Sapiens
gagggccgcgcgcugggagccgcaugcccugg

SEQ ID NO: 299501 - RNA, 32 nt, Homo Sapiens
cagugagggcccuagcggggcccgagcggggc

SEQ ID NO: 299502 - RNA, 32 nt, Homo Sapiens
agcgauucuccugccucagccuccucaggagc

SEQ ID NO: 299503 - RNA, 32 nt, Homo Sapiens
uggaggugacacucucacaaucgucacagcgg

SEQ ID NO: 299504 - RNA, 32 nt, Homo Sapiens
cagaaaaacuaaaaauaaaaggcauugacuua

SEQ ID NO: 299505 - RNA, 32 nt, Homo Sapiens
accuggauuugaggacuagcccugcccugcca

SEQ ID NO: 299506 - RNA, 32 nt, Homo Sapiens
ccugcuagaauuuggaucacuuucaauugaag

SEQ ID NO: 299507 - RNA, 32 nt, Homo Sapiens
gcccugcagacccugcccuuguuuggggcagg

SEQ ID NO: 299508 - RNA, 32 nt, Homo Sapiens
uugugcugucuggccugaggccauuucaaguc

SEQ ID NO: 299509 - RNA, 32 nt, Homo Sapiens
acaaccagucagagcagcgagaucuggcaccu

SEQ ID NO: 299510 - RNA, 32 nt, Homo Sapiens
gugcaaaaugucaauuuuuaauguauaaucag

SEQ ID NO: 299511 - RNA, 32 nt, Homo Sapiens
aggggucccugcgggagugcugccccuuccag

SEQ ID NO: 299512 - RNA, 27 nt, Homo Sapiens
ucuagguccuucuuuccucauuggaag

SEQ ID NO: 299513 - RNA, 32 nt, Homo Sapiens
ucuuauguacuauccaaaagugccagaaugac

SEQ ID NO: 299514 - RNA, 32 nt, Homo Sapiens
gucucucugcgguaccccauggagcugucuua

SEQ ID NO: 299515 - RNA, 32 nt, Homo Sapiens
ggaccugcugcuuguccccagcccugaacuga

SEQ ID NO: 299516 - RNA, 32 nt, Homo Sapiens
aggcgucagagccgcgcaccgcggacgagcag

SEQ ID NO: 299517 - RNA, 32 nt, Homo Sapiens
caaggugguccguguuugaauucugcagcugg

SEQ ID NO: 299518 - RNA, 32 nt, Homo Sapiens
cugcugccgcuacugcugcugcugccuuaagu

SEQ ID NO: 299519 - RNA, 32 nt, Homo Sapiens
caucaggauggcggcucuggacacccauucaa

SEQ ID NO: 299520 - RNA, 32 nt, Homo Sapiens
agcauuuaagauguaauuaauuagacagagga

SEQ ID NO: 299521 - RNA, 32 nt, Homo Sapiens
ucucaaaauaaaauaaaaauaacauauuggug

SEQ ID NO: 299522 - RNA, 32 nt, Homo Sapiens
uauuuuuucuaaaauccaacuucugaccgccc

SEQ ID NO: 299523 - RNA, 32 nt, Homo Sapiens
cuuuaaaaaugguuuagaaguuuagcugguuu

SEQ ID NO: 299524 - RNA, 32 nt, Homo Sapiens
guggguggguccguugguucccgagauacuuu

SEQ ID NO: 299525 - RNA, 30 nt, Homo Sapiens
ggugcaggcaggcgggucacagggacccug

SEQ ID NO: 299526 - RNA, 32 nt, Homo Sapiens
agucuggccaacauggggaaaccccgucucua

SEQ ID NO: 299527 - RNA, 32 nt, Homo Sapiens
acagacaauggacuuugaagucagccuuugcc

SEQ ID NO: 299528 - RNA, 32 nt, Homo Sapiens
ucugggaguauuuuaaagaauguaucuugccu

SEQ ID NO: 299529 - RNA, 32 nt, Homo Sapiens
cggucugcucuugguguucagaaucacaucaa

SEQ ID NO: 299530 - RNA, 32 nt, Homo Sapiens
gcaccacugucaagagcagcagcaagcccuca

SEQ ID NO: 299531 - RNA, 32 nt, Homo Sapiens
gggacagggcaaagucgaucuugguuguacag

SEQ ID NO: 299532 - RNA, 32 nt, Homo Sapiens
ucgcgcgagagccgcaagcggaguuggugggc

SEQ ID NO: 299533 - RNA, 32 nt, Homo Sapiens
ggaaaauuguuuaaguauguuuuaucaagcag

SEQ ID NO: 299534 - RNA, 32 nt, Homo Sapiens
aaucaggaguccagaucauucuuccaggugcg

SEQ ID NO: 299535 - RNA, 28 nt, Homo Sapiens
aucugaugucuugacauuauaaauguuu

SEQ ID NO: 299536 - RNA, 32 nt, Homo Sapiens
gauuggaaacaaauacuacuaccacuaauauu

SEQ ID NO: 299537 - RNA, 32 nt, Homo Sapiens
gagcagucagacgcccucugggccacgccccg

SEQ ID NO: 299538 - RNA, 32 nt, Homo Sapiens
uguggguuacaaucccuucuacacauguucuc

SEQ ID NO: 299539 - RNA, 32 nt, Homo Sapiens
cacugugauauuaaauuagaaauaauuuauca

SEQ ID NO: 299540 - RNA, 31 nt, Homo Sapiens
cccgggcagcgcagaggccuggggcucaggu

SEQ ID NO: 299541 - RNA, 32 nt, Homo Sapiens
aaaaaacuugguuauuccauggaguugugcaa

SEQ ID NO: 299542 - RNA, 32 nt, Homo Sapiens
uccggcccugaaccagcuccagcccucugcuc

SEQ ID NO: 299543 - RNA, 32 nt, Homo Sapiens
gagcgggcccucccgcgcccugugcuggccgg

SEQ ID NO: 299544 - RNA, 32 nt, Homo Sapiens
ucuucccucuuggcugcccccagguauuuacu

SEQ ID NO: 299545 - RNA, 32 nt, Homo Sapiens
gcucuaguccacacccaauacuuuagagaucu

SEQ ID NO: 299546 - RNA, 32 nt, Homo Sapiens
auaaaaggauauaaaaggcaaauacaauagag

SEQ ID NO: 299547 - RNA, 32 nt, Homo Sapiens
ccguuugcaauaauacuaaggaugucgcauuc

SEQ ID NO: 299548 - RNA, 32 nt, Homo Sapiens
acaugaacaccgugucuccuucucuugugugu

SEQ ID NO: 299549 - RNA, 32 nt, Homo Sapiens
ccucccccacagagccuccagagcuagcugag

SEQ ID NO: 299550 - RNA, 32 nt, Homo Sapiens
cugcagcaccucaagucccuccuggaagggag

SEQ ID NO: 299551 - RNA, 32 nt, Homo Sapiens
uagauggggcagccuucuaaugcucccaguau

SEQ ID NO: 299552 - RNA, 32 nt, Homo Sapiens
cgcggacccacccggaccucggcggggagaug

SEQ ID NO: 299553 - RNA, 32 nt, Homo Sapiens
agagagaacugggauuugcacccaggcaaucu

SEQ ID NO: 299554 - RNA, 28 nt, Homo Sapiens
cgcuggcagcggccgcugaggugcuggc

SEQ ID NO: 299555 - RNA, 32 nt, Homo Sapiens
ccccaacccacccccaaggagcugugggaggc

SEQ ID NO: 299556 - RNA, 32 nt, Homo Sapiens
ucugcuauuaaguggccuacuucaaggcuuug

SEQ ID NO: 299557 - RNA, 32 nt, Homo Sapiens
uuugcuggugguggcuucgggcucaugcccag

SEQ ID NO: 299558 - RNA, 32 nt, Homo Sapiens
uuguuguaaaaagcccagcacuugaauuguua

SEQ ID NO: 299559 - RNA, 32 nt, Homo Sapiens
gagcaggccaucucggguucacugggccaggg

SEQ ID NO: 299560 - RNA, 32 nt, Homo Sapiens
uuuuuauuaugcauuauaucaaaucuaccacu

SEQ ID NO: 299561 - RNA, 32 nt, Homo Sapiens
gcguugaggagcugcugccgccgcuugccgcu

SEQ ID NO: 299562 - RNA, 32 nt, Homo Sapiens
aacacagcaggcuccccggccccggggccuca

SEQ ID NO: 299563 - RNA, 32 nt, Homo Sapiens
ccagcaggagguggcugcgcaacauucgggag

SEQ ID NO: 299564 - RNA, 32 nt, Homo Sapiens
cucuuucugcucacugugcuugcaauaaaaac

SEQ ID NO: 299565 - RNA, 32 nt, Homo Sapiens
uccaggcccccggcccacguguccccugcccu

SEQ ID NO: 299566 - RNA, 32 nt, Homo Sapiens
uuagguguuaguuggucugggggugacagaug

SEQ ID NO: 299567 - RNA, 32 nt, Homo Sapiens
auaaagauacauguguauaauuuuauguaauu

SEQ ID NO: 299568 - RNA, 32 nt, Homo Sapiens
ucauaauuuuaaauuaaagacauaucacuuuu

SEQ ID NO: 299569 - RNA, 32 nt, Homo Sapiens
gccaggcuagggaaagauagggacgaagcuua

SEQ ID NO: 299570 - RNA, 32 nt, Homo Sapiens
aucccccacaggccaggcuuggcaccggaguu

SEQ ID NO: 299571 - RNA, 30 nt, Homo Sapiens
agcggagcgcccgugguccagcguguaggg

SEQ ID NO: 299572 - RNA, 32 nt, Homo Sapiens
ccaguaggucaccaccugcaguucccuggucu

SEQ ID NO: 299573 - RNA, 32 nt, Homo Sapiens
aaauaaaccaggucauucucucuucuucuucu

SEQ ID NO: 299574 - RNA, 32 nt, Homo Sapiens
caaauguauguggaugagaucucuaagaagag

SEQ ID NO: 299575 - RNA, 32 nt, Homo Sapiens
gcuccccacucuggggggcugcugcuguccag

SEQ ID NO: 299576 - RNA, 32 nt, Homo Sapiens
uucagagcggccugggugccuggcggacagaa

SEQ ID NO: 299577 - RNA, 32 nt, Homo Sapiens
ucagucauucgguccguugaucaauaauccuu

SEQ ID NO: 299578 - RNA, 32 nt, Homo Sapiens
cuuggaagccacuagccagcaagcauuaaugc

SEQ ID NO: 299579 - RNA, 32 nt, Homo Sapiens
cgaaacaaugguucuuuuuauuuuggaaguuu

SEQ ID NO: 299580 - RNA, 32 nt, Homo Sapiens
cccccaggccgucuguccacuccaugccaccu

SEQ ID NO: 299581 - RNA, 32 nt, Homo Sapiens
uuucagacugguuuuaacuuaucccagcuuua

SEQ ID NO: 299582 - RNA, 32 nt, Homo Sapiens
cagguauuuuucccuuugcauuuuuaaaaaua

SEQ ID NO: 299583 - RNA, 32 nt, Homo Sapiens
aacgagguguggaaccccuucuugcuggaacu

SEQ ID NO: 299584 - RNA, 32 nt, Homo Sapiens
aguguuuugccuuuguucaugauguaugugau

SEQ ID NO: 299585 - RNA, 32 nt, Homo Sapiens
uaagaagccaagggggaccucgggcuguucug

SEQ ID NO: 299586 - RNA, 32 nt, Homo Sapiens
uccaugccaagcccccgaagauucugacuagu

SEQ ID NO: 299587 - RNA, 32 nt, Homo Sapiens
acauuugucugccuggugcaaacaaggaaucc

SEQ ID NO: 299588 - RNA, 32 nt, Homo Sapiens
auauucagcuuuauagucuuggauagaaaauc

SEQ ID NO: 299589 - RNA, 31 nt, Homo Sapiens
acaaugaaauaaaguuauuuucucauuccaa

SEQ ID NO: 299590 - RNA, 32 nt, Homo Sapiens
caucccgggccagcugccugcggaccgcuucc

SEQ ID NO: 299591 - RNA, 32 nt, Homo Sapiens
ggcgugaaggcacacugucccaccacaacuga

SEQ ID NO: 299592 - RNA, 32 nt, Homo Sapiens
guugauaauaaucaaaggaauuacucucuucu

SEQ ID NO: 299593 - RNA, 32 nt, Homo Sapiens
gccuccgggaggaggggcagggcgcugccuug

SEQ ID NO: 299594 - RNA, 32 nt, Homo Sapiens
acauagaaagagagcccaagaauauuagauuu

SEQ ID NO: 299595 - RNA, 32 nt, Homo Sapiens
agguaggagcaucaccuggggcugggagggag

SEQ ID NO: 299596 - RNA, 32 nt, Homo Sapiens
auuguacaaaaauaaugugacuucugaggccc

SEQ ID NO: 299597 - RNA, 32 nt, Homo Sapiens
uaggaaaaaaugcuuaaaauccugucauuuag

SEQ ID NO: 299598 - RNA, 32 nt, Homo Sapiens
uauuuaggaaaugguauacuauuuugcuauuu

SEQ ID NO: 299599 - RNA, 32 nt, Homo Sapiens
ugcaguguucccccuccuccucaccacggggc

SEQ ID NO: 299600 - RNA, 32 nt, Homo Sapiens
guauauauaaaaagucaugagauccagaucug

SEQ ID NO: 299601 - RNA, 32 nt, Homo Sapiens
uaacuagauaguauauaauguacaguauaaag

SEQ ID NO: 299602 - RNA, 32 nt, Homo Sapiens
gggaaccugaacuaggaguccugggagagcug

SEQ ID NO: 299603 - RNA, 32 nt, Homo Sapiens
ucucugucgagccgcggacgcgggucucuguu

SEQ ID NO: 299604 - RNA, 32 nt, Homo Sapiens
cacuaguccccccaguuggagaucugggacca

SEQ ID NO: 299605 - RNA, 32 nt, Homo Sapiens
gcgcggggauuucgccuacgccgccccggcuc

SEQ ID NO: 299606 - RNA, 32 nt, Homo Sapiens
auuacaguaugaaauaaauaugcugaaugauu

SEQ ID NO: 299607 - RNA, 32 nt, Homo Sapiens
cuggacucaaacaaaaacgaggucaaucaugc

SEQ ID NO: 299608 - RNA, 32 nt, Homo Sapiens
caagaggccaggccuggcacauuuuggagugu

SEQ ID NO: 299609 - RNA, 32 nt, Homo Sapiens
auauuucaggugguauuugcauucagugccuu

SEQ ID NO: 299610 - RNA, 32 nt, Homo Sapiens
aaaagggaacaucagggucaaauggaaaucac

SEQ ID NO: 299611 - RNA, 32 nt, Homo Sapiens
aaaaugcacauaauucauauuucaggugguau

SEQ ID NO: 299612 - RNA, 32 nt, Homo Sapiens
cgccccacuucagcccggcccgcgcccuggac

SEQ ID NO: 299613 - RNA, 32 nt, Homo Sapiens
ucggcauuccgaagcugacuuucuauaggcaa

SEQ ID NO: 299614 - RNA, 32 nt, Homo Sapiens
ccucugauccuccaucagggccagaucuucca

SEQ ID NO: 299615 - RNA, 32 nt, Homo Sapiens
ggcgggcgccggccaggcucuccccgagauca

SEQ ID NO: 299616 - RNA, 32 nt, Homo Sapiens
gccucccugggaacccauguguccuuguggcc

SEQ ID NO: 299617 - RNA, 32 nt, Homo Sapiens
uucugcauuaggggaaggucagacagccaugg

SEQ ID NO: 299618 - RNA, 32 nt, Homo Sapiens
uuccagggaccuaugucuuuuaauacucacug

SEQ ID NO: 299619 - RNA, 32 nt, Homo Sapiens
aucgcuggccccagaacccugucccccacacc

SEQ ID NO: 299620 - RNA, 32 nt, Homo Sapiens
uggacuugucccauuccccugucccuggaaag

SEQ ID NO: 299621 - RNA, 32 nt, Homo Sapiens
auauuacccagcugaauaguuacugcugcacu

SEQ ID NO: 299622 - RNA, 32 nt, Homo Sapiens
aguuacuuacuucuuuguuguuugcaggccac

SEQ ID NO: 299623 - RNA, 32 nt, Homo Sapiens
cccaaccuccaaguggacuucuugcaaagggu

SEQ ID NO: 299624 - RNA, 32 nt, Homo Sapiens
auuugaaugcugugaaauuguuauuauuacua

SEQ ID NO: 299625 - RNA, 32 nt, Homo Sapiens
caagcauaugauaaaaagauaacaaaguaaau

SEQ ID NO: 299626 - RNA, 32 nt, Homo Sapiens
guuuaaggaaggaaacacuaucuggaaaagua

SEQ ID NO: 299627 - RNA, 32 nt, Homo Sapiens
ucggaggcgucggcccggcagcggcagcggca

SEQ ID NO: 299628 - RNA, 32 nt, Homo Sapiens
ccucacuuuccccucacccaucccuuuaaagu

SEQ ID NO: 299629 - RNA, 32 nt, Homo Sapiens
acuggggaccagcccccuucucccacaaauaa

SEQ ID NO: 299630 - RNA, 32 nt, Homo Sapiens
agccaucuguggggcaggcacacacaccuccc

SEQ ID NO: 299631 - RNA, 32 nt, Homo Sapiens
cucccuggaaggaaaaaugguaucugucaaug

SEQ ID NO: 299632 - RNA, 32 nt, Homo Sapiens
ucagagacuggggccggcgugaguccucagua

SEQ ID NO: 299633 - RNA, 32 nt, Homo Sapiens
uggccgugcgcgcgcccucccccgaggagaug

SEQ ID NO: 299634 - RNA, 32 nt, Homo Sapiens
cuuccucccuggauacucuugcugcaccguau

SEQ ID NO: 299635 - RNA, 32 nt, Homo Sapiens
ucaaacugaaaaaaaaucauuuuaauaaauau

SEQ ID NO: 299636 - RNA, 30 nt, Homo Sapiens
cagggcuuucgccacuacaguacagugguu

SEQ ID NO: 299637 - RNA, 32 nt, Homo Sapiens
ucaaacuccgcaucaacaaaaccugggccccu

SEQ ID NO: 299638 - RNA, 32 nt, Homo Sapiens
accccaacuacuauuguagaguggucuauuuc

SEQ ID NO: 299639 - RNA, 32 nt, Homo Sapiens
cccuuuguuguauuuaugcugaaucuucccuu

SEQ ID NO: 299640 - RNA, 32 nt, Homo Sapiens
ccugaggcugcccagaggggccccauccaugg

SEQ ID NO: 299641 - RNA, 32 nt, Homo Sapiens
auaucuguugucccaggccaaagacuaacaac

SEQ ID NO: 299642 - RNA, 32 nt, Homo Sapiens
aucuuuaauauaguucuucaccaccguugggg

SEQ ID NO: 299643 - RNA, 32 nt, Homo Sapiens
auaagguuuuuggcaguuuuggaucaauaaau

SEQ ID NO: 299644 - RNA, 32 nt, Homo Sapiens
agacuacaaaccaaauaaauaggguuuuaugu

SEQ ID NO: 299645 - RNA, 32 nt, Homo Sapiens
uccagaggagccccucuuggacugccuggguu

SEQ ID NO: 299646 - RNA, 32 nt, Homo Sapiens
agcaagaaguauuucuugcaucaugacagaga

SEQ ID NO: 299647 - RNA, 32 nt, Homo Sapiens
cccugccggggaucuuggcaguggaggugcug

SEQ ID NO: 299648 - RNA, 32 nt, Homo Sapiens
accacuacacuccagccaaagcaacaagagca

SEQ ID NO: 299649 - RNA, 32 nt, Homo Sapiens
gcaggggcccucacuggcugcagcugaucugu

SEQ ID NO: 299650 - RNA, 32 nt, Homo Sapiens
ggaccccgggcacuguugcugcugcgggagac

SEQ ID NO: 299651 - RNA, 32 nt, Homo Sapiens
ucaguucccgcaugggggcgaggcagauccag

SEQ ID NO: 299652 - RNA, 32 nt, Homo Sapiens
uuugugacuauauaaauuguaacaguggauug

SEQ ID NO: 299653 - RNA, 32 nt, Homo Sapiens
ggagcgaacccacaugaaccaauacagcccag

SEQ ID NO: 299654 - RNA, 32 nt, Homo Sapiens
ggcaggguggagaccggcacccagacaggugg

SEQ ID NO: 299655 - RNA, 32 nt, Homo Sapiens
gcagaaaagucuuuucaccugucucagucuuc

SEQ ID NO: 299656 - RNA, 32 nt, Homo Sapiens
ugcagguaccauguccuuucagcccucaacgc

SEQ ID NO: 299657 - RNA, 32 nt, Homo Sapiens
gucuggggcagcugcaguggcuucuccuuucc

SEQ ID NO: 299658 - RNA, 32 nt, Homo Sapiens
accuguccaagcauaggcuauccauaguuagg

SEQ ID NO: 299659 - RNA, 32 nt, Homo Sapiens
uaaugaugggaccuaucucccaguguacugag

SEQ ID NO: 299660 - RNA, 32 nt, Homo Sapiens
cgguuuuagugucagacagaccgggguucaaa

SEQ ID NO: 299661 - RNA, 32 nt, Homo Sapiens
ggggggugaggguggagccagguagaugcagc

SEQ ID NO: 299662 - RNA, 32 nt, Homo Sapiens
aaggaggccugccugccucuguaggcuccacc

SEQ ID NO: 299663 - RNA, 32 nt, Homo Sapiens
gauuugaccuccagugggauagauacgauuag

SEQ ID NO: 299664 - RNA, 32 nt, Homo Sapiens
gcccaaaucuguguaauggguaauauuagcau

SEQ ID NO: 299665 - RNA, 32 nt, Homo Sapiens
uguaccucuuuuagucauuuugcuucauagcu

SEQ ID NO: 299666 - RNA, 32 nt, Homo Sapiens
ggacucuaggcaugcaugaaagagccccccug

SEQ ID NO: 299667 - RNA, 32 nt, Homo Sapiens
ggagucuauauguuuucguaaucuucaucaag

SEQ ID NO: 299668 - RNA, 32 nt, Homo Sapiens
aaguucgagugaagauuaaacuguagaaaaga

SEQ ID NO: 299669 - RNA, 32 nt, Homo Sapiens
accugaacacaucauauauaaagaagaaaugc

SEQ ID NO: 299670 - RNA, 32 nt, Homo Sapiens
agaagggggucgugggguccccggggcccacc

SEQ ID NO: 299671 - RNA, 32 nt, Homo Sapiens
cuaacagaugaaauauguuaaauaugugguug

SEQ ID NO: 299672 - RNA, 32 nt, Homo Sapiens
uggccgggcuggggcaucuuucccuccuuggg

SEQ ID NO: 299673 - RNA, 32 nt, Homo Sapiens
uuuuuacucugggaguaauacuuuuuaaauua

SEQ ID NO: 299674 - RNA, 32 nt, Homo Sapiens
guucuacaaaaguuuaaagcagagauuguuuc

SEQ ID NO: 299675 - RNA, 32 nt, Homo Sapiens
cauugccaugcgaccuggucaagccccccuca

SEQ ID NO: 299676 - RNA, 32 nt, Homo Sapiens
cgccgagguccccgaggugcugcagggccucu

SEQ ID NO: 299677 - RNA, 30 nt, Homo Sapiens
gcagugucaacaccuuccuuguagaacggc

SEQ ID NO: 299678 - RNA, 32 nt, Homo Sapiens
gucggccccgucaccuggggccccagcaccuc

SEQ ID NO: 299679 - RNA, 32 nt, Homo Sapiens
caggcauugguaguuuugaagcucuccaggug

SEQ ID NO: 299680 - RNA, 32 nt, Homo Sapiens
cuggggcugcggcuaccgcacucugcagacgc

SEQ ID NO: 299681 - RNA, 32 nt, Homo Sapiens
uccauggggcgggcacggcgucgcugcaggcg

SEQ ID NO: 299682 - RNA, 32 nt, Homo Sapiens
caacagugcagcccagugcaccucugaaagcc

SEQ ID NO: 299683 - RNA, 32 nt, Homo Sapiens
caaggaccagcaugccagaaaagccacucuuu

SEQ ID NO: 299684 - RNA, 32 nt, Homo Sapiens
aguauuuuuucaauguuucuguuucaggcuuc

SEQ ID NO: 299685 - RNA, 32 nt, Homo Sapiens
cagccccucccucuccucccacuacagugauu

SEQ ID NO: 299686 - RNA, 32 nt, Homo Sapiens
gacgaggaaaccgaggaccaggagguucagua

SEQ ID NO: 299687 - RNA, 32 nt, Homo Sapiens
gauaucuuuggaacaaauaauccacgucagca

SEQ ID NO: 299688 - RNA, 32 nt, Homo Sapiens
uugcaaaguacuggccaggugugugugcagcu

SEQ ID NO: 299689 - RNA, 32 nt, Homo Sapiens
aaauauaucagauggugagaaaacagaaaaau

SEQ ID NO: 299690 - RNA, 32 nt, Homo Sapiens
cagaacuagugggaguggaggcaggcccucca

SEQ ID NO: 299691 - RNA, 32 nt, Homo Sapiens
cucauuguauaagacuuuuuugaaguaucuug

SEQ ID NO: 299692 - RNA, 32 nt, Homo Sapiens
agugacaugugggacagcucuggccagggcuc

SEQ ID NO: 299693 - RNA, 32 nt, Homo Sapiens
aggcuucagguggguaugugcugugcugauau

SEQ ID NO: 299694 - RNA, 32 nt, Homo Sapiens
augggaggccuggccugaucuggccucugccc

SEQ ID NO: 299695 - RNA, 32 nt, Homo Sapiens
acccacuucugcacuugcgguuccggcaugga

SEQ ID NO: 299696 - RNA, 32 nt, Homo Sapiens
cagccucccccggcugcuggugcaggcccugc

SEQ ID NO: 299697 - RNA, 32 nt, Homo Sapiens
uuuggugaguccuuugugccaccacccauaau

SEQ ID NO: 299698 - RNA, 32 nt, Homo Sapiens
auucucauucuuuaucccacucaaucaaagga

SEQ ID NO: 299699 - RNA, 32 nt, Homo Sapiens
guagccaaauuugacaauauaaaguaaggagc

SEQ ID NO: 299700 - RNA, 32 nt, Homo Sapiens
cacauggggcuaugacuuucccucguaauacu

SEQ ID NO: 299701 - RNA, 32 nt, Homo Sapiens
gugugcuugcgugugugaaugugugugcgagg

SEQ ID NO: 299702 - RNA, 32 nt, Homo Sapiens
aucuuuuuacuuuagaauuugcaauaaagggu

SEQ ID NO: 299703 - RNA, 32 nt, Homo Sapiens
cauuugcagcuaguacaaacacuucuuuacau

SEQ ID NO: 299704 - RNA, 32 nt, Homo Sapiens
cgcgcugagggccguugagugucgcaggcggc

SEQ ID NO: 299705 - RNA, 32 nt, Homo Sapiens
caaaugcuccacucuggccacccagaguggcc

SEQ ID NO: 299706 - RNA, 32 nt, Homo Sapiens
ggcugggcgaggggugugaugugggagugggg

SEQ ID NO: 299707 - RNA, 32 nt, Homo Sapiens
ggguaccuuuuuccuuuuuuuucugagacgga

SEQ ID NO: 299708 - RNA, 32 nt, Homo Sapiens
gacuuucucgcauacuaacuagguuugacugu

SEQ ID NO: 299709 - RNA, 32 nt, Homo Sapiens
ggcuggucuggaacuccugaccucaggugauc

SEQ ID NO: 299710 - RNA, 32 nt, Homo Sapiens
gccuggucucgaacuccugaccucaggugauc

SEQ ID NO: 299711 - RNA, 32 nt, Homo Sapiens
gccgagggcacugaacggcgucgcgguacgcu

SEQ ID NO: 299712 - RNA, 32 nt, Homo Sapiens
agagguaugggacagauucuuuucucgaaccu

SEQ ID NO: 299713 - RNA, 32 nt, Homo Sapiens
caauauagaucaauggcauagaauugagaauu

SEQ ID NO: 299714 - RNA, 32 nt, Homo Sapiens
aaaugauaaaagacaugauacagucauguuac

SEQ ID NO: 299715 - RNA, 32 nt, Homo Sapiens
gugcagcccccagaagcuuccagcucccgcac

SEQ ID NO: 299716 - RNA, 32 nt, Homo Sapiens
ggcuggucucaaacucccgaccucaaguaguc

SEQ ID NO: 299717 - RNA, 30 nt, Homo Sapiens
cggagcugagccuggaugcugagcccauug

SEQ ID NO: 299718 - RNA, 30 nt, Homo Sapiens
ggauacaagccuuccgcggguccugccugg

SEQ ID NO: 299719 - RNA, 32 nt, Homo Sapiens
acauuuugcucuauguauauuguaacuaaaug

SEQ ID NO: 299720 - RNA, 32 nt, Homo Sapiens
aaccauccacccaagggaaauggaaggcaaga

SEQ ID NO: 299721 - RNA, 32 nt, Homo Sapiens
caauguuauugugacaacauuccaguacucug

SEQ ID NO: 299722 - RNA, 32 nt, Homo Sapiens
acugacugguaccccacucucauuucacuggc

SEQ ID NO: 299723 - RNA, 32 nt, Homo Sapiens
cgaugagaacagagacuccuggaggguuugcu

SEQ ID NO: 299724 - RNA, 32 nt, Homo Sapiens
ugcaggcugucccccacccccagaugaaccca

SEQ ID NO: 299725 - RNA, 32 nt, Homo Sapiens
cauaauguguauauauuuguuugaaauauaau

SEQ ID NO: 299726 - RNA, 32 nt, Homo Sapiens
uuaaagugguuguuuaugauucuuauacuaau

SEQ ID NO: 299727 - RNA, 32 nt, Homo Sapiens
cuuuuagaacaaaaacagcacaguguuauuug

SEQ ID NO: 299728 - RNA, 32 nt, Homo Sapiens
cugccucauaaguggcaguuucccuuuucucu

SEQ ID NO: 299729 - RNA, 32 nt, Homo Sapiens
ugcaguucaugguaaaaugcauuuucaaacca

SEQ ID NO: 299730 - RNA, 32 nt, Homo Sapiens
ggcuggaaaaggauugcugugugcuagacuuu

SEQ ID NO: 299731 - RNA, 32 nt, Homo Sapiens
ccuguauguuuuucuucuuccacauguaccca

SEQ ID NO: 299732 - RNA, 32 nt, Homo Sapiens
gcagaccccguccccaccgcggcgcuccucgc

SEQ ID NO: 299733 - RNA, 32 nt, Homo Sapiens
ugucauugguuucugaugcuuguacaaacacg

SEQ ID NO: 299734 - RNA, 32 nt, Homo Sapiens
auucacucaaggaaaacaccaucucaacuuug

SEQ ID NO: 299735 - RNA, 32 nt, Homo Sapiens
cuacccagacagagccggugaauggguuugug

SEQ ID NO: 299736 - RNA, 32 nt, Homo Sapiens
uggaacuguuauucuauuuaaucuucauuaua

SEQ ID NO: 299737 - RNA, 32 nt, Homo Sapiens
cugcgcgaaggaagaggguacgacgccgggga

SEQ ID NO: 299738 - RNA, 28 nt, Homo Sapiens
ucacuaagaaggagacauuugaugauuu

SEQ ID NO: 299739 - RNA, 32 nt, Homo Sapiens
auguaauauagaccguguauguuuacaauguu

SEQ ID NO: 299740 - RNA, 32 nt, Homo Sapiens
uagcaguguuuccaaacuggcaauuuaugcuu

SEQ ID NO: 299741 - RNA, 32 nt, Homo Sapiens
ucaauggagaucagaauauucuauguauugag

SEQ ID NO: 299742 - RNA, 32 nt, Homo Sapiens
aggggagagaccuggugguuaacaugcauuua

SEQ ID NO: 299743 - RNA, 32 nt, Homo Sapiens
cucagccccccgcagccccugcugucaccccu

SEQ ID NO: 299744 - RNA, 32 nt, Homo Sapiens
ugccuugguuggaaccuugcagauucaucaca

SEQ ID NO: 299745 - RNA, 32 nt, Homo Sapiens
ucagucuuagacgacugcgucgugcuaugacc

SEQ ID NO: 299746 - RNA, 32 nt, Homo Sapiens
ucgagcccagguaaguccuacugcaggauuuu

SEQ ID NO: 299747 - RNA, 32 nt, Homo Sapiens
ugaacugcaucugcccggcgaccuccacccuc

SEQ ID NO: 299748 - RNA, 32 nt, Homo Sapiens
aauaauuuugcuaacaacuuugaaauuucaaa

SEQ ID NO: 299749 - RNA, 32 nt, Homo Sapiens
cauacaguagcuaaucaauaaauauuuauuga

SEQ ID NO: 299750 - RNA, 32 nt, Homo Sapiens
cucaugcagaacugucuacuugaucuggaggg

SEQ ID NO: 299751 - RNA, 32 nt, Homo Sapiens
auugaugugguuuggaucuguguccucaccga

SEQ ID NO: 299752 - RNA, 32 nt, Homo Sapiens
auaaauuucuauuuuuaucugaguuacagaaa

SEQ ID NO: 299753 - RNA, 32 nt, Homo Sapiens
gcccgagccccgcuccucgcagccgccucucc

SEQ ID NO: 299754 - RNA, 32 nt, Homo Sapiens
aauccauugcuagcugccucuuucucgucugc

SEQ ID NO: 299755 - RNA, 32 nt, Homo Sapiens
cuaccuaagaaggccaggauccuccacagcca

SEQ ID NO: 299756 - RNA, 32 nt, Homo Sapiens
auuaccccuaaaauaugaauaaucaauuuguc

SEQ ID NO: 299757 - RNA, 32 nt, Homo Sapiens
aggcucucagagauaagguuuuuuacaugugu

SEQ ID NO: 299758 - RNA, 32 nt, Homo Sapiens
ugacaggugaauggaaaacucuauuuagaugc

SEQ ID NO: 299759 - RNA, 32 nt, Homo Sapiens
cgaagacauuucauaaacaaaauagggauuuc

SEQ ID NO: 299760 - RNA, 32 nt, Homo Sapiens
cuggguaugcuucaugaccuguguuuugguga

SEQ ID NO: 299761 - RNA, 32 nt, Homo Sapiens
ucucaggaagcgacgugaccccugccccagcu

SEQ ID NO: 299762 - RNA, 32 nt, Homo Sapiens
ggagcggggcgggggcguggggaccaggaguc

SEQ ID NO: 299763 - RNA, 30 nt, Homo Sapiens
gauggaccacuugaccaucacauuucagua

SEQ ID NO: 299764 - RNA, 32 nt, Homo Sapiens
ggaccuugacuuuaaccuuucugcuguuuucc

SEQ ID NO: 299765 - RNA, 32 nt, Homo Sapiens
cuccuccccccgccaacacccccucccugcuc

SEQ ID NO: 299766 - RNA, 32 nt, Homo Sapiens
auuuauuugucaauaaacugccuuuuguaagg

SEQ ID NO: 299767 - RNA, 32 nt, Homo Sapiens
gaaucagcaagccaggccugcgggaaaaguau

SEQ ID NO: 299768 - RNA, 32 nt, Homo Sapiens
gacccuccccaggaacccccagggagccagca

SEQ ID NO: 299769 - RNA, 32 nt, Homo Sapiens
uuccucuaagaauugaaaggaguugaacugcc

SEQ ID NO: 299770 - RNA, 32 nt, Homo Sapiens
uggugcuagaugguacauuuuauguguuaaaa

SEQ ID NO: 299771 - RNA, 32 nt, Homo Sapiens
agugagagaaauuuauauuacuggcaauuuca

SEQ ID NO: 299772 - RNA, 32 nt, Homo Sapiens
cuaaguccacuuuaaccuuccaauaucauuac

SEQ ID NO: 299773 - RNA, 32 nt, Homo Sapiens
guuuucaccauguuggccaggcuggucucgaa

SEQ ID NO: 299774 - RNA, 32 nt, Homo Sapiens
auuuuugugggacaacucuagcccacaaacug

SEQ ID NO: 299775 - RNA, 32 nt, Homo Sapiens
uuugcuccuguugccgcccucaucucagagaa

SEQ ID NO: 299776 - RNA, 32 nt, Homo Sapiens
gccgguugaggccccaggcuuggccucaccac

SEQ ID NO: 299777 - RNA, 32 nt, Homo Sapiens
guugugacuccgugguuugaacacgaaagaaa

SEQ ID NO: 299778 - RNA, 32 nt, Homo Sapiens
uaagucuuuuucugccccaguggccuguuugc

SEQ ID NO: 299779 - RNA, 32 nt, Homo Sapiens
ugugagucucuuucgccuugcuccgggcuuuc

SEQ ID NO: 299780 - RNA, 29 nt, Homo Sapiens
gaggucagggcacagaggacgugcgacuu

SEQ ID NO: 299781 - RNA, 32 nt, Homo Sapiens
caaaagauccuagcgguccucaucucuaccau

SEQ ID NO: 299782 - RNA, 32 nt, Homo Sapiens
auuccuaaaaauuuguucagaauaauuaaaag

SEQ ID NO: 299783 - RNA, 32 nt, Homo Sapiens
ucuuucuugaaaagguacacauguaaaauuua

SEQ ID NO: 299784 - RNA, 32 nt, Homo Sapiens
cugccuggacacacgcagauaugcugucuagu

SEQ ID NO: 299785 - RNA, 32 nt, Homo Sapiens
aaggggagagaauggcugggugcuggggaguu

SEQ ID NO: 299786 - RNA, 32 nt, Homo Sapiens
uggccuggaaugcacuugccccgggacacccu

SEQ ID NO: 299787 - RNA, 32 nt, Homo Sapiens
ggagagugguuuuaggcccguggggcuguucu

SEQ ID NO: 299788 - RNA, 32 nt, Homo Sapiens
cucuacuaaaaauacaaaaauuagaugggugu

SEQ ID NO: 299789 - RNA, 32 nt, Homo Sapiens
cgcuggcugucauugugcuggcugugguccuc

SEQ ID NO: 299790 - RNA, 32 nt, Homo Sapiens
aucucgccgugagacagcaagugucgcgcagc

SEQ ID NO: 299791 - RNA, 32 nt, Homo Sapiens
ugccauguacacaaccuacuaggccaggaaca

SEQ ID NO: 299792 - RNA, 32 nt, Homo Sapiens
gugauuguacauuuauacuuggccuaugugcu

SEQ ID NO: 299793 - RNA, 32 nt, Homo Sapiens
ccucugcagggccugcucuugccucccagggg

SEQ ID NO: 299794 - RNA, 32 nt, Homo Sapiens
cucuacccauccccugaugcccaggucaccgg

SEQ ID NO: 299795 - RNA, 32 nt, Homo Sapiens
accacggaccugugcaggggcccccacucuuc

SEQ ID NO: 299796 - RNA, 32 nt, Homo Sapiens
agguagcacugcuguccagccacagccccagc

SEQ ID NO: 299797 - RNA, 32 nt, Homo Sapiens
gucacaaguuugggaagaaagucaucuauuuc

SEQ ID NO: 299798 - RNA, 32 nt, Homo Sapiens
cggcgucaccaugaucgcacggcggaacccag

SEQ ID NO: 299799 - RNA, 32 nt, Homo Sapiens
gaccggcgccucccuccccgccgcccguggac

SEQ ID NO: 299800 - RNA, 31 nt, Homo Sapiens
gcugagcagcgcaagcuccuauuuacgggcc

SEQ ID NO: 299801 - RNA, 32 nt, Homo Sapiens
caccagaagcuguuggcgccccucccacaucc

SEQ ID NO: 299802 - RNA, 32 nt, Homo Sapiens
acuuggcaucucaggacucagcuggagggagg

SEQ ID NO: 299803 - RNA, 32 nt, Homo Sapiens
ccucuaagcccuuuuagaaguacaaguauaau

SEQ ID NO: 299804 - RNA, 32 nt, Homo Sapiens
gggauccuccaagugaccucccugcucauucu

SEQ ID NO: 299805 - RNA, 32 nt, Homo Sapiens
uaccagaugcccuccaccgccauuucuugguc

SEQ ID NO: 299806 - RNA, 32 nt, Homo Sapiens
ggugugggguaagggagggaagucacaucaga

SEQ ID NO: 299807 - RNA, 32 nt, Homo Sapiens
guuaaaaugugaauaguauuguaacuauuuua

SEQ ID NO: 299808 - RNA, 32 nt, Homo Sapiens
aauuagccgggcgugguggugggcgccugcag

SEQ ID NO: 299809 - RNA, 32 nt, Homo Sapiens
guugccugccacccagccuugcugccuuugcu

SEQ ID NO: 299810 - RNA, 32 nt, Homo Sapiens
ggcagcucccucuuccuaaucccuuuaccuga

SEQ ID NO: 299811 - RNA, 32 nt, Homo Sapiens
ccaguguuuuuccugaccucucuucuuuggag

SEQ ID NO: 299812 - RNA, 32 nt, Homo Sapiens
ucuuucccucuugcuucuuuggcaaauguuga

SEQ ID NO: 299813 - RNA, 30 nt, Homo Sapiens
caugcaggcaggcgaaaguggcucgaaaag

SEQ ID NO: 299814 - RNA, 32 nt, Homo Sapiens
ugugucauucuucuaauccaauguagaaauug

SEQ ID NO: 299815 - RNA, 32 nt, Homo Sapiens
aggcuacccugugccagggagggggcagaaug

SEQ ID NO: 299816 - RNA, 32 nt, Homo Sapiens
cccgggccccagagauaaucccagugacccug

SEQ ID NO: 299817 - RNA, 27 nt, Homo Sapiens
auuaccuuuuuauucugguauauaggc

SEQ ID NO: 299818 - RNA, 32 nt, Homo Sapiens
uguugugcaaccauuaccaccauccaucucca

SEQ ID NO: 299819 - RNA, 32 nt, Homo Sapiens
augccucugaccagagauggugaggcaggacu

SEQ ID NO: 299820 - RNA, 32 nt, Homo Sapiens
cucauguugggaacacaugaaugugaugaaca

SEQ ID NO: 299821 - RNA, 32 nt, Homo Sapiens
ccgccccugcagucagcgucagugcucaucua

SEQ ID NO: 299822 - RNA, 32 nt, Homo Sapiens
aauuagccgggcgugguggcgggagccuguag

SEQ ID NO: 299823 - RNA, 32 nt, Homo Sapiens
ggccuagggagccgcaccuugucauguaccau

SEQ ID NO: 299824 - RNA, 32 nt, Homo Sapiens
uuuccucuaugggaccuucccagcaucagccu

SEQ ID NO: 299825 - RNA, 32 nt, Homo Sapiens
ugccuuccugguuuccuugacuuuggccuccu

SEQ ID NO: 299826 - RNA, 32 nt, Homo Sapiens
uguuugagcauacuuaggagaagucuucuauu

SEQ ID NO: 299827 - RNA, 32 nt, Homo Sapiens
ccuguuagaucuugguuugugauaaaaauaua

SEQ ID NO: 299828 - RNA, 32 nt, Homo Sapiens
uuuaaaucaggaaacuaaaaauauuaacaucu

SEQ ID NO: 299829 - RNA, 32 nt, Homo Sapiens
agccuuuucuucauuuugaagcuccuagaauu

SEQ ID NO: 299830 - RNA, 32 nt, Homo Sapiens
aacauaacagagcaacaucaccuaggaaaaaa

SEQ ID NO: 299831 - RNA, 32 nt, Homo Sapiens
accuuucugccagagcucccagccaggccuac

SEQ ID NO: 299832 - RNA, 32 nt, Homo Sapiens
uagcuaugcuguaucugugcuuugcccacaug

SEQ ID NO: 299833 - RNA, 32 nt, Homo Sapiens
uagguugaaccauaagaaauugccaguguaca

SEQ ID NO: 299834 - RNA, 30 nt, Homo Sapiens
acgaggguuaccccuuugcuuuguuuuauc

SEQ ID NO: 299835 - RNA, 32 nt, Homo Sapiens
uggugggaaugggacugggcugacgcccugca

SEQ ID NO: 299836 - RNA, 32 nt, Homo Sapiens
uguguuucuccucccccuugcuugcauguaaa

SEQ ID NO: 299837 - RNA, 32 nt, Homo Sapiens
gagucccuggugccccacacuuccuaaaggca

SEQ ID NO: 299838 - RNA, 32 nt, Homo Sapiens
cacgcacuucgggaggucgaggcaggaggauc

SEQ ID NO: 299839 - RNA, 32 nt, Homo Sapiens
gcugagggcgagcggcagccgccgccaggcau

SEQ ID NO: 299840 - RNA, 32 nt, Homo Sapiens
aguuugaggcauauuucuuaaucugguaucac

SEQ ID NO: 299841 - RNA, 32 nt, Homo Sapiens
cagcagaaaagaguucuaaacauggugccgaa

SEQ ID NO: 299842 - RNA, 32 nt, Homo Sapiens
uaauguuaucuuugagaaaucuauguaaauaa

SEQ ID NO: 299843 - RNA, 32 nt, Homo Sapiens
ccgcccccgcggcucccugccaggcucucgcg

SEQ ID NO: 299844 - RNA, 32 nt, Homo Sapiens
gggagaugguccagcugaaaauccccagcauc

SEQ ID NO: 299845 - RNA, 32 nt, Homo Sapiens
caggacguucccucagcgcucagugcccuucc

SEQ ID NO: 299846 - RNA, 32 nt, Homo Sapiens
cagugccccuccccccgacccagccccaaggu

SEQ ID NO: 299847 - RNA, 32 nt, Homo Sapiens
gauguacgcauccgcagguucccgcggacuug

SEQ ID NO: 299848 - RNA, 32 nt, Homo Sapiens
uagaggagcugagggagggaaccaccgcucac

SEQ ID NO: 299849 - RNA, 32 nt, Homo Sapiens
gucccagaauacuggccaaucagaguuuaaga

SEQ ID NO: 299850 - RNA, 32 nt, Homo Sapiens
ggcugcucucaaaccccugaccucaaaugaug

SEQ ID NO: 299851 - RNA, 32 nt, Homo Sapiens
ccacaggccuuauuucauauguuuccucaacu

SEQ ID NO: 299852 - RNA, 32 nt, Homo Sapiens
uuacaucgagguauaauaaauaaucauguaca

SEQ ID NO: 299853 - RNA, 32 nt, Homo Sapiens
aaagacagcgcaacuuugaaugcuuucuuacu

SEQ ID NO: 299854 - RNA, 32 nt, Homo Sapiens
gaugcuuucuucauuaagauuuugagcauuuu

SEQ ID NO: 299855 - RNA, 32 nt, Homo Sapiens
ggugcgcgcuggcgugcauggggccuguucug

SEQ ID NO: 299856 - RNA, 32 nt, Homo Sapiens
gaugcugcugcugguuaagagaauagaugcaa

SEQ ID NO: 299857 - RNA, 32 nt, Homo Sapiens
acuuucccuugagaaacuuauacuaaaacuau

SEQ ID NO: 299858 - RNA, 32 nt, Homo Sapiens
uggagaggcgggucccaggcccggcccggagc

SEQ ID NO: 299859 - RNA, 32 nt, Homo Sapiens
caccgaauuggaaacgcgcgcccaggcuccgu

SEQ ID NO: 299860 - RNA, 32 nt, Homo Sapiens
guagugcagauagugaauccacugagccacau

SEQ ID NO: 299861 - RNA, 32 nt, Homo Sapiens
aaaccuuguauuguggcugaagaaauuagaag

SEQ ID NO: 299862 - RNA, 32 nt, Homo Sapiens
ugcuuuccccaccuccuccccuccccuggccg

SEQ ID NO: 299863 - RNA, 32 nt, Homo Sapiens
gucauuuuagaggauuauaugguugucuccag

SEQ ID NO: 299864 - RNA, 32 nt, Homo Sapiens
gccccuagcccggccccugccccacgcgcagg

SEQ ID NO: 299865 - RNA, 32 nt, Homo Sapiens
gcggcgcguccgugacgucacugaugugcgcu

SEQ ID NO: 299866 - RNA, 32 nt, Homo Sapiens
gaccccgcccccgcagcgcccgcuuccaagau

SEQ ID NO: 299867 - RNA, 31 nt, Homo Sapiens
uggauguaaaauuguaaugcguauauguaca

SEQ ID NO: 299868 - RNA, 32 nt, Homo Sapiens
ggagaugacauggagaucugugcagaugagcu

SEQ ID NO: 299869 - RNA, 32 nt, Homo Sapiens
gagaacucauuauaaugaacguuuauuauauu

SEQ ID NO: 299870 - RNA, 32 nt, Homo Sapiens
caacaaucuuaccccuuacagggacgauggaa

SEQ ID NO: 299871 - RNA, 32 nt, Homo Sapiens
auuuuuaaauugcuuuuuuuuauuguugaggu

SEQ ID NO: 299872 - RNA, 32 nt, Homo Sapiens
gaauggacguagcacugucauguggcauuugg

SEQ ID NO: 299873 - RNA, 32 nt, Homo Sapiens
acaagagcucugcagugugagcuuggaaugaa

SEQ ID NO: 299874 - RNA, 32 nt, Homo Sapiens
ggacucgguguuguguccaucaucaacggcuu

SEQ ID NO: 299875 - RNA, 32 nt, Homo Sapiens
ccucccacaggcaagaaccagaggcccaggcu

SEQ ID NO: 299876 - RNA, 32 nt, Homo Sapiens
guccacaggcccggcucugggccacgugcccc

SEQ ID NO: 299877 - RNA, 32 nt, Homo Sapiens
gggugucagaccuggaggagaagcucccagag

SEQ ID NO: 299878 - RNA, 32 nt, Homo Sapiens
gcugugacuagcgggccggcccgggccaggac

SEQ ID NO: 299879 - RNA, 32 nt, Homo Sapiens
ggauggagcugacuacggaacugcacacucag

SEQ ID NO: 299880 - RNA, 32 nt, Homo Sapiens
ggugccccgcgcgcccgaugcacgcgcggcaa

SEQ ID NO: 299881 - RNA, 32 nt, Homo Sapiens
ccgcagccccaagccaguggcuuuuccacaag

SEQ ID NO: 299882 - RNA, 32 nt, Homo Sapiens
ggagggguggggagggggagggggaagugucu

SEQ ID NO: 299883 - RNA, 32 nt, Homo Sapiens
gccgguccuucccucucaugacuugcagggcc

SEQ ID NO: 299884 - RNA, 32 nt, Homo Sapiens
gggggcgccggggcuuuugcugaguuggcggg

SEQ ID NO: 299885 - RNA, 32 nt, Homo Sapiens
auaguaacauuguuuuuuuuuauuuuguguuu

SEQ ID NO: 299886 - RNA, 32 nt, Homo Sapiens
cuuuuuaaaaacagaagaguaggaggaaauaa

SEQ ID NO: 299887 - RNA, 32 nt, Homo Sapiens
uucagauuugcacaaaaagauaccuuaaaauu

SEQ ID NO: 299888 - RNA, 32 nt, Homo Sapiens
ggcacgggcugagacucaggggccggcugugc

SEQ ID NO: 299889 - RNA, 32 nt, Homo Sapiens
uuugccaaaagcagaccugaacaucaagccug

SEQ ID NO: 299890 - RNA, 32 nt, Homo Sapiens
gcaaguguaaauauuaaggaugaccugugcaa

SEQ ID NO: 299891 - RNA, 32 nt, Homo Sapiens
aaaugccggccggcugcgcccgccgcgcggcu

SEQ ID NO: 299892 - RNA, 32 nt, Homo Sapiens
accagaggcaccuuugcugcugccgcuguucu

SEQ ID NO: 299893 - RNA, 32 nt, Homo Sapiens
cccucuccccucacccaaucguggaugaagca

SEQ ID NO: 299894 - RNA, 32 nt, Homo Sapiens
caaagggacgguuuucuagagcuccgacgccu

SEQ ID NO: 299895 - RNA, 32 nt, Homo Sapiens
cagccgucacagccgccuccugagaugccacc

SEQ ID NO: 299896 - RNA, 32 nt, Homo Sapiens
cuguuuuguguuuacuaauugggaugucauag

SEQ ID NO: 299897 - RNA, 32 nt, Homo Sapiens
guuuuuuaaaagacacaucugacauuuuuaac

SEQ ID NO: 299898 - RNA, 32 nt, Homo Sapiens
cacagugccucaagcuggccuacugccuccaa

SEQ ID NO: 299899 - RNA, 32 nt, Homo Sapiens
aagccugucugagacucacaggaaggaggagc

SEQ ID NO: 299900 - RNA, 32 nt, Homo Sapiens
aucaacuaccagugacucgcucaucugcccug

SEQ ID NO: 299901 - RNA, 32 nt, Homo Sapiens
ucgcucgcugccgggggcggucggaaggcgcg

SEQ ID NO: 299902 - RNA, 32 nt, Homo Sapiens
uagcagggcucgcugcuuggccugcagagacu

SEQ ID NO: 299903 - RNA, 32 nt, Homo Sapiens
auggagagccucagccauggcaaguccaucug

SEQ ID NO: 299904 - RNA, 32 nt, Homo Sapiens
acuaaauuaugguaaaaaugugcacuauugug

SEQ ID NO: 299905 - RNA, 32 nt, Homo Sapiens
gggcggcguggagacggcgccuucagcuugag

SEQ ID NO: 299906 - RNA, 32 nt, Homo Sapiens
gcuggucucggaaguaccgauguucgaguccu

SEQ ID NO: 299907 - RNA, 27 nt, Homo Sapiens
ugguauuccuucuuucucccaccuaag

SEQ ID NO: 299908 - RNA, 29 nt, Homo Sapiens
ccacuuuguaaauaaacugcugaacaccc

SEQ ID NO: 299909 - RNA, 32 nt, Homo Sapiens
ccgcagcucuguucagcggagcagccagccag

SEQ ID NO: 299910 - RNA, 32 nt, Homo Sapiens
acgagagguaugccuguacucgcuugugcaga

SEQ ID NO: 299911 - RNA, 32 nt, Homo Sapiens
uaagugguuuuucagaaaaagcuuacaacauu

SEQ ID NO: 299912 - RNA, 32 nt, Homo Sapiens
acuggacucaggaugcccagggccacucugcc

SEQ ID NO: 299913 - RNA, 32 nt, Homo Sapiens
ccagacguggauggugcugaauuguugcuugg

SEQ ID NO: 299914 - RNA, 32 nt, Homo Sapiens
cagaaauguuuuuucuuuuccuuguggccaaa

SEQ ID NO: 299915 - RNA, 32 nt, Homo Sapiens
uuacaccagaaagcuggcgggcacuaugggga

SEQ ID NO: 299916 - RNA, 32 nt, Homo Sapiens
uuacuaacauagcuuuaaaucuuuaaauguau

SEQ ID NO: 299917 - RNA, 32 nt, Homo Sapiens
acucugagguugauuaaugucaugcucacaga

SEQ ID NO: 299918 - RNA, 32 nt, Homo Sapiens
ccgcacgguuggaggaggucggcugguuaucg

SEQ ID NO: 299919 - RNA, 32 nt, Homo Sapiens
aaccacauggaauaaugacucaugugcauuaa

SEQ ID NO: 299920 - RNA, 32 nt, Homo Sapiens
accaagucaggauaagaauccaggucugcuga

SEQ ID NO: 299921 - RNA, 32 nt, Homo Sapiens
gucucacugggagcugcagaccggagcuguuc

SEQ ID NO: 299922 - RNA, 32 nt, Homo Sapiens
ucaugguuuucagauccauuccaaccugacug

SEQ ID NO: 299923 - RNA, 32 nt, Homo Sapiens
acaacguacaaugucugcauucacuaauucau

SEQ ID NO: 299924 - RNA, 32 nt, Homo Sapiens
aaggaaaaaaaauuauuuggaagcagaaaacc

SEQ ID NO: 299925 - RNA, 32 nt, Homo Sapiens
gccacacuguauguuucuaacauauuauuauu

SEQ ID NO: 299926 - RNA, 32 nt, Homo Sapiens
gaaugcuugagcccaagaguuuuagaccagcc

SEQ ID NO: 299927 - RNA, 32 nt, Homo Sapiens
uguagucucggcggcagcggcggagacacuag

SEQ ID NO: 299928 - RNA, 32 nt, Homo Sapiens
cggggcuauccucuccucccuuggcuccucca

SEQ ID NO: 299929 - RNA, 32 nt, Homo Sapiens
ccagagugaccguugggcucugggguucucug

SEQ ID NO: 299930 - RNA, 32 nt, Homo Sapiens
cugggaacacaggaagucaaccagcuaaggac

SEQ ID NO: 299931 - RNA, 32 nt, Homo Sapiens
agccgcagccucuucuaccgcggccgguuggg

SEQ ID NO: 299932 - RNA, 32 nt, Homo Sapiens
auuuauacaacacugauuucacuuacccagac

SEQ ID NO: 299933 - RNA, 32 nt, Homo Sapiens
acuccauccagccccaggcacgccaccugcuc

SEQ ID NO: 299934 - RNA, 32 nt, Homo Sapiens
aguuagcguccucaauguggacgcccugagcu

SEQ ID NO: 299935 - RNA, 32 nt, Homo Sapiens
uuccccccaacgccacggccaaggcaggcccc

SEQ ID NO: 299936 - RNA, 32 nt, Homo Sapiens
guuugaauuccagcgcugccacuuccucucug

SEQ ID NO: 299937 - RNA, 32 nt, Homo Sapiens
ggcccccucuacugaggcagggcugaguugag

SEQ ID NO: 299938 - RNA, 31 nt, Homo Sapiens
gacccuggaugcugccugcccugcaacucag

SEQ ID NO: 299939 - RNA, 32 nt, Homo Sapiens
uagaaaucgugguucuuccccgagggugcaug

SEQ ID NO: 299940 - RNA, 32 nt, Homo Sapiens
accuguaaucccaacacuuugggaggcugagg

SEQ ID NO: 299941 - RNA, 32 nt, Homo Sapiens
gggaaggcgggggcgugccggcccagcgggga

SEQ ID NO: 299942 - RNA, 32 nt, Homo Sapiens
cuacugaauuuggagggcaggcacgaagaaca

SEQ ID NO: 299943 - RNA, 32 nt, Homo Sapiens
auauucagaaaauuauuucuaaaguugaucga

SEQ ID NO: 299944 - RNA, 32 nt, Homo Sapiens
uaucaauacuggcuauuuucucuucucgccgu

SEQ ID NO: 299945 - RNA, 32 nt, Homo Sapiens
uauccuuuuaugaaaugaaaucaguagaacuu

SEQ ID NO: 299946 - RNA, 32 nt, Homo Sapiens
acagccaagacagauucauuuuucucaagcuc

SEQ ID NO: 299947 - RNA, 32 nt, Homo Sapiens
aaaaucuagaaaagacuuguugguuuaugugc

SEQ ID NO: 299948 - RNA, 32 nt, Homo Sapiens
gucuugagcuguugucuauagagcaguuuaca

SEQ ID NO: 299949 - RNA, 32 nt, Homo Sapiens
cagguguccgcgggcgcgccaagcccuuuugg

SEQ ID NO: 299950 - RNA, 32 nt, Homo Sapiens
gaguuuuuaggggcagcaggcuuuugcuguac

SEQ ID NO: 299951 - RNA, 32 nt, Homo Sapiens
ucuucaaaauaauauguaaauccuacuuuugc

SEQ ID NO: 299952 - RNA, 32 nt, Homo Sapiens
ugaaggagaagcuggagcuggcugggagucaa

SEQ ID NO: 299953 - RNA, 32 nt, Homo Sapiens
aagaaacgaaacaauguuauuuggugguguau

SEQ ID NO: 299954 - RNA, 32 nt, Homo Sapiens
auuuuauauauacauuuccauguauugaugua

SEQ ID NO: 299955 - RNA, 32 nt, Homo Sapiens
gggugucugcggaauagcgucucgucuuguuu

SEQ ID NO: 299956 - RNA, 32 nt, Homo Sapiens
caccagccugcagcacaccccacagccaagua

SEQ ID NO: 299957 - RNA, 32 nt, Homo Sapiens
cuccucacaaccccaagagcccccagcccggu

SEQ ID NO: 299958 - RNA, 32 nt, Homo Sapiens
uguuuaugauucaaauaugggaauuugagaaa

SEQ ID NO: 299959 - RNA, 32 nt, Homo Sapiens
ccaggcacagaaacagacagaaaugauacugu

SEQ ID NO: 299960 - RNA, 32 nt, Homo Sapiens
uugauuuuuacuuuucuuucuaacauaucaau

SEQ ID NO: 299961 - RNA, 32 nt, Homo Sapiens
uaaauagucgcaccccagcagccucucucgca

SEQ ID NO: 299962 - RNA, 32 nt, Homo Sapiens
cuccauaggggaggagagccacgcaggaucuc

SEQ ID NO: 299963 - RNA, 32 nt, Homo Sapiens
auuuccuguacaacuuuuuguaaaauguucug

SEQ ID NO: 299964 - RNA, 32 nt, Homo Sapiens
gacucuggaucuuugugagucugaaguauugc

SEQ ID NO: 299965 - RNA, 32 nt, Homo Sapiens
ugcuguggucaucuuggugacucggucacagc

SEQ ID NO: 299966 - RNA, 32 nt, Homo Sapiens
gggaguaggaauuaagugaaaggucacacuac

SEQ ID NO: 299967 - RNA, 32 nt, Homo Sapiens
uuauuaaaaacgcaaccucuucaaagacucag

SEQ ID NO: 299968 - RNA, 32 nt, Homo Sapiens
cugcuggcaucugcgauugcauuuuuccuguu

SEQ ID NO: 299969 - RNA, 32 nt, Homo Sapiens
aucccaucaucuguggauggauagggcacccu

SEQ ID NO: 299970 - RNA, 32 nt, Homo Sapiens
acgaggucaggagauugagaccauccuggcca

SEQ ID NO: 299971 - RNA, 32 nt, Homo Sapiens
acgaggucaggagacugagaccauccuggcua

SEQ ID NO: 299972 - RNA, 32 nt, Homo Sapiens
caugcaacacaagcccuguuucgggccuccug

SEQ ID NO: 299973 - RNA, 32 nt, Homo Sapiens
uucccaaacugggcaggucauggggucaucga

SEQ ID NO: 299974 - RNA, 32 nt, Homo Sapiens
guuggcugagaccgagaugugcucuccacugg

SEQ ID NO: 299975 - RNA, 32 nt, Homo Sapiens
gaucgcuugagccugggagauugaggcugcac

SEQ ID NO: 299976 - RNA, 32 nt, Homo Sapiens
aaacucucuaguguuucuuaaccugcaguuuu

SEQ ID NO: 299977 - RNA, 32 nt, Homo Sapiens
gcccggaggagccgucgcgcgcccgcuuccug

SEQ ID NO: 299978 - RNA, 32 nt, Homo Sapiens
gcaucuggggccagguuggggcggcggggucc

SEQ ID NO: 299979 - RNA, 32 nt, Homo Sapiens
aacauauuuuuaaugagacuuuauugcuauau

SEQ ID NO: 299980 - RNA, 32 nt, Homo Sapiens
agcacccuuucugcagaaaguaaacuagccuu

SEQ ID NO: 299981 - RNA, 32 nt, Homo Sapiens
gucagcugcccccugcccucucucuggggcua

SEQ ID NO: 299982 - RNA, 32 nt, Homo Sapiens
aauugaucuucagauuuguucguacucuguuu

SEQ ID NO: 299983 - RNA, 32 nt, Homo Sapiens
ugaaaaaauauuaauauguuugucagaaggaa

SEQ ID NO: 299984 - RNA, 32 nt, Homo Sapiens
ccagauucuaucuggucaguggcaagggagga

SEQ ID NO: 299985 - RNA, 32 nt, Homo Sapiens
aagcagcacagaauuggugccauggauuaucu

SEQ ID NO: 299986 - RNA, 30 nt, Homo Sapiens
aaccugggagguggagguugcagugacccg

SEQ ID NO: 299987 - RNA, 32 nt, Homo Sapiens
cccuuuugaagaaaagacaaagguagaaagga

SEQ ID NO: 299988 - RNA, 32 nt, Homo Sapiens
guuucccgccccaccuuuccccuacuaccgca

SEQ ID NO: 299989 - RNA, 32 nt, Homo Sapiens
cuucaaggggccugggcugcugcucacgggua

SEQ ID NO: 299990 - RNA, 32 nt, Homo Sapiens
aaacggggggaguuuaggagacuuuaaucccg

SEQ ID NO: 299991 - RNA, 32 nt, Homo Sapiens
cggaaggugggcugaggcccagggugaacaug

SEQ ID NO: 299992 - RNA, 32 nt, Homo Sapiens
acgcaggacgacggaggcgugauuuugguuuc

SEQ ID NO: 299993 - RNA, 32 nt, Homo Sapiens
ucacgaccacuaauagaucacuuuuuacccca

SEQ ID NO: 299994 - RNA, 32 nt, Homo Sapiens
ucugcggccuagcgcccggcgccgccugccgc

SEQ ID NO: 299995 - RNA, 32 nt, Homo Sapiens
aaccugucuccagccaccuucuguggagucuc

SEQ ID NO: 299996 - RNA, 32 nt, Homo Sapiens
ugaucacaaaaauguauuuuauaaaauguucu

SEQ ID NO: 299997 - RNA, 32 nt, Homo Sapiens
auuguuuugccuuuuccaauguucauaacugu

SEQ ID NO: 299998 - RNA, 32 nt, Homo Sapiens
ggaccccggcgucuccggcugcaccgaguggu

SEQ ID NO: 299999 - RNA, 32 nt, Homo Sapiens
gcaaggagaaaggagaggugacugcugauguu

SEQ ID NO: 300000 - RNA, 32 nt, Homo Sapiens
cucacaguucuuuuucuuccugucauaaccag

SEQ ID NO: 300001 - RNA, 32 nt, Homo Sapiens
agcauuccaaauagacucagacucacugcccu

SEQ ID NO: 300002 - RNA, 32 nt, Homo Sapiens
gccgaggcggguggaucacuugagaucaggag

SEQ ID NO: 300003 - RNA, 32 nt, Homo Sapiens
cuaaauuuagguuugcagaaaguauuaaacau

SEQ ID NO: 300004 - RNA, 32 nt, Homo Sapiens
gcgucgcggaggagauggcgcggcacgugcgg

SEQ ID NO: 300005 - RNA, 32 nt, Homo Sapiens
uuuaauacucaccgugacaaacaccaucauag

SEQ ID NO: 300006 - RNA, 32 nt, Homo Sapiens
ggaagccgaacgaguuccucggcggcugcagg

SEQ ID NO: 300007 - RNA, 32 nt, Homo Sapiens
gggcgccggaagaaccguugucugccacgcgc

SEQ ID NO: 300008 - RNA, 32 nt, Homo Sapiens
aacuuccuaacacaaccuggcuuggacaugaa

SEQ ID NO: 300009 - RNA, 32 nt, Homo Sapiens
ucggcccgggcgugcaggggccccggguucgc

SEQ ID NO: 300010 - RNA, 32 nt, Homo Sapiens
auagaagugaauuguggacguaaaaugguugu

SEQ ID NO: 300011 - RNA, 32 nt, Homo Sapiens
cugggaucuguguuuacuguguccuugcucuc

SEQ ID NO: 300012 - RNA, 32 nt, Homo Sapiens
guguuuuaaaauucucuuucuaaacacagagu

SEQ ID NO: 300013 - RNA, 32 nt, Homo Sapiens
uguuauauauuauugucuuuaagggaaaagaa

SEQ ID NO: 300014 - RNA, 32 nt, Homo Sapiens
ucagagucauauucagguuuaaauucugucau

SEQ ID NO: 300015 - RNA, 32 nt, Homo Sapiens
cccgcuccuucccgcucggccgcggccucagg

SEQ ID NO: 300016 - RNA, 32 nt, Homo Sapiens
aauaugucagugggcccuuccauuuuauggag

SEQ ID NO: 300017 - RNA, 32 nt, Homo Sapiens
uggccacagcuauggugauguguuugacgucc

SEQ ID NO: 300018 - RNA, 32 nt, Homo Sapiens
cgccgccgagccgcugccccccaaggaacugu

SEQ ID NO: 300019 - RNA, 29 nt, Homo Sapiens
cccguuucuauccucgacuccaaaguaag

SEQ ID NO: 300020 - RNA, 32 nt, Homo Sapiens
aauagcugggaggcugcagagggugcugggag

SEQ ID NO: 300021 - RNA, 32 nt, Homo Sapiens
cuugggauauauauuuaauuuucuuaaauucc

SEQ ID NO: 300022 - RNA, 32 nt, Homo Sapiens
ucaagcgauucuccugccccagccucccaagu

SEQ ID NO: 300023 - RNA, 32 nt, Homo Sapiens
ucuuguaaacucuauuuugaaauaaacuauuc

SEQ ID NO: 300024 - RNA, 32 nt, Homo Sapiens
agaacaaauggcacagcaucccugccaggauc

SEQ ID NO: 300025 - RNA, 32 nt, Homo Sapiens
ccucccugccacguggagacgcagaggccgaa

SEQ ID NO: 300026 - RNA, 32 nt, Homo Sapiens
cuacaggaggggucucauguccugcuggcuuc

SEQ ID NO: 300027 - RNA, 32 nt, Homo Sapiens
ggggagguuugccuuaaaggcuuuuaauuuug

SEQ ID NO: 300028 - RNA, 32 nt, Homo Sapiens
ccucccauaucaagaagaaaccacuuauucuc

SEQ ID NO: 300029 - RNA, 32 nt, Homo Sapiens
uacuggcaaugcauuggaaaacagacagcucc

SEQ ID NO: 300030 - RNA, 30 nt, Homo Sapiens
cguuccacugcucuggggccggcgccgcgc

SEQ ID NO: 300031 - RNA, 32 nt, Homo Sapiens
uccugaccucaagugaucugcccgccucagcc

SEQ ID NO: 300032 - RNA, 32 nt, Homo Sapiens
ucaaagcccuggggcccggcccucucugcauc

SEQ ID NO: 300033 - RNA, 32 nt, Homo Sapiens
ugugugucuguuuuuaucuccccucucaggac

SEQ ID NO: 300034 - RNA, 32 nt, Homo Sapiens
ggagagcaaaggagaccccucccgagccgcuc

SEQ ID NO: 300035 - RNA, 32 nt, Homo Sapiens
accugucccuccugggcugcugcauugucuag

SEQ ID NO: 300036 - RNA, 32 nt, Homo Sapiens
uuguauuuccucccuuucaucacauuuguuug

SEQ ID NO: 300037 - RNA, 32 nt, Homo Sapiens
ucugaauuauuuuuaaagaucuucucuaacaa

SEQ ID NO: 300038 - RNA, 30 nt, Homo Sapiens
uuacuauugaugugcaugcaagagauauag

SEQ ID NO: 300039 - RNA, 32 nt, Homo Sapiens
cagacugcgccucccagcauccccucacccaa

SEQ ID NO: 300040 - RNA, 32 nt, Homo Sapiens
gcagagaggaggacguguacuccaggcgaggc

SEQ ID NO: 300041 - RNA, 32 nt, Homo Sapiens
uguguccaaccacacaccccaccccauccgug

SEQ ID NO: 300042 - RNA, 32 nt, Homo Sapiens
uaaaaguuuuuggcaaaaacucuuugccauuu

SEQ ID NO: 300043 - RNA, 32 nt, Homo Sapiens
auguguguuguccuucagcauaauucggaagg

SEQ ID NO: 300044 - RNA, 32 nt, Homo Sapiens
gcacauaguaccuggugcuagggucuaggggc

SEQ ID NO: 300045 - RNA, 27 nt, Homo Sapiens
caaagguccuucuuguccacaccccuu

SEQ ID NO: 300046 - RNA, 32 nt, Homo Sapiens
uuugaagauuccccaagucaagcaggcaagau

SEQ ID NO: 300047 - RNA, 32 nt, Homo Sapiens
auugucuuuggaacuuggucucccaacacuua

SEQ ID NO: 300048 - RNA, 32 nt, Homo Sapiens
agcgcuacccacuucuaaauagcaauuucgcc

SEQ ID NO: 300049 - RNA, 32 nt, Homo Sapiens
cuuuggcauucacuugaacagcaaccaccgcc

SEQ ID NO: 300050 - RNA, 32 nt, Homo Sapiens
guucucuuucaacuccaguacucuguaaguuu

SEQ ID NO: 300051 - RNA, 32 nt, Homo Sapiens
aauugaaaagagcccagcauauuuuaucacag

SEQ ID NO: 300052 - RNA, 32 nt, Homo Sapiens
uauuuuauugugcuuugcaucuccaggcaguu

SEQ ID NO: 300053 - RNA, 31 nt, Homo Sapiens
ggugcucucccacuugcuccaaguuaggcag

SEQ ID NO: 300054 - RNA, 32 nt, Homo Sapiens
agucuauugcaugaaacaggcaucauggauga

SEQ ID NO: 300055 - RNA, 32 nt, Homo Sapiens
cccagaguuuuuauuucuuuaauuagucugag

SEQ ID NO: 300056 - RNA, 32 nt, Homo Sapiens
uuugcaggcugcgggcaguggcaccgacuugg

SEQ ID NO: 300057 - RNA, 32 nt, Homo Sapiens
acggcgaagcaauagagggggugcuggagcgc

SEQ ID NO: 300058 - RNA, 31 nt, Homo Sapiens
uugagaugaaacacuucaaaacccugguuau

SEQ ID NO: 300059 - RNA, 32 nt, Homo Sapiens
cccacuuaucgcuccuggccccaaggggcccu

SEQ ID NO: 300060 - RNA, 32 nt, Homo Sapiens
uuuuucacaucccaccauacacugcugcccag

SEQ ID NO: 300061 - RNA, 32 nt, Homo Sapiens
guuucaugaggauuuacacauggcauucagug

SEQ ID NO: 300062 - RNA, 32 nt, Homo Sapiens
ucggggugguggggggcggggagaugaacgcu

SEQ ID NO: 300063 - RNA, 30 nt, Homo Sapiens
agcauugucuguguagaggugugcuaguaa

SEQ ID NO: 300064 - RNA, 32 nt, Homo Sapiens
gcggggccauggcggggaccgcgcucaagagg

SEQ ID NO: 300065 - RNA, 32 nt, Homo Sapiens
gccgugguacuuuuccauuuagauucaaaugg

SEQ ID NO: 300066 - RNA, 32 nt, Homo Sapiens
ggagaaagagccaguuauucaaauuuccaauc

SEQ ID NO: 300067 - RNA, 32 nt, Homo Sapiens
gaaggccugcgagagucgcccgcggcccagcg

SEQ ID NO: 300068 - RNA, 32 nt, Homo Sapiens
uggcacagacugcgagcugggccguguguaug

SEQ ID NO: 300069 - RNA, 32 nt, Homo Sapiens
auuguguugcugucccauuuuucaggugaggg

SEQ ID NO: 300070 - RNA, 32 nt, Homo Sapiens
cugcuuuuccuaaaugcauacuguauauaauu

SEQ ID NO: 300071 - RNA, 32 nt, Homo Sapiens
caaagccccggugucggacacacagcaguaau

SEQ ID NO: 300072 - RNA, 32 nt, Homo Sapiens
uaaaaauagcgaucuuccugugcguguccacc

SEQ ID NO: 300073 - RNA, 32 nt, Homo Sapiens
agguuuuccuuccaagcacccagcccuccugc

SEQ ID NO: 300074 - RNA, 32 nt, Homo Sapiens
aagccuccaggccagcagcaucagcaucaccu

SEQ ID NO: 300075 - RNA, 32 nt, Homo Sapiens
ccugaauguguuccugccccccaggaguguga

SEQ ID NO: 300076 - RNA, 32 nt, Homo Sapiens
gaggcagguuugccacuguuuccccaggccug

SEQ ID NO: 300077 - RNA, 32 nt, Homo Sapiens
cuaaaugcuaguucucagcagcugcguggcuu

SEQ ID NO: 300078 - RNA, 32 nt, Homo Sapiens
cagagggagcgcgggcuuccuggggcguccuu

SEQ ID NO: 300079 - RNA, 32 nt, Homo Sapiens
acaggccacgacccuccugaucacucugagga

SEQ ID NO: 300080 - RNA, 30 nt, Homo Sapiens
aaccggcaucgccgccgccggagccgcagc

SEQ ID NO: 300081 - RNA, 32 nt, Homo Sapiens
cggcuuaugaaggaauuuuaaguaaaacaguu

SEQ ID NO: 300082 - RNA, 32 nt, Homo Sapiens
guuggcguacagagacccccgcuuugcugcuc

SEQ ID NO: 300083 - RNA, 32 nt, Homo Sapiens
guaaagacgggguuuugucauguugcucgggc

SEQ ID NO: 300084 - RNA, 32 nt, Homo Sapiens
aaccaccugucauucuuggagaaaaggaugcu

SEQ ID NO: 300085 - RNA, 32 nt, Homo Sapiens
auaaccacaccacccggccccucuggccuggg

SEQ ID NO: 300086 - RNA, 32 nt, Homo Sapiens
ucggguuucuuuucuuuuugccucuaaugcag

SEQ ID NO: 300087 - RNA, 32 nt, Homo Sapiens
agugagguaauggaugucaucaaucucaggaa

SEQ ID NO: 300088 - RNA, 32 nt, Homo Sapiens
ugaucuguuuuaaguaugagaggcuuauagug

SEQ ID NO: 300089 - RNA, 32 nt, Homo Sapiens
gacgucaaggccaccaaccaccacugagccuu

SEQ ID NO: 300090 - RNA, 32 nt, Homo Sapiens
ccagggcagcuagugcaacugagccuugacau

SEQ ID NO: 300091 - RNA, 32 nt, Homo Sapiens
augggccuucccggcccggagcugggagucga

SEQ ID NO: 300092 - RNA, 32 nt, Homo Sapiens
ccauucugccucagccucccaaguagcuggga

SEQ ID NO: 300093 - RNA, 32 nt, Homo Sapiens
gucuagcugccgccgcggcgaccgcugccugg

SEQ ID NO: 300094 - RNA, 32 nt, Homo Sapiens
cggacccggcgcccgcgccucgggacggauuu

SEQ ID NO: 300095 - RNA, 32 nt, Homo Sapiens
gcagcgggaggcagagggaggacccuggaaca

SEQ ID NO: 300096 - RNA, 32 nt, Homo Sapiens
gaccaagggcuuucacauccuaagucauuugg

SEQ ID NO: 300097 - RNA, 32 nt, Homo Sapiens
uuaguaguaaaauaaacaacucauggacaucu

SEQ ID NO: 300098 - RNA, 32 nt, Homo Sapiens
uucuuucgcucuuugugcuucgccagugcuuu

SEQ ID NO: 300099 - RNA, 32 nt, Homo Sapiens
aagagcuaaaagacaaggaaacaaacuacuuu

SEQ ID NO: 300100 - RNA, 31 nt, Homo Sapiens
ugcuaaagaaguaaacaggucauggcacguu

SEQ ID NO: 300101 - RNA, 32 nt, Homo Sapiens
cugacugguaucuauuuauuucucauuuguac

SEQ ID NO: 300102 - RNA, 32 nt, Homo Sapiens
guacaggacaacacaggagaugaagggcauug

SEQ ID NO: 300103 - RNA, 32 nt, Homo Sapiens
ggagggagaaggaaaagugugagauuucuacu

SEQ ID NO: 300104 - RNA, 32 nt, Homo Sapiens
agggggcaagcgcaggccgggcugggaggcgg

SEQ ID NO: 300105 - RNA, 32 nt, Homo Sapiens
aagcagccuacauccuagcuaagcaaagaaga

SEQ ID NO: 300106 - RNA, 32 nt, Homo Sapiens
gcccaggugccggagaugaaugagccccagca

SEQ ID NO: 300107 - RNA, 32 nt, Homo Sapiens
cucucaugugacacccacaguuaugccggaug

SEQ ID NO: 300108 - RNA, 32 nt, Homo Sapiens
augcuaaacuguauuucuuuuuaaaauuugga

SEQ ID NO: 300109 - RNA, 32 nt, Homo Sapiens
agcauuuccuuugagcgucauguuagaguuca

SEQ ID NO: 300110 - RNA, 32 nt, Homo Sapiens
gguaccaccuggaugguggcauuagggaucag

SEQ ID NO: 300111 - RNA, 32 nt, Homo Sapiens
aaacaucuggacuuaagaguuucugcuucccu

SEQ ID NO: 300112 - RNA, 32 nt, Homo Sapiens
agcauaaaaguacuauauagacauagaaaccu

SEQ ID NO: 300113 - RNA, 32 nt, Homo Sapiens
cccugggcucuggaccccgggcacacgaggga

SEQ ID NO: 300114 - RNA, 32 nt, Homo Sapiens
cacaggagccgcagugaguccugccuggcucu

SEQ ID NO: 300115 - RNA, 32 nt, Homo Sapiens
agguaaauucguucuucagggauugaacacua

SEQ ID NO: 300116 - RNA, 32 nt, Homo Sapiens
ggaagacuuaggccuuucgcuuccuccucagg

SEQ ID NO: 300117 - RNA, 32 nt, Homo Sapiens
uggagagcugucuuccuguguaccucuagaau

SEQ ID NO: 300118 - RNA, 32 nt, Homo Sapiens
caagggcuacccuaauaaaggaauguauauac

SEQ ID NO: 300119 - RNA, 32 nt, Homo Sapiens
cggggcggcuggccaggcagggggcugacccc

SEQ ID NO: 300120 - RNA, 32 nt, Homo Sapiens
aaguggggaaauuuauaaagcuaaauauuaua

SEQ ID NO: 300121 - RNA, 32 nt, Homo Sapiens
guuucuugaacaaaaguucugaagaugaugcg

SEQ ID NO: 300122 - RNA, 32 nt, Homo Sapiens
uuuacauguuuccaucauuucugucuuuaaga

SEQ ID NO: 300123 - RNA, 32 nt, Homo Sapiens
uggaagcauccacccucucgcugccccagccu

SEQ ID NO: 300124 - RNA, 30 nt, Homo Sapiens
ugucaauguauuuuaagcuucaguguguua

SEQ ID NO: 300125 - RNA, 32 nt, Homo Sapiens
uugcuuuuggaaagaauaaauucugugaugug

SEQ ID NO: 300126 - RNA, 32 nt, Homo Sapiens
ucucaguucaccccaaccuuugccucacgggu

SEQ ID NO: 300127 - RNA, 32 nt, Homo Sapiens
aggaaauuugaaaagacaaacuauggcugcuu

SEQ ID NO: 300128 - RNA, 32 nt, Homo Sapiens
uuuuguucaaagauuaaugccaacucuuaaga

SEQ ID NO: 300129 - RNA, 32 nt, Homo Sapiens
gggccggcccagcccgcgucacccggcagcaa

SEQ ID NO: 300130 - RNA, 32 nt, Homo Sapiens
uggaaaaggcaaagcgcagagccacgccguag

SEQ ID NO: 300131 - RNA, 32 nt, Homo Sapiens
uccccugccugcucugcagucguggguggggc

SEQ ID NO: 300132 - RNA, 32 nt, Homo Sapiens
uuccuggagcuaaauuauucuauggauguuug

SEQ ID NO: 300133 - RNA, 32 nt, Homo Sapiens
uucccucuuugguuuucuuagcuuuugaauuu

SEQ ID NO: 300134 - RNA, 32 nt, Homo Sapiens
auaguuucacuuuuuaaaaaauccauuacugu

SEQ ID NO: 300135 - RNA, 32 nt, Homo Sapiens
ucccagaggagaagagguuugacuugcgugua

SEQ ID NO: 300136 - RNA, 32 nt, Homo Sapiens
ucaucacccucagugcaugaaucuucacagca

SEQ ID NO: 300137 - RNA, 32 nt, Homo Sapiens
uccaagaauucacuugaguccuaugcauucaa

SEQ ID NO: 300138 - RNA, 32 nt, Homo Sapiens
caauaugaaauacuaaaacaaacaaacaaaca

SEQ ID NO: 300139 - RNA, 32 nt, Homo Sapiens
ucugcccggccgcagcagugcacauggggugu

SEQ ID NO: 300140 - RNA, 32 nt, Homo Sapiens
cugcugacacauggaacugaggugaaauugug

SEQ ID NO: 300141 - RNA, 32 nt, Homo Sapiens
gugacucuccuggcaaugaaaccugggccacc

SEQ ID NO: 300142 - RNA, 31 nt, Homo Sapiens
ggguggggggcggugaaucaccucugaggcc

SEQ ID NO: 300143 - RNA, 32 nt, Homo Sapiens
uucccccuagcuggcuccuuuggaccuacccc

SEQ ID NO: 300144 - RNA, 32 nt, Homo Sapiens
caugagacggaaugaggucaccaagagaguga

SEQ ID NO: 300145 - RNA, 32 nt, Homo Sapiens
uaagacccaagaaaaccuggaacuuuggauca

SEQ ID NO: 300146 - RNA, 32 nt, Homo Sapiens
gauggaggguggcagguggggcgucugcaggg

SEQ ID NO: 300147 - RNA, 32 nt, Homo Sapiens
uuuuaaucaugaugaauugccuggggucugua

SEQ ID NO: 300148 - RNA, 32 nt, Homo Sapiens
ucucugugaaaggcugcagauuuuaaguguca

SEQ ID NO: 300149 - RNA, 32 nt, Homo Sapiens
ugagaggagaaucccugaccccugcccugggc

SEQ ID NO: 300150 - RNA, 32 nt, Homo Sapiens
augccaacaaggaaaugcguuuauggcuacaa

SEQ ID NO: 300151 - RNA, 32 nt, Homo Sapiens
uuuuuuuuuuucuggagccuuccagcagacuu

SEQ ID NO: 300152 - RNA, 32 nt, Homo Sapiens
gaggccaaaucugaaguccuuuccagggagug

SEQ ID NO: 300153 - RNA, 32 nt, Homo Sapiens
agcagugugggugggggcgcucuggguggagg

SEQ ID NO: 300154 - RNA, 32 nt, Homo Sapiens
caggcaacagagcuacgcacuccuuuccuuuu

SEQ ID NO: 300155 - RNA, 32 nt, Homo Sapiens
cugagggcgcgguccuuggacucauucaggcc

SEQ ID NO: 300156 - RNA, 32 nt, Homo Sapiens
uaaauccccccuccccugccaggugaaaggaa

SEQ ID NO: 300157 - RNA, 32 nt, Homo Sapiens
guccgggagcgcggcggagacgaugccugaga

SEQ ID NO: 300158 - RNA, 32 nt, Homo Sapiens
gagcgagcaaaaggcgcgauccagagagccag

SEQ ID NO: 300159 - RNA, 32 nt, Homo Sapiens
aaaagaaacagacaucuuucuguaugaaagua

SEQ ID NO: 300160 - RNA, 32 nt, Homo Sapiens
ucauuauuauuacacaaagucaagggaaauau

SEQ ID NO: 300161 - RNA, 32 nt, Homo Sapiens
ccggccccgcucggcgcccgcgugggauggug

SEQ ID NO: 300162 - RNA, 32 nt, Homo Sapiens
cccaccuggucucugcacgcacacacugguca

SEQ ID NO: 300163 - RNA, 32 nt, Homo Sapiens
ggagagaaagacuuagaacauacacagauccu

SEQ ID NO: 300164 - RNA, 32 nt, Homo Sapiens
uggaggggagacgggcacucaguuuaggcgcu

SEQ ID NO: 300165 - RNA, 32 nt, Homo Sapiens
ugcagacacgugccagcgugaagcuggugaag

SEQ ID NO: 300166 - RNA, 32 nt, Homo Sapiens
ccagacacguccccacagaggaccucaccauc

SEQ ID NO: 300167 - RNA, 32 nt, Homo Sapiens
ucgguuaucccauguguaagguagagaaauga

SEQ ID NO: 300168 - RNA, 32 nt, Homo Sapiens
auggagcagcgcacgcccaggcgaugccaguc

SEQ ID NO: 300169 - RNA, 32 nt, Homo Sapiens
ggcauuggccccaggucaccuguggcuuuggg

SEQ ID NO: 300170 - RNA, 32 nt, Homo Sapiens
uaacuagaacaaaaauguacauuguaaacaag

SEQ ID NO: 300171 - RNA, 32 nt, Homo Sapiens
ucuggccucucaccccacuucagugcucucuu

SEQ ID NO: 300172 - RNA, 32 nt, Homo Sapiens
guaauccaauuaugaacuguguguguauagag

SEQ ID NO: 300173 - RNA, 32 nt, Homo Sapiens
ucuuguauucauauugugggacagugggaaua

SEQ ID NO: 300174 - RNA, 32 nt, Homo Sapiens
ugcuuuuuaucaguuguagaaaagaaccuuag

SEQ ID NO: 300175 - RNA, 32 nt, Homo Sapiens
ccccagugagcacuucuuuuugagggacuuga

SEQ ID NO: 300176 - RNA, 32 nt, Homo Sapiens
ccuccucucaggcuucccaaacuuggccucac

SEQ ID NO: 300177 - RNA, 32 nt, Homo Sapiens
cuuuuggcggccuuucugcuccucgcggccca

SEQ ID NO: 300178 - RNA, 32 nt, Homo Sapiens
aacauauuuagaauguaaauggcauuauuaaa

SEQ ID NO: 300179 - RNA, 32 nt, Homo Sapiens
agaccaaggaaagcuccgaguaccucaagugc

SEQ ID NO: 300180 - RNA, 30 nt, Homo Sapiens
uaugugaauauccccuguauguacuugugu

SEQ ID NO: 300181 - RNA, 32 nt, Homo Sapiens
ucagaaccgaggauuauuguaauuguaguuag

SEQ ID NO: 300182 - RNA, 32 nt, Homo Sapiens
ggcggcggccgcggccuccgcaagccgucuuu

SEQ ID NO: 300183 - RNA, 32 nt, Homo Sapiens
uccggaaucgcccuucccuuccuggccacgaa

SEQ ID NO: 300184 - RNA, 32 nt, Homo Sapiens
cuggcaguacaugugcacaaagcagaaucuca

SEQ ID NO: 300185 - RNA, 32 nt, Homo Sapiens
agaggccauguuccaauaaacaggaggucgug

SEQ ID NO: 300186 - RNA, 32 nt, Homo Sapiens
ccccccuuccugcgccagccaugccuuuaaac

SEQ ID NO: 300187 - RNA, 32 nt, Homo Sapiens
caaggaugaaugccuguauuuggucuaggaac

SEQ ID NO: 300188 - RNA, 31 nt, Homo Sapiens
cgggaugcaagguagcauggguccaagagac

SEQ ID NO: 300189 - RNA, 32 nt, Homo Sapiens
cucagaacccucgggcaccugagagagauguu

SEQ ID NO: 300190 - RNA, 32 nt, Homo Sapiens
gucucacucuaggaucccacuccagacuuccu

SEQ ID NO: 300191 - RNA, 32 nt, Homo Sapiens
acauuuugugucaucaucucuaccaccacuca

SEQ ID NO: 300192 - RNA, 32 nt, Homo Sapiens
agggccuugcagaguccugcaccaggccuggg

SEQ ID NO: 300193 - RNA, 32 nt, Homo Sapiens
uccgucugcggugggcaggcagccucacccug

SEQ ID NO: 300194 - RNA, 32 nt, Homo Sapiens
ugccuuuuacaaaauuuuuaaagaguagguaa

SEQ ID NO: 300195 - RNA, 32 nt, Homo Sapiens
gcgcggacuccuucucacgggcggagcugcug

SEQ ID NO: 300196 - RNA, 32 nt, Homo Sapiens
ugccugggacuggcaggguggcugagcggcug

SEQ ID NO: 300197 - RNA, 32 nt, Homo Sapiens
gcuggcgggguucggcccgagcuagauagaca

SEQ ID NO: 300198 - RNA, 30 nt, Homo Sapiens
gcaucaugcaagaagaugaaagcuaccucc

SEQ ID NO: 300199 - RNA, 32 nt, Homo Sapiens
caccuucucagccagcagcuccagcucagagc

SEQ ID NO: 300200 - RNA, 32 nt, Homo Sapiens
agggggacugguuuguccugaaugugagaaaa

SEQ ID NO: 300201 - RNA, 32 nt, Homo Sapiens
gagcccuuccucuguaaaagugucacaccacc

SEQ ID NO: 300202 - RNA, 32 nt, Homo Sapiens
uugugucccugguagcagaaauccuuaccuau

SEQ ID NO: 300203 - RNA, 32 nt, Homo Sapiens
gauggugcccagagggcggcgggggugcggag

SEQ ID NO: 300204 - RNA, 32 nt, Homo Sapiens
ggcaaguugcuugagcucuuugggccucuguu

SEQ ID NO: 300205 - RNA, 31 nt, Homo Sapiens
gccugagccucaguuccucuaacuguagagu

SEQ ID NO: 300206 - RNA, 32 nt, Homo Sapiens
uugauauucccuaaaaaacauuuggaauauau

SEQ ID NO: 300207 - RNA, 32 nt, Homo Sapiens
caccgcagaccccaagccauugagcacaucac

SEQ ID NO: 300208 - RNA, 32 nt, Homo Sapiens
uuuacaaucaguauucuaaguguggccgagug

SEQ ID NO: 300209 - RNA, 32 nt, Homo Sapiens
augccaaaaaccuguuugauaaauaaacacuc

SEQ ID NO: 300210 - RNA, 32 nt, Homo Sapiens
gacuugaaauaccaaaaccugaggagugggca

SEQ ID NO: 300211 - RNA, 32 nt, Homo Sapiens
ggcgaagcauacugggggaggguguggugggu

SEQ ID NO: 300212 - RNA, 32 nt, Homo Sapiens
auccccgcaccaagcgcuuaaccucauugggg

SEQ ID NO: 300213 - RNA, 32 nt, Homo Sapiens
ccagggcuaagcaauuaaaccaguuaagucuc

SEQ ID NO: 300214 - RNA, 32 nt, Homo Sapiens
cauggaagcugauuuuggucauugcacuaugc

SEQ ID NO: 300215 - RNA, 32 nt, Homo Sapiens
acaaacguuguuaaauugacuaucuuuuuaaa

SEQ ID NO: 300216 - RNA, 32 nt, Homo Sapiens
aggcugugcugucgaggcgccugcucgcuuac

SEQ ID NO: 300217 - RNA, 32 nt, Homo Sapiens
ugaagccaccugcucaggacaaugaaauucuu

SEQ ID NO: 300218 - RNA, 32 nt, Homo Sapiens
ugcaugacagagcuuucugaccuugcacuucc

SEQ ID NO: 300219 - RNA, 32 nt, Homo Sapiens
ggucaucuuucugugauagugaaaaaauaugu

SEQ ID NO: 300220 - RNA, 32 nt, Homo Sapiens
cagucuucauacaaaacaaaaggaauaagaac

SEQ ID NO: 300221 - RNA, 32 nt, Homo Sapiens
gaagagccaacaugcuggccccgcgcggagcc

SEQ ID NO: 300222 - RNA, 31 nt, Homo Sapiens
gcgccuugggacuccgguccccgcgccugcg

SEQ ID NO: 300223 - RNA, 32 nt, Homo Sapiens
gaaaaauuuugcaccacuggucauagcaucua

SEQ ID NO: 300224 - RNA, 32 nt, Homo Sapiens
agccuuccgggaacuggagucugucucuuuca

SEQ ID NO: 300225 - RNA, 32 nt, Homo Sapiens
gugaccucugaccccugaugcuuucgugauca

SEQ ID NO: 300226 - RNA, 32 nt, Homo Sapiens
ucaguuauaugauacuaccuuuguaugucugu

SEQ ID NO: 300227 - RNA, 32 nt, Homo Sapiens
ccugcucucccucugccuucugccauaauugu

SEQ ID NO: 300228 - RNA, 32 nt, Homo Sapiens
ugcagggacacugagcuggcuaucucggcgcu

SEQ ID NO: 300229 - RNA, 32 nt, Homo Sapiens
agacuagcauucccagacaucauucuaggguc

SEQ ID NO: 300230 - RNA, 32 nt, Homo Sapiens
aaguccuggggaggauuuacacacagaccgga

SEQ ID NO: 300231 - RNA, 32 nt, Homo Sapiens
cucuccuugcugaaguuuuucuugacuucucc

SEQ ID NO: 300232 - RNA, 32 nt, Homo Sapiens
guucccgcgggugccgggccuggagagugcua

SEQ ID NO: 300233 - RNA, 32 nt, Homo Sapiens
cggaggugcgaccgggcgucggcagcgcagac

SEQ ID NO: 300234 - RNA, 32 nt, Homo Sapiens
aaagugcaaagugugcgugaaaacuuuugaaa

SEQ ID NO: 300235 - RNA, 32 nt, Homo Sapiens
ggccacaauggccaguucccacgagaagcgcc

SEQ ID NO: 300236 - RNA, 32 nt, Homo Sapiens
agagagagcagcggggugaugaucucuagcag

SEQ ID NO: 300237 - RNA, 32 nt, Homo Sapiens
cguggacuccuacaauaaugcuauaaaugcau

SEQ ID NO: 300238 - RNA, 32 nt, Homo Sapiens
aaaaggcggugcuuaaaccggaggaggcggaa

SEQ ID NO: 300239 - RNA, 32 nt, Homo Sapiens
aaacauccuggccaucuugucugugcaacaac

SEQ ID NO: 300240 - RNA, 32 nt, Homo Sapiens
cugcuuccaggguccacaaucugcuccaggac

SEQ ID NO: 300241 - RNA, 32 nt, Homo Sapiens
guguccugugcuuucugcaugcuuagagcaug

SEQ ID NO: 300242 - RNA, 32 nt, Homo Sapiens
cauccccuccccuuuuguccuaucauucccua

SEQ ID NO: 300243 - RNA, 32 nt, Homo Sapiens
ggugccggguugacuuggcuggggugguggga

SEQ ID NO: 300244 - RNA, 32 nt, Homo Sapiens
ccugccgcagcagcugcggcccagcgagcggc

SEQ ID NO: 300245 - RNA, 32 nt, Homo Sapiens
uucucucuccuguacauagugggcaguggugu

SEQ ID NO: 300246 - RNA, 31 nt, Homo Sapiens
ucaaugagggcggggccuggcgucugaucug

SEQ ID NO: 300247 - RNA, 32 nt, Homo Sapiens
ggcccuugcaaggcgcgaccggcggccaugca

SEQ ID NO: 300248 - RNA, 32 nt, Homo Sapiens
gucuuccaagaggauucuaacugcacaugacu

SEQ ID NO: 300249 - RNA, 32 nt, Homo Sapiens
ugggauggcgaucccuacugaacgcuuguguc

SEQ ID NO: 300250 - RNA, 32 nt, Homo Sapiens
acauguuaggacgaggcccuauuccaugcccc

SEQ ID NO: 300251 - RNA, 32 nt, Homo Sapiens
uauuaagcugcuguuguaaaguauuguuugca

SEQ ID NO: 300252 - RNA, 32 nt, Homo Sapiens
acacccagcuaauguuuuguauuuuuaguaga

SEQ ID NO: 300253 - RNA, 32 nt, Homo Sapiens
ugcgcaacccgcucugagggacgcugcugcag

SEQ ID NO: 300254 - RNA, 32 nt, Homo Sapiens
ggcccccagccuggccagacaagacgacuguc

SEQ ID NO: 300255 - RNA, 32 nt, Homo Sapiens
uccaaaguacaugcagaacaaguucuaaauga

SEQ ID NO: 300256 - RNA, 32 nt, Homo Sapiens
cucacgcuggucgucuuuuuuauuuuuucucu

SEQ ID NO: 300257 - RNA, 32 nt, Homo Sapiens
uacaguguuuugaaacagaaaccuuagaauag

SEQ ID NO: 300258 - RNA, 32 nt, Homo Sapiens
uucaccacuucuaaaacaaaaagaaaaggaag

SEQ ID NO: 300259 - RNA, 32 nt, Homo Sapiens
cuuggggcugcaccuccuacccucccaccaga

SEQ ID NO: 300260 - RNA, 32 nt, Homo Sapiens
uccuuuggguggcagucaggggagaucucagg

SEQ ID NO: 300261 - RNA, 32 nt, Homo Sapiens
agugcucauggucugaaccugccguguucuug

SEQ ID NO: 300262 - RNA, 32 nt, Homo Sapiens
agcaaaauaagaauuuauuaagcaaaauagcc

SEQ ID NO: 300263 - RNA, 32 nt, Homo Sapiens
uuuucugacacauaagagguguguucugcucc

SEQ ID NO: 300264 - RNA, 32 nt, Homo Sapiens
uuuaucugauugacuccaaacaucccgaaaug

SEQ ID NO: 300265 - RNA, 32 nt, Homo Sapiens
cgucauugcuccuccuuauaccucugacuucg

SEQ ID NO: 300266 - RNA, 32 nt, Homo Sapiens
gaggagcugggcugaaucuccaggcguuccuu

SEQ ID NO: 300267 - RNA, 32 nt, Homo Sapiens
cccuggauaacaaccucuaaagcuguauggag

SEQ ID NO: 300268 - RNA, 32 nt, Homo Sapiens
cgccgaugguuucauauuaacuaaaaaagcug

SEQ ID NO: 300269 - RNA, 32 nt, Homo Sapiens
aaauggcagacacgggccuucucuucaggcga

SEQ ID NO: 300270 - RNA, 32 nt, Homo Sapiens
ugcuguuuguaagcuuuuuuuauuauuuuuuu

SEQ ID NO: 300271 - RNA, 32 nt, Homo Sapiens
cggcugcgcccaccggcuccgcgcugcugccg

SEQ ID NO: 300272 - RNA, 32 nt, Homo Sapiens
auccaggcggcugagggggcauugugacagcu

SEQ ID NO: 300273 - RNA, 32 nt, Homo Sapiens
agcaguuuuuaaaacuacuguugcaaccuuuu

SEQ ID NO: 300274 - RNA, 32 nt, Homo Sapiens
ugaugaccuugguaugguggugauggucaguc

SEQ ID NO: 300275 - RNA, 32 nt, Homo Sapiens
uuucugauguggcaaaggauauuucccaucua

SEQ ID NO: 300276 - RNA, 32 nt, Homo Sapiens
ggcacgugcgguuuccgccccucccuuccugg

SEQ ID NO: 300277 - RNA, 32 nt, Homo Sapiens
accagccaacuggucaggaacuugcacccugg

SEQ ID NO: 300278 - RNA, 32 nt, Homo Sapiens
cuuggggccuucuuggaggagcuugggugaca

SEQ ID NO: 300279 - RNA, 32 nt, Homo Sapiens
gccccugccugccugauuggaucuuucuccac

SEQ ID NO: 300280 - RNA, 32 nt, Homo Sapiens
cgagugcaaggccgccuggcgcggcccccacc

SEQ ID NO: 300281 - RNA, 32 nt, Homo Sapiens
gugcccgccuuggccucccaaagagcugggau

SEQ ID NO: 300282 - RNA, 32 nt, Homo Sapiens
guaccuacguacuuauaucagcaccauguaug

SEQ ID NO: 300283 - RNA, 32 nt, Homo Sapiens
cacucgcguggccuucgcgaaggugucgcugc

SEQ ID NO: 300284 - RNA, 32 nt, Homo Sapiens
cccccaaaaugaaucccaacacuggaagacca

SEQ ID NO: 300285 - RNA, 32 nt, Homo Sapiens
cagauggucaauaacuugaaauuuauagcugu

SEQ ID NO: 300286 - RNA, 32 nt, Homo Sapiens
uccagaaaacauccauaacauaguaaagacuu

SEQ ID NO: 300287 - RNA, 32 nt, Homo Sapiens
ugauucuuuuugaacaggcccgcggcuccucc

SEQ ID NO: 300288 - RNA, 32 nt, Homo Sapiens
uagcacaggaggaagagaugggcagggagagu

SEQ ID NO: 300289 - RNA, 32 nt, Homo Sapiens
gacucugaguggcgacugccuccaccucauuc

SEQ ID NO: 300290 - RNA, 32 nt, Homo Sapiens
gaagccugcacagauccaacccuugcuaggua

SEQ ID NO: 300291 - RNA, 30 nt, Homo Sapiens
aaguuugagggacgcgcgggccccgcgccc

SEQ ID NO: 300292 - RNA, 32 nt, Homo Sapiens
uaugaauuguuucuaacaaaccuugaucugua

SEQ ID NO: 300293 - RNA, 32 nt, Homo Sapiens
gucugacccacacagcgaaaccccgucucuac

SEQ ID NO: 300294 - RNA, 32 nt, Homo Sapiens
gcgaagagaagcacagaagaauugguuccuuc

SEQ ID NO: 300295 - RNA, 32 nt, Homo Sapiens
acaguccugguuguugucaucauaaacauaug

SEQ ID NO: 300296 - RNA, 32 nt, Homo Sapiens
uggaguuugccccucacccaccagcugcccca

SEQ ID NO: 300297 - RNA, 32 nt, Homo Sapiens
gaggccgagcaggcucucuccccuccccuccc

SEQ ID NO: 300298 - RNA, 32 nt, Homo Sapiens
ggugcggcgugaagaggagccugagccgagcg

SEQ ID NO: 300299 - RNA, 32 nt, Homo Sapiens
cuuuuuacagcuuuugacuuaaagucuguuuu

SEQ ID NO: 300300 - RNA, 27 nt, Homo Sapiens
agaugccugaagacaaucggaggggua

SEQ ID NO: 300301 - RNA, 32 nt, Homo Sapiens
aacuaauaaaaugaguuauacuuacauaaaaa

SEQ ID NO: 300302 - RNA, 32 nt, Homo Sapiens
caccgaguucccuaugcagagucccuggugcg

SEQ ID NO: 300303 - RNA, 32 nt, Homo Sapiens
cucuauuacuuguucuuaauucucuguucucu

SEQ ID NO: 300304 - RNA, 32 nt, Homo Sapiens
caccaguugucuuuaagaauggucaguuucgg

SEQ ID NO: 300305 - RNA, 32 nt, Homo Sapiens
aaagagggaacaucacucuuuugccuuuccuu

SEQ ID NO: 300306 - RNA, 32 nt, Homo Sapiens
ugggggcaccgugccccccaccccccugcccu

SEQ ID NO: 300307 - RNA, 32 nt, Homo Sapiens
gaacacauguucaugugacuuaacucagccaa

SEQ ID NO: 300308 - RNA, 32 nt, Homo Sapiens
cagaaugucugaggagugagacacaggcauca

SEQ ID NO: 300309 - RNA, 32 nt, Homo Sapiens
cccaccugucuuggcuuucucauccuucccaa

SEQ ID NO: 300310 - RNA, 32 nt, Homo Sapiens
ucuuuuugcuacuucugcagaccuucccucuc

SEQ ID NO: 300311 - RNA, 32 nt, Homo Sapiens
aguguuuuguacauuucuuuucaaaaagugcc

SEQ ID NO: 300312 - RNA, 32 nt, Homo Sapiens
gaaaacagaaaaguuucaagaagcaggaagaa

SEQ ID NO: 300313 - RNA, 32 nt, Homo Sapiens
auaugacgugugggugggagcaaccaaaguua

SEQ ID NO: 300314 - RNA, 32 nt, Homo Sapiens
cuucccugccuggcccuggagggagcugggug

SEQ ID NO: 300315 - RNA, 27 nt, Homo Sapiens
gacaacuuuuucuucagccauuccagc

SEQ ID NO: 300316 - RNA, 32 nt, Homo Sapiens
ccugucuccucacccacccccagcccuagcau

SEQ ID NO: 300317 - RNA, 28 nt, Homo Sapiens
gauauggugguaccaggagacgauaagu

SEQ ID NO: 300318 - RNA, 32 nt, Homo Sapiens
cauguagcuucuuguccuuuccccucagcugu

SEQ ID NO: 300319 - RNA, 32 nt, Homo Sapiens
ggccuuccacuccaacaguguuuaccagacca

SEQ ID NO: 300320 - RNA, 32 nt, Homo Sapiens
uccggggaggcagggguccugcagguccuggu

SEQ ID NO: 300321 - RNA, 32 nt, Homo Sapiens
uuuguuguuguuguuaaguacuuuuuauucca

SEQ ID NO: 300322 - RNA, 32 nt, Homo Sapiens
ccugguugugguuuuucaugcccucuaccaug

SEQ ID NO: 300323 - RNA, 32 nt, Homo Sapiens
agugccuuagagcagagcugcggccgcggaag

SEQ ID NO: 300324 - RNA, 32 nt, Homo Sapiens
uagaaggauagauucgaggucaugcuuugagc

SEQ ID NO: 300325 - RNA, 32 nt, Homo Sapiens
ugggcuaagguuagcacugccugugguaauaa

SEQ ID NO: 300326 - RNA, 32 nt, Homo Sapiens
ggagagcugguggaagugugucugaacucgga

SEQ ID NO: 300327 - RNA, 32 nt, Homo Sapiens
gagagacagcauugcuccccagcccuccagaa

SEQ ID NO: 300328 - RNA, 32 nt, Homo Sapiens
auauguuguucuaaaauaugucuuagaauccu

SEQ ID NO: 300329 - RNA, 32 nt, Homo Sapiens
gacucugacaggauccggggcugagggaagga

SEQ ID NO: 300330 - RNA, 32 nt, Homo Sapiens
cucuucuggguggaggccgccggccagggacc

SEQ ID NO: 300331 - RNA, 32 nt, Homo Sapiens
aaauuuaccucuucuucagcacuguuuacuau

SEQ ID NO: 300332 - RNA, 32 nt, Homo Sapiens
ccgccccccgcaaaaaaguaaaagucaaacca

SEQ ID NO: 300333 - RNA, 32 nt, Homo Sapiens
gcgguggggggaggagauauaggacaggaaaa

SEQ ID NO: 300334 - RNA, 32 nt, Homo Sapiens
cuagugccauucuccucucuguucagguaaau

SEQ ID NO: 300335 - RNA, 32 nt, Homo Sapiens
cucacccagcuaauuuuuguauuuucaguaga

SEQ ID NO: 300336 - RNA, 32 nt, Homo Sapiens
gucaccaugucauauugugggucuuucaguuc

SEQ ID NO: 300337 - RNA, 32 nt, Homo Sapiens
uuaaggaugugaauaaaaccaccaaauggcau

SEQ ID NO: 300338 - RNA, 32 nt, Homo Sapiens
ggaaaagacaaaugucuugacuguugaccucg

SEQ ID NO: 300339 - RNA, 32 nt, Homo Sapiens
gugcugcacagacuugucaagguuugcuacgu

SEQ ID NO: 300340 - RNA, 32 nt, Homo Sapiens
ccuauuugaggaagagggugucugcccuucac

SEQ ID NO: 300341 - RNA, 32 nt, Homo Sapiens
caggaaagcaccuguccuggccccacaguaug

SEQ ID NO: 300342 - RNA, 32 nt, Homo Sapiens
caagcuauauauaaaaguaugauuacauguaa

SEQ ID NO: 300343 - RNA, 32 nt, Homo Sapiens
caggugcugacuguccgcuguccgcuccugua

SEQ ID NO: 300344 - RNA, 32 nt, Homo Sapiens
auaaaaaaaaaauuauaauaggcugauuuucu

SEQ ID NO: 300345 - RNA, 30 nt, Homo Sapiens
ucaguguaauuaacauaccuaucacucaac

SEQ ID NO: 300346 - RNA, 32 nt, Homo Sapiens
cuauaucuaaucuuuaaaaaucagaaugcuaa

SEQ ID NO: 300347 - RNA, 32 nt, Homo Sapiens
cacagccaaagccccauccccuucauuucccu

SEQ ID NO: 300348 - RNA, 32 nt, Homo Sapiens
cauauuugaaauguauaaguccauaaaauaga

SEQ ID NO: 300349 - RNA, 32 nt, Homo Sapiens
uaaaaccugcuuugcauagaaaucacuuuugc

SEQ ID NO: 300350 - RNA, 32 nt, Homo Sapiens
agacccugcccggcuuggcgauggaguuuccg

SEQ ID NO: 300351 - RNA, 32 nt, Homo Sapiens
agggccuggggaagaggcccugucuagguagc

SEQ ID NO: 300352 - RNA, 32 nt, Homo Sapiens
aucagcugccugaggagcugccacggagcugg

SEQ ID NO: 300353 - RNA, 32 nt, Homo Sapiens
gguuguuuuuacauauggucuauuuaagucug

SEQ ID NO: 300354 - RNA, 32 nt, Homo Sapiens
uuuauuuugucauauuuuuguaaaacggcaga

SEQ ID NO: 300355 - RNA, 32 nt, Homo Sapiens
gccacccugccagcugcagcagguccugggcc

SEQ ID NO: 300356 - RNA, 32 nt, Homo Sapiens
ccagaggggaucuccugaaaccaacucgccug

SEQ ID NO: 300357 - RNA, 32 nt, Homo Sapiens
gguggcucagguuucuccgggcggcggcggcg

SEQ ID NO: 300358 - RNA, 31 nt, Homo Sapiens
aaacauagucucuuaaaccaggcaacuuuca

SEQ ID NO: 300359 - RNA, 31 nt, Homo Sapiens
gccccugcaagguuugggacucuguccacag

SEQ ID NO: 300360 - RNA, 32 nt, Homo Sapiens
gugucuucaucugacaaaauagugugcucaga

SEQ ID NO: 300361 - RNA, 32 nt, Homo Sapiens
agaagcuuaaugaaaagaaauaaaaugccuau

SEQ ID NO: 300362 - RNA, 32 nt, Homo Sapiens
ccuaccccuuccgacugccccaucccucucca

SEQ ID NO: 300363 - RNA, 32 nt, Homo Sapiens
gaaagucauuacuuacuacugcacuccugcuu

SEQ ID NO: 300364 - RNA, 32 nt, Homo Sapiens
uguacuugacuucuuaggauggguagcugaaa

SEQ ID NO: 300365 - RNA, 32 nt, Homo Sapiens
ugcuuuauuggcuuugaaaacacugucagaua

SEQ ID NO: 300366 - RNA, 32 nt, Homo Sapiens
auuaauggaaaauaaugcugauaauauuuaau

SEQ ID NO: 300367 - RNA, 29 nt, Homo Sapiens
agggggauggggcagaggacgaggagugg

SEQ ID NO: 300368 - RNA, 32 nt, Homo Sapiens
gcuugggaugaaaaaggauauugcagcuucag

SEQ ID NO: 300369 - RNA, 29 nt, Homo Sapiens
caggaguucagcugauauuuucuagugug

SEQ ID NO: 300370 - RNA, 32 nt, Homo Sapiens
aggacagcagcaugacagucaccaggacucac

SEQ ID NO: 300371 - RNA, 32 nt, Homo Sapiens
cgugugcccucuccaggauuugaggggcuuaa

SEQ ID NO: 300372 - RNA, 32 nt, Homo Sapiens
uggauuuugagaaagaaaaauaacuucucugc

SEQ ID NO: 300373 - RNA, 32 nt, Homo Sapiens
gcagcguccuccccgacccccagucugggcgc

SEQ ID NO: 300374 - RNA, 32 nt, Homo Sapiens
ugaggggauuuauacauauuuuuagauaaaau

SEQ ID NO: 300375 - RNA, 32 nt, Homo Sapiens
uggaagaacaaaugcccucagcuaaaaggaaa

SEQ ID NO: 300376 - RNA, 32 nt, Homo Sapiens
uagcugauuuuaaaagaaccuauacauucaag

SEQ ID NO: 300377 - RNA, 32 nt, Homo Sapiens
uugaguguucuuuucucccaagugcuauuccu

SEQ ID NO: 300378 - RNA, 32 nt, Homo Sapiens
ucuuggaggucuugcagagcuaggguguguga

SEQ ID NO: 300379 - RNA, 32 nt, Homo Sapiens
aagagcagcccaggaagaaagcaucaggggaa

SEQ ID NO: 300380 - RNA, 32 nt, Homo Sapiens
gauuacauguguacuacggaucagcgccaauu

SEQ ID NO: 300381 - RNA, 32 nt, Homo Sapiens
ccacguuugguaaacuaauaccucugguugac

SEQ ID NO: 300382 - RNA, 32 nt, Homo Sapiens
guauauuguacaguuacaguaaaauucaaccu

SEQ ID NO: 300383 - RNA, 32 nt, Homo Sapiens
uucugcauacauuuuagaaacaucuuagccgu

SEQ ID NO: 300384 - RNA, 32 nt, Homo Sapiens
caguugacagccuacagagaacaaagacugau

SEQ ID NO: 300385 - RNA, 32 nt, Homo Sapiens
uuaagccaaguucacagaugcugcaaguucag

SEQ ID NO: 300386 - RNA, 32 nt, Homo Sapiens
ccucaaaucagaaaacaaaaugaugugcuuug

SEQ ID NO: 300387 - RNA, 32 nt, Homo Sapiens
gaggaccuuuaaaauuuguauaauuuucacag

SEQ ID NO: 300388 - RNA, 32 nt, Homo Sapiens
cggccaugcgcggccccccuggccaagccggc

SEQ ID NO: 300389 - RNA, 32 nt, Homo Sapiens
cugcgguucccuggucccgcgccaacggccug

SEQ ID NO: 300390 - RNA, 32 nt, Homo Sapiens
acaggugucaggcugucacuguucacacaaau

SEQ ID NO: 300391 - RNA, 32 nt, Homo Sapiens
uguugaccaaaauaaaauauaaaggguuuucu

SEQ ID NO: 300392 - RNA, 32 nt, Homo Sapiens
acugggucugcacuugaggguggaggacagca

SEQ ID NO: 300393 - RNA, 32 nt, Homo Sapiens
acaccuuagacagaauaauacaaagcuuuaac

SEQ ID NO: 300394 - RNA, 32 nt, Homo Sapiens
acgaggucaggaguucgagaccagccugccca

SEQ ID NO: 300395 - RNA, 32 nt, Homo Sapiens
uuucuccagcagguggagauuauggaaccuac

SEQ ID NO: 300396 - RNA, 32 nt, Homo Sapiens
agaagcagggcagcuuccuucgccagaggccu

SEQ ID NO: 300397 - RNA, 32 nt, Homo Sapiens
cucacugcaaccuccgccucccagguuuaagc

SEQ ID NO: 300398 - RNA, 32 nt, Homo Sapiens
uuuuucauuucccaacauuuuuuggcuauuau

SEQ ID NO: 300399 - RNA, 32 nt, Homo Sapiens
acuuuuuuacugcgucccgucccgccagcccu

SEQ ID NO: 300400 - RNA, 32 nt, Homo Sapiens
caaaaauggagcuguagaagaggcauguuuaa

SEQ ID NO: 300401 - RNA, 32 nt, Homo Sapiens
guagcaaguagguguucaguacuuauugggua

SEQ ID NO: 300402 - RNA, 30 nt, Homo Sapiens
ugggccaugucggcgccgccggcccugcag

SEQ ID NO: 300403 - RNA, 32 nt, Homo Sapiens
uucgucugccucggccucccaaguagcuggga

SEQ ID NO: 300404 - RNA, 32 nt, Homo Sapiens
guuacccucaucccuguccccagcaugugacu

SEQ ID NO: 300405 - RNA, 32 nt, Homo Sapiens
cagcaggaaaauuuugcaaguuacauaauugu

SEQ ID NO: 300406 - RNA, 28 nt, Homo Sapiens
aguggagggcggccgaugagggcgguuc

SEQ ID NO: 300407 - RNA, 32 nt, Homo Sapiens
aauggguggggaggaugcggcgcacauggccc

SEQ ID NO: 300408 - RNA, 32 nt, Homo Sapiens
uccauaucuccauggcccugucccaggccggc

SEQ ID NO: 300409 - RNA, 32 nt, Homo Sapiens
uuaauauaggauuucgcugugcucuuuugauu

SEQ ID NO: 300410 - RNA, 32 nt, Homo Sapiens
agaguggaagcaggaggaaacccgaagauccu

SEQ ID NO: 300411 - RNA, 32 nt, Homo Sapiens
accaaauggaaacacaugaugaugccucuggg

SEQ ID NO: 300412 - RNA, 32 nt, Homo Sapiens
uuccucauagcuauacuguguacacauaagac

SEQ ID NO: 300413 - RNA, 32 nt, Homo Sapiens
cuuuuagcaugauuuucuuuuaaacugcuuuu

SEQ ID NO: 300414 - RNA, 32 nt, Homo Sapiens
cccucgaggcagagacccuccgcccucuugca

SEQ ID NO: 300415 - RNA, 32 nt, Homo Sapiens
gugacaagcucuuuguuucaguuggaguguuu

SEQ ID NO: 300416 - RNA, 32 nt, Homo Sapiens
ccccaccccgucccguuccguuccgcugccca

SEQ ID NO: 300417 - RNA, 32 nt, Homo Sapiens
agcacuacaagccccuggcccggaggcaccuu

SEQ ID NO: 300418 - RNA, 32 nt, Homo Sapiens
uuauuaaaaaaguguguuccaaaggcauuaaa

SEQ ID NO: 300419 - RNA, 32 nt, Homo Sapiens
cuggccuggacuguuuucucucggcuccccau

SEQ ID NO: 300420 - RNA, 32 nt, Homo Sapiens
gggugggggaggagggagcgugaagguaguga

SEQ ID NO: 300421 - RNA, 32 nt, Homo Sapiens
gguaacuccaauucuugcacaaacacaaaguu

SEQ ID NO: 300422 - RNA, 32 nt, Homo Sapiens
uuuacauacauuaggggaauuuuuuaaaaucu

SEQ ID NO: 300423 - RNA, 32 nt, Homo Sapiens
uugcuuagguuuuuuaauccacugcccgauau

SEQ ID NO: 300424 - RNA, 32 nt, Homo Sapiens
cgaaggccugaagcacaggauuaggacugaag

SEQ ID NO: 300425 - RNA, 32 nt, Homo Sapiens
gaggaggucgucgggggcggcgggcggagacc

SEQ ID NO: 300426 - RNA, 32 nt, Homo Sapiens
cuccccaggaacuuaugaugccuccgaaaacc

SEQ ID NO: 300427 - RNA, 32 nt, Homo Sapiens
guugaaugacuucaucuuaauacaacauggac

SEQ ID NO: 300428 - RNA, 32 nt, Homo Sapiens
ccugaguuaugaaggggagaagggacagauga

SEQ ID NO: 300429 - RNA, 32 nt, Homo Sapiens
gccuuaagaacauuugaugcaagauggccagc

SEQ ID NO: 300430 - RNA, 32 nt, Homo Sapiens
aaucacugcuccauauuugccaguggaggaaa

SEQ ID NO: 300431 - RNA, 32 nt, Homo Sapiens
gccuaucugucccaggcugggccacugccucc

SEQ ID NO: 300432 - RNA, 32 nt, Homo Sapiens
acauauugugcagcuguugguuuucauguagu

SEQ ID NO: 300433 - RNA, 32 nt, Homo Sapiens
cccugcaggacacuccugcuguccuugcgggg

SEQ ID NO: 300434 - RNA, 32 nt, Homo Sapiens
gcucuucggaaaccaaggaacaagccaccugc

SEQ ID NO: 300435 - RNA, 32 nt, Homo Sapiens
ccccggcugcuggcagaaugguggcuccagcg

SEQ ID NO: 300436 - RNA, 32 nt, Homo Sapiens
gcagacgaacaugggaaugaucugaaaggcuc

SEQ ID NO: 300437 - RNA, 32 nt, Homo Sapiens
gggauacaagagaggagauggggucccggcac

SEQ ID NO: 300438 - RNA, 32 nt, Homo Sapiens
ugacuucacagugucagugcaguuuguguaaa

SEQ ID NO: 300439 - RNA, 32 nt, Homo Sapiens
aagggaagggcuggccgcucacugcuugggcc

SEQ ID NO: 300440 - RNA, 32 nt, Homo Sapiens
cacuuucagccuuuauacuaaauaagaguauu

SEQ ID NO: 300441 - RNA, 32 nt, Homo Sapiens
gggcuuugccagcaggcaguggagguggcacg

SEQ ID NO: 300442 - RNA, 32 nt, Homo Sapiens
cguggcuccuucuccuuucucagugcagacuc

SEQ ID NO: 300443 - RNA, 32 nt, Homo Sapiens
gcaaaucgaugugacuggucugcugcugcagg

SEQ ID NO: 300444 - RNA, 32 nt, Homo Sapiens
cagccgaggcuacaaaaacuacccuggauccu

SEQ ID NO: 300445 - RNA, 32 nt, Homo Sapiens
uggcccggaguggagggcgcgcggucccagcc

SEQ ID NO: 300446 - RNA, 32 nt, Homo Sapiens
cuuugggaaaagcaucauuuuaccaaacauac

SEQ ID NO: 300447 - RNA, 32 nt, Homo Sapiens
ggguuggggucgcccgcgagagucucuugagc

SEQ ID NO: 300448 - RNA, 32 nt, Homo Sapiens
ucucugaaagacuagacugucuuauauuauga

SEQ ID NO: 300449 - RNA, 32 nt, Homo Sapiens
gcucuagugauacaaguuuuacuagugauaaa

SEQ ID NO: 300450 - RNA, 32 nt, Homo Sapiens
gagcaaaguccuccuccccuacgcccuuacau

SEQ ID NO: 300451 - RNA, 32 nt, Homo Sapiens
gaagaaaacagguuccauauuccuucuuugug

SEQ ID NO: 300452 - RNA, 32 nt, Homo Sapiens
gcagggucaugaaguuuuuucuucagugaagg

SEQ ID NO: 300453 - RNA, 32 nt, Homo Sapiens
auuaaucaggcuauacauaaguauuguauuua

SEQ ID NO: 300454 - RNA, 32 nt, Homo Sapiens
guuuacuucuaaacagucauuuucuaacugaa

SEQ ID NO: 300455 - RNA, 32 nt, Homo Sapiens
agcagcaacucgacugguucucccaggagcag

SEQ ID NO: 300456 - RNA, 32 nt, Homo Sapiens
ggugauagcauuaaauguucaucuagaguuaa

SEQ ID NO: 300457 - RNA, 32 nt, Homo Sapiens
cccaggaauggcagcucuguguucugagggga

SEQ ID NO: 300458 - RNA, 32 nt, Homo Sapiens
gacccgaaauuccaaucuggcaaacuuucagc

SEQ ID NO: 300459 - RNA, 32 nt, Homo Sapiens
gcgguugccaccgaggaggcggcggcccugcg

SEQ ID NO: 300460 - RNA, 32 nt, Homo Sapiens
ugcaauuguuugugaaauacaaaccuuguuac

SEQ ID NO: 300461 - RNA, 32 nt, Homo Sapiens
cugaacacuuggaggaauaaaguucuguuuuu

SEQ ID NO: 300462 - RNA, 32 nt, Homo Sapiens
augaccuauuuaaugccauuuguguuucaugc

SEQ ID NO: 300463 - RNA, 32 nt, Homo Sapiens
gcugcuggaagacgaggagcgcgucgugcgcc

SEQ ID NO: 300464 - RNA, 32 nt, Homo Sapiens
auucuaccuguuuuaguugugaagguaguuuu

SEQ ID NO: 300465 - RNA, 32 nt, Homo Sapiens
ccugaauguauuaaaaacuaauuuuggaaaaa

SEQ ID NO: 300466 - RNA, 32 nt, Homo Sapiens
acggaugauuuuuucuucagggaagauggugc

SEQ ID NO: 300467 - RNA, 32 nt, Homo Sapiens
gcugcccuggcucuccuucuggucaguaccca

SEQ ID NO: 300468 - RNA, 32 nt, Homo Sapiens
augucugcugggugugaccauguuuccucuca

SEQ ID NO: 300469 - RNA, 32 nt, Homo Sapiens
aauugcuugagccugggagauggagguugcag

SEQ ID NO: 300470 - RNA, 32 nt, Homo Sapiens
aggcuaauuuuuuuauuuuuuauagagacgau

SEQ ID NO: 300471 - RNA, 32 nt, Homo Sapiens
gugagaugcaaaucaauuucauaaaugcuaaa

SEQ ID NO: 300472 - RNA, 32 nt, Homo Sapiens
cggccuccagucacucugucccgcccccugau

SEQ ID NO: 300473 - RNA, 32 nt, Homo Sapiens
uuacacuccaggucaauuuacuaaggaugaau

SEQ ID NO: 300474 - RNA, 32 nt, Homo Sapiens
guaauucauucuggagaaaacuucuacaagug

SEQ ID NO: 300475 - RNA, 32 nt, Homo Sapiens
uguacguggaugggagcagcuuugccaacccu

SEQ ID NO: 300476 - RNA, 32 nt, Homo Sapiens
cugguuugaucccagggugcgcuucgggacca

SEQ ID NO: 300477 - RNA, 32 nt, Homo Sapiens
cccuuccucugggagcucugugccacugaggu

SEQ ID NO: 300478 - RNA, 32 nt, Homo Sapiens
uaguuuaacugaaaguuuaacuauuuaaaaga

SEQ ID NO: 300479 - RNA, 32 nt, Homo Sapiens
guuuuagaaaacuguuuaaaacaaagagcaau

SEQ ID NO: 300480 - RNA, 32 nt, Homo Sapiens
uguuauuucuaaaacuucucuguaugucugac

SEQ ID NO: 300481 - RNA, 32 nt, Homo Sapiens
cagcagcagcagcagcagcagcagcagggaaa

SEQ ID NO: 300482 - RNA, 32 nt, Homo Sapiens
uuucaauguaucugccucuccacacaccagcc

SEQ ID NO: 300483 - RNA, 32 nt, Homo Sapiens
uuugucacaauccuaacacauuaucgggagca

SEQ ID NO: 300484 - RNA, 32 nt, Homo Sapiens
cuucaaucccaaaaauuauaaaacugaaaccc

SEQ ID NO: 300485 - RNA, 32 nt, Homo Sapiens
ucuuuggcccagccaagcugcccucacuacag

SEQ ID NO: 300486 - RNA, 32 nt, Homo Sapiens
ccugucaguaaauccccugugcauugacuaga

SEQ ID NO: 300487 - RNA, 32 nt, Homo Sapiens
aaguucuucuauuucaaacguuaauuuugcuu

SEQ ID NO: 300488 - RNA, 32 nt, Homo Sapiens
aagcgccugccuguuuuccccggggagaaggg

SEQ ID NO: 300489 - RNA, 32 nt, Homo Sapiens
ccagucuuugcauaggagaauguuagacauuc

SEQ ID NO: 300490 - RNA, 32 nt, Homo Sapiens
ggcuugacauauuuauacuguaacauuguaau

SEQ ID NO: 300491 - RNA, 32 nt, Homo Sapiens
gccacugccugggugaagaaaaagcacugcua

SEQ ID NO: 300492 - RNA, 32 nt, Homo Sapiens
cuuuaagcaaauaaauuaugucauuauugaaa

SEQ ID NO: 300493 - RNA, 32 nt, Homo Sapiens
aaugaccaaaagaugggacuccuccuuuauuc

SEQ ID NO: 300494 - RNA, 32 nt, Homo Sapiens
uggauguugacguauauauaaacagaacuccc

SEQ ID NO: 300495 - RNA, 32 nt, Homo Sapiens
uaauaaaaacaaaaacaagugucugaauugua

SEQ ID NO: 300496 - RNA, 32 nt, Homo Sapiens
ggggcugggcuaggcgcgcgcuuggagagcau

SEQ ID NO: 300497 - RNA, 32 nt, Homo Sapiens
uccugccuccuccgcccgacgccccgcguccc

SEQ ID NO: 300498 - RNA, 32 nt, Homo Sapiens
gugcauuucugcuggugacuggaggagggacc

SEQ ID NO: 300499 - RNA, 32 nt, Homo Sapiens
gaaggaaggaccaggcuuccagcuccucugca

SEQ ID NO: 300500 - RNA, 32 nt, Homo Sapiens
cccgucggggagaggacgcagcucguaggggg

SEQ ID NO: 300501 - RNA, 31 nt, Homo Sapiens
guugguugcucagcuaugcaagauugugccc

SEQ ID NO: 300502 - RNA, 32 nt, Homo Sapiens
uugccuauuaaaccucugcuccuggccaggca

SEQ ID NO: 300503 - RNA, 32 nt, Homo Sapiens
ugcugcgagcccagccccgcccuggagcccgc

SEQ ID NO: 300504 - RNA, 29 nt, Homo Sapiens
uaccauguccaagccccccgaccuccugc

SEQ ID NO: 300505 - RNA, 32 nt, Homo Sapiens
cugaauccugaacacaggcaccaggacuacug

SEQ ID NO: 300506 - RNA, 32 nt, Homo Sapiens
agggugguagaggagguaagacaguagggaaa

SEQ ID NO: 300507 - RNA, 31 nt, Homo Sapiens
gcgcugugucucacacucagagccuccuugc

SEQ ID NO: 300508 - RNA, 32 nt, Homo Sapiens
ccuauguuuauuugaaauuucauuuuuaaaga

SEQ ID NO: 300509 - RNA, 32 nt, Homo Sapiens
auguuugaagucuuguguauuugucuguguua

SEQ ID NO: 300510 - RNA, 32 nt, Homo Sapiens
aagugaaggauuuuugucauacagccaguaag

SEQ ID NO: 300511 - RNA, 32 nt, Homo Sapiens
uccacauagagaaaagaaagauaccuaaccuu

SEQ ID NO: 300512 - RNA, 32 nt, Homo Sapiens
gggguuggcgacggagcgcguuggugccagga

SEQ ID NO: 300513 - RNA, 32 nt, Homo Sapiens
gagcucuuggccccgcugcugcgcccacacuc

SEQ ID NO: 300514 - RNA, 32 nt, Homo Sapiens
ggaggauccuucccuccccgcuuucugaaccu

SEQ ID NO: 300515 - RNA, 32 nt, Homo Sapiens
gaccugcgcuagccccacccagccccccagug

SEQ ID NO: 300516 - RNA, 32 nt, Homo Sapiens
gagucgggggagaggauggcagagacuuuauu

SEQ ID NO: 300517 - RNA, 32 nt, Homo Sapiens
uuucccguuggcgccgcggcccgggcgcuuca

SEQ ID NO: 300518 - RNA, 32 nt, Homo Sapiens
ggggagcgaggcacggaguguaccucacagcc

SEQ ID NO: 300519 - RNA, 32 nt, Homo Sapiens
ugaccuugaggguggaagccacaggcuaauau

SEQ ID NO: 300520 - RNA, 32 nt, Homo Sapiens
ccaaacucccugaucugaaggaucuuccgggc

SEQ ID NO: 300521 - RNA, 32 nt, Homo Sapiens
cauacaguuuucacauuuccugcaucucucag

SEQ ID NO: 300522 - RNA, 32 nt, Homo Sapiens
cggaggucaccauggcagcugccuuggcucgg

SEQ ID NO: 300523 - RNA, 32 nt, Homo Sapiens
gccucggagagccuaagagcacccgcacacuu

SEQ ID NO: 300524 - RNA, 32 nt, Homo Sapiens
uccgcugggcccgcgcugcucgccccgggcca

SEQ ID NO: 300525 - RNA, 32 nt, Homo Sapiens
cucuggaguccgcccugccccucccccggccc

SEQ ID NO: 300526 - RNA, 32 nt, Homo Sapiens
ggaucuucugcaacugucgucuccaugcgccc

SEQ ID NO: 300527 - RNA, 32 nt, Homo Sapiens
aagaaaaauuuuuuaaagugcacuaaaaugac

SEQ ID NO: 300528 - RNA, 32 nt, Homo Sapiens
uuguguaguuuauuuaucuuguacauauguau

SEQ ID NO: 300529 - RNA, 32 nt, Homo Sapiens
ucuaaauagauacuuuugauaauagauaacug

SEQ ID NO: 300530 - RNA, 32 nt, Homo Sapiens
cugcaacuuccacuucccggguucaagcgauu

SEQ ID NO: 300531 - RNA, 32 nt, Homo Sapiens
uaggcuccggcguguggccgcggccgccgccg

SEQ ID NO: 300532 - RNA, 32 nt, Homo Sapiens
uguuaguuuuaacuguuuugaaaauaauaagu

SEQ ID NO: 300533 - RNA, 32 nt, Homo Sapiens
ucugaucagcaugggaaugugccucggccucc

SEQ ID NO: 300534 - RNA, 32 nt, Homo Sapiens
ccucugacaagaugaaugggcacugccugccc

SEQ ID NO: 300535 - RNA, 30 nt, Homo Sapiens
ggagagucugguccugccuagcucagauuu

SEQ ID NO: 300536 - RNA, 32 nt, Homo Sapiens
acuuauugauccuacaagcuuacuacacauaa

SEQ ID NO: 300537 - RNA, 32 nt, Homo Sapiens
gggucugcagggaacuggacugucccauggcc

SEQ ID NO: 300538 - RNA, 32 nt, Homo Sapiens
cacagagaggggcuguguaauacuggcugccu

SEQ ID NO: 300539 - RNA, 32 nt, Homo Sapiens
aauuagccgggcgugguagcgcauggcuguaa

SEQ ID NO: 300540 - RNA, 32 nt, Homo Sapiens
uucaacagcugaugcccuauaaccccugccug

SEQ ID NO: 300541 - RNA, 30 nt, Homo Sapiens
aaaauggauaaaaucugauauguauuguuu

SEQ ID NO: 300542 - RNA, 32 nt, Homo Sapiens
cuuucacagagaaaaaauauuucccuugaaaa

SEQ ID NO: 300543 - RNA, 32 nt, Homo Sapiens
uuuguuugggauuuccuuuucuuucuuuccuu

SEQ ID NO: 300544 - RNA, 32 nt, Homo Sapiens
aaauguaguuuuucauuuccuacauuuauuag

SEQ ID NO: 300545 - RNA, 32 nt, Homo Sapiens
cuuccauaaacaagugcaauuuuuuaaagugc

SEQ ID NO: 300546 - RNA, 32 nt, Homo Sapiens
acuuugggacgcccacguggcagaccgugacc

SEQ ID NO: 300547 - RNA, 32 nt, Homo Sapiens
agauucaugauuaauuauguacacaaaaauau

SEQ ID NO: 300548 - RNA, 32 nt, Homo Sapiens
guccugaguggccuuaggaagcugcaguggcc

SEQ ID NO: 300549 - RNA, 32 nt, Homo Sapiens
uaaucauaaaaugaacaaaaccucagagcccg

SEQ ID NO: 300550 - RNA, 32 nt, Homo Sapiens
cgaggccgcgccccgcgguggccgcaagacgc

SEQ ID NO: 300551 - RNA, 32 nt, Homo Sapiens
ccagccucuagggaccgcuccucccuuuuucc

SEQ ID NO: 300552 - RNA, 32 nt, Homo Sapiens
caccguuuucccuuggacuucuuggaaggcag

SEQ ID NO: 300553 - RNA, 32 nt, Homo Sapiens
gcccuccgacccuggaggaguucaagcagcug

SEQ ID NO: 300554 - RNA, 32 nt, Homo Sapiens
ccuuuccacuaggauuuucucauccucaucug

SEQ ID NO: 300555 - RNA, 32 nt, Homo Sapiens
uacccacccucccccagacccccguuuccuca

SEQ ID NO: 300556 - RNA, 32 nt, Homo Sapiens
uacuguaugugggaaggccuucauccagaagu

SEQ ID NO: 300557 - RNA, 32 nt, Homo Sapiens
uccccugcugagccccgagcgccgggccagca

SEQ ID NO: 300558 - RNA, 32 nt, Homo Sapiens
guccagcccccaccccaccuccugggacccuc

SEQ ID NO: 300559 - RNA, 32 nt, Homo Sapiens
ugaagcuguggauaaauuggaauuuuuuaugu

SEQ ID NO: 300560 - RNA, 32 nt, Homo Sapiens
ggcuugcccucccggcacccuggcccaggagg

SEQ ID NO: 300561 - RNA, 32 nt, Homo Sapiens
aaagguguuguaauggugaaaacgucuuccuu

SEQ ID NO: 300562 - RNA, 27 nt, Homo Sapiens
uaaucacauuaauuauguaugacaggu

SEQ ID NO: 300563 - RNA, 32 nt, Homo Sapiens
uggcagugcggcggguuacggccuggucagac

SEQ ID NO: 300564 - RNA, 32 nt, Homo Sapiens
uugagcuccuuggauccuggcuccuggacacc

SEQ ID NO: 300565 - RNA, 32 nt, Homo Sapiens
uuaauacuucaugaucacuugaauuaaaguuu

SEQ ID NO: 300566 - RNA, 32 nt, Homo Sapiens
ucuucaucucugugucccaucucuacaaccca

SEQ ID NO: 300567 - RNA, 32 nt, Homo Sapiens
acaguuaauguuucagucaauguauuaucugu

SEQ ID NO: 300568 - RNA, 32 nt, Homo Sapiens
uaaaugauaucugaguaaauagacuugaggaa

SEQ ID NO: 300569 - RNA, 32 nt, Homo Sapiens
uucaggagcuggauggcgugggacaugugcaa

SEQ ID NO: 300570 - RNA, 32 nt, Homo Sapiens
auuuucauuugggucuuaacuuauuggaacug

SEQ ID NO: 300571 - RNA, 30 nt, Homo Sapiens
gugcgccggcaccugccgccggagacaugu

SEQ ID NO: 300572 - RNA, 32 nt, Homo Sapiens
gcgugccuaguagcugugaacccggcgcgagg

SEQ ID NO: 300573 - RNA, 32 nt, Homo Sapiens
uggcaugguggauguuuucauguuguuccgcc

SEQ ID NO: 300574 - RNA, 32 nt, Homo Sapiens
aacgucaaccaugguagcaaauuggugaggcu

SEQ ID NO: 300575 - RNA, 32 nt, Homo Sapiens
uuaaaaugcuaguauaacuagauaguauauaa

SEQ ID NO: 300576 - RNA, 32 nt, Homo Sapiens
gauggccccacccagaccgagagacacaguga

SEQ ID NO: 300577 - RNA, 32 nt, Homo Sapiens
auuagcaauuuucauuuauuccuuccauauau

SEQ ID NO: 300578 - RNA, 32 nt, Homo Sapiens
uggcuugguguguaugcucuucauuguguaaa

SEQ ID NO: 300579 - RNA, 32 nt, Homo Sapiens
guguggggaaaggguguuuuugguagagcuug

SEQ ID NO: 300580 - RNA, 32 nt, Homo Sapiens
uuccuguccuccucggccccagguccagcggu

SEQ ID NO: 300581 - RNA, 32 nt, Homo Sapiens
acaguucuccaguccuucucuuucgucaguau

SEQ ID NO: 300582 - RNA, 32 nt, Homo Sapiens
acagaaaacccacagccagagccccugggccc

SEQ ID NO: 300583 - RNA, 32 nt, Homo Sapiens
aauaaauagaaagaguucuauggagacuuugc

SEQ ID NO: 300584 - RNA, 32 nt, Homo Sapiens
ugaggcccaagccuggagcuuacccaggugcg

SEQ ID NO: 300585 - RNA, 32 nt, Homo Sapiens
ccacuccugaugccauggcuagaguggccccc

SEQ ID NO: 300586 - RNA, 32 nt, Homo Sapiens
ccccuacagcccuguuuguuccugcuucucau

SEQ ID NO: 300587 - RNA, 32 nt, Homo Sapiens
aaugcuguggcccuucccuuuaccaacagaaa

SEQ ID NO: 300588 - RNA, 32 nt, Homo Sapiens
gucuuccaggacuagaaccuuguguccuuuga

SEQ ID NO: 300589 - RNA, 32 nt, Homo Sapiens
uugcuugcugcccugcaucuuaaggcguauuc

SEQ ID NO: 300590 - RNA, 32 nt, Homo Sapiens
caguuuuugaccaagaaucagaagcccaaggg

SEQ ID NO: 300591 - RNA, 32 nt, Homo Sapiens
gaguucugguucaugcagacaaagcccugucc

SEQ ID NO: 300592 - RNA, 32 nt, Homo Sapiens
acuuguaaaugaggugcaaauaaaaugcagau

SEQ ID NO: 300593 - RNA, 32 nt, Homo Sapiens
uagggaaaguuaaaaguguugauuacauaauc

SEQ ID NO: 300594 - RNA, 32 nt, Homo Sapiens
gcgaggcgcgcccuggagcugcuagagauccg

SEQ ID NO: 300595 - RNA, 32 nt, Homo Sapiens
agguugcagugagccaagauuaugucacugca

SEQ ID NO: 300596 - RNA, 32 nt, Homo Sapiens
aauucccggcccggccggcgugagcgcagcgc

SEQ ID NO: 300597 - RNA, 32 nt, Homo Sapiens
uguacuauauauaauguuugugucauguauau

SEQ ID NO: 300598 - RNA, 32 nt, Homo Sapiens
gguaacaggggcugccugagguccuggagaag

SEQ ID NO: 300599 - RNA, 32 nt, Homo Sapiens
ucccugcccagcugugucuucuguuggaagaa

SEQ ID NO: 300600 - RNA, 29 nt, Homo Sapiens
uauggguagagaguauauuuucugcugua

SEQ ID NO: 300601 - RNA, 32 nt, Homo Sapiens
accuguggagacggugaucuugucuuuaaaac

SEQ ID NO: 300602 - RNA, 32 nt, Homo Sapiens
ccagcccugcgguuaaauguuccugaaauaau

SEQ ID NO: 300603 - RNA, 32 nt, Homo Sapiens
gcggaguggaccgggagcuggugacgauggcg

SEQ ID NO: 300604 - RNA, 32 nt, Homo Sapiens
agaaaaccuggagacgggauaugaagaucaau

SEQ ID NO: 300605 - RNA, 32 nt, Homo Sapiens
uuaacuuugcuuaauuccucaggcuuugcgau

SEQ ID NO: 300606 - RNA, 32 nt, Homo Sapiens
uagaugccugcauggguccuggcgauuauuuu

SEQ ID NO: 300607 - RNA, 32 nt, Homo Sapiens
uguguuggauggcaugagauuaugugaauguu

SEQ ID NO: 300608 - RNA, 32 nt, Homo Sapiens
auuccuagacugcccugagaggucagguuuua

SEQ ID NO: 300609 - RNA, 32 nt, Homo Sapiens
cccagaccuucccugauuggugucucagcauu

SEQ ID NO: 300610 - RNA, 32 nt, Homo Sapiens
gauacauauaauuuauaaugauaugggcaguu

SEQ ID NO: 300611 - RNA, 31 nt, Homo Sapiens
cggcccuggcacugccccuugcauuaggucu

SEQ ID NO: 300612 - RNA, 32 nt, Homo Sapiens
aaucugaaagagauucuaaaauauauuacaga

SEQ ID NO: 300613 - RNA, 32 nt, Homo Sapiens
gguuauuuauuuugauuuuagcauuaaauguc

SEQ ID NO: 300614 - RNA, 32 nt, Homo Sapiens
uccagccccuggggcagaacuuucucgccccc

SEQ ID NO: 300615 - RNA, 32 nt, Homo Sapiens
aagaaaaaagugcuuaauaaaaaugaugggga

SEQ ID NO: 300616 - RNA, 32 nt, Homo Sapiens
agcaguucaaggauuuccagcggcggauccug

SEQ ID NO: 300617 - RNA, 32 nt, Homo Sapiens
gcaaacaauggcaaauccagcucuuccaugau

SEQ ID NO: 300618 - RNA, 32 nt, Homo Sapiens
aaucaugcuuaaaauauuauuaccagugaaca

SEQ ID NO: 300619 - RNA, 32 nt, Homo Sapiens
aaugaacuugaauaaacucuggacaaugacca

SEQ ID NO: 300620 - RNA, 32 nt, Homo Sapiens
gaggaggcagguggaggagcugcggguuuuca

SEQ ID NO: 300621 - RNA, 32 nt, Homo Sapiens
ugagaacugugcugguggagagguccuagagc

SEQ ID NO: 300622 - RNA, 32 nt, Homo Sapiens
ugggagcuggaacccaggcagguaaggcccug

SEQ ID NO: 300623 - RNA, 32 nt, Homo Sapiens
gaugaguccagggcagcagccaucacaaauau

SEQ ID NO: 300624 - RNA, 32 nt, Homo Sapiens
cagggugggaccagccugugaccucucaguca

SEQ ID NO: 300625 - RNA, 29 nt, Homo Sapiens
agggacgggguacagaggauagugugggu

SEQ ID NO: 300626 - RNA, 32 nt, Homo Sapiens
gaugguggcaucgggcugcugcugcccaugca

SEQ ID NO: 300627 - RNA, 32 nt, Homo Sapiens
guaguucaaaaauaugaugugagcuaguuaag

SEQ ID NO: 300628 - RNA, 32 nt, Homo Sapiens
gggcggccgcgugguaucucccgagggcugcu

SEQ ID NO: 300629 - RNA, 32 nt, Homo Sapiens
aaaacaaaacaauguaaguaaaggauauuucu

SEQ ID NO: 300630 - RNA, 32 nt, Homo Sapiens
gagcaaaaauccagaccuuguuucucuugcca

SEQ ID NO: 300631 - RNA, 32 nt, Homo Sapiens
gucacauacaccugguggccaagccucugcug

SEQ ID NO: 300632 - RNA, 32 nt, Homo Sapiens
uaauaugcuuuguauuuaacuaccugcuuccc

SEQ ID NO: 300633 - RNA, 32 nt, Homo Sapiens
gaggcaggggagaggacacaggguggccucaa

SEQ ID NO: 300634 - RNA, 31 nt, Homo Sapiens
gcagagguuucagugagccaagauugcgcca

SEQ ID NO: 300635 - RNA, 32 nt, Homo Sapiens
cacaagauggguggccaaacucccagcucagg

SEQ ID NO: 300636 - RNA, 32 nt, Homo Sapiens
uucaagugagccaggaaagcagcaaaggaaag

SEQ ID NO: 300637 - RNA, 32 nt, Homo Sapiens
gcugucuggagcagcaggaucccgggacagga

SEQ ID NO: 300638 - RNA, 32 nt, Homo Sapiens
uuaugaagggccuauauaaaucuuuugcuuac

SEQ ID NO: 300639 - RNA, 32 nt, Homo Sapiens
agggcaggagggcggagcaggcggcggugcag

SEQ ID NO: 300640 - RNA, 32 nt, Homo Sapiens
cuucuccauuaauacccaugcuuuguuuuuca

SEQ ID NO: 300641 - RNA, 32 nt, Homo Sapiens
gagccagggcugcggcacaugugcugugaaac

SEQ ID NO: 300642 - RNA, 32 nt, Homo Sapiens
guuuuucuucuguggugagugaaacaaucuga

SEQ ID NO: 300643 - RNA, 32 nt, Homo Sapiens
auuuugagaaaguuuuauuaagcuucucgguc

SEQ ID NO: 300644 - RNA, 32 nt, Homo Sapiens
uuucagaagcuugaaggaaaccaagaggagag

SEQ ID NO: 300645 - RNA, 32 nt, Homo Sapiens
uccccgaguggcggccggagccucgaaaagag

SEQ ID NO: 300646 - RNA, 32 nt, Homo Sapiens
auugauggcaggcaucucuggguggaagcgau

SEQ ID NO: 300647 - RNA, 32 nt, Homo Sapiens
auacuuuuggauucuuuuuuuuacauuuaaua

SEQ ID NO: 300648 - RNA, 32 nt, Homo Sapiens
aaguacggccccugcccucccuuccccugucc

SEQ ID NO: 300649 - RNA, 32 nt, Homo Sapiens
cccuaggagacggagucaaacuaaacuugugg

SEQ ID NO: 300650 - RNA, 32 nt, Homo Sapiens
caaguguauauaaaugugaaaauggaggaaga

SEQ ID NO: 300651 - RNA, 32 nt, Homo Sapiens
cugcgagugacccggcgggcgagcuccgugcu

SEQ ID NO: 300652 - RNA, 32 nt, Homo Sapiens
uguuuguuaauacauauuuauuagagugaugu

SEQ ID NO: 300653 - RNA, 32 nt, Homo Sapiens
cccuuagccuccccucccucccggccccucac

SEQ ID NO: 300654 - RNA, 32 nt, Homo Sapiens
ccagccccauucccccacuccuccccacuugc

SEQ ID NO: 300655 - RNA, 32 nt, Homo Sapiens
ugcgcuacugggcgggggaggggcggccugcc

SEQ ID NO: 300656 - RNA, 32 nt, Homo Sapiens
gcugaagaggaaaaccacgugcuuacuccaca

SEQ ID NO: 300657 - RNA, 32 nt, Homo Sapiens
aaauuauuacuacacuuuauuacuacacuugc

SEQ ID NO: 300658 - RNA, 32 nt, Homo Sapiens
cugaccuucagcaaaguucuugaaauuuaaga

SEQ ID NO: 300659 - RNA, 32 nt, Homo Sapiens
ggaguggaugaugcucguguguccucugcaag

SEQ ID NO: 300660 - RNA, 32 nt, Homo Sapiens
ugaggagcagccagcgggaggcggcggcgagu

SEQ ID NO: 300661 - RNA, 32 nt, Homo Sapiens
uuggcugacagugccaccuggagcuggucucu

SEQ ID NO: 300662 - RNA, 32 nt, Homo Sapiens
uaaacuauaucauauuacuaggacuuaauaua

SEQ ID NO: 300663 - RNA, 32 nt, Homo Sapiens
gcgucgcucccuccccgagcuggcccagcaca

SEQ ID NO: 300664 - RNA, 32 nt, Homo Sapiens
gguagccgcgcgcugggggugggcgccgcucg

SEQ ID NO: 300665 - RNA, 32 nt, Homo Sapiens
cugcucaaccucaccgagaggcaggucaagau

SEQ ID NO: 300666 - RNA, 32 nt, Homo Sapiens
gccccacccaccccaaggcuggagccgcugca

SEQ ID NO: 300667 - RNA, 32 nt, Homo Sapiens
gacuguugugaggcuuggcaaguuuugucuaa

SEQ ID NO: 300668 - RNA, 32 nt, Homo Sapiens
ucccaauaugagccuacugauguuguugauaa

SEQ ID NO: 300669 - RNA, 32 nt, Homo Sapiens
gaggaggaaaaguuuaacaugaacuaacauuu

SEQ ID NO: 300670 - RNA, 31 nt, Homo Sapiens
cccaaaaugaaaacccaagacgauggaguau

SEQ ID NO: 300671 - RNA, 32 nt, Homo Sapiens
caggcucugggcggagggcagcagccccuggg

SEQ ID NO: 300672 - RNA, 32 nt, Homo Sapiens
gagcuggggucuuggaggaagagaggauggcg

SEQ ID NO: 300673 - RNA, 32 nt, Homo Sapiens
gggcccagauauucacuauuaaguguccagga

SEQ ID NO: 300674 - RNA, 32 nt, Homo Sapiens
cucccuccagaccuggccgaggcagugggagu

SEQ ID NO: 300675 - RNA, 32 nt, Homo Sapiens
gguaggagccugcacaggauguguguguaugg

SEQ ID NO: 300676 - RNA, 32 nt, Homo Sapiens
uguuugcgcuguggguguccaaggcugggugu

SEQ ID NO: 300677 - RNA, 32 nt, Homo Sapiens
uuguugaaaccagugggugagaaggacaccug

SEQ ID NO: 300678 - RNA, 32 nt, Homo Sapiens
ggccuugaggcuuuggaccauugguuacaaaa

SEQ ID NO: 300679 - RNA, 32 nt, Homo Sapiens
aaagcaaaaagaaaaugcugcauaaaaauacc

SEQ ID NO: 300680 - RNA, 32 nt, Homo Sapiens
gccucgcgggacgcgggcagugcggagaccgc

SEQ ID NO: 300681 - RNA, 32 nt, Homo Sapiens
uagggaggggugcacaguguucccuccuggca

SEQ ID NO: 300682 - RNA, 32 nt, Homo Sapiens
cacgccaaucccaaaggcaugcagauggcugu

SEQ ID NO: 300683 - RNA, 32 nt, Homo Sapiens
aacuuaauaaaacaggugguuggcugcauuuu

SEQ ID NO: 300684 - RNA, 32 nt, Homo Sapiens
gugugagcugaaucgugacuugcuucccaccu

SEQ ID NO: 300685 - RNA, 32 nt, Homo Sapiens
guuuuuggucuccucagagagcuccaucacac

SEQ ID NO: 300686 - RNA, 32 nt, Homo Sapiens
acaugaggugcagaggcccacccagcccccua

SEQ ID NO: 300687 - RNA, 32 nt, Homo Sapiens
ccuuccuggugcccugaucuccugcacugagc

SEQ ID NO: 300688 - RNA, 32 nt, Homo Sapiens
gccaaccuucccucccccaacccuggggccgc

SEQ ID NO: 300689 - RNA, 32 nt, Homo Sapiens
ugaggcccuaaaaagccagagaccucacuccc

SEQ ID NO: 300690 - RNA, 32 nt, Homo Sapiens
gaaggucacaaggccugggguuguucacacca

SEQ ID NO: 300691 - RNA, 32 nt, Homo Sapiens
ggucuuugucaucuuggugcugugagagguag

SEQ ID NO: 300692 - RNA, 30 nt, Homo Sapiens
cggacgggagguggcggagguggcggcgga

SEQ ID NO: 300693 - RNA, 32 nt, Homo Sapiens
ggcauuuucugccuaugcuggaauagcucccu

SEQ ID NO: 300694 - RNA, 32 nt, Homo Sapiens
aacagcccagggaacuggucucuuuucccuuu

SEQ ID NO: 300695 - RNA, 31 nt, Homo Sapiens
guaguuuuacagaaaaaagaggacaauauug

SEQ ID NO: 300696 - RNA, 32 nt, Homo Sapiens
auuaaauugccaacuuggcauuauuauuaaac

SEQ ID NO: 300697 - RNA, 30 nt, Homo Sapiens
uacaggggcaggcgcugcuauuucccggca

SEQ ID NO: 300698 - RNA, 32 nt, Homo Sapiens
aagcauuccuguggcacccaucaccauuucaa

SEQ ID NO: 300699 - RNA, 32 nt, Homo Sapiens
uuguaaggacuuucuuuuuucccuaagagacu

SEQ ID NO: 300700 - RNA, 32 nt, Homo Sapiens
acuuagaaauaccaugcacuuggggguaccaa

SEQ ID NO: 300701 - RNA, 32 nt, Homo Sapiens
guccccuguaagccccuuaauuucauacaguc

SEQ ID NO: 300702 - RNA, 32 nt, Homo Sapiens
cuccccucuggucuccauucucuucagcuccc

SEQ ID NO: 300703 - RNA, 32 nt, Homo Sapiens
uguccacccagcuacugguucauuugaguaga

SEQ ID NO: 300704 - RNA, 32 nt, Homo Sapiens
acuguucagacaccuccuaaccuccgucauga

SEQ ID NO: 300705 - RNA, 32 nt, Homo Sapiens
agcgggcccggggcuucuccgcagccgcugcc

SEQ ID NO: 300706 - RNA, 32 nt, Homo Sapiens
cgggcuggccccagcccaucugcuggcaucag

SEQ ID NO: 300707 - RNA, 32 nt, Homo Sapiens
gaagcacaaaaaucaauaaacacugugauugc

SEQ ID NO: 300708 - RNA, 32 nt, Homo Sapiens
guguccuuuucacuacaccauguuugagcuca

SEQ ID NO: 300709 - RNA, 32 nt, Homo Sapiens
gagcugccccagcagacgcuccgccccacccg

SEQ ID NO: 300710 - RNA, 32 nt, Homo Sapiens
ucagguucuccacagcagucuuccacuggcca

SEQ ID NO: 300711 - RNA, 32 nt, Homo Sapiens
uguuuagccaaaacagaaaaugauuuccacug

SEQ ID NO: 300712 - RNA, 32 nt, Homo Sapiens
agaaaaacuuaagcuuccuuggauucccacgu

SEQ ID NO: 300713 - RNA, 32 nt, Homo Sapiens
gucuaauuuugucaaaucauggccaaaucgca

SEQ ID NO: 300714 - RNA, 32 nt, Homo Sapiens
gucucggaaaucuggcugugcagguucaaauu

SEQ ID NO: 300715 - RNA, 32 nt, Homo Sapiens
gagagucuggggauggaggcccagguggagag

SEQ ID NO: 300716 - RNA, 32 nt, Homo Sapiens
ucacauuuucuuucucacuguaaauacacauu

SEQ ID NO: 300717 - RNA, 32 nt, Homo Sapiens
uguugaagcacacuuaaccugcuucgucagag

SEQ ID NO: 300718 - RNA, 32 nt, Homo Sapiens
agaucaaugcaggaucuaauucuuuugauaag

SEQ ID NO: 300719 - RNA, 32 nt, Homo Sapiens
ucuucaaugcuguuucaggcuuaaacaucaca

SEQ ID NO: 300720 - RNA, 32 nt, Homo Sapiens
uguugucggggaagagguguggcuucaaagug

SEQ ID NO: 300721 - RNA, 32 nt, Homo Sapiens
gguaccuuaacauggggaaucuucuuaaaguu

SEQ ID NO: 300722 - RNA, 32 nt, Homo Sapiens
ugcccuuggaagagggucuguguucacaauua

SEQ ID NO: 300723 - RNA, 32 nt, Homo Sapiens
cugcccccgccgcugcucagaccuccaggagg

SEQ ID NO: 300724 - RNA, 32 nt, Homo Sapiens
uccuaauaaauugacaaauuguccuccaacau

SEQ ID NO: 300725 - RNA, 32 nt, Homo Sapiens
gcuuauguauaaguuagaaauaauuguuaguu

SEQ ID NO: 300726 - RNA, 32 nt, Homo Sapiens
accaucccugucaucagcaacaguagaagaug

SEQ ID NO: 300727 - RNA, 32 nt, Homo Sapiens
gugaucacucuggaggcuggucagucuacgca

SEQ ID NO: 300728 - RNA, 32 nt, Homo Sapiens
aauaucaaaaaggagcucuucuugugaaaugu

SEQ ID NO: 300729 - RNA, 32 nt, Homo Sapiens
uugaugaagauauuuuucaccaaaguuuauuu

SEQ ID NO: 300730 - RNA, 32 nt, Homo Sapiens
aauauuuauaguguuauuuguuucaccuucaa

SEQ ID NO: 300731 - RNA, 32 nt, Homo Sapiens
ucgagccgcgcgcagggugcgcucguuugaac

SEQ ID NO: 300732 - RNA, 32 nt, Homo Sapiens
agaaagcacaugccaagucagcaaagaaaagu

SEQ ID NO: 300733 - RNA, 32 nt, Homo Sapiens
gcgauggcauccuuccuuuccauccuaagacu

SEQ ID NO: 300734 - RNA, 32 nt, Homo Sapiens
aaaaauuagccgggcgugguggugagugccug

SEQ ID NO: 300735 - RNA, 32 nt, Homo Sapiens
ugccccggaguagcugcaggcgccccgggaua

SEQ ID NO: 300736 - RNA, 32 nt, Homo Sapiens
accagccuggacaacauagugagaccccgucu

SEQ ID NO: 300737 - RNA, 32 nt, Homo Sapiens
uuaauuuuuuaaaagguauuuaauuuccaacc

SEQ ID NO: 300738 - RNA, 32 nt, Homo Sapiens
uuacagguguaagccacugcucccagccuuuu

SEQ ID NO: 300739 - RNA, 32 nt, Homo Sapiens
acaggcagccuccuuuguguguauucagaggc

SEQ ID NO: 300740 - RNA, 32 nt, Homo Sapiens
gcugcuucgugggauacagucuucuuacuugg

SEQ ID NO: 300741 - RNA, 32 nt, Homo Sapiens
ccaggccugugcuaguuccgagcuagguauga

SEQ ID NO: 300742 - RNA, 32 nt, Homo Sapiens
cacgucguccuccgcgucgucuucgaccucuu

SEQ ID NO: 300743 - RNA, 32 nt, Homo Sapiens
aagaguugguacaaacagaaauacuaaguuua

SEQ ID NO: 300744 - RNA, 32 nt, Homo Sapiens
gguugaaagaagcgcagggaagagacugggug

SEQ ID NO: 300745 - RNA, 32 nt, Homo Sapiens
agccccaagcagcugggcgcuccaucagaggc

SEQ ID NO: 300746 - RNA, 32 nt, Homo Sapiens
gccuucuuccaucaaaugcacuugcuugugaa

SEQ ID NO: 300747 - RNA, 32 nt, Homo Sapiens
ggugccccuagccccgcacaucagcgcggacc

SEQ ID NO: 300748 - RNA, 32 nt, Homo Sapiens
aaacuauguuaacagugucucuguuuaaguau

SEQ ID NO: 300749 - RNA, 32 nt, Homo Sapiens
uuccuuuccuuacuguccgaggcaacuacagg

SEQ ID NO: 300750 - RNA, 32 nt, Homo Sapiens
ugcugccccccgccagcccucaccaccugccc

SEQ ID NO: 300751 - RNA, 32 nt, Homo Sapiens
gcuugauuaaacagcaaagccauauucuaaau

SEQ ID NO: 300752 - RNA, 32 nt, Homo Sapiens
aaaggcuacuaggaaaaaccagaaguggagag

SEQ ID NO: 300753 - RNA, 32 nt, Homo Sapiens
auuuaauuuucuaaguuuuacuuuuuguuucu

SEQ ID NO: 300754 - RNA, 31 nt, Homo Sapiens
ggaugggcugagacccucagagcagccugca

SEQ ID NO: 300755 - RNA, 32 nt, Homo Sapiens
uuacagauguccucuguaaauagcaucgagag

SEQ ID NO: 300756 - RNA, 32 nt, Homo Sapiens
gaagauauuuuauuaucuuuuacagaaauuua

SEQ ID NO: 300757 - RNA, 32 nt, Homo Sapiens
aauaaaggaacaaaaaagacaaaagacauaga

SEQ ID NO: 300758 - RNA, 32 nt, Homo Sapiens
caugauucagcugaucuuaacaaaauucguag

SEQ ID NO: 300759 - RNA, 32 nt, Homo Sapiens
uuucaguccagcaacaggcagcucagccaacc

SEQ ID NO: 300760 - RNA, 32 nt, Homo Sapiens
caguccucauuucuguggaaucugaagaagcc

SEQ ID NO: 300761 - RNA, 32 nt, Homo Sapiens
ggccgcuccuucccacccgcuuggcagccggg

SEQ ID NO: 300762 - RNA, 32 nt, Homo Sapiens
auuuguucauugcuugccagagaugaacacag

SEQ ID NO: 300763 - RNA, 32 nt, Homo Sapiens
gcucugugcucccucccggcccuccaauccuu

SEQ ID NO: 300764 - RNA, 31 nt, Homo Sapiens
cuccuuuuugguaauucacaacagacuuagu

SEQ ID NO: 300765 - RNA, 32 nt, Homo Sapiens
aguuuauaaacagauaaagacgcaacaugaaa

SEQ ID NO: 300766 - RNA, 32 nt, Homo Sapiens
gggaauuuagguuugcagagcugcacgauggu

SEQ ID NO: 300767 - RNA, 31 nt, Homo Sapiens
auuuauagguugguaaaauagauuguuuuuc

SEQ ID NO: 300768 - RNA, 32 nt, Homo Sapiens
aaauaaaauaaaauaaaauggcuguauaagaa

SEQ ID NO: 300769 - RNA, 32 nt, Homo Sapiens
ggagacuuuaauucucuuacugcuucuuuuca

SEQ ID NO: 300770 - RNA, 31 nt, Homo Sapiens
cagagaucuuugaauuaauaugugguggguu

SEQ ID NO: 300771 - RNA, 32 nt, Homo Sapiens
uuugguuugaaaaacuaaaauuucagauuucu

SEQ ID NO: 300772 - RNA, 32 nt, Homo Sapiens
gagagcucgucggucuccgaggauggagauag

SEQ ID NO: 300773 - RNA, 32 nt, Homo Sapiens
ccgggccugccagugggcugaggacuggggga

SEQ ID NO: 300774 - RNA, 32 nt, Homo Sapiens
ucccugauugaaccaagguuccguggaggugg

SEQ ID NO: 300775 - RNA, 32 nt, Homo Sapiens
auugacaaguaaagauacugcuauggaaugau

SEQ ID NO: 300776 - RNA, 32 nt, Homo Sapiens
ggucuuaacacuuuuauauaaaaaugaaaaug

SEQ ID NO: 300777 - RNA, 31 nt, Homo Sapiens
cuuuggugaaacaucauuugacuggugaauu

SEQ ID NO: 300778 - RNA, 32 nt, Homo Sapiens
cuuuacuagugccgauaaacuuucucaaagag

SEQ ID NO: 300779 - RNA, 32 nt, Homo Sapiens
caguuguggaggaaacauucacacugaucugc

SEQ ID NO: 300780 - RNA, 32 nt, Homo Sapiens
uuagugaagcgcgcccggcgucacggugagug

SEQ ID NO: 300781 - RNA, 32 nt, Homo Sapiens
caggggcugggguggugcugcugcuaugagcu

SEQ ID NO: 300782 - RNA, 32 nt, Homo Sapiens
ucugaagggcaguccuccuucucuagguuaca

SEQ ID NO: 300783 - RNA, 32 nt, Homo Sapiens
uucgcucccuucccuggaaaccccgcugccuc

SEQ ID NO: 300784 - RNA, 32 nt, Homo Sapiens
uuacaaaauauguguaggauuuaagaaugaag

SEQ ID NO: 300785 - RNA, 32 nt, Homo Sapiens
gucccacagcagccuccaccagggcccuggug

SEQ ID NO: 300786 - RNA, 32 nt, Homo Sapiens
uggcccgcacguguccgaggggcccccggguc

SEQ ID NO: 300787 - RNA, 30 nt, Homo Sapiens
aguuccuuagcuucugccuauaggaacaua

SEQ ID NO: 300788 - RNA, 32 nt, Homo Sapiens
cccuuucuauaaguuuucaguacaccuuaaac

SEQ ID NO: 300789 - RNA, 32 nt, Homo Sapiens
gguggcgugugccuguaaucccagcuacuugg

SEQ ID NO: 300790 - RNA, 32 nt, Homo Sapiens
gggcaagggcuuuggccauucaugucaagcug

SEQ ID NO: 300791 - RNA, 32 nt, Homo Sapiens
uugucaaagcaguccacggauauuuugaucca

SEQ ID NO: 300792 - RNA, 32 nt, Homo Sapiens
uagaagacaaugaauguauaaguucuauggaa

SEQ ID NO: 300793 - RNA, 32 nt, Homo Sapiens
gaaguguccucuugugggaggcggugggcagc

SEQ ID NO: 300794 - RNA, 32 nt, Homo Sapiens
ggggagaaaacagguuuuauuuuuguggcugu

SEQ ID NO: 300795 - RNA, 32 nt, Homo Sapiens
cugaaauuggguccuccuccaacuggggguuu

SEQ ID NO: 300796 - RNA, 32 nt, Homo Sapiens
gacagggucuugcacuaucacccaggcuggag

SEQ ID NO: 300797 - RNA, 32 nt, Homo Sapiens
ggccuucugagauugcaggagauggaaagggg

SEQ ID NO: 300798 - RNA, 32 nt, Homo Sapiens
gcgugcaggaggcuguucgcuaccucacaccc

SEQ ID NO: 300799 - RNA, 32 nt, Homo Sapiens
uucucccuucuuucuuuuuuuggcuuugggaa

SEQ ID NO: 300800 - RNA, 32 nt, Homo Sapiens
aguuauauguugaguaaugaccauaugccagg

SEQ ID NO: 300801 - RNA, 32 nt, Homo Sapiens
cagggcgugucugccguguuuacugugugucu

SEQ ID NO: 300802 - RNA, 32 nt, Homo Sapiens
agcuaauaauaaauauauaacuuaaaaagcua

SEQ ID NO: 300803 - RNA, 32 nt, Homo Sapiens
guggccaaaggauggugucuugugaaaggagg

SEQ ID NO: 300804 - RNA, 32 nt, Homo Sapiens
agcccugggccccagcaccuccccuccuccag

SEQ ID NO: 300805 - RNA, 32 nt, Homo Sapiens
aaacuucuagcgcgucacuuccgcugggggcg

SEQ ID NO: 300806 - RNA, 32 nt, Homo Sapiens
acauaagcuuaccccaacuugaauuacucagc

SEQ ID NO: 300807 - RNA, 32 nt, Homo Sapiens
gugucauucucuaucaucacuccuuuuaccau

SEQ ID NO: 300808 - RNA, 32 nt, Homo Sapiens
aaaaaaacaaacaaaaaacugccuuugauaca

SEQ ID NO: 300809 - RNA, 32 nt, Homo Sapiens
agguggugacggauaccuacuucuuuucaugg

SEQ ID NO: 300810 - RNA, 32 nt, Homo Sapiens
aaauggguuaaauuugcuagcuuaauuguuuu

SEQ ID NO: 300811 - RNA, 32 nt, Homo Sapiens
cauuaguuguacauugauuucagugucaacac

SEQ ID NO: 300812 - RNA, 32 nt, Homo Sapiens
uucuuuucuuuucuuucuuuuuuaauuauugg

SEQ ID NO: 300813 - RNA, 32 nt, Homo Sapiens
uucccaaggugugucacagaaacuagaacccc

SEQ ID NO: 300814 - RNA, 32 nt, Homo Sapiens
cccacuucacuuucuucaaagccacauuuuuu

SEQ ID NO: 300815 - RNA, 32 nt, Homo Sapiens
agaggagguuugagccccauucugccuuggaa

SEQ ID NO: 300816 - RNA, 32 nt, Homo Sapiens
uguaaguaacauuggccaucucuucugaguuu

SEQ ID NO: 300817 - RNA, 32 nt, Homo Sapiens
gcuguuuugucuccagacccagcccucaucca

SEQ ID NO: 300818 - RNA, 32 nt, Homo Sapiens
aaguuauggaaaugcccuucuguucuugauug

SEQ ID NO: 300819 - RNA, 32 nt, Homo Sapiens
ggaguucuauugcaucucucaccuguucucac

SEQ ID NO: 300820 - RNA, 32 nt, Homo Sapiens
acuguuacuguccuguuuucuaaucucuuuau

SEQ ID NO: 300821 - RNA, 32 nt, Homo Sapiens
uauaucugcacuuuugaguguguaugguuuau

SEQ ID NO: 300822 - RNA, 32 nt, Homo Sapiens
aggguacaccaauaugucaugacacugugugg

SEQ ID NO: 300823 - RNA, 32 nt, Homo Sapiens
cacuccuucuaccugcacgcucugcgcauccc

SEQ ID NO: 300824 - RNA, 32 nt, Homo Sapiens
agcuagcccagcugccuugggcuggggccugc

SEQ ID NO: 300825 - RNA, 32 nt, Homo Sapiens
cgcccacccgcugcccgaggugcucuguuugu

SEQ ID NO: 300826 - RNA, 32 nt, Homo Sapiens
gcuuuuaaagaaaaauguuuuacaagggcagc

SEQ ID NO: 300827 - RNA, 32 nt, Homo Sapiens
aguuaaacccaccguauucauuguauaaauca

SEQ ID NO: 300828 - RNA, 32 nt, Homo Sapiens
agggguugccguacucgcacuccagagcccug

SEQ ID NO: 300829 - RNA, 32 nt, Homo Sapiens
gcaucauugguagcuuuuauaugcaaaugguc

SEQ ID NO: 300830 - RNA, 32 nt, Homo Sapiens
aaggcugaguuccauaugagagcugagguuug

SEQ ID NO: 300831 - RNA, 32 nt, Homo Sapiens
cagccgccugcgccgcgccugcggagaccugg

SEQ ID NO: 300832 - RNA, 32 nt, Homo Sapiens
uagguuuugucaaagaauaccagauauuuuag

SEQ ID NO: 300833 - RNA, 32 nt, Homo Sapiens
ggacaaauauaaaaauagcaacaguaucuuug

SEQ ID NO: 300834 - RNA, 32 nt, Homo Sapiens
ccuuuuguccccuggugaucaguuuuuuucau

SEQ ID NO: 300835 - RNA, 32 nt, Homo Sapiens
ggauauggaaauaaaaucauggugacaucacu

SEQ ID NO: 300836 - RNA, 32 nt, Homo Sapiens
cggcacuuuauauauauugaucucuguacggc

SEQ ID NO: 300837 - RNA, 32 nt, Homo Sapiens
aagugcucauuuccugacaauggaaauggaac

SEQ ID NO: 300838 - RNA, 32 nt, Homo Sapiens
uagcaacagaaaccaguccugcucuccuccgu

SEQ ID NO: 300839 - RNA, 32 nt, Homo Sapiens
uauguuauuaaaccuuuuuuaaaaaagguuca

SEQ ID NO: 300840 - RNA, 32 nt, Homo Sapiens
auuugcugggugauuuaaaugugugggucuca

SEQ ID NO: 300841 - RNA, 32 nt, Homo Sapiens
cagggagcgcccgccgagugcugcuggguugg

SEQ ID NO: 300842 - RNA, 32 nt, Homo Sapiens
ggggcgggaccuggggcgggggacgggacuua

SEQ ID NO: 300843 - RNA, 32 nt, Homo Sapiens
ggcaggugcgcucagagcuguccucaagaugg

SEQ ID NO: 300844 - RNA, 32 nt, Homo Sapiens
cuccauuuccuugucuguaaaauagagauaaa

SEQ ID NO: 300845 - RNA, 32 nt, Homo Sapiens
acugccggcgggggcgggugccagggacuugg

SEQ ID NO: 300846 - RNA, 32 nt, Homo Sapiens
auuugguucagauccaaacaaauacacauucu

SEQ ID NO: 300847 - RNA, 32 nt, Homo Sapiens
auuuuacuuuauuuuuuuuuuaaauaaaaagg

SEQ ID NO: 300848 - RNA, 32 nt, Homo Sapiens
ugggggccuguucuucagcccccgucagggcg

SEQ ID NO: 300849 - RNA, 32 nt, Homo Sapiens
gcuuuguucugugcccagagggggugggcccc

SEQ ID NO: 300850 - RNA, 32 nt, Homo Sapiens
gaggugcacugauaaaccaaaaagcacuggga

SEQ ID NO: 300851 - RNA, 32 nt, Homo Sapiens
cguuugccuguccacacccccucgcuccccac

SEQ ID NO: 300852 - RNA, 32 nt, Homo Sapiens
cggcuccgucggcuaccgcgggcgggcgcagg

SEQ ID NO: 300853 - RNA, 32 nt, Homo Sapiens
gugauguugcuguagggugcguacaauggaau

SEQ ID NO: 300854 - RNA, 27 nt, Homo Sapiens
uuuuuauaaaguuaaagcauuucucuu

SEQ ID NO: 300855 - RNA, 32 nt, Homo Sapiens
cugucucugcaccugucuguccaucugcaugc

SEQ ID NO: 300856 - RNA, 29 nt, Homo Sapiens
ucugcuucuaaaugaugucuagcugcuua

SEQ ID NO: 300857 - RNA, 32 nt, Homo Sapiens
guugacuauccaucaggauaauaauuaguugc

SEQ ID NO: 300858 - RNA, 32 nt, Homo Sapiens
guaaacuagagagagcagcaaaaacaccaguc

SEQ ID NO: 300859 - RNA, 32 nt, Homo Sapiens
cccggcuaauuuuuuguauuuucaguagagau

SEQ ID NO: 300860 - RNA, 32 nt, Homo Sapiens
gccugcagagagcggugugcuggggcuccugc

SEQ ID NO: 300861 - RNA, 32 nt, Homo Sapiens
aaacauaaauauuuacggauagauugcuaggu

SEQ ID NO: 300862 - RNA, 32 nt, Homo Sapiens
cuuaucuucaaggcuggcuuaaguauaaaauu

SEQ ID NO: 300863 - RNA, 32 nt, Homo Sapiens
uuuuuauuuaugauacugcuuuauugacguuu

SEQ ID NO: 300864 - RNA, 32 nt, Homo Sapiens
cucgccgaacgcccuccucgccgcccgccgcg

SEQ ID NO: 300865 - RNA, 32 nt, Homo Sapiens
caaauaauaaaaacagaaggaaauugagauua

SEQ ID NO: 300866 - RNA, 32 nt, Homo Sapiens
gaagggugaggggccagcaggaccccuuucgg

SEQ ID NO: 300867 - RNA, 32 nt, Homo Sapiens
caucagcagcagcagcagcagcagcacaauuc

SEQ ID NO: 300868 - RNA, 32 nt, Homo Sapiens
uugggguuugaaaugcaacguuagaacuucag

SEQ ID NO: 300869 - RNA, 32 nt, Homo Sapiens
uucacacugcuguuuuuuccucuuugguccuu

SEQ ID NO: 300870 - RNA, 32 nt, Homo Sapiens
agaggagaaaaccuggggacacaggggcugug

SEQ ID NO: 300871 - RNA, 32 nt, Homo Sapiens
gguggcaucgggcugcugcugcccaugcagga

SEQ ID NO: 300872 - RNA, 32 nt, Homo Sapiens
gacaggaccaaaugaaaauauuuuauguuuuc

SEQ ID NO: 300873 - RNA, 32 nt, Homo Sapiens
aagugcugccuccagcucucggucccacaguc

SEQ ID NO: 300874 - RNA, 30 nt, Homo Sapiens
agagacggaauuggcggcgggggcgggggg

SEQ ID NO: 300875 - RNA, 32 nt, Homo Sapiens
gggacgcggggccgcgcacgcgggaaaagcuu

SEQ ID NO: 300876 - RNA, 32 nt, Homo Sapiens
cuccagaaccggcguucuccgcgcgcaaaucc

SEQ ID NO: 300877 - RNA, 32 nt, Homo Sapiens
cccguguugggcggcggccccgggggcgcuug

SEQ ID NO: 300878 - RNA, 32 nt, Homo Sapiens
gaauuugaaaauaaaucacauuuugaucauug

SEQ ID NO: 300879 - RNA, 32 nt, Homo Sapiens
acucuugagaagcauaacuuuaugacaacuua

SEQ ID NO: 300880 - RNA, 30 nt, Homo Sapiens
uuauucagaacccuugaugagacuauuuuu

SEQ ID NO: 300881 - RNA, 32 nt, Homo Sapiens
aguacuaugauacuguucuuggagcucaauuc

SEQ ID NO: 300882 - RNA, 32 nt, Homo Sapiens
ucuuugauuaagugcuaggagauaaauuugca

SEQ ID NO: 300883 - RNA, 32 nt, Homo Sapiens
uuccgugcuacacuuuguguccugcugcaaug

SEQ ID NO: 300884 - RNA, 32 nt, Homo Sapiens
aacuuguaaaugcugucaacuaugauauggua

SEQ ID NO: 300885 - RNA, 32 nt, Homo Sapiens
ucguauccaaaauaaccuuuaaugcuaaacuu

SEQ ID NO: 300886 - RNA, 32 nt, Homo Sapiens
auuacagguauaaaagugaugaccuaucauga

SEQ ID NO: 300887 - RNA, 32 nt, Homo Sapiens
gccucagaauccaccccgugccugcaggggaa

SEQ ID NO: 300888 - RNA, 32 nt, Homo Sapiens
acaucauuuaaaauauauaugguaucugagua

SEQ ID NO: 300889 - RNA, 32 nt, Homo Sapiens
guaaaugcacuuucuuccuccccucuuucucc

SEQ ID NO: 300890 - RNA, 32 nt, Homo Sapiens
cacgcacacacacacacacacacacacacacu

SEQ ID NO: 300891 - RNA, 32 nt, Homo Sapiens
ugccugggaucgggaaagcguagucgggugcc

SEQ ID NO: 300892 - RNA, 32 nt, Homo Sapiens
acacugcccugucuccccacucaguggggaaa

SEQ ID NO: 300893 - RNA, 32 nt, Homo Sapiens
aguuuggacuuccuagagacuuguugaauggc

SEQ ID NO: 300894 - RNA, 32 nt, Homo Sapiens
guaaaaguaauuuuaauaguuaaucaucucug

SEQ ID NO: 300895 - RNA, 32 nt, Homo Sapiens
uuauggcugcugccuuccuuguggaugaaaag

SEQ ID NO: 300896 - RNA, 32 nt, Homo Sapiens
cuaggaaguauuaaaacugugaagcuuucuca

SEQ ID NO: 300897 - RNA, 32 nt, Homo Sapiens
aagauggccaugauuucuguaugugagacguc

SEQ ID NO: 300898 - RNA, 32 nt, Homo Sapiens
ggcucaaugcaaagguggcagacauuuaugga

SEQ ID NO: 300899 - RNA, 32 nt, Homo Sapiens
ggucccacaggccagggaccaaugcgcugcag

SEQ ID NO: 300900 - RNA, 32 nt, Homo Sapiens
augaggggaccauuuacauaaaacacagagcu

SEQ ID NO: 300901 - RNA, 32 nt, Homo Sapiens
agccgcccgcaugcagcuucaccuccccuuuc

SEQ ID NO: 300902 - RNA, 32 nt, Homo Sapiens
caaaugccucgacaucgccgcgccuccgccuc

SEQ ID NO: 300903 - RNA, 32 nt, Homo Sapiens
ggacaugggcaagaagcacaagaagcacaagu

SEQ ID NO: 300904 - RNA, 32 nt, Homo Sapiens
accuuagaugucuauuugauuuuuuaaaaaac

SEQ ID NO: 300905 - RNA, 30 nt, Homo Sapiens
ucugggggcaggcgcugugcuucugugagg

SEQ ID NO: 300906 - RNA, 32 nt, Homo Sapiens
ucauuuuucuaaaauacaauuuuguuucucca

SEQ ID NO: 300907 - RNA, 32 nt, Homo Sapiens
ccuccuuuuuauuuucaaguuccuuuuuauuu

SEQ ID NO: 300908 - RNA, 32 nt, Homo Sapiens
uuggaugucuccaacuaacaaaaguaacuaaa

SEQ ID NO: 300909 - RNA, 32 nt, Homo Sapiens
uuuguaacaaaauuauuuuaaagugacuggaa

SEQ ID NO: 300910 - RNA, 32 nt, Homo Sapiens
ucaguguuuuauuuguccuuucaucaguuggu

SEQ ID NO: 300911 - RNA, 32 nt, Homo Sapiens
uuaucaguccacaaguccuuccaauuauauuu

SEQ ID NO: 300912 - RNA, 32 nt, Homo Sapiens
acacaaugugauguuuaguuaaagucaugcua

SEQ ID NO: 300913 - RNA, 32 nt, Homo Sapiens
gaggacagaggcgcgaugggccugcugcaggg

SEQ ID NO: 300914 - RNA, 32 nt, Homo Sapiens
auuagcaaaugauggucuucuacugauaaagu

SEQ ID NO: 300915 - RNA, 32 nt, Homo Sapiens
cgccccguccccagccagacccacucgcugcc

SEQ ID NO: 300916 - RNA, 32 nt, Homo Sapiens
gggcaccggcagcgcagcgucuccgauaguaa

SEQ ID NO: 300917 - RNA, 32 nt, Homo Sapiens
gccccgcccucccugcgccggcccaugaugug

SEQ ID NO: 300918 - RNA, 32 nt, Homo Sapiens
cagucauccuguggcucuggcuccagaggacc

SEQ ID NO: 300919 - RNA, 32 nt, Homo Sapiens
cggaacccuggccucguccgcggcccagcucc

SEQ ID NO: 300920 - RNA, 32 nt, Homo Sapiens
ccccuucccucauaggggcugugaccugggag

SEQ ID NO: 300921 - RNA, 32 nt, Homo Sapiens
uccaaauagagacaucacuuugaaauaacaug

SEQ ID NO: 300922 - RNA, 32 nt, Homo Sapiens
ggcucggcgaggggaagacggcgcggcggggc

SEQ ID NO: 300923 - RNA, 32 nt, Homo Sapiens
gcuaggcuccggcguguggccgcggccgccgc

SEQ ID NO: 300924 - RNA, 32 nt, Homo Sapiens
cauauagucaacauggaaguagaccagcucug

SEQ ID NO: 300925 - RNA, 32 nt, Homo Sapiens
ugcgcagcaccgugaugguucgcguuggugga

SEQ ID NO: 300926 - RNA, 32 nt, Homo Sapiens
cagaggugcccagauagcaaaugaagguguaa

SEQ ID NO: 300927 - RNA, 32 nt, Homo Sapiens
uugcggggccccaccauucauccugucugaag

SEQ ID NO: 300928 - RNA, 32 nt, Homo Sapiens
guucccuuuuuucucuaaaguccccugacauc

SEQ ID NO: 300929 - RNA, 32 nt, Homo Sapiens
ggcuuggcuucuuucacucugggcuguguuua

SEQ ID NO: 300930 - RNA, 32 nt, Homo Sapiens
ccacaccugccaggauauggacaucuugggau

SEQ ID NO: 300931 - RNA, 32 nt, Homo Sapiens
uguacugugaaggaugacacagcacuucuucc

SEQ ID NO: 300932 - RNA, 32 nt, Homo Sapiens
aguggugaguuccccacagccggcgcuagccg

SEQ ID NO: 300933 - RNA, 32 nt, Homo Sapiens
cagccaguucucggacucguuccuccuggacc

SEQ ID NO: 300934 - RNA, 32 nt, Homo Sapiens
aaguccgaggggcgggacccaggcaccugcau

SEQ ID NO: 300935 - RNA, 32 nt, Homo Sapiens
ggcguucccacccacaccuucgacgcgacgcc

SEQ ID NO: 300936 - RNA, 29 nt, Homo Sapiens
cucgugaugaagauggcagggggaauucu

SEQ ID NO: 300937 - RNA, 32 nt, Homo Sapiens
ccggguggccuggccaaguccgggcaugucgg

SEQ ID NO: 300938 - RNA, 32 nt, Homo Sapiens
uauuuauuuuuccaggaauuaaaaaacaucua

SEQ ID NO: 300939 - RNA, 32 nt, Homo Sapiens
uaauauuauuuuuucuucaauauaacacugga

SEQ ID NO: 300940 - RNA, 32 nt, Homo Sapiens
uuaaauuuuuaaaaucugcugaucucuguaga

SEQ ID NO: 300941 - RNA, 29 nt, Homo Sapiens
cgggggcuggcuucgaggacgccgccugc

SEQ ID NO: 300942 - RNA, 32 nt, Homo Sapiens
agaggccuccccaccccacuaucccacccugg

SEQ ID NO: 300943 - RNA, 32 nt, Homo Sapiens
caacccccagggcuccuccaaccccauucccu

SEQ ID NO: 300944 - RNA, 32 nt, Homo Sapiens
uuuuuaauuuuuuauuuuuuuaacccuacccu

SEQ ID NO: 300945 - RNA, 30 nt, Homo Sapiens
aaagguuagaucucggccuaacuuucuguu

SEQ ID NO: 300946 - RNA, 32 nt, Homo Sapiens
auauuguauuccaggcgacagguugaguggga

SEQ ID NO: 300947 - RNA, 32 nt, Homo Sapiens
cucacccgccccacucccuccuaaccuagaga

SEQ ID NO: 300948 - RNA, 32 nt, Homo Sapiens
ucugaauauuugugucccccaaaauuuccuau

SEQ ID NO: 300949 - RNA, 32 nt, Homo Sapiens
cuccgccuccggaagcgcgggcgcgcggcgcc

SEQ ID NO: 300950 - RNA, 32 nt, Homo Sapiens
caaauacaguugcaaucugcaaucugcuguug

SEQ ID NO: 300951 - RNA, 32 nt, Homo Sapiens
agucacuuccucgucuccuccuccuucccaca

SEQ ID NO: 300952 - RNA, 32 nt, Homo Sapiens
accuuguuuaaagauaaauguaagcugggugu

SEQ ID NO: 300953 - RNA, 32 nt, Homo Sapiens
ccucccagcuggaagaggcgguggcggcgggu

SEQ ID NO: 300954 - RNA, 32 nt, Homo Sapiens
caguccucccuucccagccucccuuugggccu

SEQ ID NO: 300955 - RNA, 32 nt, Homo Sapiens
gucagacucugcagacuggguucuagagaggc

SEQ ID NO: 300956 - RNA, 32 nt, Homo Sapiens
gcccccacuugcuccggcaccccgcccagccc

SEQ ID NO: 300957 - RNA, 32 nt, Homo Sapiens
auugauguaaauuuauaguggaauaugaccug

SEQ ID NO: 300958 - RNA, 32 nt, Homo Sapiens
gauauuugguguuuaagauagcaccauuguuu

SEQ ID NO: 300959 - RNA, 32 nt, Homo Sapiens
ugguguccccuggcccuccccccaccccucug

SEQ ID NO: 300960 - RNA, 32 nt, Homo Sapiens
gcaguccgcgagguccccacgccgggcgauau

SEQ ID NO: 300961 - RNA, 29 nt, Homo Sapiens
gaguggagaugauuauguuuaacgcauuc

SEQ ID NO: 300962 - RNA, 32 nt, Homo Sapiens
uuauaacagcuggguucgcaggagccagccuu

SEQ ID NO: 300963 - RNA, 32 nt, Homo Sapiens
uaauauaaaaauuauugauaaucuuaaauuau

SEQ ID NO: 300964 - RNA, 32 nt, Homo Sapiens
cgcugcgccccgagccccucuccggcuccuca

SEQ ID NO: 300965 - RNA, 32 nt, Homo Sapiens
guugcagaccuuuguguuggguccugggaauc

SEQ ID NO: 300966 - RNA, 32 nt, Homo Sapiens
gagauaggaagccagacuccacugcuuacguu

SEQ ID NO: 300967 - RNA, 31 nt, Homo Sapiens
gcugggacuuuuugguaauagauuuaauuau

SEQ ID NO: 300968 - RNA, 32 nt, Homo Sapiens
uuugaauuucuaggacaugggauugugcaacc

SEQ ID NO: 300969 - RNA, 32 nt, Homo Sapiens
aucgggauguucuuguguauuuuucauguuga

SEQ ID NO: 300970 - RNA, 32 nt, Homo Sapiens
acggacauuuauuugcaucgcucuaauuugaa

SEQ ID NO: 300971 - RNA, 32 nt, Homo Sapiens
gauggcaccaguggggacccacacccuggcug

SEQ ID NO: 300972 - RNA, 32 nt, Homo Sapiens
cagcuaaccccucccuccccacagccagagga

SEQ ID NO: 300973 - RNA, 32 nt, Homo Sapiens
aaguaaacccucacugugaaucagagaauuca

SEQ ID NO: 300974 - RNA, 32 nt, Homo Sapiens
ggacaguuagaugcuuaccaaaaaagaaaaaa

SEQ ID NO: 300975 - RNA, 32 nt, Homo Sapiens
ugagguguauccagcugcagccgccuccggag

SEQ ID NO: 300976 - RNA, 32 nt, Homo Sapiens
uggcccugcgcccaccaaucgaauuguagagc

SEQ ID NO: 300977 - RNA, 32 nt, Homo Sapiens
ucucucuuaaauuggugccuugaaagagaagg

SEQ ID NO: 300978 - RNA, 30 nt, Homo Sapiens
ucgcggccgcagcagcaccgggcgggaugc

SEQ ID NO: 300979 - RNA, 32 nt, Homo Sapiens
cgugggucgccuucgcccacaccggcgcgugg

SEQ ID NO: 300980 - RNA, 32 nt, Homo Sapiens
guuucuaaaaauuuauuugaaacaaucuagaa

SEQ ID NO: 300981 - RNA, 32 nt, Homo Sapiens
aacucuuuucuuugcuacaucuuagugacaau

SEQ ID NO: 300982 - RNA, 32 nt, Homo Sapiens
ccugaaguucccugucuccauucucuagcacg

SEQ ID NO: 300983 - RNA, 32 nt, Homo Sapiens
gcaaagucagaauuuucuaaaugaaaggucau

SEQ ID NO: 300984 - RNA, 32 nt, Homo Sapiens
cuccaggggccucuggugcgguuccgggaaga

SEQ ID NO: 300985 - RNA, 32 nt, Homo Sapiens
gaaacucaugggauuuguaaccagaugaauca

SEQ ID NO: 300986 - RNA, 32 nt, Homo Sapiens
guccgcggccccagcagcccugugcccucguu

SEQ ID NO: 300987 - RNA, 30 nt, Homo Sapiens
auaaacuacuauauuucccaucuugcaaau

SEQ ID NO: 300988 - RNA, 32 nt, Homo Sapiens
cagaacuaagcacuuuguuaauuuggggggaa

SEQ ID NO: 300989 - RNA, 32 nt, Homo Sapiens
ugaggucacuccuugcaggacaucaggaaauu

SEQ ID NO: 300990 - RNA, 32 nt, Homo Sapiens
auggaaaaacaaaaucugacauauacauacau

SEQ ID NO: 300991 - RNA, 30 nt, Homo Sapiens
ugccagcgcgcgcugacacagugaugggcu

SEQ ID NO: 300992 - RNA, 32 nt, Homo Sapiens
cuaggggcagcagcaggaggaauaccagggcc

SEQ ID NO: 300993 - RNA, 31 nt, Homo Sapiens
cgcuagugaaacaaucuaggccuguugcuuu

SEQ ID NO: 300994 - RNA, 32 nt, Homo Sapiens
cugaacucuccccuugucugcacuguucaaac

SEQ ID NO: 300995 - RNA, 32 nt, Homo Sapiens
ggcugaacuuaccauggagaucccucaguucg

SEQ ID NO: 300996 - RNA, 30 nt, Homo Sapiens
uggcagcuggacugcuguuuguuuaccgca

SEQ ID NO: 300997 - RNA, 32 nt, Homo Sapiens
ucccaacaugagccuacugauguuguugauaa

SEQ ID NO: 300998 - RNA, 32 nt, Homo Sapiens
cuuuccccgccuccagcucucaucucaacucc

SEQ ID NO: 300999 - RNA, 30 nt, Homo Sapiens
aacauuuucuugaaaggggaaacgucuccc

SEQ ID NO: 301000 - RNA, 32 nt, Homo Sapiens
acggaggcggcgggcccaggagccucagccag

SEQ ID NO: 301001 - RNA, 32 nt, Homo Sapiens
cguaaaucauauuucccuuacaauuaauaaau

SEQ ID NO: 301002 - RNA, 32 nt, Homo Sapiens
uagguagcauauuuuaauauaaaccaacuuuc

SEQ ID NO: 301003 - RNA, 32 nt, Homo Sapiens
cagaaucuagcaacuucuagguccuaaaaacc

SEQ ID NO: 301004 - RNA, 32 nt, Homo Sapiens
ucccaccugccagcccaggguaccccagacuc

SEQ ID NO: 301005 - RNA, 32 nt, Homo Sapiens
cacgaggggcggcggcagcuguggaagcucag

SEQ ID NO: 301006 - RNA, 32 nt, Homo Sapiens
agcagccgguccuggggucccacccuggugcc

SEQ ID NO: 301007 - RNA, 32 nt, Homo Sapiens
ugcagguguaugugagcggggagcuggugccc

SEQ ID NO: 301008 - RNA, 32 nt, Homo Sapiens
cuucgcgccggcgggaagacgcggcgguggcc

SEQ ID NO: 301009 - RNA, 32 nt, Homo Sapiens
augaucccagcaugaauguuauuuucauggaa

SEQ ID NO: 301010 - RNA, 32 nt, Homo Sapiens
auuugcauguaacccaaaauuagcuuaucuug

SEQ ID NO: 301011 - RNA, 32 nt, Homo Sapiens
aguaugaaggauucucucuccugagauuguag

SEQ ID NO: 301012 - RNA, 32 nt, Homo Sapiens
agucugcaccucaaccgugcggaaagugacug

SEQ ID NO: 301013 - RNA, 32 nt, Homo Sapiens
uagcaaucucuucauuauucucugcuauauau

SEQ ID NO: 301014 - RNA, 32 nt, Homo Sapiens
acaucaugugagauuucuuuaaaauggauuaa

SEQ ID NO: 301015 - RNA, 32 nt, Homo Sapiens
cauagccauguuucuauuaguuuacuuuuaaa

SEQ ID NO: 301016 - RNA, 32 nt, Homo Sapiens
ucuucugcuuucucgggaauuuucaucuagga

SEQ ID NO: 301017 - RNA, 32 nt, Homo Sapiens
ugggguuggaauguggaacugcagccucagcc

SEQ ID NO: 301018 - RNA, 32 nt, Homo Sapiens
cuucccaagcuggcagaggccauuuguggaaa

SEQ ID NO: 301019 - RNA, 32 nt, Homo Sapiens
aaaacagacauaucaaguucuaugugaugauu

SEQ ID NO: 301020 - RNA, 32 nt, Homo Sapiens
ggcugggugagcacuugggaggcgcuggcucu

SEQ ID NO: 301021 - RNA, 32 nt, Homo Sapiens
gugugggcgcgaggaugacgaccucaggcgcg

SEQ ID NO: 301022 - RNA, 32 nt, Homo Sapiens
gacagaugggccggaugcaauggcucacgucu

SEQ ID NO: 301023 - RNA, 31 nt, Homo Sapiens
cacgucaggcgcagccggccacgauccugcc

SEQ ID NO: 301024 - RNA, 32 nt, Homo Sapiens
ccugcuggacagagacucagcgcuccuccugu

SEQ ID NO: 301025 - RNA, 29 nt, Homo Sapiens
uggauguuugagaugcauggcaagaccag

SEQ ID NO: 301026 - RNA, 32 nt, Homo Sapiens
gguucaguaugcaccuuguguugagagagagg

SEQ ID NO: 301027 - RNA, 32 nt, Homo Sapiens
gccgaacgaguuccucggcggcugcaggaugg

SEQ ID NO: 301028 - RNA, 30 nt, Homo Sapiens
aacgcaucacuugccaaacuguuggaaugc

SEQ ID NO: 301029 - RNA, 32 nt, Homo Sapiens
gguucuaucuguucguggcuuaaacuugcauu

SEQ ID NO: 301030 - RNA, 32 nt, Homo Sapiens
auccccagaaaaggagcacgugaauugagucg

SEQ ID NO: 301031 - RNA, 32 nt, Homo Sapiens
cuagcggguugagcgcaccaucacaucuaagc

SEQ ID NO: 301032 - RNA, 32 nt, Homo Sapiens
cugcuuccccuugcaccugcgccgggcggcca

SEQ ID NO: 301033 - RNA, 32 nt, Homo Sapiens
aguucucuucuguuuuuuuuuaauuuguuguu

SEQ ID NO: 301034 - RNA, 32 nt, Homo Sapiens
guuacauuuuuuucuuuuuaacacuaaaaaua

SEQ ID NO: 301035 - RNA, 32 nt, Homo Sapiens
acugauuuagauuacauacuuuagaggauuaa

SEQ ID NO: 301036 - RNA, 32 nt, Homo Sapiens
uuacucccucuuaaauuaugugggaaaucuua

SEQ ID NO: 301037 - RNA, 32 nt, Homo Sapiens
ggcuccagaugucugcuucagaauucaagaac

SEQ ID NO: 301038 - RNA, 32 nt, Homo Sapiens
gcacagacagagcuugugccggauuuggcccu

SEQ ID NO: 301039 - RNA, 32 nt, Homo Sapiens
uggagugugaaugcagucaugaauaaaagaau

SEQ ID NO: 301040 - RNA, 32 nt, Homo Sapiens
uuaggcccaugcccaagaaguaucauucugag

SEQ ID NO: 301041 - RNA, 32 nt, Homo Sapiens
uuguucuguuuaaauuuguacuguggcuuaug

SEQ ID NO: 301042 - RNA, 32 nt, Homo Sapiens
aaccauuugucuuuuuaacuucuuuugccugu

SEQ ID NO: 301043 - RNA, 32 nt, Homo Sapiens
acauuggagagaaacuuuaugauuauagucaa

SEQ ID NO: 301044 - RNA, 32 nt, Homo Sapiens
cuuuuuagguuucucuucaacauauacauaua

SEQ ID NO: 301045 - RNA, 32 nt, Homo Sapiens
cccuccccgagacccuggagacgcggcuccgc

SEQ ID NO: 301046 - RNA, 32 nt, Homo Sapiens
uggccagugucuauucaggcccacugggaguu

SEQ ID NO: 301047 - RNA, 32 nt, Homo Sapiens
uacaggcgugagccaccacucccggccgugaa

SEQ ID NO: 301048 - RNA, 32 nt, Homo Sapiens
cgucccugcccccagcuggccgcagggcccgc

SEQ ID NO: 301049 - RNA, 32 nt, Homo Sapiens
aauagaauauugugugaaaaaaugcacuguua

SEQ ID NO: 301050 - RNA, 32 nt, Homo Sapiens
cagauggggcuuuguggcccugggggugcuuc

SEQ ID NO: 301051 - RNA, 32 nt, Homo Sapiens
ugguuuucauuuuauucuggucucagggccau

SEQ ID NO: 301052 - RNA, 32 nt, Homo Sapiens
guuuacagcuaaugcauaguuacuugcaugcc

SEQ ID NO: 301053 - RNA, 32 nt, Homo Sapiens
uuuucauaagccacaauuuuaaaagaugcagu

SEQ ID NO: 301054 - RNA, 32 nt, Homo Sapiens
agcuccugcugcuagucuccaauugccaaggg

SEQ ID NO: 301055 - RNA, 32 nt, Homo Sapiens
ugcguccggccgccugagcagguguggugccg

SEQ ID NO: 301056 - RNA, 32 nt, Homo Sapiens
caguuccauccccgcugcuccucccuugggga

SEQ ID NO: 301057 - RNA, 32 nt, Homo Sapiens
gcacucaccccccacaccuuccccggccugag

SEQ ID NO: 301058 - RNA, 32 nt, Homo Sapiens
aaacagcauccacagguuacaucuuuacuauu

SEQ ID NO: 301059 - RNA, 32 nt, Homo Sapiens
guuugugcuaguuuuucuuuuuuuucucugug

SEQ ID NO: 301060 - RNA, 32 nt, Homo Sapiens
aggauccguucgcgcuccuccagccgcugcgc

SEQ ID NO: 301061 - RNA, 32 nt, Homo Sapiens
uggggcaccaaggcccugugcuaagcacucau

SEQ ID NO: 301062 - RNA, 32 nt, Homo Sapiens
acaacauuuggcuuuguuuucuuuuuccuuug

SEQ ID NO: 301063 - RNA, 31 nt, Homo Sapiens
cuuguagcaaauuguuuuaauucuguagcuu

SEQ ID NO: 301064 - RNA, 32 nt, Homo Sapiens
gccuguggccgagaagggggucgggcccagcc

SEQ ID NO: 301065 - RNA, 32 nt, Homo Sapiens
agcagcagcagcaacaguuuguguaccagucu

SEQ ID NO: 301066 - RNA, 32 nt, Homo Sapiens
cccugucugcugucuacgugguggguuguggg

SEQ ID NO: 301067 - RNA, 32 nt, Homo Sapiens
gugaggaguucugguauaaaauuuaagauuac

SEQ ID NO: 301068 - RNA, 32 nt, Homo Sapiens
uggaucuuuuucuguuaggauguuaauauuau

SEQ ID NO: 301069 - RNA, 32 nt, Homo Sapiens
caaggggggaggaggaggaguggugcugcgag

SEQ ID NO: 301070 - RNA, 32 nt, Homo Sapiens
guaauaucuuauaacaugcagaugaaugcuuu

SEQ ID NO: 301071 - RNA, 32 nt, Homo Sapiens
ugagaugcuuucccuuccccagaugggauugc

SEQ ID NO: 301072 - RNA, 32 nt, Homo Sapiens
cagccgcucauuuccuucucaugaagucccau

SEQ ID NO: 301073 - RNA, 32 nt, Homo Sapiens
ucccaucaagacaagauuccaggaagguccac

SEQ ID NO: 301074 - RNA, 32 nt, Homo Sapiens
cccuuuccuggcuuauggccaagcccuacccg

SEQ ID NO: 301075 - RNA, 32 nt, Homo Sapiens
gucgucugacuucucgugccauuuucaaugaa

SEQ ID NO: 301076 - RNA, 32 nt, Homo Sapiens
acgcgccccagccccagagcagggucaggguc

SEQ ID NO: 301077 - RNA, 32 nt, Homo Sapiens
ucccgggaggagagggcggagggcggagggaa

SEQ ID NO: 301078 - RNA, 32 nt, Homo Sapiens
ucccguccggccaggacaguguccaguggcac

SEQ ID NO: 301079 - RNA, 32 nt, Homo Sapiens
ggucucaaacuccugagcucaagcaauccacc

SEQ ID NO: 301080 - RNA, 32 nt, Homo Sapiens
cccuccacgccccaugcugggcuuggucgguu

SEQ ID NO: 301081 - RNA, 32 nt, Homo Sapiens
auuugaugugcagcugagauuggggcacauuc

SEQ ID NO: 301082 - RNA, 32 nt, Homo Sapiens
cagaagggcaguugccuauugaggugauuuua

SEQ ID NO: 301083 - RNA, 32 nt, Homo Sapiens
aucaggccaacguccaccccagccucacauug

SEQ ID NO: 301084 - RNA, 32 nt, Homo Sapiens
aagggagcccccagcccugcugggccggccca

SEQ ID NO: 301085 - RNA, 32 nt, Homo Sapiens
gaucccggugccagggacccugcccaguucca

SEQ ID NO: 301086 - RNA, 32 nt, Homo Sapiens
gccaacgcgggaaaggcaaggccuggcuuacu

SEQ ID NO: 301087 - RNA, 32 nt, Homo Sapiens
guccagcggccgcgggcagacccggagggaac

SEQ ID NO: 301088 - RNA, 27 nt, Homo Sapiens
ggauggcgcuggcgcgggccuggaagc

SEQ ID NO: 301089 - RNA, 32 nt, Homo Sapiens
cccagaaaccuuuguuugcaucugaaaauuga

SEQ ID NO: 301090 - RNA, 30 nt, Homo Sapiens
ucucaccaugcucaguuuuuucugaaccca

SEQ ID NO: 301091 - RNA, 32 nt, Homo Sapiens
cacagauuccuccgccagaaaucuuacucgcg

SEQ ID NO: 301092 - RNA, 32 nt, Homo Sapiens
uuuuuucagaggugggauggguggagauuuuu

SEQ ID NO: 301093 - RNA, 32 nt, Homo Sapiens
agcgucccccacuuuggcaucccggccggccg

SEQ ID NO: 301094 - RNA, 32 nt, Homo Sapiens
aaugaaaauaccagacccagaaaugagugagc

SEQ ID NO: 301095 - RNA, 32 nt, Homo Sapiens
cuaagguuaagagauucuggaauagaagcguc

SEQ ID NO: 301096 - RNA, 32 nt, Homo Sapiens
uaauagucauaaaguuaagaaaauauucaaag

SEQ ID NO: 301097 - RNA, 32 nt, Homo Sapiens
uuucuccucccucugccccuauauucccgaaa

SEQ ID NO: 301098 - RNA, 32 nt, Homo Sapiens
ccuguggaauuggcaaaagcuacauuuuuacu

SEQ ID NO: 301099 - RNA, 28 nt, Homo Sapiens
acugugaagaacugacauuugaagaaaa

SEQ ID NO: 301100 - RNA, 32 nt, Homo Sapiens
cuuucgaagauaaaaaacucuagucccuuuaa

SEQ ID NO: 301101 - RNA, 32 nt, Homo Sapiens
cgcgcugcccaaccgcgcucuccgccuaccuc

SEQ ID NO: 301102 - RNA, 32 nt, Homo Sapiens
uccggcacuugggugggaccaaggagaugcca

SEQ ID NO: 301103 - RNA, 32 nt, Homo Sapiens
gcgcgggaggaucggcggcucgcggucacugg

SEQ ID NO: 301104 - RNA, 32 nt, Homo Sapiens
agcacugucaggcucagguuucccugcuguug

SEQ ID NO: 301105 - RNA, 32 nt, Homo Sapiens
aaggauggcauucaccugaggauuccuaucuu

SEQ ID NO: 301106 - RNA, 32 nt, Homo Sapiens
gcagcugggggccgccauuuugccguacggca

SEQ ID NO: 301107 - RNA, 32 nt, Homo Sapiens
cccaccccugucacuacagccucaccuccuac

SEQ ID NO: 301108 - RNA, 32 nt, Homo Sapiens
cggauuccuaccuggaggaggaggacaaccug

SEQ ID NO: 301109 - RNA, 32 nt, Homo Sapiens
aggucuuccugcacugcccaccccuggcuggu

SEQ ID NO: 301110 - RNA, 32 nt, Homo Sapiens
cacaggugacaagcgucacuucuccugcugcu

SEQ ID NO: 301111 - RNA, 32 nt, Homo Sapiens
ucauacauacaccacauagauaguuugccaag

SEQ ID NO: 301112 - RNA, 32 nt, Homo Sapiens
ucuccuguuucaucugggucaguuuggccaua

SEQ ID NO: 301113 - RNA, 32 nt, Homo Sapiens
gucauugugucugaaaacugcaaagugaacuu

SEQ ID NO: 301114 - RNA, 32 nt, Homo Sapiens
ugccuauaaucccagcacuuugggaagucaag

SEQ ID NO: 301115 - RNA, 32 nt, Homo Sapiens
gcuucaauguguuguggaccaauauacaaaua

SEQ ID NO: 301116 - RNA, 32 nt, Homo Sapiens
acacucuuuaccgcugaaaaccucaagaguga

SEQ ID NO: 301117 - RNA, 32 nt, Homo Sapiens
gugugugaccucugccugaaaaagcagguauu

SEQ ID NO: 301118 - RNA, 32 nt, Homo Sapiens
accagggcugcggggcagcagcugcugcgacc

SEQ ID NO: 301119 - RNA, 32 nt, Homo Sapiens
cgggccugcaccaugagcgucccggccuucau

SEQ ID NO: 301120 - RNA, 32 nt, Homo Sapiens
aucucuacuguaaaaugggcucccugguaucu

SEQ ID NO: 301121 - RNA, 32 nt, Homo Sapiens
cuaacagaauaaaaugguccacccucaagcca

SEQ ID NO: 301122 - RNA, 32 nt, Homo Sapiens
aucaacaaacaaaucaaagccaggcucagagc

SEQ ID NO: 301123 - RNA, 32 nt, Homo Sapiens
guggggccagggugggagggagggacaagggg

SEQ ID NO: 301124 - RNA, 32 nt, Homo Sapiens
accggucgcucucaggaacagcagcgcaaccu

SEQ ID NO: 301125 - RNA, 32 nt, Homo Sapiens
aguugaaacagaauuaaaaauauuucucaaac

SEQ ID NO: 301126 - RNA, 32 nt, Homo Sapiens
cgaagaucuccucaccuccccagcggcuccug

SEQ ID NO: 301127 - RNA, 32 nt, Homo Sapiens
cgcccgccaccaagccucaccugggggccaca

SEQ ID NO: 301128 - RNA, 32 nt, Homo Sapiens
gcauugacaucaucuguaaaaccaucaucugu

SEQ ID NO: 301129 - RNA, 32 nt, Homo Sapiens
ugaagggggagucuugguggggaucagggcuu

SEQ ID NO: 301130 - RNA, 32 nt, Homo Sapiens
uccuaggaaaauagaacaaaacauacauauuc

SEQ ID NO: 301131 - RNA, 32 nt, Homo Sapiens
cuuaaauguguguuuuaaaaaaugcgcuaaga

SEQ ID NO: 301132 - RNA, 32 nt, Homo Sapiens
gccggccagucgugacugggcggcaaugaggu

SEQ ID NO: 301133 - RNA, 32 nt, Homo Sapiens
cccacccagaggguccuggggggcggggagga

SEQ ID NO: 301134 - RNA, 32 nt, Homo Sapiens
cuugcugcacucuuauuuucauuuucaaccaa

SEQ ID NO: 301135 - RNA, 32 nt, Homo Sapiens
ugggcaucauucuggacccauguucggugaac

SEQ ID NO: 301136 - RNA, 32 nt, Homo Sapiens
gggagcaucauucuguuauacuucuguacaca

SEQ ID NO: 301137 - RNA, 32 nt, Homo Sapiens
ucgcggcgcgcgccggccgccagacucggccu

SEQ ID NO: 301138 - RNA, 32 nt, Homo Sapiens
gucacacaccagaaaauccacacuggagagaa

SEQ ID NO: 301139 - RNA, 32 nt, Homo Sapiens
gacuugugaaaaccuguagugaaauaccuuaa

SEQ ID NO: 301140 - RNA, 32 nt, Homo Sapiens
gaggacacgcaccuguggcgcagcgaggcgca

SEQ ID NO: 301141 - RNA, 32 nt, Homo Sapiens
agacccugccccgaugagaaggggcagggacu

SEQ ID NO: 301142 - RNA, 32 nt, Homo Sapiens
cuguguaucacguaagugugugagugcagugc

SEQ ID NO: 301143 - RNA, 32 nt, Homo Sapiens
agagugacaaaguuaagcaacuuuugaaaauu

SEQ ID NO: 301144 - RNA, 32 nt, Homo Sapiens
guuugggaagcaguuagggagauagcgacccg

SEQ ID NO: 301145 - RNA, 32 nt, Homo Sapiens
gcuugguccaucuggucaccaaggcugggcgg

SEQ ID NO: 301146 - RNA, 32 nt, Homo Sapiens
uaagauuaauuuucucuuuguaugucuguuac

SEQ ID NO: 301147 - RNA, 32 nt, Homo Sapiens
cuaaauuggguucauuaucuuuuauuuuucaa

SEQ ID NO: 301148 - RNA, 32 nt, Homo Sapiens
ucugccucccagccucuuucugagggaaagga

SEQ ID NO: 301149 - RNA, 32 nt, Homo Sapiens
auuguaggguugaagucuagcuugugauauuu

SEQ ID NO: 301150 - RNA, 32 nt, Homo Sapiens
agccccuccuuccccagcugccccuccuucua

SEQ ID NO: 301151 - RNA, 32 nt, Homo Sapiens
uauaaccauguggauaaaaugccagacaucuu

SEQ ID NO: 301152 - RNA, 32 nt, Homo Sapiens
uccgcucgccugcccgcacgccgcccgccacc

SEQ ID NO: 301153 - RNA, 32 nt, Homo Sapiens
ugacaauaaaggaaacagcuauacuuggugau

SEQ ID NO: 301154 - RNA, 32 nt, Homo Sapiens
aagcaaaaucauagugcaaaaauacauuuaag

SEQ ID NO: 301155 - RNA, 32 nt, Homo Sapiens
ggcccucaggacccguguccucagagcaccac

SEQ ID NO: 301156 - RNA, 32 nt, Homo Sapiens
auuuuccgaauuuauuugaucaugaacuccuu

SEQ ID NO: 301157 - RNA, 32 nt, Homo Sapiens
ugagugagaaaacaaaauuaucuuccuuucca

SEQ ID NO: 301158 - RNA, 32 nt, Homo Sapiens
gagcacgcagauccaugagcuggaggauaacu

SEQ ID NO: 301159 - RNA, 32 nt, Homo Sapiens
guuuuaccugaaauaaagaacuaguuuuagag

SEQ ID NO: 301160 - RNA, 32 nt, Homo Sapiens
uggaaagcacaccucauucagcaugagaggcc

SEQ ID NO: 301161 - RNA, 32 nt, Homo Sapiens
cggaaggguaguccgcggggcauuccgggcgg

SEQ ID NO: 301162 - RNA, 31 nt, Homo Sapiens
auuuuucugggaauucucagaggccuggauc

SEQ ID NO: 301163 - RNA, 32 nt, Homo Sapiens
cuguccugguguggugcugcucccucaccucc

SEQ ID NO: 301164 - RNA, 32 nt, Homo Sapiens
ugggagaaauaccagaaagggauuuuucaaag

SEQ ID NO: 301165 - RNA, 32 nt, Homo Sapiens
gaguguaggggguggggguucuaggcuauagg

SEQ ID NO: 301166 - RNA, 32 nt, Homo Sapiens
ggcacacucacagagagaagugugcauguaca

SEQ ID NO: 301167 - RNA, 32 nt, Homo Sapiens
uaaacuagcucuuuuguuaguaucgucucaca

SEQ ID NO: 301168 - RNA, 32 nt, Homo Sapiens
aauuugaaaaagaucagauauuaaauaacaaa

SEQ ID NO: 301169 - RNA, 32 nt, Homo Sapiens
uucugccaagaacacagaacuacuuuggcauu

SEQ ID NO: 301170 - RNA, 32 nt, Homo Sapiens
uuccgcggaauuccgcgccgccgccgccggca

SEQ ID NO: 301171 - RNA, 32 nt, Homo Sapiens
uuuagugagaggacaauuucugauugauuguu

SEQ ID NO: 301172 - RNA, 32 nt, Homo Sapiens
cacccaggcuggaccccagcacguucucuuuu

SEQ ID NO: 301173 - RNA, 32 nt, Homo Sapiens
acuguacuuuuguuggauuagcaaaucaugug

SEQ ID NO: 301174 - RNA, 32 nt, Homo Sapiens
cauuuguacagcaugaugaccuuuacaaagug

SEQ ID NO: 301175 - RNA, 32 nt, Homo Sapiens
cuggcuguucuucccgcugggcgcuguacacc

SEQ ID NO: 301176 - RNA, 32 nt, Homo Sapiens
aaguaagaugagaacuaaaaugccguugaauu

SEQ ID NO: 301177 - RNA, 32 nt, Homo Sapiens
uauuuaaaaaagcaggcuggccaggcacagug

SEQ ID NO: 301178 - RNA, 32 nt, Homo Sapiens
auucaauuugaaagauauuuaugggcaacaaa

SEQ ID NO: 301179 - RNA, 32 nt, Homo Sapiens
gugaccugaucuccuccucaugaccuucugcc

SEQ ID NO: 301180 - RNA, 32 nt, Homo Sapiens
gggaggcccugggcuuccuguguguagcccug

SEQ ID NO: 301181 - RNA, 32 nt, Homo Sapiens
agcaacuccaaaccccagccacuuccugggag

SEQ ID NO: 301182 - RNA, 32 nt, Homo Sapiens
agacggggaaacugaggccugaggcggccggg

SEQ ID NO: 301183 - RNA, 32 nt, Homo Sapiens
accgccuugagugagucaacaaaccuaucauc

SEQ ID NO: 301184 - RNA, 32 nt, Homo Sapiens
gacucgacagacccaagggucccuggaacgua

SEQ ID NO: 301185 - RNA, 32 nt, Homo Sapiens
ucuguacaaaaaucuguuuuuacaucauaaug

SEQ ID NO: 301186 - RNA, 32 nt, Homo Sapiens
guaugaaauauuaaaaagucuaaagugaaaaa

SEQ ID NO: 301187 - RNA, 31 nt, Homo Sapiens
gguguuuuuaggcuuuuuaaucugauuuucu

SEQ ID NO: 301188 - RNA, 27 nt, Homo Sapiens
uuggacuccuucuugcuccccugccau

SEQ ID NO: 301189 - RNA, 32 nt, Homo Sapiens
ccucgccuaugauguccuugaccuccaccgua

SEQ ID NO: 301190 - RNA, 32 nt, Homo Sapiens
gcuuuucugcggcuguguaguaaaucuccccg

SEQ ID NO: 301191 - RNA, 32 nt, Homo Sapiens
cauaagugaggcugggcagagccccgcugugc

SEQ ID NO: 301192 - RNA, 32 nt, Homo Sapiens
agccuuuuaaauuuguaauauuuauauagucg

SEQ ID NO: 301193 - RNA, 32 nt, Homo Sapiens
uagcucuucacagauaucauguauuguaaaca

SEQ ID NO: 301194 - RNA, 32 nt, Homo Sapiens
cugaccaaaaacuuuacaggauucauaaauca

SEQ ID NO: 301195 - RNA, 32 nt, Homo Sapiens
guuagcgggaauccgggagccgcggggugagc

SEQ ID NO: 301196 - RNA, 32 nt, Homo Sapiens
uugauuugauuagguaucuuuuuacaccagua

SEQ ID NO: 301197 - RNA, 32 nt, Homo Sapiens
agagggaagacacagaugaugaagcuggagcc

SEQ ID NO: 301198 - RNA, 32 nt, Homo Sapiens
cuuuguacagcuuuaaguugugucagauucuc

SEQ ID NO: 301199 - RNA, 32 nt, Homo Sapiens
gcaucugugauagcuucugucccuucaucggu

SEQ ID NO: 301200 - RNA, 32 nt, Homo Sapiens
ccuuccuuguuuccuuugacucucaaacaaaa

SEQ ID NO: 301201 - RNA, 32 nt, Homo Sapiens
agagcgagcugacagcagcaacacugucagaa

SEQ ID NO: 301202 - RNA, 32 nt, Homo Sapiens
ccccaccgccgcccccuccggcguguucaugc

SEQ ID NO: 301203 - RNA, 32 nt, Homo Sapiens
gaacccggcgagaggggcgcgcgcaggaucuc

SEQ ID NO: 301204 - RNA, 32 nt, Homo Sapiens
gaaguugaacacacucaacaucagagaaggca

SEQ ID NO: 301205 - RNA, 32 nt, Homo Sapiens
aaauguaugaaacaaccagaucuuucagggag

SEQ ID NO: 301206 - RNA, 32 nt, Homo Sapiens
cguacucccuccccucccguccccagggcaga

SEQ ID NO: 301207 - RNA, 32 nt, Homo Sapiens
uuauuaaguauuuuauuaggaguaccauaauu

SEQ ID NO: 301208 - RNA, 32 nt, Homo Sapiens
ggcccugugguggggcagcugcaccccgauga

SEQ ID NO: 301209 - RNA, 32 nt, Homo Sapiens
ccccacccuaacccccaccucccggcccugag

SEQ ID NO: 301210 - RNA, 32 nt, Homo Sapiens
uuuagggcugugcaggaugugcuuuguuuaaa

SEQ ID NO: 301211 - RNA, 32 nt, Homo Sapiens
ggacaucaggguggcgacucuauagacucuag

SEQ ID NO: 301212 - RNA, 32 nt, Homo Sapiens
ugcugcccaaauaguuuuucuuguuuucauau

SEQ ID NO: 301213 - RNA, 32 nt, Homo Sapiens
aacaaaaacaaaugauagauauagugacagua

SEQ ID NO: 301214 - RNA, 32 nt, Homo Sapiens
guuucuggaagacugcucccggcccgccugcc

SEQ ID NO: 301215 - RNA, 32 nt, Homo Sapiens
acuauauauugcauuucuuuuauguuuuacag

SEQ ID NO: 301216 - RNA, 32 nt, Homo Sapiens
ccggcccugccagcgggcgguggcgccuccag

SEQ ID NO: 301217 - RNA, 32 nt, Homo Sapiens
ugagcuuugacaaagauuuuuauucuaauucu

SEQ ID NO: 301218 - RNA, 32 nt, Homo Sapiens
uuugguuguaagauuauuuuagaguauuguug

SEQ ID NO: 301219 - RNA, 32 nt, Homo Sapiens
auauaaugauaacaauuaaaaggauauucugu

SEQ ID NO: 301220 - RNA, 32 nt, Homo Sapiens
ugguucccagcagucggcaguaauagaaugcu

SEQ ID NO: 301221 - RNA, 32 nt, Homo Sapiens
uguauuuucuuuucuuuuuuuuuuuuuuuugg

SEQ ID NO: 301222 - RNA, 32 nt, Homo Sapiens
aaaggcacaaacgaguuuaggguagacucugu

SEQ ID NO: 301223 - RNA, 32 nt, Homo Sapiens
uaagccacuuggauccugaauaauuuaaaucu

SEQ ID NO: 301224 - RNA, 32 nt, Homo Sapiens
ccucauguauacuucaaguaagaucaagaauc

SEQ ID NO: 301225 - RNA, 32 nt, Homo Sapiens
aagagaagaaaaacuuuuuuuaucuugucuuc

SEQ ID NO: 301226 - RNA, 32 nt, Homo Sapiens
uugcaggggaugcucucugauguuuguuccgu

SEQ ID NO: 301227 - RNA, 32 nt, Homo Sapiens
cucccggagccgcggaacucggcggccgccau

SEQ ID NO: 301228 - RNA, 32 nt, Homo Sapiens
gaagcucggugccggcucgcgcgaucgguggg

SEQ ID NO: 301229 - RNA, 32 nt, Homo Sapiens
uuccccgcccgcaggagcucagagcaucgcug

SEQ ID NO: 301230 - RNA, 32 nt, Homo Sapiens
guguuugcuguaagacuuuguacauuuuugug

SEQ ID NO: 301231 - RNA, 32 nt, Homo Sapiens
cagguggccccggugccgcuguucaucgggcc

SEQ ID NO: 301232 - RNA, 32 nt, Homo Sapiens
uguuuaaaaaauuugggguuagagcaacuguu

SEQ ID NO: 301233 - RNA, 32 nt, Homo Sapiens
ucucccgacuucucgucaggcuuucgcgccgg

SEQ ID NO: 301234 - RNA, 32 nt, Homo Sapiens
acaaaugaaaaauagcagcauugcauuucuuu

SEQ ID NO: 301235 - RNA, 32 nt, Homo Sapiens
guagaacacuguauaccauauauacuauauac

SEQ ID NO: 301236 - RNA, 32 nt, Homo Sapiens
cccacucugccagcuuccuggagccgugcauu

SEQ ID NO: 301237 - RNA, 31 nt, Homo Sapiens
uuggaaugaggcagaaaaguauaucaagaca

SEQ ID NO: 301238 - RNA, 32 nt, Homo Sapiens
ucucggcuugucuacaggcccuuuuccccguc

SEQ ID NO: 301239 - RNA, 32 nt, Homo Sapiens
guuacaucauuuaaaaaacccuugcuguaaag

SEQ ID NO: 301240 - RNA, 32 nt, Homo Sapiens
ggcggggaggagaggaggaaaaagcgcugagu

SEQ ID NO: 301241 - RNA, 32 nt, Homo Sapiens
auugccgccccucccgccccagggcagggcug

SEQ ID NO: 301242 - RNA, 32 nt, Homo Sapiens
ccuacccaguacccacgucaccccaagugagc

SEQ ID NO: 301243 - RNA, 32 nt, Homo Sapiens
ccucuccacccugccucccacuuaagaggcuc

SEQ ID NO: 301244 - RNA, 32 nt, Homo Sapiens
cugugcuguccugauuguugcugcugguguug

SEQ ID NO: 301245 - RNA, 32 nt, Homo Sapiens
gagccugccgagugccgucccggcgcccgacc

SEQ ID NO: 301246 - RNA, 32 nt, Homo Sapiens
cccgacagaggccccaggugcgcuggcagugg

SEQ ID NO: 301247 - RNA, 32 nt, Homo Sapiens
gccaaagagcuccugagaagcagagaaaaguc

SEQ ID NO: 301248 - RNA, 28 nt, Homo Sapiens
agaaagacaauuuaacauuugguucugg

SEQ ID NO: 301249 - RNA, 32 nt, Homo Sapiens
uuuauauuguugagaaagaacaaaaagggaau

SEQ ID NO: 301250 - RNA, 32 nt, Homo Sapiens
accuucccugaccccugaaccuggauacaagc

SEQ ID NO: 301251 - RNA, 30 nt, Homo Sapiens
aggguaggcaggcggcacaggcccuucauc

SEQ ID NO: 301252 - RNA, 32 nt, Homo Sapiens
cuucucuguaacaugcacacuuuggccugugu

SEQ ID NO: 301253 - RNA, 32 nt, Homo Sapiens
caaggugacuucuggugacagccagaucaucc

SEQ ID NO: 301254 - RNA, 32 nt, Homo Sapiens
gaaagaugacggaugccuagaguuuaccuuau

SEQ ID NO: 301255 - RNA, 32 nt, Homo Sapiens
cuccgcguucccagcccggguccccgcguuca

SEQ ID NO: 301256 - RNA, 32 nt, Homo Sapiens
cccugggacggacagggcuggcugucucucag

SEQ ID NO: 301257 - RNA, 32 nt, Homo Sapiens
gaccuucugugccucagaucccugagugcccg

SEQ ID NO: 301258 - RNA, 32 nt, Homo Sapiens
ccggggcuccggggcggcagcagagcuggcac

SEQ ID NO: 301259 - RNA, 32 nt, Homo Sapiens
auuuguauaucgauggcuuaacauauacaaca

SEQ ID NO: 301260 - RNA, 32 nt, Homo Sapiens
ccgcucccacugacgcugcuuucgcuucaccc

SEQ ID NO: 301261 - RNA, 32 nt, Homo Sapiens
guaucuguaugccuaugagugugagaagaaag

SEQ ID NO: 301262 - RNA, 31 nt, Homo Sapiens
accucggcccacgccgccugaguuagaaacg

SEQ ID NO: 301263 - RNA, 32 nt, Homo Sapiens
gacggggcugugaggggugucuccaggcacaa

SEQ ID NO: 301264 - RNA, 32 nt, Homo Sapiens
uuguaauuaaacugcuauauauuguuugccau

SEQ ID NO: 301265 - RNA, 32 nt, Homo Sapiens
ccauuuucuauuugugcaaacucuguaaauau

SEQ ID NO: 301266 - RNA, 26 nt, Homo Sapiens
gacuuauauaaaaauagaauaauacu

SEQ ID NO: 301267 - RNA, 32 nt, Homo Sapiens
cuacugccccacuucaaauugcaguguucugu

SEQ ID NO: 301268 - RNA, 32 nt, Homo Sapiens
ccuagcuacuugggaggcugaggugggagaau

SEQ ID NO: 301269 - RNA, 32 nt, Homo Sapiens
uuugacaucagucugugguuuauuuugucauc

SEQ ID NO: 301270 - RNA, 32 nt, Homo Sapiens
ugccuaugcuguugcccuccccagggccugag

SEQ ID NO: 301271 - RNA, 30 nt, Homo Sapiens
gaacauuaauaaacuaaaaacuucaugugu

SEQ ID NO: 301272 - RNA, 32 nt, Homo Sapiens
ugcaaacugcagugacuguaaauuggccuggc

SEQ ID NO: 301273 - RNA, 32 nt, Homo Sapiens
aaugaguugauuugcagaugacucauaacuaa

SEQ ID NO: 301274 - RNA, 32 nt, Homo Sapiens
aaagcaaugaugauuaggacuucuuucaaauu

SEQ ID NO: 301275 - RNA, 32 nt, Homo Sapiens
agucggcucuacaggacgcgcucaucucaaac

SEQ ID NO: 301276 - RNA, 32 nt, Homo Sapiens
ggaacaagcuauccaaccaaagcaaaguuguc

SEQ ID NO: 301277 - RNA, 32 nt, Homo Sapiens
uuucgguuauagccggccggcgcucacuuguc

SEQ ID NO: 301278 - RNA, 32 nt, Homo Sapiens
caauauuagacaaugugaagacagugacagcg

SEQ ID NO: 301279 - RNA, 32 nt, Homo Sapiens
uuucagcauucacaccacuacaaaaucaucuu

SEQ ID NO: 301280 - RNA, 32 nt, Homo Sapiens
agccaugaacucccaagccccggccucagccu

SEQ ID NO: 301281 - RNA, 32 nt, Homo Sapiens
agucagccugaagacacaggguggauuauuuc

SEQ ID NO: 301282 - RNA, 32 nt, Homo Sapiens
ugagagccuggggcuccuggugccgcugcguu

SEQ ID NO: 301283 - RNA, 31 nt, Homo Sapiens
ccaccaacccucucagcucagacgcggggug

SEQ ID NO: 301284 - RNA, 32 nt, Homo Sapiens
uacagaugccuuccuuaggaguucuugcuucu

SEQ ID NO: 301285 - RNA, 32 nt, Homo Sapiens
gucggaaaaaccaaauaccucaaaauuacccg

SEQ ID NO: 301286 - RNA, 32 nt, Homo Sapiens
uuucaaagggaaggaagggcagugcugacuuu

SEQ ID NO: 301287 - RNA, 32 nt, Homo Sapiens
ccuuuauagcuggaguuuaucaguguuguuuu

SEQ ID NO: 301288 - RNA, 32 nt, Homo Sapiens
gcaugcugguggccucaggaauacgaggaaaa

SEQ ID NO: 301289 - RNA, 32 nt, Homo Sapiens
gagccccggccgcggcgaccaccagccgcacu

SEQ ID NO: 301290 - RNA, 32 nt, Homo Sapiens
cuuuuaaauuaugcuaauucucuucuucugaa

SEQ ID NO: 301291 - RNA, 32 nt, Homo Sapiens
ugagacccuuuucagaagauggcaccgaaagu

SEQ ID NO: 301292 - RNA, 32 nt, Homo Sapiens
uuuuucaaaauuuuacuaaccagaauucuguu

SEQ ID NO: 301293 - RNA, 32 nt, Homo Sapiens
ugcacauuguggguggagagcgggaaagagag

SEQ ID NO: 301294 - RNA, 32 nt, Homo Sapiens
aauaacgccuguauggaguugguuucaucuuc

SEQ ID NO: 301295 - RNA, 32 nt, Homo Sapiens
ucucugcugaccuugcugggaacacucugagg

SEQ ID NO: 301296 - RNA, 32 nt, Homo Sapiens
cagccuccgcggcuaucccgggaguccugcuc

SEQ ID NO: 301297 - RNA, 32 nt, Homo Sapiens
caccaagacccuucccucccaagcccucaaag

SEQ ID NO: 301298 - RNA, 32 nt, Homo Sapiens
cacaagcccucccacccccgugcagccacaua

SEQ ID NO: 301299 - RNA, 32 nt, Homo Sapiens
ucugagaggcaguaaagcagugaugaagacag

SEQ ID NO: 301300 - RNA, 32 nt, Homo Sapiens
guuuuguuuuuuucgauuucguuuaaugacaa

SEQ ID NO: 301301 - RNA, 32 nt, Homo Sapiens
ccccgcggcuggaagaaugagcuuguccuucc

SEQ ID NO: 301302 - RNA, 32 nt, Homo Sapiens
aaauuuguaugaaccuuagaaaaguuauuaaa

SEQ ID NO: 301303 - RNA, 32 nt, Homo Sapiens
cuugggggguccccggggucggcgccuuccca

SEQ ID NO: 301304 - RNA, 32 nt, Homo Sapiens
gaagagcuugaacaaugcugcauuugcaucag

SEQ ID NO: 301305 - RNA, 32 nt, Homo Sapiens
acuuuaaucaugguuucaugagcauuaaaaag

SEQ ID NO: 301306 - RNA, 32 nt, Homo Sapiens
aaagaaggcaaaauaccuaacacauaguaaac

SEQ ID NO: 301307 - RNA, 32 nt, Homo Sapiens
auuaacacaggguuuuaacuugcaauacggaa

SEQ ID NO: 301308 - RNA, 32 nt, Homo Sapiens
agucagugcgauccgauuuguggaggaugaga

SEQ ID NO: 301309 - RNA, 32 nt, Homo Sapiens
gaggacccaggcccacacccagcccuucugcc

SEQ ID NO: 301310 - RNA, 32 nt, Homo Sapiens
gagugaugguggccucagcgaagaugggccgg

SEQ ID NO: 301311 - RNA, 32 nt, Homo Sapiens
cuuccuguaagacgaugugacugcacaagagc

SEQ ID NO: 301312 - RNA, 32 nt, Homo Sapiens
uggaaagaaggaaaaaagaaaaucccugggcc

SEQ ID NO: 301313 - RNA, 32 nt, Homo Sapiens
ugaucugcauggcaguggugggcuugcucuuu

SEQ ID NO: 301314 - RNA, 32 nt, Homo Sapiens
ccggauaggaggaggaggggacccauaggacg

SEQ ID NO: 301315 - RNA, 32 nt, Homo Sapiens
uuuauuucuguaaaauauuagcuguaugaaua

SEQ ID NO: 301316 - RNA, 32 nt, Homo Sapiens
uuccuaucacugugaacuuugcugguacagag

SEQ ID NO: 301317 - RNA, 32 nt, Homo Sapiens
cucuuauggcugugucccugguugucaauaaa

SEQ ID NO: 301318 - RNA, 32 nt, Homo Sapiens
acccagcauuuaguuuuaaaucuuuuagaugc

SEQ ID NO: 301319 - RNA, 32 nt, Homo Sapiens
auggcagaacagacaccguguuuauucuuaca

SEQ ID NO: 301320 - RNA, 32 nt, Homo Sapiens
ggggcccagacacccccgaccuucagaacagc

SEQ ID NO: 301321 - RNA, 32 nt, Homo Sapiens
ucugagucucccaaagauugguccuagagaaa

SEQ ID NO: 301322 - RNA, 32 nt, Homo Sapiens
uauuuguuuuucagaaaugaccacugaagauu

SEQ ID NO: 301323 - RNA, 32 nt, Homo Sapiens
ccccgucugaccaagggcugacuucuccagga

SEQ ID NO: 301324 - RNA, 32 nt, Homo Sapiens
gcagauggauggugagcaccacugcuacagag

SEQ ID NO: 301325 - RNA, 32 nt, Homo Sapiens
gggcuccuggcgugucauuugcuggcuugaau

SEQ ID NO: 301326 - RNA, 32 nt, Homo Sapiens
aucuggagagagcagcugcugcugccccacca

SEQ ID NO: 301327 - RNA, 32 nt, Homo Sapiens
gaagaaaccugcugcucucuuaauuuuaauau

SEQ ID NO: 301328 - RNA, 32 nt, Homo Sapiens
aaaggcaaccaccauucugauuucucucacca

SEQ ID NO: 301329 - RNA, 32 nt, Homo Sapiens
cuaguuuuaguuuaaaaagaaaaaaugcaggg

SEQ ID NO: 301330 - RNA, 32 nt, Homo Sapiens
ggcccggccgcgccugguccugagcgguacca

SEQ ID NO: 301331 - RNA, 32 nt, Homo Sapiens
ugaauaccuucuccauugggggaaagauauuc

SEQ ID NO: 301332 - RNA, 31 nt, Homo Sapiens
ccaaaaauacaacacagacgauauuuaauuc

SEQ ID NO: 301333 - RNA, 32 nt, Homo Sapiens
cguuugggaaagggauauuugagagcuucuuu

SEQ ID NO: 301334 - RNA, 32 nt, Homo Sapiens
gggaggaccugugggcacccaggcagcagcac

SEQ ID NO: 301335 - RNA, 32 nt, Homo Sapiens
uuagcaucucauuccuugugacuuccacagcu

SEQ ID NO: 301336 - RNA, 32 nt, Homo Sapiens
guuuguuuuggcagcauagaaaaguaacauau

SEQ ID NO: 301337 - RNA, 32 nt, Homo Sapiens
gcgccggccagagcgagcuagacaagggcacg

SEQ ID NO: 301338 - RNA, 32 nt, Homo Sapiens
ccugacaauuguggcuuaauucaugacuuguu

SEQ ID NO: 301339 - RNA, 32 nt, Homo Sapiens
ccaagugguugaacacuuugaucuggaguucc

SEQ ID NO: 301340 - RNA, 32 nt, Homo Sapiens
gggcuggcugggcaggcaggggcuugccucuu

SEQ ID NO: 301341 - RNA, 32 nt, Homo Sapiens
uuaacaaauuccuaggugauaacugauaaugu

SEQ ID NO: 301342 - RNA, 32 nt, Homo Sapiens
cgccuguaauaccagcacuuugggaggcugag

SEQ ID NO: 301343 - RNA, 32 nt, Homo Sapiens
uuuauagaagcauuuuacaaguauugcaauca

SEQ ID NO: 301344 - RNA, 32 nt, Homo Sapiens
uuauuagaauaaaaugugcaaauaaugacaau

SEQ ID NO: 301345 - RNA, 32 nt, Homo Sapiens
augucuauauagcauauagacauaugcuauaa

SEQ ID NO: 301346 - RNA, 32 nt, Homo Sapiens
cugaagaagggagaggacuuggaggaugcagg

SEQ ID NO: 301347 - RNA, 32 nt, Homo Sapiens
uuucccuccucucuugccccagcaauucuuuu

SEQ ID NO: 301348 - RNA, 32 nt, Homo Sapiens
uccucugcuucccccaccacguucccaucacc

SEQ ID NO: 301349 - RNA, 32 nt, Homo Sapiens
caguaacaaaaacacaugauuuggaaauacuu

SEQ ID NO: 301350 - RNA, 32 nt, Homo Sapiens
agacugaguaaacaaacauuauagaaaaaaag

SEQ ID NO: 301351 - RNA, 32 nt, Homo Sapiens
guuugggguucaggaugcugcagucugugcaa

SEQ ID NO: 301352 - RNA, 32 nt, Homo Sapiens
aagaggcuuggaccugggcagcuccugccccu

SEQ ID NO: 301353 - RNA, 28 nt, Homo Sapiens
acagaggggcggccgggcagaggugcuc

SEQ ID NO: 301354 - RNA, 32 nt, Homo Sapiens
ugagaagcuggaaagagagagaagggccucac

SEQ ID NO: 301355 - RNA, 32 nt, Homo Sapiens
acuucuuuuuaaagucaucucauggucuccag

SEQ ID NO: 301356 - RNA, 32 nt, Homo Sapiens
caucagcaccagaagcagcauguuggacagaa

SEQ ID NO: 301357 - RNA, 32 nt, Homo Sapiens
auaccuuuuuauucuauggaacucuaaccuau

SEQ ID NO: 301358 - RNA, 32 nt, Homo Sapiens
auugaauuaguuuuuucuuccuuuuugcuuga

SEQ ID NO: 301359 - RNA, 32 nt, Homo Sapiens
uuagccagguuuccuuugaagagaaacucaaa

SEQ ID NO: 301360 - RNA, 32 nt, Homo Sapiens
gaccaaguauaaacuuuuaccacuugcugcac

SEQ ID NO: 301361 - RNA, 32 nt, Homo Sapiens
aaucgauucgccgaauccaacaguacugauua

SEQ ID NO: 301362 - RNA, 32 nt, Homo Sapiens
cgugcaugugcgcacacacacacacacacgca

SEQ ID NO: 301363 - RNA, 32 nt, Homo Sapiens
cauuggguaguguagaagcaacaagcaugucc

SEQ ID NO: 301364 - RNA, 32 nt, Homo Sapiens
uccaccuccucgcuccucugaggcuccuccuc

SEQ ID NO: 301365 - RNA, 32 nt, Homo Sapiens
aucagaagucuaccccaccaccuccucaggaa

SEQ ID NO: 301366 - RNA, 32 nt, Homo Sapiens
ccccagccuggugcuuggcagaugacugccuc

SEQ ID NO: 301367 - RNA, 32 nt, Homo Sapiens
cgagagcaugaguggggugugccucgugugcg

SEQ ID NO: 301368 - RNA, 32 nt, Homo Sapiens
gccagcagacccaggacccagcccuuucucug

SEQ ID NO: 301369 - RNA, 32 nt, Homo Sapiens
uuguuuugucucguguucaugauguuaagaaa

SEQ ID NO: 301370 - RNA, 32 nt, Homo Sapiens
uaccuggggaaggagcuuuuaggguugggggg

SEQ ID NO: 301371 - RNA, 32 nt, Homo Sapiens
cuugaugagaagagaccccugcccauccucag

SEQ ID NO: 301372 - RNA, 32 nt, Homo Sapiens
ggcccaggccccagcacgguggcccuccagug

SEQ ID NO: 301373 - RNA, 32 nt, Homo Sapiens
cugggcuucucagugucucgccggcgggguuc

SEQ ID NO: 301374 - RNA, 32 nt, Homo Sapiens
auucugaugccagacuguuaaaacaggcgcug

SEQ ID NO: 301375 - RNA, 32 nt, Homo Sapiens
agaaagaggaaaacuuugccuacaacuuugga

SEQ ID NO: 301376 - RNA, 32 nt, Homo Sapiens
uguuacugacaguuaacaguggugugacaucc

SEQ ID NO: 301377 - RNA, 32 nt, Homo Sapiens
gucucccugacucugaugauuugagcacuuuu

SEQ ID NO: 301378 - RNA, 32 nt, Homo Sapiens
gcaagcaaaaauuuauucucagggucagcugu

SEQ ID NO: 301379 - RNA, 32 nt, Homo Sapiens
gcgcguccggugcgggcggagucggacggacu

SEQ ID NO: 301380 - RNA, 32 nt, Homo Sapiens
agguagauauuaucuuuacugauaaaauauuu

SEQ ID NO: 301381 - RNA, 32 nt, Homo Sapiens
ugucaauacugaagucucugcuguaauccuua

SEQ ID NO: 301382 - RNA, 32 nt, Homo Sapiens
gccuggcgcugggauuggcgccggaugcaccc

SEQ ID NO: 301383 - RNA, 32 nt, Homo Sapiens
uacuuguaucacgacauacuaaguuuaguuuc

SEQ ID NO: 301384 - RNA, 32 nt, Homo Sapiens
cacccacuuccgagacaugcuggagagcgccc

SEQ ID NO: 301385 - RNA, 31 nt, Homo Sapiens
uguggguggagcugccugcugcacucagcag

SEQ ID NO: 301386 - RNA, 32 nt, Homo Sapiens
ggagccgagugccacaggcauucugcauugcu

SEQ ID NO: 301387 - RNA, 32 nt, Homo Sapiens
cccugacaaggugccugguggccucacccgga

SEQ ID NO: 301388 - RNA, 32 nt, Homo Sapiens
uaagcuaaaaacaaguuuuuuuuauuuguaau

SEQ ID NO: 301389 - RNA, 27 nt, Homo Sapiens
auacauuaaaguuucucuuuuacagug

SEQ ID NO: 301390 - RNA, 32 nt, Homo Sapiens
gaaaaauccuggcagcuuuucuccaggcaucu

SEQ ID NO: 301391 - RNA, 32 nt, Homo Sapiens
aagcaacaccauguacaaaccuaucuucuccc

SEQ ID NO: 301392 - RNA, 32 nt, Homo Sapiens
accagccccauggucuggcuccugucaccugg

SEQ ID NO: 301393 - RNA, 32 nt, Homo Sapiens
cuuaggaaaauauuuaaagcaaauauuucaaa

SEQ ID NO: 301394 - RNA, 32 nt, Homo Sapiens
uacuuguugauagaaauaauuugguagaaaga

SEQ ID NO: 301395 - RNA, 32 nt, Homo Sapiens
agcgaaacagcuuuugucucugggcaguugca

SEQ ID NO: 301396 - RNA, 31 nt, Homo Sapiens
accuccggcggcugugacacggccucuuccc

SEQ ID NO: 301397 - RNA, 32 nt, Homo Sapiens
uauuuggaggugucauaacauuauaauaauaa

SEQ ID NO: 301398 - RNA, 32 nt, Homo Sapiens
ugcgacgcugcagccgcagggagggaggggcu

SEQ ID NO: 301399 - RNA, 30 nt, Homo Sapiens
cugucauggcugccaucucuacuuccaucc

SEQ ID NO: 301400 - RNA, 32 nt, Homo Sapiens
cugauucuuuuggaaaaugacaguuuaagcac

SEQ ID NO: 301401 - RNA, 32 nt, Homo Sapiens
uuuguugaaaauaaagguuucucuuugauuuc

SEQ ID NO: 301402 - RNA, 32 nt, Homo Sapiens
aguccccuaggcuccucucugcucuccccagg

SEQ ID NO: 301403 - RNA, 32 nt, Homo Sapiens
caucucgcacuuccaacugcccuguaaccacc

SEQ ID NO: 301404 - RNA, 32 nt, Homo Sapiens
uggucuggagaagagaucugaggucccaccuu

SEQ ID NO: 301405 - RNA, 32 nt, Homo Sapiens
acaggcuugagccacugcgcccggccuagaac

SEQ ID NO: 301406 - RNA, 32 nt, Homo Sapiens
aaauacauuuaaaagaaaaaucuacaugguac

SEQ ID NO: 301407 - RNA, 32 nt, Homo Sapiens
augccccgccucccaacggaccuggacguagg

SEQ ID NO: 301408 - RNA, 32 nt, Homo Sapiens
uguagggcguugcaggcagcgcucaccuccuc

SEQ ID NO: 301409 - RNA, 32 nt, Homo Sapiens
gccccuccaaaacacgcccccaucccacagcg

SEQ ID NO: 301410 - RNA, 32 nt, Homo Sapiens
aggcgcugagccgcgccacgcugcaacgggac

SEQ ID NO: 301411 - RNA, 32 nt, Homo Sapiens
aauugaagguuguauguaaaucugcuuugugg

SEQ ID NO: 301412 - RNA, 32 nt, Homo Sapiens
ccauguccacgagcggggagggguggguucug

SEQ ID NO: 301413 - RNA, 32 nt, Homo Sapiens
ucaacaaaaaguucuacgggaaguauugaucg

SEQ ID NO: 301414 - RNA, 32 nt, Homo Sapiens
guuguaaaaucguuuuggaauuugugccugcu

SEQ ID NO: 301415 - RNA, 32 nt, Homo Sapiens
gacaauggaggggacagugagcuacgcacaac

SEQ ID NO: 301416 - RNA, 32 nt, Homo Sapiens
ucuuguguauggcagggcugggacugcugucc

SEQ ID NO: 301417 - RNA, 32 nt, Homo Sapiens
ugaauaaauaaaugcaccuucucuguaugcag

SEQ ID NO: 301418 - RNA, 32 nt, Homo Sapiens
uuguggcacuguauauguuaagaaauuuuauu

SEQ ID NO: 301419 - RNA, 32 nt, Homo Sapiens
auaguuuuucuuuaauaugauucuaguacaua

SEQ ID NO: 301420 - RNA, 32 nt, Homo Sapiens
gcugaauggaaagccagaaaguagagugaagc

SEQ ID NO: 301421 - RNA, 32 nt, Homo Sapiens
auugugcuuucacuucccaggcuccauguguc

SEQ ID NO: 301422 - RNA, 32 nt, Homo Sapiens
agaauggaaccucagcucugccagguaaccaa

SEQ ID NO: 301423 - RNA, 32 nt, Homo Sapiens
ggguagcagaaucuugguaacuccuaaugauc

SEQ ID NO: 301424 - RNA, 32 nt, Homo Sapiens
uucuauugauucuacaucagacuuccaagcag

SEQ ID NO: 301425 - RNA, 32 nt, Homo Sapiens
ugagugucaggagauugagaucaugaggucag

SEQ ID NO: 301426 - RNA, 32 nt, Homo Sapiens
ccggccccccucgccgcgcguccuccaaaaaa

SEQ ID NO: 301427 - RNA, 32 nt, Homo Sapiens
acucugaauuccaaguagaauugauuucccuu

SEQ ID NO: 301428 - RNA, 32 nt, Homo Sapiens
cuuugcccucaaauacaguauuguggucauuu

SEQ ID NO: 301429 - RNA, 32 nt, Homo Sapiens
ugcauccuccaagcuggauuccuaacaucucu

SEQ ID NO: 301430 - RNA, 32 nt, Homo Sapiens
cagcucaggcgcccggcucaggagcgggagga

SEQ ID NO: 301431 - RNA, 32 nt, Homo Sapiens
agcugcccauuuugugaaauuuuuauguagaa

SEQ ID NO: 301432 - RNA, 32 nt, Homo Sapiens
uggccugaccucagcuccucgcauucccucca

SEQ ID NO: 301433 - RNA, 32 nt, Homo Sapiens
auaucuuuauugcaugagaagccauacaaauc

SEQ ID NO: 301434 - RNA, 32 nt, Homo Sapiens
aucuucauuuuuguuucauuucgugguaguug

SEQ ID NO: 301435 - RNA, 32 nt, Homo Sapiens
gcucaguugcugucauccuagaccuguuucuu

SEQ ID NO: 301436 - RNA, 32 nt, Homo Sapiens
uauaugauagucauaaaguaaauaacucacuu

SEQ ID NO: 301437 - RNA, 32 nt, Homo Sapiens
uugcaaucuauuauauuuugcaauugauuaga

SEQ ID NO: 301438 - RNA, 32 nt, Homo Sapiens
aauagaccugguacaugguacacacaccccca

SEQ ID NO: 301439 - RNA, 32 nt, Homo Sapiens
gaaaucuuuugguggaucaauucuagacaagc

SEQ ID NO: 301440 - RNA, 32 nt, Homo Sapiens
ugagaaggaaagauuaucaagcauugaaaaga

SEQ ID NO: 301441 - RNA, 32 nt, Homo Sapiens
cgcgcgaggguggugggcaucgaggucccagc

SEQ ID NO: 301442 - RNA, 32 nt, Homo Sapiens
ggaagccgggagggggagccgcggcggcgugg

SEQ ID NO: 301443 - RNA, 30 nt, Homo Sapiens
aaccgaggcuucggcgggggcgggaggagc

SEQ ID NO: 301444 - RNA, 32 nt, Homo Sapiens
cuaaauacguggagaauuucuugaauaguuuu

SEQ ID NO: 301445 - RNA, 32 nt, Homo Sapiens
cacuaggggccacuggggggcuggggucucca

SEQ ID NO: 301446 - RNA, 32 nt, Homo Sapiens
gucccagcaccucggagcccccuucacacgcc

SEQ ID NO: 301447 - RNA, 32 nt, Homo Sapiens
gagccuggccuggccccuggccuuggcugcau

SEQ ID NO: 301448 - RNA, 32 nt, Homo Sapiens
aaaggggguaguccucuuauaaccugauauuu

SEQ ID NO: 301449 - RNA, 32 nt, Homo Sapiens
uaccccaaauuguguauauaucuuauaacugu

SEQ ID NO: 301450 - RNA, 32 nt, Homo Sapiens
ugacuaguuucuuuuucuugacagcucuucuc

SEQ ID NO: 301451 - RNA, 32 nt, Homo Sapiens
uuuuaacugaagaaauuauacuguuugugugu

SEQ ID NO: 301452 - RNA, 32 nt, Homo Sapiens
ccucgggggcuuugggaaagcauggcacccuc

SEQ ID NO: 301453 - RNA, 32 nt, Homo Sapiens
uuggaguuuggccagucuuguuuuuuaggcac

SEQ ID NO: 301454 - RNA, 32 nt, Homo Sapiens
ugcugggcgccguggggccgggacagcagcag

SEQ ID NO: 301455 - RNA, 32 nt, Homo Sapiens
caguagagacagggcuuuugccaugucgccca

SEQ ID NO: 301456 - RNA, 32 nt, Homo Sapiens
ggcaucccugugcucuugggggccuaggaagc

SEQ ID NO: 301457 - RNA, 32 nt, Homo Sapiens
uguaucauagaaauuguauuaagcaaauugac

SEQ ID NO: 301458 - RNA, 32 nt, Homo Sapiens
ccguugcggggcgcgcucucgagaggcggcgg

SEQ ID NO: 301459 - RNA, 32 nt, Homo Sapiens
uccucuucucccuugccagccagcacucugcc

SEQ ID NO: 301460 - RNA, 32 nt, Homo Sapiens
ugcugucauggcggccgcucuguggggcuucu

SEQ ID NO: 301461 - RNA, 32 nt, Homo Sapiens
gcugggaacacacacacacacacacacacaca

SEQ ID NO: 301462 - RNA, 32 nt, Homo Sapiens
aggaggcucagcugcggcucacgcuccacugc

SEQ ID NO: 301463 - RNA, 32 nt, Homo Sapiens
uggggucuauagagauugcuuuauuggauacu

SEQ ID NO: 301464 - RNA, 32 nt, Homo Sapiens
uugagcgccugcauuccugggggcuggagggu

SEQ ID NO: 301465 - RNA, 32 nt, Homo Sapiens
ccgcgguggagcaaacuguggacuugccuggc

SEQ ID NO: 301466 - RNA, 32 nt, Homo Sapiens
aaacaaaacaaaacaaaacaaacaaacaaaca

SEQ ID NO: 301467 - RNA, 32 nt, Homo Sapiens
auggagcaugcaauguguuuaucacaguaucu

SEQ ID NO: 301468 - RNA, 32 nt, Homo Sapiens
ccagcuuccuucagagagcaguguuuuuggug

SEQ ID NO: 301469 - RNA, 32 nt, Homo Sapiens
ccuuagccgggcgcagggcgcgcagcccaggc

SEQ ID NO: 301470 - RNA, 32 nt, Homo Sapiens
ggugaggccggauccucagagccccgacaccc

SEQ ID NO: 301471 - RNA, 31 nt, Homo Sapiens
gaacuuuuggaaaaucucagagggucugggg

SEQ ID NO: 301472 - RNA, 32 nt, Homo Sapiens
gaaucagaccugguucccgccucccccaaggc

SEQ ID NO: 301473 - RNA, 32 nt, Homo Sapiens
cauauuugaacuugucgaaccagaucuucuca

SEQ ID NO: 301474 - RNA, 32 nt, Homo Sapiens
auuuuuacagcuacuuuaaccuaugauaauua

SEQ ID NO: 301475 - RNA, 32 nt, Homo Sapiens
guaugucaguccaagaaacaaacaagauagcu

SEQ ID NO: 301476 - RNA, 32 nt, Homo Sapiens
caugugccacguaacagcgucugggucaguga

SEQ ID NO: 301477 - RNA, 32 nt, Homo Sapiens
uggcaggugaguggauggauagauggauaggu

SEQ ID NO: 301478 - RNA, 32 nt, Homo Sapiens
agagugaggaagugggauggggccugaccgga

SEQ ID NO: 301479 - RNA, 32 nt, Homo Sapiens
ccauucucuauuauuucucucacauacaugug

SEQ ID NO: 301480 - RNA, 32 nt, Homo Sapiens
uugcugaugaacugagauggucccaacugagg

SEQ ID NO: 301481 - RNA, 32 nt, Homo Sapiens
gagcccccagcccccaggagagcccuccacag

SEQ ID NO: 301482 - RNA, 32 nt, Homo Sapiens
cagcuucuagccucccuucucuggaaucuaug

SEQ ID NO: 301483 - RNA, 32 nt, Homo Sapiens
cuugaggugggaaguaucuugugggaaaguag

SEQ ID NO: 301484 - RNA, 32 nt, Homo Sapiens
ugauccaggcuucggcggccgguggcagcucu

SEQ ID NO: 301485 - RNA, 32 nt, Homo Sapiens
cauuccugucuucucacccccaacgaugccaa

SEQ ID NO: 301486 - RNA, 32 nt, Homo Sapiens
ccacacuuuguccaaugguuuuuucacugccu

SEQ ID NO: 301487 - RNA, 32 nt, Homo Sapiens
agaccuagaaaagaaucgugacgggcaggaaa

SEQ ID NO: 301488 - RNA, 32 nt, Homo Sapiens
gaaggucuguugcaugagcaaugggaaaucca

SEQ ID NO: 301489 - RNA, 32 nt, Homo Sapiens
uggguggcuuuuucuuuuuuguacguguacag

SEQ ID NO: 301490 - RNA, 32 nt, Homo Sapiens
gaggacaaugaaaauauaaugaaauaaauauu

SEQ ID NO: 301491 - RNA, 32 nt, Homo Sapiens
uaagggagaaggauaguucacacauaaacugu

SEQ ID NO: 301492 - RNA, 32 nt, Homo Sapiens
ccgcugcugagcugcgugccacaucgcuacgc

SEQ ID NO: 301493 - RNA, 32 nt, Homo Sapiens
uuggccuccagcagcccuucccugcccaguug

SEQ ID NO: 301494 - RNA, 32 nt, Homo Sapiens
caucuugauagugcuuguuuucuucaacaaau

SEQ ID NO: 301495 - RNA, 32 nt, Homo Sapiens
ccauguacugaauaagugaacucaaagaaaag

SEQ ID NO: 301496 - RNA, 32 nt, Homo Sapiens
gggagagggggcguguugaacauccugcaguc

SEQ ID NO: 301497 - RNA, 32 nt, Homo Sapiens
accuugccaggagaggagaaggaugccugggu

SEQ ID NO: 301498 - RNA, 32 nt, Homo Sapiens
uaaccaaggggccugcccugcugggacaggcc

SEQ ID NO: 301499 - RNA, 32 nt, Homo Sapiens
auuuguuuuuaacuucauucgagauaguaccu

SEQ ID NO: 301500 - RNA, 32 nt, Homo Sapiens
agaggagcauauauggcagaggugauggcugg

SEQ ID NO: 301501 - RNA, 32 nt, Homo Sapiens
auaugaacuauuucuaggcuuugacuuuucuu

SEQ ID NO: 301502 - RNA, 32 nt, Homo Sapiens
cagucagugcuguguuugagguaaaugcagua

SEQ ID NO: 301503 - RNA, 32 nt, Homo Sapiens
cugccaaguccuccacccgcugcccccgccau

SEQ ID NO: 301504 - RNA, 32 nt, Homo Sapiens
uuagagcaauacuagcauacguuuuucuuagu

SEQ ID NO: 301505 - RNA, 32 nt, Homo Sapiens
ccgcggagccaugcgguacaacgagaaggagc

SEQ ID NO: 301506 - RNA, 32 nt, Homo Sapiens
ccgaguugugaaaauaaaaaauguuuccagac

SEQ ID NO: 301507 - RNA, 32 nt, Homo Sapiens
uuuaaaacuggaagauuaagcuuuuguuaaca

SEQ ID NO: 301508 - RNA, 30 nt, Homo Sapiens
caagcagcuauugggggggaaacacagcau

SEQ ID NO: 301509 - RNA, 32 nt, Homo Sapiens
ucucuaaguagcagauugaacaauaugaaaug

SEQ ID NO: 301510 - RNA, 32 nt, Homo Sapiens
ucuccugccucccagagcaaggcuccugucac

SEQ ID NO: 301511 - RNA, 32 nt, Homo Sapiens
uguuuguuaauaaaagaaaaaauguaucuuaa

SEQ ID NO: 301512 - RNA, 32 nt, Homo Sapiens
uccugccuccuucacauuuccuccccagcuuu

SEQ ID NO: 301513 - RNA, 32 nt, Homo Sapiens
agcacaccaggagccaugagaagugccuugga

SEQ ID NO: 301514 - RNA, 32 nt, Homo Sapiens
agguggccgagcugcuggcccagggccacacc

SEQ ID NO: 301515 - RNA, 32 nt, Homo Sapiens
aucaucuccugcauccugcccuccucacagac

SEQ ID NO: 301516 - RNA, 32 nt, Homo Sapiens
agagugcccaggaggcaggcagugcggggugc

SEQ ID NO: 301517 - RNA, 32 nt, Homo Sapiens
uuguuuucaaugccugugccucagcugcuguc

SEQ ID NO: 301518 - RNA, 32 nt, Homo Sapiens
gggcagcucccucuuccuaaucccuuuaccug

SEQ ID NO: 301519 - RNA, 32 nt, Homo Sapiens
gugccccuguucucccuucccucccccaguug

SEQ ID NO: 301520 - RNA, 32 nt, Homo Sapiens
ggggcucaguuugcaggcccaggcccgcaggc

SEQ ID NO: 301521 - RNA, 32 nt, Homo Sapiens
ggguccgagcgcggggcggguugccgaagggc

SEQ ID NO: 301522 - RNA, 32 nt, Homo Sapiens
ucaucuccacacuggcgagagaggacgugcag

SEQ ID NO: 301523 - RNA, 32 nt, Homo Sapiens
uaugcccaugauauccgcggccucggaccccg

SEQ ID NO: 301524 - RNA, 32 nt, Homo Sapiens
gugaguuuuugugaauuacaugaguauggaau

SEQ ID NO: 301525 - RNA, 32 nt, Homo Sapiens
cccacggcaucugccacucuuccuccucccua

SEQ ID NO: 301526 - RNA, 32 nt, Homo Sapiens
gcacccucugcguuuuggauguccuuggaaug

SEQ ID NO: 301527 - RNA, 32 nt, Homo Sapiens
caucccaagguuuccggcuuguccuaugcucu

SEQ ID NO: 301528 - RNA, 32 nt, Homo Sapiens
cauuguauauauaucaccacagacuauaagga

SEQ ID NO: 301529 - RNA, 32 nt, Homo Sapiens
agcacuggguucugcccuuucaucuuuguaag

SEQ ID NO: 301530 - RNA, 32 nt, Homo Sapiens
ucguucugggugcugucccuucugggacucua

SEQ ID NO: 301531 - RNA, 32 nt, Homo Sapiens
aaacuuuuucuuuauuccauguucuauauaag

SEQ ID NO: 301532 - RNA, 32 nt, Homo Sapiens
agugcuuucuguauuuaaauauuguaaaaaga

SEQ ID NO: 301533 - RNA, 32 nt, Homo Sapiens
cacgaggacagaggcugcuuuggacucaauag

SEQ ID NO: 301534 - RNA, 32 nt, Homo Sapiens
augaccacagcugcagaucaguucuuagcaau

SEQ ID NO: 301535 - RNA, 32 nt, Homo Sapiens
guauguuaggaaugauucagaugugugcauaa

SEQ ID NO: 301536 - RNA, 32 nt, Homo Sapiens
ggcuguguuuuaaauuuugcuugaauuuuuau

SEQ ID NO: 301537 - RNA, 32 nt, Homo Sapiens
cgccucccgcggcauucccgcaccggaucgcu

SEQ ID NO: 301538 - RNA, 32 nt, Homo Sapiens
cuuaccgagacccgcccggcccggcggugcga

SEQ ID NO: 301539 - RNA, 32 nt, Homo Sapiens
uugagcggcaccuggucuguggagauggacuc

SEQ ID NO: 301540 - RNA, 32 nt, Homo Sapiens
ugacucuagcugggcaccuuggaccuccagcu

SEQ ID NO: 301541 - RNA, 32 nt, Homo Sapiens
ccugaagccuguccacccaugcuuggagaggc

SEQ ID NO: 301542 - RNA, 32 nt, Homo Sapiens
aaguugcugaagccggccggggagaagguguu

SEQ ID NO: 301543 - RNA, 32 nt, Homo Sapiens
cugcaacgagaucacagcguugccccagcaga

SEQ ID NO: 301544 - RNA, 32 nt, Homo Sapiens
aguaacaaauccaagauuuuggaaaagcgccu

SEQ ID NO: 301545 - RNA, 30 nt, Homo Sapiens
ggaagauggcgcccucgggcccgggcagca

SEQ ID NO: 301546 - RNA, 32 nt, Homo Sapiens
cuuucuuccgccuuaggaagguggcggccagg

SEQ ID NO: 301547 - RNA, 32 nt, Homo Sapiens
agcagaaucggcuuaaggcagcucccaguccc

SEQ ID NO: 301548 - RNA, 32 nt, Homo Sapiens
aaugguuuugauuuuuauguugaggcacauuc

SEQ ID NO: 301549 - RNA, 29 nt, Homo Sapiens
uguucugggggacagagaaggcgcuuccc

SEQ ID NO: 301550 - RNA, 32 nt, Homo Sapiens
gauuuaaaaacaaaacaaaaaaaacacuuaau

SEQ ID NO: 301551 - RNA, 32 nt, Homo Sapiens
accauugaauauauuucacuauguaauaaauu

SEQ ID NO: 301552 - RNA, 32 nt, Homo Sapiens
gcuuccugcuaagugggggaggugagacagau

SEQ ID NO: 301553 - RNA, 32 nt, Homo Sapiens
cuaagugcuccuuaugugaauuucaaacacgu

SEQ ID NO: 301554 - RNA, 31 nt, Homo Sapiens
uguuacuugaagaaaaagaauuuugauauug

SEQ ID NO: 301555 - RNA, 32 nt, Homo Sapiens
ucugcccauucaucuucauguaaggacagcug

SEQ ID NO: 301556 - RNA, 32 nt, Homo Sapiens
ccagaacuuucauguuuaugaguauuagccuu

SEQ ID NO: 301557 - RNA, 32 nt, Homo Sapiens
ggguccugcgaccgcuccuggcuggugggugg

SEQ ID NO: 301558 - RNA, 32 nt, Homo Sapiens
cuaacacuuuacauguuuuucucauuuaauuc

SEQ ID NO: 301559 - RNA, 32 nt, Homo Sapiens
caggcugauuaccauggagugaccuccguugg

SEQ ID NO: 301560 - RNA, 32 nt, Homo Sapiens
cauaggccagacuguugaaaugcugaaaugaa

SEQ ID NO: 301561 - RNA, 32 nt, Homo Sapiens
aucaguccacccccauugugaauguuguccug

SEQ ID NO: 301562 - RNA, 32 nt, Homo Sapiens
gagcucugcccggcugcagggauggcggggag

SEQ ID NO: 301563 - RNA, 32 nt, Homo Sapiens
uuuugacuucaucuauuuuuuauuuguuuuua

SEQ ID NO: 301564 - RNA, 29 nt, Homo Sapiens
aaaaaguuuaauguguauuuucuacagac

SEQ ID NO: 301565 - RNA, 32 nt, Homo Sapiens
uuguauucagacuuuuuuccuguucuagucug

SEQ ID NO: 301566 - RNA, 32 nt, Homo Sapiens
gguuaucggccggcccgguggcuuggcaggca

SEQ ID NO: 301567 - RNA, 32 nt, Homo Sapiens
ccucaugucaaaugcagcaucagucuuuccgg

SEQ ID NO: 301568 - RNA, 32 nt, Homo Sapiens
ccagccuggugcccauccuggcccuugagugu

SEQ ID NO: 301569 - RNA, 32 nt, Homo Sapiens
cuccccaaguuguuccaccagcuccucagacu

SEQ ID NO: 301570 - RNA, 32 nt, Homo Sapiens
aaaaagacgguucucauuuccaauaguuuauu

SEQ ID NO: 301571 - RNA, 32 nt, Homo Sapiens
ggcggugaacucuggcucuuugcuguggacau

SEQ ID NO: 301572 - RNA, 32 nt, Homo Sapiens
cacugcacuccagcacccugggcgacagagug

SEQ ID NO: 301573 - RNA, 32 nt, Homo Sapiens
cuguauguuuguuuuuaauauucaucauaucc

SEQ ID NO: 301574 - RNA, 32 nt, Homo Sapiens
ucuucacccaacuuaaauguucuugagaugaa

SEQ ID NO: 301575 - RNA, 32 nt, Homo Sapiens
ccaguuugccagcaagcgcauccuagcagggu

SEQ ID NO: 301576 - RNA, 32 nt, Homo Sapiens
aaauaaaaaaggaauuauguggucagugcauu

SEQ ID NO: 301577 - RNA, 32 nt, Homo Sapiens
uggauccacgugcuuuuucuuguccaauggga

SEQ ID NO: 301578 - RNA, 32 nt, Homo Sapiens
cuuaguuuugaaauauuugccauuguuguuua

SEQ ID NO: 301579 - RNA, 32 nt, Homo Sapiens
ugaguaggaagaguuaauuguuuucuuuguuc

SEQ ID NO: 301580 - RNA, 32 nt, Homo Sapiens
cuccgcaauuugcauuggugggauaaaggaau

SEQ ID NO: 301581 - RNA, 32 nt, Homo Sapiens
gauagugacagagaugaccuaaaauuaauggc

SEQ ID NO: 301582 - RNA, 32 nt, Homo Sapiens
ggaaugcuuuuauucaagacaccaaauuccaa

SEQ ID NO: 301583 - RNA, 32 nt, Homo Sapiens
gccugcccugcucgccccuccacagccucggu

SEQ ID NO: 301584 - RNA, 32 nt, Homo Sapiens
aacucugacuuggcucacuggauagcucucug

SEQ ID NO: 301585 - RNA, 32 nt, Homo Sapiens
ccgcccgcgccucucucccagcgccgcgccuc

SEQ ID NO: 301586 - RNA, 32 nt, Homo Sapiens
cagcaaggcaccauuuuagagccccgucuuca

SEQ ID NO: 301587 - RNA, 32 nt, Homo Sapiens
aucuuguagauuacauugagcaguauagacau

SEQ ID NO: 301588 - RNA, 31 nt, Homo Sapiens
ucagccuggcacugcccagcccuccagccgu

SEQ ID NO: 301589 - RNA, 32 nt, Homo Sapiens
gcugagccuccucuuugguguugcgguaagau

SEQ ID NO: 301590 - RNA, 32 nt, Homo Sapiens
guuuuaagggagaagguccaguccuuagcccu

SEQ ID NO: 301591 - RNA, 30 nt, Homo Sapiens
ggggggcaccgcgcgggugcagccacgaug

SEQ ID NO: 301592 - RNA, 32 nt, Homo Sapiens
cagacuccuuuucucuucugucccgucaccag

SEQ ID NO: 301593 - RNA, 32 nt, Homo Sapiens
acgggccagggaccuaggaaaagcggcaagga

SEQ ID NO: 301594 - RNA, 32 nt, Homo Sapiens
gcuacuucugcaugcaucuacagggcaucuga

SEQ ID NO: 301595 - RNA, 32 nt, Homo Sapiens
gucaucacauuacaggcaggugucucauaugu

SEQ ID NO: 301596 - RNA, 32 nt, Homo Sapiens
ccgcucccuccuccuccuuccccuggagucag

SEQ ID NO: 301597 - RNA, 32 nt, Homo Sapiens
cgggggauuucaaguuuagggauugggucgug

SEQ ID NO: 301598 - RNA, 32 nt, Homo Sapiens
cggaggccuccagcucggccccgccccugucc

SEQ ID NO: 301599 - RNA, 32 nt, Homo Sapiens
agguagauuuaaaaucugcuuuugaugcuauu

SEQ ID NO: 301600 - RNA, 32 nt, Homo Sapiens
ggagaguuggucaggcugcugcugggagaaau

SEQ ID NO: 301601 - RNA, 32 nt, Homo Sapiens
auggacuugguaguuuuucuauuuuucaauag

SEQ ID NO: 301602 - RNA, 32 nt, Homo Sapiens
auuaggcaaagauaguuucucuagagagaauc

SEQ ID NO: 301603 - RNA, 32 nt, Homo Sapiens
gucaugacagcauucaagauuaugaaaguguu

SEQ ID NO: 301604 - RNA, 32 nt, Homo Sapiens
aggagccacgggggcgcugcugggaacguggg

SEQ ID NO: 301605 - RNA, 32 nt, Homo Sapiens
aauuacgacauuuuaagauauuucauagacaa

SEQ ID NO: 301606 - RNA, 32 nt, Homo Sapiens
acuucuuguucuaugacuugagugaaaaauuu

SEQ ID NO: 301607 - RNA, 30 nt, Homo Sapiens
gucccucucugugcucaaggaguuccauuc

SEQ ID NO: 301608 - RNA, 32 nt, Homo Sapiens
guaugggcugcugcagaggcggcuggagaaca

SEQ ID NO: 301609 - RNA, 32 nt, Homo Sapiens
gaaagaccauucuggaggugggagugggagag

SEQ ID NO: 301610 - RNA, 32 nt, Homo Sapiens
cggaagaggcccggcggaggcggcggugcagc

SEQ ID NO: 301611 - RNA, 32 nt, Homo Sapiens
auaauuaguuuauauaaguguacuggcuguaa

SEQ ID NO: 301612 - RNA, 32 nt, Homo Sapiens
ggggaugcgcgcccggccccucagcgccccca

SEQ ID NO: 301613 - RNA, 32 nt, Homo Sapiens
cccacucccaguccuccugggauccugcuggc

SEQ ID NO: 301614 - RNA, 32 nt, Homo Sapiens
ucaggccgugggcgacucugugccccucaucu

SEQ ID NO: 301615 - RNA, 32 nt, Homo Sapiens
ugcgcacagggugguuuuccucauggauuuug

SEQ ID NO: 301616 - RNA, 32 nt, Homo Sapiens
ugaaggaguugagaugacuuugaagcuaaaau

SEQ ID NO: 301617 - RNA, 32 nt, Homo Sapiens
ucuaguaaguuuuccugcaacauauuuucaau

SEQ ID NO: 301618 - RNA, 32 nt, Homo Sapiens
cuccuugguucuaguccuccccgcagccccuu

SEQ ID NO: 301619 - RNA, 32 nt, Homo Sapiens
cuugggucgggccccaggagccagggaucggc

SEQ ID NO: 301620 - RNA, 32 nt, Homo Sapiens
ggcacgaggaggacccugggcgugauucuccc

SEQ ID NO: 301621 - RNA, 32 nt, Homo Sapiens
auacugcaagcacuucucuucaagaauaugag

SEQ ID NO: 301622 - RNA, 32 nt, Homo Sapiens
agcccaguguggaagagagguaccucaggugu

SEQ ID NO: 301623 - RNA, 32 nt, Homo Sapiens
aagcuuccucuggccuggcgcaggccguucca

SEQ ID NO: 301624 - RNA, 32 nt, Homo Sapiens
gcacgcggagucccggccccgcccccuguucc

SEQ ID NO: 301625 - RNA, 32 nt, Homo Sapiens
caguaaauguaguauauuauuguacagcuacu

SEQ ID NO: 301626 - RNA, 32 nt, Homo Sapiens
agggcccaggacuuggagaagggagcgcgccu

SEQ ID NO: 301627 - RNA, 32 nt, Homo Sapiens
guccaggcccccagccccuccucccucaaacc

SEQ ID NO: 301628 - RNA, 32 nt, Homo Sapiens
cucccucugccagcuggucccgggaauucugu

SEQ ID NO: 301629 - RNA, 32 nt, Homo Sapiens
gacaaaaguuuaucuuugcacaaucaauaaaa

SEQ ID NO: 301630 - RNA, 32 nt, Homo Sapiens
gcccccgcgggaaggggcugagcugcccgccg

SEQ ID NO: 301631 - RNA, 32 nt, Homo Sapiens
cagaucccauauuucugcuuccccucacuuuu

SEQ ID NO: 301632 - RNA, 32 nt, Homo Sapiens
aggacaggagugugggggcgccuuggcggaca

SEQ ID NO: 301633 - RNA, 32 nt, Homo Sapiens
ugggacgcaaggggcaauccugcccgguucgc

SEQ ID NO: 301634 - RNA, 32 nt, Homo Sapiens
cuuacgucaguuccuuacaccaccaaagcacu

SEQ ID NO: 301635 - RNA, 32 nt, Homo Sapiens
ucccgccggguccucccuccccagaccccaga

SEQ ID NO: 301636 - RNA, 32 nt, Homo Sapiens
acuguuuaucugcuguucccuaucaaguauua

SEQ ID NO: 301637 - RNA, 32 nt, Homo Sapiens
uuuccacaguguucuuucguccgagaccgaaa

SEQ ID NO: 301638 - RNA, 32 nt, Homo Sapiens
cacgccuucuucacugccccccucagagugca

SEQ ID NO: 301639 - RNA, 32 nt, Homo Sapiens
cccagaaagcucagaaggcuaaaugauauuau

SEQ ID NO: 301640 - RNA, 32 nt, Homo Sapiens
uauucuuauuuuaauacgcuguagaagguagg

SEQ ID NO: 301641 - RNA, 31 nt, Homo Sapiens
ccucucucaaggagaaaguaauuuuccugca

SEQ ID NO: 301642 - RNA, 32 nt, Homo Sapiens
uucccucguggccuuugcacuugcggcagcaa

SEQ ID NO: 301643 - RNA, 32 nt, Homo Sapiens
uucuauguauggugaggccuuguuguucuagg

SEQ ID NO: 301644 - RNA, 32 nt, Homo Sapiens
aucaccacuaaagaacuuauguaaccaaauac

SEQ ID NO: 301645 - RNA, 32 nt, Homo Sapiens
ccucacagaggauguuacguauucuagacacg

SEQ ID NO: 301646 - RNA, 32 nt, Homo Sapiens
auggggagcgccaggagaggagggucauggag

SEQ ID NO: 301647 - RNA, 32 nt, Homo Sapiens
gaggaagaguuuuuauuuuuuauuuauuuuug

SEQ ID NO: 301648 - RNA, 32 nt, Homo Sapiens
acucucugaaaaagauaacugauucaaugaag

SEQ ID NO: 301649 - RNA, 32 nt, Homo Sapiens
accuucaauuccauuccaaucagccuuugcau

SEQ ID NO: 301650 - RNA, 32 nt, Homo Sapiens
agcggcagugggccugcugaggccuucucuug

SEQ ID NO: 301651 - RNA, 32 nt, Homo Sapiens
cacaaagcccauauaauauaaaacaggauggu

SEQ ID NO: 301652 - RNA, 32 nt, Homo Sapiens
cuaguccaggcgccuccacgcugcaccgugag

SEQ ID NO: 301653 - RNA, 32 nt, Homo Sapiens
uacgggggagggucagggaagaacgaaccuug

SEQ ID NO: 301654 - RNA, 32 nt, Homo Sapiens
uuuguuuuaucuuauaugagaauagaaacacc

SEQ ID NO: 301655 - RNA, 32 nt, Homo Sapiens
uuggcugucccccaaguuuaagcaagcacuga

SEQ ID NO: 301656 - RNA, 32 nt, Homo Sapiens
ccuagcuaaggcacagaagacugaaugaaugc

SEQ ID NO: 301657 - RNA, 32 nt, Homo Sapiens
acauugaauuguagguguuucgugugcugcua

SEQ ID NO: 301658 - RNA, 32 nt, Homo Sapiens
gguucccaucauuuccugugucagcgccuggc

SEQ ID NO: 301659 - RNA, 32 nt, Homo Sapiens
uuuucuuuuuuuuuuuuuuuuaauuuuucccc

SEQ ID NO: 301660 - RNA, 32 nt, Homo Sapiens
acagcuggggaagaggugaagaccauugccaa

SEQ ID NO: 301661 - RNA, 32 nt, Homo Sapiens
cuuuaaguauuuuuaauaagaaaugaauuauc

SEQ ID NO: 301662 - RNA, 32 nt, Homo Sapiens
guaagagcaaaauaaauaauaauacggauuau

SEQ ID NO: 301663 - RNA, 32 nt, Homo Sapiens
gcuuuauugcaaagcuuuaaauauaaauuuca

SEQ ID NO: 301664 - RNA, 32 nt, Homo Sapiens
agagcuuaaauucagauuugugucucauuaau

SEQ ID NO: 301665 - RNA, 32 nt, Homo Sapiens
ccauuggagagaaaaaacuuaaguagauaagg

SEQ ID NO: 301666 - RNA, 32 nt, Homo Sapiens
auauguuuuuaaaagcuuaucuaacaaauuau

SEQ ID NO: 301667 - RNA, 32 nt, Homo Sapiens
ggcuucguagagugggugcuguucccaaaugu

SEQ ID NO: 301668 - RNA, 32 nt, Homo Sapiens
ccuucauccccauaagcccccaucucagcccc

SEQ ID NO: 301669 - RNA, 32 nt, Homo Sapiens
uguuugagacugggcugcaggccccaggaaga

SEQ ID NO: 301670 - RNA, 32 nt, Homo Sapiens
ugaacacaucccagccccuccggccgggcacc

SEQ ID NO: 301671 - RNA, 32 nt, Homo Sapiens
aaaccacagagaaaauauuuauaacaugcaaa

SEQ ID NO: 301672 - RNA, 32 nt, Homo Sapiens
gcggccgguuucugcguccgcugccgcagguu

SEQ ID NO: 301673 - RNA, 32 nt, Homo Sapiens
cuggagggggugacuguccagagccuggaacu

SEQ ID NO: 301674 - RNA, 28 nt, Homo Sapiens
ggcaaaagauaugcacauuugaucacuu

SEQ ID NO: 301675 - RNA, 32 nt, Homo Sapiens
cuuucuggggaagagucagaaaggcugauuag

SEQ ID NO: 301676 - RNA, 32 nt, Homo Sapiens
cugagcauuguuaugcguuauuuucaagcuuu

SEQ ID NO: 301677 - RNA, 30 nt, Homo Sapiens
agccgccucugccgccgccgccgcguuggc

SEQ ID NO: 301678 - RNA, 32 nt, Homo Sapiens
ugaguuucauuuccagucacaaaaaucaguau

SEQ ID NO: 301679 - RNA, 32 nt, Homo Sapiens
uuaugugugugcauuucuuuuuuauuauuauu

SEQ ID NO: 301680 - RNA, 32 nt, Homo Sapiens
cuccuugcugcuuuuucuucuguauuucuagg

SEQ ID NO: 301681 - RNA, 32 nt, Homo Sapiens
gagugaggcugcugccugcgcccugcucccac

SEQ ID NO: 301682 - RNA, 32 nt, Homo Sapiens
cgguaccaggcgcagaucauggcaggcagccg

SEQ ID NO: 301683 - RNA, 32 nt, Homo Sapiens
cuuuguuuccuucuuuagcugccguguguacu

SEQ ID NO: 301684 - RNA, 32 nt, Homo Sapiens
gcuucugccgcugccgccgccggaucccagug

SEQ ID NO: 301685 - RNA, 32 nt, Homo Sapiens
uugagaacagccuggccuucagcccucacaga

SEQ ID NO: 301686 - RNA, 32 nt, Homo Sapiens
cauuccauucuauuuaauugcaguguacaaaa

SEQ ID NO: 301687 - RNA, 32 nt, Homo Sapiens
cuuaguaaaaauugauuacaauugagggaagu

SEQ ID NO: 301688 - RNA, 32 nt, Homo Sapiens
ccuacggccgcgccuuuguguuccugucuucu

SEQ ID NO: 301689 - RNA, 32 nt, Homo Sapiens
ugaucccauucuaguuuucagaauaggaccag

SEQ ID NO: 301690 - RNA, 32 nt, Homo Sapiens
cuucuacggcccggucuaggugucgcucugcu

SEQ ID NO: 301691 - RNA, 32 nt, Homo Sapiens
gaaucaaguuugaaacaaagauuaauaaaguu

SEQ ID NO: 301692 - RNA, 32 nt, Homo Sapiens
uggaguuuucgcugagaacaaaacaguguugu

SEQ ID NO: 301693 - RNA, 32 nt, Homo Sapiens
ugaaguugacuucaagcuuagcuuccucaacu

SEQ ID NO: 301694 - RNA, 32 nt, Homo Sapiens
cgcuggcugugcccuccccuggcacucugacu

SEQ ID NO: 301695 - RNA, 32 nt, Homo Sapiens
uaagugccuaaauaagcaagccaggcuguuga

SEQ ID NO: 301696 - RNA, 32 nt, Homo Sapiens
auucuccagcaaugacaaagugccagagugua

SEQ ID NO: 301697 - RNA, 32 nt, Homo Sapiens
uguacaucucaacaacuuucgccuugaauguc

SEQ ID NO: 301698 - RNA, 32 nt, Homo Sapiens
caucuccucacuuuucagacugaggccuuuuu

SEQ ID NO: 301699 - RNA, 32 nt, Homo Sapiens
agacuacuuucugcccuaauggccauuacuau

SEQ ID NO: 301700 - RNA, 32 nt, Homo Sapiens
cccgacccuuagcgccagcgagcuuggcccuc

SEQ ID NO: 301701 - RNA, 32 nt, Homo Sapiens
ggacaggcugcggccccucccccguccuggag

SEQ ID NO: 301702 - RNA, 32 nt, Homo Sapiens
cacauuugccuccaugguggcguaaguucuga

SEQ ID NO: 301703 - RNA, 32 nt, Homo Sapiens
gagaggagaaacaaaauaugagcguuuaaaau

SEQ ID NO: 301704 - RNA, 32 nt, Homo Sapiens
uccuccaugguggaagggggugugcgugcgug

SEQ ID NO: 301705 - RNA, 32 nt, Homo Sapiens
auucccuccucauuugguggguugguggcugg

SEQ ID NO: 301706 - RNA, 32 nt, Homo Sapiens
aaagaagggucucacguggcuggccuggcucc

SEQ ID NO: 301707 - RNA, 32 nt, Homo Sapiens
cagauauuuaucacccaauugccucugacacu

SEQ ID NO: 301708 - RNA, 32 nt, Homo Sapiens
gcugagcccucccuguggugaucccagccuaa

SEQ ID NO: 301709 - RNA, 32 nt, Homo Sapiens
ugaggagggaacgggaagucggugccuugguu

SEQ ID NO: 301710 - RNA, 32 nt, Homo Sapiens
cacccgcacccucggcggccgcagccucagca

SEQ ID NO: 301711 - RNA, 32 nt, Homo Sapiens
ccuuacaguaggagcccagcucugaaaccagu

SEQ ID NO: 301712 - RNA, 32 nt, Homo Sapiens
cugcagccuugacuuccugggcucaagugauc

SEQ ID NO: 301713 - RNA, 32 nt, Homo Sapiens
ucccgguugugagagccugugauccuuagaug

SEQ ID NO: 301714 - RNA, 32 nt, Homo Sapiens
augugaugcugaccuaugauaagguugaguau

SEQ ID NO: 301715 - RNA, 31 nt, Homo Sapiens
gcugggaaggucccgaauggaguccagaccu

SEQ ID NO: 301716 - RNA, 32 nt, Homo Sapiens
ccuauguuaaaauuauuguuuaucugaaauuc

SEQ ID NO: 301717 - RNA, 32 nt, Homo Sapiens
uagagcuaagacagaaauuaaccccguucagu

SEQ ID NO: 301718 - RNA, 32 nt, Homo Sapiens
ugaguauuccuccguuagcuuuccccauaagg

SEQ ID NO: 301719 - RNA, 32 nt, Homo Sapiens
ccccugauuuucggcacccccagucccaauca

SEQ ID NO: 301720 - RNA, 32 nt, Homo Sapiens
cagauuuuugaaaaauacaaugucuaaugguu

SEQ ID NO: 301721 - RNA, 32 nt, Homo Sapiens
aaguauagugacccuccugugaacuuucugcc

SEQ ID NO: 301722 - RNA, 32 nt, Homo Sapiens
cccggagccccucggcggcgccaccauguacu

SEQ ID NO: 301723 - RNA, 32 nt, Homo Sapiens
uagcggcagcggcggcggguucgggccgccuu

SEQ ID NO: 301724 - RNA, 32 nt, Homo Sapiens
uuccugcucucuuuuccacuuuuccacaucag

SEQ ID NO: 301725 - RNA, 32 nt, Homo Sapiens
gauuuguuuguaaagcacuuugacucuuaccu

SEQ ID NO: 301726 - RNA, 32 nt, Homo Sapiens
ccuccuaccccggcccgacgcucggcccgcga

SEQ ID NO: 301727 - RNA, 32 nt, Homo Sapiens
uuuuuguuuuuaauuuugccaaugaaaucuuc

SEQ ID NO: 301728 - RNA, 32 nt, Homo Sapiens
aaugggaaaaggaaacagucuuugaaccaacu

SEQ ID NO: 301729 - RNA, 32 nt, Homo Sapiens
agaccagccugggcaaaauagcaagaccuugc

SEQ ID NO: 301730 - RNA, 32 nt, Homo Sapiens
aaguguucaugacuuguucuacauaaaacuaa

SEQ ID NO: 301731 - RNA, 32 nt, Homo Sapiens
auaacauaaaaagccaguuggguucuaaauug

SEQ ID NO: 301732 - RNA, 32 nt, Homo Sapiens
gugccauagucuggcugcauuacuggucauuu

SEQ ID NO: 301733 - RNA, 32 nt, Homo Sapiens
aaggaaccaacccugccaacaccuugauguug

SEQ ID NO: 301734 - RNA, 32 nt, Homo Sapiens
uuaaggaaacaaaaauacuuauauauacacag

SEQ ID NO: 301735 - RNA, 32 nt, Homo Sapiens
agaauggacaacacuaugaagcuguggcuaga

SEQ ID NO: 301736 - RNA, 32 nt, Homo Sapiens
aauacaugccaaaauacaagucccugcuggac

SEQ ID NO: 301737 - RNA, 32 nt, Homo Sapiens
ccccaaaauauucccaucuuguccuagcccau

SEQ ID NO: 301738 - RNA, 32 nt, Homo Sapiens
agauaggacaauuuaaauuggauaauuuuaaa

SEQ ID NO: 301739 - RNA, 32 nt, Homo Sapiens
ggccuuauuuguauauuuuuaaauagcgauuu

SEQ ID NO: 301740 - RNA, 32 nt, Homo Sapiens
guaccgagcaaaugccaggucuagcaaacaua

SEQ ID NO: 301741 - RNA, 32 nt, Homo Sapiens
uagcaacaacugaguuugcugucucacuaccc

SEQ ID NO: 301742 - RNA, 32 nt, Homo Sapiens
ggugggguucacucucaggggcgcacaaaggc

SEQ ID NO: 301743 - RNA, 32 nt, Homo Sapiens
ggcaaggcaaguagcggcggcgcuucaagaug

SEQ ID NO: 301744 - RNA, 32 nt, Homo Sapiens
caguguuuugcagugaugggcauuccagcuuc

SEQ ID NO: 301745 - RNA, 32 nt, Homo Sapiens
ugaagaaugcaaaccaggugaugguuucaaug

SEQ ID NO: 301746 - RNA, 32 nt, Homo Sapiens
gguuuuauuuuuguuugagggggauugucaga

SEQ ID NO: 301747 - RNA, 32 nt, Homo Sapiens
uccacuuaagacaaagccuugucuaugugggg

SEQ ID NO: 301748 - RNA, 32 nt, Homo Sapiens
gucugaaaaaaaaaacaaaaaaacugcuuugu

SEQ ID NO: 301749 - RNA, 32 nt, Homo Sapiens
gggccacggugguggggcuggcauggcuggag

SEQ ID NO: 301750 - RNA, 32 nt, Homo Sapiens
gccuuuugucugcggugcugcggccgugggag

SEQ ID NO: 301751 - RNA, 32 nt, Homo Sapiens
gagcuaccacaccagcaaugucuaugcuucuc

SEQ ID NO: 301752 - RNA, 32 nt, Homo Sapiens
cucaugaucccacugcuuccagcccucaaacu

SEQ ID NO: 301753 - RNA, 32 nt, Homo Sapiens
cuuggcgcuucuccccuccccccgaucugccu

SEQ ID NO: 301754 - RNA, 32 nt, Homo Sapiens
gcuggaacauggcaccaguccaaacauuaagg

SEQ ID NO: 301755 - RNA, 32 nt, Homo Sapiens
cccccgcgcgcccuccgucuauuuuuuccucu

SEQ ID NO: 301756 - RNA, 32 nt, Homo Sapiens
augcgcggccccagcgccagggggccagccuu

SEQ ID NO: 301757 - RNA, 32 nt, Homo Sapiens
agugagcauaguccccaccuccaccccucaca

SEQ ID NO: 301758 - RNA, 32 nt, Homo Sapiens
agcuuugguauuuuaaaauuauuguuaaacau

SEQ ID NO: 301759 - RNA, 32 nt, Homo Sapiens
auuccuggcgcagggcauccaggccgcccgcu

SEQ ID NO: 301760 - RNA, 32 nt, Homo Sapiens
ucuucuucuccaugaccuugugcgagaugcca

SEQ ID NO: 301761 - RNA, 32 nt, Homo Sapiens
aaacuccucggucuccagaaaucagaagaaaa

SEQ ID NO: 301762 - RNA, 32 nt, Homo Sapiens
ccucacuacccacaugcugaucuauuggggaa

SEQ ID NO: 301763 - RNA, 32 nt, Homo Sapiens
gagucauuuacuuauagauuuauuuauuuuua

SEQ ID NO: 301764 - RNA, 32 nt, Homo Sapiens
ccaggacccagccuucaaaauuccuggcaggc

SEQ ID NO: 301765 - RNA, 32 nt, Homo Sapiens
gcucucccugucacgcucauguccuguccugg

SEQ ID NO: 301766 - RNA, 32 nt, Homo Sapiens
cgggccguaggggcuccugagugucaugaagu

SEQ ID NO: 301767 - RNA, 32 nt, Homo Sapiens
gggcucaaggggugcuggaaggcgcagagauu

SEQ ID NO: 301768 - RNA, 32 nt, Homo Sapiens
ggccgcugcggagcuuccgcugccaucuucgg

SEQ ID NO: 301769 - RNA, 32 nt, Homo Sapiens
cccggccagcucuggaguucucucaucggagg

SEQ ID NO: 301770 - RNA, 32 nt, Homo Sapiens
uuugguguuguacagcucacauguuuacacac

SEQ ID NO: 301771 - RNA, 32 nt, Homo Sapiens
uuccuuccgcccgcugguggguaaccagugcc

SEQ ID NO: 301772 - RNA, 32 nt, Homo Sapiens
caagacagggcccgggcucuggaccugggugc

SEQ ID NO: 301773 - RNA, 32 nt, Homo Sapiens
aaaaggaagaaugucgucuacugcagucuauu

SEQ ID NO: 301774 - RNA, 32 nt, Homo Sapiens
augguuuguaguauugaugacaaugguuaagg

SEQ ID NO: 301775 - RNA, 32 nt, Homo Sapiens
acugcuuugucaaaauuaaacauuuuguacac

SEQ ID NO: 301776 - RNA, 32 nt, Homo Sapiens
uaaaaaucaaugagcguuggccaggcacggug

SEQ ID NO: 301777 - RNA, 32 nt, Homo Sapiens
cuaacuacuaaagauuuuggcagaaucaaugu

SEQ ID NO: 301778 - RNA, 32 nt, Homo Sapiens
cgccagagaagcuguguggaccccccacccaa

SEQ ID NO: 301779 - RNA, 32 nt, Homo Sapiens
uuuauuccauuucucucugugucugugccaag

SEQ ID NO: 301780 - RNA, 32 nt, Homo Sapiens
cugagggcccgcggcggccgcggccggugcau

SEQ ID NO: 301781 - RNA, 32 nt, Homo Sapiens
ggcccaggcagacagaucaccagaugucggga

SEQ ID NO: 301782 - RNA, 32 nt, Homo Sapiens
ugcguguuccgaaguucaggggcccccugauc

SEQ ID NO: 301783 - RNA, 32 nt, Homo Sapiens
uuuuugguuuuuuaguuuuuuauugguauccu

SEQ ID NO: 301784 - RNA, 32 nt, Homo Sapiens
uccuugggugccucccucuccuugggaggaaa

SEQ ID NO: 301785 - RNA, 32 nt, Homo Sapiens
aaguaaauauuuugaccacuauuuucaacaac

SEQ ID NO: 301786 - RNA, 32 nt, Homo Sapiens
uccaauggaagaaacauguguuuguuuaaauc

SEQ ID NO: 301787 - RNA, 32 nt, Homo Sapiens
uucugaggucacauaacacauaaaauuaguuu

SEQ ID NO: 301788 - RNA, 32 nt, Homo Sapiens
cugggacuacaggcgugagcugcuacaccuag

SEQ ID NO: 301789 - RNA, 32 nt, Homo Sapiens
cuggggggugggggaggacgccgagcguugag

SEQ ID NO: 301790 - RNA, 32 nt, Homo Sapiens
ucacugcagccuccaccuccccgguucaagug

SEQ ID NO: 301791 - RNA, 32 nt, Homo Sapiens
ugucuucucuacuacaccuuaagagcaggacu

SEQ ID NO: 301792 - RNA, 32 nt, Homo Sapiens
uaaggucagcacaacuauauggauggggaaga

SEQ ID NO: 301793 - RNA, 32 nt, Homo Sapiens
ccugggaggcgaagguugcagugagcugagau

SEQ ID NO: 301794 - RNA, 32 nt, Homo Sapiens
agcaagcggcccugcuggcuggacugugcuuc

SEQ ID NO: 301795 - RNA, 32 nt, Homo Sapiens
agcgguaauuucagggugcuuaugacaaccug

SEQ ID NO: 301796 - RNA, 32 nt, Homo Sapiens
acuugccccgcccucccacaccugcuugggag

SEQ ID NO: 301797 - RNA, 32 nt, Homo Sapiens
ccacgcaguggacaguaagggcugggaguaug

SEQ ID NO: 301798 - RNA, 32 nt, Homo Sapiens
aaggaacaaggcuauuugaaaacagaaggcag

SEQ ID NO: 301799 - RNA, 32 nt, Homo Sapiens
uccagacggaggaggggguccuuguggccacg

SEQ ID NO: 301800 - RNA, 32 nt, Homo Sapiens
gggaagcccagggugugcuccucccgcccuuu

SEQ ID NO: 301801 - RNA, 32 nt, Homo Sapiens
gagcagccacaaaacuguaaccucaaggaaac

SEQ ID NO: 301802 - RNA, 32 nt, Homo Sapiens
acacacggcccccuuccuccuguccccacacu

SEQ ID NO: 301803 - RNA, 32 nt, Homo Sapiens
uaucauuucucccccgccgccggcgaguugac

SEQ ID NO: 301804 - RNA, 32 nt, Homo Sapiens
ccgaggcaagggggcgcggcgcacgcaguaug

SEQ ID NO: 301805 - RNA, 32 nt, Homo Sapiens
uguaaucccaguuccuugggaggcugaggcgg

SEQ ID NO: 301806 - RNA, 32 nt, Homo Sapiens
aguucgguuucauuuuacugaaaaccugugaa

SEQ ID NO: 301807 - RNA, 32 nt, Homo Sapiens
acugagugcaaaggaagaaaaauauauauuag

SEQ ID NO: 301808 - RNA, 32 nt, Homo Sapiens
gccacuccacacugcugggacauggcagggac

SEQ ID NO: 301809 - RNA, 30 nt, Homo Sapiens
cuggcagggggccucgcgggucuccucagc

SEQ ID NO: 301810 - RNA, 32 nt, Homo Sapiens
gcccuucuggggguuucuaucuuucuuccacc

SEQ ID NO: 301811 - RNA, 32 nt, Homo Sapiens
aauaucaacauuaauaguacuuugaaagaagu

SEQ ID NO: 301812 - RNA, 32 nt, Homo Sapiens
agcaucugugugccgaagaaccuggcagguac

SEQ ID NO: 301813 - RNA, 32 nt, Homo Sapiens
caagugaguuuugaaucccaaaugguaauucu

SEQ ID NO: 301814 - RNA, 32 nt, Homo Sapiens
gauuguccucaaccgagaccuugagcuugcag

SEQ ID NO: 301815 - RNA, 32 nt, Homo Sapiens
ggagccgaggccgagcgcccccugcuggcccg

SEQ ID NO: 301816 - RNA, 32 nt, Homo Sapiens
uaaggguggaaauuaaucaugguaccaucuca

SEQ ID NO: 301817 - RNA, 32 nt, Homo Sapiens
ccgcgcccggccucccgcacgccccgcaggua

SEQ ID NO: 301818 - RNA, 32 nt, Homo Sapiens
ugaaugccaggcacuggcaugcugggucaugg

SEQ ID NO: 301819 - RNA, 32 nt, Homo Sapiens
uuuaggcaaaaauaaaacagacauguauuuuu

SEQ ID NO: 301820 - RNA, 32 nt, Homo Sapiens
aauuuacuuuuggacauugagaacuugaaauu

SEQ ID NO: 301821 - RNA, 32 nt, Homo Sapiens
ugaguggaagaauuuuuucaaauuauuuuugu

SEQ ID NO: 301822 - RNA, 32 nt, Homo Sapiens
agcuggccccagcacugcacccucccaggacu

SEQ ID NO: 301823 - RNA, 32 nt, Homo Sapiens
gaauggcccagcugguaggauccuugcuuucc

SEQ ID NO: 301824 - RNA, 32 nt, Homo Sapiens
ucugugauuucuucucccuccuccccugcaag

SEQ ID NO: 301825 - RNA, 32 nt, Homo Sapiens
aaccuuccaaaaagaagcagucauugaaaaau

SEQ ID NO: 301826 - RNA, 32 nt, Homo Sapiens
ccccaggaauggugugguggcaucagugaugu

SEQ ID NO: 301827 - RNA, 32 nt, Homo Sapiens
auaguguuuggggacauugaaauggauguucu

SEQ ID NO: 301828 - RNA, 32 nt, Homo Sapiens
gucccuuuacuuuuugcucugcauaggguaac

SEQ ID NO: 301829 - RNA, 32 nt, Homo Sapiens
cuauggagaaaaccucaaguaaaguuuuauuc

SEQ ID NO: 301830 - RNA, 32 nt, Homo Sapiens
gguguuuaauaaaaaucauucaaaauuucaaa

SEQ ID NO: 301831 - RNA, 32 nt, Homo Sapiens
uugggauuuuagaagcucucuuuuugauaaac

SEQ ID NO: 301832 - RNA, 32 nt, Homo Sapiens
uugaggaugugcggguagauagauaacuuugg

SEQ ID NO: 301833 - RNA, 32 nt, Homo Sapiens
aggccagccccggccccuagcccucaggccuc

SEQ ID NO: 301834 - RNA, 32 nt, Homo Sapiens
gccggccuaagccccagugcugagacccggug

SEQ ID NO: 301835 - RNA, 32 nt, Homo Sapiens
gaguacaccguucacuauuguagaguaacccc

SEQ ID NO: 301836 - RNA, 32 nt, Homo Sapiens
uggaaaaaagguggcccagggcucaggcuacc

SEQ ID NO: 301837 - RNA, 32 nt, Homo Sapiens
acucagcuacagagcucugcuauacaugggug

SEQ ID NO: 301838 - RNA, 32 nt, Homo Sapiens
gcugcuacagcauggccaggccugguuugaag

SEQ ID NO: 301839 - RNA, 32 nt, Homo Sapiens
agagaagagggagaggacuggaagggaucacc

SEQ ID NO: 301840 - RNA, 32 nt, Homo Sapiens
acuaccauuuuuaaacuacuguagcuuuaaaa

SEQ ID NO: 301841 - RNA, 32 nt, Homo Sapiens
uggggcaaccucaggagaagcagaccuuucca

SEQ ID NO: 301842 - RNA, 32 nt, Homo Sapiens
uauugcucaaugccacuguccaaguuacgacu

SEQ ID NO: 301843 - RNA, 32 nt, Homo Sapiens
gcucggcuccccagccccaucccaaacccuuc

SEQ ID NO: 301844 - RNA, 32 nt, Homo Sapiens
gagguggagcagcuggacuuccgagaccuccu

SEQ ID NO: 301845 - RNA, 32 nt, Homo Sapiens
gaacccugaugauggagaagaacugugaaaga

SEQ ID NO: 301846 - RNA, 32 nt, Homo Sapiens
ccuacaagucacuugacccaucuuaggcugag

SEQ ID NO: 301847 - RNA, 32 nt, Homo Sapiens
ugaaaauguauuauuuauguugagaaaccacu

SEQ ID NO: 301848 - RNA, 32 nt, Homo Sapiens
gucccgcgggucugucucuugcuucaacagug

SEQ ID NO: 301849 - RNA, 32 nt, Homo Sapiens
aucaauaugcuuuuuauuuuguuauuuaugac

SEQ ID NO: 301850 - RNA, 32 nt, Homo Sapiens
uuaaaggagcuggauuccuucucugaggcucu

SEQ ID NO: 301851 - RNA, 32 nt, Homo Sapiens
ucccauucagcguuuuguuucuuucuguccau

SEQ ID NO: 301852 - RNA, 32 nt, Homo Sapiens
gguuccgcacuguccgaccccugcacaccacu

SEQ ID NO: 301853 - RNA, 32 nt, Homo Sapiens
cagaacagaaaagaaacagugggauuagggcu

SEQ ID NO: 301854 - RNA, 32 nt, Homo Sapiens
uuucaguugguuuucaauuugcucacuggcca

SEQ ID NO: 301855 - RNA, 32 nt, Homo Sapiens
ccuuauuguuucuauuuguaauaaaucuguuc

SEQ ID NO: 301856 - RNA, 32 nt, Homo Sapiens
uaguuaaagcaaauucuagauacaugguagag

SEQ ID NO: 301857 - RNA, 32 nt, Homo Sapiens
gcagaggagguggugguauugggauagugcug

SEQ ID NO: 301858 - RNA, 32 nt, Homo Sapiens
gcagagaagacaggcaaaguuguggacuguuu

SEQ ID NO: 301859 - RNA, 32 nt, Homo Sapiens
aauaauaacugagacugggagagguggcucau

SEQ ID NO: 301860 - RNA, 32 nt, Homo Sapiens
ggcguucaaggauauuuggucggaucgcccgg

SEQ ID NO: 301861 - RNA, 32 nt, Homo Sapiens
caucuacgugcaugugagagcguguuaaccua

SEQ ID NO: 301862 - RNA, 32 nt, Homo Sapiens
accaaccccuggaagccaaagcggccucucca

SEQ ID NO: 301863 - RNA, 32 nt, Homo Sapiens
gcugagcgcgccccccgagccgccgacuugcc

SEQ ID NO: 301864 - RNA, 32 nt, Homo Sapiens
ucguguccgcgcuccuucucuuccagugaucu

SEQ ID NO: 301865 - RNA, 32 nt, Homo Sapiens
ggccuggacuuccagugcucagagggcgggga

SEQ ID NO: 301866 - RNA, 32 nt, Homo Sapiens
gagagugcacuagucacugaaggaagagguag

SEQ ID NO: 301867 - RNA, 32 nt, Homo Sapiens
aacugaaaguuccaguugggaugaagcauuuc

SEQ ID NO: 301868 - RNA, 32 nt, Homo Sapiens
aacucaaugcauacuauauaauuugaagauua

SEQ ID NO: 301869 - RNA, 32 nt, Homo Sapiens
uaacuaaauauuugugaggcccucagguugug

SEQ ID NO: 301870 - RNA, 32 nt, Homo Sapiens
ugaugguuaguguuaaugauccugucuuaggg

SEQ ID NO: 301871 - RNA, 32 nt, Homo Sapiens
guccacgaggcagggauucucaucucuggugc

SEQ ID NO: 301872 - RNA, 32 nt, Homo Sapiens
aacuaaagcuacaauuaauaugggaauuugga

SEQ ID NO: 301873 - RNA, 32 nt, Homo Sapiens
ggaacuucaggucuuaagugcaaaucaaagca

SEQ ID NO: 301874 - RNA, 32 nt, Homo Sapiens
gccucaagccccagaguggcucacccugucca

SEQ ID NO: 301875 - RNA, 32 nt, Homo Sapiens
uugcccaggaaaggggcugugcugucguccug

SEQ ID NO: 301876 - RNA, 32 nt, Homo Sapiens
gaaacuuuuuaaauuaaucuuuguacuccucu

SEQ ID NO: 301877 - RNA, 32 nt, Homo Sapiens
agcugaucuuccugggguucugaagguugcga

SEQ ID NO: 301878 - RNA, 32 nt, Homo Sapiens
ggucccugccccacccuccggcagcucaggga

SEQ ID NO: 301879 - RNA, 29 nt, Homo Sapiens
ggcgcggggggacagaggaggcucguggg

SEQ ID NO: 301880 - RNA, 32 nt, Homo Sapiens
guuuaacauugaaauaaaauggaucugccagc

SEQ ID NO: 301881 - RNA, 32 nt, Homo Sapiens
cuguaaacuucuccugcccagcccccagcuga

SEQ ID NO: 301882 - RNA, 32 nt, Homo Sapiens
uuagaauguuuuggccuaacggugcuaguauc

SEQ ID NO: 301883 - RNA, 32 nt, Homo Sapiens
auggaaaaguaaaaauucugugccgacuaccu

SEQ ID NO: 301884 - RNA, 32 nt, Homo Sapiens
aaaaauuguaaaaaacaguuuguuguuuuuau

SEQ ID NO: 301885 - RNA, 32 nt, Homo Sapiens
cagucucuugccuuccucuccucccugaucau

SEQ ID NO: 301886 - RNA, 32 nt, Homo Sapiens
uuucuagaaaaggggacauccauguaaaaaau

SEQ ID NO: 301887 - RNA, 32 nt, Homo Sapiens
ccucuccuccccagcccuucuccugugugccu

SEQ ID NO: 301888 - RNA, 32 nt, Homo Sapiens
uuuaguauagccacaaaugccuugaacuguug

SEQ ID NO: 301889 - RNA, 32 nt, Homo Sapiens
uccgcggccaagggccaacggucccucgcccc

SEQ ID NO: 301890 - RNA, 32 nt, Homo Sapiens
auaguggaaagacugaggcuucugccuacuga

SEQ ID NO: 301891 - RNA, 32 nt, Homo Sapiens
cccucugccccagcugagauggacagaucguu

SEQ ID NO: 301892 - RNA, 32 nt, Homo Sapiens
cccggagcgagucggcggggcuggcggcagcg

SEQ ID NO: 301893 - RNA, 32 nt, Homo Sapiens
gauugccuugaucuggcacuuacugauacaag

SEQ ID NO: 301894 - RNA, 31 nt, Homo Sapiens
ccagaaagggucgucaucucgagccacaggg

SEQ ID NO: 301895 - RNA, 32 nt, Homo Sapiens
gcccgcgggagcccaggacgccgcuuccccgc

SEQ ID NO: 301896 - RNA, 32 nt, Homo Sapiens
guguauuuugucacggcggaaaaucugcucgc

SEQ ID NO: 301897 - RNA, 32 nt, Homo Sapiens
auuaggauaauuaaauaguuaaauaugaguca

SEQ ID NO: 301898 - RNA, 32 nt, Homo Sapiens
ucucccauaguugagauuguaagcaaacaugu

SEQ ID NO: 301899 - RNA, 32 nt, Homo Sapiens
gaagccaugggccagggggccauggugaccug

SEQ ID NO: 301900 - RNA, 32 nt, Homo Sapiens
uuuuacauuauuuggagccucaucugugucag

SEQ ID NO: 301901 - RNA, 32 nt, Homo Sapiens
gcaacaaucugugucccuggaaugcuggccuc

SEQ ID NO: 301902 - RNA, 32 nt, Homo Sapiens
auuuuuaauguuuuuuaaagcauuaauggaca

SEQ ID NO: 301903 - RNA, 32 nt, Homo Sapiens
agcguccgcgcggcugccggcccaagagcugg

SEQ ID NO: 301904 - RNA, 32 nt, Homo Sapiens
aggguccugaugaggccuuccuggacucagcu

SEQ ID NO: 301905 - RNA, 32 nt, Homo Sapiens
guacagguugaccccugaaaauauuuggaugg

SEQ ID NO: 301906 - RNA, 32 nt, Homo Sapiens
cccuauaucuccgugugcuccucgguguuacu

SEQ ID NO: 301907 - RNA, 32 nt, Homo Sapiens
uggaaagauuucuccaggaaaaggaggaaugu

SEQ ID NO: 301908 - RNA, 32 nt, Homo Sapiens
ggacacuauccguuugcgccccgguggcgcgg

SEQ ID NO: 301909 - RNA, 32 nt, Homo Sapiens
cuaugguugugggucuggaaaccuggcaggaa

SEQ ID NO: 301910 - RNA, 32 nt, Homo Sapiens
aaacuauuuaucuguguuuuugaaauauuaaa

SEQ ID NO: 301911 - RNA, 32 nt, Homo Sapiens
ugggacacaauuucauguuuuugcacuaaaaa

SEQ ID NO: 301912 - RNA, 32 nt, Homo Sapiens
gcccgccugccgcggucaccccggccucugcc

SEQ ID NO: 301913 - RNA, 32 nt, Homo Sapiens
ccugucuccucagcugcucaccaccaccccac

SEQ ID NO: 301914 - RNA, 32 nt, Homo Sapiens
augcuuuggcugccugagguccugcuugcguu

SEQ ID NO: 301915 - RNA, 32 nt, Homo Sapiens
aaaaugauguccuagugaaccuugugcuuucu

SEQ ID NO: 301916 - RNA, 32 nt, Homo Sapiens
uuggauuucuucaggagauucagccucuugaa

SEQ ID NO: 301917 - RNA, 32 nt, Homo Sapiens
uccggggcuguguggcuuuggcagaugucaga

SEQ ID NO: 301918 - RNA, 30 nt, Homo Sapiens
ggcccagagcccgugcccuggagcgcugcg

SEQ ID NO: 301919 - RNA, 32 nt, Homo Sapiens
uuaaauaauaaaauaagauaaucugucaguca

SEQ ID NO: 301920 - RNA, 32 nt, Homo Sapiens
auucuccugccucagcucccaaguagcuggga

SEQ ID NO: 301921 - RNA, 32 nt, Homo Sapiens
gcuaaacucuagauucugugccaggcacugua

SEQ ID NO: 301922 - RNA, 32 nt, Homo Sapiens
gccgccucuccuuagucgccgccuugacgacc

SEQ ID NO: 301923 - RNA, 32 nt, Homo Sapiens
aagcacuuuuguaguuuugaugaugaaaaaua

SEQ ID NO: 301924 - RNA, 32 nt, Homo Sapiens
uagcugggugugguggugggcgccuguagucc

SEQ ID NO: 301925 - RNA, 32 nt, Homo Sapiens
gaccccaucguggccuccgaggaggcaucaga

SEQ ID NO: 301926 - RNA, 32 nt, Homo Sapiens
uauaguccagcagcccuacaggaggcaggagg

SEQ ID NO: 301927 - RNA, 32 nt, Homo Sapiens
cucugccguccccucugagagcagccauggcc

SEQ ID NO: 301928 - RNA, 32 nt, Homo Sapiens
uguccccggcgccccggaccacccucccugcc

SEQ ID NO: 301929 - RNA, 32 nt, Homo Sapiens
caaguuaggcuuaauuuuuuuaucuaaugauc

SEQ ID NO: 301930 - RNA, 32 nt, Homo Sapiens
auuagaaauuuaauuucuucaugugaugucau

SEQ ID NO: 301931 - RNA, 32 nt, Homo Sapiens
ggcacagccaagauucagagccaggcuguaaa

SEQ ID NO: 301932 - RNA, 32 nt, Homo Sapiens
acacacaccauaaagcugaucuguaaacccuu

SEQ ID NO: 301933 - RNA, 32 nt, Homo Sapiens
ggggcuggaggcagggcagagccucagggguu

SEQ ID NO: 301934 - RNA, 32 nt, Homo Sapiens
uagcggauggaccagauuccucuggcuaacgu

SEQ ID NO: 301935 - RNA, 32 nt, Homo Sapiens
uucugcacauucaguguauugguaauuuaaau

SEQ ID NO: 301936 - RNA, 32 nt, Homo Sapiens
ggccgucaccccacccgaugaccugcaugaag

SEQ ID NO: 301937 - RNA, 32 nt, Homo Sapiens
gcgcugcaccgacgagaagagccggcgcaucc

SEQ ID NO: 301938 - RNA, 32 nt, Homo Sapiens
aaauaaacauauauucuugcuugcauccuaga

SEQ ID NO: 301939 - RNA, 32 nt, Homo Sapiens
caacacaaaaauagcugaaagccagguacaac

SEQ ID NO: 301940 - RNA, 32 nt, Homo Sapiens
cacagcgccugcgcgcguacggcggccggaag

SEQ ID NO: 301941 - RNA, 30 nt, Homo Sapiens
cccccgcugcgaugcauccgcggcgcccgg

SEQ ID NO: 301942 - RNA, 32 nt, Homo Sapiens
uaaagacuagacagaacaauauuuucaauguc

SEQ ID NO: 301943 - RNA, 31 nt, Homo Sapiens
gggcuuucgggguccgcaguccccccgcgac

SEQ ID NO: 301944 - RNA, 32 nt, Homo Sapiens
aggguggaggcagaacgaugcugcugugguag

SEQ ID NO: 301945 - RNA, 32 nt, Homo Sapiens
agagauuaacuccauucagaucgggcagcagc

SEQ ID NO: 301946 - RNA, 29 nt, Homo Sapiens
uaggccgcgcgaagggggacgccgugccg

SEQ ID NO: 301947 - RNA, 32 nt, Homo Sapiens
guggauaacuuuucuuuuucccaggccagaga

SEQ ID NO: 301948 - RNA, 32 nt, Homo Sapiens
accuccuucccgguccccucccggcccagucc

SEQ ID NO: 301949 - RNA, 32 nt, Homo Sapiens
aggcugacgguauggaauauguuuccaugucu

SEQ ID NO: 301950 - RNA, 32 nt, Homo Sapiens
uagugccuaaaauaguguccuuugaaaaaacu

SEQ ID NO: 301951 - RNA, 27 nt, Homo Sapiens
ucauggccuuaccagugaccgccuugc

SEQ ID NO: 301952 - RNA, 32 nt, Homo Sapiens
guugagcgucauuuuucuuagugugccaagag

SEQ ID NO: 301953 - RNA, 32 nt, Homo Sapiens
uagccaucaaaggaauaaaaagcuggccguac

SEQ ID NO: 301954 - RNA, 32 nt, Homo Sapiens
cgcucaugcuggcaucaguggugagacagugu

SEQ ID NO: 301955 - RNA, 32 nt, Homo Sapiens
acaaagcagggccgggccuuccugccaucccc

SEQ ID NO: 301956 - RNA, 32 nt, Homo Sapiens
cauugacuguaucccaccuguuuuccaaggaa

SEQ ID NO: 301957 - RNA, 32 nt, Homo Sapiens
uaaagaugaaacaaaauuuaugaaacugagcu

SEQ ID NO: 301958 - RNA, 32 nt, Homo Sapiens
cauggugagaauccggccugagccgaagcgga

SEQ ID NO: 301959 - RNA, 32 nt, Homo Sapiens
gagagaagcagcugccuaucuuaagcguuccc

SEQ ID NO: 301960 - RNA, 29 nt, Homo Sapiens
uucagaauguggaucugccgaauugagag

SEQ ID NO: 301961 - RNA, 32 nt, Homo Sapiens
aaggaaauguaaugaacuuauggaaagcccau

SEQ ID NO: 301962 - RNA, 32 nt, Homo Sapiens
gcagaggaggucgcggcgccggaggccccaga

SEQ ID NO: 301963 - RNA, 32 nt, Homo Sapiens
cuugccugguucaacaguauuauuucacucac

SEQ ID NO: 301964 - RNA, 32 nt, Homo Sapiens
gaaagguggcccggccccaguggaggcuuugu

SEQ ID NO: 301965 - RNA, 32 nt, Homo Sapiens
gagaugggauggggcgggagguggcuucacca

SEQ ID NO: 301966 - RNA, 32 nt, Homo Sapiens
cuaaugaccagcucgauucccugugcaguuca

SEQ ID NO: 301967 - RNA, 32 nt, Homo Sapiens
gaaucuuuuaauaaguuucuucuuuuguuuca

SEQ ID NO: 301968 - RNA, 32 nt, Homo Sapiens
gugcgaaggcucuggagagagcgugggugggc

SEQ ID NO: 301969 - RNA, 32 nt, Homo Sapiens
cugcccgccucggccucccaacgugcccccag

SEQ ID NO: 301970 - RNA, 32 nt, Homo Sapiens
acaaguaaaaauuuauaaauauuaagaaugua

SEQ ID NO: 301971 - RNA, 32 nt, Homo Sapiens
aucuguggaaaugcaagauguuagagcaccua

SEQ ID NO: 301972 - RNA, 32 nt, Homo Sapiens
cugccuuccgcguuccgccgcggccccaccug

SEQ ID NO: 301973 - RNA, 29 nt, Homo Sapiens
uguacugugacuuuaguucaggaaguuuu

SEQ ID NO: 301974 - RNA, 32 nt, Homo Sapiens
guuuagaaaggguaauauuuugaaauacuaca

SEQ ID NO: 301975 - RNA, 32 nt, Homo Sapiens
uguuucauuguaaccugaauggaccaagcugg

SEQ ID NO: 301976 - RNA, 32 nt, Homo Sapiens
cucugcuccugucuccuguccccucccccggu

SEQ ID NO: 301977 - RNA, 32 nt, Homo Sapiens
cuucuauacaggaaucucuggaaaacuaucag

SEQ ID NO: 301978 - RNA, 32 nt, Homo Sapiens
ugcagccucggccccaggauccugcucacagu

SEQ ID NO: 301979 - RNA, 32 nt, Homo Sapiens
gcguuggggccgggaccgcuggcgcccgacgu

SEQ ID NO: 301980 - RNA, 32 nt, Homo Sapiens
cgcccggcaggagucaggagccagggacugug

SEQ ID NO: 301981 - RNA, 32 nt, Homo Sapiens
agacauaguucccuccuucuggggcuccacau

SEQ ID NO: 301982 - RNA, 32 nt, Homo Sapiens
aucuacauucuauucugcggauguuauuucug

SEQ ID NO: 301983 - RNA, 32 nt, Homo Sapiens
cagaauguacuucuuccuaccaugacugcaua

SEQ ID NO: 301984 - RNA, 32 nt, Homo Sapiens
cgaggcccggggagcgcguccccagucugcgc

SEQ ID NO: 301985 - RNA, 32 nt, Homo Sapiens
guauauguuguaauaaaacuuaugcuaguuua

SEQ ID NO: 301986 - RNA, 32 nt, Homo Sapiens
gucucagugucugccuccaucucccccaaagg

SEQ ID NO: 301987 - RNA, 32 nt, Homo Sapiens
uuccugagccagcccccagccacagccuuaga

SEQ ID NO: 301988 - RNA, 32 nt, Homo Sapiens
agaggacucugcagugaggcccuaggccacgu

SEQ ID NO: 301989 - RNA, 32 nt, Homo Sapiens
caguggucaucucccacugggaauauggcgua

SEQ ID NO: 301990 - RNA, 32 nt, Homo Sapiens
gaccaacgaaaacaagccgcggggaaaggacu

SEQ ID NO: 301991 - RNA, 32 nt, Homo Sapiens
ccaaacuccgcggcguccccagggcgccacgu

SEQ ID NO: 301992 - RNA, 32 nt, Homo Sapiens
gauccgcccuccccagccucccaaagugcugg

SEQ ID NO: 301993 - RNA, 32 nt, Homo Sapiens
ucuguucuaaaauggaggcaguagggagcaaa

SEQ ID NO: 301994 - RNA, 32 nt, Homo Sapiens
aaacccaccuugucccauccacaucaggacau

SEQ ID NO: 301995 - RNA, 30 nt, Homo Sapiens
aauauugcaauaaagcaagucauacacauu

SEQ ID NO: 301996 - RNA, 32 nt, Homo Sapiens
uccauauuuuuuuuaaauuuguuggcucuuaa

SEQ ID NO: 301997 - RNA, 32 nt, Homo Sapiens
cuaaccccgcugcccaggauuagggucugugg

SEQ ID NO: 301998 - RNA, 32 nt, Homo Sapiens
caagucacccuccuugagacagcccuccaguc

SEQ ID NO: 301999 - RNA, 32 nt, Homo Sapiens
gaaagaacccaucugugagaaagcagagcccu

SEQ ID NO: 302000 - RNA, 32 nt, Homo Sapiens
uaaaagcggcccggggcggccggcgcggcgca

SEQ ID NO: 302001 - RNA, 32 nt, Homo Sapiens
cucagauggggucagaagagcuucauagaaag

SEQ ID NO: 302002 - RNA, 32 nt, Homo Sapiens
auuugguuuauuguuggagauuuuagggcgaa

SEQ ID NO: 302003 - RNA, 32 nt, Homo Sapiens
uugggggccacggagagaagggagagcucgug

SEQ ID NO: 302004 - RNA, 32 nt, Homo Sapiens
aagugaguugaggcuugugccacaaaagguuu

SEQ ID NO: 302005 - RNA, 32 nt, Homo Sapiens
uuucuugcacagcuaauagaagacaaaguuga

SEQ ID NO: 302006 - RNA, 32 nt, Homo Sapiens
gguccgcggugaccgcgccgcccgggcgaugc

SEQ ID NO: 302007 - RNA, 32 nt, Homo Sapiens
cuccuccgacgcccggggcugcggcgcuccgg

SEQ ID NO: 302008 - RNA, 32 nt, Homo Sapiens
aagaggaggaagaagagguguggacacugcag

SEQ ID NO: 302009 - RNA, 32 nt, Homo Sapiens
gcucagagcaccaccaggccuacuucaucugu

SEQ ID NO: 302010 - RNA, 32 nt, Homo Sapiens
augcgguaccugauucauccagcaaauuaaga

SEQ ID NO: 302011 - RNA, 32 nt, Homo Sapiens
caccuccaaugggaaaacucugacacaccgcc

SEQ ID NO: 302012 - RNA, 32 nt, Homo Sapiens
gccguaauuuaacuuucuggguugccuuuguu

SEQ ID NO: 302013 - RNA, 32 nt, Homo Sapiens
aaacauauuugugaaaagaguauguaguggcu

SEQ ID NO: 302014 - RNA, 32 nt, Homo Sapiens
uuucacugaaauuuauaauacacuuauccaug

SEQ ID NO: 302015 - RNA, 32 nt, Homo Sapiens
acuccaugugaaucuacaaggaucucaggauu

SEQ ID NO: 302016 - RNA, 32 nt, Homo Sapiens
accgccuucccuguuuugcccuugggggagcc

SEQ ID NO: 302017 - RNA, 32 nt, Homo Sapiens
uucucaucgcagugcuuugguaugggaggugu

SEQ ID NO: 302018 - RNA, 32 nt, Homo Sapiens
cauggauguucuaugauggcaguuggacacaa

SEQ ID NO: 302019 - RNA, 32 nt, Homo Sapiens
cuaacccucuuaugaaaugugugcaacaccua

SEQ ID NO: 302020 - RNA, 32 nt, Homo Sapiens
caaacaagugaacaaaggucucuggucuuccc

SEQ ID NO: 302021 - RNA, 32 nt, Homo Sapiens
caagaaugcagcacuucuuaaucuuuagcucu

SEQ ID NO: 302022 - RNA, 32 nt, Homo Sapiens
agaaggcagcauucacaaagacuuuuauuuuu

SEQ ID NO: 302023 - RNA, 32 nt, Homo Sapiens
ucacagagaagacacgacaggauaggauaggu

SEQ ID NO: 302024 - RNA, 32 nt, Homo Sapiens
aaaucaaaacaaaaaauaccacagcuuagugu

SEQ ID NO: 302025 - RNA, 32 nt, Homo Sapiens
gacugaacacugggguagggguuggggguggg

SEQ ID NO: 302026 - RNA, 32 nt, Homo Sapiens
uuguauuugccaaauaauuuacuguauagccu

SEQ ID NO: 302027 - RNA, 32 nt, Homo Sapiens
ggcagcucagaaaggauuaaggaagauagcuc

SEQ ID NO: 302028 - RNA, 32 nt, Homo Sapiens
cuuacuauauguggguugagcuaugcagaaga

SEQ ID NO: 302029 - RNA, 32 nt, Homo Sapiens
augagauggaaaguagaugaaacuacuuugaa

SEQ ID NO: 302030 - RNA, 32 nt, Homo Sapiens
cuuaagaagguucuuuguaauucuccccaccc

SEQ ID NO: 302031 - RNA, 32 nt, Homo Sapiens
aaugaacccccuccccacagacacacccuggg

SEQ ID NO: 302032 - RNA, 32 nt, Homo Sapiens
agaagaaggggaguguccgcaaaauggaaaga

SEQ ID NO: 302033 - RNA, 32 nt, Homo Sapiens
aucaaaccaaaauggaucaaagucuggaaucc

SEQ ID NO: 302034 - RNA, 32 nt, Homo Sapiens
ucauuaccacauucaaucauggguaauaaaau

SEQ ID NO: 302035 - RNA, 31 nt, Homo Sapiens
acgccucaggaugaucguggagcuacaucga

SEQ ID NO: 302036 - RNA, 28 nt, Homo Sapiens
cacaauguuccaggaccaaagacuugau

SEQ ID NO: 302037 - RNA, 31 nt, Homo Sapiens
cagacacagacagagccugcaaaagaggcag

SEQ ID NO: 302038 - RNA, 32 nt, Homo Sapiens
ccaccgacccuccucccacccccucccacuca

SEQ ID NO: 302039 - RNA, 32 nt, Homo Sapiens
uguuuuaauaguuuuucuauuauuuuggguuu

SEQ ID NO: 302040 - RNA, 32 nt, Homo Sapiens
uugggucuuauuugaguuaguuuguuucucag

SEQ ID NO: 302041 - RNA, 32 nt, Homo Sapiens
guucauucaggcagcugcugcagaugugguca

SEQ ID NO: 302042 - RNA, 32 nt, Homo Sapiens
caugccccgccucccaacggaccuggacguag

SEQ ID NO: 302043 - RNA, 32 nt, Homo Sapiens
gcuccaacaugacuuugaucugaguaauagug

SEQ ID NO: 302044 - RNA, 32 nt, Homo Sapiens
uacuccccagauccucuccccuggacacagga

SEQ ID NO: 302045 - RNA, 32 nt, Homo Sapiens
gggggguggcacucccacugcugcuguccugg

SEQ ID NO: 302046 - RNA, 32 nt, Homo Sapiens
ccacccuugcuguguccaagccaagcucugug

SEQ ID NO: 302047 - RNA, 32 nt, Homo Sapiens
cggggccuaaaaugaaccgaacaggcuggaaa

SEQ ID NO: 302048 - RNA, 32 nt, Homo Sapiens
caaaugaggagcuggucuuugauauguuuccu

SEQ ID NO: 302049 - RNA, 32 nt, Homo Sapiens
cagccccaggccccggccccccacccacgucu

SEQ ID NO: 302050 - RNA, 32 nt, Homo Sapiens
ggcucuggcgcgggcuccagcuccuucagccg

SEQ ID NO: 302051 - RNA, 32 nt, Homo Sapiens
ugaacaaacaaacuaccaaagauuccuccacu

SEQ ID NO: 302052 - RNA, 32 nt, Homo Sapiens
aacaccccaccccucugccaaccgggguaugg

SEQ ID NO: 302053 - RNA, 32 nt, Homo Sapiens
ugucuuucauucuccacauccucuuuuguucu

SEQ ID NO: 302054 - RNA, 32 nt, Homo Sapiens
gacccggccccggugaacgggcucggggugcc

SEQ ID NO: 302055 - RNA, 32 nt, Homo Sapiens
gaaguucucgcaccagaauuauccacagcaac

SEQ ID NO: 302056 - RNA, 32 nt, Homo Sapiens
guggauauuucaaauuuuuuuaguauagcgua

SEQ ID NO: 302057 - RNA, 32 nt, Homo Sapiens
uucuuuuuuaucuauuuguuguuuaagagugu

SEQ ID NO: 302058 - RNA, 29 nt, Homo Sapiens
ggaggacagggacagagcccucuguggug

SEQ ID NO: 302059 - RNA, 32 nt, Homo Sapiens
ccucccccagcaugcauccaaaaaucaacaag

SEQ ID NO: 302060 - RNA, 32 nt, Homo Sapiens
gaucaaaaaccugguuagacaugccagccuuu

SEQ ID NO: 302061 - RNA, 32 nt, Homo Sapiens
gggagcacgccagccgccgagaguggggggcg

SEQ ID NO: 302062 - RNA, 32 nt, Homo Sapiens
ccgccucuggccgccacccccaucuuccaccu

SEQ ID NO: 302063 - RNA, 32 nt, Homo Sapiens
aaaggcccccuacaaggggccccauacgacag

SEQ ID NO: 302064 - RNA, 31 nt, Homo Sapiens
ccaguguaacaggaagucuugacuaugguuc

SEQ ID NO: 302065 - RNA, 32 nt, Homo Sapiens
cagauccuggggaccaauaaagcccgcagcgg

SEQ ID NO: 302066 - RNA, 32 nt, Homo Sapiens
aaggugugaauucauggggugauucaugggaa

SEQ ID NO: 302067 - RNA, 32 nt, Homo Sapiens
ccucuuuuaaacaggcaaaacaggaaggggga

SEQ ID NO: 302068 - RNA, 32 nt, Homo Sapiens
uuucuaagcugagaaccccacugggcagagcu

SEQ ID NO: 302069 - RNA, 32 nt, Homo Sapiens
cucccaagucgcugccagacaccacccacugc

SEQ ID NO: 302070 - RNA, 32 nt, Homo Sapiens
cuguaaaagcagacccaccucccagcgccggg

SEQ ID NO: 302071 - RNA, 32 nt, Homo Sapiens
guggaguugagcguccugcggcugggccuccg

SEQ ID NO: 302072 - RNA, 32 nt, Homo Sapiens
ccacgccccccucccuggccagccucccucac

SEQ ID NO: 302073 - RNA, 32 nt, Homo Sapiens
aaagcaagccccccaggcccagcccacgugca

SEQ ID NO: 302074 - RNA, 32 nt, Homo Sapiens
cccucuuucuucccuuuuccaugguacuguuu

SEQ ID NO: 302075 - RNA, 32 nt, Homo Sapiens
ucucuccgccuccccgucuccuccucaggcuc

SEQ ID NO: 302076 - RNA, 32 nt, Homo Sapiens
gccuccgccucccagguucaagcgauucuccu

SEQ ID NO: 302077 - RNA, 32 nt, Homo Sapiens
accuccgccucccagguucaagcgguucuccu

SEQ ID NO: 302078 - RNA, 32 nt, Homo Sapiens
cuuuguagaucauaaagugcuauacagauaua

SEQ ID NO: 302079 - RNA, 32 nt, Homo Sapiens
cgcaggagagagucuuaccuccccuggcccuc

SEQ ID NO: 302080 - RNA, 32 nt, Homo Sapiens
guuuauguauuagaaacuuaaucccuaaugca

SEQ ID NO: 302081 - RNA, 32 nt, Homo Sapiens
uuggugccugucuucgcccaccugagcauccu

SEQ ID NO: 302082 - RNA, 32 nt, Homo Sapiens
uacaaccuuccacuccuaaccucccaagcuuc

SEQ ID NO: 302083 - RNA, 32 nt, Homo Sapiens
ggccagcccgcgucaccuacacuuccuucugu

SEQ ID NO: 302084 - RNA, 32 nt, Homo Sapiens
ggaagcaaagcagagguggagaagaucccacu

SEQ ID NO: 302085 - RNA, 32 nt, Homo Sapiens
uggagggggccggagggaaaugcugcuacuua

SEQ ID NO: 302086 - RNA, 32 nt, Homo Sapiens
agcccccugcgagcuggggcggugaggugcua

SEQ ID NO: 302087 - RNA, 32 nt, Homo Sapiens
gucaucgucaggcuccccacuugcaguggccg

SEQ ID NO: 302088 - RNA, 32 nt, Homo Sapiens
cguggccccguccugaacuucacccuuguuug

SEQ ID NO: 302089 - RNA, 32 nt, Homo Sapiens
ugcucugacucaccucaucucuagguugaauu

SEQ ID NO: 302090 - RNA, 32 nt, Homo Sapiens
ucugaccucccucugucuccucucccagccuu

SEQ ID NO: 302091 - RNA, 31 nt, Homo Sapiens
aaacuauugggagauauucaagaacuagaaa

SEQ ID NO: 302092 - RNA, 32 nt, Homo Sapiens
aacugcguuaggguuaaaaaccacuucccucc

SEQ ID NO: 302093 - RNA, 32 nt, Homo Sapiens
uaaauauguauuuuauaauguacaaugcuugg

SEQ ID NO: 302094 - RNA, 32 nt, Homo Sapiens
ccuuagcuguugcaggaggcauggugaacucu

SEQ ID NO: 302095 - RNA, 32 nt, Homo Sapiens
cuuucccaggugguuuguucuuucuuauuggg

SEQ ID NO: 302096 - RNA, 32 nt, Homo Sapiens
uaaguuacuggguauuugauacguguuccuau

SEQ ID NO: 302097 - RNA, 32 nt, Homo Sapiens
uuacacucccaugaguccuccuggacaggugc

SEQ ID NO: 302098 - RNA, 32 nt, Homo Sapiens
ccauugcaguuuguagcaauguuauuucugug

SEQ ID NO: 302099 - RNA, 32 nt, Homo Sapiens
cuuuucaccaaaauuucuacaccaagguaaac

SEQ ID NO: 302100 - RNA, 30 nt, Homo Sapiens
cuggaaagugccccugccuggugcucuggu

SEQ ID NO: 302101 - RNA, 28 nt, Homo Sapiens
agaaucaguuguuggagaaaaauuaaag

SEQ ID NO: 302102 - RNA, 32 nt, Homo Sapiens
accugcaagugccgccucccuccggaggugcg

SEQ ID NO: 302103 - RNA, 32 nt, Homo Sapiens
aggggcgagacuuggggugcugagagggccug

SEQ ID NO: 302104 - RNA, 32 nt, Homo Sapiens
uucacgccauucuccugccucagacuccccag

SEQ ID NO: 302105 - RNA, 32 nt, Homo Sapiens
uuauuuugaaauaaguuuagauucacaaaauc

SEQ ID NO: 302106 - RNA, 28 nt, Homo Sapiens
cuugccgagcggccgccgcugccguguc

SEQ ID NO: 302107 - RNA, 32 nt, Homo Sapiens
gcccgcagcugucggugacagcuccucccuac

SEQ ID NO: 302108 - RNA, 30 nt, Homo Sapiens
ugggcccagggcggcggcgggagaagccgg

SEQ ID NO: 302109 - RNA, 32 nt, Homo Sapiens
cugggagaaaccaagcugcuggccguagggug

SEQ ID NO: 302110 - RNA, 32 nt, Homo Sapiens
cuuggguguuccuggggugcaagggcaggcca

SEQ ID NO: 302111 - RNA, 32 nt, Homo Sapiens
ggcaaaugcccugguauguaccucuggcaaau

SEQ ID NO: 302112 - RNA, 32 nt, Homo Sapiens
cucuguuuuaaauacaaaauuuauugaauaua

SEQ ID NO: 302113 - RNA, 29 nt, Homo Sapiens
gaaucuucuauccagaaauugugaaggag

SEQ ID NO: 302114 - RNA, 32 nt, Homo Sapiens
aaugcauacugagagacaaacaucuugucauu

SEQ ID NO: 302115 - RNA, 32 nt, Homo Sapiens
aaaaaauaucuaguaauauauuuaaagggaaa

SEQ ID NO: 302116 - RNA, 32 nt, Homo Sapiens
uccccauauauucauauauuuuugcucguuag

SEQ ID NO: 302117 - RNA, 32 nt, Homo Sapiens
agaaauguaacuccagccucugaugaaaaacg

SEQ ID NO: 302118 - RNA, 32 nt, Homo Sapiens
gagcccaggaguuggagagcaacaucacaaca

SEQ ID NO: 302119 - RNA, 32 nt, Homo Sapiens
uggagaucuauagccaccuggucucaauggga

SEQ ID NO: 302120 - RNA, 32 nt, Homo Sapiens
uuaggauaaacuagaauauuuuauguuuauga

SEQ ID NO: 302121 - RNA, 32 nt, Homo Sapiens
aguagagguuuaaagaaaaaucaguuuuuguu

SEQ ID NO: 302122 - RNA, 32 nt, Homo Sapiens
ugcgcugacguggcuccuggaagcagggcugg

SEQ ID NO: 302123 - RNA, 32 nt, Homo Sapiens
augguugaagcuggaaguuuaauuauauguag

SEQ ID NO: 302124 - RNA, 32 nt, Homo Sapiens
caggcagaucuccugcccucucugagccuugu

SEQ ID NO: 302125 - RNA, 32 nt, Homo Sapiens
gauaaggguguguaucuuaauguuguugaguu

SEQ ID NO: 302126 - RNA, 32 nt, Homo Sapiens
acaucgccaggggaagaggacuguagccagga

SEQ ID NO: 302127 - RNA, 32 nt, Homo Sapiens
gguaaaggacaaaguggaguaccuccuaaagu

SEQ ID NO: 302128 - RNA, 32 nt, Homo Sapiens
uaaggccaucuuggcuuugaguagcaguguuc

SEQ ID NO: 302129 - RNA, 32 nt, Homo Sapiens
auagcauggcacaacuaaaaaucuaagccuga

SEQ ID NO: 302130 - RNA, 32 nt, Homo Sapiens
augucucagggugaugugaacucuguuguugc

SEQ ID NO: 302131 - RNA, 32 nt, Homo Sapiens
guuaagugacuaauuuaauuucaauuaaaaag

SEQ ID NO: 302132 - RNA, 32 nt, Homo Sapiens
uccagcuccugcgccuuccccagcaacugcug

SEQ ID NO: 302133 - RNA, 32 nt, Homo Sapiens
ccgccgcgacccgaggcgggggccccacauga

SEQ ID NO: 302134 - RNA, 32 nt, Homo Sapiens
guaugaggaccacuuaaaggcuuugccacauc

SEQ ID NO: 302135 - RNA, 32 nt, Homo Sapiens
ucucaguacugccuauagagauacaguguauu

SEQ ID NO: 302136 - RNA, 32 nt, Homo Sapiens
cagucucuggaggaccacuuugagccuuugga

SEQ ID NO: 302137 - RNA, 29 nt, Homo Sapiens
agccccaguuuguccaguuuaauggagga

SEQ ID NO: 302138 - RNA, 32 nt, Homo Sapiens
gggacacggcugacuuccagauaugaccaugu

SEQ ID NO: 302139 - RNA, 32 nt, Homo Sapiens
gugugcucccacccuuuccuccugcugcugca

SEQ ID NO: 302140 - RNA, 32 nt, Homo Sapiens
aggccugcaagauuauucugugcccaucccau

SEQ ID NO: 302141 - RNA, 32 nt, Homo Sapiens
ccuggaaggcccuccagcuggaugcuggggau

SEQ ID NO: 302142 - RNA, 32 nt, Homo Sapiens
cguccacccucaagggccccagaaaucacugu

SEQ ID NO: 302143 - RNA, 32 nt, Homo Sapiens
uuuauguagaauaaacauuuguaucuguaaaa

SEQ ID NO: 302144 - RNA, 32 nt, Homo Sapiens
aucaguacaaccccaaguuucagacccuguuc

SEQ ID NO: 302145 - RNA, 32 nt, Homo Sapiens
cccuccccaaaagaagcagugaaauggaccaa

SEQ ID NO: 302146 - RNA, 32 nt, Homo Sapiens
auagaaggacggguggaagagaggcagccucc

SEQ ID NO: 302147 - RNA, 32 nt, Homo Sapiens
aguaaccauugguuuaaauauaaucaugaguu

SEQ ID NO: 302148 - RNA, 32 nt, Homo Sapiens
ggcccucgucauccugcccacccagcggggcu

SEQ ID NO: 302149 - RNA, 32 nt, Homo Sapiens
uucucaaagccucagcaccaucuuuuaucccc

SEQ ID NO: 302150 - RNA, 32 nt, Homo Sapiens
ccccucugcacccccguuuccuccccuguaag

SEQ ID NO: 302151 - RNA, 32 nt, Homo Sapiens
uucccuuccggcagccucuuggccucuaauuu

SEQ ID NO: 302152 - RNA, 32 nt, Homo Sapiens
uuuccccugcuaucucccuuccugcuucgaag

SEQ ID NO: 302153 - RNA, 32 nt, Homo Sapiens
uaaguccccauuuauauuuggaucuaucccua

SEQ ID NO: 302154 - RNA, 32 nt, Homo Sapiens
agaggauuuuuagggcagugaaauuauuccau

SEQ ID NO: 302155 - RNA, 32 nt, Homo Sapiens
ggggagggacgcgggugcggcgcggguggggg

SEQ ID NO: 302156 - RNA, 32 nt, Homo Sapiens
uugcauucaaaaggaguggcccuguuuucugu

SEQ ID NO: 302157 - RNA, 32 nt, Homo Sapiens
agugagaccugcccccuaucucuacaaggaau

SEQ ID NO: 302158 - RNA, 29 nt, Homo Sapiens
gaaaugggacgucuuccuuaacaucugca

SEQ ID NO: 302159 - RNA, 32 nt, Homo Sapiens
cagacaccgcccccagccccagcuaccaccuc

SEQ ID NO: 302160 - RNA, 32 nt, Homo Sapiens
gucugagucugauuuucgcugaugcuguuuug

SEQ ID NO: 302161 - RNA, 32 nt, Homo Sapiens
caacccaugaaggcuccccggaggaagcaggc

SEQ ID NO: 302162 - RNA, 32 nt, Homo Sapiens
ccaggagucaacaugccaaagaaugaggcugg

SEQ ID NO: 302163 - RNA, 32 nt, Homo Sapiens
ggggaaagggaaggcuaaaaauacuuggucaa

SEQ ID NO: 302164 - RNA, 32 nt, Homo Sapiens
aguucccuccacuguaaauugaggauaauaau

SEQ ID NO: 302165 - RNA, 32 nt, Homo Sapiens
cauaaagagagcuucucagagccugacugaag

SEQ ID NO: 302166 - RNA, 32 nt, Homo Sapiens
gguaggggcagggaggcaacacugcuguccac

SEQ ID NO: 302167 - RNA, 31 nt, Homo Sapiens
ggugggugaaacacugccucuguuccuccuu

SEQ ID NO: 302168 - RNA, 32 nt, Homo Sapiens
cggagcgccccgagcuggcgcgggcauggccg

SEQ ID NO: 302169 - RNA, 32 nt, Homo Sapiens
cagacgcagcagcugggaccccucccaaccuc

SEQ ID NO: 302170 - RNA, 32 nt, Homo Sapiens
aggccgacucgcgggccgcugcacccaccgcc

SEQ ID NO: 302171 - RNA, 32 nt, Homo Sapiens
ggcuggggcauggaaggcaagauuguguccca

SEQ ID NO: 302172 - RNA, 29 nt, Homo Sapiens
caucucauauguauuuauauggauacaua

SEQ ID NO: 302173 - RNA, 32 nt, Homo Sapiens
uugcugggaagcaucugcgugugugagggggc

SEQ ID NO: 302174 - RNA, 32 nt, Homo Sapiens
cuuucgcuauuucuucuacugcuaucuacuac

SEQ ID NO: 302175 - RNA, 32 nt, Homo Sapiens
guauuaucuauuuuuauuuaaccuuucuuaua

SEQ ID NO: 302176 - RNA, 32 nt, Homo Sapiens
aaagacacagaaagagauuggggagagaaaua

SEQ ID NO: 302177 - RNA, 32 nt, Homo Sapiens
ugccugcucccagagaagcuugucuaaccuag

SEQ ID NO: 302178 - RNA, 32 nt, Homo Sapiens
gcgcgcugggguugcgccccggaggcggaucu

SEQ ID NO: 302179 - RNA, 32 nt, Homo Sapiens
gccacauacuagguuaaagauaaagugagaaa

SEQ ID NO: 302180 - RNA, 32 nt, Homo Sapiens
aauuuucugaaauuucaauuaaacuauuggug

SEQ ID NO: 302181 - RNA, 32 nt, Homo Sapiens
gucgagaucaggcuuccugcuugauagucucu

SEQ ID NO: 302182 - RNA, 29 nt, Homo Sapiens
ccagcacccacuuuaccucccccagauaa

SEQ ID NO: 302183 - RNA, 32 nt, Homo Sapiens
cggaguucggggucgcgccgcucccaggcagg

SEQ ID NO: 302184 - RNA, 32 nt, Homo Sapiens
gucccucccccugcaggguggugcugguguug

SEQ ID NO: 302185 - RNA, 31 nt, Homo Sapiens
caacuucugaaagaucucagaggacuggcau

SEQ ID NO: 302186 - RNA, 32 nt, Homo Sapiens
cacauuaaaagcuuaugguauguguggucuau

SEQ ID NO: 302187 - RNA, 30 nt, Homo Sapiens
gaaucgucaugugccacagaagcucagccu

SEQ ID NO: 302188 - RNA, 32 nt, Homo Sapiens
ggagaaccaaaggccacauacaugacaaaaag

SEQ ID NO: 302189 - RNA, 32 nt, Homo Sapiens
gauggcuaagguggcgaaaauuuucaccacac

SEQ ID NO: 302190 - RNA, 32 nt, Homo Sapiens
ccggcggugggugccgccuagccgggagugag

SEQ ID NO: 302191 - RNA, 32 nt, Homo Sapiens
ccgcaggcgggcgagccgcgggcgcucgcuca

SEQ ID NO: 302192 - RNA, 32 nt, Homo Sapiens
caggacuaauuucaagguuuacaacacuuuac

SEQ ID NO: 302193 - RNA, 32 nt, Homo Sapiens
uuggaaaguuaguucaacaugaacuaaaaugg

SEQ ID NO: 302194 - RNA, 32 nt, Homo Sapiens
ggccaaucaaaauaauguuugugaucucuacu

SEQ ID NO: 302195 - RNA, 32 nt, Homo Sapiens
guccugucgcugcugagcuggcaccgacugug

SEQ ID NO: 302196 - RNA, 32 nt, Homo Sapiens
acgcaugggcucagaacacacuggauccacaa

SEQ ID NO: 302197 - RNA, 32 nt, Homo Sapiens
acuugguuccucccuuucuuaagcccuuauug

SEQ ID NO: 302198 - RNA, 32 nt, Homo Sapiens
aggcacauggauuugaaccagagaccgcuugg

SEQ ID NO: 302199 - RNA, 32 nt, Homo Sapiens
uaucacaauuuaaauuaucuucagcccauaua

SEQ ID NO: 302200 - RNA, 32 nt, Homo Sapiens
aggaccgugcugcuuuccugggaauuugaggc

SEQ ID NO: 302201 - RNA, 32 nt, Homo Sapiens
uagggcacuuuuccuuaagaaauagaacuuga

SEQ ID NO: 302202 - RNA, 32 nt, Homo Sapiens
acauaucugggugccccucauagugcaguaau

SEQ ID NO: 302203 - RNA, 32 nt, Homo Sapiens
aagugucauuggaccacagugcagcuugguua

SEQ ID NO: 302204 - RNA, 31 nt, Homo Sapiens
auuucaaaccggagaaagucauacugucagu

SEQ ID NO: 302205 - RNA, 32 nt, Homo Sapiens
uccaggacuuuccaauauuaauccauguuauc

SEQ ID NO: 302206 - RNA, 32 nt, Homo Sapiens
accucugccucccaggucagccucccaaguag

SEQ ID NO: 302207 - RNA, 32 nt, Homo Sapiens
ccccugcugucccagggaggacgggcuucugu

SEQ ID NO: 302208 - RNA, 32 nt, Homo Sapiens
ugggccagaccgccuccaccucccccgcccgc

SEQ ID NO: 302209 - RNA, 32 nt, Homo Sapiens
caaguaacccuucuccucccuccccccucacc

SEQ ID NO: 302210 - RNA, 32 nt, Homo Sapiens
uuauugauaaauagauaaaccaauuugaaucc

SEQ ID NO: 302211 - RNA, 32 nt, Homo Sapiens
ggggacguguucagcccucggguccugaaggg

SEQ ID NO: 302212 - RNA, 32 nt, Homo Sapiens
uccacaaugugcuccugcccacccggguuccg

SEQ ID NO: 302213 - RNA, 32 nt, Homo Sapiens
caaauaaagcaugugauguggaauaaucuaaa

SEQ ID NO: 302214 - RNA, 32 nt, Homo Sapiens
aagcggagggucaccggaaucugggaagauca

SEQ ID NO: 302215 - RNA, 32 nt, Homo Sapiens
ccuguggccgcggugcuuuuuaauuuuccccc

SEQ ID NO: 302216 - RNA, 32 nt, Homo Sapiens
gcggccggguggcgggaggaaccguuacggga

SEQ ID NO: 302217 - RNA, 32 nt, Homo Sapiens
guuacccuuuuggcaccccuccccuuaugccc

SEQ ID NO: 302218 - RNA, 32 nt, Homo Sapiens
cgcuuuuuacaaaccacuggaucuuacaugcc

SEQ ID NO: 302219 - RNA, 32 nt, Homo Sapiens
agagucgcugacgcggcacugcuguccuuccc

SEQ ID NO: 302220 - RNA, 32 nt, Homo Sapiens
aaaggggggaggaggaguaaaagcccgauuau

SEQ ID NO: 302221 - RNA, 32 nt, Homo Sapiens
accuguuaaaccuagaaauuguauucauccuu

SEQ ID NO: 302222 - RNA, 32 nt, Homo Sapiens
uauagaagaugaacaacuagcauaugguuuca

SEQ ID NO: 302223 - RNA, 32 nt, Homo Sapiens
agacgcugguaugggggcucggaccccucacu

SEQ ID NO: 302224 - RNA, 32 nt, Homo Sapiens
auucaaaaauuugggauucauguagcagagac

SEQ ID NO: 302225 - RNA, 32 nt, Homo Sapiens
ugcaccaggaacugcaugugucuucaugacca

SEQ ID NO: 302226 - RNA, 32 nt, Homo Sapiens
auauggaguuuuuaugagugugucacuggauu

SEQ ID NO: 302227 - RNA, 32 nt, Homo Sapiens
guuugacaaacacaauucuaggaugaacaaug

SEQ ID NO: 302228 - RNA, 32 nt, Homo Sapiens
auacuugugaauugugaucuaacugcagaaag

SEQ ID NO: 302229 - RNA, 32 nt, Homo Sapiens
auuuuaagacugaguuucacucuuguugccca

SEQ ID NO: 302230 - RNA, 32 nt, Homo Sapiens
aaaaagagugaaugugguauauuucuaaauga

SEQ ID NO: 302231 - RNA, 32 nt, Homo Sapiens
ggagaugggcccgccaugugccugcagggagc

SEQ ID NO: 302232 - RNA, 32 nt, Homo Sapiens
auauuggaaaauuauauguauaaaaccaaagu

SEQ ID NO: 302233 - RNA, 32 nt, Homo Sapiens
aggcccaggaugaggaggagcuuggcucccag

SEQ ID NO: 302234 - RNA, 32 nt, Homo Sapiens
auaaguucaacaaccaucacauuggaagggag

SEQ ID NO: 302235 - RNA, 32 nt, Homo Sapiens
uaacaugcucuuagcccaaccaaaagaucaug

SEQ ID NO: 302236 - RNA, 32 nt, Homo Sapiens
ggcaauguccacucacacaaccaugcacaugg

SEQ ID NO: 302237 - RNA, 32 nt, Homo Sapiens
gccaaauauauuaacaguaauaaaaugaucuc

SEQ ID NO: 302238 - RNA, 32 nt, Homo Sapiens
uuggaagugucugcacuggggucaugcacuga

SEQ ID NO: 302239 - RNA, 32 nt, Homo Sapiens
uuugaggcugggugcaguggcucacaccugua

SEQ ID NO: 302240 - RNA, 32 nt, Homo Sapiens
ggcccugugaggggcuguacagacgggaugug

SEQ ID NO: 302241 - RNA, 29 nt, Homo Sapiens
uguuacauauguauacaugugccauauug

SEQ ID NO: 302242 - RNA, 32 nt, Homo Sapiens
ggaacuguaauuacuuguauuuuuguaagcca

SEQ ID NO: 302243 - RNA, 32 nt, Homo Sapiens
ccuagcuugaguucccuagaagcgaaaucuga

SEQ ID NO: 302244 - RNA, 32 nt, Homo Sapiens
uccagccacaaagaagccaaaggucagucccu

SEQ ID NO: 302245 - RNA, 32 nt, Homo Sapiens
gggcaggcgggugggggcacaccccucguacc

SEQ ID NO: 302246 - RNA, 32 nt, Homo Sapiens
gugagagcggcaagcaggaacuguggucagag

SEQ ID NO: 302247 - RNA, 32 nt, Homo Sapiens
gcagaaggagacggcgucgacgucugacugga

SEQ ID NO: 302248 - RNA, 32 nt, Homo Sapiens
gguaguggcauggguggaguguguguucuuuc

SEQ ID NO: 302249 - RNA, 32 nt, Homo Sapiens
gaaaaucguccggaagcugcugauugagggcu

SEQ ID NO: 302250 - RNA, 32 nt, Homo Sapiens
acaaaagggaauguucuaaaacuuuuucuucc

SEQ ID NO: 302251 - RNA, 32 nt, Homo Sapiens
aaaaugugaugcagacacgaaaugagcaugug

SEQ ID NO: 302252 - RNA, 32 nt, Homo Sapiens
uuuuuucucuacagacggauaucuguuuagga

SEQ ID NO: 302253 - RNA, 32 nt, Homo Sapiens
ucgcgcagcgggguggcacaggcggccaggga

SEQ ID NO: 302254 - RNA, 32 nt, Homo Sapiens
acaaacauacgauaguguguuuucagagcaag

SEQ ID NO: 302255 - RNA, 32 nt, Homo Sapiens
guaaauguuucuuuuguuugguaaauguuucu

SEQ ID NO: 302256 - RNA, 32 nt, Homo Sapiens
gucuucuugugcuaagucaguuccugggugag

SEQ ID NO: 302257 - RNA, 32 nt, Homo Sapiens
ggugugugccagcaugccuggccaauuguugg

SEQ ID NO: 302258 - RNA, 32 nt, Homo Sapiens
uucuuuuuucuuuuuuaaagacagggucucac

SEQ ID NO: 302259 - RNA, 32 nt, Homo Sapiens
cugggcguggcggugcgcaacuguagucccag

SEQ ID NO: 302260 - RNA, 32 nt, Homo Sapiens
gcccgccagccuucccggccggaccggcuguc

SEQ ID NO: 302261 - RNA, 32 nt, Homo Sapiens
ccagcacuucgggaggccgagguaggcggauc

SEQ ID NO: 302262 - RNA, 32 nt, Homo Sapiens
augccuuagacuauuugcuucccacugauagg

SEQ ID NO: 302263 - RNA, 32 nt, Homo Sapiens
ccucagaaguagauuuuuuaaaacgaagccgc

SEQ ID NO: 302264 - RNA, 31 nt, Homo Sapiens
ccggcggcaaggucggcagcugcgaggccaa

SEQ ID NO: 302265 - RNA, 32 nt, Homo Sapiens
uguccuccaagccccugucuuccucggcagcc

SEQ ID NO: 302266 - RNA, 32 nt, Homo Sapiens
agcggcccaagcaggagcugcagcgagccggg

SEQ ID NO: 302267 - RNA, 32 nt, Homo Sapiens
cucgguugcgguucuguaaaugggguggcagu

SEQ ID NO: 302268 - RNA, 32 nt, Homo Sapiens
uguccccuaagucaaggccgaacuccagccug

SEQ ID NO: 302269 - RNA, 32 nt, Homo Sapiens
ggucugaaggugggagggcagcuccaugagca

SEQ ID NO: 302270 - RNA, 32 nt, Homo Sapiens
aauaacuauugcugcuuucucuucuacuucuu

SEQ ID NO: 302271 - RNA, 32 nt, Homo Sapiens
cgcugggucugguggggacgcgggggugcccc

SEQ ID NO: 302272 - RNA, 32 nt, Homo Sapiens
cuguuuaaccauuagaaauauuucaugucaag

SEQ ID NO: 302273 - RNA, 32 nt, Homo Sapiens
augccaaagucuucuuuuuucagaccauacaa

SEQ ID NO: 302274 - RNA, 28 nt, Homo Sapiens
ucagccggugcuaccaggagucacugcc

SEQ ID NO: 302275 - RNA, 32 nt, Homo Sapiens
cucagcuccaaauagcgggggccugucaggag

SEQ ID NO: 302276 - RNA, 32 nt, Homo Sapiens
uuuuuauaucuaaauguauucugcacgagaag

SEQ ID NO: 302277 - RNA, 32 nt, Homo Sapiens
guccguuuuccacaugcaacuguguuacagaa

SEQ ID NO: 302278 - RNA, 32 nt, Homo Sapiens
gaccuaaguccuccuguccaaucucccugcca

SEQ ID NO: 302279 - RNA, 32 nt, Homo Sapiens
gcgcugacccggccggccccacacccgcucuu

SEQ ID NO: 302280 - RNA, 32 nt, Homo Sapiens
ccugacuccuggugcccucucccuuugucccc

SEQ ID NO: 302281 - RNA, 32 nt, Homo Sapiens
cuggcccgcucgcccgccggcaccaugaugga

SEQ ID NO: 302282 - RNA, 32 nt, Homo Sapiens
cugcuggacaguccuugacauguguucugugu

SEQ ID NO: 302283 - RNA, 32 nt, Homo Sapiens
uagagauggaggaggaggcaauugggauggcg

SEQ ID NO: 302284 - RNA, 32 nt, Homo Sapiens
ccaaauccaaaaauccaaaauucaaaaugcuc

SEQ ID NO: 302285 - RNA, 30 nt, Homo Sapiens
cuccccggcaggcgcugugcccuggagaag

SEQ ID NO: 302286 - RNA, 32 nt, Homo Sapiens
acuguuaugacacccagaaaugucucaggacg

SEQ ID NO: 302287 - RNA, 32 nt, Homo Sapiens
aaaauuucuagguauuugcuuuauuaccuuuc

SEQ ID NO: 302288 - RNA, 32 nt, Homo Sapiens
ggcaugagccaccgugcccagccaagaacacu

SEQ ID NO: 302289 - RNA, 32 nt, Homo Sapiens
aucugggaccguccuaucaaggcgcuucaaag

SEQ ID NO: 302290 - RNA, 32 nt, Homo Sapiens
gcuuggcaguugcagugcugcugucucggggg

SEQ ID NO: 302291 - RNA, 32 nt, Homo Sapiens
cucuccucggccuggggcucuggccaaggaug

SEQ ID NO: 302292 - RNA, 32 nt, Homo Sapiens
uggaggcccuggugcccggcccuuggugcuga

SEQ ID NO: 302293 - RNA, 32 nt, Homo Sapiens
uaaagcuuuacuauucuguccugggcuuauau

SEQ ID NO: 302294 - RNA, 32 nt, Homo Sapiens
aaaaagccugguuuuucucaauacgccuuuaa

SEQ ID NO: 302295 - RNA, 32 nt, Homo Sapiens
gagcuggcguccgcgggugcuggucuggccug

SEQ ID NO: 302296 - RNA, 32 nt, Homo Sapiens
aagcaagaggaacagugguaucaacagaccaa

SEQ ID NO: 302297 - RNA, 32 nt, Homo Sapiens
cccgccacuuuacuuucuccagcccugauacc

SEQ ID NO: 302298 - RNA, 32 nt, Homo Sapiens
uuaauuuuagucaccaaugguauaaagcaaaa

SEQ ID NO: 302299 - RNA, 32 nt, Homo Sapiens
caggaauagcauaugcacgcuguucuugcuuc

SEQ ID NO: 302300 - RNA, 32 nt, Homo Sapiens
ucugauucuguaucuucaguauauauauuuug

SEQ ID NO: 302301 - RNA, 32 nt, Homo Sapiens
uuccacacccuggacucuggcucccgaggacc

SEQ ID NO: 302302 - RNA, 32 nt, Homo Sapiens
uguaguggauagccaaagaugauaaaaaugca

SEQ ID NO: 302303 - RNA, 32 nt, Homo Sapiens
caccucgcgguccccaggaccacuggcugcca

SEQ ID NO: 302304 - RNA, 32 nt, Homo Sapiens
ggggaccuaggccccagggaaagagccccaug

SEQ ID NO: 302305 - RNA, 32 nt, Homo Sapiens
accuacuagguccaaugcccgccagccuagcu

SEQ ID NO: 302306 - RNA, 29 nt, Homo Sapiens
cagccauggggguccuggacgccgccucg

SEQ ID NO: 302307 - RNA, 32 nt, Homo Sapiens
cagaguaggguggagcucccaacaggcugggc

SEQ ID NO: 302308 - RNA, 32 nt, Homo Sapiens
caggagcccugccuucgucuccauaggaagga

SEQ ID NO: 302309 - RNA, 32 nt, Homo Sapiens
gaauggggaaaggcccccuggggcgaaggaag

SEQ ID NO: 302310 - RNA, 32 nt, Homo Sapiens
uuguggaagauauuuuuaaaaucugauuuugc

SEQ ID NO: 302311 - RNA, 32 nt, Homo Sapiens
uagcugggacugcaggcaugcgccaccaugcc

SEQ ID NO: 302312 - RNA, 32 nt, Homo Sapiens
agaagagauaaaauuugccuuaaaacuuaccu

SEQ ID NO: 302313 - RNA, 32 nt, Homo Sapiens
gaccuguucacuguucaaaaaauacacuuaau

SEQ ID NO: 302314 - RNA, 32 nt, Homo Sapiens
ccagucaagacaccccucccccaccucauguc

SEQ ID NO: 302315 - RNA, 32 nt, Homo Sapiens
augccucuuuuguacauguucauguuuagugu

SEQ ID NO: 302316 - RNA, 32 nt, Homo Sapiens
cuccccacugucagcagcagccccgggacacc

SEQ ID NO: 302317 - RNA, 32 nt, Homo Sapiens
caucccaccaaaacuaguuuauuuuuccccuc

SEQ ID NO: 302318 - RNA, 32 nt, Homo Sapiens
caagcaucccugcaacugccacagcagguggg

SEQ ID NO: 302319 - RNA, 32 nt, Homo Sapiens
acgaacuucuccagcucugcucuguuuucucu

SEQ ID NO: 302320 - RNA, 32 nt, Homo Sapiens
acugaacgucuggaugcucuucuucuggaaaa

SEQ ID NO: 302321 - RNA, 32 nt, Homo Sapiens
cuuaaagggucaaagugcaaugggcagcuuuu

SEQ ID NO: 302322 - RNA, 32 nt, Homo Sapiens
ggcggaaacaaaugaugaggcugguuagcgga

SEQ ID NO: 302323 - RNA, 32 nt, Homo Sapiens
auccaguacuuugguauccaguccacuuccau

SEQ ID NO: 302324 - RNA, 32 nt, Homo Sapiens
ugcuuccugcccucgaacaucagacuccaagu

SEQ ID NO: 302325 - RNA, 32 nt, Homo Sapiens
guguaggagaugguucucgccaugcugggggc

SEQ ID NO: 302326 - RNA, 32 nt, Homo Sapiens
agauggguccuccaugcuggcaaugcguuaca

SEQ ID NO: 302327 - RNA, 32 nt, Homo Sapiens
aaaggugaaggcggcccggggaggcggggacg

SEQ ID NO: 302328 - RNA, 32 nt, Homo Sapiens
gcccuuagcugucaaggaugcugugggaagag

SEQ ID NO: 302329 - RNA, 32 nt, Homo Sapiens
gagcugcccaccuggugcugagcuggggcccc

SEQ ID NO: 302330 - RNA, 32 nt, Homo Sapiens
uuaccaucacagccuuuuaacaaaaucaucuu

SEQ ID NO: 302331 - RNA, 32 nt, Homo Sapiens
acguuugcgaaucagagcugcccgggguacac

SEQ ID NO: 302332 - RNA, 32 nt, Homo Sapiens
uggugggagagugcagacacacacggggcugu

SEQ ID NO: 302333 - RNA, 32 nt, Homo Sapiens
cugaacuucuuugagcuucuguuuccugauuu

SEQ ID NO: 302334 - RNA, 32 nt, Homo Sapiens
auuagacaagguggucuucuucuuaagcccau

SEQ ID NO: 302335 - RNA, 32 nt, Homo Sapiens
ggcaccaagggagagaggggcccagggguagg

SEQ ID NO: 302336 - RNA, 32 nt, Homo Sapiens
ucuccucugcgccugcgccgccgggaugcugg

SEQ ID NO: 302337 - RNA, 32 nt, Homo Sapiens
aucuuuaaaaauuuuaauuacugugauauuga

SEQ ID NO: 302338 - RNA, 32 nt, Homo Sapiens
uaaagaagaguauccuaguaaaauauuaaaaa

SEQ ID NO: 302339 - RNA, 32 nt, Homo Sapiens
gccaagucccggggccgagacauagugugcau

SEQ ID NO: 302340 - RNA, 32 nt, Homo Sapiens
cgggugacgggcgggcggagggcuugcccccg

SEQ ID NO: 302341 - RNA, 32 nt, Homo Sapiens
cggucucggucuugucaucuuuuacauggaau

SEQ ID NO: 302342 - RNA, 31 nt, Homo Sapiens
agggcccagcgcagcuacuggcaguaacacu

SEQ ID NO: 302343 - RNA, 32 nt, Homo Sapiens
ugaaacuccugcuacauaaguggacauagaaa

SEQ ID NO: 302344 - RNA, 32 nt, Homo Sapiens
gacaagggaggcccuuuggcugugauuucauu

SEQ ID NO: 302345 - RNA, 32 nt, Homo Sapiens
gagcccacuccccugagagacggagggaagag

SEQ ID NO: 302346 - RNA, 32 nt, Homo Sapiens
gcccaacccaaguucaaaggcugauaagagag

SEQ ID NO: 302347 - RNA, 32 nt, Homo Sapiens
ugcagccaggacuugugggguggccccaggag

SEQ ID NO: 302348 - RNA, 32 nt, Homo Sapiens
uugggauuuguccuugaaucuucucuuuuagc

SEQ ID NO: 302349 - RNA, 32 nt, Homo Sapiens
ccuuugggacccaucuuugcuuccuuucaguu

SEQ ID NO: 302350 - RNA, 29 nt, Homo Sapiens
gcuggggggugggggaggacgccgagcgu

SEQ ID NO: 302351 - RNA, 32 nt, Homo Sapiens
guucgccaggguaggaugugucuuaaagauug

SEQ ID NO: 302352 - RNA, 32 nt, Homo Sapiens
gcggcguugccauggcggcgucucuggggcag

SEQ ID NO: 302353 - RNA, 32 nt, Homo Sapiens
guugcuaacucuggauaacacuuggggacuug

SEQ ID NO: 302354 - RNA, 32 nt, Homo Sapiens
uuucacuauaaucaauaaaauaaaguauuugu

SEQ ID NO: 302355 - RNA, 32 nt, Homo Sapiens
ccccgugcccggaaccgcggcuucucccacgc

SEQ ID NO: 302356 - RNA, 32 nt, Homo Sapiens
auguugacagcaggauugaaauggacucaaac

SEQ ID NO: 302357 - RNA, 32 nt, Homo Sapiens
aaaagaagccccagcccagccugccucauccc

SEQ ID NO: 302358 - RNA, 32 nt, Homo Sapiens
cuacuuccugucagcacaacuaggacgucugg

SEQ ID NO: 302359 - RNA, 32 nt, Homo Sapiens
ggccuuucacguauuccgucugcacaggcaac

SEQ ID NO: 302360 - RNA, 31 nt, Homo Sapiens
cccgcuccagggcucgcuccaggaccuucuu

SEQ ID NO: 302361 - RNA, 31 nt, Homo Sapiens
agucccauucaagucaccugaggcaaagugu

SEQ ID NO: 302362 - RNA, 32 nt, Homo Sapiens
ccuucuuuuuucuguuuguuuuuagauaaaaa

SEQ ID NO: 302363 - RNA, 32 nt, Homo Sapiens
aagacuucaaagcugacugccaaagcuucugg

SEQ ID NO: 302364 - RNA, 32 nt, Homo Sapiens
guuccccacagccagcgccgcccgccacgucc

SEQ ID NO: 302365 - RNA, 32 nt, Homo Sapiens
auuauuuuuuggacagaugcuuuugucaccaa

SEQ ID NO: 302366 - RNA, 32 nt, Homo Sapiens
ugccagccuuggaggaucguggccaacgugga

SEQ ID NO: 302367 - RNA, 32 nt, Homo Sapiens
uggaaugacaauaccagcccuggacuaccuac

SEQ ID NO: 302368 - RNA, 32 nt, Homo Sapiens
uuuguugcugcagccgagugaccuccauaaau

SEQ ID NO: 302369 - RNA, 32 nt, Homo Sapiens
cuguuaaaucuuccuaguaguuuguuuucacc

SEQ ID NO: 302370 - RNA, 32 nt, Homo Sapiens
ucaacauuuuuaaaaagaaaauguaaaggugu

SEQ ID NO: 302371 - RNA, 32 nt, Homo Sapiens
auuuguuaaaaauaaaauucuguaccauuuau

SEQ ID NO: 302372 - RNA, 32 nt, Homo Sapiens
ugagauuauuuuuucaucuguaaaaugggaag

SEQ ID NO: 302373 - RNA, 32 nt, Homo Sapiens
gaggaggcuguggcugcagagccuggaggagc

SEQ ID NO: 302374 - RNA, 32 nt, Homo Sapiens
uucugcaauucucauuggggugagaggaggcc

SEQ ID NO: 302375 - RNA, 32 nt, Homo Sapiens
uaccuguuugcugcugagaacaucucugccua

SEQ ID NO: 302376 - RNA, 32 nt, Homo Sapiens
uuugucacguacuugcgugcuggcugagauga

SEQ ID NO: 302377 - RNA, 32 nt, Homo Sapiens
uggugcugcgcggcgggcggguggcacagucc

SEQ ID NO: 302378 - RNA, 32 nt, Homo Sapiens
gaaccgagggaagaagguagagagcugugagc

SEQ ID NO: 302379 - RNA, 32 nt, Homo Sapiens
gagcugcagagacuguauucagagcacagugg

SEQ ID NO: 302380 - RNA, 32 nt, Homo Sapiens
agaagaugagagauucaaaaauaucagaaaag

SEQ ID NO: 302381 - RNA, 32 nt, Homo Sapiens
auguaagaggauuuuugcugcuuuuggggugc

SEQ ID NO: 302382 - RNA, 32 nt, Homo Sapiens
cgcagggggauggcccccggcgcgggcucuug

SEQ ID NO: 302383 - RNA, 32 nt, Homo Sapiens
aagaggaaacaccgugauuuccugaugcucuu

SEQ ID NO: 302384 - RNA, 32 nt, Homo Sapiens
gccuguuuauuauuauuuuuugagauggagug

SEQ ID NO: 302385 - RNA, 32 nt, Homo Sapiens
cuguguaaaaauugaucuacauccacccuuua

SEQ ID NO: 302386 - RNA, 32 nt, Homo Sapiens
aaggugcuacuguguccccaggagccuaauag

SEQ ID NO: 302387 - RNA, 32 nt, Homo Sapiens
cucccaagugcagcugcagccacccaagcugc

SEQ ID NO: 302388 - RNA, 32 nt, Homo Sapiens
ccuucagagauuacggguacuugcacugggga

SEQ ID NO: 302389 - RNA, 32 nt, Homo Sapiens
uucauuuguaaaaaugagucauuuguuuaaac

SEQ ID NO: 302390 - RNA, 32 nt, Homo Sapiens
agcucccggggguggggucgggugagggcagc

SEQ ID NO: 302391 - RNA, 32 nt, Homo Sapiens
gaucaaaauuguuacccauuugaaagaauauu

SEQ ID NO: 302392 - RNA, 32 nt, Homo Sapiens
ccuccaucuucagagcuagcagguucagucug

SEQ ID NO: 302393 - RNA, 32 nt, Homo Sapiens
uacuuucccaaauguguuaaauuuguaacucc

SEQ ID NO: 302394 - RNA, 32 nt, Homo Sapiens
gggaugcggcaggaggcggcgcggcgggagga

SEQ ID NO: 302395 - RNA, 28 nt, Homo Sapiens
ugaagauauacauuacauuugaaaaacu

SEQ ID NO: 302396 - RNA, 32 nt, Homo Sapiens
ccugcucugcuggccugagccccaggccuugg

SEQ ID NO: 302397 - RNA, 32 nt, Homo Sapiens
cccuuggaccaggcauuugcacaggggaggcc

SEQ ID NO: 302398 - RNA, 32 nt, Homo Sapiens
aaauaugaaacuuuuuaaaucugauuuucuuc

SEQ ID NO: 302399 - RNA, 32 nt, Homo Sapiens
aacaaaucuaauggugcuuuuaccacaauaug

SEQ ID NO: 302400 - RNA, 32 nt, Homo Sapiens
agcugagacugcacuagggucuggggacacag

SEQ ID NO: 302401 - RNA, 32 nt, Homo Sapiens
ucccgcccgggcgcgccgcgcuucucccagcg

SEQ ID NO: 302402 - RNA, 29 nt, Homo Sapiens
cugcuuuggggacaggugauccuagcccc

SEQ ID NO: 302403 - RNA, 32 nt, Homo Sapiens
uacuauauagaauccauauauuugacugcaag

SEQ ID NO: 302404 - RNA, 32 nt, Homo Sapiens
cugauuguuucauugcgaaucuuuuuuagcau

SEQ ID NO: 302405 - RNA, 32 nt, Homo Sapiens
uuuuuggugaggugaggggggaggcaaauggc

SEQ ID NO: 302406 - RNA, 32 nt, Homo Sapiens
auauaaaauguuuugcuaaaucuuacaauuug

SEQ ID NO: 302407 - RNA, 32 nt, Homo Sapiens
aauuuuucuuuuucuuuuuaugaugaauaagg

SEQ ID NO: 302408 - RNA, 32 nt, Homo Sapiens
uuugcagggugcugccuaugggcccucugcuc

SEQ ID NO: 302409 - RNA, 32 nt, Homo Sapiens
ggauucuagguggagguugugcauguuguccu

SEQ ID NO: 302410 - RNA, 32 nt, Homo Sapiens
cacugccaaacacaagaguaggacacaucugu

SEQ ID NO: 302411 - RNA, 32 nt, Homo Sapiens
aaaaaucuuuuauuugugauauuuucagagac

SEQ ID NO: 302412 - RNA, 32 nt, Homo Sapiens
ucggggcagguugugaggccacagcaaugcug

SEQ ID NO: 302413 - RNA, 32 nt, Homo Sapiens
uucuuugccuuuuuuuuuuuuaacaacuuuca

SEQ ID NO: 302414 - RNA, 32 nt, Homo Sapiens
aaacaaaaacaucaaugaguaggcauuuuaua

SEQ ID NO: 302415 - RNA, 32 nt, Homo Sapiens
gaagugauauccuccccagaccaucugcuuug

SEQ ID NO: 302416 - RNA, 32 nt, Homo Sapiens
guuagagcuggacaacccuuugaaaugacaga

SEQ ID NO: 302417 - RNA, 32 nt, Homo Sapiens
auuuccagcuggaaucugcagccacccccauu

SEQ ID NO: 302418 - RNA, 32 nt, Homo Sapiens
ugucauuuuuaaauguuauauacaucucaagg

SEQ ID NO: 302419 - RNA, 32 nt, Homo Sapiens
ccuuaguuuuuucaucuguaaaacagggauaa

SEQ ID NO: 302420 - RNA, 32 nt, Homo Sapiens
accuauuuauuauuuucuuuugcauauccauu

SEQ ID NO: 302421 - RNA, 32 nt, Homo Sapiens
aaaaucucccucuaaccacgggucuguguggc

SEQ ID NO: 302422 - RNA, 32 nt, Homo Sapiens
cacugaggaccacaucacugcagacccaggga

SEQ ID NO: 302423 - RNA, 32 nt, Homo Sapiens
auauuucugcaugauuguuaaaguauauugag

SEQ ID NO: 302424 - RNA, 32 nt, Homo Sapiens
ggguggaggaggagcauuguccaggcauggcc

SEQ ID NO: 302425 - RNA, 32 nt, Homo Sapiens
uaccauuuccacuuacauaaugaaaaacaauu

SEQ ID NO: 302426 - RNA, 32 nt, Homo Sapiens
gcuccgcgcucagauuuuccuguuuucguugu

SEQ ID NO: 302427 - RNA, 32 nt, Homo Sapiens
gguggcaugaauugaucagcgagaaaggugug

SEQ ID NO: 302428 - RNA, 32 nt, Homo Sapiens
ggaaaaaguuuauuuugagaguuucuucuuca

SEQ ID NO: 302429 - RNA, 32 nt, Homo Sapiens
ccgagccugcgguccaacugcgcugcugccgg

SEQ ID NO: 302430 - RNA, 32 nt, Homo Sapiens
cuaguuaaggauuguuucuuuaaacaacuuuc

SEQ ID NO: 302431 - RNA, 32 nt, Homo Sapiens
ggcugacacucucaaaggucuucucggaugga

SEQ ID NO: 302432 - RNA, 32 nt, Homo Sapiens
gaagugaggauguaacucuacugaauaaucaa

SEQ ID NO: 302433 - RNA, 32 nt, Homo Sapiens
aaagaaugccuuacagaagagcauucucugau

SEQ ID NO: 302434 - RNA, 32 nt, Homo Sapiens
agguggcaucucggggccuccugugugcugug

SEQ ID NO: 302435 - RNA, 32 nt, Homo Sapiens
uauuugacuaaaucaauauauuguacagccua

SEQ ID NO: 302436 - RNA, 32 nt, Homo Sapiens
cccacaaggaggugcccggggaccucagggcc

SEQ ID NO: 302437 - RNA, 32 nt, Homo Sapiens
ugaauccuguucucugacauccguggagcccc

SEQ ID NO: 302438 - RNA, 32 nt, Homo Sapiens
ggagggcccugucuccacgguguccaagcaga

SEQ ID NO: 302439 - RNA, 30 nt, Homo Sapiens
cuaggggcuggaaugggggaaaguguugac

SEQ ID NO: 302440 - RNA, 32 nt, Homo Sapiens
auccacgggacaaaaacucaagaagaaauaag

SEQ ID NO: 302441 - RNA, 28 nt, Homo Sapiens
caggcucagguggccuccuggccuuucc

SEQ ID NO: 302442 - RNA, 32 nt, Homo Sapiens
agagcgcuagcuguguggugcacgggacuuua

SEQ ID NO: 302443 - RNA, 32 nt, Homo Sapiens
gacauccccccuccaucccagcccacuggacc

SEQ ID NO: 302444 - RNA, 29 nt, Homo Sapiens
agugaacuguguauguaugugugggguuu

SEQ ID NO: 302445 - RNA, 32 nt, Homo Sapiens
cauuugaggggagagggaacggaaauaaagga

SEQ ID NO: 302446 - RNA, 32 nt, Homo Sapiens
aaaaauacaaccugugaaaauuguggcaguua

SEQ ID NO: 302447 - RNA, 32 nt, Homo Sapiens
uguuacaaauauauuuauuuuguauagcuucu

SEQ ID NO: 302448 - RNA, 32 nt, Homo Sapiens
cgcgggcaggcucgcguggugcugggguugcu

SEQ ID NO: 302449 - RNA, 32 nt, Homo Sapiens
aacgauuuagaaaucuggacuggccagugacc

SEQ ID NO: 302450 - RNA, 32 nt, Homo Sapiens
cggggccccuggauuccugcaucugcauaugc

SEQ ID NO: 302451 - RNA, 32 nt, Homo Sapiens
gaacaaaaccugguuuucccuaagcaccuuau

SEQ ID NO: 302452 - RNA, 32 nt, Homo Sapiens
gagccacacuguggcgggucggcggcccucag

SEQ ID NO: 302453 - RNA, 32 nt, Homo Sapiens
aauuaaguucccucccuccagccagaaguuaa

SEQ ID NO: 302454 - RNA, 32 nt, Homo Sapiens
uauuuucaguaaaauguauggaucuaucuuuu

SEQ ID NO: 302455 - RNA, 32 nt, Homo Sapiens
cuuggaagaaggaaacggaagcugacauaaug

SEQ ID NO: 302456 - RNA, 32 nt, Homo Sapiens
ccuuguucucccugcaacccaggcccugccau

SEQ ID NO: 302457 - RNA, 32 nt, Homo Sapiens
agccaccuauuuuuacuuccuucucugaaaua

SEQ ID NO: 302458 - RNA, 32 nt, Homo Sapiens
augugcuauaguuuucacuccagucaucauuu

SEQ ID NO: 302459 - RNA, 32 nt, Homo Sapiens
uguccuccuccccuggacaaucuccucuugga

SEQ ID NO: 302460 - RNA, 31 nt, Homo Sapiens
ccuuaugugacacgagccagagccugcuggg

SEQ ID NO: 302461 - RNA, 32 nt, Homo Sapiens
gcuuagaguuggcacaugcugcuguguuuauu

SEQ ID NO: 302462 - RNA, 32 nt, Homo Sapiens
uucccucucgcucgcccuguuccuccucuagu

SEQ ID NO: 302463 - RNA, 32 nt, Homo Sapiens
uugccucaggccugcuggccuccugcugugaa

SEQ ID NO: 302464 - RNA, 32 nt, Homo Sapiens
ugugugacacagauugcauauuugggauugca

SEQ ID NO: 302465 - RNA, 32 nt, Homo Sapiens
aggugcggccggggaggcgcgcggaggcugga

SEQ ID NO: 302466 - RNA, 32 nt, Homo Sapiens
gagcgcgggugccuuggccgccugcagaucua

SEQ ID NO: 302467 - RNA, 32 nt, Homo Sapiens
gucauggccgcaguucagugugagauuuuuua

SEQ ID NO: 302468 - RNA, 32 nt, Homo Sapiens
gcacauauguacuuuacaguagauaaaauugu

SEQ ID NO: 302469 - RNA, 32 nt, Homo Sapiens
ggaguagggaauguuaugauuugauuugcaaa

SEQ ID NO: 302470 - RNA, 32 nt, Homo Sapiens
ucagacgaggccccguggcuccuccuuccucc

SEQ ID NO: 302471 - RNA, 32 nt, Homo Sapiens
ugaggaaaaaggaaaaggagauuuuggagucc

SEQ ID NO: 302472 - RNA, 32 nt, Homo Sapiens
acaaaauacuaaaaaagaggaaccuuaaugaa

SEQ ID NO: 302473 - RNA, 32 nt, Homo Sapiens
aagcgcaggcugcggggcgcggagucgggagg

SEQ ID NO: 302474 - RNA, 32 nt, Homo Sapiens
ccagguggacucaggagggaaccuggccccaa

SEQ ID NO: 302475 - RNA, 32 nt, Homo Sapiens
aagucucaguuucaaaagagcuucuccucauc

SEQ ID NO: 302476 - RNA, 32 nt, Homo Sapiens
ggaggggaaugggggcuccgcuggcgcuagag

SEQ ID NO: 302477 - RNA, 32 nt, Homo Sapiens
cagugggaagggggguguaauggcaaacgagg

SEQ ID NO: 302478 - RNA, 30 nt, Homo Sapiens
ggccgcagcaggcgccgguguccggaaagg

SEQ ID NO: 302479 - RNA, 32 nt, Homo Sapiens
ggggguuucugcauccgggucaaugcccagcu

SEQ ID NO: 302480 - RNA, 32 nt, Homo Sapiens
auguuuacaucuuagaaaaaacauagauagug

SEQ ID NO: 302481 - RNA, 32 nt, Homo Sapiens
uuaaaacuguacauuuaaaauugcuauguuac

SEQ ID NO: 302482 - RNA, 32 nt, Homo Sapiens
ugaggaccacucugcccucccgcggcccgggc

SEQ ID NO: 302483 - RNA, 32 nt, Homo Sapiens
cggcuccugcuugccccgcagccccggccccc

SEQ ID NO: 302484 - RNA, 32 nt, Homo Sapiens
agaguaugccauaacugagaaacuauggauau

SEQ ID NO: 302485 - RNA, 32 nt, Homo Sapiens
gauaaaauaaacuaaaacaacaaacauccuua

SEQ ID NO: 302486 - RNA, 32 nt, Homo Sapiens
cugggacccagcugauaacacguggugauggg

SEQ ID NO: 302487 - RNA, 32 nt, Homo Sapiens
guggugguucuuaauuuuuaauuuaguuuggg

SEQ ID NO: 302488 - RNA, 32 nt, Homo Sapiens
aucucuucucccuuugaagaaacuauacauuu

SEQ ID NO: 302489 - RNA, 32 nt, Homo Sapiens
aaauggcaaaauaaauaucuuuccaaggauca

SEQ ID NO: 302490 - RNA, 32 nt, Homo Sapiens
acccagacacugggcuaggcugcaacuuuauc

SEQ ID NO: 302491 - RNA, 32 nt, Homo Sapiens
aacuucagucccucaggcuggcagcugugcug

SEQ ID NO: 302492 - RNA, 32 nt, Homo Sapiens
cuuuuaagauuugaacuuguccucaaaccaag

SEQ ID NO: 302493 - RNA, 32 nt, Homo Sapiens
cuggggcaagaagccagaugggagaugagaua

SEQ ID NO: 302494 - RNA, 32 nt, Homo Sapiens
ggauuuccaaaaacuuugucuucaaauuuuaa

SEQ ID NO: 302495 - RNA, 32 nt, Homo Sapiens
cgcuugccgggcgcagaggcgggucaacggca

SEQ ID NO: 302496 - RNA, 32 nt, Homo Sapiens
gccacugccccggcuccagcuccagccccaca

SEQ ID NO: 302497 - RNA, 32 nt, Homo Sapiens
caucauuugucaagcaccuacuagaugccaga

SEQ ID NO: 302498 - RNA, 32 nt, Homo Sapiens
ucaaauggaaaacuauguuccucauucuaauc

SEQ ID NO: 302499 - RNA, 32 nt, Homo Sapiens
caccacacuccagccugggugacagagcgaga

SEQ ID NO: 302500 - RNA, 32 nt, Homo Sapiens
cacuacacuccagccugggugacagagugaga

SEQ ID NO: 302501 - RNA, 32 nt, Homo Sapiens
cacugcacuccagccugggugacagaguaaga

SEQ ID NO: 302502 - RNA, 32 nt, Homo Sapiens
cuuugagucauacauuuuuaugauuaugauua

SEQ ID NO: 302503 - RNA, 32 nt, Homo Sapiens
cuauaggacuauguuuucuucaucucuguaac

SEQ ID NO: 302504 - RNA, 32 nt, Homo Sapiens
cccugggaaugggaggaaccaggccacauucc

SEQ ID NO: 302505 - RNA, 29 nt, Homo Sapiens
uuucaaaagcgaagauauuuucuaaguug

SEQ ID NO: 302506 - RNA, 32 nt, Homo Sapiens
gaaaucaucaugcuaugauaaaacacagaagc

SEQ ID NO: 302507 - RNA, 32 nt, Homo Sapiens
ucagaagcauuuggugagagggguggaggugg

SEQ ID NO: 302508 - RNA, 32 nt, Homo Sapiens
agauccucgucauggaaaggugccaaacuguu

SEQ ID NO: 302509 - RNA, 32 nt, Homo Sapiens
uggagucgcccuugucgucgucguccugcucg

SEQ ID NO: 302510 - RNA, 32 nt, Homo Sapiens
gugcccuccuucccccaucccaagcugcugag

SEQ ID NO: 302511 - RNA, 32 nt, Homo Sapiens
aaguuguuuaacauauuuauaauuacuaugug

SEQ ID NO: 302512 - RNA, 32 nt, Homo Sapiens
augcauauacccuucaccuggauucaccacuu

SEQ ID NO: 302513 - RNA, 32 nt, Homo Sapiens
uuuaaaaaguuggcaaacgcugaaacgcacug

SEQ ID NO: 302514 - RNA, 32 nt, Homo Sapiens
caggagaaggguggagaggaggcaggggccga

SEQ ID NO: 302515 - RNA, 32 nt, Homo Sapiens
guggcaagcguuacuuccugugcacguagcca

SEQ ID NO: 302516 - RNA, 32 nt, Homo Sapiens
aacauuccagagauagguauuuuugguaggcu

SEQ ID NO: 302517 - RNA, 32 nt, Homo Sapiens
gaugggccuuuucuugaauaaaaguuaauaac

SEQ ID NO: 302518 - RNA, 32 nt, Homo Sapiens
cggguaccggggccggggcgccaugcggaggc

SEQ ID NO: 302519 - RNA, 32 nt, Homo Sapiens
ugacgcgcuccggagacgcucugcggguccug

SEQ ID NO: 302520 - RNA, 32 nt, Homo Sapiens
ugaaacuagguccugccuuucuguaucuuggg

SEQ ID NO: 302521 - RNA, 32 nt, Homo Sapiens
gucugacaucuguguccucacucuuaaccacu

SEQ ID NO: 302522 - RNA, 32 nt, Homo Sapiens
gggaggcgcggaguggagccgcagccagcccc

SEQ ID NO: 302523 - RNA, 32 nt, Homo Sapiens
ugauucaggagccccaggaucuuacgguugau

SEQ ID NO: 302524 - RNA, 32 nt, Homo Sapiens
gcucuuaucaaaacagaagaaggcuacauuug

SEQ ID NO: 302525 - RNA, 32 nt, Homo Sapiens
cugugcauuuauaaguuuguuuacuaguugac

SEQ ID NO: 302526 - RNA, 32 nt, Homo Sapiens
cgauaggagagccgauggccaaguggggugag

SEQ ID NO: 302527 - RNA, 32 nt, Homo Sapiens
ugccaaaacugggaaguugaaggaagcccaag

SEQ ID NO: 302528 - RNA, 32 nt, Homo Sapiens
aaaguugaguuuucaucuuugacuccaaaaug

SEQ ID NO: 302529 - RNA, 32 nt, Homo Sapiens
ccaggaggaaaacaguuccguucauucuuuca

SEQ ID NO: 302530 - RNA, 32 nt, Homo Sapiens
uaucaagaaugaugauguugaaaaauaguuua

SEQ ID NO: 302531 - RNA, 32 nt, Homo Sapiens
aggcuuaaacccauauuguaaaacagguagaa

SEQ ID NO: 302532 - RNA, 32 nt, Homo Sapiens
aaaucuucgguaccaguguaccagagaauggc

SEQ ID NO: 302533 - RNA, 32 nt, Homo Sapiens
gucagcgcgcagcccggcacccgcagccugca

SEQ ID NO: 302534 - RNA, 32 nt, Homo Sapiens
uaaugcuacauaucaauaacuaccaucauggu

SEQ ID NO: 302535 - RNA, 32 nt, Homo Sapiens
guguggcggacagaggggcugcugccccugga

SEQ ID NO: 302536 - RNA, 32 nt, Homo Sapiens
gaucagugcaggugguuagcucaaccaaugga

SEQ ID NO: 302537 - RNA, 32 nt, Homo Sapiens
uuacugagguccuggaacaucagguuuccugg

SEQ ID NO: 302538 - RNA, 32 nt, Homo Sapiens
cccccaccccgccuggcgaccggggcagaagg

SEQ ID NO: 302539 - RNA, 32 nt, Homo Sapiens
ccugcgggccaccugugccccgagggcggcca

SEQ ID NO: 302540 - RNA, 32 nt, Homo Sapiens
ugauccagaacaguggcucguaucccaaaucu

SEQ ID NO: 302541 - RNA, 32 nt, Homo Sapiens
gccucuuacuugccacuguuagguuggaguua

SEQ ID NO: 302542 - RNA, 32 nt, Homo Sapiens
aauuaaaagucuuuuuuuuccuggaaaaaaaa

SEQ ID NO: 302543 - RNA, 31 nt, Homo Sapiens
uuugucaguaacauguaguuguuuaguuaua

SEQ ID NO: 302544 - RNA, 32 nt, Homo Sapiens
gggaaggaggauguaauuccaucauauauacu

SEQ ID NO: 302545 - RNA, 31 nt, Homo Sapiens
uggggcugggcccuccugcccccgcccaucc

SEQ ID NO: 302546 - RNA, 32 nt, Homo Sapiens
ugcauuuauuauaaaaucuuauguaguuuuua

SEQ ID NO: 302547 - RNA, 32 nt, Homo Sapiens
uacugagacuuugugggccucagacaccagga

SEQ ID NO: 302548 - RNA, 32 nt, Homo Sapiens
augccuuuuuaaaauuuaauuuucuagcuggc

SEQ ID NO: 302549 - RNA, 32 nt, Homo Sapiens
gauggaagaagcugagcaugucuuaccaaaaa

SEQ ID NO: 302550 - RNA, 32 nt, Homo Sapiens
aucauuuuuauugacaaaguauagaaacgggg

SEQ ID NO: 302551 - RNA, 32 nt, Homo Sapiens
ucugcucauuuauaaugagagucgugccgugc

SEQ ID NO: 302552 - RNA, 32 nt, Homo Sapiens
cugaaacccucuaucucuccggcauccuggca

SEQ ID NO: 302553 - RNA, 32 nt, Homo Sapiens
gcugcuggacuguaccagacgucugucccagu

SEQ ID NO: 302554 - RNA, 32 nt, Homo Sapiens
gauaaaaacacuuggaagcucugugauuucaa

SEQ ID NO: 302555 - RNA, 32 nt, Homo Sapiens
uuuguuuuugcuaugaauauaauuacaguauu

SEQ ID NO: 302556 - RNA, 32 nt, Homo Sapiens
ucaucgccuccauggggacaguggccauggac

SEQ ID NO: 302557 - RNA, 32 nt, Homo Sapiens
cuugcuuccuuccuccuggcugcacagacacc

SEQ ID NO: 302558 - RNA, 32 nt, Homo Sapiens
cagcacaucacaguggaccuucugccuccucc

SEQ ID NO: 302559 - RNA, 32 nt, Homo Sapiens
uuggcuaaauuaagcagugugacaugcauccc

SEQ ID NO: 302560 - RNA, 32 nt, Homo Sapiens
gcgcccucgcugacuccgggcgcgcccagcag

SEQ ID NO: 302561 - RNA, 32 nt, Homo Sapiens
ucuuuuuggauauuuauuauguguguuuugug

SEQ ID NO: 302562 - RNA, 32 nt, Homo Sapiens
ccucgcucucaccucccuccuccugagucggu

SEQ ID NO: 302563 - RNA, 32 nt, Homo Sapiens
gguagggaggcuuuuucuuauuuccaaauacu

SEQ ID NO: 302564 - RNA, 32 nt, Homo Sapiens
ucuuugcuugcagcccuccguccugcugaaaa

SEQ ID NO: 302565 - RNA, 32 nt, Homo Sapiens
cccgcacgccucuucccacaccugucagcuuc

SEQ ID NO: 302566 - RNA, 32 nt, Homo Sapiens
cuuguucagggcuuuucuuaauacugaacgua

SEQ ID NO: 302567 - RNA, 32 nt, Homo Sapiens
cccagggagucuccaagagccucgauccucug

SEQ ID NO: 302568 - RNA, 32 nt, Homo Sapiens
ugaauucuuuacaacuaaauaacacagauauu

SEQ ID NO: 302569 - RNA, 32 nt, Homo Sapiens
ggccggagacaggccgaaccuccggagcugcu

SEQ ID NO: 302570 - RNA, 32 nt, Homo Sapiens
ucccagguggagcucauguuugugauccucua

SEQ ID NO: 302571 - RNA, 32 nt, Homo Sapiens
auguacaaaguaucacccuucuccaugcccca

SEQ ID NO: 302572 - RNA, 32 nt, Homo Sapiens
cagauguggacauagcccagguccugggaagg

SEQ ID NO: 302573 - RNA, 32 nt, Homo Sapiens
caguuggcgagggacacgaaggcugcggccgg

SEQ ID NO: 302574 - RNA, 32 nt, Homo Sapiens
aagggaagccccacugauuuacucccucucuu

SEQ ID NO: 302575 - RNA, 32 nt, Homo Sapiens
aggaccccagggugggagggaaggugcggugg

SEQ ID NO: 302576 - RNA, 32 nt, Homo Sapiens
uaugugccuuuuuguuuuuguaaaaaaggaac

SEQ ID NO: 302577 - RNA, 32 nt, Homo Sapiens
agccuuacagccccugaguccuacacccagaa

SEQ ID NO: 302578 - RNA, 32 nt, Homo Sapiens
ggggguggugccugcuggggccuagaggggga

SEQ ID NO: 302579 - RNA, 32 nt, Homo Sapiens
uccugaucuccaaaucgaccuaucucgacuag

SEQ ID NO: 302580 - RNA, 32 nt, Homo Sapiens
uaaggauucucaugaagugccauagacuguac

SEQ ID NO: 302581 - RNA, 32 nt, Homo Sapiens
aauauuuugucaauaaagauuuaucaauaugc

SEQ ID NO: 302582 - RNA, 32 nt, Homo Sapiens
auauuuucucucuccaguuucaucucuaaguu

SEQ ID NO: 302583 - RNA, 32 nt, Homo Sapiens
agagagaugucagauugauuugaaaggugugc

SEQ ID NO: 302584 - RNA, 32 nt, Homo Sapiens
ggucagucaauacacaaaacacacuaggggcc

SEQ ID NO: 302585 - RNA, 32 nt, Homo Sapiens
ucagcacuggacucacuacaagagggagaagc

SEQ ID NO: 302586 - RNA, 32 nt, Homo Sapiens
aaaaagaaaaagaagggaaaauugccuaagaa

SEQ ID NO: 302587 - RNA, 32 nt, Homo Sapiens
guucuucuuugaagaaauacagcuuggugaag

SEQ ID NO: 302588 - RNA, 32 nt, Homo Sapiens
uagagacacuggagcaagggccccacagugug

SEQ ID NO: 302589 - RNA, 32 nt, Homo Sapiens
aacccugaggcccccgaguccuggcaaacugc

SEQ ID NO: 302590 - RNA, 32 nt, Homo Sapiens
cauuggaaggauuucugccccuccaagcuucc

SEQ ID NO: 302591 - RNA, 32 nt, Homo Sapiens
caccucccucgcgucugugccugccucaacgc

SEQ ID NO: 302592 - RNA, 32 nt, Homo Sapiens
ucugcaguggcucuuacaaaacucuguuccca

SEQ ID NO: 302593 - RNA, 32 nt, Homo Sapiens
gagcaugcgcgagagccgccccggagcgcccc

SEQ ID NO: 302594 - RNA, 32 nt, Homo Sapiens
caguguacuuuguuaaaaacacugcugaggcu

SEQ ID NO: 302595 - RNA, 29 nt, Homo Sapiens
auaaacgugguguuuuauuuucuggguua

SEQ ID NO: 302596 - RNA, 32 nt, Homo Sapiens
ugcgccugcuuugaugugaacugguauagaca

SEQ ID NO: 302597 - RNA, 32 nt, Homo Sapiens
ccuugggcgcccggccccugggacgccugugg

SEQ ID NO: 302598 - RNA, 30 nt, Homo Sapiens
gacggccaggccgugccgccgugugcccuc

SEQ ID NO: 302599 - RNA, 32 nt, Homo Sapiens
uuaauucaaauuuaugccaauaccuucccaaa

SEQ ID NO: 302600 - RNA, 32 nt, Homo Sapiens
cucccaaguagcuagcugggacuacaggcacg

SEQ ID NO: 302601 - RNA, 32 nt, Homo Sapiens
aaguccgagaggagaccccccucaccugacgu

SEQ ID NO: 302602 - RNA, 32 nt, Homo Sapiens
ccagcauggcugggcccaggaugcuugucucu

SEQ ID NO: 302603 - RNA, 30 nt, Homo Sapiens
ggacuagagaagcuugagcacccccgaguu

SEQ ID NO: 302604 - RNA, 32 nt, Homo Sapiens
uauagugauuuucagccucaucagacugaaug

SEQ ID NO: 302605 - RNA, 32 nt, Homo Sapiens
gcaaggccccucuauuugcuauuucucuuuac

SEQ ID NO: 302606 - RNA, 32 nt, Homo Sapiens
gucguuuccgcgaugcugccucugcugcgcug

SEQ ID NO: 302607 - RNA, 32 nt, Homo Sapiens
aacugaggcccaaagcacuugcuuacauccuc

SEQ ID NO: 302608 - RNA, 32 nt, Homo Sapiens
agacaauaauuuccuaccucccaagggagcag

SEQ ID NO: 302609 - RNA, 32 nt, Homo Sapiens
uccacccaaggugggauuggccuuccuuaggc

SEQ ID NO: 302610 - RNA, 32 nt, Homo Sapiens
gugucugucaacaaauacaccaaaaccauuuu

SEQ ID NO: 302611 - RNA, 32 nt, Homo Sapiens
acaauuagugacuuugaggccuuagaaagagc

SEQ ID NO: 302612 - RNA, 32 nt, Homo Sapiens
auggagccagcauguaucucaacaacucaccu

SEQ ID NO: 302613 - RNA, 32 nt, Homo Sapiens
uaaccuuggcagaagccaaaacagucagacag

SEQ ID NO: 302614 - RNA, 32 nt, Homo Sapiens
cugcguggaaggugcugcagguccuugcacgc

SEQ ID NO: 302615 - RNA, 32 nt, Homo Sapiens
ugaggagcgugguucuaccacccccugggcau

SEQ ID NO: 302616 - RNA, 32 nt, Homo Sapiens
ucgccgcagcccggugcccccggcucugcggg

SEQ ID NO: 302617 - RNA, 32 nt, Homo Sapiens
uuuuucaaggugcuguuaaaagaaagucaugu

SEQ ID NO: 302618 - RNA, 32 nt, Homo Sapiens
cuggaguuauuuaaccacuauguucaguauuu

SEQ ID NO: 302619 - RNA, 32 nt, Homo Sapiens
aaggagagaagcuguuuuggugagauugguuc

SEQ ID NO: 302620 - RNA, 32 nt, Homo Sapiens
ggacauacauucaaacuaauuuuaucacaagg

SEQ ID NO: 302621 - RNA, 32 nt, Homo Sapiens
caggcaggugauggaaauguggaugggcaaag

SEQ ID NO: 302622 - RNA, 32 nt, Homo Sapiens
ucuaccuaaggaccagaauuuuuuaucuagag

SEQ ID NO: 302623 - RNA, 32 nt, Homo Sapiens
auaaacugaguaauguugauaauuagauaauu

SEQ ID NO: 302624 - RNA, 32 nt, Homo Sapiens
cugcgagaugacccugcaggaauaccacuaug

SEQ ID NO: 302625 - RNA, 32 nt, Homo Sapiens
ugauuucagagguguuuguaucauugcucuaa

SEQ ID NO: 302626 - RNA, 32 nt, Homo Sapiens
ccgcucgcgggccugcgccucggcguccccga

SEQ ID NO: 302627 - RNA, 32 nt, Homo Sapiens
ccccggccaagcccaacuccggaucucgcucu

SEQ ID NO: 302628 - RNA, 32 nt, Homo Sapiens
gcagcagcugugcuucaguggagcaggugguu

SEQ ID NO: 302629 - RNA, 32 nt, Homo Sapiens
gcccuggagauuacaguauacuuaggauuuuu

SEQ ID NO: 302630 - RNA, 32 nt, Homo Sapiens
ucuguucaaaacacuuuuaacaaaauuaauuc

SEQ ID NO: 302631 - RNA, 32 nt, Homo Sapiens
ugagucugggggccugcccccgagggcacugg

SEQ ID NO: 302632 - RNA, 32 nt, Homo Sapiens
caguugguaauuuaaaaguacacuucacuuca

SEQ ID NO: 302633 - RNA, 32 nt, Homo Sapiens
cccagagcggggccagagcggcgggucuaugu

SEQ ID NO: 302634 - RNA, 32 nt, Homo Sapiens
ccccaccagacgggacuccccgcccccaauug

SEQ ID NO: 302635 - RNA, 30 nt, Homo Sapiens
ggggaggcuggcgcaaacgcagcggguggc

SEQ ID NO: 302636 - RNA, 32 nt, Homo Sapiens
agaaagugcucgcucucacccagcacaucucu

SEQ ID NO: 302637 - RNA, 32 nt, Homo Sapiens
uggugugcaccuguaguccuaguuacuucugg

SEQ ID NO: 302638 - RNA, 32 nt, Homo Sapiens
uauuuuaaguaauuauacuaauuaugagagug

SEQ ID NO: 302639 - RNA, 32 nt, Homo Sapiens
gcugaggcgggugaggugaggagcagccccuc

SEQ ID NO: 302640 - RNA, 27 nt, Homo Sapiens
acagcguacuaucccagccccccaggu

SEQ ID NO: 302641 - RNA, 32 nt, Homo Sapiens
uuugacaacugacuucuguuuccuuuucuaag

SEQ ID NO: 302642 - RNA, 32 nt, Homo Sapiens
ccagcacccagcuuaaccccugccaucccaug

SEQ ID NO: 302643 - RNA, 32 nt, Homo Sapiens
guacaacaaaaaucuuuguaaauaaaaucuua

SEQ ID NO: 302644 - RNA, 32 nt, Homo Sapiens
gugcaguugcuguuuacuugaauaguauugug

SEQ ID NO: 302645 - RNA, 32 nt, Homo Sapiens
cacaaggugaggcugugccuucuggugccagg

SEQ ID NO: 302646 - RNA, 32 nt, Homo Sapiens
uuuuguuuuuauuguuuccuuuuuuacaguaa

SEQ ID NO: 302647 - RNA, 32 nt, Homo Sapiens
acagaagguggaugaagugguggacugccccu

SEQ ID NO: 302648 - RNA, 32 nt, Homo Sapiens
cauacaggagaaugauggaaggaagggaggaa

SEQ ID NO: 302649 - RNA, 32 nt, Homo Sapiens
uagauacacaauuuugucaguuuacuuacagu

SEQ ID NO: 302650 - RNA, 32 nt, Homo Sapiens
ccucgcccucuaccuguccccucccccuuugg

SEQ ID NO: 302651 - RNA, 32 nt, Homo Sapiens
ccaaacaacuugguugugaaccaacugccuua

SEQ ID NO: 302652 - RNA, 30 nt, Homo Sapiens
ccucccugcgcgcagacccaggggacucug

SEQ ID NO: 302653 - RNA, 32 nt, Homo Sapiens
cuggagccucauuggccggcccggggcgccgg

SEQ ID NO: 302654 - RNA, 28 nt, Homo Sapiens
uggaaaguggcuaugcaguuugaauauc

SEQ ID NO: 302655 - RNA, 32 nt, Homo Sapiens
uugcccugggggagucugagggcgcgguccuu

SEQ ID NO: 302656 - RNA, 32 nt, Homo Sapiens
aauauuuggaauauuuaaaucuaguaaaagaa

SEQ ID NO: 302657 - RNA, 32 nt, Homo Sapiens
gcagcuggccccaggccccuagagccccgaga

SEQ ID NO: 302658 - RNA, 32 nt, Homo Sapiens
ugcugcuuuccacagugguugcaucuguuuac

SEQ ID NO: 302659 - RNA, 32 nt, Homo Sapiens
cgccacuaucgcgccaucaucuucgaggaucu

SEQ ID NO: 302660 - RNA, 32 nt, Homo Sapiens
ugaggcucuuucuauaaauacauauuguuuaa

SEQ ID NO: 302661 - RNA, 32 nt, Homo Sapiens
aauggaggagucugaggcccugguccaucaac

SEQ ID NO: 302662 - RNA, 32 nt, Homo Sapiens
cuccuuugcauuccaugauuuuacagagaauc

SEQ ID NO: 302663 - RNA, 32 nt, Homo Sapiens
aagcuucuugcugccaggcccacacaucccca

SEQ ID NO: 302664 - RNA, 30 nt, Homo Sapiens
aucuggggggauggaaagcaaaauaaagga

SEQ ID NO: 302665 - RNA, 32 nt, Homo Sapiens
ggacgccguucucucccgcggaauucagguuu

SEQ ID NO: 302666 - RNA, 32 nt, Homo Sapiens
cucggugcuccucaggccccagcgcccggcac

SEQ ID NO: 302667 - RNA, 32 nt, Homo Sapiens
ggaccccugcagcugcagacaucugcuucacc

SEQ ID NO: 302668 - RNA, 32 nt, Homo Sapiens
gucagucaagaucugauguggcuauucaaaua

SEQ ID NO: 302669 - RNA, 32 nt, Homo Sapiens
aagcuccgucugacacaugaucaauagcccgu

SEQ ID NO: 302670 - RNA, 32 nt, Homo Sapiens
gacgccgcgcuccagcagcugcugccgcccag

SEQ ID NO: 302671 - RNA, 32 nt, Homo Sapiens
ggacugcuggaaccuggcugugcgcgcugucg

SEQ ID NO: 302672 - RNA, 32 nt, Homo Sapiens
gagcggcgcgcgcggagguguccggcggccag

SEQ ID NO: 302673 - RNA, 32 nt, Homo Sapiens
augcuugguccggagagcugccuuggacucuc

SEQ ID NO: 302674 - RNA, 32 nt, Homo Sapiens
ggagccuccgucugcuuguucccacaggccuc

SEQ ID NO: 302675 - RNA, 32 nt, Homo Sapiens
uguggaaaacccuauaaauguaaaaaauguag

SEQ ID NO: 302676 - RNA, 32 nt, Homo Sapiens
cuauggcacugacuacaggccauguccaggcc

SEQ ID NO: 302677 - RNA, 32 nt, Homo Sapiens
cucgcgggccggagcgcggagcgcugccccag

SEQ ID NO: 302678 - RNA, 32 nt, Homo Sapiens
ugugcccacccuccccaggugcuggguccaug

SEQ ID NO: 302679 - RNA, 32 nt, Homo Sapiens
guauuugauaauaucccugucuccaugguugg

SEQ ID NO: 302680 - RNA, 32 nt, Homo Sapiens
uauuuaacagacguguccugguaaauaugauu

SEQ ID NO: 302681 - RNA, 32 nt, Homo Sapiens
uacgguuuaaugggcauagaauuucaguuuug

SEQ ID NO: 302682 - RNA, 32 nt, Homo Sapiens
ccggucagcuggggcgcagcaugcccucugcu

SEQ ID NO: 302683 - RNA, 32 nt, Homo Sapiens
aaguauagcucuuuuccuaccugaacucuucc

SEQ ID NO: 302684 - RNA, 32 nt, Homo Sapiens
agggugacucgcguaccgugcggcugcugaag

SEQ ID NO: 302685 - RNA, 32 nt, Homo Sapiens
aaauaaagacccuggaggaggugggaucggag

SEQ ID NO: 302686 - RNA, 32 nt, Homo Sapiens
agggcuccuccauggugcugcauugaguccag

SEQ ID NO: 302687 - RNA, 32 nt, Homo Sapiens
ucacuuuaaaaauuauuuuccacccuugcaaa

SEQ ID NO: 302688 - RNA, 32 nt, Homo Sapiens
cuuaauccauuguuuaaauuuacaacuuaacu

SEQ ID NO: 302689 - RNA, 32 nt, Homo Sapiens
uuccgacgcgugaccccggcgcgcuagcgucc

SEQ ID NO: 302690 - RNA, 32 nt, Homo Sapiens
aaaguucaguuauagaacuuuccauacuucca

SEQ ID NO: 302691 - RNA, 32 nt, Homo Sapiens
aaaaugucaguuguaauuuagccucugaucag

SEQ ID NO: 302692 - RNA, 32 nt, Homo Sapiens
uugugaacuuaaacagaaacacauaaagguca

SEQ ID NO: 302693 - RNA, 32 nt, Homo Sapiens
agaaucccccauugucccuccuccuaugucuc

SEQ ID NO: 302694 - RNA, 32 nt, Homo Sapiens
uuaguugugcgcgcccuuagugcgcggaacca

SEQ ID NO: 302695 - RNA, 32 nt, Homo Sapiens
cagacacuaaacgaacuuaacuguauauaagc

SEQ ID NO: 302696 - RNA, 32 nt, Homo Sapiens
gguuugcuccagcauccgguagucuuuaaaca

SEQ ID NO: 302697 - RNA, 32 nt, Homo Sapiens
aaacucuccuacacuuccauuaacuuagcaug

SEQ ID NO: 302698 - RNA, 32 nt, Homo Sapiens
guauuuacugaaugaugaauuaauauauuuau

SEQ ID NO: 302699 - RNA, 32 nt, Homo Sapiens
cacggccccgcggucccggucccggccgcauc

SEQ ID NO: 302700 - RNA, 32 nt, Homo Sapiens
ucugcagcugggugaccagagccccgggcacg

SEQ ID NO: 302701 - RNA, 32 nt, Homo Sapiens
aguuuuguacuauugguguguuggugaauuuu

SEQ ID NO: 302702 - RNA, 32 nt, Homo Sapiens
cacaauggacacguuucaaaacaucacguugu

SEQ ID NO: 302703 - RNA, 32 nt, Homo Sapiens
aucuucuguuuaucgguugaaugccacagauu

SEQ ID NO: 302704 - RNA, 32 nt, Homo Sapiens
cugcagaggauacagcuuuccauguggcucag

SEQ ID NO: 302705 - RNA, 32 nt, Homo Sapiens
guggcuccucuguuuuacauacucauuaguaa

SEQ ID NO: 302706 - RNA, 32 nt, Homo Sapiens
ggcucucaggguggcuucugcguccccgccgc

SEQ ID NO: 302707 - RNA, 32 nt, Homo Sapiens
uguuaaaaucauagaaagaucuuuuauuuuuu

SEQ ID NO: 302708 - RNA, 32 nt, Homo Sapiens
auggcaugccagaguucaacacuguugcucuu

SEQ ID NO: 302709 - RNA, 32 nt, Homo Sapiens
ggccugcgugacugaaucacagcuuugguccc

SEQ ID NO: 302710 - RNA, 32 nt, Homo Sapiens
ugguucugcacucucagcaugcaguccgaaag

SEQ ID NO: 302711 - RNA, 32 nt, Homo Sapiens
agggacgggaccagcccuuguucuguucccua

SEQ ID NO: 302712 - RNA, 32 nt, Homo Sapiens
accuggaggcaagagggaggguacagagccuc

SEQ ID NO: 302713 - RNA, 30 nt, Homo Sapiens
gauucccuggacugguuggucggggacagg

SEQ ID NO: 302714 - RNA, 32 nt, Homo Sapiens
gcaugaagauaaagaggaagcuauucagacuu

SEQ ID NO: 302715 - RNA, 32 nt, Homo Sapiens
gcgcgcgcucugcgagcuggauguccaggcug

SEQ ID NO: 302716 - RNA, 32 nt, Homo Sapiens
ggaggccgcacgaugccuggaguuacuguaaa

SEQ ID NO: 302717 - RNA, 32 nt, Homo Sapiens
uuucuuucuccucgucggcccgagagcaggaa

SEQ ID NO: 302718 - RNA, 32 nt, Homo Sapiens
uaaaugcaucaaagucugaaauuuauaaguau

SEQ ID NO: 302719 - RNA, 32 nt, Homo Sapiens
ccuaaaagauaguaaguagaaauauuugucuc

SEQ ID NO: 302720 - RNA, 32 nt, Homo Sapiens
cuugccguggaagagacaguugugagauuccc

SEQ ID NO: 302721 - RNA, 32 nt, Homo Sapiens
augggggugggucuuuccugugcuguucuccu

SEQ ID NO: 302722 - RNA, 32 nt, Homo Sapiens
aguguguacagcaaauucuauagugcuucuga

SEQ ID NO: 302723 - RNA, 32 nt, Homo Sapiens
auuaggaaagacuguauuuccuaguaagguca

SEQ ID NO: 302724 - RNA, 32 nt, Homo Sapiens
cccuuacagggcccccucccccgggaaugcgc

SEQ ID NO: 302725 - RNA, 32 nt, Homo Sapiens
gacccagcacgcugaggagagggccuauacaa

SEQ ID NO: 302726 - RNA, 32 nt, Homo Sapiens
uuaauuugaaccaugauuuugcuagaaauaga

SEQ ID NO: 302727 - RNA, 32 nt, Homo Sapiens
guaagucuuaauguuugucucaucuacuacau

SEQ ID NO: 302728 - RNA, 32 nt, Homo Sapiens
guguagagaaauauuucuuuuccuguguuaau

SEQ ID NO: 302729 - RNA, 32 nt, Homo Sapiens
acggccgaggccucggccuccuccucuggggc

SEQ ID NO: 302730 - RNA, 30 nt, Homo Sapiens
uauuggcucugcucaaauguugcaggauac

SEQ ID NO: 302731 - RNA, 32 nt, Homo Sapiens
cacguguggcuggagaccaaggugauggcacu

SEQ ID NO: 302732 - RNA, 32 nt, Homo Sapiens
ugggacucccagcagagcccaccagccagccc

SEQ ID NO: 302733 - RNA, 32 nt, Homo Sapiens
gcccccugccugcccugucaggaggcagaagg

SEQ ID NO: 302734 - RNA, 32 nt, Homo Sapiens
ggcccagccacgaugauacauuucauauugcu

SEQ ID NO: 302735 - RNA, 32 nt, Homo Sapiens
cuuggcagaaaagaaaauaaggucuaaaggaa

SEQ ID NO: 302736 - RNA, 32 nt, Homo Sapiens
cucggcggguggcggugguggccguagcgguu

SEQ ID NO: 302737 - RNA, 32 nt, Homo Sapiens
auuccuuugaaauaauucauauuuucauugac

SEQ ID NO: 302738 - RNA, 32 nt, Homo Sapiens
uacuucauggucuggguagaguauaucaaacc

SEQ ID NO: 302739 - RNA, 32 nt, Homo Sapiens
uaccccagacuugccucuggggccugauuaaa

SEQ ID NO: 302740 - RNA, 30 nt, Homo Sapiens
aaguggaaauaaaaugucuuuaucacuugg

SEQ ID NO: 302741 - RNA, 32 nt, Homo Sapiens
uuccuuuccagaagacuucaaagcugacugcc

SEQ ID NO: 302742 - RNA, 32 nt, Homo Sapiens
ccucggcgccuggggcagcgggcccggaaacc

SEQ ID NO: 302743 - RNA, 32 nt, Homo Sapiens
gguacguagugggagaggggugugauggggca

SEQ ID NO: 302744 - RNA, 32 nt, Homo Sapiens
ccuguggagaugcacaguucuaccauucaaaa

SEQ ID NO: 302745 - RNA, 32 nt, Homo Sapiens
cgcucgccggacgaagaagagaagggcaguug

SEQ ID NO: 302746 - RNA, 32 nt, Homo Sapiens
aagcagugagaagccagacggagacccacaca

SEQ ID NO: 302747 - RNA, 32 nt, Homo Sapiens
auuuccugcauaccauuagaagaauuuuauuu

SEQ ID NO: 302748 - RNA, 32 nt, Homo Sapiens
uagacagauggccuuauagauuuggaaaauga

SEQ ID NO: 302749 - RNA, 32 nt, Homo Sapiens
acuugucuucagaacuuggauuucuuaaauaa

SEQ ID NO: 302750 - RNA, 32 nt, Homo Sapiens
gaccccucggcgccuggccuggccggugcugc

SEQ ID NO: 302751 - RNA, 32 nt, Homo Sapiens
uuuucuggaugcucccuuacuuucucagcgcu

SEQ ID NO: 302752 - RNA, 32 nt, Homo Sapiens
aaucagaauuguaauuauguucuccagaggcc

SEQ ID NO: 302753 - RNA, 32 nt, Homo Sapiens
auugacauuucccucucuuuccuuuauuucga

SEQ ID NO: 302754 - RNA, 31 nt, Homo Sapiens
gugcuuagaaauaaacagguuucacguggac

SEQ ID NO: 302755 - RNA, 31 nt, Homo Sapiens
ugcagccgcuucggugcuccaagaccagaga

SEQ ID NO: 302756 - RNA, 28 nt, Homo Sapiens
aggaggugggcucccaggaugguaccau

SEQ ID NO: 302757 - RNA, 32 nt, Homo Sapiens
uggaacaccaaggcaaaaacaccaaccugcua

SEQ ID NO: 302758 - RNA, 32 nt, Homo Sapiens
guguuuugggguugccaucggcccguaguaug

SEQ ID NO: 302759 - RNA, 32 nt, Homo Sapiens
ccaggaagcagcuugcaaccacuagccugggg

SEQ ID NO: 302760 - RNA, 32 nt, Homo Sapiens
uuauuguagcagcugguagaguggcuucuuca

SEQ ID NO: 302761 - RNA, 32 nt, Homo Sapiens
gagccagcugggccuguccagcagccaccugu

SEQ ID NO: 302762 - RNA, 32 nt, Homo Sapiens
gugcgacggccugagcgcucacgcucggugca

SEQ ID NO: 302763 - RNA, 32 nt, Homo Sapiens
guguuuuuuuaauuuucuuuuuaaauuguuua

SEQ ID NO: 302764 - RNA, 32 nt, Homo Sapiens
uuuuguacuagaauuugcuaacuuguaauauu

SEQ ID NO: 302765 - RNA, 32 nt, Homo Sapiens
agugacuauccgaugcagggccaggcacugaa

SEQ ID NO: 302766 - RNA, 32 nt, Homo Sapiens
gagaugagcauguucauuaaaaaacaagucaa

SEQ ID NO: 302767 - RNA, 32 nt, Homo Sapiens
uacagaguuauucugguugugaauaucuugag

SEQ ID NO: 302768 - RNA, 31 nt, Homo Sapiens
gaggcccaagccacugugccuggcccuuuau

SEQ ID NO: 302769 - RNA, 32 nt, Homo Sapiens
uuacuugcuucucuagcucucuaggccucucc

SEQ ID NO: 302770 - RNA, 32 nt, Homo Sapiens
ugaacuggaaaacaccuugucugcauucacuu

SEQ ID NO: 302771 - RNA, 32 nt, Homo Sapiens
guguguugguauuuuuaaauuguuacaguauc

SEQ ID NO: 302772 - RNA, 32 nt, Homo Sapiens
ccucuacagacaggggcgcugcugcagaugcu

SEQ ID NO: 302773 - RNA, 32 nt, Homo Sapiens
ucaccaguguuugccucugugcuuccacugug

SEQ ID NO: 302774 - RNA, 32 nt, Homo Sapiens
gguuguaaaauagacuccauggagacucuuag

SEQ ID NO: 302775 - RNA, 32 nt, Homo Sapiens
ggagcaaugcuggucagcgcugcccagacucc

SEQ ID NO: 302776 - RNA, 32 nt, Homo Sapiens
gauccuccuugacgaguuuuguuuuucaaaau

SEQ ID NO: 302777 - RNA, 32 nt, Homo Sapiens
uucugguuaaaagcuuccuaacggguaacaga

SEQ ID NO: 302778 - RNA, 32 nt, Homo Sapiens
uuuacuccauucuccauagauuguuucuuuga

SEQ ID NO: 302779 - RNA, 32 nt, Homo Sapiens
gcggccgaggacccggcucccgcgcaggacgg

SEQ ID NO: 302780 - RNA, 32 nt, Homo Sapiens
auuaucuuugcugagcagcuuuugaaugcuaa

SEQ ID NO: 302781 - RNA, 32 nt, Homo Sapiens
ccccuucccuucuuggaagucaaguguaggua

SEQ ID NO: 302782 - RNA, 32 nt, Homo Sapiens
ggaagguggggaggcugcgggaggaagagaug

SEQ ID NO: 302783 - RNA, 32 nt, Homo Sapiens
ucagauuuguaacauuuacucuguaaauaaaa

SEQ ID NO: 302784 - RNA, 32 nt, Homo Sapiens
accccuauguaguuuuuaaaacacuggcaaug

SEQ ID NO: 302785 - RNA, 32 nt, Homo Sapiens
gcuuacagaaugggagaaaauauuugcaaauc

SEQ ID NO: 302786 - RNA, 32 nt, Homo Sapiens
uacuggauaaaacuuaaagccaguuucuauuc

SEQ ID NO: 302787 - RNA, 32 nt, Homo Sapiens
agagcaauuuguuuaaugagugguucagccau

SEQ ID NO: 302788 - RNA, 32 nt, Homo Sapiens
gagaccaauuuaauuucauuuauaagaacaua

SEQ ID NO: 302789 - RNA, 32 nt, Homo Sapiens
ugcuuagauguuccaguaaucuaauauggcca

SEQ ID NO: 302790 - RNA, 32 nt, Homo Sapiens
auugagacuuguguagaugcuucucagaacau

SEQ ID NO: 302791 - RNA, 32 nt, Homo Sapiens
gcaggcacccggaggaggagcagcagcugugu

SEQ ID NO: 302792 - RNA, 32 nt, Homo Sapiens
ggcccggcgcggggcgggccggcaguaaaccu

SEQ ID NO: 302793 - RNA, 32 nt, Homo Sapiens
aggccuuuuccacacgcauuaauagucccauu

SEQ ID NO: 302794 - RNA, 32 nt, Homo Sapiens
uuaccaguuucugugcccuuuuggagcuuuug

SEQ ID NO: 302795 - RNA, 32 nt, Homo Sapiens
gggugccuggaggugaucuuugaaugccuaca

SEQ ID NO: 302796 - RNA, 32 nt, Homo Sapiens
ucacggaucccucucucucgggccagggugga

SEQ ID NO: 302797 - RNA, 32 nt, Homo Sapiens
gaacugaguauuuuugucaaaagucacaggga

SEQ ID NO: 302798 - RNA, 28 nt, Homo Sapiens
aaauauaguuugagucaaauaaaauuag

SEQ ID NO: 302799 - RNA, 32 nt, Homo Sapiens
ucauuucugaauacagaaguuguggccaagua

SEQ ID NO: 302800 - RNA, 32 nt, Homo Sapiens
cacaagcucuccagacaaagucaauguaaaug

SEQ ID NO: 302801 - RNA, 32 nt, Homo Sapiens
uggaauguaucuucccuuccaagcugccuaaa

SEQ ID NO: 302802 - RNA, 32 nt, Homo Sapiens
gguacuaguuaaacaauuggauaauaucuugg

SEQ ID NO: 302803 - RNA, 32 nt, Homo Sapiens
ucucggcuucaaggcgcugcugcugcucgggg

SEQ ID NO: 302804 - RNA, 31 nt, Homo Sapiens
cuugcggagccccgcgggagccuggcccgcc

SEQ ID NO: 302805 - RNA, 32 nt, Homo Sapiens
ggacuuuguaagucagcauaaaaaugaaaagu

SEQ ID NO: 302806 - RNA, 32 nt, Homo Sapiens
auguauuguaaugaaugaugugaauucugaac

SEQ ID NO: 302807 - RNA, 32 nt, Homo Sapiens
caaccaccaccaaccacugcgaccacaagaag

SEQ ID NO: 302808 - RNA, 31 nt, Homo Sapiens
ugaccaauaaauuguaauuuuggaacugagu

SEQ ID NO: 302809 - RNA, 32 nt, Homo Sapiens
ucaagccuccccgcuagcagccccacaggcuu

SEQ ID NO: 302810 - RNA, 32 nt, Homo Sapiens
uuacaaugugggaagaggaagaaugaguguca

SEQ ID NO: 302811 - RNA, 32 nt, Homo Sapiens
ucagcuggaagaaggcagugguaguggacauc

SEQ ID NO: 302812 - RNA, 32 nt, Homo Sapiens
aaauggagaaagggcuucaggcuggugacuag

SEQ ID NO: 302813 - RNA, 32 nt, Homo Sapiens
acauucagaaaauuauuccaaaaaugaaggua

SEQ ID NO: 302814 - RNA, 32 nt, Homo Sapiens
ugaugaaugacuguccccagcagauggcaagu

SEQ ID NO: 302815 - RNA, 32 nt, Homo Sapiens
ucaaauuuauuuuuuucuuuuguuugauauuu

SEQ ID NO: 302816 - RNA, 32 nt, Homo Sapiens
agaauuggagugcuguccuucuggagaguggu

SEQ ID NO: 302817 - RNA, 32 nt, Homo Sapiens
aucucgaacuuucaaaauauauuuucaguaca

SEQ ID NO: 302818 - RNA, 32 nt, Homo Sapiens
uaaaauaaaaauuuaaaacuaaaaaauaauua

SEQ ID NO: 302819 - RNA, 32 nt, Homo Sapiens
gcuccgccgcgguggcgguugcuaucgcuucg

SEQ ID NO: 302820 - RNA, 32 nt, Homo Sapiens
aauuacgaaaacuacuacauccaugcugcccc

SEQ ID NO: 302821 - RNA, 32 nt, Homo Sapiens
guuuggauuuucaauaucgacuuugcuuaaaa

SEQ ID NO: 302822 - RNA, 32 nt, Homo Sapiens
ucgacagggugagcgcacuccuacacacaggg

SEQ ID NO: 302823 - RNA, 32 nt, Homo Sapiens
aaauaagagauaaguugaacuucaccaaaaaa

SEQ ID NO: 302824 - RNA, 32 nt, Homo Sapiens
ugcugguuccccagcccuuuucccugcccugg

SEQ ID NO: 302825 - RNA, 32 nt, Homo Sapiens
uggacaaucgccuuuaccuaucuaccagguuu

SEQ ID NO: 302826 - RNA, 31 nt, Homo Sapiens
cuguagagggcggugaccgcgcuccagacac

SEQ ID NO: 302827 - RNA, 32 nt, Homo Sapiens
ggcgacucccgcucgugccccggagucaccgc

SEQ ID NO: 302828 - RNA, 32 nt, Homo Sapiens
aagaaggauugugaaaugacagcuuagguggg

SEQ ID NO: 302829 - RNA, 32 nt, Homo Sapiens
ucugaacaggauuucugcaaaaauagccccaa

SEQ ID NO: 302830 - RNA, 32 nt, Homo Sapiens
ucacugacagcuugcacugugugccuggaaaa

SEQ ID NO: 302831 - RNA, 27 nt, Homo Sapiens
ccauggucaacuccgucaucuuuuuug

SEQ ID NO: 302832 - RNA, 32 nt, Homo Sapiens
uaguuucagcucugccaguugcuggcugauug

SEQ ID NO: 302833 - RNA, 32 nt, Homo Sapiens
cucugcaucaaggguuauuccaggggcuacug

SEQ ID NO: 302834 - RNA, 32 nt, Homo Sapiens
guuuguccuuggagccucuuugccucuauuca

SEQ ID NO: 302835 - RNA, 32 nt, Homo Sapiens
cuucaggcuuuggcacgcaagccugggacccu

SEQ ID NO: 302836 - RNA, 32 nt, Homo Sapiens
cacagaugaagauuauagaggaaauguuggug

SEQ ID NO: 302837 - RNA, 32 nt, Homo Sapiens
uaaccuuuugggggagcuuucuaaaucucgca

SEQ ID NO: 302838 - RNA, 32 nt, Homo Sapiens
aggauaaaaugaacgcuauuugaggacuccgg

SEQ ID NO: 302839 - RNA, 32 nt, Homo Sapiens
aguuuuccucuuaaaugaggaugaugaugacc

SEQ ID NO: 302840 - RNA, 32 nt, Homo Sapiens
uacugcuguauauuuguugauuuuggaguuac

SEQ ID NO: 302841 - RNA, 32 nt, Homo Sapiens
aacaugaaauauauuuauuacaugcaaaauau

SEQ ID NO: 302842 - RNA, 32 nt, Homo Sapiens
cguuggggcagauguuacugaaccugugaauc

SEQ ID NO: 302843 - RNA, 32 nt, Homo Sapiens
ucacuuuucagcaaguaaugucucagauugcg

SEQ ID NO: 302844 - RNA, 32 nt, Homo Sapiens
gagaacucauacuggaggaaaauuuuagaaau

SEQ ID NO: 302845 - RNA, 32 nt, Homo Sapiens
ugugugcguucccaggggccaggccucuucca

SEQ ID NO: 302846 - RNA, 32 nt, Homo Sapiens
gguguagcuggguacauauuaaguggcuuguu

SEQ ID NO: 302847 - RNA, 32 nt, Homo Sapiens
aacuucagggucugggucugagcccgugggca

SEQ ID NO: 302848 - RNA, 32 nt, Homo Sapiens
aaguacuuucucugaauuuaaagcagacuucu

SEQ ID NO: 302849 - RNA, 32 nt, Homo Sapiens
gaggcuguucuaugauaucaugacccuucuug

SEQ ID NO: 302850 - RNA, 32 nt, Homo Sapiens
uaaugaaggggagggagauaaauacacaaauc

SEQ ID NO: 302851 - RNA, 32 nt, Homo Sapiens
caaaagaaaugcagauuucccaguuaucuugc

SEQ ID NO: 302852 - RNA, 32 nt, Homo Sapiens
gcagaccucacagaagaucagcuacccuccua

SEQ ID NO: 302853 - RNA, 32 nt, Homo Sapiens
ucccccaccguuuuagagagcuaggccucagc

SEQ ID NO: 302854 - RNA, 32 nt, Homo Sapiens
uuggaaaagacuuuguuucauguguauuugaa

SEQ ID NO: 302855 - RNA, 30 nt, Homo Sapiens
ccaccaggcaggcucgggcgacaggguugu

SEQ ID NO: 302856 - RNA, 32 nt, Homo Sapiens
aggcugugaccucagcugacgccgaugaucca

SEQ ID NO: 302857 - RNA, 32 nt, Homo Sapiens
uccucccucauucagaugaaccuuaaaccuca

SEQ ID NO: 302858 - RNA, 32 nt, Homo Sapiens
cuugcguauuggcuuuuucagagucauuuaug

SEQ ID NO: 302859 - RNA, 32 nt, Homo Sapiens
auguuccauuggcccaggauucuugcacuaau

SEQ ID NO: 302860 - RNA, 32 nt, Homo Sapiens
ggcgaccagccucggcggugggguuccugcaa

SEQ ID NO: 302861 - RNA, 32 nt, Homo Sapiens
ggcuccagaucccacacuccuuccucggcacu

SEQ ID NO: 302862 - RNA, 32 nt, Homo Sapiens
ugacuucuuuguaaguuuuguacugcuuugga

SEQ ID NO: 302863 - RNA, 32 nt, Homo Sapiens
uagugagcccagauugugccacugcucuccag

SEQ ID NO: 302864 - RNA, 32 nt, Homo Sapiens
cggcggcggcugcugcagcugcaggaggagcc

SEQ ID NO: 302865 - RNA, 32 nt, Homo Sapiens
ccuuuuacaaauggcauuuucuuaauugaaaa

SEQ ID NO: 302866 - RNA, 32 nt, Homo Sapiens
agagcgaagggcgggcgggucccggagcaaga

SEQ ID NO: 302867 - RNA, 32 nt, Homo Sapiens
cuagcacaguuucuaagcuacccaggcugcca

SEQ ID NO: 302868 - RNA, 32 nt, Homo Sapiens
gaguaaggugguugggguguugaaguaccaag

SEQ ID NO: 302869 - RNA, 32 nt, Homo Sapiens
ggaaggggccagcuucagccaaggcugaaccu

SEQ ID NO: 302870 - RNA, 32 nt, Homo Sapiens
agauagcugaggcuaggggagaaggaucuggc

SEQ ID NO: 302871 - RNA, 32 nt, Homo Sapiens
ugccggugccgcggccuuugucucgcagucag

SEQ ID NO: 302872 - RNA, 32 nt, Homo Sapiens
ggccugaaaaggagcagccucguauuuuucug

SEQ ID NO: 302873 - RNA, 32 nt, Homo Sapiens
guccuguguggguguggagauggccaaugaga

SEQ ID NO: 302874 - RNA, 32 nt, Homo Sapiens
cuucuagguacugucuucuggaccucagagcc

SEQ ID NO: 302875 - RNA, 32 nt, Homo Sapiens
caugaauggaauggaaaaaagaugacucaguu

SEQ ID NO: 302876 - RNA, 32 nt, Homo Sapiens
ucuggaggggaacccacugccggagcaguccu

SEQ ID NO: 302877 - RNA, 29 nt, Homo Sapiens
agagccuggaguugcagaggcagcuacag

SEQ ID NO: 302878 - RNA, 32 nt, Homo Sapiens
uauccaugaccucaguguuucuuaaccaaagu

SEQ ID NO: 302879 - RNA, 30 nt, Homo Sapiens
auaguggguucccuuggucagcaacagugc

SEQ ID NO: 302880 - RNA, 32 nt, Homo Sapiens
cuuaugcuauaaaugucauuuguauuuuaaaa

SEQ ID NO: 302881 - RNA, 32 nt, Homo Sapiens
cagccagacaccuuguacugggcacgcgucag

SEQ ID NO: 302882 - RNA, 32 nt, Homo Sapiens
aaaacaaaacaaaacagaacaaaacguauuua

SEQ ID NO: 302883 - RNA, 32 nt, Homo Sapiens
uaacagcaaauaaauuaacuauggaaaacaua

SEQ ID NO: 302884 - RNA, 32 nt, Homo Sapiens
aaggcugccguggagggcagggggguggugcu

SEQ ID NO: 302885 - RNA, 32 nt, Homo Sapiens
acagcugccaaguggcagguaagggaccguua

SEQ ID NO: 302886 - RNA, 32 nt, Homo Sapiens
guuaauccaccgauauuaugccuuguguguau

SEQ ID NO: 302887 - RNA, 32 nt, Homo Sapiens
ccucucgcugaacgcuccugcugggcuggggc

SEQ ID NO: 302888 - RNA, 32 nt, Homo Sapiens
guauguucauuuccaaauuuuguaucauaaga

SEQ ID NO: 302889 - RNA, 32 nt, Homo Sapiens
agccgucccuccucuuccuccccucccgacuc

SEQ ID NO: 302890 - RNA, 32 nt, Homo Sapiens
uaaacaaguccucacgaccacuucucaguuuu

SEQ ID NO: 302891 - RNA, 32 nt, Homo Sapiens
cagaaacccccuuuuuuagcuuuugcuugggg

SEQ ID NO: 302892 - RNA, 32 nt, Homo Sapiens
augaugauccuguuuuacaaaugcagaaauga

SEQ ID NO: 302893 - RNA, 32 nt, Homo Sapiens
ccaucuuauuuuuacuuauuguaauuuacugg

SEQ ID NO: 302894 - RNA, 32 nt, Homo Sapiens
uaaaggaauuuaaauguggacagaucggaggg

SEQ ID NO: 302895 - RNA, 32 nt, Homo Sapiens
gccgcacucccccugaggugcccgccggaacc

SEQ ID NO: 302896 - RNA, 32 nt, Homo Sapiens
caaguguaauacauuuaugugaaguaagacaa

SEQ ID NO: 302897 - RNA, 32 nt, Homo Sapiens
ccacuuuucuaaaaggucucuauuuaaaugcc

SEQ ID NO: 302898 - RNA, 32 nt, Homo Sapiens
cacugcacuccagccugugcgacagagggaga

SEQ ID NO: 302899 - RNA, 32 nt, Homo Sapiens
ucugagggagacugcuagaggacccaacuugg

SEQ ID NO: 302900 - RNA, 32 nt, Homo Sapiens
auaucuccuaggaggcauggagggauccagaa

SEQ ID NO: 302901 - RNA, 32 nt, Homo Sapiens
cgggguuugggguuggagcggcuggucacgug

SEQ ID NO: 302902 - RNA, 32 nt, Homo Sapiens
ggucuuauccugucccuccuccagguagagag

SEQ ID NO: 302903 - RNA, 32 nt, Homo Sapiens
agauaaaaacaucaaaauauaaaagcaagugc

SEQ ID NO: 302904 - RNA, 32 nt, Homo Sapiens
cugcuggcacggugugagcgccaggcaucucc

SEQ ID NO: 302905 - RNA, 32 nt, Homo Sapiens
cuuucuacauauauuauuggucaguacaucaa

SEQ ID NO: 302906 - RNA, 32 nt, Homo Sapiens
aagauaaaaacugcauacuaagaaugcaugaa

SEQ ID NO: 302907 - RNA, 32 nt, Homo Sapiens
augaaacuauaaauuuaguaauuaucaugccu

SEQ ID NO: 302908 - RNA, 32 nt, Homo Sapiens
gaucaaaucucacccuuucugcuucugaagua

SEQ ID NO: 302909 - RNA, 32 nt, Homo Sapiens
gcagauaaaacaaguuuacaugugcagaguua

SEQ ID NO: 302910 - RNA, 32 nt, Homo Sapiens
aauauauagauauaucacuguaaaauaaacuu

SEQ ID NO: 302911 - RNA, 31 nt, Homo Sapiens
gcggcgaugcagcgacggcgucgcccuccgc

SEQ ID NO: 302912 - RNA, 32 nt, Homo Sapiens
ugccacugccuucuaccuuguuugaaaccuga

SEQ ID NO: 302913 - RNA, 32 nt, Homo Sapiens
uuaauaacaucauuguugguggcugauacauu

SEQ ID NO: 302914 - RNA, 32 nt, Homo Sapiens
gaucuuaccaccaccccucccccggccccccg

SEQ ID NO: 302915 - RNA, 32 nt, Homo Sapiens
ugaccaagagcugacgugugcagaaguccuuc

SEQ ID NO: 302916 - RNA, 32 nt, Homo Sapiens
ugcagguugcccaggaggagcugcagcgccag

SEQ ID NO: 302917 - RNA, 32 nt, Homo Sapiens
gucgagcacucugcucgggggaggcaagguca

SEQ ID NO: 302918 - RNA, 29 nt, Homo Sapiens
cuguaaagauauuuauauuuuuguauagu

SEQ ID NO: 302919 - RNA, 32 nt, Homo Sapiens
caucugaaucaucaguauugucuauuuuuaac

SEQ ID NO: 302920 - RNA, 32 nt, Homo Sapiens
cgguugucauauuuauugaucugaguccaggc

SEQ ID NO: 302921 - RNA, 32 nt, Homo Sapiens
uauauauuuaucaaugguggacacuuuuauag

SEQ ID NO: 302922 - RNA, 32 nt, Homo Sapiens
gucuuucugugccucugaauugccaauacugu

SEQ ID NO: 302923 - RNA, 32 nt, Homo Sapiens
aaaugaauauuuuaaugccacagucuuuccug

SEQ ID NO: 302924 - RNA, 32 nt, Homo Sapiens
aaaacaaaacaaacaaccugccacaaugugau

SEQ ID NO: 302925 - RNA, 32 nt, Homo Sapiens
gucucugccuucccuucuucccauguguaucu

SEQ ID NO: 302926 - RNA, 32 nt, Homo Sapiens
cauccgacucgcgucucggcccuggcccgccu

SEQ ID NO: 302927 - RNA, 32 nt, Homo Sapiens
gaacgccccguccuuaccgccggcugcugugg

SEQ ID NO: 302928 - RNA, 32 nt, Homo Sapiens
aauuuuaaaaauuugaauggaaggggguaaag

SEQ ID NO: 302929 - RNA, 32 nt, Homo Sapiens
aggcauuuugguuuuuuaaaaucuguacagca

SEQ ID NO: 302930 - RNA, 32 nt, Homo Sapiens
cgcagcagcugcacgcucaccgucuaugacaa

SEQ ID NO: 302931 - RNA, 32 nt, Homo Sapiens
aggcccuuggccuuccucuccccugccucuuu

SEQ ID NO: 302932 - RNA, 32 nt, Homo Sapiens
cccuggcucgggccuguucacauuggggucaa

SEQ ID NO: 302933 - RNA, 32 nt, Homo Sapiens
aggcccugucucccaccagcuggguuccuggg

SEQ ID NO: 302934 - RNA, 32 nt, Homo Sapiens
auccuaacucucucacgaggcuugucggugac

SEQ ID NO: 302935 - RNA, 32 nt, Homo Sapiens
ucuuuuugguucuuucuuuucuuuuuauuagg

SEQ ID NO: 302936 - RNA, 32 nt, Homo Sapiens
ggaagugacagagcggagcuagcgcgucaaag

SEQ ID NO: 302937 - RNA, 32 nt, Homo Sapiens
caagucacccuugccccgauuccuccuguuug

SEQ ID NO: 302938 - RNA, 32 nt, Homo Sapiens
ugucuuugcacguuuuucaaguuucaugugcc

SEQ ID NO: 302939 - RNA, 32 nt, Homo Sapiens
agaaguuuauguguagggacugugggaaggcu

SEQ ID NO: 302940 - RNA, 32 nt, Homo Sapiens
gcagguggauuugagguuaggcagaugaugcu

SEQ ID NO: 302941 - RNA, 32 nt, Homo Sapiens
ccaucacuugcaaaauaaaggccaaagccuua

SEQ ID NO: 302942 - RNA, 32 nt, Homo Sapiens
cuuggaaaaaauauuuaagcuaaugaaaagca

SEQ ID NO: 302943 - RNA, 32 nt, Homo Sapiens
cuucuuccauauuuucucacuaaucucccguu

SEQ ID NO: 302944 - RNA, 32 nt, Homo Sapiens
gugccccggaaaccccacccccacccccaccu

SEQ ID NO: 302945 - RNA, 32 nt, Homo Sapiens
gaauauaucauucgccucuauaacaauuuaau

SEQ ID NO: 302946 - RNA, 32 nt, Homo Sapiens
agauaauuuccauuuuaauguuuguuuuuacu

SEQ ID NO: 302947 - RNA, 32 nt, Homo Sapiens
gggaaguaggagcccugugugaucgugcgucu

SEQ ID NO: 302948 - RNA, 32 nt, Homo Sapiens
ugcugcacuccagcugacccaaguaggaagcc

SEQ ID NO: 302949 - RNA, 32 nt, Homo Sapiens
guuccaguacuauuuugguugagucugugauu

SEQ ID NO: 302950 - RNA, 32 nt, Homo Sapiens
uuuuauuugugauauuuucagagacauuugcu

SEQ ID NO: 302951 - RNA, 32 nt, Homo Sapiens
gccaaaacauaguggaggugcugugugugagu

SEQ ID NO: 302952 - RNA, 32 nt, Homo Sapiens
cauccccaugccgacgugcucaucucuagcaa

SEQ ID NO: 302953 - RNA, 32 nt, Homo Sapiens
gcggacaaggauggguccgcgcggcgcggcga

SEQ ID NO: 302954 - RNA, 32 nt, Homo Sapiens
uucuuaugcuuuuuacuacaaacaaaauuacu

SEQ ID NO: 302955 - RNA, 32 nt, Homo Sapiens
cugcccccaccuaagguuugccuguagguacc

SEQ ID NO: 302956 - RNA, 32 nt, Homo Sapiens
ccugcaccccuuagcccucccugcuuugccug

SEQ ID NO: 302957 - RNA, 32 nt, Homo Sapiens
caaucuucucauuuggaaauguuguaaauaau

SEQ ID NO: 302958 - RNA, 32 nt, Homo Sapiens
caaauucacuucugccuuccucagguuugaua

SEQ ID NO: 302959 - RNA, 32 nt, Homo Sapiens
acgugcucaagcccccacagggggcugcgaca

SEQ ID NO: 302960 - RNA, 32 nt, Homo Sapiens
acacagagaaaucagagaguggcugccauggu

SEQ ID NO: 302961 - RNA, 32 nt, Homo Sapiens
gagaugggaaguucugugacugcugcuacugu

SEQ ID NO: 302962 - RNA, 32 nt, Homo Sapiens
uguuaaauucaccaacagauacccugauuuuu

SEQ ID NO: 302963 - RNA, 32 nt, Homo Sapiens
ccacccaguuuggggacccagugggaccaggu

SEQ ID NO: 302964 - RNA, 32 nt, Homo Sapiens
uuuuuggaaggggacacgugacagccguuugu

SEQ ID NO: 302965 - RNA, 32 nt, Homo Sapiens
cccuuccagagguaaugauccugagaccacuc

SEQ ID NO: 302966 - RNA, 32 nt, Homo Sapiens
ggagccuguggcggcagcggcgauggaaccag

SEQ ID NO: 302967 - RNA, 32 nt, Homo Sapiens
cugcagucacugcacguuuucaucucuaggga

SEQ ID NO: 302968 - RNA, 32 nt, Homo Sapiens
caccccacccccaccuaccacuccaugcuuuc

SEQ ID NO: 302969 - RNA, 32 nt, Homo Sapiens
cacaccuucuggcaaauucaagaggcaugagu

SEQ ID NO: 302970 - RNA, 32 nt, Homo Sapiens
ugaagcaauuuaacuguagacaaagcuugcau

SEQ ID NO: 302971 - RNA, 32 nt, Homo Sapiens
agcauccccucuagcuccuuacacccuagcgg

SEQ ID NO: 302972 - RNA, 32 nt, Homo Sapiens
agcgggaggggaggcuucgcggaacgcucucg

SEQ ID NO: 302973 - RNA, 32 nt, Homo Sapiens
aggcuccauucugccaucuacaucccagcgca

SEQ ID NO: 302974 - RNA, 32 nt, Homo Sapiens
ccacagcccucccccgcccccuucccccgccc

SEQ ID NO: 302975 - RNA, 32 nt, Homo Sapiens
agaaugagccagcagacuggccagcgccucug

SEQ ID NO: 302976 - RNA, 32 nt, Homo Sapiens
ucacagcgaauccccgccccgccccgggaagc

SEQ ID NO: 302977 - RNA, 32 nt, Homo Sapiens
ucuccagagauuaugggguuggggguggaggu

SEQ ID NO: 302978 - RNA, 32 nt, Homo Sapiens
cggcggccgaccauggugcugccgcccccgga

SEQ ID NO: 302979 - RNA, 32 nt, Homo Sapiens
uguggacucugccugccuaccuggucugggaa

SEQ ID NO: 302980 - RNA, 32 nt, Homo Sapiens
cauuauuuuaucauuuaauaugugcucacuga

SEQ ID NO: 302981 - RNA, 31 nt, Homo Sapiens
ugcaggagggcgggggcucugguuguaaaac

SEQ ID NO: 302982 - RNA, 32 nt, Homo Sapiens
ucugacccuggccaccugucuccaugugaagg

SEQ ID NO: 302983 - RNA, 32 nt, Homo Sapiens
gcccguccgcuugccaccauggagcuggagga

SEQ ID NO: 302984 - RNA, 32 nt, Homo Sapiens
uucaggggguuaucuuuuuuuuuuuccccucc

SEQ ID NO: 302985 - RNA, 32 nt, Homo Sapiens
auuccagaugguuuuucugaaauuucauuaag

SEQ ID NO: 302986 - RNA, 32 nt, Homo Sapiens
guuggacaaugaauguaguuaacugguuccug

SEQ ID NO: 302987 - RNA, 32 nt, Homo Sapiens
aacucuguggggugggggccguugcaggugua

SEQ ID NO: 302988 - RNA, 32 nt, Homo Sapiens
agguaaggggagagcaaggaugcacagaaaac

SEQ ID NO: 302989 - RNA, 32 nt, Homo Sapiens
cgaggcggccccgggcggguggauuggauuug

SEQ ID NO: 302990 - RNA, 32 nt, Homo Sapiens
auaggaagcuccugggcuuagcugugggaagc

SEQ ID NO: 302991 - RNA, 32 nt, Homo Sapiens
guccuucaggacugcccuuuucugccuucuca

SEQ ID NO: 302992 - RNA, 32 nt, Homo Sapiens
cgcgcccgcucgccgccucgucucccagcggc

SEQ ID NO: 302993 - RNA, 32 nt, Homo Sapiens
aggcagcacgugagagcagagccccccaaaaa

SEQ ID NO: 302994 - RNA, 32 nt, Homo Sapiens
cccgugcccagccucuccaccgucacuguccg

SEQ ID NO: 302995 - RNA, 32 nt, Homo Sapiens
uauuuucucaguguauuuuuguaaaaaauaua

SEQ ID NO: 302996 - RNA, 32 nt, Homo Sapiens
agaaacucuuaacugcagaaaaaaguuccaga

SEQ ID NO: 302997 - RNA, 32 nt, Homo Sapiens
ugguccuuucuuccggccccuccccuccaaaa

SEQ ID NO: 302998 - RNA, 32 nt, Homo Sapiens
acugggcgacgguggcuccagcauguaucagc

SEQ ID NO: 302999 - RNA, 32 nt, Homo Sapiens
gggcugggcugagacccagcugagugcagcgu

SEQ ID NO: 303000 - RNA, 32 nt, Homo Sapiens
ugugggcuugccgcgcgccggugagucaggcc

SEQ ID NO: 303001 - RNA, 32 nt, Homo Sapiens
uuugcuucugguggaauuaaaugacgguaaaa

SEQ ID NO: 303002 - RNA, 32 nt, Homo Sapiens
uccaaagauauuuggauccuuuguuucauaaa

SEQ ID NO: 303003 - RNA, 32 nt, Homo Sapiens
gcgcucgggccgccagcaccugcccgcgccug

SEQ ID NO: 303004 - RNA, 28 nt, Homo Sapiens
aaagggaaagauuucaucauuuuaccau

SEQ ID NO: 303005 - RNA, 32 nt, Homo Sapiens
gccgggcgcugaggacaagggccgcugguagg

SEQ ID NO: 303006 - RNA, 32 nt, Homo Sapiens
agcgugcggccuuguuacgggcgaaaggccac

SEQ ID NO: 303007 - RNA, 32 nt, Homo Sapiens
aagcugcugacugugauuaggugcuggggucu

SEQ ID NO: 303008 - RNA, 32 nt, Homo Sapiens
agauauguaaaaaagauacuuuccagcacaua

SEQ ID NO: 303009 - RNA, 32 nt, Homo Sapiens
agaucuccacaaauaaaaggacaagugugagg

SEQ ID NO: 303010 - RNA, 32 nt, Homo Sapiens
uggaagagagaaauaaacauuuagaggauuua

SEQ ID NO: 303011 - RNA, 32 nt, Homo Sapiens
aggaccuaguuccauagaagacauuaaagcga

SEQ ID NO: 303012 - RNA, 32 nt, Homo Sapiens
ccgcggggccgggugcgauggcggcgguggcu

SEQ ID NO: 303013 - RNA, 32 nt, Homo Sapiens
ccucauuuuguuauuuguuuuauuuuuaggag

SEQ ID NO: 303014 - RNA, 32 nt, Homo Sapiens
ggagagauacccagcuccaacuacccacuggc

SEQ ID NO: 303015 - RNA, 32 nt, Homo Sapiens
gugaaacccccuuuuccagucauaaaaugucu

SEQ ID NO: 303016 - RNA, 32 nt, Homo Sapiens
ggggccucugccaaguucugcauugcuaaaua

SEQ ID NO: 303017 - RNA, 32 nt, Homo Sapiens
cacgcccggcuaauuuuuguauuuucagucga

SEQ ID NO: 303018 - RNA, 32 nt, Homo Sapiens
caccgcccaagcccagguggccagcucucaua

SEQ ID NO: 303019 - RNA, 32 nt, Homo Sapiens
aucccguggggagagguuauaucagacuggag

SEQ ID NO: 303020 - RNA, 32 nt, Homo Sapiens
uugaauucuggagggguuaggcagagagaaaa

SEQ ID NO: 303021 - RNA, 32 nt, Homo Sapiens
cauggcuguaagugcuggccucauuucgcguu

SEQ ID NO: 303022 - RNA, 32 nt, Homo Sapiens
uugugaaacaauuuaucuuuaaaguuucugaa

SEQ ID NO: 303023 - RNA, 32 nt, Homo Sapiens
aggggaagauuucuaagaagagaugcccagcu

SEQ ID NO: 303024 - RNA, 32 nt, Homo Sapiens
cuuuaucaugugaaccuuuaaaaguuagcucu

SEQ ID NO: 303025 - RNA, 32 nt, Homo Sapiens
ugugggcugaagauuuuggaccugaguuuauc

SEQ ID NO: 303026 - RNA, 32 nt, Homo Sapiens
agccuuucucccugccaccacucccuuagucu

SEQ ID NO: 303027 - RNA, 32 nt, Homo Sapiens
ugccagaggggcagcagcugcagauccacuua

SEQ ID NO: 303028 - RNA, 32 nt, Homo Sapiens
auuuaucuuuugcgguuuuaugacaaaguuau

SEQ ID NO: 303029 - RNA, 32 nt, Homo Sapiens
agacugaaauuuaaaaauauugagaauaacua

SEQ ID NO: 303030 - RNA, 32 nt, Homo Sapiens
guacccuccgcggagcccggggguggggggcg

SEQ ID NO: 303031 - RNA, 32 nt, Homo Sapiens
ucugcccgcccccaccucccccugcgucgggc

SEQ ID NO: 303032 - RNA, 32 nt, Homo Sapiens
cuggaaugaacagguucccucccugccaccug

SEQ ID NO: 303033 - RNA, 32 nt, Homo Sapiens
acauauuuuuauuaacuucuuuugagcuuuca

SEQ ID NO: 303034 - RNA, 32 nt, Homo Sapiens
ugcuauacuuuucccccaacccuccaauaaau

SEQ ID NO: 303035 - RNA, 32 nt, Homo Sapiens
cuuaggcaagucacuucaccuccacgagagca

SEQ ID NO: 303036 - RNA, 32 nt, Homo Sapiens
cugcacugccuggcucagcugcacgcugcaga

SEQ ID NO: 303037 - RNA, 32 nt, Homo Sapiens
ggcaaugggaagcucaauguugcucagugggu

SEQ ID NO: 303038 - RNA, 32 nt, Homo Sapiens
uuugguuuuaguuuauuccucucuacaacuaa

SEQ ID NO: 303039 - RNA, 32 nt, Homo Sapiens
uggaggugauuuucuuuuuuuuaaauuauuau

SEQ ID NO: 303040 - RNA, 32 nt, Homo Sapiens
gucggugcuuugcagggaucugccagaaauuc

SEQ ID NO: 303041 - RNA, 32 nt, Homo Sapiens
ccacggaaggucggucugaucgcagcugcggg

SEQ ID NO: 303042 - RNA, 32 nt, Homo Sapiens
acccggcugcgguggcugcgggacugacgaga

SEQ ID NO: 303043 - RNA, 32 nt, Homo Sapiens
gaggggaagaauuuaauggacugugaauuuca

SEQ ID NO: 303044 - RNA, 31 nt, Homo Sapiens
cuccgcuggcucugccugcuccugcaacagu

SEQ ID NO: 303045 - RNA, 32 nt, Homo Sapiens
uccuggaaaaggaaaauucuucugcuugucug

SEQ ID NO: 303046 - RNA, 32 nt, Homo Sapiens
aacuacuguauauuaaaaguugguuugaacca

SEQ ID NO: 303047 - RNA, 27 nt, Homo Sapiens
ugcuuccagugauucuggugaauccau

SEQ ID NO: 303048 - RNA, 32 nt, Homo Sapiens
agaagagaagacuguggagccagcuaccgucu

SEQ ID NO: 303049 - RNA, 32 nt, Homo Sapiens
ccugagugauggggccggcgccagcuggagag

SEQ ID NO: 303050 - RNA, 32 nt, Homo Sapiens
cucuggccaaagggcucuggcaacugcaugug

SEQ ID NO: 303051 - RNA, 32 nt, Homo Sapiens
gguccuggccccagcgcugacguuuucucucc

SEQ ID NO: 303052 - RNA, 32 nt, Homo Sapiens
guugaggcggcggcgccccugcggcugugcgc

SEQ ID NO: 303053 - RNA, 32 nt, Homo Sapiens
ccuucucuccuccccaaaucaauacacuaguu

SEQ ID NO: 303054 - RNA, 32 nt, Homo Sapiens
cuauaaagucacuucugaaaucuuacaugaaa

SEQ ID NO: 303055 - RNA, 32 nt, Homo Sapiens
gcccauacaccugucuccuucuuccugccugg

SEQ ID NO: 303056 - RNA, 32 nt, Homo Sapiens
ccaacagcuaaccugauauggaagagccaaga

SEQ ID NO: 303057 - RNA, 32 nt, Homo Sapiens
gagaacuccggccccaggcuggccugagcugc

SEQ ID NO: 303058 - RNA, 32 nt, Homo Sapiens
uccagcuuggcugguuuugcaggccgccagca

SEQ ID NO: 303059 - RNA, 32 nt, Homo Sapiens
cagggagcaugaagcaccuugcccaaggucuc

SEQ ID NO: 303060 - RNA, 32 nt, Homo Sapiens
aggacaagaagggaagcagaaggugcuuugga

SEQ ID NO: 303061 - RNA, 32 nt, Homo Sapiens
ccugacugcgcggccagacgccagcgccaugg

SEQ ID NO: 303062 - RNA, 32 nt, Homo Sapiens
acaguuuugaugauaaucacauguaugccaaa

SEQ ID NO: 303063 - RNA, 32 nt, Homo Sapiens
uccugcugccccagccuuagagagcucccauc

SEQ ID NO: 303064 - RNA, 32 nt, Homo Sapiens
ccucccucacuccucugcgccuccccccacug

SEQ ID NO: 303065 - RNA, 32 nt, Homo Sapiens
gcccucccgggucagcaugcccggggugaaac

SEQ ID NO: 303066 - RNA, 32 nt, Homo Sapiens
agaaccuugcuuaacaugagauuuuaacacaa

SEQ ID NO: 303067 - RNA, 32 nt, Homo Sapiens
agucugcucuccccgggaaucucuaacaugcu

SEQ ID NO: 303068 - RNA, 32 nt, Homo Sapiens
ggcgagaggcaugggcacguggcugccgaggg

SEQ ID NO: 303069 - RNA, 32 nt, Homo Sapiens
aaauaggucaguuacuggucucuuucuccgaa

SEQ ID NO: 303070 - RNA, 32 nt, Homo Sapiens
ugggaagagggagaggagcagaaaaaguaccu

SEQ ID NO: 303071 - RNA, 32 nt, Homo Sapiens
uacauccgggaggugguucgggauaaagagaa

SEQ ID NO: 303072 - RNA, 32 nt, Homo Sapiens
ucauaaccaaaauaaguaguacuguaauauuu

SEQ ID NO: 303073 - RNA, 32 nt, Homo Sapiens
aaaugucugcccugccagcagccccgggccug

SEQ ID NO: 303074 - RNA, 32 nt, Homo Sapiens
cugccuggccuggccguagguuuguaacuguu

SEQ ID NO: 303075 - RNA, 32 nt, Homo Sapiens
guugcuuuuaucaaagaguauguaaucuauac

SEQ ID NO: 303076 - RNA, 32 nt, Homo Sapiens
ggcacggucuauguaacacuaguucugcguau

SEQ ID NO: 303077 - RNA, 32 nt, Homo Sapiens
cccggcgggaaaaggaucgggcgggcgggcgg

SEQ ID NO: 303078 - RNA, 32 nt, Homo Sapiens
gucuucagagggcaucuucaugugugggcacc

SEQ ID NO: 303079 - RNA, 32 nt, Homo Sapiens
uuucauauaaaacggugauaucaugcagaugc

SEQ ID NO: 303080 - RNA, 32 nt, Homo Sapiens
ugauugcaguugcuuggagaugcuccaggugc

SEQ ID NO: 303081 - RNA, 32 nt, Homo Sapiens
guacaccaguuguuccucccccaccucagccc

SEQ ID NO: 303082 - RNA, 31 nt, Homo Sapiens
gcucccgcuguacugcagccccgcgccagcu

SEQ ID NO: 303083 - RNA, 32 nt, Homo Sapiens
ccggauuuuccacuucgguucuuucgaguuua

SEQ ID NO: 303084 - RNA, 32 nt, Homo Sapiens
agauaaggcaacaaaaugguuuacuuaacagu

SEQ ID NO: 303085 - RNA, 32 nt, Homo Sapiens
cugccagcucuacugggcuuggagcacguccg

SEQ ID NO: 303086 - RNA, 32 nt, Homo Sapiens
aagaagacauaaaaacagccaacagguauaug

SEQ ID NO: 303087 - RNA, 32 nt, Homo Sapiens
uauuuuaugaaaccccuaauguuuauauauua

SEQ ID NO: 303088 - RNA, 32 nt, Homo Sapiens
gcucgcugagaaaguccuugcugggaaaucga

SEQ ID NO: 303089 - RNA, 32 nt, Homo Sapiens
gucuggcauuccugggucguuagaggacaggc

SEQ ID NO: 303090 - RNA, 32 nt, Homo Sapiens
aaaaguuggacaucaauuuuuuccccugauuu

SEQ ID NO: 303091 - RNA, 32 nt, Homo Sapiens
aguagcuuuuaaaacugaauuuccuuuaauug

SEQ ID NO: 303092 - RNA, 32 nt, Homo Sapiens
aagggacguugggcggcccauguguuauguua

SEQ ID NO: 303093 - RNA, 32 nt, Homo Sapiens
uuccuaaacaaaugugaaaaugugaacagugc

SEQ ID NO: 303094 - RNA, 32 nt, Homo Sapiens
ucuauuuaaaaauuacaaaaaugaacccaagu

SEQ ID NO: 303095 - RNA, 31 nt, Homo Sapiens
gccuugaaauaaaaugugagaguauucuggu

SEQ ID NO: 303096 - RNA, 32 nt, Homo Sapiens
ccuggacagcagccgccagaagggcaggccgc

SEQ ID NO: 303097 - RNA, 32 nt, Homo Sapiens
guauggaauguuaugauaggacacaguaguag

SEQ ID NO: 303098 - RNA, 32 nt, Homo Sapiens
auuguuuucucuguauuuaccuaauauuuuau

SEQ ID NO: 303099 - RNA, 32 nt, Homo Sapiens
gaggaaggguggucaucccagcuccugcccua

SEQ ID NO: 303100 - RNA, 32 nt, Homo Sapiens
cagcuccuagcagagaagagccagccagaccc

SEQ ID NO: 303101 - RNA, 32 nt, Homo Sapiens
ccgcgacagcgguccggacgccgcccgaacau

SEQ ID NO: 303102 - RNA, 32 nt, Homo Sapiens
cggcccggcccgggggccauggagcuccgagc

SEQ ID NO: 303103 - RNA, 32 nt, Homo Sapiens
cugcucagccccaccugaagagcccagagagg

SEQ ID NO: 303104 - RNA, 32 nt, Homo Sapiens
uuagucccaaaauaaauauaccugggaauaaa

SEQ ID NO: 303105 - RNA, 32 nt, Homo Sapiens
uguggccagugggacaguccugguggcugaca

SEQ ID NO: 303106 - RNA, 32 nt, Homo Sapiens
cccccgagaagcuggccgaggugggcgaguuc

SEQ ID NO: 303107 - RNA, 32 nt, Homo Sapiens
cccagggcaggagagcgcagagcuagggaaag

SEQ ID NO: 303108 - RNA, 32 nt, Homo Sapiens
acaaugggucugugaggaggcaggcaagaggg

SEQ ID NO: 303109 - RNA, 32 nt, Homo Sapiens
auccuuccugcagcugccaggcaacaacgaaa

SEQ ID NO: 303110 - RNA, 32 nt, Homo Sapiens
aagcggagcgucaucgucucccgccccgugcg

SEQ ID NO: 303111 - RNA, 32 nt, Homo Sapiens
acauccgugaugacgggcgccgggccaccauc

SEQ ID NO: 303112 - RNA, 32 nt, Homo Sapiens
aaaaaagcggccgcuuccccccggccgggccc

SEQ ID NO: 303113 - RNA, 32 nt, Homo Sapiens
aacuguuaaugauuucaacaaugcauuaaaag

SEQ ID NO: 303114 - RNA, 32 nt, Homo Sapiens
ugcuuuccaucugcacuccagacggcuuucuc

SEQ ID NO: 303115 - RNA, 32 nt, Homo Sapiens
uggacuucuucuucuuuuuuuuuuucuuuuua

SEQ ID NO: 303116 - RNA, 32 nt, Homo Sapiens
acauguacuucucucuuggaucaaauaugucu

SEQ ID NO: 303117 - RNA, 32 nt, Homo Sapiens
uuucuaugauaaaagcacuuucagauuguucu

SEQ ID NO: 303118 - RNA, 32 nt, Homo Sapiens
uaaacacuucuuuuccuucucuuccucguuuu

SEQ ID NO: 303119 - RNA, 32 nt, Homo Sapiens
cacugcacuccagccuggcuacagagugagau

SEQ ID NO: 303120 - RNA, 29 nt, Homo Sapiens
caccaugccguggccccugcugcugcugc

SEQ ID NO: 303121 - RNA, 32 nt, Homo Sapiens
aaccuaugaugauuuuguccuguguguaaaug

SEQ ID NO: 303122 - RNA, 32 nt, Homo Sapiens
aacauggcaaaacccuguuucuacacaaaguu

SEQ ID NO: 303123 - RNA, 32 nt, Homo Sapiens
agcggcaggaccaugguugagcgcgccagcaa

SEQ ID NO: 303124 - RNA, 30 nt, Homo Sapiens
gccggggccugacggucgccggcgguggug

SEQ ID NO: 303125 - RNA, 32 nt, Homo Sapiens
gggaaugauaaucaaaugauucagccuauugu

SEQ ID NO: 303126 - RNA, 32 nt, Homo Sapiens
ccaucuugcugccaagguaccuuuagauguuu

SEQ ID NO: 303127 - RNA, 32 nt, Homo Sapiens
ugagggccuugaugaaauaacacagcaguuuc

SEQ ID NO: 303128 - RNA, 32 nt, Homo Sapiens
uauuuuuggacaauuucuuaggguucagcuua

SEQ ID NO: 303129 - RNA, 32 nt, Homo Sapiens
ggaauacauuuuauaaaauguuguagugaagc

SEQ ID NO: 303130 - RNA, 32 nt, Homo Sapiens
uggcaugcaccuguagucccagcuacuccgga

SEQ ID NO: 303131 - RNA, 32 nt, Homo Sapiens
cauaggaaaugaauauugugaugaauccuggg

SEQ ID NO: 303132 - RNA, 32 nt, Homo Sapiens
uguauguuaaaugucuguuuuaaaagaaagua

SEQ ID NO: 303133 - RNA, 32 nt, Homo Sapiens
ccauuuccugucuuucccguccaucacccauc

SEQ ID NO: 303134 - RNA, 30 nt, Homo Sapiens
ccuugggcgcccggccccugggacgccugu

SEQ ID NO: 303135 - RNA, 32 nt, Homo Sapiens
gugggcccacaccacacccugccccuuagccc

SEQ ID NO: 303136 - RNA, 32 nt, Homo Sapiens
agauguggucugagaugggugcugcaaagauc

SEQ ID NO: 303137 - RNA, 32 nt, Homo Sapiens
gaaagcgucgagcggcuucgguagguggggcg

SEQ ID NO: 303138 - RNA, 32 nt, Homo Sapiens
gucuuaaguucugcaacccacccacuccccca

SEQ ID NO: 303139 - RNA, 32 nt, Homo Sapiens
agagagcugcgcuggaggagaaaagccagucc

SEQ ID NO: 303140 - RNA, 32 nt, Homo Sapiens
gggcacauuucccacaacucccagagggcagg

SEQ ID NO: 303141 - RNA, 32 nt, Homo Sapiens
ucugcuccugaagagggugaacaaauggggca

SEQ ID NO: 303142 - RNA, 32 nt, Homo Sapiens
aaaacaaugaauugaaugcucuaagaggcucc

SEQ ID NO: 303143 - RNA, 32 nt, Homo Sapiens
uuggcgggcagacacgcgggcgcgaucccaca

SEQ ID NO: 303144 - RNA, 32 nt, Homo Sapiens
ucugguccgagccgccucgguucugaagcgag

SEQ ID NO: 303145 - RNA, 32 nt, Homo Sapiens
cuauucucaaaguuaaaaguaaaauuguuuca

SEQ ID NO: 303146 - RNA, 32 nt, Homo Sapiens
gaaaaaacaaagucuggcugaaaauuacuauu

SEQ ID NO: 303147 - RNA, 32 nt, Homo Sapiens
ugucugggagaauguugauguuagaaaucagg

SEQ ID NO: 303148 - RNA, 32 nt, Homo Sapiens
cuucaugccgcuguaagcucggaggccaagga

SEQ ID NO: 303149 - RNA, 32 nt, Homo Sapiens
auauauuuuucacaguuuuuccaaaaaaaaaa

SEQ ID NO: 303150 - RNA, 32 nt, Homo Sapiens
cccucgcagugaguguuacaguucuuaaaggu

SEQ ID NO: 303151 - RNA, 32 nt, Homo Sapiens
ugaacaaaagaagugacauacacaauauaaau

SEQ ID NO: 303152 - RNA, 32 nt, Homo Sapiens
accagguacugcgagaaggugaaacagcugaa

SEQ ID NO: 303153 - RNA, 32 nt, Homo Sapiens
uauuuuucccaauugcccugagcaguacaaug

SEQ ID NO: 303154 - RNA, 32 nt, Homo Sapiens
ucucugaaauauauuuuuuucauguuuggucc

SEQ ID NO: 303155 - RNA, 32 nt, Homo Sapiens
ucuagugguugugggugaauaaaggagggcag

SEQ ID NO: 303156 - RNA, 32 nt, Homo Sapiens
ugccuagagggaaaaguuauuuuuguuucuua

SEQ ID NO: 303157 - RNA, 32 nt, Homo Sapiens
cuggguugaggguggacugugcgaggccuggc

SEQ ID NO: 303158 - RNA, 30 nt, Homo Sapiens
acgggguuucaucguguuagccaggauggu

SEQ ID NO: 303159 - RNA, 32 nt, Homo Sapiens
auugggucugcaccuccauccuugaucuuguu

SEQ ID NO: 303160 - RNA, 32 nt, Homo Sapiens
gugugugggcugcucuaggagcagauacaggc

SEQ ID NO: 303161 - RNA, 32 nt, Homo Sapiens
cacauucauuuaaugguuucuguaaacauuuu

SEQ ID NO: 303162 - RNA, 32 nt, Homo Sapiens
ugggcauugaagaaaaaauguugagauaaaau

SEQ ID NO: 303163 - RNA, 32 nt, Homo Sapiens
cauuugguggcagugcugguggcugccuggga

SEQ ID NO: 303164 - RNA, 32 nt, Homo Sapiens
aagagcuuacagucgggugagcaagauacgcc

SEQ ID NO: 303165 - RNA, 32 nt, Homo Sapiens
caaaccgaugaucuaaaccaaccacuuggaaa

SEQ ID NO: 303166 - RNA, 32 nt, Homo Sapiens
cccagccccagccaacucccggcacugaacac

SEQ ID NO: 303167 - RNA, 32 nt, Homo Sapiens
uauuuucuuguugcuuuuuucuuagaaaaaaa

SEQ ID NO: 303168 - RNA, 32 nt, Homo Sapiens
acaugauaaacuaauaaauguuauucuuauug

SEQ ID NO: 303169 - RNA, 32 nt, Homo Sapiens
cuggggcugcccauugggggccccacaugucc

SEQ ID NO: 303170 - RNA, 32 nt, Homo Sapiens
cugagccgccgccgagcgcccggggccaugcg

SEQ ID NO: 303171 - RNA, 32 nt, Homo Sapiens
uauaugaaaaagagaaugauauucaaaauagu

SEQ ID NO: 303172 - RNA, 32 nt, Homo Sapiens
gccuacaaucccaacacuuugggaggcugagg

SEQ ID NO: 303173 - RNA, 32 nt, Homo Sapiens
uaccuucacaauuuaguguaucuuuuaauguu

SEQ ID NO: 303174 - RNA, 32 nt, Homo Sapiens
gaccuuagaaaguggaaaugagguugcuaugg

SEQ ID NO: 303175 - RNA, 32 nt, Homo Sapiens
acaaaugaaaacaaaauuagagcaaagcugac

SEQ ID NO: 303176 - RNA, 32 nt, Homo Sapiens
uugugguccuugcggcuucucucucuagcagc

SEQ ID NO: 303177 - RNA, 32 nt, Homo Sapiens
cuccaaaaacaaaaacaaaaacuguuagugaa

SEQ ID NO: 303178 - RNA, 32 nt, Homo Sapiens
acacaaccccuacgguacagcacacuagcccu

SEQ ID NO: 303179 - RNA, 32 nt, Homo Sapiens
cgaauccccuccaccgggacgccccgcugccg

SEQ ID NO: 303180 - RNA, 32 nt, Homo Sapiens
ucacauguuaaaccucaguuuuauaagagggg

SEQ ID NO: 303181 - RNA, 32 nt, Homo Sapiens
agcuauugaaagauauaauggaggaugaauuu

SEQ ID NO: 303182 - RNA, 32 nt, Homo Sapiens
acgguugcuguccucauuugcauuccaagaag

SEQ ID NO: 303183 - RNA, 32 nt, Homo Sapiens
ggcugccuccucugguccccaggccccuccag

SEQ ID NO: 303184 - RNA, 32 nt, Homo Sapiens
cagagguuuuauucccucuacuccgagcaaug

SEQ ID NO: 303185 - RNA, 32 nt, Homo Sapiens
auuuauugagacggagucuugcucuguagccc

SEQ ID NO: 303186 - RNA, 27 nt, Homo Sapiens
uugcacuccuucuuuguuuucaauauu

SEQ ID NO: 303187 - RNA, 29 nt, Homo Sapiens
gcucuuguccucuggguacggcucgcggg

SEQ ID NO: 303188 - RNA, 32 nt, Homo Sapiens
cugcgucgccgggacccucgcgcgcgaccagc

SEQ ID NO: 303189 - RNA, 32 nt, Homo Sapiens
ugagcaaagcuaggccugauuagaguagagug

SEQ ID NO: 303190 - RNA, 32 nt, Homo Sapiens
gcucuaccuaucugauacaucuguaaaugugg

SEQ ID NO: 303191 - RNA, 32 nt, Homo Sapiens
ugccgacccuguggccugcugcccgccccccg

SEQ ID NO: 303192 - RNA, 32 nt, Homo Sapiens
gggcguccgcggcucucccgaccagccccagc

SEQ ID NO: 303193 - RNA, 32 nt, Homo Sapiens
cccaggcuucuguguucccagucuccuguaau

SEQ ID NO: 303194 - RNA, 32 nt, Homo Sapiens
gagaauggaccggagggacaagaggggcagca

SEQ ID NO: 303195 - RNA, 32 nt, Homo Sapiens
uauaguuugauuuaagcauuagucauuuacaa

SEQ ID NO: 303196 - RNA, 32 nt, Homo Sapiens
uuuagaacauuuagaaacaauugauugccucu

SEQ ID NO: 303197 - RNA, 32 nt, Homo Sapiens
cagaauguucugggauaacauuuggaggaagg

SEQ ID NO: 303198 - RNA, 32 nt, Homo Sapiens
aaacagaaagagaacuuagaaauaaaaccaca

SEQ ID NO: 303199 - RNA, 32 nt, Homo Sapiens
ggguggccacgcugccagguguuccacucccc

SEQ ID NO: 303200 - RNA, 32 nt, Homo Sapiens
cuggguagcucugccugaagcauuccacuaag

SEQ ID NO: 303201 - RNA, 32 nt, Homo Sapiens
uacaaagacaaauaccaggcuuucucagcaag

SEQ ID NO: 303202 - RNA, 32 nt, Homo Sapiens
ggcuucgacaugcuggaggagccccggccgcg

SEQ ID NO: 303203 - RNA, 32 nt, Homo Sapiens
cugagacaaccacugcucacaguuugauguau

SEQ ID NO: 303204 - RNA, 32 nt, Homo Sapiens
uuggucacaguuaauugguguuuucuuauugc

SEQ ID NO: 303205 - RNA, 32 nt, Homo Sapiens
ccgagcgcccaccccaggacucccucggccag

SEQ ID NO: 303206 - RNA, 32 nt, Homo Sapiens
ucuaggccucggugcuggccuggguucuagau

SEQ ID NO: 303207 - RNA, 32 nt, Homo Sapiens
ucccagcuccucaggaggcugaggugggagga

SEQ ID NO: 303208 - RNA, 32 nt, Homo Sapiens
guaagucuccauugcagaauugucgugcuuug

SEQ ID NO: 303209 - RNA, 32 nt, Homo Sapiens
gggacgaagcagagaccucuacagacccaagu

SEQ ID NO: 303210 - RNA, 32 nt, Homo Sapiens
aggcgcacggggcgaagauggcggcggagcga

SEQ ID NO: 303211 - RNA, 32 nt, Homo Sapiens
gagccauccuuacuguucagagacagcaacuc

SEQ ID NO: 303212 - RNA, 32 nt, Homo Sapiens
uugcauaccauauuuguaacuaucaacuuaaa

SEQ ID NO: 303213 - RNA, 32 nt, Homo Sapiens
gucugcuuacauuuccuucuccccucaggcuu

SEQ ID NO: 303214 - RNA, 32 nt, Homo Sapiens
gcaguuuguggcugcagccaguccucuugcag

SEQ ID NO: 303215 - RNA, 32 nt, Homo Sapiens
ggagcgcccggccgucgccgccgccgccauuu

SEQ ID NO: 303216 - RNA, 32 nt, Homo Sapiens
aucugccggguacccgggcggcguggcgcucg

SEQ ID NO: 303217 - RNA, 32 nt, Homo Sapiens
ccgcgccguccagcccgaggucuacggcuuug

SEQ ID NO: 303218 - RNA, 32 nt, Homo Sapiens
cucaaaccagucacuuuugucaauugcuaaua

SEQ ID NO: 303219 - RNA, 32 nt, Homo Sapiens
guauuauguauuaacauggcguguuuauuuuu

SEQ ID NO: 303220 - RNA, 32 nt, Homo Sapiens
ucuaccacuuucuguuggucacagcaacucac

SEQ ID NO: 303221 - RNA, 32 nt, Homo Sapiens
aggugugcuggaaguccacuuggaagaacugu

SEQ ID NO: 303222 - RNA, 32 nt, Homo Sapiens
aguuauaaauaaauaaccaaaaauguauguaa

SEQ ID NO: 303223 - RNA, 32 nt, Homo Sapiens
auuugguuucguuuuucuuuuguauuauccgc

SEQ ID NO: 303224 - RNA, 28 nt, Homo Sapiens
gggacggagacaggaccggcggagcccu

SEQ ID NO: 303225 - RNA, 32 nt, Homo Sapiens
ucagaguuuuuggccagugcuucugccauuuu

SEQ ID NO: 303226 - RNA, 32 nt, Homo Sapiens
uugguuguaagauuauuuuagaguauuguuga

SEQ ID NO: 303227 - RNA, 32 nt, Homo Sapiens
cucguuguuccuuuccucugucuucaagcacc

SEQ ID NO: 303228 - RNA, 32 nt, Homo Sapiens
gcccagugcaagauucugaagaagcaggaauu

SEQ ID NO: 303229 - RNA, 32 nt, Homo Sapiens
caggcaucuauuccugcccccaucaugcccca

SEQ ID NO: 303230 - RNA, 32 nt, Homo Sapiens
acuagucuccuuuuuuuuuuuaccuuuauacu

SEQ ID NO: 303231 - RNA, 32 nt, Homo Sapiens
uuauuauuuuuauaguuuuucauguuuugcuu

SEQ ID NO: 303232 - RNA, 32 nt, Homo Sapiens
aaacagucuuuaguaauuuaaucuucaugcuu

SEQ ID NO: 303233 - RNA, 32 nt, Homo Sapiens
ggaucugaaaauaaagugucauccaagccaua

SEQ ID NO: 303234 - RNA, 32 nt, Homo Sapiens
cugaauaucagcaauaucaggaugccacggcc

SEQ ID NO: 303235 - RNA, 32 nt, Homo Sapiens
cucuguacaaauaaagaaguugcuuguuguuu

SEQ ID NO: 303236 - RNA, 32 nt, Homo Sapiens
gugccucuguccuuugccacaaacaugagguu

SEQ ID NO: 303237 - RNA, 32 nt, Homo Sapiens
agggggugggaaggcugcuuugcuauggauca

SEQ ID NO: 303238 - RNA, 32 nt, Homo Sapiens
aaguauuuuuaaauauccaugauuucucccug

SEQ ID NO: 303239 - RNA, 32 nt, Homo Sapiens
acaagugcacaccaguaugcccagcuaauuuu

SEQ ID NO: 303240 - RNA, 32 nt, Homo Sapiens
uguaaacaugaggucagacauguguaagguag

SEQ ID NO: 303241 - RNA, 32 nt, Homo Sapiens
gagguuucuggugaaaacauggagaggaggcu

SEQ ID NO: 303242 - RNA, 32 nt, Homo Sapiens
caguagcaggagacuugagaaguagagugaca

SEQ ID NO: 303243 - RNA, 32 nt, Homo Sapiens
uguuuuaucaagucacuguuaaguagaagaaa

SEQ ID NO: 303244 - RNA, 32 nt, Homo Sapiens
uaauugugagaaaaaauggaaggaaaggcuug

SEQ ID NO: 303245 - RNA, 32 nt, Homo Sapiens
ccaccugcacacucagucaggaggcugcaguc

SEQ ID NO: 303246 - RNA, 32 nt, Homo Sapiens
uaaaauuuaccauuuuaaccguuuuuaaguac

SEQ ID NO: 303247 - RNA, 32 nt, Homo Sapiens
gcacccuuggggugggagccgcaagccucgcc

SEQ ID NO: 303248 - RNA, 32 nt, Homo Sapiens
aaacgguaacucaagaggacagaggcugguga

SEQ ID NO: 303249 - RNA, 32 nt, Homo Sapiens
gcaguccuugcacaggcccuccaggugauucu

SEQ ID NO: 303250 - RNA, 32 nt, Homo Sapiens
guggggagccccacacuugggcuccucgccuc

SEQ ID NO: 303251 - RNA, 32 nt, Homo Sapiens
cccuaucuguucugcccucucucgucauguga

SEQ ID NO: 303252 - RNA, 32 nt, Homo Sapiens
cgcugagcugucuccgccuccaccuaucuucc

SEQ ID NO: 303253 - RNA, 32 nt, Homo Sapiens
gugugccauauucuuguuggagaugaaccgua

SEQ ID NO: 303254 - RNA, 32 nt, Homo Sapiens
cgccgcugaccgcccgcgccccgggaaggaag

SEQ ID NO: 303255 - RNA, 32 nt, Homo Sapiens
caaaucaauaucuauuuguugagcacuuauug

SEQ ID NO: 303256 - RNA, 32 nt, Homo Sapiens
acugacuugaguuauuuucuaaaauuaagagc

SEQ ID NO: 303257 - RNA, 32 nt, Homo Sapiens
uuuggcccacugauaauguuaauucucuggcg

SEQ ID NO: 303258 - RNA, 32 nt, Homo Sapiens
caaggagcaguccccgaccucuccucggaggg

SEQ ID NO: 303259 - RNA, 32 nt, Homo Sapiens
uggccuacgaagagggccuggcgcgccucaag

SEQ ID NO: 303260 - RNA, 32 nt, Homo Sapiens
gaacaugaaagucacauccuucuccugccucu

SEQ ID NO: 303261 - RNA, 32 nt, Homo Sapiens
uuacuauggguuacauuuuuuauuuuucaaau

SEQ ID NO: 303262 - RNA, 32 nt, Homo Sapiens
ucugcuuugugacuaaauacaaacuacauuuu

SEQ ID NO: 303263 - RNA, 31 nt, Homo Sapiens
aaaauuaauaauaaaacuacuuguaagcaac

SEQ ID NO: 303264 - RNA, 32 nt, Homo Sapiens
acuuggcagcuugguuuaccgauggaugggcu

SEQ ID NO: 303265 - RNA, 32 nt, Homo Sapiens
ugucccagccccagguccugugcagggcaccu

SEQ ID NO: 303266 - RNA, 32 nt, Homo Sapiens
caggcgcagcggggucgcagggcgcggcgggu

SEQ ID NO: 303267 - RNA, 32 nt, Homo Sapiens
acggagccgagaccauagaugaggaggcugca

SEQ ID NO: 303268 - RNA, 32 nt, Homo Sapiens
aacaggucgagcugugcucgggugcugccagc

SEQ ID NO: 303269 - RNA, 32 nt, Homo Sapiens
cccucccuuccgcuccugcccagccuggggga

SEQ ID NO: 303270 - RNA, 32 nt, Homo Sapiens
cuaccgcugcggcuaccgcggcggagcugaaa

SEQ ID NO: 303271 - RNA, 32 nt, Homo Sapiens
uuucuguauuuuacuacuaaauuagaaagcac

SEQ ID NO: 303272 - RNA, 32 nt, Homo Sapiens
gaagccuggugcccuggcgacacuggaccugc

SEQ ID NO: 303273 - RNA, 32 nt, Homo Sapiens
ugggagagccuggcaaggcauuccucaucacc

SEQ ID NO: 303274 - RNA, 32 nt, Homo Sapiens
uguaaaaaaugaacuucaaauuauggagugga

SEQ ID NO: 303275 - RNA, 32 nt, Homo Sapiens
cagggucgcugccugcucuccuggggcugaag

SEQ ID NO: 303276 - RNA, 32 nt, Homo Sapiens
auccacccaccagucuuaggcaucauaaugug

SEQ ID NO: 303277 - RNA, 32 nt, Homo Sapiens
aagggagaacagaaggggaguccucucuuccc

SEQ ID NO: 303278 - RNA, 32 nt, Homo Sapiens
cucucugucuuaauuagcacaaaccgacagag

SEQ ID NO: 303279 - RNA, 32 nt, Homo Sapiens
guaaaguguaaauccuuuuucuuuauaaacuu

SEQ ID NO: 303280 - RNA, 32 nt, Homo Sapiens
caaaauucuucagauuguuccucaugaauauc

SEQ ID NO: 303281 - RNA, 32 nt, Homo Sapiens
auuagaauggugcucuuaaaaauagaaacuga

SEQ ID NO: 303282 - RNA, 32 nt, Homo Sapiens
ccaacaggagagcuugaguuucccuucucacu

SEQ ID NO: 303283 - RNA, 32 nt, Homo Sapiens
aucaagaugugcgcaagguuguuuccugcuga

SEQ ID NO: 303284 - RNA, 32 nt, Homo Sapiens
cagcucugcuguccuggcaagugucauugacu

SEQ ID NO: 303285 - RNA, 32 nt, Homo Sapiens
aagugcccguuuuguucuuguuuaccagaauc

SEQ ID NO: 303286 - RNA, 32 nt, Homo Sapiens
acuccgcccucccagccucaacaccucagggc

SEQ ID NO: 303287 - RNA, 32 nt, Homo Sapiens
auggccgcccugucccucucccuagcuggcgg

SEQ ID NO: 303288 - RNA, 32 nt, Homo Sapiens
gccaccuguaggccacaccccauccagcuccc

SEQ ID NO: 303289 - RNA, 32 nt, Homo Sapiens
caggggaggagggaggggcgccagcaccugau

SEQ ID NO: 303290 - RNA, 32 nt, Homo Sapiens
caaacaaccuggcuggaaaacacacagcaaaa

SEQ ID NO: 303291 - RNA, 32 nt, Homo Sapiens
cgguuaacggucaaagccccccugccuacuuu

SEQ ID NO: 303292 - RNA, 32 nt, Homo Sapiens
uggacccccuggaagcugauucacuauggggg

SEQ ID NO: 303293 - RNA, 32 nt, Homo Sapiens
gguuuccaggacugaaacuuugauuuuccggg

SEQ ID NO: 303294 - RNA, 32 nt, Homo Sapiens
cugccaucuggcgcgccgcagacucccgagaa

SEQ ID NO: 303295 - RNA, 32 nt, Homo Sapiens
ucauuuuuuguuuuguuuuuuauuggcuugac

SEQ ID NO: 303296 - RNA, 32 nt, Homo Sapiens
uuauuaccacccaagagaaacaggaaaaaggu

SEQ ID NO: 303297 - RNA, 32 nt, Homo Sapiens
caggggccagcaugagccggagggagggaagu

SEQ ID NO: 303298 - RNA, 32 nt, Homo Sapiens
cgcagacccagcugcguccugcgccgccuccc

SEQ ID NO: 303299 - RNA, 29 nt, Homo Sapiens
guuuacuuuauccaauccucaggauuuca

SEQ ID NO: 303300 - RNA, 32 nt, Homo Sapiens
cuuggaugguuaguuucacuuuuuacauauag

SEQ ID NO: 303301 - RNA, 32 nt, Homo Sapiens
uccagggccuuauaguucuccucauuaucuau

SEQ ID NO: 303302 - RNA, 32 nt, Homo Sapiens
ggcugcaggcugggagggagaagugcuacgcc

SEQ ID NO: 303303 - RNA, 32 nt, Homo Sapiens
gcgggaacucugagucagaacguugauuaucu

SEQ ID NO: 303304 - RNA, 32 nt, Homo Sapiens
ccaagaaaaaggaaaagaaagagugccaccaa

SEQ ID NO: 303305 - RNA, 32 nt, Homo Sapiens
ccacacuuuauauaaaguaguuuuugcauuug

SEQ ID NO: 303306 - RNA, 32 nt, Homo Sapiens
gugggggcuggauaugcccaccccugccaaaa

SEQ ID NO: 303307 - RNA, 28 nt, Homo Sapiens
ucauuauguagaaauauuauaaauccaa

SEQ ID NO: 303308 - RNA, 32 nt, Homo Sapiens
gaauuauuuuucucuguagaaacacagauacc

SEQ ID NO: 303309 - RNA, 32 nt, Homo Sapiens
uggauagcuuuuaauuacauuucagagaggug

SEQ ID NO: 303310 - RNA, 32 nt, Homo Sapiens
ggcggguuaaagagcgcguugcuggcugggcc

SEQ ID NO: 303311 - RNA, 32 nt, Homo Sapiens
aauuagccgggcgugggggcgggcaucuguag

SEQ ID NO: 303312 - RNA, 32 nt, Homo Sapiens
uuuaaaggaggaggaguaaucaacaguaacga

SEQ ID NO: 303313 - RNA, 32 nt, Homo Sapiens
ccuuugggauagggcugcuuuccccgugcuag

SEQ ID NO: 303314 - RNA, 32 nt, Homo Sapiens
cgaaugcuugagccugccccagccccagccgu

SEQ ID NO: 303315 - RNA, 32 nt, Homo Sapiens
aggaacaggcauuguuagcaucagauuauacc

SEQ ID NO: 303316 - RNA, 32 nt, Homo Sapiens
uuuccagaaguauauuauuuggcugccuaaua

SEQ ID NO: 303317 - RNA, 32 nt, Homo Sapiens
uguacagaaguauuuuucaaagcagcauuaaa

SEQ ID NO: 303318 - RNA, 32 nt, Homo Sapiens
gggcgacgcggcaggggucuccgcgcccaggc

SEQ ID NO: 303319 - RNA, 32 nt, Homo Sapiens
ugcauucagaucugaaguagugugaguguuag

SEQ ID NO: 303320 - RNA, 32 nt, Homo Sapiens
agcccgggccagccuucuccuguagggacgga

SEQ ID NO: 303321 - RNA, 32 nt, Homo Sapiens
guuuguuuugaaaaaauagagaugggguuuca

SEQ ID NO: 303322 - RNA, 31 nt, Homo Sapiens
aaagugaaauaaaaaauauguugaaucagau

SEQ ID NO: 303323 - RNA, 32 nt, Homo Sapiens
accacagaaguaauuuucaaaguaagucucug

SEQ ID NO: 303324 - RNA, 32 nt, Homo Sapiens
agaacuuuaaauuguguuuuaauuguaaaaau

SEQ ID NO: 303325 - RNA, 32 nt, Homo Sapiens
cugcagaccccaccccagcaggcucacucagc

SEQ ID NO: 303326 - RNA, 32 nt, Homo Sapiens
cauagauaggggaguuggccccugcccacccc

SEQ ID NO: 303327 - RNA, 32 nt, Homo Sapiens
acggaagucaaagucaagcuuucuaggccgac

SEQ ID NO: 303328 - RNA, 32 nt, Homo Sapiens
agagcccagagcauagacaggaguguaggagu

SEQ ID NO: 303329 - RNA, 32 nt, Homo Sapiens
ugaugcuuuuuccaccaguccacagcuuccuu

SEQ ID NO: 303330 - RNA, 32 nt, Homo Sapiens
ugggagaugcucacugagcugcugcuuuuaug

SEQ ID NO: 303331 - RNA, 32 nt, Homo Sapiens
agccuucccguccgccucgccacgcgcccgga

SEQ ID NO: 303332 - RNA, 29 nt, Homo Sapiens
ggucuucggggacagagggagguuuggug

SEQ ID NO: 303333 - RNA, 32 nt, Homo Sapiens
cuagcacuuuugggggccgaggcggguggauc

SEQ ID NO: 303334 - RNA, 32 nt, Homo Sapiens
uuuagucguggguuacauaugcuugagcuuuu

SEQ ID NO: 303335 - RNA, 32 nt, Homo Sapiens
uuuuuaagauggaaucuugcucugucgcccac

SEQ ID NO: 303336 - RNA, 29 nt, Homo Sapiens
agggagguuggugucagaggcaggagugg

SEQ ID NO: 303337 - RNA, 32 nt, Homo Sapiens
gcccuagccaaggagccaggucugcaaagcug

SEQ ID NO: 303338 - RNA, 32 nt, Homo Sapiens
aucauggcagaauuuuucuuaucccuugugag

SEQ ID NO: 303339 - RNA, 32 nt, Homo Sapiens
gcugagggggaccgcuggcaccccccuucccu

SEQ ID NO: 303340 - RNA, 30 nt, Homo Sapiens
uuugaggauaaaaaaggcauuguauuauau

SEQ ID NO: 303341 - RNA, 32 nt, Homo Sapiens
ucugcuccucucuucucucuuggaccuauuuu

SEQ ID NO: 303342 - RNA, 32 nt, Homo Sapiens
gcuaugucaacagcauuuauuuguacuaaugc

SEQ ID NO: 303343 - RNA, 32 nt, Homo Sapiens
caccaguucucgucuuggaggaacuauuagga

SEQ ID NO: 303344 - RNA, 32 nt, Homo Sapiens
uugcuauauaccauguaauagugaguauagcu

SEQ ID NO: 303345 - RNA, 32 nt, Homo Sapiens
ccugcagcagugccgacaccccugagaacaca

SEQ ID NO: 303346 - RNA, 32 nt, Homo Sapiens
cucuccugccuggccuggccugggacaccucc

SEQ ID NO: 303347 - RNA, 32 nt, Homo Sapiens
aacaagaccacuuuuuaagauuuauccuguuu

SEQ ID NO: 303348 - RNA, 32 nt, Homo Sapiens
gaaaagauaccccagucugcggugacgaggac

SEQ ID NO: 303349 - RNA, 32 nt, Homo Sapiens
agagaugagaaaaggauugagaaggauaaacu

SEQ ID NO: 303350 - RNA, 32 nt, Homo Sapiens
cacccuuagaaaaagaugguaccucuugggcc

SEQ ID NO: 303351 - RNA, 32 nt, Homo Sapiens
gggugggaggggcugagauggcugcuggccug

SEQ ID NO: 303352 - RNA, 32 nt, Homo Sapiens
augguaggagccugcacaggauguguguguau

SEQ ID NO: 303353 - RNA, 32 nt, Homo Sapiens
ggagaccaggacucugccuuccaggcguaggg

SEQ ID NO: 303354 - RNA, 30 nt, Homo Sapiens
gaagcaggcaggcgcaggaugcggggccac

SEQ ID NO: 303355 - RNA, 32 nt, Homo Sapiens
ucucccagaggcuuuuaccagcuggccccauu

SEQ ID NO: 303356 - RNA, 32 nt, Homo Sapiens
ugugccucccuuccgcugcgggcccagcugag

SEQ ID NO: 303357 - RNA, 32 nt, Homo Sapiens
aaaauugaaauaaauaugaaaauaucaaguuc

SEQ ID NO: 303358 - RNA, 32 nt, Homo Sapiens
gaugaagagccuaucugucaucgccugaggug

SEQ ID NO: 303359 - RNA, 32 nt, Homo Sapiens
auuuauuaaguaccuacugugugcucagcacu

SEQ ID NO: 303360 - RNA, 32 nt, Homo Sapiens
ggaaagaaaaggaaauggcuuuuauaaacauc

SEQ ID NO: 303361 - RNA, 32 nt, Homo Sapiens
ggcucccauccugacagaaaugaccuaacgcc

SEQ ID NO: 303362 - RNA, 32 nt, Homo Sapiens
gaguauuugugauuuucuuacuauauuguaag

SEQ ID NO: 303363 - RNA, 32 nt, Homo Sapiens
ugcuaggucugcuuccugcccaggaaggugcc

SEQ ID NO: 303364 - RNA, 32 nt, Homo Sapiens
gugaugccccauguaaaaacaugaugauaaaa

SEQ ID NO: 303365 - RNA, 32 nt, Homo Sapiens
aauuauaacaauagaaaugaugacaaaacuaa

SEQ ID NO: 303366 - RNA, 32 nt, Homo Sapiens
uaccgaggcuucagcgggugccgcccgccuag

SEQ ID NO: 303367 - RNA, 32 nt, Homo Sapiens
agcuagguaggaaacaugagcggcaccaacuu

SEQ ID NO: 303368 - RNA, 31 nt, Homo Sapiens
cauuagaaauaaaauuguugucacacuuuca

SEQ ID NO: 303369 - RNA, 32 nt, Homo Sapiens
auuaucucaauccucauggaauauaacgggac

SEQ ID NO: 303370 - RNA, 32 nt, Homo Sapiens
caaagguacuugucacaucauccagauuccac

SEQ ID NO: 303371 - RNA, 32 nt, Homo Sapiens
ccccagugcagggcuggucuuggggaggcagg

SEQ ID NO: 303372 - RNA, 32 nt, Homo Sapiens
ccaauuucauuuuacuccaggcacauagucca

SEQ ID NO: 303373 - RNA, 32 nt, Homo Sapiens
uuuuuuuuucucucucucucucucuuaagaaa

SEQ ID NO: 303374 - RNA, 32 nt, Homo Sapiens
uggcccccuuuaugaaaaccacuucccacagc

SEQ ID NO: 303375 - RNA, 32 nt, Homo Sapiens
cgugugcacagcuaaccaccgugcgucucucu

SEQ ID NO: 303376 - RNA, 32 nt, Homo Sapiens
aacuagguaaguauaaaaccacagguuaacaa

SEQ ID NO: 303377 - RNA, 32 nt, Homo Sapiens
uaccccugcccaucccugagccagguaccacc

SEQ ID NO: 303378 - RNA, 32 nt, Homo Sapiens
cuugguucucccugagcuaaccucgccagccu

SEQ ID NO: 303379 - RNA, 32 nt, Homo Sapiens
ccuuccccaagaguccucucuauccuggauga

SEQ ID NO: 303380 - RNA, 32 nt, Homo Sapiens
gauauuuuugguuuuuuuaaaacugauaauaa

SEQ ID NO: 303381 - RNA, 32 nt, Homo Sapiens
cucugaucuugggcugucugcacugucacagg

SEQ ID NO: 303382 - RNA, 32 nt, Homo Sapiens
ccaucgagcugcuggaucccacagccagccgg

SEQ ID NO: 303383 - RNA, 32 nt, Homo Sapiens
acagcauccuccccgccuuccaccuugguaga

SEQ ID NO: 303384 - RNA, 32 nt, Homo Sapiens
cgguucuaaaauuaauuuguugcagcuuugua

SEQ ID NO: 303385 - RNA, 32 nt, Homo Sapiens
ucucgucagcgccgcuucuccugguuucucuu

SEQ ID NO: 303386 - RNA, 32 nt, Homo Sapiens
caggggugggugaaagaagagauagaacuuag

SEQ ID NO: 303387 - RNA, 32 nt, Homo Sapiens
aacucagauaaaauuguauaugauguaaauag

SEQ ID NO: 303388 - RNA, 32 nt, Homo Sapiens
guucucugucacucuuguuuuuguuuucuguu

SEQ ID NO: 303389 - RNA, 32 nt, Homo Sapiens
acccagcauccaugggccgcugccggaggccu

SEQ ID NO: 303390 - RNA, 32 nt, Homo Sapiens
ucugugggaggaguaaagaaaauccaaaagca

SEQ ID NO: 303391 - RNA, 32 nt, Homo Sapiens
aguggccgaccggagauagcuaagaugccgcg

SEQ ID NO: 303392 - RNA, 32 nt, Homo Sapiens
cgcccuccaagcccuucaggccgccccagugu

SEQ ID NO: 303393 - RNA, 32 nt, Homo Sapiens
uugaaggauguguuaucaaauauuuuacuaac

SEQ ID NO: 303394 - RNA, 32 nt, Homo Sapiens
acugaggcaaagggcuggccacaccaccugag

SEQ ID NO: 303395 - RNA, 32 nt, Homo Sapiens
ucauaggguguaccuuucccggcuccagcagc

SEQ ID NO: 303396 - RNA, 32 nt, Homo Sapiens
uuccuaccucgcgucccuaggcggcggcggcc

SEQ ID NO: 303397 - RNA, 32 nt, Homo Sapiens
agguuugaaguaaaaauuaucuaguuaaauuu

SEQ ID NO: 303398 - RNA, 32 nt, Homo Sapiens
cacgcccgcgcgcccgccggcgccaugggaag

SEQ ID NO: 303399 - RNA, 32 nt, Homo Sapiens
uggcagcagggccccagcgcaccaugucugcc

SEQ ID NO: 303400 - RNA, 32 nt, Homo Sapiens
cgcgcuccccuccuccccggcggccgcacuca

SEQ ID NO: 303401 - RNA, 31 nt, Homo Sapiens
cucagauucuggagaaagucaagccagcucu

SEQ ID NO: 303402 - RNA, 32 nt, Homo Sapiens
ugacuuuucuuacugguuuuuaugcccacggu

SEQ ID NO: 303403 - RNA, 32 nt, Homo Sapiens
uuguagauauugugugaacuacaguauauaau

SEQ ID NO: 303404 - RNA, 32 nt, Homo Sapiens
ccccccacucccuacccuuaauccccacaugg

SEQ ID NO: 303405 - RNA, 32 nt, Homo Sapiens
aguauguuuuaacauguaauugugggagaaau

SEQ ID NO: 303406 - RNA, 32 nt, Homo Sapiens
gcagguuuucagacaaaggaucccuggcaauc

SEQ ID NO: 303407 - RNA, 32 nt, Homo Sapiens
cagggaaggccuccccgcacgggugggggaaa

SEQ ID NO: 303408 - RNA, 32 nt, Homo Sapiens
ccaguaguacuguccuaggagucggaggucgg

SEQ ID NO: 303409 - RNA, 32 nt, Homo Sapiens
agaagccauguacagagaaguaaaaguaagau

SEQ ID NO: 303410 - RNA, 32 nt, Homo Sapiens
gcgccagaggcugcgaccccccugccccgaau

SEQ ID NO: 303411 - RNA, 32 nt, Homo Sapiens
gggauuacaggcgugagcuagaucugacuuuc

SEQ ID NO: 303412 - RNA, 32 nt, Homo Sapiens
uuaccuggcagugauaaagaugggcuguggag

SEQ ID NO: 303413 - RNA, 32 nt, Homo Sapiens
guacugaagcuucuucccguccugccacagac

SEQ ID NO: 303414 - RNA, 32 nt, Homo Sapiens
uaaugaaauuuauaaauaugcuucuugaauaa

SEQ ID NO: 303415 - RNA, 32 nt, Homo Sapiens
gaucauuccuucccuuuauuccaacuuagauu

SEQ ID NO: 303416 - RNA, 32 nt, Homo Sapiens
aaauguaagaaauuggaauaaaaaagagagac

SEQ ID NO: 303417 - RNA, 30 nt, Homo Sapiens
guuugugucugugcugcguuugugagcugc

SEQ ID NO: 303418 - RNA, 32 nt, Homo Sapiens
auauaauuggauauuaaaaaauccauucuggc

SEQ ID NO: 303419 - RNA, 32 nt, Homo Sapiens
uuucuuauacacaacacacaauuuaugaauuu

SEQ ID NO: 303420 - RNA, 32 nt, Homo Sapiens
cccuugcagcaccaccugcaggaccuccuccu

SEQ ID NO: 303421 - RNA, 32 nt, Homo Sapiens
uucccugugcaagauucuuagaugggccucaa

SEQ ID NO: 303422 - RNA, 32 nt, Homo Sapiens
gccagucguggguugguggcuggagggccugg

SEQ ID NO: 303423 - RNA, 32 nt, Homo Sapiens
cuacauauacuuauuacccaguacaguuuuuu

SEQ ID NO: 303424 - RNA, 32 nt, Homo Sapiens
ggauucuauuggaugagcugguguggugcugc

SEQ ID NO: 303425 - RNA, 32 nt, Homo Sapiens
aaaaaagagaucuauuucuuuaaaagauauuu

SEQ ID NO: 303426 - RNA, 32 nt, Homo Sapiens
gcuggagacggggccagcucggcggccugcug

SEQ ID NO: 303427 - RNA, 32 nt, Homo Sapiens
cccuagcucccuccacuuggcuccccuggucc

SEQ ID NO: 303428 - RNA, 32 nt, Homo Sapiens
gcuaacuuuccacacauggcugcauuccauuu

SEQ ID NO: 303429 - RNA, 32 nt, Homo Sapiens
uggaauugaaguuaaaaacccauccaccauuu

SEQ ID NO: 303430 - RNA, 32 nt, Homo Sapiens
gugucaucauuucuucauucugcauauucuuu

SEQ ID NO: 303431 - RNA, 32 nt, Homo Sapiens
aagcaaaauauguaaacuuguacggggugauc

SEQ ID NO: 303432 - RNA, 32 nt, Homo Sapiens
auucagcucagccuuacaaguggcgagggaaa

SEQ ID NO: 303433 - RNA, 32 nt, Homo Sapiens
aucucucugaagauuaagaagucucugugaag

SEQ ID NO: 303434 - RNA, 32 nt, Homo Sapiens
cagguguggguucccacgugggcacagagugg

SEQ ID NO: 303435 - RNA, 32 nt, Homo Sapiens
auaaaaauggauaaaauacugauacauguaac

SEQ ID NO: 303436 - RNA, 32 nt, Homo Sapiens
gguucccaucucuccuucugccucacucuggg

SEQ ID NO: 303437 - RNA, 32 nt, Homo Sapiens
agggaggacgggggcgcagacggccggcgcgc

SEQ ID NO: 303438 - RNA, 32 nt, Homo Sapiens
ccuucgaccccuuugcccacguggugaccgcu

SEQ ID NO: 303439 - RNA, 32 nt, Homo Sapiens
aaaagcaucagaucuuuguauaugcuaagauu

SEQ ID NO: 303440 - RNA, 31 nt, Homo Sapiens
ucagcuucaaggagaaagaguucagaggccc

SEQ ID NO: 303441 - RNA, 32 nt, Homo Sapiens
cgugagguggagguuguagugagucaagaucg

SEQ ID NO: 303442 - RNA, 32 nt, Homo Sapiens
cuaaaucucauuauuucuccuuaauauguuac

SEQ ID NO: 303443 - RNA, 32 nt, Homo Sapiens
ucuugaauucuacuuuuuuuuaaauuucuacu

SEQ ID NO: 303444 - RNA, 31 nt, Homo Sapiens
cacuucaggaugguuuuuaaauuugguauga

SEQ ID NO: 303445 - RNA, 32 nt, Homo Sapiens
acuagagucuggauguuucauuguaggaauau

SEQ ID NO: 303446 - RNA, 32 nt, Homo Sapiens
uuuuugagggaucagaagggaaggggagaguc

SEQ ID NO: 303447 - RNA, 32 nt, Homo Sapiens
cauuguggagggcuuggccagguguauauaaa

SEQ ID NO: 303448 - RNA, 32 nt, Homo Sapiens
cucccccuuuuaauuucugguguuaugaggaa

SEQ ID NO: 303449 - RNA, 32 nt, Homo Sapiens
auagggaugaagaacagaucaguuguugucag

SEQ ID NO: 303450 - RNA, 32 nt, Homo Sapiens
cuggccucagaagacgucaaacguaacagcuc

SEQ ID NO: 303451 - RNA, 32 nt, Homo Sapiens
ggccaggcugacugaauguaucuccuagcuau

SEQ ID NO: 303452 - RNA, 32 nt, Homo Sapiens
uucagacccagggcucaggcucugagagcuuc

SEQ ID NO: 303453 - RNA, 32 nt, Homo Sapiens
auccccuucuucccuuugcucaagauuguuuu

SEQ ID NO: 303454 - RNA, 32 nt, Homo Sapiens
auguagaagucauaugaaugagggaucgugca

SEQ ID NO: 303455 - RNA, 32 nt, Homo Sapiens
gggacggggaggggggcgggaugugucaccca

SEQ ID NO: 303456 - RNA, 32 nt, Homo Sapiens
gcagacaucauucccugcccuggcagugacuu

SEQ ID NO: 303457 - RNA, 32 nt, Homo Sapiens
gcaagcgagcuacuagcgaccggaggaaagug

SEQ ID NO: 303458 - RNA, 32 nt, Homo Sapiens
agcgggggauggggaagcgcgcggccuuggag

SEQ ID NO: 303459 - RNA, 32 nt, Homo Sapiens
auuuuaggcuuuuuaauacguguguagugaua

SEQ ID NO: 303460 - RNA, 32 nt, Homo Sapiens
aauauaaaaaucagcuguguuugguggugugc

SEQ ID NO: 303461 - RNA, 32 nt, Homo Sapiens
cgcuggagggaagaaggcgcuggaggagcacc

SEQ ID NO: 303462 - RNA, 32 nt, Homo Sapiens
aauuuuaauugauguauggacacacacaaaca

SEQ ID NO: 303463 - RNA, 32 nt, Homo Sapiens
uuccuggccgggcgugguggcuccugccugua

SEQ ID NO: 303464 - RNA, 32 nt, Homo Sapiens
uuauuauuuaaauuauuuuuuauguaauauca

SEQ ID NO: 303465 - RNA, 32 nt, Homo Sapiens
aucgggaccucuuggaggaacccuggguacca

SEQ ID NO: 303466 - RNA, 32 nt, Homo Sapiens
uucugcacgagacuuugaggcugucagagcgc

SEQ ID NO: 303467 - RNA, 32 nt, Homo Sapiens
cuugaccuccugcaggccauguguguauuacu

SEQ ID NO: 303468 - RNA, 32 nt, Homo Sapiens
agcugugcgcucucgucgggagucccagccau

SEQ ID NO: 303469 - RNA, 30 nt, Homo Sapiens
cacagaugaagauggaacuaagccgaguua

SEQ ID NO: 303470 - RNA, 32 nt, Homo Sapiens
ggaagaggguacagcuuugugcaggucacaug

SEQ ID NO: 303471 - RNA, 32 nt, Homo Sapiens
agaauaaccgacaugaaaauuuuuuaggauaa

SEQ ID NO: 303472 - RNA, 32 nt, Homo Sapiens
ggagacaggucccugcccuuuauuugcgggau

SEQ ID NO: 303473 - RNA, 32 nt, Homo Sapiens
cuuagauuuuacaugaaguauuuuuucaguau

SEQ ID NO: 303474 - RNA, 32 nt, Homo Sapiens
uauguuuauaauuuuuagguguuuccugaaau

SEQ ID NO: 303475 - RNA, 32 nt, Homo Sapiens
gcgccccgcccggaguccccgccgccgucaug

SEQ ID NO: 303476 - RNA, 32 nt, Homo Sapiens
agguaggauuugacacugguuuucucacuauu

SEQ ID NO: 303477 - RNA, 32 nt, Homo Sapiens
gacugauucuccuccgccaggccacccagagg

SEQ ID NO: 303478 - RNA, 32 nt, Homo Sapiens
uuccccaagcugagaagcugagagcuggagga

SEQ ID NO: 303479 - RNA, 32 nt, Homo Sapiens
cuugacguggaugaaauugaaaaguaccaaga

SEQ ID NO: 303480 - RNA, 32 nt, Homo Sapiens
ccacagaucacugagagggaccaucucccaag

SEQ ID NO: 303481 - RNA, 32 nt, Homo Sapiens
aagagaugaagaaacuuacuuuucucccuggc

SEQ ID NO: 303482 - RNA, 32 nt, Homo Sapiens
gaaauaucuuauuuucuaaguuuaccuuuagu

SEQ ID NO: 303483 - RNA, 32 nt, Homo Sapiens
cuggcggcggggggacggaccggcccugcagu

SEQ ID NO: 303484 - RNA, 32 nt, Homo Sapiens
gggcugucuggggcuccuguuuuuuagcugcu

SEQ ID NO: 303485 - RNA, 32 nt, Homo Sapiens
cccauguauuuuuguauugccuguaaaggaaa

SEQ ID NO: 303486 - RNA, 32 nt, Homo Sapiens
uuaguuuguuuacauuuuccugaacccuccug

SEQ ID NO: 303487 - RNA, 32 nt, Homo Sapiens
ucgagacgcgcccuuuuaugucuaucuuucgu

SEQ ID NO: 303488 - RNA, 32 nt, Homo Sapiens
cugccggccccggccgccccuccucgugaaag

SEQ ID NO: 303489 - RNA, 32 nt, Homo Sapiens
gacgguugcuguuaccugguauuuccacucuc

SEQ ID NO: 303490 - RNA, 32 nt, Homo Sapiens
uaacugggauuacaggcaugcgccaccaugcc

SEQ ID NO: 303491 - RNA, 32 nt, Homo Sapiens
aggguugggagaauaguugagaucuggaaagc

SEQ ID NO: 303492 - RNA, 32 nt, Homo Sapiens
aaauauucauaauguggaauuugaagggcaua

SEQ ID NO: 303493 - RNA, 32 nt, Homo Sapiens
aacaaguuccauuaugaaaaucuuauuccuca

SEQ ID NO: 303494 - RNA, 32 nt, Homo Sapiens
gagaucccacuuucacucaguuuucuuguuuu

SEQ ID NO: 303495 - RNA, 32 nt, Homo Sapiens
uaccaucucagaagucaagcugauggaguaug

SEQ ID NO: 303496 - RNA, 32 nt, Homo Sapiens
cagggccccucucuccucccaccuggacuugg

SEQ ID NO: 303497 - RNA, 32 nt, Homo Sapiens
cuuucccacucugggugggggccuggcggugu

SEQ ID NO: 303498 - RNA, 32 nt, Homo Sapiens
gaggcuuccccucacuauccuaccccacccgc

SEQ ID NO: 303499 - RNA, 32 nt, Homo Sapiens
acccacccaucccucccugcagcaccucgccu

SEQ ID NO: 303500 - RNA, 32 nt, Homo Sapiens
caacugcuuuucugccgugccucucuucccua

SEQ ID NO: 303501 - RNA, 31 nt, Homo Sapiens
cggggcuggacgcgcgcuccaagauggcggc

SEQ ID NO: 303502 - RNA, 32 nt, Homo Sapiens
agcagccaagauacacaggagauggagccccc

SEQ ID NO: 303503 - RNA, 32 nt, Homo Sapiens
cucaagcccggugcgcgcccucgcgucccgcc

SEQ ID NO: 303504 - RNA, 32 nt, Homo Sapiens
uaauaguuaagagacagaucuguuacagguuu

SEQ ID NO: 303505 - RNA, 32 nt, Homo Sapiens
ucuuucuuuggcagcccuccggcccuuaccuu

SEQ ID NO: 303506 - RNA, 32 nt, Homo Sapiens
aagggccggcuggggccuggggugcagcuggu

SEQ ID NO: 303507 - RNA, 32 nt, Homo Sapiens
guuggccuuuugcccguggugugcuaguagcu

SEQ ID NO: 303508 - RNA, 31 nt, Homo Sapiens
ggcucuucuaaccucagccaaacacagagcg

SEQ ID NO: 303509 - RNA, 32 nt, Homo Sapiens
gaaagaagguggcuuaucaaguggguuuguag

SEQ ID NO: 303510 - RNA, 32 nt, Homo Sapiens
uuaaaaguacuaaugaaaaaacaugacauacu

SEQ ID NO: 303511 - RNA, 32 nt, Homo Sapiens
uaauacacauauuugcacaaguacaguaacaa

SEQ ID NO: 303512 - RNA, 32 nt, Homo Sapiens
gaagagaaaauucacaucugccuuguuaaucu

SEQ ID NO: 303513 - RNA, 32 nt, Homo Sapiens
uccauucgcuccugggguuuccugcaagcccu

SEQ ID NO: 303514 - RNA, 32 nt, Homo Sapiens
cacagccagaguugccucuccuccuccucuuc

SEQ ID NO: 303515 - RNA, 32 nt, Homo Sapiens
gcuagagcaugaaacuaacagguaucugcacg

SEQ ID NO: 303516 - RNA, 32 nt, Homo Sapiens
uguuccccgccuuagccgcuggcgccucccaa

SEQ ID NO: 303517 - RNA, 30 nt, Homo Sapiens
gcuucgugggacccgcggccggcgcgggga

SEQ ID NO: 303518 - RNA, 32 nt, Homo Sapiens
cacacaccaaauaaucagaaacaaagaacucc

SEQ ID NO: 303519 - RNA, 32 nt, Homo Sapiens
cuccuggauuaaucucuuucuugaauuuugaa

SEQ ID NO: 303520 - RNA, 32 nt, Homo Sapiens
ccaacuugacagucuaccugugguauaacugu

SEQ ID NO: 303521 - RNA, 32 nt, Homo Sapiens
agacucuuuaugaucuggcccuugcuuaccuc

SEQ ID NO: 303522 - RNA, 32 nt, Homo Sapiens
uugcccgaaucggcggaguucgcagcuagcga

SEQ ID NO: 303523 - RNA, 32 nt, Homo Sapiens
aaagaaaacagauuccaagagaauugaagauu

SEQ ID NO: 303524 - RNA, 32 nt, Homo Sapiens
ucaacuccggcagcucaagacccccgagcaac

SEQ ID NO: 303525 - RNA, 32 nt, Homo Sapiens
aaggaaauugguuguacugacccccaggcccu

SEQ ID NO: 303526 - RNA, 32 nt, Homo Sapiens
gaaggccagagugaggacugaugcagcucuuu

SEQ ID NO: 303527 - RNA, 32 nt, Homo Sapiens
cuuucuguaguaauaaaaaguaacacaccaag

SEQ ID NO: 303528 - RNA, 32 nt, Homo Sapiens
ucuucacaaagaaggaagaaaagaaggagugg

SEQ ID NO: 303529 - RNA, 32 nt, Homo Sapiens
uugguccaauaucagagauuugaaagaaccug

SEQ ID NO: 303530 - RNA, 32 nt, Homo Sapiens
aaucaacugccaaaggugcuacugugucccca

SEQ ID NO: 303531 - RNA, 32 nt, Homo Sapiens
auuuuuauuuuuguuuuuguugguaggcgucu

SEQ ID NO: 303532 - RNA, 32 nt, Homo Sapiens
ugaucccauuuuccucugacguccaccuccua

SEQ ID NO: 303533 - RNA, 32 nt, Homo Sapiens
augccagauggccacacccccagccacagaug

SEQ ID NO: 303534 - RNA, 32 nt, Homo Sapiens
cuuacuaaaaauuuuuuuuuacuguuaaaaaa

SEQ ID NO: 303535 - RNA, 32 nt, Homo Sapiens
ugugccugucuccuguaugaucacaucaccaa

SEQ ID NO: 303536 - RNA, 32 nt, Homo Sapiens
uauaaugaugacucuuggcagcccuuugggag

SEQ ID NO: 303537 - RNA, 32 nt, Homo Sapiens
guuccauccucugccaucuacuccacuguuca

SEQ ID NO: 303538 - RNA, 32 nt, Homo Sapiens
gaacugaaacaucagcacaaagaagcaaucau

SEQ ID NO: 303539 - RNA, 29 nt, Homo Sapiens
gcacgguggcucaugccuauaaaauucca

SEQ ID NO: 303540 - RNA, 32 nt, Homo Sapiens
aacucauguaaugucuuaaaucuuacaaguau

SEQ ID NO: 303541 - RNA, 32 nt, Homo Sapiens
cuggagcccuccccugcccacccgcccccagc

SEQ ID NO: 303542 - RNA, 32 nt, Homo Sapiens
cuaauuuuagcaucuuuuuuuuuuuuuuuaca

SEQ ID NO: 303543 - RNA, 32 nt, Homo Sapiens
acagaggagggagaggcagauccugggccggg

SEQ ID NO: 303544 - RNA, 32 nt, Homo Sapiens
guuauuacaaauaaauaugucucuuuauuuuu

SEQ ID NO: 303545 - RNA, 32 nt, Homo Sapiens
uggcccacaccuguaaucccagcacuuuggga

SEQ ID NO: 303546 - RNA, 32 nt, Homo Sapiens
aauauaaauauguggaagauuacgagcagggu

SEQ ID NO: 303547 - RNA, 32 nt, Homo Sapiens
ggaggugagcugcacugaaacuuuacgacaaa

SEQ ID NO: 303548 - RNA, 32 nt, Homo Sapiens
uuuugauuugcuuuaaaaauggccuuccuaca

SEQ ID NO: 303549 - RNA, 30 nt, Homo Sapiens
uauuuacuaccuagcccccaucuucacugg

SEQ ID NO: 303550 - RNA, 32 nt, Homo Sapiens
aggugccagagccccaggggcugcagagccug

SEQ ID NO: 303551 - RNA, 32 nt, Homo Sapiens
uugucagggaguauucuccguuuuccuuucuc

SEQ ID NO: 303552 - RNA, 32 nt, Homo Sapiens
aguagaacacaagucacauuucagauggaggc

SEQ ID NO: 303553 - RNA, 32 nt, Homo Sapiens
gacuguagcucuucagacucccucucgcaaug

SEQ ID NO: 303554 - RNA, 32 nt, Homo Sapiens
guuguugaucauaauauaauugguuacaaagu

SEQ ID NO: 303555 - RNA, 32 nt, Homo Sapiens
gaauaaauauauuguaaccaauguuauguaaa

SEQ ID NO: 303556 - RNA, 32 nt, Homo Sapiens
cugucaaugccaccaguuggaccuccauacau

SEQ ID NO: 303557 - RNA, 31 nt, Homo Sapiens
ugccagggcuccugccugcuccuccuguguu

SEQ ID NO: 303558 - RNA, 32 nt, Homo Sapiens
gccagcaggaccacagcugugaccggcugcuc

SEQ ID NO: 303559 - RNA, 31 nt, Homo Sapiens
agacaucugcccucagcuagcacagucccug

SEQ ID NO: 303560 - RNA, 32 nt, Homo Sapiens
uauaauuuuugugagguauacauauuguggaa

SEQ ID NO: 303561 - RNA, 32 nt, Homo Sapiens
agggugagccccagcugcugcgcacggcggcc

SEQ ID NO: 303562 - RNA, 32 nt, Homo Sapiens
gaguucccaucccacaagaguccuaggaagca

SEQ ID NO: 303563 - RNA, 32 nt, Homo Sapiens
cuuuggagaaugcccuacuggcagccugcuuu

SEQ ID NO: 303564 - RNA, 32 nt, Homo Sapiens
cuuccuaaauguuuauacucaucuaguuuuuc

SEQ ID NO: 303565 - RNA, 32 nt, Homo Sapiens
ugggucaggaacaagggccggcuggggccugg

SEQ ID NO: 303566 - RNA, 32 nt, Homo Sapiens
cacaaagauucugggcagcugccaccucaguc

SEQ ID NO: 303567 - RNA, 32 nt, Homo Sapiens
cagaccaaucuggguucccauccuggcucugu

SEQ ID NO: 303568 - RNA, 32 nt, Homo Sapiens
uaaaauguaaaauaaagauguaugcugccugu

SEQ ID NO: 303569 - RNA, 32 nt, Homo Sapiens
uuuguuuugaauuaagaaaugaguuucaggaa

SEQ ID NO: 303570 - RNA, 32 nt, Homo Sapiens
ugcuuccuggcgcacgcggagccuccuggagc

SEQ ID NO: 303571 - RNA, 32 nt, Homo Sapiens
ccaccgcccucccgcccccaccuggcguguag

SEQ ID NO: 303572 - RNA, 32 nt, Homo Sapiens
ucugagaccugcuuaugaucagugcaaugaag

SEQ ID NO: 303573 - RNA, 32 nt, Homo Sapiens
ccagcccggcgcccagcucuuuguucuccaag

SEQ ID NO: 303574 - RNA, 32 nt, Homo Sapiens
cuugugcagucaucagaaauuccagcguacua

SEQ ID NO: 303575 - RNA, 32 nt, Homo Sapiens
cuuccuuccuuccccgagaaggccucaaugug

SEQ ID NO: 303576 - RNA, 32 nt, Homo Sapiens
cccauccgccccaggcccccugccugugccug

SEQ ID NO: 303577 - RNA, 32 nt, Homo Sapiens
gaagcaaacaauuacaugucaugucaaggggg

SEQ ID NO: 303578 - RNA, 32 nt, Homo Sapiens
auaucuguaacuguaucuuaaucuacaaugag

SEQ ID NO: 303579 - RNA, 32 nt, Homo Sapiens
auggaggcaucggagcccgagcgucgcgggag

SEQ ID NO: 303580 - RNA, 32 nt, Homo Sapiens
uuugauguucuuccuuuucacauuucagaauc

SEQ ID NO: 303581 - RNA, 32 nt, Homo Sapiens
ugcaggcgcuggcaaacgcccuucuggaaaag

SEQ ID NO: 303582 - RNA, 32 nt, Homo Sapiens
agcgagccaggccgagggccgcggcggcgaug

SEQ ID NO: 303583 - RNA, 32 nt, Homo Sapiens
ccccgcuugggguggugacgugacauugacau

SEQ ID NO: 303584 - RNA, 32 nt, Homo Sapiens
gaccccaucccaugguggcaggugcagcggug

SEQ ID NO: 303585 - RNA, 32 nt, Homo Sapiens
uguguccugguaauuccucuccaggccagaau

SEQ ID NO: 303586 - RNA, 32 nt, Homo Sapiens
acugaggcagcaugcacggaggcggggucagg

SEQ ID NO: 303587 - RNA, 32 nt, Homo Sapiens
ggaaggcuaagcauaggguuccugcagcccca

SEQ ID NO: 303588 - RNA, 32 nt, Homo Sapiens
ugcugaggggaagagggggucuccgcucuucc

SEQ ID NO: 303589 - RNA, 32 nt, Homo Sapiens
gcccgcagccccggcgccgccaugguggaggc

SEQ ID NO: 303590 - RNA, 32 nt, Homo Sapiens
gugucgucucuuucugccuccccuccccuggg

SEQ ID NO: 303591 - RNA, 32 nt, Homo Sapiens
ugccuguaaucccagcacuuugagaggcugag

SEQ ID NO: 303592 - RNA, 32 nt, Homo Sapiens
ugccuguaauccuagcacuuugagaggccgag

SEQ ID NO: 303593 - RNA, 32 nt, Homo Sapiens
cccacucuuggagcagcucuccagggcugugc

SEQ ID NO: 303594 - RNA, 32 nt, Homo Sapiens
ugccuauaauccuagcacuuugagaggccaag

SEQ ID NO: 303595 - RNA, 32 nt, Homo Sapiens
cgaggcugcccggcccuggagggcuccguagg

SEQ ID NO: 303596 - RNA, 32 nt, Homo Sapiens
aagggagaugugacggaugaaaaggagacccc

SEQ ID NO: 303597 - RNA, 32 nt, Homo Sapiens
gggauauaucuucauauuguguguuucaaauu

SEQ ID NO: 303598 - RNA, 32 nt, Homo Sapiens
uggacggaacagagccauauuucucuucuuuc

SEQ ID NO: 303599 - RNA, 32 nt, Homo Sapiens
gugggaagccagcagcugcccgcucccuccuc

SEQ ID NO: 303600 - RNA, 32 nt, Homo Sapiens
guucccggccagcuccccagggcccgcggcgc

SEQ ID NO: 303601 - RNA, 32 nt, Homo Sapiens
caguugagacuacgucaaaaugggcucccaug

SEQ ID NO: 303602 - RNA, 32 nt, Homo Sapiens
cuagauuggggcauauuucugauaaagaccca

SEQ ID NO: 303603 - RNA, 32 nt, Homo Sapiens
gcccaguuuguacagcccucuuguauagcauc

SEQ ID NO: 303604 - RNA, 32 nt, Homo Sapiens
gacaugcauaccauuggugccuaagauuuuuu

SEQ ID NO: 303605 - RNA, 32 nt, Homo Sapiens
gcuucagaauacuaaucaucgcuagugagggc

SEQ ID NO: 303606 - RNA, 32 nt, Homo Sapiens
accagcagccccaccugaaguccgcaugcaac

SEQ ID NO: 303607 - RNA, 32 nt, Homo Sapiens
gggagccggccgcugggagcccgucgcuaugg

SEQ ID NO: 303608 - RNA, 32 nt, Homo Sapiens
uccccuaaacuguguuccuaagaaccauccaa

SEQ ID NO: 303609 - RNA, 32 nt, Homo Sapiens
aggcaucuuucugcuccugaucagaagggcag

SEQ ID NO: 303610 - RNA, 32 nt, Homo Sapiens
guaccuggaaauuuuuauuacuuuuuauacca

SEQ ID NO: 303611 - RNA, 32 nt, Homo Sapiens
guucccgccccggguccccggcgccgcaggag

SEQ ID NO: 303612 - RNA, 32 nt, Homo Sapiens
accauuuacgguuuccucaguaauuuccacca

SEQ ID NO: 303613 - RNA, 32 nt, Homo Sapiens
aauguggguugucacuuguuauucccaaguac

SEQ ID NO: 303614 - RNA, 32 nt, Homo Sapiens
uuucugaggugugccauuggggccucagccuu

SEQ ID NO: 303615 - RNA, 32 nt, Homo Sapiens
guggggaugcugcuggcugcgcggcgcugagg

SEQ ID NO: 303616 - RNA, 32 nt, Homo Sapiens
auuguuuuucuuucuuuuuuuuuuuuuagauu

SEQ ID NO: 303617 - RNA, 32 nt, Homo Sapiens
ucauucuuuaaguaucuauauuucauuuguuu

SEQ ID NO: 303618 - RNA, 32 nt, Homo Sapiens
ugauucacaugcacuggaguuaauuagucuua

SEQ ID NO: 303619 - RNA, 32 nt, Homo Sapiens
aagauugccgugagccgagaucaugccacugc

SEQ ID NO: 303620 - RNA, 32 nt, Homo Sapiens
cagucuuuuugaccucuuuugaagguagaguu

SEQ ID NO: 303621 - RNA, 32 nt, Homo Sapiens
gugcagggcacgagcaggcugugcgucugcuu

SEQ ID NO: 303622 - RNA, 32 nt, Homo Sapiens
gcuuauaauuuauuaagaauguuuacaccugu

SEQ ID NO: 303623 - RNA, 32 nt, Homo Sapiens
acgcaggaguccagcugccccugccgucuccc

SEQ ID NO: 303624 - RNA, 32 nt, Homo Sapiens
auauuuaaagacagggaagagcagaacggagc

SEQ ID NO: 303625 - RNA, 32 nt, Homo Sapiens
gguaccucuggggagagaggaccuccucugac

SEQ ID NO: 303626 - RNA, 32 nt, Homo Sapiens
ggggcguugccauggcgacagccucucccgcu

SEQ ID NO: 303627 - RNA, 32 nt, Homo Sapiens
agcuggacugagggcagagucugugggugcag

SEQ ID NO: 303628 - RNA, 32 nt, Homo Sapiens
cucaucccgcggcucuccuccugucgguccug

SEQ ID NO: 303629 - RNA, 32 nt, Homo Sapiens
guuguuacauaaauauauuuaauauagguaaa

SEQ ID NO: 303630 - RNA, 32 nt, Homo Sapiens
gagguggcaggggcggggcggcuggcgguaga

SEQ ID NO: 303631 - RNA, 32 nt, Homo Sapiens
guuggugcuuugcauuuugauauugcugugag

SEQ ID NO: 303632 - RNA, 32 nt, Homo Sapiens
ugugagccucauguaagaacaugauggucuuu

SEQ ID NO: 303633 - RNA, 32 nt, Homo Sapiens
uaacuuucuggcauccaccacuccaugucucu

SEQ ID NO: 303634 - RNA, 31 nt, Homo Sapiens
agcccugcacccucagcuccaaauacacauu

SEQ ID NO: 303635 - RNA, 31 nt, Homo Sapiens
cucagugaaacaccugcaauuucuagggccc

SEQ ID NO: 303636 - RNA, 32 nt, Homo Sapiens
uuuauacuugagaacaaauguacaaauauaaa

SEQ ID NO: 303637 - RNA, 32 nt, Homo Sapiens
gacaagauucuuuuccaaauaucaaaacuccu

SEQ ID NO: 303638 - RNA, 32 nt, Homo Sapiens
uuacuuuauugaagguuuuagacccauagcag

SEQ ID NO: 303639 - RNA, 32 nt, Homo Sapiens
auuacagaaaauacuucugccuuaaaaaauau

SEQ ID NO: 303640 - RNA, 32 nt, Homo Sapiens
agaauguaugucaagaauuuuagauaggccuu

SEQ ID NO: 303641 - RNA, 32 nt, Homo Sapiens
gccugcaggacuguuccgagacgcugcggugg

SEQ ID NO: 303642 - RNA, 32 nt, Homo Sapiens
cuccuucccgcaccuaacagggacuucccauc

SEQ ID NO: 303643 - RNA, 30 nt, Homo Sapiens
uuuccuuccuaucucccccaguguucuacg

SEQ ID NO: 303644 - RNA, 32 nt, Homo Sapiens
aaugguacugguaguguauguuuucuaugugg

SEQ ID NO: 303645 - RNA, 32 nt, Homo Sapiens
cuggccacggccugcccuccccgucccggggg

SEQ ID NO: 303646 - RNA, 32 nt, Homo Sapiens
uuucucuuucauucuauaaaucagucuguugu

SEQ ID NO: 303647 - RNA, 32 nt, Homo Sapiens
auucuggucaggcagaaggagaaggaaaugua

SEQ ID NO: 303648 - RNA, 32 nt, Homo Sapiens
caauuuuauuuuucauucugugcuucagggau

SEQ ID NO: 303649 - RNA, 32 nt, Homo Sapiens
ugugaggcggguggggaacuggaugucgaaga

SEQ ID NO: 303650 - RNA, 32 nt, Homo Sapiens
uaugcaauauauuauaguacauguuuguacau

SEQ ID NO: 303651 - RNA, 32 nt, Homo Sapiens
auauggacagauucauaaacaaguagaacucc

SEQ ID NO: 303652 - RNA, 32 nt, Homo Sapiens
cugggcuccuccccgggcccgccccgacaggu

SEQ ID NO: 303653 - RNA, 32 nt, Homo Sapiens
uauaauuguuaacguguauuaaccgaaaaaug

SEQ ID NO: 303654 - RNA, 32 nt, Homo Sapiens
ccugcacccccuccccccgguuauuugggaga

SEQ ID NO: 303655 - RNA, 32 nt, Homo Sapiens
ggcgcggccgucggaguggccauggugcugcu

SEQ ID NO: 303656 - RNA, 32 nt, Homo Sapiens
ggagaaggggugcaccugcugcucaccuucau

SEQ ID NO: 303657 - RNA, 32 nt, Homo Sapiens
gccuuuuucacacccacuccagcccucugccc

SEQ ID NO: 303658 - RNA, 32 nt, Homo Sapiens
cucccauccuucccauuuccuuugauguuauu

SEQ ID NO: 303659 - RNA, 32 nt, Homo Sapiens
augagaacauauauuuauugcaugauuuucua

SEQ ID NO: 303660 - RNA, 32 nt, Homo Sapiens
ucgguccccgcacccccaggccgcccgcucac

SEQ ID NO: 303661 - RNA, 32 nt, Homo Sapiens
gucuuguucuuugaccauuacgucugcggcug

SEQ ID NO: 303662 - RNA, 32 nt, Homo Sapiens
cuuccccaauuuccuuuuacuaaccugugaga

SEQ ID NO: 303663 - RNA, 29 nt, Homo Sapiens
cacuggaugaagauucuccugugcuagau

SEQ ID NO: 303664 - RNA, 32 nt, Homo Sapiens
gugauuccacgggcucacgggcagaagaacac

SEQ ID NO: 303665 - RNA, 32 nt, Homo Sapiens
cuuucgugcagauaacuggaaguaaagcggca

SEQ ID NO: 303666 - RNA, 32 nt, Homo Sapiens
cugaguccuuucuuccucucguuccccaaauc

SEQ ID NO: 303667 - RNA, 32 nt, Homo Sapiens
gacaaaauauacuuuugaaauaaaaugcuaua

SEQ ID NO: 303668 - RNA, 32 nt, Homo Sapiens
ugcaaccuuucuguuuuauuuaaagaaagccc

SEQ ID NO: 303669 - RNA, 32 nt, Homo Sapiens
auucuauggauuaaaaucauacaaaugguggc

SEQ ID NO: 303670 - RNA, 32 nt, Homo Sapiens
aaaaauauauauauuuaauacauuaauuucuc

SEQ ID NO: 303671 - RNA, 32 nt, Homo Sapiens
uggguucaguuccagaccaccucgguaaagcc

SEQ ID NO: 303672 - RNA, 32 nt, Homo Sapiens
guaaauuuucuuuuucaaauccaauuuaaaau

SEQ ID NO: 303673 - RNA, 32 nt, Homo Sapiens
gagggauuuaugagugauugcucuacauuauu

SEQ ID NO: 303674 - RNA, 32 nt, Homo Sapiens
gaaguauggaagagcaucauggcugugcagga

SEQ ID NO: 303675 - RNA, 32 nt, Homo Sapiens
ggccaaauacucagcguaaaaacuuccagcac

SEQ ID NO: 303676 - RNA, 32 nt, Homo Sapiens
agaaggucggauuguagaagcugggguggccg

SEQ ID NO: 303677 - RNA, 32 nt, Homo Sapiens
gggcgguggaggaggagguggggcuggcgcug

SEQ ID NO: 303678 - RNA, 32 nt, Homo Sapiens
aaaucaagaaggaaacuuauuaaacuagaaug

SEQ ID NO: 303679 - RNA, 32 nt, Homo Sapiens
cagaggcccucccuguggacacccccucaccu

SEQ ID NO: 303680 - RNA, 32 nt, Homo Sapiens
uauguaccaagauauuuugcucuugcuauugu

SEQ ID NO: 303681 - RNA, 32 nt, Homo Sapiens
cucccgcgccgggacgcggggugggaccaggg

SEQ ID NO: 303682 - RNA, 31 nt, Homo Sapiens
caguggcuggcuggccugcccugaauugaga

SEQ ID NO: 303683 - RNA, 32 nt, Homo Sapiens
cuuucucugaggggauaaauauuuuaucgagg

SEQ ID NO: 303684 - RNA, 32 nt, Homo Sapiens
auuuuuguuugccuuucaggcaucauauuagc

SEQ ID NO: 303685 - RNA, 29 nt, Homo Sapiens
guuaaaaguugaagauauuuucugaugau

SEQ ID NO: 303686 - RNA, 32 nt, Homo Sapiens
cagcaauuuucuaugauuuuuucagauauaga

SEQ ID NO: 303687 - RNA, 32 nt, Homo Sapiens
guaauaagagcacuucuguauuccuugggacu

SEQ ID NO: 303688 - RNA, 32 nt, Homo Sapiens
gaagaauugaggcugcuugggaggaaggccag

SEQ ID NO: 303689 - RNA, 32 nt, Homo Sapiens
gcugccugcagccugcagccugcagccuccgg

SEQ ID NO: 303690 - RNA, 32 nt, Homo Sapiens
acccgggcggcccugcccuuuuuagagggucc

SEQ ID NO: 303691 - RNA, 32 nt, Homo Sapiens
auagugaauguuuggcuuuucauuuguuacuu

SEQ ID NO: 303692 - RNA, 32 nt, Homo Sapiens
cguguuucuaacuguaaguaccuuggacauuu

SEQ ID NO: 303693 - RNA, 32 nt, Homo Sapiens
ugugggccccggcggcggcggcguggagcagc

SEQ ID NO: 303694 - RNA, 32 nt, Homo Sapiens
uacugaaacagcucagcuugugaaagauaaau

SEQ ID NO: 303695 - RNA, 30 nt, Homo Sapiens
ccuuuaccacuuguuaagaaaauuaaauuc

SEQ ID NO: 303696 - RNA, 32 nt, Homo Sapiens
aucccagcaugcugagaugugaaugugcagca

SEQ ID NO: 303697 - RNA, 32 nt, Homo Sapiens
aaguuagaguuaguggauuucuaguuuaggag

SEQ ID NO: 303698 - RNA, 31 nt, Homo Sapiens
uuggcuucagcgcuucgcccccgcgcugugc

SEQ ID NO: 303699 - RNA, 32 nt, Homo Sapiens
ccggcuuccgccucggcucuggcaaaugccgu

SEQ ID NO: 303700 - RNA, 32 nt, Homo Sapiens
ugguucuaaguuagcuuucucauaacgguucu

SEQ ID NO: 303701 - RNA, 32 nt, Homo Sapiens
augggauaguagcugggaacuguucccuuucu

SEQ ID NO: 303702 - RNA, 32 nt, Homo Sapiens
aguuuugccucgggguagcaccuccagccaca

SEQ ID NO: 303703 - RNA, 32 nt, Homo Sapiens
aagucaacccucaguaccucagaaugugacua

SEQ ID NO: 303704 - RNA, 32 nt, Homo Sapiens
agauguugaagacaggggucucgggggugggc

SEQ ID NO: 303705 - RNA, 32 nt, Homo Sapiens
cacccacugggguggagaagggggccagcggg

SEQ ID NO: 303706 - RNA, 32 nt, Homo Sapiens
ugcuagaucugugccguuaauaggcaucgucu

SEQ ID NO: 303707 - RNA, 32 nt, Homo Sapiens
aaacauuucuuaccacuugauuuguuuuccaa

SEQ ID NO: 303708 - RNA, 32 nt, Homo Sapiens
gccaccaucugccugcauucgccggagccgcc

SEQ ID NO: 303709 - RNA, 32 nt, Homo Sapiens
ggaccguggacaggcccagcgcggccagcguc

SEQ ID NO: 303710 - RNA, 32 nt, Homo Sapiens
uagacucauuuuuauacuacucgggggacaag

SEQ ID NO: 303711 - RNA, 32 nt, Homo Sapiens
ccaugugauuuaaacaaacaaacaaacaaaca

SEQ ID NO: 303712 - RNA, 32 nt, Homo Sapiens
gauggaagccaggacaggggagcccaccgggc

SEQ ID NO: 303713 - RNA, 32 nt, Homo Sapiens
uguuaaaucaccaauuauauuaaucaaaugga

SEQ ID NO: 303714 - RNA, 32 nt, Homo Sapiens
gggguaagguggccaggcugcagaccccugca

SEQ ID NO: 303715 - RNA, 32 nt, Homo Sapiens
ucagcaguucccagcgcuccucacggaucccu

SEQ ID NO: 303716 - RNA, 32 nt, Homo Sapiens
aggugaaagccaagagcaggugccaaagaaag

SEQ ID NO: 303717 - RNA, 32 nt, Homo Sapiens
augucuguguucccuugggacucauuggaaau

SEQ ID NO: 303718 - RNA, 32 nt, Homo Sapiens
cccagccgccccacgcucagcccugcguggcu

SEQ ID NO: 303719 - RNA, 32 nt, Homo Sapiens
ugcuuugauaaaauauuuuaagguaugaguua

SEQ ID NO: 303720 - RNA, 32 nt, Homo Sapiens
gugauccgcaugccucagccucccaaagugcu

SEQ ID NO: 303721 - RNA, 32 nt, Homo Sapiens
gaacagcagguccuggacuaaagcagaaaaga

SEQ ID NO: 303722 - RNA, 32 nt, Homo Sapiens
cucugauuuugaugaauuauaugggagugaga

SEQ ID NO: 303723 - RNA, 31 nt, Homo Sapiens
aguguucauuugauuuucuacagaaauaaua

SEQ ID NO: 303724 - RNA, 32 nt, Homo Sapiens
uuuaaaaaaugucuucaagguguucacuaacg

SEQ ID NO: 303725 - RNA, 32 nt, Homo Sapiens
uucucagggacacacccugauagcacaaucuc

SEQ ID NO: 303726 - RNA, 32 nt, Homo Sapiens
gaccccccaagccaagcucccaaccuuuagca

SEQ ID NO: 303727 - RNA, 32 nt, Homo Sapiens
acccagugaaaaggauaaauggcauuguccau

SEQ ID NO: 303728 - RNA, 32 nt, Homo Sapiens
gccaggcccagcugccacacccuuucugggag

SEQ ID NO: 303729 - RNA, 32 nt, Homo Sapiens
auacuucucuccccgggauucagccagcagcu

SEQ ID NO: 303730 - RNA, 32 nt, Homo Sapiens
aaagaagggugaaugggaaaagagaagacugu

SEQ ID NO: 303731 - RNA, 32 nt, Homo Sapiens
uuguacacccgcacgaggagcggggacggcgg

SEQ ID NO: 303732 - RNA, 32 nt, Homo Sapiens
ccagugcacuccggucccaaauguagcaggug

SEQ ID NO: 303733 - RNA, 32 nt, Homo Sapiens
ugcuaguagguucugcuucugcuucucucugc

SEQ ID NO: 303734 - RNA, 32 nt, Homo Sapiens
acaggccccuccccggagucaccuccagguaa

SEQ ID NO: 303735 - RNA, 32 nt, Homo Sapiens
uuucugugucugucuuuaauucuucuagugcu

SEQ ID NO: 303736 - RNA, 32 nt, Homo Sapiens
uagaagaaaaggaagggucuuugcagucuuag

SEQ ID NO: 303737 - RNA, 32 nt, Homo Sapiens
uaccuguuuaaguguuugauaaacguuaagaa

SEQ ID NO: 303738 - RNA, 32 nt, Homo Sapiens
cacaacuuggggccccucuccuccccagcccu

SEQ ID NO: 303739 - RNA, 32 nt, Homo Sapiens
ccucccaccaggcuccuccuccaacagugggg

SEQ ID NO: 303740 - RNA, 32 nt, Homo Sapiens
guggccaaacuggcaaaauuuacuuucaagca

SEQ ID NO: 303741 - RNA, 32 nt, Homo Sapiens
guuugcacguaguugugagcugugagugguua

SEQ ID NO: 303742 - RNA, 32 nt, Homo Sapiens
uguccacgcgccgggcccgggugggaguggcu

SEQ ID NO: 303743 - RNA, 32 nt, Homo Sapiens
ccauuucuaaucuuuuguguaauuuucucuua

SEQ ID NO: 303744 - RNA, 32 nt, Homo Sapiens
aggaacguguggaguuucggaguccagcccag

SEQ ID NO: 303745 - RNA, 32 nt, Homo Sapiens
cccuggcaaccuggagcagccaccagacaaca

SEQ ID NO: 303746 - RNA, 32 nt, Homo Sapiens
cucauucuuuuggauugcuacguaaucucacu

SEQ ID NO: 303747 - RNA, 32 nt, Homo Sapiens
cauaauauuuagugaccaacauuuuaaaguau

SEQ ID NO: 303748 - RNA, 32 nt, Homo Sapiens
cuccccaccuuucccaccccagcccucuugca

SEQ ID NO: 303749 - RNA, 32 nt, Homo Sapiens
caccgugaccccaaccucuccuguccccuccc

SEQ ID NO: 303750 - RNA, 28 nt, Homo Sapiens
ggcagcugggggagaggugaccuaguac

SEQ ID NO: 303751 - RNA, 32 nt, Homo Sapiens
uagacuuuucuuucuuuuuuuaaccaaaucca

SEQ ID NO: 303752 - RNA, 32 nt, Homo Sapiens
aaacggaucuuggaucuuugcauucacuugau

SEQ ID NO: 303753 - RNA, 32 nt, Homo Sapiens
ucauuaucuccacuuccaauuccaguacccug

SEQ ID NO: 303754 - RNA, 32 nt, Homo Sapiens
ugaaaagaaaaaaggaacuuccucgaacuaaa

SEQ ID NO: 303755 - RNA, 32 nt, Homo Sapiens
aaaggagagagaaaagugauuuaaacagggug

SEQ ID NO: 303756 - RNA, 32 nt, Homo Sapiens
acagguuuggguuuuuuuuuuaugcucaugaa

SEQ ID NO: 303757 - RNA, 32 nt, Homo Sapiens
ucagaaaguccauuuuuguuuaaaauuagaac

SEQ ID NO: 303758 - RNA, 32 nt, Homo Sapiens
ugguauagacugccucuggggaagcaaguugg

SEQ ID NO: 303759 - RNA, 32 nt, Homo Sapiens
uaagauuguucuaucucuacuagucauagaaa

SEQ ID NO: 303760 - RNA, 32 nt, Homo Sapiens
agucucgccucuggccuucucuggccacuccu

SEQ ID NO: 303761 - RNA, 32 nt, Homo Sapiens
ggcgccgggcuucguuacauaaucucggaccg

SEQ ID NO: 303762 - RNA, 32 nt, Homo Sapiens
gaaaugccaucacuccuacugcggcugcuaug

SEQ ID NO: 303763 - RNA, 32 nt, Homo Sapiens
aaggguagccaaggauggcugcagcuucauau

SEQ ID NO: 303764 - RNA, 32 nt, Homo Sapiens
uugucuuauaugcuuagcauagauuugcagcu

SEQ ID NO: 303765 - RNA, 32 nt, Homo Sapiens
uaaaucuccccacuccagaagcauuacccaua

SEQ ID NO: 303766 - RNA, 30 nt, Homo Sapiens
ucuggaagcugcgguggggaaacugaguuu

SEQ ID NO: 303767 - RNA, 32 nt, Homo Sapiens
guggaggagcagccgugacugcccguggcucu

SEQ ID NO: 303768 - RNA, 32 nt, Homo Sapiens
acuuuugcaguuugacacuaagauaacuucug

SEQ ID NO: 303769 - RNA, 32 nt, Homo Sapiens
cuggaccccuggaccgcuuugcgcacuuaccg

SEQ ID NO: 303770 - RNA, 32 nt, Homo Sapiens
gugaacguggcagugcuugugauucaggcuuc

SEQ ID NO: 303771 - RNA, 32 nt, Homo Sapiens
cagccgguucccuccucuccaggcccccuccc

SEQ ID NO: 303772 - RNA, 32 nt, Homo Sapiens
guccaggccaucuccaaccaugggagugaggc

SEQ ID NO: 303773 - RNA, 32 nt, Homo Sapiens
accuaaaauauuagaauauuuauuggagauuu

SEQ ID NO: 303774 - RNA, 32 nt, Homo Sapiens
caagguucuaguugcuggcccuguguccucaa

SEQ ID NO: 303775 - RNA, 32 nt, Homo Sapiens
uaaugaacauuuuuaaaaauaauuaccaaggc

SEQ ID NO: 303776 - RNA, 32 nt, Homo Sapiens
cgaccgcacccggcgccugcccucgcucggcg

SEQ ID NO: 303777 - RNA, 32 nt, Homo Sapiens
accauuugcccuucgccacagcccuuagagua

SEQ ID NO: 303778 - RNA, 32 nt, Homo Sapiens
ugaugguggaauuuuuaaauaauauucagcug

SEQ ID NO: 303779 - RNA, 32 nt, Homo Sapiens
gcaggcaggcuuugggagagaaauuuauuuuu

SEQ ID NO: 303780 - RNA, 32 nt, Homo Sapiens
accagauauaaaacucuuucucgucgccaugc

SEQ ID NO: 303781 - RNA, 32 nt, Homo Sapiens
guuagagcaacuguuagcgucuccaugggcaa

SEQ ID NO: 303782 - RNA, 32 nt, Homo Sapiens
agcauaaaacaaagacuacugaaauauagaua

SEQ ID NO: 303783 - RNA, 32 nt, Homo Sapiens
gcugggaagggagacagaggcggcggcggcuc

SEQ ID NO: 303784 - RNA, 32 nt, Homo Sapiens
ccaaaauaucauuaguccugagguugagaaac

SEQ ID NO: 303785 - RNA, 32 nt, Homo Sapiens
gauggagcaggaaggcuugagauacacaaccc

SEQ ID NO: 303786 - RNA, 32 nt, Homo Sapiens
gggaggugggagaggaagguggaguacuaaca

SEQ ID NO: 303787 - RNA, 32 nt, Homo Sapiens
gacuuucgaaacaaacagacuugcuguugcuc

SEQ ID NO: 303788 - RNA, 32 nt, Homo Sapiens
uaauaacauuuaauuuagauauuuuccaucau

SEQ ID NO: 303789 - RNA, 32 nt, Homo Sapiens
cucagggcucccgccgucccaggccgcccucc

SEQ ID NO: 303790 - RNA, 32 nt, Homo Sapiens
ucucagcuacucuggagguuuagcaggaggau

SEQ ID NO: 303791 - RNA, 32 nt, Homo Sapiens
acaaacugacuucagauuauaaggcuauaaua

SEQ ID NO: 303792 - RNA, 32 nt, Homo Sapiens
aggaauucaaaauaaagauaucuugaagagaa

SEQ ID NO: 303793 - RNA, 32 nt, Homo Sapiens
cacuccagcugagacugccucacugaguuguc

SEQ ID NO: 303794 - RNA, 32 nt, Homo Sapiens
ccaguccaaguggucaggcuccagagcccaca

SEQ ID NO: 303795 - RNA, 32 nt, Homo Sapiens
ucaggcccaucccaucccaccacacucacuca

SEQ ID NO: 303796 - RNA, 32 nt, Homo Sapiens
ggucgacgcggcacucgcuacgcacgugccgg

SEQ ID NO: 303797 - RNA, 32 nt, Homo Sapiens
auucgccuaauuauuucuuuaugauaacaugu

SEQ ID NO: 303798 - RNA, 32 nt, Homo Sapiens
agcuccucugcauggcuucucagacuugggac

SEQ ID NO: 303799 - RNA, 32 nt, Homo Sapiens
uauucgaaugcauguagauuuguuaaaugugu

SEQ ID NO: 303800 - RNA, 32 nt, Homo Sapiens
gucagacuggucaugcaaggucuugggccugc

SEQ ID NO: 303801 - RNA, 32 nt, Homo Sapiens
gagccaccgcacccagccugguuauuggauuu

SEQ ID NO: 303802 - RNA, 32 nt, Homo Sapiens
ccuuaguagaguauaaaaauaguguuuugccc

SEQ ID NO: 303803 - RNA, 32 nt, Homo Sapiens
ggcuguguucccuccggggccccaggaagagg

SEQ ID NO: 303804 - RNA, 32 nt, Homo Sapiens
ucugcuccagcuugcuggauguuaccuguccu

SEQ ID NO: 303805 - RNA, 32 nt, Homo Sapiens
ggcauuuuuauacucagaacugucccaucccc

SEQ ID NO: 303806 - RNA, 32 nt, Homo Sapiens
agaacagaaauauauaaaaauauauguugaau

SEQ ID NO: 303807 - RNA, 32 nt, Homo Sapiens
aacaguuuugggaaacaaguuugaucauggcg

SEQ ID NO: 303808 - RNA, 32 nt, Homo Sapiens
caacagugugacuacugucaauaaucauuuaa

SEQ ID NO: 303809 - RNA, 32 nt, Homo Sapiens
ugaaauaugaagauccaguuucauacaaacau

SEQ ID NO: 303810 - RNA, 31 nt, Homo Sapiens
uguaagugaaacacagacucacccuccuucu

SEQ ID NO: 303811 - RNA, 32 nt, Homo Sapiens
ucacccucacaugccucccccaucccugcugg

SEQ ID NO: 303812 - RNA, 32 nt, Homo Sapiens
uuucuagugucuuuuuauuuauaacacuuuuu

SEQ ID NO: 303813 - RNA, 32 nt, Homo Sapiens
aaguccagcucuucgcccugcguuccuucccc

SEQ ID NO: 303814 - RNA, 32 nt, Homo Sapiens
cuuggagaugguuucccugcucccggggcagu

SEQ ID NO: 303815 - RNA, 32 nt, Homo Sapiens
guaggcgucugugugcgccgccaagucggugg

SEQ ID NO: 303816 - RNA, 32 nt, Homo Sapiens
cucguauguaggaaucaaauaucccuccauac

SEQ ID NO: 303817 - RNA, 32 nt, Homo Sapiens
ugguggcugacuucgggcuggcgcgucucaug

SEQ ID NO: 303818 - RNA, 32 nt, Homo Sapiens
caccaggcacagccgccuccggaaugcacagg

SEQ ID NO: 303819 - RNA, 32 nt, Homo Sapiens
ccucgcgggguccuggccaagcaagcccgccc

SEQ ID NO: 303820 - RNA, 32 nt, Homo Sapiens
cugaugcuccagccacgaaaucuaugguacuc

SEQ ID NO: 303821 - RNA, 32 nt, Homo Sapiens
uuuguccauguuuauuguuauagugcauuuaa

SEQ ID NO: 303822 - RNA, 32 nt, Homo Sapiens
augcuguuagacaagacacugacgcugauuau

SEQ ID NO: 303823 - RNA, 32 nt, Homo Sapiens
uggcucacaccuguaacccccagcacuuuggg

SEQ ID NO: 303824 - RNA, 32 nt, Homo Sapiens
gcugaaagaagcugcuguaauguacgggaacg

SEQ ID NO: 303825 - RNA, 32 nt, Homo Sapiens
gcuggcaucccuccccuuguggguucagagcu

SEQ ID NO: 303826 - RNA, 32 nt, Homo Sapiens
auugagauuguccuuuuccccugaucaaaaaa

SEQ ID NO: 303827 - RNA, 32 nt, Homo Sapiens
gccugaaguccugccaagagaggacugggaac

SEQ ID NO: 303828 - RNA, 32 nt, Homo Sapiens
ucagcagcaacaggcccagaagggcagccacg

SEQ ID NO: 303829 - RNA, 32 nt, Homo Sapiens
agacacuagugcccucugcugggcaugugucc

SEQ ID NO: 303830 - RNA, 32 nt, Homo Sapiens
cucccccagaagcucacaaaggaaaacggaga

SEQ ID NO: 303831 - RNA, 32 nt, Homo Sapiens
agugcaaggggaggucagucucaggagacagu

SEQ ID NO: 303832 - RNA, 32 nt, Homo Sapiens
caggagaauuaaaacuucucccaaucuucucu

SEQ ID NO: 303833 - RNA, 32 nt, Homo Sapiens
gucccuuggccauaaauuccuacuugugcuug

SEQ ID NO: 303834 - RNA, 31 nt, Homo Sapiens
caagcaaugaaagaaauucugugugguacaa

SEQ ID NO: 303835 - RNA, 32 nt, Homo Sapiens
uuuauauuugaaaagaaaauguuuuauuugca

SEQ ID NO: 303836 - RNA, 32 nt, Homo Sapiens
uauuaagcugaauuucaaccaacuuuauuacu

SEQ ID NO: 303837 - RNA, 32 nt, Homo Sapiens
cugccuugacauuuaaauacauaaauugagau

SEQ ID NO: 303838 - RNA, 32 nt, Homo Sapiens
agcgccuggaggaggcaggggcaggaagcggc

SEQ ID NO: 303839 - RNA, 32 nt, Homo Sapiens
ucgggccuugagguggaaggcgggaaaauggc

SEQ ID NO: 303840 - RNA, 32 nt, Homo Sapiens
gaggccauugggaagagacggcaccgaaagcg

SEQ ID NO: 303841 - RNA, 32 nt, Homo Sapiens
agagucuaauaggaaaaauggacauuaaacag

SEQ ID NO: 303842 - RNA, 32 nt, Homo Sapiens
acuuguuuuauccaaggggauuuuacauguaa

SEQ ID NO: 303843 - RNA, 27 nt, Homo Sapiens
agaauuaaauucaugaaacauaaaaaa

SEQ ID NO: 303844 - RNA, 32 nt, Homo Sapiens
gucugaaaagaggagccagagaaggugguacc

SEQ ID NO: 303845 - RNA, 32 nt, Homo Sapiens
cauuuucaaaauuuaauguuaccaguuucucc

SEQ ID NO: 303846 - RNA, 32 nt, Homo Sapiens
gaggcgucgguggaggaggggaggcggcgagg

SEQ ID NO: 303847 - RNA, 32 nt, Homo Sapiens
cacagccggucgggcucuggcgccagccucga

SEQ ID NO: 303848 - RNA, 32 nt, Homo Sapiens
ucuuuguaagaguauuaaauacaaagugauuu

SEQ ID NO: 303849 - RNA, 32 nt, Homo Sapiens
ccaaugcucaggugcuggggccugguucccgg

SEQ ID NO: 303850 - RNA, 32 nt, Homo Sapiens
gaugcuggcaggagggcggggugaggaggggc

SEQ ID NO: 303851 - RNA, 32 nt, Homo Sapiens
ccgccccccguccaaugcugagcucagucugc

SEQ ID NO: 303852 - RNA, 32 nt, Homo Sapiens
caaacccggccgcgcugcgcaccugcugggug

SEQ ID NO: 303853 - RNA, 32 nt, Homo Sapiens
ggagccacagauauccagagccagcaugaccu

SEQ ID NO: 303854 - RNA, 32 nt, Homo Sapiens
uuugcuguauauacacuacaaacucuggagaa

SEQ ID NO: 303855 - RNA, 32 nt, Homo Sapiens
gucagcuguuugcuaggcaagggcaggaaagu

SEQ ID NO: 303856 - RNA, 32 nt, Homo Sapiens
cuguuuguuuaguuaguaucaucugguaaaau

SEQ ID NO: 303857 - RNA, 32 nt, Homo Sapiens
ugcaccucccugcccuccuccucccugggccu

SEQ ID NO: 303858 - RNA, 32 nt, Homo Sapiens
ggcugcugcgccaagaggccuucaguccccuu

SEQ ID NO: 303859 - RNA, 32 nt, Homo Sapiens
ccgccgccgccguggccuacgccgcgccgcac

SEQ ID NO: 303860 - RNA, 31 nt, Homo Sapiens
cagcaggggcacugccuggggcccuguagcc

SEQ ID NO: 303861 - RNA, 32 nt, Homo Sapiens
uccccacuccccaagggcuggugcuugauaga

SEQ ID NO: 303862 - RNA, 32 nt, Homo Sapiens
guguugaggggaggcaguuacacaaaaaaccc

SEQ ID NO: 303863 - RNA, 32 nt, Homo Sapiens
auauuauggcauuuuuaagaucauggcauuuu

SEQ ID NO: 303864 - RNA, 32 nt, Homo Sapiens
uccucgcgcagauuguuagggcggcgggaagg

SEQ ID NO: 303865 - RNA, 32 nt, Homo Sapiens
uccgucuucccucuccacccccgcccccaauc

SEQ ID NO: 303866 - RNA, 32 nt, Homo Sapiens
uacaaaguauaaaaaauuauaugcacaaagau

SEQ ID NO: 303867 - RNA, 32 nt, Homo Sapiens
gagucaaaccugguuugucugaaucugaaguc

SEQ ID NO: 303868 - RNA, 30 nt, Homo Sapiens
ccaacauggcggcggcggcccugcggagug

SEQ ID NO: 303869 - RNA, 32 nt, Homo Sapiens
ccagcaggagauguaaggcuuccuguugucuc

SEQ ID NO: 303870 - RNA, 32 nt, Homo Sapiens
cccucucccugcuuggcagagccgcuggagga

SEQ ID NO: 303871 - RNA, 32 nt, Homo Sapiens
cagggcguggagaggagggcaccagggggccg

SEQ ID NO: 303872 - RNA, 32 nt, Homo Sapiens
gccuggacacugggcccuucaggucgcaagaa

SEQ ID NO: 303873 - RNA, 32 nt, Homo Sapiens
cagcucuugccagcuucucugacacuuggguu

SEQ ID NO: 303874 - RNA, 32 nt, Homo Sapiens
ucauauggaaaagcuaauuucuucuuaaauuu

SEQ ID NO: 303875 - RNA, 32 nt, Homo Sapiens
gccgggcucgggggccaccccgggggcccggg

SEQ ID NO: 303876 - RNA, 30 nt, Homo Sapiens
gcuucucuggacuuugcacaccuccaggag

SEQ ID NO: 303877 - RNA, 32 nt, Homo Sapiens
uaacucccacacucugggccaagccccaguca

SEQ ID NO: 303878 - RNA, 32 nt, Homo Sapiens
gguuccagggggaaacaaggcuuugguauucc

SEQ ID NO: 303879 - RNA, 32 nt, Homo Sapiens
cuuaaucaguuauaauaacaaugauaaauuau

SEQ ID NO: 303880 - RNA, 32 nt, Homo Sapiens
cugcuucucaucccggccgccucgcggggccg

SEQ ID NO: 303881 - RNA, 32 nt, Homo Sapiens
uggguuuccuucccucuggcucuccacuucug

SEQ ID NO: 303882 - RNA, 32 nt, Homo Sapiens
gggcguggccccaggccuggggaccuguuuuu

SEQ ID NO: 303883 - RNA, 32 nt, Homo Sapiens
gcucaauuccuucuucaacgccaucuccacuc

SEQ ID NO: 303884 - RNA, 29 nt, Homo Sapiens
gugaauauauguauauguguacauaugga

SEQ ID NO: 303885 - RNA, 32 nt, Homo Sapiens
acauccuccaaauugucuuugcuggaggagaa

SEQ ID NO: 303886 - RNA, 32 nt, Homo Sapiens
uggagccaucauaaaaauauuuuuaaaaucag

SEQ ID NO: 303887 - RNA, 32 nt, Homo Sapiens
gcaugggaaggggauggggguccucauuuagu

SEQ ID NO: 303888 - RNA, 32 nt, Homo Sapiens
uucuucauuauguaugugacuauuuauauaac

SEQ ID NO: 303889 - RNA, 32 nt, Homo Sapiens
auagugagaaaaacauuuuaaaauuuuaguua

SEQ ID NO: 303890 - RNA, 32 nt, Homo Sapiens
acaguuagaaaaggcuaaaaauauuauugcac

SEQ ID NO: 303891 - RNA, 32 nt, Homo Sapiens
cguagcucuucacuuucuuaccucaaggcucu

SEQ ID NO: 303892 - RNA, 32 nt, Homo Sapiens
cugugcccaagccuggguaucacagcuguguc

SEQ ID NO: 303893 - RNA, 32 nt, Homo Sapiens
cccgcugcgggcccacgugguuggggcccugc

SEQ ID NO: 303894 - RNA, 32 nt, Homo Sapiens
uuacacauuuuucauuguugcauuuagagguu

SEQ ID NO: 303895 - RNA, 32 nt, Homo Sapiens
aacaauucugagaaacaaaaacacacacgcag

SEQ ID NO: 303896 - RNA, 32 nt, Homo Sapiens
ucuaaauaaaaugcaaaugucaagaaggaugu

SEQ ID NO: 303897 - RNA, 32 nt, Homo Sapiens
aacaaucuuuuauuucuguuguuuccuuauua

SEQ ID NO: 303898 - RNA, 32 nt, Homo Sapiens
uuccuuugaucccucauggagagacggaagca

SEQ ID NO: 303899 - RNA, 31 nt, Homo Sapiens
ccauggugaaacaucucugugcuaauuucuu

SEQ ID NO: 303900 - RNA, 32 nt, Homo Sapiens
uaucaauccuguuaaugcuuguccuuggaaca

SEQ ID NO: 303901 - RNA, 32 nt, Homo Sapiens
caaguaugaaucuauuugugggugugcuauag

SEQ ID NO: 303902 - RNA, 32 nt, Homo Sapiens
ggagcccguuugcuggugcuggagggggcgca

SEQ ID NO: 303903 - RNA, 32 nt, Homo Sapiens
ugcgaugagggaacagaagagaugauggcaau

SEQ ID NO: 303904 - RNA, 32 nt, Homo Sapiens
cacuuguucugcaacuugggcugggaguggug

SEQ ID NO: 303905 - RNA, 32 nt, Homo Sapiens
aggcaggaauacugaggugccuccccacagau

SEQ ID NO: 303906 - RNA, 32 nt, Homo Sapiens
cguuagccucgcgcccgccgcgcaguccgggc

SEQ ID NO: 303907 - RNA, 32 nt, Homo Sapiens
ggauuuccaaaaaacuuuuugaccaauuucag

SEQ ID NO: 303908 - RNA, 32 nt, Homo Sapiens
gaggucccaucccucccucagacccauguggu

SEQ ID NO: 303909 - RNA, 32 nt, Homo Sapiens
ccugcagccgcccgggccgccggcccuccugu

SEQ ID NO: 303910 - RNA, 32 nt, Homo Sapiens
gaagaaucaaacaaaaucuuaaguucuaugag

SEQ ID NO: 303911 - RNA, 32 nt, Homo Sapiens
ccuauauuuuuccucaaagauucugcauuuua

SEQ ID NO: 303912 - RNA, 32 nt, Homo Sapiens
aggccggggcggagcaggagcgggcgggccug

SEQ ID NO: 303913 - RNA, 32 nt, Homo Sapiens
ggggcacaggagaggagaggggcugugcccca

SEQ ID NO: 303914 - RNA, 32 nt, Homo Sapiens
acacuuccuuccuggguagcucugccugaagc

SEQ ID NO: 303915 - RNA, 32 nt, Homo Sapiens
cuccguugccccagcuucacucucucccucag

SEQ ID NO: 303916 - RNA, 32 nt, Homo Sapiens
uugcuggucagagggaggggaggcuuuacaag

SEQ ID NO: 303917 - RNA, 32 nt, Homo Sapiens
gauguugggaaggguguagugcccuagguugg

SEQ ID NO: 303918 - RNA, 32 nt, Homo Sapiens
gaguggccccagcuccacggcgucugcauggc

SEQ ID NO: 303919 - RNA, 32 nt, Homo Sapiens
caugcuaaugcaacagaaauagaggguuugug

SEQ ID NO: 303920 - RNA, 32 nt, Homo Sapiens
cugcgcgcuccuucgccacgccgccgcgcagc

SEQ ID NO: 303921 - RNA, 32 nt, Homo Sapiens
acggcgguggccggugcggcguguucggugcg

SEQ ID NO: 303922 - RNA, 32 nt, Homo Sapiens
ggacguuugucucaagggaaaagcaguuuucu

SEQ ID NO: 303923 - RNA, 32 nt, Homo Sapiens
gcacagcagcaagugcccuucuccggccugca

SEQ ID NO: 303924 - RNA, 32 nt, Homo Sapiens
gcagcaccgcacccucacuagccaggguguug

SEQ ID NO: 303925 - RNA, 32 nt, Homo Sapiens
agcugugugucccucccaguggcuguggcagu

SEQ ID NO: 303926 - RNA, 32 nt, Homo Sapiens
cccguucuagauuaggcgcaguggaguccgcu

SEQ ID NO: 303927 - RNA, 32 nt, Homo Sapiens
uuuaaauaaaggaaaacuuuuguguuauauuu

SEQ ID NO: 303928 - RNA, 32 nt, Homo Sapiens
guucacugcccgcgacaggagcagauuugggg

SEQ ID NO: 303929 - RNA, 32 nt, Homo Sapiens
gagauucccuuguuccuggggugucugcagca

SEQ ID NO: 303930 - RNA, 32 nt, Homo Sapiens
gucuccugauuucaaguacaguucuugccaac

SEQ ID NO: 303931 - RNA, 32 nt, Homo Sapiens
ggagagcggccuccuccucccugguggggccu

SEQ ID NO: 303932 - RNA, 32 nt, Homo Sapiens
guccaguauuuaauaaaauguacaauguuaaa

SEQ ID NO: 303933 - RNA, 32 nt, Homo Sapiens
aauggagaauacuggucauagguccuaaauaa

SEQ ID NO: 303934 - RNA, 32 nt, Homo Sapiens
cuuaauuggccauuguaccagccacuuguccu

SEQ ID NO: 303935 - RNA, 32 nt, Homo Sapiens
uguuuucuuucugaauuaaagauugucaagac

SEQ ID NO: 303936 - RNA, 32 nt, Homo Sapiens
guuagugaugcaguuaguauagcuuuauacuc

SEQ ID NO: 303937 - RNA, 32 nt, Homo Sapiens
aacaaacugcuuucacaucccaacagggucug

SEQ ID NO: 303938 - RNA, 32 nt, Homo Sapiens
uucguguugcccucgugcccaucaagugcagu

SEQ ID NO: 303939 - RNA, 32 nt, Homo Sapiens
aaaaaugacaacacuugaagcaugguguuuca

SEQ ID NO: 303940 - RNA, 32 nt, Homo Sapiens
ucucuuuugaagaucuaugguugacuaauuaa

SEQ ID NO: 303941 - RNA, 32 nt, Homo Sapiens
gggaguagggcggggaggagcucgccagcccg

SEQ ID NO: 303942 - RNA, 30 nt, Homo Sapiens
agcaaaccaaggugcuauucuuuggaagga

SEQ ID NO: 303943 - RNA, 32 nt, Homo Sapiens
auaugaaauauguuuuagaacugugaauagag

SEQ ID NO: 303944 - RNA, 32 nt, Homo Sapiens
aagacaucgucaccgagccgccggcggaagcu

SEQ ID NO: 303945 - RNA, 32 nt, Homo Sapiens
uccuuacccagccccagucccacccagcacac

SEQ ID NO: 303946 - RNA, 32 nt, Homo Sapiens
guacagaacugggauaggcgcaguggagcggg

SEQ ID NO: 303947 - RNA, 32 nt, Homo Sapiens
ucaagaaaucaucaucugaccaucagaaaucu

SEQ ID NO: 303948 - RNA, 32 nt, Homo Sapiens
gcucacugcccgggcgcugugggaggcagcga

SEQ ID NO: 303949 - RNA, 32 nt, Homo Sapiens
ucucaggcuuacuacagccuccaccuucaggu

SEQ ID NO: 303950 - RNA, 32 nt, Homo Sapiens
gcuugauaugcuuuuccuuccacauguuaagc

SEQ ID NO: 303951 - RNA, 32 nt, Homo Sapiens
ucaagguauagucugccuuuaagggaguuuua

SEQ ID NO: 303952 - RNA, 32 nt, Homo Sapiens
cccugcggccccacucccggccgccgugaccu

SEQ ID NO: 303953 - RNA, 32 nt, Homo Sapiens
cauuucauuuuuuauuugauauuaaaguauga

SEQ ID NO: 303954 - RNA, 32 nt, Homo Sapiens
agucaaaauuuauuuuccaggaauuuaauaug

SEQ ID NO: 303955 - RNA, 30 nt, Homo Sapiens
caaggucugcgcccaccgccggcccgccca

SEQ ID NO: 303956 - RNA, 32 nt, Homo Sapiens
cuugguaugggcuguucuguuuccugugucuc

SEQ ID NO: 303957 - RNA, 32 nt, Homo Sapiens
gcagccgaauggcuugccaguggcucuguggc

SEQ ID NO: 303958 - RNA, 32 nt, Homo Sapiens
gugaucagaagcagcaguuauuugaguguaug

SEQ ID NO: 303959 - RNA, 32 nt, Homo Sapiens
gaccaggcgugguggcucaugccuauaauccc

SEQ ID NO: 303960 - RNA, 32 nt, Homo Sapiens
gaauagaaacaguauuuauuuuggagauuuuu

SEQ ID NO: 303961 - RNA, 32 nt, Homo Sapiens
aauauuugauacugugcuugcugucaguaugc

SEQ ID NO: 303962 - RNA, 32 nt, Homo Sapiens
aaagcuuaaccucucuucuccucuccaaaccu

SEQ ID NO: 303963 - RNA, 32 nt, Homo Sapiens
agccuggaucugagcucugugcccccagccgg

SEQ ID NO: 303964 - RNA, 32 nt, Homo Sapiens
aaaguuggaaaaccacugacuagaccaucggc

SEQ ID NO: 303965 - RNA, 32 nt, Homo Sapiens
uucaggggaccuaauacuuaaaaguuaaugag

SEQ ID NO: 303966 - RNA, 32 nt, Homo Sapiens
aaaugauuauuuagaugaugacugaaaaugug

SEQ ID NO: 303967 - RNA, 32 nt, Homo Sapiens
aguuacaauuccauagccagaagugcugacau

SEQ ID NO: 303968 - RNA, 32 nt, Homo Sapiens
gcuggaggcuggagggccaggaggcgggaagc

SEQ ID NO: 303969 - RNA, 32 nt, Homo Sapiens
cugagauacauuuuuccaauccugggggcaaa

SEQ ID NO: 303970 - RNA, 32 nt, Homo Sapiens
gagacagagcacauuuucaggccagcaacuau

SEQ ID NO: 303971 - RNA, 32 nt, Homo Sapiens
gagccacugcaccugauguuggucuuuuauua

SEQ ID NO: 303972 - RNA, 32 nt, Homo Sapiens
cccuuuccugcagggaggggugccaugagucu

SEQ ID NO: 303973 - RNA, 32 nt, Homo Sapiens
ucuuugauaugcaaauuaauauuuucaguuga

SEQ ID NO: 303974 - RNA, 32 nt, Homo Sapiens
ggcuggggucauggucggcugcgcauguccag

SEQ ID NO: 303975 - RNA, 32 nt, Homo Sapiens
cgacuugaaggugggggugcugccuggcucgg

SEQ ID NO: 303976 - RNA, 32 nt, Homo Sapiens
uugagggaagcuuuucuuaauugugucuuuua

SEQ ID NO: 303977 - RNA, 31 nt, Homo Sapiens
aguuaauggugcagccaaccaaccuggcaca

SEQ ID NO: 303978 - RNA, 32 nt, Homo Sapiens
auuuagaucuuugucugagauacauucaccua

SEQ ID NO: 303979 - RNA, 32 nt, Homo Sapiens
uggccgucagggcggagcugcagaagcgugug

SEQ ID NO: 303980 - RNA, 32 nt, Homo Sapiens
uagcggagcucaguguggcagcugcuggccuc

SEQ ID NO: 303981 - RNA, 31 nt, Homo Sapiens
ccucgggugaucugccugccucggccucuua

SEQ ID NO: 303982 - RNA, 32 nt, Homo Sapiens
ugaccuucaaggauguggcuguggucuucacc

SEQ ID NO: 303983 - RNA, 32 nt, Homo Sapiens
auguuguaaaacuacguguuacauuuggagag

SEQ ID NO: 303984 - RNA, 32 nt, Homo Sapiens
gagcccacuccaggggccccagccccccagga

SEQ ID NO: 303985 - RNA, 32 nt, Homo Sapiens
agacugauuggaauucuuucuguugaaaagca

SEQ ID NO: 303986 - RNA, 32 nt, Homo Sapiens
ggaguaggaauauuuuucguguucucuuuuau

SEQ ID NO: 303987 - RNA, 32 nt, Homo Sapiens
aagcugaaucccugaauagaucaauaacaagu

SEQ ID NO: 303988 - RNA, 32 nt, Homo Sapiens
ggauugcugucauggacacggacacggaucuu

SEQ ID NO: 303989 - RNA, 31 nt, Homo Sapiens
cuaacacagcacugccugcuuuuuguuuuug

SEQ ID NO: 303990 - RNA, 32 nt, Homo Sapiens
gagaccaggcugugucccucuucucuucccug

SEQ ID NO: 303991 - RNA, 32 nt, Homo Sapiens
accgccaccugcaccugggccuuuuccccaag

SEQ ID NO: 303992 - RNA, 32 nt, Homo Sapiens
aggcugagauaaagcacagggugguuucacuc

SEQ ID NO: 303993 - RNA, 32 nt, Homo Sapiens
gguagggccccggucccacaggccccgccuca

SEQ ID NO: 303994 - RNA, 32 nt, Homo Sapiens
cugaauuaucuguauguguccuggauuccuug

SEQ ID NO: 303995 - RNA, 32 nt, Homo Sapiens
uauuugcccaccagcuucuccucuggagccug

SEQ ID NO: 303996 - RNA, 32 nt, Homo Sapiens
ccaggugccggcacagugccucucccagagcc

SEQ ID NO: 303997 - RNA, 32 nt, Homo Sapiens
gagauuccauguguuuugcucaucucaccagc

SEQ ID NO: 303998 - RNA, 32 nt, Homo Sapiens
uuuuuuaacacuuuggacuucucugaaauauu

SEQ ID NO: 303999 - RNA, 32 nt, Homo Sapiens
uucaugaguacauuuaagcggaagcauacggg

SEQ ID NO: 304000 - RNA, 32 nt, Homo Sapiens
uuacggcauaauuauggaauuuuuauuuacug

SEQ ID NO: 304001 - RNA, 32 nt, Homo Sapiens
aagcauguccgaaagcaguccaggagauuauu

SEQ ID NO: 304002 - RNA, 32 nt, Homo Sapiens
ggacaggguggccuuacucaguaaagguguuu

SEQ ID NO: 304003 - RNA, 32 nt, Homo Sapiens
uugcacaagcuguucauguuaauucuguaccc

SEQ ID NO: 304004 - RNA, 32 nt, Homo Sapiens
aauuuauuugaaaaugcaucacaugaugaaaa

SEQ ID NO: 304005 - RNA, 32 nt, Homo Sapiens
cauaaauucucuucuuuuucccccuuaaguag

SEQ ID NO: 304006 - RNA, 32 nt, Homo Sapiens
gcaauuucccuuuuuuaacccacauuacuuua

SEQ ID NO: 304007 - RNA, 32 nt, Homo Sapiens
ggcccuacuccagccuggagcucccugaggga

SEQ ID NO: 304008 - RNA, 32 nt, Homo Sapiens
agugcagcaggcaccaaguucuccugcacauu

SEQ ID NO: 304009 - RNA, 32 nt, Homo Sapiens
agagauacaaacgguagugaagauucuccuuc

SEQ ID NO: 304010 - RNA, 32 nt, Homo Sapiens
gggcgcggggagagcugggcgggcccaccgcu

SEQ ID NO: 304011 - RNA, 32 nt, Homo Sapiens
cugagauucuuacuuuggggucaggaacuuga

SEQ ID NO: 304012 - RNA, 32 nt, Homo Sapiens
ggcgggcgccugggggcgacgggagggggcug

SEQ ID NO: 304013 - RNA, 32 nt, Homo Sapiens
aaauucggucccugggccuccucccgggcgcu

SEQ ID NO: 304014 - RNA, 32 nt, Homo Sapiens
cuccagugugcaguaaggcucuuccaagccag

SEQ ID NO: 304015 - RNA, 32 nt, Homo Sapiens
guacugcuaaauuauuugauaugaacucaauc

SEQ ID NO: 304016 - RNA, 32 nt, Homo Sapiens
cuuuuccauucuucuuucuuucuuuuuauguu

SEQ ID NO: 304017 - RNA, 32 nt, Homo Sapiens
ugccucccauccccagacccaccagacaccac

SEQ ID NO: 304018 - RNA, 32 nt, Homo Sapiens
uccacucauaaaacuuuaaaaccaucuuucaa

SEQ ID NO: 304019 - RNA, 32 nt, Homo Sapiens
cgcucuggccccaagcacuauuucuuccuuuu

SEQ ID NO: 304020 - RNA, 32 nt, Homo Sapiens
agaagaacaaagucgaaguaugagccagaaga

SEQ ID NO: 304021 - RNA, 32 nt, Homo Sapiens
ggaguuucccccuuucuagggugaggaugguu

SEQ ID NO: 304022 - RNA, 32 nt, Homo Sapiens
aagaaaagaaauucuuuuuuuucaauacuuua

SEQ ID NO: 304023 - RNA, 32 nt, Homo Sapiens
cugcuuuccuuccccacccaccccuuccucag

SEQ ID NO: 304024 - RNA, 32 nt, Homo Sapiens
uacaaguauggacucaugagcuauuguugguu

SEQ ID NO: 304025 - RNA, 32 nt, Homo Sapiens
auauugcaucugcauuuuccaaggcugauucg

SEQ ID NO: 304026 - RNA, 32 nt, Homo Sapiens
uuguaaugguaguuuguuuguugcuggagaau

SEQ ID NO: 304027 - RNA, 32 nt, Homo Sapiens
cagcuugccucccaggccccuuguggacuuag

SEQ ID NO: 304028 - RNA, 32 nt, Homo Sapiens
cauugucccuuuccucacccaguugguagagg

SEQ ID NO: 304029 - RNA, 32 nt, Homo Sapiens
ucagugcccucccuggugcgucugcgcugggg

SEQ ID NO: 304030 - RNA, 32 nt, Homo Sapiens
ucuuuucaguauuuaauaccuguaguucaguu

SEQ ID NO: 304031 - RNA, 32 nt, Homo Sapiens
cuggcgcccucccaugcucucggccacccgga

SEQ ID NO: 304032 - RNA, 32 nt, Homo Sapiens
auccucaggcgaagcuccugccuuuuggcagc

SEQ ID NO: 304033 - RNA, 32 nt, Homo Sapiens
gugagugugaggggcguggaggaggaggcggg

SEQ ID NO: 304034 - RNA, 32 nt, Homo Sapiens
ccuuuccuccuccuugaaaauacaucacuacc

SEQ ID NO: 304035 - RNA, 32 nt, Homo Sapiens
gcugcauccugccugcccgugggaacugaaug

SEQ ID NO: 304036 - RNA, 31 nt, Homo Sapiens
cuggcacugugauuccugccccaugagugcc

SEQ ID NO: 304037 - RNA, 32 nt, Homo Sapiens
uguuguuguuuuccuuuuaacaauaugcacug

SEQ ID NO: 304038 - RNA, 32 nt, Homo Sapiens
ugcggcccaguuccuaacaggucacgaaccug

SEQ ID NO: 304039 - RNA, 32 nt, Homo Sapiens
ggacggacagagcuucugaaacaguccucaga

SEQ ID NO: 304040 - RNA, 32 nt, Homo Sapiens
agugacccuggagcguggaaaagcagaccagc

SEQ ID NO: 304041 - RNA, 32 nt, Homo Sapiens
aaaaauggaaagauccuggccugugguagugg

SEQ ID NO: 304042 - RNA, 32 nt, Homo Sapiens
cccagccggccgcagccugacacgccgcgcgg

SEQ ID NO: 304043 - RNA, 32 nt, Homo Sapiens
uggcuccuuuugcugcugaggacacucacugu

SEQ ID NO: 304044 - RNA, 32 nt, Homo Sapiens
cuucuugcaacaaaaacaaaagugauuauguc

SEQ ID NO: 304045 - RNA, 32 nt, Homo Sapiens
ugccccagagggugggaccacugcaagcucga

SEQ ID NO: 304046 - RNA, 32 nt, Homo Sapiens
uauggucugauuaugccuggaguauuauuuua

SEQ ID NO: 304047 - RNA, 32 nt, Homo Sapiens
auacaccacacuuuucagguuguugcaacaca

SEQ ID NO: 304048 - RNA, 32 nt, Homo Sapiens
aacacaucuuccuccgcagacccaggcccucc

SEQ ID NO: 304049 - RNA, 32 nt, Homo Sapiens
uucguaugucuauugguugugcagguguaauu

SEQ ID NO: 304050 - RNA, 32 nt, Homo Sapiens
uucauuaggaccagauugguucuaagaguuag

SEQ ID NO: 304051 - RNA, 32 nt, Homo Sapiens
uaaagugcuguaaaaugaaaucauucuacuuu

SEQ ID NO: 304052 - RNA, 32 nt, Homo Sapiens
ugcagcccuauaaagauugaucuguccgucuu

SEQ ID NO: 304053 - RNA, 32 nt, Homo Sapiens
ucccaauuagacuuccucuccuuccaccccuc

SEQ ID NO: 304054 - RNA, 32 nt, Homo Sapiens
acuuccagaccccugcccucuugggacugccc

SEQ ID NO: 304055 - RNA, 32 nt, Homo Sapiens
ggaagggacaucgaacuaagaccugaacuaug

SEQ ID NO: 304056 - RNA, 32 nt, Homo Sapiens
auuaauguaaagguuaaaaauaaaaccuaaua

SEQ ID NO: 304057 - RNA, 32 nt, Homo Sapiens
uaacacugaaagauaagcugggagauacugaa

SEQ ID NO: 304058 - RNA, 32 nt, Homo Sapiens
ccgcaagaggguggcgggcgcggccgucggag

SEQ ID NO: 304059 - RNA, 32 nt, Homo Sapiens
caucaguauugaccgucucgcuccaucuuggu

SEQ ID NO: 304060 - RNA, 32 nt, Homo Sapiens
agaguugccacauuguucuuugaaauguccag

SEQ ID NO: 304061 - RNA, 32 nt, Homo Sapiens
auacauuauuuguagggaauugcaugcuuuuu

SEQ ID NO: 304062 - RNA, 32 nt, Homo Sapiens
ucuugagaacagagaauacaauugucaucuuu

SEQ ID NO: 304063 - RNA, 32 nt, Homo Sapiens
gaaagggcugaugucugcauucugggauuauu

SEQ ID NO: 304064 - RNA, 32 nt, Homo Sapiens
cucugccccucgggacugacuauuuuggccca

SEQ ID NO: 304065 - RNA, 32 nt, Homo Sapiens
uuaacuggugaaauauacuggauuauguuuaa

SEQ ID NO: 304066 - RNA, 32 nt, Homo Sapiens
uccuguacugugucucauggauuuggcacuag

SEQ ID NO: 304067 - RNA, 32 nt, Homo Sapiens
uaugcauugcaacagcuaaaaaguauaaauuu

SEQ ID NO: 304068 - RNA, 32 nt, Homo Sapiens
aguaaccauaggugacuaaauuaaacuaaaau

SEQ ID NO: 304069 - RNA, 32 nt, Homo Sapiens
gucuguuuacucuguugauaguuucuuuagcu

SEQ ID NO: 304070 - RNA, 32 nt, Homo Sapiens
aggaggaggaggagccgagcgggcgcuggcac

SEQ ID NO: 304071 - RNA, 32 nt, Homo Sapiens
ggcaugggaaaauggaaggguugaggauggac

SEQ ID NO: 304072 - RNA, 32 nt, Homo Sapiens
cuuuggcuagccacauacuggaccuuacccca

SEQ ID NO: 304073 - RNA, 32 nt, Homo Sapiens
uauuuccuuccaugaauggaagaaacacacua

SEQ ID NO: 304074 - RNA, 32 nt, Homo Sapiens
uaccccacgcugcaggaaauccauucagaaau

SEQ ID NO: 304075 - RNA, 32 nt, Homo Sapiens
cuuaagcaaucuauaaaucauuuucaauguua

SEQ ID NO: 304076 - RNA, 32 nt, Homo Sapiens
agaacaagaaaaguuuauaacaccauguucac

SEQ ID NO: 304077 - RNA, 32 nt, Homo Sapiens
gaagaacaaauugaucuacauaaagaaguuau

SEQ ID NO: 304078 - RNA, 32 nt, Homo Sapiens
gcgcagucagcuggagcgucgcggcgguccgc

SEQ ID NO: 304079 - RNA, 32 nt, Homo Sapiens
ugagaagccagaccauucaugauggucuuuau

SEQ ID NO: 304080 - RNA, 32 nt, Homo Sapiens
uuugaacuccuggccucccaaggugcugauag

SEQ ID NO: 304081 - RNA, 32 nt, Homo Sapiens
agugaagcugugucaguuuuaacauuagcuau

SEQ ID NO: 304082 - RNA, 32 nt, Homo Sapiens
gagacagagggagagugugcauacagcagcug

SEQ ID NO: 304083 - RNA, 32 nt, Homo Sapiens
gccaccgugcuccgggcaccccgggagcuccu

SEQ ID NO: 304084 - RNA, 32 nt, Homo Sapiens
cagugucaguuauuuaaagugguaaugcccga

SEQ ID NO: 304085 - RNA, 32 nt, Homo Sapiens
uaguuuuauccagggagaaaaauaaaaggaag

SEQ ID NO: 304086 - RNA, 32 nt, Homo Sapiens
ccccggcggcggcggcagcagcugcagcauca

SEQ ID NO: 304087 - RNA, 32 nt, Homo Sapiens
aggaaugagagggaaaguuuggaccugucacu

SEQ ID NO: 304088 - RNA, 32 nt, Homo Sapiens
ccuuuucagggugaagcucuuccuucaagagu

SEQ ID NO: 304089 - RNA, 32 nt, Homo Sapiens
auggcuuuaagcaagcacuacugcacuuuaca

SEQ ID NO: 304090 - RNA, 32 nt, Homo Sapiens
gcccagggccuggcccugcugcacaugcccug

SEQ ID NO: 304091 - RNA, 27 nt, Homo Sapiens
uucauucauuaauuuuaguacugugua

SEQ ID NO: 304092 - RNA, 32 nt, Homo Sapiens
gacagacccagcuuucgggacccucccgcgug

SEQ ID NO: 304093 - RNA, 32 nt, Homo Sapiens
caaaaaggggcggggagaaggcgggggcgcug

SEQ ID NO: 304094 - RNA, 32 nt, Homo Sapiens
gcccgguccccgccgcacccagcccagagaag

SEQ ID NO: 304095 - RNA, 32 nt, Homo Sapiens
aggcaggaccacccuuucucccugcccagcca

SEQ ID NO: 304096 - RNA, 26 nt, Homo Sapiens
ccaauuaaaaacaaugauugagaaaa

SEQ ID NO: 304097 - RNA, 32 nt, Homo Sapiens
aggagaaaugauguuauaaaaaacucauaagg

SEQ ID NO: 304098 - RNA, 32 nt, Homo Sapiens
ugggacccggggacccuggugucccugguucg

SEQ ID NO: 304099 - RNA, 32 nt, Homo Sapiens
cucaccccugcuggggucugcacugcucuucc

SEQ ID NO: 304100 - RNA, 32 nt, Homo Sapiens
uacaguuguaagucagaguuaauauaauaggg

SEQ ID NO: 304101 - RNA, 32 nt, Homo Sapiens
uucuaaauuuaaaaaaucuucaaaucugaaua

SEQ ID NO: 304102 - RNA, 32 nt, Homo Sapiens
aaauguaucuuauuuuugauaauggcucuuaa

SEQ ID NO: 304103 - RNA, 32 nt, Homo Sapiens
cagagcuggcagccagcucugccuuuccacug

SEQ ID NO: 304104 - RNA, 32 nt, Homo Sapiens
aaaaaucagagguggaggucaggggguuaggu

SEQ ID NO: 304105 - RNA, 32 nt, Homo Sapiens
gucauugccugccuauuugagacaggaaugug

SEQ ID NO: 304106 - RNA, 32 nt, Homo Sapiens
aaccggcgcgcgggcugaggccgcccgggaug

SEQ ID NO: 304107 - RNA, 32 nt, Homo Sapiens
cugaaauuggcuucuuuuuauugggcuucucu

SEQ ID NO: 304108 - RNA, 32 nt, Homo Sapiens
cagagccaacuggcucaggcuugggaaggcug

SEQ ID NO: 304109 - RNA, 32 nt, Homo Sapiens
ggguuuuguuucuauuuguaguuucuugagua

SEQ ID NO: 304110 - RNA, 32 nt, Homo Sapiens
ccagccucuggcauuagaauuauuuaaacaaa

SEQ ID NO: 304111 - RNA, 32 nt, Homo Sapiens
cgccgggcucugcaguuccgccgggggucggg

SEQ ID NO: 304112 - RNA, 32 nt, Homo Sapiens
uccuuggcaacacuuacagaacuuuccaucaa

SEQ ID NO: 304113 - RNA, 32 nt, Homo Sapiens
cgggacccgggcggggaaaggcgcggcguggc

SEQ ID NO: 304114 - RNA, 32 nt, Homo Sapiens
agccucaccugccucccuucucugaguagcac

SEQ ID NO: 304115 - RNA, 32 nt, Homo Sapiens
cggccugcgggcccgugcgcgccucccaccug

SEQ ID NO: 304116 - RNA, 32 nt, Homo Sapiens
aggggacaagauacaacaugggaaucccaaug

SEQ ID NO: 304117 - RNA, 32 nt, Homo Sapiens
ucucuccgcgcgcacccccaacccgcccccuu

SEQ ID NO: 304118 - RNA, 32 nt, Homo Sapiens
ccccacccaccaccuucuggcuccucuccucu

SEQ ID NO: 304119 - RNA, 32 nt, Homo Sapiens
ccccuggaggcauuuaaaaugccacaacgaga

SEQ ID NO: 304120 - RNA, 32 nt, Homo Sapiens
guguucugcccggcucugcuuggucacagaca

SEQ ID NO: 304121 - RNA, 32 nt, Homo Sapiens
cggguggcuggcuuugccauuagcgggggccu

SEQ ID NO: 304122 - RNA, 32 nt, Homo Sapiens
uguagugucacggauuuucuggauagaggaag

SEQ ID NO: 304123 - RNA, 29 nt, Homo Sapiens
gaccagccugggcaacauggcaaaacacc

SEQ ID NO: 304124 - RNA, 32 nt, Homo Sapiens
gacuaugucauuauuuugauaauuaggcauuu

SEQ ID NO: 304125 - RNA, 32 nt, Homo Sapiens
cccugggcaggccgcuccugagcugcugucuc

SEQ ID NO: 304126 - RNA, 32 nt, Homo Sapiens
aggcuagagugcagugguaugaucucagcuua

SEQ ID NO: 304127 - RNA, 32 nt, Homo Sapiens
ucgcggccacuacgaugccgggagccgccggg

SEQ ID NO: 304128 - RNA, 32 nt, Homo Sapiens
agaaaucaagauacacaagugggaauugucca

SEQ ID NO: 304129 - RNA, 32 nt, Homo Sapiens
acucuugccucugagauggcgugaccagcaga

SEQ ID NO: 304130 - RNA, 32 nt, Homo Sapiens
ucugaccucaggugaucuacccgccucggccu

SEQ ID NO: 304131 - RNA, 32 nt, Homo Sapiens
aggugauccgccugccucggccucggaaagug

SEQ ID NO: 304132 - RNA, 32 nt, Homo Sapiens
ccugggcaggagagaacacacgagcacguauu

SEQ ID NO: 304133 - RNA, 32 nt, Homo Sapiens
ucuacuaagauauguuacaggauguuuuacau

SEQ ID NO: 304134 - RNA, 32 nt, Homo Sapiens
agccaagauugugccacuguauuccaacuugg

SEQ ID NO: 304135 - RNA, 32 nt, Homo Sapiens
aaaccucacaaaugcaucaggccgugugcugg

SEQ ID NO: 304136 - RNA, 32 nt, Homo Sapiens
gcuuucuuuacuuaaaaugucuaucucauuug

SEQ ID NO: 304137 - RNA, 32 nt, Homo Sapiens
gcagcgcccucccgaggaacaggcgucuuccc

SEQ ID NO: 304138 - RNA, 32 nt, Homo Sapiens
ggguucccgagcugccggucugagccugaggc

SEQ ID NO: 304139 - RNA, 32 nt, Homo Sapiens
aucuauauauugcacauauuccuguauaguga

SEQ ID NO: 304140 - RNA, 29 nt, Homo Sapiens
ggguggcuucagaaucauggcggaaggca

SEQ ID NO: 304141 - RNA, 32 nt, Homo Sapiens
auacaaauuguuaauguuucuuuagagcugua

SEQ ID NO: 304142 - RNA, 32 nt, Homo Sapiens
cugcgggcgggggcgaaagggcuccuugcggg

SEQ ID NO: 304143 - RNA, 32 nt, Homo Sapiens
ucugcauauaaaaguucauugaaaugauaugc

SEQ ID NO: 304144 - RNA, 32 nt, Homo Sapiens
uaaaaagaauaaagcggccaggcacagugguu

SEQ ID NO: 304145 - RNA, 32 nt, Homo Sapiens
ugcggccgcgcgcgccuuaggcucggccccgc

SEQ ID NO: 304146 - RNA, 32 nt, Homo Sapiens
guggccuuuccacauaauccacauuaaguucu

SEQ ID NO: 304147 - RNA, 32 nt, Homo Sapiens
gccucuuucuucagugcuucuagcaggccuac

SEQ ID NO: 304148 - RNA, 32 nt, Homo Sapiens
guuagccaggauggucucaaucuccugaccuu

SEQ ID NO: 304149 - RNA, 32 nt, Homo Sapiens
gaaaauuggccaucuuucccaccucuaaauuc

SEQ ID NO: 304150 - RNA, 32 nt, Homo Sapiens
uagggguguacuuguuggggucaggguaagca

SEQ ID NO: 304151 - RNA, 32 nt, Homo Sapiens
aucuagauccuaucuaaaaauauguaguuauu

SEQ ID NO: 304152 - RNA, 32 nt, Homo Sapiens
auugcugaacaaaagagaacuggguuuaccug

SEQ ID NO: 304153 - RNA, 32 nt, Homo Sapiens
gugaccuaacuguguauuucacugaagaaacc

SEQ ID NO: 304154 - RNA, 32 nt, Homo Sapiens
ucaauaaauaucuauuuuucauuuuuuuacuu

SEQ ID NO: 304155 - RNA, 32 nt, Homo Sapiens
ccagucaccacugagcagcauggggcacgcua

SEQ ID NO: 304156 - RNA, 32 nt, Homo Sapiens
uuaaaugaaaauaaaaugauaugcuuauacau

SEQ ID NO: 304157 - RNA, 32 nt, Homo Sapiens
ucaaugccaaaauauuucuaugcuuguuucuu

SEQ ID NO: 304158 - RNA, 32 nt, Homo Sapiens
uacuaugugaggaaacaaacauguucaggccc

SEQ ID NO: 304159 - RNA, 32 nt, Homo Sapiens
cgagcauauuucauuuucugucauuggacuuu

SEQ ID NO: 304160 - RNA, 32 nt, Homo Sapiens
cacuaugguuaaaugucuuguuuaaugguuga

SEQ ID NO: 304161 - RNA, 32 nt, Homo Sapiens
aaauugagaaaguuaugauuuugaccucccaa

SEQ ID NO: 304162 - RNA, 32 nt, Homo Sapiens
uuacaaaaugacuuaccuguaacuuccuuuau

SEQ ID NO: 304163 - RNA, 32 nt, Homo Sapiens
ugaccugcaccccugauguggcauauggagcc

SEQ ID NO: 304164 - RNA, 32 nt, Homo Sapiens
ugggccaucaguauuagugauuucauacugca

SEQ ID NO: 304165 - RNA, 32 nt, Homo Sapiens
ugcagcagcucuuucagcuccuucuugcucag

SEQ ID NO: 304166 - RNA, 32 nt, Homo Sapiens
auuagcuguugaccauuugaugcuguugucug

SEQ ID NO: 304167 - RNA, 32 nt, Homo Sapiens
aacagcacuuuaggaaaagucaccguagccca

SEQ ID NO: 304168 - RNA, 32 nt, Homo Sapiens
uuuaugcucagcaaaguauguauuuuaaguaa

SEQ ID NO: 304169 - RNA, 32 nt, Homo Sapiens
gucuuagggcuggugcuggcccugcccacgcc

SEQ ID NO: 304170 - RNA, 32 nt, Homo Sapiens
guccuaaacuuauuagaaaauuuuauauacuu

SEQ ID NO: 304171 - RNA, 32 nt, Homo Sapiens
auuccguccaauuggcaauggcacauaaaaau

SEQ ID NO: 304172 - RNA, 32 nt, Homo Sapiens
uggggguuggugacgcgggccggcgcucacga

SEQ ID NO: 304173 - RNA, 32 nt, Homo Sapiens
gagauguucuuugcucuuauuaucuagauuca

SEQ ID NO: 304174 - RNA, 32 nt, Homo Sapiens
gagcaucuggauucugccuaauaaaaaacauu

SEQ ID NO: 304175 - RNA, 32 nt, Homo Sapiens
auaaagaagcuacuauuuuggaaaaugacauu

SEQ ID NO: 304176 - RNA, 32 nt, Homo Sapiens
cuugggcagaucugcugguucaaccaagaaag

SEQ ID NO: 304177 - RNA, 32 nt, Homo Sapiens
gggucccagccccaccaaguacgcagagaccc

SEQ ID NO: 304178 - RNA, 32 nt, Homo Sapiens
uugggguucauuaaaagcacaaauaaaacaau

SEQ ID NO: 304179 - RNA, 32 nt, Homo Sapiens
acccacuguguuuugcucacucccucacucac

SEQ ID NO: 304180 - RNA, 32 nt, Homo Sapiens
uuguauggauauauuuuuauuauguguacuga

SEQ ID NO: 304181 - RNA, 32 nt, Homo Sapiens
gaaaaucuuaggaugguuguacaauugacugg

SEQ ID NO: 304182 - RNA, 32 nt, Homo Sapiens
gccccacagccuucuacaagggguggccuccu

SEQ ID NO: 304183 - RNA, 32 nt, Homo Sapiens
aaggccuagcuccauugcagacuuccaaaggg

SEQ ID NO: 304184 - RNA, 32 nt, Homo Sapiens
aauguucacagcagcauuauucauaauaguca

SEQ ID NO: 304185 - RNA, 32 nt, Homo Sapiens
uuuuuucacaggagaaauaaucauauucguaa

SEQ ID NO: 304186 - RNA, 32 nt, Homo Sapiens
uaagaaauguagaaaaaccuucagccaggagg

SEQ ID NO: 304187 - RNA, 32 nt, Homo Sapiens
aagcaaagaagagaagugacuuuuccuggccu

SEQ ID NO: 304188 - RNA, 32 nt, Homo Sapiens
gcaagccuuucugcacagagagcacagcagaa

SEQ ID NO: 304189 - RNA, 32 nt, Homo Sapiens
ccucccugcaccucugccccaaggcugcccgg

SEQ ID NO: 304190 - RNA, 32 nt, Homo Sapiens
cacgagcuggaacccacgaggauggccuggaa

SEQ ID NO: 304191 - RNA, 32 nt, Homo Sapiens
agguggaccugugcacucaguaaaacgcagug

SEQ ID NO: 304192 - RNA, 32 nt, Homo Sapiens
augaugauacaacagguagugaaacagguugu

SEQ ID NO: 304193 - RNA, 32 nt, Homo Sapiens
ccugguuucaacauggaagugagauagcugau

SEQ ID NO: 304194 - RNA, 32 nt, Homo Sapiens
ggcgggagaggcggccggccuggacuggcccg

SEQ ID NO: 304195 - RNA, 32 nt, Homo Sapiens
aggacgcagcaaguggcggagcaagaaucaca

SEQ ID NO: 304196 - RNA, 32 nt, Homo Sapiens
gggugaacaugaggagaaccagcaaaaucugu

SEQ ID NO: 304197 - RNA, 32 nt, Homo Sapiens
cagacgcauccucgcggggucuccucggccug

SEQ ID NO: 304198 - RNA, 32 nt, Homo Sapiens
uguuaccaucucauuuggucaagccccugaua

SEQ ID NO: 304199 - RNA, 32 nt, Homo Sapiens
gggaaggagauccagaacuuuuuaccagauuu

SEQ ID NO: 304200 - RNA, 32 nt, Homo Sapiens
auaugcucaacacaaaguaaacagcauuauau

SEQ ID NO: 304201 - RNA, 32 nt, Homo Sapiens
uugugggagagccgcagaggcugggcucagag

SEQ ID NO: 304202 - RNA, 27 nt, Homo Sapiens
aacucuuccaccugcagcccccuuuug

SEQ ID NO: 304203 - RNA, 32 nt, Homo Sapiens
uggaacgggagcgggcacagcugcugguccgg

SEQ ID NO: 304204 - RNA, 32 nt, Homo Sapiens
gcccaccggccgcagaccugcguggccgucca

SEQ ID NO: 304205 - RNA, 32 nt, Homo Sapiens
uguuuuagcugagacuugugggauggguagua

SEQ ID NO: 304206 - RNA, 32 nt, Homo Sapiens
ccgaaacuugugcgcgcacgccaaacuaaccu

SEQ ID NO: 304207 - RNA, 32 nt, Homo Sapiens
gccucugcgaggggcguccggguccgagucgg

SEQ ID NO: 304208 - RNA, 32 nt, Homo Sapiens
aaaaggaagaacuccagguggcccuggaagaa

SEQ ID NO: 304209 - RNA, 32 nt, Homo Sapiens
ugggcgagaacgcagcggcccgggccggcgga

SEQ ID NO: 304210 - RNA, 32 nt, Homo Sapiens
ugggugggcggagggacacaacaaaauuuaag

SEQ ID NO: 304211 - RNA, 32 nt, Homo Sapiens
gugauuggcuccuggguuucauguucugugac

SEQ ID NO: 304212 - RNA, 32 nt, Homo Sapiens
aagucagaaaucaauaaaauguuauuaaauga

SEQ ID NO: 304213 - RNA, 32 nt, Homo Sapiens
aagagcgucuccugggcagcugaccccaaaag

SEQ ID NO: 304214 - RNA, 32 nt, Homo Sapiens
agcggggccagcgggggcgguggcggugacac

SEQ ID NO: 304215 - RNA, 29 nt, Homo Sapiens
gaagcuaaagauucagauuuucuauguga

SEQ ID NO: 304216 - RNA, 32 nt, Homo Sapiens
gccauauuuuugggaggcagagaggggcaggc

SEQ ID NO: 304217 - RNA, 32 nt, Homo Sapiens
ggccgccggcgccgcaucccucucuaccugcc

SEQ ID NO: 304218 - RNA, 32 nt, Homo Sapiens
cacaggccagcauggccguggagccacacacc

SEQ ID NO: 304219 - RNA, 31 nt, Homo Sapiens
cuucuacaucugcagaaccaggugauugauc

SEQ ID NO: 304220 - RNA, 32 nt, Homo Sapiens
gccaguucagggcccagcugccccccaggaug

SEQ ID NO: 304221 - RNA, 32 nt, Homo Sapiens
uccuaauaagguguggucuguuugucugaaca

SEQ ID NO: 304222 - RNA, 32 nt, Homo Sapiens
agcagcuacuguaacuuuuuuaaauuaagaca

SEQ ID NO: 304223 - RNA, 27 nt, Homo Sapiens
guuguuuacuucuucaguuuuuaaaau

SEQ ID NO: 304224 - RNA, 32 nt, Homo Sapiens
gccgcccggcucuguccacaccugcuuugcuc

SEQ ID NO: 304225 - RNA, 32 nt, Homo Sapiens
uuaguggcaguagaccuaauccaauuauuuga

SEQ ID NO: 304226 - RNA, 32 nt, Homo Sapiens
aguuucacuccuccccuucuuccaugucuccu

SEQ ID NO: 304227 - RNA, 32 nt, Homo Sapiens
gcaauauguaaaaauguaucaaauguauuaua

SEQ ID NO: 304228 - RNA, 30 nt, Homo Sapiens
uuaucacuguuuaaaacccaucucuaaaua

SEQ ID NO: 304229 - RNA, 32 nt, Homo Sapiens
agacccucccaacuccuccccgacucccagcc

SEQ ID NO: 304230 - RNA, 32 nt, Homo Sapiens
cucuucucucagucaccaccguguggcugccc

SEQ ID NO: 304231 - RNA, 32 nt, Homo Sapiens
augguuuguuuuuauagcaaaacuguuaagcu

SEQ ID NO: 304232 - RNA, 30 nt, Homo Sapiens
ccuugcaugaugcugggggaaaaagagaaa

SEQ ID NO: 304233 - RNA, 32 nt, Homo Sapiens
agacucugcucccgagaagccaagugaugcug

SEQ ID NO: 304234 - RNA, 32 nt, Homo Sapiens
gacaaagccuuccaaugauuguuacacuugcu

SEQ ID NO: 304235 - RNA, 32 nt, Homo Sapiens
agcagcucggcgucucagccucaugcugcaug

SEQ ID NO: 304236 - RNA, 32 nt, Homo Sapiens
uguuccagauugacaagucaucuuucaguuau

SEQ ID NO: 304237 - RNA, 32 nt, Homo Sapiens
agggguggcagcccccagcuccccucagugcu

SEQ ID NO: 304238 - RNA, 32 nt, Homo Sapiens
uacauauguacaacuugcagguuuguuacaua

SEQ ID NO: 304239 - RNA, 32 nt, Homo Sapiens
ugaagggaaaaagaggucacauauugugauuu

SEQ ID NO: 304240 - RNA, 32 nt, Homo Sapiens
aaacacacucagaaagcagagaaaaaggacaa

SEQ ID NO: 304241 - RNA, 31 nt, Homo Sapiens
agggguuuuacauaaggaaauaaguccuagg

SEQ ID NO: 304242 - RNA, 32 nt, Homo Sapiens
uuacguccuguuuauaaaaugauuccaaagca

SEQ ID NO: 304243 - RNA, 32 nt, Homo Sapiens
ccgggacccggcccgcgccuucugccccugcu

SEQ ID NO: 304244 - RNA, 32 nt, Homo Sapiens
cgccccgcaucgugcccggccccgucgcggag

SEQ ID NO: 304245 - RNA, 32 nt, Homo Sapiens
gaggugaacaaaugaaucagagcugagaugag

SEQ ID NO: 304246 - RNA, 32 nt, Homo Sapiens
cagucaguucccugcacccagcaccucacagc

SEQ ID NO: 304247 - RNA, 32 nt, Homo Sapiens
aguaucuuccagguacaccucccuuacacauc

SEQ ID NO: 304248 - RNA, 32 nt, Homo Sapiens
gaggacguguggagcuaaggucauaucaucug

SEQ ID NO: 304249 - RNA, 32 nt, Homo Sapiens
cuaaguagcugggauuacaggaaaugagaaca

SEQ ID NO: 304250 - RNA, 32 nt, Homo Sapiens
ggcugggagggcugcuggcgcgggcucgccgg

SEQ ID NO: 304251 - RNA, 32 nt, Homo Sapiens
auguuuacuacauuuccaacuugaugucaagc

SEQ ID NO: 304252 - RNA, 32 nt, Homo Sapiens
ccuggcuauagcuuauacaguaucuccccuug

SEQ ID NO: 304253 - RNA, 32 nt, Homo Sapiens
ugugucccacccuucacccccaaauucccgug

SEQ ID NO: 304254 - RNA, 32 nt, Homo Sapiens
aaaguaucauauaaagcugaauacaaauuggu

SEQ ID NO: 304255 - RNA, 32 nt, Homo Sapiens
gcgcccuucccgcccggcaccccacuucugua

SEQ ID NO: 304256 - RNA, 32 nt, Homo Sapiens
aauaauaguuauccgucuucuacuucauggaa

SEQ ID NO: 304257 - RNA, 32 nt, Homo Sapiens
aagccuacaugauaggcauauuuuguauuucg

SEQ ID NO: 304258 - RNA, 32 nt, Homo Sapiens
cugucccgcgcgcucccaggccgccccgaggc

SEQ ID NO: 304259 - RNA, 32 nt, Homo Sapiens
caucaucccuccccgcaucgaggcucuuuaaa

SEQ ID NO: 304260 - RNA, 32 nt, Homo Sapiens
aucucuucauguggcuuuucuuucuccaagaa

SEQ ID NO: 304261 - RNA, 32 nt, Homo Sapiens
aguacagcuaucugcuggcucuaaaccuucua

SEQ ID NO: 304262 - RNA, 32 nt, Homo Sapiens
uuuuuaugggucugcugguaagaaaagggaaa

SEQ ID NO: 304263 - RNA, 31 nt, Homo Sapiens
agguagaaauaaagacuaaaauaccaaagug

SEQ ID NO: 304264 - RNA, 32 nt, Homo Sapiens
aggaagccaucccuccucccccaggauccaca

SEQ ID NO: 304265 - RNA, 30 nt, Homo Sapiens
gagcuggagcgccagcaccacgauggcccc

SEQ ID NO: 304266 - RNA, 32 nt, Homo Sapiens
guacucaaauauauuuucucaguuucagaucc

SEQ ID NO: 304267 - RNA, 32 nt, Homo Sapiens
ccgguuuccucccagacuaugucuuacacgcu

SEQ ID NO: 304268 - RNA, 31 nt, Homo Sapiens
uagaaaaaauaaaaacuacaaucauuagcag

SEQ ID NO: 304269 - RNA, 32 nt, Homo Sapiens
gugagggccaaggggcuauuacugcuguuggg

SEQ ID NO: 304270 - RNA, 32 nt, Homo Sapiens
gauuguacuuggacugucauagccucugcguu

SEQ ID NO: 304271 - RNA, 32 nt, Homo Sapiens
auugcccacaguuuuucuuuuuaaaggugguu

SEQ ID NO: 304272 - RNA, 32 nt, Homo Sapiens
uuugagagauaaaucccuuaugaaucccuggu

SEQ ID NO: 304273 - RNA, 31 nt, Homo Sapiens
cacuucagaggcagccaaucauauccuuccu

SEQ ID NO: 304274 - RNA, 32 nt, Homo Sapiens
uugaggucaggaguuugagaccagccugggua

SEQ ID NO: 304275 - RNA, 32 nt, Homo Sapiens
acaagagaaguacuaucuuuguguugcagccu

SEQ ID NO: 304276 - RNA, 32 nt, Homo Sapiens
gcgagaacccucaacugacaugaaauacuuua

SEQ ID NO: 304277 - RNA, 32 nt, Homo Sapiens
gaccaaaugcaucaaggggcauuaucagcccc

SEQ ID NO: 304278 - RNA, 31 nt, Homo Sapiens
ggccgagcgggcccagcugcagagucagcug

SEQ ID NO: 304279 - RNA, 32 nt, Homo Sapiens
cugacgugcagggcucagcccagggcauccag

SEQ ID NO: 304280 - RNA, 32 nt, Homo Sapiens
ccauugcucggcccugcgccugccccaguccu

SEQ ID NO: 304281 - RNA, 32 nt, Homo Sapiens
cgccuagccucacgcuccuuucugaucuucac

SEQ ID NO: 304282 - RNA, 32 nt, Homo Sapiens
cucccuucaagaaaauucuguggcugugcagu

SEQ ID NO: 304283 - RNA, 32 nt, Homo Sapiens
ccuuugcuaccaucaauuugcagacuagaaag

SEQ ID NO: 304284 - RNA, 32 nt, Homo Sapiens
ugaucucuugcuuucaucaucuugucuagggg

SEQ ID NO: 304285 - RNA, 32 nt, Homo Sapiens
agacauuccggugggggacucuggccagcccg

SEQ ID NO: 304286 - RNA, 32 nt, Homo Sapiens
ggaacaggaaaacaaauggcaguaucccucag

SEQ ID NO: 304287 - RNA, 32 nt, Homo Sapiens
caucacccuccccuccccuccccuccccuccc

SEQ ID NO: 304288 - RNA, 32 nt, Homo Sapiens
ugcauauccggaggucugggccauacauggcu

SEQ ID NO: 304289 - RNA, 32 nt, Homo Sapiens
agacguggucugaccgaggaucaagaagcaca

SEQ ID NO: 304290 - RNA, 32 nt, Homo Sapiens
ucaggguuuccacagucaucagggcuucucuc

SEQ ID NO: 304291 - RNA, 28 nt, Homo Sapiens
caaaaaauaaacgagauggguuaaagau

SEQ ID NO: 304292 - RNA, 32 nt, Homo Sapiens
auacuaauucuauaccccagauggggaauuag

SEQ ID NO: 304293 - RNA, 32 nt, Homo Sapiens
auuacucauaauuuauaaugcuuaauauaauc

SEQ ID NO: 304294 - RNA, 32 nt, Homo Sapiens
acaccucagacacgcacaguucaccaagugcc

SEQ ID NO: 304295 - RNA, 32 nt, Homo Sapiens
gaagauuugauacauuauuucauuaucuaaaa

SEQ ID NO: 304296 - RNA, 32 nt, Homo Sapiens
ugggggugggggugggggccgggagccgucgc

SEQ ID NO: 304297 - RNA, 32 nt, Homo Sapiens
ugguuaacaauaggucuuugguaaauaaaauu

SEQ ID NO: 304298 - RNA, 32 nt, Homo Sapiens
ugguagcauuaaugaaaguuuaccaagaggaa

SEQ ID NO: 304299 - RNA, 32 nt, Homo Sapiens
gaggagaggaagaggguggagugggcucugcc

SEQ ID NO: 304300 - RNA, 32 nt, Homo Sapiens
gugcagacacuaugccaaaaaauaacuucaca

SEQ ID NO: 304301 - RNA, 32 nt, Homo Sapiens
acagucuggugggagagugcagacacacacca

SEQ ID NO: 304302 - RNA, 32 nt, Homo Sapiens
cuuccuuccagaagcuugguucuacuguaagc

SEQ ID NO: 304303 - RNA, 32 nt, Homo Sapiens
uuucuuuuuuaaaacauuuuuuacuguaguaa

SEQ ID NO: 304304 - RNA, 32 nt, Homo Sapiens
cccaacugacuucugcuagguagaggcauuug

SEQ ID NO: 304305 - RNA, 32 nt, Homo Sapiens
uuacaggcaacgcucauuuuaagcaacccuua

SEQ ID NO: 304306 - RNA, 30 nt, Homo Sapiens
ggccgcccgccucugccgccgcaaugauga

SEQ ID NO: 304307 - RNA, 32 nt, Homo Sapiens
uagcugugcagcucugcagaucuaaaaucugu

SEQ ID NO: 304308 - RNA, 32 nt, Homo Sapiens
aguuugucuuuaucaccccccaucccaccgcc

SEQ ID NO: 304309 - RNA, 32 nt, Homo Sapiens
gcagacgugggcacugugggagcccagaugag

SEQ ID NO: 304310 - RNA, 32 nt, Homo Sapiens
uugccaguuucugcccagcaaaagcacguaug

SEQ ID NO: 304311 - RNA, 32 nt, Homo Sapiens
gaggcugccgggaucgcgacggaccggcgggc

SEQ ID NO: 304312 - RNA, 32 nt, Homo Sapiens
uccauguaaccaaaaaccacuuguagggggaa

SEQ ID NO: 304313 - RNA, 32 nt, Homo Sapiens
gaagacaaaaagacaaacacacccacacgcag

SEQ ID NO: 304314 - RNA, 32 nt, Homo Sapiens
ccucuaugaaaauuauaucucaguaaacuuug

SEQ ID NO: 304315 - RNA, 32 nt, Homo Sapiens
acaacagugaucugaaaagaccaaaaagagua

SEQ ID NO: 304316 - RNA, 32 nt, Homo Sapiens
agauaagauucuuaggguucacugcuuuauuc

SEQ ID NO: 304317 - RNA, 32 nt, Homo Sapiens
auguaaaaauagggaaaagugauucaaauuga

SEQ ID NO: 304318 - RNA, 32 nt, Homo Sapiens
aaaggcuuguaaauuuacccaaugcaguuugg

SEQ ID NO: 304319 - RNA, 32 nt, Homo Sapiens
ugggaccacgaggcagggagccaggcuugaag

SEQ ID NO: 304320 - RNA, 32 nt, Homo Sapiens
uugaggucaggaguuugagaccagccugguca

SEQ ID NO: 304321 - RNA, 32 nt, Homo Sapiens
cugaggucaggaguuugagacuagucuggcca

SEQ ID NO: 304322 - RNA, 32 nt, Homo Sapiens
uauagauguaauuuauagauagaucaguugcu

SEQ ID NO: 304323 - RNA, 32 nt, Homo Sapiens
gauauuugcauuccuggcguacucaagucugu

SEQ ID NO: 304324 - RNA, 32 nt, Homo Sapiens
uacagagugugagccaccacacccagccagca

SEQ ID NO: 304325 - RNA, 32 nt, Homo Sapiens
gauuuuccccacuuacuuacccucaccuguca

SEQ ID NO: 304326 - RNA, 32 nt, Homo Sapiens
ucuuucacauucagaaaaguaguauagauuca

SEQ ID NO: 304327 - RNA, 32 nt, Homo Sapiens
cauguugggcgaaaacagaacaacuguguuuc

SEQ ID NO: 304328 - RNA, 32 nt, Homo Sapiens
cugaggccagcauggugguagcagccagagac

SEQ ID NO: 304329 - RNA, 32 nt, Homo Sapiens
aauggaggagccaggccccaccccuucccuau

SEQ ID NO: 304330 - RNA, 32 nt, Homo Sapiens
ugcagaagaaaagacaggugaguggccaggug

SEQ ID NO: 304331 - RNA, 32 nt, Homo Sapiens
cuccuccagccaccacccacaaucacaagaag

SEQ ID NO: 304332 - RNA, 32 nt, Homo Sapiens
cagcugcuguguccuccuccuuggugauggac

SEQ ID NO: 304333 - RNA, 32 nt, Homo Sapiens
gugccggggcccagcgcaggcgcacgggcguc

SEQ ID NO: 304334 - RNA, 32 nt, Homo Sapiens
aguccagucugugccggggaaggcacugguua

SEQ ID NO: 304335 - RNA, 32 nt, Homo Sapiens
cagggccagggccaguucccuucuccccuccc

SEQ ID NO: 304336 - RNA, 32 nt, Homo Sapiens
gagcugggacuacagguaugcgccaccacacc

SEQ ID NO: 304337 - RNA, 32 nt, Homo Sapiens
ucggcggacgggccaggcgggcggccuccuga

SEQ ID NO: 304338 - RNA, 32 nt, Homo Sapiens
cacagcucagagacauaaagagaagaugccaa

SEQ ID NO: 304339 - RNA, 32 nt, Homo Sapiens
ccgcgcaugcuugcccuauuaaaggcagcuga

SEQ ID NO: 304340 - RNA, 32 nt, Homo Sapiens
gugauaaaccugguuuauacaacaucugccuu

SEQ ID NO: 304341 - RNA, 32 nt, Homo Sapiens
gacaauuuuuaaaauuuguaucuuuacuagaa

SEQ ID NO: 304342 - RNA, 31 nt, Homo Sapiens
uugauggaaaauaaauaaacaucaguuucua

SEQ ID NO: 304343 - RNA, 32 nt, Homo Sapiens
ucuucuuagucuuaugcuaaauuuauuccagc

SEQ ID NO: 304344 - RNA, 30 nt, Homo Sapiens
uuagugaauauccuuuaagagcugggauuu

SEQ ID NO: 304345 - RNA, 32 nt, Homo Sapiens
ugugcagauaaaaguacucuugauuuaacaca

SEQ ID NO: 304346 - RNA, 32 nt, Homo Sapiens
cccguccccccucccaggacuggucuguuguc

SEQ ID NO: 304347 - RNA, 32 nt, Homo Sapiens
gucagagggaggagaccccugguccucugcug

SEQ ID NO: 304348 - RNA, 32 nt, Homo Sapiens
uguuuuuucugucauuucuacuuuuuguauaa

SEQ ID NO: 304349 - RNA, 32 nt, Homo Sapiens
ucuacaguuugacaucacucaaugaaagggau

SEQ ID NO: 304350 - RNA, 32 nt, Homo Sapiens
cuugccccacccaacaagccauaguggagaga

SEQ ID NO: 304351 - RNA, 32 nt, Homo Sapiens
acuuuugcauuccuaggcugcccgccucacug

SEQ ID NO: 304352 - RNA, 32 nt, Homo Sapiens
gccaguuucauuuguucauucuaguucacccu

SEQ ID NO: 304353 - RNA, 32 nt, Homo Sapiens
aggaaggagaaccuggggagggugugugggaa

SEQ ID NO: 304354 - RNA, 32 nt, Homo Sapiens
uccacagcuuuuuaaaaauacuucuacucuua

SEQ ID NO: 304355 - RNA, 32 nt, Homo Sapiens
ugacaaaucuucccuccucaccagcuagucug

SEQ ID NO: 304356 - RNA, 32 nt, Homo Sapiens
cugcccccaggcggcagagucugagggucccg

SEQ ID NO: 304357 - RNA, 32 nt, Homo Sapiens
guaacuuauauuuuuuaaugcugauguuaacu

SEQ ID NO: 304358 - RNA, 32 nt, Homo Sapiens
aagaacuuucacacaagggucuguaacaauug

SEQ ID NO: 304359 - RNA, 32 nt, Homo Sapiens
guguaccugacuucagcuguggcaccaccccu

SEQ ID NO: 304360 - RNA, 32 nt, Homo Sapiens
gacauuuggcauuagccuggaagagguccugg

SEQ ID NO: 304361 - RNA, 32 nt, Homo Sapiens
aguauacccuggaccacccaucugaccaucuc

SEQ ID NO: 304362 - RNA, 32 nt, Homo Sapiens
caggguauuuaagugcuagggcuggucacaca

SEQ ID NO: 304363 - RNA, 32 nt, Homo Sapiens
ggcagagcaggguuccuggggcagcccuggua

SEQ ID NO: 304364 - RNA, 32 nt, Homo Sapiens
aaauaacaaauuucuucaguggucuagagcca

SEQ ID NO: 304365 - RNA, 32 nt, Homo Sapiens
ucccguuuuugacucccuggaacuguauugcc

SEQ ID NO: 304366 - RNA, 32 nt, Homo Sapiens
guaccgccaucccacuucccgccguucccauc

SEQ ID NO: 304367 - RNA, 32 nt, Homo Sapiens
gguggguuggaacacguuugcugccugagccu

SEQ ID NO: 304368 - RNA, 32 nt, Homo Sapiens
cguuuaauccacuucuuuuuuaugagucagug

SEQ ID NO: 304369 - RNA, 32 nt, Homo Sapiens
agguuacccggcccggcccuuccucgcuuccc

SEQ ID NO: 304370 - RNA, 32 nt, Homo Sapiens
cacguggagcccaagucugugccuugccccuu

SEQ ID NO: 304371 - RNA, 32 nt, Homo Sapiens
cugcaugagcagcugaauguuccugugcagaa

SEQ ID NO: 304372 - RNA, 32 nt, Homo Sapiens
ucccgucugcugugacgcgcggacagagagcu

SEQ ID NO: 304373 - RNA, 32 nt, Homo Sapiens
acaacaacaaaaaacaaacaaacaaaaaagcu

SEQ ID NO: 304374 - RNA, 32 nt, Homo Sapiens
aguggccccagcucccgaguuccugaugaaac

SEQ ID NO: 304375 - RNA, 32 nt, Homo Sapiens
acuaaaaaagacaggaggaaaaacagggcccu

SEQ ID NO: 304376 - RNA, 32 nt, Homo Sapiens
uaggagccggaggaggagccgccgccgccguu

SEQ ID NO: 304377 - RNA, 32 nt, Homo Sapiens
ccggugccccugugucccacuacacacagaaa

SEQ ID NO: 304378 - RNA, 32 nt, Homo Sapiens
cagccaaguugugacagucacugcauuugccu

SEQ ID NO: 304379 - RNA, 28 nt, Homo Sapiens
augccaacuacauggccaagcgauuaga

SEQ ID NO: 304380 - RNA, 32 nt, Homo Sapiens
caaauuaaaaauuuuuuuaaggaaaauuagca

SEQ ID NO: 304381 - RNA, 32 nt, Homo Sapiens
auuuaaugggacaggagaagggaacgggcuuu

SEQ ID NO: 304382 - RNA, 32 nt, Homo Sapiens
gguuauacaaauagcugcauauuuuuuagaaa

SEQ ID NO: 304383 - RNA, 28 nt, Homo Sapiens
gcauugaaagauuauuuacauuuugaaa

SEQ ID NO: 304384 - RNA, 32 nt, Homo Sapiens
uucggaggggcggaugcagagcccggggcccc

SEQ ID NO: 304385 - RNA, 32 nt, Homo Sapiens
gguuggucaccauuaucuccuauuccucuuuc

SEQ ID NO: 304386 - RNA, 32 nt, Homo Sapiens
ugucuuuaggugguccugaaucuugggcccuu

SEQ ID NO: 304387 - RNA, 32 nt, Homo Sapiens
uguagcuagcaauagguuuguaaaaugcaccc

SEQ ID NO: 304388 - RNA, 32 nt, Homo Sapiens
accuuauugaagcucacucugauguuaaugag

SEQ ID NO: 304389 - RNA, 32 nt, Homo Sapiens
ucuggggcuugagucuuaauagggcugauagu

SEQ ID NO: 304390 - RNA, 32 nt, Homo Sapiens
ccuccuccagcaugucauccagcgacacuguc

SEQ ID NO: 304391 - RNA, 32 nt, Homo Sapiens
uaaauggaagacugagguuaagcagugguccc

SEQ ID NO: 304392 - RNA, 32 nt, Homo Sapiens
ucaugaaggacuucuuuuuguuucuaacuaua

SEQ ID NO: 304393 - RNA, 32 nt, Homo Sapiens
ucaaagauggcaggaaagggacacagccggcg

SEQ ID NO: 304394 - RNA, 32 nt, Homo Sapiens
ugguccaggacauucaauaccauucacagcau

SEQ ID NO: 304395 - RNA, 32 nt, Homo Sapiens
auaucuuuuucaagccucaugauuggcugagu

SEQ ID NO: 304396 - RNA, 32 nt, Homo Sapiens
caacuuccucagggaggaccccugcccuccgc

SEQ ID NO: 304397 - RNA, 32 nt, Homo Sapiens
uuugaaaggcuuuuucaagcuuaaaaauugug

SEQ ID NO: 304398 - RNA, 32 nt, Homo Sapiens
gggagggugggggaggguguuccaggcugagg

SEQ ID NO: 304399 - RNA, 32 nt, Homo Sapiens
uuaaacuuugaguauuuuuuuacaauguugcu

SEQ ID NO: 304400 - RNA, 32 nt, Homo Sapiens
acugucauuaaaccaguaugaugauggagugg

SEQ ID NO: 304401 - RNA, 32 nt, Homo Sapiens
guggcggcuuugcggagcugcugcuuuggcgg

SEQ ID NO: 304402 - RNA, 32 nt, Homo Sapiens
uggcugcuuucucuccuuaaacuuagaucaaa

SEQ ID NO: 304403 - RNA, 32 nt, Homo Sapiens
uuuggagaagggagaaagaagggagaggcagc

SEQ ID NO: 304404 - RNA, 32 nt, Homo Sapiens
caaauacaggacugaggcucagagagucaugu

SEQ ID NO: 304405 - RNA, 32 nt, Homo Sapiens
gagggguggcgcgcggccaggagcacgcaugg

SEQ ID NO: 304406 - RNA, 32 nt, Homo Sapiens
aaggcgcggaguggcgcgggacgucccgggcg

SEQ ID NO: 304407 - RNA, 32 nt, Homo Sapiens
gcacggggaugaccuguggcgcacaaagacug

SEQ ID NO: 304408 - RNA, 32 nt, Homo Sapiens
aguuaaaccugguccuggccccaggggccuug

SEQ ID NO: 304409 - RNA, 32 nt, Homo Sapiens
ugaagaagggaagagaggaaaaccaaccccag

SEQ ID NO: 304410 - RNA, 32 nt, Homo Sapiens
gguucggcgcggggcggggaugugaaucccga

SEQ ID NO: 304411 - RNA, 32 nt, Homo Sapiens
cugagccucaggugucuggcggugccccagca

SEQ ID NO: 304412 - RNA, 32 nt, Homo Sapiens
gcucuguguuugugcuccugauuucccuggag

SEQ ID NO: 304413 - RNA, 32 nt, Homo Sapiens
ugucacccaggcuggaaugcaguggugugauc

SEQ ID NO: 304414 - RNA, 32 nt, Homo Sapiens
cagaauggagaaacagacagcaaccaagccac

SEQ ID NO: 304415 - RNA, 32 nt, Homo Sapiens
cuuccucccccuccccgaccaaaccucgggga

SEQ ID NO: 304416 - RNA, 32 nt, Homo Sapiens
uccaggcccucccacagcuugugcccuccaca

SEQ ID NO: 304417 - RNA, 32 nt, Homo Sapiens
auauauguauauauuuaauaaagaguacuugu

SEQ ID NO: 304418 - RNA, 32 nt, Homo Sapiens
ccagccugcugcugcccucccgcccugcucca

SEQ ID NO: 304419 - RNA, 32 nt, Homo Sapiens
gucucaggcggaggagaaaaagagaucggcuu

SEQ ID NO: 304420 - RNA, 32 nt, Homo Sapiens
uauguuuucuucaucucuguaaccccagaagc

SEQ ID NO: 304421 - RNA, 32 nt, Homo Sapiens
agcaagaugaaaggaugugaaaugguagauau

SEQ ID NO: 304422 - RNA, 32 nt, Homo Sapiens
gggagugugggaagaugaguaaggacucaucg

SEQ ID NO: 304423 - RNA, 32 nt, Homo Sapiens
ggcugaaggaagauuauagagacuugcuuuag

SEQ ID NO: 304424 - RNA, 32 nt, Homo Sapiens
caccugagcgcgcgcagggccgcgcggcucgg

SEQ ID NO: 304425 - RNA, 32 nt, Homo Sapiens
uuuuguaucuauuugacauuuuccauuaaaag

SEQ ID NO: 304426 - RNA, 32 nt, Homo Sapiens
guccaugacuaagacuggucuucucagaugcc

SEQ ID NO: 304427 - RNA, 32 nt, Homo Sapiens
gucuggcagaaucaguguuugggucaccccuc

SEQ ID NO: 304428 - RNA, 32 nt, Homo Sapiens
cauaaugaaugaugaauuugugaugagggaua

SEQ ID NO: 304429 - RNA, 32 nt, Homo Sapiens
cauguaagcagcacguuuuaacucuuaggaag

SEQ ID NO: 304430 - RNA, 32 nt, Homo Sapiens
gugcauccccccacccuacaacugagcacaac

SEQ ID NO: 304431 - RNA, 32 nt, Homo Sapiens
aagaaauguacauuccaagcaguuggaaguga

SEQ ID NO: 304432 - RNA, 32 nt, Homo Sapiens
aagcagcaaaaucuugguguugugauguacag

SEQ ID NO: 304433 - RNA, 32 nt, Homo Sapiens
ccagcccaugugucuuggucuuuuuuacuaau

SEQ ID NO: 304434 - RNA, 32 nt, Homo Sapiens
caucacaucuucugugcucuuuauuuuugccg

SEQ ID NO: 304435 - RNA, 32 nt, Homo Sapiens
ccaauaggcaugccgccuccgggaaugagacc

SEQ ID NO: 304436 - RNA, 32 nt, Homo Sapiens
ccaguccauccucacaaguuccacucaguucc

SEQ ID NO: 304437 - RNA, 32 nt, Homo Sapiens
ugggaagacgggggcgccagagcagguaggcu

SEQ ID NO: 304438 - RNA, 32 nt, Homo Sapiens
ccugucucugccucugggagggaacaggaagc

SEQ ID NO: 304439 - RNA, 32 nt, Homo Sapiens
gcgcuugccucucccuggcccagggcugacuc

SEQ ID NO: 304440 - RNA, 32 nt, Homo Sapiens
gcugacuugggcaauccuccccaacaggaagg

SEQ ID NO: 304441 - RNA, 32 nt, Homo Sapiens
uguggcugacagagccugcuuggccccacugu

SEQ ID NO: 304442 - RNA, 32 nt, Homo Sapiens
cuguacaugaggacgacaguggcgucuacacc

SEQ ID NO: 304443 - RNA, 32 nt, Homo Sapiens
aaacagcaggaagugcuagaaaaucacuuuaa

SEQ ID NO: 304444 - RNA, 32 nt, Homo Sapiens
acagauuuguuauccuuuauuaacguacuuug

SEQ ID NO: 304445 - RNA, 32 nt, Homo Sapiens
uccaaguacuuuuuuuuuuuuaauuuuuaagc

SEQ ID NO: 304446 - RNA, 32 nt, Homo Sapiens
aaaauaagaacaaagagaaaaaauacauagau

SEQ ID NO: 304447 - RNA, 32 nt, Homo Sapiens
uguaagauguauguauuuuuaaaauucaaaau

SEQ ID NO: 304448 - RNA, 32 nt, Homo Sapiens
gccugcaccagaccagccccagcccuuuauuc

SEQ ID NO: 304449 - RNA, 32 nt, Homo Sapiens
cccggcccagcccagcccggcgcggaggccgc

SEQ ID NO: 304450 - RNA, 32 nt, Homo Sapiens
aggaaucucaaaaacaaacaaacaaaaaagau

SEQ ID NO: 304451 - RNA, 32 nt, Homo Sapiens
uucaguuguaaaucuuaccauuauuuuacgua

SEQ ID NO: 304452 - RNA, 32 nt, Homo Sapiens
agcuggucccgccauccuccuuugccuuccca

SEQ ID NO: 304453 - RNA, 32 nt, Homo Sapiens
auucaaaaugcuuuaaagaauuuuccaaggaa

SEQ ID NO: 304454 - RNA, 32 nt, Homo Sapiens
aauaaagaagauaaaaaguuuugaaucaauuu

SEQ ID NO: 304455 - RNA, 32 nt, Homo Sapiens
uggccggcccccuggggugccccugccgaggu

SEQ ID NO: 304456 - RNA, 32 nt, Homo Sapiens
agacacaucgccaaccugggugucauuucuca

SEQ ID NO: 304457 - RNA, 32 nt, Homo Sapiens
cugaugaggagcuuccuccugauuggaguggg

SEQ ID NO: 304458 - RNA, 32 nt, Homo Sapiens
ccagggucaccaagcagcagagcucuggggac

SEQ ID NO: 304459 - RNA, 32 nt, Homo Sapiens
ugccauggggccugggguuugugguaaaaugu

SEQ ID NO: 304460 - RNA, 32 nt, Homo Sapiens
uaccugggaaagggcuguuauaaucuuucaca

SEQ ID NO: 304461 - RNA, 32 nt, Homo Sapiens
guugauagacgaaauauacuugguuuuaucug

SEQ ID NO: 304462 - RNA, 32 nt, Homo Sapiens
aaacaaaagcaucuucccuagaaauuuuugug

SEQ ID NO: 304463 - RNA, 32 nt, Homo Sapiens
cccgaggccgccaauuguccgccccgccagcg

SEQ ID NO: 304464 - RNA, 32 nt, Homo Sapiens
ugaucagugucuauuugaugugaugcagaucu

SEQ ID NO: 304465 - RNA, 29 nt, Homo Sapiens
guguuuuuaaaauacagaggcaagcacgu

SEQ ID NO: 304466 - RNA, 32 nt, Homo Sapiens
uguaaauaaaaaguauggagaugauacggugu

SEQ ID NO: 304467 - RNA, 32 nt, Homo Sapiens
gaauaagccuucgauaauuaugaaggguguuu

SEQ ID NO: 304468 - RNA, 32 nt, Homo Sapiens
gucccuucucccuagcacacccaugccuccac

SEQ ID NO: 304469 - RNA, 32 nt, Homo Sapiens
agcucagcagccccccaccucucuuuauucuc

SEQ ID NO: 304470 - RNA, 32 nt, Homo Sapiens
uucuauucuuugauuuuuaauaaacuuuggaa

SEQ ID NO: 304471 - RNA, 32 nt, Homo Sapiens
uaagagaagauaacugacagcuuuaccuacuu

SEQ ID NO: 304472 - RNA, 32 nt, Homo Sapiens
caccugcagacaccaugcauguguuaccuaca

SEQ ID NO: 304473 - RNA, 32 nt, Homo Sapiens
uguaacggccuggccuguaccccaacggucug

SEQ ID NO: 304474 - RNA, 32 nt, Homo Sapiens
cuggcagggggugaaggcaggaguugggggca

SEQ ID NO: 304475 - RNA, 32 nt, Homo Sapiens
cucauccugaagaucagcugaccauugacaau

SEQ ID NO: 304476 - RNA, 32 nt, Homo Sapiens
cagcuuauauugcaguuuugguacuuauuuuc

SEQ ID NO: 304477 - RNA, 32 nt, Homo Sapiens
gcagaggcgucccugccgcugcccuuggcccu

SEQ ID NO: 304478 - RNA, 32 nt, Homo Sapiens
uaaucacucauaugguagaauuuuauaaacac

SEQ ID NO: 304479 - RNA, 32 nt, Homo Sapiens
ccccuccccacuuuuuuuuuuaaccugccccc

SEQ ID NO: 304480 - RNA, 32 nt, Homo Sapiens
uaaguaagagucauguuuuucuuuaaaguuuc

SEQ ID NO: 304481 - RNA, 32 nt, Homo Sapiens
gcaaggcugggccgggaagggcguggguugag

SEQ ID NO: 304482 - RNA, 32 nt, Homo Sapiens
gccgccuucucgggaugccgcggccggggucc

SEQ ID NO: 304483 - RNA, 31 nt, Homo Sapiens
uauauauauuuuguuuugccaauaugaagaa

SEQ ID NO: 304484 - RNA, 32 nt, Homo Sapiens
aggagaaacaaaccaccauugccugcuggcuc

SEQ ID NO: 304485 - RNA, 32 nt, Homo Sapiens
augcaagugggagagggaaaaugacucgggac

SEQ ID NO: 304486 - RNA, 32 nt, Homo Sapiens
gguacucaacugugugggguacuacauaaauc

SEQ ID NO: 304487 - RNA, 32 nt, Homo Sapiens
agauccccuccuguaaguggccaggcauucuc

SEQ ID NO: 304488 - RNA, 32 nt, Homo Sapiens
ggugcauguguucccuaggagcucaacaggac

SEQ ID NO: 304489 - RNA, 32 nt, Homo Sapiens
auuaaaagaaagaagccagaaaauauuaucaa

SEQ ID NO: 304490 - RNA, 30 nt, Homo Sapiens
cacagagauaguccugccuaauucugaacg

SEQ ID NO: 304491 - RNA, 32 nt, Homo Sapiens
aaagggagguugggcggggcggugcugggacu

SEQ ID NO: 304492 - RNA, 32 nt, Homo Sapiens
ccacugaacacuuuucuggcccuacugcacau

SEQ ID NO: 304493 - RNA, 32 nt, Homo Sapiens
acugucuugcuccucagucuugaucaaugccu

SEQ ID NO: 304494 - RNA, 32 nt, Homo Sapiens
cagauauuuuugggagugacaaacauucucuc

SEQ ID NO: 304495 - RNA, 31 nt, Homo Sapiens
gguaucugucucucccugccccaugccaagg

SEQ ID NO: 304496 - RNA, 32 nt, Homo Sapiens
gaagggccgggagcgcgcggcgcgggagauuu

SEQ ID NO: 304497 - RNA, 32 nt, Homo Sapiens
guggcuugggugccgggcgucucccgccucca

SEQ ID NO: 304498 - RNA, 32 nt, Homo Sapiens
uuucuguaucuuggggaaauaagaccgaucuc

SEQ ID NO: 304499 - RNA, 32 nt, Homo Sapiens
ucucauuauacuauucuguuuauuuuauaucu

SEQ ID NO: 304500 - RNA, 32 nt, Homo Sapiens
ugaugggugguuuguccaaggaugcugaaugu

SEQ ID NO: 304501 - RNA, 32 nt, Homo Sapiens
aggagcgcaccaagucugcgagcaggggccgg

SEQ ID NO: 304502 - RNA, 32 nt, Homo Sapiens
caggcgugguggcucaugccuguaaucccggc

SEQ ID NO: 304503 - RNA, 27 nt, Homo Sapiens
gggcaacauuaauuaauguauauucuu

SEQ ID NO: 304504 - RNA, 32 nt, Homo Sapiens
ggcuucucuuucguccgcucaggccucacuuu

SEQ ID NO: 304505 - RNA, 32 nt, Homo Sapiens
uaaagcaauauuugaaauuugcuugguauauc

SEQ ID NO: 304506 - RNA, 32 nt, Homo Sapiens
augauuccuugacuccuaugaccuuaugaccc

SEQ ID NO: 304507 - RNA, 32 nt, Homo Sapiens
gcuucauuaaaauaaacaauauuuguaaaaau

SEQ ID NO: 304508 - RNA, 32 nt, Homo Sapiens
acuggcuccgcccccagcaccaggcgcccagu

SEQ ID NO: 304509 - RNA, 32 nt, Homo Sapiens
augaaacggaccucacuggacccauucuuuuu

SEQ ID NO: 304510 - RNA, 32 nt, Homo Sapiens
uauggcacccugucuuccuguacaccagaggc

SEQ ID NO: 304511 - RNA, 32 nt, Homo Sapiens
uacagcacacugaguaaccacacugggcuccu

SEQ ID NO: 304512 - RNA, 32 nt, Homo Sapiens
gaaacucuucaccucccugcaaaccuaccagu

SEQ ID NO: 304513 - RNA, 32 nt, Homo Sapiens
ggaggaaaauuaccaacuugcaaccaguaguc

SEQ ID NO: 304514 - RNA, 32 nt, Homo Sapiens
ugccggggacugccucgacucugguuuuggca

SEQ ID NO: 304515 - RNA, 32 nt, Homo Sapiens
uguagggaauuaugcauagugauuauaauacu

SEQ ID NO: 304516 - RNA, 32 nt, Homo Sapiens
aggacuccaaaagaaagcacaaaaacuagaca

SEQ ID NO: 304517 - RNA, 32 nt, Homo Sapiens
guugcuaggugauucugacacugcuggcuuga

SEQ ID NO: 304518 - RNA, 32 nt, Homo Sapiens
ucaaugaacacuaaccugaggagcauauuuuu

SEQ ID NO: 304519 - RNA, 32 nt, Homo Sapiens
auuuugauaaaacaauuuucccacuuuaguuc

SEQ ID NO: 304520 - RNA, 29 nt, Homo Sapiens
aucauuucuaaauaucuuuagcaccccac

SEQ ID NO: 304521 - RNA, 32 nt, Homo Sapiens
cucccccggccgcugcgucgcucggcucgcga

SEQ ID NO: 304522 - RNA, 32 nt, Homo Sapiens
gccagaauuucuuuuuccuccucccuaugagu

SEQ ID NO: 304523 - RNA, 32 nt, Homo Sapiens
ggucauggacauuugaacaggugccuugggca

SEQ ID NO: 304524 - RNA, 32 nt, Homo Sapiens
agaccaaaaaucagcgggcugggauggagcac

SEQ ID NO: 304525 - RNA, 32 nt, Homo Sapiens
cagaaccaucaggaacagccugccuggcuccu

SEQ ID NO: 304526 - RNA, 32 nt, Homo Sapiens
uggagauggguuuuucuggugccacugacacc

SEQ ID NO: 304527 - RNA, 32 nt, Homo Sapiens
uucccaauuagacuuccucuccuuccaccccu

SEQ ID NO: 304528 - RNA, 32 nt, Homo Sapiens
auccuggauuuugcccucuccuuagcucuuag

SEQ ID NO: 304529 - RNA, 32 nt, Homo Sapiens
ccccgcccccguggacccggccccaccccgaa

SEQ ID NO: 304530 - RNA, 32 nt, Homo Sapiens
aaacaugccaauuuaaaguguaauuaacucag

SEQ ID NO: 304531 - RNA, 32 nt, Homo Sapiens
uccucuuuuuauugcuuugucuauguuucaua

SEQ ID NO: 304532 - RNA, 32 nt, Homo Sapiens
agggcaagcugugcgacgugacccucaagauu

SEQ ID NO: 304533 - RNA, 32 nt, Homo Sapiens
cuuuauuuuucucguagaucuuuagcuacuuu

SEQ ID NO: 304534 - RNA, 32 nt, Homo Sapiens
agauuuggaauuuagaaagauauucuuuccgg

SEQ ID NO: 304535 - RNA, 32 nt, Homo Sapiens
uucagcuccccucccugcuucuggaaaccucu

SEQ ID NO: 304536 - RNA, 32 nt, Homo Sapiens
ccccaccuguucauucuaccccauugguagaa

SEQ ID NO: 304537 - RNA, 32 nt, Homo Sapiens
ccaucccaaaagacaagccaugcauacaacuu

SEQ ID NO: 304538 - RNA, 32 nt, Homo Sapiens
caggccauggcuccacggucccggcgacgaag

SEQ ID NO: 304539 - RNA, 32 nt, Homo Sapiens
ccaggccucugcccugcagcugaaacuuggcc

SEQ ID NO: 304540 - RNA, 32 nt, Homo Sapiens
auaaauguguguauauuuagagauuauaaggc

SEQ ID NO: 304541 - RNA, 32 nt, Homo Sapiens
gcugagaggaggaggaggaugaagaguugggc

SEQ ID NO: 304542 - RNA, 32 nt, Homo Sapiens
agaagagaaaaucggauggaccuugcccugcu

SEQ ID NO: 304543 - RNA, 32 nt, Homo Sapiens
uucuuuuccaaaauuacuucucucuaucugga

SEQ ID NO: 304544 - RNA, 32 nt, Homo Sapiens
auguuauggaauggaaaguacauugggcugaa

SEQ ID NO: 304545 - RNA, 32 nt, Homo Sapiens
uggacggaaaucaaaaagcaccaagagcgauu

SEQ ID NO: 304546 - RNA, 32 nt, Homo Sapiens
agaacuaaacacaucuguaaaacuaaauauag

SEQ ID NO: 304547 - RNA, 32 nt, Homo Sapiens
cagccuagccccacccaucucugcccugauug

SEQ ID NO: 304548 - RNA, 32 nt, Homo Sapiens
agcaaaugaaacaaaaauggccaguuuuaaga

SEQ ID NO: 304549 - RNA, 32 nt, Homo Sapiens
gucccccuguucugcugcaucauuuugcacac

SEQ ID NO: 304550 - RNA, 32 nt, Homo Sapiens
augucagcggcagcugcucggcagcccagccc

SEQ ID NO: 304551 - RNA, 32 nt, Homo Sapiens
gguuuagggugucuggcagaagaaauuucuaa

SEQ ID NO: 304552 - RNA, 32 nt, Homo Sapiens
ugggcaccgagccaccaggagguuguugaucu

SEQ ID NO: 304553 - RNA, 32 nt, Homo Sapiens
ucaguuuuuaggauuauuuaugcuguaauaau

SEQ ID NO: 304554 - RNA, 32 nt, Homo Sapiens
aucagcgagguuucuuuuuuuuuuuuuccuau

SEQ ID NO: 304555 - RNA, 32 nt, Homo Sapiens
auccuucgagauaucaucuguaccucagcacu

SEQ ID NO: 304556 - RNA, 32 nt, Homo Sapiens
aaccuccgcacccaccuaaagacauguauaug

SEQ ID NO: 304557 - RNA, 31 nt, Homo Sapiens
acauggaaauaaaagcaaacuuguaugaaaa

SEQ ID NO: 304558 - RNA, 32 nt, Homo Sapiens
cggagaaccucccaggcagggcucuguguuuu

SEQ ID NO: 304559 - RNA, 32 nt, Homo Sapiens
cucucauuuauacuaccaacccucccuagaaa

SEQ ID NO: 304560 - RNA, 32 nt, Homo Sapiens
uguggcacagcuuuuaacuaaucuucaaaccu

SEQ ID NO: 304561 - RNA, 30 nt, Homo Sapiens
ugaggaggcggcggcggcggcagcggcagc

SEQ ID NO: 304562 - RNA, 32 nt, Homo Sapiens
uuguguuuuaucauguuaucuucauaacaugc

SEQ ID NO: 304563 - RNA, 32 nt, Homo Sapiens
gccauugcugcagcugcuccacagcccuuuuc

SEQ ID NO: 304564 - RNA, 32 nt, Homo Sapiens
ccccauuguaaaaaugccugauagaguguuua

SEQ ID NO: 304565 - RNA, 32 nt, Homo Sapiens
gagggaagacaauucugugaacucuguaacuc

SEQ ID NO: 304566 - RNA, 32 nt, Homo Sapiens
uugccguguugucauuuacaguucuguugaug

SEQ ID NO: 304567 - RNA, 32 nt, Homo Sapiens
uuuuauaguuagucccucaucacuugaaguga

SEQ ID NO: 304568 - RNA, 32 nt, Homo Sapiens
auacuuuuacuuugaaauacuaaauuuuauag

SEQ ID NO: 304569 - RNA, 32 nt, Homo Sapiens
uuuuuaguuaauggaagaauucaccaauuuua

SEQ ID NO: 304570 - RNA, 32 nt, Homo Sapiens
cuuaaagcaaaagaagaaagaagguacuugcu

SEQ ID NO: 304571 - RNA, 32 nt, Homo Sapiens
guugagaacuuauguguuuuaauuguauaauu

SEQ ID NO: 304572 - RNA, 32 nt, Homo Sapiens
uucagagaccauugcaaugaauccccaauaau

SEQ ID NO: 304573 - RNA, 32 nt, Homo Sapiens
ggagccccgaggcacgcggcccgggcagcucg

SEQ ID NO: 304574 - RNA, 32 nt, Homo Sapiens
ugggggugucuguacguaggagaguggaggcc

SEQ ID NO: 304575 - RNA, 32 nt, Homo Sapiens
ggggagcucagaucagaucuaucaucacaaua

SEQ ID NO: 304576 - RNA, 32 nt, Homo Sapiens
uucauuuuugccagucuguuaaguaaaauguc

SEQ ID NO: 304577 - RNA, 32 nt, Homo Sapiens
ggccuggccucuccgagggauggaggggacag

SEQ ID NO: 304578 - RNA, 32 nt, Homo Sapiens
gacaagauuauguagcucuaauuauacguaua

SEQ ID NO: 304579 - RNA, 32 nt, Homo Sapiens
aggugggaagggcaugggaggaugggaaggug

SEQ ID NO: 304580 - RNA, 32 nt, Homo Sapiens
uaaugugaaucaugguuuuucuuaguagauuu

SEQ ID NO: 304581 - RNA, 32 nt, Homo Sapiens
uucucccuuggccacugucagcuuuucuugac

SEQ ID NO: 304582 - RNA, 32 nt, Homo Sapiens
uaguggugggucugaucugacugcagccaucg

SEQ ID NO: 304583 - RNA, 32 nt, Homo Sapiens
cauccuggaggcggcccgcacccgagcugcug

SEQ ID NO: 304584 - RNA, 32 nt, Homo Sapiens
caaauguacauaucguucccauguauuuuaac

SEQ ID NO: 304585 - RNA, 32 nt, Homo Sapiens
uaaacaaaacaucaauuuaaaacgcaaguaaa

SEQ ID NO: 304586 - RNA, 32 nt, Homo Sapiens
gcucccuccgccccgcgccaucgcgcucggag

SEQ ID NO: 304587 - RNA, 32 nt, Homo Sapiens
caaguaucuaauggagaaguagagaagaaccc

SEQ ID NO: 304588 - RNA, 32 nt, Homo Sapiens
uuaauuucuugccccaggcccugcugggcccc

SEQ ID NO: 304589 - RNA, 32 nt, Homo Sapiens
ugugggaccacagaugagucuuucagaggcag

SEQ ID NO: 304590 - RNA, 32 nt, Homo Sapiens
ugccggagacucgcccuucaauaaaaaaucuc

SEQ ID NO: 304591 - RNA, 32 nt, Homo Sapiens
uucuguuuaaaaaggggagaugagaaagggaa

SEQ ID NO: 304592 - RNA, 32 nt, Homo Sapiens
gccaguguuuggucuuuagcugaaacagacau

SEQ ID NO: 304593 - RNA, 32 nt, Homo Sapiens
ccagccacugaggcccgcucuggccaggggag

SEQ ID NO: 304594 - RNA, 32 nt, Homo Sapiens
acuuuggguaguguggacauuuuaacaauauu

SEQ ID NO: 304595 - RNA, 32 nt, Homo Sapiens
cccaguagccccacugaagcuggcccagcaca

SEQ ID NO: 304596 - RNA, 32 nt, Homo Sapiens
gagacccugugagucugacaauaaaagauuug

SEQ ID NO: 304597 - RNA, 32 nt, Homo Sapiens
guauauagccaugguuucauucuuaucagucc

SEQ ID NO: 304598 - RNA, 32 nt, Homo Sapiens
cagcagcccuucccugcccaguugugagaacc

SEQ ID NO: 304599 - RNA, 32 nt, Homo Sapiens
gugggaugugggggguggagggggaaugacag

SEQ ID NO: 304600 - RNA, 32 nt, Homo Sapiens
aggacguuggggcggccuggcucccucagguu

SEQ ID NO: 304601 - RNA, 32 nt, Homo Sapiens
gucugagccaagcaggacccugucccagagca

SEQ ID NO: 304602 - RNA, 32 nt, Homo Sapiens
accaauacuuuuucauuaaauuaugaaaacug

SEQ ID NO: 304603 - RNA, 32 nt, Homo Sapiens
cuucucuuuguacuccucccuguacaacauca

SEQ ID NO: 304604 - RNA, 28 nt, Homo Sapiens
caguaggggcggccgggcagaggcgccc

SEQ ID NO: 304605 - RNA, 32 nt, Homo Sapiens
aguuguggcuguggaguuagagucacauagca

SEQ ID NO: 304606 - RNA, 32 nt, Homo Sapiens
ucuucagaaagcuacagcagcuaacaaucaug

SEQ ID NO: 304607 - RNA, 32 nt, Homo Sapiens
ugccaguccuggagacuggugcccugagcucc

SEQ ID NO: 304608 - RNA, 32 nt, Homo Sapiens
gcccugagugccgaccuuggguggcggggccu

SEQ ID NO: 304609 - RNA, 32 nt, Homo Sapiens
acaagcuccagaugggcuguuuaccccaaccc

SEQ ID NO: 304610 - RNA, 32 nt, Homo Sapiens
gcuuugggugaucuugaaaaucaaauacuauc

SEQ ID NO: 304611 - RNA, 32 nt, Homo Sapiens
caguguuuaaggaaaccaucucugauaaggau

SEQ ID NO: 304612 - RNA, 32 nt, Homo Sapiens
gcccaguuaauguauuuauuuauauuuauuuu

SEQ ID NO: 304613 - RNA, 32 nt, Homo Sapiens
uucgguaagaaguaaaaccucuggagaccuau

SEQ ID NO: 304614 - RNA, 32 nt, Homo Sapiens
accaagugcuccccggagcccugggagcacuu

SEQ ID NO: 304615 - RNA, 32 nt, Homo Sapiens
uauguaaauauuuuucuuaacaauuugacccu

SEQ ID NO: 304616 - RNA, 32 nt, Homo Sapiens
ugugugugcauuaauauaugcauuccauuugg

SEQ ID NO: 304617 - RNA, 32 nt, Homo Sapiens
uuguuuaguuuaaugacguaguucauuagcug

SEQ ID NO: 304618 - RNA, 32 nt, Homo Sapiens
ccuacgcccuccccuccccggcccuccacagc

SEQ ID NO: 304619 - RNA, 32 nt, Homo Sapiens
uuuuggcugcagcggcagcucagucguuucua

SEQ ID NO: 304620 - RNA, 32 nt, Homo Sapiens
ugcucugcugucauccuguguacccuugucaa

SEQ ID NO: 304621 - RNA, 32 nt, Homo Sapiens
ggcugggagcagcccagacccuccugaggagc

SEQ ID NO: 304622 - RNA, 32 nt, Homo Sapiens
ucccaaagauguauguaagacacacacugccc

SEQ ID NO: 304623 - RNA, 28 nt, Homo Sapiens
ucauugaaaaaggaacauuugagugaag

SEQ ID NO: 304624 - RNA, 32 nt, Homo Sapiens
uaauuauuuaaaguguggaaagcaaaauaaca

SEQ ID NO: 304625 - RNA, 32 nt, Homo Sapiens
gcgguuccagcaugaagaggagagcuggccug

SEQ ID NO: 304626 - RNA, 32 nt, Homo Sapiens
uauacccaaaggaaaggaaaucaguguaucaa

SEQ ID NO: 304627 - RNA, 32 nt, Homo Sapiens
uucuccaaggggucugauuugcugagacacca

SEQ ID NO: 304628 - RNA, 32 nt, Homo Sapiens
ucggcuuauggcaaccuccgccucccggguuc

SEQ ID NO: 304629 - RNA, 32 nt, Homo Sapiens
uguuuggugcuuuccuuuugucuugcauacuc

SEQ ID NO: 304630 - RNA, 32 nt, Homo Sapiens
uucuuucacuuuccuuucccacucagauugcu

SEQ ID NO: 304631 - RNA, 32 nt, Homo Sapiens
caguaguggagguuuuacauuuguuugcacau

SEQ ID NO: 304632 - RNA, 32 nt, Homo Sapiens
caucaucucugccccagguguacgguuucucu

SEQ ID NO: 304633 - RNA, 32 nt, Homo Sapiens
ggcugcugcgaggaagacccggucagcugucc

SEQ ID NO: 304634 - RNA, 32 nt, Homo Sapiens
uaccuuaccaauggggcaucuggcuaaacaac

SEQ ID NO: 304635 - RNA, 32 nt, Homo Sapiens
uacuguucagauuuugguggguucucaaagca

SEQ ID NO: 304636 - RNA, 32 nt, Homo Sapiens
caccuccuggacucagagagcccagggcaacu

SEQ ID NO: 304637 - RNA, 32 nt, Homo Sapiens
auuaccaauaauuuucccaaaauaaugaaaga

SEQ ID NO: 304638 - RNA, 32 nt, Homo Sapiens
aaaucuaauucaaacuaauagaauuaauggaa

SEQ ID NO: 304639 - RNA, 32 nt, Homo Sapiens
cuggcuggccccagggcuaccacugguauucc

SEQ ID NO: 304640 - RNA, 32 nt, Homo Sapiens
guguuaggggauuaugacgcgcagcagccaug

SEQ ID NO: 304641 - RNA, 32 nt, Homo Sapiens
ggcaaaacaggagcagggggagcccagcacug

SEQ ID NO: 304642 - RNA, 32 nt, Homo Sapiens
gagcgcggcagagggugagccucacagccccu

SEQ ID NO: 304643 - RNA, 30 nt, Homo Sapiens
agcagaugcagguguuccagaugaucacca

SEQ ID NO: 304644 - RNA, 32 nt, Homo Sapiens
aguagcaggcccagcuggggccccucggcuac

SEQ ID NO: 304645 - RNA, 32 nt, Homo Sapiens
ugggugcccucccccuccgggagccugggucc

SEQ ID NO: 304646 - RNA, 32 nt, Homo Sapiens
agaauacaucuauauauaaucuuaacauguuu

SEQ ID NO: 304647 - RNA, 32 nt, Homo Sapiens
aagauucauuuucucauuuuaagccaauuaaa

SEQ ID NO: 304648 - RNA, 32 nt, Homo Sapiens
cccaggguggggugggguccaggucgggugug

SEQ ID NO: 304649 - RNA, 32 nt, Homo Sapiens
aaaagagauaaaauuaauaauaguucacuugu

SEQ ID NO: 304650 - RNA, 32 nt, Homo Sapiens
uuaaaagcaacaaaaauugaaauaagacaucg

SEQ ID NO: 304651 - RNA, 32 nt, Homo Sapiens
cuuuaggcugugauaguuuuugaaauaaaauu

SEQ ID NO: 304652 - RNA, 32 nt, Homo Sapiens
uugguccucuggcuucucuccuccugcuggag

SEQ ID NO: 304653 - RNA, 32 nt, Homo Sapiens
ugaaaagaguucuggagguagauggaggugau

SEQ ID NO: 304654 - RNA, 32 nt, Homo Sapiens
aggaggacguggggagcuggcgccacaggagc

SEQ ID NO: 304655 - RNA, 32 nt, Homo Sapiens
agggugcaaaaauuguagaauaaauguauaag

SEQ ID NO: 304656 - RNA, 32 nt, Homo Sapiens
aagaggcagcuagggagagugggagguaggca

SEQ ID NO: 304657 - RNA, 32 nt, Homo Sapiens
ucggaggccaggcccuccugcuggcugaggcu

SEQ ID NO: 304658 - RNA, 32 nt, Homo Sapiens
ugagggccccucgggagccccuggccauguua

SEQ ID NO: 304659 - RNA, 32 nt, Homo Sapiens
aacaguuuuuuggagaggcagaugacauuaua

SEQ ID NO: 304660 - RNA, 32 nt, Homo Sapiens
acuuuccuuucugccucuucaauccaucuuac

SEQ ID NO: 304661 - RNA, 31 nt, Homo Sapiens
acauucugggcugggaaccagggaggcgccc

SEQ ID NO: 304662 - RNA, 32 nt, Homo Sapiens
ucuagcugcgucugcggccagcccgugccagu

SEQ ID NO: 304663 - RNA, 32 nt, Homo Sapiens
ccacccucucccuguuuuacauggaaauugca

SEQ ID NO: 304664 - RNA, 32 nt, Homo Sapiens
ucacugcccuaucuccuucuuuccucacgccc

SEQ ID NO: 304665 - RNA, 32 nt, Homo Sapiens
aaguucuuccuggaggcagucugcgauuucug

SEQ ID NO: 304666 - RNA, 32 nt, Homo Sapiens
gacuccagcuacagcgagccugccccuuuucu

SEQ ID NO: 304667 - RNA, 30 nt, Homo Sapiens
ggccgaguucaccagccgccggggcaguag

SEQ ID NO: 304668 - RNA, 32 nt, Homo Sapiens
guuguuucuaguuuauacucucaccaacagaa

SEQ ID NO: 304669 - RNA, 32 nt, Homo Sapiens
gcggucuugucucgcccucccaugcuuaugga

SEQ ID NO: 304670 - RNA, 32 nt, Homo Sapiens
gcagccucucugaugcacucucuuccaucucu

SEQ ID NO: 304671 - RNA, 32 nt, Homo Sapiens
uaugaagaucacaacuaacaacugacaaauca

SEQ ID NO: 304672 - RNA, 32 nt, Homo Sapiens
ccaccucuccaagucucucugugaauacaauu

SEQ ID NO: 304673 - RNA, 32 nt, Homo Sapiens
cucuuggguauaaaggcuaaaagggaaaaagg

SEQ ID NO: 304674 - RNA, 32 nt, Homo Sapiens
ucaagguauuaaauauaagacguuaaauauaa

SEQ ID NO: 304675 - RNA, 32 nt, Homo Sapiens
agcaucuggugggcccggggcugcuggggcca

SEQ ID NO: 304676 - RNA, 32 nt, Homo Sapiens
uuuuuugucauuccauaagcuugcugaauagu

SEQ ID NO: 304677 - RNA, 32 nt, Homo Sapiens
uucuguggggaagguauggggcagcuucacaa

SEQ ID NO: 304678 - RNA, 32 nt, Homo Sapiens
uuggaguaagaaugauuauauaaucguuaucc

SEQ ID NO: 304679 - RNA, 32 nt, Homo Sapiens
gugaauuguuugaaccugggagguggagguug

SEQ ID NO: 304680 - RNA, 32 nt, Homo Sapiens
cucagugaaacaccugcaauuucuagggcccu

SEQ ID NO: 304681 - RNA, 32 nt, Homo Sapiens
ccccuucggugaugaaugggugggcccucaaa

SEQ ID NO: 304682 - RNA, 32 nt, Homo Sapiens
uuuaaaucauuuaaaaaacuaaacugcaggga

SEQ ID NO: 304683 - RNA, 32 nt, Homo Sapiens
guuuguucauuacuuuuucauauauuuuuacc

SEQ ID NO: 304684 - RNA, 32 nt, Homo Sapiens
ugucccugggccagcagggaccucugaagccu

SEQ ID NO: 304685 - RNA, 32 nt, Homo Sapiens
accuucgccccacugacaagcacugcagaccu

SEQ ID NO: 304686 - RNA, 32 nt, Homo Sapiens
aucuccagugcagcugcagaagagaaauggga

SEQ ID NO: 304687 - RNA, 32 nt, Homo Sapiens
agcaauggaaaguugcaucuuugcugugaaaa

SEQ ID NO: 304688 - RNA, 32 nt, Homo Sapiens
cuggaccuggggagugguuaggcagcaagcuu

SEQ ID NO: 304689 - RNA, 32 nt, Homo Sapiens
cuuucuugguuuuagauguucauuucauuugu

SEQ ID NO: 304690 - RNA, 32 nt, Homo Sapiens
ggcggcggcccgggcgggacgaugaagcggca

SEQ ID NO: 304691 - RNA, 32 nt, Homo Sapiens
agggucuaggagaggagccgcaaucgugucug

SEQ ID NO: 304692 - RNA, 32 nt, Homo Sapiens
ccacacccggcagggccgcgggcugccccagc

SEQ ID NO: 304693 - RNA, 32 nt, Homo Sapiens
ccgagagaugggcgcaaggggugcugggggag

SEQ ID NO: 304694 - RNA, 32 nt, Homo Sapiens
aggccuaggaccagccugugcaggucuaugaa

SEQ ID NO: 304695 - RNA, 32 nt, Homo Sapiens
cuuuccugccccaagauggcuugcuuuucaca

SEQ ID NO: 304696 - RNA, 32 nt, Homo Sapiens
ggcagcuagagcaaauggcucguguucuuugu

SEQ ID NO: 304697 - RNA, 32 nt, Homo Sapiens
uacugccuacugacaaaaccuauucuucauau

SEQ ID NO: 304698 - RNA, 32 nt, Homo Sapiens
aaaacauggccucuccucuccugcccuggccc

SEQ ID NO: 304699 - RNA, 32 nt, Homo Sapiens
aaugaagaugaccugaggcacaguuauugcua

SEQ ID NO: 304700 - RNA, 32 nt, Homo Sapiens
agucuugucucaccaaccccagcccaucaucu

SEQ ID NO: 304701 - RNA, 32 nt, Homo Sapiens
agacuuucccccuguguugagaaugcccugcc

SEQ ID NO: 304702 - RNA, 32 nt, Homo Sapiens
ccugaagaacagaggcacacuguaaaacccaa

SEQ ID NO: 304703 - RNA, 32 nt, Homo Sapiens
ggugcugugcuucccgugaggacccaggaccc

SEQ ID NO: 304704 - RNA, 31 nt, Homo Sapiens
ccgggcaggcacugcacccccagcugccuuu

SEQ ID NO: 304705 - RNA, 32 nt, Homo Sapiens
cauacccaauacuugcuuuuuccuuugagugg

SEQ ID NO: 304706 - RNA, 32 nt, Homo Sapiens
guagcucuggaacauguuguccguguugcucc

SEQ ID NO: 304707 - RNA, 32 nt, Homo Sapiens
cccaggagggaagaagaaguggggcaaagccu

SEQ ID NO: 304708 - RNA, 32 nt, Homo Sapiens
uggccucuugguuaacgcuggccccgguccag

SEQ ID NO: 304709 - RNA, 32 nt, Homo Sapiens
ggaggcugcgguucugcuuccuccuggggcug

SEQ ID NO: 304710 - RNA, 32 nt, Homo Sapiens
agaaugagaagggaaaagcaaaaauuauccuu

SEQ ID NO: 304711 - RNA, 32 nt, Homo Sapiens
uccaucuuaauguaaccuuaugcuauucugua

SEQ ID NO: 304712 - RNA, 32 nt, Homo Sapiens
agcucugggcacagauucugguggcucccugc

SEQ ID NO: 304713 - RNA, 32 nt, Homo Sapiens
ccuccgggaaugagacccccuccaccaggcau

SEQ ID NO: 304714 - RNA, 32 nt, Homo Sapiens
ggccgguccccggccuccccccauggccaccg

SEQ ID NO: 304715 - RNA, 32 nt, Homo Sapiens
aaauuuugacuuaauuucagacuuuuagaaaa

SEQ ID NO: 304716 - RNA, 32 nt, Homo Sapiens
uucacagguucuccuccuuuuaucuuuugugu

SEQ ID NO: 304717 - RNA, 32 nt, Homo Sapiens
auuuauuuuaaaugucuguaguuuuguuuacu

SEQ ID NO: 304718 - RNA, 32 nt, Homo Sapiens
gucggccgugcgcucccgcgggacgccacagg

SEQ ID NO: 304719 - RNA, 31 nt, Homo Sapiens
aacaugugaagaugcccaagagccuggaggc

SEQ ID NO: 304720 - RNA, 32 nt, Homo Sapiens
cauuugugauggggucuaauucuuauuacuuc

SEQ ID NO: 304721 - RNA, 32 nt, Homo Sapiens
gccaggaggaaaaauagaaauaaauuugucuu

SEQ ID NO: 304722 - RNA, 32 nt, Homo Sapiens
ucagggguccccaggaacuccucgguccagag

SEQ ID NO: 304723 - RNA, 32 nt, Homo Sapiens
uucucucaauguuuguaauaauugcucauaag

SEQ ID NO: 304724 - RNA, 32 nt, Homo Sapiens
cagaauguaaggaaacuauaacuaauagucau

SEQ ID NO: 304725 - RNA, 32 nt, Homo Sapiens
ucagagccccuagcucuucucuagccuggggc

SEQ ID NO: 304726 - RNA, 32 nt, Homo Sapiens
ugugagggugacagaagaggguccaggcugga

SEQ ID NO: 304727 - RNA, 32 nt, Homo Sapiens
cauccgcucgcaggagcgccggcggccagcag

SEQ ID NO: 304728 - RNA, 32 nt, Homo Sapiens
ccugccccuugcuucggcuccucccuugcuga

SEQ ID NO: 304729 - RNA, 32 nt, Homo Sapiens
ggcaucaucuuucacuuucuccuuccaacaug

SEQ ID NO: 304730 - RNA, 32 nt, Homo Sapiens
uaaggaggaaauuagcauuccuuaauguuuug

SEQ ID NO: 304731 - RNA, 32 nt, Homo Sapiens
gggaggggcugcugugaagaccucugacgugc

SEQ ID NO: 304732 - RNA, 32 nt, Homo Sapiens
caugauguaauuuuucuuucuucuuucuuuuu

SEQ ID NO: 304733 - RNA, 32 nt, Homo Sapiens
aagagccaggacuucugaauuuaccuugaaua

SEQ ID NO: 304734 - RNA, 32 nt, Homo Sapiens
aagcaagaauacuggagcaauggcacagugac

SEQ ID NO: 304735 - RNA, 32 nt, Homo Sapiens
uaacuucuaaaauuauuucugaauacaguugc

SEQ ID NO: 304736 - RNA, 32 nt, Homo Sapiens
guauaucuugucaccgagggccaccgcaaugg

SEQ ID NO: 304737 - RNA, 32 nt, Homo Sapiens
ucaucgccccuccaggcccccggcgccccacc

SEQ ID NO: 304738 - RNA, 32 nt, Homo Sapiens
gggaggaggaggaggacgccgcggugaaguuc

SEQ ID NO: 304739 - RNA, 32 nt, Homo Sapiens
auuuccaccacuuuucagagucaucuacaaaa

SEQ ID NO: 304740 - RNA, 32 nt, Homo Sapiens
aacgcccuccccgacccucucccggccccugu

SEQ ID NO: 304741 - RNA, 32 nt, Homo Sapiens
ugguaaggaaaugccgauucuucauuauaaac

SEQ ID NO: 304742 - RNA, 32 nt, Homo Sapiens
uaugacaaccucagauggcaggaauuaucauc

SEQ ID NO: 304743 - RNA, 32 nt, Homo Sapiens
acugcuuuuuccugcccuucugugcccucagg

SEQ ID NO: 304744 - RNA, 32 nt, Homo Sapiens
ugaauauuugacaaauuuuuacugugacuauu

SEQ ID NO: 304745 - RNA, 32 nt, Homo Sapiens
uuaggaaagggaguaggcaggcauguguuggc

SEQ ID NO: 304746 - RNA, 32 nt, Homo Sapiens
ugugcccacaagcaacaguccacagcccuugg

SEQ ID NO: 304747 - RNA, 32 nt, Homo Sapiens
ggacugcucugagauuugagggaaacauggac

SEQ ID NO: 304748 - RNA, 32 nt, Homo Sapiens
uggccagggcaggcugggagggacauacuuuc

SEQ ID NO: 304749 - RNA, 32 nt, Homo Sapiens
ggaaggagggagagggucguugugagcagguu

SEQ ID NO: 304750 - RNA, 32 nt, Homo Sapiens
ccuuuauaaggugccagcgucuguucaggggc

SEQ ID NO: 304751 - RNA, 32 nt, Homo Sapiens
cugguagaacuaagggagauuacaccaucuaa

SEQ ID NO: 304752 - RNA, 32 nt, Homo Sapiens
guccaguucaggcuucuagacauuuuacucau

SEQ ID NO: 304753 - RNA, 32 nt, Homo Sapiens
gcauugugggguggcggcggcggccgcgcuag

SEQ ID NO: 304754 - RNA, 32 nt, Homo Sapiens
uuuacaagcuugugcuguaggcacaugccuuc

SEQ ID NO: 304755 - RNA, 31 nt, Homo Sapiens
cuguggaacauaucuccucgguacgugcugu

SEQ ID NO: 304756 - RNA, 32 nt, Homo Sapiens
gcaggaggccagaggagagugugagucuaaca

SEQ ID NO: 304757 - RNA, 32 nt, Homo Sapiens
cacaggaugcacugucagcaucaggucccaga

SEQ ID NO: 304758 - RNA, 32 nt, Homo Sapiens
uuuguguaaaagaugaugugauuguagcucug

SEQ ID NO: 304759 - RNA, 32 nt, Homo Sapiens
ggcagucaaguccaauggcagcgucuucgucc

SEQ ID NO: 304760 - RNA, 32 nt, Homo Sapiens
ggaguguuguauauaguguagcaaaagaguau

SEQ ID NO: 304761 - RNA, 32 nt, Homo Sapiens
cuucgugcccaacguccacgccgccgaguucg

SEQ ID NO: 304762 - RNA, 32 nt, Homo Sapiens
ggauccgcccagguagccggccucggacccag

SEQ ID NO: 304763 - RNA, 32 nt, Homo Sapiens
gggggaaaagggucgaguuagaacaaagcuaa

SEQ ID NO: 304764 - RNA, 32 nt, Homo Sapiens
gggugagaagaagggcgcgaggcggccggggc

SEQ ID NO: 304765 - RNA, 32 nt, Homo Sapiens
ccuguccugccagcucugcugccaccucugac

SEQ ID NO: 304766 - RNA, 32 nt, Homo Sapiens
acuugauguuugcgguuugagaggcaagaaaa

SEQ ID NO: 304767 - RNA, 32 nt, Homo Sapiens
aagaauuagggcccgcgcugcacaggaaaguu

SEQ ID NO: 304768 - RNA, 32 nt, Homo Sapiens
gggguggggggcccugggacguuuuuaaaccu

SEQ ID NO: 304769 - RNA, 32 nt, Homo Sapiens
ucuagagacugucagagcugaccccagcuaag

SEQ ID NO: 304770 - RNA, 32 nt, Homo Sapiens
uucccaagucucccuuucccugucuggcuucu

SEQ ID NO: 304771 - RNA, 32 nt, Homo Sapiens
cgggacucgggguuugcucagugagccguuca

SEQ ID NO: 304772 - RNA, 32 nt, Homo Sapiens
agguaccuguuuuccuucuccugguacuagga

SEQ ID NO: 304773 - RNA, 32 nt, Homo Sapiens
auuuuauauaucuuaauguauuuuuucagacu

SEQ ID NO: 304774 - RNA, 32 nt, Homo Sapiens
cuucugcgggcuucgaggagcgggauguugcg

SEQ ID NO: 304775 - RNA, 32 nt, Homo Sapiens
ugccuuuaauuggccuugguccucacagcucc

SEQ ID NO: 304776 - RNA, 32 nt, Homo Sapiens
gaguuuccuugacuuacacuagauuuuguuuu

SEQ ID NO: 304777 - RNA, 32 nt, Homo Sapiens
agucccgggucugucuuccuuaucaucggggu

SEQ ID NO: 304778 - RNA, 32 nt, Homo Sapiens
gcaugagagauuacaaggaacaauccaauguc

SEQ ID NO: 304779 - RNA, 32 nt, Homo Sapiens
agguuccagcaggcgggggagccccgaccagu

SEQ ID NO: 304780 - RNA, 32 nt, Homo Sapiens
acuaugaugcuguuuuauuaauauuuucuaaa

SEQ ID NO: 304781 - RNA, 32 nt, Homo Sapiens
gguuucaacauauuggccaggcuggucucaaa

SEQ ID NO: 304782 - RNA, 32 nt, Homo Sapiens
ccaagaucaggcauagucccacuaccagucga

SEQ ID NO: 304783 - RNA, 32 nt, Homo Sapiens
cuucugcugcagcagaggcucacccagcguga

SEQ ID NO: 304784 - RNA, 32 nt, Homo Sapiens
ggcggcaccgacagcuggggccugggucgggg

SEQ ID NO: 304785 - RNA, 32 nt, Homo Sapiens
ggauugaaaauaaaauugcacuuuuuagguac

SEQ ID NO: 304786 - RNA, 32 nt, Homo Sapiens
gguaccugagggacgcgcggccgcccgcggca

SEQ ID NO: 304787 - RNA, 32 nt, Homo Sapiens
gccccucucgcuucugguggucugugacccug

SEQ ID NO: 304788 - RNA, 32 nt, Homo Sapiens
uccaagauuuucuccucuucuggagucaauuu

SEQ ID NO: 304789 - RNA, 32 nt, Homo Sapiens
cuaaauuauauuucuuuauagagaaaguaccu

SEQ ID NO: 304790 - RNA, 32 nt, Homo Sapiens
aaaguacagauuuuuuacauuuuagaggaaga

SEQ ID NO: 304791 - RNA, 32 nt, Homo Sapiens
uuguccacugagaaauuagaaacuagggacaa

SEQ ID NO: 304792 - RNA, 32 nt, Homo Sapiens
ccucagucuccucaucuguaaaacaggcauaa

SEQ ID NO: 304793 - RNA, 32 nt, Homo Sapiens
acugcgcagccugggaggaggcguggauccug

SEQ ID NO: 304794 - RNA, 32 nt, Homo Sapiens
cccuggcccugagacucugugagggggcugga

SEQ ID NO: 304795 - RNA, 32 nt, Homo Sapiens
uucagagucugugccccuggaccuggggagug

SEQ ID NO: 304796 - RNA, 32 nt, Homo Sapiens
gcugcuuuagggagcccaaagccugcuccccg

SEQ ID NO: 304797 - RNA, 32 nt, Homo Sapiens
ggggacucaggaccagauguccgucucucuug

SEQ ID NO: 304798 - RNA, 32 nt, Homo Sapiens
ugcugcuucucugucuccgagaccggaguacu

SEQ ID NO: 304799 - RNA, 32 nt, Homo Sapiens
gggcagaggaggacuuaguuuuuuguaugugu

SEQ ID NO: 304800 - RNA, 32 nt, Homo Sapiens
ccaaagagccgcgucccggcaaguccggcgga

SEQ ID NO: 304801 - RNA, 32 nt, Homo Sapiens
aagagcgcgggaaguuugucggaaacggacag

SEQ ID NO: 304802 - RNA, 32 nt, Homo Sapiens
ccaucaucuuccucucccccagccucccaggc

SEQ ID NO: 304803 - RNA, 32 nt, Homo Sapiens
cauuaauugcugucaaagaugaagaagaaggc

SEQ ID NO: 304804 - RNA, 32 nt, Homo Sapiens
acaccuggcuuccacccuccccagcuccugca

SEQ ID NO: 304805 - RNA, 32 nt, Homo Sapiens
aagacaugggcccucccaugggccauuugcuc

SEQ ID NO: 304806 - RNA, 32 nt, Homo Sapiens
accuuuguucuucagugaucgcuguucuccag

SEQ ID NO: 304807 - RNA, 32 nt, Homo Sapiens
ugcugccccagcugcuggcgugcugucagcac

SEQ ID NO: 304808 - RNA, 32 nt, Homo Sapiens
uaggcaggaucuguacaauaauaauuaugagu

SEQ ID NO: 304809 - RNA, 32 nt, Homo Sapiens
cuucagguuuuuaaagacccagcccuucccaa

SEQ ID NO: 304810 - RNA, 28 nt, Homo Sapiens
ggaaugcauauggacagugaaaaaauaa

SEQ ID NO: 304811 - RNA, 32 nt, Homo Sapiens
ccacaccucacuuuucacagccucugagggca

SEQ ID NO: 304812 - RNA, 32 nt, Homo Sapiens
guugcauccucccucccuguuccggaucuuau

SEQ ID NO: 304813 - RNA, 32 nt, Homo Sapiens
acuuggggguggcaaguaaggcuuugccucag

SEQ ID NO: 304814 - RNA, 32 nt, Homo Sapiens
agaauauauuucaucaagugucuuaaauauua

SEQ ID NO: 304815 - RNA, 32 nt, Homo Sapiens
uggaagaguggccuaggacagcuccucuccug

SEQ ID NO: 304816 - RNA, 32 nt, Homo Sapiens
ggggccugugaagcccugaguaccucaugggg

SEQ ID NO: 304817 - RNA, 32 nt, Homo Sapiens
gagcccugaggguggagugacuggggcagggc

SEQ ID NO: 304818 - RNA, 32 nt, Homo Sapiens
gagguugcaggggagagcugccgccagcccac

SEQ ID NO: 304819 - RNA, 32 nt, Homo Sapiens
agaacguaguuuggaaaacacuggccuaucgg

SEQ ID NO: 304820 - RNA, 31 nt, Homo Sapiens
cccauaauaaauuguaauuuuauacugcuua

SEQ ID NO: 304821 - RNA, 32 nt, Homo Sapiens
ccuguaaaauaauuauuuuaauucaauuuaaa

SEQ ID NO: 304822 - RNA, 32 nt, Homo Sapiens
auugauucucuuuuccuuccacaauaaaaugg

SEQ ID NO: 304823 - RNA, 32 nt, Homo Sapiens
aacccaguuuguuuucaaaaaaucacaguagc

SEQ ID NO: 304824 - RNA, 32 nt, Homo Sapiens
uguguaacauucaaaugugugcauuaaauaug

SEQ ID NO: 304825 - RNA, 32 nt, Homo Sapiens
ucugccuggagagaaacuuucagaccagcccc

SEQ ID NO: 304826 - RNA, 32 nt, Homo Sapiens
gauauaaggucuuugaggcagggcucaguggc

SEQ ID NO: 304827 - RNA, 32 nt, Homo Sapiens
ucagcugguagguccgcagaucaguccuccug

SEQ ID NO: 304828 - RNA, 32 nt, Homo Sapiens
ggacgcugcuccaugcugaagaaaagugacag

SEQ ID NO: 304829 - RNA, 32 nt, Homo Sapiens
uuucauagugccaagcagcauggugguccagu

SEQ ID NO: 304830 - RNA, 31 nt, Homo Sapiens
cucugguccagcaccaccuggauguugaggu

SEQ ID NO: 304831 - RNA, 32 nt, Homo Sapiens
cccccaacccugggcucuggcuguuuaaaagc

SEQ ID NO: 304832 - RNA, 32 nt, Homo Sapiens
cagauacacacacacacacacacacacacaca

SEQ ID NO: 304833 - RNA, 32 nt, Homo Sapiens
ggccaggguggcugguggaaaccaguccuggc

SEQ ID NO: 304834 - RNA, 32 nt, Homo Sapiens
aggccgcgguggaggaccugccaggcaccccc

SEQ ID NO: 304835 - RNA, 32 nt, Homo Sapiens
uugaugauaacacuuaaaauuguaaccugcau

SEQ ID NO: 304836 - RNA, 32 nt, Homo Sapiens
ucauaccuuuauucuuuuuuuuaaccaaaaaa

SEQ ID NO: 304837 - RNA, 32 nt, Homo Sapiens
uccagccgcgcgcagacuugcgcacgcgucgu

SEQ ID NO: 304838 - RNA, 32 nt, Homo Sapiens
acauuaauuaggaaacaaagaacuuuaaugcu

SEQ ID NO: 304839 - RNA, 32 nt, Homo Sapiens
cccacuggguggcaaggcaggaccuuccuaau

SEQ ID NO: 304840 - RNA, 32 nt, Homo Sapiens
ucuuuuaaggauagugggguccguucugagag

SEQ ID NO: 304841 - RNA, 32 nt, Homo Sapiens
ccaggcuaggcuguggccgccgguggccuggg

SEQ ID NO: 304842 - RNA, 31 nt, Homo Sapiens
cugcuggaaggcauucucagagcuuuauguc

SEQ ID NO: 304843 - RNA, 32 nt, Homo Sapiens
agucggucaccagcggccccauguccccagag

SEQ ID NO: 304844 - RNA, 32 nt, Homo Sapiens
ggggaaaaaagugaauucaaagcaaaaauaac

SEQ ID NO: 304845 - RNA, 32 nt, Homo Sapiens
gaagcccuccccacccaggacugagaggcugg

SEQ ID NO: 304846 - RNA, 32 nt, Homo Sapiens
auguggaggggccagaggcuugccagaccccc

SEQ ID NO: 304847 - RNA, 32 nt, Homo Sapiens
uuaugcccugaacacccgccaggaugaggcug

SEQ ID NO: 304848 - RNA, 31 nt, Homo Sapiens
ucccagugucaccagaaccaggggcacggca

SEQ ID NO: 304849 - RNA, 32 nt, Homo Sapiens
aaguuaguauuacucaagauuaugaacaaaua

SEQ ID NO: 304850 - RNA, 32 nt, Homo Sapiens
aaaaagaaauaaauuuuauuuuuuacgugaga

SEQ ID NO: 304851 - RNA, 32 nt, Homo Sapiens
gggugggugggcagaggacgggguaaugugag

SEQ ID NO: 304852 - RNA, 32 nt, Homo Sapiens
ucccacccugaaucucaucaucuccuaauauc

SEQ ID NO: 304853 - RNA, 32 nt, Homo Sapiens
cugagucuuggcccaggagcugucugagaaac

SEQ ID NO: 304854 - RNA, 32 nt, Homo Sapiens
cacacacacagagauaugcacacacacggaug

SEQ ID NO: 304855 - RNA, 32 nt, Homo Sapiens
cucaaaggagaguauaguugcaaccacuaaau

SEQ ID NO: 304856 - RNA, 32 nt, Homo Sapiens
cggcugacugcgacucgggagcuccgggagcg

SEQ ID NO: 304857 - RNA, 32 nt, Homo Sapiens
ccucugcagcucagcccuguacauauaccugu

SEQ ID NO: 304858 - RNA, 32 nt, Homo Sapiens
uuauaauaaaaauuauauacaaguauaaaauu

SEQ ID NO: 304859 - RNA, 32 nt, Homo Sapiens
uagugugggcauucagucaggcuggugggaaa

SEQ ID NO: 304860 - RNA, 32 nt, Homo Sapiens
ccucccggcucggggaggccccggggcuggga

SEQ ID NO: 304861 - RNA, 32 nt, Homo Sapiens
uugccuugccuugcaugaugcugggggaaaaa

SEQ ID NO: 304862 - RNA, 32 nt, Homo Sapiens
gagugaggagacugaggagaaacuguagagaa

SEQ ID NO: 304863 - RNA, 32 nt, Homo Sapiens
aaaacagagacuauaaagauuucacaaaacag

SEQ ID NO: 304864 - RNA, 32 nt, Homo Sapiens
ccaucucauauuacugucuaauuaaaauaaac

SEQ ID NO: 304865 - RNA, 32 nt, Homo Sapiens
ugcuuuggaaacugccagguggggucauguca

SEQ ID NO: 304866 - RNA, 32 nt, Homo Sapiens
cuuggaaaggagguuuacaaaaaugcaaauga

SEQ ID NO: 304867 - RNA, 32 nt, Homo Sapiens
acgagaacccugacuaauacaccuggagugca

SEQ ID NO: 304868 - RNA, 32 nt, Homo Sapiens
aguggaacuguuguugcguuguguguuuugag

SEQ ID NO: 304869 - RNA, 32 nt, Homo Sapiens
ccccgguugggucuguucuugggggcugcacu

SEQ ID NO: 304870 - RNA, 32 nt, Homo Sapiens
cgagcaugguggcucacgcuuguaaucccagc

SEQ ID NO: 304871 - RNA, 32 nt, Homo Sapiens
agcagaauuggaaaagacuaagaucgguuaac

SEQ ID NO: 304872 - RNA, 32 nt, Homo Sapiens
cugguguguacugaauaggaaagggaaguuuu

SEQ ID NO: 304873 - RNA, 32 nt, Homo Sapiens
caguggcucaagaugagaagcguauugagaca

SEQ ID NO: 304874 - RNA, 32 nt, Homo Sapiens
uugguuugaagaugaaccgacuuuuuaguuug

SEQ ID NO: 304875 - RNA, 32 nt, Homo Sapiens
ggccacagcucuucucuccuucucucuucucu

SEQ ID NO: 304876 - RNA, 32 nt, Homo Sapiens
ugaagaaugaagcuaaggaaaagggaauucau

SEQ ID NO: 304877 - RNA, 32 nt, Homo Sapiens
aauggaaacuaaaaguuaggauuuuauggagu

SEQ ID NO: 304878 - RNA, 32 nt, Homo Sapiens
guggguuuagagguccuggugcccaaaggaga

SEQ ID NO: 304879 - RNA, 32 nt, Homo Sapiens
ugguggugcuggccagggaggaugcuggagcg

SEQ ID NO: 304880 - RNA, 32 nt, Homo Sapiens
cugaccugaggcucagcccgcccaguggggcc

SEQ ID NO: 304881 - RNA, 32 nt, Homo Sapiens
ugccgccugccgggcgcuaagcgccgguguug

SEQ ID NO: 304882 - RNA, 32 nt, Homo Sapiens
cuuacaccagaagccuuuuagagaagcaugag

SEQ ID NO: 304883 - RNA, 32 nt, Homo Sapiens
ggaagcuguuuuugcagccugaggaagcauca

SEQ ID NO: 304884 - RNA, 32 nt, Homo Sapiens
gucaucugccagccucccuacccccuugccca

SEQ ID NO: 304885 - RNA, 32 nt, Homo Sapiens
ggccuggcauggggguucagucuguggauggu

SEQ ID NO: 304886 - RNA, 32 nt, Homo Sapiens
ugagggugaaggugggacgggaggcgggaggg

SEQ ID NO: 304887 - RNA, 32 nt, Homo Sapiens
ugggaaaagcuuugcggggcuugcuugguuaa

SEQ ID NO: 304888 - RNA, 32 nt, Homo Sapiens
acuugccuuguacaucuuucaauucuggaaua

SEQ ID NO: 304889 - RNA, 32 nt, Homo Sapiens
ucuuuuugaaauuuauguuuucaaauaaaauc

SEQ ID NO: 304890 - RNA, 32 nt, Homo Sapiens
ccuggcagauaccaccuuaaccaggugaucaa

SEQ ID NO: 304891 - RNA, 32 nt, Homo Sapiens
ccugcugcuccgacccgcucccggcccgcggc

SEQ ID NO: 304892 - RNA, 32 nt, Homo Sapiens
gaaucaccaauaucauuaggcauuggcaucau

SEQ ID NO: 304893 - RNA, 32 nt, Homo Sapiens
acacaagauggggacuccugcuucuggaagga

SEQ ID NO: 304894 - RNA, 32 nt, Homo Sapiens
gaggggcccccgagggggaaaccgggagucgg

SEQ ID NO: 304895 - RNA, 32 nt, Homo Sapiens
auuuccuuaagugguuuguaacaucgaugagg

SEQ ID NO: 304896 - RNA, 32 nt, Homo Sapiens
ucggccugcauggggcacccacuuccuucugg

SEQ ID NO: 304897 - RNA, 32 nt, Homo Sapiens
cagcuacaaaacaaaauacuggacccacuucu

SEQ ID NO: 304898 - RNA, 32 nt, Homo Sapiens
cguggcaggaggagggcucagggagcugagau

SEQ ID NO: 304899 - RNA, 32 nt, Homo Sapiens
ccuagcuauucaggaaacugaggugggaggau

SEQ ID NO: 304900 - RNA, 32 nt, Homo Sapiens
guggauacuguaaucauagaacauuaggucau

SEQ ID NO: 304901 - RNA, 32 nt, Homo Sapiens
gccucaaacuccugcccuccccaggccucugg

SEQ ID NO: 304902 - RNA, 32 nt, Homo Sapiens
caccucucuauuggguuuaucaucaucaacaa

SEQ ID NO: 304903 - RNA, 32 nt, Homo Sapiens
uccgcuuaauuucaaagauaaaaugcaguuac

SEQ ID NO: 304904 - RNA, 32 nt, Homo Sapiens
gaaugggaauccaagagcgaugcccuggagac

SEQ ID NO: 304905 - RNA, 32 nt, Homo Sapiens
ucuagcccaucauuucuuggggccugaacccc

SEQ ID NO: 304906 - RNA, 32 nt, Homo Sapiens
uuugacacccuucaugggcucgugagcacacu

SEQ ID NO: 304907 - RNA, 32 nt, Homo Sapiens
cucuggcaagggcgucaggguccuaucuggau

SEQ ID NO: 304908 - RNA, 32 nt, Homo Sapiens
gcaagaggauugcauucagccuaguuccuggu

SEQ ID NO: 304909 - RNA, 30 nt, Homo Sapiens
cagcaucccugugcugucccggcucucauu

SEQ ID NO: 304910 - RNA, 32 nt, Homo Sapiens
ccccaggugcuaugggggaggggggcguugaa

SEQ ID NO: 304911 - RNA, 32 nt, Homo Sapiens
cugccagguccccugggaccaacuacagcucc

SEQ ID NO: 304912 - RNA, 32 nt, Homo Sapiens
cgccucgcgcccgcgcggaucccgucaccugc

SEQ ID NO: 304913 - RNA, 32 nt, Homo Sapiens
acccugggagagaacagaaagcugucccuggc

SEQ ID NO: 304914 - RNA, 32 nt, Homo Sapiens
agacuucucgcaggcccagguccuccugggug

SEQ ID NO: 304915 - RNA, 32 nt, Homo Sapiens
acaaagggguccaacagcucuuugaguaggca

SEQ ID NO: 304916 - RNA, 32 nt, Homo Sapiens
guguuauuuaaaugaguguguuugucaccguu

SEQ ID NO: 304917 - RNA, 32 nt, Homo Sapiens
uaauaauaaaaauaaacaaaucuguuuaaauu

SEQ ID NO: 304918 - RNA, 32 nt, Homo Sapiens
caggcugugcccccgagcugcccccacccccu

SEQ ID NO: 304919 - RNA, 32 nt, Homo Sapiens
agcuggaggaagauggcaaaggaugugaagau

SEQ ID NO: 304920 - RNA, 32 nt, Homo Sapiens
aaaauaaaucauccaacuucuuugcauuacuu

SEQ ID NO: 304921 - RNA, 32 nt, Homo Sapiens
gaggccccaagccccagcugacugagguccgc

SEQ ID NO: 304922 - RNA, 32 nt, Homo Sapiens
gaaagcaaagacccgggugugcauccucuucc

SEQ ID NO: 304923 - RNA, 32 nt, Homo Sapiens
agcuuggcaaccgaaaacccgagggaggagaa

SEQ ID NO: 304924 - RNA, 32 nt, Homo Sapiens
gugcacgugcgcgcuugggcauuugcuguugu

SEQ ID NO: 304925 - RNA, 32 nt, Homo Sapiens
agcacuacaagacuucuguuuguucguucguu

SEQ ID NO: 304926 - RNA, 32 nt, Homo Sapiens
cggugcgcgggaagggaccccggacccggagg

SEQ ID NO: 304927 - RNA, 32 nt, Homo Sapiens
cccucccggacgggacagcuggccgggcgggg

SEQ ID NO: 304928 - RNA, 32 nt, Homo Sapiens
ccuuccccagaagcuaagagccagccucagag

SEQ ID NO: 304929 - RNA, 32 nt, Homo Sapiens
aucugccucugcaguucucagaaccgcugcag

SEQ ID NO: 304930 - RNA, 32 nt, Homo Sapiens
agaggaggcaacacugaucccccagaugcagg

SEQ ID NO: 304931 - RNA, 32 nt, Homo Sapiens
cauggccgucuucucucugcauugucacauca

SEQ ID NO: 304932 - RNA, 32 nt, Homo Sapiens
uacuucccugagaggagccgcgcgcgccgcau

SEQ ID NO: 304933 - RNA, 32 nt, Homo Sapiens
aaauguaauuaaaaguuuuuauugagcccccg

SEQ ID NO: 304934 - RNA, 32 nt, Homo Sapiens
gaaaagcaaaaauuauccuugugaaauaucug

SEQ ID NO: 304935 - RNA, 32 nt, Homo Sapiens
uaccuucggcuaaaauaucuuucauauuuuua

SEQ ID NO: 304936 - RNA, 32 nt, Homo Sapiens
gcagguccaccgagccccugaccccugucugu

SEQ ID NO: 304937 - RNA, 32 nt, Homo Sapiens
caaaaauuuuuccaguggaaaaaggaaaagac

SEQ ID NO: 304938 - RNA, 32 nt, Homo Sapiens
ggagaaaaagaguaagaggaaauauucccaca

SEQ ID NO: 304939 - RNA, 31 nt, Homo Sapiens
aacaacacaaagaaguaagggcaguuauugg

SEQ ID NO: 304940 - RNA, 26 nt, Homo Sapiens
uaugaaugaugaugauggcuggcaac

SEQ ID NO: 304941 - RNA, 32 nt, Homo Sapiens
ucaaacacucuuccaaggaaaagcagaaguaa

SEQ ID NO: 304942 - RNA, 32 nt, Homo Sapiens
ucuucacguguccaggaaaauuccucaauuca

SEQ ID NO: 304943 - RNA, 32 nt, Homo Sapiens
gugacauagauaugauaugacaacugguaaug

SEQ ID NO: 304944 - RNA, 31 nt, Homo Sapiens
ugaagggcgggccccuaggggagauggugca

SEQ ID NO: 304945 - RNA, 32 nt, Homo Sapiens
gaauugucaacacgagagaucacaguggagca

SEQ ID NO: 304946 - RNA, 32 nt, Homo Sapiens
gucuauaaacuuugauuuuccucugauguaaa

SEQ ID NO: 304947 - RNA, 32 nt, Homo Sapiens
auaaauaaauaaacaagaggcuauaugaaauu

SEQ ID NO: 304948 - RNA, 32 nt, Homo Sapiens
acaguuuuucuuuuucuuuccuugauggucug

SEQ ID NO: 304949 - RNA, 32 nt, Homo Sapiens
caaaaaucaucauggucauuuauauauuucua

SEQ ID NO: 304950 - RNA, 32 nt, Homo Sapiens
accuuauucuacaucauuaaccaguaaggacu

SEQ ID NO: 304951 - RNA, 32 nt, Homo Sapiens
gcaauuuucugccaccacuccaaauacuccuc

SEQ ID NO: 304952 - RNA, 32 nt, Homo Sapiens
uugaucuacuucuguaauuguguggauucuuu

SEQ ID NO: 304953 - RNA, 32 nt, Homo Sapiens
ucccgagcagcuuuuguuaaagcaguagguuu

SEQ ID NO: 304954 - RNA, 32 nt, Homo Sapiens
ggaaagucggagccgcagccugcugcaccguu

SEQ ID NO: 304955 - RNA, 32 nt, Homo Sapiens
acaggccggcccgggccgccaccgcccauccc

SEQ ID NO: 304956 - RNA, 32 nt, Homo Sapiens
ccuuugggaucagccuccgccauuccaaguca

SEQ ID NO: 304957 - RNA, 32 nt, Homo Sapiens
ccuggagcucaggaguucaagagcagccuggg

SEQ ID NO: 304958 - RNA, 32 nt, Homo Sapiens
caguugauauaaaacucuggucuuggccauga

SEQ ID NO: 304959 - RNA, 32 nt, Homo Sapiens
ugcgggcacgccagggcuggggugcugcugcu

SEQ ID NO: 304960 - RNA, 32 nt, Homo Sapiens
gaugaaguguguauuuaaauuucaugccuuaa

SEQ ID NO: 304961 - RNA, 32 nt, Homo Sapiens
cucuccugaggccaccacugggcccccuucug

SEQ ID NO: 304962 - RNA, 32 nt, Homo Sapiens
uccuaucacaagcucauggccuuggacagcac

SEQ ID NO: 304963 - RNA, 32 nt, Homo Sapiens
uuaucuaacagauauuuacugagcauuuacca

SEQ ID NO: 304964 - RNA, 32 nt, Homo Sapiens
ugcuucagcucuuugcugcuucacuucuuugu

SEQ ID NO: 304965 - RNA, 32 nt, Homo Sapiens
ccaggcugucacccuccaccgagccacgcagu

SEQ ID NO: 304966 - RNA, 32 nt, Homo Sapiens
uauuacauuucugcuuuuuucuagucauucaa

SEQ ID NO: 304967 - RNA, 32 nt, Homo Sapiens
uugucucauggcaaccuucccuggccagauuc

SEQ ID NO: 304968 - RNA, 32 nt, Homo Sapiens
acaaagacaugaucuggaaacacacacacacc

SEQ ID NO: 304969 - RNA, 32 nt, Homo Sapiens
gcgguaggagcucaucaccucccagacuccca

SEQ ID NO: 304970 - RNA, 32 nt, Homo Sapiens
cugggccucuccugggcugugccuaggguuug

SEQ ID NO: 304971 - RNA, 32 nt, Homo Sapiens
uccucuggaugaggguuagaagagacuuuuuc

SEQ ID NO: 304972 - RNA, 32 nt, Homo Sapiens
uggacagagucuuugggguaaugcuacacgga

SEQ ID NO: 304973 - RNA, 32 nt, Homo Sapiens
gcugcucuuggugaugggagaauggggacucu

SEQ ID NO: 304974 - RNA, 32 nt, Homo Sapiens
uucugguccuuaaauuuggguuauuuuugguu

SEQ ID NO: 304975 - RNA, 32 nt, Homo Sapiens
agccuuuggaaguuaagguuuccucagccacc

SEQ ID NO: 304976 - RNA, 32 nt, Homo Sapiens
uuuuccuguuucuccuuuucuguugucgagua

SEQ ID NO: 304977 - RNA, 32 nt, Homo Sapiens
cuugugaauuuugugauauuuuauguaauaaa

SEQ ID NO: 304978 - RNA, 32 nt, Homo Sapiens
cugagccaacugcuuggacagcagccagcgcg

SEQ ID NO: 304979 - RNA, 32 nt, Homo Sapiens
cuggcuggugccugcugccauggccagccccc

SEQ ID NO: 304980 - RNA, 32 nt, Homo Sapiens
gucauugcauuuccacauucccaggaaagccc

SEQ ID NO: 304981 - RNA, 32 nt, Homo Sapiens
ugugaagccggaagaaaguucugggacuuccc

SEQ ID NO: 304982 - RNA, 32 nt, Homo Sapiens
gaacuuagauauauuuguguugaauaaauuaa

SEQ ID NO: 304983 - RNA, 32 nt, Homo Sapiens
accaaacuaugaagugaaggcuuuaaaagugc

SEQ ID NO: 304984 - RNA, 32 nt, Homo Sapiens
ccucugggccuggccagugggcuccugggggg

SEQ ID NO: 304985 - RNA, 32 nt, Homo Sapiens
gaaaagugguggccauccaaggggcccacgua

SEQ ID NO: 304986 - RNA, 32 nt, Homo Sapiens
caaggcgcucaucccgcggaggaggcacgcuc

SEQ ID NO: 304987 - RNA, 32 nt, Homo Sapiens
ugcuccugcaccaugaaaguccugcuuuguga

SEQ ID NO: 304988 - RNA, 32 nt, Homo Sapiens
ggaugccgcccgggggucuuggggcgggacuc

SEQ ID NO: 304989 - RNA, 32 nt, Homo Sapiens
ucagcuugccgccggcggccaagcagccaacc

SEQ ID NO: 304990 - RNA, 32 nt, Homo Sapiens
cggaugccagcuugggcacugcugucuacuga

SEQ ID NO: 304991 - RNA, 32 nt, Homo Sapiens
ugaaacauauuuuaauguuguuuacuuuuuua

SEQ ID NO: 304992 - RNA, 32 nt, Homo Sapiens
ucagcagaugaccacugagucacuaugggcuu

SEQ ID NO: 304993 - RNA, 32 nt, Homo Sapiens
caaaguugagagaacuccaugcugguggagaa

SEQ ID NO: 304994 - RNA, 32 nt, Homo Sapiens
ugcugcccgcgccggaccccagccgcggaggg

SEQ ID NO: 304995 - RNA, 32 nt, Homo Sapiens
caacagacuauauaaugauacaugacugacac

SEQ ID NO: 304996 - RNA, 32 nt, Homo Sapiens
cucgcucugcucauuucuuuugcagcuuccua

SEQ ID NO: 304997 - RNA, 32 nt, Homo Sapiens
gaacuuucucugagcucccacucuguaccaag

SEQ ID NO: 304998 - RNA, 32 nt, Homo Sapiens
acucccuggaccugguugcuuauuuagcuguc

SEQ ID NO: 304999 - RNA, 32 nt, Homo Sapiens
aguuuucccucaucuguaaaugugauuuaaaa

SEQ ID NO: 305000 - RNA, 32 nt, Homo Sapiens
caagggauauaaaaugaaagauuuuuacuaau

SEQ ID NO: 305001 - RNA, 32 nt, Homo Sapiens
acagagagccagauaacgugggacaucgauuc

SEQ ID NO: 305002 - RNA, 27 nt, Homo Sapiens
ggaugcccauccccuccccuuucccug

SEQ ID NO: 305003 - RNA, 32 nt, Homo Sapiens
ccaugccaguguugcucuaggagagaaagggu

SEQ ID NO: 305004 - RNA, 32 nt, Homo Sapiens
ccguucauuccauggcugggagucacugaugc

SEQ ID NO: 305005 - RNA, 32 nt, Homo Sapiens
agguccaggaggaaguauagccagcauggcua

SEQ ID NO: 305006 - RNA, 32 nt, Homo Sapiens
gcuggcggaaacaaaugaugaggcugguuagc

SEQ ID NO: 305007 - RNA, 32 nt, Homo Sapiens
uggcagcaguugccagguuuuagcugccaccg

SEQ ID NO: 305008 - RNA, 32 nt, Homo Sapiens
gucagcaaaaauuagaaagucagcuaaugcca

SEQ ID NO: 305009 - RNA, 32 nt, Homo Sapiens
uaacuaaaaaauuuagaaaaauaaauccagua

SEQ ID NO: 305010 - RNA, 32 nt, Homo Sapiens
ccucagcagcugggcuugccuguggagggagu

SEQ ID NO: 305011 - RNA, 32 nt, Homo Sapiens
cccgugcagugggaccagauuccagguccaaa

SEQ ID NO: 305012 - RNA, 32 nt, Homo Sapiens
uguaaaauauccaucuuaaagacaucaacuau

SEQ ID NO: 305013 - RNA, 32 nt, Homo Sapiens
ggcagggaugggacagaagaguuuggggaagg

SEQ ID NO: 305014 - RNA, 32 nt, Homo Sapiens
aaauguaacuugaaaacaaaauaaaaugugga

SEQ ID NO: 305015 - RNA, 32 nt, Homo Sapiens
aucugagaaaauuuauaugaccgcgaacccau

SEQ ID NO: 305016 - RNA, 32 nt, Homo Sapiens
uccaggagccccagccagcccuucccaggcca

SEQ ID NO: 305017 - RNA, 32 nt, Homo Sapiens
cgucggacaaacagcgucuacugcacauuuuu

SEQ ID NO: 305018 - RNA, 32 nt, Homo Sapiens
aaaguguauaaaugaaaagaugauguuucuaa

SEQ ID NO: 305019 - RNA, 32 nt, Homo Sapiens
gaagggaaggaagaggaagagugcaaaacauu

SEQ ID NO: 305020 - RNA, 32 nt, Homo Sapiens
gacacggucugacucugucacccaggcuggag

SEQ ID NO: 305021 - RNA, 32 nt, Homo Sapiens
gagacggucucacucugucacccaggcuggag

SEQ ID NO: 305022 - RNA, 32 nt, Homo Sapiens
aaaguuaauuauuauuauucuggaaauaccgc

SEQ ID NO: 305023 - RNA, 32 nt, Homo Sapiens
uaucacuuuuuauguccaaaauuaaauuucac

SEQ ID NO: 305024 - RNA, 32 nt, Homo Sapiens
cuccaucaaagucccccuccuaacgucuuccu

SEQ ID NO: 305025 - RNA, 32 nt, Homo Sapiens
gucuuuuagugucacagggaacaguuauuagg

SEQ ID NO: 305026 - RNA, 32 nt, Homo Sapiens
augaaaucucuucuuuccugucuugguccugc

SEQ ID NO: 305027 - RNA, 32 nt, Homo Sapiens
aagauggcugcugggcgaccacuuccugacag

SEQ ID NO: 305028 - RNA, 32 nt, Homo Sapiens
aauuccauuagcauuugcuaccaaguaggaaa

SEQ ID NO: 305029 - RNA, 32 nt, Homo Sapiens
uccugacagccgccagcgggagagagguggag

SEQ ID NO: 305030 - RNA, 32 nt, Homo Sapiens
uuuagaaucugugcuguguaagggcauucgua

SEQ ID NO: 305031 - RNA, 32 nt, Homo Sapiens
cgcugagccaggcgcccagucgcgagaagcug

SEQ ID NO: 305032 - RNA, 32 nt, Homo Sapiens
caucuuagagaacuauacaacuuuuauuguuu

SEQ ID NO: 305033 - RNA, 32 nt, Homo Sapiens
gaucaguggcugcuggguggcggguacccuug

SEQ ID NO: 305034 - RNA, 32 nt, Homo Sapiens
guggaacauauuuguguaaauagaauccucaa

SEQ ID NO: 305035 - RNA, 32 nt, Homo Sapiens
cagcaagggagaagcaaaguuguugaaagaug

SEQ ID NO: 305036 - RNA, 32 nt, Homo Sapiens
cuccaacacgacagcaccauguugaacaagaa

SEQ ID NO: 305037 - RNA, 32 nt, Homo Sapiens
gguucauugggaagauucucuauuggcucccu

SEQ ID NO: 305038 - RNA, 32 nt, Homo Sapiens
aggccgaaggggaagacgauccggccggugag

SEQ ID NO: 305039 - RNA, 32 nt, Homo Sapiens
cagaugcaaccucagaccugauacugacucca

SEQ ID NO: 305040 - RNA, 32 nt, Homo Sapiens
agugccccuggccaacaggcccuuuucucagu

SEQ ID NO: 305041 - RNA, 32 nt, Homo Sapiens
gacuauucucuuaaguuuauguuggagaauua

SEQ ID NO: 305042 - RNA, 32 nt, Homo Sapiens
aaaagggcagaaccauagcagggugcgcgcug

SEQ ID NO: 305043 - RNA, 32 nt, Homo Sapiens
uaagcauuuuuggcaaccaauggcagauaucu

SEQ ID NO: 305044 - RNA, 30 nt, Homo Sapiens
acaaagaauauccugcuucauuuuuuauuu

SEQ ID NO: 305045 - RNA, 30 nt, Homo Sapiens
acaucaugcgugaguacaagcuaguggucc

SEQ ID NO: 305046 - RNA, 32 nt, Homo Sapiens
ugcaaacaguguaaauguguuugaugccacug

SEQ ID NO: 305047 - RNA, 32 nt, Homo Sapiens
gcuaucccgggaagacguggaaggccgagcaa

SEQ ID NO: 305048 - RNA, 32 nt, Homo Sapiens
gauuacaaaaauuuuauuauccugaguuagcu

SEQ ID NO: 305049 - RNA, 32 nt, Homo Sapiens
accccuccccagugccucuccuggcccugaag

SEQ ID NO: 305050 - RNA, 32 nt, Homo Sapiens
uacaaaauuguguuuguauauagaauaaacug

SEQ ID NO: 305051 - RNA, 32 nt, Homo Sapiens
aaagcuggggauguuagccuaugacugucauc

SEQ ID NO: 305052 - RNA, 32 nt, Homo Sapiens
aguugaccgcggcuaaccugggaagguagaaa

SEQ ID NO: 305053 - RNA, 32 nt, Homo Sapiens
uucaggccaagauacagccagccaggccuguc

SEQ ID NO: 305054 - RNA, 32 nt, Homo Sapiens
cagaugcagcuaggcucugcagugcuguuugg

SEQ ID NO: 305055 - RNA, 32 nt, Homo Sapiens
uuguccaaggucgcccagcagugcugcucuga

SEQ ID NO: 305056 - RNA, 32 nt, Homo Sapiens
agcugggaaggggacauucccacuaguucuca

SEQ ID NO: 305057 - RNA, 32 nt, Homo Sapiens
ucuguguucacauuuuuuccugcaacuuuuaa

SEQ ID NO: 305058 - RNA, 32 nt, Homo Sapiens
acaaccccccucacuacacagacacacaccgu

SEQ ID NO: 305059 - RNA, 32 nt, Homo Sapiens
accuucuguuugcugcacaagcaucucaucac

SEQ ID NO: 305060 - RNA, 32 nt, Homo Sapiens
aggaaugugagauuuuaaauuauugaccaccu

SEQ ID NO: 305061 - RNA, 32 nt, Homo Sapiens
auuggcucaucaagaacacaguccccauguug

SEQ ID NO: 305062 - RNA, 32 nt, Homo Sapiens
cuuuaaggcagacaagggcuaagauuuccuua

SEQ ID NO: 305063 - RNA, 32 nt, Homo Sapiens
uggcagcccagcuguguggacucagggggcuc

SEQ ID NO: 305064 - RNA, 32 nt, Homo Sapiens
guuaccacccucggcccucccucugcaagccc

SEQ ID NO: 305065 - RNA, 32 nt, Homo Sapiens
acuguagaguuccauauucugguauugugauu

SEQ ID NO: 305066 - RNA, 32 nt, Homo Sapiens
acaggugggaggccagccccagccccagcccc

SEQ ID NO: 305067 - RNA, 29 nt, Homo Sapiens
uuccauggaauuuuccugcauggagugcu

SEQ ID NO: 305068 - RNA, 32 nt, Homo Sapiens
auuaugaaugauuuuucuccuuuugcuuguua

SEQ ID NO: 305069 - RNA, 32 nt, Homo Sapiens
cuggugccucaaagcagcugcuaacauggcag

SEQ ID NO: 305070 - RNA, 32 nt, Homo Sapiens
ccccagcccgaacccccggcccaggguccugg

SEQ ID NO: 305071 - RNA, 32 nt, Homo Sapiens
uuugggguaagacuuuuuuaugaguacuuuuu

SEQ ID NO: 305072 - RNA, 31 nt, Homo Sapiens
cgaaggcagcgcagccggugucccagggacc

SEQ ID NO: 305073 - RNA, 32 nt, Homo Sapiens
uaaaaugcauucaaaauaauuaaagugcaugu

SEQ ID NO: 305074 - RNA, 32 nt, Homo Sapiens
guacugccccucagcagggaugacucagcacc

SEQ ID NO: 305075 - RNA, 32 nt, Homo Sapiens
auuuuccucugauaguuucuggucacuguugc

SEQ ID NO: 305076 - RNA, 32 nt, Homo Sapiens
gaggguuagaaagcgggguguauuuuagauuu

SEQ ID NO: 305077 - RNA, 32 nt, Homo Sapiens
cuaucuaugaacaacaguaguuucucaggguc

SEQ ID NO: 305078 - RNA, 32 nt, Homo Sapiens
gacaccgaggccggcgugcaggcgugcgggug

SEQ ID NO: 305079 - RNA, 32 nt, Homo Sapiens
aggcaggggcuucccgggcugcugcugucccg

SEQ ID NO: 305080 - RNA, 32 nt, Homo Sapiens
cccugauguuuaggaaaaucacaggaggguaa

SEQ ID NO: 305081 - RNA, 32 nt, Homo Sapiens
cuagguuuucuuucugcucuuuauugaagaca

SEQ ID NO: 305082 - RNA, 32 nt, Homo Sapiens
aaucgggaacucuggucuggguacagaaaucg

SEQ ID NO: 305083 - RNA, 32 nt, Homo Sapiens
ccuaacuuggggaaacaaaagccuucucuaga

SEQ ID NO: 305084 - RNA, 32 nt, Homo Sapiens
cucccacucccaucuccuuaccucuggaaccc

SEQ ID NO: 305085 - RNA, 32 nt, Homo Sapiens
ccgggugagcgcggggcugcugggugacccgg

SEQ ID NO: 305086 - RNA, 32 nt, Homo Sapiens
gcagagguugugguaggaaccacaaggccaga

SEQ ID NO: 305087 - RNA, 32 nt, Homo Sapiens
uugccuguggagugugccucuugaauguggac

SEQ ID NO: 305088 - RNA, 32 nt, Homo Sapiens
gcguaccugcggugaggaagcugggcgcuguu

SEQ ID NO: 305089 - RNA, 32 nt, Homo Sapiens
uguacuuugugccauuucugggcucacguguc

SEQ ID NO: 305090 - RNA, 32 nt, Homo Sapiens
uuuuuguacuuuggaacgacaaaaugaaacag

SEQ ID NO: 305091 - RNA, 32 nt, Homo Sapiens
uagaauguaguaggaacaauguauaagucuua

SEQ ID NO: 305092 - RNA, 32 nt, Homo Sapiens
uuuucaaagguacuuggauaauaaugaaauaa

SEQ ID NO: 305093 - RNA, 32 nt, Homo Sapiens
uucaaguauuuuucuauaaucacuuuccccuu

SEQ ID NO: 305094 - RNA, 32 nt, Homo Sapiens
guggccuccuucacagccuccuccucagagaa

SEQ ID NO: 305095 - RNA, 32 nt, Homo Sapiens
aaccacauuuuucuacauacagcuggggaggu

SEQ ID NO: 305096 - RNA, 32 nt, Homo Sapiens
agccuccucuccugggguccagcuugucgccu

SEQ ID NO: 305097 - RNA, 32 nt, Homo Sapiens
ucaggcuggcagaggggcuggugcccuggaga

SEQ ID NO: 305098 - RNA, 32 nt, Homo Sapiens
ucacccacagaaagagagcacugaccccgaug

SEQ ID NO: 305099 - RNA, 32 nt, Homo Sapiens
caggaacaccuucgagcuuugcagaccugcgg

SEQ ID NO: 305100 - RNA, 32 nt, Homo Sapiens
ccuuuccucuucuccuuugguuccucaauuaa

SEQ ID NO: 305101 - RNA, 32 nt, Homo Sapiens
aggucaaaacaucuguacacaacuugagcaaa

SEQ ID NO: 305102 - RNA, 32 nt, Homo Sapiens
cuaggaacagagcuggauuccuugugccucau

SEQ ID NO: 305103 - RNA, 32 nt, Homo Sapiens
ggcuuguguucgcagccuugccguggcugggg

SEQ ID NO: 305104 - RNA, 32 nt, Homo Sapiens
caccggcagggcaggcagcugcgcgcggcugg

SEQ ID NO: 305105 - RNA, 32 nt, Homo Sapiens
gcaggaaaaugaacuuaucacaagagugaaaa

SEQ ID NO: 305106 - RNA, 32 nt, Homo Sapiens
ggcaaggccugcaccucacuggagcggaaugg

SEQ ID NO: 305107 - RNA, 32 nt, Homo Sapiens
cgccguccgccagcuccgugcuccccgcgcca

SEQ ID NO: 305108 - RNA, 32 nt, Homo Sapiens
ugcagcccacagcaaccguucccucuucagca

SEQ ID NO: 305109 - RNA, 32 nt, Homo Sapiens
gcaguggggaguaucaggcuggccgagaguca

SEQ ID NO: 305110 - RNA, 32 nt, Homo Sapiens
accgcaggcaggucacccaggcagccuccucu

SEQ ID NO: 305111 - RNA, 32 nt, Homo Sapiens
cgagccgcccuccucucaccgcccccacuccc

SEQ ID NO: 305112 - RNA, 32 nt, Homo Sapiens
gcgcugagcugcuuauuuauugaaaauaaacg

SEQ ID NO: 305113 - RNA, 32 nt, Homo Sapiens
gcgagcuuccccgcaccggccaggcgccuccu

SEQ ID NO: 305114 - RNA, 32 nt, Homo Sapiens
cucaaaucaggcaagacucuagguuccacacu

SEQ ID NO: 305115 - RNA, 32 nt, Homo Sapiens
accugugcacaccacagcauagaugaaucuca

SEQ ID NO: 305116 - RNA, 32 nt, Homo Sapiens
uuguuucucauuucuuuuuucuucuucuuuaa

SEQ ID NO: 305117 - RNA, 32 nt, Homo Sapiens
ccuauagcagugcaccauguacagguguugug

SEQ ID NO: 305118 - RNA, 32 nt, Homo Sapiens
cugcugucgcugccucggccccgggcagagcc

SEQ ID NO: 305119 - RNA, 30 nt, Homo Sapiens
gaagagucugguccugccuagcucagauuu

SEQ ID NO: 305120 - RNA, 32 nt, Homo Sapiens
ugcaagagccuguuuccagccuccgucagccu

SEQ ID NO: 305121 - RNA, 32 nt, Homo Sapiens
cucccaacucccaguggcacagaugacgacuu

SEQ ID NO: 305122 - RNA, 32 nt, Homo Sapiens
gcacugugguauauuaaaaggcacaagggcau

SEQ ID NO: 305123 - RNA, 32 nt, Homo Sapiens
gaaagauuucaaauccucuggaagccaaaaug

SEQ ID NO: 305124 - RNA, 30 nt, Homo Sapiens
gugccaccacuugccauuccuagcgcgaga

SEQ ID NO: 305125 - RNA, 32 nt, Homo Sapiens
aggcaaaaggaggcgcucggcccgcggccuga

SEQ ID NO: 305126 - RNA, 32 nt, Homo Sapiens
uaaggcauuuuuaaaaauuuuacuucaugccc

SEQ ID NO: 305127 - RNA, 32 nt, Homo Sapiens
uggaagaaacgcggaaccauggccgcuguggu

SEQ ID NO: 305128 - RNA, 32 nt, Homo Sapiens
aaaugaauuucuguucugugucucucuguuuu

SEQ ID NO: 305129 - RNA, 32 nt, Homo Sapiens
auaaucacaagggccucuguaaaggaggcagg

SEQ ID NO: 305130 - RNA, 32 nt, Homo Sapiens
cagcaucccaccucacaggcgaggaagcuuaa

SEQ ID NO: 305131 - RNA, 32 nt, Homo Sapiens
gauuuaucaguuccagaaccucacagugauaa

SEQ ID NO: 305132 - RNA, 32 nt, Homo Sapiens
ugacuaaucuucaucaccacuguagauuuugc

SEQ ID NO: 305133 - RNA, 32 nt, Homo Sapiens
auauuuaaauuaaugucuuguucacauaugug

SEQ ID NO: 305134 - RNA, 32 nt, Homo Sapiens
ggucgccgggugucucccacucccccggccuc

SEQ ID NO: 305135 - RNA, 32 nt, Homo Sapiens
gccgcacgcguagcacgccgggacuagcuauc

SEQ ID NO: 305136 - RNA, 32 nt, Homo Sapiens
ugccuagaagccaauguuguuuccuguuauua

SEQ ID NO: 305137 - RNA, 32 nt, Homo Sapiens
cacccaggcccuccugucaucacaucaccggc

SEQ ID NO: 305138 - RNA, 32 nt, Homo Sapiens
aaggccuauauaauucauacauuucauauuau

SEQ ID NO: 305139 - RNA, 32 nt, Homo Sapiens
gggaaucucugugaaguccuagcugauaacua

SEQ ID NO: 305140 - RNA, 32 nt, Homo Sapiens
gagguggcggccuggugcccgguggaggauga

SEQ ID NO: 305141 - RNA, 32 nt, Homo Sapiens
caggcacagugguggcucaugccuguaauccc

SEQ ID NO: 305142 - RNA, 32 nt, Homo Sapiens
gggcauuucuguccuuuuaagcacagacuaag

SEQ ID NO: 305143 - RNA, 32 nt, Homo Sapiens
auuucaacauauaaaaauauauuagugagaca

SEQ ID NO: 305144 - RNA, 32 nt, Homo Sapiens
cacucacccagcuccgcgagcucagccgcuca

SEQ ID NO: 305145 - RNA, 32 nt, Homo Sapiens
cggcggaggaggagacggcaggucgggcauua

SEQ ID NO: 305146 - RNA, 32 nt, Homo Sapiens
gucaagucuucagauaauugcaacuucaguug

SEQ ID NO: 305147 - RNA, 32 nt, Homo Sapiens
aaagccugcugcagcuggcccuggguccuggc

SEQ ID NO: 305148 - RNA, 32 nt, Homo Sapiens
cuuacuuaaaauguacuucaacuuuuuaacaa

SEQ ID NO: 305149 - RNA, 31 nt, Homo Sapiens
guaaugaaauaaaaaucugaauguuucuaag

SEQ ID NO: 305150 - RNA, 32 nt, Homo Sapiens
aaaccacgugaauguaaugaaugugggaacgc

SEQ ID NO: 305151 - RNA, 32 nt, Homo Sapiens
uguauuuauuguuacugagacaaaacaguacu

SEQ ID NO: 305152 - RNA, 32 nt, Homo Sapiens
ccgggagaggauuaaguuugaucacuaugauc

SEQ ID NO: 305153 - RNA, 30 nt, Homo Sapiens
cccagagccagagggcugggucccgggucc

SEQ ID NO: 305154 - RNA, 30 nt, Homo Sapiens
gaggcaggcaggcaugcaugugggccucug

SEQ ID NO: 305155 - RNA, 32 nt, Homo Sapiens
cagcaggcuggguaagaagcuggguuguguac

SEQ ID NO: 305156 - RNA, 32 nt, Homo Sapiens
cuuggcucgcggaagcgcaggcgccgacugcc

SEQ ID NO: 305157 - RNA, 32 nt, Homo Sapiens
acuguuacagcuuugaagggucaagggaggau

SEQ ID NO: 305158 - RNA, 32 nt, Homo Sapiens
cuguacuggaggcucuguucugccucuuauca

SEQ ID NO: 305159 - RNA, 32 nt, Homo Sapiens
uacuguuaaugauuuuaauauauauggcuuau

SEQ ID NO: 305160 - RNA, 32 nt, Homo Sapiens
gggccacccgcacccccgcuccccgccugacg

SEQ ID NO: 305161 - RNA, 32 nt, Homo Sapiens
ggccugugacccuccacaccagcccucagaac

SEQ ID NO: 305162 - RNA, 32 nt, Homo Sapiens
uuuuauuuacccuaaccugucaauuucauagu

SEQ ID NO: 305163 - RNA, 32 nt, Homo Sapiens
ccagcuaauguuuuauuuuuuguagagacgag

SEQ ID NO: 305164 - RNA, 32 nt, Homo Sapiens
aauuacuugacaagauuaaaaguaaaacaauu

SEQ ID NO: 305165 - RNA, 32 nt, Homo Sapiens
cuaaaaaagauguagaugaauaugaaagacgu

SEQ ID NO: 305166 - RNA, 32 nt, Homo Sapiens
uggaagaaagaauguacuaauuuuauaagcuc

SEQ ID NO: 305167 - RNA, 32 nt, Homo Sapiens
uaacaagcaucuauuucuuuauucuucugggc

SEQ ID NO: 305168 - RNA, 32 nt, Homo Sapiens
gggucaggagacggggcugacggcacgggugg

SEQ ID NO: 305169 - RNA, 32 nt, Homo Sapiens
agaggcugcccccuguucgcacgucuaggaag

SEQ ID NO: 305170 - RNA, 32 nt, Homo Sapiens
cugccuuguugugucucaugguaaauaaaaaa

SEQ ID NO: 305171 - RNA, 32 nt, Homo Sapiens
aaacugcaggacuuaagaagcuuuucuccgaa

SEQ ID NO: 305172 - RNA, 32 nt, Homo Sapiens
gaaaauaaaaacagugggguaaaauuagccau

SEQ ID NO: 305173 - RNA, 27 nt, Homo Sapiens
aguguguuccagcucagccccccaagc

SEQ ID NO: 305174 - RNA, 32 nt, Homo Sapiens
uauauauaaacacaaauaauuagugacagauu

SEQ ID NO: 305175 - RNA, 27 nt, Homo Sapiens
gaaugugggaauggaaaauaugcaaca

SEQ ID NO: 305176 - RNA, 32 nt, Homo Sapiens
ggcugggugcgguggcucaugccugugauccc

SEQ ID NO: 305177 - RNA, 32 nt, Homo Sapiens
auauuuuucauuuucccacugccguguuccug

SEQ ID NO: 305178 - RNA, 32 nt, Homo Sapiens
aggugucaugcgccggaaccugcgcuuggggc

SEQ ID NO: 305179 - RNA, 32 nt, Homo Sapiens
ugaggggagggcccgugauaaguuucugagca

SEQ ID NO: 305180 - RNA, 32 nt, Homo Sapiens
cuggacuuuuaaaaauauuuguuuccuauacc

SEQ ID NO: 305181 - RNA, 32 nt, Homo Sapiens
uugggagaguuggagagaagggggacguuucu

SEQ ID NO: 305182 - RNA, 32 nt, Homo Sapiens
uuugcuaaacaaaagaggcuaugaaagaacua

SEQ ID NO: 305183 - RNA, 32 nt, Homo Sapiens
acuucacugacaucauucuucccuagcaguca

SEQ ID NO: 305184 - RNA, 32 nt, Homo Sapiens
guagcugaagccgaaguaugaacaguccauuu

SEQ ID NO: 305185 - RNA, 32 nt, Homo Sapiens
gagcccugcccccagcccccagcaagccugag

SEQ ID NO: 305186 - RNA, 32 nt, Homo Sapiens
cuugaagaugaccucuagggaccagcccagac

SEQ ID NO: 305187 - RNA, 32 nt, Homo Sapiens
cacuccccgcccccggccucugguacccacca

SEQ ID NO: 305188 - RNA, 32 nt, Homo Sapiens
acuaugucaccucuccucucaucuggggucag

SEQ ID NO: 305189 - RNA, 32 nt, Homo Sapiens
gagaucugcaggcugccucuucugccccggag

SEQ ID NO: 305190 - RNA, 32 nt, Homo Sapiens
cuucaugcaauaaacugaaaagagccaugcug

SEQ ID NO: 305191 - RNA, 32 nt, Homo Sapiens
auggguuccgguuuccuugcaccuugugcagu

SEQ ID NO: 305192 - RNA, 32 nt, Homo Sapiens
cuuacauuccucuccuucucagcggugugaug

SEQ ID NO: 305193 - RNA, 32 nt, Homo Sapiens
uggagcaguuccucacuauccugccccgcgag

SEQ ID NO: 305194 - RNA, 32 nt, Homo Sapiens
gacagaggacaaaggagaagggagggucuaga

SEQ ID NO: 305195 - RNA, 32 nt, Homo Sapiens
acaucauauucacaccaaaaauguagaacaua

SEQ ID NO: 305196 - RNA, 32 nt, Homo Sapiens
ggccucuuucuuuugcagaaaugugaguuccu

SEQ ID NO: 305197 - RNA, 32 nt, Homo Sapiens
uauugcuucuauucuuggaaaaauagaagugu

SEQ ID NO: 305198 - RNA, 32 nt, Homo Sapiens
auggaaggcagggcuguggcucagaggacgcg

SEQ ID NO: 305199 - RNA, 32 nt, Homo Sapiens
aaggccccgagcucagggcagcugugcugggu

SEQ ID NO: 305200 - RNA, 28 nt, Homo Sapiens
cugggucuuaagaaacauuuggaaauau

SEQ ID NO: 305201 - RNA, 32 nt, Homo Sapiens
ucggggugggggcauggaauccgcggaaccug

SEQ ID NO: 305202 - RNA, 32 nt, Homo Sapiens
uggcuacaaacuuuguuacugaagaagacaag

SEQ ID NO: 305203 - RNA, 32 nt, Homo Sapiens
ugagccucaguuccuuaucuguaaaacagcaa

SEQ ID NO: 305204 - RNA, 32 nt, Homo Sapiens
auucagaacauaaaagcacuagguguacaagu

SEQ ID NO: 305205 - RNA, 32 nt, Homo Sapiens
uauaauguuacugguuuuaucuacuuguuuau

SEQ ID NO: 305206 - RNA, 32 nt, Homo Sapiens
cccgcccagucgccgcgcugcacgcccggggu

SEQ ID NO: 305207 - RNA, 32 nt, Homo Sapiens
uaaugacuccacuggcugagcuucugguaggu

SEQ ID NO: 305208 - RNA, 32 nt, Homo Sapiens
ggccaaagcugauguucaggccccacccacuc

SEQ ID NO: 305209 - RNA, 32 nt, Homo Sapiens
ucuucaccuaugugcagucgcucuacaaccac

SEQ ID NO: 305210 - RNA, 29 nt, Homo Sapiens
auuguauacuauauuaaaugugaauuugu

SEQ ID NO: 305211 - RNA, 32 nt, Homo Sapiens
cuacaugugucaggguuuuucuccaggugcuu

SEQ ID NO: 305212 - RNA, 32 nt, Homo Sapiens
uauuuccuauuauaauuacaucucauuguccu

SEQ ID NO: 305213 - RNA, 31 nt, Homo Sapiens
cauacucauuugauccuuauaaucaaccuug

SEQ ID NO: 305214 - RNA, 31 nt, Homo Sapiens
uaccuacaagaggcauuuucugaaagguggc

SEQ ID NO: 305215 - RNA, 31 nt, Homo Sapiens
gucuuccugcacugcccaccccuggcugguc

SEQ ID NO: 305216 - RNA, 32 nt, Homo Sapiens
ccaugcaaacaaagcgccagggaaaugaccca

SEQ ID NO: 305217 - RNA, 32 nt, Homo Sapiens
uaguguucuguuugaaacuaauacuuaccgag

SEQ ID NO: 305218 - RNA, 32 nt, Homo Sapiens
ugcuuuagauugaagacucaucugaaguauca

SEQ ID NO: 305219 - RNA, 32 nt, Homo Sapiens
cuaguuuuuaucaccauacuuuaucuaauuau

SEQ ID NO: 305220 - RNA, 32 nt, Homo Sapiens
aaauaggauaaugcucagcuuggcaguggacu

SEQ ID NO: 305221 - RNA, 32 nt, Homo Sapiens
ucccucuugccagcucugugagucuggccagg

SEQ ID NO: 305222 - RNA, 28 nt, Homo Sapiens
cagcuggggcggccgcggcgcuuccgau

SEQ ID NO: 305223 - RNA, 32 nt, Homo Sapiens
agacgcagagacggcccggccgggcgcccucg

SEQ ID NO: 305224 - RNA, 32 nt, Homo Sapiens
cgccugggccccagggccccuuugccggcggg

SEQ ID NO: 305225 - RNA, 32 nt, Homo Sapiens
ccucggagcccacuucccauccucccuccagc

SEQ ID NO: 305226 - RNA, 32 nt, Homo Sapiens
acacuuguauauugaaaagauagggaagagag

SEQ ID NO: 305227 - RNA, 32 nt, Homo Sapiens
ugcagauuuccaugagggcaucuugcaucugc

SEQ ID NO: 305228 - RNA, 32 nt, Homo Sapiens
uuuggauaccaaugcauaggacuccauaguaa

SEQ ID NO: 305229 - RNA, 28 nt, Homo Sapiens
agggaaguuacagggaagcagguuucau

SEQ ID NO: 305230 - RNA, 32 nt, Homo Sapiens
caaccuauaccgcugcggcgaccaaccccgcc

SEQ ID NO: 305231 - RNA, 28 nt, Homo Sapiens
auaaauauuuaguaugacaugacacuua

SEQ ID NO: 305232 - RNA, 32 nt, Homo Sapiens
aggcacaagggggugagggaaagggaaggcuu

SEQ ID NO: 305233 - RNA, 32 nt, Homo Sapiens
auucuaaagagaaaauauuuuaaaagauauug

SEQ ID NO: 305234 - RNA, 32 nt, Homo Sapiens
gcuucuggcaguugggggaggggggcuccugg

SEQ ID NO: 305235 - RNA, 32 nt, Homo Sapiens
cagggccugagcugccggagcggcgccuguga

SEQ ID NO: 305236 - RNA, 32 nt, Homo Sapiens
cuacuccagugcagaugaccaaaccuguccug

SEQ ID NO: 305237 - RNA, 32 nt, Homo Sapiens
cauuucuguaguuaacagaacacuguaaugug

SEQ ID NO: 305238 - RNA, 32 nt, Homo Sapiens
uuuuucuuaaagcaaagucacuucuccaucac

SEQ ID NO: 305239 - RNA, 32 nt, Homo Sapiens
aaacaaagggaagaagagaaccuucugugacu

SEQ ID NO: 305240 - RNA, 32 nt, Homo Sapiens
caacaccccucccacacucccccagacugcuc

SEQ ID NO: 305241 - RNA, 32 nt, Homo Sapiens
aauugaaggugugacaagaugguguucugcua

SEQ ID NO: 305242 - RNA, 32 nt, Homo Sapiens
auuuggccauugauauucaacaggucacugac

SEQ ID NO: 305243 - RNA, 32 nt, Homo Sapiens
cuacaaggccuccuuuuugcaccuguagacua

SEQ ID NO: 305244 - RNA, 32 nt, Homo Sapiens
gagguuuaggccucuggaugacugcgggcggg

SEQ ID NO: 305245 - RNA, 32 nt, Homo Sapiens
cauuugacucccucuguauguacugugcccuc

SEQ ID NO: 305246 - RNA, 32 nt, Homo Sapiens
cuaccuguuuguauccagcaguguuccucauc

SEQ ID NO: 305247 - RNA, 32 nt, Homo Sapiens
ucuucgcccggucccugccgcgcacaggccuc

SEQ ID NO: 305248 - RNA, 32 nt, Homo Sapiens
agaagcaaggcacaagucauaccuacauucaa

SEQ ID NO: 305249 - RNA, 32 nt, Homo Sapiens
ccugaccucaggugcccaccugccucagccuu

SEQ ID NO: 305250 - RNA, 32 nt, Homo Sapiens
ggcguccgagggugggagucgggguguggcag

SEQ ID NO: 305251 - RNA, 32 nt, Homo Sapiens
gccacugugagcucagcacagaguaggaagaa

SEQ ID NO: 305252 - RNA, 32 nt, Homo Sapiens
ucgcaggcgccucggcgcggcacucacguaga

SEQ ID NO: 305253 - RNA, 32 nt, Homo Sapiens
gaucaagucauacuccacagccugccuggcaa

SEQ ID NO: 305254 - RNA, 32 nt, Homo Sapiens
ccucaauuuugguuuuucucauuugaaauguu

SEQ ID NO: 305255 - RNA, 32 nt, Homo Sapiens
cucccgcgcgccccgcacccgaccggcucagc

SEQ ID NO: 305256 - RNA, 32 nt, Homo Sapiens
uugagauuguaaauaucaaaggaguuagauug

SEQ ID NO: 305257 - RNA, 32 nt, Homo Sapiens
cauuuacacggggacaugaguacauccaucug

SEQ ID NO: 305258 - RNA, 32 nt, Homo Sapiens
cauuuauggacaauuuuuuggacuaguagccu

SEQ ID NO: 305259 - RNA, 32 nt, Homo Sapiens
acagcuuguaaauuuuacuaacuuguuucuuu

SEQ ID NO: 305260 - RNA, 32 nt, Homo Sapiens
agcugcgggcgcgccagggcgcugacagucug

SEQ ID NO: 305261 - RNA, 32 nt, Homo Sapiens
acaaggucaggagaucaagacuguccuggaca

SEQ ID NO: 305262 - RNA, 32 nt, Homo Sapiens
uucauggauaauuuuuaacuucauuauuucug

SEQ ID NO: 305263 - RNA, 32 nt, Homo Sapiens
aucgugcggcccgacgcuaucucgcgcucgug

SEQ ID NO: 305264 - RNA, 32 nt, Homo Sapiens
cagcacggccaggaguagauggagcggggugg

SEQ ID NO: 305265 - RNA, 32 nt, Homo Sapiens
ggagucugaugcuuuugcaguacucugaucgc

SEQ ID NO: 305266 - RNA, 32 nt, Homo Sapiens
ggacccgcaccucggcgggcgccacacacucg

SEQ ID NO: 305267 - RNA, 32 nt, Homo Sapiens
aauuauuaaaaugaugguacuccaugaauuuu

SEQ ID NO: 305268 - RNA, 32 nt, Homo Sapiens
cccugcuccuccugcagccccuccucaccugg

SEQ ID NO: 305269 - RNA, 32 nt, Homo Sapiens
caucucuacaaaacuuuuuuuuuuaaacuuac

SEQ ID NO: 305270 - RNA, 32 nt, Homo Sapiens
guagggggagccugggucuuggagggcuuugu

SEQ ID NO: 305271 - RNA, 32 nt, Homo Sapiens
aauaacuaacugugugcuuuuggaaucagacu

SEQ ID NO: 305272 - RNA, 32 nt, Homo Sapiens
agaauaaucagauuuucuaaccaaaucuaaau

SEQ ID NO: 305273 - RNA, 32 nt, Homo Sapiens
gaggcccacgcuuggguccccggagcucccgg

SEQ ID NO: 305274 - RNA, 32 nt, Homo Sapiens
aaggaggaggauuuuucacuuacucauaucga

SEQ ID NO: 305275 - RNA, 32 nt, Homo Sapiens
cucugggcgcgugcgcgggcggucgcuaccug

SEQ ID NO: 305276 - RNA, 32 nt, Homo Sapiens
uagugaaugcagaaaauaaaaauacacaggua

SEQ ID NO: 305277 - RNA, 32 nt, Homo Sapiens
aaugaaugaggaugccuugaauguguggccaa

SEQ ID NO: 305278 - RNA, 32 nt, Homo Sapiens
ccgggcgcguaggggccaugccgcccgggacc

SEQ ID NO: 305279 - RNA, 32 nt, Homo Sapiens
ugaaucuggauauauaggauccacaccuauag

SEQ ID NO: 305280 - RNA, 32 nt, Homo Sapiens
ugucuccuggcagccagcuccucccuugcuga

SEQ ID NO: 305281 - RNA, 32 nt, Homo Sapiens
guggagcucugagaauacaacaagugcucaau

SEQ ID NO: 305282 - RNA, 32 nt, Homo Sapiens
aggauuuugggguucaccagaugcuuccuggc

SEQ ID NO: 305283 - RNA, 26 nt, Homo Sapiens
caugcgcucccuccugcuucucagcg

SEQ ID NO: 305284 - RNA, 32 nt, Homo Sapiens
cggucuucaaaagagaacugugccaaaaaccu

SEQ ID NO: 305285 - RNA, 32 nt, Homo Sapiens
ccaucggccccggcacccugcuccaucggcac

SEQ ID NO: 305286 - RNA, 32 nt, Homo Sapiens
uccuucccaggguccacgggcggcaaugcugc

SEQ ID NO: 305287 - RNA, 32 nt, Homo Sapiens
uuucaguauugcuaaacagggauugaagaaaa

SEQ ID NO: 305288 - RNA, 32 nt, Homo Sapiens
guguccuuuugcguugguaccagcggcgacau

SEQ ID NO: 305289 - RNA, 32 nt, Homo Sapiens
auuccuucugccacccaaacccugaugagacc

SEQ ID NO: 305290 - RNA, 32 nt, Homo Sapiens
auuuuuaaauuaaagaaauaucauuauggaac

SEQ ID NO: 305291 - RNA, 32 nt, Homo Sapiens
uuuaagaaacucaaaaacuggugcuggaagau

SEQ ID NO: 305292 - RNA, 32 nt, Homo Sapiens
caaaauggguguaucugguuugaaaugaaacc

SEQ ID NO: 305293 - RNA, 32 nt, Homo Sapiens
gccccaggagcucaggugggcagagcuuaaag

SEQ ID NO: 305294 - RNA, 32 nt, Homo Sapiens
cuguauccagcaugcuccaaggccacagcucu

SEQ ID NO: 305295 - RNA, 32 nt, Homo Sapiens
auacagaaagcuauugcacuguucaggagaug

SEQ ID NO: 305296 - RNA, 32 nt, Homo Sapiens
uguaauacugaauauaaacauagagcuagagu

SEQ ID NO: 305297 - RNA, 32 nt, Homo Sapiens
cccugccgucuccucauccugcacccccuaaa

SEQ ID NO: 305298 - RNA, 32 nt, Homo Sapiens
cuccacaaccucaggccguagugaggaaucaa

SEQ ID NO: 305299 - RNA, 32 nt, Homo Sapiens
caggcggagcgcggcggcucucggccgucguc

SEQ ID NO: 305300 - RNA, 32 nt, Homo Sapiens
ccuaggcagggcccagcccugcuuccuggagu

SEQ ID NO: 305301 - RNA, 32 nt, Homo Sapiens
uugcaagcagaaaaccacagagacaggugccc

SEQ ID NO: 305302 - RNA, 32 nt, Homo Sapiens
ggggccaucgucuuuguuuucuuuuuugucuu

SEQ ID NO: 305303 - RNA, 32 nt, Homo Sapiens
uuauguaaaugaauuauauaugcugaauauua

SEQ ID NO: 305304 - RNA, 32 nt, Homo Sapiens
gaugcaaaugcuauucuuauuaaaagauaaau

SEQ ID NO: 305305 - RNA, 32 nt, Homo Sapiens
uagcaguauuacagucaguauuucauauaauu

SEQ ID NO: 305306 - RNA, 32 nt, Homo Sapiens
uauuuuuuuaauauuucuauugcaaaagucua

SEQ ID NO: 305307 - RNA, 28 nt, Homo Sapiens
gguggggccuaggcgaugauccggcauu

SEQ ID NO: 305308 - RNA, 32 nt, Homo Sapiens
uauaagacauuuaagaggcccuuuuucauaua

SEQ ID NO: 305309 - RNA, 32 nt, Homo Sapiens
auugggguaaaucuuuuuuuuauuauuuuuau

SEQ ID NO: 305310 - RNA, 32 nt, Homo Sapiens
aaaugugaaaaguuuuauucaaaauaucaaac

SEQ ID NO: 305311 - RNA, 29 nt, Homo Sapiens
caugacauagugagggaaagaaaaagcuu

SEQ ID NO: 305312 - RNA, 32 nt, Homo Sapiens
uuuggugagccuggggaaucagcaaaagggga

SEQ ID NO: 305313 - RNA, 32 nt, Homo Sapiens
uuuuaaucgggcagucgcgcggauggccuuuu

SEQ ID NO: 305314 - RNA, 32 nt, Homo Sapiens
acauuuuuguuacuucuaaaaaguauauucaa

SEQ ID NO: 305315 - RNA, 32 nt, Homo Sapiens
auuguaaguaaugcgcaacacuggccuggcuu

SEQ ID NO: 305316 - RNA, 32 nt, Homo Sapiens
uuugggggucccugccuuagccccacacaagg

SEQ ID NO: 305317 - RNA, 32 nt, Homo Sapiens
ccugcgucaccaccuccgggggcccccagacc

SEQ ID NO: 305318 - RNA, 32 nt, Homo Sapiens
cucaucccagauguugguuaucuuucugaagu

SEQ ID NO: 305319 - RNA, 32 nt, Homo Sapiens
aucaggccugaagcugagggcauaacugacca

SEQ ID NO: 305320 - RNA, 32 nt, Homo Sapiens
agcuccccgauggccugggugagggcaggcug

SEQ ID NO: 305321 - RNA, 32 nt, Homo Sapiens
ccuuuagaucucuuucaagcacauuccauuuu

SEQ ID NO: 305322 - RNA, 32 nt, Homo Sapiens
gcggcucuagggacccccggcgccuacacuua

SEQ ID NO: 305323 - RNA, 32 nt, Homo Sapiens
auaagacauuuuaauuuuguuauaauguacaa

SEQ ID NO: 305324 - RNA, 32 nt, Homo Sapiens
uaaauguguccacaggaaaugaccccacaucc

SEQ ID NO: 305325 - RNA, 32 nt, Homo Sapiens
aaaaaaaaguuggcuuuuuuuuuuuuuaacau

SEQ ID NO: 305326 - RNA, 32 nt, Homo Sapiens
uguaagacugguuacauuccaaucuuugugca

SEQ ID NO: 305327 - RNA, 32 nt, Homo Sapiens
uuuguguaggugucagggaaccccaaacuggu

SEQ ID NO: 305328 - RNA, 32 nt, Homo Sapiens
aggaguucaaagcugcagugagucaugauagc

SEQ ID NO: 305329 - RNA, 32 nt, Homo Sapiens
ugaggugguggcggcgcugccggccccggccg

SEQ ID NO: 305330 - RNA, 32 nt, Homo Sapiens
gagaggcggagcaagagacgcuggagggcgug

SEQ ID NO: 305331 - RNA, 32 nt, Homo Sapiens
cgucccggccagcggagacgcggccgcccugg

SEQ ID NO: 305332 - RNA, 32 nt, Homo Sapiens
aaaaaggagacucgagcagauauuaagcaagc

SEQ ID NO: 305333 - RNA, 32 nt, Homo Sapiens
cucuagggccccagcgcagcucgggagcccgc

SEQ ID NO: 305334 - RNA, 32 nt, Homo Sapiens
gagccagugugaccacacguggcacugacguc

SEQ ID NO: 305335 - RNA, 32 nt, Homo Sapiens
ggcugauuugacucucuuucuuuagacauauu

SEQ ID NO: 305336 - RNA, 32 nt, Homo Sapiens
auuuauuugucaauguuauuauuuaaugagcu

SEQ ID NO: 305337 - RNA, 32 nt, Homo Sapiens
ggcaccuccuuccccgccucugggggcugcuc

SEQ ID NO: 305338 - RNA, 32 nt, Homo Sapiens
gcagucaccaaaaaauuuauauauuuugcuca

SEQ ID NO: 305339 - RNA, 32 nt, Homo Sapiens
ucucgaggccuggccagcccuguggcuccuua

SEQ ID NO: 305340 - RNA, 32 nt, Homo Sapiens
gccacgcccucccucucccaggcccgagaugu

SEQ ID NO: 305341 - RNA, 32 nt, Homo Sapiens
gugggcccggagaccccggcccgaggcgccca

SEQ ID NO: 305342 - RNA, 30 nt, Homo Sapiens
aaauggggccccgugcccggcguguggccu

SEQ ID NO: 305343 - RNA, 32 nt, Homo Sapiens
uuuauaaaagaugcauuaucuaugauaugcua

SEQ ID NO: 305344 - RNA, 32 nt, Homo Sapiens
ggcuggucuggaacgccugaccucaagugauc

SEQ ID NO: 305345 - RNA, 32 nt, Homo Sapiens
uuaaaaaccuguaucugacccacuuuguaauu

SEQ ID NO: 305346 - RNA, 32 nt, Homo Sapiens
gacuagaaagagaagggggugauauguuacac

SEQ ID NO: 305347 - RNA, 32 nt, Homo Sapiens
agggcaauauuuuugcuuuuugaaaugcucuu

SEQ ID NO: 305348 - RNA, 32 nt, Homo Sapiens
caggagaguugccgaccaccucgggggugcuu

SEQ ID NO: 305349 - RNA, 32 nt, Homo Sapiens
ggugugagcgcagacugcaggacugccccuca

SEQ ID NO: 305350 - RNA, 32 nt, Homo Sapiens
gcucugcccuccccgguuuccgacaggaccca

SEQ ID NO: 305351 - RNA, 32 nt, Homo Sapiens
uccaccugcagacagcgagagccccaggaagg

SEQ ID NO: 305352 - RNA, 32 nt, Homo Sapiens
ucccagcuacuuggaagcugaggugggaggau

SEQ ID NO: 305353 - RNA, 32 nt, Homo Sapiens
auuauaauauacaaaaucauauauauauauau

SEQ ID NO: 305354 - RNA, 32 nt, Homo Sapiens
ucgcagcuccagccgccuccuccgcgcagccg

SEQ ID NO: 305355 - RNA, 32 nt, Homo Sapiens
gccgcggcucugcugggagacccggcgcuggc

SEQ ID NO: 305356 - RNA, 32 nt, Homo Sapiens
uucucaucuugcaccuguguugccuggugucu

SEQ ID NO: 305357 - RNA, 32 nt, Homo Sapiens
cugccggccagagccucccggcguuucuuccg

SEQ ID NO: 305358 - RNA, 32 nt, Homo Sapiens
ucaccaauagggauaauguuucuccaacugga

SEQ ID NO: 305359 - RNA, 32 nt, Homo Sapiens
accugcgcgcacaguggaccggcgcccuagcc

SEQ ID NO: 305360 - RNA, 32 nt, Homo Sapiens
aguaaaggggcaaggagaagacggccugcaac

SEQ ID NO: 305361 - RNA, 32 nt, Homo Sapiens
uccccacccgcaccugcaguccccucaugugc

SEQ ID NO: 305362 - RNA, 32 nt, Homo Sapiens
agcggcggcgcugccugcagccugcagccugc

SEQ ID NO: 305363 - RNA, 32 nt, Homo Sapiens
ccgagcucuccuuguuaccguguucugucugu

SEQ ID NO: 305364 - RNA, 32 nt, Homo Sapiens
caggacaggaccaguuuaccucuuuccagaua

SEQ ID NO: 305365 - RNA, 32 nt, Homo Sapiens
cccucagccaagggacagugccauccuugggg

SEQ ID NO: 305366 - RNA, 32 nt, Homo Sapiens
aaaccaaacaauuuucuaugaugauuuuucag

SEQ ID NO: 305367 - RNA, 32 nt, Homo Sapiens
auuggguauacuuauacucuauagggucguug

SEQ ID NO: 305368 - RNA, 32 nt, Homo Sapiens
uaccuuuggggaaaauuuguauguaaauguac

SEQ ID NO: 305369 - RNA, 32 nt, Homo Sapiens
uugcaccuggaguucugcugguuaaguuuguu

SEQ ID NO: 305370 - RNA, 32 nt, Homo Sapiens
cccucugcguccucggcucgggggccggcacc

SEQ ID NO: 305371 - RNA, 32 nt, Homo Sapiens
uggaccagggcgugggucucugggguuggggu

SEQ ID NO: 305372 - RNA, 27 nt, Homo Sapiens
aagaggcccuucuuccucacccaagau

SEQ ID NO: 305373 - RNA, 32 nt, Homo Sapiens
guggggcuuucugcagaaugacacagccucag

SEQ ID NO: 305374 - RNA, 32 nt, Homo Sapiens
aauuggcucaggucucggcucugccaucuacc

SEQ ID NO: 305375 - RNA, 32 nt, Homo Sapiens
caaugugaaaauacaucucaaugucauuccuu

SEQ ID NO: 305376 - RNA, 32 nt, Homo Sapiens
agggggccugcaggagggaggacccccaagcc

SEQ ID NO: 305377 - RNA, 32 nt, Homo Sapiens
uucugucuuuugcuagcuucaccaguuucugu

SEQ ID NO: 305378 - RNA, 30 nt, Homo Sapiens
cgaacuggggaaagacggauugagauuaac

SEQ ID NO: 305379 - RNA, 32 nt, Homo Sapiens
acugccauuucccauuccccucccuuccugga

SEQ ID NO: 305380 - RNA, 32 nt, Homo Sapiens
uaaccacuaugaaugauagucuugucucacca

SEQ ID NO: 305381 - RNA, 32 nt, Homo Sapiens
gugguacaagcacaguucacuguacccuguuc

SEQ ID NO: 305382 - RNA, 32 nt, Homo Sapiens
ggcacaugcacagacccaguccccucacggua

SEQ ID NO: 305383 - RNA, 32 nt, Homo Sapiens
aacugauacaacucagaaacugcucaauguca

SEQ ID NO: 305384 - RNA, 32 nt, Homo Sapiens
gggcgucuucggcucccaccccggggcguggg

SEQ ID NO: 305385 - RNA, 32 nt, Homo Sapiens
ucuugccuuccucuccucccugaucauccuau

SEQ ID NO: 305386 - RNA, 32 nt, Homo Sapiens
uaggugcauauguauacauacacacacauaua

SEQ ID NO: 305387 - RNA, 32 nt, Homo Sapiens
gcauucccaagcaagaggccgacacuaaggac

SEQ ID NO: 305388 - RNA, 32 nt, Homo Sapiens
auuguauccaaaugaaaugacacugaucacug

SEQ ID NO: 305389 - RNA, 32 nt, Homo Sapiens
ggaggggcacgcuggaacagccuagucuccuc

SEQ ID NO: 305390 - RNA, 32 nt, Homo Sapiens
ugaaagaagauaaaugguucauccagagcuuu

SEQ ID NO: 305391 - RNA, 32 nt, Homo Sapiens
cauccugcuuuagccugagacuugccauaaga

SEQ ID NO: 305392 - RNA, 32 nt, Homo Sapiens
cauccaaauuccaggaagcucuuaggggucau

SEQ ID NO: 305393 - RNA, 32 nt, Homo Sapiens
uuuggacaaaaguuuaaaguauuuaguccucc

SEQ ID NO: 305394 - RNA, 32 nt, Homo Sapiens
cccgggcccuccccgcacacugaccuauaccu

SEQ ID NO: 305395 - RNA, 32 nt, Homo Sapiens
caccaacagucuuucugcaaagggcaggagag

SEQ ID NO: 305396 - RNA, 32 nt, Homo Sapiens
gccgcugacauguugaggacuacgcgcggccc

SEQ ID NO: 305397 - RNA, 32 nt, Homo Sapiens
agguggaccaaagggaugcacaggcggcucgc

SEQ ID NO: 305398 - RNA, 32 nt, Homo Sapiens
accagagucugcuuccacgcugugggagcuuu

SEQ ID NO: 305399 - RNA, 32 nt, Homo Sapiens
cugagggcugagaaugaggcaguuggaaucua

SEQ ID NO: 305400 - RNA, 32 nt, Homo Sapiens
ccucagccacccaaaguguugggauuacaggc

SEQ ID NO: 305401 - RNA, 32 nt, Homo Sapiens
uuugcccgccucugcgggcugcgggaggcggg

SEQ ID NO: 305402 - RNA, 29 nt, Homo Sapiens
aauguugcaauaaaagaauauguuguaag

SEQ ID NO: 305403 - RNA, 32 nt, Homo Sapiens
gauuccugacuggucaagaaccagaggcaaaa

SEQ ID NO: 305404 - RNA, 32 nt, Homo Sapiens
ggcagcggggccuggaggaggagcugcggagg

SEQ ID NO: 305405 - RNA, 32 nt, Homo Sapiens
ugcuaucccuccccccuccccccaccccacaa

SEQ ID NO: 305406 - RNA, 32 nt, Homo Sapiens
uguagcaguuuucagccuccucuacccuacau

SEQ ID NO: 305407 - RNA, 32 nt, Homo Sapiens
acaugguguuuuuauaaagaauucugugagaa

SEQ ID NO: 305408 - RNA, 32 nt, Homo Sapiens
aaggaaugauuucaaagagagguguguacagc

SEQ ID NO: 305409 - RNA, 32 nt, Homo Sapiens
uuccccacucccuccacuggccucugcuguuc

SEQ ID NO: 305410 - RNA, 32 nt, Homo Sapiens
ugacauguuuauuuggcaaauuuuauaaugaa

SEQ ID NO: 305411 - RNA, 32 nt, Homo Sapiens
gccugugccccagcucuccccgagggcucugu

SEQ ID NO: 305412 - RNA, 32 nt, Homo Sapiens
ccuuauccagcauuauuugaaaacacugcugu

SEQ ID NO: 305413 - RNA, 32 nt, Homo Sapiens
cagccgcgccccagccagcccugcggcaggaa

SEQ ID NO: 305414 - RNA, 32 nt, Homo Sapiens
aucagaaugaacugucaagggaggugcuggag

SEQ ID NO: 305415 - RNA, 32 nt, Homo Sapiens
cauuccugaaucucaagugcuuuugcuugaag

SEQ ID NO: 305416 - RNA, 32 nt, Homo Sapiens
cucccggccgaggcccgggggaccagagcgag

SEQ ID NO: 305417 - RNA, 32 nt, Homo Sapiens
ucacauaaaugcuuuguuuugcuggugauuua

SEQ ID NO: 305418 - RNA, 32 nt, Homo Sapiens
uuuauugguuucucauggguggauauggauuc

SEQ ID NO: 305419 - RNA, 32 nt, Homo Sapiens
agagccggcuccugggccugcuggggccucug

SEQ ID NO: 305420 - RNA, 32 nt, Homo Sapiens
gcgagcgcggcgauggggagcggcggcguggu

SEQ ID NO: 305421 - RNA, 32 nt, Homo Sapiens
gguuugaggaggagggacucuggaguagcaga

SEQ ID NO: 305422 - RNA, 32 nt, Homo Sapiens
caagcggcccgcggcguccguccguccuuccg

SEQ ID NO: 305423 - RNA, 32 nt, Homo Sapiens
ggaaaacaaaguuuaaugauucagaaggggau

SEQ ID NO: 305424 - RNA, 32 nt, Homo Sapiens
uuaaaauaaaauggccuaucuuuaaaauaucc

SEQ ID NO: 305425 - RNA, 32 nt, Homo Sapiens
ucuucaagguaauagcgauacaauuaaauuuu

SEQ ID NO: 305426 - RNA, 32 nt, Homo Sapiens
ugugggcuuccagggcgacucccuucacaucc

SEQ ID NO: 305427 - RNA, 32 nt, Homo Sapiens
gccaggaucagucggggcacccgcagcgcagg

SEQ ID NO: 305428 - RNA, 32 nt, Homo Sapiens
acuuaaggcuguacuuuauuaaggcuuccuua

SEQ ID NO: 305429 - RNA, 32 nt, Homo Sapiens
gcagaugacccguugccuccccgggaaugaug

SEQ ID NO: 305430 - RNA, 32 nt, Homo Sapiens
ccguacugacuucuccuauaagcgcuucucuu

SEQ ID NO: 305431 - RNA, 32 nt, Homo Sapiens
cugggagugggaagagguggcaggaaggggau

SEQ ID NO: 305432 - RNA, 32 nt, Homo Sapiens
aaguuuuagcuacuaagauuacuugguuuuga

SEQ ID NO: 305433 - RNA, 32 nt, Homo Sapiens
auugugaaccuguguacgcacacacacauaua

SEQ ID NO: 305434 - RNA, 32 nt, Homo Sapiens
agcuccuggggccagcucuuuugggaagcaaa

SEQ ID NO: 305435 - RNA, 32 nt, Homo Sapiens
ggcuggucacuggaaagaccacagcaggauua

SEQ ID NO: 305436 - RNA, 32 nt, Homo Sapiens
guaaacacugcuuauauuuggccacuaagugg

SEQ ID NO: 305437 - RNA, 32 nt, Homo Sapiens
uuugugacaaaauaugaauaaacuacugcaaa

SEQ ID NO: 305438 - RNA, 32 nt, Homo Sapiens
acuauuuuauuuccucauagcacaaaauuauc

SEQ ID NO: 305439 - RNA, 32 nt, Homo Sapiens
cucccgagggcacuaagcguugccccuggccc

SEQ ID NO: 305440 - RNA, 32 nt, Homo Sapiens
cuccuguguuuccauugcccacuuucuucucc

SEQ ID NO: 305441 - RNA, 32 nt, Homo Sapiens
cuggggucaggaguucaaaaccagccuggcca

SEQ ID NO: 305442 - RNA, 32 nt, Homo Sapiens
ccaacuaauauuuggaauuuucguauacgugg

SEQ ID NO: 305443 - RNA, 32 nt, Homo Sapiens
uguaauggaaaacaaauucuuaugacuuugug

SEQ ID NO: 305444 - RNA, 32 nt, Homo Sapiens
ggggacaugcgugcuggaaccugucggaacuc

SEQ ID NO: 305445 - RNA, 32 nt, Homo Sapiens
aagcagugggagagggcagugcccggugcccu

SEQ ID NO: 305446 - RNA, 32 nt, Homo Sapiens
gagaauaaaucuauuucuuucuaccaaaaaaa

SEQ ID NO: 305447 - RNA, 32 nt, Homo Sapiens
uccugcugcugccgccgcugcccgaaucggaa

SEQ ID NO: 305448 - RNA, 32 nt, Homo Sapiens
ccccgacuccuuucccagaggugagugcccga

SEQ ID NO: 305449 - RNA, 32 nt, Homo Sapiens
ucuccagcucccagcccuacccugaauuccuc

SEQ ID NO: 305450 - RNA, 32 nt, Homo Sapiens
uauucuucgguuugaauaauuaaaaugaacca

SEQ ID NO: 305451 - RNA, 32 nt, Homo Sapiens
gugucuuagagguaggaauaauacaugauuau

SEQ ID NO: 305452 - RNA, 32 nt, Homo Sapiens
cuggaaaaaugguguggcuagcauuucccuuu

SEQ ID NO: 305453 - RNA, 32 nt, Homo Sapiens
uaggaucaagacagacaaugucgagggacaaa

SEQ ID NO: 305454 - RNA, 32 nt, Homo Sapiens
gaagugacaugcccuggagacuugugggaagu

SEQ ID NO: 305455 - RNA, 32 nt, Homo Sapiens
aguuuaacuccacccucauuuaaacuuccuuu

SEQ ID NO: 305456 - RNA, 32 nt, Homo Sapiens
uuccagcaggguggugugcaccacugaccagg

SEQ ID NO: 305457 - RNA, 32 nt, Homo Sapiens
cgugaaaauggcagacacgggccuucucuuca

SEQ ID NO: 305458 - RNA, 32 nt, Homo Sapiens
uaaaaagaguaucuuauacauguauccuaaaa

SEQ ID NO: 305459 - RNA, 32 nt, Homo Sapiens
ggggugaggaggagccaggccuccugugugcu

SEQ ID NO: 305460 - RNA, 32 nt, Homo Sapiens
caugggcugggaugcuguuguggcuuugacuu

SEQ ID NO: 305461 - RNA, 32 nt, Homo Sapiens
aagugcgcucaugccccacgcggggucuccaa

SEQ ID NO: 305462 - RNA, 32 nt, Homo Sapiens
aggcaucuuuaacgucagcagccccuuaccug

SEQ ID NO: 305463 - RNA, 32 nt, Homo Sapiens
ccgaggucaggaguuggagaccauucugacca

SEQ ID NO: 305464 - RNA, 32 nt, Homo Sapiens
cccguguucacuguuacccagaggcucuuguu

SEQ ID NO: 305465 - RNA, 32 nt, Homo Sapiens
uagagaauucagcaagagaacaaaauuaacag

SEQ ID NO: 305466 - RNA, 32 nt, Homo Sapiens
uuugccugcuaagagggagaccaggucaaggc

SEQ ID NO: 305467 - RNA, 32 nt, Homo Sapiens
ccauggggugaagccaucccaaggcugacagc

SEQ ID NO: 305468 - RNA, 32 nt, Homo Sapiens
gagauguguacuuucuaacaggggauugguac

SEQ ID NO: 305469 - RNA, 32 nt, Homo Sapiens
caccuacacagagggacacaucugcuuuguua

SEQ ID NO: 305470 - RNA, 32 nt, Homo Sapiens
acguucggacugccuucaucaagacaacucua

SEQ ID NO: 305471 - RNA, 32 nt, Homo Sapiens
cuuauaugagcuuagcguaaagaauauuuuua

SEQ ID NO: 305472 - RNA, 32 nt, Homo Sapiens
agaugccuauuaugggcauaugucucugcuaa

SEQ ID NO: 305473 - RNA, 32 nt, Homo Sapiens
uauuggcucuuuuaucaucagaauaggaaaaa

SEQ ID NO: 305474 - RNA, 32 nt, Homo Sapiens
cugugauggggcuccaggauuccaggccuggc

SEQ ID NO: 305475 - RNA, 32 nt, Homo Sapiens
gcagcagccagccagcagccucucccaggcgg

SEQ ID NO: 305476 - RNA, 30 nt, Homo Sapiens
uguauaauaaaauuauuguuuuuuuagcca

SEQ ID NO: 305477 - RNA, 32 nt, Homo Sapiens
uuuuuuggauauuuauacuuuuagauauauag

SEQ ID NO: 305478 - RNA, 32 nt, Homo Sapiens
aaauuugcaauauagaaguugaagauaguuuu

SEQ ID NO: 305479 - RNA, 32 nt, Homo Sapiens
ggccccuguucucccccuuagagcuccaucca

SEQ ID NO: 305480 - RNA, 32 nt, Homo Sapiens
cgaaaaugaguaaguguaaauauuuugaauuc

SEQ ID NO: 305481 - RNA, 32 nt, Homo Sapiens
augauggucuucagccucuuucugucccuucu

SEQ ID NO: 305482 - RNA, 32 nt, Homo Sapiens
aauuggauauauaucagcugacacugauagau

SEQ ID NO: 305483 - RNA, 32 nt, Homo Sapiens
acgauggcaggacaaugccgugagaagcacuu

SEQ ID NO: 305484 - RNA, 32 nt, Homo Sapiens
ugggaggggacagggauucacgauccaucgcg

SEQ ID NO: 305485 - RNA, 32 nt, Homo Sapiens
uaauucauuguuacgucacuuuucuauaguuu

SEQ ID NO: 305486 - RNA, 32 nt, Homo Sapiens
ggauaaucacacuuagaaaacaucugcuccau

SEQ ID NO: 305487 - RNA, 32 nt, Homo Sapiens
gccccccaguaccucccuccccuccccuccag

SEQ ID NO: 305488 - RNA, 32 nt, Homo Sapiens
acgacuaaaagagaagcagaggagcugauaga

SEQ ID NO: 305489 - RNA, 32 nt, Homo Sapiens
gucccggcagugccgcccuccccacuaagacc

SEQ ID NO: 305490 - RNA, 32 nt, Homo Sapiens
agacuuuuugaaaaaauucuuugugaacuacg

SEQ ID NO: 305491 - RNA, 32 nt, Homo Sapiens
uguggggaaaaauuauugagccaguugucagu

SEQ ID NO: 305492 - RNA, 32 nt, Homo Sapiens
ugguauguuuucagcuuuuguaucauguuuaa

SEQ ID NO: 305493 - RNA, 32 nt, Homo Sapiens
ggcucagggccucuuuaccaugugcagugacc

SEQ ID NO: 305494 - RNA, 32 nt, Homo Sapiens
aucuuugcaaucuauuuuauauauauugacaa

SEQ ID NO: 305495 - RNA, 32 nt, Homo Sapiens
cuugagagaacuauucuuuuuaucagggagau

SEQ ID NO: 305496 - RNA, 32 nt, Homo Sapiens
ugcuugguguggagauuaaauagaauaaccca

SEQ ID NO: 305497 - RNA, 32 nt, Homo Sapiens
guccuucuggggucuuacuccuccucaaggag

SEQ ID NO: 305498 - RNA, 32 nt, Homo Sapiens
ggagaaaaaucaguagaaacccagaaaagaca

SEQ ID NO: 305499 - RNA, 32 nt, Homo Sapiens
uccuuacauugaacuugcuucuucccaucagc

SEQ ID NO: 305500 - RNA, 32 nt, Homo Sapiens
ggaagcuccugcgugcauccccgggaugacca

SEQ ID NO: 305501 - RNA, 29 nt, Homo Sapiens
uugcuaucuauccaaaaaucaauaaaaua

SEQ ID NO: 305502 - RNA, 32 nt, Homo Sapiens
cggcgcugacuucucaccugcgcguucacacu

SEQ ID NO: 305503 - RNA, 32 nt, Homo Sapiens
cuguugugguuuuucagcauaguguuguaugu

SEQ ID NO: 305504 - RNA, 32 nt, Homo Sapiens
aaauucccaaggacaaggaucccucugcauuu

SEQ ID NO: 305505 - RNA, 32 nt, Homo Sapiens
ggaaccagacugcccuucacaaggauggaaau

SEQ ID NO: 305506 - RNA, 31 nt, Homo Sapiens
caaucagcggcggugucgcacuucucccgag

SEQ ID NO: 305507 - RNA, 32 nt, Homo Sapiens
ucauauccaaggacacaaaaccacuuuaaaaa

SEQ ID NO: 305508 - RNA, 32 nt, Homo Sapiens
gggaggagugccagcaauaguucauaauaaaa

SEQ ID NO: 305509 - RNA, 32 nt, Homo Sapiens
uuucuuacaucaugcuugauuccuacauuuug

SEQ ID NO: 305510 - RNA, 32 nt, Homo Sapiens
uaauguuacaguguugucauuguuuagaaaua

SEQ ID NO: 305511 - RNA, 32 nt, Homo Sapiens
guauuguaucuguaguuuuguaauaaacuaac

SEQ ID NO: 305512 - RNA, 32 nt, Homo Sapiens
agaguccugagcauaucucucguaacaaggaa

SEQ ID NO: 305513 - RNA, 32 nt, Homo Sapiens
aaacuuaccauccuuuauuuuacaauauuuuu

SEQ ID NO: 305514 - RNA, 32 nt, Homo Sapiens
ccgauacuuguaaaaacaauuuauguacuaau

SEQ ID NO: 305515 - RNA, 32 nt, Homo Sapiens
uuguuauuuuaaaaauacuuauuguucucagu

SEQ ID NO: 305516 - RNA, 32 nt, Homo Sapiens
uguuccccgcuaguaaaauguacagauggagg

SEQ ID NO: 305517 - RNA, 32 nt, Homo Sapiens
agaaaagaaagcaaacguagaugucaaauugu

SEQ ID NO: 305518 - RNA, 32 nt, Homo Sapiens
caucccuucuccugggguggcuggccccucac

SEQ ID NO: 305519 - RNA, 32 nt, Homo Sapiens
gccaaggcccuucucggccccuuccaguucgu

SEQ ID NO: 305520 - RNA, 32 nt, Homo Sapiens
accuguauaguaguuauaugcauauguuucug

SEQ ID NO: 305521 - RNA, 32 nt, Homo Sapiens
ggaagggagccgagucagaucgcgagguaccc

SEQ ID NO: 305522 - RNA, 29 nt, Homo Sapiens
aacaagauagugaucucucugugaaaaug

SEQ ID NO: 305523 - RNA, 32 nt, Homo Sapiens
uagaguaacaccuuuauacgugugcuugccuc

SEQ ID NO: 305524 - RNA, 32 nt, Homo Sapiens
acccaucgccgcgucuuuuauuuuuugcaaag

SEQ ID NO: 305525 - RNA, 32 nt, Homo Sapiens
ccagggcccucccacccuugcccagaccuggu

SEQ ID NO: 305526 - RNA, 32 nt, Homo Sapiens
ggaugagucugcuugggccugagaguuugauc

SEQ ID NO: 305527 - RNA, 32 nt, Homo Sapiens
ccccugcagccacgcaccucccggugagaagc

SEQ ID NO: 305528 - RNA, 32 nt, Homo Sapiens
cuaacagugucuauuuucaugucugauguguu

SEQ ID NO: 305529 - RNA, 32 nt, Homo Sapiens
caccccuccucuuuccuccccugucccuaaaa

SEQ ID NO: 305530 - RNA, 32 nt, Homo Sapiens
ggcgcccccuaccccacugcccucgaccuggg

SEQ ID NO: 305531 - RNA, 32 nt, Homo Sapiens
agcagcaugaauaguuuauacugugguuuuuc

SEQ ID NO: 305532 - RNA, 32 nt, Homo Sapiens
aguaaacaaaguauggaugaaggucagauuuu

SEQ ID NO: 305533 - RNA, 32 nt, Homo Sapiens
uguauguaaaaucuuuucaaaauacauuuuua

SEQ ID NO: 305534 - RNA, 32 nt, Homo Sapiens
ucggaauagacgguccuuccccggggagucag

SEQ ID NO: 305535 - RNA, 32 nt, Homo Sapiens
gccugagcaggauggugcccuccagcccagcg

SEQ ID NO: 305536 - RNA, 32 nt, Homo Sapiens
gcaaguggucagaagggcuuuacuucaaauca

SEQ ID NO: 305537 - RNA, 32 nt, Homo Sapiens
gcuucacaaggugacccuagcucccaccgcca

SEQ ID NO: 305538 - RNA, 32 nt, Homo Sapiens
ggguccugccaugccgccuucccacauuccag

SEQ ID NO: 305539 - RNA, 32 nt, Homo Sapiens
aggcccgcgggcccgucauggaggcgcccacc

SEQ ID NO: 305540 - RNA, 32 nt, Homo Sapiens
aagguaucaaggaagaacuucuaaucagaaaa

SEQ ID NO: 305541 - RNA, 32 nt, Homo Sapiens
aggcgcggcaggcggcaggucccggccgaagg

SEQ ID NO: 305542 - RNA, 32 nt, Homo Sapiens
gggggcauggguggagcagaggggcucccuca

SEQ ID NO: 305543 - RNA, 32 nt, Homo Sapiens
uguguguuugccaauagauacccauuauacua

SEQ ID NO: 305544 - RNA, 32 nt, Homo Sapiens
ggcugagguagauugcaaaugaccugcuuucu

SEQ ID NO: 305545 - RNA, 32 nt, Homo Sapiens
uaaauuauuauuaagguuguaauguuuuucuc

SEQ ID NO: 305546 - RNA, 32 nt, Homo Sapiens
gcaaguguguggaagcugagcguugucgccgc

SEQ ID NO: 305547 - RNA, 32 nt, Homo Sapiens
cauaaaauuggcaagaaaaugguacuuuccuu

SEQ ID NO: 305548 - RNA, 32 nt, Homo Sapiens
aaaaggguguucggacacauguauaaaaggau

SEQ ID NO: 305549 - RNA, 32 nt, Homo Sapiens
uauguaauauuuuuguuacugguguguucuaa

SEQ ID NO: 305550 - RNA, 32 nt, Homo Sapiens
ggucugggggugucuuaacaugacgcauuuca

SEQ ID NO: 305551 - RNA, 32 nt, Homo Sapiens
cucggaggggcgggggcggggaggccuagccu

SEQ ID NO: 305552 - RNA, 32 nt, Homo Sapiens
uguuuucuaaacuuauuugaccacagaacccu

SEQ ID NO: 305553 - RNA, 32 nt, Homo Sapiens
uauuaagggcuuagauuuaggaucuacauauu

SEQ ID NO: 305554 - RNA, 32 nt, Homo Sapiens
gauucaaacugggauauuaacauuccaaagcc

SEQ ID NO: 305555 - RNA, 32 nt, Homo Sapiens
gcagcgcucgccgccgggcccgagagcugcug

SEQ ID NO: 305556 - RNA, 32 nt, Homo Sapiens
uuugguugacauuuacaagauaaggcuaaaac

SEQ ID NO: 305557 - RNA, 32 nt, Homo Sapiens
gccacugcacccagccccaauccaccacuuuu

SEQ ID NO: 305558 - RNA, 32 nt, Homo Sapiens
acugauaaaaacaggaaauaugugaaaauauu

SEQ ID NO: 305559 - RNA, 32 nt, Homo Sapiens
aaggaaucaaggagaggaaaauaugagcaaua

SEQ ID NO: 305560 - RNA, 32 nt, Homo Sapiens
guuccugccuucccuccucaagcaggcaccca

SEQ ID NO: 305561 - RNA, 32 nt, Homo Sapiens
ccccuugcguaagacuccacaggagcgggcgg

SEQ ID NO: 305562 - RNA, 32 nt, Homo Sapiens
cccuuccaaccccauuuccccagcccaugagg

SEQ ID NO: 305563 - RNA, 32 nt, Homo Sapiens
caagucucaauauaauaauauucuuuauuccu

SEQ ID NO: 305564 - RNA, 32 nt, Homo Sapiens
ccacguuauaacgugaauauuuauacaguagc

SEQ ID NO: 305565 - RNA, 32 nt, Homo Sapiens
gagaagccugcgcugguagugagcuuccacuu

SEQ ID NO: 305566 - RNA, 32 nt, Homo Sapiens
gagcugccgaagagguggagccaggcaggggc

SEQ ID NO: 305567 - RNA, 32 nt, Homo Sapiens
cauagcaaugguaaaaucaucaucuggauuua

SEQ ID NO: 305568 - RNA, 32 nt, Homo Sapiens
gcaaaaacccaccucuacaaaaaguacaaaaa

SEQ ID NO: 305569 - RNA, 32 nt, Homo Sapiens
ccuagucugggguacacagaccaguguuccuu

SEQ ID NO: 305570 - RNA, 32 nt, Homo Sapiens
uucucacagcagaggaaccuuuccaagguggg

SEQ ID NO: 305571 - RNA, 32 nt, Homo Sapiens
cagccacgcugccuaugagaaauggcauggcc

SEQ ID NO: 305572 - RNA, 32 nt, Homo Sapiens
ccccagaguuucaggaucuccuccccucccag

SEQ ID NO: 305573 - RNA, 32 nt, Homo Sapiens
uucuaacuuggcccauucccacuacugugaag

SEQ ID NO: 305574 - RNA, 32 nt, Homo Sapiens
accugccccuaaucacugcaguguccagccca

SEQ ID NO: 305575 - RNA, 32 nt, Homo Sapiens
cccuaccugagagcugcagcccagcagcacgc

SEQ ID NO: 305576 - RNA, 32 nt, Homo Sapiens
cccaggugagcugccccgccccggcccaggug

SEQ ID NO: 305577 - RNA, 32 nt, Homo Sapiens
auaaugcuuugccagcaguacgugguagccac

SEQ ID NO: 305578 - RNA, 32 nt, Homo Sapiens
cggggugacggaauguucuggaccuugauaua

SEQ ID NO: 305579 - RNA, 32 nt, Homo Sapiens
uggucacaagggccuccugggaugcugcccac

SEQ ID NO: 305580 - RNA, 32 nt, Homo Sapiens
cuuugcugucuccugugucaaugucaggagga

SEQ ID NO: 305581 - RNA, 32 nt, Homo Sapiens
gaugggcuuccucugggccucuuucuuacuuu

SEQ ID NO: 305582 - RNA, 32 nt, Homo Sapiens
uacuugucccaaaaguuuuuguuuccuagcuu

SEQ ID NO: 305583 - RNA, 32 nt, Homo Sapiens
auguaacuuaauuugcagacauuuuuuuuccc

SEQ ID NO: 305584 - RNA, 32 nt, Homo Sapiens
gccuauguauaccuauguaacauggugguuac

SEQ ID NO: 305585 - RNA, 32 nt, Homo Sapiens
ugaaugcaccaaucagugcucuguaucuagcu

SEQ ID NO: 305586 - RNA, 32 nt, Homo Sapiens
gcguauuguaauaaaacuacugauggaauucc

SEQ ID NO: 305587 - RNA, 32 nt, Homo Sapiens
ccagcuuuacuuuugugauaaaauauugaugu

SEQ ID NO: 305588 - RNA, 32 nt, Homo Sapiens
auuuuaauggaguggauagcauuguuuucuuu

SEQ ID NO: 305589 - RNA, 32 nt, Homo Sapiens
cauccagaacagagaucuuaacaugccacccg

SEQ ID NO: 305590 - RNA, 32 nt, Homo Sapiens
uaaaauguaagguuuaugaugaaaaucuaagu

SEQ ID NO: 305591 - RNA, 31 nt, Homo Sapiens
uaagagugaaacauucacaaagauuugcguu

SEQ ID NO: 305592 - RNA, 32 nt, Homo Sapiens
cuccugggggccccgcuugucucggggguacc

SEQ ID NO: 305593 - RNA, 32 nt, Homo Sapiens
caggaaauuggaagguagaauuguaaauucau

SEQ ID NO: 305594 - RNA, 30 nt, Homo Sapiens
cgaccaugcggcugcacagacuucgugcgc

SEQ ID NO: 305595 - RNA, 32 nt, Homo Sapiens
guugcuuuauaaauaucauuuuguuuuuaguc

SEQ ID NO: 305596 - RNA, 32 nt, Homo Sapiens
ggcucccugcucugggcccugcaccgagagcu

SEQ ID NO: 305597 - RNA, 32 nt, Homo Sapiens
accuuagugggcaaugggggagcuccugaugg

SEQ ID NO: 305598 - RNA, 32 nt, Homo Sapiens
cuuguggcucgcgucgcgcgcgcacgcugcgc

SEQ ID NO: 305599 - RNA, 32 nt, Homo Sapiens
ugccucugucuccuuguugcccaacuacuauc

SEQ ID NO: 305600 - RNA, 32 nt, Homo Sapiens
ugcaggcccagcuggaggagcagcugcgggac

SEQ ID NO: 305601 - RNA, 32 nt, Homo Sapiens
caauggugcagcucuuaggagcucucacagga

SEQ ID NO: 305602 - RNA, 32 nt, Homo Sapiens
ucuuucuggguauuuuuauagcccuuaauaaa

SEQ ID NO: 305603 - RNA, 32 nt, Homo Sapiens
cuuuuggucccuggaaacaaauccgccuaugu

SEQ ID NO: 305604 - RNA, 32 nt, Homo Sapiens
gacacagaaaaagggaaggaaauuggcuaguc

SEQ ID NO: 305605 - RNA, 32 nt, Homo Sapiens
aucuucuaauaaaaauauauuuggcucuuauc

SEQ ID NO: 305606 - RNA, 32 nt, Homo Sapiens
aaaaagacugaacauguuuacagguuugaauu

SEQ ID NO: 305607 - RNA, 32 nt, Homo Sapiens
gucggggugaagggcugucccagcuacuuguc

SEQ ID NO: 305608 - RNA, 32 nt, Homo Sapiens
guugucuuaccuuuuuaaccuuaccauaauau

SEQ ID NO: 305609 - RNA, 32 nt, Homo Sapiens
uuugggaauucuguuuucagucuuggguggua

SEQ ID NO: 305610 - RNA, 32 nt, Homo Sapiens
gaaagugagaacaaauauauuuaaucucaggu

SEQ ID NO: 305611 - RNA, 32 nt, Homo Sapiens
gauuguuguaaaugcaaugccguaguuuggau

SEQ ID NO: 305612 - RNA, 32 nt, Homo Sapiens
gccaucuccgcccggcugcccgcggccucacc

SEQ ID NO: 305613 - RNA, 32 nt, Homo Sapiens
aucuugaugaagaaaauguuauguaaaucaug

SEQ ID NO: 305614 - RNA, 32 nt, Homo Sapiens
uuucccaucuucugcccuuuacuauucuggga

SEQ ID NO: 305615 - RNA, 32 nt, Homo Sapiens
agaaaagauugugugucaccccuguuuauucu

SEQ ID NO: 305616 - RNA, 32 nt, Homo Sapiens
gcaacaccucucugcccucccucccuuugucc

SEQ ID NO: 305617 - RNA, 32 nt, Homo Sapiens
auaucugcauguccuaaauuuugaauuuagau

SEQ ID NO: 305618 - RNA, 32 nt, Homo Sapiens
cauggauaugugcaugagacacuuacugugua

SEQ ID NO: 305619 - RNA, 32 nt, Homo Sapiens
ccuccaaugauaaagaaaaugauaaauuuucu

SEQ ID NO: 305620 - RNA, 32 nt, Homo Sapiens
cacuggagccguuacccaggaugcugcggccc

SEQ ID NO: 305621 - RNA, 32 nt, Homo Sapiens
auacccuauccuguuuuaaucugagugacucu

SEQ ID NO: 305622 - RNA, 32 nt, Homo Sapiens
uaugucuuacuuaguuucuucuuaauaauagg

SEQ ID NO: 305623 - RNA, 32 nt, Homo Sapiens
gccccgcgccgcgccgcgccaugucggugaac

SEQ ID NO: 305624 - RNA, 32 nt, Homo Sapiens
gacuuacuuuggauuaaauuuacaaugggaaa

SEQ ID NO: 305625 - RNA, 32 nt, Homo Sapiens
ggcacuuuugccaccauauccaaauacagcca

SEQ ID NO: 305626 - RNA, 32 nt, Homo Sapiens
auuugccugugcugucauuugcauacagaaag

SEQ ID NO: 305627 - RNA, 32 nt, Homo Sapiens
uuuggggaucugaaacaaucugggaguuaaua

SEQ ID NO: 305628 - RNA, 32 nt, Homo Sapiens
gguuaggcgggugaaguuugccagagauucug

SEQ ID NO: 305629 - RNA, 32 nt, Homo Sapiens
ccacgaggucagcaaacuaucauguucuuaug

SEQ ID NO: 305630 - RNA, 32 nt, Homo Sapiens
ucuaauuuggcaccucuuuugaugccuaagca

SEQ ID NO: 305631 - RNA, 32 nt, Homo Sapiens
acuguucuguuuuucuauuaaucuuuugucaa

SEQ ID NO: 305632 - RNA, 31 nt, Homo Sapiens
ugacuuggcgagacucacagagccugcauuc

SEQ ID NO: 305633 - RNA, 32 nt, Homo Sapiens
caacugggucuuuuaauaaugugucaggcacu

SEQ ID NO: 305634 - RNA, 32 nt, Homo Sapiens
ugcugaaguauauaaagaaguuuuauauucuc

SEQ ID NO: 305635 - RNA, 32 nt, Homo Sapiens
guggcagguguugggauguggggccucauaag

SEQ ID NO: 305636 - RNA, 32 nt, Homo Sapiens
gcguccggaguucgugcccccggagcggcugg

SEQ ID NO: 305637 - RNA, 32 nt, Homo Sapiens
ugaaccugucuccugcgcuugcucuacaguuc

SEQ ID NO: 305638 - RNA, 32 nt, Homo Sapiens
gucgcggcgcccccggccguccucuguccgua

SEQ ID NO: 305639 - RNA, 32 nt, Homo Sapiens
cgcccuccaaugaugucggcguacagagggcu

SEQ ID NO: 305640 - RNA, 32 nt, Homo Sapiens
caugacccacagccaucugguuaugucuuauu

SEQ ID NO: 305641 - RNA, 31 nt, Homo Sapiens
uguuucauaauaaaaauagauacguugacuu

SEQ ID NO: 305642 - RNA, 30 nt, Homo Sapiens
ggucgcccucccgugccucgcccgcggaca

SEQ ID NO: 305643 - RNA, 30 nt, Homo Sapiens
uugguaucaagaggccacaagagugggacc

SEQ ID NO: 305644 - RNA, 32 nt, Homo Sapiens
gcccauucacugaguuuucucagcagaccauu

SEQ ID NO: 305645 - RNA, 32 nt, Homo Sapiens
uucaauauuuaguagagaugggguuucaccau

SEQ ID NO: 305646 - RNA, 32 nt, Homo Sapiens
ccuccccugccagcucugcaugacuuugucac

SEQ ID NO: 305647 - RNA, 32 nt, Homo Sapiens
gcccuggaggggcugcugcuccucaguugcau

SEQ ID NO: 305648 - RNA, 32 nt, Homo Sapiens
guuuuuauuuucauaacacuaauaauacacug

SEQ ID NO: 305649 - RNA, 30 nt, Homo Sapiens
gauccucuguccccgccgccggccccgcug

SEQ ID NO: 305650 - RNA, 31 nt, Homo Sapiens
caacagcugccggucugcgccugcgcggcga

SEQ ID NO: 305651 - RNA, 32 nt, Homo Sapiens
ugcuacaaugacuuccuauuaaagguucaaua

SEQ ID NO: 305652 - RNA, 32 nt, Homo Sapiens
auacaucugucaaaguuuuucauaaauuuuca

SEQ ID NO: 305653 - RNA, 32 nt, Homo Sapiens
gaagccuggaacaucaucaaggcacugccuga

SEQ ID NO: 305654 - RNA, 32 nt, Homo Sapiens
caggaagaccuccaggaguaaaaguuaaggcu

SEQ ID NO: 305655 - RNA, 32 nt, Homo Sapiens
aaaguuacaacuucuuuuauuuuauuuuuuaa

SEQ ID NO: 305656 - RNA, 32 nt, Homo Sapiens
ccugaguuccccagccccucuccuccuuuuuu

SEQ ID NO: 305657 - RNA, 32 nt, Homo Sapiens
caucugucuguccuuccuuccauugcucccag

SEQ ID NO: 305658 - RNA, 32 nt, Homo Sapiens
uuuuuaugagguuuugccaagcaagaacucuu

SEQ ID NO: 305659 - RNA, 32 nt, Homo Sapiens
cuauggcccccuccucuccgggggaucgucgc

SEQ ID NO: 305660 - RNA, 32 nt, Homo Sapiens
cacgcuguccugcucucgguccuuccacaacc

SEQ ID NO: 305661 - RNA, 32 nt, Homo Sapiens
cgcuacaucgccaucugccggccucugcacua

SEQ ID NO: 305662 - RNA, 32 nt, Homo Sapiens
ugguuugugucuguauuuguauauuauaccua

SEQ ID NO: 305663 - RNA, 32 nt, Homo Sapiens
ggauggugcagguucuguuuuuaaauguaccu

SEQ ID NO: 305664 - RNA, 32 nt, Homo Sapiens
gaaucuuuaaucuuguuaauacuuguuauaug

SEQ ID NO: 305665 - RNA, 32 nt, Homo Sapiens
augaucacuuuaucuuuaguagccucaguucu

SEQ ID NO: 305666 - RNA, 32 nt, Homo Sapiens
uguacacaaaaagaagcaguuggacucgggaa

SEQ ID NO: 305667 - RNA, 32 nt, Homo Sapiens
gcuucuccaagcaugauggccacaggucaguc

SEQ ID NO: 305668 - RNA, 32 nt, Homo Sapiens
ugcucaaccugaaagaggggucgguagcaagg

SEQ ID NO: 305669 - RNA, 32 nt, Homo Sapiens
ggauggaguuucacuugucacccaggcuggag

SEQ ID NO: 305670 - RNA, 31 nt, Homo Sapiens
acccaaguucccaggcccugaguuuuaaaac

SEQ ID NO: 305671 - RNA, 32 nt, Homo Sapiens
auuuccacaugaaagcacuuuaaggcacugau

SEQ ID NO: 305672 - RNA, 29 nt, Homo Sapiens
ucuauauaaaguugcugcuucuacaggag

SEQ ID NO: 305673 - RNA, 32 nt, Homo Sapiens
aaaccaaaagauuacagcuauuaaacuaacaa

SEQ ID NO: 305674 - RNA, 32 nt, Homo Sapiens
auucagggcuccuggcuggcucgcccuuggug

SEQ ID NO: 305675 - RNA, 32 nt, Homo Sapiens
uaaagaagauaaaauaaauuauauacccgagc

SEQ ID NO: 305676 - RNA, 32 nt, Homo Sapiens
cccccaccccacuugcccuugguucuuuagaa

SEQ ID NO: 305677 - RNA, 32 nt, Homo Sapiens
auuugauggcuuaaaaaguaaaugcguuagaa

SEQ ID NO: 305678 - RNA, 32 nt, Homo Sapiens
aagccuuucuacuuacuaccagcaaugcaaaa

SEQ ID NO: 305679 - RNA, 32 nt, Homo Sapiens
uuucugaaaauuaacacugcuuguguuuuuaa

SEQ ID NO: 305680 - RNA, 32 nt, Homo Sapiens
acagaccuuuuucucucuuacugcuucaugua

SEQ ID NO: 305681 - RNA, 32 nt, Homo Sapiens
cgucacugcauuccagccuggauaauagagug

SEQ ID NO: 305682 - RNA, 32 nt, Homo Sapiens
ccuucccggcuuucgguccggaggaggcggga

SEQ ID NO: 305683 - RNA, 32 nt, Homo Sapiens
cagccggcugagccaggacccaccacacucaa

SEQ ID NO: 305684 - RNA, 32 nt, Homo Sapiens
gcagaugaaaauaaagguguuuuugguuaacu

SEQ ID NO: 305685 - RNA, 29 nt, Homo Sapiens
aggaaugagugcagaugcaaccccucuuc

SEQ ID NO: 305686 - RNA, 32 nt, Homo Sapiens
ccguaggcgaaggugaagauggcugccucugc

SEQ ID NO: 305687 - RNA, 32 nt, Homo Sapiens
ccaaagccauucucccccucuuugggcagugc

SEQ ID NO: 305688 - RNA, 32 nt, Homo Sapiens
ucaucgccccauaucacccaccaccgaccccc

SEQ ID NO: 305689 - RNA, 32 nt, Homo Sapiens
gcccgcgcccuugaccuucggccccgcgagcu

SEQ ID NO: 305690 - RNA, 32 nt, Homo Sapiens
ccuccaguucugccugccggaccuccaccugg

SEQ ID NO: 305691 - RNA, 32 nt, Homo Sapiens
agcuggggacgccacgugccauucccaugggc

SEQ ID NO: 305692 - RNA, 32 nt, Homo Sapiens
aaucacuuguaaugaagugugaaucuuguuau

SEQ ID NO: 305693 - RNA, 32 nt, Homo Sapiens
guugcuguuauucaaauuucuuguaauuuagu

SEQ ID NO: 305694 - RNA, 32 nt, Homo Sapiens
uguuuugcucucuguucauauauggcucuauu

SEQ ID NO: 305695 - RNA, 29 nt, Homo Sapiens
cauaaugaaggucuuggcggcaggaguug

SEQ ID NO: 305696 - RNA, 32 nt, Homo Sapiens
accucagccuccuccccaaaccccgcugggga

SEQ ID NO: 305697 - RNA, 32 nt, Homo Sapiens
cuugcccauuuucacaugucugcuuauuuauu

SEQ ID NO: 305698 - RNA, 32 nt, Homo Sapiens
ugcacugccucgggaaccucacucuugccaac

SEQ ID NO: 305699 - RNA, 32 nt, Homo Sapiens
ccagaaaugauuagaagugcugauuuagauuc

SEQ ID NO: 305700 - RNA, 32 nt, Homo Sapiens
guugcagggaaccaggaggaaagggaaagaug

SEQ ID NO: 305701 - RNA, 32 nt, Homo Sapiens
auccucuucuaucauuuuuuuaaaucucuucu

SEQ ID NO: 305702 - RNA, 29 nt, Homo Sapiens
gcucauggaagaaggggugcccugcccag

SEQ ID NO: 305703 - RNA, 32 nt, Homo Sapiens
gggccggcucgcgggcgcugccagucucgggc

SEQ ID NO: 305704 - RNA, 32 nt, Homo Sapiens
uuuuauuuaaugacuacuuguuuucuaguuuu

SEQ ID NO: 305705 - RNA, 32 nt, Homo Sapiens
aguacuacagcuuucauguuuugggcuucuug

SEQ ID NO: 305706 - RNA, 32 nt, Homo Sapiens
uuuuaggaaaucaagacauauuucacuuccuu

SEQ ID NO: 305707 - RNA, 32 nt, Homo Sapiens
gcucggccggcgaagcucuaauugcccugaag

SEQ ID NO: 305708 - RNA, 32 nt, Homo Sapiens
agccucucugucaucuccccuucccagccccu

SEQ ID NO: 305709 - RNA, 32 nt, Homo Sapiens
caacauaaaaauuauaauaggaauaauuugag

SEQ ID NO: 305710 - RNA, 32 nt, Homo Sapiens
aacuaauacagacuugcauauuugagaaucac

SEQ ID NO: 305711 - RNA, 32 nt, Homo Sapiens
uuguucccuucaguuugaaaaaucaucgauau

SEQ ID NO: 305712 - RNA, 32 nt, Homo Sapiens
uguugugaggaguguuccguauauuauaggau

SEQ ID NO: 305713 - RNA, 32 nt, Homo Sapiens
gaagaaacuaaagagggaagauaaagaggcuc

SEQ ID NO: 305714 - RNA, 32 nt, Homo Sapiens
aacacgccuacuguaagcaugcuuggaaugac

SEQ ID NO: 305715 - RNA, 32 nt, Homo Sapiens
uuagaaugcacacauuuuuaguuuacauacau

SEQ ID NO: 305716 - RNA, 32 nt, Homo Sapiens
cccuccagcuggacgaccccacgcugcagcac

SEQ ID NO: 305717 - RNA, 31 nt, Homo Sapiens
uggaggaugcugcggcaggugcuucgcagag

SEQ ID NO: 305718 - RNA, 32 nt, Homo Sapiens
cccagccucgcuccucuuuccuucuguccgug

SEQ ID NO: 305719 - RNA, 28 nt, Homo Sapiens
ccggaagcucuuuccaggaugacggacg

SEQ ID NO: 305720 - RNA, 32 nt, Homo Sapiens
ugccccugagguucuccuggcuagucggggug

SEQ ID NO: 305721 - RNA, 32 nt, Homo Sapiens
auuauagaaaauaccuuagaauguucuugaua

SEQ ID NO: 305722 - RNA, 32 nt, Homo Sapiens
gcauauauaugauuguuuuucuuauaacuuua

SEQ ID NO: 305723 - RNA, 30 nt, Homo Sapiens
uuccccaaaguccugacgucgcuguuugcu

SEQ ID NO: 305724 - RNA, 32 nt, Homo Sapiens
gccacccugagcucagccaccgauggaggguc

SEQ ID NO: 305725 - RNA, 31 nt, Homo Sapiens
guucuuauugaaacaguaaauuuuauaaaaa

SEQ ID NO: 305726 - RNA, 32 nt, Homo Sapiens
cagggaugcaugcgugggagaacucucugaga

SEQ ID NO: 305727 - RNA, 32 nt, Homo Sapiens
caguuaaggagucauggauggaacuagagguc

SEQ ID NO: 305728 - RNA, 32 nt, Homo Sapiens
gagauuauuucugcucuucaggaaauuucugc

SEQ ID NO: 305729 - RNA, 32 nt, Homo Sapiens
agaaccauugaaaaauuuaagaaugaggcugc

SEQ ID NO: 305730 - RNA, 32 nt, Homo Sapiens
ccaguccggccgccgccccacgucccggucug

SEQ ID NO: 305731 - RNA, 28 nt, Homo Sapiens
gcgcaggcggcggagaggaugacugccg

SEQ ID NO: 305732 - RNA, 32 nt, Homo Sapiens
gcucguuauguaaccacaccacaugaggccca

SEQ ID NO: 305733 - RNA, 32 nt, Homo Sapiens
ggucggucucugucgcccaggcuggcgugaag

SEQ ID NO: 305734 - RNA, 32 nt, Homo Sapiens
cggaagacccucccgcugcccgcgggcccagg

SEQ ID NO: 305735 - RNA, 32 nt, Homo Sapiens
ggccaggagcgcgggccggcgaugcggcugcc

SEQ ID NO: 305736 - RNA, 32 nt, Homo Sapiens
acuccacgugccugcccggccuccagggugcg

SEQ ID NO: 305737 - RNA, 32 nt, Homo Sapiens
gagcugaggcucccauugucuccaucagagcc

SEQ ID NO: 305738 - RNA, 32 nt, Homo Sapiens
aagucuacugaauuaauuuuuuaaaagaaaag

SEQ ID NO: 305739 - RNA, 32 nt, Homo Sapiens
cacagugacuacugaauauaccaagagcuuuu

SEQ ID NO: 305740 - RNA, 32 nt, Homo Sapiens
aauaaugaaauuuauuuuuuuaauuuaaaagc

SEQ ID NO: 305741 - RNA, 32 nt, Homo Sapiens
agcguccggcgcgaccccggaucccggucugc

SEQ ID NO: 305742 - RNA, 32 nt, Homo Sapiens
ccccacgcgcgcaccagucgcguaagacaaca

SEQ ID NO: 305743 - RNA, 32 nt, Homo Sapiens
cauuucuagaaaaaaggagauaauguuuuuaa

SEQ ID NO: 305744 - RNA, 32 nt, Homo Sapiens
ugugucuucggugccagaggggcccgcuuccc

SEQ ID NO: 305745 - RNA, 32 nt, Homo Sapiens
aaggaaaaguguuuaaauaguaagcuguucuu

SEQ ID NO: 305746 - RNA, 32 nt, Homo Sapiens
acaggauggaggagggacuaccuaaaccccug

SEQ ID NO: 305747 - RNA, 32 nt, Homo Sapiens
auaaagaaaaggaauuuuagaagugaccagag

SEQ ID NO: 305748 - RNA, 32 nt, Homo Sapiens
gagacagggucucacucugucauccaggcugg

SEQ ID NO: 305749 - RNA, 32 nt, Homo Sapiens
ccugccguuggcggccugguccgcagcgcccu

SEQ ID NO: 305750 - RNA, 32 nt, Homo Sapiens
ggugggggcugcauggcuguuggguggcagug

SEQ ID NO: 305751 - RNA, 32 nt, Homo Sapiens
ccugugaauuagccaguagggucugacacaac

SEQ ID NO: 305752 - RNA, 32 nt, Homo Sapiens
gugaccgacaguuaagaaaacagucagucaua

SEQ ID NO: 305753 - RNA, 32 nt, Homo Sapiens
guccgggagcauggggggcuggaccggguccc

SEQ ID NO: 305754 - RNA, 32 nt, Homo Sapiens
aaaaaccgauucaaaucaacuuguacauggaa

SEQ ID NO: 305755 - RNA, 32 nt, Homo Sapiens
uggauuuuuagguggugggaauuuaagcauaa

SEQ ID NO: 305756 - RNA, 29 nt, Homo Sapiens
auuccucauuggcaacauggcaaacagau

SEQ ID NO: 305757 - RNA, 32 nt, Homo Sapiens
gagcaaacagaaaaagaagguugagggcaaug

SEQ ID NO: 305758 - RNA, 32 nt, Homo Sapiens
aguaugauauugugauguuucauacaaugcag

SEQ ID NO: 305759 - RNA, 30 nt, Homo Sapiens
cuguggagcaucccugcaggggacucuggc

SEQ ID NO: 305760 - RNA, 32 nt, Homo Sapiens
ucugccugccucggccucccaagugcugggau

SEQ ID NO: 305761 - RNA, 32 nt, Homo Sapiens
cccgauugacuggccugcuuggcaaggcaagu

SEQ ID NO: 305762 - RNA, 32 nt, Homo Sapiens
ccgagcgagggucaguuugaaaaggaggaucg

SEQ ID NO: 305763 - RNA, 32 nt, Homo Sapiens
agauaaaaugauguuauacaucaauauguaua

SEQ ID NO: 305764 - RNA, 32 nt, Homo Sapiens
ggcaaacgccagcaacagccccucgucacugc

SEQ ID NO: 305765 - RNA, 32 nt, Homo Sapiens
auaacuuacuagagaauguauauuuuaugaca

SEQ ID NO: 305766 - RNA, 32 nt, Homo Sapiens
cgcagcggcuccgggcccgacccggcggcuuc

SEQ ID NO: 305767 - RNA, 32 nt, Homo Sapiens
acuuugugcaauauuucugugauugugccuau

SEQ ID NO: 305768 - RNA, 32 nt, Homo Sapiens
auguagaaaaagaguaacugguagauuuuguu

SEQ ID NO: 305769 - RNA, 32 nt, Homo Sapiens
cuucuuucaggauuaguucguuccaaggaggc

SEQ ID NO: 305770 - RNA, 32 nt, Homo Sapiens
agaggcuccaugauuuucgagugcuguaccuc

SEQ ID NO: 305771 - RNA, 32 nt, Homo Sapiens
ugucaugaaugccagcagcuagcagaggcuuu

SEQ ID NO: 305772 - RNA, 32 nt, Homo Sapiens
cagacucugaccacagauuuuaugcuguuuag

SEQ ID NO: 305773 - RNA, 32 nt, Homo Sapiens
ugaggggagggugccaggaacuaccccaugau

SEQ ID NO: 305774 - RNA, 30 nt, Homo Sapiens
cauggauucugcaggaccuagaagaguggc

SEQ ID NO: 305775 - RNA, 32 nt, Homo Sapiens
acugcuuuggcuaugacaguuuuuugcauggg

SEQ ID NO: 305776 - RNA, 32 nt, Homo Sapiens
ccuauuaaaacaugaacaggccaggcauggug

SEQ ID NO: 305777 - RNA, 32 nt, Homo Sapiens
gcuccucugaccaggacggguaaggccucugc

SEQ ID NO: 305778 - RNA, 32 nt, Homo Sapiens
ugggaacagaaagugcuuccugucccggccug

SEQ ID NO: 305779 - RNA, 32 nt, Homo Sapiens
guucacucuuggcauuuuuucuuuaauauagg

SEQ ID NO: 305780 - RNA, 32 nt, Homo Sapiens
ggaggaaggaggaggcccaggccgcgucuuca

SEQ ID NO: 305781 - RNA, 32 nt, Homo Sapiens
ccccaccuagcaguccaggucccucaaccuuc

SEQ ID NO: 305782 - RNA, 32 nt, Homo Sapiens
uuuuuggagucuuuuuucuaucucuucugaau

SEQ ID NO: 305783 - RNA, 32 nt, Homo Sapiens
cucuguucauuuccucaaaaagauuuccccau

SEQ ID NO: 305784 - RNA, 30 nt, Homo Sapiens
ugcaaggggaagcuugagaguggggugagg

SEQ ID NO: 305785 - RNA, 32 nt, Homo Sapiens
ugucucuuggaggguccaggauaagucgugag

SEQ ID NO: 305786 - RNA, 32 nt, Homo Sapiens
aucugccgugccccuccucccuguucuuuucu

SEQ ID NO: 305787 - RNA, 32 nt, Homo Sapiens
ugcuauuguugcaauaucuacauucuauuuca

SEQ ID NO: 305788 - RNA, 28 nt, Homo Sapiens
cauaugcuuggcugaauguguuuaucgg

SEQ ID NO: 305789 - RNA, 32 nt, Homo Sapiens
aguguuggcgcuccugaagagagacgacgccc

SEQ ID NO: 305790 - RNA, 32 nt, Homo Sapiens
ggauccccaagcccuucaggccugagaucaga

SEQ ID NO: 305791 - RNA, 32 nt, Homo Sapiens
acuugaauugcgauguguauuacuucuagggc

SEQ ID NO: 305792 - RNA, 32 nt, Homo Sapiens
guugcuuucuuaccuacuauuggcccuaaaua

SEQ ID NO: 305793 - RNA, 32 nt, Homo Sapiens
acauuuucuuugagcuccugcuaaaaauagga

SEQ ID NO: 305794 - RNA, 32 nt, Homo Sapiens
gacaaagaugagauuauuggggcuguucauau

SEQ ID NO: 305795 - RNA, 32 nt, Homo Sapiens
augcagucuauuaucauacauaacuaaaaaua

SEQ ID NO: 305796 - RNA, 32 nt, Homo Sapiens
uuagugagcaccucuguauuuugaggucugag

SEQ ID NO: 305797 - RNA, 32 nt, Homo Sapiens
gcuuggugcccacagggcugcgcacugccagg

SEQ ID NO: 305798 - RNA, 32 nt, Homo Sapiens
uuuuuaguuuuuuauuauacauuugaauggcc

SEQ ID NO: 305799 - RNA, 32 nt, Homo Sapiens
uaugucguuacuuugauaagcauuccacuuuu

SEQ ID NO: 305800 - RNA, 32 nt, Homo Sapiens
gcaugcauaugugagauaugcauaucauguau

SEQ ID NO: 305801 - RNA, 32 nt, Homo Sapiens
agcucccgcgaccgccucuccugccccucgcc

SEQ ID NO: 305802 - RNA, 32 nt, Homo Sapiens
cgcccacgccacauggacacagcccucgcccu

SEQ ID NO: 305803 - RNA, 32 nt, Homo Sapiens
cacuuuuuuuuuauuuuuauuuuugcaauggg

SEQ ID NO: 305804 - RNA, 32 nt, Homo Sapiens
aaauaaucccaccagcacuuugggaggccaag

SEQ ID NO: 305805 - RNA, 32 nt, Homo Sapiens
ugagaucgacagugacuagugaccccuuguug

SEQ ID NO: 305806 - RNA, 32 nt, Homo Sapiens
acagcugcugggagaaagaauggaauggaccc

SEQ ID NO: 305807 - RNA, 32 nt, Homo Sapiens
aagauagauaggagacacuuuuuuaucacaug

SEQ ID NO: 305808 - RNA, 32 nt, Homo Sapiens
ugaaacagacugucgcuugauuuuaaaaaaca

SEQ ID NO: 305809 - RNA, 32 nt, Homo Sapiens
uaucuuacuaaaaaugugaaaugaaaggacua

SEQ ID NO: 305810 - RNA, 32 nt, Homo Sapiens
auucuuggaggagguuguagggagaggaggcc

SEQ ID NO: 305811 - RNA, 32 nt, Homo Sapiens
guaaaagaacaaaagagagagcuugacacacc

SEQ ID NO: 305812 - RNA, 32 nt, Homo Sapiens
uugcuauuuuauuuuaaaucacagcaaaguua

SEQ ID NO: 305813 - RNA, 32 nt, Homo Sapiens
aaggcuggcgcuggcaggcgcuuccgucggca

SEQ ID NO: 305814 - RNA, 32 nt, Homo Sapiens
cugaggccaacucuccuugcuccuggcugggg

SEQ ID NO: 305815 - RNA, 32 nt, Homo Sapiens
uagcaagauaaaaaucucuuauucaaauuguu

SEQ ID NO: 305816 - RNA, 32 nt, Homo Sapiens
caggcgccagccacugcgcccggcccagugug

SEQ ID NO: 305817 - RNA, 32 nt, Homo Sapiens
agucauuuuccacaaaaacucccagccuuaaa

SEQ ID NO: 305818 - RNA, 32 nt, Homo Sapiens
gccacucucccuccccgccaaacaggcguauc

SEQ ID NO: 305819 - RNA, 32 nt, Homo Sapiens
ggcucggccccggccccagccccgccagcaug

SEQ ID NO: 305820 - RNA, 32 nt, Homo Sapiens
guuuagacaacgucauccccuggcaggcuaaa

SEQ ID NO: 305821 - RNA, 32 nt, Homo Sapiens
ccgcugcccuccccggccuuccaacuugcugu

SEQ ID NO: 305822 - RNA, 32 nt, Homo Sapiens
agugcuuucacuuauuucgggaccaccuaagg

SEQ ID NO: 305823 - RNA, 32 nt, Homo Sapiens
aagugaagaaaaauaagaaguauuacaacaga

SEQ ID NO: 305824 - RNA, 32 nt, Homo Sapiens
ggggaagcuuguucauucccagcccucacugg

SEQ ID NO: 305825 - RNA, 32 nt, Homo Sapiens
uucuccauggaauguuuguaaaauucccuagc

SEQ ID NO: 305826 - RNA, 32 nt, Homo Sapiens
uugaacucacugacaugaucuuagcuucuuua

SEQ ID NO: 305827 - RNA, 32 nt, Homo Sapiens
auuagcauuauuuucuuuugcuuuuguuuaug

SEQ ID NO: 305828 - RNA, 31 nt, Homo Sapiens
augugucaacucugacaagugcugugaggga

SEQ ID NO: 305829 - RNA, 32 nt, Homo Sapiens
cucgccgcgacccccgcgggacccaucgggcc

SEQ ID NO: 305830 - RNA, 32 nt, Homo Sapiens
ucuaccuacauauuuguauguuuuucuguaua

SEQ ID NO: 305831 - RNA, 32 nt, Homo Sapiens
ugccacgcucuccacccgauccuuccauugaa

SEQ ID NO: 305832 - RNA, 32 nt, Homo Sapiens
gcugcguggcaggacugccagggugugcaggg

SEQ ID NO: 305833 - RNA, 32 nt, Homo Sapiens
cagcccuggcaacauugugagacccaucucua

SEQ ID NO: 305834 - RNA, 32 nt, Homo Sapiens
aagaaacauugauugcuaaaucuuuuugcugc

SEQ ID NO: 305835 - RNA, 32 nt, Homo Sapiens
ggcccauuuucccuuuuccccagcugaugagg

SEQ ID NO: 305836 - RNA, 32 nt, Homo Sapiens
agaguucccgguuuuuuccucuuguccuuccc

SEQ ID NO: 305837 - RNA, 32 nt, Homo Sapiens
gcggguuccggagaucccggccucacuucguc

SEQ ID NO: 305838 - RNA, 32 nt, Homo Sapiens
uacgcgcgccgcgucguuuacgcggcgauuuc

SEQ ID NO: 305839 - RNA, 32 nt, Homo Sapiens
uuucuguguaaaucauuaaguauaagaagaaa

SEQ ID NO: 305840 - RNA, 32 nt, Homo Sapiens
cgggacaccugcccugcccccacgagggucag

SEQ ID NO: 305841 - RNA, 32 nt, Homo Sapiens
uguaagauggggcuacuguuguuacagucuca

SEQ ID NO: 305842 - RNA, 32 nt, Homo Sapiens
cagaugcaaauaacuucauaagaugacacugg

SEQ ID NO: 305843 - RNA, 32 nt, Homo Sapiens
uaugccuuuuaaaauacuguuuacuaugaaga

SEQ ID NO: 305844 - RNA, 32 nt, Homo Sapiens
accaucuaguugcaggaaaauaagcucagggc

SEQ ID NO: 305845 - RNA, 32 nt, Homo Sapiens
accaccuaguugcaggaaaacaagcucagggc

SEQ ID NO: 305846 - RNA, 32 nt, Homo Sapiens
auuuguuuuuaaaacuuguauuucugcacugu

SEQ ID NO: 305847 - RNA, 32 nt, Homo Sapiens
guaguauuccagaugagcugcagaugcuuacc

SEQ ID NO: 305848 - RNA, 32 nt, Homo Sapiens
gggaauguagagcuagccaacauaucacauuc

SEQ ID NO: 305849 - RNA, 32 nt, Homo Sapiens
agcucuucaggucucugcauuccuccuggcaa

SEQ ID NO: 305850 - RNA, 32 nt, Homo Sapiens
gucaaauuuaccauaucuucuggcuaaccaua

SEQ ID NO: 305851 - RNA, 32 nt, Homo Sapiens
ucccgccagaacgaucgccgcggccggaagag

SEQ ID NO: 305852 - RNA, 32 nt, Homo Sapiens
uaugaugauuguugguaacaacuuuuucuaua

SEQ ID NO: 305853 - RNA, 32 nt, Homo Sapiens
agcuuuuaaaugaguucuaauccagaccagcu

SEQ ID NO: 305854 - RNA, 32 nt, Homo Sapiens
ggaggaggcggagccggugccucggguucagg

SEQ ID NO: 305855 - RNA, 32 nt, Homo Sapiens
uuugccuauucccacaccuccacaguucagug

SEQ ID NO: 305856 - RNA, 32 nt, Homo Sapiens
cauccaggaccgaagaaagcucaugugcugau

SEQ ID NO: 305857 - RNA, 32 nt, Homo Sapiens
ucauucuuuguaucuucaguguugaauuguuu

SEQ ID NO: 305858 - RNA, 32 nt, Homo Sapiens
gcggggcguucucccaccuguagcgacucagg

SEQ ID NO: 305859 - RNA, 27 nt, Homo Sapiens
aauaaaaugucuuguuuuugcauugug

SEQ ID NO: 305860 - RNA, 32 nt, Homo Sapiens
ccugacaguguugggcaucugcuccccgugga

SEQ ID NO: 305861 - RNA, 32 nt, Homo Sapiens
aacguccgugcccagggcccagccccgcucac

SEQ ID NO: 305862 - RNA, 32 nt, Homo Sapiens
uugucacucugauuaaaugaguaguauucuua

SEQ ID NO: 305863 - RNA, 32 nt, Homo Sapiens
aacacaggcagacgggaccugaaggggccgcu

SEQ ID NO: 305864 - RNA, 32 nt, Homo Sapiens
uaauaauuaguugcugcaguacucauaaugag

SEQ ID NO: 305865 - RNA, 32 nt, Homo Sapiens
agacucacagaaaaaucugcccagagccuacc

SEQ ID NO: 305866 - RNA, 32 nt, Homo Sapiens
gcucgcucucucacaagcaaauguagacugcg

SEQ ID NO: 305867 - RNA, 32 nt, Homo Sapiens
acacuuuuuaucacccuguauguuagggcaag

SEQ ID NO: 305868 - RNA, 32 nt, Homo Sapiens
uacuugcuggugccgggcagaaugggggaccu

SEQ ID NO: 305869 - RNA, 32 nt, Homo Sapiens
aaaaaagauaggaaagggaaaauauuuuuuca

SEQ ID NO: 305870 - RNA, 32 nt, Homo Sapiens
gggacggggagggcaaggagcugggguggggg

SEQ ID NO: 305871 - RNA, 32 nt, Homo Sapiens
ucuaugccuuugccacauucucuucagggucu

SEQ ID NO: 305872 - RNA, 32 nt, Homo Sapiens
gguguaaaaaucaaagguuuuagaguaaaauu

SEQ ID NO: 305873 - RNA, 32 nt, Homo Sapiens
ccccagcggaacucagcccgcggcucggacuc

SEQ ID NO: 305874 - RNA, 32 nt, Homo Sapiens
caggggcccuccccacucaggcaucugauaac

SEQ ID NO: 305875 - RNA, 32 nt, Homo Sapiens
cagugccaggaccacccuugccugcagccuuu

SEQ ID NO: 305876 - RNA, 32 nt, Homo Sapiens
auuacaccuucauaugugcacacacacacaca

SEQ ID NO: 305877 - RNA, 32 nt, Homo Sapiens
cagacggcugcugcccuucucugggcauguuc

SEQ ID NO: 305878 - RNA, 32 nt, Homo Sapiens
gacccagucaccuuuacuaguccuuuggagac

SEQ ID NO: 305879 - RNA, 32 nt, Homo Sapiens
ggcgcggcguagccccgcucuccugagagcuc

SEQ ID NO: 305880 - RNA, 32 nt, Homo Sapiens
aguagacaaagaggauguggauaauauuauga

SEQ ID NO: 305881 - RNA, 32 nt, Homo Sapiens
aauuacaaacaaacaaacaaagcagaacuaaa

SEQ ID NO: 305882 - RNA, 32 nt, Homo Sapiens
agagaucuuaugucaaguucuacaucaauauc

SEQ ID NO: 305883 - RNA, 32 nt, Homo Sapiens
ucaugcugacuucuccacuaggguuucaggac

SEQ ID NO: 305884 - RNA, 32 nt, Homo Sapiens
aaaaguuacugauugcuucucaguuauuagga

SEQ ID NO: 305885 - RNA, 32 nt, Homo Sapiens
ccacgccgaggccacgaguauuucauagacau

SEQ ID NO: 305886 - RNA, 32 nt, Homo Sapiens
ggcaugcaugaaagagccccccuggugaugcc

SEQ ID NO: 305887 - RNA, 32 nt, Homo Sapiens
agggcuacagaacaggcauucaggaguccugu

SEQ ID NO: 305888 - RNA, 32 nt, Homo Sapiens
caaaagaccaaaaaucagcgggcugggaugga

SEQ ID NO: 305889 - RNA, 32 nt, Homo Sapiens
accuccgccucccagguucaagugauucuccc

SEQ ID NO: 305890 - RNA, 32 nt, Homo Sapiens
uacaggcuugcgccaccacaccuggcuaauuu

SEQ ID NO: 305891 - RNA, 32 nt, Homo Sapiens
ugaacguuguauuugcaaaauuaagccuucga

SEQ ID NO: 305892 - RNA, 32 nt, Homo Sapiens
uauacacacacacacagagacacacacacaca

SEQ ID NO: 305893 - RNA, 32 nt, Homo Sapiens
acaguuacagaaaaaauguaaacucagaguga

SEQ ID NO: 305894 - RNA, 32 nt, Homo Sapiens
uguccccgccccacaucccuucagaucccaau

SEQ ID NO: 305895 - RNA, 32 nt, Homo Sapiens
ucuugcagaacccuauacuaacauguaauggg

SEQ ID NO: 305896 - RNA, 32 nt, Homo Sapiens
agauguaauaaugaaggcauguugauaacggg

SEQ ID NO: 305897 - RNA, 32 nt, Homo Sapiens
gucugagaugguaggagcaguugugugaagau

SEQ ID NO: 305898 - RNA, 32 nt, Homo Sapiens
uugcauuccagaaucuugacuuucugauuggu

SEQ ID NO: 305899 - RNA, 32 nt, Homo Sapiens
ccgccuagacacagccaaccccggccccuggu

SEQ ID NO: 305900 - RNA, 32 nt, Homo Sapiens
uaugcuuuaaacaauaaaguaggauuuaaauc

SEQ ID NO: 305901 - RNA, 32 nt, Homo Sapiens
agccuuccaagcaugaagucggggaccaaauu

SEQ ID NO: 305902 - RNA, 32 nt, Homo Sapiens
ugaaucacauccucuaaagaugacucaugucu

SEQ ID NO: 305903 - RNA, 32 nt, Homo Sapiens
uaggacauuucugagagcaaggugauaacauu

SEQ ID NO: 305904 - RNA, 32 nt, Homo Sapiens
augggauaccauugugggaagagaagaaaagu

SEQ ID NO: 305905 - RNA, 32 nt, Homo Sapiens
guucccgcuuuaggccccgaggaggcccaaag

SEQ ID NO: 305906 - RNA, 32 nt, Homo Sapiens
uuuuuggacugccuauaauaauagcacauuaa

SEQ ID NO: 305907 - RNA, 32 nt, Homo Sapiens
ggggacccagcuugucucuccuuguuucuucc

SEQ ID NO: 305908 - RNA, 32 nt, Homo Sapiens
uaucuuuuuuaaaauuaaaaauaucugacaca

SEQ ID NO: 305909 - RNA, 32 nt, Homo Sapiens
cuuagaaaugcagucucccaauggaagcuuua

SEQ ID NO: 305910 - RNA, 32 nt, Homo Sapiens
gccucccuggccaugcugaacucuucagucaa

SEQ ID NO: 305911 - RNA, 32 nt, Homo Sapiens
uccccucaggccguggcccugcugccucucuc

SEQ ID NO: 305912 - RNA, 32 nt, Homo Sapiens
agaagcuucagccaugcaggccccacgggagc

SEQ ID NO: 305913 - RNA, 32 nt, Homo Sapiens
acucaagaaaucaaguacuucaguaagagaug

SEQ ID NO: 305914 - RNA, 32 nt, Homo Sapiens
gcuacauuggcauguggcaggcuggucagcgc

SEQ ID NO: 305915 - RNA, 32 nt, Homo Sapiens
gaauugcccugccccaggucggccaucuauca

SEQ ID NO: 305916 - RNA, 27 nt, Homo Sapiens
uuguuaccuaaguucugguaucuaagg

SEQ ID NO: 305917 - RNA, 32 nt, Homo Sapiens
cagagacuauaaaauucauccuguauaauaau

SEQ ID NO: 305918 - RNA, 32 nt, Homo Sapiens
uugagggcgggugcgggugcacaagguggggc

SEQ ID NO: 305919 - RNA, 32 nt, Homo Sapiens
agcaaccucagggcuugucuauguggguugga

SEQ ID NO: 305920 - RNA, 32 nt, Homo Sapiens
uugcuuggcccgguccccuccgugccaguucc

SEQ ID NO: 305921 - RNA, 32 nt, Homo Sapiens
aaaaaauugcaaaauauguauuuuuaaaguuc

SEQ ID NO: 305922 - RNA, 32 nt, Homo Sapiens
auuggaaauuaggauguaaaucugcucaggag

SEQ ID NO: 305923 - RNA, 32 nt, Homo Sapiens
cggcuccgcgcgcgucgcugcuaggacccggg

SEQ ID NO: 305924 - RNA, 32 nt, Homo Sapiens
ucaugaccagauugggagagccagcaccuaac

SEQ ID NO: 305925 - RNA, 32 nt, Homo Sapiens
aggacauggagaaaauccauauauuuuuagcu

SEQ ID NO: 305926 - RNA, 32 nt, Homo Sapiens
ucaaaaaguggguuggugguaacaguggaggc

SEQ ID NO: 305927 - RNA, 32 nt, Homo Sapiens
ccacugcagacuccaggggacucucacaccgc

SEQ ID NO: 305928 - RNA, 32 nt, Homo Sapiens
uauguauuugaauuccugaaaaauggaaaaug

SEQ ID NO: 305929 - RNA, 32 nt, Homo Sapiens
gaauguguaccaucugugugccugcagcugug

SEQ ID NO: 305930 - RNA, 32 nt, Homo Sapiens
cgcgugggaagcgccaggaucgcgaggaaacg

SEQ ID NO: 305931 - RNA, 32 nt, Homo Sapiens
ccuuuucuugguucuuuuuucaguuauuuuga

SEQ ID NO: 305932 - RNA, 32 nt, Homo Sapiens
gcccgguggacgucagggacucggggggcagg

SEQ ID NO: 305933 - RNA, 32 nt, Homo Sapiens
uggugagaaaacaaaauuauuggugagaaaau

SEQ ID NO: 305934 - RNA, 32 nt, Homo Sapiens
cccacgcguccgggcgcugccgggucucgguu

SEQ ID NO: 305935 - RNA, 32 nt, Homo Sapiens
ggaauaugcuguggagcuccucugccauauaa

SEQ ID NO: 305936 - RNA, 32 nt, Homo Sapiens
gccucaugucaaaugcagcaucagucuuuccg

SEQ ID NO: 305937 - RNA, 32 nt, Homo Sapiens
ggcucaagugauccuccugccucagccuccug

SEQ ID NO: 305938 - RNA, 32 nt, Homo Sapiens
aaaacaucaaggagaacgguacauguugauug

SEQ ID NO: 305939 - RNA, 32 nt, Homo Sapiens
cgcuauuuaauguuuacccccaucuccagugc

SEQ ID NO: 305940 - RNA, 32 nt, Homo Sapiens
gagccagaaauauuuuccuuuguuauguacgg

SEQ ID NO: 305941 - RNA, 32 nt, Homo Sapiens
gcugcgcugaauauggauauggugagugaauc

SEQ ID NO: 305942 - RNA, 32 nt, Homo Sapiens
uacuggcucccucagguucucgcgcgcucucc

SEQ ID NO: 305943 - RNA, 32 nt, Homo Sapiens
ugucuuuguucucggcucccacagcagagcca

SEQ ID NO: 305944 - RNA, 32 nt, Homo Sapiens
caucuuucaacagccucuaaauucaucagcag

SEQ ID NO: 305945 - RNA, 32 nt, Homo Sapiens
gccccgcgcggucuucgccgggaugaagcgcc

SEQ ID NO: 305946 - RNA, 32 nt, Homo Sapiens
cuuuuucagucugcugaagagcuuggaagacu

SEQ ID NO: 305947 - RNA, 32 nt, Homo Sapiens
cccucacccaaagguucuggcucuucccuccc

SEQ ID NO: 305948 - RNA, 29 nt, Homo Sapiens
uccuaugucgcgccgggcccuccggaggc

SEQ ID NO: 305949 - RNA, 32 nt, Homo Sapiens
ccucuccccacuuuuuuuaaaaauuuuaacca

SEQ ID NO: 305950 - RNA, 32 nt, Homo Sapiens
agaggaagccuggccuugagggaggggugcag

SEQ ID NO: 305951 - RNA, 32 nt, Homo Sapiens
gacuuuaaauucccauaaaaugucugacuuca

SEQ ID NO: 305952 - RNA, 32 nt, Homo Sapiens
uucucagcucuuugggucgcacggagcuuuuc

SEQ ID NO: 305953 - RNA, 32 nt, Homo Sapiens
ggcuuaagggagaggcgagagaaugaucuggc

SEQ ID NO: 305954 - RNA, 32 nt, Homo Sapiens
uuuuuacaugcugaauuagccucgaucuuuuu

SEQ ID NO: 305955 - RNA, 32 nt, Homo Sapiens
gcguccuccagcucagccacugcacugagaac

SEQ ID NO: 305956 - RNA, 32 nt, Homo Sapiens
uacagaagucauguaacuguggcugccucuuu

SEQ ID NO: 305957 - RNA, 32 nt, Homo Sapiens
ucagcacaugcgcacacgcacacucggacuca

SEQ ID NO: 305958 - RNA, 32 nt, Homo Sapiens
cgguugaaggcaccuuucuggucaccaugcug

SEQ ID NO: 305959 - RNA, 32 nt, Homo Sapiens
auggcuuggggaugauguaugaaguggacuuu

SEQ ID NO: 305960 - RNA, 32 nt, Homo Sapiens
uucauucacucaggaacaaaugucaagaaggu

SEQ ID NO: 305961 - RNA, 32 nt, Homo Sapiens
aacagccacaguguggggcucugccaugagga

SEQ ID NO: 305962 - RNA, 32 nt, Homo Sapiens
uucagauggugauucugaagcuuacaucuccc

SEQ ID NO: 305963 - RNA, 32 nt, Homo Sapiens
aacacacacacacacacauacacacacacaca

SEQ ID NO: 305964 - RNA, 32 nt, Homo Sapiens
auuucuuuuucuuuuucuuucuuuuuuuuuuu

SEQ ID NO: 305965 - RNA, 32 nt, Homo Sapiens
ucaggaagggaugugcuguuucccucuacgug

SEQ ID NO: 305966 - RNA, 32 nt, Homo Sapiens
ugcgagcgggcggcccggcuccccuccucccc

SEQ ID NO: 305967 - RNA, 32 nt, Homo Sapiens
uuccaguugaauuguccauuaccguaaaacuu

SEQ ID NO: 305968 - RNA, 32 nt, Homo Sapiens
gacucagaaucgaaucucuucucccuccccuu

SEQ ID NO: 305969 - RNA, 32 nt, Homo Sapiens
gaaaaauaaauggaaacaccacugcuagggga

SEQ ID NO: 305970 - RNA, 32 nt, Homo Sapiens
uugccccccacuuuggcaaauuggggacugag

SEQ ID NO: 305971 - RNA, 32 nt, Homo Sapiens
ggagcccccagcgcagcggccgcguuugaagg

SEQ ID NO: 305972 - RNA, 32 nt, Homo Sapiens
aagugcuuuucuucuuuuuggguagaaggauu

SEQ ID NO: 305973 - RNA, 32 nt, Homo Sapiens
guaguggggggaguaauacagauucuucccua

SEQ ID NO: 305974 - RNA, 32 nt, Homo Sapiens
aggcaaacccuagauugggguagagggaaaag

SEQ ID NO: 305975 - RNA, 32 nt, Homo Sapiens
uuccagcccauuccccuuuuccccucagucgc

SEQ ID NO: 305976 - RNA, 32 nt, Homo Sapiens
ugccacuggaagagaaacuuuuugaaaaaccc

SEQ ID NO: 305977 - RNA, 32 nt, Homo Sapiens
aauuaaaugaauuuguuuugccauuaaaguag

SEQ ID NO: 305978 - RNA, 32 nt, Homo Sapiens
gaaaacucuaaagauuuccaggucccauccaa

SEQ ID NO: 305979 - RNA, 32 nt, Homo Sapiens
ugcuaccagaguuuaggccacaaacuuuguaa

SEQ ID NO: 305980 - RNA, 32 nt, Homo Sapiens
gagaaguggguuccugggcagugcagauuuuu

SEQ ID NO: 305981 - RNA, 32 nt, Homo Sapiens
gccccacccaggaugggaccaccaugcgacuu

SEQ ID NO: 305982 - RNA, 32 nt, Homo Sapiens
gaaaagucaaauucauuguuuauuuuuauauu

SEQ ID NO: 305983 - RNA, 32 nt, Homo Sapiens
ucuuggugcuguuuucugucucuucuccugaa

SEQ ID NO: 305984 - RNA, 32 nt, Homo Sapiens
aaacaaaaaguccauauguguugugcuaaucc

SEQ ID NO: 305985 - RNA, 32 nt, Homo Sapiens
gguguuacagcacaugaaggccgugcaggcag

SEQ ID NO: 305986 - RNA, 32 nt, Homo Sapiens
aaugcuuugggaacuguguuuauugccuauaa

SEQ ID NO: 305987 - RNA, 32 nt, Homo Sapiens
gcagccccuccuccccggcgcccucaggaccc

SEQ ID NO: 305988 - RNA, 32 nt, Homo Sapiens
gaagcagcacuaaagcacucugaaucaagaug

SEQ ID NO: 305989 - RNA, 32 nt, Homo Sapiens
ggccuaaaaauauuuugauguuuacucaaaaa

SEQ ID NO: 305990 - RNA, 32 nt, Homo Sapiens
acuggacagcuguggggauauuaagcaccccc

SEQ ID NO: 305991 - RNA, 32 nt, Homo Sapiens
uucuuuauuccuguucccuccccuccccuucc

SEQ ID NO: 305992 - RNA, 32 nt, Homo Sapiens
ucccuauuacccccucgccucccggcccccuu

SEQ ID NO: 305993 - RNA, 32 nt, Homo Sapiens
agagcucucacagaugaagcaggaacugcucu

SEQ ID NO: 305994 - RNA, 32 nt, Homo Sapiens
uuuaaguccaaauaaagcaugugauguggaau

SEQ ID NO: 305995 - RNA, 32 nt, Homo Sapiens
cccgccuugcccgugggccccgccgggauggg

SEQ ID NO: 305996 - RNA, 32 nt, Homo Sapiens
gguaaagaaaaauuacagaauggaaaauaaua

SEQ ID NO: 305997 - RNA, 32 nt, Homo Sapiens
uagugggagauaacccagcaagccauacauau

SEQ ID NO: 305998 - RNA, 32 nt, Homo Sapiens
acuuuaagaauuuuggugaacuuugauauuuu

SEQ ID NO: 305999 - RNA, 32 nt, Homo Sapiens
uauaacuggggauaaacuagaagaaccuguga

SEQ ID NO: 306000 - RNA, 30 nt, Homo Sapiens
gcgcgaugcagcgggcggcggcgcuggucc

SEQ ID NO: 306001 - RNA, 32 nt, Homo Sapiens
aaucuuaagugcaauuauuuuaauaaaagggg

SEQ ID NO: 306002 - RNA, 27 nt, Homo Sapiens
cagucuuucuucuucaccuuagauccc

SEQ ID NO: 306003 - RNA, 32 nt, Homo Sapiens
augguagcucuggggugagcugugggggaggc

SEQ ID NO: 306004 - RNA, 32 nt, Homo Sapiens
auugaagcaaggaaagaaguugaaguaucaca

SEQ ID NO: 306005 - RNA, 32 nt, Homo Sapiens
ccagccucaggcacucucaucaucuccguugg

SEQ ID NO: 306006 - RNA, 32 nt, Homo Sapiens
agagaccaccccacccccacauuccuuugacc

SEQ ID NO: 306007 - RNA, 32 nt, Homo Sapiens
uccaggaacacaauuaggauauuuucauacac

SEQ ID NO: 306008 - RNA, 28 nt, Homo Sapiens
acauggcggcggccguaaggugcauggg

SEQ ID NO: 306009 - RNA, 32 nt, Homo Sapiens
ugcuucccgggguggggaggaggcaggaggcg

SEQ ID NO: 306010 - RNA, 32 nt, Homo Sapiens
uuuuugacuuaaguuuuagaaaauauucaugu

SEQ ID NO: 306011 - RNA, 32 nt, Homo Sapiens
aagagcccguggauguucugcgcgcggccugg

SEQ ID NO: 306012 - RNA, 32 nt, Homo Sapiens
uuuccagcggugccgcccugggucccaucuuc

SEQ ID NO: 306013 - RNA, 32 nt, Homo Sapiens
guaggaagaaaggugaugaaaacuccugguca

SEQ ID NO: 306014 - RNA, 32 nt, Homo Sapiens
ggcaggaacaggaccuucucucucccaggccc

SEQ ID NO: 306015 - RNA, 32 nt, Homo Sapiens
uguguguuagaauuuuaacauaaauuccacuu

SEQ ID NO: 306016 - RNA, 32 nt, Homo Sapiens
ggugugacauguuaguuuuucuuacuugcauu

SEQ ID NO: 306017 - RNA, 32 nt, Homo Sapiens
cugugaggccccagguggaaacgugcaagaga

SEQ ID NO: 306018 - RNA, 32 nt, Homo Sapiens
ggugcuguucccucggucacccuguugcccag

SEQ ID NO: 306019 - RNA, 32 nt, Homo Sapiens
uuggcucacugaauaggagacuuuacaucucu

SEQ ID NO: 306020 - RNA, 32 nt, Homo Sapiens
gcugaagcacugggcuuccacaggccccuggc

SEQ ID NO: 306021 - RNA, 32 nt, Homo Sapiens
cucuuccugggcagguggcccgaggacgcucc

SEQ ID NO: 306022 - RNA, 32 nt, Homo Sapiens
ugucucaugccaguaacaggcucaaacaauga

SEQ ID NO: 306023 - RNA, 32 nt, Homo Sapiens
ccagggcccgcggccgcggguucgcgagcacc

SEQ ID NO: 306024 - RNA, 31 nt, Homo Sapiens
gccucuguaaaggaggcaggagugucagagu

SEQ ID NO: 306025 - RNA, 32 nt, Homo Sapiens
uuacuggcuuuuauacuuaccaaacaucaguu

SEQ ID NO: 306026 - RNA, 32 nt, Homo Sapiens
caucagggcaggaguucucacucccauuuuac

SEQ ID NO: 306027 - RNA, 32 nt, Homo Sapiens
aaugcuauaaaauuuuaaaucuguagccuggg

SEQ ID NO: 306028 - RNA, 32 nt, Homo Sapiens
uuccacaagccacuucccugucccuucagucu

SEQ ID NO: 306029 - RNA, 30 nt, Homo Sapiens
gcgccuggcaggcggccggcucugcccagc

SEQ ID NO: 306030 - RNA, 32 nt, Homo Sapiens
gguaccaguuuagagaaauuccaagcuuuaca

SEQ ID NO: 306031 - RNA, 32 nt, Homo Sapiens
gagauccagcacaacucagucugugggagcuc

SEQ ID NO: 306032 - RNA, 32 nt, Homo Sapiens
ccugaggcucacgguacagaggccugcccugc

SEQ ID NO: 306033 - RNA, 32 nt, Homo Sapiens
acuucagauguaucugggcucuaaucauauag

SEQ ID NO: 306034 - RNA, 32 nt, Homo Sapiens
ucccagcccgucuguugagggccccaugacag

SEQ ID NO: 306035 - RNA, 32 nt, Homo Sapiens
cuaaaauguauuauugaaacagcauucugggc

SEQ ID NO: 306036 - RNA, 32 nt, Homo Sapiens
ucacuucuguuccucccugcuugcauuuuuua

SEQ ID NO: 306037 - RNA, 32 nt, Homo Sapiens
acccuucauucuucuaaccagcccugacauuc

SEQ ID NO: 306038 - RNA, 32 nt, Homo Sapiens
agguggccgcgcagcccgcgggccugucgggc

SEQ ID NO: 306039 - RNA, 32 nt, Homo Sapiens
aauauauuuuugguauaacuuuuaugagaaaa

SEQ ID NO: 306040 - RNA, 32 nt, Homo Sapiens
ucaggagugggccuuggcuggugcuggugcca

SEQ ID NO: 306041 - RNA, 32 nt, Homo Sapiens
aagaaguauuauuaugcaguacucguuauuga

SEQ ID NO: 306042 - RNA, 32 nt, Homo Sapiens
aaucccgacagaacaucaugugagauuucuuu

SEQ ID NO: 306043 - RNA, 32 nt, Homo Sapiens
uaauguguacuaugacaaacgugcuuuauucu

SEQ ID NO: 306044 - RNA, 32 nt, Homo Sapiens
uucugcauccuguucccuguuaaacuucuuag

SEQ ID NO: 306045 - RNA, 32 nt, Homo Sapiens
uuacacacucuagcuuaggaauccccaguuug

SEQ ID NO: 306046 - RNA, 32 nt, Homo Sapiens
caagacccuggguguucagaccccaaggccag

SEQ ID NO: 306047 - RNA, 32 nt, Homo Sapiens
guggacuuggucaccagcuccucccuuguucu

SEQ ID NO: 306048 - RNA, 32 nt, Homo Sapiens
ucuuuuugaucaucuuuuuuuaauaauuagaa

SEQ ID NO: 306049 - RNA, 28 nt, Homo Sapiens
cagaacugaggccccaggaugacagaac

SEQ ID NO: 306050 - RNA, 32 nt, Homo Sapiens
ccaaauccagcauggcuuggaggagcucuguu

SEQ ID NO: 306051 - RNA, 32 nt, Homo Sapiens
uaggcuaggacguuggccucagggccaggaag

SEQ ID NO: 306052 - RNA, 32 nt, Homo Sapiens
gaaugccuguauuguucauguaacucgcaggg

SEQ ID NO: 306053 - RNA, 32 nt, Homo Sapiens
accaccgccagcugccagcaccgcuacagauc

SEQ ID NO: 306054 - RNA, 32 nt, Homo Sapiens
ugcucuucuucuuuucuugaucuuccugucug

SEQ ID NO: 306055 - RNA, 32 nt, Homo Sapiens
uggcuuccucagcuccucacagaugguccaca

SEQ ID NO: 306056 - RNA, 30 nt, Homo Sapiens
cgaucaugcagcccccacuggaccucaagc

SEQ ID NO: 306057 - RNA, 32 nt, Homo Sapiens
ugcccgcgaugguggccgcgcugcugggcggc

SEQ ID NO: 306058 - RNA, 32 nt, Homo Sapiens
gccgggucgggcggcccagggaccgacagacu

SEQ ID NO: 306059 - RNA, 32 nt, Homo Sapiens
cuacugaacaaauguaguauaaagguuauuau

SEQ ID NO: 306060 - RNA, 32 nt, Homo Sapiens
gugaggaaggauuugguucuccuuccaggagu

SEQ ID NO: 306061 - RNA, 32 nt, Homo Sapiens
caccugucccccugccugucuccagugggaag

SEQ ID NO: 306062 - RNA, 32 nt, Homo Sapiens
uuuuuagaaaucagcuacccauuauagcacaa

SEQ ID NO: 306063 - RNA, 32 nt, Homo Sapiens
uguugcuaaaagauaccugaauaugugaaagu

SEQ ID NO: 306064 - RNA, 32 nt, Homo Sapiens
gcugccuggggcgggcggcgcgugucugcagc

SEQ ID NO: 306065 - RNA, 32 nt, Homo Sapiens
cgccugcugaagcccacggccgugccauccau

SEQ ID NO: 306066 - RNA, 32 nt, Homo Sapiens
uuccccaggcuccauucccccauccaagaguu

SEQ ID NO: 306067 - RNA, 32 nt, Homo Sapiens
uccuuaguucuuaaugucucaguuuuugaauu

SEQ ID NO: 306068 - RNA, 32 nt, Homo Sapiens
gcucuucugugauuuugagaaguauacucuug

SEQ ID NO: 306069 - RNA, 32 nt, Homo Sapiens
uccaugccagcacuucugcacuacggccauuc

SEQ ID NO: 306070 - RNA, 32 nt, Homo Sapiens
cacccaaagggagaggaguggaagaccuucug

SEQ ID NO: 306071 - RNA, 32 nt, Homo Sapiens
agaaaggaagaaacuuaagaaccaucauagcc

SEQ ID NO: 306072 - RNA, 32 nt, Homo Sapiens
gcccugaguuucuggcggggcugagcaguggg

SEQ ID NO: 306073 - RNA, 32 nt, Homo Sapiens
guggcgccugcgcugggaggugagcuugugac

SEQ ID NO: 306074 - RNA, 32 nt, Homo Sapiens
gcgacuggcgugugcuucugcccgccaccgcc

SEQ ID NO: 306075 - RNA, 32 nt, Homo Sapiens
gcaacuuuccugaagcaucuccagggcuggau

SEQ ID NO: 306076 - RNA, 32 nt, Homo Sapiens
ugcccagaccuucguuuguuuccccgguggcc

SEQ ID NO: 306077 - RNA, 32 nt, Homo Sapiens
cccggcccacacccgacaccagcccugcugcu

SEQ ID NO: 306078 - RNA, 32 nt, Homo Sapiens
cccacuguuguggucagccccagagaauuuua

SEQ ID NO: 306079 - RNA, 32 nt, Homo Sapiens
uauggaaaacauuuuucuuauuuuuaaguguu

SEQ ID NO: 306080 - RNA, 32 nt, Homo Sapiens
ugaaguuuuucugcauuauacaacccuaaaac

SEQ ID NO: 306081 - RNA, 32 nt, Homo Sapiens
aacacuggaaaacaaauucccccaaaacacau

SEQ ID NO: 306082 - RNA, 32 nt, Homo Sapiens
ccaggacuauaaaauuccacaaaugauugugc

SEQ ID NO: 306083 - RNA, 32 nt, Homo Sapiens
auuuuguguuuguuuccugaguccugagguua

SEQ ID NO: 306084 - RNA, 32 nt, Homo Sapiens
uugccggauuauucuauuuccccucccucucu

SEQ ID NO: 306085 - RNA, 32 nt, Homo Sapiens
uaugagacgaucucgcugggaccgccccugcc

SEQ ID NO: 306086 - RNA, 32 nt, Homo Sapiens
gguuuguggugauguuaaguucuguuaggacc

SEQ ID NO: 306087 - RNA, 32 nt, Homo Sapiens
ggacuucuguuguauucucaccacucaauuug

SEQ ID NO: 306088 - RNA, 32 nt, Homo Sapiens
ugcugcuucuguauauuuccacagcauccuag

SEQ ID NO: 306089 - RNA, 31 nt, Homo Sapiens
gcaaggaugagguacaaggaaaugguagaac

SEQ ID NO: 306090 - RNA, 32 nt, Homo Sapiens
aaauuuuuaauuacuuuuuuuuuuuuugagac

SEQ ID NO: 306091 - RNA, 32 nt, Homo Sapiens
cacauucaucauuaaacuauacaggaugaggc

SEQ ID NO: 306092 - RNA, 32 nt, Homo Sapiens
uaagucuugugauuucuugccuuauuggagcu

SEQ ID NO: 306093 - RNA, 32 nt, Homo Sapiens
uucuggcuucuaguccaaugccaaguguguga

SEQ ID NO: 306094 - RNA, 32 nt, Homo Sapiens
uccagcguccugucgccuccucgcccgacuuc

SEQ ID NO: 306095 - RNA, 32 nt, Homo Sapiens
cugguucugaggggucggcuugagaucggcug

SEQ ID NO: 306096 - RNA, 32 nt, Homo Sapiens
gacagcgcagcucgcgucgacccuggcuccuc

SEQ ID NO: 306097 - RNA, 32 nt, Homo Sapiens
gaaucaugcgaaaggggagcuguuggaauuca

SEQ ID NO: 306098 - RNA, 32 nt, Homo Sapiens
ucucuguugcuguugagucucugcuccguuuu

SEQ ID NO: 306099 - RNA, 32 nt, Homo Sapiens
gcaccacaccaucccuaaagugccaggugauc

SEQ ID NO: 306100 - RNA, 32 nt, Homo Sapiens
gugggaaauaaaaggcaguucuacacagacug

SEQ ID NO: 306101 - RNA, 32 nt, Homo Sapiens
acccccagcuccggccuguccuccaacaccaa

SEQ ID NO: 306102 - RNA, 32 nt, Homo Sapiens
ccuguuaccuguggguggccugucccaggggc

SEQ ID NO: 306103 - RNA, 32 nt, Homo Sapiens
gccccccagacccagcuguccgggccacagac

SEQ ID NO: 306104 - RNA, 32 nt, Homo Sapiens
agcgcgccccucgcaccgcagccagugccgac

SEQ ID NO: 306105 - RNA, 32 nt, Homo Sapiens
aaucaacugugacccucgcuccuuccauuucu

SEQ ID NO: 306106 - RNA, 32 nt, Homo Sapiens
caaggcugcccccaccuggccacagccgccuc

SEQ ID NO: 306107 - RNA, 32 nt, Homo Sapiens
ggauucuauccugcaagggcacggggacccac

SEQ ID NO: 306108 - RNA, 32 nt, Homo Sapiens
ucugucccaagcaagagagaugaauggagagu

SEQ ID NO: 306109 - RNA, 32 nt, Homo Sapiens
uucccucccgcggcgaccagggcccgagccga

SEQ ID NO: 306110 - RNA, 32 nt, Homo Sapiens
uggaucucauucucccuuuuuauccugaguua

SEQ ID NO: 306111 - RNA, 32 nt, Homo Sapiens
guauguaaugcacaacuugcacaaacgguaag

SEQ ID NO: 306112 - RNA, 32 nt, Homo Sapiens
gaauuucacaaagcuuuuuuuaucuucaguuc

SEQ ID NO: 306113 - RNA, 32 nt, Homo Sapiens
agcaggcccuccccaaggggcucggaacucua

SEQ ID NO: 306114 - RNA, 32 nt, Homo Sapiens
cuuagggcacugggcuguuguuccauugaagc

SEQ ID NO: 306115 - RNA, 30 nt, Homo Sapiens
cgucuuuauaaaauaaauucaguaaaaugg

SEQ ID NO: 306116 - RNA, 32 nt, Homo Sapiens
accaagaaugaaacuauuuacaaauuaagaug

SEQ ID NO: 306117 - RNA, 32 nt, Homo Sapiens
gggaacccgcggcccacagugacccucuacaa

SEQ ID NO: 306118 - RNA, 32 nt, Homo Sapiens
uuuuuuuauaaauaaacuguugcucguuaaaa

SEQ ID NO: 306119 - RNA, 32 nt, Homo Sapiens
ggccccgguggcggcggcgcgugcgacgguca

SEQ ID NO: 306120 - RNA, 32 nt, Homo Sapiens
uguuuuaaucccaauuuuaguaaaaugugucu

SEQ ID NO: 306121 - RNA, 32 nt, Homo Sapiens
cuggguucacgucauuuuccugucucagccuc

SEQ ID NO: 306122 - RNA, 32 nt, Homo Sapiens
gggagugcguaggcuuccagugaugguugggg

SEQ ID NO: 306123 - RNA, 32 nt, Homo Sapiens
uugaggugccagaagagggaaaagcacauugc

SEQ ID NO: 306124 - RNA, 31 nt, Homo Sapiens
aacucaugcuggagaaagacauuccaaauau

SEQ ID NO: 306125 - RNA, 32 nt, Homo Sapiens
guagccaauccgggggacccaggacaugcccc

SEQ ID NO: 306126 - RNA, 32 nt, Homo Sapiens
aaacaucugccacauuuaguguguguaugugu

SEQ ID NO: 306127 - RNA, 32 nt, Homo Sapiens
cucagcaguuuuucuguaaaucugaagcuauu

SEQ ID NO: 306128 - RNA, 32 nt, Homo Sapiens
gacacggaagcaugcgacggcugcugaucccu

SEQ ID NO: 306129 - RNA, 32 nt, Homo Sapiens
ugcggaggacgcccgccccacucagccuccuc

SEQ ID NO: 306130 - RNA, 32 nt, Homo Sapiens
cuccgccaguggguuauaugucucagcccaag

SEQ ID NO: 306131 - RNA, 32 nt, Homo Sapiens
guuuagaaagacugauggagaagugagcacca

SEQ ID NO: 306132 - RNA, 32 nt, Homo Sapiens
agccaggacugggaaacuguguugaagcuccu

SEQ ID NO: 306133 - RNA, 27 nt, Homo Sapiens
ucagccugugccuucagcccccggaaa

SEQ ID NO: 306134 - RNA, 32 nt, Homo Sapiens
gcagcucccgcgugucggccccccgccagcgg

SEQ ID NO: 306135 - RNA, 32 nt, Homo Sapiens
uuguaaauauauauguauacauguggaagaua

SEQ ID NO: 306136 - RNA, 32 nt, Homo Sapiens
ccucugcucugugcucagcugcaaccacagcc

SEQ ID NO: 306137 - RNA, 32 nt, Homo Sapiens
ugaggcugugggggaccuccaggccgaaccuc

SEQ ID NO: 306138 - RNA, 32 nt, Homo Sapiens
guccuuuauagcaaaaguuuccaguucaaaau

SEQ ID NO: 306139 - RNA, 32 nt, Homo Sapiens
uugguggggagauaaaauccauugcugcuaag

SEQ ID NO: 306140 - RNA, 32 nt, Homo Sapiens
auccucuguggagccacugaucuuacaaagcu

SEQ ID NO: 306141 - RNA, 32 nt, Homo Sapiens
gagcaggagacggcauugcgcgucuacagcca

SEQ ID NO: 306142 - RNA, 32 nt, Homo Sapiens
aguggcagagagaggagcaguagcccgcggag

SEQ ID NO: 306143 - RNA, 32 nt, Homo Sapiens
cuccugaaccaucaggaacccaggaaucuacc

SEQ ID NO: 306144 - RNA, 32 nt, Homo Sapiens
ggauucuuugauuuucuuuugaggaucaaucu

SEQ ID NO: 306145 - RNA, 32 nt, Homo Sapiens
caaugcugguauugcaccuucuggaacuaugg

SEQ ID NO: 306146 - RNA, 32 nt, Homo Sapiens
cucucugcugagcugggcccagccccuccaca

SEQ ID NO: 306147 - RNA, 32 nt, Homo Sapiens
cuuccuuuucuuuuucagugcagaaauuaaaa

SEQ ID NO: 306148 - RNA, 32 nt, Homo Sapiens
ggaagcaggguggugagcugcugggguuggau

SEQ ID NO: 306149 - RNA, 32 nt, Homo Sapiens
aggaaccguacaucccaucugcucucuggcca

SEQ ID NO: 306150 - RNA, 32 nt, Homo Sapiens
ucugugaugggggcgcggacaccaccccuagg

SEQ ID NO: 306151 - RNA, 32 nt, Homo Sapiens
uuggcagaauaguuuuaaauuuugcuguauuu

SEQ ID NO: 306152 - RNA, 32 nt, Homo Sapiens
ugcccuuccgcgccucgagccaucgcuaccgc

SEQ ID NO: 306153 - RNA, 32 nt, Homo Sapiens
guuuuaugaugaugcuggguaaguagaguaag

SEQ ID NO: 306154 - RNA, 32 nt, Homo Sapiens
ccacuccuggguggccugggggcccccacccu

SEQ ID NO: 306155 - RNA, 32 nt, Homo Sapiens
gcugcagaucacaucaguuuuucagucaaaga

SEQ ID NO: 306156 - RNA, 32 nt, Homo Sapiens
cucaguacauaagugcauuuugaaagagguuc

SEQ ID NO: 306157 - RNA, 32 nt, Homo Sapiens
agugcauacauuuauauaaucuaaucuuggaa

SEQ ID NO: 306158 - RNA, 32 nt, Homo Sapiens
guggagugggcuguagugggaagaagagucuu

SEQ ID NO: 306159 - RNA, 32 nt, Homo Sapiens
agccuggccaacaugguuaaaccccgucucua

SEQ ID NO: 306160 - RNA, 32 nt, Homo Sapiens
ggccgggcgucccgggauggccuucauggaga

SEQ ID NO: 306161 - RNA, 32 nt, Homo Sapiens
gcgcggcgaaccgucuagccuccggaggccag

SEQ ID NO: 306162 - RNA, 32 nt, Homo Sapiens
gccgagaucgcaccacugcacuccagcaugag

SEQ ID NO: 306163 - RNA, 32 nt, Homo Sapiens
ggaugaugaugaugaugacuacaggaauuaca

SEQ ID NO: 306164 - RNA, 32 nt, Homo Sapiens
gaaauccagacacccccacccccacccucaga

SEQ ID NO: 306165 - RNA, 32 nt, Homo Sapiens
uaaaacggugggccgaggcggcugggcuggac

SEQ ID NO: 306166 - RNA, 32 nt, Homo Sapiens
agggucugcauaaugaucccauuucagccugu

SEQ ID NO: 306167 - RNA, 32 nt, Homo Sapiens
aaaugcacaauuuucuaaguuugggaagcagc

SEQ ID NO: 306168 - RNA, 32 nt, Homo Sapiens
uggaacgguuggaauuuucugggcccaguucc

SEQ ID NO: 306169 - RNA, 32 nt, Homo Sapiens
ugcccucggauuaucagcacuccaguucucgc

SEQ ID NO: 306170 - RNA, 32 nt, Homo Sapiens
ugaagagaacagaauccacaccugcauugaau

SEQ ID NO: 306171 - RNA, 32 nt, Homo Sapiens
uaacaugaacauugcuucaucuuuguuccaca

SEQ ID NO: 306172 - RNA, 32 nt, Homo Sapiens
caagugccccuugagaugggcugaacgugaug

SEQ ID NO: 306173 - RNA, 32 nt, Homo Sapiens
agccccuuauauuugcagggaagaaagaguga

SEQ ID NO: 306174 - RNA, 32 nt, Homo Sapiens
acacuuaaaaauuaauguuucaaaaucucugu

SEQ ID NO: 306175 - RNA, 32 nt, Homo Sapiens
agaugaggaaacugaggccuggagaguuuaag

SEQ ID NO: 306176 - RNA, 32 nt, Homo Sapiens
ccgucccggcucccggccggcucgggggagaa

SEQ ID NO: 306177 - RNA, 32 nt, Homo Sapiens
ucgucuaucuggccccuccucccggcuggacu

SEQ ID NO: 306178 - RNA, 32 nt, Homo Sapiens
ugccagcccucccuggcagcccauguucuccu

SEQ ID NO: 306179 - RNA, 32 nt, Homo Sapiens
cucccugagaggcaugacccaggccagcugau

SEQ ID NO: 306180 - RNA, 32 nt, Homo Sapiens
aagcugcuggccaagcucaguggggagccugg

SEQ ID NO: 306181 - RNA, 32 nt, Homo Sapiens
gcagcggcggcuccagcuccugcggcuccucc

SEQ ID NO: 306182 - RNA, 32 nt, Homo Sapiens
uuuuaaaaaaaauaaacacucugcuuacuacu

SEQ ID NO: 306183 - RNA, 32 nt, Homo Sapiens
cagaaccuauuauaaagacuguauuucccaua

SEQ ID NO: 306184 - RNA, 32 nt, Homo Sapiens
acauacuucuuugcaguucauuauaguaaggc

SEQ ID NO: 306185 - RNA, 29 nt, Homo Sapiens
gguugucuggguuucagagcuguuuuuaa

SEQ ID NO: 306186 - RNA, 32 nt, Homo Sapiens
ccucuaugguuccacaucugaguguucgccac

SEQ ID NO: 306187 - RNA, 32 nt, Homo Sapiens
cgccccacuucgcuugccaucacagcacgccu

SEQ ID NO: 306188 - RNA, 32 nt, Homo Sapiens
uuggggcccgcgccgcgcgccggcggcaccau

SEQ ID NO: 306189 - RNA, 32 nt, Homo Sapiens
cuguuuccuucuucuuuuuuucacugugacaa

SEQ ID NO: 306190 - RNA, 32 nt, Homo Sapiens
cgauggcucacgccuguaaucccggcacuuug

SEQ ID NO: 306191 - RNA, 32 nt, Homo Sapiens
aacucaucaguucuuggcguuucacgccaugc

SEQ ID NO: 306192 - RNA, 32 nt, Homo Sapiens
gacccucucuugcucaauaacucucaacuguu

SEQ ID NO: 306193 - RNA, 28 nt, Homo Sapiens
aauuauaugucuaauucuauguguuuug

SEQ ID NO: 306194 - RNA, 32 nt, Homo Sapiens
uauauuggggaaugcagguggggggugucacc

SEQ ID NO: 306195 - RNA, 32 nt, Homo Sapiens
guucaaccagugcuauggggugcugggugugc

SEQ ID NO: 306196 - RNA, 32 nt, Homo Sapiens
ccccacucaucggcugccucccagggaggagg

SEQ ID NO: 306197 - RNA, 32 nt, Homo Sapiens
gcugcccgagaccgcagggcaaguaagcggcu

SEQ ID NO: 306198 - RNA, 32 nt, Homo Sapiens
ucaaagcccaaguuccaguuuucacaaucugc

SEQ ID NO: 306199 - RNA, 32 nt, Homo Sapiens
uaaugcagauggacagauaaaaaagauuuuac

SEQ ID NO: 306200 - RNA, 32 nt, Homo Sapiens
auauucacccucagagaaggcgugaggaauca

SEQ ID NO: 306201 - RNA, 32 nt, Homo Sapiens
aauucauggcucugggcaccccgugaggcagu

SEQ ID NO: 306202 - RNA, 32 nt, Homo Sapiens
cacauaggcuccuggcguggacaaggggucug

SEQ ID NO: 306203 - RNA, 32 nt, Homo Sapiens
acaguguucacauuuucauauuuuuucccuaa

SEQ ID NO: 306204 - RNA, 32 nt, Homo Sapiens
ggagaaaagaucugagaauguccuucuugguu

SEQ ID NO: 306205 - RNA, 32 nt, Homo Sapiens
uaaucuacuuggaauguggauaaauguaaaaa

SEQ ID NO: 306206 - RNA, 32 nt, Homo Sapiens
gggcuugcaggagagcgugcaaacugaaacca

SEQ ID NO: 306207 - RNA, 32 nt, Homo Sapiens
ugaugugaaaaauaaaaguaauaaaaguaucu

SEQ ID NO: 306208 - RNA, 32 nt, Homo Sapiens
ucuggaacaaaguggugauuaaaauuccuaau

SEQ ID NO: 306209 - RNA, 32 nt, Homo Sapiens
caggucucuccgcuccucuuggccucaugugu

SEQ ID NO: 306210 - RNA, 32 nt, Homo Sapiens
cccaccuuucuuucguucaucuccagggcccc

SEQ ID NO: 306211 - RNA, 32 nt, Homo Sapiens
augauguuacuuugauuuuauauauaauccca

SEQ ID NO: 306212 - RNA, 32 nt, Homo Sapiens
gcaggccgaucgccagcuccguggcagcgguc

SEQ ID NO: 306213 - RNA, 32 nt, Homo Sapiens
gggaaccacaguggauaugcuagcauuuuagc

SEQ ID NO: 306214 - RNA, 32 nt, Homo Sapiens
caaugugaaaauacaucucaaugucauucuuu

SEQ ID NO: 306215 - RNA, 32 nt, Homo Sapiens
cugcucgcuccgggucccggcgccgcgccaug

SEQ ID NO: 306216 - RNA, 32 nt, Homo Sapiens
ugggggaagaggaggaggagggccgaucgucc

SEQ ID NO: 306217 - RNA, 32 nt, Homo Sapiens
ccuggcugggaagcggcuagggcacccgggca

SEQ ID NO: 306218 - RNA, 32 nt, Homo Sapiens
accacaggcagaaacuaggagaaaccacagga

SEQ ID NO: 306219 - RNA, 32 nt, Homo Sapiens
augguguggagguuccggggagcccugccccu

SEQ ID NO: 306220 - RNA, 32 nt, Homo Sapiens
uuguuugcuccaggguuauucuccuccucgag

SEQ ID NO: 306221 - RNA, 32 nt, Homo Sapiens
aggaaggcagcaugcucagugggaacacagca

SEQ ID NO: 306222 - RNA, 32 nt, Homo Sapiens
uaacaaggcauugaagaauggcagaugaacgg

SEQ ID NO: 306223 - RNA, 32 nt, Homo Sapiens
cuauaaauauaaaucuauauuccuguauuuuu

SEQ ID NO: 306224 - RNA, 32 nt, Homo Sapiens
cuggauggcccggccccggggcccguacacag

SEQ ID NO: 306225 - RNA, 32 nt, Homo Sapiens
uaauauucauucaaaaaggguguuuauaucga

SEQ ID NO: 306226 - RNA, 32 nt, Homo Sapiens
gaagccgaaaauuuuuaaauuauuaacaaggu

SEQ ID NO: 306227 - RNA, 32 nt, Homo Sapiens
uuacauuuucuuuuuucuuaugugauaauucc

SEQ ID NO: 306228 - RNA, 32 nt, Homo Sapiens
aagcauuaaaaauaagccaaaauaagacuauu

SEQ ID NO: 306229 - RNA, 32 nt, Homo Sapiens
acucauuuagccauucuuauuauuauaaaaaa

SEQ ID NO: 306230 - RNA, 32 nt, Homo Sapiens
ggucagacccauggcuggggucgcacacgcau

SEQ ID NO: 306231 - RNA, 32 nt, Homo Sapiens
accacugcacuccagccugggcgacagagcaa

SEQ ID NO: 306232 - RNA, 32 nt, Homo Sapiens
gaaaaaacugaauauauucaggaccaacucuc

SEQ ID NO: 306233 - RNA, 32 nt, Homo Sapiens
ccugaaagagaaucucgaggauauaucggguu

SEQ ID NO: 306234 - RNA, 32 nt, Homo Sapiens
cagugagagccuccccugccccugccugccca

SEQ ID NO: 306235 - RNA, 32 nt, Homo Sapiens
guagaacugaagauuuccauugaugugaagca

SEQ ID NO: 306236 - RNA, 29 nt, Homo Sapiens
gccuccauagugaaucuccagaagucaca

SEQ ID NO: 306237 - RNA, 32 nt, Homo Sapiens
cuccccaugaaauuaaauuuuacuucauccuu

SEQ ID NO: 306238 - RNA, 32 nt, Homo Sapiens
uccauuucuggaaggguuuucuuguucuuaaa

SEQ ID NO: 306239 - RNA, 32 nt, Homo Sapiens
agacuauguauuauucuaacauguaggcugau

SEQ ID NO: 306240 - RNA, 30 nt, Homo Sapiens
ucucuccaugcuccugacucaagaaaagga

SEQ ID NO: 306241 - RNA, 32 nt, Homo Sapiens
ccuuccugccagcuguuugcccuuaggccagu

SEQ ID NO: 306242 - RNA, 32 nt, Homo Sapiens
agacuugagcccaauuaaauuuuauuuuugcu

SEQ ID NO: 306243 - RNA, 32 nt, Homo Sapiens
uugaguuaaaugaguucuuaauaaucucuggc

SEQ ID NO: 306244 - RNA, 32 nt, Homo Sapiens
aagccauccuucugccucacugucccuaguag

SEQ ID NO: 306245 - RNA, 32 nt, Homo Sapiens
uuucaaagaaugcuccauguucauugggcccu

SEQ ID NO: 306246 - RNA, 32 nt, Homo Sapiens
gggaggcccgcagggaagugucugcacaucac

SEQ ID NO: 306247 - RNA, 32 nt, Homo Sapiens
uucuucaucugggucuugcaggaggcaggcaa

SEQ ID NO: 306248 - RNA, 32 nt, Homo Sapiens
gcaggcucugccccggcccggcggcucuggcc

SEQ ID NO: 306249 - RNA, 32 nt, Homo Sapiens
gagcugccgcgguggaacaguccauggcucug

SEQ ID NO: 306250 - RNA, 32 nt, Homo Sapiens
aggaagcucaggaucugacauguucuuccuuu

SEQ ID NO: 306251 - RNA, 32 nt, Homo Sapiens
ggucuaauuucuacauaauuauugcacugaac

SEQ ID NO: 306252 - RNA, 32 nt, Homo Sapiens
ccaaagccacuacugaccaaggucucuucagu

SEQ ID NO: 306253 - RNA, 32 nt, Homo Sapiens
auaaaauaauuucucaccuauuuugugugugu

SEQ ID NO: 306254 - RNA, 32 nt, Homo Sapiens
ucauccaugcuuagcaucuacucuguauaacg

SEQ ID NO: 306255 - RNA, 32 nt, Homo Sapiens
gguaaaaagagaugaucaguugguuguuuacu

SEQ ID NO: 306256 - RNA, 32 nt, Homo Sapiens
uuugugcugaaauaaugaaaaucauaaucaau

SEQ ID NO: 306257 - RNA, 32 nt, Homo Sapiens
gaucagugguuaucuuugcagacgccaccauc

SEQ ID NO: 306258 - RNA, 32 nt, Homo Sapiens
ccuguucagggugaggguucucugcaagaacc

SEQ ID NO: 306259 - RNA, 32 nt, Homo Sapiens
gcagccgccucccuuaugcaggacaugugcuc

SEQ ID NO: 306260 - RNA, 32 nt, Homo Sapiens
aguucucaggacucccaccucugccccaaggg

SEQ ID NO: 306261 - RNA, 32 nt, Homo Sapiens
cugccucugaaucccuaccuuuaaagucagaa

SEQ ID NO: 306262 - RNA, 31 nt, Homo Sapiens
gccgccagucgucgccugcccgcgccugcgc

SEQ ID NO: 306263 - RNA, 30 nt, Homo Sapiens
ucgggaugccgcggccgggguccgcgcagc

SEQ ID NO: 306264 - RNA, 32 nt, Homo Sapiens
uaaaaucgcucuugcguccucagcguuuaucu

SEQ ID NO: 306265 - RNA, 32 nt, Homo Sapiens
ggccacguccacuccaagcagcugguccaggu

SEQ ID NO: 306266 - RNA, 32 nt, Homo Sapiens
cugccccaaauaacuucaguccugcuuccaga

SEQ ID NO: 306267 - RNA, 32 nt, Homo Sapiens
auaguggagcccacaauugaccuuugucuaau

SEQ ID NO: 306268 - RNA, 32 nt, Homo Sapiens
aaaucuugcaacuguucuauguucacuacacc

SEQ ID NO: 306269 - RNA, 32 nt, Homo Sapiens
uccgucuccccgcuccggagcccaggcggcgg

SEQ ID NO: 306270 - RNA, 32 nt, Homo Sapiens
uaaugagacuuguugagcacaaaaauggacuu

SEQ ID NO: 306271 - RNA, 32 nt, Homo Sapiens
ucggagucucccagccccgcggccccgagcgc

SEQ ID NO: 306272 - RNA, 32 nt, Homo Sapiens
ugauuucuuuuuccucuuccgcuaguugugaa

SEQ ID NO: 306273 - RNA, 30 nt, Homo Sapiens
gucaccuucucgaucccgccggcgcuuuag

SEQ ID NO: 306274 - RNA, 32 nt, Homo Sapiens
auuuccucugugucuuugggcagacuuccuuc

SEQ ID NO: 306275 - RNA, 30 nt, Homo Sapiens
gguggguauaaaagauggggucuguaaaau

SEQ ID NO: 306276 - RNA, 32 nt, Homo Sapiens
agagccgguuuccguggcaacccucagcugcc

SEQ ID NO: 306277 - RNA, 32 nt, Homo Sapiens
cccugagcggugggcgggccucguccgcaggu

SEQ ID NO: 306278 - RNA, 32 nt, Homo Sapiens
aaugaucuguaggggagggaguucaaauaaag

SEQ ID NO: 306279 - RNA, 32 nt, Homo Sapiens
uugcagcauauaugaauugcauuuucaaaaga

SEQ ID NO: 306280 - RNA, 28 nt, Homo Sapiens
cuggggaggcggccgcgcugagcucacu

SEQ ID NO: 306281 - RNA, 32 nt, Homo Sapiens
gccuuauuucccucccuccccacuccccuggc

SEQ ID NO: 306282 - RNA, 32 nt, Homo Sapiens
uuucaagauaaaauuuaaguauucaguaaaau

SEQ ID NO: 306283 - RNA, 32 nt, Homo Sapiens
gacucuauuucccccgucagucugggggcuuc

SEQ ID NO: 306284 - RNA, 32 nt, Homo Sapiens
uggcucacgaaguuaaggaaagaugccaucug

SEQ ID NO: 306285 - RNA, 32 nt, Homo Sapiens
caguauguaguugaguggaggcugggaguuuu

SEQ ID NO: 306286 - RNA, 32 nt, Homo Sapiens
uuugugugucuuaauuauuauuuguguuuuaa

SEQ ID NO: 306287 - RNA, 32 nt, Homo Sapiens
cgcgugggccgcggggugcugguaggaguggu

SEQ ID NO: 306288 - RNA, 32 nt, Homo Sapiens
gucuaggcaaauccagccugcauuaaugcauu

SEQ ID NO: 306289 - RNA, 32 nt, Homo Sapiens
gcuguagacuccugggugcuggaggaguagag

SEQ ID NO: 306290 - RNA, 32 nt, Homo Sapiens
ucugaaauuuaaaauauguaaacuaaaguggu

SEQ ID NO: 306291 - RNA, 32 nt, Homo Sapiens
gccuccugucuccagagaaguucuccauuaaa

SEQ ID NO: 306292 - RNA, 32 nt, Homo Sapiens
uugcaauagauauaauuuccaauauaccauuc

SEQ ID NO: 306293 - RNA, 32 nt, Homo Sapiens
uuucuaaauggcaucgaagcuggucuuuaaug

SEQ ID NO: 306294 - RNA, 32 nt, Homo Sapiens
uaacuugcccccgcgccggccgggcccauggc

SEQ ID NO: 306295 - RNA, 32 nt, Homo Sapiens
aagaaagaaaaauuaucuugaauguaguauuc

SEQ ID NO: 306296 - RNA, 32 nt, Homo Sapiens
ccuggucacuacacaguggaaaacagacaagc

SEQ ID NO: 306297 - RNA, 32 nt, Homo Sapiens
aucccuuguaaguuggauuccuagguauuuua

SEQ ID NO: 306298 - RNA, 32 nt, Homo Sapiens
uuguggucugagccaaagagaaugccauucuc

SEQ ID NO: 306299 - RNA, 31 nt, Homo Sapiens
cgucaacggcacugcuucaggacgcgcuugc

SEQ ID NO: 306300 - RNA, 30 nt, Homo Sapiens
cauuuaccacuugcacaccagaccuuauaa

SEQ ID NO: 306301 - RNA, 32 nt, Homo Sapiens
ggaauagacuucuaguucauucugggacacuu

SEQ ID NO: 306302 - RNA, 32 nt, Homo Sapiens
ucuccuagcacuccuuuccccugcuguccccu

SEQ ID NO: 306303 - RNA, 32 nt, Homo Sapiens
gaaaggaccuggaagcaguagugugucuucag

SEQ ID NO: 306304 - RNA, 32 nt, Homo Sapiens
agcaaaauauauguauaguuuauaauauagaa

SEQ ID NO: 306305 - RNA, 32 nt, Homo Sapiens
cucaccccucgcgcaccagucccggcccggca

SEQ ID NO: 306306 - RNA, 32 nt, Homo Sapiens
cugauuacuggacacaguuuuauucuuaucag

SEQ ID NO: 306307 - RNA, 32 nt, Homo Sapiens
agucucccugucagccacacccuuugucuccc

SEQ ID NO: 306308 - RNA, 32 nt, Homo Sapiens
agaaaucgaagcaaacaugucuggagaagugc

SEQ ID NO: 306309 - RNA, 32 nt, Homo Sapiens
aaccugucuccauugugugauccagcccuggu

SEQ ID NO: 306310 - RNA, 32 nt, Homo Sapiens
aauauaucuuggcgaagcugcaaggcgaggcc

SEQ ID NO: 306311 - RNA, 32 nt, Homo Sapiens
ucuggcaccacugcccugguccuuccagcugc

SEQ ID NO: 306312 - RNA, 32 nt, Homo Sapiens
uccuuugccugcauccuguguacaacaugaca

SEQ ID NO: 306313 - RNA, 32 nt, Homo Sapiens
gcccccuccccgcucccaccucccugcuggga

SEQ ID NO: 306314 - RNA, 32 nt, Homo Sapiens
acugucagcuccccucggagaagagcuguuca

SEQ ID NO: 306315 - RNA, 32 nt, Homo Sapiens
cuagccgaggccagucugcugccgugugcgug

SEQ ID NO: 306316 - RNA, 32 nt, Homo Sapiens
auauaauggccauauucaugauauuuaacaua

SEQ ID NO: 306317 - RNA, 32 nt, Homo Sapiens
aauggcagugccugggguuggcagggaggggc

SEQ ID NO: 306318 - RNA, 32 nt, Homo Sapiens
auuguuacuaaucuuugugacuauuuaaucuu

SEQ ID NO: 306319 - RNA, 32 nt, Homo Sapiens
agcccuccccuacaauccuugggcagagcaug

SEQ ID NO: 306320 - RNA, 32 nt, Homo Sapiens
ucagucucucaagauuuggcauuagucagaca

SEQ ID NO: 306321 - RNA, 32 nt, Homo Sapiens
gauucucaaauuaacuguauugguguaagauu

SEQ ID NO: 306322 - RNA, 32 nt, Homo Sapiens
ggaagugcacuuuccccuggggcgugugggug

SEQ ID NO: 306323 - RNA, 32 nt, Homo Sapiens
gcugugguugcuguccgcggaguggaagcgcg

SEQ ID NO: 306324 - RNA, 32 nt, Homo Sapiens
cccuccuccccugucucuggcugucucgagca

SEQ ID NO: 306325 - RNA, 32 nt, Homo Sapiens
agcugagauuuaugguaacuuauuuaauuaau

SEQ ID NO: 306326 - RNA, 32 nt, Homo Sapiens
agggcucucuagcuccugccagcccuuagagc

SEQ ID NO: 306327 - RNA, 32 nt, Homo Sapiens
aauaaguuguguuacuacauguguguaauccu

SEQ ID NO: 306328 - RNA, 32 nt, Homo Sapiens
cagugcuagugucaaguguuguccuaggauug

SEQ ID NO: 306329 - RNA, 32 nt, Homo Sapiens
gacgcaucucaaaacagagggcugcauucgaa

SEQ ID NO: 306330 - RNA, 31 nt, Homo Sapiens
gcuaguggcggcugccugcguccccaacccc

SEQ ID NO: 306331 - RNA, 29 nt, Homo Sapiens
gcgagugacugcaccgagcccgagaaguc

SEQ ID NO: 306332 - RNA, 30 nt, Homo Sapiens
ucuggaggcaggcugggcgguggcggccga

SEQ ID NO: 306333 - RNA, 32 nt, Homo Sapiens
gcuagcucugcucccagcaucccuuccccuuc

SEQ ID NO: 306334 - RNA, 32 nt, Homo Sapiens
uguauuaaaaauuuaagaauaccacacuuuaa

SEQ ID NO: 306335 - RNA, 32 nt, Homo Sapiens
agccucuagggagaguggccaggagccggguc

SEQ ID NO: 306336 - RNA, 28 nt, Homo Sapiens
cccggcguggcuacuaggagaaggacgu

SEQ ID NO: 306337 - RNA, 32 nt, Homo Sapiens
cuauugacuugguaagucuacuguauauaaca

SEQ ID NO: 306338 - RNA, 32 nt, Homo Sapiens
ggccuggauccccaugguaugcuugaaucugc

SEQ ID NO: 306339 - RNA, 32 nt, Homo Sapiens
auggcuacaaaauaaauauuuuuuguuuuucc

SEQ ID NO: 306340 - RNA, 32 nt, Homo Sapiens
uccuacaucucccugaaccagagugugcccug

SEQ ID NO: 306341 - RNA, 32 nt, Homo Sapiens
uuugcuuuguaacguaacuaaauaauguaaug

SEQ ID NO: 306342 - RNA, 32 nt, Homo Sapiens
guguaucugagauuguuguaauaaucagucau

SEQ ID NO: 306343 - RNA, 32 nt, Homo Sapiens
uucuguaucauguaaaaacuacacuuaggaua

SEQ ID NO: 306344 - RNA, 32 nt, Homo Sapiens
uacugggucuauauugugaaucauccugccuu

SEQ ID NO: 306345 - RNA, 32 nt, Homo Sapiens
aauuaugauaaggaugauaaaagcacuuacuu

SEQ ID NO: 306346 - RNA, 32 nt, Homo Sapiens
auuuucuauuugugcaaacucuguaaauaugu

SEQ ID NO: 306347 - RNA, 32 nt, Homo Sapiens
ccgacaagcccgccagccccagccgcuccucc

SEQ ID NO: 306348 - RNA, 32 nt, Homo Sapiens
gcucccagacaugacagccaucaucaaagaga

SEQ ID NO: 306349 - RNA, 31 nt, Homo Sapiens
gucagcaggggccgccugccccggccagaac

SEQ ID NO: 306350 - RNA, 32 nt, Homo Sapiens
ccagcccgccagcucgucagcccgccagccag

SEQ ID NO: 306351 - RNA, 32 nt, Homo Sapiens
uccucccuggggaccccuguggccugucucac

SEQ ID NO: 306352 - RNA, 32 nt, Homo Sapiens
cucuugggccucuuccucucucaagaugaaga

SEQ ID NO: 306353 - RNA, 32 nt, Homo Sapiens
acggccauuaccaaucgcgaaaccgcacgcug

SEQ ID NO: 306354 - RNA, 32 nt, Homo Sapiens
uuccuucugcauuuuacccagcuuuucuaggu

SEQ ID NO: 306355 - RNA, 32 nt, Homo Sapiens
acagggugcgggcaauggccacguggccaagg

SEQ ID NO: 306356 - RNA, 30 nt, Homo Sapiens
uugugcaaaagagaugaagacuucucaaua

SEQ ID NO: 306357 - RNA, 32 nt, Homo Sapiens
cauggggagggaagaagggggagcucuuuuuu

SEQ ID NO: 306358 - RNA, 32 nt, Homo Sapiens
gggagucccgcaccacggggccucgcucaggg

SEQ ID NO: 306359 - RNA, 32 nt, Homo Sapiens
gguacaaaugcuuuauugaaacuaaauacaua

SEQ ID NO: 306360 - RNA, 32 nt, Homo Sapiens
uucauaaugauuugcuuuuucugguuuuugua

SEQ ID NO: 306361 - RNA, 32 nt, Homo Sapiens
guaguugguuuuauugauuugcuggccuaaca

SEQ ID NO: 306362 - RNA, 32 nt, Homo Sapiens
auaaaauauaaaacugaaauaaaccugcacug

SEQ ID NO: 306363 - RNA, 31 nt, Homo Sapiens
aaugugaacaaauaaaauacagcaaauacuc

SEQ ID NO: 306364 - RNA, 32 nt, Homo Sapiens
gcauguacagugccuccauccuggaggcaaga

SEQ ID NO: 306365 - RNA, 32 nt, Homo Sapiens
gcagaaggagugccgcauguacaugcagagag

SEQ ID NO: 306366 - RNA, 32 nt, Homo Sapiens
ccccccagcuuucuuucuacagauggugcuac

SEQ ID NO: 306367 - RNA, 32 nt, Homo Sapiens
acuugaaaucaucggucucaucucaagucacu

SEQ ID NO: 306368 - RNA, 32 nt, Homo Sapiens
uuuagaggcuugugauucuacugcuucuuauu

SEQ ID NO: 306369 - RNA, 32 nt, Homo Sapiens
guuagggcaagacaauguugacagugaugcau

SEQ ID NO: 306370 - RNA, 27 nt, Homo Sapiens
agaugaaggaauggaaaucaaagaugg

SEQ ID NO: 306371 - RNA, 32 nt, Homo Sapiens
agcugcccagcauggaccuggugacucuccac

SEQ ID NO: 306372 - RNA, 32 nt, Homo Sapiens
ugauuccauccaccuuucccaaucggccuuac

SEQ ID NO: 306373 - RNA, 32 nt, Homo Sapiens
ggaagaagaaaguugagcuuuuuccccuugag

SEQ ID NO: 306374 - RNA, 32 nt, Homo Sapiens
agaggaaaauguuaauaaaaaaugcaaagccc

SEQ ID NO: 306375 - RNA, 32 nt, Homo Sapiens
agcacuuugagaggccgagauaggcggauugc

SEQ ID NO: 306376 - RNA, 32 nt, Homo Sapiens
uaaucaauaaaaauaaguaaaaggcuuuuugu

SEQ ID NO: 306377 - RNA, 32 nt, Homo Sapiens
ggggaagaagugggaacugaaaugguauuuug

SEQ ID NO: 306378 - RNA, 32 nt, Homo Sapiens
guagagaccccuguuagccagcccucgaucau

SEQ ID NO: 306379 - RNA, 32 nt, Homo Sapiens
cgagcugggagauggcggcggcagcggcggcg

SEQ ID NO: 306380 - RNA, 32 nt, Homo Sapiens
aggagcccaagcacaagggcacuuaggagaag

SEQ ID NO: 306381 - RNA, 32 nt, Homo Sapiens
aaaaacacucucacuaugcugcuauggacgac

SEQ ID NO: 306382 - RNA, 32 nt, Homo Sapiens
ucaaggcucccuugccagcagggugcugccaa

SEQ ID NO: 306383 - RNA, 32 nt, Homo Sapiens
cuuacuggaacaauguuugauacucuaguaug

SEQ ID NO: 306384 - RNA, 31 nt, Homo Sapiens
guaacagugggccccaguauggacaaaggca

SEQ ID NO: 306385 - RNA, 32 nt, Homo Sapiens
augggggcauucuggcacccccugcuccagga

SEQ ID NO: 306386 - RNA, 32 nt, Homo Sapiens
cucaccugccccacagccgcacccugccugug

SEQ ID NO: 306387 - RNA, 31 nt, Homo Sapiens
guacagaaauaaacagccuuguauagagaaa

SEQ ID NO: 306388 - RNA, 32 nt, Homo Sapiens
aagcccaaccaccuuagcauguaucacucugu

SEQ ID NO: 306389 - RNA, 32 nt, Homo Sapiens
cccccauagccuggugaccucuggccacccgc

SEQ ID NO: 306390 - RNA, 32 nt, Homo Sapiens
cugcuucuugguuuccucuguucucauccuuu

SEQ ID NO: 306391 - RNA, 32 nt, Homo Sapiens
gcugcgagcugcugggcugcacacgcacacgc

SEQ ID NO: 306392 - RNA, 32 nt, Homo Sapiens
acucagaagauaaggugugaauguauguauua

SEQ ID NO: 306393 - RNA, 32 nt, Homo Sapiens
aucauuuacauccuaauacugaccacaguuca

SEQ ID NO: 306394 - RNA, 32 nt, Homo Sapiens
cuucaguugcugucagggcagcaguuccaguu

SEQ ID NO: 306395 - RNA, 32 nt, Homo Sapiens
auaaaaacagcccuaaagacuauugguaaaau

SEQ ID NO: 306396 - RNA, 32 nt, Homo Sapiens
gagguggaaggggucaugggggucugguccuc

SEQ ID NO: 306397 - RNA, 32 nt, Homo Sapiens
guuccuuccuucccgagugauacccaugaacu

SEQ ID NO: 306398 - RNA, 32 nt, Homo Sapiens
gggccuggcacgccggucugugccugcccgcc

SEQ ID NO: 306399 - RNA, 32 nt, Homo Sapiens
uuuaaagcagugccauguuccuuguuugacaa

SEQ ID NO: 306400 - RNA, 32 nt, Homo Sapiens
cucugucuuuaccauacuuacuggccuuggcu

SEQ ID NO: 306401 - RNA, 32 nt, Homo Sapiens
uaaucagaaaacaaaauagaggcagcuuuugu

SEQ ID NO: 306402 - RNA, 29 nt, Homo Sapiens
aucuuguuaucuaggugaaagccaaugcu

SEQ ID NO: 306403 - RNA, 32 nt, Homo Sapiens
cugcugcuuugucacuuucucaaucaaauugg

SEQ ID NO: 306404 - RNA, 32 nt, Homo Sapiens
cuuuugguggccuggggcaugucuugaggccc

SEQ ID NO: 306405 - RNA, 32 nt, Homo Sapiens
uuaccuaucuuaaaucuuucugaguugguagu

SEQ ID NO: 306406 - RNA, 32 nt, Homo Sapiens
ucucccggugcagcuguguucgcggccugcag

SEQ ID NO: 306407 - RNA, 32 nt, Homo Sapiens
agcggagaggacggggagguuacuucucuaag

SEQ ID NO: 306408 - RNA, 31 nt, Homo Sapiens
cuuauaaaauaaaagcaaaagucaaauauga

SEQ ID NO: 306409 - RNA, 32 nt, Homo Sapiens
cugggcugcuaagggaacugugagccgcucag

SEQ ID NO: 306410 - RNA, 32 nt, Homo Sapiens
accucacgccccacauaaaugugcuuauuggg

SEQ ID NO: 306411 - RNA, 32 nt, Homo Sapiens
cuuguugacggaagaaaaguaggaaugcagcc

SEQ ID NO: 306412 - RNA, 32 nt, Homo Sapiens
cagaaauucuacugagugacuccgucccccac

SEQ ID NO: 306413 - RNA, 32 nt, Homo Sapiens
cuauaaaauaaaugcagacuaauuuccugccc

SEQ ID NO: 306414 - RNA, 32 nt, Homo Sapiens
augcugaaacucgaagucauggccaccuccag

SEQ ID NO: 306415 - RNA, 32 nt, Homo Sapiens
ggcgcgcgugcacacacacacacacacacacg

SEQ ID NO: 306416 - RNA, 32 nt, Homo Sapiens
uacugaacauucaaccauucauuguaaugaua

SEQ ID NO: 306417 - RNA, 32 nt, Homo Sapiens
uacaggaaaaaguaacaaguaaaauuacuaga

SEQ ID NO: 306418 - RNA, 32 nt, Homo Sapiens
cagaaagugugcuuuaugcugaaacagaauac

SEQ ID NO: 306419 - RNA, 32 nt, Homo Sapiens
gauugguaucuggucagcagagaaaggcaucc

SEQ ID NO: 306420 - RNA, 32 nt, Homo Sapiens
gcgaugggcaaauuauauuugcugucagcaug

SEQ ID NO: 306421 - RNA, 32 nt, Homo Sapiens
cucuuuucagagccacccacaucagcacuugg

SEQ ID NO: 306422 - RNA, 32 nt, Homo Sapiens
uuagggucaggagacggccagagccuguuugu

SEQ ID NO: 306423 - RNA, 32 nt, Homo Sapiens
auucuaauauccaacgcaacuaucaaaauugc

SEQ ID NO: 306424 - RNA, 32 nt, Homo Sapiens
uccuggcugucaugcucauuguucugaacucc

SEQ ID NO: 306425 - RNA, 32 nt, Homo Sapiens
cuucaucauuggcauuugaacaaaagacuuac

SEQ ID NO: 306426 - RNA, 32 nt, Homo Sapiens
ccuucuccgccaggcccggcgggcgggagcgg

SEQ ID NO: 306427 - RNA, 32 nt, Homo Sapiens
agcaguuuauuccaguaucacccagggugcag

SEQ ID NO: 306428 - RNA, 32 nt, Homo Sapiens
gccaggaagaagaacagaacuuuguguguuua

SEQ ID NO: 306429 - RNA, 32 nt, Homo Sapiens
ucccaggucccggcccggagcuauggagcggc

SEQ ID NO: 306430 - RNA, 32 nt, Homo Sapiens
ggacgcagcgggcagcagcaggcagggcagcg

SEQ ID NO: 306431 - RNA, 32 nt, Homo Sapiens
ugucacauuuuucuguuacuauaaucagaaaa

SEQ ID NO: 306432 - RNA, 32 nt, Homo Sapiens
uaaucuuuucugcuuaccaaauuaaaggacaa

SEQ ID NO: 306433 - RNA, 32 nt, Homo Sapiens
uugcagcucucccagcagcccuggacggcggu

SEQ ID NO: 306434 - RNA, 32 nt, Homo Sapiens
agggaguagcagcaggugggagggguuaccca

SEQ ID NO: 306435 - RNA, 32 nt, Homo Sapiens
guugucaagaaggcuuuuuuuuuuuucuuuuu

SEQ ID NO: 306436 - RNA, 32 nt, Homo Sapiens
uuugugaauacgaauaaaugggauaaagaaaa

SEQ ID NO: 306437 - RNA, 32 nt, Homo Sapiens
uaggaugcugagcagcaucccgggccucacca

SEQ ID NO: 306438 - RNA, 32 nt, Homo Sapiens
cgcggucacaguccgacuggcggcacggaggc

SEQ ID NO: 306439 - RNA, 32 nt, Homo Sapiens
uccaguuucugcacaucugcuugacucauggg

SEQ ID NO: 306440 - RNA, 32 nt, Homo Sapiens
agcccagggauguggcagcugcagcgggcuug

SEQ ID NO: 306441 - RNA, 32 nt, Homo Sapiens
uuuaccuaaaagacucuagacaugggaugaaa

SEQ ID NO: 306442 - RNA, 32 nt, Homo Sapiens
aauagugauguuauccugaggagcaauugggg

SEQ ID NO: 306443 - RNA, 32 nt, Homo Sapiens
uuaccauuucuuuuuuaaaacaugucuagaug

SEQ ID NO: 306444 - RNA, 28 nt, Homo Sapiens
caaaguguuacaggaucaguguuuucuu

SEQ ID NO: 306445 - RNA, 32 nt, Homo Sapiens
uuuccuuaaaaugugagugaccucacuucugg

SEQ ID NO: 306446 - RNA, 32 nt, Homo Sapiens
gagaccguaucacacgccucuccgggacaaau

SEQ ID NO: 306447 - RNA, 32 nt, Homo Sapiens
aucuuuucuaguugaaauggugaacugauagg

SEQ ID NO: 306448 - RNA, 32 nt, Homo Sapiens
cacuucucacugccucucuggacaccgggcuu

SEQ ID NO: 306449 - RNA, 32 nt, Homo Sapiens
uccggagcugagauuucuuuuacauagaugac

SEQ ID NO: 306450 - RNA, 32 nt, Homo Sapiens
guaauuuaauaaauucaagaacuucguuuuua

SEQ ID NO: 306451 - RNA, 32 nt, Homo Sapiens
caccauuugaaucugggcuggcacugugacuu

SEQ ID NO: 306452 - RNA, 32 nt, Homo Sapiens
acuauuauuuaguuguuuacaagacuccaauu

SEQ ID NO: 306453 - RNA, 32 nt, Homo Sapiens
auacaaagacauggcagcuacugcaucuucau

SEQ ID NO: 306454 - RNA, 32 nt, Homo Sapiens
ggagagaaaccuuaugguuguagugugugugg

SEQ ID NO: 306455 - RNA, 32 nt, Homo Sapiens
acgugggucccgggcgcguuucgggugcuggc

SEQ ID NO: 306456 - RNA, 32 nt, Homo Sapiens
guggggggccccagcuuucaggccagcauuga

SEQ ID NO: 306457 - RNA, 32 nt, Homo Sapiens
gugaaaagcagugucuuugaucugcaacagca

SEQ ID NO: 306458 - RNA, 32 nt, Homo Sapiens
guuaacccauucuuaauuuauuguuuuaaucu

SEQ ID NO: 306459 - RNA, 32 nt, Homo Sapiens
augugagccacuuaauaaagguucauauguuc

SEQ ID NO: 306460 - RNA, 30 nt, Homo Sapiens
ccagggugcugcugcgggggucccggcgcu

SEQ ID NO: 306461 - RNA, 32 nt, Homo Sapiens
cggcuccauuuucuccgccgccgggggccggg

SEQ ID NO: 306462 - RNA, 32 nt, Homo Sapiens
uaugccaccaaaauggugcacuucacagauuc

SEQ ID NO: 306463 - RNA, 28 nt, Homo Sapiens
gguauggugguagaaagagaugacggaa

SEQ ID NO: 306464 - RNA, 28 nt, Homo Sapiens
gcugggugccugcccaggauggguagga

SEQ ID NO: 306465 - RNA, 32 nt, Homo Sapiens
uauuuuuaaagcguaucugaaaacgauugaug

SEQ ID NO: 306466 - RNA, 32 nt, Homo Sapiens
uuaagcggccccagcucugcuuuccuagagcu

SEQ ID NO: 306467 - RNA, 32 nt, Homo Sapiens
caggggucauguaaauuuguuuuuguacccuc

SEQ ID NO: 306468 - RNA, 32 nt, Homo Sapiens
caugcgguagccagcacacagggcagugaggg

SEQ ID NO: 306469 - RNA, 32 nt, Homo Sapiens
cagccacagcuguaagcagcucucugccagcc

SEQ ID NO: 306470 - RNA, 32 nt, Homo Sapiens
ugccuggaaugggagggggcaugccuggaaug

SEQ ID NO: 306471 - RNA, 30 nt, Homo Sapiens
ggaucugucugugcuugcaggaaaguccau

SEQ ID NO: 306472 - RNA, 32 nt, Homo Sapiens
guuuggaggcucucuugugcauguaggauguu

SEQ ID NO: 306473 - RNA, 32 nt, Homo Sapiens
aauuccccuucccugacucccgagggcuaggg

SEQ ID NO: 306474 - RNA, 32 nt, Homo Sapiens
gcgcagguccgggauucggggaggcagcgcca

SEQ ID NO: 306475 - RNA, 32 nt, Homo Sapiens
cugccaucuaaugggaaaagagaaaacugcag

SEQ ID NO: 306476 - RNA, 32 nt, Homo Sapiens
aaguuauuaaaauuaucuuugaaacaccucuu

SEQ ID NO: 306477 - RNA, 32 nt, Homo Sapiens
gugagcccggcgggccgcgccuggcugggugc

SEQ ID NO: 306478 - RNA, 32 nt, Homo Sapiens
gcaccaugggcggaggcgccagaggcugggaa

SEQ ID NO: 306479 - RNA, 32 nt, Homo Sapiens
ccagccacaggaccaccuccucugccagcagg

SEQ ID NO: 306480 - RNA, 32 nt, Homo Sapiens
gucuugucaagaaauacccugagccagucucu

SEQ ID NO: 306481 - RNA, 32 nt, Homo Sapiens
acacgugccccgagugcggcaaggccuucgcc

SEQ ID NO: 306482 - RNA, 29 nt, Homo Sapiens
agugcugugugguuccugccguccggacu

SEQ ID NO: 306483 - RNA, 32 nt, Homo Sapiens
uucacugcuacccauaucccagcccugcgagu

SEQ ID NO: 306484 - RNA, 32 nt, Homo Sapiens
gcagccccugucagaugccagccauuccccag

SEQ ID NO: 306485 - RNA, 32 nt, Homo Sapiens
gacgcgcgucuggcggccccagccaagcugcg

SEQ ID NO: 306486 - RNA, 32 nt, Homo Sapiens
auuacuguuucauauugaagcucucucuuuug

SEQ ID NO: 306487 - RNA, 32 nt, Homo Sapiens
cgggacagggagguugggaggggggacagagg

SEQ ID NO: 306488 - RNA, 32 nt, Homo Sapiens
gcacugacggcccauggcgccgccagccgccc

SEQ ID NO: 306489 - RNA, 32 nt, Homo Sapiens
cagguaggucggcacuuggacaauggagugcc

SEQ ID NO: 306490 - RNA, 32 nt, Homo Sapiens
caucaauggaaaucccaucaccaucuuccagg

SEQ ID NO: 306491 - RNA, 32 nt, Homo Sapiens
agaaagggcucacucuaccucuaggcauguuu

SEQ ID NO: 306492 - RNA, 32 nt, Homo Sapiens
cagguuggcagguuuuuuuuuagcagacaagu

SEQ ID NO: 306493 - RNA, 32 nt, Homo Sapiens
ugagugaggucuuuauugccaucauccgugug

SEQ ID NO: 306494 - RNA, 32 nt, Homo Sapiens
cccucuguuucauuagcucuaguucuccccca

SEQ ID NO: 306495 - RNA, 32 nt, Homo Sapiens
aguacaggauuaggaagaaauuaaaugauagc

SEQ ID NO: 306496 - RNA, 32 nt, Homo Sapiens
ccuugacuugauuagugccuucugcccucccu

SEQ ID NO: 306497 - RNA, 32 nt, Homo Sapiens
ucugaggugcgcgccgcgcuggggcucgcgcu

SEQ ID NO: 306498 - RNA, 32 nt, Homo Sapiens
acgagugagcccagcgcgaccgcgggcguccg

SEQ ID NO: 306499 - RNA, 32 nt, Homo Sapiens
aaaacuacugaauaaaucauguggccuaauau

SEQ ID NO: 306500 - RNA, 32 nt, Homo Sapiens
agauuguacuuaugcauaagauaguuuuuaaa

SEQ ID NO: 306501 - RNA, 32 nt, Homo Sapiens
ugcagggcggguggagucgcggaguaguccuc

SEQ ID NO: 306502 - RNA, 32 nt, Homo Sapiens
cauaauucaaggauugcuggcaacaccagaag

SEQ ID NO: 306503 - RNA, 32 nt, Homo Sapiens
cacauacacacacacacacacacacacauauc

SEQ ID NO: 306504 - RNA, 32 nt, Homo Sapiens
uaaucucuuccacugaugcauccuccaagggu

SEQ ID NO: 306505 - RNA, 32 nt, Homo Sapiens
gggucccaagcacuucccuuuaccccaggacc

SEQ ID NO: 306506 - RNA, 32 nt, Homo Sapiens
uuuuguugauaaaaucaagucuugguuguggc

SEQ ID NO: 306507 - RNA, 30 nt, Homo Sapiens
cauggauggccugugccgcccucgcuggcg

SEQ ID NO: 306508 - RNA, 32 nt, Homo Sapiens
uuuauuuggugacaccagggaacguggagaag

SEQ ID NO: 306509 - RNA, 32 nt, Homo Sapiens
caguuuccagcaugcaaucauuuccaucuuau

SEQ ID NO: 306510 - RNA, 32 nt, Homo Sapiens
cgagacuugcuaagguucugugcuacaaauug

SEQ ID NO: 306511 - RNA, 32 nt, Homo Sapiens
uuauggcaaaguggauuccauacucuggcaca

SEQ ID NO: 306512 - RNA, 30 nt, Homo Sapiens
gcuccugcagugggcgcgggucacggcuga

SEQ ID NO: 306513 - RNA, 32 nt, Homo Sapiens
uggagcggccccagcguucgggagcggcccgg

SEQ ID NO: 306514 - RNA, 32 nt, Homo Sapiens
ccgagcugccuucgcgugcccccgcccugugu

SEQ ID NO: 306515 - RNA, 32 nt, Homo Sapiens
ugccuggggcuggggggcgcuccuugcaaugc

SEQ ID NO: 306516 - RNA, 32 nt, Homo Sapiens
cuuccugaacucucuucaucacucaggguuga

SEQ ID NO: 306517 - RNA, 32 nt, Homo Sapiens
cgauggauaaguggagggauucggguugcgug

SEQ ID NO: 306518 - RNA, 32 nt, Homo Sapiens
aggcuugaacaaaauaaaaggacuugguuaga

SEQ ID NO: 306519 - RNA, 32 nt, Homo Sapiens
uggaccagaagccguggaccccagaggcucau

SEQ ID NO: 306520 - RNA, 30 nt, Homo Sapiens
gcgcgauggccucggcgcugagcuaugucu

SEQ ID NO: 306521 - RNA, 32 nt, Homo Sapiens
gacuccugcccugccacacccuggacaccugc

SEQ ID NO: 306522 - RNA, 32 nt, Homo Sapiens
uacagugcuaacccaaaccagcaccaggcagg

SEQ ID NO: 306523 - RNA, 32 nt, Homo Sapiens
uggccuuguccagauagcggcaaaccucccug

SEQ ID NO: 306524 - RNA, 32 nt, Homo Sapiens
guuaauaacacacagagagcucugccaagcac

SEQ ID NO: 306525 - RNA, 32 nt, Homo Sapiens
agaaauccaagccucggacaaguuaacuaagg

SEQ ID NO: 306526 - RNA, 32 nt, Homo Sapiens
gacccccuccuccuccuucuuugccaccgccc

SEQ ID NO: 306527 - RNA, 32 nt, Homo Sapiens
guugacaggcagcuggggggacaugauccaug

SEQ ID NO: 306528 - RNA, 32 nt, Homo Sapiens
aagugagaugacuuagaggcaacugggcacug

SEQ ID NO: 306529 - RNA, 32 nt, Homo Sapiens
cuuuccccaagguagcacaucuggcucacucc

SEQ ID NO: 306530 - RNA, 32 nt, Homo Sapiens
ucucuggagcagcuguggcuuccccguggcug

SEQ ID NO: 306531 - RNA, 32 nt, Homo Sapiens
cccagcuaauuuugaaauuugcuuguagagau

SEQ ID NO: 306532 - RNA, 32 nt, Homo Sapiens
uuccgccuccucuccuucuacuacagcccgga

SEQ ID NO: 306533 - RNA, 32 nt, Homo Sapiens
cagaggcuaggaauagugauccugcuauaaug

SEQ ID NO: 306534 - RNA, 32 nt, Homo Sapiens
cuagagucgccgguggcugugcgugggggcug

SEQ ID NO: 306535 - RNA, 32 nt, Homo Sapiens
ccauggccacucccugcccccagccuggcuug

SEQ ID NO: 306536 - RNA, 32 nt, Homo Sapiens
auagagcuuguucccaaaaaagagggaggcac

SEQ ID NO: 306537 - RNA, 32 nt, Homo Sapiens
uggccucgccuggccugaggucucgcugaugc

SEQ ID NO: 306538 - RNA, 32 nt, Homo Sapiens
gaaggcccaagccccaagguugaauaugucug

SEQ ID NO: 306539 - RNA, 32 nt, Homo Sapiens
agcauuacguaacuaaaguaaguaaaaugaug

SEQ ID NO: 306540 - RNA, 32 nt, Homo Sapiens
cuccccugccccaccccggggcugacauuucu

SEQ ID NO: 306541 - RNA, 32 nt, Homo Sapiens
augucugaacucuccagcuucgcgugagaagu

SEQ ID NO: 306542 - RNA, 32 nt, Homo Sapiens
gaaauagaacagaauucagccauggccccaag

SEQ ID NO: 306543 - RNA, 32 nt, Homo Sapiens
gaagugcccuacucuuucuccucccuuuggug

SEQ ID NO: 306544 - RNA, 32 nt, Homo Sapiens
agggcugugucuuccuugggggaggagauggu

SEQ ID NO: 306545 - RNA, 32 nt, Homo Sapiens
auuauauguaaggaaucuauuuccuagaaucc

SEQ ID NO: 306546 - RNA, 29 nt, Homo Sapiens
agagaugcugcugcugccccugcugcugc

SEQ ID NO: 306547 - RNA, 32 nt, Homo Sapiens
ucuccucacuacccacccacgcauguaccggg

SEQ ID NO: 306548 - RNA, 31 nt, Homo Sapiens
ucucugcagcacugccucccagcgccagggu

SEQ ID NO: 306549 - RNA, 32 nt, Homo Sapiens
uuuuaucacaugcuggcacuaaaaggcagaag

SEQ ID NO: 306550 - RNA, 32 nt, Homo Sapiens
gugaggggaaucuggaacgcucuaggcagaag

SEQ ID NO: 306551 - RNA, 29 nt, Homo Sapiens
gaagucauggauaugucuaucaaaaucuc

SEQ ID NO: 306552 - RNA, 32 nt, Homo Sapiens
ggugaaggggagaggcagccucccgcuccggu

SEQ ID NO: 306553 - RNA, 32 nt, Homo Sapiens
aagaucagacugccucuucagaaaccaaagcu

SEQ ID NO: 306554 - RNA, 32 nt, Homo Sapiens
gaggauucacacucaacagguuuuaggauaau

SEQ ID NO: 306555 - RNA, 32 nt, Homo Sapiens
acuuuauuuuaaugggcaugggcuugucuaua

SEQ ID NO: 306556 - RNA, 32 nt, Homo Sapiens
ucuggaguuaccugaggccauagcugcccuau

SEQ ID NO: 306557 - RNA, 32 nt, Homo Sapiens
ccucuggcccaucacccacgugguguccccaa

SEQ ID NO: 306558 - RNA, 32 nt, Homo Sapiens
gagggggcgcggggggcgccgggggggcccaa

SEQ ID NO: 306559 - RNA, 32 nt, Homo Sapiens
caucuuuccagaagaaaucuaugauuccugcu

SEQ ID NO: 306560 - RNA, 32 nt, Homo Sapiens
gggcuacaaccacugggauauuauuuguaaua

SEQ ID NO: 306561 - RNA, 32 nt, Homo Sapiens
ucaucugguauaacugguucugauggcuggga

SEQ ID NO: 306562 - RNA, 32 nt, Homo Sapiens
cgccccagccccagccagccaggcccuggugg

SEQ ID NO: 306563 - RNA, 32 nt, Homo Sapiens
uuugugggacauaauuugauaaguagaguuaa

SEQ ID NO: 306564 - RNA, 32 nt, Homo Sapiens
aaauuauaaaaagccacuagacucuucacugu

SEQ ID NO: 306565 - RNA, 32 nt, Homo Sapiens
agaaaauguucuugacccauugauuguaucug

SEQ ID NO: 306566 - RNA, 32 nt, Homo Sapiens
acacuuagagauuuuucuuugcuuucacuugc

SEQ ID NO: 306567 - RNA, 32 nt, Homo Sapiens
ucaggcagaaaagguagugaccggcccggcgu

SEQ ID NO: 306568 - RNA, 32 nt, Homo Sapiens
agcuugucugaaacucuuagccugcagaauuu

SEQ ID NO: 306569 - RNA, 32 nt, Homo Sapiens
guauugcuaaucuugaugucucucgaaaugac

SEQ ID NO: 306570 - RNA, 32 nt, Homo Sapiens
uguuaaguauucauauuaaauacaugccuucu

SEQ ID NO: 306571 - RNA, 32 nt, Homo Sapiens
uuuaguggguccuagugcacaauggccuuucu

SEQ ID NO: 306572 - RNA, 32 nt, Homo Sapiens
ccacacagggauauuucugcuaugcaccagcc

SEQ ID NO: 306573 - RNA, 32 nt, Homo Sapiens
gacauguuuccccuccucccacccucauuuuc

SEQ ID NO: 306574 - RNA, 32 nt, Homo Sapiens
gguuaugacaacaccgaaaguagugugcguaa

SEQ ID NO: 306575 - RNA, 32 nt, Homo Sapiens
ucugagagccccagccugagccagucccagcu

SEQ ID NO: 306576 - RNA, 32 nt, Homo Sapiens
ugugcgcggaggaggugaaggcggccggggcc

SEQ ID NO: 306577 - RNA, 32 nt, Homo Sapiens
cagcauugcacggggccggcacugccgcugcc

SEQ ID NO: 306578 - RNA, 32 nt, Homo Sapiens
ccucugaagauaacuugagauucuaggcacau

SEQ ID NO: 306579 - RNA, 32 nt, Homo Sapiens
gcacagugguggcagggccuagcugcuacaaa

SEQ ID NO: 306580 - RNA, 32 nt, Homo Sapiens
ggaacagcugaauacuaggaauauaucuugcu

SEQ ID NO: 306581 - RNA, 32 nt, Homo Sapiens
gcaagcggaggcggcccaggcccggcggucuc

SEQ ID NO: 306582 - RNA, 32 nt, Homo Sapiens
auaucuguguaaguauaugcaaguguauauuc

SEQ ID NO: 306583 - RNA, 32 nt, Homo Sapiens
ugaggcugucuccugcccucuucugccuggag

SEQ ID NO: 306584 - RNA, 32 nt, Homo Sapiens
gcuacccuccccaccccacuucuaucucaaua

SEQ ID NO: 306585 - RNA, 32 nt, Homo Sapiens
uucagccccaccgccacccccagcguauucca

SEQ ID NO: 306586 - RNA, 32 nt, Homo Sapiens
cucugcugcagagggggguuguguacagauag

SEQ ID NO: 306587 - RNA, 31 nt, Homo Sapiens
aaacugcggcaaagccaaccacuuagaagcc

SEQ ID NO: 306588 - RNA, 32 nt, Homo Sapiens
cuggucuccggcggccccguccccgacugggc

SEQ ID NO: 306589 - RNA, 32 nt, Homo Sapiens
uaucuacuugguuuuucucaaaauggaaauaa

SEQ ID NO: 306590 - RNA, 32 nt, Homo Sapiens
gcggcgcugaagugaaggaugcuggcggggag

SEQ ID NO: 306591 - RNA, 32 nt, Homo Sapiens
ugcugacccuccccaaaggcuuugcccugcug

SEQ ID NO: 306592 - RNA, 32 nt, Homo Sapiens
cgauggaaggucggggcgugcgggcagcugga

SEQ ID NO: 306593 - RNA, 32 nt, Homo Sapiens
ucauaugcuacaguugaauaaaaauuaaauuu

SEQ ID NO: 306594 - RNA, 32 nt, Homo Sapiens
cuuccauccacccaccucccuggggcacucua

SEQ ID NO: 306595 - RNA, 32 nt, Homo Sapiens
gguccauaaaaugaagacuguauuguauugag

SEQ ID NO: 306596 - RNA, 32 nt, Homo Sapiens
gacgcuggccuucagcagcaugaugccaggcu

SEQ ID NO: 306597 - RNA, 32 nt, Homo Sapiens
uauaacuuaccuuguuuuguuccacuuuaaag

SEQ ID NO: 306598 - RNA, 32 nt, Homo Sapiens
ccaucauagauuucuuuuuuuaguguugcccu

SEQ ID NO: 306599 - RNA, 32 nt, Homo Sapiens
cuccgcgccuagagcgcgacccggagcgggca

SEQ ID NO: 306600 - RNA, 32 nt, Homo Sapiens
acaaagucauaaagagcauauuuuagagcaca

SEQ ID NO: 306601 - RNA, 32 nt, Homo Sapiens
uucagcaccagucaagcuuucagaugcugcag

SEQ ID NO: 306602 - RNA, 32 nt, Homo Sapiens
uucauugugucaaagggcugcccggucaguac

SEQ ID NO: 306603 - RNA, 32 nt, Homo Sapiens
gcgggggagaagggcugccccgggcccucugg

SEQ ID NO: 306604 - RNA, 32 nt, Homo Sapiens
cucaacuauuuucucauagucccuguuccggu

SEQ ID NO: 306605 - RNA, 32 nt, Homo Sapiens
uccuaacacuuugggaggccuagacaggagga

SEQ ID NO: 306606 - RNA, 32 nt, Homo Sapiens
uguuuuauaugauuaaauuaucauuguuuguc

SEQ ID NO: 306607 - RNA, 32 nt, Homo Sapiens
ggaggggcuccucacuucccagaugggguggc

SEQ ID NO: 306608 - RNA, 32 nt, Homo Sapiens
gccugauagacugauuaaaccacagaagguga

SEQ ID NO: 306609 - RNA, 32 nt, Homo Sapiens
gagccccagcccuaagggaaccccaaauccua

SEQ ID NO: 306610 - RNA, 32 nt, Homo Sapiens
ugucuucaguggcaaauggaucugucaacagg

SEQ ID NO: 306611 - RNA, 32 nt, Homo Sapiens
ggccaggcgcgguggcucaugcguguaauccc

SEQ ID NO: 306612 - RNA, 32 nt, Homo Sapiens
ggaaccggcuggcgcggccagcuggaacgcug

SEQ ID NO: 306613 - RNA, 32 nt, Homo Sapiens
uacuuauugcuaaagaaagggagaucaaugga

SEQ ID NO: 306614 - RNA, 32 nt, Homo Sapiens
uacugaaaaccaaaaaagagugagauugucag

SEQ ID NO: 306615 - RNA, 32 nt, Homo Sapiens
aauacuucaucagaauaaacuauugaucuugu

SEQ ID NO: 306616 - RNA, 32 nt, Homo Sapiens
uacuucagagugcaaacauuaagcaaguaaua

SEQ ID NO: 306617 - RNA, 32 nt, Homo Sapiens
gccauguagugucugccugaaaauggguccca

SEQ ID NO: 306618 - RNA, 32 nt, Homo Sapiens
ccgggagugucugcugccacaucccacacucc

SEQ ID NO: 306619 - RNA, 32 nt, Homo Sapiens
agggcggcgguggguguccgcuucucucugcu

SEQ ID NO: 306620 - RNA, 32 nt, Homo Sapiens
cgcccgcucccuccuuaauccuagaugauuug

SEQ ID NO: 306621 - RNA, 32 nt, Homo Sapiens
gggcaguggagaggaccgcgcuguccugcugu

SEQ ID NO: 306622 - RNA, 32 nt, Homo Sapiens
cuucccaggugaccacgccggcuucaggacau

SEQ ID NO: 306623 - RNA, 32 nt, Homo Sapiens
gcugugugggucugcaggugagcagacaggac

SEQ ID NO: 306624 - RNA, 29 nt, Homo Sapiens
cuugcaugguguuucaaaggguggugaag

SEQ ID NO: 306625 - RNA, 29 nt, Homo Sapiens
gggaaugugacuuuaauuuggaaauagug

SEQ ID NO: 306626 - RNA, 32 nt, Homo Sapiens
gccucccaggcgcaccucccccggccgccgac

SEQ ID NO: 306627 - RNA, 31 nt, Homo Sapiens
ccucucccacccucagucgcauagacuuaug

SEQ ID NO: 306628 - RNA, 32 nt, Homo Sapiens
cagucaucuucaguauuacuuccucauuggac

SEQ ID NO: 306629 - RNA, 32 nt, Homo Sapiens
gaaacuacuugcuguguggcacuuccuggucu

SEQ ID NO: 306630 - RNA, 32 nt, Homo Sapiens
gcugaguccuguggcuggcccgugaugccagg

SEQ ID NO: 306631 - RNA, 32 nt, Homo Sapiens
uuggcuuucuucaguuucacugguaucuuuug

SEQ ID NO: 306632 - RNA, 32 nt, Homo Sapiens
cuugagucccccugcuuuuuggcagaccuaau

SEQ ID NO: 306633 - RNA, 32 nt, Homo Sapiens
uagccuaaauguuaacuacauauugucuggaa

SEQ ID NO: 306634 - RNA, 32 nt, Homo Sapiens
uacucagucaaguucaccauggccguaauccu

SEQ ID NO: 306635 - RNA, 32 nt, Homo Sapiens
cagugugugaauggacaauguugaaugaaugu

SEQ ID NO: 306636 - RNA, 32 nt, Homo Sapiens
aauucaucuuuugaaaccuaauuaccaaagug

SEQ ID NO: 306637 - RNA, 32 nt, Homo Sapiens
uguccagauuucgagauucauaaagagagaaa

SEQ ID NO: 306638 - RNA, 27 nt, Homo Sapiens
gccaacuccaaguucugguacaacucc

SEQ ID NO: 306639 - RNA, 32 nt, Homo Sapiens
cccagcugccagcagcguggccagcgucuaug

SEQ ID NO: 306640 - RNA, 32 nt, Homo Sapiens
uuuaggggacauuugagggacucuuggggccg

SEQ ID NO: 306641 - RNA, 32 nt, Homo Sapiens
gcuuguuggggauuucaccacauggaggaaaa

SEQ ID NO: 306642 - RNA, 32 nt, Homo Sapiens
ggguaagagaaauaaaacugcuuugcagcugu

SEQ ID NO: 306643 - RNA, 32 nt, Homo Sapiens
gauuggcccccucccucgacggggcgggugga

SEQ ID NO: 306644 - RNA, 32 nt, Homo Sapiens
gacggagucucagucugucacccaggcuggag

SEQ ID NO: 306645 - RNA, 32 nt, Homo Sapiens
gauggagucucacucugucacccagguucgag

SEQ ID NO: 306646 - RNA, 32 nt, Homo Sapiens
cucaacaggaggaggcuguggcugcagagccu

SEQ ID NO: 306647 - RNA, 32 nt, Homo Sapiens
ccuggccuggucuacaguuaacuccacugucc

SEQ ID NO: 306648 - RNA, 32 nt, Homo Sapiens
aaacccaggucuggaaauggcuccuuaccuug

SEQ ID NO: 306649 - RNA, 32 nt, Homo Sapiens
gcugcagccagcugcacucugcugcgggcacg

SEQ ID NO: 306650 - RNA, 32 nt, Homo Sapiens
ggauugaagaucggcggauacucauuggcaug

SEQ ID NO: 306651 - RNA, 32 nt, Homo Sapiens
caaggaugaaacaaccguauaccugagaaaua

SEQ ID NO: 306652 - RNA, 32 nt, Homo Sapiens
ugcccuggcccuggcucuggcccuggcccaca

SEQ ID NO: 306653 - RNA, 32 nt, Homo Sapiens
auaaggcccucccuggcgagggcagagguuuu

SEQ ID NO: 306654 - RNA, 32 nt, Homo Sapiens
gaggaaagaaaagaagucaggaauggcccuua

SEQ ID NO: 306655 - RNA, 32 nt, Homo Sapiens
acuuuuuucugcacuuauaacugauuugguuu

SEQ ID NO: 306656 - RNA, 32 nt, Homo Sapiens
ucuucuucuacuaaauuagaaucuucagguuc

SEQ ID NO: 306657 - RNA, 30 nt, Homo Sapiens
guuuuaacuaucccugccugugacuuucaa

SEQ ID NO: 306658 - RNA, 32 nt, Homo Sapiens
ccacucucauuucacuggcugaaggagagauu

SEQ ID NO: 306659 - RNA, 32 nt, Homo Sapiens
agggacaguuuagcagcuggaucaggguggaa

SEQ ID NO: 306660 - RNA, 32 nt, Homo Sapiens
uaaaaaauuuaaaagugcuauuuuguuuguau

SEQ ID NO: 306661 - RNA, 29 nt, Homo Sapiens
uauaauguacaguguuauuuucuguacuu

SEQ ID NO: 306662 - RNA, 32 nt, Homo Sapiens
uaaaacauugucccugcccccgggggcuucac

SEQ ID NO: 306663 - RNA, 32 nt, Homo Sapiens
gcuguauuuuaagagacacuuuauuggaagug

SEQ ID NO: 306664 - RNA, 32 nt, Homo Sapiens
aucagugaguggcuaggcaucugcagauaaau

SEQ ID NO: 306665 - RNA, 32 nt, Homo Sapiens
cuacaaaaaauuuaaaaaauuagccaggcaug

SEQ ID NO: 306666 - RNA, 32 nt, Homo Sapiens
auaaggccaauccuaaugggcuaccucggcuu

SEQ ID NO: 306667 - RNA, 32 nt, Homo Sapiens
agugaagauugugaugguguaagagcuaaucc

SEQ ID NO: 306668 - RNA, 32 nt, Homo Sapiens
aauuauuucuuacaucaugcuugauuccuaca

SEQ ID NO: 306669 - RNA, 32 nt, Homo Sapiens
cgcagaggcuccugggggucagaaagcugaga

SEQ ID NO: 306670 - RNA, 32 nt, Homo Sapiens
cguccgcccggcuugaggcccgcggggagcgc

SEQ ID NO: 306671 - RNA, 32 nt, Homo Sapiens
gagguccuccaugccagccccacgguggucca

SEQ ID NO: 306672 - RNA, 32 nt, Homo Sapiens
gugguggugaggguuaaaugggaugaggucau

SEQ ID NO: 306673 - RNA, 32 nt, Homo Sapiens
auuaagaccagaaaauaaaauaauuuuccguu

SEQ ID NO: 306674 - RNA, 32 nt, Homo Sapiens
cccuccugccagcuuagcccccuuggaaccua

SEQ ID NO: 306675 - RNA, 32 nt, Homo Sapiens
cuugggcugggaagaggugguggcagagucuc

SEQ ID NO: 306676 - RNA, 32 nt, Homo Sapiens
caagaguugcuuucuuuuuuauucuuuuuccu

SEQ ID NO: 306677 - RNA, 32 nt, Homo Sapiens
guccccugccugcguccuggggccugugcacu

SEQ ID NO: 306678 - RNA, 32 nt, Homo Sapiens
cagaaggcuuucuggcagcugccuggguuugg

SEQ ID NO: 306679 - RNA, 32 nt, Homo Sapiens
uuaagcaaucauauuuucaauuuauauauugu

SEQ ID NO: 306680 - RNA, 32 nt, Homo Sapiens
uauagagauauuaaaggaauguugguuugcua

SEQ ID NO: 306681 - RNA, 32 nt, Homo Sapiens
auucgaguuuuugucuuucuucucagguguau

SEQ ID NO: 306682 - RNA, 32 nt, Homo Sapiens
caagcuuugagaaagcucccagugaggaacug

SEQ ID NO: 306683 - RNA, 32 nt, Homo Sapiens
ggcagaaacuucaugaaccagcccuuucucag

SEQ ID NO: 306684 - RNA, 32 nt, Homo Sapiens
ggagcuggagaacagggguuaucccuaccccu

SEQ ID NO: 306685 - RNA, 32 nt, Homo Sapiens
ucaucuugacccccaaagagccacaguagcug

SEQ ID NO: 306686 - RNA, 32 nt, Homo Sapiens
ugcuuauucauaauucucaguguaucagucau

SEQ ID NO: 306687 - RNA, 32 nt, Homo Sapiens
auggucuuggggauuaacauuaggcuccuugc

SEQ ID NO: 306688 - RNA, 32 nt, Homo Sapiens
aauggggggcaucaccaugccugccgucgggu

SEQ ID NO: 306689 - RNA, 32 nt, Homo Sapiens
cuuccguccuuccccagccgcucuugucgccu

SEQ ID NO: 306690 - RNA, 32 nt, Homo Sapiens
ucucuuguugaauuccucucuuuuaaacucac

SEQ ID NO: 306691 - RNA, 32 nt, Homo Sapiens
ccuaaucugaccacuuucagguuuaguuuacc

SEQ ID NO: 306692 - RNA, 32 nt, Homo Sapiens
ucuuaaaguuuauaaaaguaaaaucaaauuac

SEQ ID NO: 306693 - RNA, 28 nt, Homo Sapiens
aucgaaagauucauaccagaguuuaaag

SEQ ID NO: 306694 - RNA, 32 nt, Homo Sapiens
cuuuuccuuuuggaucauagcuuaacaaggca

SEQ ID NO: 306695 - RNA, 32 nt, Homo Sapiens
ugaggagcccucguuuucgagaucaggccuga

SEQ ID NO: 306696 - RNA, 32 nt, Homo Sapiens
auuuuaaaaaucagcucugagcaaaugaauuu

SEQ ID NO: 306697 - RNA, 32 nt, Homo Sapiens
cgcccugccugccuaugcauuuugggaacagc

SEQ ID NO: 306698 - RNA, 32 nt, Homo Sapiens
uggguucuuggucucgcugaccucaagaauga

SEQ ID NO: 306699 - RNA, 32 nt, Homo Sapiens
gaacccaagagguggagguugcggugagccaa

SEQ ID NO: 306700 - RNA, 32 nt, Homo Sapiens
gaugaaggccccacacacaggugugcugcauu

SEQ ID NO: 306701 - RNA, 32 nt, Homo Sapiens
aaaacaacagcgcgugcgcguagcgaccucuu

SEQ ID NO: 306702 - RNA, 32 nt, Homo Sapiens
uuuggggaauuauuugagaaagcaaaacaaaa

SEQ ID NO: 306703 - RNA, 32 nt, Homo Sapiens
uacuaagcauauacuauuaauauuauauugca

SEQ ID NO: 306704 - RNA, 32 nt, Homo Sapiens
ccacaccaccccacccuccuccugucccgugg

SEQ ID NO: 306705 - RNA, 32 nt, Homo Sapiens
guuuggggaaaguguaggggcaaccaaagauc

SEQ ID NO: 306706 - RNA, 32 nt, Homo Sapiens
ggcacuggaaacccagcuccccgugucagacc

SEQ ID NO: 306707 - RNA, 32 nt, Homo Sapiens
cagaaagaaugggggcuuggggccugagcgca

SEQ ID NO: 306708 - RNA, 32 nt, Homo Sapiens
cagaggccaaggaggagaacaugaugauggac

SEQ ID NO: 306709 - RNA, 32 nt, Homo Sapiens
aaccaaacaagagcuuguagagccaagacaau

SEQ ID NO: 306710 - RNA, 32 nt, Homo Sapiens
gccaccacacccucccgagaucuuuaaaguuu

SEQ ID NO: 306711 - RNA, 32 nt, Homo Sapiens
uucagaauaucugcccaaauguacauaucguu

SEQ ID NO: 306712 - RNA, 32 nt, Homo Sapiens
cuggaguggagggaaggcaggggaaggacagg

SEQ ID NO: 306713 - RNA, 32 nt, Homo Sapiens
gcaggaaggaagaggguugugccaagguauug

SEQ ID NO: 306714 - RNA, 32 nt, Homo Sapiens
agucuguuauauaaaaauaaaagucauaccug

SEQ ID NO: 306715 - RNA, 32 nt, Homo Sapiens
uggcacuuuccacuguuccaucuguggccuag

SEQ ID NO: 306716 - RNA, 32 nt, Homo Sapiens
cacugcgaccaccuugccgcuuuucaucacaa

SEQ ID NO: 306717 - RNA, 32 nt, Homo Sapiens
aggaccccauucuccuauuuaucaguccuguc

SEQ ID NO: 306718 - RNA, 32 nt, Homo Sapiens
accagccugggcaacauagugagacucuuguc

SEQ ID NO: 306719 - RNA, 32 nt, Homo Sapiens
ggggcgcggguguauuugauauaguguuugca

SEQ ID NO: 306720 - RNA, 32 nt, Homo Sapiens
cuggaaagagccuuuuccuucuccuuuucuua

SEQ ID NO: 306721 - RNA, 30 nt, Homo Sapiens
gagucggcgcccgcaacgcggagccgggaa

SEQ ID NO: 306722 - RNA, 32 nt, Homo Sapiens
gauagugagacuuauucacuaucaggagaaua

SEQ ID NO: 306723 - RNA, 32 nt, Homo Sapiens
aaaaaaugugacucaagacuuccagagccuca

SEQ ID NO: 306724 - RNA, 32 nt, Homo Sapiens
uugggucauuuauaguuacauuuuauaauuuu

SEQ ID NO: 306725 - RNA, 32 nt, Homo Sapiens
uguggagagucgauuuacauaagcuguguaua

SEQ ID NO: 306726 - RNA, 32 nt, Homo Sapiens
gagaagagaccaagcuuguuucccugcuggcc

SEQ ID NO: 306727 - RNA, 32 nt, Homo Sapiens
aucugccccaguggagacccaggaguuccuuu

SEQ ID NO: 306728 - RNA, 32 nt, Homo Sapiens
ucauagcauuuucuuucugugguguuugacuu

SEQ ID NO: 306729 - RNA, 32 nt, Homo Sapiens
uaaccugucaggcuggcuugguuagguuuuac

SEQ ID NO: 306730 - RNA, 32 nt, Homo Sapiens
ggacugugcagcucgaggcuccagaggcacac

SEQ ID NO: 306731 - RNA, 32 nt, Homo Sapiens
uggaaaaagcauuggcauuauuuucaauaaau

SEQ ID NO: 306732 - RNA, 32 nt, Homo Sapiens
ccucccaacuggugacugguuagugaugaggc

SEQ ID NO: 306733 - RNA, 32 nt, Homo Sapiens
uuagacagggucgggcggggagggguguggag

SEQ ID NO: 306734 - RNA, 32 nt, Homo Sapiens
gcagugccagcuuucuucuguugaugccguuc

SEQ ID NO: 306735 - RNA, 32 nt, Homo Sapiens
ccucguuccgccgagagccgggcccccagucg

SEQ ID NO: 306736 - RNA, 32 nt, Homo Sapiens
acgaggucaggaguucgagaccauccuggcca

SEQ ID NO: 306737 - RNA, 32 nt, Homo Sapiens
cuuacagacaaaaugaagacuaucaugugcaa

SEQ ID NO: 306738 - RNA, 32 nt, Homo Sapiens
gucgggugucauugugcauaccuguaguccca

SEQ ID NO: 306739 - RNA, 32 nt, Homo Sapiens
acacaguugcucguggccacucaguggagcug

SEQ ID NO: 306740 - RNA, 32 nt, Homo Sapiens
acacuucagaacugcugcuauaaagaaauucu

SEQ ID NO: 306741 - RNA, 32 nt, Homo Sapiens
ucucuguuaauacauaauugcuccaagcuucc

SEQ ID NO: 306742 - RNA, 32 nt, Homo Sapiens
auauauuaaugucaguucuacuguauagaguu

SEQ ID NO: 306743 - RNA, 32 nt, Homo Sapiens
aaauagcugcaugguuuauucuaauuuauuuc

SEQ ID NO: 306744 - RNA, 32 nt, Homo Sapiens
acuccuggugcaggucuccaccugcacauugg

SEQ ID NO: 306745 - RNA, 32 nt, Homo Sapiens
uggaagaaaucgucagaggguagcaaaaauua

SEQ ID NO: 306746 - RNA, 32 nt, Homo Sapiens
aauuuucuaaaaugggucacuuugaaaagaau

SEQ ID NO: 306747 - RNA, 32 nt, Homo Sapiens
cgguaagccagacgucccucccucggggauac

SEQ ID NO: 306748 - RNA, 32 nt, Homo Sapiens
gagggugggugcccuccagaccuggggacuga

SEQ ID NO: 306749 - RNA, 32 nt, Homo Sapiens
agccaaaaaauauauuccauugcuuugaaaaa

SEQ ID NO: 306750 - RNA, 32 nt, Homo Sapiens
uuaauuuuaaacaaucuccauaucuccaaaga

SEQ ID NO: 306751 - RNA, 32 nt, Homo Sapiens
acucucucccuggccugggagucggggucuca

SEQ ID NO: 306752 - RNA, 32 nt, Homo Sapiens
aaaagacuccgccccucccccucccccucgaa

SEQ ID NO: 306753 - RNA, 32 nt, Homo Sapiens
gcucauuguaaaugauggcauuaauuuauugg

SEQ ID NO: 306754 - RNA, 32 nt, Homo Sapiens
uggaggacacaccgaccccaccccaugcugcc

SEQ ID NO: 306755 - RNA, 32 nt, Homo Sapiens
auugugaaauauuuugcuaaucuuauagaaaa

SEQ ID NO: 306756 - RNA, 32 nt, Homo Sapiens
ccaccuugaacuuuauacugacuaccugaggg

SEQ ID NO: 306757 - RNA, 32 nt, Homo Sapiens
acagggccuaguacauagugggcccccuacau

SEQ ID NO: 306758 - RNA, 32 nt, Homo Sapiens
guaccuaauguuugccauuuugugacaugggu

SEQ ID NO: 306759 - RNA, 32 nt, Homo Sapiens
ggcccaguccaucguuaaccacuacaccugug

SEQ ID NO: 306760 - RNA, 32 nt, Homo Sapiens
auucuuuuuuaaaacuaccaaguuugagaaua

SEQ ID NO: 306761 - RNA, 32 nt, Homo Sapiens
ucugggcaaggagcugcaggccacccucaggc

SEQ ID NO: 306762 - RNA, 32 nt, Homo Sapiens
aguaugauugaguaaacauauuaaacuuccuc

SEQ ID NO: 306763 - RNA, 32 nt, Homo Sapiens
acauuuggcugcaugugguugggccaucaaca

SEQ ID NO: 306764 - RNA, 32 nt, Homo Sapiens
cuuuguguucuuccuccuuagccuauuuucuu

SEQ ID NO: 306765 - RNA, 32 nt, Homo Sapiens
uucagcagaagcccagagacaagcauuuugaa

SEQ ID NO: 306766 - RNA, 32 nt, Homo Sapiens
cuugagaguuuugccaagaaaaucugggccua

SEQ ID NO: 306767 - RNA, 32 nt, Homo Sapiens
caguguaggugauggccaccugguggcacauc

SEQ ID NO: 306768 - RNA, 32 nt, Homo Sapiens
ccacaggugggaggagucggagaggcaggggc

SEQ ID NO: 306769 - RNA, 32 nt, Homo Sapiens
gaggcuaaaagcucuuguucagauugcuugag

SEQ ID NO: 306770 - RNA, 32 nt, Homo Sapiens
gaugcuuacugaccuggugauguuagaagaca

SEQ ID NO: 306771 - RNA, 32 nt, Homo Sapiens
ccauggagccuccugggagaucuucagaccca

SEQ ID NO: 306772 - RNA, 32 nt, Homo Sapiens
ggaggucuucaguaucucuggcacuggcaaua

SEQ ID NO: 306773 - RNA, 32 nt, Homo Sapiens
aacaaauguuauucuuuuuaaauaauuaagaa

SEQ ID NO: 306774 - RNA, 32 nt, Homo Sapiens
gggcagaggggaggagaauuccaggacaagag

SEQ ID NO: 306775 - RNA, 32 nt, Homo Sapiens
auuguugguggcacguccccccgggagggggu

SEQ ID NO: 306776 - RNA, 32 nt, Homo Sapiens
agucagauuagcaagcucauggccacaugaag

SEQ ID NO: 306777 - RNA, 32 nt, Homo Sapiens
cugccccgaggguccggacgcgccccagcucg

SEQ ID NO: 306778 - RNA, 32 nt, Homo Sapiens
uguaagaaaaugacuguaaaucucaagaaaaa

SEQ ID NO: 306779 - RNA, 32 nt, Homo Sapiens
ggacaacaaguaccuauggaacuauauaaugg

SEQ ID NO: 306780 - RNA, 32 nt, Homo Sapiens
uguuuaacaaaauaaucagauuuuugccuagc

SEQ ID NO: 306781 - RNA, 32 nt, Homo Sapiens
cuccccuccccuccccucccccgccccugugu

SEQ ID NO: 306782 - RNA, 32 nt, Homo Sapiens
ugcaguaaagaaaaaauuggggaagaaugcaa

SEQ ID NO: 306783 - RNA, 32 nt, Homo Sapiens
cagugagaauugguggggcaaguuguccugag

SEQ ID NO: 306784 - RNA, 32 nt, Homo Sapiens
gagcugccuacuacaucacugauccuugugaa

SEQ ID NO: 306785 - RNA, 32 nt, Homo Sapiens
uaaaauuuaaacaauaaauuugccacuuagau

SEQ ID NO: 306786 - RNA, 32 nt, Homo Sapiens
ugcagggagguguuaagaagagaacucugugc

SEQ ID NO: 306787 - RNA, 32 nt, Homo Sapiens
ucccccaacucaacugccguucgucguucgug

SEQ ID NO: 306788 - RNA, 32 nt, Homo Sapiens
agcacuuuuucuuuucuuugugucuguauuau

SEQ ID NO: 306789 - RNA, 32 nt, Homo Sapiens
ccuuugaguggccuugcuucucaaaauguggc

SEQ ID NO: 306790 - RNA, 32 nt, Homo Sapiens
gccggccaugaucgcgucgugcuuguguuacc

SEQ ID NO: 306791 - RNA, 32 nt, Homo Sapiens
cuccagcugacagaaaaauccaggaugagauc

SEQ ID NO: 306792 - RNA, 32 nt, Homo Sapiens
cugaggaacgaaucucagaacuugaagauugg

SEQ ID NO: 306793 - RNA, 32 nt, Homo Sapiens
acaaaguagaugcucaaugaauuuauauuaaa

SEQ ID NO: 306794 - RNA, 32 nt, Homo Sapiens
gccucucaccuggccuggccucagcuggcuuu

SEQ ID NO: 306795 - RNA, 32 nt, Homo Sapiens
cuucucugucucaugugugcucuucuucuuuc

SEQ ID NO: 306796 - RNA, 32 nt, Homo Sapiens
ggagcacccaugugaagggguuuaccuggcau

SEQ ID NO: 306797 - RNA, 32 nt, Homo Sapiens
accgcccggccguccggacccgggccgcgaga

SEQ ID NO: 306798 - RNA, 32 nt, Homo Sapiens
accuuggaauuugcucuguagagcagcagaga

SEQ ID NO: 306799 - RNA, 32 nt, Homo Sapiens
guccagguucugccggccccagccggaagcuu

SEQ ID NO: 306800 - RNA, 32 nt, Homo Sapiens
uggacauggagcucucuuaauaccgucaaacc

SEQ ID NO: 306801 - RNA, 32 nt, Homo Sapiens
cgcuuuagccgcagccgcugcugccgccgccg

SEQ ID NO: 306802 - RNA, 32 nt, Homo Sapiens
gauacaggaagggagaggugucugcuaccuuu

SEQ ID NO: 306803 - RNA, 30 nt, Homo Sapiens
cuuuucaucuucggcgagcccaggggaugg

SEQ ID NO: 306804 - RNA, 32 nt, Homo Sapiens
gaagccagggccauauauuuacacagagucca

SEQ ID NO: 306805 - RNA, 32 nt, Homo Sapiens
acggcaucaggagagacagagaugugaaggag

SEQ ID NO: 306806 - RNA, 32 nt, Homo Sapiens
agaugaaaauggugcccucaucagagucauca

SEQ ID NO: 306807 - RNA, 32 nt, Homo Sapiens
ccucuucccuccccaucacccaccucagugau

SEQ ID NO: 306808 - RNA, 32 nt, Homo Sapiens
ggucguggggacgggaacaugugcccgaccgc

SEQ ID NO: 306809 - RNA, 32 nt, Homo Sapiens
ggcccgggaggcggcccaggcuggguaaagac

SEQ ID NO: 306810 - RNA, 32 nt, Homo Sapiens
auaauuugguauuuacucaaaucuucaauuuc

SEQ ID NO: 306811 - RNA, 32 nt, Homo Sapiens
cacccagcugucuggcccgauuccugcuuuuc

SEQ ID NO: 306812 - RNA, 32 nt, Homo Sapiens
cgcuuguaaucucagcacuuugggaggccgag

SEQ ID NO: 306813 - RNA, 32 nt, Homo Sapiens
gacacaaaacaaugcugaaguuaauauaauuu

SEQ ID NO: 306814 - RNA, 32 nt, Homo Sapiens
cgccuguaauccuagcacuuugggaggcugag

SEQ ID NO: 306815 - RNA, 32 nt, Homo Sapiens
caccuauaaucccagcacuuugggaagccaag

SEQ ID NO: 306816 - RNA, 32 nt, Homo Sapiens
cgccuguaaucccagcacuuugggaggccgag

SEQ ID NO: 306817 - RNA, 32 nt, Homo Sapiens
cgccuguaaucccagcacuuuaggaggccaag

SEQ ID NO: 306818 - RNA, 32 nt, Homo Sapiens
cgccuauaaucccagcacuuugggaggccaag

SEQ ID NO: 306819 - RNA, 32 nt, Homo Sapiens
gcugggccuuggaggaagggggccgagaccgg

SEQ ID NO: 306820 - RNA, 32 nt, Homo Sapiens
gugagccucccugcugcccccaggggcuccuc

SEQ ID NO: 306821 - RNA, 32 nt, Homo Sapiens
gcuccagaacaguaaccaagugggaaaauaaa

SEQ ID NO: 306822 - RNA, 32 nt, Homo Sapiens
aacucuuaaauuauaaugugaaaccugguuuu

SEQ ID NO: 306823 - RNA, 32 nt, Homo Sapiens
guucugugcagguggaagagcuacccgagaac

SEQ ID NO: 306824 - RNA, 32 nt, Homo Sapiens
uucuccugccucagccucccaaggagcuggga

SEQ ID NO: 306825 - RNA, 32 nt, Homo Sapiens
gaagucagcuggacuucuggguggggcgggga

SEQ ID NO: 306826 - RNA, 32 nt, Homo Sapiens
aucuguaagaucugggauuugcggggacacuu

SEQ ID NO: 306827 - RNA, 32 nt, Homo Sapiens
uacacugugugauggucauauuagucucucua

SEQ ID NO: 306828 - RNA, 32 nt, Homo Sapiens
gacucugccagccccagcuucagccccggcuc

SEQ ID NO: 306829 - RNA, 32 nt, Homo Sapiens
cuuucugcgucucucccuguaccaggcucaaa

SEQ ID NO: 306830 - RNA, 32 nt, Homo Sapiens
aauauuuggcauugugucuguaucuaauuuaa

SEQ ID NO: 306831 - RNA, 32 nt, Homo Sapiens
uuuccagcucaucacaccccgccccacuaugg

SEQ ID NO: 306832 - RNA, 32 nt, Homo Sapiens
uuuuaaaaaacaugaucacacuguauaagcua

SEQ ID NO: 306833 - RNA, 32 nt, Homo Sapiens
agggccagcugcugggggagcggcacugggga

SEQ ID NO: 306834 - RNA, 32 nt, Homo Sapiens
uuauuuacuguaauacaaacugguuaaaacua

SEQ ID NO: 306835 - RNA, 32 nt, Homo Sapiens
uuuguccuggggauccagaaacccaugauacc

SEQ ID NO: 306836 - RNA, 32 nt, Homo Sapiens
ccgagccgcugagcagguguugguccucagga

SEQ ID NO: 306837 - RNA, 32 nt, Homo Sapiens
ccccaccugcuucauggguuggcuugagcaag

SEQ ID NO: 306838 - RNA, 32 nt, Homo Sapiens
gccaaggucugacugcuucuuuuugaugauca

SEQ ID NO: 306839 - RNA, 32 nt, Homo Sapiens
aauuagccgggcgugguggcgccugccuguaa

SEQ ID NO: 306840 - RNA, 32 nt, Homo Sapiens
aaugggagaaaaagcaaaucgcacaaugacau

SEQ ID NO: 306841 - RNA, 32 nt, Homo Sapiens
gagagaaggugacacggauggaagagugggaa

SEQ ID NO: 306842 - RNA, 32 nt, Homo Sapiens
cuuccgcggaagggaagagucccgcagucgga

SEQ ID NO: 306843 - RNA, 30 nt, Homo Sapiens
acccgaggcaggcucugggcccgccggguc

SEQ ID NO: 306844 - RNA, 31 nt, Homo Sapiens
ggggcugcugaauaaagccaugucucauuua

SEQ ID NO: 306845 - RNA, 32 nt, Homo Sapiens
auuuuaugcaagaugguacuguaacauuccau

SEQ ID NO: 306846 - RNA, 32 nt, Homo Sapiens
ccagggcacuucuauuuguuuuuguggaaaga

SEQ ID NO: 306847 - RNA, 32 nt, Homo Sapiens
gugaaaauaaccucaaaaagaaaaauacgacu

SEQ ID NO: 306848 - RNA, 32 nt, Homo Sapiens
ucagugcuggggguggugggcggacaauagga

SEQ ID NO: 306849 - RNA, 32 nt, Homo Sapiens
gggccgcgcgccucgggcgcuacgaacccggc

SEQ ID NO: 306850 - RNA, 32 nt, Homo Sapiens
cacacacacacacacacacacacacacgcccc

SEQ ID NO: 306851 - RNA, 32 nt, Homo Sapiens
uagcggacgggcgggcgggcgcgcgugugccc

SEQ ID NO: 306852 - RNA, 32 nt, Homo Sapiens
uucccgugcagcucagcucgcgcagguuuucu

SEQ ID NO: 306853 - RNA, 32 nt, Homo Sapiens
aaggaaccgagcuuguaguacccggcggggca

SEQ ID NO: 306854 - RNA, 32 nt, Homo Sapiens
gccaaauuuuguuuuucuucauuuaaauauuu

SEQ ID NO: 306855 - RNA, 32 nt, Homo Sapiens
ggcggggaugcgggaccggcugccagaccuga

SEQ ID NO: 306856 - RNA, 32 nt, Homo Sapiens
uugguuccucagaaagccaagcccacugcagc

SEQ ID NO: 306857 - RNA, 32 nt, Homo Sapiens
ccgaggcagugaggugauugcugcugggaugg

SEQ ID NO: 306858 - RNA, 32 nt, Homo Sapiens
caagacauuuccccucucugaaccuauuuccu

SEQ ID NO: 306859 - RNA, 32 nt, Homo Sapiens
agcgucacuccagugcucagcuguggcuggag

SEQ ID NO: 306860 - RNA, 32 nt, Homo Sapiens
cacggugagccacagucuguugguagaauuug

SEQ ID NO: 306861 - RNA, 29 nt, Homo Sapiens
ugccaggggaagauuccuuggaggaggcc

SEQ ID NO: 306862 - RNA, 32 nt, Homo Sapiens
caccgcucugggauugggugguugccuaucau

SEQ ID NO: 306863 - RNA, 32 nt, Homo Sapiens
accaugucucaaacuccugaccucaggcgauc

SEQ ID NO: 306864 - RNA, 32 nt, Homo Sapiens
uguuagugcauguguuuuuaauuuacaugaaa

SEQ ID NO: 306865 - RNA, 32 nt, Homo Sapiens
aacaagguucccucugagaauuccaaggaguu

SEQ ID NO: 306866 - RNA, 32 nt, Homo Sapiens
agcauagauggcaacugauucccaguuuaaga

SEQ ID NO: 306867 - RNA, 32 nt, Homo Sapiens
aauauuuaguauuuguacaaaauaucaaaaag

SEQ ID NO: 306868 - RNA, 32 nt, Homo Sapiens
cccuuuucuaggcuuuuuguaucauuucuuag

SEQ ID NO: 306869 - RNA, 32 nt, Homo Sapiens
agaccacagcagcuuucguuccuccuucccuu

SEQ ID NO: 306870 - RNA, 32 nt, Homo Sapiens
ugguuauuucuuuuauaauccauauaauaaau

SEQ ID NO: 306871 - RNA, 32 nt, Homo Sapiens
cagggaacacugggcgaugccuggggacauug

SEQ ID NO: 306872 - RNA, 32 nt, Homo Sapiens
auuauuaaauaccaacuuugguuacaguauag

SEQ ID NO: 306873 - RNA, 32 nt, Homo Sapiens
uucacaucgauuuccugguaggcgucugcauu

SEQ ID NO: 306874 - RNA, 32 nt, Homo Sapiens
ggcauuggauauuuuuuacuuuagaagccugc

SEQ ID NO: 306875 - RNA, 32 nt, Homo Sapiens
gaucaacuaggaugaauuuaagacugugcuac

SEQ ID NO: 306876 - RNA, 32 nt, Homo Sapiens
ggugaugggguuuuuuuuuuuauaacuuagua

SEQ ID NO: 306877 - RNA, 31 nt, Homo Sapiens
uagguauuugauccauuuugaguuaauuuuu

SEQ ID NO: 306878 - RNA, 32 nt, Homo Sapiens
ucaccaacuagauaguuuaaucuagcacauuu

SEQ ID NO: 306879 - RNA, 32 nt, Homo Sapiens
ggguggagccucugugugacuccauacuccuc

SEQ ID NO: 306880 - RNA, 32 nt, Homo Sapiens
cuucguguguggaaacacaccucuccuuuaca

SEQ ID NO: 306881 - RNA, 32 nt, Homo Sapiens
cagaaaccguccuugccugugcucugccagcg

SEQ ID NO: 306882 - RNA, 32 nt, Homo Sapiens
uuugguccaaauaauauuuuauuuguaugggu

SEQ ID NO: 306883 - RNA, 32 nt, Homo Sapiens
cccccgggaccggcccgugucccgccccgugu

SEQ ID NO: 306884 - RNA, 32 nt, Homo Sapiens
ggccagcgguuuaguuuacagaucuccucccc

SEQ ID NO: 306885 - RNA, 32 nt, Homo Sapiens
gcugcuaccaaaacacuagacagugccaagug

SEQ ID NO: 306886 - RNA, 32 nt, Homo Sapiens
uuugauaguaaguuuaaaaagcacaaugugaa

SEQ ID NO: 306887 - RNA, 32 nt, Homo Sapiens
ugaauauuuuugcugugaaacacuugacagca

SEQ ID NO: 306888 - RNA, 32 nt, Homo Sapiens
cccagggccuacagagccuauguaucuaccua

SEQ ID NO: 306889 - RNA, 32 nt, Homo Sapiens
uacacacacacagacacacacacacacacacg

SEQ ID NO: 306890 - RNA, 32 nt, Homo Sapiens
caauauacugaucuuagaaaauguagacaugg

SEQ ID NO: 306891 - RNA, 32 nt, Homo Sapiens
gaucccuucuuggucuucuccuucugggccuc

SEQ ID NO: 306892 - RNA, 32 nt, Homo Sapiens
gucgcccugagcggagcgccgcccgcgggauc

SEQ ID NO: 306893 - RNA, 32 nt, Homo Sapiens
ggugggugcauuuucuggcccggaguugccug

SEQ ID NO: 306894 - RNA, 32 nt, Homo Sapiens
ggcuguuaccccgugcgcgcuucgacguugcu

SEQ ID NO: 306895 - RNA, 32 nt, Homo Sapiens
guacuuuguauauagaauuuuuauaaauugua

SEQ ID NO: 306896 - RNA, 32 nt, Homo Sapiens
caaccgcagggccgccccucccgcuugcuccc

SEQ ID NO: 306897 - RNA, 32 nt, Homo Sapiens
agaguuggaaaucaguugugaauacauucuuu

SEQ ID NO: 306898 - RNA, 32 nt, Homo Sapiens
acuuuccuuccgucagcgucagcuccuugcca

SEQ ID NO: 306899 - RNA, 32 nt, Homo Sapiens
ccaccccugggaggcagaagccaggcauagcg

SEQ ID NO: 306900 - RNA, 32 nt, Homo Sapiens
acaaaaaauuacuggguauggugcugggcugu

SEQ ID NO: 306901 - RNA, 32 nt, Homo Sapiens
cggcagaugcuguuguuguuacuucccuccaa

SEQ ID NO: 306902 - RNA, 32 nt, Homo Sapiens
guacccgcacuguguccuuucuaucacguuau

SEQ ID NO: 306903 - RNA, 32 nt, Homo Sapiens
aaaaauaagcagcugaggaauuacuguaacuc

SEQ ID NO: 306904 - RNA, 32 nt, Homo Sapiens
uauaaacuguuguuuaauuacguggaaacauc

SEQ ID NO: 306905 - RNA, 32 nt, Homo Sapiens
augauaagaaugccuuuuagggcuagaaaaga

SEQ ID NO: 306906 - RNA, 32 nt, Homo Sapiens
guaggcauugauaaaaauuugcuggagcauug

SEQ ID NO: 306907 - RNA, 32 nt, Homo Sapiens
gccaagcucuuuuuaauaaccagcucucacug

SEQ ID NO: 306908 - RNA, 32 nt, Homo Sapiens
accuccagugggaaacaaaacuaaagagacca

SEQ ID NO: 306909 - RNA, 32 nt, Homo Sapiens
uuaguugucuuucaagauaccuuaagagauca

SEQ ID NO: 306910 - RNA, 32 nt, Homo Sapiens
cuauuucuguaccaaaguguuuguggaaacaa

SEQ ID NO: 306911 - RNA, 32 nt, Homo Sapiens
cucuugaccauuuguaauuuuuucauauuauc

SEQ ID NO: 306912 - RNA, 32 nt, Homo Sapiens
cucucucugcccgugucaguccgugaaauucc

SEQ ID NO: 306913 - RNA, 32 nt, Homo Sapiens
caugaaccuggcuucgaggccuugcuuuucuc

SEQ ID NO: 306914 - RNA, 32 nt, Homo Sapiens
gauuaugaugcaucauuaucacagaagaaauu

SEQ ID NO: 306915 - RNA, 32 nt, Homo Sapiens
agagcaagaagaagagugacuccugaagcccu

SEQ ID NO: 306916 - RNA, 32 nt, Homo Sapiens
auuacaguguauaaaugaaaagcaauuucaua

SEQ ID NO: 306917 - RNA, 32 nt, Homo Sapiens
aaccccaacucggaggacccccugcccgggca

SEQ ID NO: 306918 - RNA, 32 nt, Homo Sapiens
aaagcuccacccaaagaccuaauaucaaaaga

SEQ ID NO: 306919 - RNA, 32 nt, Homo Sapiens
gaccaauguagguauucuccccgccccaucuu

SEQ ID NO: 306920 - RNA, 32 nt, Homo Sapiens
gugcuuuaaaaugacuuugggauuaaaaaagc

SEQ ID NO: 306921 - RNA, 27 nt, Homo Sapiens
caucauuauuauaucugguauagugcu

SEQ ID NO: 306922 - RNA, 32 nt, Homo Sapiens
uacagaguuagcagguuuuucuaaggaaaugc

SEQ ID NO: 306923 - RNA, 32 nt, Homo Sapiens
ugcacugcacuucuucguuuucuugcuccccc

SEQ ID NO: 306924 - RNA, 32 nt, Homo Sapiens
gcuuccugcccccagcugcagcuauccugaca

SEQ ID NO: 306925 - RNA, 32 nt, Homo Sapiens
gccaggacuacaacuguguauuuuaaagccau

SEQ ID NO: 306926 - RNA, 32 nt, Homo Sapiens
uuaacaccauauauuucccucccaguuuuucu

SEQ ID NO: 306927 - RNA, 30 nt, Homo Sapiens
cagaaaauaaaaacagaagacuguccuuuc

SEQ ID NO: 306928 - RNA, 32 nt, Homo Sapiens
caggguggagagggcggugggaggcgugugcc

SEQ ID NO: 306929 - RNA, 32 nt, Homo Sapiens
cucuccuaggccccggccgcgcgccacccgcc

SEQ ID NO: 306930 - RNA, 32 nt, Homo Sapiens
gcuggcugcaggugcugggugagcugcagcgg

SEQ ID NO: 306931 - RNA, 32 nt, Homo Sapiens
ccugagagaguuaguuccauggaauaaauacu

SEQ ID NO: 306932 - RNA, 32 nt, Homo Sapiens
cugggaaguaagacauaggauccaagaaugag

SEQ ID NO: 306933 - RNA, 32 nt, Homo Sapiens
aacagacaucaguggaaucgaaaaccaauagu

SEQ ID NO: 306934 - RNA, 32 nt, Homo Sapiens
caggccaaggaccuggcagggccagacgcugu

SEQ ID NO: 306935 - RNA, 32 nt, Homo Sapiens
gugcuuacacacaugcacacacaaauaugcac

SEQ ID NO: 306936 - RNA, 32 nt, Homo Sapiens
ccucugaguuggagaugucagagggagccaug

SEQ ID NO: 306937 - RNA, 32 nt, Homo Sapiens
aaggagguuauaccaggauuuauuuugagcuc

SEQ ID NO: 306938 - RNA, 32 nt, Homo Sapiens
acccuuuuuaucacuuuuaaauuugcacuuua

SEQ ID NO: 306939 - RNA, 32 nt, Homo Sapiens
ugcgacuacaggcgcgcaccaccacgcccggc

SEQ ID NO: 306940 - RNA, 32 nt, Homo Sapiens
agcucucauuggcucguugcaugugagugucc

SEQ ID NO: 306941 - RNA, 32 nt, Homo Sapiens
uuguuuuggugucaaggacucaguaaagcauc

SEQ ID NO: 306942 - RNA, 32 nt, Homo Sapiens
accaacugcggguguuuccucaccacgcuggg

SEQ ID NO: 306943 - RNA, 32 nt, Homo Sapiens
gguaaauuauacauuuguauauuuaaagugcu

SEQ ID NO: 306944 - RNA, 32 nt, Homo Sapiens
uuacaggugugagccaccgcgcccggcccgag

SEQ ID NO: 306945 - RNA, 32 nt, Homo Sapiens
agcgggagcgcggcgcacggcgaugcgccgag

SEQ ID NO: 306946 - RNA, 32 nt, Homo Sapiens
uccaaagauuuuccucuuaguuguuugaaaua

SEQ ID NO: 306947 - RNA, 32 nt, Homo Sapiens
aguaaaggaauuaaguaaaaauaaaauuucag

SEQ ID NO: 306948 - RNA, 32 nt, Homo Sapiens
aaaauauauggacuaaacguagcccugugcug

SEQ ID NO: 306949 - RNA, 32 nt, Homo Sapiens
gccgagggacgccgaggccucgggcgggggcu

SEQ ID NO: 306950 - RNA, 32 nt, Homo Sapiens
ggcuggagugcagucgcacaaucucggcucac

SEQ ID NO: 306951 - RNA, 32 nt, Homo Sapiens
ugcccucccaacuuucuauccuccccuccugc

SEQ ID NO: 306952 - RNA, 31 nt, Homo Sapiens
agcuuuuggcuguauuaauagagguaggaau

SEQ ID NO: 306953 - RNA, 32 nt, Homo Sapiens
uugguugucacuguuguacggugucuagaauu

SEQ ID NO: 306954 - RNA, 32 nt, Homo Sapiens
aucaggggaccaaaaaacuugcucuuaucuuc

SEQ ID NO: 306955 - RNA, 32 nt, Homo Sapiens
cgucggagggagccggagcgcuucucccgagu

SEQ ID NO: 306956 - RNA, 32 nt, Homo Sapiens
gaguuuauccugccagcccauaaauggacuau

SEQ ID NO: 306957 - RNA, 32 nt, Homo Sapiens
uaacaacugggaaauaagcaaaaaacugcauc

SEQ ID NO: 306958 - RNA, 32 nt, Homo Sapiens
gacuggaggguuccgggaaaagagcagaggaa

SEQ ID NO: 306959 - RNA, 32 nt, Homo Sapiens
cccuggccugacgcccugcuucgucgccuccu

SEQ ID NO: 306960 - RNA, 32 nt, Homo Sapiens
gagcccggcgcuggcucugggccaaguagcug

SEQ ID NO: 306961 - RNA, 32 nt, Homo Sapiens
cugugccacagugguaagucaccuaaccuuua

SEQ ID NO: 306962 - RNA, 32 nt, Homo Sapiens
ucaugauagggagagcaggcagcuggguccug

SEQ ID NO: 306963 - RNA, 32 nt, Homo Sapiens
ccaggggcucagccugauggccccacacuguc

SEQ ID NO: 306964 - RNA, 32 nt, Homo Sapiens
gggacauggcagugacuguguccagaacugac

SEQ ID NO: 306965 - RNA, 32 nt, Homo Sapiens
cacccgugaagccccacgggucaaggcuggug

SEQ ID NO: 306966 - RNA, 32 nt, Homo Sapiens
auguuuauaaggauaaacaggauacuuacagg

SEQ ID NO: 306967 - RNA, 32 nt, Homo Sapiens
uaaagcggcucuuuucaguagugugacuuuua

SEQ ID NO: 306968 - RNA, 32 nt, Homo Sapiens
ugucuuuucuugcaugaggcuagugugguguu

SEQ ID NO: 306969 - RNA, 32 nt, Homo Sapiens
cuuugagaggaagaaauugaccaccuggacua

SEQ ID NO: 306970 - RNA, 32 nt, Homo Sapiens
cugaugugugaagugagaacuccaucagaaaa

SEQ ID NO: 306971 - RNA, 32 nt, Homo Sapiens
auggaagaaauaccuuaugaauguaagaaugu

SEQ ID NO: 306972 - RNA, 32 nt, Homo Sapiens
gaggagccgaguuagcucagccaggcggcgac

SEQ ID NO: 306973 - RNA, 32 nt, Homo Sapiens
aauuuacuuacaaggaggcugcucuuguuacc

SEQ ID NO: 306974 - RNA, 32 nt, Homo Sapiens
cgccaacuggccuggaccccagccccuugcac

SEQ ID NO: 306975 - RNA, 30 nt, Homo Sapiens
cgcggcuggccaggaccgccggcuccuucu

SEQ ID NO: 306976 - RNA, 32 nt, Homo Sapiens
guugaccgggauggucucaaucuccugaccuc

SEQ ID NO: 306977 - RNA, 32 nt, Homo Sapiens
gccccuuucccucucucggacucgguuucccc

SEQ ID NO: 306978 - RNA, 32 nt, Homo Sapiens
uuuaaauuggugaccuagggaucagagauuug

SEQ ID NO: 306979 - RNA, 32 nt, Homo Sapiens
gagugagcccagcacggcgcuccgacuggcuu

SEQ ID NO: 306980 - RNA, 32 nt, Homo Sapiens
ggccgggugcgcgccacgcucuuccugccgcc

SEQ ID NO: 306981 - RNA, 32 nt, Homo Sapiens
auggcgccgcgggcauuucuuccacugcccgu

SEQ ID NO: 306982 - RNA, 32 nt, Homo Sapiens
uggggccuucccuccugccagggaggccaucu

SEQ ID NO: 306983 - RNA, 32 nt, Homo Sapiens
cgggaguuccccgggagcgcugccgggaguuc

SEQ ID NO: 306984 - RNA, 28 nt, Homo Sapiens
aacaaagugccaggaccagcuggguuca

SEQ ID NO: 306985 - RNA, 32 nt, Homo Sapiens
guaaauuuguugccaaaaauugauaguuuacu

SEQ ID NO: 306986 - RNA, 32 nt, Homo Sapiens
agaaucuaaaauuguauaugaacuuauucuua

SEQ ID NO: 306987 - RNA, 32 nt, Homo Sapiens
cauucucugaccacagucuccuccuugauaua

SEQ ID NO: 306988 - RNA, 30 nt, Homo Sapiens
gcgagggauaaaagacuacaaauauggugc

SEQ ID NO: 306989 - RNA, 32 nt, Homo Sapiens
agcauguuuguaaccuguuacuauuuggagag

SEQ ID NO: 306990 - RNA, 32 nt, Homo Sapiens
uugagcucuccauucacaaacaugacaucacc

SEQ ID NO: 306991 - RNA, 32 nt, Homo Sapiens
gggugggugcgguggcuuacaccuguaauccc

SEQ ID NO: 306992 - RNA, 32 nt, Homo Sapiens
auuugaucuuaccaaagaagucaacacauggg

SEQ ID NO: 306993 - RNA, 32 nt, Homo Sapiens
aagaagaguuuguauuauuuuuucauacggcu

SEQ ID NO: 306994 - RNA, 32 nt, Homo Sapiens
ccuauaccgagacccaccauccuuccauccug

SEQ ID NO: 306995 - RNA, 32 nt, Homo Sapiens
ccacagagcuccuggagagacugcccagcuau

SEQ ID NO: 306996 - RNA, 32 nt, Homo Sapiens
gcuguuuuggaacacaguugauuccuugaguu

SEQ ID NO: 306997 - RNA, 32 nt, Homo Sapiens
gcgggcgcgggaaggggauuuggauuguugcg

SEQ ID NO: 306998 - RNA, 32 nt, Homo Sapiens
ggacaguugcuuaguacaggcuucucacuucc

SEQ ID NO: 306999 - RNA, 32 nt, Homo Sapiens
gucaucauaguguuaguuuuuauuuuucccuc

SEQ ID NO: 307000 - RNA, 32 nt, Homo Sapiens
uauaggcuuuggucuuuucaucugcaaagccu

SEQ ID NO: 307001 - RNA, 32 nt, Homo Sapiens
uuccagcucuuaaaauucuuuaucuuuuucuu

SEQ ID NO: 307002 - RNA, 32 nt, Homo Sapiens
aauuuuccauaguuugguuucuuaauugugcu

SEQ ID NO: 307003 - RNA, 32 nt, Homo Sapiens
aauuuauggugucagaauaaagggagaucaua

SEQ ID NO: 307004 - RNA, 32 nt, Homo Sapiens
gugagccgggauugcagugagccacggcacuc

SEQ ID NO: 307005 - RNA, 32 nt, Homo Sapiens
uucuuuggggaaaaaaucuauaaucacaaagu

SEQ ID NO: 307006 - RNA, 32 nt, Homo Sapiens
ccuuugcugacugcaggaaugcuugagaugca

SEQ ID NO: 307007 - RNA, 32 nt, Homo Sapiens
ccugcuguggaggcagcugagaagugguggcc

SEQ ID NO: 307008 - RNA, 32 nt, Homo Sapiens
caguguccauugggugcuucccuggugccagu

SEQ ID NO: 307009 - RNA, 32 nt, Homo Sapiens
gaggacgguuccagcccugggccaggcagaga

SEQ ID NO: 307010 - RNA, 32 nt, Homo Sapiens
cacagcaagcaaccacaaaaccagagcggaag

SEQ ID NO: 307011 - RNA, 32 nt, Homo Sapiens
ccggcgagccgacuggggagggguguggacgc

SEQ ID NO: 307012 - RNA, 32 nt, Homo Sapiens
ucacccccaugcugacagcagugagcugacca

SEQ ID NO: 307013 - RNA, 32 nt, Homo Sapiens
aaccacaaggaccccgacugcuccagacugga

SEQ ID NO: 307014 - RNA, 32 nt, Homo Sapiens
gcuggacccaaugcccggggcccaggcagaau

SEQ ID NO: 307015 - RNA, 32 nt, Homo Sapiens
uguaacaugcccagaagcuguuguggccgaca

SEQ ID NO: 307016 - RNA, 32 nt, Homo Sapiens
cucaaccagacagauagugaaacagcuuucug

SEQ ID NO: 307017 - RNA, 32 nt, Homo Sapiens
guggugacuggugccgugauguuugacaguag

SEQ ID NO: 307018 - RNA, 32 nt, Homo Sapiens
gguucuucuccuccgaaauaauauacugcaga

SEQ ID NO: 307019 - RNA, 32 nt, Homo Sapiens
ucauuuuucacuuuucaaagaauuuaaccuau

SEQ ID NO: 307020 - RNA, 32 nt, Homo Sapiens
cgcgggugcggcagcugcaggcugggagcgug

SEQ ID NO: 307021 - RNA, 32 nt, Homo Sapiens
uaacaauuauucaauaaucuauccucagguuu

SEQ ID NO: 307022 - RNA, 32 nt, Homo Sapiens
ugugggagguccccggccucuggaugcagcag

SEQ ID NO: 307023 - RNA, 32 nt, Homo Sapiens
guauugaaaaauaaaauaucuuuaaaacaucu

SEQ ID NO: 307024 - RNA, 32 nt, Homo Sapiens
aacuuggcugcaauuguggaccuucccuacca

SEQ ID NO: 307025 - RNA, 32 nt, Homo Sapiens
cacacuggugcagcugagcgccugugaacugu

SEQ ID NO: 307026 - RNA, 32 nt, Homo Sapiens
cccacacagucgcgcgcagcugcuggagagcc

SEQ ID NO: 307027 - RNA, 32 nt, Homo Sapiens
aggucccgcccagcugcagacccuccaggcug

SEQ ID NO: 307028 - RNA, 32 nt, Homo Sapiens
aaaggcugacccggcccgggcugcguacaccc

SEQ ID NO: 307029 - RNA, 32 nt, Homo Sapiens
gcuugugcgggcgggagggcaaugguggcaga

SEQ ID NO: 307030 - RNA, 32 nt, Homo Sapiens
ggagcccugcacccucccagugaucgugaaca

SEQ ID NO: 307031 - RNA, 32 nt, Homo Sapiens
acaugguuuuaaaaauauucaaccauuauagg

SEQ ID NO: 307032 - RNA, 32 nt, Homo Sapiens
uuuugauacaacaucuuaauucuuuguagaua

SEQ ID NO: 307033 - RNA, 32 nt, Homo Sapiens
ggcgcggccggagaccguggggcccccgguug

SEQ ID NO: 307034 - RNA, 32 nt, Homo Sapiens
ugcuggccuuggcagcucuagggugcccagca

SEQ ID NO: 307035 - RNA, 32 nt, Homo Sapiens
ugcaaccuccuccuccuggauucaagcaauuc

SEQ ID NO: 307036 - RNA, 30 nt, Homo Sapiens
gcaucagcuggcgucaugcaaagucaugca

SEQ ID NO: 307037 - RNA, 32 nt, Homo Sapiens
uacagauaauuuccauuuuaauguuuguuuuu

SEQ ID NO: 307038 - RNA, 32 nt, Homo Sapiens
gaagagaggaaggggaggagccgagucgagcc

SEQ ID NO: 307039 - RNA, 32 nt, Homo Sapiens
auggccucauccagcccucccuccccaggucc

SEQ ID NO: 307040 - RNA, 32 nt, Homo Sapiens
ucugcgugcgcgcgucugcugggccagucggg

SEQ ID NO: 307041 - RNA, 32 nt, Homo Sapiens
guccggcacuuggagccccccggagagggacc

SEQ ID NO: 307042 - RNA, 32 nt, Homo Sapiens
guacagcauaucuauacaaaauucugcuauag

SEQ ID NO: 307043 - RNA, 32 nt, Homo Sapiens
aggcuugaaggccggcaggagcauccaggggg

SEQ ID NO: 307044 - RNA, 31 nt, Homo Sapiens
cagguucccaggggcccgggaguccaaauac

SEQ ID NO: 307045 - RNA, 32 nt, Homo Sapiens
aaucaggcaaggaaaugaacucaggauucaga

SEQ ID NO: 307046 - RNA, 32 nt, Homo Sapiens
gaugggcccucccacuuuccccugccugcucc

SEQ ID NO: 307047 - RNA, 32 nt, Homo Sapiens
aggaccauccccggaagcugguccugugucca

SEQ ID NO: 307048 - RNA, 32 nt, Homo Sapiens
cagccucccuuugcugcagaggaggcagggaa

SEQ ID NO: 307049 - RNA, 32 nt, Homo Sapiens
auucauuacuagauaaaauguauaaagcucuc

SEQ ID NO: 307050 - RNA, 32 nt, Homo Sapiens
cuucaggcaggcggcccggggcagggacuugc

SEQ ID NO: 307051 - RNA, 32 nt, Homo Sapiens
gugccagcggugcccuucugcggccgcccuug

SEQ ID NO: 307052 - RNA, 30 nt, Homo Sapiens
ugugcagcgcccguggugaucugggguagg

SEQ ID NO: 307053 - RNA, 32 nt, Homo Sapiens
augcuuccucaaugagcuaaaacccaaauucg

SEQ ID NO: 307054 - RNA, 32 nt, Homo Sapiens
uggccuggccuggcccugcccugaggaaggag

SEQ ID NO: 307055 - RNA, 32 nt, Homo Sapiens
ucccugcagggcccucggugcagccuggcacc

SEQ ID NO: 307056 - RNA, 32 nt, Homo Sapiens
uaagucuugccuuuuuucucuaaguggcagga

SEQ ID NO: 307057 - RNA, 32 nt, Homo Sapiens
ugauguuccccucccugucuguguccaugugu

SEQ ID NO: 307058 - RNA, 32 nt, Homo Sapiens
ugucccacucacucuuuccccugcugcuccug

SEQ ID NO: 307059 - RNA, 32 nt, Homo Sapiens
uggggugcaccuguagucccagcuacuaggga

SEQ ID NO: 307060 - RNA, 32 nt, Homo Sapiens
ccggacauuggggacacgcagcuggacguaga

SEQ ID NO: 307061 - RNA, 32 nt, Homo Sapiens
auccgagcacaccaggaacagcuggaugaaau

SEQ ID NO: 307062 - RNA, 32 nt, Homo Sapiens
aaagaugccaugaccuucaccgagggccagac

SEQ ID NO: 307063 - RNA, 32 nt, Homo Sapiens
uccucccgcccggggccccaugggccgccgca

SEQ ID NO: 307064 - RNA, 32 nt, Homo Sapiens
guacauuucuuacuacucuucuacugucugag

SEQ ID NO: 307065 - RNA, 32 nt, Homo Sapiens
gcgagagccugcccuggcauccuuggucggaa

SEQ ID NO: 307066 - RNA, 32 nt, Homo Sapiens
uggcccgcaugcuggggagggucuauaggagg

SEQ ID NO: 307067 - RNA, 32 nt, Homo Sapiens
agcacagauuuuucuuuuucauugaaacuuua

SEQ ID NO: 307068 - RNA, 32 nt, Homo Sapiens
uuggaggcccucuggaggauuauaagaacgga

SEQ ID NO: 307069 - RNA, 32 nt, Homo Sapiens
aaugauguuauucuagagaacuucuaugucag

SEQ ID NO: 307070 - RNA, 32 nt, Homo Sapiens
cuuguaaacuaaauauuugguaacugaagcaa

SEQ ID NO: 307071 - RNA, 32 nt, Homo Sapiens
gacagagggucucagauggacgagggcucucc

SEQ ID NO: 307072 - RNA, 32 nt, Homo Sapiens
accccaguggauguuggaaaaaccaaaguuuu

SEQ ID NO: 307073 - RNA, 32 nt, Homo Sapiens
augaauaagggugaccccauugugaucugagc

SEQ ID NO: 307074 - RNA, 32 nt, Homo Sapiens
uagacucuggugccggggucagcucuggauuc

SEQ ID NO: 307075 - RNA, 32 nt, Homo Sapiens
cacugcggaacaggagugacucuggcugccaa

SEQ ID NO: 307076 - RNA, 32 nt, Homo Sapiens
uuugcuggaaauuuauaucagugucugggcuc

SEQ ID NO: 307077 - RNA, 32 nt, Homo Sapiens
ccaguggagcccaacuucuaaaggucaauaua

SEQ ID NO: 307078 - RNA, 28 nt, Homo Sapiens
acagacguggcuacuauggaaggcgcca

SEQ ID NO: 307079 - RNA, 32 nt, Homo Sapiens
aacauaaagccuuaaaaagacacacacuaaga

SEQ ID NO: 307080 - RNA, 32 nt, Homo Sapiens
agaccaaaucuaggaauuguugguguucaaga

SEQ ID NO: 307081 - RNA, 32 nt, Homo Sapiens
auguuaacuggcaaucaccuaacugguuaauc

SEQ ID NO: 307082 - RNA, 32 nt, Homo Sapiens
cucgggcucagaggccccacccugccccacac

SEQ ID NO: 307083 - RNA, 32 nt, Homo Sapiens
gcuuuuaaaauauuuuaaaacuggaccuguau

SEQ ID NO: 307084 - RNA, 32 nt, Homo Sapiens
augggguucccuguuuucucucugccgggugg

SEQ ID NO: 307085 - RNA, 32 nt, Homo Sapiens
gauucccagcucccaaccccgcagcuagccaa

SEQ ID NO: 307086 - RNA, 32 nt, Homo Sapiens
cucccaauuuucuuuuuacucccccucuuaag

SEQ ID NO: 307087 - RNA, 32 nt, Homo Sapiens
uauuucaauauacccucuuguuuauucaggaa

SEQ ID NO: 307088 - RNA, 32 nt, Homo Sapiens
ugauuagguccauggagggaagcccaucccug

SEQ ID NO: 307089 - RNA, 32 nt, Homo Sapiens
cggaggguggguccgcucucgcggccgccgaa

SEQ ID NO: 307090 - RNA, 32 nt, Homo Sapiens
gagucccucccaccacccucgccgcaggcagc

SEQ ID NO: 307091 - RNA, 32 nt, Homo Sapiens
auguacucuuccgauguuugugucacacaaca

SEQ ID NO: 307092 - RNA, 32 nt, Homo Sapiens
acuaggcaguggcggugccuugguacaaccug

SEQ ID NO: 307093 - RNA, 32 nt, Homo Sapiens
cuccuugccaagcugugugccuugaagaagau

SEQ ID NO: 307094 - RNA, 32 nt, Homo Sapiens
gggcccaggcacuuucuguuugaaccccuguc

SEQ ID NO: 307095 - RNA, 32 nt, Homo Sapiens
ggcggcugggagaccuguggguguggccuggc

SEQ ID NO: 307096 - RNA, 32 nt, Homo Sapiens
aacuguauuuuuauguuauauuguauaguuug

SEQ ID NO: 307097 - RNA, 32 nt, Homo Sapiens
uucuuuuacccauauuuuauuuaaaaguguau

SEQ ID NO: 307098 - RNA, 32 nt, Homo Sapiens
acccagugcccucacugcccagccccgccugu

SEQ ID NO: 307099 - RNA, 32 nt, Homo Sapiens
auucggcgcuuucaccgccgcggcccggguuc

SEQ ID NO: 307100 - RNA, 32 nt, Homo Sapiens
uuagaaggaagauucagaagugaggggcuaag

SEQ ID NO: 307101 - RNA, 32 nt, Homo Sapiens
aggggugggggaggagagagauaacaaacugg

SEQ ID NO: 307102 - RNA, 32 nt, Homo Sapiens
gccaagacccuggcccucuccucugcccagcc

SEQ ID NO: 307103 - RNA, 32 nt, Homo Sapiens
agagagaucccggcucccagcccacugagugg

SEQ ID NO: 307104 - RNA, 32 nt, Homo Sapiens
cgcgggcguggcagcugauauccggccgcugg

SEQ ID NO: 307105 - RNA, 32 nt, Homo Sapiens
gccaucgugggcuugcaagagucaaagggccu

SEQ ID NO: 307106 - RNA, 32 nt, Homo Sapiens
agcgcgcggugcauggaaugggcuaugugaau

SEQ ID NO: 307107 - RNA, 32 nt, Homo Sapiens
acuggcuuucccugauucauucuacaauccaa

SEQ ID NO: 307108 - RNA, 32 nt, Homo Sapiens
caacauggauauaaguuuuuuaaaaaaauagu

SEQ ID NO: 307109 - RNA, 32 nt, Homo Sapiens
caugcaguccucaaaaauuagauguaauugag

SEQ ID NO: 307110 - RNA, 32 nt, Homo Sapiens
uuuauccaaaguucuuuuuuuuuuuuuuugag

SEQ ID NO: 307111 - RNA, 30 nt, Homo Sapiens
gcgcagggcaggcgcgagcuggccucugag

SEQ ID NO: 307112 - RNA, 32 nt, Homo Sapiens
gggucugugagugucagcgugggaucaggcag

SEQ ID NO: 307113 - RNA, 32 nt, Homo Sapiens
agaaggggagugcccgcggcaggguucauuga

SEQ ID NO: 307114 - RNA, 32 nt, Homo Sapiens
ggggaggcuggggagggcccaggccacggaaa

SEQ ID NO: 307115 - RNA, 32 nt, Homo Sapiens
gccacauacucuaauauagauuuugguggaua

SEQ ID NO: 307116 - RNA, 32 nt, Homo Sapiens
uuuucaugagucuguauuacuaauggauaagu

SEQ ID NO: 307117 - RNA, 28 nt, Homo Sapiens
uccugacaaaauaaauguauguccuucc

SEQ ID NO: 307118 - RNA, 32 nt, Homo Sapiens
gccaccucccagcagagcaggcuacguccuca

SEQ ID NO: 307119 - RNA, 32 nt, Homo Sapiens
uaggggccuucccucccaggucugugucugau

SEQ ID NO: 307120 - RNA, 32 nt, Homo Sapiens
ggagaucauuuuggagcuuucagauuugacug

SEQ ID NO: 307121 - RNA, 32 nt, Homo Sapiens
augaggguacugucaccugccuuaauguaggu

SEQ ID NO: 307122 - RNA, 32 nt, Homo Sapiens
uaacugggguuacaaaaauuauagaaauuuuu

SEQ ID NO: 307123 - RNA, 32 nt, Homo Sapiens
cuuuguaaacguccaaauaaaauacagauaac

SEQ ID NO: 307124 - RNA, 32 nt, Homo Sapiens
cucggacucgggaucuccccggcggccucccu

SEQ ID NO: 307125 - RNA, 32 nt, Homo Sapiens
uguuuuagcugagacuugugggauggauaaua

SEQ ID NO: 307126 - RNA, 32 nt, Homo Sapiens
gggagcauauccuugucacugcagccagaaag

SEQ ID NO: 307127 - RNA, 32 nt, Homo Sapiens
aaggucggauggcggcggccagggcagccccg

SEQ ID NO: 307128 - RNA, 32 nt, Homo Sapiens
cuuuccuucuguauuggucagaauagaaucca

SEQ ID NO: 307129 - RNA, 31 nt, Homo Sapiens
uuggagaugcugaggaugacggccucaaccc

SEQ ID NO: 307130 - RNA, 32 nt, Homo Sapiens
cccuguagcaugugcccgguccagucagugca

SEQ ID NO: 307131 - RNA, 32 nt, Homo Sapiens
acuugucccguggucaggcccagccaauggaa

SEQ ID NO: 307132 - RNA, 32 nt, Homo Sapiens
cucugaucucucuauuuggaaguuugcagaag

SEQ ID NO: 307133 - RNA, 32 nt, Homo Sapiens
guaucuauuucaucaaauuauuucaaaauuuu

SEQ ID NO: 307134 - RNA, 32 nt, Homo Sapiens
gauguucucaucacagaaauguauuugaagua

SEQ ID NO: 307135 - RNA, 32 nt, Homo Sapiens
auaagggagggaagaaguggugagaaguuugc

SEQ ID NO: 307136 - RNA, 32 nt, Homo Sapiens
uguuuuaguuuucauuuuuuuaaaaugcuucu

SEQ ID NO: 307137 - RNA, 30 nt, Homo Sapiens
ccccuuggcuguggcauggcaacugacuua

SEQ ID NO: 307138 - RNA, 32 nt, Homo Sapiens
uguuucuucaccugggugguaguuagaagggu

SEQ ID NO: 307139 - RNA, 32 nt, Homo Sapiens
uuuuacgagggaaaacugaaaaaggaaguaau

SEQ ID NO: 307140 - RNA, 32 nt, Homo Sapiens
cuuccauggcaaacuccagagaauuaagaagc

SEQ ID NO: 307141 - RNA, 32 nt, Homo Sapiens
cucacggcucugcagucccgcggcgcgauacg

SEQ ID NO: 307142 - RNA, 32 nt, Homo Sapiens
uggaccuucaucagaccacucccuucccccau

SEQ ID NO: 307143 - RNA, 32 nt, Homo Sapiens
agcuguggauggaagacagggauuggccugug

SEQ ID NO: 307144 - RNA, 32 nt, Homo Sapiens
ugaccguccaggugcuggccugccgggagccg

SEQ ID NO: 307145 - RNA, 32 nt, Homo Sapiens
acuuuauuuuucccuuuucagaaaguccuuag

SEQ ID NO: 307146 - RNA, 32 nt, Homo Sapiens
gaauaggaaucauggcggcugcgcuguucgug

SEQ ID NO: 307147 - RNA, 32 nt, Homo Sapiens
uguggagcauauaaugauaugugcaagauuga

SEQ ID NO: 307148 - RNA, 32 nt, Homo Sapiens
accauuggagggccaagcggaaggugacagug

SEQ ID NO: 307149 - RNA, 32 nt, Homo Sapiens
cagccaugacuugggcagcugcaucugugccc

SEQ ID NO: 307150 - RNA, 32 nt, Homo Sapiens
cugaaaaagggaggcaauugagggaaaggccu

SEQ ID NO: 307151 - RNA, 32 nt, Homo Sapiens
ggacuuucugcaaggugagaaaauagugggaa

SEQ ID NO: 307152 - RNA, 32 nt, Homo Sapiens
uaacucaccugaacuugcuauuuuaaacaaau

SEQ ID NO: 307153 - RNA, 32 nt, Homo Sapiens
augccaggccccaaugcaguuauuuuuagaug

SEQ ID NO: 307154 - RNA, 32 nt, Homo Sapiens
uggcacaggaggaggagcccgggcgggcgagg

SEQ ID NO: 307155 - RNA, 32 nt, Homo Sapiens
gucugcuuuccacagcugccccgggccugcag

SEQ ID NO: 307156 - RNA, 32 nt, Homo Sapiens
aucuucacuccagucucugccucuguguucac

SEQ ID NO: 307157 - RNA, 32 nt, Homo Sapiens
agucaccugcgagcggcugcgcuggcggccag

SEQ ID NO: 307158 - RNA, 32 nt, Homo Sapiens
cacggaggcagggccgccggaugcugugcggg

SEQ ID NO: 307159 - RNA, 31 nt, Homo Sapiens
uuguuuuugugcuugagauagaacaguguuu

SEQ ID NO: 307160 - RNA, 32 nt, Homo Sapiens
uucuccagccucagccuccugaguagcuggaa

SEQ ID NO: 307161 - RNA, 32 nt, Homo Sapiens
uugggguucugggucgguuccagcggcuuuag

SEQ ID NO: 307162 - RNA, 32 nt, Homo Sapiens
aaaaacaccuugggggcaggcaggggcauuua

SEQ ID NO: 307163 - RNA, 32 nt, Homo Sapiens
aucagucagaugaaagaaauauaauacaugcu

SEQ ID NO: 307164 - RNA, 32 nt, Homo Sapiens
aucccccucccucccugggcccggcccuggac

SEQ ID NO: 307165 - RNA, 32 nt, Homo Sapiens
gaggcggacgagaugcgagcgcggccgcggcc

SEQ ID NO: 307166 - RNA, 32 nt, Homo Sapiens
auauucaaggacagaagcucuggcaggaguaa

SEQ ID NO: 307167 - RNA, 32 nt, Homo Sapiens
cugcuucaggacuuaacaugcugauccagcug

SEQ ID NO: 307168 - RNA, 32 nt, Homo Sapiens
ggaccugugccaggcccacgggcugcccuugg

SEQ ID NO: 307169 - RNA, 32 nt, Homo Sapiens
agaccacagagguggcaagagaagggcugaag

SEQ ID NO: 307170 - RNA, 32 nt, Homo Sapiens
agcucuauuuuccugcagacaccagcucuccu

SEQ ID NO: 307171 - RNA, 32 nt, Homo Sapiens
gcgcaguagagcuugguucaguguucccacag

SEQ ID NO: 307172 - RNA, 32 nt, Homo Sapiens
aucagcccacugacagaccuuaaucuuaauua

SEQ ID NO: 307173 - RNA, 32 nt, Homo Sapiens
cggcagcacccggggcagccccugcccccgac

SEQ ID NO: 307174 - RNA, 32 nt, Homo Sapiens
ugugcuacagcuucuggauuaguugucuauuu

SEQ ID NO: 307175 - RNA, 32 nt, Homo Sapiens
caugucagcccuuguuucauguuuccuaaaag

SEQ ID NO: 307176 - RNA, 32 nt, Homo Sapiens
guccaacugucaacucauccacucaacuuuac

SEQ ID NO: 307177 - RNA, 32 nt, Homo Sapiens
gcuaaggagucccacaccuccaccaccagccc

SEQ ID NO: 307178 - RNA, 32 nt, Homo Sapiens
aguuagcccggugugguggcgcgcaccugugg

SEQ ID NO: 307179 - RNA, 32 nt, Homo Sapiens
aaacaaacaaacaaaacgaagucauguacucg

SEQ ID NO: 307180 - RNA, 32 nt, Homo Sapiens
aucaggcaugugucccuuccaagcuguguuaa

SEQ ID NO: 307181 - RNA, 31 nt, Homo Sapiens
gugcuucaggguaauuacuaguaguguuaca

SEQ ID NO: 307182 - RNA, 32 nt, Homo Sapiens
ccccaucauuggccuaugcugugcaucuggga

SEQ ID NO: 307183 - RNA, 32 nt, Homo Sapiens
uucgaucauaguaucauaucaaugcaaauugu

SEQ ID NO: 307184 - RNA, 32 nt, Homo Sapiens
uagucauacugaauuuagauagauaagggcua

SEQ ID NO: 307185 - RNA, 32 nt, Homo Sapiens
aagcuccgucuucugaauucaucucuacaggc

SEQ ID NO: 307186 - RNA, 32 nt, Homo Sapiens
gaagcugccacacucauguuccccucaggaaa

SEQ ID NO: 307187 - RNA, 32 nt, Homo Sapiens
cagugucuuuuacguuguuaugaugaauccca

SEQ ID NO: 307188 - RNA, 32 nt, Homo Sapiens
uugagagaauguucugggcaaguucugugugu

SEQ ID NO: 307189 - RNA, 32 nt, Homo Sapiens
cacaagucaauacuuauuauccaccagguaac

SEQ ID NO: 307190 - RNA, 32 nt, Homo Sapiens
auagaaugucauuguggauguuaccuuuuuca

SEQ ID NO: 307191 - RNA, 32 nt, Homo Sapiens
ccucccugcccccauuaguauuuauauugauc

SEQ ID NO: 307192 - RNA, 32 nt, Homo Sapiens
uuugagguuucccccugucuccuuauucggca

SEQ ID NO: 307193 - RNA, 32 nt, Homo Sapiens
cccccacccucuuuuccaauuuuuuuuuuuug

SEQ ID NO: 307194 - RNA, 30 nt, Homo Sapiens
cuucuuucuguagauggggaaacugaggca

SEQ ID NO: 307195 - RNA, 32 nt, Homo Sapiens
cuaacagucuuagaucuacuuuuaaaacggau

SEQ ID NO: 307196 - RNA, 32 nt, Homo Sapiens
uuaagaaugucuuuuuacugugugucacacuu

SEQ ID NO: 307197 - RNA, 32 nt, Homo Sapiens
aauauuugucuucaagccauuguuggagcagg

SEQ ID NO: 307198 - RNA, 32 nt, Homo Sapiens
ggcacgaggcagaguggcgcagcaaguggccg

SEQ ID NO: 307199 - RNA, 30 nt, Homo Sapiens
aaccugcaauguuuuaugcaaaauuguaug

SEQ ID NO: 307200 - RNA, 32 nt, Homo Sapiens
cuggggaaggauucauuuguugcgagugccag

SEQ ID NO: 307201 - RNA, 32 nt, Homo Sapiens
cgguggaguugggaggcccacguuccucagcg

SEQ ID NO: 307202 - RNA, 32 nt, Homo Sapiens
ucagauuuguaggucauguuaagcuucuugca

SEQ ID NO: 307203 - RNA, 32 nt, Homo Sapiens
cacgguggcuagagccagcugcacuauccuuu

SEQ ID NO: 307204 - RNA, 32 nt, Homo Sapiens
ugcagcuucaugggucccacugcgugcacuug

SEQ ID NO: 307205 - RNA, 30 nt, Homo Sapiens
cgcaggcggguuguggggccggcgcuggug

SEQ ID NO: 307206 - RNA, 32 nt, Homo Sapiens
uacuagcugcuccuuuuucaccaccuuuacca

SEQ ID NO: 307207 - RNA, 32 nt, Homo Sapiens
cugcggagcucccggcggcccagccccgaggc

SEQ ID NO: 307208 - RNA, 32 nt, Homo Sapiens
aaaagaagaauaggggaaacccagaaaauaac

SEQ ID NO: 307209 - RNA, 32 nt, Homo Sapiens
cgcugcccccucacugcccacccagcgagggc

SEQ ID NO: 307210 - RNA, 32 nt, Homo Sapiens
ccgucaccaacccggacuuguacagagcaacc

SEQ ID NO: 307211 - RNA, 32 nt, Homo Sapiens
uuucuuauuaacuggugacuaauauuaacaaa

SEQ ID NO: 307212 - RNA, 32 nt, Homo Sapiens
cuguuggguggccuggccuggaggcggggggu

SEQ ID NO: 307213 - RNA, 32 nt, Homo Sapiens
gacacagaauccaaauguaauauuguagaaag

SEQ ID NO: 307214 - RNA, 32 nt, Homo Sapiens
caguuuaauuuucaucaaacaucggaguaguu

SEQ ID NO: 307215 - RNA, 32 nt, Homo Sapiens
uauuuuggaucccagcacuuugggaagccaaa

SEQ ID NO: 307216 - RNA, 32 nt, Homo Sapiens
gacaguagcuaaugggucaguggguucuuuuu

SEQ ID NO: 307217 - RNA, 32 nt, Homo Sapiens
gggagaaggaaaugcagggcacaugaucuggc

SEQ ID NO: 307218 - RNA, 32 nt, Homo Sapiens
uuugaaaguauuuucauugaucuuaaaaaaua

SEQ ID NO: 307219 - RNA, 32 nt, Homo Sapiens
cuguuuuaucuuugaguaauagcagugagaau

SEQ ID NO: 307220 - RNA, 32 nt, Homo Sapiens
agaggcugaugcggccccggcgggaggggggc

SEQ ID NO: 307221 - RNA, 32 nt, Homo Sapiens
ccuagaaacaauggcauagaaacuaaggaaag

SEQ ID NO: 307222 - RNA, 32 nt, Homo Sapiens
ucuccuggguggcacuucugccuggcucuucu

SEQ ID NO: 307223 - RNA, 32 nt, Homo Sapiens
ccugggaucccgcuccucuucagccuccuucc

SEQ ID NO: 307224 - RNA, 32 nt, Homo Sapiens
uuuaccuucuaaaaguacugcauuuuuuacuu

SEQ ID NO: 307225 - RNA, 32 nt, Homo Sapiens
ccccacuucugcccggcccuugagcuucuugc

SEQ ID NO: 307226 - RNA, 32 nt, Homo Sapiens
gugcagcuggauauuagugaaauauuugccau

SEQ ID NO: 307227 - RNA, 32 nt, Homo Sapiens
ccgcccuccuucccuucccagccgcgggccuc

SEQ ID NO: 307228 - RNA, 32 nt, Homo Sapiens
ggaaguaaaaauuuuacaauuaggagauaauu

SEQ ID NO: 307229 - RNA, 32 nt, Homo Sapiens
aaaccaaggaaacacugccaucuucaagaguc

SEQ ID NO: 307230 - RNA, 32 nt, Homo Sapiens
cagggcuggccgcgcuccugggacgccugucc

SEQ ID NO: 307231 - RNA, 32 nt, Homo Sapiens
cacuugggaaaaauauuaaauuauuaacauug

SEQ ID NO: 307232 - RNA, 32 nt, Homo Sapiens
ucacacugccccaccccgagaacccucagcuc

SEQ ID NO: 307233 - RNA, 32 nt, Homo Sapiens
gaaauccauucaaacgugacugucccaaaugc

SEQ ID NO: 307234 - RNA, 32 nt, Homo Sapiens
gaagagaagcuacuguguuuggugcgggagcg

SEQ ID NO: 307235 - RNA, 32 nt, Homo Sapiens
uaaaugugaauaacccauauauacaacaaagu

SEQ ID NO: 307236 - RNA, 32 nt, Homo Sapiens
gacaugugauuggaaguugucaauuguugaag

SEQ ID NO: 307237 - RNA, 28 nt, Homo Sapiens
ccaccugugugcaccaggaugccugaca

SEQ ID NO: 307238 - RNA, 32 nt, Homo Sapiens
ugcucagcccgccugcgccgcuugggacgccu

SEQ ID NO: 307239 - RNA, 32 nt, Homo Sapiens
gaguuuuccaugaagugcagucccaacuaaaa

SEQ ID NO: 307240 - RNA, 32 nt, Homo Sapiens
uucacauaucuaguaugaaauuauauaaguau

SEQ ID NO: 307241 - RNA, 32 nt, Homo Sapiens
uauugugauguugugguuuuauuaucuuaaac

SEQ ID NO: 307242 - RNA, 32 nt, Homo Sapiens
uuuguaucugugguaacaaaacauuaaccaaa

SEQ ID NO: 307243 - RNA, 32 nt, Homo Sapiens
acccuucggcugccucccggggugggggcggg

SEQ ID NO: 307244 - RNA, 32 nt, Homo Sapiens
uuccaaaaacaauuagguauuuuaaucugaaa

SEQ ID NO: 307245 - RNA, 32 nt, Homo Sapiens
uucugugcaucuccuuuuuuuuucugcuguuu

SEQ ID NO: 307246 - RNA, 32 nt, Homo Sapiens
gagcagggccgcggugggagugggcgcagugc

SEQ ID NO: 307247 - RNA, 29 nt, Homo Sapiens
ccaguguggcauuuccugccaggggcggg

SEQ ID NO: 307248 - RNA, 32 nt, Homo Sapiens
caacuaaauuguuauggacuacaggguuauuu

SEQ ID NO: 307249 - RNA, 31 nt, Homo Sapiens
augauauuuaacuuuuugccaaauaaaauau

SEQ ID NO: 307250 - RNA, 32 nt, Homo Sapiens
aucgcgagcggccgcaccuugcucucccucgg

SEQ ID NO: 307251 - RNA, 31 nt, Homo Sapiens
ggucaggccuagcugagucaggcaaggaaaa

SEQ ID NO: 307252 - RNA, 32 nt, Homo Sapiens
uauccagaaauauuuucagcaaaacuuuccaa

SEQ ID NO: 307253 - RNA, 32 nt, Homo Sapiens
aggaagaaguagacaacugaaagggcgggaga

SEQ ID NO: 307254 - RNA, 32 nt, Homo Sapiens
gcuuuuguaaaacuuuuuggauuuuguaaaag

SEQ ID NO: 307255 - RNA, 32 nt, Homo Sapiens
agaggcugccugcgcaucuggagccugcgcuc

SEQ ID NO: 307256 - RNA, 32 nt, Homo Sapiens
caacaggaaggggagacauugccugccacuga

SEQ ID NO: 307257 - RNA, 32 nt, Homo Sapiens
cguucugcagccgggagggagccgccgcucgc

SEQ ID NO: 307258 - RNA, 32 nt, Homo Sapiens
cugcuaccuuagagugugaaggugaugguaac

SEQ ID NO: 307259 - RNA, 32 nt, Homo Sapiens
ccuuccaucugcuccuucuuaaacuguccuag

SEQ ID NO: 307260 - RNA, 32 nt, Homo Sapiens
guauuuuaacaaaucuuaauuauuaaacucuu

SEQ ID NO: 307261 - RNA, 29 nt, Homo Sapiens
uccauuuuuaaaguauauuuuguaaaugu

SEQ ID NO: 307262 - RNA, 32 nt, Homo Sapiens
uuucuuugcagacaaggucuagaugcggaguc

SEQ ID NO: 307263 - RNA, 32 nt, Homo Sapiens
accauccuggccaacauggugaaacacugucu

SEQ ID NO: 307264 - RNA, 32 nt, Homo Sapiens
aggaauguuguuaaaaaugucuuuaggaaguc

SEQ ID NO: 307265 - RNA, 32 nt, Homo Sapiens
ucuuucccauuuuuggcugaaaacaguuggga

SEQ ID NO: 307266 - RNA, 32 nt, Homo Sapiens
gggccgcccuguacccucuuucaccuuucccu

SEQ ID NO: 307267 - RNA, 32 nt, Homo Sapiens
gcccgcucgcucgcccggcccgcgacucaugu

SEQ ID NO: 307268 - RNA, 31 nt, Homo Sapiens
aucucaucuauggacuugccaaacagucuuu

SEQ ID NO: 307269 - RNA, 32 nt, Homo Sapiens
caguuuccauuuucccugaggagucuguaugg

SEQ ID NO: 307270 - RNA, 32 nt, Homo Sapiens
aauagcccggguuccuuuggcuccugcugagg

SEQ ID NO: 307271 - RNA, 32 nt, Homo Sapiens
uacauuaaagauuuuuuccaaguaaguuacac

SEQ ID NO: 307272 - RNA, 32 nt, Homo Sapiens
uaguguuccuaucccaggauggcuguugggau

SEQ ID NO: 307273 - RNA, 32 nt, Homo Sapiens
agggagaggagcaugucugcaacucgagccaa

SEQ ID NO: 307274 - RNA, 32 nt, Homo Sapiens
ugaauuugcagcugucucucugaugggugccu

SEQ ID NO: 307275 - RNA, 32 nt, Homo Sapiens
cccauaacacggcuuccugugcucucccucca

SEQ ID NO: 307276 - RNA, 32 nt, Homo Sapiens
uaaugcaucaucuauuuaggaguuagauuugg

SEQ ID NO: 307277 - RNA, 32 nt, Homo Sapiens
uuggguacaaagugagaauuuacagagaucau

SEQ ID NO: 307278 - RNA, 32 nt, Homo Sapiens
gcuuugucucugucacaucagcaauuucagaa

SEQ ID NO: 307279 - RNA, 32 nt, Homo Sapiens
ggcccuccgaagcucacuguugcaaauacccc

SEQ ID NO: 307280 - RNA, 32 nt, Homo Sapiens
caauucaggcccauucuuucugaucugcgccc

SEQ ID NO: 307281 - RNA, 32 nt, Homo Sapiens
cuggcgggacugaugggcucucguuccaaugg

SEQ ID NO: 307282 - RNA, 32 nt, Homo Sapiens
gcgcagaggaagagacccucccauguacgcaa

SEQ ID NO: 307283 - RNA, 32 nt, Homo Sapiens
cauaugucaagaguccuuccugucuuauaugc

SEQ ID NO: 307284 - RNA, 32 nt, Homo Sapiens
uuuaauuguaaaagugaaggaguucuaaaacu

SEQ ID NO: 307285 - RNA, 30 nt, Homo Sapiens
ccaggaugacacaacugccagaacucggcc

SEQ ID NO: 307286 - RNA, 32 nt, Homo Sapiens
caucgcuagaaaacuaaggauucgguguuggg

SEQ ID NO: 307287 - RNA, 32 nt, Homo Sapiens
gacagccccuuucgagcuuccacgcaccagcc

SEQ ID NO: 307288 - RNA, 32 nt, Homo Sapiens
ugaaacauuauuuacgaguuggccuuauccuu

SEQ ID NO: 307289 - RNA, 32 nt, Homo Sapiens
gggcccagauccuggggaccugcaggagcugg

SEQ ID NO: 307290 - RNA, 32 nt, Homo Sapiens
augcuugagagaaauggguuaaugcauaauua

SEQ ID NO: 307291 - RNA, 32 nt, Homo Sapiens
augaauccccaaaauuguaggcaaaguuugug

SEQ ID NO: 307292 - RNA, 32 nt, Homo Sapiens
agaucacacucuauguacugcuuuguaacuug

SEQ ID NO: 307293 - RNA, 32 nt, Homo Sapiens
aaagcuucaauagaacuguuucaacuguauaa

SEQ ID NO: 307294 - RNA, 32 nt, Homo Sapiens
uaaacuuguuuccagacaucuuuuucagauug

SEQ ID NO: 307295 - RNA, 30 nt, Homo Sapiens
acucggggcuuggugccgcccacggcuuug

SEQ ID NO: 307296 - RNA, 32 nt, Homo Sapiens
auguacuguggcagacagaacuaguugcuguc

SEQ ID NO: 307297 - RNA, 32 nt, Homo Sapiens
acgcuuuauuuuuucuuuugcaaauaauagaa

SEQ ID NO: 307298 - RNA, 32 nt, Homo Sapiens
cagggcggccccaggccucugcccuccucuca

SEQ ID NO: 307299 - RNA, 32 nt, Homo Sapiens
ucuccgcgcgggacgcugcccggagcgcggcg

SEQ ID NO: 307300 - RNA, 32 nt, Homo Sapiens
gaaaacgugggacaguuuggaacuuccuagag

SEQ ID NO: 307301 - RNA, 32 nt, Homo Sapiens
cagcccugggccuggggauguccccaaugcug

SEQ ID NO: 307302 - RNA, 32 nt, Homo Sapiens
ucuaaugcugcuagucacuaggugguacgcau

SEQ ID NO: 307303 - RNA, 32 nt, Homo Sapiens
gaagguccuaguagaaggcauuccuucugagu

SEQ ID NO: 307304 - RNA, 32 nt, Homo Sapiens
aggaggaggaggaggaggagggcuagucaagc

SEQ ID NO: 307305 - RNA, 31 nt, Homo Sapiens
caagagcauccuauagugccaaauaauaaag

SEQ ID NO: 307306 - RNA, 32 nt, Homo Sapiens
uauuuggauaaccuggaaaacacccaaacaca

SEQ ID NO: 307307 - RNA, 32 nt, Homo Sapiens
aguaauacaaagugcuaguguagcuaucccgg

SEQ ID NO: 307308 - RNA, 32 nt, Homo Sapiens
gucccacaugcauuagaggaacuguaaaaauc

SEQ ID NO: 307309 - RNA, 32 nt, Homo Sapiens
gacuucgugucugcccgccucagccucccaaa

SEQ ID NO: 307310 - RNA, 32 nt, Homo Sapiens
gugcucgggcacccgagcuggagcuccgcagc

SEQ ID NO: 307311 - RNA, 32 nt, Homo Sapiens
agcuaaaaacaaaggaaauuuuguauaguuua

SEQ ID NO: 307312 - RNA, 32 nt, Homo Sapiens
ccuaauaaagguauuucuuccuuggugccuuc

SEQ ID NO: 307313 - RNA, 32 nt, Homo Sapiens
cuaaaugcaccugaagcgcggauuguagauga

SEQ ID NO: 307314 - RNA, 31 nt, Homo Sapiens
auaugucuugguauaguggcuuaaauaaaac

SEQ ID NO: 307315 - RNA, 32 nt, Homo Sapiens
cagccaguaugugccccucacccaggccuggc

SEQ ID NO: 307316 - RNA, 32 nt, Homo Sapiens
gaggcugggauggcuccuggccccaccgccag

SEQ ID NO: 307317 - RNA, 32 nt, Homo Sapiens
uauucccccuucccugucccccaaccugcagg

SEQ ID NO: 307318 - RNA, 32 nt, Homo Sapiens
gccagccgcaugcuggggacaggccuggaagg

SEQ ID NO: 307319 - RNA, 32 nt, Homo Sapiens
agucagaauuucuauuugggagaugagaaaaa

SEQ ID NO: 307320 - RNA, 32 nt, Homo Sapiens
uagagaugccagcagcucuuccuugccagaga

SEQ ID NO: 307321 - RNA, 32 nt, Homo Sapiens
gggggugcgacccgcgcagccggcgccuuguu

SEQ ID NO: 307322 - RNA, 32 nt, Homo Sapiens
aaggccucuggcucugccuuggaccagacaau

SEQ ID NO: 307323 - RNA, 32 nt, Homo Sapiens
uguaaaugaguguggcuguaauccaagaaaac

SEQ ID NO: 307324 - RNA, 32 nt, Homo Sapiens
agguucugcagcaccaggcagaugaugcagag

SEQ ID NO: 307325 - RNA, 32 nt, Homo Sapiens
ggagggccaaggaaacaggcugugugguuaau

SEQ ID NO: 307326 - RNA, 32 nt, Homo Sapiens
ccaccugggcucagcucacacccaagacaugg

SEQ ID NO: 307327 - RNA, 32 nt, Homo Sapiens
auuccacugaaguucugaaaucuuucgucaug

SEQ ID NO: 307328 - RNA, 32 nt, Homo Sapiens
ggagacccaagcccccaacgccaggcccugcc

SEQ ID NO: 307329 - RNA, 32 nt, Homo Sapiens
uuguuaaugcaaacaggacuuaaaugaacuuu

SEQ ID NO: 307330 - RNA, 32 nt, Homo Sapiens
gccgugcaugaaagaauuuguuuaaugucuug

SEQ ID NO: 307331 - RNA, 32 nt, Homo Sapiens
gcccugcacccucagcuccaaauacacauucu

SEQ ID NO: 307332 - RNA, 32 nt, Homo Sapiens
gguugaguagccaaggaaggucagugugaaaa

SEQ ID NO: 307333 - RNA, 32 nt, Homo Sapiens
uuuauguugcuuuguucaguaccuuuugaauu

SEQ ID NO: 307334 - RNA, 32 nt, Homo Sapiens
cuucucagccccagcucgugcccuguuuuucu

SEQ ID NO: 307335 - RNA, 27 nt, Homo Sapiens
uagaguggcuucuucagcuuuucucaa

SEQ ID NO: 307336 - RNA, 32 nt, Homo Sapiens
uuguuaaacugcagggcguacucucaaagacc

SEQ ID NO: 307337 - RNA, 32 nt, Homo Sapiens
ugccgggcagcauggaggagcugagcagcgug

SEQ ID NO: 307338 - RNA, 32 nt, Homo Sapiens
uuuaaagagaaaaaagugaccuuucauuuuuu

SEQ ID NO: 307339 - RNA, 32 nt, Homo Sapiens
gauuuagugggaagcuggaaaaaggaacucuu

SEQ ID NO: 307340 - RNA, 32 nt, Homo Sapiens
ucucagauuuggcauggauacuauuucucaug

SEQ ID NO: 307341 - RNA, 32 nt, Homo Sapiens
caacauuuuuaaaaacugguguaccuucaucu

SEQ ID NO: 307342 - RNA, 32 nt, Homo Sapiens
cauuuugccuauguuucuacaaugaaguguua

SEQ ID NO: 307343 - RNA, 32 nt, Homo Sapiens
aggcggcuguauucucuucucuucggggaagc

SEQ ID NO: 307344 - RNA, 32 nt, Homo Sapiens
uguucccgaggaucgucugccuuauugaaacc

SEQ ID NO: 307345 - RNA, 32 nt, Homo Sapiens
uagccauauaaauuauuuuccuuuuauuauuu

SEQ ID NO: 307346 - RNA, 32 nt, Homo Sapiens
uuuuugagauagagucccacucuugcccaggc

SEQ ID NO: 307347 - RNA, 32 nt, Homo Sapiens
cuaaaaugucagacugguuuauuguuaaguug

SEQ ID NO: 307348 - RNA, 32 nt, Homo Sapiens
ucucuaaugugguuuuuaaaugcuggaggauu

SEQ ID NO: 307349 - RNA, 32 nt, Homo Sapiens
ggaagauguuauuuaugaccaauaucugccag

SEQ ID NO: 307350 - RNA, 32 nt, Homo Sapiens
guuucccuccuccuuuuaacuucaacuuuuuu

SEQ ID NO: 307351 - RNA, 31 nt, Homo Sapiens
cugaaggcgucgaggugugggggcacuugga

SEQ ID NO: 307352 - RNA, 32 nt, Homo Sapiens
uguucauaaaauacuuuuuuuuuuuuuuuuuu

SEQ ID NO: 307353 - RNA, 32 nt, Homo Sapiens
acuucuucaagagcugccugcacacugucuug

SEQ ID NO: 307354 - RNA, 32 nt, Homo Sapiens
gggcugcuguccuggggcgggcacucucaggc

SEQ ID NO: 307355 - RNA, 32 nt, Homo Sapiens
gaaggagagcauguaggagaauacuaacccug

SEQ ID NO: 307356 - RNA, 32 nt, Homo Sapiens
gccgggauccaggucuccgggguccgcuuugg

SEQ ID NO: 307357 - RNA, 32 nt, Homo Sapiens
cugaaaaauaccaugaauuaauguuauggcuu

SEQ ID NO: 307358 - RNA, 32 nt, Homo Sapiens
aguuuuucaggagagaaaacugccugaccuuu

SEQ ID NO: 307359 - RNA, 32 nt, Homo Sapiens
ccuccuccgcacucaggaucagcccuccuguc

SEQ ID NO: 307360 - RNA, 32 nt, Homo Sapiens
uucagacauuuucaccacuccaaaaaagaaac

SEQ ID NO: 307361 - RNA, 32 nt, Homo Sapiens
uaaccuggugucugugcucacccaggcugagg

SEQ ID NO: 307362 - RNA, 32 nt, Homo Sapiens
ugcgaggcugccguccucuccuccucgcgccc

SEQ ID NO: 307363 - RNA, 32 nt, Homo Sapiens
gucagaauugcccuuuuuuuuauuuugaaugg

SEQ ID NO: 307364 - RNA, 32 nt, Homo Sapiens
gcccugaacaaauguaaagcuauuuauguacu

SEQ ID NO: 307365 - RNA, 32 nt, Homo Sapiens
ccaaaaggacaaaacugacaggaaugcacauu

SEQ ID NO: 307366 - RNA, 32 nt, Homo Sapiens
accccggccaccucuagguucuccucguccgc

SEQ ID NO: 307367 - RNA, 32 nt, Homo Sapiens
guuagggccucacuucccugcuuccacaccuc

SEQ ID NO: 307368 - RNA, 32 nt, Homo Sapiens
ccuugcugaccucagcgguugccaggaagggg

SEQ ID NO: 307369 - RNA, 32 nt, Homo Sapiens
ggauucgccuuggcuaggugccaggcaggucc

SEQ ID NO: 307370 - RNA, 32 nt, Homo Sapiens
aagccuuuucacacagcacuccccucagacac

SEQ ID NO: 307371 - RNA, 32 nt, Homo Sapiens
uacacuuggaauuugagacaaggaaagagcau

SEQ ID NO: 307372 - RNA, 32 nt, Homo Sapiens
acacuucagaagcaccgugucugaaccguugc

SEQ ID NO: 307373 - RNA, 32 nt, Homo Sapiens
gaacucuucguaggccgcgggcacgaagccgc

SEQ ID NO: 307374 - RNA, 32 nt, Homo Sapiens
ggccaaaagggagggcccuuuggaggagcgug

SEQ ID NO: 307375 - RNA, 32 nt, Homo Sapiens
gauugugcgagcggaucgugcucgguggaggc

SEQ ID NO: 307376 - RNA, 32 nt, Homo Sapiens
aaaauuacagggaaaaauauguaagugaaaag

SEQ ID NO: 307377 - RNA, 32 nt, Homo Sapiens
gaauuaccaaccccuggauuuuccuugugggg

SEQ ID NO: 307378 - RNA, 32 nt, Homo Sapiens
auggcauugccgugacucacacaccucuacuu

SEQ ID NO: 307379 - RNA, 32 nt, Homo Sapiens
agauguuucugugccuucagggagaggacuga

SEQ ID NO: 307380 - RNA, 32 nt, Homo Sapiens
caaaaagcaaccucagaccaauacccagagau

SEQ ID NO: 307381 - RNA, 32 nt, Homo Sapiens
gacaguucaaggaugcacuguauagccaggcu

SEQ ID NO: 307382 - RNA, 32 nt, Homo Sapiens
ggccagagggagaggcagcagggaacgugggu

SEQ ID NO: 307383 - RNA, 32 nt, Homo Sapiens
cuucauaaauguguuucuuucuuaauaguauc

SEQ ID NO: 307384 - RNA, 32 nt, Homo Sapiens
cuccugcagccuccucccggcacgggacuccu

SEQ ID NO: 307385 - RNA, 32 nt, Homo Sapiens
acgguucccugccuaggagcuggggagggaga

SEQ ID NO: 307386 - RNA, 32 nt, Homo Sapiens
ugggggaugguggccgcccacccgcccgaggg

SEQ ID NO: 307387 - RNA, 32 nt, Homo Sapiens
accaacagagggucucccuuucugccuuuccc

SEQ ID NO: 307388 - RNA, 32 nt, Homo Sapiens
gccuggccguccuuggggggaagcuguacguc

SEQ ID NO: 307389 - RNA, 32 nt, Homo Sapiens
ugcacuugggaaucaaagaaaauggaacuucu

SEQ ID NO: 307390 - RNA, 30 nt, Homo Sapiens
ccuuugugcugugcuguggaguucagaaac

SEQ ID NO: 307391 - RNA, 32 nt, Homo Sapiens
uuaauuucaaaauaagugaaguguuugacgga

SEQ ID NO: 307392 - RNA, 32 nt, Homo Sapiens
gugggagggaggugggggugccuggcaggcuc

SEQ ID NO: 307393 - RNA, 32 nt, Homo Sapiens
ggcgcacacuguauguaccuauaauaaacccu

SEQ ID NO: 307394 - RNA, 32 nt, Homo Sapiens
aguccugcaucuuuuuuuuuuauuugcuucug

SEQ ID NO: 307395 - RNA, 32 nt, Homo Sapiens
ccccgccgcgcgcccuccaaccugcugcugcc

SEQ ID NO: 307396 - RNA, 32 nt, Homo Sapiens
cucccuuccucucuccuuauagacacuugcuc

SEQ ID NO: 307397 - RNA, 32 nt, Homo Sapiens
ggacagugcucagcuugggggacccggacccu

SEQ ID NO: 307398 - RNA, 32 nt, Homo Sapiens
cgucgggggagugcagacccaggcccaaggcg

SEQ ID NO: 307399 - RNA, 32 nt, Homo Sapiens
cguuagacagccuggugauggaggaugaagaa

SEQ ID NO: 307400 - RNA, 32 nt, Homo Sapiens
uauucuccaagggcuuuugauuuugaaggaga

SEQ ID NO: 307401 - RNA, 32 nt, Homo Sapiens
aaaauacaaaaauuaggugggucugguggcac

SEQ ID NO: 307402 - RNA, 32 nt, Homo Sapiens
gacagcgugcgcgcgcguggccugaggcgcgc

SEQ ID NO: 307403 - RNA, 32 nt, Homo Sapiens
cuagagaggaggagggcggggcuggaggaaug

SEQ ID NO: 307404 - RNA, 32 nt, Homo Sapiens
ggaugggaagggggcauugacgcaagccugga

SEQ ID NO: 307405 - RNA, 32 nt, Homo Sapiens
ucauuccugugcuaccugcuucacagagaaug

SEQ ID NO: 307406 - RNA, 32 nt, Homo Sapiens
ucucucuccucuucuuuuggucaguguugugc

SEQ ID NO: 307407 - RNA, 32 nt, Homo Sapiens
ucggcgugucaggaauucgaauuuagaguuua

SEQ ID NO: 307408 - RNA, 32 nt, Homo Sapiens
cuccuggcucugcaggcggcacagccuggggc

SEQ ID NO: 307409 - RNA, 32 nt, Homo Sapiens
gucagagacagagugguagagccaguccaugc

SEQ ID NO: 307410 - RNA, 32 nt, Homo Sapiens
aaaguucuaaauuuuucuuaaucauagcaaga

SEQ ID NO: 307411 - RNA, 32 nt, Homo Sapiens
augugaaggcacaagcugcuguuauauacaac

SEQ ID NO: 307412 - RNA, 32 nt, Homo Sapiens
gggcaggaugguuuugcucauguguuuccagu

SEQ ID NO: 307413 - RNA, 32 nt, Homo Sapiens
aaaugagcacacugcuggcccaugcgccucgg

SEQ ID NO: 307414 - RNA, 32 nt, Homo Sapiens
auauagacuguaucucuagaaaggcuauuuuu

SEQ ID NO: 307415 - RNA, 32 nt, Homo Sapiens
gcucugugaggccccugaagcucugugaaccc

SEQ ID NO: 307416 - RNA, 32 nt, Homo Sapiens
uugcccuaaguuuagauggcaaaccugaugca

SEQ ID NO: 307417 - RNA, 32 nt, Homo Sapiens
ggagguuugucuccgaggaagacccagggaac

SEQ ID NO: 307418 - RNA, 32 nt, Homo Sapiens
accuggcgggggugcugggcgccuggcacaug

SEQ ID NO: 307419 - RNA, 32 nt, Homo Sapiens
accuugagccccagugcaggccugcuggucgu

SEQ ID NO: 307420 - RNA, 32 nt, Homo Sapiens
gaagacgcccggagcggcugcugcagccagua

SEQ ID NO: 307421 - RNA, 32 nt, Homo Sapiens
ugcuccacugcccucucaccccgguacacaca

SEQ ID NO: 307422 - RNA, 32 nt, Homo Sapiens
auuuacaguuucuuaugaaaaaucacaggacc

SEQ ID NO: 307423 - RNA, 32 nt, Homo Sapiens
gaagcacugucaucuuccacgucaucuucaca

SEQ ID NO: 307424 - RNA, 32 nt, Homo Sapiens
uucauuugauuauacgggggagggucagggaa

SEQ ID NO: 307425 - RNA, 32 nt, Homo Sapiens
gaacaagccccaaccggauccuggacaggcac

SEQ ID NO: 307426 - RNA, 32 nt, Homo Sapiens
guguguguguguguguccuugugcaugagcua

SEQ ID NO: 307427 - RNA, 32 nt, Homo Sapiens
uguguguaugugugcguguugaaacagaagug

SEQ ID NO: 307428 - RNA, 32 nt, Homo Sapiens
acauguuuguugccuggcauugguaaugaaag

SEQ ID NO: 307429 - RNA, 29 nt, Homo Sapiens
aauuagggguguuacagaggcagcuuuuu

SEQ ID NO: 307430 - RNA, 32 nt, Homo Sapiens
gaggucacgccagcugaggcagcaccggcggg

SEQ ID NO: 307431 - RNA, 32 nt, Homo Sapiens
acucaggaaggcaggaggaaagagacugccuc

SEQ ID NO: 307432 - RNA, 29 nt, Homo Sapiens
ggaggauggaagggcaggacgaggugucg

SEQ ID NO: 307433 - RNA, 32 nt, Homo Sapiens
cagcccgggaggucaggagcgcggcgggcgag

SEQ ID NO: 307434 - RNA, 29 nt, Homo Sapiens
cuccaugugacuuccucccaggagccaga

SEQ ID NO: 307435 - RNA, 32 nt, Homo Sapiens
auccacauaagacauguguauuaggguucucc

SEQ ID NO: 307436 - RNA, 32 nt, Homo Sapiens
uguucuuucucuucuuuuucuuaccucccacu

SEQ ID NO: 307437 - RNA, 32 nt, Homo Sapiens
aaugagaaaaggaaaagggaagaggguucuga

SEQ ID NO: 307438 - RNA, 32 nt, Homo Sapiens
ggagggcaaggugggggagaucgcuuaacccc

SEQ ID NO: 307439 - RNA, 32 nt, Homo Sapiens
uaauuaugaagaugaaacacuagagucauaua

SEQ ID NO: 307440 - RNA, 32 nt, Homo Sapiens
ucagguugcauuugagcugcugucugagguua

SEQ ID NO: 307441 - RNA, 32 nt, Homo Sapiens
caaacaaggcuuccucaacagcuaucuauuuu

SEQ ID NO: 307442 - RNA, 32 nt, Homo Sapiens
cuggugccccuggcccgggccucaguggaugu

SEQ ID NO: 307443 - RNA, 32 nt, Homo Sapiens
ccccugcucacaguguuuuagagauggcuuuc

SEQ ID NO: 307444 - RNA, 32 nt, Homo Sapiens
gggcauggggcaccuggugcugcugaggggcu

SEQ ID NO: 307445 - RNA, 32 nt, Homo Sapiens
auuguuauucucagagccuuuaugaugcauaa

SEQ ID NO: 307446 - RNA, 32 nt, Homo Sapiens
ugguaaaaaaaauuauuuuuaacauugagaag

SEQ ID NO: 307447 - RNA, 32 nt, Homo Sapiens
gcccccacagcuacuccaacccaaacaacaac

SEQ ID NO: 307448 - RNA, 32 nt, Homo Sapiens
ccgugcaccuguggcagcccggcggccgaucu

SEQ ID NO: 307449 - RNA, 32 nt, Homo Sapiens
aagucccugcgcugacgcccggcagcggcugg

SEQ ID NO: 307450 - RNA, 32 nt, Homo Sapiens
cagaggccuggagcguccugcugcguggacug

SEQ ID NO: 307451 - RNA, 32 nt, Homo Sapiens
uuuaauuaauuucaaaucaacauagacacaag

SEQ ID NO: 307452 - RNA, 32 nt, Homo Sapiens
caacugggaaaccccugaaaugcucucagagc

SEQ ID NO: 307453 - RNA, 32 nt, Homo Sapiens
gaagggauccucacuagagagcgagcuggcac

SEQ ID NO: 307454 - RNA, 32 nt, Homo Sapiens
cuaacgaaaugguuugaaguauuuucauguuu

SEQ ID NO: 307455 - RNA, 32 nt, Homo Sapiens
gcaguuauuguucccugaucuccguacacugg

SEQ ID NO: 307456 - RNA, 30 nt, Homo Sapiens
aaggaggcgcccggcuucccgcccaggccc

SEQ ID NO: 307457 - RNA, 32 nt, Homo Sapiens
ccaguuccucucuccuucccugacccccaccc

SEQ ID NO: 307458 - RNA, 32 nt, Homo Sapiens
uccuaaacacccacagagcaaaaaccuggaaa

SEQ ID NO: 307459 - RNA, 32 nt, Homo Sapiens
ccgagggagacggcuccugcaccggccccaag

SEQ ID NO: 307460 - RNA, 32 nt, Homo Sapiens
cauuuucaauuucuaaauuugcaggggauacu

SEQ ID NO: 307461 - RNA, 32 nt, Homo Sapiens
aguaggggcagagggagggagccaaggucacu

SEQ ID NO: 307462 - RNA, 32 nt, Homo Sapiens
agucucuucuaaaaauuguuaaugcuuuuaua

SEQ ID NO: 307463 - RNA, 32 nt, Homo Sapiens
cuggccuggggcugcccucccagccccuguuc

SEQ ID NO: 307464 - RNA, 32 nt, Homo Sapiens
agcgggcggcccggcggcugcguacuggcugu

SEQ ID NO: 307465 - RNA, 32 nt, Homo Sapiens
caagccucccuggccuacucaguuggccaagg

SEQ ID NO: 307466 - RNA, 32 nt, Homo Sapiens
uccugacccuggugcaguuuuacuucaauuac

SEQ ID NO: 307467 - RNA, 32 nt, Homo Sapiens
cgggagacacgaggcgcccagaaggacugaca

SEQ ID NO: 307468 - RNA, 32 nt, Homo Sapiens
aggccaucucuguuucucuccuccgcuuaacc

SEQ ID NO: 307469 - RNA, 32 nt, Homo Sapiens
auacagggugacugagugaucaucagaugaga

SEQ ID NO: 307470 - RNA, 32 nt, Homo Sapiens
uugguucugaugcauaagugaacccuguuuuu

SEQ ID NO: 307471 - RNA, 32 nt, Homo Sapiens
ugaacuggccccagcuccucuuccugccucuc

SEQ ID NO: 307472 - RNA, 32 nt, Homo Sapiens
uuuauacugaagaugccgcacacaaacaaugc

SEQ ID NO: 307473 - RNA, 32 nt, Homo Sapiens
guauuuucucauuuccaaagacccagagucuc

SEQ ID NO: 307474 - RNA, 32 nt, Homo Sapiens
agccccagccccaccacucaccagcccugagc

SEQ ID NO: 307475 - RNA, 31 nt, Homo Sapiens
gcuuaaccaagagugagaggauaugucaugu

SEQ ID NO: 307476 - RNA, 32 nt, Homo Sapiens
aaaguaaacugggagaauaauaagucugaaag

SEQ ID NO: 307477 - RNA, 31 nt, Homo Sapiens
aguuucuacaaguucgcaggagucaaaaacc

SEQ ID NO: 307478 - RNA, 32 nt, Homo Sapiens
agcugcuucaccgauauagacacauuuuggga

SEQ ID NO: 307479 - RNA, 32 nt, Homo Sapiens
aacuagggagaugacugagaacaaagauauuu

SEQ ID NO: 307480 - RNA, 32 nt, Homo Sapiens
uugggucugcaccuccauccuugaucuuguua

SEQ ID NO: 307481 - RNA, 32 nt, Homo Sapiens
ggauggaaccugggaaaggccaccauuccugc

SEQ ID NO: 307482 - RNA, 32 nt, Homo Sapiens
gcccuauucaaguccaucuccucccagaaaua

SEQ ID NO: 307483 - RNA, 32 nt, Homo Sapiens
uggauugaagaaaucaaaauggcugaagauaa

SEQ ID NO: 307484 - RNA, 32 nt, Homo Sapiens
uccccgaccucggcgcugccugggcuccugca

SEQ ID NO: 307485 - RNA, 32 nt, Homo Sapiens
gccaugaucaugccacuguacugcagacugag

SEQ ID NO: 307486 - RNA, 32 nt, Homo Sapiens
gaccagguugucacuugcuuguccuauaaaga

SEQ ID NO: 307487 - RNA, 32 nt, Homo Sapiens
ccucauccaucccacacaccuuggccuucugc

SEQ ID NO: 307488 - RNA, 32 nt, Homo Sapiens
cagccguggaaaugugauaagagcgguaccgu

SEQ ID NO: 307489 - RNA, 32 nt, Homo Sapiens
guaaaccccguccuuacgagccccgccccuag

SEQ ID NO: 307490 - RNA, 32 nt, Homo Sapiens
uaagcuaauuucuuccuauguuugucaucaua

SEQ ID NO: 307491 - RNA, 32 nt, Homo Sapiens
agguugcagugagccaagauuaugccacugca

SEQ ID NO: 307492 - RNA, 32 nt, Homo Sapiens
ucuguuuuaguguuuauguuuaaaagaaauau

SEQ ID NO: 307493 - RNA, 32 nt, Homo Sapiens
gguggggccgggcuugcucaugaaagcucuac

SEQ ID NO: 307494 - RNA, 32 nt, Homo Sapiens
cagcguuaggucuggggagauggagaagcuga

SEQ ID NO: 307495 - RNA, 32 nt, Homo Sapiens
cuccuucugcugucagaggagcagagaguuga

SEQ ID NO: 307496 - RNA, 32 nt, Homo Sapiens
agaaaaaucugcuagaggaaaacuuugaggaa

SEQ ID NO: 307497 - RNA, 32 nt, Homo Sapiens
ccagaugcuuggccccugugaagugcugucug

SEQ ID NO: 307498 - RNA, 32 nt, Homo Sapiens
ugaugugacuucaaguuuuucuuuguuacaag

SEQ ID NO: 307499 - RNA, 32 nt, Homo Sapiens
gugaagaaagcuaaguugugaacaagaguguu

SEQ ID NO: 307500 - RNA, 32 nt, Homo Sapiens
uucuuuugccacccugaauugcuggagacccu

SEQ ID NO: 307501 - RNA, 32 nt, Homo Sapiens
uaauggaaacuuucuguauuaagggcauguau

SEQ ID NO: 307502 - RNA, 32 nt, Homo Sapiens
uuccaugggcauggccguugccucucugccag

SEQ ID NO: 307503 - RNA, 28 nt, Homo Sapiens
caugugaaauaaaacucaguauuuuaau

SEQ ID NO: 307504 - RNA, 32 nt, Homo Sapiens
gcgcuuggcugguggggcccgcggcgggauuu

SEQ ID NO: 307505 - RNA, 32 nt, Homo Sapiens
uauuuacauucacucagugaaaagugucaugu

SEQ ID NO: 307506 - RNA, 32 nt, Homo Sapiens
aacugagguggggauggggagagccuuugccu

SEQ ID NO: 307507 - RNA, 29 nt, Homo Sapiens
cgcgcucggggaccgugcucguggccccc

SEQ ID NO: 307508 - RNA, 32 nt, Homo Sapiens
cucagccugguagaugcugguguauagcacug

SEQ ID NO: 307509 - RNA, 32 nt, Homo Sapiens
aauguauuuuaaaaggaaacuguacuacaucu

SEQ ID NO: 307510 - RNA, 32 nt, Homo Sapiens
ggacggagcugcuggcagcuucugcgagaaga

SEQ ID NO: 307511 - RNA, 32 nt, Homo Sapiens
aggacgguuccagcccugggccaggcagagag

SEQ ID NO: 307512 - RNA, 32 nt, Homo Sapiens
uuuugauuaagcauuauaagcauuugagucua

SEQ ID NO: 307513 - RNA, 30 nt, Homo Sapiens
gccaagguucuugccacccagcacucaugg

SEQ ID NO: 307514 - RNA, 31 nt, Homo Sapiens
acuggguggcacugcugaugugcacugugua

SEQ ID NO: 307515 - RNA, 32 nt, Homo Sapiens
uuuccauuccuccacugauuggcacuuaagcu

SEQ ID NO: 307516 - RNA, 30 nt, Homo Sapiens
accagguggggcggguggggagcuguccgg

SEQ ID NO: 307517 - RNA, 32 nt, Homo Sapiens
ccgcggcgacggcggcagcagcugcgguggcg

SEQ ID NO: 307518 - RNA, 32 nt, Homo Sapiens
agcaugauggugcuggcucauauaguguaguc

SEQ ID NO: 307519 - RNA, 32 nt, Homo Sapiens
acuuagaacaaaaguaucaaguuugcacacaa

SEQ ID NO: 307520 - RNA, 32 nt, Homo Sapiens
aauggaugcuguauuagauaaauauuuuaggc

SEQ ID NO: 307521 - RNA, 32 nt, Homo Sapiens
uggcaagaaucgucugugaagugaauugauag

SEQ ID NO: 307522 - RNA, 32 nt, Homo Sapiens
gggcgcugagccgagcgccgggagagcagcgc

SEQ ID NO: 307523 - RNA, 32 nt, Homo Sapiens
cauggacuuccacugccauccucccaaggggc

SEQ ID NO: 307524 - RNA, 32 nt, Homo Sapiens
uuguaaaaacugaacuauucccagaaucaugu

SEQ ID NO: 307525 - RNA, 32 nt, Homo Sapiens
agagagagagagacauaagaaauuuagagaaa

SEQ ID NO: 307526 - RNA, 32 nt, Homo Sapiens
uuggggguuuauucucuucccuucuaacuuga

SEQ ID NO: 307527 - RNA, 32 nt, Homo Sapiens
gccacugaagcacgugagagacccucgcaaaa

SEQ ID NO: 307528 - RNA, 32 nt, Homo Sapiens
acaugccauccauuauuuuaaauaaacuaaua

SEQ ID NO: 307529 - RNA, 32 nt, Homo Sapiens
caaaagaauggccagaucuaaaaaagacccug

SEQ ID NO: 307530 - RNA, 30 nt, Homo Sapiens
aagcuacuaggugaaaugcaaaacaaccau

SEQ ID NO: 307531 - RNA, 32 nt, Homo Sapiens
aagggaagacaauuuacaaacuccaagcacua

SEQ ID NO: 307532 - RNA, 32 nt, Homo Sapiens
ugauuguaacauauuucuugaguaauuuaaau

SEQ ID NO: 307533 - RNA, 32 nt, Homo Sapiens
agccccggagagccugccggugggagcuggaa

SEQ ID NO: 307534 - RNA, 32 nt, Homo Sapiens
ggcgauacuuccuguugccgggacgcuauaua

SEQ ID NO: 307535 - RNA, 32 nt, Homo Sapiens
uccaaccccugaguucaagugauucaccuccc

SEQ ID NO: 307536 - RNA, 32 nt, Homo Sapiens
ccucuucaauuucuaucacuuuuugcgaaggu

SEQ ID NO: 307537 - RNA, 32 nt, Homo Sapiens
uuccuuaugcuucuuucaaauugugugugcuc

SEQ ID NO: 307538 - RNA, 27 nt, Homo Sapiens
cagaggucugaggucagcccccacaga

SEQ ID NO: 307539 - RNA, 30 nt, Homo Sapiens
ggcuguucacuugccccuccuugaggcaga

SEQ ID NO: 307540 - RNA, 32 nt, Homo Sapiens
ccaccaugccugguuucuguccugcuuauuug

SEQ ID NO: 307541 - RNA, 32 nt, Homo Sapiens
cauaggaaagcagccccuccucacacauacau

SEQ ID NO: 307542 - RNA, 32 nt, Homo Sapiens
gccaggaucuuaagggacuuugaaaauuccau

SEQ ID NO: 307543 - RNA, 29 nt, Homo Sapiens
ucauaaaaauaaaugaaaaaaugggauag

SEQ ID NO: 307544 - RNA, 32 nt, Homo Sapiens
aaugauccucagucuguaauuuuuguucuauu

SEQ ID NO: 307545 - RNA, 32 nt, Homo Sapiens
uccugcuaccuuccugaccccugugcucagcc

SEQ ID NO: 307546 - RNA, 32 nt, Homo Sapiens
aacagaucuucaguccacccugccccacccuu

SEQ ID NO: 307547 - RNA, 32 nt, Homo Sapiens
ucccacacaccuccccguggccugggacgugg

SEQ ID NO: 307548 - RNA, 32 nt, Homo Sapiens
gugagccagccugaagaaaugucaagcagagc

SEQ ID NO: 307549 - RNA, 32 nt, Homo Sapiens
cgcaccccucucccgcgcccgguucucccucg

SEQ ID NO: 307550 - RNA, 32 nt, Homo Sapiens
auuaaagugcgauucccacuccccuccucuca

SEQ ID NO: 307551 - RNA, 32 nt, Homo Sapiens
ggccuccaaaauuccuucucuuuuucuuucuu

SEQ ID NO: 307552 - RNA, 32 nt, Homo Sapiens
cagagaggggagaggggcuggagauuuguguc

SEQ ID NO: 307553 - RNA, 32 nt, Homo Sapiens
aaucugaaggucauguggcaucagggaaaggg

SEQ ID NO: 307554 - RNA, 32 nt, Homo Sapiens
acucaguaaacuaaugaaagccuauugugaac

SEQ ID NO: 307555 - RNA, 32 nt, Homo Sapiens
uccaaggggagagggcggggccugaggguggg

SEQ ID NO: 307556 - RNA, 32 nt, Homo Sapiens
aauguauguauuauucaauccuuuggaauguu

SEQ ID NO: 307557 - RNA, 32 nt, Homo Sapiens
uaauuguucuuuuguugcuuuaauuuuuaaaa

SEQ ID NO: 307558 - RNA, 32 nt, Homo Sapiens
ccacuugucaucuauuuucugauuaucuuuuu

SEQ ID NO: 307559 - RNA, 32 nt, Homo Sapiens
uccuggguggcaaguguuacaaaccuuaggca

SEQ ID NO: 307560 - RNA, 32 nt, Homo Sapiens
uccccggcaugagacucagugcagauggagag

SEQ ID NO: 307561 - RNA, 32 nt, Homo Sapiens
agcgcccgugguccagcguguagggagccgau

SEQ ID NO: 307562 - RNA, 32 nt, Homo Sapiens
ccacccugccagcagcuuccagccagucccca

SEQ ID NO: 307563 - RNA, 30 nt, Homo Sapiens
cagcgcagcuacggcggcggcagcggcggc

SEQ ID NO: 307564 - RNA, 32 nt, Homo Sapiens
aggccagcccuggcugcccaggcggagcugcc

SEQ ID NO: 307565 - RNA, 32 nt, Homo Sapiens
uuuggccugaaauaguuuucugcuguucuuuc

SEQ ID NO: 307566 - RNA, 32 nt, Homo Sapiens
uuaugggugugagccaccacacccggcccccc

SEQ ID NO: 307567 - RNA, 32 nt, Homo Sapiens
cucggagcaugacccccgcgggccagcgccgc

SEQ ID NO: 307568 - RNA, 31 nt, Homo Sapiens
ccgccgccgcgcagccccacaucaacgcacc

SEQ ID NO: 307569 - RNA, 32 nt, Homo Sapiens
cccacccuccaggggagcuggugaagaugggc

SEQ ID NO: 307570 - RNA, 32 nt, Homo Sapiens
ugagucacugagcaucacuagugacaagucuc

SEQ ID NO: 307571 - RNA, 32 nt, Homo Sapiens
cucuuuuaucccagccuuauuccuucaccuug

SEQ ID NO: 307572 - RNA, 32 nt, Homo Sapiens
gcgcgccauugagucccucccucccccgccuc

SEQ ID NO: 307573 - RNA, 32 nt, Homo Sapiens
cucccagggccuccccaggcaccggugcucgg

SEQ ID NO: 307574 - RNA, 32 nt, Homo Sapiens
auaaagaagcuccccaccuggcucucagucac

SEQ ID NO: 307575 - RNA, 32 nt, Homo Sapiens
agaggaucaacgccaccgcccugcgugucaag

SEQ ID NO: 307576 - RNA, 32 nt, Homo Sapiens
acuccacauacugacccuauauuauccagacu

SEQ ID NO: 307577 - RNA, 32 nt, Homo Sapiens
gccguggcacagcugggagccugguucagaca

SEQ ID NO: 307578 - RNA, 32 nt, Homo Sapiens
uucaaugugcaugcaugucauuauuacaucaa

SEQ ID NO: 307579 - RNA, 32 nt, Homo Sapiens
auccaucgcucuucucucaaggagcacagucc

SEQ ID NO: 307580 - RNA, 32 nt, Homo Sapiens
ggcacugacaucugccuuguaacugaugagaa

SEQ ID NO: 307581 - RNA, 32 nt, Homo Sapiens
acugaaacccgucaauauggcggcgaucggcc

SEQ ID NO: 307582 - RNA, 32 nt, Homo Sapiens
caggcgugagcaccccacccagcucauuaccc

SEQ ID NO: 307583 - RNA, 32 nt, Homo Sapiens
gauuucaucauguuggcuaggcuggucuugaa

SEQ ID NO: 307584 - RNA, 32 nt, Homo Sapiens
ggacaggcuggugcaccuccaggcugugccag

SEQ ID NO: 307585 - RNA, 32 nt, Homo Sapiens
ggaggguuggguggagauguuuuuagcagagc

SEQ ID NO: 307586 - RNA, 32 nt, Homo Sapiens
cuuuacaaggaguaacaaaacagccucuuugc

SEQ ID NO: 307587 - RNA, 32 nt, Homo Sapiens
uucugggcguccgggcagcugcagcugagagg

SEQ ID NO: 307588 - RNA, 32 nt, Homo Sapiens
acuccacgcucgcuugcccugauucucuccgc

SEQ ID NO: 307589 - RNA, 32 nt, Homo Sapiens
aauuuguaaaucauuauuuucauuucauaagu

SEQ ID NO: 307590 - RNA, 32 nt, Homo Sapiens
uuguuuucuuucccuuucacaguaacuuuaug

SEQ ID NO: 307591 - RNA, 32 nt, Homo Sapiens
uauuuaucuuguucuuagucucuucuuuggac

SEQ ID NO: 307592 - RNA, 32 nt, Homo Sapiens
uaaccaauaaaauaaauacugaugaggcaugc

SEQ ID NO: 307593 - RNA, 32 nt, Homo Sapiens
cagugggacuuggaauccagaugugugaagga

SEQ ID NO: 307594 - RNA, 32 nt, Homo Sapiens
aauguagagacaugagaagagaguuaugaugg

SEQ ID NO: 307595 - RNA, 32 nt, Homo Sapiens
ggacuagacgcauauuuaccugcguaucugag

SEQ ID NO: 307596 - RNA, 32 nt, Homo Sapiens
gggaaagcucaccccaguauuccucuuggugg

SEQ ID NO: 307597 - RNA, 32 nt, Homo Sapiens
gauuauuuuuuuuuuucuuuugaaguagauuc

SEQ ID NO: 307598 - RNA, 32 nt, Homo Sapiens
cucuuucggcccagcccagcucaugccucccg

SEQ ID NO: 307599 - RNA, 32 nt, Homo Sapiens
gguucaaaagauucuccugccuuagccuccca

SEQ ID NO: 307600 - RNA, 32 nt, Homo Sapiens
guccccagcucccuccucccaggcugguguga

SEQ ID NO: 307601 - RNA, 32 nt, Homo Sapiens
aauuggagaaaguucugcagcauggcuuuuua

SEQ ID NO: 307602 - RNA, 32 nt, Homo Sapiens
ugucaaccacacgugaucucgucugaaacagu

SEQ ID NO: 307603 - RNA, 32 nt, Homo Sapiens
cgggacccgggcccggcccgugugcguccucg

SEQ ID NO: 307604 - RNA, 32 nt, Homo Sapiens
ccuauggaugaggaggacgcggcggccccggu

SEQ ID NO: 307605 - RNA, 32 nt, Homo Sapiens
ugcucuauagcagcugacgauggccugucaga

SEQ ID NO: 307606 - RNA, 32 nt, Homo Sapiens
ucucugcuucuguacaaaaucuccaggauuua

SEQ ID NO: 307607 - RNA, 32 nt, Homo Sapiens
uuucuucagcucuggggaaaaugccacagugu

SEQ ID NO: 307608 - RNA, 28 nt, Homo Sapiens
acaauggggccgcggcggcugcugcugg

SEQ ID NO: 307609 - RNA, 32 nt, Homo Sapiens
ucccuuuugcggcuaucaccgaagcaggagug

SEQ ID NO: 307610 - RNA, 29 nt, Homo Sapiens
guucuugcaauaacaauauuauaauauuu

SEQ ID NO: 307611 - RNA, 29 nt, Homo Sapiens
cggcugcggggacaaguccguugaggcug

SEQ ID NO: 307612 - RNA, 32 nt, Homo Sapiens
gagagcaucugugucccagacccggcgguggg

SEQ ID NO: 307613 - RNA, 32 nt, Homo Sapiens
ggcgaucugugcuaagaggucaggacccagcc

SEQ ID NO: 307614 - RNA, 32 nt, Homo Sapiens
gggccacacaugaaauucacaaacacuaaggu

SEQ ID NO: 307615 - RNA, 32 nt, Homo Sapiens
uucuuugcaguuucuuguaaauuuauaaacca

SEQ ID NO: 307616 - RNA, 32 nt, Homo Sapiens
ucuuuucugaagauuguccuacaauuuggauu

SEQ ID NO: 307617 - RNA, 32 nt, Homo Sapiens
ccauccuucccaugaugccgcucuucugucau

SEQ ID NO: 307618 - RNA, 32 nt, Homo Sapiens
aacuuccccgugugucccacuuucccacacuu

SEQ ID NO: 307619 - RNA, 32 nt, Homo Sapiens
accuggaaccucugggagggcugcagaguaag

SEQ ID NO: 307620 - RNA, 32 nt, Homo Sapiens
cgcugggccccggaacccaaggucccucugcu

SEQ ID NO: 307621 - RNA, 32 nt, Homo Sapiens
aagaugacaucagaagaagcucugccuuuuuu

SEQ ID NO: 307622 - RNA, 31 nt, Homo Sapiens
ugaaucugcggacugaugccccgccugcaaa

SEQ ID NO: 307623 - RNA, 32 nt, Homo Sapiens
aguuuucugaagaacucuugacucuugcuccu

SEQ ID NO: 307624 - RNA, 32 nt, Homo Sapiens
aguuaagcugucugugaccagccggguucccc

SEQ ID NO: 307625 - RNA, 32 nt, Homo Sapiens
cuugcuuuuuaaaacaaguugguaaugcauau

SEQ ID NO: 307626 - RNA, 32 nt, Homo Sapiens
guccggagccugccgcagccccgccccuccgc

SEQ ID NO: 307627 - RNA, 32 nt, Homo Sapiens
ugaaauuagggucagaguuugaugaauuaaca

SEQ ID NO: 307628 - RNA, 32 nt, Homo Sapiens
uaaccaguuauuuuuauuauugagucugucca

SEQ ID NO: 307629 - RNA, 32 nt, Homo Sapiens
gcaugggaggugggaggauaucaaauucucua

SEQ ID NO: 307630 - RNA, 32 nt, Homo Sapiens
gugacggccgagaggaagcacauggagaucac

SEQ ID NO: 307631 - RNA, 32 nt, Homo Sapiens
cuuaaggauugugauauuuuuacuugcauuga

SEQ ID NO: 307632 - RNA, 32 nt, Homo Sapiens
aaccacuggaaauuauuuugccaacuugaaag

SEQ ID NO: 307633 - RNA, 32 nt, Homo Sapiens
auucucccuguaaaaggaacuagaagcuauua

SEQ ID NO: 307634 - RNA, 32 nt, Homo Sapiens
aaacaaaaacaaaaucuauuguaguuauauac

SEQ ID NO: 307635 - RNA, 32 nt, Homo Sapiens
uuggagaagaugucuaaagagcccuuauaaaa

SEQ ID NO: 307636 - RNA, 32 nt, Homo Sapiens
gagccaaguuguguaaguccccgggaaggagc

SEQ ID NO: 307637 - RNA, 32 nt, Homo Sapiens
cuagggcauuguaucugucuuuccacucugga

SEQ ID NO: 307638 - RNA, 32 nt, Homo Sapiens
agucacagauauauuucuccaagaaagccaac

SEQ ID NO: 307639 - RNA, 32 nt, Homo Sapiens
gaagggcccucccuccagccuaggucagaggu

SEQ ID NO: 307640 - RNA, 32 nt, Homo Sapiens
gccaucagggacagaccccccacccccaaggc

SEQ ID NO: 307641 - RNA, 32 nt, Homo Sapiens
ccgcucccucuggcccuucucuguuuaguagu

SEQ ID NO: 307642 - RNA, 32 nt, Homo Sapiens
agcuccgcgcacucccuccgcggccgcugagc

SEQ ID NO: 307643 - RNA, 32 nt, Homo Sapiens
gccuucccccugccccaccucucccaccaaga

SEQ ID NO: 307644 - RNA, 30 nt, Homo Sapiens
cugcccccacuugccauaaaacuuagcuaa

SEQ ID NO: 307645 - RNA, 32 nt, Homo Sapiens
gcuaccgcgucugcuggacgcgggagacgcca

SEQ ID NO: 307646 - RNA, 30 nt, Homo Sapiens
gggaaaugcuggcgcgcgcggcgcggggca

SEQ ID NO: 307647 - RNA, 30 nt, Homo Sapiens
cuccucuuugcagagggggaaacucuuggg

SEQ ID NO: 307648 - RNA, 32 nt, Homo Sapiens
aauuaaaaaaucaaggagucuucuaauguaaa

SEQ ID NO: 307649 - RNA, 32 nt, Homo Sapiens
ggaaucucguugagcguucggcguggauccac

SEQ ID NO: 307650 - RNA, 32 nt, Homo Sapiens
cagaguggagaugccugcugaugugaauuuau

SEQ ID NO: 307651 - RNA, 32 nt, Homo Sapiens
cucccggcuccaggugccugggcccccggcgg

SEQ ID NO: 307652 - RNA, 32 nt, Homo Sapiens
aguuuugacaaugaccagguuggacuguuuaa

SEQ ID NO: 307653 - RNA, 32 nt, Homo Sapiens
agugaagaaaauguaugguacuaagauuaugc

SEQ ID NO: 307654 - RNA, 32 nt, Homo Sapiens
cggacaccccgauccucccacaauaaggcuuc

SEQ ID NO: 307655 - RNA, 32 nt, Homo Sapiens
guuauuucuaguucauaagaaugugaugacug

SEQ ID NO: 307656 - RNA, 32 nt, Homo Sapiens
gugggagaguguggaaaggcacucuuuuuucu

SEQ ID NO: 307657 - RNA, 32 nt, Homo Sapiens
acgugccccuucuugcacuaccgugauggucc

SEQ ID NO: 307658 - RNA, 32 nt, Homo Sapiens
agccagacacagugacucacgccuguaauccc

SEQ ID NO: 307659 - RNA, 32 nt, Homo Sapiens
aucgugcaaaaacgccucuuauggaaaagcca

SEQ ID NO: 307660 - RNA, 32 nt, Homo Sapiens
cuuuuaacccucacaggaagggccaggggagg

SEQ ID NO: 307661 - RNA, 32 nt, Homo Sapiens
uauuuuugagacggagucuugcugugucacca

SEQ ID NO: 307662 - RNA, 29 nt, Homo Sapiens
ggguguucguguuagugccaagauugcuu

SEQ ID NO: 307663 - RNA, 32 nt, Homo Sapiens
uuuucaauuuaaaaggaaaaugguucaucuca

SEQ ID NO: 307664 - RNA, 32 nt, Homo Sapiens
gcuccauuguuggggucuggcucccagcccau

SEQ ID NO: 307665 - RNA, 32 nt, Homo Sapiens
gcauuuaccaaaaaauacaaguaaaaucauaa

SEQ ID NO: 307666 - RNA, 32 nt, Homo Sapiens
acuucaaaagaauuauuuuguacaaaaucauc

SEQ ID NO: 307667 - RNA, 32 nt, Homo Sapiens
uucagggggcuuuggggaaagaauuaggaagg

SEQ ID NO: 307668 - RNA, 32 nt, Homo Sapiens
caggagcuguggacuuaaccguugcaaagcac

SEQ ID NO: 307669 - RNA, 32 nt, Homo Sapiens
gguuucaccauguuggacaggcuggucucaaa

SEQ ID NO: 307670 - RNA, 32 nt, Homo Sapiens
cugccugccugccagcagccucaacaggcaca

SEQ ID NO: 307671 - RNA, 32 nt, Homo Sapiens
ugcuagucaucacgugccccagcugaccuucc

SEQ ID NO: 307672 - RNA, 32 nt, Homo Sapiens
ccagcuuguaguaacagaagugaauguuugua

SEQ ID NO: 307673 - RNA, 32 nt, Homo Sapiens
cucgcacuccacucacgcggcgcgcagcucug

SEQ ID NO: 307674 - RNA, 32 nt, Homo Sapiens
gccgccgccucccaggaucguccgccggucag

SEQ ID NO: 307675 - RNA, 32 nt, Homo Sapiens
gcaggagguuccgcaggcccaggccaggccag

SEQ ID NO: 307676 - RNA, 32 nt, Homo Sapiens
auaaugaaaauauuuuuuacagauuggaaaaa

SEQ ID NO: 307677 - RNA, 32 nt, Homo Sapiens
aaaggauguauguguauaaacagauucaaggg

SEQ ID NO: 307678 - RNA, 32 nt, Homo Sapiens
ugcaagaaaauauuuauggugagaacuuuucu

SEQ ID NO: 307679 - RNA, 32 nt, Homo Sapiens
ggucugcccuccccauucaagccccuucucca

SEQ ID NO: 307680 - RNA, 32 nt, Homo Sapiens
gcuuuaggcaggcuuccuggaacuacuguuuu

SEQ ID NO: 307681 - RNA, 32 nt, Homo Sapiens
uaagacaaaaauuuauguuuggagccuguguu

SEQ ID NO: 307682 - RNA, 32 nt, Homo Sapiens
uuguugaaucugggugaaggauuugagggagu

SEQ ID NO: 307683 - RNA, 32 nt, Homo Sapiens
acauucagggaaauggcuuauuaaacuuugaa

SEQ ID NO: 307684 - RNA, 32 nt, Homo Sapiens
agauucauccauuuuggaagccaggcauggug

SEQ ID NO: 307685 - RNA, 32 nt, Homo Sapiens
cgccagcugucccccgcagagcuuccuggagc

SEQ ID NO: 307686 - RNA, 32 nt, Homo Sapiens
auuccaggaaaguucuauaaaaauauaccauc

SEQ ID NO: 307687 - RNA, 32 nt, Homo Sapiens
gagagacuggccaggccuccccgguggccaga

SEQ ID NO: 307688 - RNA, 32 nt, Homo Sapiens
cccucugugggaagaguguccuucagcuucuc

SEQ ID NO: 307689 - RNA, 32 nt, Homo Sapiens
gaugcccugccagggcaccagccacccuccuc

SEQ ID NO: 307690 - RNA, 32 nt, Homo Sapiens
gagaggcccuccccaccuggcucaccaggaag

SEQ ID NO: 307691 - RNA, 32 nt, Homo Sapiens
aaauuccuuuuuuuuucuuuuucuaugagcac

SEQ ID NO: 307692 - RNA, 32 nt, Homo Sapiens
uguggcaguauuuuaguaccggguuaagaaaa

SEQ ID NO: 307693 - RNA, 32 nt, Homo Sapiens
acaggccgagagaaauguaauaaaauauaaca

SEQ ID NO: 307694 - RNA, 32 nt, Homo Sapiens
ugcagaaacccagcccugccccugccuccugc

SEQ ID NO: 307695 - RNA, 32 nt, Homo Sapiens
gaucuggaucugcggcggccucgggcgguuuc

SEQ ID NO: 307696 - RNA, 32 nt, Homo Sapiens
ucaugucuuacugaucuaacccuaaauccaac

SEQ ID NO: 307697 - RNA, 32 nt, Homo Sapiens
ucuggccuggagucccuggcccgggcagcagc

SEQ ID NO: 307698 - RNA, 32 nt, Homo Sapiens
gggccaguguagagguccucaggccgccggca

SEQ ID NO: 307699 - RNA, 32 nt, Homo Sapiens
ggggagcccucccuggcguccgagggugggag

SEQ ID NO: 307700 - RNA, 32 nt, Homo Sapiens
gaugauugcgcagggagggguacguggcaccu

SEQ ID NO: 307701 - RNA, 32 nt, Homo Sapiens
uguggacuuuuauauauagaucuacauaaaaa

SEQ ID NO: 307702 - RNA, 32 nt, Homo Sapiens
uauauuaaacacauccauuaaaaggcuaugug

SEQ ID NO: 307703 - RNA, 32 nt, Homo Sapiens
ggaaaggcagauguaaaugauguguugguuua

SEQ ID NO: 307704 - RNA, 32 nt, Homo Sapiens
cacugguauuuauuucugauaauuaaaaauua

SEQ ID NO: 307705 - RNA, 32 nt, Homo Sapiens
ccggccggcugccagaagaucccggcgggagg

SEQ ID NO: 307706 - RNA, 32 nt, Homo Sapiens
cuaaggaccccuccccgcgggacggagggagg

SEQ ID NO: 307707 - RNA, 32 nt, Homo Sapiens
cggaagugguggcuguggaaggcguagcauca

SEQ ID NO: 307708 - RNA, 32 nt, Homo Sapiens
ucugcuaccuggacguucauucuuauguauua

SEQ ID NO: 307709 - RNA, 32 nt, Homo Sapiens
ccugcuggggacgguccagccacagcgccagg

SEQ ID NO: 307710 - RNA, 32 nt, Homo Sapiens
gcagggggagacucaaggccugggaagguuuu

SEQ ID NO: 307711 - RNA, 32 nt, Homo Sapiens
ucgguuuguauguaauggaagcacggggcuag

SEQ ID NO: 307712 - RNA, 32 nt, Homo Sapiens
gcugggcgccauggcgcuccccggagcccggg

SEQ ID NO: 307713 - RNA, 32 nt, Homo Sapiens
gagaauaaucuuucuuaaaaaauauaugcacu

SEQ ID NO: 307714 - RNA, 32 nt, Homo Sapiens
uccgccccgccaggcccggcccggacucccga

SEQ ID NO: 307715 - RNA, 32 nt, Homo Sapiens
ugcccagaggaugagaacacauagccauuagg

SEQ ID NO: 307716 - RNA, 32 nt, Homo Sapiens
ucuguucagggugggacuccaggugaauuacu

SEQ ID NO: 307717 - RNA, 32 nt, Homo Sapiens
guuguuacuauaagaguaauugccuaacuuga

SEQ ID NO: 307718 - RNA, 32 nt, Homo Sapiens
aaauuaauaaacaacuaaaaacauauauuuau

SEQ ID NO: 307719 - RNA, 32 nt, Homo Sapiens
guagcgcugggaaggacgggugaggcagggga

SEQ ID NO: 307720 - RNA, 32 nt, Homo Sapiens
aucuuccuccccagcccccgggcucgggaguu

SEQ ID NO: 307721 - RNA, 32 nt, Homo Sapiens
ugggcuguuucccccuuccccuuaaauccgga

SEQ ID NO: 307722 - RNA, 32 nt, Homo Sapiens
ggaugggaauggcaauggccuagcuuuuauuu

SEQ ID NO: 307723 - RNA, 32 nt, Homo Sapiens
ggccaccccacccacaccugucccuggccagc

SEQ ID NO: 307724 - RNA, 32 nt, Homo Sapiens
cagggggacagcggcuggucggaggcucgcag

SEQ ID NO: 307725 - RNA, 31 nt, Homo Sapiens
uccggcucccugagaugguccacucuguggc

SEQ ID NO: 307726 - RNA, 32 nt, Homo Sapiens
aauguucuuuaacuauauacuauguaacaggg

SEQ ID NO: 307727 - RNA, 32 nt, Homo Sapiens
gcccgcccagcaugcagaacaaaagcacaacg

SEQ ID NO: 307728 - RNA, 32 nt, Homo Sapiens
cgacccggcccugcaggcuccaggcggcagag

SEQ ID NO: 307729 - RNA, 32 nt, Homo Sapiens
ccaggagcucucaacuaacaaggaggcaggag

SEQ ID NO: 307730 - RNA, 32 nt, Homo Sapiens
cuuuuuaaaaauugugguaaaauacauaacaa

SEQ ID NO: 307731 - RNA, 32 nt, Homo Sapiens
gcaaagcaguugcagcaaccucccucuugcug

SEQ ID NO: 307732 - RNA, 32 nt, Homo Sapiens
aagaacaaauggccucagugaccuacacucuc

SEQ ID NO: 307733 - RNA, 32 nt, Homo Sapiens
auaccugccgcuaacacacacacacacacaca

SEQ ID NO: 307734 - RNA, 32 nt, Homo Sapiens
aggagagaaaucagagguggcgcgcgaaggcu

SEQ ID NO: 307735 - RNA, 32 nt, Homo Sapiens
uagaguaucagaaagcacucuccagugguucc

SEQ ID NO: 307736 - RNA, 32 nt, Homo Sapiens
uaguuuuucuuacuugcauuuauuuaagacac

SEQ ID NO: 307737 - RNA, 32 nt, Homo Sapiens
gaaagaaaacgaaaauguuauugcacauguaa

SEQ ID NO: 307738 - RNA, 32 nt, Homo Sapiens
ugcauuuccagccccagcaucuugcuggagcc

SEQ ID NO: 307739 - RNA, 32 nt, Homo Sapiens
aaaugauuucauaaggaaaaccacuguuugaa

SEQ ID NO: 307740 - RNA, 32 nt, Homo Sapiens
gagacaauaaucaagacuuagaggaacugacu

SEQ ID NO: 307741 - RNA, 32 nt, Homo Sapiens
ccccaacuuagaauuugcuacuuauuuuaaag

SEQ ID NO: 307742 - RNA, 32 nt, Homo Sapiens
gauucccacaacacugacaaucaaggcaacau

SEQ ID NO: 307743 - RNA, 32 nt, Homo Sapiens
uacaggaagcuccagggcuggagcaccucuga

SEQ ID NO: 307744 - RNA, 32 nt, Homo Sapiens
cucgccggagagcugggugcuaccgcuguuuc

SEQ ID NO: 307745 - RNA, 32 nt, Homo Sapiens
ugccacacagacaugcacaaacuugaaggcag

SEQ ID NO: 307746 - RNA, 32 nt, Homo Sapiens
ggggcaugaguacacacugugugcuaaggaaa

SEQ ID NO: 307747 - RNA, 32 nt, Homo Sapiens
ucagaaagagugauuuuuaaaaauauauauuu

SEQ ID NO: 307748 - RNA, 32 nt, Homo Sapiens
uauacauauaucuguauagauacauuaccccu

SEQ ID NO: 307749 - RNA, 32 nt, Homo Sapiens
agaacagugccuucagcauacuuuuuuauuag

SEQ ID NO: 307750 - RNA, 32 nt, Homo Sapiens
guucuuuauuuuuuuuuuuuuauuuugagcaa

SEQ ID NO: 307751 - RNA, 32 nt, Homo Sapiens
cccacccaccgcccaggcucaucuaccccgcu

SEQ ID NO: 307752 - RNA, 32 nt, Homo Sapiens
guuccagaaaauaggacugaccaagaagcaga

SEQ ID NO: 307753 - RNA, 32 nt, Homo Sapiens
gcuuucuucugaacuuaccaccagcccuggcu

SEQ ID NO: 307754 - RNA, 32 nt, Homo Sapiens
ccaaaaagcugggauuacuagcaugagccacc

SEQ ID NO: 307755 - RNA, 32 nt, Homo Sapiens
ggucucaaacucccaaccucaggugauccgcc

SEQ ID NO: 307756 - RNA, 32 nt, Homo Sapiens
guguguggacgaaagaaagacugauggcucaa

SEQ ID NO: 307757 - RNA, 32 nt, Homo Sapiens
acaauguuguacaauuauguuuuuaauacagu

SEQ ID NO: 307758 - RNA, 32 nt, Homo Sapiens
gacugaaauuuauuauuagacaaauucauuau

SEQ ID NO: 307759 - RNA, 32 nt, Homo Sapiens
aaagaaaaaaggaaaggcuagcagucauccaa

SEQ ID NO: 307760 - RNA, 32 nt, Homo Sapiens
ggacacgugguagggacaguuuagcagcugga

SEQ ID NO: 307761 - RNA, 32 nt, Homo Sapiens
cuacuaagaagcugugucacuuggagaagcga

SEQ ID NO: 307762 - RNA, 32 nt, Homo Sapiens
agggcagguccucccgggucgugagccaguag

SEQ ID NO: 307763 - RNA, 32 nt, Homo Sapiens
gggaagcccacccacaaugcauggaguauuau

SEQ ID NO: 307764 - RNA, 32 nt, Homo Sapiens
caguaaccacagcuagcuguaaaauugaaaau

SEQ ID NO: 307765 - RNA, 32 nt, Homo Sapiens
ugaggcggguccccggcuuccugcucccuucg

SEQ ID NO: 307766 - RNA, 32 nt, Homo Sapiens
acugccuucucugccgaugacauccuggcuca

SEQ ID NO: 307767 - RNA, 32 nt, Homo Sapiens
uaccacguaaccaaaaaugaaggagaacuacu

SEQ ID NO: 307768 - RNA, 32 nt, Homo Sapiens
uuacagacacccauaauaaaauaucauauuaa

SEQ ID NO: 307769 - RNA, 32 nt, Homo Sapiens
agucgucugguagcagauguggcaccugcggg

SEQ ID NO: 307770 - RNA, 32 nt, Homo Sapiens
uccacggacucaaauuuuaaucuccucuggca

SEQ ID NO: 307771 - RNA, 31 nt, Homo Sapiens
cagugcuaugccaccaccugacguggcagaa

SEQ ID NO: 307772 - RNA, 32 nt, Homo Sapiens
guguaauauuucuaagaggaaaugucacaggg

SEQ ID NO: 307773 - RNA, 32 nt, Homo Sapiens
acaccacauugggaaaaccuucugccucauuu

SEQ ID NO: 307774 - RNA, 32 nt, Homo Sapiens
ugacuccggcccggccuacagggcgcgugcgc

SEQ ID NO: 307775 - RNA, 32 nt, Homo Sapiens
uuccuuccccugaccuagguguagagaccucc

SEQ ID NO: 307776 - RNA, 32 nt, Homo Sapiens
auggguccauuuugcccuuccauagccuaauc

SEQ ID NO: 307777 - RNA, 32 nt, Homo Sapiens
ugggggaggaggaggaugggaccuccuggacc

SEQ ID NO: 307778 - RNA, 32 nt, Homo Sapiens
cagggcuugggucuucaaccuguggcgacagg

SEQ ID NO: 307779 - RNA, 32 nt, Homo Sapiens
ccccuccggccucccgcacgcccgaucccggg

SEQ ID NO: 307780 - RNA, 32 nt, Homo Sapiens
uccaccacucccuuuugucuuucacauggagg

SEQ ID NO: 307781 - RNA, 32 nt, Homo Sapiens
aaaugucccucccuuacccccauccuuaacuu

SEQ ID NO: 307782 - RNA, 32 nt, Homo Sapiens
cuuauggcggcgcuggagagggggcgcugagc

SEQ ID NO: 307783 - RNA, 32 nt, Homo Sapiens
gacaggugcgugacagugggagcugcucucgg

SEQ ID NO: 307784 - RNA, 32 nt, Homo Sapiens
aagccauacuuauauuuucuuguaaagugcuu

SEQ ID NO: 307785 - RNA, 32 nt, Homo Sapiens
ccgccucggcccggaacauggcugcgcgcccu

SEQ ID NO: 307786 - RNA, 32 nt, Homo Sapiens
uuauauaggcugaugucuuugccucaagauug

SEQ ID NO: 307787 - RNA, 32 nt, Homo Sapiens
gcugccgacggcgggggcuguggccggguccc

SEQ ID NO: 307788 - RNA, 32 nt, Homo Sapiens
gcuucucugggcagaauugggcugggaccucu

SEQ ID NO: 307789 - RNA, 32 nt, Homo Sapiens
auccuggaccagcugugcuuuugccuggucau

SEQ ID NO: 307790 - RNA, 32 nt, Homo Sapiens
ccucagauguugaaauuuacacugcuuugaaa

SEQ ID NO: 307791 - RNA, 32 nt, Homo Sapiens
cuuaucuauaaaauggggaugguaaugauaca

SEQ ID NO: 307792 - RNA, 32 nt, Homo Sapiens
uaguucacaccuguaaucccagcacuuuggga

SEQ ID NO: 307793 - RNA, 32 nt, Homo Sapiens
uagcucacaccuguaaucccagcacuucggga

SEQ ID NO: 307794 - RNA, 32 nt, Homo Sapiens
cucgcggccguucagaauuauaaggcugucug

SEQ ID NO: 307795 - RNA, 32 nt, Homo Sapiens
uucuuccugcccccacaccccauccccagcua

SEQ ID NO: 307796 - RNA, 32 nt, Homo Sapiens
uagaguugaaauauuuuguugcugcagccgag

SEQ ID NO: 307797 - RNA, 32 nt, Homo Sapiens
uaugauaccaauuuauaaaaaauaauuacaca

SEQ ID NO: 307798 - RNA, 32 nt, Homo Sapiens
gagacugcaaauuaucauccugauggaacuau

SEQ ID NO: 307799 - RNA, 30 nt, Homo Sapiens
acacggggcucucgcgcgggcaucgaggau

SEQ ID NO: 307800 - RNA, 32 nt, Homo Sapiens
uguggggaaugggaagaaguaguuuacuuugg

SEQ ID NO: 307801 - RNA, 32 nt, Homo Sapiens
caagcacggggucuuucuugcuggacggaggc

SEQ ID NO: 307802 - RNA, 32 nt, Homo Sapiens
cuucccucugccucccacccaggccacucuuc

SEQ ID NO: 307803 - RNA, 32 nt, Homo Sapiens
cgguuuuuguuguuugugguuuguaucaagau

SEQ ID NO: 307804 - RNA, 32 nt, Homo Sapiens
augccaaaaauauauuugauguuaaaucaaau

SEQ ID NO: 307805 - RNA, 32 nt, Homo Sapiens
guacuuucuuugcaugaggauucaacaacccc

SEQ ID NO: 307806 - RNA, 32 nt, Homo Sapiens
acuguggagcagcuuucauuccuacccacuug

SEQ ID NO: 307807 - RNA, 32 nt, Homo Sapiens
guuacggaccuucccuaggaaaacagauaacu

SEQ ID NO: 307808 - RNA, 32 nt, Homo Sapiens
uauuauuacaucauccauguccugcuuuauac

SEQ ID NO: 307809 - RNA, 32 nt, Homo Sapiens
uaaccauccagaccccaccccacucacgcggc

SEQ ID NO: 307810 - RNA, 32 nt, Homo Sapiens
cuccauuuuuauuuucugaacuguacauucac

SEQ ID NO: 307811 - RNA, 32 nt, Homo Sapiens
auucauuccaaauugugcauauggauauauaa

SEQ ID NO: 307812 - RNA, 32 nt, Homo Sapiens
agcaacagcuucuacuaccagcccuuggggca

SEQ ID NO: 307813 - RNA, 32 nt, Homo Sapiens
gguguugggcgaccugacucagacacagagga

SEQ ID NO: 307814 - RNA, 32 nt, Homo Sapiens
cucucucuuuuuuuuuuuuuuaaauagugcua

SEQ ID NO: 307815 - RNA, 32 nt, Homo Sapiens
gggcuccccacuuugcuuccuauacucugcug

SEQ ID NO: 307816 - RNA, 32 nt, Homo Sapiens
aggcugcugcgguuucaggcggcugcuucgug

SEQ ID NO: 307817 - RNA, 32 nt, Homo Sapiens
aacucaacuaacaaaaucaagccugauucaaa

SEQ ID NO: 307818 - RNA, 32 nt, Homo Sapiens
cuccaugucaccuccucagaucuuuaaucugg

SEQ ID NO: 307819 - RNA, 28 nt, Homo Sapiens
uaugagguaaauaaacauuuggauauca

SEQ ID NO: 307820 - RNA, 32 nt, Homo Sapiens
uucucgcuucuggccugggugagcuagaaggg

SEQ ID NO: 307821 - RNA, 32 nt, Homo Sapiens
agcugucugucucguuucuguccgcgcgcccu

SEQ ID NO: 307822 - RNA, 32 nt, Homo Sapiens
cccgcuuccuuccuucauuucuaucagccuuu

SEQ ID NO: 307823 - RNA, 32 nt, Homo Sapiens
agacuaaaaaagugaggacgagaguaagaacu

SEQ ID NO: 307824 - RNA, 32 nt, Homo Sapiens
uauccucgccaagaccuucgcuugugaugacu

SEQ ID NO: 307825 - RNA, 32 nt, Homo Sapiens
uacccaagcugcgccggcuggcgggagagcag

SEQ ID NO: 307826 - RNA, 32 nt, Homo Sapiens
accguuucaagugaugaagugaaaauaauuua

SEQ ID NO: 307827 - RNA, 32 nt, Homo Sapiens
gaccacgcuccuuccucgggaaggaggcggca

SEQ ID NO: 307828 - RNA, 32 nt, Homo Sapiens
cugggcugaagggagggaaaggcggcuugggc

SEQ ID NO: 307829 - RNA, 32 nt, Homo Sapiens
acauauacaaagugauuuuagcuguauaaagu

SEQ ID NO: 307830 - RNA, 32 nt, Homo Sapiens
cucaucaguccugauuagccuccggagggccc

SEQ ID NO: 307831 - RNA, 32 nt, Homo Sapiens
uuaucagauauauuugcaauuauuuucuucca

SEQ ID NO: 307832 - RNA, 32 nt, Homo Sapiens
ggcagccuggggaacgugguuggcucaggguu

SEQ ID NO: 307833 - RNA, 32 nt, Homo Sapiens
ggguagaaggauuauuacuaacuuaccaaagg

SEQ ID NO: 307834 - RNA, 32 nt, Homo Sapiens
uggcuggcacaccagggcaaugauuucccugc

SEQ ID NO: 307835 - RNA, 32 nt, Homo Sapiens
cucuuugcaccuccuuuuuuuagucgagauau

SEQ ID NO: 307836 - RNA, 32 nt, Homo Sapiens
cgggccgggcccaggagcgcgcggaugaugcg

SEQ ID NO: 307837 - RNA, 32 nt, Homo Sapiens
ccuauccccuccccugcucagaguuuuuaagc

SEQ ID NO: 307838 - RNA, 32 nt, Homo Sapiens
uugaagucuuuuuuauggauaauaacguguuu

SEQ ID NO: 307839 - RNA, 32 nt, Homo Sapiens
cuugggcaucacgcccaccuccuuuggcagag

SEQ ID NO: 307840 - RNA, 32 nt, Homo Sapiens
guccugaaccccauucaagaaaacacagacuu

SEQ ID NO: 307841 - RNA, 30 nt, Homo Sapiens
gaccguggggaggugccgccggggucgcag

SEQ ID NO: 307842 - RNA, 32 nt, Homo Sapiens
uuuugcauuuuuuauaaagauggggucucuau

SEQ ID NO: 307843 - RNA, 32 nt, Homo Sapiens
aaaccacuaauauguauguaaaaauugugcug

SEQ ID NO: 307844 - RNA, 32 nt, Homo Sapiens
ggucauuucacaugcauaugggauuacuugug

SEQ ID NO: 307845 - RNA, 32 nt, Homo Sapiens
gguggcggccggcugggcgcgcacucucggga

SEQ ID NO: 307846 - RNA, 32 nt, Homo Sapiens
cgacucuguuucucaucuuuccaauuugcagg

SEQ ID NO: 307847 - RNA, 32 nt, Homo Sapiens
gcgacuccgcgccgugugucgccgggcggggc

SEQ ID NO: 307848 - RNA, 31 nt, Homo Sapiens
gaaaauuugugcugcuguuagugcaacugcu

SEQ ID NO: 307849 - RNA, 28 nt, Homo Sapiens
caguggaaagauuacagaugaggaaagg

SEQ ID NO: 307850 - RNA, 32 nt, Homo Sapiens
cagacggacguggacgcccccggaguggaagc

SEQ ID NO: 307851 - RNA, 32 nt, Homo Sapiens
acauccuagaauuuauacuggagagaaaccuu

SEQ ID NO: 307852 - RNA, 32 nt, Homo Sapiens
caaaaaacuuguaaauaaaggaaccauaauca

SEQ ID NO: 307853 - RNA, 32 nt, Homo Sapiens
agggaagaugacccacaauaaaugucugcagu

SEQ ID NO: 307854 - RNA, 32 nt, Homo Sapiens
uccucugcucucuuuuucaguuuccauaaaaa

SEQ ID NO: 307855 - RNA, 32 nt, Homo Sapiens
ucuacuaaaaauacaaaacuagccaggcgcgg

SEQ ID NO: 307856 - RNA, 32 nt, Homo Sapiens
aucaucccauuguaaagcgacuucaaaaauau

SEQ ID NO: 307857 - RNA, 32 nt, Homo Sapiens
guugaccaggauggucucaaucuccugaccuu

SEQ ID NO: 307858 - RNA, 32 nt, Homo Sapiens
acuguaaugcuuguauguauaaauccuaugaa

SEQ ID NO: 307859 - RNA, 32 nt, Homo Sapiens
ggcucccuuucuggagacccagacaccgccug

SEQ ID NO: 307860 - RNA, 32 nt, Homo Sapiens
agaaguuggcuuuguucauauagcuucucuac

SEQ ID NO: 307861 - RNA, 32 nt, Homo Sapiens
acuuuuuauuauuuauacuacuauauauaaua

SEQ ID NO: 307862 - RNA, 32 nt, Homo Sapiens
guuacccucuauuugcagcuuuuauguuuaaa

SEQ ID NO: 307863 - RNA, 32 nt, Homo Sapiens
ucuccggccgcgggcaucucccggcccggccg

SEQ ID NO: 307864 - RNA, 32 nt, Homo Sapiens
ugaaauggacugugaaggaaaaggggacagga

SEQ ID NO: 307865 - RNA, 32 nt, Homo Sapiens
cuucuucuguaucccaauaauccaccaggaua

SEQ ID NO: 307866 - RNA, 32 nt, Homo Sapiens
uuugaaauccuggccucccucagaggccucca

SEQ ID NO: 307867 - RNA, 32 nt, Homo Sapiens
gacagacaguguuccugagaggcugggcacuu

SEQ ID NO: 307868 - RNA, 32 nt, Homo Sapiens
auuuugcuuugauguguuucuacauguaguug

SEQ ID NO: 307869 - RNA, 32 nt, Homo Sapiens
guucuguguuucaguaaagagagaccugauca

SEQ ID NO: 307870 - RNA, 32 nt, Homo Sapiens
ugcaccuucagcugccacuccauccucugcac

SEQ ID NO: 307871 - RNA, 31 nt, Homo Sapiens
aaggagccuuaaaauucccaggcaagugggu

SEQ ID NO: 307872 - RNA, 32 nt, Homo Sapiens
guggcuuucccucucugggccucagucuguuc

SEQ ID NO: 307873 - RNA, 32 nt, Homo Sapiens
gugacugcaugcggcgcgcagcggguauaugu

SEQ ID NO: 307874 - RNA, 32 nt, Homo Sapiens
uguggcuggccuucuugccccccucccagagg

SEQ ID NO: 307875 - RNA, 32 nt, Homo Sapiens
uaacacaccguaauuuggcauuuguuuaaccu

SEQ ID NO: 307876 - RNA, 32 nt, Homo Sapiens
ggaaaaacuauuauuaauaauauuauccuauc

SEQ ID NO: 307877 - RNA, 32 nt, Homo Sapiens
gaccugaguuucgucuccugucucucuggcug

SEQ ID NO: 307878 - RNA, 32 nt, Homo Sapiens
uuucugaaaaacaaaauaaugucaucauauga

SEQ ID NO: 307879 - RNA, 32 nt, Homo Sapiens
uuguuucacagcugcggggauucugcugacca

SEQ ID NO: 307880 - RNA, 32 nt, Homo Sapiens
uguugaguuuuaaaggaagaaauauuuucaaa

SEQ ID NO: 307881 - RNA, 32 nt, Homo Sapiens
cucaagccugcccuuccuagacggccaccugc

SEQ ID NO: 307882 - RNA, 32 nt, Homo Sapiens
gggcagcgccugggcugacugcaccguggacu

SEQ ID NO: 307883 - RNA, 32 nt, Homo Sapiens
cagaagacacaaacucaccucccucuccccaa

SEQ ID NO: 307884 - RNA, 32 nt, Homo Sapiens
cuuauauugacaacaaaucaucucgcuaaaga

SEQ ID NO: 307885 - RNA, 32 nt, Homo Sapiens
uggcgucgccuugaaaucccaggccgugagga

SEQ ID NO: 307886 - RNA, 32 nt, Homo Sapiens
ccaccgcagcuggcagagggggagguuugggg

SEQ ID NO: 307887 - RNA, 32 nt, Homo Sapiens
gggcggagaggaccucagcggcugcggcgaca

SEQ ID NO: 307888 - RNA, 32 nt, Homo Sapiens
caaacagagggacaucugcagaugagcggguc

SEQ ID NO: 307889 - RNA, 32 nt, Homo Sapiens
aaauaccucccuccccuaaacugacuggacgg

SEQ ID NO: 307890 - RNA, 32 nt, Homo Sapiens
gccucuccagagcuagcagauuccuucuggac

SEQ ID NO: 307891 - RNA, 29 nt, Homo Sapiens
gguacauaguguuucaagugcaugguagu

SEQ ID NO: 307892 - RNA, 32 nt, Homo Sapiens
gccagagugcugcaacuggggcgugggccgcu

SEQ ID NO: 307893 - RNA, 32 nt, Homo Sapiens
cacccaguugcccuuuucaugaacuaaacaau

SEQ ID NO: 307894 - RNA, 32 nt, Homo Sapiens
ccagagcccccagggugucccggagcccugga

SEQ ID NO: 307895 - RNA, 32 nt, Homo Sapiens
gugguaucuuccgguaucauccuauucaaaca

SEQ ID NO: 307896 - RNA, 32 nt, Homo Sapiens
accuguauaacccucuguaccucucauaacug

SEQ ID NO: 307897 - RNA, 32 nt, Homo Sapiens
cacugccaccuuugguauuugcagcuuaccag

SEQ ID NO: 307898 - RNA, 32 nt, Homo Sapiens
ccuccauuuaacaguguugguuaugcaauaag

SEQ ID NO: 307899 - RNA, 30 nt, Homo Sapiens
uauuguccuugugcugcaauaaccucagcc

SEQ ID NO: 307900 - RNA, 32 nt, Homo Sapiens
ucuaguacaaccuuguugcuuuaggugaguca

SEQ ID NO: 307901 - RNA, 32 nt, Homo Sapiens
aaaccugugaauguggguaaugugggagagcc

SEQ ID NO: 307902 - RNA, 32 nt, Homo Sapiens
cuuggugcgccgggccguggugaguccgggcu

SEQ ID NO: 307903 - RNA, 32 nt, Homo Sapiens
gcagccugacaguccagcuguuugcaaacuca

SEQ ID NO: 307904 - RNA, 32 nt, Homo Sapiens
cggaugcccagcugaagagccugcugauguca

SEQ ID NO: 307905 - RNA, 32 nt, Homo Sapiens
uuucuucuguggauccauaagaggaacauuuc

SEQ ID NO: 307906 - RNA, 32 nt, Homo Sapiens
ccaguagccuccugggguggcaagguguagag

SEQ ID NO: 307907 - RNA, 32 nt, Homo Sapiens
ugcucuuccgcaucaccccauccaccuuacag

SEQ ID NO: 307908 - RNA, 32 nt, Homo Sapiens
gaaaaugccugccacauaguagaugacacuca

SEQ ID NO: 307909 - RNA, 32 nt, Homo Sapiens
ugagcccugugcaugcacacacacuuacgaug

SEQ ID NO: 307910 - RNA, 32 nt, Homo Sapiens
gccuucugcuccaagcucuccugcuucccagg

SEQ ID NO: 307911 - RNA, 32 nt, Homo Sapiens
uaaaacaaaagaaagaacaaauaacaaaugaa

SEQ ID NO: 307912 - RNA, 31 nt, Homo Sapiens
ggucugaaauaaaaauuauauuacgaaauuu

SEQ ID NO: 307913 - RNA, 32 nt, Homo Sapiens
uaaagaugugguggccacucuuucaugguggu

SEQ ID NO: 307914 - RNA, 32 nt, Homo Sapiens
gcagggacauaguggggcugggcagggauggg

SEQ ID NO: 307915 - RNA, 32 nt, Homo Sapiens
cgaaagcccuccaguuuccccuggacgccuug

SEQ ID NO: 307916 - RNA, 32 nt, Homo Sapiens
ggguuuaacaauuuuagaugauucagcuuuug

SEQ ID NO: 307917 - RNA, 32 nt, Homo Sapiens
aguacuugacuccaucacgcagaugggagcag

SEQ ID NO: 307918 - RNA, 32 nt, Homo Sapiens
guguguuacaccuuucccagcucucagcaguu

SEQ ID NO: 307919 - RNA, 32 nt, Homo Sapiens
ccuuacuuaugaugaaguauuugggagagugg

SEQ ID NO: 307920 - RNA, 32 nt, Homo Sapiens
caucucccaagccucaaauuccuccuuaguug

SEQ ID NO: 307921 - RNA, 32 nt, Homo Sapiens
ccaugguauuucuccuugaauuccucuuucuu

SEQ ID NO: 307922 - RNA, 32 nt, Homo Sapiens
cagagguacuaaaauuuguuaccacaucauug

SEQ ID NO: 307923 - RNA, 32 nt, Homo Sapiens
uaugucagcuucccuuuggccugcaguuugua

SEQ ID NO: 307924 - RNA, 32 nt, Homo Sapiens
uccaaugacaggauuauauaauugcuauuggc

SEQ ID NO: 307925 - RNA, 32 nt, Homo Sapiens
cggcagcggcggugacggcugcggccccgcuc

SEQ ID NO: 307926 - RNA, 32 nt, Homo Sapiens
gcucugcagcugcuccuccacgcgggcccgcu

SEQ ID NO: 307927 - RNA, 32 nt, Homo Sapiens
uccagucacuguauauggaaguauuuuauuuu

SEQ ID NO: 307928 - RNA, 32 nt, Homo Sapiens
caguccuggcaaugggguuuggcaccauucuc

SEQ ID NO: 307929 - RNA, 32 nt, Homo Sapiens
ccgccgaggcggugaggcgccuggccgggcug

SEQ ID NO: 307930 - RNA, 32 nt, Homo Sapiens
gaguaaaagggcucagccucacugagaacuuu

SEQ ID NO: 307931 - RNA, 32 nt, Homo Sapiens
uuuuuuguucuuguuguuuauaugaaaacacu

SEQ ID NO: 307932 - RNA, 32 nt, Homo Sapiens
guauguugauauucuaaaaacaucuauuuuaa

SEQ ID NO: 307933 - RNA, 32 nt, Homo Sapiens
uucccugcagagguuccugggggcguggcagg

SEQ ID NO: 307934 - RNA, 32 nt, Homo Sapiens
ccugaccacugcggcaagaggaccccagcugg

SEQ ID NO: 307935 - RNA, 32 nt, Homo Sapiens
aaaaagacauaaaauagauaaaacagaccaga

SEQ ID NO: 307936 - RNA, 32 nt, Homo Sapiens
caaaggcauaagaacuaggagcugcugacauu

SEQ ID NO: 307937 - RNA, 32 nt, Homo Sapiens
ccauucuuccuaguuuucuccucccaggaacu

SEQ ID NO: 307938 - RNA, 30 nt, Homo Sapiens
uggcugggagguggcuccucaaacagccgc

SEQ ID NO: 307939 - RNA, 32 nt, Homo Sapiens
gcagaggaugcaauggcacggaccuuggcuug

SEQ ID NO: 307940 - RNA, 32 nt, Homo Sapiens
uaaugugcagaugagcagcaugguaaucaugu

SEQ ID NO: 307941 - RNA, 31 nt, Homo Sapiens
ccgugcucacacaacugguccacuccugagu

SEQ ID NO: 307942 - RNA, 32 nt, Homo Sapiens
uagccugacaagaaauaaaaccacccguuuuc

SEQ ID NO: 307943 - RNA, 32 nt, Homo Sapiens
gccacccaccgcccccaaucuaucuuggcuca

SEQ ID NO: 307944 - RNA, 32 nt, Homo Sapiens
gggacuggguguggccggcggcucuggucucg

SEQ ID NO: 307945 - RNA, 32 nt, Homo Sapiens
gauacugugccaaauaauuacuuuuuauuuau

SEQ ID NO: 307946 - RNA, 32 nt, Homo Sapiens
gacucucauuuucuacaaggcugcagugggcc

SEQ ID NO: 307947 - RNA, 32 nt, Homo Sapiens
gaccaggcucuuagaaaccaacuccauccuga

SEQ ID NO: 307948 - RNA, 32 nt, Homo Sapiens
uguacugcaauaauuuuucaaaaaacaaaaaa

SEQ ID NO: 307949 - RNA, 32 nt, Homo Sapiens
augugaaaaauaacuaugauauuuugguaaaa

SEQ ID NO: 307950 - RNA, 32 nt, Homo Sapiens
cacggcuaucugugcuggccccuggcuggagg

SEQ ID NO: 307951 - RNA, 32 nt, Homo Sapiens
guccggguugcccaccugcaaacucuccgccu

SEQ ID NO: 307952 - RNA, 32 nt, Homo Sapiens
gaagcaaauuccugagugggggguacuggggc

SEQ ID NO: 307953 - RNA, 32 nt, Homo Sapiens
ccugcccggccgcuagccggcuccgccacuug

SEQ ID NO: 307954 - RNA, 32 nt, Homo Sapiens
ccaccacucugcaugcaggagcuguuaucauc

SEQ ID NO: 307955 - RNA, 32 nt, Homo Sapiens
agggcgggucugcggccgagccagcggcggcg

SEQ ID NO: 307956 - RNA, 32 nt, Homo Sapiens
gccgaguugcugugggcgugcccggaagcaga

SEQ ID NO: 307957 - RNA, 32 nt, Homo Sapiens
ugcccaggaaauggguugauucaucacagauu

SEQ ID NO: 307958 - RNA, 32 nt, Homo Sapiens
ugaaauaguuuaucuuguaaugaaauauaagg

SEQ ID NO: 307959 - RNA, 32 nt, Homo Sapiens
ucaggaaauacagcacuuugucuuaagaaaac

SEQ ID NO: 307960 - RNA, 32 nt, Homo Sapiens
uauacuccauucucauuaauuucccauuuugu

SEQ ID NO: 307961 - RNA, 32 nt, Homo Sapiens
auuaacacacugggcuagggccacacaaugag

SEQ ID NO: 307962 - RNA, 32 nt, Homo Sapiens
uggggagagaugggggcggggaaaauggaggu

SEQ ID NO: 307963 - RNA, 32 nt, Homo Sapiens
uagcaccugggccagcagcugcugugcucgau

SEQ ID NO: 307964 - RNA, 32 nt, Homo Sapiens
cacauuagaguucauauuuuauacaaacuccg

SEQ ID NO: 307965 - RNA, 32 nt, Homo Sapiens
ccuuccugucuccucuucgggaagccagcgug

SEQ ID NO: 307966 - RNA, 32 nt, Homo Sapiens
gaaaaucuggguggcuuuccaaggcuaagaua

SEQ ID NO: 307967 - RNA, 32 nt, Homo Sapiens
ugcuguuaaaacaaaauuauccuuuaagucug

SEQ ID NO: 307968 - RNA, 32 nt, Homo Sapiens
aauguggacagagggcuugaagacauggccga

SEQ ID NO: 307969 - RNA, 32 nt, Homo Sapiens
ccagcucacaugauuauggagggugagaaguu

SEQ ID NO: 307970 - RNA, 32 nt, Homo Sapiens
ucaaagcuaaaaccagggaaauuaaaaugcaa

SEQ ID NO: 307971 - RNA, 32 nt, Homo Sapiens
acuauuuuuucuucuuuuauuuuugaaauucu

SEQ ID NO: 307972 - RNA, 32 nt, Homo Sapiens
gagaaguucauuugcugaaucgcugaaguuca

SEQ ID NO: 307973 - RNA, 31 nt, Homo Sapiens
aaaaggcggcacuccaccccccggcgcacuc

SEQ ID NO: 307974 - RNA, 31 nt, Homo Sapiens
gcaugggcaauaaacaaguaaauauacaaac

SEQ ID NO: 307975 - RNA, 32 nt, Homo Sapiens
gccuccugcaucauccucgucuucaucuuccu

SEQ ID NO: 307976 - RNA, 32 nt, Homo Sapiens
uauuuagcugugucugcaaaucuuaaaagcca

SEQ ID NO: 307977 - RNA, 30 nt, Homo Sapiens
cuggaaugugguggcaugaacauagcucac

SEQ ID NO: 307978 - RNA, 32 nt, Homo Sapiens
cuguucacugccagcucugaugcuguccacug

SEQ ID NO: 307979 - RNA, 32 nt, Homo Sapiens
cugaagaaacucuggaacagaguaaaauggac

SEQ ID NO: 307980 - RNA, 32 nt, Homo Sapiens
uuucuauaucaucgugugauaauuguucacca

SEQ ID NO: 307981 - RNA, 32 nt, Homo Sapiens
ggagaugcagucuuaaggcccuggacaccuga

SEQ ID NO: 307982 - RNA, 32 nt, Homo Sapiens
uggauagacaagaaacaaaauucauuuaguag

SEQ ID NO: 307983 - RNA, 32 nt, Homo Sapiens
augcccugugcagcugcccgagggucuccgcc

SEQ ID NO: 307984 - RNA, 32 nt, Homo Sapiens
gugcgccgcgcuuugagccucuaggccaugaa

SEQ ID NO: 307985 - RNA, 32 nt, Homo Sapiens
ugaaaagaggguuuccucuuauuucuucccug

SEQ ID NO: 307986 - RNA, 32 nt, Homo Sapiens
cgggagauggaccccucccuugcucagugccu

SEQ ID NO: 307987 - RNA, 32 nt, Homo Sapiens
gcaguggcccagaggaagcccagggcccagcc

SEQ ID NO: 307988 - RNA, 32 nt, Homo Sapiens
guauuccagaaaggccauguacaagaggaagu

SEQ ID NO: 307989 - RNA, 32 nt, Homo Sapiens
gaaccgagacugccccgcggagccgccgguau

SEQ ID NO: 307990 - RNA, 32 nt, Homo Sapiens
cugcgagaugccuuuugaaaagagaaaaagaa

SEQ ID NO: 307991 - RNA, 32 nt, Homo Sapiens
aacaacugaaaguuaagcaaccccuccuccug

SEQ ID NO: 307992 - RNA, 32 nt, Homo Sapiens
aaguaggauugugacagucacgcccccggcag

SEQ ID NO: 307993 - RNA, 32 nt, Homo Sapiens
uccccucugguagccacagacaugcuguguuu

SEQ ID NO: 307994 - RNA, 32 nt, Homo Sapiens
uucuuccuggaagaguaggaagcuaugcguau

SEQ ID NO: 307995 - RNA, 32 nt, Homo Sapiens
uugggcaggcaugguggccagcuccucacuug

SEQ ID NO: 307996 - RNA, 29 nt, Homo Sapiens
gacgaggaucgucucaggucagcggaggg

SEQ ID NO: 307997 - RNA, 32 nt, Homo Sapiens
gugacugacggcugaggccugccucuccuucc

SEQ ID NO: 307998 - RNA, 32 nt, Homo Sapiens
guaacuaaugaaaucaaacccccaagcugcuu

SEQ ID NO: 307999 - RNA, 32 nt, Homo Sapiens
ggucuccuauuuucuuuuuaacuuuuuaaaga

SEQ ID NO: 308000 - RNA, 32 nt, Homo Sapiens
gggcucccaagagcuccugguggugcagccug

SEQ ID NO: 308001 - RNA, 32 nt, Homo Sapiens
agccgaggaugcgggcgggccggggcgcgacg

SEQ ID NO: 308002 - RNA, 32 nt, Homo Sapiens
aaugagggugguuuuuuucuuuaaaacacaug

SEQ ID NO: 308003 - RNA, 32 nt, Homo Sapiens
ugccgcccaagcccuaccacccccgccugccg

SEQ ID NO: 308004 - RNA, 32 nt, Homo Sapiens
cugcaagugguagcaagaagugauuagaggca

SEQ ID NO: 308005 - RNA, 32 nt, Homo Sapiens
ccccccucgggccccagggcuccgaggcacuu

SEQ ID NO: 308006 - RNA, 32 nt, Homo Sapiens
gaacagcucccucaguuucuuucuagcucauc

SEQ ID NO: 308007 - RNA, 32 nt, Homo Sapiens
ugaaaauguaaaauaaaaccaaaaauagacaa

SEQ ID NO: 308008 - RNA, 32 nt, Homo Sapiens
caugaaggacucggggucuggaugccauggaa

SEQ ID NO: 308009 - RNA, 32 nt, Homo Sapiens
cugugcccacccagacuugguuugggccacca

SEQ ID NO: 308010 - RNA, 32 nt, Homo Sapiens
auauuugucauucaaguuuucaucugcuuuau

SEQ ID NO: 308011 - RNA, 32 nt, Homo Sapiens
ccaaacccauucuuguacucccuugugaucua

SEQ ID NO: 308012 - RNA, 32 nt, Homo Sapiens
uggcuaacacggcauggguagcaagaaacuaa

SEQ ID NO: 308013 - RNA, 32 nt, Homo Sapiens
cucccuaccacccgcccuggcuccccagcugc

SEQ ID NO: 308014 - RNA, 32 nt, Homo Sapiens
uuguguacugguguccaggcucugccagggga

SEQ ID NO: 308015 - RNA, 32 nt, Homo Sapiens
cuagagaaaaauaaaaaugaacauguauauac

SEQ ID NO: 308016 - RNA, 32 nt, Homo Sapiens
agagguggcaacuggugacaucaugagacgau

SEQ ID NO: 308017 - RNA, 32 nt, Homo Sapiens
gagcucagcuggaaggggcuggauucauucuc

SEQ ID NO: 308018 - RNA, 32 nt, Homo Sapiens
cuugaaugaaauagcaggaagcuccucgggag

SEQ ID NO: 308019 - RNA, 32 nt, Homo Sapiens
ucuuugcacagaugaauggaaguugaugcaca

SEQ ID NO: 308020 - RNA, 32 nt, Homo Sapiens
augaaggacaccuggaugaugguggauacacu

SEQ ID NO: 308021 - RNA, 32 nt, Homo Sapiens
uugcucauuuucuggucugaccggcggaaccc

SEQ ID NO: 308022 - RNA, 32 nt, Homo Sapiens
aaauugcuaacaaagcacuuuuggacaaugcu

SEQ ID NO: 308023 - RNA, 32 nt, Homo Sapiens
aguaccuauaugcuaccgguuagcaugguuuu

SEQ ID NO: 308024 - RNA, 32 nt, Homo Sapiens
acgcaccugcucuccaccuggacucaggccgg

SEQ ID NO: 308025 - RNA, 32 nt, Homo Sapiens
ggggagcccucccauaacccugucuugggcuc

SEQ ID NO: 308026 - RNA, 32 nt, Homo Sapiens
cccgccggguggcuccagaaauggccugugac

SEQ ID NO: 308027 - RNA, 28 nt, Homo Sapiens
ccgaugccagguuuccuuagcuuccuua

SEQ ID NO: 308028 - RNA, 30 nt, Homo Sapiens
aauaaagagaagcaugguuuuugaauguuc

SEQ ID NO: 308029 - RNA, 32 nt, Homo Sapiens
ugguaaacuauugguacuuguuuucuaccucc

SEQ ID NO: 308030 - RNA, 32 nt, Homo Sapiens
agaauguauguuuacuuauauagaauuaauga

SEQ ID NO: 308031 - RNA, 32 nt, Homo Sapiens
cauuccagguggccagagcgaguggggccggg

SEQ ID NO: 308032 - RNA, 32 nt, Homo Sapiens
ucugcgacccggggcucuggccagcacucugu

SEQ ID NO: 308033 - RNA, 32 nt, Homo Sapiens
ccugagagucccugggguucugggcccucccu

SEQ ID NO: 308034 - RNA, 32 nt, Homo Sapiens
uggaacgcagcagcagcgugcagggucaaaga

SEQ ID NO: 308035 - RNA, 32 nt, Homo Sapiens
caacugaggggaagagaagagaaagaggggga

SEQ ID NO: 308036 - RNA, 32 nt, Homo Sapiens
uugauuccgcuuuuccuggagagagcggccgg

SEQ ID NO: 308037 - RNA, 31 nt, Homo Sapiens
uuaacucucaaugaagucaucuauuuucugg

SEQ ID NO: 308038 - RNA, 32 nt, Homo Sapiens
ggagucugcccccaagcucucucacugaaugc

SEQ ID NO: 308039 - RNA, 32 nt, Homo Sapiens
gcaguucuuugaggaaguugggauaagacgga

SEQ ID NO: 308040 - RNA, 32 nt, Homo Sapiens
gauucuuugaacuuauuuccacuuuaauuucu

SEQ ID NO: 308041 - RNA, 32 nt, Homo Sapiens
cuugguugugaagaggcggggaagcggguguc

SEQ ID NO: 308042 - RNA, 32 nt, Homo Sapiens
ggaaauuaguacauuuuaaaucuuaguuaaau

SEQ ID NO: 308043 - RNA, 32 nt, Homo Sapiens
uucugcuccccucccacccaagaugcugguuc

SEQ ID NO: 308044 - RNA, 32 nt, Homo Sapiens
ggaagaucagucagugggcacaagacagucaa

SEQ ID NO: 308045 - RNA, 32 nt, Homo Sapiens
uggcccugcaggcuccugcugcaccgcuauug

SEQ ID NO: 308046 - RNA, 32 nt, Homo Sapiens
ggcucagcugugugcccaguuccuccuguggg

SEQ ID NO: 308047 - RNA, 32 nt, Homo Sapiens
gaccggcuaggaggguugcagcugccucuuuu

SEQ ID NO: 308048 - RNA, 28 nt, Homo Sapiens
accaugcaggagcugcaucugcucuggu

SEQ ID NO: 308049 - RNA, 30 nt, Homo Sapiens
ccacagcgguccggcggcggcagcgagccc

SEQ ID NO: 308050 - RNA, 32 nt, Homo Sapiens
ggaaguguuuaaaacuauuuuaauuuuauuac

SEQ ID NO: 308051 - RNA, 32 nt, Homo Sapiens
gcccuaaaucauaguaaaacauuauaaacuaa

SEQ ID NO: 308052 - RNA, 32 nt, Homo Sapiens
cugaguacauuacccugaugucuaaauggacc

SEQ ID NO: 308053 - RNA, 32 nt, Homo Sapiens
ugaucaugauaugaccauuuaaccucagaauu

SEQ ID NO: 308054 - RNA, 32 nt, Homo Sapiens
cgauaaguauuaaaacaguauuugaguuuaaa

SEQ ID NO: 308055 - RNA, 32 nt, Homo Sapiens
cgagcuguauauggaggccgugucacagccau

SEQ ID NO: 308056 - RNA, 32 nt, Homo Sapiens
aagggcaguuuagaaaaauuaacuuugugaau

SEQ ID NO: 308057 - RNA, 32 nt, Homo Sapiens
ucacgugucccgggcgcugaggggaaaggaag

SEQ ID NO: 308058 - RNA, 32 nt, Homo Sapiens
uauacuuaaucuaauuugauuagauuauagag

SEQ ID NO: 308059 - RNA, 32 nt, Homo Sapiens
acucggugguggccacugcgcagaccagacuu

SEQ ID NO: 308060 - RNA, 32 nt, Homo Sapiens
acagccggccgcccugagggucgggccggagc

SEQ ID NO: 308061 - RNA, 32 nt, Homo Sapiens
gaucgcugucuccuccgcaaagcauuuuaacu

SEQ ID NO: 308062 - RNA, 32 nt, Homo Sapiens
uuccugaacaugauucaugaugauuaaaauau

SEQ ID NO: 308063 - RNA, 32 nt, Homo Sapiens
cuuuuaaaaaauaucaauaagcucuauacuuc

SEQ ID NO: 308064 - RNA, 32 nt, Homo Sapiens
ugucaucuaaaccaggggaaccacugaacuaa

SEQ ID NO: 308065 - RNA, 32 nt, Homo Sapiens
uggcaaagcuccggagccccagccccaaggcu

SEQ ID NO: 308066 - RNA, 32 nt, Homo Sapiens
cuuuuuguuuuaauaaaaauuauuaagccaau

SEQ ID NO: 308067 - RNA, 32 nt, Homo Sapiens
ggcacgaggcagugggcaggccaggcagggcg

SEQ ID NO: 308068 - RNA, 32 nt, Homo Sapiens
uccuuuauaauucuuucuuuuuccuucauaau

SEQ ID NO: 308069 - RNA, 32 nt, Homo Sapiens
cugacucugcaccuggcccuuugccagacagc

SEQ ID NO: 308070 - RNA, 32 nt, Homo Sapiens
gcaagcuccagcugcagccuccgccuacguga

SEQ ID NO: 308071 - RNA, 32 nt, Homo Sapiens
cccggcccgcggccccaccaugccccagcucg

SEQ ID NO: 308072 - RNA, 32 nt, Homo Sapiens
ugccuauaacagugacuugauugccaaggaau

SEQ ID NO: 308073 - RNA, 32 nt, Homo Sapiens
cacagucauucacaucacugauugggugccau

SEQ ID NO: 308074 - RNA, 32 nt, Homo Sapiens
acgcugcgcgcgcgucccugcgcgacgagaag

SEQ ID NO: 308075 - RNA, 32 nt, Homo Sapiens
gcgugcgugcgcggcccggcagagccgugcgg

SEQ ID NO: 308076 - RNA, 32 nt, Homo Sapiens
aacucagauuuaacccagaaccagaguaaagu

SEQ ID NO: 308077 - RNA, 32 nt, Homo Sapiens
aacacugaacucuacgccacuccacaaaugau

SEQ ID NO: 308078 - RNA, 32 nt, Homo Sapiens
acuccuguucuccucagagccugucauccguc

SEQ ID NO: 308079 - RNA, 32 nt, Homo Sapiens
guuguuucuugccugccuuuugggaagaaaug

SEQ ID NO: 308080 - RNA, 32 nt, Homo Sapiens
caccuugucuuucagcuuccagugucuugggu

SEQ ID NO: 308081 - RNA, 32 nt, Homo Sapiens
ucuaaggacuuuuucuuagguuugcuaaauac

SEQ ID NO: 308082 - RNA, 32 nt, Homo Sapiens
accgcccacuucccggcccggggccugcacaa

SEQ ID NO: 308083 - RNA, 32 nt, Homo Sapiens
acagcagcagugccucgguuccucuuuggcug

SEQ ID NO: 308084 - RNA, 32 nt, Homo Sapiens
ugugauggcggugggcacuggcacucuugucc

SEQ ID NO: 308085 - RNA, 32 nt, Homo Sapiens
ggaccccuggccacccccggcgccugcuaucc

SEQ ID NO: 308086 - RNA, 32 nt, Homo Sapiens
cccuugcuucggcuccucccuugcugaccugc

SEQ ID NO: 308087 - RNA, 32 nt, Homo Sapiens
cgggcgcagccaucuugccggcaccgccccgc

SEQ ID NO: 308088 - RNA, 32 nt, Homo Sapiens
uuuuucuccaugagaaagcuaaacaugaaaua

SEQ ID NO: 308089 - RNA, 32 nt, Homo Sapiens
cgcauuuccucugcacuuccugucucauucuu

SEQ ID NO: 308090 - RNA, 32 nt, Homo Sapiens
aauuguucacuaggucuucagaauggacgucc

SEQ ID NO: 308091 - RNA, 32 nt, Homo Sapiens
auuguauaaaauuugcuggauuugagcacugu

SEQ ID NO: 308092 - RNA, 32 nt, Homo Sapiens
cuugguacuuaaaguaguaaaacuauaaaaca

SEQ ID NO: 308093 - RNA, 32 nt, Homo Sapiens
uuuucuugaguguuaagucuuuuaccaaaagu

SEQ ID NO: 308094 - RNA, 32 nt, Homo Sapiens
guaauaaccauaaagcaaaaaauaauuugaaa

SEQ ID NO: 308095 - RNA, 32 nt, Homo Sapiens
gaaacuuugucucaaaaacaaacaaacaaaca

SEQ ID NO: 308096 - RNA, 32 nt, Homo Sapiens
uuguuccuuucuguauugugcugagaggaucc

SEQ ID NO: 308097 - RNA, 32 nt, Homo Sapiens
gagcuguguuaggcacuuuauauacauuauuc

SEQ ID NO: 308098 - RNA, 32 nt, Homo Sapiens
ggugggaaccagggcugcacgcggugcuugcg

SEQ ID NO: 308099 - RNA, 32 nt, Homo Sapiens
cuguuguagcuauguuuaggguagugguucuc

SEQ ID NO: 308100 - RNA, 32 nt, Homo Sapiens
gcacacccagagcuacccaacagauuccuaug

SEQ ID NO: 308101 - RNA, 32 nt, Homo Sapiens
cuuuuugcugcuaguuguguaauauuuauuga

SEQ ID NO: 308102 - RNA, 32 nt, Homo Sapiens
ccaaggcugaugcaggauuuguucucugucca

SEQ ID NO: 308103 - RNA, 32 nt, Homo Sapiens
guaaacaguauuuuaagauguucacuuugcuc

SEQ ID NO: 308104 - RNA, 32 nt, Homo Sapiens
guaguuuaacaauuugauuauuuuggauauua

SEQ ID NO: 308105 - RNA, 32 nt, Homo Sapiens
acuggacagcucuggaggaacaggccugcuga

SEQ ID NO: 308106 - RNA, 32 nt, Homo Sapiens
ccacucagaaaaggcgagaaggcuuugugauu

SEQ ID NO: 308107 - RNA, 32 nt, Homo Sapiens
gcccgaggagccggccgccccggaggugcugc

SEQ ID NO: 308108 - RNA, 32 nt, Homo Sapiens
ccgccucccuccggucucgguggcgcggcacg

SEQ ID NO: 308109 - RNA, 32 nt, Homo Sapiens
aaggguucagagacucagggccccagcacuaa

SEQ ID NO: 308110 - RNA, 32 nt, Homo Sapiens
gaaaccaaaaugcuauuuuaaaguaguuucuu

SEQ ID NO: 308111 - RNA, 32 nt, Homo Sapiens
acccugacaugcguccgcaggaccccgcgcuc

SEQ ID NO: 308112 - RNA, 32 nt, Homo Sapiens
ccaucaauauaaaaugccacccaucugcaguu

SEQ ID NO: 308113 - RNA, 32 nt, Homo Sapiens
cauuugaaaaugauagaggaacaaagaguuau

SEQ ID NO: 308114 - RNA, 32 nt, Homo Sapiens
acuuuuuuguugacaaauaccauucugaagga

SEQ ID NO: 308115 - RNA, 32 nt, Homo Sapiens
cucuucagcagcccccuccccccggccgcucu

SEQ ID NO: 308116 - RNA, 32 nt, Homo Sapiens
gcuauaaauaaauugaauauauugguugcuca

SEQ ID NO: 308117 - RNA, 32 nt, Homo Sapiens
uaccacuaaaauuuaugugguuuacuuuaagc

SEQ ID NO: 308118 - RNA, 32 nt, Homo Sapiens
ugccaucccaugccaggaaaauguaggacacg

SEQ ID NO: 308119 - RNA, 32 nt, Homo Sapiens
ccaaaucuuccacuccucccccuccauugucc

SEQ ID NO: 308120 - RNA, 32 nt, Homo Sapiens
cuagccaagacagggacaaaauggggaagggg

SEQ ID NO: 308121 - RNA, 32 nt, Homo Sapiens
gccacugguauuuuaguacuugauuauuuuuu

SEQ ID NO: 308122 - RNA, 32 nt, Homo Sapiens
ccaguuuggaauuacuuauuaaggagaauugg

SEQ ID NO: 308123 - RNA, 32 nt, Homo Sapiens
ggagucugucccugggggcggcaggacagcag

SEQ ID NO: 308124 - RNA, 32 nt, Homo Sapiens
gguucucugaacuuaucuuuccuauaaaaugg

SEQ ID NO: 308125 - RNA, 32 nt, Homo Sapiens
ccggaccccucccuuccauccuccucuccaaa

SEQ ID NO: 308126 - RNA, 32 nt, Homo Sapiens
guguuuauagcuuuuguuucgcgggguugugg

SEQ ID NO: 308127 - RNA, 32 nt, Homo Sapiens
uacuuagaaggagcagaaauaguuauuuucgu

SEQ ID NO: 308128 - RNA, 32 nt, Homo Sapiens
augugauggggugaaaucauggcagugugauu

SEQ ID NO: 308129 - RNA, 32 nt, Homo Sapiens
aucucagaaaaaauacaacacagguuuaacuu

SEQ ID NO: 308130 - RNA, 32 nt, Homo Sapiens
uguuuuuguaaauuacaucaacagucaugugu

SEQ ID NO: 308131 - RNA, 30 nt, Homo Sapiens
gguguggggcuggggaacgcagcguucucc

SEQ ID NO: 308132 - RNA, 32 nt, Homo Sapiens
ugcgaaaguaccaugagaaauaucagaguaaa

SEQ ID NO: 308133 - RNA, 31 nt, Homo Sapiens
cugggggagcgcagcccggagcuguggcgug

SEQ ID NO: 308134 - RNA, 32 nt, Homo Sapiens
cuucauugauuuccugugucaauccagauggu

SEQ ID NO: 308135 - RNA, 32 nt, Homo Sapiens
acacagcaugaauaagaccugauucccaccau

SEQ ID NO: 308136 - RNA, 32 nt, Homo Sapiens
uaauagaaaagauuaaagcaaaauauucauuu

SEQ ID NO: 308137 - RNA, 32 nt, Homo Sapiens
aaagaagaugaagcuuggaaaauacuauauuc

SEQ ID NO: 308138 - RNA, 32 nt, Homo Sapiens
cuuccuggacuugcccccgccggccgccuguc

SEQ ID NO: 308139 - RNA, 32 nt, Homo Sapiens
cugcgcggcccccucggggcugccgggcgccg

SEQ ID NO: 308140 - RNA, 30 nt, Homo Sapiens
agcagccggcgcggccgccagcgcggugua

SEQ ID NO: 308141 - RNA, 32 nt, Homo Sapiens
cucaagggaaaggcaagcuugaggccaagaug

SEQ ID NO: 308142 - RNA, 32 nt, Homo Sapiens
uacacacguauugcuauuuaagaguaggaguu

SEQ ID NO: 308143 - RNA, 32 nt, Homo Sapiens
uuguuucccaaguuauuuguacaaaacguuuu

SEQ ID NO: 308144 - RNA, 32 nt, Homo Sapiens
acgccgaucccgggggaagucgucuuggugcu

SEQ ID NO: 308145 - RNA, 32 nt, Homo Sapiens
aacccaggcacagucgcaacccggcccaguuu

SEQ ID NO: 308146 - RNA, 32 nt, Homo Sapiens
cccgaugccuuugaccggcagcucuguguauu

SEQ ID NO: 308147 - RNA, 32 nt, Homo Sapiens
cagccgucgugagcgcaggcgcggggcgggcg

SEQ ID NO: 308148 - RNA, 32 nt, Homo Sapiens
cuaagagucccaugguuucucuucuggucaca

SEQ ID NO: 308149 - RNA, 32 nt, Homo Sapiens
uggcuuauuuuuguuuucucuuuuucaaugaa

SEQ ID NO: 308150 - RNA, 32 nt, Homo Sapiens
ggaugggagaggggucccagacuuuaccauga

SEQ ID NO: 308151 - RNA, 32 nt, Homo Sapiens
acugacggcuuugcuuguuuugauucuuuucc

SEQ ID NO: 308152 - RNA, 32 nt, Homo Sapiens
uuuagugaaccaaaucuagaaaguaccaaggc

SEQ ID NO: 308153 - RNA, 32 nt, Homo Sapiens
aaacagauauauauuuaaugaaaagaagagau

SEQ ID NO: 308154 - RNA, 32 nt, Homo Sapiens
cagaauuacauaaaaaagaaacaugcucagac

SEQ ID NO: 308155 - RNA, 32 nt, Homo Sapiens
ccauugcccagcugaaagcaccuagcucauag

SEQ ID NO: 308156 - RNA, 32 nt, Homo Sapiens
acaggaguuuaaaacguauagccuacaaagua

SEQ ID NO: 308157 - RNA, 32 nt, Homo Sapiens
ugccuucaagaugguucaaacacaaaauauua

SEQ ID NO: 308158 - RNA, 32 nt, Homo Sapiens
ucagcuugucccauucaagccaccgagcucac

SEQ ID NO: 308159 - RNA, 32 nt, Homo Sapiens
ucacaagacaccuguuauccucuucuuucacc

SEQ ID NO: 308160 - RNA, 32 nt, Homo Sapiens
cagggugguuuucaggagcucuggugaagugg

SEQ ID NO: 308161 - RNA, 30 nt, Homo Sapiens
uuauuauguuaagagaaauucgugacaucc

SEQ ID NO: 308162 - RNA, 32 nt, Homo Sapiens
gugcugcagcugugcccggccccgccuggagc

SEQ ID NO: 308163 - RNA, 32 nt, Homo Sapiens
gaagaagaaaaaaggauccuugauguuuguga

SEQ ID NO: 308164 - RNA, 32 nt, Homo Sapiens
gucccagauucaugaaauuugcugauguccau

SEQ ID NO: 308165 - RNA, 32 nt, Homo Sapiens
agaccagacggaauccagccucgggggucauc

SEQ ID NO: 308166 - RNA, 32 nt, Homo Sapiens
gaggacaguuuccccaucgccuucugguuguu

SEQ ID NO: 308167 - RNA, 32 nt, Homo Sapiens
ccccuuguucuucccaaugucauauccaccag

SEQ ID NO: 308168 - RNA, 32 nt, Homo Sapiens
ucucuguagaaucuuagaggcuugaugaugau

SEQ ID NO: 308169 - RNA, 32 nt, Homo Sapiens
uuauaacguuaccauggaugauccugaacuug

SEQ ID NO: 308170 - RNA, 32 nt, Homo Sapiens
ggaaagguaaaugauugcuuuuuuauauugca

SEQ ID NO: 308171 - RNA, 32 nt, Homo Sapiens
cgaacagcugucugccuuguugugagagccau

SEQ ID NO: 308172 - RNA, 32 nt, Homo Sapiens
auuuguaugauauuuuaaaaucuccuaaaugc

SEQ ID NO: 308173 - RNA, 32 nt, Homo Sapiens
cagcagccugacgcuagaggacaucugcgggc

SEQ ID NO: 308174 - RNA, 32 nt, Homo Sapiens
gcaagccugcggugcuggcggccccgucuggc

SEQ ID NO: 308175 - RNA, 32 nt, Homo Sapiens
gaaagucaaugucaaugaacaagcauucucuc

SEQ ID NO: 308176 - RNA, 32 nt, Homo Sapiens
caguauccuuagaauccaaaugucuagauaag

SEQ ID NO: 308177 - RNA, 32 nt, Homo Sapiens
aaagacagcccacagacuuaguguucaaguaa

SEQ ID NO: 308178 - RNA, 32 nt, Homo Sapiens
gagguuuuaugaaaagaauaaaaauugacuuc

SEQ ID NO: 308179 - RNA, 32 nt, Homo Sapiens
cgcagaccccaccgcccucccucuccccgggg

SEQ ID NO: 308180 - RNA, 32 nt, Homo Sapiens
ggggaagccagacuggucucaggagcgcuaaa

SEQ ID NO: 308181 - RNA, 32 nt, Homo Sapiens
ugaaggagguucaagaggcugugcuuuccaag

SEQ ID NO: 308182 - RNA, 32 nt, Homo Sapiens
cuucagucuugccuaggcgauuuugucuacca

SEQ ID NO: 308183 - RNA, 32 nt, Homo Sapiens
uggggcugggggugggggcaggcaggaggcau

SEQ ID NO: 308184 - RNA, 32 nt, Homo Sapiens
guuccuagcgcagagccgcgcccgccaugagg

SEQ ID NO: 308185 - RNA, 32 nt, Homo Sapiens
ggccgcggagacugcgacccucuucucucagu

SEQ ID NO: 308186 - RNA, 32 nt, Homo Sapiens
uggaggaggcuuggcccucagcccuuauaucu

SEQ ID NO: 308187 - RNA, 32 nt, Homo Sapiens
gcugauuuucuuuuccaagguguagaauauuc

SEQ ID NO: 308188 - RNA, 32 nt, Homo Sapiens
aaggccuguuugcugcacaucugccugcagag

SEQ ID NO: 308189 - RNA, 32 nt, Homo Sapiens
ugcgaggcccucggggcccacccacagcggcc

SEQ ID NO: 308190 - RNA, 32 nt, Homo Sapiens
auuguccccucuauucuaaggauuucaucguc

SEQ ID NO: 308191 - RNA, 32 nt, Homo Sapiens
cuauuuauucugucuuucuccucccacacugg

SEQ ID NO: 308192 - RNA, 32 nt, Homo Sapiens
accucauaccagcauacgcucaccuuacaggg

SEQ ID NO: 308193 - RNA, 32 nt, Homo Sapiens
ccuuacugcaucucagcccacaucucagcccu

SEQ ID NO: 308194 - RNA, 27 nt, Homo Sapiens
ugcaaguccuucuucccuuuggaaugu

SEQ ID NO: 308195 - RNA, 32 nt, Homo Sapiens
ggcugcuuguuuacaaagcaucucauucauau

SEQ ID NO: 308196 - RNA, 32 nt, Homo Sapiens
ugcucuacugaauauucugacucugaaagaag

SEQ ID NO: 308197 - RNA, 32 nt, Homo Sapiens
cggccuccagacgcuauauaaacagacccgga

SEQ ID NO: 308198 - RNA, 32 nt, Homo Sapiens
cagaucccaagccuccagggaggccaccagcc

SEQ ID NO: 308199 - RNA, 32 nt, Homo Sapiens
cuguggaacagguggguggguugguggaguuu

SEQ ID NO: 308200 - RNA, 32 nt, Homo Sapiens
cugguggucggcgggggaucugguggccuggc

SEQ ID NO: 308201 - RNA, 32 nt, Homo Sapiens
ggguucuuuuuguagugagacauacaaaucug

SEQ ID NO: 308202 - RNA, 32 nt, Homo Sapiens
gccgcaggcgcaacuuuuuugaguuuuccugg

SEQ ID NO: 308203 - RNA, 32 nt, Homo Sapiens
ccauucacauuuaauguuacuaugauaugcuu

SEQ ID NO: 308204 - RNA, 32 nt, Homo Sapiens
ugcaccugccagcguggccgagucacacagug

SEQ ID NO: 308205 - RNA, 32 nt, Homo Sapiens
ggcauuucaaggaagaaguacugaaaugauuu

SEQ ID NO: 308206 - RNA, 32 nt, Homo Sapiens
cuacuuucagaagaaaaauauaauacggaaaa

SEQ ID NO: 308207 - RNA, 32 nt, Homo Sapiens
gaucuuuguagauuggggggagauucuaaauu

SEQ ID NO: 308208 - RNA, 32 nt, Homo Sapiens
uucccccagaaauuacucaaugcugaaaccuc

SEQ ID NO: 308209 - RNA, 31 nt, Homo Sapiens
gaggcggugaguaaggucagagccugcucca

SEQ ID NO: 308210 - RNA, 32 nt, Homo Sapiens
cuccuggguggcuuccagacggaccgggcagc

SEQ ID NO: 308211 - RNA, 32 nt, Homo Sapiens
gaaaaugcuuggacagaagagaugaguacuau

SEQ ID NO: 308212 - RNA, 32 nt, Homo Sapiens
gcaaucagcauuuggaucucagaaugagcaag

SEQ ID NO: 308213 - RNA, 32 nt, Homo Sapiens
agacggcgcuggcuccccucggcggggcuggc

SEQ ID NO: 308214 - RNA, 32 nt, Homo Sapiens
gcggcugaccuugggugaagcccuucagcauc

SEQ ID NO: 308215 - RNA, 32 nt, Homo Sapiens
gcugagccaagagcuugcuuucagcuuuagua

SEQ ID NO: 308216 - RNA, 32 nt, Homo Sapiens
ucccugaaauaccuuaaaauguccucuacacc

SEQ ID NO: 308217 - RNA, 32 nt, Homo Sapiens
auguguuuuuguauuuaugaaaauaguuucau

SEQ ID NO: 308218 - RNA, 32 nt, Homo Sapiens
ccucaacagguggaagaagaucaugagagaug

SEQ ID NO: 308219 - RNA, 32 nt, Homo Sapiens
cuuguucuuagucucuucuuuggacaguacgu

SEQ ID NO: 308220 - RNA, 32 nt, Homo Sapiens
aggauccgauuugauaaccaaauauuuauacc

SEQ ID NO: 308221 - RNA, 32 nt, Homo Sapiens
uacuuuuucuucccuucuucccuauugaaccu

SEQ ID NO: 308222 - RNA, 32 nt, Homo Sapiens
gcgugccuggaaaggagcugcaggugaggaca

SEQ ID NO: 308223 - RNA, 32 nt, Homo Sapiens
ugccucugggcaaagaagcagagcuaacgagg

SEQ ID NO: 308224 - RNA, 32 nt, Homo Sapiens
uguagaacuggguauaugugauugggaauggu

SEQ ID NO: 308225 - RNA, 32 nt, Homo Sapiens
uuguggccucugcggguccugccucagccaug

SEQ ID NO: 308226 - RNA, 32 nt, Homo Sapiens
gaagaugguggagauacacagaugaacaagcc

SEQ ID NO: 308227 - RNA, 32 nt, Homo Sapiens
ggugaaaucucuagccucuuuguguuuuuguu

SEQ ID NO: 308228 - RNA, 32 nt, Homo Sapiens
cuuaaugacaacaauaaugugauugugcagag

SEQ ID NO: 308229 - RNA, 32 nt, Homo Sapiens
ggcuggcauguaguggcaugaucugcaaucuc

SEQ ID NO: 308230 - RNA, 32 nt, Homo Sapiens
aagagaagcuuccuuggacaaaaggacccugc

SEQ ID NO: 308231 - RNA, 32 nt, Homo Sapiens
cucagcuuguuucguuuugaugucaauaaaua

SEQ ID NO: 308232 - RNA, 32 nt, Homo Sapiens
uccuagaggcacacaccucaaaaguuacuagg

SEQ ID NO: 308233 - RNA, 29 nt, Homo Sapiens
ccggcccggggacagugcgcugcuggucc

SEQ ID NO: 308234 - RNA, 32 nt, Homo Sapiens
caguguggaugaugauaugcuuuugugagcaa

SEQ ID NO: 308235 - RNA, 32 nt, Homo Sapiens
uuucuuguucagccaaugaggaaagggcauug

SEQ ID NO: 308236 - RNA, 32 nt, Homo Sapiens
cauagcaacagcagcucuguaccucaucuguu

SEQ ID NO: 308237 - RNA, 32 nt, Homo Sapiens
cucacucuccagagacccucacauguccuuuu

SEQ ID NO: 308238 - RNA, 32 nt, Homo Sapiens
cuaaaguuuuaucucuguaguuccucaaauug

SEQ ID NO: 308239 - RNA, 32 nt, Homo Sapiens
uuuuauugaauggggaauuaagaauauaaacu

SEQ ID NO: 308240 - RNA, 32 nt, Homo Sapiens
auggugacccuuuauuucauccguauuuaaac

SEQ ID NO: 308241 - RNA, 32 nt, Homo Sapiens
agccccugcccccgaacugcgugcugucccau

SEQ ID NO: 308242 - RNA, 32 nt, Homo Sapiens
acugcaguacucuauguuaccacacaugauuu

SEQ ID NO: 308243 - RNA, 32 nt, Homo Sapiens
caaacccguaucuauuccuaacuacugccucu

SEQ ID NO: 308244 - RNA, 32 nt, Homo Sapiens
gcagggcucaggggggccgggcugguccuuug

SEQ ID NO: 308245 - RNA, 32 nt, Homo Sapiens
ggagaccuucccgacgaccccugcuccggcgg

SEQ ID NO: 308246 - RNA, 32 nt, Homo Sapiens
ggccgcugccagcccagacgcugcugacgcug

SEQ ID NO: 308247 - RNA, 32 nt, Homo Sapiens
uauuaagacuauugauauauuuuuguaauguu

SEQ ID NO: 308248 - RNA, 32 nt, Homo Sapiens
ucugugaaaaggagcacuguauggccacagaa

SEQ ID NO: 308249 - RNA, 32 nt, Homo Sapiens
uagcacuugguaguucuuccucugcucugcuu

SEQ ID NO: 308250 - RNA, 32 nt, Homo Sapiens
ccgcgcgaggucccuccucuccgggcguccgu

SEQ ID NO: 308251 - RNA, 32 nt, Homo Sapiens
gguuuugacuguaucagcauuucuauugcaga

SEQ ID NO: 308252 - RNA, 32 nt, Homo Sapiens
ggcuauggccacagcuggaacuacccgagaag

SEQ ID NO: 308253 - RNA, 32 nt, Homo Sapiens
ucccgagcucgcguccagguggccaggccucu

SEQ ID NO: 308254 - RNA, 32 nt, Homo Sapiens
gaguccuaaauguuucuagaauuuauacuguu

SEQ ID NO: 308255 - RNA, 32 nt, Homo Sapiens
cggccgcacggugacguugccgugugagccca

SEQ ID NO: 308256 - RNA, 32 nt, Homo Sapiens
cgguccccauucucuuacauucuauucccaac

SEQ ID NO: 308257 - RNA, 32 nt, Homo Sapiens
cacauugauccuccuccucagcuccuugcaga

SEQ ID NO: 308258 - RNA, 32 nt, Homo Sapiens
aaauaugguuuacauuuaauuguacauaaagg

SEQ ID NO: 308259 - RNA, 32 nt, Homo Sapiens
aggauuugcacaugaccuuccauccuuaccug

SEQ ID NO: 308260 - RNA, 31 nt, Homo Sapiens
ccuaaauggcgcagccaauccaggcuuuuca

SEQ ID NO: 308261 - RNA, 32 nt, Homo Sapiens
gccucuccuugacuuccacaaugauuuugaag

SEQ ID NO: 308262 - RNA, 32 nt, Homo Sapiens
caccuuaaugaaauuaaaagaauugagaagac

SEQ ID NO: 308263 - RNA, 32 nt, Homo Sapiens
gaggguggaaaagaagacgaugaggacaaggc

SEQ ID NO: 308264 - RNA, 32 nt, Homo Sapiens
ugauaugcauugacaagcucuuucucuauuua

SEQ ID NO: 308265 - RNA, 32 nt, Homo Sapiens
cgcccugggcuggugaaggugcgcgccaggau

SEQ ID NO: 308266 - RNA, 32 nt, Homo Sapiens
gacuauauucuaaaacuauauuugagcgaaac

SEQ ID NO: 308267 - RNA, 32 nt, Homo Sapiens
aaguuguguucugacaagacugagagaguuac

SEQ ID NO: 308268 - RNA, 32 nt, Homo Sapiens
agcugcacgcaaguguuaaacuucuguaggag

SEQ ID NO: 308269 - RNA, 32 nt, Homo Sapiens
caaaggcccuuaaggagagcagaacuccugca

SEQ ID NO: 308270 - RNA, 32 nt, Homo Sapiens
ggccgcggccccagaguccccgcaccaggcag

SEQ ID NO: 308271 - RNA, 32 nt, Homo Sapiens
aggccgcucggugauccgcggcggcggcagcg

SEQ ID NO: 308272 - RNA, 32 nt, Homo Sapiens
augcaucgcucuuaaccuugagcauagugacu

SEQ ID NO: 308273 - RNA, 32 nt, Homo Sapiens
caaauaaaaauauuucaguagucuuugcauca

SEQ ID NO: 308274 - RNA, 32 nt, Homo Sapiens
ccgacgcuccgucucugacagaaucgcggcgu

SEQ ID NO: 308275 - RNA, 32 nt, Homo Sapiens
aagaaugaaacacuuauacugacuuucaucug

SEQ ID NO: 308276 - RNA, 32 nt, Homo Sapiens
ccguggauccugauuccagcugugugagggcu

SEQ ID NO: 308277 - RNA, 32 nt, Homo Sapiens
aaccaaaaaucgucuuucuuugcuuuuuuauc

SEQ ID NO: 308278 - RNA, 32 nt, Homo Sapiens
acauaacauuauuauuguuaguuuacauagcc

SEQ ID NO: 308279 - RNA, 32 nt, Homo Sapiens
gauuguaaauuaaaaaucauaucuccacaacg

SEQ ID NO: 308280 - RNA, 32 nt, Homo Sapiens
uugccuuuuccccuaauaccgcccccucagug

SEQ ID NO: 308281 - RNA, 32 nt, Homo Sapiens
cacugcagccccaucuccuccuccucccccag

SEQ ID NO: 308282 - RNA, 32 nt, Homo Sapiens
ugugggcuugcuggucuaucacuuccuggccu

SEQ ID NO: 308283 - RNA, 32 nt, Homo Sapiens
uagagagcccuccccagugucuucccaggaua

SEQ ID NO: 308284 - RNA, 32 nt, Homo Sapiens
cccugucccagggccuccaugucagccaggaa

SEQ ID NO: 308285 - RNA, 32 nt, Homo Sapiens
uaaacaauguauauauuaauaaguaacuuaug

SEQ ID NO: 308286 - RNA, 32 nt, Homo Sapiens
ucccuagaguccuagaggaucccuacuguuuu

SEQ ID NO: 308287 - RNA, 32 nt, Homo Sapiens
ccuucugauggccuggcccaccuuccccagaa

SEQ ID NO: 308288 - RNA, 32 nt, Homo Sapiens
agcacgcuacagauguguuguuugucacacug

SEQ ID NO: 308289 - RNA, 32 nt, Homo Sapiens
uucagcagaacagggccucuccccuugcaggc

SEQ ID NO: 308290 - RNA, 32 nt, Homo Sapiens
agcauuuguagcaaaaucgcugggaucuggag

SEQ ID NO: 308291 - RNA, 32 nt, Homo Sapiens
aucccaccaacccucagagccaccccuaaaga

SEQ ID NO: 308292 - RNA, 30 nt, Homo Sapiens
cauuccauuuaauugggggaacaaaaggcc

SEQ ID NO: 308293 - RNA, 32 nt, Homo Sapiens
gagagggaaggggacagauguuucucauugca

SEQ ID NO: 308294 - RNA, 32 nt, Homo Sapiens
agucugaaaugcaauuaacauuaaaggauuaa

SEQ ID NO: 308295 - RNA, 31 nt, Homo Sapiens
cacgcgccgcgcagccauggggaggcugcug

SEQ ID NO: 308296 - RNA, 32 nt, Homo Sapiens
agcccuuccuggcaccccugcugcugacaggg

SEQ ID NO: 308297 - RNA, 32 nt, Homo Sapiens
aauucaagcuuucaaaaaagauuuucugaguu

SEQ ID NO: 308298 - RNA, 32 nt, Homo Sapiens
aggagauaucaaaggaggucagaccuuggaca

SEQ ID NO: 308299 - RNA, 29 nt, Homo Sapiens
auuuuguaaaguuucuagaauuuuauauc

SEQ ID NO: 308300 - RNA, 32 nt, Homo Sapiens
uugucuuuggauauuacaaaauuaaaagaaca

SEQ ID NO: 308301 - RNA, 32 nt, Homo Sapiens
ugacaucuccuccagcagcaucuguccucucu

SEQ ID NO: 308302 - RNA, 32 nt, Homo Sapiens
agcucugcagggugggggcuagagaggaagca

SEQ ID NO: 308303 - RNA, 32 nt, Homo Sapiens
guugauaaacauuuuaugcuugcauuuaaacu

SEQ ID NO: 308304 - RNA, 32 nt, Homo Sapiens
auagccaguuccagcugggagagacagugggc

SEQ ID NO: 308305 - RNA, 32 nt, Homo Sapiens
agcagccgacagaugggcgagcauagagcuca

SEQ ID NO: 308306 - RNA, 32 nt, Homo Sapiens
cccugcaccccuccccucuauagagcagggga

SEQ ID NO: 308307 - RNA, 32 nt, Homo Sapiens
uaauuaaguaaaaauaaagcugaauuguguca

SEQ ID NO: 308308 - RNA, 32 nt, Homo Sapiens
aggagcagccacagugugccccucccaggacc

SEQ ID NO: 308309 - RNA, 32 nt, Homo Sapiens
ucacggcagccuugcccucccuggcucaagca

SEQ ID NO: 308310 - RNA, 32 nt, Homo Sapiens
uaugugugucugcggcgcugccucagcgugcu

SEQ ID NO: 308311 - RNA, 32 nt, Homo Sapiens
agccuccgcucccgaccagucagcgcccccau

SEQ ID NO: 308312 - RNA, 32 nt, Homo Sapiens
acuggcaguaagucuuuuuugaucauucccuu

SEQ ID NO: 308313 - RNA, 32 nt, Homo Sapiens
uucaaauaucacauuggguguacacacauggu

SEQ ID NO: 308314 - RNA, 32 nt, Homo Sapiens
cacucauguggcuacgaaagugucucugagaa

SEQ ID NO: 308315 - RNA, 32 nt, Homo Sapiens
gaaaugcugccggcugcacccagagggagcag

SEQ ID NO: 308316 - RNA, 32 nt, Homo Sapiens
agcuccugcgggcguggcgucucugugcgcag

SEQ ID NO: 308317 - RNA, 32 nt, Homo Sapiens
uguaccugggaauaaacucaugcauggaugag

SEQ ID NO: 308318 - RNA, 32 nt, Homo Sapiens
aagauguuuuccuuuuuucuuucuaaguuuag

SEQ ID NO: 308319 - RNA, 32 nt, Homo Sapiens
cccuaaaggcaaaaacagaacuuccaaaguau

SEQ ID NO: 308320 - RNA, 32 nt, Homo Sapiens
aauuggaaaauaucaauaauuaagaguauuuu

SEQ ID NO: 308321 - RNA, 32 nt, Homo Sapiens
uugaguuguuucucagaaauaaauauuucagu

SEQ ID NO: 308322 - RNA, 32 nt, Homo Sapiens
cgucgagucauuuggugacuuugaugggggga

SEQ ID NO: 308323 - RNA, 32 nt, Homo Sapiens
uaaacaggacaggcccgggcaaccgcagggca

SEQ ID NO: 308324 - RNA, 32 nt, Homo Sapiens
agagagcccaccuccgcccugggcaggagccc

SEQ ID NO: 308325 - RNA, 32 nt, Homo Sapiens
cggcugcaggucggccaggagcuccugcucua

SEQ ID NO: 308326 - RNA, 32 nt, Homo Sapiens
uauuguaacuauuauucuuaaucuuaaaacua

SEQ ID NO: 308327 - RNA, 32 nt, Homo Sapiens
cugaagaggaggaggagggucuagaggccuga

SEQ ID NO: 308328 - RNA, 32 nt, Homo Sapiens
cacuuguggagcaaaugcgugacaugggcagu

SEQ ID NO: 308329 - RNA, 32 nt, Homo Sapiens
cuccugggccccacagagaguccuugugcuca

SEQ ID NO: 308330 - RNA, 31 nt, Homo Sapiens
cugacucccccaucagcucaaacauuaaggg

SEQ ID NO: 308331 - RNA, 32 nt, Homo Sapiens
auaaauggccgcugcgcucuggcccgggcaac

SEQ ID NO: 308332 - RNA, 32 nt, Homo Sapiens
augcaugccgugcauuuguauugaaaugucuc

SEQ ID NO: 308333 - RNA, 32 nt, Homo Sapiens
cggcggcccaagaugcgcccugcccggcgucg

SEQ ID NO: 308334 - RNA, 32 nt, Homo Sapiens
guagacuuuguccuguagccuccacuucugcc

SEQ ID NO: 308335 - RNA, 32 nt, Homo Sapiens
cugaagcauggccagcagcggcauggcugaca

SEQ ID NO: 308336 - RNA, 32 nt, Homo Sapiens
caaagcuuccaggcuccacuuuucacugauga

SEQ ID NO: 308337 - RNA, 32 nt, Homo Sapiens
aauaaauguagcaaaauuucuuucuaaccugc

SEQ ID NO: 308338 - RNA, 32 nt, Homo Sapiens
ugucuguugcugucagcuaugacucagucccc

SEQ ID NO: 308339 - RNA, 32 nt, Homo Sapiens
uugguuucacacucagcuacaugugaccucca

SEQ ID NO: 308340 - RNA, 32 nt, Homo Sapiens
cuguuuccugggcuagucuuggaccccacgag

SEQ ID NO: 308341 - RNA, 32 nt, Homo Sapiens
auguuuuucagaagcuguuucuucacuuauug

SEQ ID NO: 308342 - RNA, 32 nt, Homo Sapiens
gggcuucccacagccucuuccuccccauguca

SEQ ID NO: 308343 - RNA, 32 nt, Homo Sapiens
aggaggagacgccaagcagagauuggaucaaa

SEQ ID NO: 308344 - RNA, 32 nt, Homo Sapiens
ugccugcccgcacccuggccuggccccugguc

SEQ ID NO: 308345 - RNA, 32 nt, Homo Sapiens
caccggauugucuuagcagccucgaucccgua

SEQ ID NO: 308346 - RNA, 32 nt, Homo Sapiens
gguguucaaacacaaccuacucugcaaaccuu

SEQ ID NO: 308347 - RNA, 32 nt, Homo Sapiens
ugcccuugcccuuggagcugccgugccugugu

SEQ ID NO: 308348 - RNA, 32 nt, Homo Sapiens
gcuguccauucccagaggcuggcacucucaug

SEQ ID NO: 308349 - RNA, 32 nt, Homo Sapiens
ccuuauguauauagcuuuucuucuuucuugag

SEQ ID NO: 308350 - RNA, 32 nt, Homo Sapiens
aaaagauacucuggguuuuuuauacuccccaa

SEQ ID NO: 308351 - RNA, 32 nt, Homo Sapiens
cucuuggcuccucuccucuaggccgucgcuuu

SEQ ID NO: 308352 - RNA, 32 nt, Homo Sapiens
aggggauaagugauuuaauauucacaaacguc

SEQ ID NO: 308353 - RNA, 32 nt, Homo Sapiens
uacacauaaaaagccaggcugcaagugggacu

SEQ ID NO: 308354 - RNA, 29 nt, Homo Sapiens
gaccagcuugggcaacauggcaaaacccu

SEQ ID NO: 308355 - RNA, 32 nt, Homo Sapiens
uagcaacugaaauucaaucauuuuaaacaaau

SEQ ID NO: 308356 - RNA, 32 nt, Homo Sapiens
uacugcagugugugaaaguaaagauuuaucug

SEQ ID NO: 308357 - RNA, 32 nt, Homo Sapiens
uaaugaaugcuguugauuauugugaguaugaa

SEQ ID NO: 308358 - RNA, 32 nt, Homo Sapiens
caaggagagggggugggguuccgcggaagguu

SEQ ID NO: 308359 - RNA, 29 nt, Homo Sapiens
gaggauggacggguccggggagcgcagcc

SEQ ID NO: 308360 - RNA, 32 nt, Homo Sapiens
acaggucccuccaggggugcugcugccuaagc

SEQ ID NO: 308361 - RNA, 32 nt, Homo Sapiens
uaacugguuuuguauuuuuucuuaauccuuca

SEQ ID NO: 308362 - RNA, 32 nt, Homo Sapiens
gugugaucccaccccacccccauaguuguaua

SEQ ID NO: 308363 - RNA, 32 nt, Homo Sapiens
gaugacugcaguuauaaagcuggguguaugcu

SEQ ID NO: 308364 - RNA, 32 nt, Homo Sapiens
gaacgaggucucacuauauugcccagacuggu

SEQ ID NO: 308365 - RNA, 32 nt, Homo Sapiens
aggugaacacaagcugcugccggggacugucc

SEQ ID NO: 308366 - RNA, 32 nt, Homo Sapiens
ggagccugaaguccacgcgcgcggcugagaac

SEQ ID NO: 308367 - RNA, 32 nt, Homo Sapiens
aaccucagcaaaaacgaggccucugcaagcca

SEQ ID NO: 308368 - RNA, 32 nt, Homo Sapiens
ccuuggaagaacuugggucauggggaggaagc

SEQ ID NO: 308369 - RNA, 32 nt, Homo Sapiens
gaaaggguauggggacugucagagcaugaacu

SEQ ID NO: 308370 - RNA, 32 nt, Homo Sapiens
accucccacucagacuggcccgggagguucuc

SEQ ID NO: 308371 - RNA, 32 nt, Homo Sapiens
gcugcuggucugacugggaagcagcaagccac

SEQ ID NO: 308372 - RNA, 32 nt, Homo Sapiens
gccacgcucgugccggccucccggcagccucc

SEQ ID NO: 308373 - RNA, 32 nt, Homo Sapiens
uaucuaauuccacacucuguauugaaaauggc

SEQ ID NO: 308374 - RNA, 32 nt, Homo Sapiens
ccagcacucugccuucuguauccaccauggug

SEQ ID NO: 308375 - RNA, 32 nt, Homo Sapiens
ccugacccugaacccugccgccaggccugugc

SEQ ID NO: 308376 - RNA, 32 nt, Homo Sapiens
ccuauggcugggugugcccugcccuaaaugca

SEQ ID NO: 308377 - RNA, 32 nt, Homo Sapiens
gagcugcugcgagaugcgaccggggcggagga

SEQ ID NO: 308378 - RNA, 32 nt, Homo Sapiens
uguggagaugucaaguuagauauaugaguucc

SEQ ID NO: 308379 - RNA, 32 nt, Homo Sapiens
cagaaggaaccuugaaaacuaccugauauuga

SEQ ID NO: 308380 - RNA, 32 nt, Homo Sapiens
auucgggaccaauauauaguggguacaucaag

SEQ ID NO: 308381 - RNA, 32 nt, Homo Sapiens
cauggacuucuggaugcccauccacugggugu

SEQ ID NO: 308382 - RNA, 32 nt, Homo Sapiens
uguuuucucagucccggcacccgccgcgaccg

SEQ ID NO: 308383 - RNA, 32 nt, Homo Sapiens
ucauuuuaauaaauauucauuuggaaucuagg

SEQ ID NO: 308384 - RNA, 32 nt, Homo Sapiens
uuucucugcccccggacuccaguaucacaguc

SEQ ID NO: 308385 - RNA, 31 nt, Homo Sapiens
ccucgcugggggagaaagcaucugcuccaag

SEQ ID NO: 308386 - RNA, 32 nt, Homo Sapiens
uaccagcccagccagcagcagggccacugcgc

SEQ ID NO: 308387 - RNA, 32 nt, Homo Sapiens
ugcacugccuucugggugugccagguuggcau

SEQ ID NO: 308388 - RNA, 32 nt, Homo Sapiens
aaagacugacuucuucuggucuuucauucguu

SEQ ID NO: 308389 - RNA, 32 nt, Homo Sapiens
gucucauuuggguguguuuaugcugcguguug

SEQ ID NO: 308390 - RNA, 31 nt, Homo Sapiens
aaggcccugagcugccugccaccugccagag

SEQ ID NO: 308391 - RNA, 32 nt, Homo Sapiens
agugguucuucugcugccgugaaacagaaaaa

SEQ ID NO: 308392 - RNA, 32 nt, Homo Sapiens
ucaaaggagguaguugcaaaagcugugcccaa

SEQ ID NO: 308393 - RNA, 32 nt, Homo Sapiens
gccaguauuggccccucgccggacccagggcc

SEQ ID NO: 308394 - RNA, 32 nt, Homo Sapiens
cuugcuggugggagagaauguacaagaugaga

SEQ ID NO: 308395 - RNA, 32 nt, Homo Sapiens
uuuucucuaguguuuuaagugauccuuugaag

SEQ ID NO: 308396 - RNA, 32 nt, Homo Sapiens
augcgaauuuccccuucuacauugucuauccc

SEQ ID NO: 308397 - RNA, 32 nt, Homo Sapiens
cuccucccccacucucaauaccuagagaguga

SEQ ID NO: 308398 - RNA, 32 nt, Homo Sapiens
ggcggagcgcaucaguguucucuggguccugu

SEQ ID NO: 308399 - RNA, 32 nt, Homo Sapiens
acggccaggccucucuccugcugcuguuuuug

SEQ ID NO: 308400 - RNA, 32 nt, Homo Sapiens
acaaacagcaaacaggcauuuuggucagguca

SEQ ID NO: 308401 - RNA, 31 nt, Homo Sapiens
cggagcagggaaaccgcaggagccugcagga

SEQ ID NO: 308402 - RNA, 32 nt, Homo Sapiens
agcucugccggggcucuaaggucccucuauuu

SEQ ID NO: 308403 - RNA, 32 nt, Homo Sapiens
guugcggauggauggaagguuggauggauggg

SEQ ID NO: 308404 - RNA, 32 nt, Homo Sapiens
gaugcacccguguuuguaaaaauguagagcac

SEQ ID NO: 308405 - RNA, 32 nt, Homo Sapiens
ccccaaggcaaacacaaauauuagauuaauaa

SEQ ID NO: 308406 - RNA, 32 nt, Homo Sapiens
accugcuucauucaagcuucauauaugcuuug

SEQ ID NO: 308407 - RNA, 32 nt, Homo Sapiens
auagcaccuuguuuuccagcuagucaauauac

SEQ ID NO: 308408 - RNA, 32 nt, Homo Sapiens
ucaucaucgucgucugucaaugaugugucuuc

SEQ ID NO: 308409 - RNA, 32 nt, Homo Sapiens
uugcugaagggagaggugguggugguuaggau

SEQ ID NO: 308410 - RNA, 32 nt, Homo Sapiens
aacgugggaaccuggugacuaagggccuggug

SEQ ID NO: 308411 - RNA, 32 nt, Homo Sapiens
cuccuggcguccccggcugcccucgcucccag

SEQ ID NO: 308412 - RNA, 32 nt, Homo Sapiens
gagucauuugaaauggucauugaagaagcaac

SEQ ID NO: 308413 - RNA, 32 nt, Homo Sapiens
gauuuauauucagauagaaaacaucaaauauu

SEQ ID NO: 308414 - RNA, 32 nt, Homo Sapiens
ggacacuucagccccaggggccugggcagcac

SEQ ID NO: 308415 - RNA, 32 nt, Homo Sapiens
ucauuuaucauauauauacauacaugcauaca

SEQ ID NO: 308416 - RNA, 32 nt, Homo Sapiens
ucuaauaugaacauuucuuucaguaacauuua

SEQ ID NO: 308417 - RNA, 32 nt, Homo Sapiens
agaaccacuuagugucccauucuacuccucuc

SEQ ID NO: 308418 - RNA, 32 nt, Homo Sapiens
uuugaaguacacacuggaccaauacguugaga

SEQ ID NO: 308419 - RNA, 32 nt, Homo Sapiens
ccgggaugacagcucucgcccaagccgagcau

SEQ ID NO: 308420 - RNA, 32 nt, Homo Sapiens
guuggaaauaaauguguguguguauauuauua

SEQ ID NO: 308421 - RNA, 32 nt, Homo Sapiens
auugcuacuucuagaacaaaaucuuuagaaua

SEQ ID NO: 308422 - RNA, 32 nt, Homo Sapiens
auucugauucaccagccuggaaacugcuuggu

SEQ ID NO: 308423 - RNA, 32 nt, Homo Sapiens
gcugacccauuuuucugcccucuucuuacccc

SEQ ID NO: 308424 - RNA, 32 nt, Homo Sapiens
uagcagcaaucguguuguuuuauuuuuagaug

SEQ ID NO: 308425 - RNA, 32 nt, Homo Sapiens
cauuucuugugcuacagcaugcaagugagcag

SEQ ID NO: 308426 - RNA, 31 nt, Homo Sapiens
gcaugcacaaagaagagaucaugucagcaua

SEQ ID NO: 308427 - RNA, 32 nt, Homo Sapiens
aauuguuugguaauauagaaagguguaugcaa

SEQ ID NO: 308428 - RNA, 32 nt, Homo Sapiens
uuucacagcugacugaccacuccagaugcccc

SEQ ID NO: 308429 - RNA, 32 nt, Homo Sapiens
gccaccuuucccuuuauuuccggagauauuua

SEQ ID NO: 308430 - RNA, 32 nt, Homo Sapiens
uggauuaaauccaacaguuuauuuguaagccc

SEQ ID NO: 308431 - RNA, 32 nt, Homo Sapiens
aucauucuuugggggcuggcuacauugcuggu

SEQ ID NO: 308432 - RNA, 30 nt, Homo Sapiens
ggcgucuuaaccggcggcgcuaggacuccg

SEQ ID NO: 308433 - RNA, 32 nt, Homo Sapiens
uauguagucaguacuuuucucauguaucuuuc

SEQ ID NO: 308434 - RNA, 32 nt, Homo Sapiens
cugcucauuucccccagccccagccccuggca

SEQ ID NO: 308435 - RNA, 32 nt, Homo Sapiens
agaaagaucugcagggaugaaaaggaagcgcu

SEQ ID NO: 308436 - RNA, 32 nt, Homo Sapiens
uuuuauuuuuugcugcaaccaacguaaaccug

SEQ ID NO: 308437 - RNA, 32 nt, Homo Sapiens
ugguugauaaauacguauaugguccauuccau

SEQ ID NO: 308438 - RNA, 32 nt, Homo Sapiens
accccugggcuuuccugcuggccacggagacu

SEQ ID NO: 308439 - RNA, 32 nt, Homo Sapiens
ugucggugcgaggaauuuugugacaggcucug

SEQ ID NO: 308440 - RNA, 32 nt, Homo Sapiens
gguccccacuugagcaggcacuuggcugggau

SEQ ID NO: 308441 - RNA, 32 nt, Homo Sapiens
ugccugggccugcaggcccaccccagccacca

SEQ ID NO: 308442 - RNA, 32 nt, Homo Sapiens
ucuuagcaggccuggggcuuccagggaggggc

SEQ ID NO: 308443 - RNA, 32 nt, Homo Sapiens
uaggggugcugcauuuugcuuccggggaagga

SEQ ID NO: 308444 - RNA, 31 nt, Homo Sapiens
cuuauguguaacaaaaagaaguggguuuuag

SEQ ID NO: 308445 - RNA, 32 nt, Homo Sapiens
ucauacuaacaaacagaacaagauuuaaggua

SEQ ID NO: 308446 - RNA, 32 nt, Homo Sapiens
gacugcggacccugugggaaaccccgucaaua

SEQ ID NO: 308447 - RNA, 32 nt, Homo Sapiens
caccagaagggagagggaaccagauaugcaga

SEQ ID NO: 308448 - RNA, 32 nt, Homo Sapiens
cauggcgcgaucucgguucacugcagccucca

SEQ ID NO: 308449 - RNA, 32 nt, Homo Sapiens
uaggucccugucuuauacaaccagagaagugg

SEQ ID NO: 308450 - RNA, 32 nt, Homo Sapiens
gaaggaaacaacaaaggaagugagguagugcc

SEQ ID NO: 308451 - RNA, 32 nt, Homo Sapiens
ugaugaugaugauuuuaacaguuuuacuucug

SEQ ID NO: 308452 - RNA, 32 nt, Homo Sapiens
ucuguaaagcaucaucauccuuggagagacug

SEQ ID NO: 308453 - RNA, 32 nt, Homo Sapiens
ccucugcucagguucagcuggacucugccauc

SEQ ID NO: 308454 - RNA, 32 nt, Homo Sapiens
gcaaccuaaaccgaagaccaagaauggcaugc

SEQ ID NO: 308455 - RNA, 32 nt, Homo Sapiens
aaaguuuacagacuuuugauauggaaaaccag

SEQ ID NO: 308456 - RNA, 32 nt, Homo Sapiens
ccggggcgcuggcugccuccugcugagccugg

SEQ ID NO: 308457 - RNA, 32 nt, Homo Sapiens
cuguucaucacacacacccccuuccucccccu

SEQ ID NO: 308458 - RNA, 32 nt, Homo Sapiens
aagaguuuaggaacugguuucugcuuuaauac

SEQ ID NO: 308459 - RNA, 31 nt, Homo Sapiens
aaauaaccaauaauccaaaaaaguucauuuu

SEQ ID NO: 308460 - RNA, 32 nt, Homo Sapiens
uaagacuuuauauaaauguuuaaaacauaggg

SEQ ID NO: 308461 - RNA, 29 nt, Homo Sapiens
caguauaaauaaaauucuuuuguaaggag

SEQ ID NO: 308462 - RNA, 32 nt, Homo Sapiens
cauuugcuuuugauuuuacuggcucauaggug

SEQ ID NO: 308463 - RNA, 32 nt, Homo Sapiens
uaaaaaguagccaggcgugguggugcaugccu

SEQ ID NO: 308464 - RNA, 32 nt, Homo Sapiens
cgggccgcgggagccgcacgcggcgauaugga

SEQ ID NO: 308465 - RNA, 32 nt, Homo Sapiens
agguauaagcccugggccccagaucccuggug

SEQ ID NO: 308466 - RNA, 32 nt, Homo Sapiens
cuguaugucuguagguaggugugugccuuuua

SEQ ID NO: 308467 - RNA, 32 nt, Homo Sapiens
cgggcggcgcgggccuggccccgggauggcua

SEQ ID NO: 308468 - RNA, 32 nt, Homo Sapiens
uauuuucuggaguuaaauuuggaugauuucua

SEQ ID NO: 308469 - RNA, 31 nt, Homo Sapiens
gcugugggcgccucauuucaggcaaguccuc

SEQ ID NO: 308470 - RNA, 32 nt, Homo Sapiens
uaaguuuuucuuuucccccauuaguaaacauu

SEQ ID NO: 308471 - RNA, 32 nt, Homo Sapiens
ugccaugucuccggggaagcccggggcgggcg

SEQ ID NO: 308472 - RNA, 32 nt, Homo Sapiens
agaaguacuuuuuuccuauuauuuuuugcugu

SEQ ID NO: 308473 - RNA, 32 nt, Homo Sapiens
auuaaaaauaauuuauacugaucuauauauuu

SEQ ID NO: 308474 - RNA, 32 nt, Homo Sapiens
aggggcaaggcugcuguuaucaucucauuuua

SEQ ID NO: 308475 - RNA, 32 nt, Homo Sapiens
gggcugcgcgccggcgcgggaccauggagcgc

SEQ ID NO: 308476 - RNA, 32 nt, Homo Sapiens
gccugccgcccggauccccgccuccugggcgg

SEQ ID NO: 308477 - RNA, 32 nt, Homo Sapiens
uuuuuaggugauaaauuuuucuuuaauuccuu

SEQ ID NO: 308478 - RNA, 32 nt, Homo Sapiens
uaucccuugacaaaaauauuuugucuuuuuuc

SEQ ID NO: 308479 - RNA, 32 nt, Homo Sapiens
auaaauauauaaauacauguauguaugucaaa

SEQ ID NO: 308480 - RNA, 32 nt, Homo Sapiens
caaggcccgggcggcgccgauccccgcgggac

SEQ ID NO: 308481 - RNA, 32 nt, Homo Sapiens
aucaccugagcacaacuaccucauggggguuc

SEQ ID NO: 308482 - RNA, 32 nt, Homo Sapiens
ggacccccgcccccugcccuccccucucugca

SEQ ID NO: 308483 - RNA, 32 nt, Homo Sapiens
aauuagguugcagugaaauuuuucucaauuag

SEQ ID NO: 308484 - RNA, 30 nt, Homo Sapiens
ggggggucccuuccgauccucccuccugac

SEQ ID NO: 308485 - RNA, 32 nt, Homo Sapiens
ugcaaagccaaggggcagccuccugucaaggu

SEQ ID NO: 308486 - RNA, 32 nt, Homo Sapiens
uauuuguaaacuaaaaccccuuguuauuugua

SEQ ID NO: 308487 - RNA, 32 nt, Homo Sapiens
uuuauuguuguaagaaaaauaguucaucauca

SEQ ID NO: 308488 - RNA, 32 nt, Homo Sapiens
augaacaugacaauuuucuagaaccugguagc

SEQ ID NO: 308489 - RNA, 32 nt, Homo Sapiens
aucugaguuuaaauguucuguuuaauggccau

SEQ ID NO: 308490 - RNA, 32 nt, Homo Sapiens
auagagacccuuggcuucuccuucuccuacuc

SEQ ID NO: 308491 - RNA, 32 nt, Homo Sapiens
gcuaaaaauggaaaguugaacuggauaaauuc

SEQ ID NO: 308492 - RNA, 32 nt, Homo Sapiens
aucgaggccucgggcccgccccggcccgggag

SEQ ID NO: 308493 - RNA, 32 nt, Homo Sapiens
ccucagagucacaccacuggcugccagucagg

SEQ ID NO: 308494 - RNA, 32 nt, Homo Sapiens
gauacaaaaaauuuucaucuaaaguaauauuu

SEQ ID NO: 308495 - RNA, 32 nt, Homo Sapiens
aauauuucauagucuuacuuccaauugaguua

SEQ ID NO: 308496 - RNA, 32 nt, Homo Sapiens
uuacggggaugugaauaaggcuuuuccuuaag

SEQ ID NO: 308497 - RNA, 32 nt, Homo Sapiens
caagcagacuuggccugggccgggggcggggc

SEQ ID NO: 308498 - RNA, 32 nt, Homo Sapiens
cagccagcuguugguuuggagagccugaagaa

SEQ ID NO: 308499 - RNA, 32 nt, Homo Sapiens
agcauaacuaaauuauuuuaaaaacuaaaaag

SEQ ID NO: 308500 - RNA, 32 nt, Homo Sapiens
ggucaagucucagaucuguauucuaagggcaa

SEQ ID NO: 308501 - RNA, 32 nt, Homo Sapiens
cuucccaggugggcgccggccgccaggccacc

SEQ ID NO: 308502 - RNA, 32 nt, Homo Sapiens
ucauuuuuaagugacaagagacucaccuccaa

SEQ ID NO: 308503 - RNA, 32 nt, Homo Sapiens
aauuuuguuaaaaagcuauaucuucacuguau

SEQ ID NO: 308504 - RNA, 32 nt, Homo Sapiens
uuggguacugugguuucugugcucucuccuuc

SEQ ID NO: 308505 - RNA, 32 nt, Homo Sapiens
gaccagcuaugccugcccucugugggugccuu

SEQ ID NO: 308506 - RNA, 32 nt, Homo Sapiens
cugggucacaagucccuuucuccacgaagccu

SEQ ID NO: 308507 - RNA, 32 nt, Homo Sapiens
acuacugucuuacuucauuaaaauacagagaa

SEQ ID NO: 308508 - RNA, 32 nt, Homo Sapiens
caauaaagcugaacugguguugugaaacagag

SEQ ID NO: 308509 - RNA, 32 nt, Homo Sapiens
cugcagcaugggugcugggcccuccuugcugc

SEQ ID NO: 308510 - RNA, 32 nt, Homo Sapiens
uuuuuaaauaaucgaauacuauuuuauauaug

SEQ ID NO: 308511 - RNA, 32 nt, Homo Sapiens
gguaauucauaaaagaaagguuuaauugacuc

SEQ ID NO: 308512 - RNA, 32 nt, Homo Sapiens
auccacaucuucuguacucguccauucugugu

SEQ ID NO: 308513 - RNA, 32 nt, Homo Sapiens
ugagagaaagacuguacuccauaacugacuau

SEQ ID NO: 308514 - RNA, 32 nt, Homo Sapiens
ucucagcccgccacugccacccggccccgugc

SEQ ID NO: 308515 - RNA, 32 nt, Homo Sapiens
cauguuuagagccauccuuguuuccaaauaug

SEQ ID NO: 308516 - RNA, 32 nt, Homo Sapiens
agguugaaagguuuugguuaugcugaauuuga

SEQ ID NO: 308517 - RNA, 32 nt, Homo Sapiens
cacuggucagggcaguggccaagccugcugug

SEQ ID NO: 308518 - RNA, 32 nt, Homo Sapiens
uuucuaacaaugcaauaaaaccacuaaacuuu

SEQ ID NO: 308519 - RNA, 32 nt, Homo Sapiens
ucccugacugguuauuucugcuguggucauuu

SEQ ID NO: 308520 - RNA, 32 nt, Homo Sapiens
gagacagggucucacuauguugcccaggcugc

SEQ ID NO: 308521 - RNA, 32 nt, Homo Sapiens
accccgagagggcgcacagaccaagcgugagc

SEQ ID NO: 308522 - RNA, 32 nt, Homo Sapiens
gcagaggggauccaacgucagagcuuuuagaa

SEQ ID NO: 308523 - RNA, 32 nt, Homo Sapiens
aacagccagguggugagauggugccuccugcc

SEQ ID NO: 308524 - RNA, 28 nt, Homo Sapiens
aaauuuugaugucgcauuauaaagacau

SEQ ID NO: 308525 - RNA, 32 nt, Homo Sapiens
uuuuaaacauggugugguauucuaaagccuuu

SEQ ID NO: 308526 - RNA, 31 nt, Homo Sapiens
ugaaccuuguaggaaauuccaagggccuuuc

SEQ ID NO: 308527 - RNA, 32 nt, Homo Sapiens
cuccgccaggcaaaaggaagauugucuuuggc

SEQ ID NO: 308528 - RNA, 32 nt, Homo Sapiens
auuagauuuucuuccccuuaaucuugaauaua

SEQ ID NO: 308529 - RNA, 32 nt, Homo Sapiens
auguacuuugaacuaccugacucauuccagca

SEQ ID NO: 308530 - RNA, 32 nt, Homo Sapiens
ccagugaccacgaaggcugugcugcuugcccu

SEQ ID NO: 308531 - RNA, 32 nt, Homo Sapiens
caucccuguccccgucagcagugucugugugu

SEQ ID NO: 308532 - RNA, 32 nt, Homo Sapiens
gacuauucacggucacccacagcuuugaggau

SEQ ID NO: 308533 - RNA, 32 nt, Homo Sapiens
cccuaggaaaauuuuacugcugucuaauuuau

SEQ ID NO: 308534 - RNA, 32 nt, Homo Sapiens
aacauugaucaagauuuguagaccaaccaacc

SEQ ID NO: 308535 - RNA, 32 nt, Homo Sapiens
ggccccaggacagaagcagacagacacggcuc

SEQ ID NO: 308536 - RNA, 32 nt, Homo Sapiens
cuuaggguucucauuuuguaguuucuucccuc

SEQ ID NO: 308537 - RNA, 32 nt, Homo Sapiens
caacccagcugagggucaaggcaaauguccuu

SEQ ID NO: 308538 - RNA, 32 nt, Homo Sapiens
gaagaaaggugcauggacccccugcugcucug

SEQ ID NO: 308539 - RNA, 32 nt, Homo Sapiens
gucaagaacauugaguccagugagauuaagug

SEQ ID NO: 308540 - RNA, 32 nt, Homo Sapiens
aacuaaugaaggguauauaauaaaacaacugg

SEQ ID NO: 308541 - RNA, 32 nt, Homo Sapiens
ccugauugcacaaauggaucuagacagcccca

SEQ ID NO: 308542 - RNA, 32 nt, Homo Sapiens
uaucuugacuaauaacuugaucugaaaauuau

SEQ ID NO: 308543 - RNA, 32 nt, Homo Sapiens
ucaccguccccggcgugcaggauccggggcug

SEQ ID NO: 308544 - RNA, 32 nt, Homo Sapiens
ccggaaagaacaagaaaaaagaacaccuuauu

SEQ ID NO: 308545 - RNA, 32 nt, Homo Sapiens
uucuacagcuuuucuuuuuuucacucauuauu

SEQ ID NO: 308546 - RNA, 32 nt, Homo Sapiens
auuggcuauaaaauauaaaugaugguauuucu

SEQ ID NO: 308547 - RNA, 32 nt, Homo Sapiens
cugugguuauuuauuuuuguuggcugaacaua

SEQ ID NO: 308548 - RNA, 32 nt, Homo Sapiens
uggaugcaauuuccuuuugugcaagcagugca

SEQ ID NO: 308549 - RNA, 32 nt, Homo Sapiens
ucuuuugcagcuugugauuucuuccagcuugg

SEQ ID NO: 308550 - RNA, 32 nt, Homo Sapiens
uauccucacagcagcuggcauucauucccuga

SEQ ID NO: 308551 - RNA, 32 nt, Homo Sapiens
ucauaagugaagcaagaaaugcauuaagaaca

SEQ ID NO: 308552 - RNA, 32 nt, Homo Sapiens
caagucuccagccagcucucccggggaaggga

SEQ ID NO: 308553 - RNA, 32 nt, Homo Sapiens
cuggcgcgggcgggagcugcggcggauacccu

SEQ ID NO: 308554 - RNA, 32 nt, Homo Sapiens
uacgcucugaauagaaacauggcaccaaagaa

SEQ ID NO: 308555 - RNA, 32 nt, Homo Sapiens
aaaucuuucuacaggcaauuaccuccccaaga

SEQ ID NO: 308556 - RNA, 32 nt, Homo Sapiens
ugggccugcuggagcugcugcagccgcacgug

SEQ ID NO: 308557 - RNA, 32 nt, Homo Sapiens
cgcgcugcuuccuacgcucgccggcggagcag

SEQ ID NO: 308558 - RNA, 32 nt, Homo Sapiens
cuauugcccuccccuuguccaacccaccuuug

SEQ ID NO: 308559 - RNA, 32 nt, Homo Sapiens
aaguauuugucaaaauggucauccuggguggu

SEQ ID NO: 308560 - RNA, 31 nt, Homo Sapiens
cacaccucacggagccuggccgcggaccccu

SEQ ID NO: 308561 - RNA, 32 nt, Homo Sapiens
uuuuaagcacauucuccuuccauccacauauu

SEQ ID NO: 308562 - RNA, 32 nt, Homo Sapiens
gguacaugugcuuguuguaacauggguguauu

SEQ ID NO: 308563 - RNA, 32 nt, Homo Sapiens
auggguaaaaauauuucuuuaaaagaaggaug

SEQ ID NO: 308564 - RNA, 32 nt, Homo Sapiens
cagaagacacacuacagaaucuggagauaauu

SEQ ID NO: 308565 - RNA, 32 nt, Homo Sapiens
cuccuucccccaccaggaacagauggaaccug

SEQ ID NO: 308566 - RNA, 32 nt, Homo Sapiens
uggcccuagagcaccaccuuccucuagggaca

SEQ ID NO: 308567 - RNA, 32 nt, Homo Sapiens
agcgugaauauuuuguuuuuuauuauagacag

SEQ ID NO: 308568 - RNA, 32 nt, Homo Sapiens
ucuucucugcccucucucccaaggucugccca

SEQ ID NO: 308569 - RNA, 32 nt, Homo Sapiens
uguuguuaaugcagagaacaaacucuguuuag

SEQ ID NO: 308570 - RNA, 32 nt, Homo Sapiens
guauguggugggggaauaaacacacuuacuug

SEQ ID NO: 308571 - RNA, 32 nt, Homo Sapiens
agaugaguaaguuaagaguuggucaucuggaa

SEQ ID NO: 308572 - RNA, 30 nt, Homo Sapiens
cuguguguuacuacuuacaagagucuugaa

SEQ ID NO: 308573 - RNA, 32 nt, Homo Sapiens
uuuaauagugucauaaagauuauaauaugugc

SEQ ID NO: 308574 - RNA, 32 nt, Homo Sapiens
gauaaaauagagaaaagggccgaggaaagcag

SEQ ID NO: 308575 - RNA, 32 nt, Homo Sapiens
guuagaaacaagguuaauagccaggcauggug

SEQ ID NO: 308576 - RNA, 32 nt, Homo Sapiens
ccccaccgcgucggcgggaagcgugggaggug

SEQ ID NO: 308577 - RNA, 32 nt, Homo Sapiens
aaagcaacuuuacugagacaauguagaaagaa

SEQ ID NO: 308578 - RNA, 32 nt, Homo Sapiens
agggaaagcaagaaggcuggagggauccagcg

SEQ ID NO: 308579 - RNA, 32 nt, Homo Sapiens
uucugcaugccugguaaaguccagccaaggcu

SEQ ID NO: 308580 - RNA, 32 nt, Homo Sapiens
aggccacuuuuggaaguaggcguuaucuagug

SEQ ID NO: 308581 - RNA, 32 nt, Homo Sapiens
agguuauccuaauagaguaauucuucacuuug

SEQ ID NO: 308582 - RNA, 32 nt, Homo Sapiens
cagcaagauggugguguaggggugugggacag

SEQ ID NO: 308583 - RNA, 32 nt, Homo Sapiens
uaauuuuuccauuuguucugcauuuugauucu

SEQ ID NO: 308584 - RNA, 32 nt, Homo Sapiens
aaccauugcuacuucuagaacaaaaucuuuag

SEQ ID NO: 308585 - RNA, 32 nt, Homo Sapiens
cuguuggcuguacuuuuuugauaauguaauuc

SEQ ID NO: 308586 - RNA, 32 nt, Homo Sapiens
gugggccggcgcccaccaugcuccugggcgcc

SEQ ID NO: 308587 - RNA, 32 nt, Homo Sapiens
cuuuuagcaauauacauaggaguggaauugcu

SEQ ID NO: 308588 - RNA, 32 nt, Homo Sapiens
ggaggggggugcccuccuuccuuaggaccugg

SEQ ID NO: 308589 - RNA, 32 nt, Homo Sapiens
ucaacaagauuucagaaagguauaaucaugua

SEQ ID NO: 308590 - RNA, 32 nt, Homo Sapiens
uguuaauugcauuuuuacacaugaugcauuca

SEQ ID NO: 308591 - RNA, 32 nt, Homo Sapiens
uucugagggccccuuuguguccugauggcugg

SEQ ID NO: 308592 - RNA, 32 nt, Homo Sapiens
gacucuucccuucccuucuccuuucccuggaa

SEQ ID NO: 308593 - RNA, 32 nt, Homo Sapiens
guucaagaucccguaacugcucaacccaaauu

SEQ ID NO: 308594 - RNA, 32 nt, Homo Sapiens
ggcugaggccuccugcccuugcccugugagag

SEQ ID NO: 308595 - RNA, 32 nt, Homo Sapiens
acuugacgguugagacaaaaaauacaguagag

SEQ ID NO: 308596 - RNA, 32 nt, Homo Sapiens
gagaggagggauccaguggggccgugggcugg

SEQ ID NO: 308597 - RNA, 32 nt, Homo Sapiens
accucugugucggccuuuaacaaaaucauagc

SEQ ID NO: 308598 - RNA, 32 nt, Homo Sapiens
ucugaugaauucugagauaaucuccuaaauca

SEQ ID NO: 308599 - RNA, 32 nt, Homo Sapiens
ggaagaaagcuuuacacacgucuugcaccaag

SEQ ID NO: 308600 - RNA, 32 nt, Homo Sapiens
aaaccacugaagggcucuggcuuccacaccga

SEQ ID NO: 308601 - RNA, 32 nt, Homo Sapiens
cuuugagucccauggccgacaccuggaaugcg

SEQ ID NO: 308602 - RNA, 32 nt, Homo Sapiens
guccgccuccuggccuccuggcugaggggaag

SEQ ID NO: 308603 - RNA, 32 nt, Homo Sapiens
cuaaaugcuguaauuugaagccauuuccauaa

SEQ ID NO: 308604 - RNA, 32 nt, Homo Sapiens
aaagaacgccaggccugggaggaggcaggggg

SEQ ID NO: 308605 - RNA, 32 nt, Homo Sapiens
ccggcugcagggauggcggggagggguaagcu

SEQ ID NO: 308606 - RNA, 32 nt, Homo Sapiens
gcguggucgggcgggucgccagcggggcaggg

SEQ ID NO: 308607 - RNA, 32 nt, Homo Sapiens
ugggggcgccaucuccucuuccggccccuggg

SEQ ID NO: 308608 - RNA, 32 nt, Homo Sapiens
uuuagcauuucauuaucuaacaaaauuaauau

SEQ ID NO: 308609 - RNA, 32 nt, Homo Sapiens
gagcuaagcgagacggcgacggcggcagucgu

SEQ ID NO: 308610 - RNA, 32 nt, Homo Sapiens
ccgcacuuaaggauuaaccaggucguccaagc

SEQ ID NO: 308611 - RNA, 32 nt, Homo Sapiens
gcugacggcagagguggagaacgacaagcagc

SEQ ID NO: 308612 - RNA, 32 nt, Homo Sapiens
uaaagaaaaaauuuaucucuuugguccuugca

SEQ ID NO: 308613 - RNA, 32 nt, Homo Sapiens
gguuuugugaaauaaacucaaguacaaagcaa

SEQ ID NO: 308614 - RNA, 31 nt, Homo Sapiens
cgagcgcccugcagccaacgugagcgccgcc

SEQ ID NO: 308615 - RNA, 28 nt, Homo Sapiens
gagaacagcuggcuaaggaugacucuaa

SEQ ID NO: 308616 - RNA, 32 nt, Homo Sapiens
caaaggggucagcagggauggcguggagucau

SEQ ID NO: 308617 - RNA, 32 nt, Homo Sapiens
uccuuagguggugggaaaggggggucccugug

SEQ ID NO: 308618 - RNA, 32 nt, Homo Sapiens
uuauaauuuuauaaaaauuauucaucgggagu

SEQ ID NO: 308619 - RNA, 32 nt, Homo Sapiens
guuauacuuaauuugcaguagauuuuuaaaug

SEQ ID NO: 308620 - RNA, 32 nt, Homo Sapiens
ucaaaucaggacuuaaaucauaggcaccacau

SEQ ID NO: 308621 - RNA, 32 nt, Homo Sapiens
cgcaagaaagagccuccgcgggccucgccccc

SEQ ID NO: 308622 - RNA, 32 nt, Homo Sapiens
gccaugcccaccgccccuggacaggcuucguc

SEQ ID NO: 308623 - RNA, 32 nt, Homo Sapiens
acaucuuccuccgcagacccaggcccuccgga

SEQ ID NO: 308624 - RNA, 32 nt, Homo Sapiens
uaaagggcgcgguggcuccacucgccccauuu

SEQ ID NO: 308625 - RNA, 32 nt, Homo Sapiens
ucucauuaaauauaaaauauuuuguaaugcug

SEQ ID NO: 308626 - RNA, 32 nt, Homo Sapiens
cucugggauucuggcaagguaccgucacugac

SEQ ID NO: 308627 - RNA, 32 nt, Homo Sapiens
gccgggcgcggugccucaugccugcaauccua

SEQ ID NO: 308628 - RNA, 32 nt, Homo Sapiens
gcucuguguuagagauaugaaaugguguuuga

SEQ ID NO: 308629 - RNA, 32 nt, Homo Sapiens
aacccagcaacgcuacuuucuaagggcauuuu

SEQ ID NO: 308630 - RNA, 32 nt, Homo Sapiens
cgagcgcauucgcgcuggagcuugcgaggagc

SEQ ID NO: 308631 - RNA, 32 nt, Homo Sapiens
ggcgcggaggccgggcgcugacggugugugug

SEQ ID NO: 308632 - RNA, 32 nt, Homo Sapiens
auuuucauacucuucccagggauuagugaugg

SEQ ID NO: 308633 - RNA, 32 nt, Homo Sapiens
ccccuccaggacccggucccccugcugccccu

SEQ ID NO: 308634 - RNA, 32 nt, Homo Sapiens
cccacaccagggcccaccauggagcuuguguu

SEQ ID NO: 308635 - RNA, 32 nt, Homo Sapiens
ccccccaaccucccucccggacggggcggcug

SEQ ID NO: 308636 - RNA, 28 nt, Homo Sapiens
gcuaagaguccuaccaggaucauucacc

SEQ ID NO: 308637 - RNA, 32 nt, Homo Sapiens
uuaagauuaauguagcagaaauuucuuggaau

SEQ ID NO: 308638 - RNA, 32 nt, Homo Sapiens
cagccuggggucugccagccagcccuccuccc

SEQ ID NO: 308639 - RNA, 32 nt, Homo Sapiens
cacuggacugaccugcccugagcggggaugca

SEQ ID NO: 308640 - RNA, 32 nt, Homo Sapiens
cuuaggucacgaguuugagaccagccugacca

SEQ ID NO: 308641 - RNA, 32 nt, Homo Sapiens
uguagcuguggcggcuggggcugcagccugca

SEQ ID NO: 308642 - RNA, 32 nt, Homo Sapiens
ucuauguauaauagggauauuuuucuguagau

SEQ ID NO: 308643 - RNA, 32 nt, Homo Sapiens
ugggccgccguaagcccggccuaggggcagcu

SEQ ID NO: 308644 - RNA, 32 nt, Homo Sapiens
aagagaaauaccagguaggaaagaagaguuac

SEQ ID NO: 308645 - RNA, 32 nt, Homo Sapiens
ugcgugaucucaagaccuccagccagaagucc

SEQ ID NO: 308646 - RNA, 32 nt, Homo Sapiens
cauggauaagacagcaggcuuugauuauagag

SEQ ID NO: 308647 - RNA, 32 nt, Homo Sapiens
aagguauauauucuauuuguauggaauucuua

SEQ ID NO: 308648 - RNA, 32 nt, Homo Sapiens
ccgccgcuccauccccagccccggccccgcau

SEQ ID NO: 308649 - RNA, 27 nt, Homo Sapiens
auuuccuguuaauucugggagacaaug

SEQ ID NO: 308650 - RNA, 32 nt, Homo Sapiens
acugggaagaacacagcccaugugcucugcau

SEQ ID NO: 308651 - RNA, 32 nt, Homo Sapiens
acuccugcuguaaaucuuuuucaaaaucuuca

SEQ ID NO: 308652 - RNA, 32 nt, Homo Sapiens
gagugucgugccuacuuaauucugauaaaccu

SEQ ID NO: 308653 - RNA, 32 nt, Homo Sapiens
agagggagcucuucugggcuucuuucucccca

SEQ ID NO: 308654 - RNA, 32 nt, Homo Sapiens
ccccuaaugaauuaaacacaaacagcgacgga

SEQ ID NO: 308655 - RNA, 32 nt, Homo Sapiens
uccuggguucaagugauucuucugccucaacc

SEQ ID NO: 308656 - RNA, 32 nt, Homo Sapiens
caaagggaaaauucuauacaacucaaucuaag

SEQ ID NO: 308657 - RNA, 32 nt, Homo Sapiens
acaaggucaggagaucaagaccauccuggcua

SEQ ID NO: 308658 - RNA, 32 nt, Homo Sapiens
guguuucgcauuaagcacacacaucuggcccu

SEQ ID NO: 308659 - RNA, 32 nt, Homo Sapiens
caauaguugcuguccccuuccaggggucaccu

SEQ ID NO: 308660 - RNA, 32 nt, Homo Sapiens
ucucaguucucuucuuucuuuagcaaaucaga

SEQ ID NO: 308661 - RNA, 32 nt, Homo Sapiens
uaacaaaaggucugaaggugucaggaccucuu

SEQ ID NO: 308662 - RNA, 32 nt, Homo Sapiens
agcccgccugcgccgcuugggacgccucugcc

SEQ ID NO: 308663 - RNA, 32 nt, Homo Sapiens
ucuuuggccaccucugaucucaucugcuaaaa

SEQ ID NO: 308664 - RNA, 32 nt, Homo Sapiens
gaagcauagcccuuaacaaaucuucagcuugu

SEQ ID NO: 308665 - RNA, 32 nt, Homo Sapiens
uguuguuauggcaaguuuuugguaaugaugau

SEQ ID NO: 308666 - RNA, 32 nt, Homo Sapiens
uauccccaagccaaacagcacaugacacacga

SEQ ID NO: 308667 - RNA, 32 nt, Homo Sapiens
uguuaccaaugccucagcaaccacugaaaguu

SEQ ID NO: 308668 - RNA, 32 nt, Homo Sapiens
gugucucccucauuggucuugagcacuugcuc

SEQ ID NO: 308669 - RNA, 32 nt, Homo Sapiens
uugucuggggccuggggccuggggaaagggcu

SEQ ID NO: 308670 - RNA, 32 nt, Homo Sapiens
cgcaccccaagcacagguguugccaguaugca

SEQ ID NO: 308671 - RNA, 32 nt, Homo Sapiens
ggcgccgcccuccgcccuccccaacagcaggc

SEQ ID NO: 308672 - RNA, 32 nt, Homo Sapiens
cuugugagauaguuuaagauauuuuuauguga

SEQ ID NO: 308673 - RNA, 32 nt, Homo Sapiens
uaauuuguuuuuauuuauucugagaaguugag

SEQ ID NO: 308674 - RNA, 32 nt, Homo Sapiens
ggaagaugaugauguaguggcuccuaaacuac

SEQ ID NO: 308675 - RNA, 32 nt, Homo Sapiens
gcgcuccaguugcacaaagcugagcuccuguu

SEQ ID NO: 308676 - RNA, 32 nt, Homo Sapiens
guaguauucaugaacgacacagccaaacagca

SEQ ID NO: 308677 - RNA, 30 nt, Homo Sapiens
cacaaacacugugcuuuccaucuuaaaauc

SEQ ID NO: 308678 - RNA, 32 nt, Homo Sapiens
aaguggaugucauuuucagcaaugcaaaaaug

SEQ ID NO: 308679 - RNA, 32 nt, Homo Sapiens
guccauccacacuucauguacgacaggccugu

SEQ ID NO: 308680 - RNA, 32 nt, Homo Sapiens
acggaucugcugggcucugccuuaaacacaca

SEQ ID NO: 308681 - RNA, 32 nt, Homo Sapiens
cagguagcagcaugcagccgccuccaagucug

SEQ ID NO: 308682 - RNA, 32 nt, Homo Sapiens
cggaucugagcagaagaaaugcgaguggagag

SEQ ID NO: 308683 - RNA, 32 nt, Homo Sapiens
ucgucacuuuugcuguggccagggccccaccu

SEQ ID NO: 308684 - RNA, 32 nt, Homo Sapiens
acgugaagccuauuuaaaaugagccugugacg

SEQ ID NO: 308685 - RNA, 32 nt, Homo Sapiens
aauuugagaacaaaaugaacaguauggaaaaa

SEQ ID NO: 308686 - RNA, 32 nt, Homo Sapiens
ggccaggaugcugaagaagcagucugcagggc

SEQ ID NO: 308687 - RNA, 32 nt, Homo Sapiens
cuagcuccaaaauaaccacuggguggaggguc

SEQ ID NO: 308688 - RNA, 32 nt, Homo Sapiens
ggcugauuccaaggggcuuaugugugccaagu

SEQ ID NO: 308689 - RNA, 32 nt, Homo Sapiens
gaaggguguuuuuuuucuuuuaaauguaauac

SEQ ID NO: 308690 - RNA, 32 nt, Homo Sapiens
gagucgcuguaaaaaaugcugccguuacuauu

SEQ ID NO: 308691 - RNA, 32 nt, Homo Sapiens
cccaccccugucacuacggccucaccucccac

SEQ ID NO: 308692 - RNA, 32 nt, Homo Sapiens
uggaaggaggaugaaucugugcucucuccucc

SEQ ID NO: 308693 - RNA, 32 nt, Homo Sapiens
acuacaucauggugcuggccuggggcuucuau

SEQ ID NO: 308694 - RNA, 32 nt, Homo Sapiens
gauggcaggaggauggagaagugccagcagcu

SEQ ID NO: 308695 - RNA, 32 nt, Homo Sapiens
uugguuuucuagguuguucaccucaagugcau

SEQ ID NO: 308696 - RNA, 31 nt, Homo Sapiens
aaucaggcaugaguuacagugcuguuggcca

SEQ ID NO: 308697 - RNA, 32 nt, Homo Sapiens
uguuggagggguuaaauuuggaucuacuagug

SEQ ID NO: 308698 - RNA, 32 nt, Homo Sapiens
uuuuacuaauaaaauuuaaaagucuugugaaa

SEQ ID NO: 308699 - RNA, 32 nt, Homo Sapiens
aagacacaacaguagggacuagcugaguuaga

SEQ ID NO: 308700 - RNA, 32 nt, Homo Sapiens
gccaguagcuaauuuguugcucuauguaugau

SEQ ID NO: 308701 - RNA, 32 nt, Homo Sapiens
aaacaaaagacauagaugguagacuuuuauua

SEQ ID NO: 308702 - RNA, 32 nt, Homo Sapiens
aagcccaggaccagauggugaauucuaccaaa

SEQ ID NO: 308703 - RNA, 32 nt, Homo Sapiens
guuuccuuauacuccaccccuuucucaacggu

SEQ ID NO: 308704 - RNA, 32 nt, Homo Sapiens
gagcgcguagccggagcgccuggggaaggcgg

SEQ ID NO: 308705 - RNA, 32 nt, Homo Sapiens
uaaagauccaacaacaucuggauuuucucaga

SEQ ID NO: 308706 - RNA, 32 nt, Homo Sapiens
guguucucugccuuguaauuuucuguuacugc

SEQ ID NO: 308707 - RNA, 32 nt, Homo Sapiens
cugcggggccaagaagaaagugcuaagcugag

SEQ ID NO: 308708 - RNA, 32 nt, Homo Sapiens
gggaagaccugauuuucgcuugaggcauuuuu

SEQ ID NO: 308709 - RNA, 32 nt, Homo Sapiens
ccuccuguuuaaaauuuccacugauagcucuc

SEQ ID NO: 308710 - RNA, 32 nt, Homo Sapiens
uguucuaaccucaguaaugcaucuaccugaga

SEQ ID NO: 308711 - RNA, 31 nt, Homo Sapiens
aauguggagccccagagggacauuuuaucuc

SEQ ID NO: 308712 - RNA, 32 nt, Homo Sapiens
uggaccuggcgagggagggacugagcgccagc

SEQ ID NO: 308713 - RNA, 32 nt, Homo Sapiens
auauaugcuauuucuuucauucuugcugguuu

SEQ ID NO: 308714 - RNA, 32 nt, Homo Sapiens
cccaggggucaggugaacagccaggcggcuaa

SEQ ID NO: 308715 - RNA, 32 nt, Homo Sapiens
cucugccuggagugggggcgccgggcacuguc

SEQ ID NO: 308716 - RNA, 32 nt, Homo Sapiens
ucccagcgcgggggcucuggcuuacccugcaa

SEQ ID NO: 308717 - RNA, 32 nt, Homo Sapiens
ugaacaaaugacuuaaugcuuuuuaagcacgu

SEQ ID NO: 308718 - RNA, 32 nt, Homo Sapiens
caaugaagaugaugaagaagauguaguggauu

SEQ ID NO: 308719 - RNA, 32 nt, Homo Sapiens
gauacauuaggagcuucaaacacauauaauuu

SEQ ID NO: 308720 - RNA, 32 nt, Homo Sapiens
ccauccaacugggaaauggggagaagcaaagc

SEQ ID NO: 308721 - RNA, 32 nt, Homo Sapiens
guaccuggcuggagccgagcuggugggcggcc

SEQ ID NO: 308722 - RNA, 32 nt, Homo Sapiens
gagucgaggaggagguggauguggcagcugag

SEQ ID NO: 308723 - RNA, 32 nt, Homo Sapiens
uguagacauuguuuuuauuaaucuuuuguuug

SEQ ID NO: 308724 - RNA, 32 nt, Homo Sapiens
gaugcagccgucucgcuugaguguguuguguu

SEQ ID NO: 308725 - RNA, 32 nt, Homo Sapiens
ccggaccgugcaguucucugcaggaccaggcc

SEQ ID NO: 308726 - RNA, 30 nt, Homo Sapiens
gagagaccauagggugaugaguuugggaaa

SEQ ID NO: 308727 - RNA, 30 nt, Homo Sapiens
aaagaagugagaauggggguagccaaguga

SEQ ID NO: 308728 - RNA, 32 nt, Homo Sapiens
guuaauaaacucuguuucugacucucaaaaaa

SEQ ID NO: 308729 - RNA, 32 nt, Homo Sapiens
cguuucugucugugucccauccugcuguccuu

SEQ ID NO: 308730 - RNA, 32 nt, Homo Sapiens
ccuucgcgggccaccggcgccaugggccagug

SEQ ID NO: 308731 - RNA, 32 nt, Homo Sapiens
ccagugaucucuccggccuccugguucccaca

SEQ ID NO: 308732 - RNA, 32 nt, Homo Sapiens
cgacuuucgguccucgacgcgccccgccccac

SEQ ID NO: 308733 - RNA, 32 nt, Homo Sapiens
cccggugcucagcuaccacccggcucccagcg

SEQ ID NO: 308734 - RNA, 32 nt, Homo Sapiens
ccccgccgcggauccuggccgcugcucuccag

SEQ ID NO: 308735 - RNA, 32 nt, Homo Sapiens
uuucaccauggaugaaacuauaacuuaaagau

SEQ ID NO: 308736 - RNA, 32 nt, Homo Sapiens
aucacucuccuuccucgggcugccgggagucc

SEQ ID NO: 308737 - RNA, 32 nt, Homo Sapiens
cuaacaaugaaguaucucuguauaagcuuaug

SEQ ID NO: 308738 - RNA, 32 nt, Homo Sapiens
gugcccgucgcaugcuggccgggugagcggcc

SEQ ID NO: 308739 - RNA, 32 nt, Homo Sapiens
gcgggcgggaggcgcugcgaggcgcugcuggc

SEQ ID NO: 308740 - RNA, 32 nt, Homo Sapiens
ggccucaggugauccucuucccucagcuuccc

SEQ ID NO: 308741 - RNA, 32 nt, Homo Sapiens
gcacacucccgagacggcacugagagagcgca

SEQ ID NO: 308742 - RNA, 32 nt, Homo Sapiens
ccccacccaucccaucuccaacccuagucuuc

SEQ ID NO: 308743 - RNA, 32 nt, Homo Sapiens
auggaagucaacaguaaugaaaaggaaaguug

SEQ ID NO: 308744 - RNA, 28 nt, Homo Sapiens
gccaaaggagauuaacauuugagucagg

SEQ ID NO: 308745 - RNA, 32 nt, Homo Sapiens
aagugguuugaaaaugaaaugggaaaauacac

SEQ ID NO: 308746 - RNA, 32 nt, Homo Sapiens
auaugcaaggcgguacacuacgcacuggacag

SEQ ID NO: 308747 - RNA, 32 nt, Homo Sapiens
uuucacaaagauuuuuguacaaguguagcuau

SEQ ID NO: 308748 - RNA, 30 nt, Homo Sapiens
gggguuucggcggccgggagggaguugucg

SEQ ID NO: 308749 - RNA, 32 nt, Homo Sapiens
ggguggguguugagacccccucagaccagcac

SEQ ID NO: 308750 - RNA, 32 nt, Homo Sapiens
gccugccauggggcugcccgaggggugcucca

SEQ ID NO: 308751 - RNA, 32 nt, Homo Sapiens
gaucccggguggcggcggcaacggcgguggug

SEQ ID NO: 308752 - RNA, 32 nt, Homo Sapiens
uucuagaaguugugaaauagguccugcacuuu

SEQ ID NO: 308753 - RNA, 32 nt, Homo Sapiens
cuccagccguggccccagcgcgcacgggcgau

SEQ ID NO: 308754 - RNA, 32 nt, Homo Sapiens
ugaacauacuuauacucaggaaguauugauug

SEQ ID NO: 308755 - RNA, 32 nt, Homo Sapiens
gaaaccugccugggcucugcccuuagucauga

SEQ ID NO: 308756 - RNA, 32 nt, Homo Sapiens
auauauacauauauacaguauuugaguuccuc

SEQ ID NO: 308757 - RNA, 32 nt, Homo Sapiens
gaaagaggccugcuaggcagggguggcggagg

SEQ ID NO: 308758 - RNA, 32 nt, Homo Sapiens
ggcaucuacguggauggcgcaggccgcaaguc

SEQ ID NO: 308759 - RNA, 32 nt, Homo Sapiens
acacuguauuuguaucucugaagcauguuuca

SEQ ID NO: 308760 - RNA, 32 nt, Homo Sapiens
agggccuuguccugggucugugucagcgggug

SEQ ID NO: 308761 - RNA, 32 nt, Homo Sapiens
cagcagccugcagccgccgccggguugugccu

SEQ ID NO: 308762 - RNA, 32 nt, Homo Sapiens
agcauuaaaaauuauuuuucuuaaaaucucuu

SEQ ID NO: 308763 - RNA, 32 nt, Homo Sapiens
cacccaccaggcggcccccuucggagcccccg

SEQ ID NO: 308764 - RNA, 32 nt, Homo Sapiens
cccccucgccucccggcccccuuccuuaaugg

SEQ ID NO: 308765 - RNA, 32 nt, Homo Sapiens
cccaucccaucccaucccaucccaucccgcuc

SEQ ID NO: 308766 - RNA, 32 nt, Homo Sapiens
uaacuggcagauccuccugucuggagguacca

SEQ ID NO: 308767 - RNA, 32 nt, Homo Sapiens
ccacguggcugagacuacaggcgcuugccacu

SEQ ID NO: 308768 - RNA, 32 nt, Homo Sapiens
ccuguccacugcccccuccccauccccagccc

SEQ ID NO: 308769 - RNA, 32 nt, Homo Sapiens
gagccacugcgcccggcccaaaucuuuuauuu

SEQ ID NO: 308770 - RNA, 32 nt, Homo Sapiens
aggaggcugaggugagaggauuccuugaggcc

SEQ ID NO: 308771 - RNA, 32 nt, Homo Sapiens
cugggacauguucugaaaaaugugucauuaca

SEQ ID NO: 308772 - RNA, 32 nt, Homo Sapiens
cagccccgcgcgccggccgagucgcugagccg

SEQ ID NO: 308773 - RNA, 32 nt, Homo Sapiens
aggaggccgcguguccagccgcgggcaagaga

SEQ ID NO: 308774 - RNA, 32 nt, Homo Sapiens
auaaaucaaaaauuucugugaagaugggaaau

SEQ ID NO: 308775 - RNA, 32 nt, Homo Sapiens
aauuugagagcagguagacuacaggguaguuu

SEQ ID NO: 308776 - RNA, 32 nt, Homo Sapiens
cugccaacccccaccccccauaaucugacuca

SEQ ID NO: 308777 - RNA, 32 nt, Homo Sapiens
uauucuuuccucuuuuucauuuucauucucag

SEQ ID NO: 308778 - RNA, 32 nt, Homo Sapiens
gaggugaugugccagguauggaccucaggccu

SEQ ID NO: 308779 - RNA, 32 nt, Homo Sapiens
aauggaugaaaauggaauaaaaauaauauccu

SEQ ID NO: 308780 - RNA, 32 nt, Homo Sapiens
ccgacgggccccagaggacccacgccugagcc

SEQ ID NO: 308781 - RNA, 32 nt, Homo Sapiens
ugcagccugaguuuuuaaaaaacagaaaauga

SEQ ID NO: 308782 - RNA, 32 nt, Homo Sapiens
aaacuaugaacuaauaaauauuuguugauuua

SEQ ID NO: 308783 - RNA, 32 nt, Homo Sapiens
ccugcugccucauggcggccaucggaguucac

SEQ ID NO: 308784 - RNA, 32 nt, Homo Sapiens
agcucuuauagcaaccuuaugaggaaggcauu

SEQ ID NO: 308785 - RNA, 32 nt, Homo Sapiens
ucccuggcggugcggcaggcccucgccucauc

SEQ ID NO: 308786 - RNA, 32 nt, Homo Sapiens
aaggcucuuccuccacccacagaucagugcug

SEQ ID NO: 308787 - RNA, 32 nt, Homo Sapiens
aggaguucaaccagccuggacaacaaagcaag

SEQ ID NO: 308788 - RNA, 32 nt, Homo Sapiens
uggcccccaagcagagcggguaaagugcaaug

SEQ ID NO: 308789 - RNA, 32 nt, Homo Sapiens
uccaguaggccuggccggggcccugaggggcg

SEQ ID NO: 308790 - RNA, 32 nt, Homo Sapiens
aggccguggugucucccaugucuguguucuua

SEQ ID NO: 308791 - RNA, 32 nt, Homo Sapiens
ggacgccgcgcggggcagugugggacuggggc

SEQ ID NO: 308792 - RNA, 32 nt, Homo Sapiens
guuuggcaggacugccauuaucuggggugugg

SEQ ID NO: 308793 - RNA, 32 nt, Homo Sapiens
ggccuuugcuuggucaggggccccacuucuua

SEQ ID NO: 308794 - RNA, 32 nt, Homo Sapiens
cgucgacgccggggagcgcccugggguuggga

SEQ ID NO: 308795 - RNA, 32 nt, Homo Sapiens
ucugcccagggccagccagguucugcugggaa

SEQ ID NO: 308796 - RNA, 32 nt, Homo Sapiens
gcacugaaauguuuauuuauuguugauaaauu

SEQ ID NO: 308797 - RNA, 32 nt, Homo Sapiens
gauuucauuucccuccucucucccaggguacc

SEQ ID NO: 308798 - RNA, 32 nt, Homo Sapiens
aucaccaaaugaucuggaaugugcuaugcgau

SEQ ID NO: 308799 - RNA, 32 nt, Homo Sapiens
uuacucacaccuguaaucccagcacuuuggga

SEQ ID NO: 308800 - RNA, 32 nt, Homo Sapiens
gcaggaaaccaucaagaucucauuuuacagcu

SEQ ID NO: 308801 - RNA, 32 nt, Homo Sapiens
cuaaugaaaggaugaaguaaauacuacucagu

SEQ ID NO: 308802 - RNA, 32 nt, Homo Sapiens
gcuaugaauauaguaccugaaaaaaugccaag

SEQ ID NO: 308803 - RNA, 32 nt, Homo Sapiens
uggacugugcagccuucgggcacccggcacag

SEQ ID NO: 308804 - RNA, 32 nt, Homo Sapiens
uucugacuuuuguggaucauuuugcacauagc

SEQ ID NO: 308805 - RNA, 32 nt, Homo Sapiens
ucgccucccagggccagaagcuggggaugucc

SEQ ID NO: 308806 - RNA, 32 nt, Homo Sapiens
cuagcuacagcgccugcugccugagcccgcca

SEQ ID NO: 308807 - RNA, 32 nt, Homo Sapiens
ggggcgcuggcugccuccugcugagccuggcg

SEQ ID NO: 308808 - RNA, 32 nt, Homo Sapiens
ccgcuccgcucgucucguugguuccggagguc

SEQ ID NO: 308809 - RNA, 32 nt, Homo Sapiens
uagagugcguggcacgggccccccgcccccga

SEQ ID NO: 308810 - RNA, 32 nt, Homo Sapiens
aucaagaauauaaguauguccguggaaggaga

SEQ ID NO: 308811 - RNA, 32 nt, Homo Sapiens
ugcgcaggcccaucgugauaaggaauuagguc

SEQ ID NO: 308812 - RNA, 32 nt, Homo Sapiens
ccuagauggauugccaaucuucugccaucaau

SEQ ID NO: 308813 - RNA, 32 nt, Homo Sapiens
gagcggggcccugcucccuuucucaagggaac

SEQ ID NO: 308814 - RNA, 32 nt, Homo Sapiens
ccugacucgcggagcauccuccucggagaggc

SEQ ID NO: 308815 - RNA, 32 nt, Homo Sapiens
uggauauaauccucagaaauaaugcacacuag

SEQ ID NO: 308816 - RNA, 32 nt, Homo Sapiens
uagggagcugucuaauccaagucccaggcuuu

SEQ ID NO: 308817 - RNA, 32 nt, Homo Sapiens
uucuacagggacaacagaaacacacaaaagug

SEQ ID NO: 308818 - RNA, 32 nt, Homo Sapiens
augcauacagcuguaauuuaacccagagcagc

SEQ ID NO: 308819 - RNA, 32 nt, Homo Sapiens
cgcgcacacacacacacacacacacacacaca

SEQ ID NO: 308820 - RNA, 32 nt, Homo Sapiens
cuaauaaagucuuuuuauaauuauuauuauaa

SEQ ID NO: 308821 - RNA, 32 nt, Homo Sapiens
aaaaggaaagagaaaauacauauuucuucccc

SEQ ID NO: 308822 - RNA, 32 nt, Homo Sapiens
aaguuuggaagacaggcuugccgaaauugagg

SEQ ID NO: 308823 - RNA, 32 nt, Homo Sapiens
ucaagagaugacugagaaggagaugguaaguu

SEQ ID NO: 308824 - RNA, 32 nt, Homo Sapiens
gcgucuccaucuaccacccccaaauaccacca

SEQ ID NO: 308825 - RNA, 32 nt, Homo Sapiens
auuuguacaaggaaaaaccagccacucagcca

SEQ ID NO: 308826 - RNA, 32 nt, Homo Sapiens
ugccuaucucuuggucuauuaaggaaagaagc

SEQ ID NO: 308827 - RNA, 31 nt, Homo Sapiens
uauuuaaaugacaggaagguauauuaaugua

SEQ ID NO: 308828 - RNA, 32 nt, Homo Sapiens
ucuuuuauaaaauuauuuuauaaaaaacaaug

SEQ ID NO: 308829 - RNA, 32 nt, Homo Sapiens
gcuccuugcuguuuucugaugauuugggggcu

SEQ ID NO: 308830 - RNA, 32 nt, Homo Sapiens
ggccgacugugagcugcagauaaggcuaucag

SEQ ID NO: 308831 - RNA, 32 nt, Homo Sapiens
cuauucauuuuuuuuucuugauuuuucucacu

SEQ ID NO: 308832 - RNA, 32 nt, Homo Sapiens
aaaauaaauaugugcuauuuccuuggcgaguu

SEQ ID NO: 308833 - RNA, 32 nt, Homo Sapiens
uugauacuuuuauuguuauaccuuuuugaaca

SEQ ID NO: 308834 - RNA, 32 nt, Homo Sapiens
ccuggaucuccugaggcccaccuuccuccuuc

SEQ ID NO: 308835 - RNA, 32 nt, Homo Sapiens
cuccggaggaggaggcggaggccgaggaccag

SEQ ID NO: 308836 - RNA, 32 nt, Homo Sapiens
aguucgaaggugccucuugucacacugaugga

SEQ ID NO: 308837 - RNA, 32 nt, Homo Sapiens
uggaucuugcauuccugauuuauuuuuauuuu

SEQ ID NO: 308838 - RNA, 32 nt, Homo Sapiens
accaagcuggaacuacccaucuaggccucucu

SEQ ID NO: 308839 - RNA, 32 nt, Homo Sapiens
ugugagggaccggucggaagggcgucgcgcgg

SEQ ID NO: 308840 - RNA, 32 nt, Homo Sapiens
agugucugucugcugagcggcgcugugaccug

SEQ ID NO: 308841 - RNA, 32 nt, Homo Sapiens
augaaagaagauguuaugcaauucuucagucc

SEQ ID NO: 308842 - RNA, 32 nt, Homo Sapiens
gcgcugagauggcgggggcgccgcgcggcgga

SEQ ID NO: 308843 - RNA, 32 nt, Homo Sapiens
gcgcggaaggcgccggccuccagggcgcgcag

SEQ ID NO: 308844 - RNA, 32 nt, Homo Sapiens
gaggagccagauuagggcuggcauugcuguag

SEQ ID NO: 308845 - RNA, 32 nt, Homo Sapiens
uuugcuguucuucauccucguuguugcuguca

SEQ ID NO: 308846 - RNA, 32 nt, Homo Sapiens
aauccugacaauggaauggggagagagaaagu

SEQ ID NO: 308847 - RNA, 32 nt, Homo Sapiens
guugaccccguccaggaacuaacuuacccagc

SEQ ID NO: 308848 - RNA, 32 nt, Homo Sapiens
gcaauauaaagucacaauagauaauauauauc

SEQ ID NO: 308849 - RNA, 32 nt, Homo Sapiens
cuggagcccucccugcuguacccaagccagag

SEQ ID NO: 308850 - RNA, 32 nt, Homo Sapiens
cucuugggauauuuuuaagcauaauaagcuca

SEQ ID NO: 308851 - RNA, 32 nt, Homo Sapiens
augcaugauuauagcucuuguuuuucucacag

SEQ ID NO: 308852 - RNA, 32 nt, Homo Sapiens
gaguggaucuuauguaguaagaauaaaauuau

SEQ ID NO: 308853 - RNA, 32 nt, Homo Sapiens
uauuacuauuaacgugauaauguuuauucuug

SEQ ID NO: 308854 - RNA, 32 nt, Homo Sapiens
agcauaaacugggagacugugggaaaugcauu

SEQ ID NO: 308855 - RNA, 32 nt, Homo Sapiens
ugugagucaaaauuuuguaaaauauaaccuca

SEQ ID NO: 308856 - RNA, 32 nt, Homo Sapiens
ccaauagaauauggcagaagugauggcaugcc

SEQ ID NO: 308857 - RNA, 32 nt, Homo Sapiens
ccuuacaaguaaacagaagagaccacaaauaa

SEQ ID NO: 308858 - RNA, 32 nt, Homo Sapiens
uuuugccugcuucucuuugauuucacagaaua

SEQ ID NO: 308859 - RNA, 32 nt, Homo Sapiens
cucccagagacacccaucucuccucauuuuuu

SEQ ID NO: 308860 - RNA, 32 nt, Homo Sapiens
gauaaaugucauucacuuauucaccaaacauu

SEQ ID NO: 308861 - RNA, 32 nt, Homo Sapiens
acacacauaaaccgugggaaagacuuaggugu

SEQ ID NO: 308862 - RNA, 32 nt, Homo Sapiens
gacuggacacuugccaaugaugaaagaucagg

SEQ ID NO: 308863 - RNA, 32 nt, Homo Sapiens
gaugcauuugguuaauaaauauuaaucugaac

SEQ ID NO: 308864 - RNA, 32 nt, Homo Sapiens
accuggagaagcugacccugggcaucacgcgc

SEQ ID NO: 308865 - RNA, 32 nt, Homo Sapiens
guacaucccacuuugaaucuugaucgugacaa

SEQ ID NO: 308866 - RNA, 32 nt, Homo Sapiens
gggacacugguagggaucaaggcucaugggcu

SEQ ID NO: 308867 - RNA, 32 nt, Homo Sapiens
agaagcuggagcccuccucuuggaauauucag

SEQ ID NO: 308868 - RNA, 32 nt, Homo Sapiens
gucuuagccaagggcugugguggcauuggccg

SEQ ID NO: 308869 - RNA, 32 nt, Homo Sapiens
gccacacuuuagacaaggucuugcucuguccc

SEQ ID NO: 308870 - RNA, 32 nt, Homo Sapiens
aacaugguuuugcacaucuacauccagaacag

SEQ ID NO: 308871 - RNA, 32 nt, Homo Sapiens
uguagccacagugauuggagaugucuuuggcu

SEQ ID NO: 308872 - RNA, 32 nt, Homo Sapiens
aguuauucacaccagcaucaucuguuaacuaa

SEQ ID NO: 308873 - RNA, 32 nt, Homo Sapiens
ugguagcuuugccagcagcugcgccgcggcag

SEQ ID NO: 308874 - RNA, 32 nt, Homo Sapiens
uggacgccuuuucucuuccacagugggcaaug

SEQ ID NO: 308875 - RNA, 32 nt, Homo Sapiens
agcagaaggcaucucauccuccccguggcugc

SEQ ID NO: 308876 - RNA, 32 nt, Homo Sapiens
cuaugggccccggcuagaggcgccgccgccgc

SEQ ID NO: 308877 - RNA, 27 nt, Homo Sapiens
guuucagcuuucuucagcugccagugu

SEQ ID NO: 308878 - RNA, 32 nt, Homo Sapiens
uauuuccuggcacagcacuuugauaaacuugg

SEQ ID NO: 308879 - RNA, 32 nt, Homo Sapiens
ggagaaccagaugauguacuaggugaagcauu

SEQ ID NO: 308880 - RNA, 32 nt, Homo Sapiens
ugagggaaacaguuauacuacaaaucauguug

SEQ ID NO: 308881 - RNA, 32 nt, Homo Sapiens
cugugcaaggaccugagggugugaaccauccu

SEQ ID NO: 308882 - RNA, 32 nt, Homo Sapiens
caagaacaaaagacaacugaaagaagcuguug

SEQ ID NO: 308883 - RNA, 32 nt, Homo Sapiens
gaggucccuggccaaagauuuauuucucuuga

SEQ ID NO: 308884 - RNA, 32 nt, Homo Sapiens
ccuuaccuggggacugguucuuggcugcccac

SEQ ID NO: 308885 - RNA, 32 nt, Homo Sapiens
uuuuacccggagagcucuggccguucggccuc

SEQ ID NO: 308886 - RNA, 32 nt, Homo Sapiens
aguacacauuuuauuucuuggauuuugagaga

SEQ ID NO: 308887 - RNA, 32 nt, Homo Sapiens
ugcccugcugcugcucaucucccuuuauucgu

SEQ ID NO: 308888 - RNA, 32 nt, Homo Sapiens
cccgcguccagccccaggcccuggagcuuguc

SEQ ID NO: 308889 - RNA, 32 nt, Homo Sapiens
ggacuugguaguuuuucuauuuuucaauagau

SEQ ID NO: 308890 - RNA, 32 nt, Homo Sapiens
ugcuaguagauauaacuuccaugguaauaaau

SEQ ID NO: 308891 - RNA, 32 nt, Homo Sapiens
cuguguuggccauggccgacuaccugauuagu

SEQ ID NO: 308892 - RNA, 32 nt, Homo Sapiens
agaccccggcccggcgaccgagcugggcccgu

SEQ ID NO: 308893 - RNA, 32 nt, Homo Sapiens
ccagagugcuuggauugcaggcaugagccacu

SEQ ID NO: 308894 - RNA, 32 nt, Homo Sapiens
gaaauugcggccggggcucaccgcgauggccc

SEQ ID NO: 308895 - RNA, 32 nt, Homo Sapiens
caaacagccaccuggugacagugaagggugag

SEQ ID NO: 308896 - RNA, 32 nt, Homo Sapiens
cuguaccugucugccuggacuguccccugucc

SEQ ID NO: 308897 - RNA, 32 nt, Homo Sapiens
uacgcauagccgggcacuagguucgugggcug

SEQ ID NO: 308898 - RNA, 32 nt, Homo Sapiens
uguuucuguggaguuuccauuauuucuacugc

SEQ ID NO: 308899 - RNA, 32 nt, Homo Sapiens
cccucuaggaggagggcguggcacggcugcug

SEQ ID NO: 308900 - RNA, 32 nt, Homo Sapiens
uuuguaucucccuccuucccagcccacccggg

SEQ ID NO: 308901 - RNA, 32 nt, Homo Sapiens
ccgcaccgcgucucccgccuucuccgcagccc

SEQ ID NO: 308902 - RNA, 28 nt, Homo Sapiens
uuuaggaaaaagcaacauuugagcagac

SEQ ID NO: 308903 - RNA, 32 nt, Homo Sapiens
cucucucuuugccugcugccauguaagaagug

SEQ ID NO: 308904 - RNA, 32 nt, Homo Sapiens
acauccgcggcaacgccuccuuggugucgucc

SEQ ID NO: 308905 - RNA, 32 nt, Homo Sapiens
uccuggccgggcccgcgcuucugcagcugggc

SEQ ID NO: 308906 - RNA, 32 nt, Homo Sapiens
cacacacgucaucugcauuguuauuggagccu

SEQ ID NO: 308907 - RNA, 32 nt, Homo Sapiens
aagaacacaacaaaaaagauuugacuuccgaa

SEQ ID NO: 308908 - RNA, 32 nt, Homo Sapiens
cacauuuuuuaaauuacccagaauguagugcc

SEQ ID NO: 308909 - RNA, 32 nt, Homo Sapiens
ugugaccccccucccuuuuuggaaugaugggg

SEQ ID NO: 308910 - RNA, 32 nt, Homo Sapiens
ccagcgaggcgcgggcuguggggccgccgcgu

SEQ ID NO: 308911 - RNA, 32 nt, Homo Sapiens
ugcagcgugagagccaguggcaucugcgcggc

SEQ ID NO: 308912 - RNA, 29 nt, Homo Sapiens
cuaccaaugacuuucuucacagaauugga

SEQ ID NO: 308913 - RNA, 32 nt, Homo Sapiens
guggguguaccuugcuuuaccuaauagaugug

SEQ ID NO: 308914 - RNA, 32 nt, Homo Sapiens
ccugcccugccccauuguccagaugggcacug

SEQ ID NO: 308915 - RNA, 32 nt, Homo Sapiens
gcuggggcucacggggccuccaacccauuuaa

SEQ ID NO: 308916 - RNA, 32 nt, Homo Sapiens
ccucuucaggauggagcugaccucaagggaaa

SEQ ID NO: 308917 - RNA, 32 nt, Homo Sapiens
aucuguguggcuauuccuuuugaaauaggugg

SEQ ID NO: 308918 - RNA, 32 nt, Homo Sapiens
uuauuuuaucccauucucuguuacuugacuca

SEQ ID NO: 308919 - RNA, 32 nt, Homo Sapiens
ucauucucgccucucuccagccacuccugcag

SEQ ID NO: 308920 - RNA, 32 nt, Homo Sapiens
caccacugucuuccuggguuugcagcucugcg

SEQ ID NO: 308921 - RNA, 32 nt, Homo Sapiens
gcggcggccuccgcagcgaccggggagcggac

SEQ ID NO: 308922 - RNA, 32 nt, Homo Sapiens
uuucaggccagcaacuauccuugccaggguuu

SEQ ID NO: 308923 - RNA, 32 nt, Homo Sapiens
ucaaacucgucugauguuuugaugccauuugu

SEQ ID NO: 308924 - RNA, 32 nt, Homo Sapiens
ggaggaaugaagauggugaaagaagagcuaug

SEQ ID NO: 308925 - RNA, 32 nt, Homo Sapiens
gcuagggcacuagccugacuuuuaaggcagug

SEQ ID NO: 308926 - RNA, 32 nt, Homo Sapiens
ccgcccugccggcuaccugaggcugcacaggc

SEQ ID NO: 308927 - RNA, 32 nt, Homo Sapiens
ggugaacgcagugcccuugggagggccgaggc

SEQ ID NO: 308928 - RNA, 32 nt, Homo Sapiens
gcuuuuuguaaauuauuuaaagugauguaaaa

SEQ ID NO: 308929 - RNA, 32 nt, Homo Sapiens
ggccccucagaguggcagcugcagcaagaggc

SEQ ID NO: 308930 - RNA, 32 nt, Homo Sapiens
uaauguugacauuguuauauaauaaaugauaa

SEQ ID NO: 308931 - RNA, 32 nt, Homo Sapiens
uuuagcauucagaaugacaccauauucuuaaa

SEQ ID NO: 308932 - RNA, 32 nt, Homo Sapiens
acaggcagccuccuuuggguguauucagaggc

SEQ ID NO: 308933 - RNA, 32 nt, Homo Sapiens
uaaaaucacaauuguggaauuacaggaauucu

SEQ ID NO: 308934 - RNA, 32 nt, Homo Sapiens
aaauauuguaaaugcuauuauacuguuaucca

SEQ ID NO: 308935 - RNA, 32 nt, Homo Sapiens
cuguuaaucaaagauccucuuaacucuugaca

SEQ ID NO: 308936 - RNA, 32 nt, Homo Sapiens
guauaaaagagcaaagagcuuugggaaauacc

SEQ ID NO: 308937 - RNA, 32 nt, Homo Sapiens
gauugucggggguggggugggaggagggccac

SEQ ID NO: 308938 - RNA, 32 nt, Homo Sapiens
cccccaugccccacagugaggaugcucagcuc

SEQ ID NO: 308939 - RNA, 32 nt, Homo Sapiens
ggcagguugcuuaaccuuuuuauuucaaacuc

SEQ ID NO: 308940 - RNA, 32 nt, Homo Sapiens
gaauaaaaugucagugucuauaaacuguaugu

SEQ ID NO: 308941 - RNA, 32 nt, Homo Sapiens
ggucaccugccagaaggucuggggcgccaagg

SEQ ID NO: 308942 - RNA, 32 nt, Homo Sapiens
cgcaggaggaggaggucaucgacggcuucgcc

SEQ ID NO: 308943 - RNA, 32 nt, Homo Sapiens
uccccaccaugaugaugacacagccauggaca

SEQ ID NO: 308944 - RNA, 30 nt, Homo Sapiens
cccgaggccguuccgggucugaacuguaac

SEQ ID NO: 308945 - RNA, 32 nt, Homo Sapiens
guuuugguuggaugaaguccuuaguacaguug

SEQ ID NO: 308946 - RNA, 32 nt, Homo Sapiens
gcagugccagcuucuccuucucggugacaugu

SEQ ID NO: 308947 - RNA, 32 nt, Homo Sapiens
guucauuguuucucaugcaucauuugccauau

SEQ ID NO: 308948 - RNA, 32 nt, Homo Sapiens
augccucugcugugagacccagcaaagcaggg

SEQ ID NO: 308949 - RNA, 32 nt, Homo Sapiens
gugccgcguaugaugcuguccuugacagaaau

SEQ ID NO: 308950 - RNA, 32 nt, Homo Sapiens
ugauggggaaaauaaacucaguagagccacga

SEQ ID NO: 308951 - RNA, 32 nt, Homo Sapiens
augguggcgggugccuguagucccagccacuu

SEQ ID NO: 308952 - RNA, 32 nt, Homo Sapiens
ggugagggauacugaggcccaggcauggagcu

SEQ ID NO: 308953 - RNA, 32 nt, Homo Sapiens
ggcaguuuagagaauccuaaugucuacacugg

SEQ ID NO: 308954 - RNA, 32 nt, Homo Sapiens
gcccuccccaccccugccccagccucaggacu

SEQ ID NO: 308955 - RNA, 32 nt, Homo Sapiens
aggggaggaaaaugaaaaagcagacgcuuccu

SEQ ID NO: 308956 - RNA, 32 nt, Homo Sapiens
ugaugccgaggguggagugcaguggcacaauc

SEQ ID NO: 308957 - RNA, 32 nt, Homo Sapiens
aagcgugggguuuuuuaaucucugccacccuu

SEQ ID NO: 308958 - RNA, 32 nt, Homo Sapiens
aguaggcaacuguuuucuuaguuacagaaguu

SEQ ID NO: 308959 - RNA, 32 nt, Homo Sapiens
gagugccccucccugugcucacuuccugcucu

SEQ ID NO: 308960 - RNA, 32 nt, Homo Sapiens
gugcuccccagcccccucccccaugcagacgg

SEQ ID NO: 308961 - RNA, 32 nt, Homo Sapiens
gggcaucgcucuuccucacaccacaaaucuga

SEQ ID NO: 308962 - RNA, 32 nt, Homo Sapiens
cgccgccaccucgcccgacgcuccacagcucg

SEQ ID NO: 308963 - RNA, 32 nt, Homo Sapiens
gagaagaaggcacuacauuuaauguuaucaug

SEQ ID NO: 308964 - RNA, 32 nt, Homo Sapiens
gaucuaugugcacacacccccaucacauggaa

SEQ ID NO: 308965 - RNA, 29 nt, Homo Sapiens
uccauccugggacagacgggccuggacuu

SEQ ID NO: 308966 - RNA, 32 nt, Homo Sapiens
uucagaauauccacacuagugaaagucuucug

SEQ ID NO: 308967 - RNA, 32 nt, Homo Sapiens
uaacaaaccugcacguucugcacauguauccu

SEQ ID NO: 308968 - RNA, 32 nt, Homo Sapiens
gggcugcgccgcgcuucgcaacguguccggcg

SEQ ID NO: 308969 - RNA, 32 nt, Homo Sapiens
cuggccuucccagcugacauggaccucagguc

SEQ ID NO: 308970 - RNA, 32 nt, Homo Sapiens
uccauagugaauggagauacuugcagagcuug

SEQ ID NO: 308971 - RNA, 32 nt, Homo Sapiens
ggcaugaguuugcaugacuuucuggaggcaug

SEQ ID NO: 308972 - RNA, 25 nt, Homo Sapiens
augccguggccccugcugcugcugc

SEQ ID NO: 308973 - RNA, 32 nt, Homo Sapiens
aaaaaucagaacaucugaaaccagagagccga

SEQ ID NO: 308974 - RNA, 32 nt, Homo Sapiens
cacacagaggcagggcgugucugagagacuaa

SEQ ID NO: 308975 - RNA, 32 nt, Homo Sapiens
augugcgagggcaggaguauuuuuguauuaga

SEQ ID NO: 308976 - RNA, 32 nt, Homo Sapiens
uuuggcuuucuggucacccauuggccaugaau

SEQ ID NO: 308977 - RNA, 32 nt, Homo Sapiens
cagugugguaggacugagggcgugccugaggg

SEQ ID NO: 308978 - RNA, 32 nt, Homo Sapiens
ugagaagcacuguacuaagauuacuguguugu

SEQ ID NO: 308979 - RNA, 32 nt, Homo Sapiens
guaugaucucaaccucuucgccagcccuccug

SEQ ID NO: 308980 - RNA, 32 nt, Homo Sapiens
ugcgaacacccacuuacacacacgccacucac

SEQ ID NO: 308981 - RNA, 28 nt, Homo Sapiens
gccaugggcaaccgcgggauggaagagc

SEQ ID NO: 308982 - RNA, 32 nt, Homo Sapiens
uggccagcacgcuggacugcgagacggcccgg

SEQ ID NO: 308983 - RNA, 30 nt, Homo Sapiens
cuggcuuuuuaaauaucuuuagauuuuugc

SEQ ID NO: 308984 - RNA, 32 nt, Homo Sapiens
gggaugugggucugagagcuugguugcagaaa

SEQ ID NO: 308985 - RNA, 32 nt, Homo Sapiens
agccuggaauggggaaggccugggguggaaag

SEQ ID NO: 308986 - RNA, 32 nt, Homo Sapiens
guaguuacaacaugaugugauuguagcuuuuu

SEQ ID NO: 308987 - RNA, 32 nt, Homo Sapiens
auguggaacaaauggaauuguaagugcuuuca

SEQ ID NO: 308988 - RNA, 32 nt, Homo Sapiens
gggagccugcuucacuuugacuuucccacugu

SEQ ID NO: 308989 - RNA, 32 nt, Homo Sapiens
uucuucugucucagccucccaaguagcuggaa

SEQ ID NO: 308990 - RNA, 32 nt, Homo Sapiens
ggaggaggcuguuuguccuucucucucugggg

SEQ ID NO: 308991 - RNA, 32 nt, Homo Sapiens
guccgccucccccaagccguuccgcaccgcgg

SEQ ID NO: 308992 - RNA, 32 nt, Homo Sapiens
cagagcaagacuuggucucaaaaaauaaauaa

SEQ ID NO: 308993 - RNA, 32 nt, Homo Sapiens
ucugcuaguaucuauuuuacaaaaugcagagc

SEQ ID NO: 308994 - RNA, 32 nt, Homo Sapiens
acaaagcauuaccaccuugugucuucagaauc

SEQ ID NO: 308995 - RNA, 32 nt, Homo Sapiens
caagcauguauuacuuuugaaaagaugaaaaa

SEQ ID NO: 308996 - RNA, 32 nt, Homo Sapiens
gcuggcccggcacuucucggagggucccggca

SEQ ID NO: 308997 - RNA, 32 nt, Homo Sapiens
ccgggagcucaaggcaaagcugcacaacauaa

SEQ ID NO: 308998 - RNA, 32 nt, Homo Sapiens
ggguguggggguggaggagagggcuccagggg

SEQ ID NO: 308999 - RNA, 28 nt, Homo Sapiens
gaugcuuggccuggcaggaugacucaaa

SEQ ID NO: 309000 - RNA, 32 nt, Homo Sapiens
cagauuccaggaggagcagagaaagcacagau

SEQ ID NO: 309001 - RNA, 32 nt, Homo Sapiens
ugacggagguggcaaugacaucaucaagguca

SEQ ID NO: 309002 - RNA, 32 nt, Homo Sapiens
gaaugccgccgggaguccgggcauggugggca

SEQ ID NO: 309003 - RNA, 32 nt, Homo Sapiens
ggcgaauggagcaggggcgcgcagauaauuaa

SEQ ID NO: 309004 - RNA, 32 nt, Homo Sapiens
cccuagggaaaacacggcccuccugggaaccu

SEQ ID NO: 309005 - RNA, 30 nt, Homo Sapiens
ucugugagaugaaugcacagaucacagagg

SEQ ID NO: 309006 - RNA, 32 nt, Homo Sapiens
agacauaugaaaggaauuguaauuggcuuaac

SEQ ID NO: 309007 - RNA, 32 nt, Homo Sapiens
aaauaaucauuuuaguuuuucuuuguuuauau

SEQ ID NO: 309008 - RNA, 32 nt, Homo Sapiens
ggugcccggccgccacacugucuuggcuacag

SEQ ID NO: 309009 - RNA, 32 nt, Homo Sapiens
auaaagagaaaguauaugucauauguuugcaa

SEQ ID NO: 309010 - RNA, 32 nt, Homo Sapiens
agguuaacguucgcacucuguguauauaaccu

SEQ ID NO: 309011 - RNA, 32 nt, Homo Sapiens
ucacagaugggccaggccuggaccucucggga

SEQ ID NO: 309012 - RNA, 32 nt, Homo Sapiens
cuggccccaucccacuuuucuguaucaugggg

SEQ ID NO: 309013 - RNA, 32 nt, Homo Sapiens
aacacuugaagaaauuguaguuuuaaacaucu

SEQ ID NO: 309014 - RNA, 32 nt, Homo Sapiens
cucucagcucagcgccagccugucccauggac

SEQ ID NO: 309015 - RNA, 32 nt, Homo Sapiens
gcugaaauauaaaauuauacucacugauugua

SEQ ID NO: 309016 - RNA, 32 nt, Homo Sapiens
uauacgcggcugcacauccucaacgggaccca

SEQ ID NO: 309017 - RNA, 32 nt, Homo Sapiens
aucacaguucacagaagcuuuugcuucguaaa

SEQ ID NO: 309018 - RNA, 32 nt, Homo Sapiens
gacuacuuucccuuuucuuacuaucuauaaaa

SEQ ID NO: 309019 - RNA, 32 nt, Homo Sapiens
cauuucccagauuuauacuaugaacauugggg

SEQ ID NO: 309020 - RNA, 32 nt, Homo Sapiens
ugcauagaauaaaauuuuuaaucuuuaauuuu

SEQ ID NO: 309021 - RNA, 32 nt, Homo Sapiens
cagggucgggaaugucuucaguucuugagagu

SEQ ID NO: 309022 - RNA, 32 nt, Homo Sapiens
gggugccccccaugcccucccugcugccaggc

SEQ ID NO: 309023 - RNA, 27 nt, Homo Sapiens
agauggaugaagauacacauuacgaua

SEQ ID NO: 309024 - RNA, 32 nt, Homo Sapiens
gagcagcugguggagucuguguucaagaauua

SEQ ID NO: 309025 - RNA, 32 nt, Homo Sapiens
ccccauuucuucaauaucauuuuugaggcuuu

SEQ ID NO: 309026 - RNA, 32 nt, Homo Sapiens
acauugugauguauauuccuuugaagauagua

SEQ ID NO: 309027 - RNA, 30 nt, Homo Sapiens
gggccauguucgcucugggcuugcccuucu

SEQ ID NO: 309028 - RNA, 32 nt, Homo Sapiens
gggagccggcgguuaucugggcggcggagcgc

SEQ ID NO: 309029 - RNA, 32 nt, Homo Sapiens
guacaaaggggagggcuggaaguguuaacucc

SEQ ID NO: 309030 - RNA, 32 nt, Homo Sapiens
aaauaagaacagagaauugaucuuuggacuua

SEQ ID NO: 309031 - RNA, 32 nt, Homo Sapiens
gaagccaaagauuucuuuguucucaugcauuu

SEQ ID NO: 309032 - RNA, 30 nt, Homo Sapiens
ggguggacgcgugccgcccagucgacguca

SEQ ID NO: 309033 - RNA, 32 nt, Homo Sapiens
ggcauugcacggugcaguggacagaagggauu

SEQ ID NO: 309034 - RNA, 32 nt, Homo Sapiens
aaguauuuucuccuuucuguguauuccuucug

SEQ ID NO: 309035 - RNA, 32 nt, Homo Sapiens
ucaaaacagucuauguggaaauccagucccgc

SEQ ID NO: 309036 - RNA, 32 nt, Homo Sapiens
acuuccuuugacugauguucaguguccaucac

SEQ ID NO: 309037 - RNA, 32 nt, Homo Sapiens
uuucuuucucaguauuagaaauuauaguuaca

SEQ ID NO: 309038 - RNA, 32 nt, Homo Sapiens
ucuucuacaaagucaacaaaaacaagugaugg

SEQ ID NO: 309039 - RNA, 32 nt, Homo Sapiens
aaagucaacccuucuguaaaucaccugcugug

SEQ ID NO: 309040 - RNA, 27 nt, Homo Sapiens
cuggcugccuucuucacgcccugagga

SEQ ID NO: 309041 - RNA, 32 nt, Homo Sapiens
aucccacgcauaagagccuaggccagaccgcc

SEQ ID NO: 309042 - RNA, 32 nt, Homo Sapiens
augcuucccucauagaaguguuacauaauucc

SEQ ID NO: 309043 - RNA, 32 nt, Homo Sapiens
caccccgugccagcucccgugccagccuucau

SEQ ID NO: 309044 - RNA, 30 nt, Homo Sapiens
ccagggggagguggauguggggguauggca

SEQ ID NO: 309045 - RNA, 32 nt, Homo Sapiens
gaaauauauggaccuuaauuuguauccugacu

SEQ ID NO: 309046 - RNA, 32 nt, Homo Sapiens
gugagauaacugugccugcuaccaaguguuaa

SEQ ID NO: 309047 - RNA, 32 nt, Homo Sapiens
gccuucugcuucugcccucuggcccucuacca

SEQ ID NO: 309048 - RNA, 32 nt, Homo Sapiens
ggguggagggagaggcgcggagacacuggggc

SEQ ID NO: 309049 - RNA, 32 nt, Homo Sapiens
aaagaccgcccggcuccuccuaugcaagcuga

SEQ ID NO: 309050 - RNA, 32 nt, Homo Sapiens
ucccuccaguuuuuccucuaguucuuuuaggc

SEQ ID NO: 309051 - RNA, 32 nt, Homo Sapiens
augccggcccccacccuggcucugaccauucu

SEQ ID NO: 309052 - RNA, 32 nt, Homo Sapiens
cccuuagcacuuuuauacuaauuaacccauuu

SEQ ID NO: 309053 - RNA, 32 nt, Homo Sapiens
gaagcugaacuuugaaagauuaaugaggcagc

SEQ ID NO: 309054 - RNA, 32 nt, Homo Sapiens
gcgcggaggcggaggcuugggugcguucaaga

SEQ ID NO: 309055 - RNA, 32 nt, Homo Sapiens
caguguggugauacagagcacuaguugucacu

SEQ ID NO: 309056 - RNA, 32 nt, Homo Sapiens
gagaaugagaagucauccuggagcacagcucu

SEQ ID NO: 309057 - RNA, 32 nt, Homo Sapiens
auuuucauaagccacaauuuuaaaagaugcag

SEQ ID NO: 309058 - RNA, 32 nt, Homo Sapiens
gccgagacccccggcgccgcgcggcgaugaac

SEQ ID NO: 309059 - RNA, 32 nt, Homo Sapiens
cucagcgaggacccuccgccccggagccgccg

SEQ ID NO: 309060 - RNA, 32 nt, Homo Sapiens
ucacaaaguccauuuuaagagcuuuaucuugu

SEQ ID NO: 309061 - RNA, 32 nt, Homo Sapiens
augauuuauuuuuuaugaaaauguuaacugau

SEQ ID NO: 309062 - RNA, 28 nt, Homo Sapiens
uucauggggcggcagccgaggcaggacc

SEQ ID NO: 309063 - RNA, 32 nt, Homo Sapiens
ucuaagacagucuggagggagagugcagacac

SEQ ID NO: 309064 - RNA, 32 nt, Homo Sapiens
ugcugcugggccucuccugggacuaccagugu

SEQ ID NO: 309065 - RNA, 32 nt, Homo Sapiens
gugacacaacuaaaaaaaaacaaagguauuua

SEQ ID NO: 309066 - RNA, 32 nt, Homo Sapiens
aggagcagcagaaaaugaacaugucucaggca

SEQ ID NO: 309067 - RNA, 32 nt, Homo Sapiens
cgcggagagaggagcuaggagccucggccaau

SEQ ID NO: 309068 - RNA, 32 nt, Homo Sapiens
aaaccaaaccaaacagaaagcaguggaggugg

SEQ ID NO: 309069 - RNA, 32 nt, Homo Sapiens
gccccaggccacacagaugcugcgaguuggga

SEQ ID NO: 309070 - RNA, 32 nt, Homo Sapiens
aaucucguuuggggggaauccuuguauuccua

SEQ ID NO: 309071 - RNA, 32 nt, Homo Sapiens
gaguagauaaaaccuucuucccaacagcacaa

SEQ ID NO: 309072 - RNA, 32 nt, Homo Sapiens
auccguagcgguuggugacuugucugccuccu

SEQ ID NO: 309073 - RNA, 32 nt, Homo Sapiens
cuccuuauuucagaauaaggugucacaauucu

SEQ ID NO: 309074 - RNA, 32 nt, Homo Sapiens
auguagaaagacucuuugguucacauuccgau

SEQ ID NO: 309075 - RNA, 32 nt, Homo Sapiens
ucagcagccucacugcaucuuucucuucccau

SEQ ID NO: 309076 - RNA, 32 nt, Homo Sapiens
ugagaaucuaagauauauuauuaauaaaugua

SEQ ID NO: 309077 - RNA, 30 nt, Homo Sapiens
uugacguguaucccugccugacaagguuga

SEQ ID NO: 309078 - RNA, 32 nt, Homo Sapiens
uucuucuuuaccaugaacaaacuugaaaauua

SEQ ID NO: 309079 - RNA, 32 nt, Homo Sapiens
ucugcagguucaaguguggggcuugaguaugc

SEQ ID NO: 309080 - RNA, 32 nt, Homo Sapiens
gccucaugccagcagcuccuggcuguuccuca

SEQ ID NO: 309081 - RNA, 32 nt, Homo Sapiens
auagcuagaagagaggauuuugaaaguucuca

SEQ ID NO: 309082 - RNA, 30 nt, Homo Sapiens
augucagucugugcugaggaccucagggac

SEQ ID NO: 309083 - RNA, 32 nt, Homo Sapiens
cgcaagagaacauuucuagaaaaaacuacuuu

SEQ ID NO: 309084 - RNA, 32 nt, Homo Sapiens
caauucucauuaaaccacauuguaaacaguaa

SEQ ID NO: 309085 - RNA, 32 nt, Homo Sapiens
auaccuauugucagcauucuugggugaggauu

SEQ ID NO: 309086 - RNA, 32 nt, Homo Sapiens
ggccaggcgcucuuccuccccagccuccaacu

SEQ ID NO: 309087 - RNA, 32 nt, Homo Sapiens
aacucaaguggaaggaagauuugguuugguuu

SEQ ID NO: 309088 - RNA, 32 nt, Homo Sapiens
auaguugcaggugugucgggugucacagaugg

SEQ ID NO: 309089 - RNA, 32 nt, Homo Sapiens
aaccugggggagagggauggucucugcacggg

SEQ ID NO: 309090 - RNA, 32 nt, Homo Sapiens
uagcucacauugagcuuuuggcuccaggugac

SEQ ID NO: 309091 - RNA, 32 nt, Homo Sapiens
uuuucucuauuguuuacgacaguacucagcuu

SEQ ID NO: 309092 - RNA, 32 nt, Homo Sapiens
gcgagccccccgccccauuggccccaccgccc

SEQ ID NO: 309093 - RNA, 32 nt, Homo Sapiens
augccuguguguuuuucuuaaguaugaauucu

SEQ ID NO: 309094 - RNA, 32 nt, Homo Sapiens
cuuuccauugcagagggaaagggcucagagaa

SEQ ID NO: 309095 - RNA, 32 nt, Homo Sapiens
aaagagcccuccccccugcagggcuccaccca

SEQ ID NO: 309096 - RNA, 32 nt, Homo Sapiens
ggcaaagcaguggguccuccucaccagccgcu

SEQ ID NO: 309097 - RNA, 32 nt, Homo Sapiens
gaagugcaccgucuucuaagcccuggcccacc

SEQ ID NO: 309098 - RNA, 32 nt, Homo Sapiens
gacgaugucaacuuaauauccuugacaacaaa

SEQ ID NO: 309099 - RNA, 32 nt, Homo Sapiens
cucuggugucugaccuagaagaggcacaguuc

SEQ ID NO: 309100 - RNA, 32 nt, Homo Sapiens
ccgugacuucuuccucaucaccuugauggcuu

SEQ ID NO: 309101 - RNA, 32 nt, Homo Sapiens
gaaaccccgucuccaagcucaagcugggagac

SEQ ID NO: 309102 - RNA, 32 nt, Homo Sapiens
cagccacucccacgguccuguguguuccggau

SEQ ID NO: 309103 - RNA, 32 nt, Homo Sapiens
accccggacuccuccgcauccuccuccugcuu

SEQ ID NO: 309104 - RNA, 32 nt, Homo Sapiens
caccuaaaagguauuucuuugugguugaagaa

SEQ ID NO: 309105 - RNA, 32 nt, Homo Sapiens
augugccauuuuccuugccgcguuaauacaac

SEQ ID NO: 309106 - RNA, 32 nt, Homo Sapiens
uacaugauaugaauuugaagcauaaaauuaaa

SEQ ID NO: 309107 - RNA, 32 nt, Homo Sapiens
gaagcuagaggcccgucgguccaguccuugcc

SEQ ID NO: 309108 - RNA, 32 nt, Homo Sapiens
ggugacugucccacccauuuaguugaauguag

SEQ ID NO: 309109 - RNA, 32 nt, Homo Sapiens
gccaggguggccuggggcacccagcggaaugu

SEQ ID NO: 309110 - RNA, 32 nt, Homo Sapiens
uuuucaagauggagucuugcucugucgcccag

SEQ ID NO: 309111 - RNA, 32 nt, Homo Sapiens
guuuacagacauuccugccagcccucaguugu

SEQ ID NO: 309112 - RNA, 32 nt, Homo Sapiens
aaggcuuuuucagggaaaaauauuuuacuagu

SEQ ID NO: 309113 - RNA, 32 nt, Homo Sapiens
accucccaaaugcaggaaaaaauaugcacuaa

SEQ ID NO: 309114 - RNA, 32 nt, Homo Sapiens
auuacagaaaucuucuauugaaugggaaaggu

SEQ ID NO: 309115 - RNA, 32 nt, Homo Sapiens
ugcugucagguguuaugcacuccauccauaau

SEQ ID NO: 309116 - RNA, 32 nt, Homo Sapiens
cuuuuccgcggaggagcgcccgccggcaucug

SEQ ID NO: 309117 - RNA, 32 nt, Homo Sapiens
gggcucggcugcgccccgaugcggcggcgacc

SEQ ID NO: 309118 - RNA, 32 nt, Homo Sapiens
guuauguaaguggucagugcauuccaguaugu

SEQ ID NO: 309119 - RNA, 32 nt, Homo Sapiens
agccuggccugccgcccucccgggcccccucc

SEQ ID NO: 309120 - RNA, 32 nt, Homo Sapiens
ccugggcccaaccuccccgccgacccgcgguc

SEQ ID NO: 309121 - RNA, 32 nt, Homo Sapiens
gacuuuuccuuccuccuuccuccccggauugg

SEQ ID NO: 309122 - RNA, 32 nt, Homo Sapiens
auuuaauguacaauacuguaaauaaacugugc

SEQ ID NO: 309123 - RNA, 32 nt, Homo Sapiens
cccucccuugccccuuuccugggcccagaagu

SEQ ID NO: 309124 - RNA, 32 nt, Homo Sapiens
agaacggagagccagugugcugugugucacgg

SEQ ID NO: 309125 - RNA, 32 nt, Homo Sapiens
caucgugggcgcgcucugcuacgcggagcugg

SEQ ID NO: 309126 - RNA, 32 nt, Homo Sapiens
caugcugucacauuguggaggcacgagggcug

SEQ ID NO: 309127 - RNA, 30 nt, Homo Sapiens
cuguuccuuugggcugcagaaacuccgcug

SEQ ID NO: 309128 - RNA, 32 nt, Homo Sapiens
cacugagagugggaaaccauuaugacuucaaa

SEQ ID NO: 309129 - RNA, 32 nt, Homo Sapiens
ugcagugcgggaagaugagcaggccaguggga

SEQ ID NO: 309130 - RNA, 32 nt, Homo Sapiens
aauuuuugcaaccuacucaucugacaaagggc

SEQ ID NO: 309131 - RNA, 32 nt, Homo Sapiens
gacucaugucccugcaauuaaacuuacuucaa

SEQ ID NO: 309132 - RNA, 32 nt, Homo Sapiens
gaguauuaaugaucaugagaauugugugcuga

SEQ ID NO: 309133 - RNA, 32 nt, Homo Sapiens
uuuuuguagaggugguguuuugccauguuucc

SEQ ID NO: 309134 - RNA, 32 nt, Homo Sapiens
aaaaaugaaaauaauaaacauguuuucguaua

SEQ ID NO: 309135 - RNA, 32 nt, Homo Sapiens
uuauauuuuaagucagcugucaaggggagacc

SEQ ID NO: 309136 - RNA, 32 nt, Homo Sapiens
auuuagugcaggguaaaugguuugagaugaga

SEQ ID NO: 309137 - RNA, 32 nt, Homo Sapiens
gacugaaggguguucagaaguaguuacaggua

SEQ ID NO: 309138 - RNA, 32 nt, Homo Sapiens
uaucugccaaaauaaacuuuauucccuauaac

SEQ ID NO: 309139 - RNA, 32 nt, Homo Sapiens
aaaacaaaauuccauuacaggggcagugccuu

SEQ ID NO: 309140 - RNA, 26 nt, Homo Sapiens
gauggcuuggcaggugagccugcugg

SEQ ID NO: 309141 - RNA, 32 nt, Homo Sapiens
auuuggauaaccuggaaaacacccaaacacaa

SEQ ID NO: 309142 - RNA, 32 nt, Homo Sapiens
aaugcuagccauuaucuaauagcaagaauucc

SEQ ID NO: 309143 - RNA, 32 nt, Homo Sapiens
ccuguacuugugacuagacaaacaauuccuuu

SEQ ID NO: 309144 - RNA, 32 nt, Homo Sapiens
gccugaauuuucugcuccugaauucaaacauu

SEQ ID NO: 309145 - RNA, 32 nt, Homo Sapiens
uguuuccaacuggcucaauuggcugggaaaac

SEQ ID NO: 309146 - RNA, 32 nt, Homo Sapiens
uuuucuugguuuuugugaaagcagaauaccga

SEQ ID NO: 309147 - RNA, 32 nt, Homo Sapiens
aagcugaggcaggaagcccuuuagucacuugc

SEQ ID NO: 309148 - RNA, 32 nt, Homo Sapiens
gaugugggugacgggcggggcggccugcaucc

SEQ ID NO: 309149 - RNA, 32 nt, Homo Sapiens
ucuacuaaaaauaccaaaauuagccaggugug

SEQ ID NO: 309150 - RNA, 32 nt, Homo Sapiens
uacucucugggccacugcugcagaggccgugg

SEQ ID NO: 309151 - RNA, 32 nt, Homo Sapiens
agcggcggccccacuggcccucucaggcugcg

SEQ ID NO: 309152 - RNA, 32 nt, Homo Sapiens
cuccagcaaaugacccaucguuuuccaccagu

SEQ ID NO: 309153 - RNA, 32 nt, Homo Sapiens
uuaccuggacgacugaugugucacaagcuguu

SEQ ID NO: 309154 - RNA, 32 nt, Homo Sapiens
ccgugucgcccgcauccuccgccuggcgccuc

SEQ ID NO: 309155 - RNA, 31 nt, Homo Sapiens
aggagucugccggugcugaaagugggggugg

SEQ ID NO: 309156 - RNA, 32 nt, Homo Sapiens
augacugauuuagaagugaacaacuugguaac

SEQ ID NO: 309157 - RNA, 32 nt, Homo Sapiens
agcuuagaguagacccgaguccugcucugcgg

SEQ ID NO: 309158 - RNA, 32 nt, Homo Sapiens
ggaaaggugagugggaaggagcagaaagcugg

SEQ ID NO: 309159 - RNA, 31 nt, Homo Sapiens
gaccgggcaaggucccccaggccaggauguc

SEQ ID NO: 309160 - RNA, 32 nt, Homo Sapiens
aaccgggcgugguggcucaugucuguaaugcc

SEQ ID NO: 309161 - RNA, 32 nt, Homo Sapiens
uuagggcgacagggcagcugguguuucgcucc

SEQ ID NO: 309162 - RNA, 32 nt, Homo Sapiens
ccacccugacagugagaugugucuucgucccc

SEQ ID NO: 309163 - RNA, 32 nt, Homo Sapiens
uuggauacccgacguucucccuggacacuugg

SEQ ID NO: 309164 - RNA, 30 nt, Homo Sapiens
gcaaaaugaaguucuuucuguugcuuuuca

SEQ ID NO: 309165 - RNA, 32 nt, Homo Sapiens
ugauuacuauugcugcauacccggggugggau

SEQ ID NO: 309166 - RNA, 32 nt, Homo Sapiens
ggggcaccggugccgccccguguucucccacg

SEQ ID NO: 309167 - RNA, 32 nt, Homo Sapiens
uguucuguucuucacuuccagcaagccagagu

SEQ ID NO: 309168 - RNA, 32 nt, Homo Sapiens
uacuauguuaacuggugacuguacuugauuuu

SEQ ID NO: 309169 - RNA, 32 nt, Homo Sapiens
aaaaaaaaaaagacaaaauauacaacucuuga

SEQ ID NO: 309170 - RNA, 30 nt, Homo Sapiens
uaggagaggaaaaggcuugagucuggauaa

SEQ ID NO: 309171 - RNA, 32 nt, Homo Sapiens
gggcgggggcuggcccgggguuccaggucucc

SEQ ID NO: 309172 - RNA, 32 nt, Homo Sapiens
cggacauccuagcuccuucucaggccuccaac

SEQ ID NO: 309173 - RNA, 32 nt, Homo Sapiens
acugcgccuggcccacuuuucuuucuuuccuu

SEQ ID NO: 309174 - RNA, 32 nt, Homo Sapiens
aguccugcggagugguagcgcgcacggccugc

SEQ ID NO: 309175 - RNA, 32 nt, Homo Sapiens
gggagacggugcgggcggccgggagcgcagcc

SEQ ID NO: 309176 - RNA, 32 nt, Homo Sapiens
accggagaggccggugcacagggccccgccag

SEQ ID NO: 309177 - RNA, 32 nt, Homo Sapiens
uugaugaauuguuucauuauuaaauauaugca

SEQ ID NO: 309178 - RNA, 32 nt, Homo Sapiens
ugauaugagauucgaauuccagugucuauaaa

SEQ ID NO: 309179 - RNA, 32 nt, Homo Sapiens
gaggaggagacggcaggucgggcauuaaaaaa

SEQ ID NO: 309180 - RNA, 32 nt, Homo Sapiens
caugaaggcuugccaccuugggacgccccagu

SEQ ID NO: 309181 - RNA, 32 nt, Homo Sapiens
ugccaccuuuuauguguugaugacucacucau

SEQ ID NO: 309182 - RNA, 32 nt, Homo Sapiens
ugcuaauaaaaucaaauaaaucaaauaaaacu

SEQ ID NO: 309183 - RNA, 32 nt, Homo Sapiens
uggcuaucuguggucagacuugcucucuaucc

SEQ ID NO: 309184 - RNA, 32 nt, Homo Sapiens
ccuccgcccucccggccucgcuccccccggag

SEQ ID NO: 309185 - RNA, 32 nt, Homo Sapiens
uuguuuuuauauuucauauauguaauaaagga

SEQ ID NO: 309186 - RNA, 32 nt, Homo Sapiens
gaggucgcgggcggggguccucaggcggccgc

SEQ ID NO: 309187 - RNA, 32 nt, Homo Sapiens
ucggaaccaagccccugacauggcccucccaa

SEQ ID NO: 309188 - RNA, 32 nt, Homo Sapiens
guauggcauaaugucaugauuuacucauuaaa

SEQ ID NO: 309189 - RNA, 32 nt, Homo Sapiens
ucaaucaucuuugcaauuauauuuucauuuua

SEQ ID NO: 309190 - RNA, 32 nt, Homo Sapiens
uugcagguguuagguauuuuuucugucaacac

SEQ ID NO: 309191 - RNA, 32 nt, Homo Sapiens
guuuuauuugaaaaguggauggucaauaaaug

SEQ ID NO: 309192 - RNA, 32 nt, Homo Sapiens
uugggaaaacaaaaagagcauaaagaaucauc

SEQ ID NO: 309193 - RNA, 32 nt, Homo Sapiens
uggucacugcccccggcccaccuggagcccau

SEQ ID NO: 309194 - RNA, 32 nt, Homo Sapiens
gccccuccugggcuccuccuccgggacaggca

SEQ ID NO: 309195 - RNA, 32 nt, Homo Sapiens
ggcgauggggacggaguggggccgucgccgcc

SEQ ID NO: 309196 - RNA, 30 nt, Homo Sapiens
gauggggcacccgugcccugcagguguuga

SEQ ID NO: 309197 - RNA, 32 nt, Homo Sapiens
ucuuggcaaaaauacuccauuugggaacucac

SEQ ID NO: 309198 - RNA, 32 nt, Homo Sapiens
gcggcggcggcggcaccauccaggcgggcacc

SEQ ID NO: 309199 - RNA, 32 nt, Homo Sapiens
gauugcuuuguauugugagaguaucuuuguug

SEQ ID NO: 309200 - RNA, 32 nt, Homo Sapiens
agccagguauagagagccuuccugucauaacu

SEQ ID NO: 309201 - RNA, 32 nt, Homo Sapiens
ggacuguggcugcagcuuccacagccacugcc

SEQ ID NO: 309202 - RNA, 32 nt, Homo Sapiens
ugagaaaugcuguacuauguuuucucauauau

SEQ ID NO: 309203 - RNA, 29 nt, Homo Sapiens
uccgcucggggacugagguugcugcaguu

SEQ ID NO: 309204 - RNA, 30 nt, Homo Sapiens
cguccgcgcgcgcagccugggaggcgcucc

SEQ ID NO: 309205 - RNA, 32 nt, Homo Sapiens
aggaauuuagccaauucagaggucuuguucuc

SEQ ID NO: 309206 - RNA, 32 nt, Homo Sapiens
ccugcuccgcgucugcgccgccgccggagucc

SEQ ID NO: 309207 - RNA, 32 nt, Homo Sapiens
ccggccgccccggggcucggcgcgggagccag

SEQ ID NO: 309208 - RNA, 32 nt, Homo Sapiens
uucaacucacugucuuuuuuuuuuuuuuuugg

SEQ ID NO: 309209 - RNA, 32 nt, Homo Sapiens
gcgcugugaggugggcaggcgaggagcgggaa

SEQ ID NO: 309210 - RNA, 32 nt, Homo Sapiens
gccacugguuccucuuuuuuuuuuuuuuuuug

SEQ ID NO: 309211 - RNA, 32 nt, Homo Sapiens
ucucucugccagccgugcggccaggcccgcgg

SEQ ID NO: 309212 - RNA, 32 nt, Homo Sapiens
cacauuaaaaaggaaaguuugccaggaggaac

SEQ ID NO: 309213 - RNA, 32 nt, Homo Sapiens
acaguuucugcagagugacugacuccauucug

SEQ ID NO: 309214 - RNA, 32 nt, Homo Sapiens
uuccuggaaaauucaaguguuuauuaaaacua

SEQ ID NO: 309215 - RNA, 32 nt, Homo Sapiens
gcagcgcggagucagcgccgcgggggccgcac

SEQ ID NO: 309216 - RNA, 32 nt, Homo Sapiens
ccuccugcucaugcugcacgggccuccccucc

SEQ ID NO: 309217 - RNA, 32 nt, Homo Sapiens
ugaucuccagcgccggccuccucagugcgaag

SEQ ID NO: 309218 - RNA, 32 nt, Homo Sapiens
aaugcacgaaaugugaaguucuuugucacugu

SEQ ID NO: 309219 - RNA, 32 nt, Homo Sapiens
gauaaaaucauggaauuaaaucagggguuuac

SEQ ID NO: 309220 - RNA, 32 nt, Homo Sapiens
uaugcuggaugugacgcuaggaccucagaucc

SEQ ID NO: 309221 - RNA, 32 nt, Homo Sapiens
ggcagcuccgccucugggccuuuccgccuccu

SEQ ID NO: 309222 - RNA, 32 nt, Homo Sapiens
agacuuuggucccagcccagacuccucagacu

SEQ ID NO: 309223 - RNA, 32 nt, Homo Sapiens
uauuuuucuauuucucuccuuaauuuuauaug

SEQ ID NO: 309224 - RNA, 32 nt, Homo Sapiens
uggauaucuaaccaaggacauguuugauaaaa

SEQ ID NO: 309225 - RNA, 32 nt, Homo Sapiens
gugaagagaagcuguccguggcggcugguguu

SEQ ID NO: 309226 - RNA, 32 nt, Homo Sapiens
ccuuggguguuuggugcuggcuccuggggacu

SEQ ID NO: 309227 - RNA, 32 nt, Homo Sapiens
aaguuugcaccucggcccuggcugcccaccau

SEQ ID NO: 309228 - RNA, 32 nt, Homo Sapiens
uuauucugucuagagacccugagccaacuuuc

SEQ ID NO: 309229 - RNA, 32 nt, Homo Sapiens
gccggggcgaggcgggggaggggccgugagug

SEQ ID NO: 309230 - RNA, 32 nt, Homo Sapiens
cacugagcuggguguaggaggggcugcagcag

SEQ ID NO: 309231 - RNA, 32 nt, Homo Sapiens
cucaccccgcggccgcaccuucccgccuucuc

SEQ ID NO: 309232 - RNA, 32 nt, Homo Sapiens
ucccgcuggugccucccgggacgaaggacuuc

SEQ ID NO: 309233 - RNA, 32 nt, Homo Sapiens
gugucaaaguauaauucucaugcugaagcugu

SEQ ID NO: 309234 - RNA, 32 nt, Homo Sapiens
gaccaguuugcaugaggcucccgggcagagcc

SEQ ID NO: 309235 - RNA, 32 nt, Homo Sapiens
ccuucuuggaugucugauacaaacagccucag

SEQ ID NO: 309236 - RNA, 32 nt, Homo Sapiens
gcugugggcuccuggggagguggcccucgugg

SEQ ID NO: 309237 - RNA, 32 nt, Homo Sapiens
ugccuaugucccucugccuccuccccaugccc

SEQ ID NO: 309238 - RNA, 32 nt, Homo Sapiens
uucuuaacaacccaccagaagaagcaccaaga

SEQ ID NO: 309239 - RNA, 32 nt, Homo Sapiens
gggaggcggcuugugcuuugccuucacuugga

SEQ ID NO: 309240 - RNA, 32 nt, Homo Sapiens
cagagccgucuucucagguugccugucgucuc

SEQ ID NO: 309241 - RNA, 32 nt, Homo Sapiens
ugacaaaggaccaggcuugccuuuucuguggc

SEQ ID NO: 309242 - RNA, 32 nt, Homo Sapiens
aacuguaugcauuguuccagaugcgcucuugc

SEQ ID NO: 309243 - RNA, 32 nt, Homo Sapiens
gguguuuaagguauguacauuuagucauuuuc

SEQ ID NO: 309244 - RNA, 32 nt, Homo Sapiens
aaguacacagaaaaacacagaguauuauaaca

SEQ ID NO: 309245 - RNA, 31 nt, Homo Sapiens
ccucaggugaucugccugccucggccucaca

SEQ ID NO: 309246 - RNA, 32 nt, Homo Sapiens
cuuuaaaaacaaaaacagaauguuguacguga

SEQ ID NO: 309247 - RNA, 32 nt, Homo Sapiens
gccgggccugcgcuuccguucgcuugacuggc

SEQ ID NO: 309248 - RNA, 32 nt, Homo Sapiens
aaacacaguuuuuguuuuguguucuggcaaag

SEQ ID NO: 309249 - RNA, 32 nt, Homo Sapiens
cucuuugguauaagccauaaaauauuuuccuu

SEQ ID NO: 309250 - RNA, 32 nt, Homo Sapiens
caaagaggcucuuauguauaagaucaauauaa

SEQ ID NO: 309251 - RNA, 32 nt, Homo Sapiens
cucuuuauuuuucuuucuuuuucuuuguuuuu

SEQ ID NO: 309252 - RNA, 32 nt, Homo Sapiens
uuuucccuggggacugauacguggacaccagg

SEQ ID NO: 309253 - RNA, 32 nt, Homo Sapiens
ccugugagccgguccccagcccugcccccagg

SEQ ID NO: 309254 - RNA, 32 nt, Homo Sapiens
gugccuacagccuuucuugauuggugacacgu

SEQ ID NO: 309255 - RNA, 32 nt, Homo Sapiens
uugaguuugucaauaggacauugaugcuggau

SEQ ID NO: 309256 - RNA, 32 nt, Homo Sapiens
agguaaaugcucauucccaaguagcaaagaga

SEQ ID NO: 309257 - RNA, 31 nt, Homo Sapiens
gccccaccgucauuguccugaguugaauguc

SEQ ID NO: 309258 - RNA, 32 nt, Homo Sapiens
uaacugugaugaugacacuuugguacaauuua

SEQ ID NO: 309259 - RNA, 32 nt, Homo Sapiens
aacucggcuuccuggggggcaucguggggugu

SEQ ID NO: 309260 - RNA, 32 nt, Homo Sapiens
cccggccauuugcugcccuccccaccccugcc

SEQ ID NO: 309261 - RNA, 32 nt, Homo Sapiens
uuuuugguuggguugacacuaacuuuucuuaa

SEQ ID NO: 309262 - RNA, 32 nt, Homo Sapiens
cuaggugccaguguuaggaugucaguuuuaca

SEQ ID NO: 309263 - RNA, 32 nt, Homo Sapiens
guuuuauuaugcaguuaaaucuguaucagugg

SEQ ID NO: 309264 - RNA, 32 nt, Homo Sapiens
cuggugacuacauguaaaugggcucacucacu

SEQ ID NO: 309265 - RNA, 32 nt, Homo Sapiens
aagacaaggggagcauuggacaacacaggaag

SEQ ID NO: 309266 - RNA, 32 nt, Homo Sapiens
aaagucaaaaauagcaaugccucccuaucccu

SEQ ID NO: 309267 - RNA, 32 nt, Homo Sapiens
acauggagacuccugcccuguuguguauagau

SEQ ID NO: 309268 - RNA, 32 nt, Homo Sapiens
gaggcugaggcggguggauugcuugaggccag

SEQ ID NO: 309269 - RNA, 32 nt, Homo Sapiens
ggcuucuugucugucugagucaacgaauacac

SEQ ID NO: 309270 - RNA, 32 nt, Homo Sapiens
uauuuucaauuucagaauacuuuauauugacu

SEQ ID NO: 309271 - RNA, 32 nt, Homo Sapiens
gacugaacuuuguuuacagauaccuuuuauaa

SEQ ID NO: 309272 - RNA, 32 nt, Homo Sapiens
ugaacugcaguggccaguggccacaucaggag

SEQ ID NO: 309273 - RNA, 32 nt, Homo Sapiens
ggcugggccgggcgcuccuggugugugacugg

SEQ ID NO: 309274 - RNA, 32 nt, Homo Sapiens
ggaauugagaggugggggaugcugaggagggg

SEQ ID NO: 309275 - RNA, 32 nt, Homo Sapiens
ugcuaaggacagagacaccccauuguggacgg

SEQ ID NO: 309276 - RNA, 32 nt, Homo Sapiens
gcaaccaugagauaauacaagccagggagagg

SEQ ID NO: 309277 - RNA, 32 nt, Homo Sapiens
agguacacaaaacugccaucauagcaaaauga

SEQ ID NO: 309278 - RNA, 32 nt, Homo Sapiens
gugacaugacaucaacuuuucagugcuuccac

SEQ ID NO: 309279 - RNA, 32 nt, Homo Sapiens
uaguuuuguucccgguuuuucuuacuguuaca

SEQ ID NO: 309280 - RNA, 32 nt, Homo Sapiens
cugauguaaaguaggaaaaauaaaaacagagc

SEQ ID NO: 309281 - RNA, 32 nt, Homo Sapiens
ggcugcacgcaccgccccugggcgucgggagu

SEQ ID NO: 309282 - RNA, 32 nt, Homo Sapiens
ggauuccugagcugagugcagaugacaauuua

SEQ ID NO: 309283 - RNA, 32 nt, Homo Sapiens
uauuacacugccuggaggauagcagagaagcc

SEQ ID NO: 309284 - RNA, 32 nt, Homo Sapiens
gcuguaagcaccugggcugaggaggcaguuuu

SEQ ID NO: 309285 - RNA, 32 nt, Homo Sapiens
gugugcacaauaaauaggaaauguagaaacca

SEQ ID NO: 309286 - RNA, 32 nt, Homo Sapiens
ucgcccccgccccgaccuccccggcugacgcg

SEQ ID NO: 309287 - RNA, 32 nt, Homo Sapiens
ccauagcugcuugaguuaacugucccacaagu

SEQ ID NO: 309288 - RNA, 32 nt, Homo Sapiens
uaucaaaaggauuggauaauaaaaauaaguuu

SEQ ID NO: 309289 - RNA, 32 nt, Homo Sapiens
aagugaggacaaagugugggaaggccgcgagg

SEQ ID NO: 309290 - RNA, 32 nt, Homo Sapiens
auaagguuaagugauaugugauucauaacaau

SEQ ID NO: 309291 - RNA, 30 nt, Homo Sapiens
aaguuguagcaguugggggaaaacagucaa

SEQ ID NO: 309292 - RNA, 32 nt, Homo Sapiens
cucccaccccugcgccggcccgcgggcuucgc

SEQ ID NO: 309293 - RNA, 32 nt, Homo Sapiens
uugcugcaaauaaacguaaaaauacuguuaaa

SEQ ID NO: 309294 - RNA, 32 nt, Homo Sapiens
cggccauguccggcugcacgggcgccuucccg

SEQ ID NO: 309295 - RNA, 32 nt, Homo Sapiens
caagguguaaaaaugauaaaauacuauuuuaa

SEQ ID NO: 309296 - RNA, 32 nt, Homo Sapiens
acaggcugcccucucccucucugcccccaccu

SEQ ID NO: 309297 - RNA, 32 nt, Homo Sapiens
uccugcacacuggccccggcccacggcacagc

SEQ ID NO: 309298 - RNA, 32 nt, Homo Sapiens
ccuccugcuucccccaggguucccagaggcga

SEQ ID NO: 309299 - RNA, 32 nt, Homo Sapiens
aagaacuaaaaguaugaaaaugucucacuaaa

SEQ ID NO: 309300 - RNA, 32 nt, Homo Sapiens
gaaguauaaaaaguugagaggaaugacaacug

SEQ ID NO: 309301 - RNA, 32 nt, Homo Sapiens
uuuaaaaaugaaauauuucaaagacugaauau

SEQ ID NO: 309302 - RNA, 32 nt, Homo Sapiens
ugcaggaccugccuggagguucucccuggggg

SEQ ID NO: 309303 - RNA, 32 nt, Homo Sapiens
uaggaaaaauacaguaaaguugcaaugaagag

SEQ ID NO: 309304 - RNA, 32 nt, Homo Sapiens
ugcguccgugacaucaucaucauggcaacaag

SEQ ID NO: 309305 - RNA, 32 nt, Homo Sapiens
augccccucucuacaaggucuuuuugguuuca

SEQ ID NO: 309306 - RNA, 32 nt, Homo Sapiens
ugggucugagcuguggaaaagggagagcagag

SEQ ID NO: 309307 - RNA, 32 nt, Homo Sapiens
cgauccgggcggugcuggcagccggagcggcg

SEQ ID NO: 309308 - RNA, 32 nt, Homo Sapiens
gagggauauuccaagacucaguauaaacaagu

SEQ ID NO: 309309 - RNA, 32 nt, Homo Sapiens
caguguuccaugaagugccaaaauuaugaugu

SEQ ID NO: 309310 - RNA, 32 nt, Homo Sapiens
augugucucuucucuuuguugcugagaaggua

SEQ ID NO: 309311 - RNA, 32 nt, Homo Sapiens
uuuacaacagcauuuucuuaaacauaaucugu

SEQ ID NO: 309312 - RNA, 32 nt, Homo Sapiens
caaggccuguuggaucucaucauccauauccc

SEQ ID NO: 309313 - RNA, 32 nt, Homo Sapiens
agauccugcauuaagaaauucaaaaaucaguu

SEQ ID NO: 309314 - RNA, 32 nt, Homo Sapiens
gugauccuccuacuucagccuccugguagcug

SEQ ID NO: 309315 - RNA, 32 nt, Homo Sapiens
cuccgcccgccgggcucugcguccccacgucc

SEQ ID NO: 309316 - RNA, 32 nt, Homo Sapiens
cccccuggccagggccaucuccugucaccaug

SEQ ID NO: 309317 - RNA, 32 nt, Homo Sapiens
aauaaaauccuccguguucauucagaccucac

SEQ ID NO: 309318 - RNA, 32 nt, Homo Sapiens
gggcuguggggacuugggggacaguaaucaag

SEQ ID NO: 309319 - RNA, 32 nt, Homo Sapiens
auguuuccuucuuguuauuuaugcuauucucu

SEQ ID NO: 309320 - RNA, 32 nt, Homo Sapiens
cauuuaaaauagaagaggcaucaugcugaaga

SEQ ID NO: 309321 - RNA, 32 nt, Homo Sapiens
aauuuuuuaaagacuuuuucugaucuuugaac

SEQ ID NO: 309322 - RNA, 32 nt, Homo Sapiens
aggccauguccuugucugguccugcuucuggc

SEQ ID NO: 309323 - RNA, 32 nt, Homo Sapiens
ugugccggccauucguuuucucucucucccuu

SEQ ID NO: 309324 - RNA, 31 nt, Homo Sapiens
cuaagaagcugagcagcuccaagggccucgu

SEQ ID NO: 309325 - RNA, 32 nt, Homo Sapiens
agagauuggagagcggguguggcugcccaacc

SEQ ID NO: 309326 - RNA, 32 nt, Homo Sapiens
auagaggacuuccaaguaacuaggaagauuuc

SEQ ID NO: 309327 - RNA, 32 nt, Homo Sapiens
gagguagauuuaauaaacaacaaaaaucagcu

SEQ ID NO: 309328 - RNA, 32 nt, Homo Sapiens
cacucaggcauuccgcguggacaagcuucauc

SEQ ID NO: 309329 - RNA, 32 nt, Homo Sapiens
gggcccagaggagaggagacagacacacacug

SEQ ID NO: 309330 - RNA, 32 nt, Homo Sapiens
cgagucugggcuugggucccccugcugcucug

SEQ ID NO: 309331 - RNA, 32 nt, Homo Sapiens
gcgaggaccaauaauuuuaauuauuuauauuu

SEQ ID NO: 309332 - RNA, 30 nt, Homo Sapiens
aauaaaaugagauacaugcaaaauaauaug

SEQ ID NO: 309333 - RNA, 32 nt, Homo Sapiens
aacuguaaauguuuauuugauagguaaauaua

SEQ ID NO: 309334 - RNA, 32 nt, Homo Sapiens
gaggcaggagaauggcgugaaccagggaggag

SEQ ID NO: 309335 - RNA, 32 nt, Homo Sapiens
gaccagccgccucugaagcagccccggggaga

SEQ ID NO: 309336 - RNA, 32 nt, Homo Sapiens
uaaaaauacacagguauaccuaaaggcacuuu

SEQ ID NO: 309337 - RNA, 32 nt, Homo Sapiens
gccaucugccuuauagacaaauguagagaauu

SEQ ID NO: 309338 - RNA, 32 nt, Homo Sapiens
gcagcaugacaaacucaugaaauggugggaga

SEQ ID NO: 309339 - RNA, 32 nt, Homo Sapiens
agggauauuuccccugcuuccccacucaggca

SEQ ID NO: 309340 - RNA, 32 nt, Homo Sapiens
ggaguuuacugcagaguaauucuuacagugcu

SEQ ID NO: 309341 - RNA, 32 nt, Homo Sapiens
agugaugcaggcugcucuucccucaugugaga

SEQ ID NO: 309342 - RNA, 32 nt, Homo Sapiens
ucacucuccauggagccagagguaguaugaag

SEQ ID NO: 309343 - RNA, 32 nt, Homo Sapiens
ccucugcugaggaaacaguaccgaaguucuuu

SEQ ID NO: 309344 - RNA, 32 nt, Homo Sapiens
gcgccggagucaggccccugggcccccaggcu

SEQ ID NO: 309345 - RNA, 32 nt, Homo Sapiens
gcagagaggacaggggugggcuuuuguucaaa

SEQ ID NO: 309346 - RNA, 32 nt, Homo Sapiens
accagggcuguggaagggugggggugggucau

SEQ ID NO: 309347 - RNA, 32 nt, Homo Sapiens
aauucugaaacacuguagaauggauaaaaauu

SEQ ID NO: 309348 - RNA, 32 nt, Homo Sapiens
uggccaaaucaucaugcaaauauuauucuggg

SEQ ID NO: 309349 - RNA, 31 nt, Homo Sapiens
ugggccccacccuaggcucacaggaccagaa

SEQ ID NO: 309350 - RNA, 32 nt, Homo Sapiens
ugaaaaguaaaucacaacauauagggucaaau

SEQ ID NO: 309351 - RNA, 32 nt, Homo Sapiens
cccugggggucucagucaccgcgaggacucga

SEQ ID NO: 309352 - RNA, 32 nt, Homo Sapiens
ccggacaaauuuccugcuaggcugcggacgag

SEQ ID NO: 309353 - RNA, 30 nt, Homo Sapiens
aacuuguggggcguggggguagugaaaaau

SEQ ID NO: 309354 - RNA, 32 nt, Homo Sapiens
gacaguaggcccggcucugcccguagcccuga

SEQ ID NO: 309355 - RNA, 32 nt, Homo Sapiens
aguacagcugcaccgugcggcugcuggacgac

SEQ ID NO: 309356 - RNA, 32 nt, Homo Sapiens
ugacagugaugggacagggaggcuucagugcc

SEQ ID NO: 309357 - RNA, 32 nt, Homo Sapiens
cugcggccgcacuaaaaccucuuuccaaaaaa

SEQ ID NO: 309358 - RNA, 32 nt, Homo Sapiens
cuguauuccccuccuuccccugcuucauggaa

SEQ ID NO: 309359 - RNA, 32 nt, Homo Sapiens
aaucuuucauuuccuuucaaaaaacagagacu

SEQ ID NO: 309360 - RNA, 32 nt, Homo Sapiens
ggcacugccaucucuagaauugccacgagucu

SEQ ID NO: 309361 - RNA, 32 nt, Homo Sapiens
aguguggcuucugaccagcugcauagacaugg

SEQ ID NO: 309362 - RNA, 32 nt, Homo Sapiens
gagcggcggugaugaagacaaaauugaacauc

SEQ ID NO: 309363 - RNA, 32 nt, Homo Sapiens
cgugcuggagcaccugaccgccgagauccugg

SEQ ID NO: 309364 - RNA, 32 nt, Homo Sapiens
auguguuauuccauguaaauguuaugcaauga

SEQ ID NO: 309365 - RNA, 32 nt, Homo Sapiens
ggcggggagggguuguggggcuggggccucac

SEQ ID NO: 309366 - RNA, 32 nt, Homo Sapiens
uaaaaaaauaaucauguuugaauuguuuucuc

SEQ ID NO: 309367 - RNA, 32 nt, Homo Sapiens
cgugucauacccaugacuuccauugcacagug

SEQ ID NO: 309368 - RNA, 32 nt, Homo Sapiens
guccccggagcggggaggccaggccgggcaac

SEQ ID NO: 309369 - RNA, 32 nt, Homo Sapiens
gaggcuggcccggcuccuucgggcgucgcuuc

SEQ ID NO: 309370 - RNA, 32 nt, Homo Sapiens
cuucugacccagugugcgcccuugacugcuuu

SEQ ID NO: 309371 - RNA, 32 nt, Homo Sapiens
agugccucugccccucgggggacuggacacac

SEQ ID NO: 309372 - RNA, 32 nt, Homo Sapiens
aauacguauauuuuauuaguugaaauaaauga

SEQ ID NO: 309373 - RNA, 32 nt, Homo Sapiens
gaggccucugcaagauucugugggcagcuggc

SEQ ID NO: 309374 - RNA, 32 nt, Homo Sapiens
augcccagucuucaaauuucuaauguuuugca

SEQ ID NO: 309375 - RNA, 32 nt, Homo Sapiens
cguaaaacaagccccagccuuacucccggccc

SEQ ID NO: 309376 - RNA, 32 nt, Homo Sapiens
gggaaggccggaugcuggcccgccgggaccug

SEQ ID NO: 309377 - RNA, 32 nt, Homo Sapiens
uccucugaagcuuuuacccaagcccuuucuug

SEQ ID NO: 309378 - RNA, 32 nt, Homo Sapiens
uacuugcuuauuuauuugauuaggauaaauuc

SEQ ID NO: 309379 - RNA, 32 nt, Homo Sapiens
ucauuaaauaccuauaugaauaugagaucuga

SEQ ID NO: 309380 - RNA, 32 nt, Homo Sapiens
agcaagcccaaccugcaggugggagggaugug

SEQ ID NO: 309381 - RNA, 32 nt, Homo Sapiens
cccucugacuucuugcccuuuggaaauggugc

SEQ ID NO: 309382 - RNA, 32 nt, Homo Sapiens
guuaagagugaacacuguuugauuuuacuugg

SEQ ID NO: 309383 - RNA, 32 nt, Homo Sapiens
uggcuucaucuucagggacacccaauaucugg

SEQ ID NO: 309384 - RNA, 32 nt, Homo Sapiens
uugcauuaguacugucuuucuguggaguuugg

SEQ ID NO: 309385 - RNA, 32 nt, Homo Sapiens
ucuugcuuguaaaaauauguauuauacaucug

SEQ ID NO: 309386 - RNA, 32 nt, Homo Sapiens
aagccuuuguuguccucccauccauccauuaa

SEQ ID NO: 309387 - RNA, 32 nt, Homo Sapiens
agcccaggcugagacucuggggacaacaggag

SEQ ID NO: 309388 - RNA, 32 nt, Homo Sapiens
caucgucacugucggcggccaugacaccgcuc

SEQ ID NO: 309389 - RNA, 32 nt, Homo Sapiens
caaccucugauccugaggaccggccgcccacc

SEQ ID NO: 309390 - RNA, 32 nt, Homo Sapiens
guaguagcaacgccacuccuucucagucuuca

SEQ ID NO: 309391 - RNA, 32 nt, Homo Sapiens
uacuguagaagcuaaauugaucuuuauaauua

SEQ ID NO: 309392 - RNA, 32 nt, Homo Sapiens
augaccacccucguagacuuuuuccaugggau

SEQ ID NO: 309393 - RNA, 32 nt, Homo Sapiens
uugaggucugaggaccguggcugagggugcau

SEQ ID NO: 309394 - RNA, 32 nt, Homo Sapiens
gugaauuacauguuucaugaauccauuuggca

SEQ ID NO: 309395 - RNA, 32 nt, Homo Sapiens
cuuugggcugcgguugucaaggauucagagca

SEQ ID NO: 309396 - RNA, 32 nt, Homo Sapiens
cuuucuaacacacacacacacacacacacaca

SEQ ID NO: 309397 - RNA, 32 nt, Homo Sapiens
ugggcagggaugcacaaggcucuacuccaucc

SEQ ID NO: 309398 - RNA, 32 nt, Homo Sapiens
ccugcgagucggaagcgccccgcgcccccgcc

SEQ ID NO: 309399 - RNA, 32 nt, Homo Sapiens
gacgggcagcuagugagccagagggcgauccc

SEQ ID NO: 309400 - RNA, 32 nt, Homo Sapiens
agggucuuuguggauugcauguugacauugac

SEQ ID NO: 309401 - RNA, 32 nt, Homo Sapiens
ugaaacuaguccccuaccaccucgguaaugag

SEQ ID NO: 309402 - RNA, 32 nt, Homo Sapiens
gggaacccaaccgcggcgaccggacgugcacu

SEQ ID NO: 309403 - RNA, 32 nt, Homo Sapiens
gccccuagaaaccaccuggguucagccucucc

SEQ ID NO: 309404 - RNA, 32 nt, Homo Sapiens
ccaucgggacccgacgggccucugacuccagc

SEQ ID NO: 309405 - RNA, 32 nt, Homo Sapiens
aguaaccacgggguccaucuuuuacaucuggu

SEQ ID NO: 309406 - RNA, 32 nt, Homo Sapiens
guccccuagggucccuagaagggcaaagacca

SEQ ID NO: 309407 - RNA, 32 nt, Homo Sapiens
cuagaaacaaacaaaacuuuggaccaaaaucc

SEQ ID NO: 309408 - RNA, 32 nt, Homo Sapiens
aaagauauauuuuaaguggugcacuaauuagu

SEQ ID NO: 309409 - RNA, 32 nt, Homo Sapiens
gucaacagugcuucccaaagugggugguguga

SEQ ID NO: 309410 - RNA, 32 nt, Homo Sapiens
ucugcuuucccuccccuaacagaaggguaccc

SEQ ID NO: 309411 - RNA, 32 nt, Homo Sapiens
auggaaucuagauagcauuuaucccucuggug

SEQ ID NO: 309412 - RNA, 32 nt, Homo Sapiens
aacugguugcugucacuuggauuucuagcuuu

SEQ ID NO: 309413 - RNA, 32 nt, Homo Sapiens
ggccuuuccaaugcauuccccaucccaccccc

SEQ ID NO: 309414 - RNA, 31 nt, Homo Sapiens
caggucgcgcgguaccugcccccagcccugg

SEQ ID NO: 309415 - RNA, 32 nt, Homo Sapiens
uuccucuccaaagcgccagaaccuccuucucu

SEQ ID NO: 309416 - RNA, 30 nt, Homo Sapiens
guaagaacggcugugggggaagucagcugg

SEQ ID NO: 309417 - RNA, 32 nt, Homo Sapiens
gccucuuuguggccaauugugcucuucugcug

SEQ ID NO: 309418 - RNA, 32 nt, Homo Sapiens
cucugacggcgaucucgcggcccgagagccuu

SEQ ID NO: 309419 - RNA, 32 nt, Homo Sapiens
aaacuguuuucagauccaagugcucagaucua

SEQ ID NO: 309420 - RNA, 32 nt, Homo Sapiens
cgcucauccuccccgccugccccguucccucc

SEQ ID NO: 309421 - RNA, 32 nt, Homo Sapiens
gucuccgcccuucccgccucccgucuccgagc

SEQ ID NO: 309422 - RNA, 31 nt, Homo Sapiens
ugggcuucacccucagaaccacauugauucc

SEQ ID NO: 309423 - RNA, 32 nt, Homo Sapiens
gggagcuccgcgggggcagcaggcaggcccca

SEQ ID NO: 309424 - RNA, 32 nt, Homo Sapiens
gcgugugauuugcugauuucgguuggagaccu

SEQ ID NO: 309425 - RNA, 32 nt, Homo Sapiens
agggaaccauuuaagaaaagauaccaaaguag

SEQ ID NO: 309426 - RNA, 32 nt, Homo Sapiens
ugggcagugucugcuauagggcuucaggcauu

SEQ ID NO: 309427 - RNA, 32 nt, Homo Sapiens
ggcgucugcagggccacucuuggcagagacuu

SEQ ID NO: 309428 - RNA, 32 nt, Homo Sapiens
acauuuuuaguagaagagaaagaugcaggccc

SEQ ID NO: 309429 - RNA, 32 nt, Homo Sapiens
auuuuuuccaaaccaggauuccuuacuauuga

SEQ ID NO: 309430 - RNA, 32 nt, Homo Sapiens
accgaggcagcagagacuaugauagaggcuau

SEQ ID NO: 309431 - RNA, 32 nt, Homo Sapiens
aagaacuuuugaaaauggaaggauuaguaugg

SEQ ID NO: 309432 - RNA, 32 nt, Homo Sapiens
cggaagaagugaaacguguggaaaaugccaag

SEQ ID NO: 309433 - RNA, 32 nt, Homo Sapiens
gaaguaaaaugcauauauaaaaaaugaaacug

SEQ ID NO: 309434 - RNA, 32 nt, Homo Sapiens
gcaagcguugggcaauggagaaggcaggaagg

SEQ ID NO: 309435 - RNA, 32 nt, Homo Sapiens
uuuccauuaugugaaugaaauuuuaaaagaca

SEQ ID NO: 309436 - RNA, 32 nt, Homo Sapiens
gcaagugagagccguacgggcacugggcgacu

SEQ ID NO: 309437 - RNA, 32 nt, Homo Sapiens
gauugugucuuugaaugacaaauguacugcug

SEQ ID NO: 309438 - RNA, 32 nt, Homo Sapiens
gcuggggcgaggggaggagggggaucagcuuc

SEQ ID NO: 309439 - RNA, 32 nt, Homo Sapiens
cucggagcaguagaccggcccgcgccccggga

SEQ ID NO: 309440 - RNA, 32 nt, Homo Sapiens
cgggccccuggcgggcgggcgguacagcccca

SEQ ID NO: 309441 - RNA, 32 nt, Homo Sapiens
uuucuguugcugucucuugccaugcacuugug

SEQ ID NO: 309442 - RNA, 32 nt, Homo Sapiens
gccuaccucugacagcgcggggcucacuaguu

SEQ ID NO: 309443 - RNA, 32 nt, Homo Sapiens
uugcgggcggcacuuuuuccagguuguuaauc

SEQ ID NO: 309444 - RNA, 32 nt, Homo Sapiens
aacuacggauugcugcaaaccacaccuucucu

SEQ ID NO: 309445 - RNA, 32 nt, Homo Sapiens
cuauuuaauguuuuuaaucacauuuuguauga

SEQ ID NO: 309446 - RNA, 32 nt, Homo Sapiens
gcucaccuguguuuccucaguggcuccaccuc

SEQ ID NO: 309447 - RNA, 32 nt, Homo Sapiens
uuugcucuagaauaccguaggucuauccuuag

SEQ ID NO: 309448 - RNA, 32 nt, Homo Sapiens
uacucaguucagucuuuuuuugcucauaaauu

SEQ ID NO: 309449 - RNA, 32 nt, Homo Sapiens
cuugcuauauaaauaaagcaaauauauuuagg

SEQ ID NO: 309450 - RNA, 32 nt, Homo Sapiens
cguugaacaagcugugucuaagaucucuacuu

SEQ ID NO: 309451 - RNA, 32 nt, Homo Sapiens
cugccagcauccgccagugccuugccagugug

SEQ ID NO: 309452 - RNA, 32 nt, Homo Sapiens
ugaaguuuucuuuauuacggauucaaagacuu

SEQ ID NO: 309453 - RNA, 32 nt, Homo Sapiens
aauuguuuuuucuguccgcaacacuggcuccc

SEQ ID NO: 309454 - RNA, 32 nt, Homo Sapiens
gaacuaagaacaaugguuaaggcagaauaaug

SEQ ID NO: 309455 - RNA, 32 nt, Homo Sapiens
gccaggccccugcugaagggccccagaccacc

SEQ ID NO: 309456 - RNA, 32 nt, Homo Sapiens
agcccacuaggggucuuaauuuccucucuuuu

SEQ ID NO: 309457 - RNA, 32 nt, Homo Sapiens
auaacuuuuuucugcaaauauucuggugacuu

SEQ ID NO: 309458 - RNA, 32 nt, Homo Sapiens
uucccagcccucgccggauucaacuuuugcca

SEQ ID NO: 309459 - RNA, 32 nt, Homo Sapiens
aacauuacagaaaauagaaauacaaacaaggu

SEQ ID NO: 309460 - RNA, 32 nt, Homo Sapiens
uugaugguccucaugcaaaacucucaauucuu

SEQ ID NO: 309461 - RNA, 32 nt, Homo Sapiens
aaaugugcuguaaaguuucuucuuuccaguaa

SEQ ID NO: 309462 - RNA, 32 nt, Homo Sapiens
uuugagugcuugucaucagguguuuuccuuaa

SEQ ID NO: 309463 - RNA, 30 nt, Homo Sapiens
aggacggcgcccgccuggcgccgcuucccu

SEQ ID NO: 309464 - RNA, 32 nt, Homo Sapiens
uaugcuguuuuaauaauuaugugccauuuuaa

SEQ ID NO: 309465 - RNA, 32 nt, Homo Sapiens
auugaaaugugugaacguuuugaaaagcuaca

SEQ ID NO: 309466 - RNA, 32 nt, Homo Sapiens
aaccgcgaaaccgacuggagcaggagcuggga

SEQ ID NO: 309467 - RNA, 32 nt, Homo Sapiens
ccugggagaggcugggugagcuggggugggau

SEQ ID NO: 309468 - RNA, 32 nt, Homo Sapiens
aggcagcuggggcagcagcaguggggaguauc

SEQ ID NO: 309469 - RNA, 32 nt, Homo Sapiens
cacagcuggcauauggaggcuguuaauaagcu

SEQ ID NO: 309470 - RNA, 32 nt, Homo Sapiens
uuauuuuggggggagggaaagggggcuagucc

SEQ ID NO: 309471 - RNA, 32 nt, Homo Sapiens
ugcauugcguuucuuucccugcuuuugagaua

SEQ ID NO: 309472 - RNA, 32 nt, Homo Sapiens
aaaacccaauuuggauaauuuucauuaucuuu

SEQ ID NO: 309473 - RNA, 32 nt, Homo Sapiens
cuguggaaggguguauuuugcuggaaucugga

SEQ ID NO: 309474 - RNA, 32 nt, Homo Sapiens
gccgggccgggcgggagugcaggggacgugag

SEQ ID NO: 309475 - RNA, 32 nt, Homo Sapiens
uagaauacugcuagucucccaaguccuguucc

SEQ ID NO: 309476 - RNA, 32 nt, Homo Sapiens
guacaguguaaauuaaauauauucaauauauu

SEQ ID NO: 309477 - RNA, 32 nt, Homo Sapiens
uucugguaugcuuuccucucuuuuuaaaggaa

SEQ ID NO: 309478 - RNA, 32 nt, Homo Sapiens
guagccugaagauaacagugcacaagguggga

SEQ ID NO: 309479 - RNA, 32 nt, Homo Sapiens
gauacuuuggaaagaugcaugccaguggaugc

SEQ ID NO: 309480 - RNA, 32 nt, Homo Sapiens
uaaaggagaaaacaacucuauguacaugcugg

SEQ ID NO: 309481 - RNA, 32 nt, Homo Sapiens
auuacuugaaaacugguggaaaaaagagacca

SEQ ID NO: 309482 - RNA, 32 nt, Homo Sapiens
cggcuggauagaggcauauuuuuaguuugaau

SEQ ID NO: 309483 - RNA, 29 nt, Homo Sapiens
cuucugauaggguuugauuuucuauuaga

SEQ ID NO: 309484 - RNA, 32 nt, Homo Sapiens
cuuuauguuuuaaaaaaugucacucuuucaaa

SEQ ID NO: 309485 - RNA, 32 nt, Homo Sapiens
gguggggccuggcagggcuugcuugagccaaa

SEQ ID NO: 309486 - RNA, 32 nt, Homo Sapiens
cacugguauuaucucagcaucaugggcaauuu

SEQ ID NO: 309487 - RNA, 32 nt, Homo Sapiens
acuucuagaauaacccagaugcgcuuuaauuu

SEQ ID NO: 309488 - RNA, 32 nt, Homo Sapiens
gauguggaugggggcgggguuggggguaaaaa

SEQ ID NO: 309489 - RNA, 32 nt, Homo Sapiens
aauuauccccucuuacacacaaacacacauac

SEQ ID NO: 309490 - RNA, 31 nt, Homo Sapiens
gaggagauggaggagcuggagaaggagcugg

SEQ ID NO: 309491 - RNA, 32 nt, Homo Sapiens
guacccuuguuuugaaacuagaaaucuguccu

SEQ ID NO: 309492 - RNA, 32 nt, Homo Sapiens
ggcugaaacaccccccucccccgcuuaccaca

SEQ ID NO: 309493 - RNA, 32 nt, Homo Sapiens
caaaagaauguuaguagguuuauauuaaucau

SEQ ID NO: 309494 - RNA, 32 nt, Homo Sapiens
gggagauggcggcggcagcggcggcgccgaga

SEQ ID NO: 309495 - RNA, 32 nt, Homo Sapiens
auccuggcuaacccggugaaaccccgucucua

SEQ ID NO: 309496 - RNA, 32 nt, Homo Sapiens
ucacggcgcccggcccuccuugggcugcggcu

SEQ ID NO: 309497 - RNA, 32 nt, Homo Sapiens
guaauaaaugucagcuuuugauagcauagcag

SEQ ID NO: 309498 - RNA, 32 nt, Homo Sapiens
cauuugcccucccuggccaugccuucuugccu

SEQ ID NO: 309499 - RNA, 32 nt, Homo Sapiens
ggagugucagccuugggcucucuucuguccca

SEQ ID NO: 309500 - RNA, 32 nt, Homo Sapiens
ccucggaggcuagccucggugcucucgcaggc

SEQ ID NO: 309501 - RNA, 32 nt, Homo Sapiens
gagaaacauuuaucuguauaaaacauauuuuu

SEQ ID NO: 309502 - RNA, 32 nt, Homo Sapiens
cccgcccugccgcccugggagcuccccggccg

SEQ ID NO: 309503 - RNA, 32 nt, Homo Sapiens
gaagcaggaggcuuugaugaccaagagccccg

SEQ ID NO: 309504 - RNA, 32 nt, Homo Sapiens
cuggccguggcauccucucuccaggucugcuc

SEQ ID NO: 309505 - RNA, 32 nt, Homo Sapiens
uuugugucauggacuccucagaauaauggguu

SEQ ID NO: 309506 - RNA, 32 nt, Homo Sapiens
ggagcccaauuuguauucagucuaaauuuguu

SEQ ID NO: 309507 - RNA, 32 nt, Homo Sapiens
uaucuagugaauggagaauacauggagaaacu

SEQ ID NO: 309508 - RNA, 32 nt, Homo Sapiens
uuuccaaaaacaaaaaauaaauccauuacaug

SEQ ID NO: 309509 - RNA, 32 nt, Homo Sapiens
agaugaugaugauaucugaauucaccagcuga

SEQ ID NO: 309510 - RNA, 32 nt, Homo Sapiens
aagaaacuuguuaaaugaaaggacucuuuacc

SEQ ID NO: 309511 - RNA, 32 nt, Homo Sapiens
uauuaaacuuagaugaaagagcugcuuccauu

SEQ ID NO: 309512 - RNA, 32 nt, Homo Sapiens
cugagcccgcuggcugccccaguagcaucugc

SEQ ID NO: 309513 - RNA, 32 nt, Homo Sapiens
gccauuggaaaacuucaguauuuccacuuggu

SEQ ID NO: 309514 - RNA, 32 nt, Homo Sapiens
gcgcgcgaggcuuccccucguuuggcggcggc

SEQ ID NO: 309515 - RNA, 32 nt, Homo Sapiens
gacucuugaaccuggaguucaucacauuacgu

SEQ ID NO: 309516 - RNA, 32 nt, Homo Sapiens
gacugcuguuuguuuaccgcacgcacagcucu

SEQ ID NO: 309517 - RNA, 32 nt, Homo Sapiens
gacgcagcccccagcccagggccgcccuagca

SEQ ID NO: 309518 - RNA, 32 nt, Homo Sapiens
gaaggaggggcaggaggcagggguggcuucug

SEQ ID NO: 309519 - RNA, 32 nt, Homo Sapiens
aucauauaguaagcagaagaguugccaugaaa

SEQ ID NO: 309520 - RNA, 32 nt, Homo Sapiens
agcagugugcugucacacaccguuaagccaga

SEQ ID NO: 309521 - RNA, 32 nt, Homo Sapiens
cuuaagaagggguuagugcaucuuucaggggu

SEQ ID NO: 309522 - RNA, 32 nt, Homo Sapiens
gacuucaggcuaauagagagguccagauguca

SEQ ID NO: 309523 - RNA, 32 nt, Homo Sapiens
uuaaaaaaugucaguguagaaaacauuuggga

SEQ ID NO: 309524 - RNA, 32 nt, Homo Sapiens
uaggugaugggggacgagggccaggcacccac

SEQ ID NO: 309525 - RNA, 32 nt, Homo Sapiens
gccaugccagcgcccaggccgacggcaaaucc

SEQ ID NO: 309526 - RNA, 32 nt, Homo Sapiens
gagcaucgcugggccugcgccagagugagggg

SEQ ID NO: 309527 - RNA, 32 nt, Homo Sapiens
ggcuggguagacggaggcacucaaccuggcag

SEQ ID NO: 309528 - RNA, 32 nt, Homo Sapiens
cgugucugaggcggcgggggcggccggaggag

SEQ ID NO: 309529 - RNA, 32 nt, Homo Sapiens
gucauucugucaguuuuuaaauuuauguauau

SEQ ID NO: 309530 - RNA, 32 nt, Homo Sapiens
ucacguacauaaauacacacagauauguugcu

SEQ ID NO: 309531 - RNA, 32 nt, Homo Sapiens
uaagaaccugcugcugggucccggcaagccca

SEQ ID NO: 309532 - RNA, 32 nt, Homo Sapiens
gccgcagcccucuuuuuucucuagccaagccu

SEQ ID NO: 309533 - RNA, 32 nt, Homo Sapiens
uggaccaaaccacgugguuugcagcuuuucua

SEQ ID NO: 309534 - RNA, 32 nt, Homo Sapiens
gggucaagcauuugucuugacuugcuuuccuc

SEQ ID NO: 309535 - RNA, 32 nt, Homo Sapiens
uaggucuacguccccagcuccagccgccggcu

SEQ ID NO: 309536 - RNA, 32 nt, Homo Sapiens
aaauaaaacuguuaaaucauggccugauauca

SEQ ID NO: 309537 - RNA, 32 nt, Homo Sapiens
guguaguugaaguaauuauaauuuauaucaaa

SEQ ID NO: 309538 - RNA, 32 nt, Homo Sapiens
gugccaggggagucaggguuguagccaagacg

SEQ ID NO: 309539 - RNA, 32 nt, Homo Sapiens
ccuucuccgugggaaccccaggccucuugccu

SEQ ID NO: 309540 - RNA, 32 nt, Homo Sapiens
gggcuacaugugcaucaacauacucugguuuc

SEQ ID NO: 309541 - RNA, 32 nt, Homo Sapiens
ccuuugaagaucuccagguggacuucacagag

SEQ ID NO: 309542 - RNA, 32 nt, Homo Sapiens
acacuggacccugcuuugccuguccguccuuc

SEQ ID NO: 309543 - RNA, 32 nt, Homo Sapiens
uguuucccaucccacugcucccccaacacaaa

SEQ ID NO: 309544 - RNA, 32 nt, Homo Sapiens
gcucugcaggggcagcacagcuggggugcagg

SEQ ID NO: 309545 - RNA, 32 nt, Homo Sapiens
gcucugaggaagcccacguuucuuuuguuaac

SEQ ID NO: 309546 - RNA, 32 nt, Homo Sapiens
agccaccgccgcugcgccagcccaggacgacc

SEQ ID NO: 309547 - RNA, 32 nt, Homo Sapiens
gaggugcauugcccucuaaaucuuuaaacaag

SEQ ID NO: 309548 - RNA, 32 nt, Homo Sapiens
uuucuacaaaaauuguuuucuucauccuugug

SEQ ID NO: 309549 - RNA, 32 nt, Homo Sapiens
ugucucaacuaauaauacaaaauuagccaggc

SEQ ID NO: 309550 - RNA, 32 nt, Homo Sapiens
uaagauuuuuaaaaucuuguuuaaaaacugua

SEQ ID NO: 309551 - RNA, 32 nt, Homo Sapiens
aauugacuuuuucauuugauauuaucuauaug

SEQ ID NO: 309552 - RNA, 32 nt, Homo Sapiens
accagcauguaccccauggauuuaaucuuauc

SEQ ID NO: 309553 - RNA, 32 nt, Homo Sapiens
ggcccacugcaucguuucaucuuccaacucaa

SEQ ID NO: 309554 - RNA, 32 nt, Homo Sapiens
gcaugaaagguuaaaaaggaaauacugcacaa

SEQ ID NO: 309555 - RNA, 32 nt, Homo Sapiens
cucucugcucucugcuggccuacagcuugucu

SEQ ID NO: 309556 - RNA, 32 nt, Homo Sapiens
gagaagccagcuuguuuacaugcuuauuccau

SEQ ID NO: 309557 - RNA, 32 nt, Homo Sapiens
cuuuguauuaaaccucuuugucuacacaugua

SEQ ID NO: 309558 - RNA, 32 nt, Homo Sapiens
agaccaacuugggcaacauagcaagaccccau

SEQ ID NO: 309559 - RNA, 32 nt, Homo Sapiens
gcgccaccuuggaugcugcgggcugguacauu

SEQ ID NO: 309560 - RNA, 32 nt, Homo Sapiens
ugcauugcuuuccccucgcccgcgguucuugg

SEQ ID NO: 309561 - RNA, 32 nt, Homo Sapiens
uaugucuguaaguuggaagagaauuaaacgaa

SEQ ID NO: 309562 - RNA, 32 nt, Homo Sapiens
uguuucuuuggacagauuaaguugauauugug

SEQ ID NO: 309563 - RNA, 32 nt, Homo Sapiens
ccagcuccaugcccggccucagcagggccgcc

SEQ ID NO: 309564 - RNA, 32 nt, Homo Sapiens
guucccccacccacaggagccuugggccgacc

SEQ ID NO: 309565 - RNA, 32 nt, Homo Sapiens
ugacccgacgggggcccggcccacugccuacc

SEQ ID NO: 309566 - RNA, 32 nt, Homo Sapiens
aagaaauaaaauguuuaugaaccagcgaaaaa

SEQ ID NO: 309567 - RNA, 32 nt, Homo Sapiens
agaucuuuugaccuuuggcuuuauuugggagg

SEQ ID NO: 309568 - RNA, 30 nt, Homo Sapiens
ugcaggccacuugcauugcgucuuccaggc

SEQ ID NO: 309569 - RNA, 32 nt, Homo Sapiens
uccauggccuguuucuccugcugucuggguga

SEQ ID NO: 309570 - RNA, 32 nt, Homo Sapiens
ggccgggacaaaggccucucaucaccacagga

SEQ ID NO: 309571 - RNA, 32 nt, Homo Sapiens
uguccaagugguuccagugucuggaggcgcug

SEQ ID NO: 309572 - RNA, 32 nt, Homo Sapiens
cagugacuggagagcuccauggaaagucucuc

SEQ ID NO: 309573 - RNA, 32 nt, Homo Sapiens
uaccagaaggugcggucuagggaccagugaau

SEQ ID NO: 309574 - RNA, 32 nt, Homo Sapiens
ggcacucagugagccuccugugccuggcccca

SEQ ID NO: 309575 - RNA, 32 nt, Homo Sapiens
cggcaggggggccgcacagcgcggcugggacc

SEQ ID NO: 309576 - RNA, 32 nt, Homo Sapiens
caacucgcaccaagagcugcugaugagagaga

SEQ ID NO: 309577 - RNA, 32 nt, Homo Sapiens
gcagaauccaaguuuacaaaccaccagaacaa

SEQ ID NO: 309578 - RNA, 32 nt, Homo Sapiens
acacuuuuuaggaugcuuggugaacauaacac

SEQ ID NO: 309579 - RNA, 32 nt, Homo Sapiens
ccuccuaccugacagacgcuccaggucgucua

SEQ ID NO: 309580 - RNA, 32 nt, Homo Sapiens
caaagccuuuccuacuuuuuuaucccuuuaag

SEQ ID NO: 309581 - RNA, 32 nt, Homo Sapiens
uccuccucaugcccugccuuguccuugucgug

SEQ ID NO: 309582 - RNA, 32 nt, Homo Sapiens
gaugaaguuuccaguaaggaagugacagugca

SEQ ID NO: 309583 - RNA, 32 nt, Homo Sapiens
gccuucaggcuguuuucuuauuuuucugacug

SEQ ID NO: 309584 - RNA, 32 nt, Homo Sapiens
ucaauauuuguagguuugauaaauuucacagu

SEQ ID NO: 309585 - RNA, 32 nt, Homo Sapiens
ggugcggaucccccagaugcccgccccgcccc

SEQ ID NO: 309586 - RNA, 32 nt, Homo Sapiens
agggccugcgggugggguccccuggcgggaag

SEQ ID NO: 309587 - RNA, 32 nt, Homo Sapiens
uuauagaaaaggaacaguugcauuuagcuucu

SEQ ID NO: 309588 - RNA, 32 nt, Homo Sapiens
uucucagauaccauggauguggaugacuuccc

SEQ ID NO: 309589 - RNA, 32 nt, Homo Sapiens
ugaguagcugaccccuucuuccacccgccuuc

SEQ ID NO: 309590 - RNA, 29 nt, Homo Sapiens
agugagaucuagggauaccacagaaaugg

SEQ ID NO: 309591 - RNA, 32 nt, Homo Sapiens
gcucggucccucgcuuccccgccgggcucuag

SEQ ID NO: 309592 - RNA, 32 nt, Homo Sapiens
guggaccuuggugacaauccugcuuuguuaaa

SEQ ID NO: 309593 - RNA, 32 nt, Homo Sapiens
acaagcugagccauauguacauaaucuagauu

SEQ ID NO: 309594 - RNA, 32 nt, Homo Sapiens
cacugcacuccagccugggcgacugugagacc

SEQ ID NO: 309595 - RNA, 32 nt, Homo Sapiens
aggcugcacccucuccgacccccaggcccaau

SEQ ID NO: 309596 - RNA, 32 nt, Homo Sapiens
auuuuuuuuucuucuuuuuaaaaagcaagguu

SEQ ID NO: 309597 - RNA, 32 nt, Homo Sapiens
uuuuucuuuuuaacuuuuuuuauauuaguaau

SEQ ID NO: 309598 - RNA, 32 nt, Homo Sapiens
cuuccccucucuucuuuuuucagggugaggug

SEQ ID NO: 309599 - RNA, 32 nt, Homo Sapiens
gcugccugccuugcuuccucuugcuuacucac

SEQ ID NO: 309600 - RNA, 32 nt, Homo Sapiens
cuugcuggggcgcggggcgcggcccccggaga

SEQ ID NO: 309601 - RNA, 32 nt, Homo Sapiens
uccuucuuucccuuggacgcccagugcuggcc

SEQ ID NO: 309602 - RNA, 32 nt, Homo Sapiens
cuucuguaucuaaaacaauacaucucaaucuu

SEQ ID NO: 309603 - RNA, 32 nt, Homo Sapiens
gauuucccaauuuaaccuuagguuucuguugc

SEQ ID NO: 309604 - RNA, 32 nt, Homo Sapiens
ggcggguagaggggcgcgggcgaggcggcgca

SEQ ID NO: 309605 - RNA, 32 nt, Homo Sapiens
gggccucgccuggggagggccuggggcagggc

SEQ ID NO: 309606 - RNA, 32 nt, Homo Sapiens
cuucucugaaauguauucuuuguggaagaugc

SEQ ID NO: 309607 - RNA, 32 nt, Homo Sapiens
gcugaucaugauagguuugguuuucuacagau

SEQ ID NO: 309608 - RNA, 32 nt, Homo Sapiens
uaauggguguugccauagcagacgcugcuaau

SEQ ID NO: 309609 - RNA, 32 nt, Homo Sapiens
caaggcuccaggccccaccuccuccuccauac

SEQ ID NO: 309610 - RNA, 32 nt, Homo Sapiens
aucgcgguuuggaaaauauuuuguucaagaua

SEQ ID NO: 309611 - RNA, 32 nt, Homo Sapiens
uuuaaaaguuuaaugauacuucugauguuucg

SEQ ID NO: 309612 - RNA, 32 nt, Homo Sapiens
gacuuaaucaacuauaaaagcuuacaauuagu

SEQ ID NO: 309613 - RNA, 32 nt, Homo Sapiens
caauggggaacaggcccuccccaucaguauug

SEQ ID NO: 309614 - RNA, 32 nt, Homo Sapiens
uguccacaguacuccuggucuuucuuucugcu

SEQ ID NO: 309615 - RNA, 32 nt, Homo Sapiens
aaaggccgucaacgaggcgguguggguggagu

SEQ ID NO: 309616 - RNA, 32 nt, Homo Sapiens
ugggcgccccccacccucccccggacucgaca

SEQ ID NO: 309617 - RNA, 32 nt, Homo Sapiens
gaaugugcugaauaacauccaaacugcaucgc

SEQ ID NO: 309618 - RNA, 32 nt, Homo Sapiens
aaggacaggggcggcccgacugggcgauauuu

SEQ ID NO: 309619 - RNA, 32 nt, Homo Sapiens
gcuuucccaggcaccgccccagccccaccaca

SEQ ID NO: 309620 - RNA, 32 nt, Homo Sapiens
cuuuuaaaaaugguagcuuuugugaaauagaa

SEQ ID NO: 309621 - RNA, 32 nt, Homo Sapiens
gagacucggggagcagggaggggggaagagac

SEQ ID NO: 309622 - RNA, 32 nt, Homo Sapiens
caguacauuuuucuucuaauaugauggagaca

SEQ ID NO: 309623 - RNA, 32 nt, Homo Sapiens
uuaaauuuaguguacaaauguaucauaauuau

SEQ ID NO: 309624 - RNA, 32 nt, Homo Sapiens
ugccccagauugcuucauuugcugggugugga

SEQ ID NO: 309625 - RNA, 32 nt, Homo Sapiens
uuugucacauaaaaugugcuaugaauguugag

SEQ ID NO: 309626 - RNA, 32 nt, Homo Sapiens
ggccgggcagcccgcgcgacuuucggaacaug

SEQ ID NO: 309627 - RNA, 32 nt, Homo Sapiens
gagggcgaggcggccacgcggggccgggaaug

SEQ ID NO: 309628 - RNA, 32 nt, Homo Sapiens
guugccugucagcagagauaggagugaaguug

SEQ ID NO: 309629 - RNA, 32 nt, Homo Sapiens
guguaucugguccuuccuccccagcuuuugug

SEQ ID NO: 309630 - RNA, 32 nt, Homo Sapiens
cagccucccuucuccuuccacucccuuaguac

SEQ ID NO: 309631 - RNA, 32 nt, Homo Sapiens
cucuuucucccucucuucuccaaucaagcacu

SEQ ID NO: 309632 - RNA, 32 nt, Homo Sapiens
uaggccgcugaucggccgcgggucuugucgac

SEQ ID NO: 309633 - RNA, 32 nt, Homo Sapiens
cagggggugccgugagacuucaaggcuuggcc

SEQ ID NO: 309634 - RNA, 32 nt, Homo Sapiens
ggccauuaacugugucuuugugguguccucug

SEQ ID NO: 309635 - RNA, 32 nt, Homo Sapiens
auuucuuaaucuuaaaugcuuauggaagaugu

SEQ ID NO: 309636 - RNA, 32 nt, Homo Sapiens
agagugcaaauacuaucuucaauccuucaguc

SEQ ID NO: 309637 - RNA, 32 nt, Homo Sapiens
accgcauagcucgaccuucauggcggcagcuc

SEQ ID NO: 309638 - RNA, 32 nt, Homo Sapiens
ggggacagggcagugcaugugcuuggacugag

SEQ ID NO: 309639 - RNA, 32 nt, Homo Sapiens
uggacuuuucugcacaguguuuucauaaagau

SEQ ID NO: 309640 - RNA, 32 nt, Homo Sapiens
uucccgcacucuauucccccagccucuuucug

SEQ ID NO: 309641 - RNA, 32 nt, Homo Sapiens
caaagugugcugggcacacacccugcaguggg

SEQ ID NO: 309642 - RNA, 32 nt, Homo Sapiens
uugugguugcugucauauuugcucuagaagaa

SEQ ID NO: 309643 - RNA, 32 nt, Homo Sapiens
cagcugaagauaauuucagaaacuucccaggc

SEQ ID NO: 309644 - RNA, 32 nt, Homo Sapiens
gcugugucggugaguucuggucaaccugcaac

SEQ ID NO: 309645 - RNA, 32 nt, Homo Sapiens
caggaaagaugcagccacuccugcuucugcug

SEQ ID NO: 309646 - RNA, 32 nt, Homo Sapiens
auggagggagacugaggcaggguggggacacc

SEQ ID NO: 309647 - RNA, 32 nt, Homo Sapiens
agagaauuuuuguaaugguucuuaauaauuuu

SEQ ID NO: 309648 - RNA, 32 nt, Homo Sapiens
cugagccugguugauguguuucugggauugua

SEQ ID NO: 309649 - RNA, 32 nt, Homo Sapiens
aucccugcaggacaaacgccccugcccugcca

SEQ ID NO: 309650 - RNA, 32 nt, Homo Sapiens
uuucaaacgcugacccugccagcccuccccuc

SEQ ID NO: 309651 - RNA, 32 nt, Homo Sapiens
guguuagcucucugcuaggagcucaaagcaac

SEQ ID NO: 309652 - RNA, 32 nt, Homo Sapiens
aaaagcagccccaagagcugcgcauuggcuuc

SEQ ID NO: 309653 - RNA, 32 nt, Homo Sapiens
uuuguagagacgggguuucgcuguucccaggc

SEQ ID NO: 309654 - RNA, 32 nt, Homo Sapiens
uauaagugauuuaucagcaccacuagauaacu

SEQ ID NO: 309655 - RNA, 32 nt, Homo Sapiens
cugccucaccaccuccucuccgcucucccagg

SEQ ID NO: 309656 - RNA, 32 nt, Homo Sapiens
ccuuaacaauguuaaucaucuccuuggaucau

SEQ ID NO: 309657 - RNA, 32 nt, Homo Sapiens
uauuuggcacauuuuauauauagaauucuaua

SEQ ID NO: 309658 - RNA, 32 nt, Homo Sapiens
cuuguucugaaucauuucuucuucucaggcca

SEQ ID NO: 309659 - RNA, 32 nt, Homo Sapiens
guuagacuuacccuccucccucuuuccaccag

SEQ ID NO: 309660 - RNA, 32 nt, Homo Sapiens
aagcacuagguguacaaguuugaaauaugauu

SEQ ID NO: 309661 - RNA, 32 nt, Homo Sapiens
uuacuccgcagccaugcugggaugcugcuggc

SEQ ID NO: 309662 - RNA, 32 nt, Homo Sapiens
acauaguucccuucuuuuuuggguaaugaagg

SEQ ID NO: 309663 - RNA, 32 nt, Homo Sapiens
aaggaugucuagauguaagugauuccacuuaa

SEQ ID NO: 309664 - RNA, 32 nt, Homo Sapiens
aaagguuguaaaaaauuguaaaacugguugua

SEQ ID NO: 309665 - RNA, 32 nt, Homo Sapiens
ccccagcaaacacaaggugcagcaggguccca

SEQ ID NO: 309666 - RNA, 32 nt, Homo Sapiens
agacuggaagucuggaggaagacuuuugccuc

SEQ ID NO: 309667 - RNA, 32 nt, Homo Sapiens
cuagaacuuacauuuuaauggaaauagacaaa

SEQ ID NO: 309668 - RNA, 32 nt, Homo Sapiens
gugucauuacauuguucaggcuacgugaacuu

SEQ ID NO: 309669 - RNA, 32 nt, Homo Sapiens
cucggaggcccucccccucccccagcucagac

SEQ ID NO: 309670 - RNA, 30 nt, Homo Sapiens
cggggcugcgcgcagcgcuugcgggccaga

SEQ ID NO: 309671 - RNA, 32 nt, Homo Sapiens
aggauaucuuauaacucacagauugucagcau

SEQ ID NO: 309672 - RNA, 32 nt, Homo Sapiens
gagauagaggggcugcugacaccagugcugga

SEQ ID NO: 309673 - RNA, 32 nt, Homo Sapiens
agagaggugauguugaaugagagacacaaggc

SEQ ID NO: 309674 - RNA, 32 nt, Homo Sapiens
guccacaagaaugaucaaguaagauuuguuuu

SEQ ID NO: 309675 - RNA, 32 nt, Homo Sapiens
uuacagccugcagcugugagcugagccaguga

SEQ ID NO: 309676 - RNA, 32 nt, Homo Sapiens
ggcggcggaaguaggagccugggaaggaagag

SEQ ID NO: 309677 - RNA, 32 nt, Homo Sapiens
ugaugaggccacuaagcccacccccaacccaa

SEQ ID NO: 309678 - RNA, 32 nt, Homo Sapiens
gagaggguagacaggcaucuggacccugcugg

SEQ ID NO: 309679 - RNA, 32 nt, Homo Sapiens
acuggggcggcaccuuccuacuucugcccagc

SEQ ID NO: 309680 - RNA, 32 nt, Homo Sapiens
uuugguaaaaauacuaaaaacuauggaauugu

SEQ ID NO: 309681 - RNA, 32 nt, Homo Sapiens
uggacauuuuuggagagagcuauguugcugcu

SEQ ID NO: 309682 - RNA, 32 nt, Homo Sapiens
caucaaccccaucaccaagaggagguucaggg

SEQ ID NO: 309683 - RNA, 32 nt, Homo Sapiens
ucuguguguauauauauuuuuucaauuuaaag

SEQ ID NO: 309684 - RNA, 32 nt, Homo Sapiens
gggcggcuuuuuccuuccuuggagcgucccug

SEQ ID NO: 309685 - RNA, 32 nt, Homo Sapiens
cugcaucaaccuccuuuuaccuuuagauaggu

SEQ ID NO: 309686 - RNA, 32 nt, Homo Sapiens
uuugacaauauuuguaugacuuuccaaauuga

SEQ ID NO: 309687 - RNA, 32 nt, Homo Sapiens
gcaguucugaagcucacacauagucucccugc

SEQ ID NO: 309688 - RNA, 30 nt, Homo Sapiens
acacagagaaagaugcacagaucaacccac

SEQ ID NO: 309689 - RNA, 32 nt, Homo Sapiens
gcguucugcgcggaagcagaugcugcugccgc

SEQ ID NO: 309690 - RNA, 32 nt, Homo Sapiens
aaaaaguacaagcuauuaaaaaucagauugaa

SEQ ID NO: 309691 - RNA, 32 nt, Homo Sapiens
gcggcuccgggaagcgguucccugucuucgga

SEQ ID NO: 309692 - RNA, 32 nt, Homo Sapiens
ugagagcaaagacuauuuuuccuuacucuuug

SEQ ID NO: 309693 - RNA, 32 nt, Homo Sapiens
caugcagaucagauggaggcggugcuuggcac

SEQ ID NO: 309694 - RNA, 32 nt, Homo Sapiens
ugauuugguuucuuaucuuucauuuuauaaga

SEQ ID NO: 309695 - RNA, 32 nt, Homo Sapiens
ugccagucauaguccuaaguauaauaccuuac

SEQ ID NO: 309696 - RNA, 32 nt, Homo Sapiens
gcuccaggcggcugcccuccccuugcuguccu

SEQ ID NO: 309697 - RNA, 32 nt, Homo Sapiens
caacgugaaauaacgcaaauggcuuccucuuu

SEQ ID NO: 309698 - RNA, 32 nt, Homo Sapiens
uuccagagcggggaguucaaggcgcugaccag

SEQ ID NO: 309699 - RNA, 32 nt, Homo Sapiens
ugccaggcuccggccaggaucccuuccuucuc

SEQ ID NO: 309700 - RNA, 32 nt, Homo Sapiens
caguggaguguucgggaugcagggggcacuau

SEQ ID NO: 309701 - RNA, 32 nt, Homo Sapiens
aguggggaaguggagcggcagcucccuugggg

SEQ ID NO: 309702 - RNA, 31 nt, Homo Sapiens
ccaggggucauugaccugcccccugcacagg

SEQ ID NO: 309703 - RNA, 32 nt, Homo Sapiens
uggccaagccccagccugcaccgucgcugccc

SEQ ID NO: 309704 - RNA, 32 nt, Homo Sapiens
uccuugauugcauuuuuguucuuuuagcagau

SEQ ID NO: 309705 - RNA, 32 nt, Homo Sapiens
aaauuuaguguauguaaacagcuuacaaauac

SEQ ID NO: 309706 - RNA, 32 nt, Homo Sapiens
ucaacugggaggcuuauaaacaacagaaauuu

SEQ ID NO: 309707 - RNA, 32 nt, Homo Sapiens
cugcggagccgcggccucgucccgaguguucu

SEQ ID NO: 309708 - RNA, 32 nt, Homo Sapiens
gcggaugaagaauucagacauggcugagcuag

SEQ ID NO: 309709 - RNA, 31 nt, Homo Sapiens
acuccuucgcuguaucgucuacugauucuua

SEQ ID NO: 309710 - RNA, 32 nt, Homo Sapiens
gcccuucugcacccugggccuucaccugcaag

SEQ ID NO: 309711 - RNA, 32 nt, Homo Sapiens
gcauggcagaggccaggcagccguggccgagu

SEQ ID NO: 309712 - RNA, 31 nt, Homo Sapiens
uaaauguacuugacuuugcaaggcaaguagu

SEQ ID NO: 309713 - RNA, 32 nt, Homo Sapiens
gacacaggaaugggggcgccuccagagggucu

SEQ ID NO: 309714 - RNA, 32 nt, Homo Sapiens
gccccucugcaccugcaugagaacccugacuu

SEQ ID NO: 309715 - RNA, 32 nt, Homo Sapiens
caacacccgucgaacacagccauccaccuggg

SEQ ID NO: 309716 - RNA, 32 nt, Homo Sapiens
gcugggcuaggcgcgcgcuuggagagcauugc

SEQ ID NO: 309717 - RNA, 32 nt, Homo Sapiens
uggaagaguccuguacucuccuccucaaugcc

SEQ ID NO: 309718 - RNA, 32 nt, Homo Sapiens
acaaguaaugucacaauucuucggaugacugc

SEQ ID NO: 309719 - RNA, 32 nt, Homo Sapiens
acuggugaacuuuguggaaauuagaacuguau

SEQ ID NO: 309720 - RNA, 32 nt, Homo Sapiens
gagaguggcugcuuaaauuucuuagccuaugu

SEQ ID NO: 309721 - RNA, 32 nt, Homo Sapiens
agccagaugucucuuuacuggaccucucugga

SEQ ID NO: 309722 - RNA, 32 nt, Homo Sapiens
aagucuguauuauguuuaaaacaugaaugauu

SEQ ID NO: 309723 - RNA, 32 nt, Homo Sapiens
auuuuagggaagccuugaaacuaccauguauc

SEQ ID NO: 309724 - RNA, 32 nt, Homo Sapiens
cagugaugugcaggaacaacuuccuagauugc

SEQ ID NO: 309725 - RNA, 32 nt, Homo Sapiens
gggguuaugugcuccgaggaucccaggaggaa

SEQ ID NO: 309726 - RNA, 32 nt, Homo Sapiens
uaaugagaauaguuuuaccaaagauaaugaaa

SEQ ID NO: 309727 - RNA, 30 nt, Homo Sapiens
gcggagcgcgcgcgggguugguugccgcga

SEQ ID NO: 309728 - RNA, 32 nt, Homo Sapiens
gaggguacagcuuuuaucuugcacaugaauuu

SEQ ID NO: 309729 - RNA, 32 nt, Homo Sapiens
guacucgccacggcacccaggcugcgcgcacg

SEQ ID NO: 309730 - RNA, 32 nt, Homo Sapiens
uuugcuuuucuuuuuagcuaaguaugcauucc

SEQ ID NO: 309731 - RNA, 32 nt, Homo Sapiens
gggucagaggucgggucuucggcccugagaag

SEQ ID NO: 309732 - RNA, 32 nt, Homo Sapiens
cuucaccuccauaucagaagugccaauaaucg

SEQ ID NO: 309733 - RNA, 32 nt, Homo Sapiens
cuaaacaaugggucgguuuguuuaaugacuga

SEQ ID NO: 309734 - RNA, 32 nt, Homo Sapiens
uguuauagaagcuuagagagccagccagcagu

SEQ ID NO: 309735 - RNA, 32 nt, Homo Sapiens
uggcaaugguaguuucugugguuggcugggaa

SEQ ID NO: 309736 - RNA, 32 nt, Homo Sapiens
aaaagugccaggugcuggcgggaugugguagc

SEQ ID NO: 309737 - RNA, 32 nt, Homo Sapiens
ccucauuccagaaucuccuacccccagaaaag

SEQ ID NO: 309738 - RNA, 32 nt, Homo Sapiens
uccugucacaugcugacguuggacuuagcagg

SEQ ID NO: 309739 - RNA, 32 nt, Homo Sapiens
gcuagaauggagagaacacacuggagaucaca

SEQ ID NO: 309740 - RNA, 32 nt, Homo Sapiens
caccaggcacuggcagggaggguaagggcugg

SEQ ID NO: 309741 - RNA, 32 nt, Homo Sapiens
augcaagggacccagauauccaaauaagccuu

SEQ ID NO: 309742 - RNA, 32 nt, Homo Sapiens
uccagccugggcuacauagugagaccgugucu

SEQ ID NO: 309743 - RNA, 32 nt, Homo Sapiens
auuuaggaaaauuggaugcagaauaauaauua

SEQ ID NO: 309744 - RNA, 32 nt, Homo Sapiens
uaucuaggcaguaauuaacuugguuuugauuu

SEQ ID NO: 309745 - RNA, 32 nt, Homo Sapiens
uaucucauuguuaccgccguuuuucacuacua

SEQ ID NO: 309746 - RNA, 32 nt, Homo Sapiens
ccccugguccccagcccucgucgcagccccgg

SEQ ID NO: 309747 - RNA, 32 nt, Homo Sapiens
agccccggccccugguccccagcccucgucgc

SEQ ID NO: 309748 - RNA, 32 nt, Homo Sapiens
auacugacggcauguuaggugauucagaauag

SEQ ID NO: 309749 - RNA, 32 nt, Homo Sapiens
aacaaauuuuugugucugugaggggccagaua

SEQ ID NO: 309750 - RNA, 32 nt, Homo Sapiens
aaauaguuucccuccacccccaagcacuacca

SEQ ID NO: 309751 - RNA, 32 nt, Homo Sapiens
auuacugcccuucucuugcugccuccugggca

SEQ ID NO: 309752 - RNA, 32 nt, Homo Sapiens
uuggcgucugcgcuggaucuggagucugcauu

SEQ ID NO: 309753 - RNA, 32 nt, Homo Sapiens
cugcgggucgcacgcccuccccagcuucugcu

SEQ ID NO: 309754 - RNA, 32 nt, Homo Sapiens
guguugcucccaucucuucucuaaccuuuauu

SEQ ID NO: 309755 - RNA, 32 nt, Homo Sapiens
gccggcuagaaaaaguagggugcgguggccag

SEQ ID NO: 309756 - RNA, 32 nt, Homo Sapiens
guuuuggggguuagaggcucuuuugggaagau

SEQ ID NO: 309757 - RNA, 32 nt, Homo Sapiens
gccggcguguccuggggagaugcugccagcac

SEQ ID NO: 309758 - RNA, 32 nt, Homo Sapiens
uccccucccgcuugcuuuugccuuacucgauc

SEQ ID NO: 309759 - RNA, 32 nt, Homo Sapiens
cccgccaccuguccccucccccuccgccuccg

SEQ ID NO: 309760 - RNA, 32 nt, Homo Sapiens
uuaccuuguuuuguuccacuuuaaagucaaga

SEQ ID NO: 309761 - RNA, 32 nt, Homo Sapiens
aagagggugggguggggaggggcguucucagg

SEQ ID NO: 309762 - RNA, 32 nt, Homo Sapiens
auaguaaaacgaaggccuaauucauggaagca

SEQ ID NO: 309763 - RNA, 32 nt, Homo Sapiens
aacggcuuucagaaugagggacuuccaucaga

SEQ ID NO: 309764 - RNA, 32 nt, Homo Sapiens
acagaaccccccacccuacauuugccuugggu

SEQ ID NO: 309765 - RNA, 32 nt, Homo Sapiens
auuuacuucugguaagcauaaagcagagagaa

SEQ ID NO: 309766 - RNA, 32 nt, Homo Sapiens
cuacauuuauauuuuuaaucuucuguuaaaua

SEQ ID NO: 309767 - RNA, 32 nt, Homo Sapiens
guuuuuaguaugggugauacuggagucuuauc

SEQ ID NO: 309768 - RNA, 32 nt, Homo Sapiens
uguaaguuucuuuucuguagugcaaguaaaau

SEQ ID NO: 309769 - RNA, 32 nt, Homo Sapiens
aggauggaaaggaaaauacugaguuuagcaga

SEQ ID NO: 309770 - RNA, 32 nt, Homo Sapiens
ccacuggagcagcccacacuggcuugauggau

SEQ ID NO: 309771 - RNA, 32 nt, Homo Sapiens
guugguuucccuucuuuuuguucuucaucuaa

SEQ ID NO: 309772 - RNA, 32 nt, Homo Sapiens
cugcuuaccaaaacauaagacgacuuauauau

SEQ ID NO: 309773 - RNA, 32 nt, Homo Sapiens
cuuuuguauauguuugaaauuuuccauaauaa

SEQ ID NO: 309774 - RNA, 32 nt, Homo Sapiens
gcugugagaagccccaggaccagcccagggua

SEQ ID NO: 309775 - RNA, 32 nt, Homo Sapiens
cgccccgaccucgcugcccccgccucgccucu

SEQ ID NO: 309776 - RNA, 32 nt, Homo Sapiens
uccaauuuguaucuaguggcugagaaauuaaa

SEQ ID NO: 309777 - RNA, 32 nt, Homo Sapiens
auccugugucgucucccccaccuaccagucau

SEQ ID NO: 309778 - RNA, 32 nt, Homo Sapiens
aacuuagcacaagcuacacucgacacaaccua

SEQ ID NO: 309779 - RNA, 32 nt, Homo Sapiens
cagcgggagaggaggagccgcaggagcugcag

SEQ ID NO: 309780 - RNA, 32 nt, Homo Sapiens
ugccccgccccggcccaggugaguggccccgc

SEQ ID NO: 309781 - RNA, 32 nt, Homo Sapiens
cggaggccgggcgcugcguguggggugugugu

SEQ ID NO: 309782 - RNA, 32 nt, Homo Sapiens
agcuuguuaugaauacaucuauuugcaaaugg

SEQ ID NO: 309783 - RNA, 31 nt, Homo Sapiens
ccagacucacggaccugaaccucucugggca

SEQ ID NO: 309784 - RNA, 32 nt, Homo Sapiens
cgcguccgcgcgccucucuccgcgcgcacccc

SEQ ID NO: 309785 - RNA, 32 nt, Homo Sapiens
acuguccgccgccguguccgcggcugcgccag

SEQ ID NO: 309786 - RNA, 32 nt, Homo Sapiens
aaaugaccaauauuauacuaagaaaagauacg

SEQ ID NO: 309787 - RNA, 32 nt, Homo Sapiens
uaaguugggagaagaacauucuuuucaaugga

SEQ ID NO: 309788 - RNA, 32 nt, Homo Sapiens
aguguguugcucaggauaccccagguacauca

SEQ ID NO: 309789 - RNA, 32 nt, Homo Sapiens
gaaauguuuguccucccuuaauuuugccucaa

SEQ ID NO: 309790 - RNA, 31 nt, Homo Sapiens
agaacugcagcccuuauucagaauugagcag

SEQ ID NO: 309791 - RNA, 32 nt, Homo Sapiens
ugcugugcuccauauuugauuucuaauuguaa

SEQ ID NO: 309792 - RNA, 32 nt, Homo Sapiens
auggacagugcuaugaauauaaauggauggcc

SEQ ID NO: 309793 - RNA, 32 nt, Homo Sapiens
gguccccuuucagccugcaguuccucagcaga

SEQ ID NO: 309794 - RNA, 31 nt, Homo Sapiens
acagagcacagcgcgguggggaggcggcagg

SEQ ID NO: 309795 - RNA, 32 nt, Homo Sapiens
gaaggccccuccccaucgccagccgggcccuc

SEQ ID NO: 309796 - RNA, 32 nt, Homo Sapiens
aacgucggccuggccuuguggggucagaccuu

SEQ ID NO: 309797 - RNA, 32 nt, Homo Sapiens
cuaccagucuucccggccccuuccccgccagu

SEQ ID NO: 309798 - RNA, 32 nt, Homo Sapiens
gcggagcccgcgugagggucacggccaccuag

SEQ ID NO: 309799 - RNA, 32 nt, Homo Sapiens
acauauucugucaucuuggcauaagccauuaa

SEQ ID NO: 309800 - RNA, 32 nt, Homo Sapiens
gccaggaccaaggcccuugggccacuacccug

SEQ ID NO: 309801 - RNA, 32 nt, Homo Sapiens
ccucaugagugucaaacgugccccccaguucc

SEQ ID NO: 309802 - RNA, 32 nt, Homo Sapiens
uugagacagggucuuucucugucacccaggau

SEQ ID NO: 309803 - RNA, 32 nt, Homo Sapiens
caauucucuuguuacauucucccuuuagcaac

SEQ ID NO: 309804 - RNA, 32 nt, Homo Sapiens
auggagccgggugcggcuguaccagcgcucag

SEQ ID NO: 309805 - RNA, 32 nt, Homo Sapiens
uuuggcccauaucaacaucuuuuauaauuuuu

SEQ ID NO: 309806 - RNA, 32 nt, Homo Sapiens
gcccuguccuggagcuggccccuggcugccug

SEQ ID NO: 309807 - RNA, 32 nt, Homo Sapiens
guugaugggugggaccugucuugaccaucgga

SEQ ID NO: 309808 - RNA, 32 nt, Homo Sapiens
ggcaagaauugaaguugcugcagacgccugug

SEQ ID NO: 309809 - RNA, 32 nt, Homo Sapiens
uuuauuuugguggcauucuacugcaucagcau

SEQ ID NO: 309810 - RNA, 32 nt, Homo Sapiens
ccuacuguucuuugccucguccaggucucuau

SEQ ID NO: 309811 - RNA, 32 nt, Homo Sapiens
cacagauuugcuggauggaagcugcgugugug

SEQ ID NO: 309812 - RNA, 32 nt, Homo Sapiens
gaaauguaccggcuuccauccugucaccauga

SEQ ID NO: 309813 - RNA, 32 nt, Homo Sapiens
uggaugugcagguuauucuuuaacuucagagg

SEQ ID NO: 309814 - RNA, 32 nt, Homo Sapiens
ggaacccacacagauaggggagggauuaagcu

SEQ ID NO: 309815 - RNA, 32 nt, Homo Sapiens
cagggcgugucugagagacuaaugccuguccu

SEQ ID NO: 309816 - RNA, 27 nt, Homo Sapiens
cuuuacuccuucuuccucuccauagaa

SEQ ID NO: 309817 - RNA, 32 nt, Homo Sapiens
uucuuuaagcuuuuuuuuuuuaaugucaugaa

SEQ ID NO: 309818 - RNA, 32 nt, Homo Sapiens
guguugcauuaacuaaagcuaaaauuaucaga

SEQ ID NO: 309819 - RNA, 32 nt, Homo Sapiens
agcggccggccgcggacacgcgcuccauugug

SEQ ID NO: 309820 - RNA, 32 nt, Homo Sapiens
augucuagugauugaugucugcuguaggcuga

SEQ ID NO: 309821 - RNA, 32 nt, Homo Sapiens
uggcagaugcuaguaauucacagaauggccuc

SEQ ID NO: 309822 - RNA, 32 nt, Homo Sapiens
aagguagaaaauaaauacagacaacaucuaaa

SEQ ID NO: 309823 - RNA, 32 nt, Homo Sapiens
cagaaugaugaaauuguuagguugugacaguu

SEQ ID NO: 309824 - RNA, 32 nt, Homo Sapiens
gugacgucaggagcagaggccggagcugucca

SEQ ID NO: 309825 - RNA, 32 nt, Homo Sapiens
aggcagagcuguggcacagacccccguccugu

SEQ ID NO: 309826 - RNA, 32 nt, Homo Sapiens
uuguuuuauuuuuugaugguaauauucuaucc

SEQ ID NO: 309827 - RNA, 32 nt, Homo Sapiens
acauuuucaaggaguaugcuggauucauggaa

SEQ ID NO: 309828 - RNA, 32 nt, Homo Sapiens
ggaccaauuaccuugaaauauuuuaaaaucuc

SEQ ID NO: 309829 - RNA, 32 nt, Homo Sapiens
uuaaaagucuuagacauguuauuuuacugauu

SEQ ID NO: 309830 - RNA, 32 nt, Homo Sapiens
aagauuuagaaaauuccucuucguucaccuug

SEQ ID NO: 309831 - RNA, 32 nt, Homo Sapiens
guccucaugucuaucccagaauccauuaaugg

SEQ ID NO: 309832 - RNA, 32 nt, Homo Sapiens
cagggaaagggagaggccaagcuggaucugaa

SEQ ID NO: 309833 - RNA, 32 nt, Homo Sapiens
aucacagcucaccccaggaucucacagguagu

SEQ ID NO: 309834 - RNA, 32 nt, Homo Sapiens
cccgcuccgggugcugaauccaggcgugggga

SEQ ID NO: 309835 - RNA, 32 nt, Homo Sapiens
agcuguuuuaucaucuguagcuucauccuauc

SEQ ID NO: 309836 - RNA, 32 nt, Homo Sapiens
ggggaucgcucuuccucacaccacgaaucuga

SEQ ID NO: 309837 - RNA, 32 nt, Homo Sapiens
gugcuuuguucauuuuaauugcaaagcugcca

SEQ ID NO: 309838 - RNA, 32 nt, Homo Sapiens
aaguaacuggaucaugcugaucuauaaagagg

SEQ ID NO: 309839 - RNA, 32 nt, Homo Sapiens
uccagaaagcugagguuucuccaggucugacc

SEQ ID NO: 309840 - RNA, 32 nt, Homo Sapiens
gccacuccacacuccagcacagggcugggaca

SEQ ID NO: 309841 - RNA, 32 nt, Homo Sapiens
ccugucccagccagcaucaucucuuuggggac

SEQ ID NO: 309842 - RNA, 30 nt, Homo Sapiens
aauauuuuggacugcuguuuuccauuaaug

SEQ ID NO: 309843 - RNA, 32 nt, Homo Sapiens
guaacagcgguuacccacgacacaauacuuau

SEQ ID NO: 309844 - RNA, 32 nt, Homo Sapiens
uccuggggggcggggaggagccaccguuggga

SEQ ID NO: 309845 - RNA, 32 nt, Homo Sapiens
ucucaaaaaacgcaucuggaaaauugauaaag

SEQ ID NO: 309846 - RNA, 32 nt, Homo Sapiens
aaauaagggcuuuaaggcacaggcuguugaag

SEQ ID NO: 309847 - RNA, 32 nt, Homo Sapiens
gucaaauuuauugagaugauaauuuaauuuuu

SEQ ID NO: 309848 - RNA, 32 nt, Homo Sapiens
cauuggcagaaucuaaccccuucuguuaucuu

SEQ ID NO: 309849 - RNA, 32 nt, Homo Sapiens
cccuggcugggaagaagaagaugggguaggag

SEQ ID NO: 309850 - RNA, 32 nt, Homo Sapiens
cuuuagacuucugguccccagaacggagagag

SEQ ID NO: 309851 - RNA, 32 nt, Homo Sapiens
ggggaucauuggcucacacgagguguccugga

SEQ ID NO: 309852 - RNA, 32 nt, Homo Sapiens
ggcgccuucaaacccagacaugcugcugcugc

SEQ ID NO: 309853 - RNA, 32 nt, Homo Sapiens
ggcagcacccacgaugcgggaccugccucuca

SEQ ID NO: 309854 - RNA, 32 nt, Homo Sapiens
guugaugugggaagaaguaaacuggauacugu

SEQ ID NO: 309855 - RNA, 32 nt, Homo Sapiens
ucuuucucuggcccgcggagcggucccgcggc

SEQ ID NO: 309856 - RNA, 32 nt, Homo Sapiens
guccaauuaugggcagaaucugcucucuguga

SEQ ID NO: 309857 - RNA, 32 nt, Homo Sapiens
gcuccuccagguccugcuggcuccucgggggc

SEQ ID NO: 309858 - RNA, 32 nt, Homo Sapiens
caaaaaacaaacaaacaaaaaagcuauggcac

SEQ ID NO: 309859 - RNA, 32 nt, Homo Sapiens
uuuuuuaaaaauuauguacauuuuaaguauuu

SEQ ID NO: 309860 - RNA, 32 nt, Homo Sapiens
ggcuggcggccgcggagucuucggcgagaccu

SEQ ID NO: 309861 - RNA, 32 nt, Homo Sapiens
cagacuaauccaugugaugcugauggauaauu

SEQ ID NO: 309862 - RNA, 32 nt, Homo Sapiens
ucucaacagccccuuccaccccugauauacca

SEQ ID NO: 309863 - RNA, 32 nt, Homo Sapiens
uaaacacaaggauuuucuuuuuuauuaauaug

SEQ ID NO: 309864 - RNA, 32 nt, Homo Sapiens
aucgcgccaggacgcuggccccgcucgcggcu

SEQ ID NO: 309865 - RNA, 32 nt, Homo Sapiens
ccaucauguacaagggccgcacggugcugcag

SEQ ID NO: 309866 - RNA, 32 nt, Homo Sapiens
ugcccuauucacacucugggaagacgcuaauc

SEQ ID NO: 309867 - RNA, 32 nt, Homo Sapiens
ccccugagccucacuagaucacacagaccauc

SEQ ID NO: 309868 - RNA, 32 nt, Homo Sapiens
gaaugucaaauuauuuuaaauggugaaacugg

SEQ ID NO: 309869 - RNA, 32 nt, Homo Sapiens
guuuuaauauauuuuaauauauuacaugugca

SEQ ID NO: 309870 - RNA, 32 nt, Homo Sapiens
guguacguggugggggcuuccucgguggcggg

SEQ ID NO: 309871 - RNA, 32 nt, Homo Sapiens
aaccagacucaauuuaaaucugcuccaaauga

SEQ ID NO: 309872 - RNA, 32 nt, Homo Sapiens
cugguggggauccaggcuguugguaagugccc

SEQ ID NO: 309873 - RNA, 32 nt, Homo Sapiens
gaaggggaagaagaggggcuaagcaaggucag

SEQ ID NO: 309874 - RNA, 32 nt, Homo Sapiens
uuggauacucaauucuuaaccaaaaucuuggu

SEQ ID NO: 309875 - RNA, 32 nt, Homo Sapiens
cggcgcucugcggccuggucuggacagccaac

SEQ ID NO: 309876 - RNA, 32 nt, Homo Sapiens
gagccaccacacccggcccccaguucuuuuuu

SEQ ID NO: 309877 - RNA, 32 nt, Homo Sapiens
agacaaugcuacuucaguuuggagcacaaaca

SEQ ID NO: 309878 - RNA, 32 nt, Homo Sapiens
gcucaguuggccugguuggaaugggcccuggg

SEQ ID NO: 309879 - RNA, 32 nt, Homo Sapiens
cacuuggcgcaugggagacaugugcugggucu

SEQ ID NO: 309880 - RNA, 29 nt, Homo Sapiens
cucccgguggggcagaggacccggugccu

SEQ ID NO: 309881 - RNA, 32 nt, Homo Sapiens
cacucaacagguauaguauuacgacucauguu

SEQ ID NO: 309882 - RNA, 32 nt, Homo Sapiens
gggcguacgaggggcggaggggaccgcgucgc

SEQ ID NO: 309883 - RNA, 30 nt, Homo Sapiens
cuuacagagaagcugucaaugaggccuggg

SEQ ID NO: 309884 - RNA, 29 nt, Homo Sapiens
aaacuuggggcaauuugcaguuuggaaaa

SEQ ID NO: 309885 - RNA, 32 nt, Homo Sapiens
augagaucaggagaucgagaccauccuggcua

SEQ ID NO: 309886 - RNA, 32 nt, Homo Sapiens
cugggacccagcugcccuccauuucccauguc

SEQ ID NO: 309887 - RNA, 31 nt, Homo Sapiens
ucaagugugaagcaaauggugcuguucccga

SEQ ID NO: 309888 - RNA, 32 nt, Homo Sapiens
guuuuuauaacacuaagacauuauuucacuau

SEQ ID NO: 309889 - RNA, 32 nt, Homo Sapiens
uuggcacucuuaggucuuaguauggauuuaug

SEQ ID NO: 309890 - RNA, 31 nt, Homo Sapiens
gucagguguaacauggaaagcuaaggguuuc

SEQ ID NO: 309891 - RNA, 32 nt, Homo Sapiens
cccccgccugccgaggcgcggaauaaggcuga

SEQ ID NO: 309892 - RNA, 32 nt, Homo Sapiens
ucuucuguucuucacgccccaugcuccugcua

SEQ ID NO: 309893 - RNA, 32 nt, Homo Sapiens
guacugggggugcggcagggacacccgaccac

SEQ ID NO: 309894 - RNA, 32 nt, Homo Sapiens
cgagagaagcugccauccaccugcuuaugcau

SEQ ID NO: 309895 - RNA, 32 nt, Homo Sapiens
gucagcgcugcccagacuccaguguuuacaga

SEQ ID NO: 309896 - RNA, 32 nt, Homo Sapiens
uuuuauagcugcagauuguccacacaguauac

SEQ ID NO: 309897 - RNA, 32 nt, Homo Sapiens
guuaaagauuaccauggucaauacagucuuuc

SEQ ID NO: 309898 - RNA, 32 nt, Homo Sapiens
uaaagucuuauguuucacucuuuaacucaaau

SEQ ID NO: 309899 - RNA, 32 nt, Homo Sapiens
augagucaacugaauucuguuuuuccauuuac

SEQ ID NO: 309900 - RNA, 32 nt, Homo Sapiens
cuucggcggcgaaggucagcgccgacggcagc

SEQ ID NO: 309901 - RNA, 32 nt, Homo Sapiens
auaccagauaaguuuaaauaagaaauuuaauu

SEQ ID NO: 309902 - RNA, 32 nt, Homo Sapiens
agacguuacauccaagaggaaauaauccaggc

SEQ ID NO: 309903 - RNA, 32 nt, Homo Sapiens
ccacuucacagccaacggcuaugacaaaacca

SEQ ID NO: 309904 - RNA, 32 nt, Homo Sapiens
ucagacuccguccaaggagaugcucuccccgg

SEQ ID NO: 309905 - RNA, 32 nt, Homo Sapiens
aagucucucuuccuccuucucaccccuggccu

SEQ ID NO: 309906 - RNA, 32 nt, Homo Sapiens
gaggaagcagugcugccaggcucugcuccagg

SEQ ID NO: 309907 - RNA, 32 nt, Homo Sapiens
ucgcagggcuucugggccgaccccgcuccggc

SEQ ID NO: 309908 - RNA, 32 nt, Homo Sapiens
caaucagauuuucaacaauuuuagacauggga

SEQ ID NO: 309909 - RNA, 32 nt, Homo Sapiens
uuaaguccauagaaugaagguaguuauuccug

SEQ ID NO: 309910 - RNA, 32 nt, Homo Sapiens
acguccccagcuccagccgccggcucggacuc

SEQ ID NO: 309911 - RNA, 32 nt, Homo Sapiens
ugcuuaguguacuuggaguauuggggucugac

SEQ ID NO: 309912 - RNA, 32 nt, Homo Sapiens
uacagcccugucacaugugcccagcacuccgc

SEQ ID NO: 309913 - RNA, 32 nt, Homo Sapiens
acagauuugagcucagcccuggugggcagaga

SEQ ID NO: 309914 - RNA, 32 nt, Homo Sapiens
cagagggaagcagaaaugagacgcagccagug

SEQ ID NO: 309915 - RNA, 32 nt, Homo Sapiens
caugagcuguguaaauuuugugaauauguauu

SEQ ID NO: 309916 - RNA, 32 nt, Homo Sapiens
ccugcggcucugcgggcaggacgggcaggacg

SEQ ID NO: 309917 - RNA, 32 nt, Homo Sapiens
ggaggccgcccggcugcgcgcggagcuggagc

SEQ ID NO: 309918 - RNA, 32 nt, Homo Sapiens
aucaacaggcuuaugaaaugucaucuucagug

SEQ ID NO: 309919 - RNA, 32 nt, Homo Sapiens
ggcugguccauguugcccacucacuccagugg

SEQ ID NO: 309920 - RNA, 32 nt, Homo Sapiens
agaggaaaacauggcggaaaacaaaggcggcg

SEQ ID NO: 309921 - RNA, 32 nt, Homo Sapiens
gaugcugguggugcagguuuuguuuguuccuu

SEQ ID NO: 309922 - RNA, 32 nt, Homo Sapiens
uucugggaagcgcagaauuucagauauauuuu

SEQ ID NO: 309923 - RNA, 32 nt, Homo Sapiens
cucccagcagcggaggacccaggacuaucccu

SEQ ID NO: 309924 - RNA, 32 nt, Homo Sapiens
uggggcagaaaaguaauacagacggagcacug

SEQ ID NO: 309925 - RNA, 32 nt, Homo Sapiens
aaaaaagagucuuuuuuuccccucugucucuu

SEQ ID NO: 309926 - RNA, 32 nt, Homo Sapiens
cagcagcagcagcagcagcagcagcaaccacu

SEQ ID NO: 309927 - RNA, 32 nt, Homo Sapiens
agaccacccuugccccaguccggcccggcccc

SEQ ID NO: 309928 - RNA, 32 nt, Homo Sapiens
auuuuggagauggaaauugacaaggagggaag

SEQ ID NO: 309929 - RNA, 32 nt, Homo Sapiens
gacagaacccuuagaccauucgcgcuagguug

SEQ ID NO: 309930 - RNA, 32 nt, Homo Sapiens
cagauuuucuucauguacugugaugucugaug

SEQ ID NO: 309931 - RNA, 32 nt, Homo Sapiens
ggucuacugugggaacaguuaucccuaaccac

SEQ ID NO: 309932 - RNA, 32 nt, Homo Sapiens
uauauuugacuucuuacaaaaucucucauaac

SEQ ID NO: 309933 - RNA, 32 nt, Homo Sapiens
ucucggagucaugcucuagaaugucgcacugg

SEQ ID NO: 309934 - RNA, 32 nt, Homo Sapiens
gucuucagaaaggcaacaguagucuuuuaacg

SEQ ID NO: 309935 - RNA, 32 nt, Homo Sapiens
aggacccgggugagccagugggcuugcgcuuu

SEQ ID NO: 309936 - RNA, 32 nt, Homo Sapiens
ucuucagugugccugaugucaccucaugauuu

SEQ ID NO: 309937 - RNA, 32 nt, Homo Sapiens
uauuuaggucaauauaaaauaauagcaaguau

SEQ ID NO: 309938 - RNA, 32 nt, Homo Sapiens
ugacuagaucacaggagcacuggaggaggagu

SEQ ID NO: 309939 - RNA, 32 nt, Homo Sapiens
guuaacuuuggucuucuguauuuuggacuaaa

SEQ ID NO: 309940 - RNA, 32 nt, Homo Sapiens
agcgucggccgcgucggccgcggguuggagca

SEQ ID NO: 309941 - RNA, 32 nt, Homo Sapiens
gacugucuaaggaugccuggauuccuuguuau

SEQ ID NO: 309942 - RNA, 32 nt, Homo Sapiens
uaauauaauuuaacagaaguugugaaacuaaa

SEQ ID NO: 309943 - RNA, 32 nt, Homo Sapiens
uuuuuugcagcuacgauguucuuccagggcac

SEQ ID NO: 309944 - RNA, 32 nt, Homo Sapiens
ccagaauccaacaagagcucuauuuuggaauu

SEQ ID NO: 309945 - RNA, 32 nt, Homo Sapiens
gccuauugccauauaguacucaccuuauaacu

SEQ ID NO: 309946 - RNA, 32 nt, Homo Sapiens
ucaucaguucucagauuaacaagcauuucugc

SEQ ID NO: 309947 - RNA, 32 nt, Homo Sapiens
uuguuuauguauuaaaaaaaccacuucacagu

SEQ ID NO: 309948 - RNA, 32 nt, Homo Sapiens
gugggaaugcagaaaacguacuccaugaucug

SEQ ID NO: 309949 - RNA, 32 nt, Homo Sapiens
aaugauauuauuauuauuugagacagaguuuu

SEQ ID NO: 309950 - RNA, 32 nt, Homo Sapiens
accgcgccuggccucuucuccuucugaagaaa

SEQ ID NO: 309951 - RNA, 32 nt, Homo Sapiens
aacaagaguagaggccaauucuccucuuccaa

SEQ ID NO: 309952 - RNA, 32 nt, Homo Sapiens
aguugaacuuugagguuuuucuuuaagaauga

SEQ ID NO: 309953 - RNA, 32 nt, Homo Sapiens
gacuggaaaugcugccgccuucugcaauuuau

SEQ ID NO: 309954 - RNA, 32 nt, Homo Sapiens
ccccuggagccagcugauccuguaacgcugcu

SEQ ID NO: 309955 - RNA, 32 nt, Homo Sapiens
gacuuuaaauuaaacauuugguagagucauca

SEQ ID NO: 309956 - RNA, 32 nt, Homo Sapiens
ugguggacaggggugucagaucugucugagga

SEQ ID NO: 309957 - RNA, 32 nt, Homo Sapiens
gaacccgucucagcagguccacagcaccuggg

SEQ ID NO: 309958 - RNA, 32 nt, Homo Sapiens
aagaaaauucuauuguuuuuuauaacaaagug

SEQ ID NO: 309959 - RNA, 32 nt, Homo Sapiens
cgagaggggccccgccgcucuccggaggcaga

SEQ ID NO: 309960 - RNA, 32 nt, Homo Sapiens
ugaccuauaaauuuauucauguacaauuuugg

SEQ ID NO: 309961 - RNA, 32 nt, Homo Sapiens
uuaaaugaaggcaaauaaguacuuaaaaguga

SEQ ID NO: 309962 - RNA, 32 nt, Homo Sapiens
acauugggcuccuccuccucgggcccacguga

SEQ ID NO: 309963 - RNA, 32 nt, Homo Sapiens
acuggcugauacauuuaaagcagcagugugaa

SEQ ID NO: 309964 - RNA, 32 nt, Homo Sapiens
ccuuuguugcuguugcuguugcuguugcuguu

SEQ ID NO: 309965 - RNA, 32 nt, Homo Sapiens
gccgggggucccugcggugcugcucuggggcc

SEQ ID NO: 309966 - RNA, 32 nt, Homo Sapiens
gcccuggccagacguuuucuuugauuuuuaau

SEQ ID NO: 309967 - RNA, 32 nt, Homo Sapiens
uggggcugaacuuuucccuacccuuaacuuug

SEQ ID NO: 309968 - RNA, 32 nt, Homo Sapiens
uucuccagaacuuuuccagcccuauccaacag

SEQ ID NO: 309969 - RNA, 32 nt, Homo Sapiens
gcacuacccagacugccagagcccaggcuggc

SEQ ID NO: 309970 - RNA, 32 nt, Homo Sapiens
gccgcaucauccgggagcugcccgguguccac

SEQ ID NO: 309971 - RNA, 32 nt, Homo Sapiens
accgacaaccccgaugcccugcccgagacgcu

SEQ ID NO: 309972 - RNA, 32 nt, Homo Sapiens
uguuccagucuggaccucuuuggagcuguaaa

SEQ ID NO: 309973 - RNA, 32 nt, Homo Sapiens
gguguccuccagccucucuggaugcuccaugg

SEQ ID NO: 309974 - RNA, 31 nt, Homo Sapiens
gaagcuguugucucuauucaagauaucacag

SEQ ID NO: 309975 - RNA, 32 nt, Homo Sapiens
cuccaauuucucuuuuaaaaaagcagacuuac

SEQ ID NO: 309976 - RNA, 32 nt, Homo Sapiens
ucuaacugacgcuaccgucgcggccgccggca

SEQ ID NO: 309977 - RNA, 32 nt, Homo Sapiens
ggccuuuuuacauauuuuuucuuuaaugagga

SEQ ID NO: 309978 - RNA, 32 nt, Homo Sapiens
agcuauaguccucauuccauguagucacauca

SEQ ID NO: 309979 - RNA, 32 nt, Homo Sapiens
ugcgcugcucucggagccccagccggcuccgc

SEQ ID NO: 309980 - RNA, 32 nt, Homo Sapiens
guccggccgggcggagcuaggggcgggccccu

SEQ ID NO: 309981 - RNA, 32 nt, Homo Sapiens
uuugaucugaguaauaguguugugaaauagau

SEQ ID NO: 309982 - RNA, 32 nt, Homo Sapiens
aaacggguuucccagaccagggguucagagga

SEQ ID NO: 309983 - RNA, 32 nt, Homo Sapiens
uguagcugaaagauacauaaauauggauuggg

SEQ ID NO: 309984 - RNA, 32 nt, Homo Sapiens
uuagcaugcgucaggauuuuauuucuuuuaaa

SEQ ID NO: 309985 - RNA, 32 nt, Homo Sapiens
cucgggguggucccugguuuucccuccuggag

SEQ ID NO: 309986 - RNA, 32 nt, Homo Sapiens
cacacuugccucccauccugccugcagaaaac

SEQ ID NO: 309987 - RNA, 32 nt, Homo Sapiens
ggacugauggagccccugggggugugggaugg

SEQ ID NO: 309988 - RNA, 32 nt, Homo Sapiens
uaaauuugugauuaaagugacauugaauuucu

SEQ ID NO: 309989 - RNA, 32 nt, Homo Sapiens
caggccacggugcuguggggccccgccgcuug

SEQ ID NO: 309990 - RNA, 32 nt, Homo Sapiens
ggggucagugccacggccuccuuguuuacaug

SEQ ID NO: 309991 - RNA, 32 nt, Homo Sapiens
cccucuguuaagucccucccccucgccauuca

SEQ ID NO: 309992 - RNA, 32 nt, Homo Sapiens
ggucaggagagccucagcagggccagccccag

SEQ ID NO: 309993 - RNA, 29 nt, Homo Sapiens
ggggaagggaagaagaggacgagguggcg

SEQ ID NO: 309994 - RNA, 32 nt, Homo Sapiens
gcuacuugagagaugacgagggaagaucacuu

SEQ ID NO: 309995 - RNA, 32 nt, Homo Sapiens
uguuugcguuggaugccuugugcuaagcugua

SEQ ID NO: 309996 - RNA, 32 nt, Homo Sapiens
cucaccuguacccacaccuccagaaugcccug

SEQ ID NO: 309997 - RNA, 32 nt, Homo Sapiens
ggacagcucccucucccgugagucccgcuguc

SEQ ID NO: 309998 - RNA, 32 nt, Homo Sapiens
ccuuugaaggauuuuuguaucuauguuuauga

SEQ ID NO: 309999 - RNA, 32 nt, Homo Sapiens
agggagcuguauuauuucaugucuuugucaca

SEQ ID NO: 310000 - RNA, 32 nt, Homo Sapiens
cgagcucccucauggcaucuggaacgcucucc

SEQ ID NO: 310001 - RNA, 32 nt, Homo Sapiens
uaaccuguagcaaucagacuuuccaaaagggg

SEQ ID NO: 310002 - RNA, 32 nt, Homo Sapiens
auaauugcuguaaguauuauauuucuggaauu

SEQ ID NO: 310003 - RNA, 32 nt, Homo Sapiens
gcugugauaaaccaugcuuuuuugagcuuguc

SEQ ID NO: 310004 - RNA, 32 nt, Homo Sapiens
gccuaguuugguuuuuuaauuaugguaaaggc

SEQ ID NO: 310005 - RNA, 32 nt, Homo Sapiens
gccaggaaggcagcugucugcugcugagucag

SEQ ID NO: 310006 - RNA, 32 nt, Homo Sapiens
ucugaaugcuuuaauuuuuauguaugcaaaau

SEQ ID NO: 310007 - RNA, 32 nt, Homo Sapiens
ucuggaccuuuucuagauaugacuccaggacc

SEQ ID NO: 310008 - RNA, 32 nt, Homo Sapiens
cagcgcuguguggagggggaaugccccgugcu

SEQ ID NO: 310009 - RNA, 26 nt, Homo Sapiens
gagccaauuaaaccucuuuucucuau

SEQ ID NO: 310010 - RNA, 32 nt, Homo Sapiens
uucuggcccaaggccgucugagggaucugcuc

SEQ ID NO: 310011 - RNA, 32 nt, Homo Sapiens
aggagccuuaggaugcagcaugccuucaggag

SEQ ID NO: 310012 - RNA, 32 nt, Homo Sapiens
cccuugugcucacccauagugauggccacugg

SEQ ID NO: 310013 - RNA, 32 nt, Homo Sapiens
cccgcccccgguuguccaccucccgcgaagcc

SEQ ID NO: 310014 - RNA, 32 nt, Homo Sapiens
uggaaucaaacacaauuuuuuaaaagcacuuu

SEQ ID NO: 310015 - RNA, 32 nt, Homo Sapiens
aacgugguauuuacaaagcucacuccucuuau

SEQ ID NO: 310016 - RNA, 32 nt, Homo Sapiens
gagaggccagacuggauuauuccuccuuugcu

SEQ ID NO: 310017 - RNA, 32 nt, Homo Sapiens
auauuuuucuccagaagauggugcuggguaau

SEQ ID NO: 310018 - RNA, 32 nt, Homo Sapiens
cacgccuguaaucucagcauuuugggaggcca

SEQ ID NO: 310019 - RNA, 32 nt, Homo Sapiens
gccucgcugagucggagcaacccccggcagga

SEQ ID NO: 310020 - RNA, 32 nt, Homo Sapiens
gaaccacggucucacucucacccaggcuggag

SEQ ID NO: 310021 - RNA, 32 nt, Homo Sapiens
ugcccuccuggggcuccugugagguggagcca

SEQ ID NO: 310022 - RNA, 32 nt, Homo Sapiens
agaacucaagacauccaaauuuuauugcgucu

SEQ ID NO: 310023 - RNA, 31 nt, Homo Sapiens
uauuuacauugcagccaacacauauggucaa

SEQ ID NO: 310024 - RNA, 32 nt, Homo Sapiens
aacuuguacugggaugugaugauggagaacua

SEQ ID NO: 310025 - RNA, 32 nt, Homo Sapiens
uucaaauuauuugaauaaucuucauauuuuca

SEQ ID NO: 310026 - RNA, 32 nt, Homo Sapiens
ugcccaggugccaggagaaggugugagcauga

SEQ ID NO: 310027 - RNA, 31 nt, Homo Sapiens
acggcacaccaaucaauaaagaacugagcag

SEQ ID NO: 310028 - RNA, 32 nt, Homo Sapiens
uucauucccucacuccugccuuucucauuugu

SEQ ID NO: 310029 - RNA, 32 nt, Homo Sapiens
auacuagugacaauaaagauuauuuuuugaua

SEQ ID NO: 310030 - RNA, 32 nt, Homo Sapiens
cuguguccccaugaggcugagagagaagccuc

SEQ ID NO: 310031 - RNA, 32 nt, Homo Sapiens
gaggacucagggcaagcagaacaucaacuccu

SEQ ID NO: 310032 - RNA, 32 nt, Homo Sapiens
ucacggaauuucugucuauuaaggugacagaa

SEQ ID NO: 310033 - RNA, 32 nt, Homo Sapiens
gcugaguucaggaugccugcgugugguuuagg

SEQ ID NO: 310034 - RNA, 32 nt, Homo Sapiens
cccaccuccugcugguuucccgagggaacuuc

SEQ ID NO: 310035 - RNA, 32 nt, Homo Sapiens
accaguauuauuccucauuuuacauacaggag

SEQ ID NO: 310036 - RNA, 32 nt, Homo Sapiens
gagccagggacuggggcggggggcgggggcga

SEQ ID NO: 310037 - RNA, 32 nt, Homo Sapiens
ucugcaaaacaaaagaauuagcaauauuuuaa

SEQ ID NO: 310038 - RNA, 32 nt, Homo Sapiens
gcggaucgccuggcucccaggcaggaggcgcu

SEQ ID NO: 310039 - RNA, 32 nt, Homo Sapiens
uuguuggaauaaucagugaaucauagaugaaa

SEQ ID NO: 310040 - RNA, 32 nt, Homo Sapiens
guugggagucugagaagucaccaccaugaagu

SEQ ID NO: 310041 - RNA, 32 nt, Homo Sapiens
cauaaggaagcuacuuuuuuuuuaaaguggaa

SEQ ID NO: 310042 - RNA, 32 nt, Homo Sapiens
acaugcaaaaaauuaaauauuuuguguucaaa

SEQ ID NO: 310043 - RNA, 32 nt, Homo Sapiens
uuucuagaugcggagucuccauuuucagcagc

SEQ ID NO: 310044 - RNA, 32 nt, Homo Sapiens
uuuuaacaauucugaguuuuccaauuguugaa

SEQ ID NO: 310045 - RNA, 32 nt, Homo Sapiens
cagcuucugauuuugcagccaagcauucuugc

SEQ ID NO: 310046 - RNA, 32 nt, Homo Sapiens
ccucuccccacuugaucaggcccagaccaggu

SEQ ID NO: 310047 - RNA, 32 nt, Homo Sapiens
uccacugguaaccaaagaguaccuaaguaguu

SEQ ID NO: 310048 - RNA, 32 nt, Homo Sapiens
uuuggauagggggguuuuauuguccgugaggc

SEQ ID NO: 310049 - RNA, 32 nt, Homo Sapiens
acuaacauuucccccgagcucuuggccuuugc

SEQ ID NO: 310050 - RNA, 32 nt, Homo Sapiens
uuguguugaaucuaaaucacauucgguuauau

SEQ ID NO: 310051 - RNA, 32 nt, Homo Sapiens
gcaccagcucagcaugcgguguccucugacag

SEQ ID NO: 310052 - RNA, 32 nt, Homo Sapiens
cccugucgcaucccucggccgcccgcccgcgc

SEQ ID NO: 310053 - RNA, 32 nt, Homo Sapiens
gcucucggcacccucccggcgcccgcguucuc

SEQ ID NO: 310054 - RNA, 32 nt, Homo Sapiens
cuggucugcuccacuggcccucagaaagacuu

SEQ ID NO: 310055 - RNA, 32 nt, Homo Sapiens
gggaugaggugcccugauuuggggaacauuac

SEQ ID NO: 310056 - RNA, 32 nt, Homo Sapiens
uuuccuuguuuuaucauuauaaaaauaaagua

SEQ ID NO: 310057 - RNA, 32 nt, Homo Sapiens
ugcuggcuuuucuggaacgccaggcgcccaug

SEQ ID NO: 310058 - RNA, 32 nt, Homo Sapiens
ucgccucggccgcgccagccggcugcgggcac

SEQ ID NO: 310059 - RNA, 32 nt, Homo Sapiens
cagggcaccccagcugaccugguacugagguu

SEQ ID NO: 310060 - RNA, 32 nt, Homo Sapiens
aauuuacuuuuguuaguuuuuucaggcauaua

SEQ ID NO: 310061 - RNA, 32 nt, Homo Sapiens
caggaguuaggaccagaguccgucccaggucu

SEQ ID NO: 310062 - RNA, 32 nt, Homo Sapiens
cuggugucccuggaccucaccgggccauggac

SEQ ID NO: 310063 - RNA, 32 nt, Homo Sapiens
gcgugauuuuuuuuuuuuuuuaaagcaaacuu

SEQ ID NO: 310064 - RNA, 32 nt, Homo Sapiens
gcaguggcuaacaaaaugauggcuaccacacu

SEQ ID NO: 310065 - RNA, 32 nt, Homo Sapiens
uugguaagaaugcugcagcuggggucagucuc

SEQ ID NO: 310066 - RNA, 32 nt, Homo Sapiens
ccucuccagcauuuccucucaccuccgagcuc

SEQ ID NO: 310067 - RNA, 32 nt, Homo Sapiens
gagagagcagcggggugaugaucucuagcagc

SEQ ID NO: 310068 - RNA, 32 nt, Homo Sapiens
cuaccuucauuauaguucauuuccaagacaca

SEQ ID NO: 310069 - RNA, 32 nt, Homo Sapiens
uucuuuauuucugggucuuuaauaucuaaaag

SEQ ID NO: 310070 - RNA, 32 nt, Homo Sapiens
cacagccucccccaagcuccuccacugaccca

SEQ ID NO: 310071 - RNA, 32 nt, Homo Sapiens
gcccagagaugaaugaggccuacuucaaacaa

SEQ ID NO: 310072 - RNA, 32 nt, Homo Sapiens
ccaguuuucaucuuugaaagugccauuucucc

SEQ ID NO: 310073 - RNA, 32 nt, Homo Sapiens
guacccccauccuuucucucgccccuccuacc

SEQ ID NO: 310074 - RNA, 32 nt, Homo Sapiens
gacccgucucgcgcuccgcugcuccugugcgu

SEQ ID NO: 310075 - RNA, 32 nt, Homo Sapiens
gguauguucuucauagguagugcuugugucuu

SEQ ID NO: 310076 - RNA, 32 nt, Homo Sapiens
aggaggggcuaaggcgggaggggcgccucauc

SEQ ID NO: 310077 - RNA, 32 nt, Homo Sapiens
acauucccaaauuuaaauuuggcagugaaaau

SEQ ID NO: 310078 - RNA, 32 nt, Homo Sapiens
gggccccgcguuagggccgccgcugccucccu

SEQ ID NO: 310079 - RNA, 32 nt, Homo Sapiens
cuuuuuaaauuaagucauuuuguaauauuuga

SEQ ID NO: 310080 - RNA, 32 nt, Homo Sapiens
guugauugcauguuaaaugauacuuuggauau

SEQ ID NO: 310081 - RNA, 32 nt, Homo Sapiens
gacuaguaaagucuuauggagucuuaugaugg

SEQ ID NO: 310082 - RNA, 32 nt, Homo Sapiens
uguccccagaaagcccugggcauggauggauu

SEQ ID NO: 310083 - RNA, 32 nt, Homo Sapiens
cauuugaccucuucuuuuccuucuaagaaaga

SEQ ID NO: 310084 - RNA, 32 nt, Homo Sapiens
guauguauaaagauuauacaaaggugcaauug

SEQ ID NO: 310085 - RNA, 32 nt, Homo Sapiens
gugggagggauagaaaucacauccgccccaac

SEQ ID NO: 310086 - RNA, 32 nt, Homo Sapiens
uccagaagggaaagucgccgccgcucgcggua

SEQ ID NO: 310087 - RNA, 32 nt, Homo Sapiens
gucuuaaaacaaagaaagaacgaaugaaugaa

SEQ ID NO: 310088 - RNA, 32 nt, Homo Sapiens
cggacgugcugggcggcugugcuucgucaaug

SEQ ID NO: 310089 - RNA, 32 nt, Homo Sapiens
guucagguuccggggcgccgcagagcucccgg

SEQ ID NO: 310090 - RNA, 32 nt, Homo Sapiens
gcaguggcuuccccggcagcagccccaugaug

SEQ ID NO: 310091 - RNA, 32 nt, Homo Sapiens
ccaccaugauucugaggccuccccacucaugu

SEQ ID NO: 310092 - RNA, 32 nt, Homo Sapiens
augccugcaaucccagcacuguagaaggcaga

SEQ ID NO: 310093 - RNA, 32 nt, Homo Sapiens
gccagacaagcacuuuauaagccugaccccac

SEQ ID NO: 310094 - RNA, 32 nt, Homo Sapiens
aaaaauuacauauuucuuucugaaacccuaug

SEQ ID NO: 310095 - RNA, 32 nt, Homo Sapiens
aggagaccaagccagaccaauaaacagaacac

SEQ ID NO: 310096 - RNA, 32 nt, Homo Sapiens
uucucucucuuuggaacagccaugaaaugcga

SEQ ID NO: 310097 - RNA, 31 nt, Homo Sapiens
ugcgugcgcagaugugggccccgcgggagca

SEQ ID NO: 310098 - RNA, 32 nt, Homo Sapiens
cacuccuugucaacaaagugcuuuuucacugc

SEQ ID NO: 310099 - RNA, 32 nt, Homo Sapiens
gacauccgcgucuguggccccugggacccugc

SEQ ID NO: 310100 - RNA, 32 nt, Homo Sapiens
gggcaaguucccuguguuagacuggaggcccc

SEQ ID NO: 310101 - RNA, 30 nt, Homo Sapiens
uccucugccgccgugccgcagccgcaccag

SEQ ID NO: 310102 - RNA, 32 nt, Homo Sapiens
acuagagugucuaggaaccaaucugaaagaga

SEQ ID NO: 310103 - RNA, 32 nt, Homo Sapiens
cauauuggauuagggcccacucuggugaccuc

SEQ ID NO: 310104 - RNA, 32 nt, Homo Sapiens
ugggggguuuccuuaugcaggaggaagaugac

SEQ ID NO: 310105 - RNA, 32 nt, Homo Sapiens
acuauuuagaauguagcccuuuuuguacugau

SEQ ID NO: 310106 - RNA, 32 nt, Homo Sapiens
auucuuuuggucuugggagaauuuaagcaguc

SEQ ID NO: 310107 - RNA, 32 nt, Homo Sapiens
uguuucccucuuccuuccgucuuguuuccuaa

SEQ ID NO: 310108 - RNA, 32 nt, Homo Sapiens
acugaaaugaacuugaucuugaucugcuuuga

SEQ ID NO: 310109 - RNA, 32 nt, Homo Sapiens
uugccaggcagacgcccguuguagccguuggg

SEQ ID NO: 310110 - RNA, 32 nt, Homo Sapiens
agcaguucguugauucucuagcaccaugacac

SEQ ID NO: 310111 - RNA, 32 nt, Homo Sapiens
cuagaugggaggaggugugcgugcacauguau

SEQ ID NO: 310112 - RNA, 32 nt, Homo Sapiens
gaggcaaaacguauccugaggacuucuuccgg

SEQ ID NO: 310113 - RNA, 32 nt, Homo Sapiens
uccguacaugugggugucgccaugugugcccu

SEQ ID NO: 310114 - RNA, 32 nt, Homo Sapiens
ggccuuuggcugccuccuaagaaagucaugug

SEQ ID NO: 310115 - RNA, 32 nt, Homo Sapiens
uucuucauuguuuucuuggacaaaaagagacc

SEQ ID NO: 310116 - RNA, 32 nt, Homo Sapiens
gugggagaaaaaagccagaauauaacuuaaga

SEQ ID NO: 310117 - RNA, 32 nt, Homo Sapiens
cucucucucgcgcgccccucuccggagcccgc

SEQ ID NO: 310118 - RNA, 32 nt, Homo Sapiens
gggcgcugcaggggccucccccugccucuucg

SEQ ID NO: 310119 - RNA, 32 nt, Homo Sapiens
ggcuacauauacauaguugcuucuuuccuuuc

SEQ ID NO: 310120 - RNA, 32 nt, Homo Sapiens
ccaucuuccagaaauaaguuuauacacucucu

SEQ ID NO: 310121 - RNA, 32 nt, Homo Sapiens
auuuaaggaaacuaaagaugacuuuauuuucu

SEQ ID NO: 310122 - RNA, 32 nt, Homo Sapiens
gacaugaacucaucguuuuuuauggcugcaua

SEQ ID NO: 310123 - RNA, 32 nt, Homo Sapiens
aaacugcaauuccauaugacuuaucuaacauc

SEQ ID NO: 310124 - RNA, 32 nt, Homo Sapiens
ccuagaagcugauggggacguaguggccgagc

SEQ ID NO: 310125 - RNA, 32 nt, Homo Sapiens
agugcuacugaauacccuggccacagagccac

SEQ ID NO: 310126 - RNA, 32 nt, Homo Sapiens
aggauacagguggucagguccuggcuggcuuu

SEQ ID NO: 310127 - RNA, 32 nt, Homo Sapiens
aacugguggagggggcgcuaggcugccgggcc

SEQ ID NO: 310128 - RNA, 32 nt, Homo Sapiens
ggcucucucccucugucucccuccuggccauu

SEQ ID NO: 310129 - RNA, 32 nt, Homo Sapiens
aaccuaaucaccguggaauuucucauuuucau

SEQ ID NO: 310130 - RNA, 32 nt, Homo Sapiens
acauucaauauuuugauucuugcacaauaaag

SEQ ID NO: 310131 - RNA, 32 nt, Homo Sapiens
uagaaguuauuuuccauauuuaaaagauaaag

SEQ ID NO: 310132 - RNA, 32 nt, Homo Sapiens
uagcgcuuauauauuuugucuuccaaaagguu

SEQ ID NO: 310133 - RNA, 29 nt, Homo Sapiens
gagauaaugccuauguaccagggagaagg

SEQ ID NO: 310134 - RNA, 32 nt, Homo Sapiens
auccagauggcucccggggaugaaugugggug

SEQ ID NO: 310135 - RNA, 32 nt, Homo Sapiens
augaaggguauauaauaaaacaacuggaaucc

SEQ ID NO: 310136 - RNA, 32 nt, Homo Sapiens
gccugcuuuccacucgcuagccccgccggggg

SEQ ID NO: 310137 - RNA, 32 nt, Homo Sapiens
ucucuggccaucuccuucccuccuuccagccc

SEQ ID NO: 310138 - RNA, 32 nt, Homo Sapiens
uaaaaaacugaauuggaauagaauugguaagu

SEQ ID NO: 310139 - RNA, 32 nt, Homo Sapiens
aaaauaggguauaaucaugacucacaaagaua

SEQ ID NO: 310140 - RNA, 32 nt, Homo Sapiens
ggcuguauuuucuuuuauaucuguaaauuuaa

SEQ ID NO: 310141 - RNA, 32 nt, Homo Sapiens
uaauaaggaaauguucaugucuuauuuuugug

SEQ ID NO: 310142 - RNA, 32 nt, Homo Sapiens
aauucuggcagagcugcuaucuucagccccgu

SEQ ID NO: 310143 - RNA, 32 nt, Homo Sapiens
cauccauugaacuuuuuguuuaaacuuucaag

SEQ ID NO: 310144 - RNA, 32 nt, Homo Sapiens
agacaaaagaucugggauacuguucugcugcu

SEQ ID NO: 310145 - RNA, 32 nt, Homo Sapiens
cuuacucuguuguucaaagccacuuuggauug

SEQ ID NO: 310146 - RNA, 32 nt, Homo Sapiens
uagucaagguucagcccagaaaacagaaagca

SEQ ID NO: 310147 - RNA, 32 nt, Homo Sapiens
agcagccauuuaaauuuucacagagggcucaa

SEQ ID NO: 310148 - RNA, 32 nt, Homo Sapiens
aaauagggauucuggggugaggauacaaagac

SEQ ID NO: 310149 - RNA, 32 nt, Homo Sapiens
cucuuaaguguugauuccauggaacugacggc

SEQ ID NO: 310150 - RNA, 32 nt, Homo Sapiens
ccucauauaugauacuaugcuuuucuucuauc

SEQ ID NO: 310151 - RNA, 32 nt, Homo Sapiens
ccagcucuuccagcugauggcuccacaucuug

SEQ ID NO: 310152 - RNA, 32 nt, Homo Sapiens
gucuugagaaacaaaaccacaggaggaaagga

SEQ ID NO: 310153 - RNA, 29 nt, Homo Sapiens
ucgcugcgcgguccuauacggucccugcu

SEQ ID NO: 310154 - RNA, 32 nt, Homo Sapiens
uccugguguaucaacugaaacaaaaucuauga

SEQ ID NO: 310155 - RNA, 31 nt, Homo Sapiens
cugggccugcacugccugcagccgacaugcg

SEQ ID NO: 310156 - RNA, 32 nt, Homo Sapiens
ccccaucccacuuucucaucugccuccuuuuc

SEQ ID NO: 310157 - RNA, 30 nt, Homo Sapiens
aaguuugucugugacuugaagacucuuacu

SEQ ID NO: 310158 - RNA, 30 nt, Homo Sapiens
ugggguggagguggggagcaagaauuugac

SEQ ID NO: 310159 - RNA, 32 nt, Homo Sapiens
gaugacagaauacauagcaccccaagcgucug

SEQ ID NO: 310160 - RNA, 32 nt, Homo Sapiens
uuuuuuaauuuuuucuuuuuuauuaagcuagc

SEQ ID NO: 310161 - RNA, 32 nt, Homo Sapiens
ucccagcccugggcccaagaggaggcggcugc

SEQ ID NO: 310162 - RNA, 32 nt, Homo Sapiens
agccgugaaugggagacugcaacaaucugugu

SEQ ID NO: 310163 - RNA, 32 nt, Homo Sapiens
caggaaaagacccaaauaaacaaaaucagaaa

SEQ ID NO: 310164 - RNA, 32 nt, Homo Sapiens
gggacugaaggggaaccccggggugcccacag

SEQ ID NO: 310165 - RNA, 32 nt, Homo Sapiens
aagaugaaaucgagcugucuuuuaacuuuugu

SEQ ID NO: 310166 - RNA, 32 nt, Homo Sapiens
ugcuauauguccugaucuccaaaucgaccuau

SEQ ID NO: 310167 - RNA, 32 nt, Homo Sapiens
cgcuuucccuacaggcgaccacugcucugcgg

SEQ ID NO: 310168 - RNA, 32 nt, Homo Sapiens
gucauuuuuauagaaugaaaugugcuuauuuc

SEQ ID NO: 310169 - RNA, 31 nt, Homo Sapiens
cuauuugugaauauuuucccaaauaaggaag

SEQ ID NO: 310170 - RNA, 32 nt, Homo Sapiens
uugccacccucagugccacaagaggggacccc

SEQ ID NO: 310171 - RNA, 32 nt, Homo Sapiens
auauuuuggcuuuuaaauguuuuaaaugauuu

SEQ ID NO: 310172 - RNA, 32 nt, Homo Sapiens
ugauaucugaagagucuuagcguuugugucgu

SEQ ID NO: 310173 - RNA, 32 nt, Homo Sapiens
gcuucggcuuuuggccucgggauguccagccc

SEQ ID NO: 310174 - RNA, 32 nt, Homo Sapiens
acggugccagguuuucuggguguccaaaggaa

SEQ ID NO: 310175 - RNA, 32 nt, Homo Sapiens
uccuggcccagcuucuccuucucccucugcau

SEQ ID NO: 310176 - RNA, 32 nt, Homo Sapiens
ccugagucaggagcucgagaccagccuggaaa

SEQ ID NO: 310177 - RNA, 32 nt, Homo Sapiens
gcauguguuacugauguguugcugaagauuaa

SEQ ID NO: 310178 - RNA, 32 nt, Homo Sapiens
cuguaugagcggcggcccagcccuaaccgcca

SEQ ID NO: 310179 - RNA, 32 nt, Homo Sapiens
caguggcucacgccuguaaucccggcacugug

SEQ ID NO: 310180 - RNA, 32 nt, Homo Sapiens
cagucugcugccgugugcgugugcgucagggc

SEQ ID NO: 310181 - RNA, 32 nt, Homo Sapiens
ucugacggcgcggccuggcuugcaggcuagag

SEQ ID NO: 310182 - RNA, 32 nt, Homo Sapiens
uccuggcucccucuguuuucucucacuguaga

SEQ ID NO: 310183 - RNA, 32 nt, Homo Sapiens
uggacccuacugucuacacgggcuugcacaca

SEQ ID NO: 310184 - RNA, 32 nt, Homo Sapiens
uguuuauggaguguuguuuucuuagaauaaug

SEQ ID NO: 310185 - RNA, 32 nt, Homo Sapiens
accuccgauggcggccccucauuggccaaggg

SEQ ID NO: 310186 - RNA, 32 nt, Homo Sapiens
uuaauuuugucaacacugcauugucuuuugag

SEQ ID NO: 310187 - RNA, 32 nt, Homo Sapiens
agugcuugagucuauuuuuaauaaaaagggaa

SEQ ID NO: 310188 - RNA, 29 nt, Homo Sapiens
uguuugucucacaaucaccacaaaauaaa

SEQ ID NO: 310189 - RNA, 32 nt, Homo Sapiens
cagacaucugcuuccacccagccaagcccaca

SEQ ID NO: 310190 - RNA, 32 nt, Homo Sapiens
uccuuggacuugucugggggcugcaguggagu

SEQ ID NO: 310191 - RNA, 32 nt, Homo Sapiens
gggaacuucuaaacacuucauucuuuauauau

SEQ ID NO: 310192 - RNA, 32 nt, Homo Sapiens
gucaagauuuugaucugagacaugcugaugcu

SEQ ID NO: 310193 - RNA, 32 nt, Homo Sapiens
ccaucugaggcucauacguaaaaggaacuugc

SEQ ID NO: 310194 - RNA, 32 nt, Homo Sapiens
uuggaucacguguggcuuuucuccaugaucac

SEQ ID NO: 310195 - RNA, 31 nt, Homo Sapiens
ggcagcugagccugccugcucugugccgugg

SEQ ID NO: 310196 - RNA, 32 nt, Homo Sapiens
agagcccucuuuccacgagacugaagucuggg

SEQ ID NO: 310197 - RNA, 32 nt, Homo Sapiens
auuacuuuuuauuacguuucuuacugucaggu

SEQ ID NO: 310198 - RNA, 32 nt, Homo Sapiens
auuguucuuuauucugaaguuauuuucuuccu

SEQ ID NO: 310199 - RNA, 32 nt, Homo Sapiens
cuuggaacgaguauaauaauggcuguucagca

SEQ ID NO: 310200 - RNA, 32 nt, Homo Sapiens
guacacugagggagaaaggaaaaggaaacuuc

SEQ ID NO: 310201 - RNA, 32 nt, Homo Sapiens
ucauguguacacaacuagugagaauccaggug

SEQ ID NO: 310202 - RNA, 30 nt, Homo Sapiens
gaccggagaacugaguugcaaaauauauua

SEQ ID NO: 310203 - RNA, 32 nt, Homo Sapiens
ccccaaaaaaauuuacaaaaaauccgcgucuc

SEQ ID NO: 310204 - RNA, 32 nt, Homo Sapiens
cuagauaaucuuucuaaaaauucauaauccca

SEQ ID NO: 310205 - RNA, 32 nt, Homo Sapiens
aagaacgcgaggggaugggcagcggggaggga

SEQ ID NO: 310206 - RNA, 32 nt, Homo Sapiens
ucucaaaugauuacauuuaaagggcagauuuu

SEQ ID NO: 310207 - RNA, 32 nt, Homo Sapiens
ucccucucaccaccacccaggcccacaggcca

SEQ ID NO: 310208 - RNA, 32 nt, Homo Sapiens
gcaugggcucucaggcugcugcugaguggagg

SEQ ID NO: 310209 - RNA, 30 nt, Homo Sapiens
auauguacuaguggcauggagaaugcacca

SEQ ID NO: 310210 - RNA, 31 nt, Homo Sapiens
guaagugaagcaugcagagugcuguuucuuu

SEQ ID NO: 310211 - RNA, 32 nt, Homo Sapiens
gcccucgguuucgaugcgcccggagcgauccu

SEQ ID NO: 310212 - RNA, 32 nt, Homo Sapiens
cccuucaauaaaacuuuuuuauucugaucucc

SEQ ID NO: 310213 - RNA, 32 nt, Homo Sapiens
ccaacauuagugaaacaaaaucagugauauaa

SEQ ID NO: 310214 - RNA, 32 nt, Homo Sapiens
cugggguagugucagagcgggagugaggcugg

SEQ ID NO: 310215 - RNA, 32 nt, Homo Sapiens
ucaucuuguuggcaucagucacagucuuccuc

SEQ ID NO: 310216 - RNA, 32 nt, Homo Sapiens
gaaaggucuccauggagcgacaggcccuuugg

SEQ ID NO: 310217 - RNA, 32 nt, Homo Sapiens
ccuacucugcaccucugaccacaccuuggcaa

SEQ ID NO: 310218 - RNA, 32 nt, Homo Sapiens
gggaaaugggagcacaguacugggaaagggga

SEQ ID NO: 310219 - RNA, 28 nt, Homo Sapiens
cugauggccuccugggguggagaaaagc

SEQ ID NO: 310220 - RNA, 32 nt, Homo Sapiens
ugcacucuauagaauaaauuaucuuuaaacau

SEQ ID NO: 310221 - RNA, 32 nt, Homo Sapiens
gcggugaagaucuguggagauggagcugggag

SEQ ID NO: 310222 - RNA, 32 nt, Homo Sapiens
agagcggggaggaggagaggucggaaugucuc

SEQ ID NO: 310223 - RNA, 32 nt, Homo Sapiens
cauucccugcucugcggcuccucccaccccac

SEQ ID NO: 310224 - RNA, 32 nt, Homo Sapiens
gacacuugucauuguuaccagcagucuccaaa

SEQ ID NO: 310225 - RNA, 32 nt, Homo Sapiens
cuugucugucuccacucucaacccaggcaauc

SEQ ID NO: 310226 - RNA, 32 nt, Homo Sapiens
cgaggcagcagcugcgcagccucauggaguuu

SEQ ID NO: 310227 - RNA, 32 nt, Homo Sapiens
aacuauguacagagaacuuuuuacaaaaggca

SEQ ID NO: 310228 - RNA, 32 nt, Homo Sapiens
gcuaauccaggaauauuguuaucccuucccau

SEQ ID NO: 310229 - RNA, 32 nt, Homo Sapiens
cggcccugccagcgggcgguggcgccuccaga

SEQ ID NO: 310230 - RNA, 32 nt, Homo Sapiens
aggcgguagcgaaggcagcagcagcgguggcg

SEQ ID NO: 310231 - RNA, 32 nt, Homo Sapiens
cuccucuauuaagaguauuuaaaaucauauuu

SEQ ID NO: 310232 - RNA, 32 nt, Homo Sapiens
gcacagcccucccgccccuuccccgagggaug

SEQ ID NO: 310233 - RNA, 32 nt, Homo Sapiens
aacaccccuggcgaggcuucccggggccagag

SEQ ID NO: 310234 - RNA, 27 nt, Homo Sapiens
gagaaguugcucuucagccuggaaaau

SEQ ID NO: 310235 - RNA, 32 nt, Homo Sapiens
gagcagcagccgcagccuccucgugauccucc

SEQ ID NO: 310236 - RNA, 32 nt, Homo Sapiens
cugagccggcagugccuccgcggccgcugggc

SEQ ID NO: 310237 - RNA, 32 nt, Homo Sapiens
uaaaauuccuuuuaggggguaguuagacaauu

SEQ ID NO: 310238 - RNA, 32 nt, Homo Sapiens
cccugaggcagcaggagcugguguguacugga

SEQ ID NO: 310239 - RNA, 32 nt, Homo Sapiens
cucuacauuccacagaugcauuuccucucccc

SEQ ID NO: 310240 - RNA, 32 nt, Homo Sapiens
cagcucauuuucuccuuucauuuuacaaaaga

SEQ ID NO: 310241 - RNA, 32 nt, Homo Sapiens
cccuuagaagucugaggccagacugacugagg

SEQ ID NO: 310242 - RNA, 32 nt, Homo Sapiens
aaauucugucuccugcauacacuccggcaugc

SEQ ID NO: 310243 - RNA, 32 nt, Homo Sapiens
guauucuguaccauagcgcugcucuuaugcca

SEQ ID NO: 310244 - RNA, 32 nt, Homo Sapiens
acaauaaauuucccuuaaaauuucauagcaau

SEQ ID NO: 310245 - RNA, 32 nt, Homo Sapiens
uuaaacaauuacauugaaaucuauaugagucu

SEQ ID NO: 310246 - RNA, 32 nt, Homo Sapiens
aagcuccaugcacauagcccagcaaagagcaa

SEQ ID NO: 310247 - RNA, 32 nt, Homo Sapiens
aaugaagauaaaauugcucuuuuguaacuuua

SEQ ID NO: 310248 - RNA, 32 nt, Homo Sapiens
cuggcuuccagaacugugagaaauaaauuucu

SEQ ID NO: 310249 - RNA, 27 nt, Homo Sapiens
guuaugcaauucuucaguccuuucugu

SEQ ID NO: 310250 - RNA, 32 nt, Homo Sapiens
gcgcgggagugccaccugauucacugcacuug

SEQ ID NO: 310251 - RNA, 32 nt, Homo Sapiens
cgccgcccaagcccgugccucgucgccgcuua

SEQ ID NO: 310252 - RNA, 32 nt, Homo Sapiens
auucuucuaauggugguuugggcuugucuucu

SEQ ID NO: 310253 - RNA, 32 nt, Homo Sapiens
gucuucagccucagccguaaggcccugggcua

SEQ ID NO: 310254 - RNA, 32 nt, Homo Sapiens
uauaccucguauuugcaacuguauuuguauaa

SEQ ID NO: 310255 - RNA, 32 nt, Homo Sapiens
aggaggucaggagauugagaccauccuggcua

SEQ ID NO: 310256 - RNA, 32 nt, Homo Sapiens
cucccaugggcacucaggauccagaagugcaa

SEQ ID NO: 310257 - RNA, 32 nt, Homo Sapiens
gggaggcgucgggggccuuagcagaaggggaa

SEQ ID NO: 310258 - RNA, 32 nt, Homo Sapiens
auauaauagauaucuaucgcuauagaauaaug

SEQ ID NO: 310259 - RNA, 32 nt, Homo Sapiens
ccaauaaugccuucucggggguggccacguac

SEQ ID NO: 310260 - RNA, 32 nt, Homo Sapiens
agaaauauuugugacaaaaaauuaaagcauuu

SEQ ID NO: 310261 - RNA, 32 nt, Homo Sapiens
cccgcgcucaggugguugcggaagucagugcc

SEQ ID NO: 310262 - RNA, 32 nt, Homo Sapiens
cguuucuuuuuaccuuuuuuggcacucccucu

SEQ ID NO: 310263 - RNA, 32 nt, Homo Sapiens
uuuugaggggcaaaaauagaaaaggagagaag

SEQ ID NO: 310264 - RNA, 32 nt, Homo Sapiens
gcaggccugaagauucucugaggcauucagca

SEQ ID NO: 310265 - RNA, 32 nt, Homo Sapiens
uuacuggcuuugggccauuguuuucuaauuuu

SEQ ID NO: 310266 - RNA, 32 nt, Homo Sapiens
ugugugccugguuuccucacauccugccucag

SEQ ID NO: 310267 - RNA, 32 nt, Homo Sapiens
cagguggaagagaucaagaugggauucugcug

SEQ ID NO: 310268 - RNA, 32 nt, Homo Sapiens
ucugccagcacagucuguuuaaguagcuaaau

SEQ ID NO: 310269 - RNA, 32 nt, Homo Sapiens
caccgcggcggccucggcgccauggagccccc

SEQ ID NO: 310270 - RNA, 30 nt, Homo Sapiens
ugugucugauaauaaagacccugugcuuuc

SEQ ID NO: 310271 - RNA, 32 nt, Homo Sapiens
uaccccaaaagaaaugucuuagucgugacaau

SEQ ID NO: 310272 - RNA, 32 nt, Homo Sapiens
agggggcacugggacuggucccugcccucauc

SEQ ID NO: 310273 - RNA, 32 nt, Homo Sapiens
cuggggaagaugagcuuccauguauccugugc

SEQ ID NO: 310274 - RNA, 30 nt, Homo Sapiens
ccaggagucgugcgcgcgggcggcgagggg

SEQ ID NO: 310275 - RNA, 32 nt, Homo Sapiens
ugaccaagggaaguagauccagagacaccaug

SEQ ID NO: 310276 - RNA, 32 nt, Homo Sapiens
uaaagcauauccuuuacccaggccauuccuau

SEQ ID NO: 310277 - RNA, 32 nt, Homo Sapiens
cuccuggugucugaaacggcaguguauuuuac

SEQ ID NO: 310278 - RNA, 32 nt, Homo Sapiens
uuuaaaaaggggagaugagaaagggaauacua

SEQ ID NO: 310279 - RNA, 32 nt, Homo Sapiens
acaucccacuggauccacacccgcccccacuu

SEQ ID NO: 310280 - RNA, 32 nt, Homo Sapiens
uuuugcuccauaucaggaaauauuuugguagg

SEQ ID NO: 310281 - RNA, 32 nt, Homo Sapiens
agcggguuccgggaggcgcccggugagcccac

SEQ ID NO: 310282 - RNA, 32 nt, Homo Sapiens
uucauuuucuauccuuuuauuuuuaguagaga

SEQ ID NO: 310283 - RNA, 32 nt, Homo Sapiens
cggggcggggccuggguccaccgggguucuga

SEQ ID NO: 310284 - RNA, 32 nt, Homo Sapiens
uggcuacgcccuggguuucaugagcuuggaca

SEQ ID NO: 310285 - RNA, 32 nt, Homo Sapiens
gcccuucucuaugaaccuugugccuucugucc

SEQ ID NO: 310286 - RNA, 32 nt, Homo Sapiens
uuccacugcucuauuucugacucucauuuuug

SEQ ID NO: 310287 - RNA, 32 nt, Homo Sapiens
agcugcuugcucaguagggaaugucaguuguu

SEQ ID NO: 310288 - RNA, 32 nt, Homo Sapiens
ccaugugauguuuuugauacuucuuccucauu

SEQ ID NO: 310289 - RNA, 32 nt, Homo Sapiens
aaugauucuuugcauuugcuuaguucuccuuc

SEQ ID NO: 310290 - RNA, 32 nt, Homo Sapiens
agagcaaauggcaaagacuggauccaaaccca

SEQ ID NO: 310291 - RNA, 32 nt, Homo Sapiens
ggacgaggaugaugaccuguggaaugaagcug

SEQ ID NO: 310292 - RNA, 32 nt, Homo Sapiens
uagcucuuugaagagaaaguaguucucuauug

SEQ ID NO: 310293 - RNA, 32 nt, Homo Sapiens
ccacuuagguguagcauggauuuuaaacugca

SEQ ID NO: 310294 - RNA, 32 nt, Homo Sapiens
uuuuuauuguugguaggaucccauuguauggg

SEQ ID NO: 310295 - RNA, 27 nt, Homo Sapiens
uccuuccaccucuucagccccggcagg

SEQ ID NO: 310296 - RNA, 32 nt, Homo Sapiens
uacaaaggaugaugauuguaaguguuuacuga

SEQ ID NO: 310297 - RNA, 32 nt, Homo Sapiens
cgaauauguaucugacuaaaaauguugcaggc

SEQ ID NO: 310298 - RNA, 32 nt, Homo Sapiens
uuacaagagucuuauaacuacuugaauuuuua

SEQ ID NO: 310299 - RNA, 32 nt, Homo Sapiens
cuugcuccauccugcgccccaauaccucagcu

SEQ ID NO: 310300 - RNA, 30 nt, Homo Sapiens
accaaaggcaggcaugguggggcuggcaug

SEQ ID NO: 310301 - RNA, 29 nt, Homo Sapiens
cagccugggaagguggccacguucacaau

SEQ ID NO: 310302 - RNA, 32 nt, Homo Sapiens
gaaugaauagauuugucuuuuccucaccaccu

SEQ ID NO: 310303 - RNA, 32 nt, Homo Sapiens
gcuuuucucccuccccuuccuuccugcagguu

SEQ ID NO: 310304 - RNA, 32 nt, Homo Sapiens
uaaauguggcaaguuuuucagacaucauucau

SEQ ID NO: 310305 - RNA, 32 nt, Homo Sapiens
gcaagcgcagugccgcagcgcacgccggagug

SEQ ID NO: 310306 - RNA, 32 nt, Homo Sapiens
auguaagaauaaauuuugacaaauuucggaac

SEQ ID NO: 310307 - RNA, 32 nt, Homo Sapiens
gaagaggcgagagcgcggagggcgcgcgugcg

SEQ ID NO: 310308 - RNA, 32 nt, Homo Sapiens
cacccuguuugucaaucuuuggcauucgaauu

SEQ ID NO: 310309 - RNA, 32 nt, Homo Sapiens
cauuuccucuuuuaaauaaaguuucuuuuucu

SEQ ID NO: 310310 - RNA, 32 nt, Homo Sapiens
ccugucugccagcagaggcaguagggcacaga

SEQ ID NO: 310311 - RNA, 32 nt, Homo Sapiens
uuggaauggcuguauuuacccaaugccuguac

SEQ ID NO: 310312 - RNA, 32 nt, Homo Sapiens
uuuuaauauauucuucuauggaucacacacau

SEQ ID NO: 310313 - RNA, 32 nt, Homo Sapiens
gcccaaccccccagggacaggcacucucuggc

SEQ ID NO: 310314 - RNA, 32 nt, Homo Sapiens
cagggguaaaacaacuuuuucaugggucaaaa

SEQ ID NO: 310315 - RNA, 32 nt, Homo Sapiens
ccuagacggcgguguugcuccggcagcguucc

SEQ ID NO: 310316 - RNA, 32 nt, Homo Sapiens
ugagaggagacgggcugggcggcgacccccac

SEQ ID NO: 310317 - RNA, 32 nt, Homo Sapiens
ucggacccgccuccgaagacguggagcgcugc

SEQ ID NO: 310318 - RNA, 28 nt, Homo Sapiens
gcggacguuggcgucaggaugaccacac

SEQ ID NO: 310319 - RNA, 32 nt, Homo Sapiens
aguuagaggaagagagugacucaaaucacaac

SEQ ID NO: 310320 - RNA, 27 nt, Homo Sapiens
cugcaguuauucuucagcuguuuggac

SEQ ID NO: 310321 - RNA, 32 nt, Homo Sapiens
auagauacauaaauuuuuaaaaaccugccaau

SEQ ID NO: 310322 - RNA, 32 nt, Homo Sapiens
aaaacgugaugaugggcagcuagcuuggaaac

SEQ ID NO: 310323 - RNA, 32 nt, Homo Sapiens
ccagaaugaacagaacaaaacccccgcacucc

SEQ ID NO: 310324 - RNA, 32 nt, Homo Sapiens
gcggaccucacagcagccccagaaguggugcg

SEQ ID NO: 310325 - RNA, 32 nt, Homo Sapiens
uugagaacaugaaaugucuucuuggugggaag

SEQ ID NO: 310326 - RNA, 32 nt, Homo Sapiens
agcuaucucagccuaaugcucucccauuauga

SEQ ID NO: 310327 - RNA, 32 nt, Homo Sapiens
uuucuucuugauuucacuucugauggaugcau

SEQ ID NO: 310328 - RNA, 32 nt, Homo Sapiens
ugacaaucucugccuuuugauuguauuguuua

SEQ ID NO: 310329 - RNA, 32 nt, Homo Sapiens
auugugaaggauuuuuauuugcaugauuauag

SEQ ID NO: 310330 - RNA, 27 nt, Homo Sapiens
uguuuuucccaccucagcccccaugcu

SEQ ID NO: 310331 - RNA, 32 nt, Homo Sapiens
agugggaguggaguggagcggcugugguugcc

SEQ ID NO: 310332 - RNA, 32 nt, Homo Sapiens
gaccucggcggacucgccauggaggaggagga

SEQ ID NO: 310333 - RNA, 32 nt, Homo Sapiens
ccagcuccagucuccccuccccggggucucgc

SEQ ID NO: 310334 - RNA, 32 nt, Homo Sapiens
cacaccugggaucgcgcagggcccgcagggca

SEQ ID NO: 310335 - RNA, 32 nt, Homo Sapiens
cuuauucugagcuuagagagaauggggagggu

SEQ ID NO: 310336 - RNA, 32 nt, Homo Sapiens
cccacacacagacucaccaacuuugcaauaga

SEQ ID NO: 310337 - RNA, 32 nt, Homo Sapiens
ggagaagacaaugaaaaacuguguaacaggug

SEQ ID NO: 310338 - RNA, 32 nt, Homo Sapiens
cuggaaagccccaagcagcugccccagggaca

SEQ ID NO: 310339 - RNA, 32 nt, Homo Sapiens
ucauugaguacgcgaggcccccgccccggucg

SEQ ID NO: 310340 - RNA, 32 nt, Homo Sapiens
gugggccugugcuggggauggggcaggccugg

SEQ ID NO: 310341 - RNA, 32 nt, Homo Sapiens
augcuggggcacuuuaaaucugagcaggaugc

SEQ ID NO: 310342 - RNA, 32 nt, Homo Sapiens
ucuuuuucucugaguacguuucaguguuuaau

SEQ ID NO: 310343 - RNA, 32 nt, Homo Sapiens
cccuaaauguuugaucucuguuugucauuacu

SEQ ID NO: 310344 - RNA, 32 nt, Homo Sapiens
ucacuuuaucccaauuucuugauacuuuuccu

SEQ ID NO: 310345 - RNA, 32 nt, Homo Sapiens
gaucuugaauuugaauaugugcaaggucagau

SEQ ID NO: 310346 - RNA, 32 nt, Homo Sapiens
agguuuuugcacaccuuauuaaggaacuccag

SEQ ID NO: 310347 - RNA, 32 nt, Homo Sapiens
aagcuagcacugucuguaauacuucuaagagc

SEQ ID NO: 310348 - RNA, 32 nt, Homo Sapiens
aagucuuaaaaaggaauuuccgaaacaaaagu

SEQ ID NO: 310349 - RNA, 32 nt, Homo Sapiens
ccagcccaaaaauaauuuuuguagaauuagca

SEQ ID NO: 310350 - RNA, 32 nt, Homo Sapiens
ugaagagguccagaaugauaugcaaaaacuac

SEQ ID NO: 310351 - RNA, 32 nt, Homo Sapiens
auuugcacagaaauuauggaguaauuaggaca

SEQ ID NO: 310352 - RNA, 32 nt, Homo Sapiens
uucauugccuguccccaccccaucccagguca

SEQ ID NO: 310353 - RNA, 32 nt, Homo Sapiens
cuccacaucgccaaggugccacagggggagca

SEQ ID NO: 310354 - RNA, 32 nt, Homo Sapiens
augaggcccccgauguacaaucugugcuuaac

SEQ ID NO: 310355 - RNA, 32 nt, Homo Sapiens
acaucuguggacagaagaaugcucuggugagg

SEQ ID NO: 310356 - RNA, 32 nt, Homo Sapiens
ucaauugaaaucaacuguguuuuguguucucu

SEQ ID NO: 310357 - RNA, 32 nt, Homo Sapiens
agagauagucuucuuuuuguccuuucuggccu

SEQ ID NO: 310358 - RNA, 32 nt, Homo Sapiens
acgggguggggguggggcgcgcaucaagauuu

SEQ ID NO: 310359 - RNA, 32 nt, Homo Sapiens
guaauauuucucacacaaaaccauuauccaau

SEQ ID NO: 310360 - RNA, 32 nt, Homo Sapiens
aaguaaccaaaauguguauuugccccaucuua

SEQ ID NO: 310361 - RNA, 32 nt, Homo Sapiens
gcaaugagccaugauuucccacugcacuccag

SEQ ID NO: 310362 - RNA, 32 nt, Homo Sapiens
auuacaguaaaaaugugcucuuuuuuaaggug

SEQ ID NO: 310363 - RNA, 32 nt, Homo Sapiens
uggggcccacccacaaaugcugauuuaacucc

SEQ ID NO: 310364 - RNA, 32 nt, Homo Sapiens
auguaguucuuuguuccugcuuucucuuucag

SEQ ID NO: 310365 - RNA, 32 nt, Homo Sapiens
aggaugagaacaaagauuccauuugcaccaug

SEQ ID NO: 310366 - RNA, 32 nt, Homo Sapiens
auuguguagcggggcccaggcugcccgcgggu

SEQ ID NO: 310367 - RNA, 32 nt, Homo Sapiens
gggccacaucucugcaccuuccaggcucugaa

SEQ ID NO: 310368 - RNA, 32 nt, Homo Sapiens
cucaacaaaaggaaggguggucagaaguacau

SEQ ID NO: 310369 - RNA, 32 nt, Homo Sapiens
cgccuuggcagcccugaugacuggucucuggc

SEQ ID NO: 310370 - RNA, 32 nt, Homo Sapiens
cccccguccaccccagagacccugcccuucca

SEQ ID NO: 310371 - RNA, 32 nt, Homo Sapiens
uaaucagccuuggcggggcccaaauaccaccc

SEQ ID NO: 310372 - RNA, 32 nt, Homo Sapiens
cuucacgcagcccuuaccccaagcccucuagc

SEQ ID NO: 310373 - RNA, 32 nt, Homo Sapiens
uuuggcuaguacuguauaaaaaacagaauugu

SEQ ID NO: 310374 - RNA, 32 nt, Homo Sapiens
aggaggccgcccggcugcgcgcggagcuggag

SEQ ID NO: 310375 - RNA, 32 nt, Homo Sapiens
acuguauugugacauuaucaaccuuuauugcu

SEQ ID NO: 310376 - RNA, 32 nt, Homo Sapiens
cauugcucugaaugguugauugaagggucagg

SEQ ID NO: 310377 - RNA, 32 nt, Homo Sapiens
uuuggaauagaaagaacagagaaggcgauacu

SEQ ID NO: 310378 - RNA, 32 nt, Homo Sapiens
gggacgggcgcgccucggagcgcacggcugcg

SEQ ID NO: 310379 - RNA, 32 nt, Homo Sapiens
gauaaucuauucucuagcuuagguaucuguga

SEQ ID NO: 310380 - RNA, 32 nt, Homo Sapiens
cuucuugcuucccgucccccagccccaugcuc

SEQ ID NO: 310381 - RNA, 32 nt, Homo Sapiens
ugguuggccccuccccaggcaggccagggccc

SEQ ID NO: 310382 - RNA, 31 nt, Homo Sapiens
uuuccccagcgcagcuuucuguagaaaugga

SEQ ID NO: 310383 - RNA, 31 nt, Homo Sapiens
acagcaaugagagccagucagaaggacuuug

SEQ ID NO: 310384 - RNA, 32 nt, Homo Sapiens
gguggucggucccugggcugugcaacaacucc

SEQ ID NO: 310385 - RNA, 32 nt, Homo Sapiens
aggagcuggagcagcgggaggcggcauggagg

SEQ ID NO: 310386 - RNA, 32 nt, Homo Sapiens
gaguuacauuaaccuuguuguuuaccuuucac

SEQ ID NO: 310387 - RNA, 32 nt, Homo Sapiens
gauuaugaucucgguccccauccauccuaacu

SEQ ID NO: 310388 - RNA, 32 nt, Homo Sapiens
guuucauucauuuuuccaacauuaaggaauaa

SEQ ID NO: 310389 - RNA, 32 nt, Homo Sapiens
gcuccgggcggcgugcgccgcggugccuagug

SEQ ID NO: 310390 - RNA, 32 nt, Homo Sapiens
uguugcaucaauuaucucugugaggauuccac

SEQ ID NO: 310391 - RNA, 32 nt, Homo Sapiens
gggaagccaaagggcuccucucuacccugacu

SEQ ID NO: 310392 - RNA, 32 nt, Homo Sapiens
ugccuccugccuccgcgcagccugcagcggga

SEQ ID NO: 310393 - RNA, 32 nt, Homo Sapiens
cauucacuuccauggugacuaguguuuguuuu

SEQ ID NO: 310394 - RNA, 32 nt, Homo Sapiens
acaacaacaacaacaaauucacggaaucuuuu

SEQ ID NO: 310395 - RNA, 32 nt, Homo Sapiens
uggaaaaucaugaaggaaaaauacaaccugug

SEQ ID NO: 310396 - RNA, 32 nt, Homo Sapiens
uaaaacucgccauuauaagacacacacaacuu

SEQ ID NO: 310397 - RNA, 32 nt, Homo Sapiens
guugccaaaaauugauaguuuacuccuaaguc

SEQ ID NO: 310398 - RNA, 32 nt, Homo Sapiens
gauggauguacaacugcgugaauauacuaaaa

SEQ ID NO: 310399 - RNA, 32 nt, Homo Sapiens
cgguuagucauugauagaacuacuuugaaaac

SEQ ID NO: 310400 - RNA, 32 nt, Homo Sapiens
ggagaguacucacuuuaccaucuuugaauaua

SEQ ID NO: 310401 - RNA, 32 nt, Homo Sapiens
cgcccucuccccaccccuaccccuggcuguac

SEQ ID NO: 310402 - RNA, 32 nt, Homo Sapiens
ccuacacugccagccgccaccggggcacacgg

SEQ ID NO: 310403 - RNA, 32 nt, Homo Sapiens
cgggguacaggaggaggacgccgcagaggugc

SEQ ID NO: 310404 - RNA, 32 nt, Homo Sapiens
aggacuuuuuaaaaauaaauauugcucuaaac

SEQ ID NO: 310405 - RNA, 32 nt, Homo Sapiens
gcaaugaaaaggaaugcuuuauauguuacaac

SEQ ID NO: 310406 - RNA, 32 nt, Homo Sapiens
augaggcugaucaacagcacuucugccacuug

SEQ ID NO: 310407 - RNA, 32 nt, Homo Sapiens
uaagaauaaaaaccgauuaccucaugccaagc

SEQ ID NO: 310408 - RNA, 32 nt, Homo Sapiens
gugaccaguuucugccaacauuuauggaaaua

SEQ ID NO: 310409 - RNA, 32 nt, Homo Sapiens
uugagauaggguuggaauauaguacucuagau

SEQ ID NO: 310410 - RNA, 32 nt, Homo Sapiens
uaccuugcaucauauuaucaaugauuccauaa

SEQ ID NO: 310411 - RNA, 32 nt, Homo Sapiens
cuuuuccggccucugcagcugcgcgggcgggc

SEQ ID NO: 310412 - RNA, 32 nt, Homo Sapiens
uugauugugccaaagaaauucauucagagcaa

SEQ ID NO: 310413 - RNA, 32 nt, Homo Sapiens
aaaugccuaaacagucuuucuguugguuagcu

SEQ ID NO: 310414 - RNA, 28 nt, Homo Sapiens
ucucugaggcugagcauuauaagaaaau

SEQ ID NO: 310415 - RNA, 32 nt, Homo Sapiens
cguggagggccucgccauguccugcugcccga

SEQ ID NO: 310416 - RNA, 32 nt, Homo Sapiens
uaggaggccaacuucagggucugggucugagc

SEQ ID NO: 310417 - RNA, 32 nt, Homo Sapiens
gggggugacggggggucgcggaggcggccagg

SEQ ID NO: 310418 - RNA, 32 nt, Homo Sapiens
aaucaaaagagcaugaugauggcugccugguu

SEQ ID NO: 310419 - RNA, 32 nt, Homo Sapiens
cuucuuuccccccacaccucauuuaaaugggg

SEQ ID NO: 310420 - RNA, 32 nt, Homo Sapiens
cucccuucccccucgccgccgaccgaguucuu

SEQ ID NO: 310421 - RNA, 32 nt, Homo Sapiens
gccggucaccccgccuccgaccccgcucucgc

SEQ ID NO: 310422 - RNA, 32 nt, Homo Sapiens
uacaccuccccuccccccgccagccgccaaag

SEQ ID NO: 310423 - RNA, 32 nt, Homo Sapiens
ggagagugacgcgguuugcgucuggagcggcu

SEQ ID NO: 310424 - RNA, 32 nt, Homo Sapiens
auucuacugaacugcacugcugauugaaaaaa

SEQ ID NO: 310425 - RNA, 32 nt, Homo Sapiens
aagaguaaggguugguucaucaucacaagaaa

SEQ ID NO: 310426 - RNA, 32 nt, Homo Sapiens
ggccaguuuccagcgccgcgcucuucguuccu

SEQ ID NO: 310427 - RNA, 32 nt, Homo Sapiens
cccacucuagacaucagccuccagguugacua

SEQ ID NO: 310428 - RNA, 32 nt, Homo Sapiens
uaauugucucaaugccucccccucccccauuc

SEQ ID NO: 310429 - RNA, 32 nt, Homo Sapiens
gccaucagcccaccuccaccucuggagggucc

SEQ ID NO: 310430 - RNA, 30 nt, Homo Sapiens
cgcccaucgccccccacccaucucuggaga

SEQ ID NO: 310431 - RNA, 32 nt, Homo Sapiens
uuucucaguguuuacuuaauucuuuuugcagu

SEQ ID NO: 310432 - RNA, 32 nt, Homo Sapiens
cuagccuuacgauccaggaucucuuccuacag

SEQ ID NO: 310433 - RNA, 32 nt, Homo Sapiens
ccagggguggcccugagcgccggcgacaccuu

SEQ ID NO: 310434 - RNA, 32 nt, Homo Sapiens
ggcugccacuaccguacagaggccgugucgcg

SEQ ID NO: 310435 - RNA, 32 nt, Homo Sapiens
gagccacugcccccagccccagcuugaucuug

SEQ ID NO: 310436 - RNA, 32 nt, Homo Sapiens
gagacgagacaaucgcuugaaccuuggaggca

SEQ ID NO: 310437 - RNA, 29 nt, Homo Sapiens
agacuuucuauccagccucacugagcugc

SEQ ID NO: 310438 - RNA, 32 nt, Homo Sapiens
uuuuccauuucguuccaaauaaaucauuauag

SEQ ID NO: 310439 - RNA, 32 nt, Homo Sapiens
accucauuuuuaaaacaaauccauaguaugga

SEQ ID NO: 310440 - RNA, 32 nt, Homo Sapiens
guuguaucaaauuuauuugaaaauuguuuugu

SEQ ID NO: 310441 - RNA, 32 nt, Homo Sapiens
gccugcuagacacccgcccugcccuucccugg

SEQ ID NO: 310442 - RNA, 32 nt, Homo Sapiens
gcaagccagucuccgaaccccaggggacuuuu

SEQ ID NO: 310443 - RNA, 32 nt, Homo Sapiens
guuuccacugucgcccgcgcccgggaacccug

SEQ ID NO: 310444 - RNA, 32 nt, Homo Sapiens
uuauaaauuuuuuuuucuuuauucuaaaaacc

SEQ ID NO: 310445 - RNA, 32 nt, Homo Sapiens
ugguuugugggaaagcaggguggacgcugagg

SEQ ID NO: 310446 - RNA, 32 nt, Homo Sapiens
uuucaaucuucaggcuucauuccuucccaaga

SEQ ID NO: 310447 - RNA, 32 nt, Homo Sapiens
ugagcgacgaguuugguuuuagcuggggauug

SEQ ID NO: 310448 - RNA, 32 nt, Homo Sapiens
ugagcucuguguccuccguucauuccauggcu

SEQ ID NO: 310449 - RNA, 32 nt, Homo Sapiens
caaggucacagcacugccuacaccuguuuaca

SEQ ID NO: 310450 - RNA, 32 nt, Homo Sapiens
uuaguuucccgggaagaaauucuuaucacugc

SEQ ID NO: 310451 - RNA, 29 nt, Homo Sapiens
uagauucugacuuuccuguaaugaguaug

SEQ ID NO: 310452 - RNA, 32 nt, Homo Sapiens
gcggaagaggugggcugguggaggcggggucg

SEQ ID NO: 310453 - RNA, 32 nt, Homo Sapiens
cuauucugacucugggauuacuauuuaaagua

SEQ ID NO: 310454 - RNA, 32 nt, Homo Sapiens
guucagaccugcagaggaaaacaucagcuggc

SEQ ID NO: 310455 - RNA, 32 nt, Homo Sapiens
guuuaaugcacaggugugaguggauugcuuau

SEQ ID NO: 310456 - RNA, 32 nt, Homo Sapiens
gggauuucugguaaugaucacucuucagugga

SEQ ID NO: 310457 - RNA, 32 nt, Homo Sapiens
uaagggaugauuagacuuggcaaucuguaagc

SEQ ID NO: 310458 - RNA, 32 nt, Homo Sapiens
ggcacgaggccucgugccgccgggcucuuggu

SEQ ID NO: 310459 - RNA, 32 nt, Homo Sapiens
ugccuuguaagauuguuguaaaauuuuuugug

SEQ ID NO: 310460 - RNA, 32 nt, Homo Sapiens
aggacucugccuuuuuucacagcccgggugug

SEQ ID NO: 310461 - RNA, 32 nt, Homo Sapiens
guggcugcgcgagggaccgaguacuagagcug

SEQ ID NO: 310462 - RNA, 32 nt, Homo Sapiens
cuuucaccaacccucaacgacucagaacacau

SEQ ID NO: 310463 - RNA, 32 nt, Homo Sapiens
agcccgggaagcucaagggcugagagggagcc

SEQ ID NO: 310464 - RNA, 32 nt, Homo Sapiens
auggugugauaugaaccaguccauucacauug

SEQ ID NO: 310465 - RNA, 32 nt, Homo Sapiens
cugcagaauuucugccgaguggcaccgagaac

SEQ ID NO: 310466 - RNA, 32 nt, Homo Sapiens
gaagcaaaugaccagaaauuauagaaaucuga

SEQ ID NO: 310467 - RNA, 32 nt, Homo Sapiens
gucagagccagaccucgugccuggggaauggg

SEQ ID NO: 310468 - RNA, 28 nt, Homo Sapiens
gaaauggaacauuugggggauagcaaac

SEQ ID NO: 310469 - RNA, 32 nt, Homo Sapiens
ccacuucuccacggaagccccaucccaaagcu

SEQ ID NO: 310470 - RNA, 32 nt, Homo Sapiens
uggccaaaguugaccacuacucuucuuacucu

SEQ ID NO: 310471 - RNA, 32 nt, Homo Sapiens
gcuuggggcccccgucugcugcuggacgcaga

SEQ ID NO: 310472 - RNA, 32 nt, Homo Sapiens
ugaucaacccaccuuggccucccuaaaugccg

SEQ ID NO: 310473 - RNA, 32 nt, Homo Sapiens
aggcagacuacuccaagcaucagugguuaguu

SEQ ID NO: 310474 - RNA, 32 nt, Homo Sapiens
cuuuacagauaccaguuccuuugucaagagca

SEQ ID NO: 310475 - RNA, 32 nt, Homo Sapiens
uuccuguugccauuuuaaguuuauaauguuua

SEQ ID NO: 310476 - RNA, 32 nt, Homo Sapiens
auuauuuauaauuuauauuuugauauucuauu

SEQ ID NO: 310477 - RNA, 32 nt, Homo Sapiens
gcccugcgccccggccggggccccacacacaa

SEQ ID NO: 310478 - RNA, 32 nt, Homo Sapiens
uuuggcuuccaugacuaucuuuuauacaugga

SEQ ID NO: 310479 - RNA, 32 nt, Homo Sapiens
cggcaggacugugauacagagcccuagccugc

SEQ ID NO: 310480 - RNA, 32 nt, Homo Sapiens
ccuaauuccaugaagggagggacagugccugu

SEQ ID NO: 310481 - RNA, 32 nt, Homo Sapiens
uguggcuggguagcugcagcagugccucggag

SEQ ID NO: 310482 - RNA, 32 nt, Homo Sapiens
uccugcugcguggacugugggcaccgagccac

SEQ ID NO: 310483 - RNA, 32 nt, Homo Sapiens
ugacaguguuugucaaauuuaaaaucaugaau

SEQ ID NO: 310484 - RNA, 32 nt, Homo Sapiens
gcaccagaacagaugaucuccauuuccgccag

SEQ ID NO: 310485 - RNA, 32 nt, Homo Sapiens
cgcggugaccucgaugggagggggccucgccc

SEQ ID NO: 310486 - RNA, 32 nt, Homo Sapiens
cgggacgcgcgaggcgccugccucaagcuacc

SEQ ID NO: 310487 - RNA, 32 nt, Homo Sapiens
ccacggaggguggaagaggagaggguggaagg

SEQ ID NO: 310488 - RNA, 32 nt, Homo Sapiens
uuuguaaaaaauacauauuugaaguauucccu

SEQ ID NO: 310489 - RNA, 32 nt, Homo Sapiens
acuggaccccuacagggcacugagcuagggaa

SEQ ID NO: 310490 - RNA, 32 nt, Homo Sapiens
agggcccaggaggccuggcgggccugggggcg

SEQ ID NO: 310491 - RNA, 32 nt, Homo Sapiens
ccaggcccccgcuuuggccacccaggcacuuu

SEQ ID NO: 310492 - RNA, 32 nt, Homo Sapiens
ccccugacagucccuccucuccggagcauuuu

SEQ ID NO: 310493 - RNA, 32 nt, Homo Sapiens
caaccuucugguggggagaaauaaacgguuua

SEQ ID NO: 310494 - RNA, 29 nt, Homo Sapiens
augauuaucuggcagugaaagcugggcuu

SEQ ID NO: 310495 - RNA, 32 nt, Homo Sapiens
uccggaagcggcacgagcucaggccgccgcag

SEQ ID NO: 310496 - RNA, 32 nt, Homo Sapiens
gucuggaacaccaggcugagguccugaucagc

SEQ ID NO: 310497 - RNA, 29 nt, Homo Sapiens
gcauauguauguaugugagccguacaggg

SEQ ID NO: 310498 - RNA, 32 nt, Homo Sapiens
uguauuuacuguauuuaaaugaguaaaggaac

SEQ ID NO: 310499 - RNA, 32 nt, Homo Sapiens
ccagcgccuuugcauccgcuccugggcaccga

SEQ ID NO: 310500 - RNA, 32 nt, Homo Sapiens
cauggggcggcuccccagggaccgcccagauc

SEQ ID NO: 310501 - RNA, 32 nt, Homo Sapiens
aaauuagcugggugugguggcgggcguguguc

SEQ ID NO: 310502 - RNA, 32 nt, Homo Sapiens
gcuggcugccagcugcugcgccccccauguag

SEQ ID NO: 310503 - RNA, 32 nt, Homo Sapiens
acuucaugauuguuguugaacuucugggucaa

SEQ ID NO: 310504 - RNA, 32 nt, Homo Sapiens
caaggaguuagagaacaaaacacaucaauaua

SEQ ID NO: 310505 - RNA, 32 nt, Homo Sapiens
uuuuucuuuagauugaauauuugaaucuuaug

SEQ ID NO: 310506 - RNA, 32 nt, Homo Sapiens
ggacgccggcugccggccgacuggccugaggg

SEQ ID NO: 310507 - RNA, 32 nt, Homo Sapiens
ccuggcuauggccuuuccugcuguuagguggc

SEQ ID NO: 310508 - RNA, 32 nt, Homo Sapiens
ucagcccuggccgcggccgccgcgcacgcccu

SEQ ID NO: 310509 - RNA, 32 nt, Homo Sapiens
cugugacauacuuuuuuuuucuuauagcaaua

SEQ ID NO: 310510 - RNA, 32 nt, Homo Sapiens
uggccggagauguucccggcgcuggaguccga

SEQ ID NO: 310511 - RNA, 32 nt, Homo Sapiens
caauuaccaaaauaaaauuuauuaagaaaaag

SEQ ID NO: 310512 - RNA, 32 nt, Homo Sapiens
accaagaagacgggagucggcagccaggaguu

SEQ ID NO: 310513 - RNA, 32 nt, Homo Sapiens
cuguccagggccagcucuugccucccggcggc

SEQ ID NO: 310514 - RNA, 32 nt, Homo Sapiens
gcuucuacauccuggggugcagcugcaaaagg

SEQ ID NO: 310515 - RNA, 32 nt, Homo Sapiens
ggugcgaucccgggcccgagggcaucagacgg

SEQ ID NO: 310516 - RNA, 31 nt, Homo Sapiens
cugucaagcaacacucugcggaccugccggc

SEQ ID NO: 310517 - RNA, 32 nt, Homo Sapiens
cuggaggcagggcaccugcugcgacccagauu

SEQ ID NO: 310518 - RNA, 32 nt, Homo Sapiens
ucagugauuuuguauaugaaaacaaguuccaa

SEQ ID NO: 310519 - RNA, 32 nt, Homo Sapiens
cccacccccacccccacccccaggaguugagu

SEQ ID NO: 310520 - RNA, 32 nt, Homo Sapiens
auuagaguguuucuuaauucauuucaaacucu

SEQ ID NO: 310521 - RNA, 32 nt, Homo Sapiens
cacugcacuccagccugggccacagaaugaga

SEQ ID NO: 310522 - RNA, 32 nt, Homo Sapiens
auugguaaaaauuaggcugggcuggggaaauu

SEQ ID NO: 310523 - RNA, 32 nt, Homo Sapiens
gguuagaguccccagagaguuacucuaaguua

SEQ ID NO: 310524 - RNA, 32 nt, Homo Sapiens
aaaggucugcaaacauggaaaccuggucuaaa

SEQ ID NO: 310525 - RNA, 32 nt, Homo Sapiens
gauacuccuccagccgggcgcgguggcucacg

SEQ ID NO: 310526 - RNA, 28 nt, Homo Sapiens
cucagaggagcaggaccagggagacucc

SEQ ID NO: 310527 - RNA, 32 nt, Homo Sapiens
ugauuguuaaguuuccucaagccuccccugcc

SEQ ID NO: 310528 - RNA, 32 nt, Homo Sapiens
aucugaaucuucuuggaggaugggucucugcu

SEQ ID NO: 310529 - RNA, 32 nt, Homo Sapiens
guauauuuuccugaauuucucaucucaaaccc

SEQ ID NO: 310530 - RNA, 32 nt, Homo Sapiens
uggccuccccaucaaugacccccagccuggcu

SEQ ID NO: 310531 - RNA, 32 nt, Homo Sapiens
aauuugagggucauuacaugugaggauagcag

SEQ ID NO: 310532 - RNA, 32 nt, Homo Sapiens
caaagaauuacaugacuuuuguuauaaacaau

SEQ ID NO: 310533 - RNA, 32 nt, Homo Sapiens
ccucuguggcugucuuucccugaaacauggua

SEQ ID NO: 310534 - RNA, 32 nt, Homo Sapiens
ggaagcucaauccugagaaaucucccagcggc

SEQ ID NO: 310535 - RNA, 32 nt, Homo Sapiens
uaccaauacaacacugaugugguguuugauuc

SEQ ID NO: 310536 - RNA, 32 nt, Homo Sapiens
gaagcuguagagagggacagaaggggcgguuc

SEQ ID NO: 310537 - RNA, 32 nt, Homo Sapiens
ugacuuacugucaguuguacuucugcuccaua

SEQ ID NO: 310538 - RNA, 32 nt, Homo Sapiens
gccagccgcccgguccgggagggagguggggg

SEQ ID NO: 310539 - RNA, 32 nt, Homo Sapiens
cauuuguaaaugauugugcaaucuuguguaau

SEQ ID NO: 310540 - RNA, 32 nt, Homo Sapiens
acuuuuuaauauguauuuauaaaguauuccag

SEQ ID NO: 310541 - RNA, 32 nt, Homo Sapiens
caugaagguagugcagucugcagaccugaaga

SEQ ID NO: 310542 - RNA, 32 nt, Homo Sapiens
guaaucagggacaaaauuuauaguucauaagu

SEQ ID NO: 310543 - RNA, 32 nt, Homo Sapiens
ugacugucuacuagcaggccagaugcuguguu

SEQ ID NO: 310544 - RNA, 32 nt, Homo Sapiens
acauuugcuagagggagggagcagccacggag

SEQ ID NO: 310545 - RNA, 32 nt, Homo Sapiens
uuaaaccaguaccauggaauaacuuuuugaaa

SEQ ID NO: 310546 - RNA, 32 nt, Homo Sapiens
uccagccugggaccuggcaucucugggccucg

SEQ ID NO: 310547 - RNA, 32 nt, Homo Sapiens
aauccaaagaaagauuugaagaggucaaagac

SEQ ID NO: 310548 - RNA, 32 nt, Homo Sapiens
agcuuuuagcuaaaaugagguauaccuagaug

SEQ ID NO: 310549 - RNA, 31 nt, Homo Sapiens
ggggucuaagccaccccuugggaaccaggug

SEQ ID NO: 310550 - RNA, 32 nt, Homo Sapiens
uguccgaggagcuccaugcggcacugagugag

SEQ ID NO: 310551 - RNA, 32 nt, Homo Sapiens
cgcuaagagccccgggugaggaccuccaagcc

SEQ ID NO: 310552 - RNA, 32 nt, Homo Sapiens
aauaaaagaacaaggaaacaaaaguaacaagg

SEQ ID NO: 310553 - RNA, 31 nt, Homo Sapiens
agccgagagcugucuuugcagaauuaucuua

SEQ ID NO: 310554 - RNA, 32 nt, Homo Sapiens
uccuaggaauuuuuauacuaaaagcaaaaugu

SEQ ID NO: 310555 - RNA, 32 nt, Homo Sapiens
aucgagccauuuaacauggcggaggauguuuc

SEQ ID NO: 310556 - RNA, 32 nt, Homo Sapiens
ggaggccugugccccaggcaucugcauccagg

SEQ ID NO: 310557 - RNA, 32 nt, Homo Sapiens
cgggguuaugcaauguggcugcuuugacugua

SEQ ID NO: 310558 - RNA, 32 nt, Homo Sapiens
ccggccgcccccaccccucuggcuccugaaua

SEQ ID NO: 310559 - RNA, 32 nt, Homo Sapiens
cuuugcaaacuccaggcuccggucgcgcacgg

SEQ ID NO: 310560 - RNA, 32 nt, Homo Sapiens
cuagcugcuggggcuccgcccacccugcuccc

SEQ ID NO: 310561 - RNA, 32 nt, Homo Sapiens
caguaucucacuuuucagaucuugaaagguuu

SEQ ID NO: 310562 - RNA, 32 nt, Homo Sapiens
cuauuguuucauuucuucuuuuauaggccuua

SEQ ID NO: 310563 - RNA, 32 nt, Homo Sapiens
guacaaaaauaucuggaagaaggucagucaaa

SEQ ID NO: 310564 - RNA, 32 nt, Homo Sapiens
ugggcgugguggcgcgcgccuguaaucccagc

SEQ ID NO: 310565 - RNA, 32 nt, Homo Sapiens
ucccaaaagcaggaucaucucuccucgguagu

SEQ ID NO: 310566 - RNA, 32 nt, Homo Sapiens
accccgucucaaaaauugauugaucaauucag

SEQ ID NO: 310567 - RNA, 32 nt, Homo Sapiens
agcagguauaugccuguuagaucuuagcugug

SEQ ID NO: 310568 - RNA, 32 nt, Homo Sapiens
uggguaugugauuugucuuccacagucucucu

SEQ ID NO: 310569 - RNA, 32 nt, Homo Sapiens
ucucccagugcuaucccuccccacucccccca

SEQ ID NO: 310570 - RNA, 32 nt, Homo Sapiens
auacagcaguuuggucaauauugucuuaacau

SEQ ID NO: 310571 - RNA, 32 nt, Homo Sapiens
cggcauggggccugggcugccagggaccucac

SEQ ID NO: 310572 - RNA, 32 nt, Homo Sapiens
cagguggccucccacacgcccccuccuaugcc

SEQ ID NO: 310573 - RNA, 32 nt, Homo Sapiens
guccaccuggggauuggguauccaccuaaggc

SEQ ID NO: 310574 - RNA, 32 nt, Homo Sapiens
gcccuugaccucuaggccccagucccuggagc

SEQ ID NO: 310575 - RNA, 32 nt, Homo Sapiens
ggggcuuggggcgacaucaagggauggcagag

SEQ ID NO: 310576 - RNA, 31 nt, Homo Sapiens
acaacuagaauguugaccucgagccgaggcc

SEQ ID NO: 310577 - RNA, 32 nt, Homo Sapiens
ucuagccccuccccugccuagagcucccucuu

SEQ ID NO: 310578 - RNA, 32 nt, Homo Sapiens
uauacagucuagguuuucuguuuggaaauagg

SEQ ID NO: 310579 - RNA, 32 nt, Homo Sapiens
gacgggucgccgcugcgccgggccgggauggc

SEQ ID NO: 310580 - RNA, 32 nt, Homo Sapiens
ugccgucugucuucaguaacugcugcucuguu

SEQ ID NO: 310581 - RNA, 30 nt, Homo Sapiens
gccuaugucugugaggaaggggcccugcca

SEQ ID NO: 310582 - RNA, 32 nt, Homo Sapiens
aauuagauugguuuuucuuguggccacaugag

SEQ ID NO: 310583 - RNA, 32 nt, Homo Sapiens
ggugggcgccgcgguccgggccgggcagugag

SEQ ID NO: 310584 - RNA, 32 nt, Homo Sapiens
cccugcuauuugagaggcugaggugggaggau

SEQ ID NO: 310585 - RNA, 32 nt, Homo Sapiens
cccccaccaagcccacaggacuccugcuccug

SEQ ID NO: 310586 - RNA, 32 nt, Homo Sapiens
ugagaaugcccccuccucccugacuccucucu

SEQ ID NO: 310587 - RNA, 32 nt, Homo Sapiens
ggagcgcgccuggccgccgcugggucacggag

SEQ ID NO: 310588 - RNA, 32 nt, Homo Sapiens
agcgagagucacgucccggcgcuagcccagcc

SEQ ID NO: 310589 - RNA, 32 nt, Homo Sapiens
ccucuguccccucccucacuuccuugggcugc

SEQ ID NO: 310590 - RNA, 32 nt, Homo Sapiens
ggugaaaaguuacuaccugucaagguuugugu

SEQ ID NO: 310591 - RNA, 32 nt, Homo Sapiens
agccaaauuaaugcauaauuucagauguagaa

SEQ ID NO: 310592 - RNA, 32 nt, Homo Sapiens
gggcgcccugcacacccguuucuggggccguc

SEQ ID NO: 310593 - RNA, 32 nt, Homo Sapiens
guacauuuuggaacaaaugaucaaauauuuuc

SEQ ID NO: 310594 - RNA, 32 nt, Homo Sapiens
cgcggucuuuaaccccagcgucuugcacuacc

SEQ ID NO: 310595 - RNA, 32 nt, Homo Sapiens
ccucauuugcuugagacuuuguguguaugggg

SEQ ID NO: 310596 - RNA, 30 nt, Homo Sapiens
guuguugugcagguagagccggcgcagagc

SEQ ID NO: 310597 - RNA, 32 nt, Homo Sapiens
ccauaucauaguauuucauaguauuauauuug

SEQ ID NO: 310598 - RNA, 32 nt, Homo Sapiens
ucuccuagaaaagaaguguuggagcagggggu

SEQ ID NO: 310599 - RNA, 32 nt, Homo Sapiens
guuacugagauuauacccuugagauacggaga

SEQ ID NO: 310600 - RNA, 32 nt, Homo Sapiens
gaucaugcuuccauuuuuuuuaguuuuaaacc

SEQ ID NO: 310601 - RNA, 32 nt, Homo Sapiens
guuucuuaucccauaacuuacuuguaucuauu

SEQ ID NO: 310602 - RNA, 32 nt, Homo Sapiens
accugcagguauugagagauccacagcuaaga

SEQ ID NO: 310603 - RNA, 32 nt, Homo Sapiens
gggcugaccugccgcugcugucagugggaggc

SEQ ID NO: 310604 - RNA, 32 nt, Homo Sapiens
agcgcauuuugacuucgaggcaccgccgacgu

SEQ ID NO: 310605 - RNA, 32 nt, Homo Sapiens
uggccccgccccauuuccccacgcuuugaagg

SEQ ID NO: 310606 - RNA, 32 nt, Homo Sapiens
ucgcagccucaggccagccgcggcccuuggcc

SEQ ID NO: 310607 - RNA, 32 nt, Homo Sapiens
cugaauauuuaguguaauuacaucucagcuuu

SEQ ID NO: 310608 - RNA, 32 nt, Homo Sapiens
ggagagauguauuauuuccccccuucagcccc

SEQ ID NO: 310609 - RNA, 32 nt, Homo Sapiens
gcagaagcccucgggaggcucggucacaaucu

SEQ ID NO: 310610 - RNA, 32 nt, Homo Sapiens
agcuucgcggcgggagagcggcuggugucgcc

SEQ ID NO: 310611 - RNA, 32 nt, Homo Sapiens
cccggagagggagaggcggggucggcuguauc

SEQ ID NO: 310612 - RNA, 32 nt, Homo Sapiens
ugugaauuucaaaaguuuuuccuuaauggugg

SEQ ID NO: 310613 - RNA, 32 nt, Homo Sapiens
uccuuugaaaaauuaguuuuguguugcuccaa

SEQ ID NO: 310614 - RNA, 32 nt, Homo Sapiens
uacuugugaaguagagaugccuuuuugucuaa

SEQ ID NO: 310615 - RNA, 30 nt, Homo Sapiens
uuucuaaauaaaacuguuuacauucaaaaa

SEQ ID NO: 310616 - RNA, 32 nt, Homo Sapiens
ugagaugcuacaucagggcccuugcugcugua

SEQ ID NO: 310617 - RNA, 32 nt, Homo Sapiens
ugcagugugugccugggaggcgcacggcagca

SEQ ID NO: 310618 - RNA, 32 nt, Homo Sapiens
aguuuuucuuguuuucauaucuaaucaugguu

SEQ ID NO: 310619 - RNA, 27 nt, Homo Sapiens
cuaugauucuucuucaaacgcuuucuu

SEQ ID NO: 310620 - RNA, 32 nt, Homo Sapiens
guccgugguguguauuaugcugucauaucaga

SEQ ID NO: 310621 - RNA, 32 nt, Homo Sapiens
cugccaccaaauuauuucuggauucucuucac

SEQ ID NO: 310622 - RNA, 32 nt, Homo Sapiens
gauagcaccacuuuuuuuuuuaaagcuuuuau

SEQ ID NO: 310623 - RNA, 32 nt, Homo Sapiens
uucaguccuugacaaggaaucuccuuuauaca

SEQ ID NO: 310624 - RNA, 32 nt, Homo Sapiens
ugccuguacuauuauuaauguuuauauuguac

SEQ ID NO: 310625 - RNA, 32 nt, Homo Sapiens
uagccuuuggauucuuuuuuuuuuuuuccuuc

SEQ ID NO: 310626 - RNA, 32 nt, Homo Sapiens
gcaacgcccuguccucagugccaggcaguguc

SEQ ID NO: 310627 - RNA, 32 nt, Homo Sapiens
uccauugugaauggacacuaugguuucuguau

SEQ ID NO: 310628 - RNA, 32 nt, Homo Sapiens
cuuccuuccuuccuuccuucgagacacagucg

SEQ ID NO: 310629 - RNA, 32 nt, Homo Sapiens
aaguugauauagaacagugcuugccacagagc

SEQ ID NO: 310630 - RNA, 32 nt, Homo Sapiens
gugaaauuauuccauaugauacuaaaauagug

SEQ ID NO: 310631 - RNA, 32 nt, Homo Sapiens
guacauuuauucaacucugagcuaggagaaaa

SEQ ID NO: 310632 - RNA, 32 nt, Homo Sapiens
cuagcccacuuaauaaaaccagagauccuaug

SEQ ID NO: 310633 - RNA, 32 nt, Homo Sapiens
aguacaaaggcuacauucgcuuuuacugagag

SEQ ID NO: 310634 - RNA, 32 nt, Homo Sapiens
ugcaagggauaauacaaauccuaugaucucua

SEQ ID NO: 310635 - RNA, 32 nt, Homo Sapiens
augaagccaagugggauuugcauaaagugaau

SEQ ID NO: 310636 - RNA, 32 nt, Homo Sapiens
gugaaaguguacuguuuacauguacagaugcc

SEQ ID NO: 310637 - RNA, 32 nt, Homo Sapiens
acccacugggguggagaagggggccagcgggc

SEQ ID NO: 310638 - RNA, 32 nt, Homo Sapiens
uuuacaaaaugguggguggcuuuuucuuuuuu

SEQ ID NO: 310639 - RNA, 32 nt, Homo Sapiens
caccauuugugcuuuuuuaagauaguauguaa

SEQ ID NO: 310640 - RNA, 32 nt, Homo Sapiens
gggaccgugaagucagcuuguuguguggccuc

SEQ ID NO: 310641 - RNA, 32 nt, Homo Sapiens
uggugaugugcuguucguuuauagaaagcuga

SEQ ID NO: 310642 - RNA, 32 nt, Homo Sapiens
gccguggcugugugucccucugagaguuggag

SEQ ID NO: 310643 - RNA, 32 nt, Homo Sapiens
ggagaccucagccagcggccuacgcccaggcc

SEQ ID NO: 310644 - RNA, 32 nt, Homo Sapiens
aaagcugagcaguacaggaggcugguuccagc

SEQ ID NO: 310645 - RNA, 32 nt, Homo Sapiens
ucaugucuagauuuaaauuuuaagucugagau

SEQ ID NO: 310646 - RNA, 32 nt, Homo Sapiens
uagcuuuguacuuuuuuuuuuagcguugccau

SEQ ID NO: 310647 - RNA, 32 nt, Homo Sapiens
ccugagcaggauugagggagccaggggagggg

SEQ ID NO: 310648 - RNA, 32 nt, Homo Sapiens
ugaaugaauauacuuuaaauuuuggugauaac

SEQ ID NO: 310649 - RNA, 32 nt, Homo Sapiens
gggggcugcgacgcgccgaugaccacgcgggc

SEQ ID NO: 310650 - RNA, 32 nt, Homo Sapiens
ggguaggaggagaggaggcaggcugcuguccu

SEQ ID NO: 310651 - RNA, 32 nt, Homo Sapiens
cucucucacucccugucuuccggagcgugagu

SEQ ID NO: 310652 - RNA, 32 nt, Homo Sapiens
ucauaggcagaucuugguagcacuuuauaugu

SEQ ID NO: 310653 - RNA, 32 nt, Homo Sapiens
agcaucaaccuauuaaaauacuuuuaagccuu

SEQ ID NO: 310654 - RNA, 32 nt, Homo Sapiens
agcccuuuccugagcuggcccgguccccuaag

SEQ ID NO: 310655 - RNA, 32 nt, Homo Sapiens
gacagcccaguguagagauuggcacuucccug

SEQ ID NO: 310656 - RNA, 32 nt, Homo Sapiens
gcggcgcuaagaaggggagacugaggcugagg

SEQ ID NO: 310657 - RNA, 32 nt, Homo Sapiens
gaauggaugaccaggaaccuucaagaguggcu

SEQ ID NO: 310658 - RNA, 32 nt, Homo Sapiens
gaaauuguuacaauacuguuaacuacagaauu

SEQ ID NO: 310659 - RNA, 32 nt, Homo Sapiens
gugcugcagucccaggagguuaggcauucuua

SEQ ID NO: 310660 - RNA, 32 nt, Homo Sapiens
agggcccgagggugggcgcggcaucuucagcg

SEQ ID NO: 310661 - RNA, 32 nt, Homo Sapiens
ucugccgucggugcgugcgcggacacgcaccc

SEQ ID NO: 310662 - RNA, 30 nt, Homo Sapiens
gcugcuggcuggggggcccguccggcccaa

SEQ ID NO: 310663 - RNA, 32 nt, Homo Sapiens
ccagggugguucauuucccagcccugggucaa

SEQ ID NO: 310664 - RNA, 32 nt, Homo Sapiens
uugcaggccccucugggcuccucccuccccug

SEQ ID NO: 310665 - RNA, 32 nt, Homo Sapiens
gguguuuuucuuuuaaacaggugaucacguuu

SEQ ID NO: 310666 - RNA, 32 nt, Homo Sapiens
ugguacuuguuuucuaccuccaaaaaauguag

SEQ ID NO: 310667 - RNA, 28 nt, Homo Sapiens
uggaggaaagauuaugaaaggaacaggc

SEQ ID NO: 310668 - RNA, 32 nt, Homo Sapiens
auagaaaauauguuuuggcauuugaagcauuu

SEQ ID NO: 310669 - RNA, 32 nt, Homo Sapiens
gagacuaggccaaaaaaagauaccuacaacuc

SEQ ID NO: 310670 - RNA, 30 nt, Homo Sapiens
ucauggagaagaaccugcagauucuuccau

SEQ ID NO: 310671 - RNA, 32 nt, Homo Sapiens
uauggugguggcucaggugggaggaagagaga

SEQ ID NO: 310672 - RNA, 32 nt, Homo Sapiens
uaagaaugacuuucuucaaaauaucugaauag

SEQ ID NO: 310673 - RNA, 32 nt, Homo Sapiens
aaaacaaucuuaaaccacauaaccaagcauug

SEQ ID NO: 310674 - RNA, 32 nt, Homo Sapiens
ggcccagggcgcugggucugguggggacgcgg

SEQ ID NO: 310675 - RNA, 32 nt, Homo Sapiens
uaugcuacucugaaaacaaagcuuauguuaga

SEQ ID NO: 310676 - RNA, 32 nt, Homo Sapiens
cagguacaacuauuaagagauuuugaacauua

SEQ ID NO: 310677 - RNA, 32 nt, Homo Sapiens
aagcuuaagguuucacaacuuaauuuuccuaa

SEQ ID NO: 310678 - RNA, 32 nt, Homo Sapiens
acgagccaggggugcaggcagcugcccccagg

SEQ ID NO: 310679 - RNA, 32 nt, Homo Sapiens
uuuacaauacucaauuuuugauuaugaaauga

SEQ ID NO: 310680 - RNA, 32 nt, Homo Sapiens
gugaaugaaugggagucauccaguccugacuc

SEQ ID NO: 310681 - RNA, 32 nt, Homo Sapiens
cguccgcgcugacuucggguccccggagccug

SEQ ID NO: 310682 - RNA, 32 nt, Homo Sapiens
agaaaucugaauccaugucauucauaaccccu

SEQ ID NO: 310683 - RNA, 32 nt, Homo Sapiens
ucaggggaaauguggcucucuccaccuugcau

SEQ ID NO: 310684 - RNA, 32 nt, Homo Sapiens
ucccaugcugcacuucuccacugucggagcac

SEQ ID NO: 310685 - RNA, 32 nt, Homo Sapiens
uugucuggaucuuuuuuguguauggcaccaga

SEQ ID NO: 310686 - RNA, 32 nt, Homo Sapiens
gagcaagcaggcccccaccugcccuuagugau

SEQ ID NO: 310687 - RNA, 32 nt, Homo Sapiens
ccugaauauuaaauugaacucuauuuaaugca

SEQ ID NO: 310688 - RNA, 32 nt, Homo Sapiens
cccuccugcccccgauucauaccuauggcuuc

SEQ ID NO: 310689 - RNA, 32 nt, Homo Sapiens
ggcggcgggaggaggcagcgccggcccaagau

SEQ ID NO: 310690 - RNA, 32 nt, Homo Sapiens
guuugaagccuggccucccaccuggggcauuu

SEQ ID NO: 310691 - RNA, 32 nt, Homo Sapiens
acugcauguccaacaaaauuuauuuuuugugu

SEQ ID NO: 310692 - RNA, 32 nt, Homo Sapiens
aagguucacaguuucucucacccagguguaac

SEQ ID NO: 310693 - RNA, 24 nt, Homo Sapiens
uggcgcacucggcugccgccgugc

SEQ ID NO: 310694 - RNA, 32 nt, Homo Sapiens
uccugggaaagcacccuaaaacggaagccauu

SEQ ID NO: 310695 - RNA, 32 nt, Homo Sapiens
aguuguguuugaaagauacucuauuaaagaag

SEQ ID NO: 310696 - RNA, 32 nt, Homo Sapiens
uguuuacaugugagugaaacugcacaaaggaa

SEQ ID NO: 310697 - RNA, 32 nt, Homo Sapiens
ugccguauaugaucaauuaccuuaauuggcca

SEQ ID NO: 310698 - RNA, 32 nt, Homo Sapiens
cggcggggaagucacagcugucagguaccggc

SEQ ID NO: 310699 - RNA, 32 nt, Homo Sapiens
gccuauugaugauggagcacuagacucacucu

SEQ ID NO: 310700 - RNA, 32 nt, Homo Sapiens
cgcgucccugcggccccacucccggccgccgu

SEQ ID NO: 310701 - RNA, 32 nt, Homo Sapiens
ugcaugcauguagaaaauuguaaaauguaaau

SEQ ID NO: 310702 - RNA, 32 nt, Homo Sapiens
uuacagugcuacuucacacuuaaaagugcaug

SEQ ID NO: 310703 - RNA, 32 nt, Homo Sapiens
acgagcuguugugcauccagagguggaauugg

SEQ ID NO: 310704 - RNA, 32 nt, Homo Sapiens
ugacagacagcgccggagugcacggugggccg

SEQ ID NO: 310705 - RNA, 32 nt, Homo Sapiens
ccgcggaguuuuccgcccggcgcugacggcug

SEQ ID NO: 310706 - RNA, 32 nt, Homo Sapiens
ggugauugacagugacuucgagaccaggaacu

SEQ ID NO: 310707 - RNA, 32 nt, Homo Sapiens
cccacuggaagcgugagcuagcggggaccacc

SEQ ID NO: 310708 - RNA, 32 nt, Homo Sapiens
gucucuuuuuauccuuauuccucccccgaccu

SEQ ID NO: 310709 - RNA, 32 nt, Homo Sapiens
aggaaugauuuguaaaauccacagcuauaucc

SEQ ID NO: 310710 - RNA, 32 nt, Homo Sapiens
ccgcucuguuugcugcaguccccguggccugc

SEQ ID NO: 310711 - RNA, 28 nt, Homo Sapiens
ucuaagaaagauugguuugacgcgaaag

SEQ ID NO: 310712 - RNA, 32 nt, Homo Sapiens
gcgacuggagacggcaucucguucacagcacc

SEQ ID NO: 310713 - RNA, 32 nt, Homo Sapiens
cacgucuucuauuauuuuauuaaucaaucugu

SEQ ID NO: 310714 - RNA, 32 nt, Homo Sapiens
gcugaaggcaaggggagggagcagaagcacuu

SEQ ID NO: 310715 - RNA, 32 nt, Homo Sapiens
cagucacccccuuccagccccaucccacuucu

SEQ ID NO: 310716 - RNA, 32 nt, Homo Sapiens
agaauugcuuugcagguggauuuaguaauuuc

SEQ ID NO: 310717 - RNA, 32 nt, Homo Sapiens
acaaaaaacaauuauccucuuuuucuagacau

SEQ ID NO: 310718 - RNA, 32 nt, Homo Sapiens
uacucaggccccaaggggcaucucuguuucca

SEQ ID NO: 310719 - RNA, 32 nt, Homo Sapiens
ggaagcagcugagacuguuggagaacguuaca

SEQ ID NO: 310720 - RNA, 32 nt, Homo Sapiens
aaccugugcaggucuugccuuccucaagcacc

SEQ ID NO: 310721 - RNA, 32 nt, Homo Sapiens
guuuauacaaagaagccacaaacaaccauugu

SEQ ID NO: 310722 - RNA, 32 nt, Homo Sapiens
gcacccacuccagcugccagagcacggaggca

SEQ ID NO: 310723 - RNA, 32 nt, Homo Sapiens
cuucacugggccagcccugccuccagcccuca

SEQ ID NO: 310724 - RNA, 32 nt, Homo Sapiens
gaggguuccuccccgcacccucgauuuuccug

SEQ ID NO: 310725 - RNA, 32 nt, Homo Sapiens
cuuugcgcuugaugaagaagcagaucggaagu

SEQ ID NO: 310726 - RNA, 32 nt, Homo Sapiens
gugaaucugggaugaaugggagucauaggcug

SEQ ID NO: 310727 - RNA, 32 nt, Homo Sapiens
ucaugauuugaaaggggcauaucagaaaacaa

SEQ ID NO: 310728 - RNA, 32 nt, Homo Sapiens
ucuucuggcaauacaagaaccauuuucaggau

SEQ ID NO: 310729 - RNA, 32 nt, Homo Sapiens
cagagcagccgcggccgccgcugcuguggccu

SEQ ID NO: 310730 - RNA, 32 nt, Homo Sapiens
ggcaacagaauucgauuaaauuacaaugggaa

SEQ ID NO: 310731 - RNA, 32 nt, Homo Sapiens
ggagggaacuuccaaagaugaagagggcaggg

SEQ ID NO: 310732 - RNA, 32 nt, Homo Sapiens
cuucuaaauuuaaugugaauuucauacauguu

SEQ ID NO: 310733 - RNA, 32 nt, Homo Sapiens
gcauagggcaugccagcuccuugagacgggcu

SEQ ID NO: 310734 - RNA, 32 nt, Homo Sapiens
agcaccacugcacuuuagccugggcgacaaga

SEQ ID NO: 310735 - RNA, 32 nt, Homo Sapiens
ccauggcugggcguuugaucugucucccuuua

SEQ ID NO: 310736 - RNA, 32 nt, Homo Sapiens
uguggagacaccuuccggcuuaccucuuugaa

SEQ ID NO: 310737 - RNA, 32 nt, Homo Sapiens
cauaucuuggcuauugugaauaauccugcagg

SEQ ID NO: 310738 - RNA, 32 nt, Homo Sapiens
ucagguauuucugaguguccuauugucuaaua

SEQ ID NO: 310739 - RNA, 32 nt, Homo Sapiens
uccaggagcaacgccaguggcaacguagugac

SEQ ID NO: 310740 - RNA, 32 nt, Homo Sapiens
cccgcaccaagcagacaaagucaauaaaagag

SEQ ID NO: 310741 - RNA, 32 nt, Homo Sapiens
aagucuuuuacauuuuaauaguuuuugaagac

SEQ ID NO: 310742 - RNA, 32 nt, Homo Sapiens
uccucuuccucggugguggguguccaccgccc

SEQ ID NO: 310743 - RNA, 32 nt, Homo Sapiens
gaagagaucuucugcugcccucuuccucucug

SEQ ID NO: 310744 - RNA, 32 nt, Homo Sapiens
uuaucccguuuacaaauguccugggagugcau

SEQ ID NO: 310745 - RNA, 32 nt, Homo Sapiens
gaaagcccagucaccucugaggaggcagcaac

SEQ ID NO: 310746 - RNA, 32 nt, Homo Sapiens
uucaguuugcuguauuuuuuuaaucacuucau

SEQ ID NO: 310747 - RNA, 32 nt, Homo Sapiens
ugccagccugacggcucuguggcauccugcug

SEQ ID NO: 310748 - RNA, 32 nt, Homo Sapiens
cuccugcuagaagacguggccuugaagcccac

SEQ ID NO: 310749 - RNA, 32 nt, Homo Sapiens
ugaaaaauaaagauguuuggcuaugcaaaaaa

SEQ ID NO: 310750 - RNA, 32 nt, Homo Sapiens
aacuauguuuccccccuuuucagaauagaacu

SEQ ID NO: 310751 - RNA, 32 nt, Homo Sapiens
guuguuagaauagaaacaguauuuauuuugga

SEQ ID NO: 310752 - RNA, 32 nt, Homo Sapiens
cagggagaacacagggacgugccacucgaggg

SEQ ID NO: 310753 - RNA, 32 nt, Homo Sapiens
gccugccucccgcgcucuggccaccccggcgg

SEQ ID NO: 310754 - RNA, 32 nt, Homo Sapiens
gcagaguuggagccuuuaaaaauugucccauc

SEQ ID NO: 310755 - RNA, 32 nt, Homo Sapiens
ccaaaccauguuaaacguggcuaacaguguag

SEQ ID NO: 310756 - RNA, 32 nt, Homo Sapiens
ggcuggccacucucggaccccucggcgucaag

SEQ ID NO: 310757 - RNA, 32 nt, Homo Sapiens
ccugugccgcacuagccucccucuccucuguc

SEQ ID NO: 310758 - RNA, 32 nt, Homo Sapiens
caaacacugcagaacagcaucaugucauaaac

SEQ ID NO: 310759 - RNA, 32 nt, Homo Sapiens
cuuuugucaucucccggaguauucauccucau

SEQ ID NO: 310760 - RNA, 32 nt, Homo Sapiens
guggggacugucugcuggcucagggcccagug

SEQ ID NO: 310761 - RNA, 32 nt, Homo Sapiens
gaaaccuggugccuuaacuucucucucccucc

SEQ ID NO: 310762 - RNA, 32 nt, Homo Sapiens
accuguaaucccaacaguuuggaagaccgagg

SEQ ID NO: 310763 - RNA, 32 nt, Homo Sapiens
ggccuugaacgauguacauuuaucagugagca

SEQ ID NO: 310764 - RNA, 32 nt, Homo Sapiens
ugggugcuggguucacagguguguucaguuug

SEQ ID NO: 310765 - RNA, 32 nt, Homo Sapiens
cguuauaaacacaucaaagguucauucugacu

SEQ ID NO: 310766 - RNA, 32 nt, Homo Sapiens
gccaagaguaauuuuuaaauuaaaaaugaaaa

SEQ ID NO: 310767 - RNA, 32 nt, Homo Sapiens
ccagagaggagcugagcccuguggagcagaac

SEQ ID NO: 310768 - RNA, 32 nt, Homo Sapiens
ggaggcuguggcccuaacgccauggugggcgc

SEQ ID NO: 310769 - RNA, 32 nt, Homo Sapiens
cucccgccaccucggcaacuccgcgcccgccu

SEQ ID NO: 310770 - RNA, 32 nt, Homo Sapiens
cauggagcccagcucucuggcugucuuaccau

SEQ ID NO: 310771 - RNA, 32 nt, Homo Sapiens
aaaccuuuuaagugguggcuuuauuugcccug

SEQ ID NO: 310772 - RNA, 32 nt, Homo Sapiens
ccaaauaagauauauaugugcucuuaauuuua

SEQ ID NO: 310773 - RNA, 32 nt, Homo Sapiens
acguuuauaaugguaaauuagauuauaugugu

SEQ ID NO: 310774 - RNA, 32 nt, Homo Sapiens
auuuuauuuuuagggccuuuuggguuuuauug

SEQ ID NO: 310775 - RNA, 32 nt, Homo Sapiens
ccggcuccucccgccgccggcuccucagcucc

SEQ ID NO: 310776 - RNA, 32 nt, Homo Sapiens
gaagggcuggugggcgaugggcccguggacau

SEQ ID NO: 310777 - RNA, 32 nt, Homo Sapiens
uucaugauuauccuaauaaauuuuacaucucu

SEQ ID NO: 310778 - RNA, 32 nt, Homo Sapiens
ucacgugagcccaggaauucaaggcugcagug

SEQ ID NO: 310779 - RNA, 32 nt, Homo Sapiens
uuggagaauaacaugcauauaauucuguagga

SEQ ID NO: 310780 - RNA, 32 nt, Homo Sapiens
cucaaucuuucuggcccaaacucaggaccgac

SEQ ID NO: 310781 - RNA, 32 nt, Homo Sapiens
agaggaaggagcuguaguguccugcugccucu

SEQ ID NO: 310782 - RNA, 32 nt, Homo Sapiens
ucacgauucacuuuuccaaggacagccuucaa

SEQ ID NO: 310783 - RNA, 32 nt, Homo Sapiens
acugcauuccaagauuagaauaguauuaaagu

SEQ ID NO: 310784 - RNA, 32 nt, Homo Sapiens
gcugccaaguuucucucuccuguuuugugauu

SEQ ID NO: 310785 - RNA, 32 nt, Homo Sapiens
gaaaccaucgccaucaucaucaccaccaucau

SEQ ID NO: 310786 - RNA, 32 nt, Homo Sapiens
gacgggguuuugccauguuacccaggcugguc

SEQ ID NO: 310787 - RNA, 32 nt, Homo Sapiens
cgacuacaaacccuucuguugcuggcgagcug

SEQ ID NO: 310788 - RNA, 32 nt, Homo Sapiens
ccccgacgcgcgcgggucucguuuggagcggg

SEQ ID NO: 310789 - RNA, 32 nt, Homo Sapiens
uguagaguugguugugguauguguuugaugcu

SEQ ID NO: 310790 - RNA, 30 nt, Homo Sapiens
gugcauucuacugucacccaucuggagcag

SEQ ID NO: 310791 - RNA, 32 nt, Homo Sapiens
aaagguauaguuuuguuuuuuauuuuaggaga

SEQ ID NO: 310792 - RNA, 31 nt, Homo Sapiens
cucucagcugacacucucagagauuccugau

SEQ ID NO: 310793 - RNA, 32 nt, Homo Sapiens
ugcagacguguuuuguuuggacuucacuuaaa

SEQ ID NO: 310794 - RNA, 32 nt, Homo Sapiens
cucacugcagcuuugaucugaccgcucaaggg

SEQ ID NO: 310795 - RNA, 32 nt, Homo Sapiens
cggggccugggcggccggcagucuucucgcuc

SEQ ID NO: 310796 - RNA, 30 nt, Homo Sapiens
ugagaaggcaggccuccgucuucccagcgg

SEQ ID NO: 310797 - RNA, 32 nt, Homo Sapiens
cauuggcugccccuccucccaccugccuuggc

SEQ ID NO: 310798 - RNA, 32 nt, Homo Sapiens
gcacuuccugaaaaaccuuuguccucauuugg

SEQ ID NO: 310799 - RNA, 32 nt, Homo Sapiens
cuccuagaaaucuauuuauuaaaaaaagacau

SEQ ID NO: 310800 - RNA, 32 nt, Homo Sapiens
ucgcagucuucggcccucuccugucgccgcca

SEQ ID NO: 310801 - RNA, 29 nt, Homo Sapiens
acagauggagcuggaccaccggaccagcg

SEQ ID NO: 310802 - RNA, 32 nt, Homo Sapiens
aaugcuugaaucucuuaguuuauuuaaaucaa

SEQ ID NO: 310803 - RNA, 32 nt, Homo Sapiens
ugguuuuaucuucccuuuauuacaagaaggaa

SEQ ID NO: 310804 - RNA, 32 nt, Homo Sapiens
aggauggauuuauguuaagggaauuacuuacu

SEQ ID NO: 310805 - RNA, 32 nt, Homo Sapiens
aaaguucuuugguuucuggggugaacucuacc

SEQ ID NO: 310806 - RNA, 32 nt, Homo Sapiens
cgagcagucguugcggccgccggcgccgcggg

SEQ ID NO: 310807 - RNA, 32 nt, Homo Sapiens
gagacaaucugcauuucuuuuauaaaacuaag

SEQ ID NO: 310808 - RNA, 32 nt, Homo Sapiens
cugggagggcggggcuccugccugauaauuua

SEQ ID NO: 310809 - RNA, 32 nt, Homo Sapiens
acaacaaacuagugcaugauucaccaagcagu

SEQ ID NO: 310810 - RNA, 32 nt, Homo Sapiens
aauaaucuacagccuuccuuccccggaugccu

SEQ ID NO: 310811 - RNA, 32 nt, Homo Sapiens
uuuuaucuccaaguggcaguuuuuaaaauugg

SEQ ID NO: 310812 - RNA, 32 nt, Homo Sapiens
gauacaaugaauucauagaccuaagaaaauaa

SEQ ID NO: 310813 - RNA, 32 nt, Homo Sapiens
ucacagggaaaggcauggucucacucaauggg

SEQ ID NO: 310814 - RNA, 32 nt, Homo Sapiens
ggccgaucacgcugggggcgcugaggccggcc

SEQ ID NO: 310815 - RNA, 32 nt, Homo Sapiens
auguguaaagauuuauacaguugaaaacuugu

SEQ ID NO: 310816 - RNA, 32 nt, Homo Sapiens
gugugucugcugucauaacuuacagugaaaaa

SEQ ID NO: 310817 - RNA, 32 nt, Homo Sapiens
aauaagcaguauuugcaugguuccagugauau

SEQ ID NO: 310818 - RNA, 32 nt, Homo Sapiens
ccaagcucuucguguuugcugcuggagugacu

SEQ ID NO: 310819 - RNA, 32 nt, Homo Sapiens
cugcagggacugccagucccccugccccaggg

SEQ ID NO: 310820 - RNA, 32 nt, Homo Sapiens
ucgcccgcccgccugcccgccauggugucaug

SEQ ID NO: 310821 - RNA, 32 nt, Homo Sapiens
gugggcaucugggaccguccuaucaaggcgcu

SEQ ID NO: 310822 - RNA, 32 nt, Homo Sapiens
auauucuauauugaacugaaguaaaucauuuc

SEQ ID NO: 310823 - RNA, 32 nt, Homo Sapiens
caaaaugccugcagcuuccagcuccuucgucc

SEQ ID NO: 310824 - RNA, 32 nt, Homo Sapiens
cuggccagccagccugacguggcugccuuccu

SEQ ID NO: 310825 - RNA, 32 nt, Homo Sapiens
aagauauucauccugcuucaagucagcuucag

SEQ ID NO: 310826 - RNA, 32 nt, Homo Sapiens
guuuucgcuucucuuugguuaaaaguaagaac

SEQ ID NO: 310827 - RNA, 32 nt, Homo Sapiens
aucccguguugcauguguuguuacaauuuucu

SEQ ID NO: 310828 - RNA, 32 nt, Homo Sapiens
ugucucuugacaaauagaaauagguaacuuga

SEQ ID NO: 310829 - RNA, 32 nt, Homo Sapiens
aaaauacaaaaauuagcuggaaaugguagugu

SEQ ID NO: 310830 - RNA, 32 nt, Homo Sapiens
ugcauccaccucugggaggcaggagaccccaa

SEQ ID NO: 310831 - RNA, 32 nt, Homo Sapiens
cauggauuauauauuucuuaaagggaaaaauu

SEQ ID NO: 310832 - RNA, 32 nt, Homo Sapiens
guucauuacuacagaagcuucucuggaugugu

SEQ ID NO: 310833 - RNA, 32 nt, Homo Sapiens
ccagcccucgagagcucugugcuccacgccga

SEQ ID NO: 310834 - RNA, 32 nt, Homo Sapiens
cauuuugaaauaauguaaugugaaguguuucu

SEQ ID NO: 310835 - RNA, 32 nt, Homo Sapiens
auggaagagaaaaccacuaaccuugauuuuug

SEQ ID NO: 310836 - RNA, 32 nt, Homo Sapiens
acugcuacgggcagcgcugggcggcgggcgcg

SEQ ID NO: 310837 - RNA, 32 nt, Homo Sapiens
acauaaggcuuaaugggagauguucuuuuguc

SEQ ID NO: 310838 - RNA, 30 nt, Homo Sapiens
uuuucugcaauaaaagaaacuagacuuguu

SEQ ID NO: 310839 - RNA, 32 nt, Homo Sapiens
ucucuccaaacaaaagcaauugugaaaugugu

SEQ ID NO: 310840 - RNA, 32 nt, Homo Sapiens
caggagaaaagcaucugcaaaauacuaaagag

SEQ ID NO: 310841 - RNA, 32 nt, Homo Sapiens
uucuuaagcccauaaaaacuacaguaaacuag

SEQ ID NO: 310842 - RNA, 32 nt, Homo Sapiens
cgcugcucggagagggcggcugggcggcggcg

SEQ ID NO: 310843 - RNA, 32 nt, Homo Sapiens
agguguaagauuuuaaagugcaauuaaaugcc

SEQ ID NO: 310844 - RNA, 32 nt, Homo Sapiens
uaauauacuguaagccaaacugaaauaacauu

SEQ ID NO: 310845 - RNA, 32 nt, Homo Sapiens
uuucuacuuuauuuugauacaacauauucccc

SEQ ID NO: 310846 - RNA, 32 nt, Homo Sapiens
cuuguuuggggagaggggaacuguuggucccc

SEQ ID NO: 310847 - RNA, 32 nt, Homo Sapiens
aaaacuaguuguuaaauuuuguucaagacauu

SEQ ID NO: 310848 - RNA, 32 nt, Homo Sapiens
cagccggcgccgucucugccccggggcgcccu

SEQ ID NO: 310849 - RNA, 32 nt, Homo Sapiens
ugugguggcgcgcgccugugaucucagcuacc

SEQ ID NO: 310850 - RNA, 32 nt, Homo Sapiens
gggggcggcuggcgcgcacuacacgcuuggga

SEQ ID NO: 310851 - RNA, 32 nt, Homo Sapiens
agaagcagggaugccaucuguugugcagggag

SEQ ID NO: 310852 - RNA, 32 nt, Homo Sapiens
gcggcaucgccggccucgcuaugucugccauu

SEQ ID NO: 310853 - RNA, 32 nt, Homo Sapiens
ggcgucagagcgcgcgcaugcuccuagcucgg

SEQ ID NO: 310854 - RNA, 32 nt, Homo Sapiens
ccaugaacaaacuugaaaauuaauggguaaua

SEQ ID NO: 310855 - RNA, 32 nt, Homo Sapiens
uacuugggaggcugaggucagaggauggcuug

SEQ ID NO: 310856 - RNA, 32 nt, Homo Sapiens
uaauuuuaaaaauuauaaagauguaaauggaa

SEQ ID NO: 310857 - RNA, 32 nt, Homo Sapiens
gccugccucacccacacccgugugguaccuuc

SEQ ID NO: 310858 - RNA, 30 nt, Homo Sapiens
cgucauuggaagcuuguugacugcaaguug

SEQ ID NO: 310859 - RNA, 31 nt, Homo Sapiens
aagagguggcucuggaggccccgcgaaacga

SEQ ID NO: 310860 - RNA, 32 nt, Homo Sapiens
caaaugucaauacagaauucauguugccgguu

SEQ ID NO: 310861 - RNA, 32 nt, Homo Sapiens
cugcaggcuguaugggaagcauggcggcaucu

SEQ ID NO: 310862 - RNA, 32 nt, Homo Sapiens
aggcaacucguagauggagauuugggaaaaga

SEQ ID NO: 310863 - RNA, 31 nt, Homo Sapiens
gacacugcugaugauucccaagauugagaug

SEQ ID NO: 310864 - RNA, 32 nt, Homo Sapiens
uaaaauacuaaaacauucaucuguaaaauggg

SEQ ID NO: 310865 - RNA, 32 nt, Homo Sapiens
uugcacgacuucccccggcccgcggccuguga

SEQ ID NO: 310866 - RNA, 32 nt, Homo Sapiens
ucuguguagacacccagcucuccagaaaaaug

SEQ ID NO: 310867 - RNA, 32 nt, Homo Sapiens
cugaggucagcaguuugagaccagccuggcca

SEQ ID NO: 310868 - RNA, 32 nt, Homo Sapiens
cucaggucaggaguuugagaccagccuggcca

SEQ ID NO: 310869 - RNA, 27 nt, Homo Sapiens
aauaaguccaacuucagccagaaggaa

SEQ ID NO: 310870 - RNA, 32 nt, Homo Sapiens
augggguugccaguaccacaaaaacuguguug

SEQ ID NO: 310871 - RNA, 32 nt, Homo Sapiens
uuaguauuucaccagcaauuauguugagaaua

SEQ ID NO: 310872 - RNA, 32 nt, Homo Sapiens
cacacacaggccuccuucuccccaucaccguc

SEQ ID NO: 310873 - RNA, 32 nt, Homo Sapiens
uuuguuuuuguauuuuuuuuuaaaguaaauuc

SEQ ID NO: 310874 - RNA, 32 nt, Homo Sapiens
gauuucaccauguuacucaggcuggucucaaa

SEQ ID NO: 310875 - RNA, 32 nt, Homo Sapiens
aauagaguggaagucuguaguaguuaauauga

SEQ ID NO: 310876 - RNA, 32 nt, Homo Sapiens
acacugcccucccugccccggcccaugccccc

SEQ ID NO: 310877 - RNA, 32 nt, Homo Sapiens
cgcuguccaugucgcgggccucgcugggacuc

SEQ ID NO: 310878 - RNA, 32 nt, Homo Sapiens
gaccccagaagccacgaugugcucuguaucca

SEQ ID NO: 310879 - RNA, 32 nt, Homo Sapiens
gugagccccgcugaccccgggccagcacuugg

SEQ ID NO: 310880 - RNA, 32 nt, Homo Sapiens
cuucagagacacuguucagggccacggagaau

SEQ ID NO: 310881 - RNA, 32 nt, Homo Sapiens
ccaaggugggguggagagaggccuacgagcca

SEQ ID NO: 310882 - RNA, 32 nt, Homo Sapiens
cgcuaacccgggucccccacuccauggccgcc

SEQ ID NO: 310883 - RNA, 32 nt, Homo Sapiens
aaagcuccuuuucucuucacuguuuuggaaag

SEQ ID NO: 310884 - RNA, 32 nt, Homo Sapiens
acuuuccugucucaagcccauccauuauuucu

SEQ ID NO: 310885 - RNA, 32 nt, Homo Sapiens
ugaagcacaucuguagcaagauggcugagaaa

SEQ ID NO: 310886 - RNA, 32 nt, Homo Sapiens
gcccgccaccugugccagcagcugaugccucc

SEQ ID NO: 310887 - RNA, 32 nt, Homo Sapiens
caucgccgcgcgccccuggcuucgacccggac

SEQ ID NO: 310888 - RNA, 32 nt, Homo Sapiens
cuuggaguugccagauggcuggucaaugcuga

SEQ ID NO: 310889 - RNA, 32 nt, Homo Sapiens
ucauuccaaagaguuucuuuuacaggcucuca

SEQ ID NO: 310890 - RNA, 32 nt, Homo Sapiens
uuuucuccuuggcuucuguuggcacucaccuc

SEQ ID NO: 310891 - RNA, 32 nt, Homo Sapiens
ucucuuuccuuccuccucgaucuuuaguuguc

SEQ ID NO: 310892 - RNA, 32 nt, Homo Sapiens
aguguucaaaguuguauuuuuaaaagauaaau

SEQ ID NO: 310893 - RNA, 32 nt, Homo Sapiens
cgcccuggagccucuuccugugccuggcucaa

SEQ ID NO: 310894 - RNA, 32 nt, Homo Sapiens
cagacacacacacacacacacacacacacaca

SEQ ID NO: 310895 - RNA, 32 nt, Homo Sapiens
ggucuccgcgccccgaggucuccgcggcccga

SEQ ID NO: 310896 - RNA, 32 nt, Homo Sapiens
cacacacacagacacacacacacacacacaca

SEQ ID NO: 310897 - RNA, 32 nt, Homo Sapiens
ucaucccauugacucacaccacgucaucugga

SEQ ID NO: 310898 - RNA, 32 nt, Homo Sapiens
cugaugaguacagcagcacuuccugaggugga

SEQ ID NO: 310899 - RNA, 32 nt, Homo Sapiens
acuguguagccauuucaguagcacuaaaagau

SEQ ID NO: 310900 - RNA, 32 nt, Homo Sapiens
gugagugcaauaaaugccaccaaauucucacu

SEQ ID NO: 310901 - RNA, 32 nt, Homo Sapiens
ucugagaggguggguggcagaggggagcagag

SEQ ID NO: 310902 - RNA, 32 nt, Homo Sapiens
ugggaauaaaauuugaggaaggcacgauuuca

SEQ ID NO: 310903 - RNA, 32 nt, Homo Sapiens
cgccccccauucuacgcgccugcccacacccu

SEQ ID NO: 310904 - RNA, 32 nt, Homo Sapiens
guccccgcuggaggcgguagagggauccagaa

SEQ ID NO: 310905 - RNA, 32 nt, Homo Sapiens
caauuuuucaggcuucucuuuguuaugaaaag

SEQ ID NO: 310906 - RNA, 32 nt, Homo Sapiens
uggaaugugcuaaugaaagagauucuagacaa

SEQ ID NO: 310907 - RNA, 32 nt, Homo Sapiens
ggcagaggcagacaggcgcuggacagaggggc

SEQ ID NO: 310908 - RNA, 32 nt, Homo Sapiens
ccuaccuucuuuccagaggaugucuuucuccu

SEQ ID NO: 310909 - RNA, 32 nt, Homo Sapiens
gacacaaagggagaaaugggacauggauucuu

SEQ ID NO: 310910 - RNA, 32 nt, Homo Sapiens
cuugcaacacaagacccuaggagggaggacgg

SEQ ID NO: 310911 - RNA, 32 nt, Homo Sapiens
aaggguuugauauggagaaacaaaauccucag

SEQ ID NO: 310912 - RNA, 32 nt, Homo Sapiens
ugcuuccggcucucauggauuccacagcaaau

SEQ ID NO: 310913 - RNA, 32 nt, Homo Sapiens
guauaggaaagacugaauaaaaauggagggau

SEQ ID NO: 310914 - RNA, 32 nt, Homo Sapiens
cuuauuguauuuucuguaaauauuucuggcac

SEQ ID NO: 310915 - RNA, 32 nt, Homo Sapiens
auuuuaaaugucaguuacaauaugagaaagau

SEQ ID NO: 310916 - RNA, 32 nt, Homo Sapiens
ccuaccuguucagugucccgggcccguugagg

SEQ ID NO: 310917 - RNA, 32 nt, Homo Sapiens
acagugugggucguuccugggguuggcuuguu

SEQ ID NO: 310918 - RNA, 32 nt, Homo Sapiens
aagguaugacuuuguuaugaaccccugcuuuu

SEQ ID NO: 310919 - RNA, 32 nt, Homo Sapiens
cucuaggaaaauuuaauucugucccuggccag

SEQ ID NO: 310920 - RNA, 32 nt, Homo Sapiens
gucuccccgaacuugucacuuuucucauaaau

SEQ ID NO: 310921 - RNA, 32 nt, Homo Sapiens
accuggucaauaacauccuuaauuacaggaca

SEQ ID NO: 310922 - RNA, 32 nt, Homo Sapiens
ucugaccugugcugauggugugcagucauuca

SEQ ID NO: 310923 - RNA, 32 nt, Homo Sapiens
guuagucccagccccaggcuccggccuuggcc

SEQ ID NO: 310924 - RNA, 32 nt, Homo Sapiens
cucuugcuguuuaccgcccacccagcagcgcc

SEQ ID NO: 310925 - RNA, 32 nt, Homo Sapiens
uccucuaaacacacuugggcacggaaaugcag

SEQ ID NO: 310926 - RNA, 30 nt, Homo Sapiens
uauuuggauaaaaaacauuauuugcaaauu

SEQ ID NO: 310927 - RNA, 32 nt, Homo Sapiens
uucagcuguagcagcaagcaauccccaaccuu

SEQ ID NO: 310928 - RNA, 32 nt, Homo Sapiens
caacaucuuacgggaagagcauaguauuuccu

SEQ ID NO: 310929 - RNA, 32 nt, Homo Sapiens
ccguggugucugcacaucacuccagccccaua

SEQ ID NO: 310930 - RNA, 32 nt, Homo Sapiens
ggaaaggagaggaaucgccacccccuccugcc

SEQ ID NO: 310931 - RNA, 32 nt, Homo Sapiens
gcuuugauaaccugcuuaauacuccaaagugu

SEQ ID NO: 310932 - RNA, 32 nt, Homo Sapiens
ggcugagaccugugcaugcucaucucuauuug

SEQ ID NO: 310933 - RNA, 32 nt, Homo Sapiens
gagaaggggagaaauguacuuggaaauuaaug

SEQ ID NO: 310934 - RNA, 32 nt, Homo Sapiens
cuaggcagccacuccagcuuguccugugcugc

SEQ ID NO: 310935 - RNA, 32 nt, Homo Sapiens
uuguuggaaaaacaugaugagagugucacaga

SEQ ID NO: 310936 - RNA, 32 nt, Homo Sapiens
gcagcccacuccccagccccagccccuuccau

SEQ ID NO: 310937 - RNA, 32 nt, Homo Sapiens
cacguucgcgcgcggugcgucggccauugccu

SEQ ID NO: 310938 - RNA, 32 nt, Homo Sapiens
aaacuauauuaaaaaguuuucuuaauagauuu

SEQ ID NO: 310939 - RNA, 32 nt, Homo Sapiens
gcuauaguguauuuuuaccuuuuacuguuaga

SEQ ID NO: 310940 - RNA, 32 nt, Homo Sapiens
uucaaaugugacucacuuuugcuguucuugug

SEQ ID NO: 310941 - RNA, 32 nt, Homo Sapiens
gcugccgccgccucucuugggaccuggccugg

SEQ ID NO: 310942 - RNA, 32 nt, Homo Sapiens
augaccauuguuaaagugcuuuuuuagaaaau

SEQ ID NO: 310943 - RNA, 32 nt, Homo Sapiens
cccaagcaaccucagccaaugaguccaacguc

SEQ ID NO: 310944 - RNA, 32 nt, Homo Sapiens
acaguucuggauucaggcuguugugggagcgg

SEQ ID NO: 310945 - RNA, 32 nt, Homo Sapiens
auaucuauauugcaaaauuuugacugucagcu

SEQ ID NO: 310946 - RNA, 32 nt, Homo Sapiens
guugaggcaggggacaguagucuccccugcca

SEQ ID NO: 310947 - RNA, 32 nt, Homo Sapiens
cuugguugauaaauacguauaugguccauucc

SEQ ID NO: 310948 - RNA, 32 nt, Homo Sapiens
aauuuuaaaaacagggaacuuuguaacuguga

SEQ ID NO: 310949 - RNA, 32 nt, Homo Sapiens
cuuaucuggaagaucugcaaacauuaccuaaa

SEQ ID NO: 310950 - RNA, 32 nt, Homo Sapiens
acaaacauuucccccaauaaauaucuugcaug

SEQ ID NO: 310951 - RNA, 32 nt, Homo Sapiens
cccgaagucuagggcguccguagucgccccgg

SEQ ID NO: 310952 - RNA, 32 nt, Homo Sapiens
accauucuggccaacauagugaaaccccaucu

SEQ ID NO: 310953 - RNA, 32 nt, Homo Sapiens
cccuucuggugcccuuugggaauaaagcugua

SEQ ID NO: 310954 - RNA, 32 nt, Homo Sapiens
cucugaaaacaaaauaggcugaaguauagcga

SEQ ID NO: 310955 - RNA, 32 nt, Homo Sapiens
acuccucaccccagcccaucuucucccgcuuc

SEQ ID NO: 310956 - RNA, 32 nt, Homo Sapiens
cggccaagagcagggcccgaggcaggagguga

SEQ ID NO: 310957 - RNA, 32 nt, Homo Sapiens
aacuuaacauucuguaaaaugucuguuaacuu

SEQ ID NO: 310958 - RNA, 32 nt, Homo Sapiens
cucuuccccaaucccccuucucuucuuccaga

SEQ ID NO: 310959 - RNA, 32 nt, Homo Sapiens
auugaauguaucuauuuauuaaguucucaaug

SEQ ID NO: 310960 - RNA, 32 nt, Homo Sapiens
acccucaaaaauacuuucuuaauuucacauug

SEQ ID NO: 310961 - RNA, 32 nt, Homo Sapiens
ucaguuugccagcauagugccaaagaccauca

SEQ ID NO: 310962 - RNA, 32 nt, Homo Sapiens
caguagaccccuccccugacauguggggauua

SEQ ID NO: 310963 - RNA, 32 nt, Homo Sapiens
uagugcagcagcugcccggagccccgugcuug

SEQ ID NO: 310964 - RNA, 32 nt, Homo Sapiens
ccugcagaccacgcccaccucauuuacauguu

SEQ ID NO: 310965 - RNA, 32 nt, Homo Sapiens
cagaacggggcagcucagcaacuauuacagca

SEQ ID NO: 310966 - RNA, 32 nt, Homo Sapiens
gugguugaaggauucuugaugcccuaaaacca

SEQ ID NO: 310967 - RNA, 32 nt, Homo Sapiens
aaucagccgggcgugguggcgggugccuguag

SEQ ID NO: 310968 - RNA, 32 nt, Homo Sapiens
agccguggaugggggcggagcugggguuuggu

SEQ ID NO: 310969 - RNA, 32 nt, Homo Sapiens
ugcuuacuuaaaagacauuuugaaaguuaaag

SEQ ID NO: 310970 - RNA, 32 nt, Homo Sapiens
aucucacccacccccacaaggggagaaaaagu

SEQ ID NO: 310971 - RNA, 32 nt, Homo Sapiens
gucacuauaauauacuguauguuuacauuuua

SEQ ID NO: 310972 - RNA, 27 nt, Homo Sapiens
accauguccuucugugguacaccccuu

SEQ ID NO: 310973 - RNA, 32 nt, Homo Sapiens
cucauauucacagguggcuggugcuagucuaa

SEQ ID NO: 310974 - RNA, 32 nt, Homo Sapiens
caagaacaaucauuauuuuauuuuauaggcau

SEQ ID NO: 310975 - RNA, 32 nt, Homo Sapiens
cgguuucccacuuuucuuuuuacauuaaugca

SEQ ID NO: 310976 - RNA, 32 nt, Homo Sapiens
cuuuggggggucuggggugaccuccccaccuc

SEQ ID NO: 310977 - RNA, 32 nt, Homo Sapiens
augcugcagggcagcuccgggucgccaggcgg

SEQ ID NO: 310978 - RNA, 32 nt, Homo Sapiens
cgucucuaccaaaaauacaaaaaauuagcugg

SEQ ID NO: 310979 - RNA, 32 nt, Homo Sapiens
cgucucuacuaaaaauacaaaaaaucagcugg

SEQ ID NO: 310980 - RNA, 32 nt, Homo Sapiens
cucgcagaacaguaaaacugaagauuauuguu

SEQ ID NO: 310981 - RNA, 32 nt, Homo Sapiens
ggcagauaaaaauaaaauaaauggagaaccua

SEQ ID NO: 310982 - RNA, 32 nt, Homo Sapiens
uauaacaugaaaauaaacauuuccuuuuuaac

SEQ ID NO: 310983 - RNA, 32 nt, Homo Sapiens
uggcccaggggugaaaaguggaugcugcguaa

SEQ ID NO: 310984 - RNA, 32 nt, Homo Sapiens
ccucaacccagcuaugguucucucgcaaggga

SEQ ID NO: 310985 - RNA, 32 nt, Homo Sapiens
cccagcaccagccagcagcaggacugagaaag

SEQ ID NO: 310986 - RNA, 30 nt, Homo Sapiens
uuggcaucuaauaaaaucauuuuguauauc

SEQ ID NO: 310987 - RNA, 32 nt, Homo Sapiens
uugcugccaagguggagggaaggauaaagcca

SEQ ID NO: 310988 - RNA, 32 nt, Homo Sapiens
caccuuuucccucucuggcguccccggcugcu

SEQ ID NO: 310989 - RNA, 32 nt, Homo Sapiens
ccugaccucaggugcuccaccugccuuggccu

SEQ ID NO: 310990 - RNA, 32 nt, Homo Sapiens
uagcaugauaacugcauuguaacuuggccaga

SEQ ID NO: 310991 - RNA, 32 nt, Homo Sapiens
uuaagcuucaauucacagggaagagaaacaug

SEQ ID NO: 310992 - RNA, 32 nt, Homo Sapiens
aauuaccaugcaaaccacuuaccaauaaauuu

SEQ ID NO: 310993 - RNA, 32 nt, Homo Sapiens
ucaaagcacagaagacauuagaagaaaacugc

SEQ ID NO: 310994 - RNA, 32 nt, Homo Sapiens
gaggucgcagugagucgagaucgcaccacggc

SEQ ID NO: 310995 - RNA, 32 nt, Homo Sapiens
acaagacccuggccucaggccggagcagcccc

SEQ ID NO: 310996 - RNA, 32 nt, Homo Sapiens
cugcaguaucuuguauuuuuuauuugugauuu

SEQ ID NO: 310997 - RNA, 32 nt, Homo Sapiens
uuccggagccccagcgucuccugcccaaauuc

SEQ ID NO: 310998 - RNA, 32 nt, Homo Sapiens
gacccucccuccccucacccccaagguguaga

SEQ ID NO: 310999 - RNA, 30 nt, Homo Sapiens
ucagagaaugugcuugaugaggaaggcggc

SEQ ID NO: 311000 - RNA, 32 nt, Homo Sapiens
gccaccuccgcggagagacugcacuuugcaau

SEQ ID NO: 311001 - RNA, 32 nt, Homo Sapiens
ugaguucgcggagauagcaucaucccugauca

SEQ ID NO: 311002 - RNA, 32 nt, Homo Sapiens
guucacuaaucuuuuuuccacaguguuuaauc

SEQ ID NO: 311003 - RNA, 32 nt, Homo Sapiens
uuaaacacggggcuugcaacuuagcucacacc

SEQ ID NO: 311004 - RNA, 32 nt, Homo Sapiens
uuugggcugaugcaaaaauaucuauguggaag

SEQ ID NO: 311005 - RNA, 32 nt, Homo Sapiens
cuaaaauuuuugguauugcagaugacguaagu

SEQ ID NO: 311006 - RNA, 32 nt, Homo Sapiens
acaaggucaggagaucaagaccauccuggcca

SEQ ID NO: 311007 - RNA, 32 nt, Homo Sapiens
gcauguccagaugaacgaagcgugcaaaucca

SEQ ID NO: 311008 - RNA, 32 nt, Homo Sapiens
ccugugucaacgcccaguggcuuggcgacauu

SEQ ID NO: 311009 - RNA, 32 nt, Homo Sapiens
uaucuuugugugucuuccuguuuaugugugcc

SEQ ID NO: 311010 - RNA, 32 nt, Homo Sapiens
cuuaucauugcuuuuccaucuagagcaguuac

SEQ ID NO: 311011 - RNA, 32 nt, Homo Sapiens
gugugggcuuuaggagaaaagugugggcauga

SEQ ID NO: 311012 - RNA, 32 nt, Homo Sapiens
guuuucuuucccuguuuugauuuugcugaagg

SEQ ID NO: 311013 - RNA, 32 nt, Homo Sapiens
gcagggaaggagaggagggauggagaagcucu

SEQ ID NO: 311014 - RNA, 32 nt, Homo Sapiens
cugucugcaccuguacagccaccucacggauc

SEQ ID NO: 311015 - RNA, 32 nt, Homo Sapiens
cagggggcugucuacuagagccuggaauaaau

SEQ ID NO: 311016 - RNA, 32 nt, Homo Sapiens
ugagggugggcuuuucccuggguggagcagga

SEQ ID NO: 311017 - RNA, 32 nt, Homo Sapiens
gacgcucugcccggcugcugccgcugaggaaa

SEQ ID NO: 311018 - RNA, 32 nt, Homo Sapiens
acgccugguucguucgcccaccaggccuaggc

SEQ ID NO: 311019 - RNA, 30 nt, Homo Sapiens
aaauaucuggacugaguuuugccaaauguu

SEQ ID NO: 311020 - RNA, 32 nt, Homo Sapiens
ucugcacagaggcagcagcauggacaucaugg

SEQ ID NO: 311021 - RNA, 32 nt, Homo Sapiens
uagcugugccagcacauguucaucuuuacaau

SEQ ID NO: 311022 - RNA, 32 nt, Homo Sapiens
cugcuccaguccugaggccuccugacccugac

SEQ ID NO: 311023 - RNA, 32 nt, Homo Sapiens
cguauuugucccauucuuggaguaguuuuagu

SEQ ID NO: 311024 - RNA, 32 nt, Homo Sapiens
ccgacccucgcuccccgcccaggacccgaaug

SEQ ID NO: 311025 - RNA, 32 nt, Homo Sapiens
cauaacucauuucuuccauaugaagaaacacc

SEQ ID NO: 311026 - RNA, 32 nt, Homo Sapiens
cugcuggccccgggucccagcaguggguccug

SEQ ID NO: 311027 - RNA, 32 nt, Homo Sapiens
uguggcccugugcccaguggcccacaggacac

SEQ ID NO: 311028 - RNA, 32 nt, Homo Sapiens
ugaagaacugagaucagugaaauacuuguugc

SEQ ID NO: 311029 - RNA, 31 nt, Homo Sapiens
gcugaguggcaggggacaggaguccacuuug

SEQ ID NO: 311030 - RNA, 32 nt, Homo Sapiens
auccuaauugguuacccaguuugacccuaauc

SEQ ID NO: 311031 - RNA, 32 nt, Homo Sapiens
uaaucccaagaaacguauacuuuaacaacaaa

SEQ ID NO: 311032 - RNA, 32 nt, Homo Sapiens
aacugggacuuccgaggcaacuugaacucaga

SEQ ID NO: 311033 - RNA, 32 nt, Homo Sapiens
auuaugauaaaguggaaauacauuacgaugaa

SEQ ID NO: 311034 - RNA, 32 nt, Homo Sapiens
uucuguuaaccaaaauugcagaauggggggcc

SEQ ID NO: 311035 - RNA, 32 nt, Homo Sapiens
uuuaccgacuccaaaaaucucaggaauuaaac

SEQ ID NO: 311036 - RNA, 32 nt, Homo Sapiens
gagccugcuuucugccagucuugagguucuga

SEQ ID NO: 311037 - RNA, 32 nt, Homo Sapiens
uugcaaaguccuuuuuaccugugcauuuggac

SEQ ID NO: 311038 - RNA, 32 nt, Homo Sapiens
uccaucacaacagguguccugaagaugcugga

SEQ ID NO: 311039 - RNA, 32 nt, Homo Sapiens
ggcugcucccagcagagguggggccggcagag

SEQ ID NO: 311040 - RNA, 32 nt, Homo Sapiens
ugucugccccaggcccggggcaucgccgccgg

SEQ ID NO: 311041 - RNA, 32 nt, Homo Sapiens
gggaaacgcccucggcgcgcacccacuggcgc

SEQ ID NO: 311042 - RNA, 32 nt, Homo Sapiens
ccauuggcauuugaagguaguugaguaugugu

SEQ ID NO: 311043 - RNA, 32 nt, Homo Sapiens
ggugauccugaugcacauccaugguggagagc

SEQ ID NO: 311044 - RNA, 32 nt, Homo Sapiens
gaaaaaugcagagggagaaauaaggcacauga

SEQ ID NO: 311045 - RNA, 32 nt, Homo Sapiens
agugauaucucacuugcuguuuguuugcuuuu

SEQ ID NO: 311046 - RNA, 32 nt, Homo Sapiens
uguugaacaaaauaaauuggaguuggaguaga

SEQ ID NO: 311047 - RNA, 32 nt, Homo Sapiens
ucugauagauuacgaaauauauuuuuagaacu

SEQ ID NO: 311048 - RNA, 32 nt, Homo Sapiens
aagaauuagugauuaaauuugaccugaaucaa

SEQ ID NO: 311049 - RNA, 32 nt, Homo Sapiens
cggguacccacccccaggaagccgcccccuca

SEQ ID NO: 311050 - RNA, 32 nt, Homo Sapiens
ggggccagcccugaccccacauauugugcagu

SEQ ID NO: 311051 - RNA, 32 nt, Homo Sapiens
auuauuccuuucuggagcuuugagaucuaaaa

SEQ ID NO: 311052 - RNA, 32 nt, Homo Sapiens
uacauuuucaggaacugaaaucauuaaaauuu

SEQ ID NO: 311053 - RNA, 32 nt, Homo Sapiens
cccuaguucuuugcauucguccuuagaauacu

SEQ ID NO: 311054 - RNA, 32 nt, Homo Sapiens
gaagggaggcgggaggugggcuggggcagccc

SEQ ID NO: 311055 - RNA, 32 nt, Homo Sapiens
ugggagguggagguugcagugagcugagguug

SEQ ID NO: 311056 - RNA, 32 nt, Homo Sapiens
agcccaggccuggccucggggcagggcagggc

SEQ ID NO: 311057 - RNA, 32 nt, Homo Sapiens
gacagacaggugccagcagagcccggggcuca

SEQ ID NO: 311058 - RNA, 32 nt, Homo Sapiens
ggcuggacgcgguggcuuacgccuguaauucc

SEQ ID NO: 311059 - RNA, 32 nt, Homo Sapiens
cagcccaguuguauguuuuucuugaauaggga

SEQ ID NO: 311060 - RNA, 32 nt, Homo Sapiens
ucucagcaaucccccucuuugcucuccucgug

SEQ ID NO: 311061 - RNA, 32 nt, Homo Sapiens
aaccauaagauuuuauacugcagauagucagc

SEQ ID NO: 311062 - RNA, 32 nt, Homo Sapiens
aacaaccacugaaaauaauauuucuauggcag

SEQ ID NO: 311063 - RNA, 32 nt, Homo Sapiens
gcauuuaaaaacauuaauggaaaauaaugcug

SEQ ID NO: 311064 - RNA, 32 nt, Homo Sapiens
augaggucaacggauugagaccaucuaggcca

SEQ ID NO: 311065 - RNA, 32 nt, Homo Sapiens
cgcgcaguagagcagcagcacaggcgcggguc

SEQ ID NO: 311066 - RNA, 32 nt, Homo Sapiens
ugccuaaaauuccauugauuguucauuguuaa

SEQ ID NO: 311067 - RNA, 32 nt, Homo Sapiens
aaaggaauuguuaauugacucuucaaauauau

SEQ ID NO: 311068 - RNA, 32 nt, Homo Sapiens
ccuaaaagucacacucucuaauuacacuuccc

SEQ ID NO: 311069 - RNA, 32 nt, Homo Sapiens
cugcuuagcuggugcuggccugaggcagggca

SEQ ID NO: 311070 - RNA, 32 nt, Homo Sapiens
gcacauguauuugguaugcauguguaucuaua

SEQ ID NO: 311071 - RNA, 32 nt, Homo Sapiens
cacaucuuacugaauauaauucuuacugcaga

SEQ ID NO: 311072 - RNA, 32 nt, Homo Sapiens
agccuugucaguguguaaauaaagcucuuuug

SEQ ID NO: 311073 - RNA, 32 nt, Homo Sapiens
uacauggggcuacauuuuaacuauggcuuaca

SEQ ID NO: 311074 - RNA, 32 nt, Homo Sapiens
cgggggagaggguaaacuggggcgcgcggguu

SEQ ID NO: 311075 - RNA, 32 nt, Homo Sapiens
auacuaaaauaguggauacaggucauuaugca

SEQ ID NO: 311076 - RNA, 32 nt, Homo Sapiens
ccaugaugucguucauuuucuguaauugcugc

SEQ ID NO: 311077 - RNA, 32 nt, Homo Sapiens
aauuguaucugugcauugauguugggaacaca

SEQ ID NO: 311078 - RNA, 32 nt, Homo Sapiens
ugguuaucuauuuaauuucaguuuuuguuaac

SEQ ID NO: 311079 - RNA, 32 nt, Homo Sapiens
aauuccaguacagcuguagcaagaugcgcagg

SEQ ID NO: 311080 - RNA, 32 nt, Homo Sapiens
cugaucgcgggcgcccacagcgcggacauggc

SEQ ID NO: 311081 - RNA, 32 nt, Homo Sapiens
cucagucccccucccaacccuccauauggcuc

SEQ ID NO: 311082 - RNA, 32 nt, Homo Sapiens
ccagugggcccucggcgcccagcuccgcgucc

SEQ ID NO: 311083 - RNA, 32 nt, Homo Sapiens
auuauguuacugucuuuuuuaaucaugugguu

SEQ ID NO: 311084 - RNA, 32 nt, Homo Sapiens
auaggcuuagguuuucugaaaaauacuuuuau

SEQ ID NO: 311085 - RNA, 32 nt, Homo Sapiens
gaagaauggggacaacagaaaccugcuuugua

SEQ ID NO: 311086 - RNA, 32 nt, Homo Sapiens
cacauccugaagaucucgugacuauacuggca

SEQ ID NO: 311087 - RNA, 32 nt, Homo Sapiens
gagcugccaguacuugacguggcgucaccgcc

SEQ ID NO: 311088 - RNA, 32 nt, Homo Sapiens
aacuacaagggcuccucuuuaucaccauaagu

SEQ ID NO: 311089 - RNA, 32 nt, Homo Sapiens
uucuuaaaaaauuuuacauagaucaguuguau

SEQ ID NO: 311090 - RNA, 32 nt, Homo Sapiens
auuuuggcugcuguucuuuaaucuuccucuaa

SEQ ID NO: 311091 - RNA, 32 nt, Homo Sapiens
cuacggacgacgccuaugaagcccuuaguccu

SEQ ID NO: 311092 - RNA, 32 nt, Homo Sapiens
gaugauuuucacaacuaccuaacuuugguguu

SEQ ID NO: 311093 - RNA, 32 nt, Homo Sapiens
cgcccagcacggccggccccgggcuuccccag

SEQ ID NO: 311094 - RNA, 32 nt, Homo Sapiens
ccugucagggucagccggcgggcccccugggu

SEQ ID NO: 311095 - RNA, 32 nt, Homo Sapiens
cccucacugccacuccucucaucccuacccac

SEQ ID NO: 311096 - RNA, 32 nt, Homo Sapiens
ucaccagcugaauucugugccuaacuuagaag

SEQ ID NO: 311097 - RNA, 32 nt, Homo Sapiens
cgcaccucugcucccuucuccucacuacccac

SEQ ID NO: 311098 - RNA, 32 nt, Homo Sapiens
cccucucgcgccccaggccgguguacccccgc

SEQ ID NO: 311099 - RNA, 32 nt, Homo Sapiens
agggugaccccauugugaucugagcauuauag

SEQ ID NO: 311100 - RNA, 32 nt, Homo Sapiens
cgccugggcuuuuucccgcccgcgguuccacc

SEQ ID NO: 311101 - RNA, 32 nt, Homo Sapiens
ugcuuguaaucccagcacuuugggaggccaag

SEQ ID NO: 311102 - RNA, 32 nt, Homo Sapiens
ucuuguuuucuguuuccuauguuuucuuaaaa

SEQ ID NO: 311103 - RNA, 32 nt, Homo Sapiens
uauugcuucuucaauaucgacuugcuuauucu

SEQ ID NO: 311104 - RNA, 31 nt, Homo Sapiens
cccccuuaaagaagaaagucucaauuccauu

SEQ ID NO: 311105 - RNA, 32 nt, Homo Sapiens
agacauuugggguuuguaugugcauuaaaauu

SEQ ID NO: 311106 - RNA, 32 nt, Homo Sapiens
cuuagguuuuaacgaugucaacaguguaguuu

SEQ ID NO: 311107 - RNA, 32 nt, Homo Sapiens
ucaguguguggaaaugucucgugggguggcau

SEQ ID NO: 311108 - RNA, 32 nt, Homo Sapiens
ucugccagccagcagccagcucucagccaacg

SEQ ID NO: 311109 - RNA, 32 nt, Homo Sapiens
gguugcauucagaauauuugaaguuucuuacg

SEQ ID NO: 311110 - RNA, 32 nt, Homo Sapiens
caugugguauguagcccggccagggccuggug

SEQ ID NO: 311111 - RNA, 32 nt, Homo Sapiens
guaagcccgccauggccucccggagccugggg

SEQ ID NO: 311112 - RNA, 32 nt, Homo Sapiens
gcuugcaaacuccagcuuugccugugagagga

SEQ ID NO: 311113 - RNA, 32 nt, Homo Sapiens
ugcucugcugguaccaguggccgucaccuaug

SEQ ID NO: 311114 - RNA, 32 nt, Homo Sapiens
auuuuuuaaguggacuuguaugcugauaauuc

SEQ ID NO: 311115 - RNA, 32 nt, Homo Sapiens
gugaucaguuugugcuuuauucuguauuuguc

SEQ ID NO: 311116 - RNA, 32 nt, Homo Sapiens
gcuugagggugcgcaagacggcagccuccgcc

SEQ ID NO: 311117 - RNA, 32 nt, Homo Sapiens
uggcaaauuuuauuuuaacuguuucuaugguu

SEQ ID NO: 311118 - RNA, 32 nt, Homo Sapiens
cauuagauaaguguugucuaccuagucuagga

SEQ ID NO: 311119 - RNA, 32 nt, Homo Sapiens
aagggaggaucuucuucaguuguaguuuggaa

SEQ ID NO: 311120 - RNA, 32 nt, Homo Sapiens
cuggcgcggccggcccgugguccucaagucca

SEQ ID NO: 311121 - RNA, 32 nt, Homo Sapiens
aagugagagaaccugcugggcauaaggaccua

SEQ ID NO: 311122 - RNA, 32 nt, Homo Sapiens
cagagucuuacuccguugcccaggcuggagua

SEQ ID NO: 311123 - RNA, 32 nt, Homo Sapiens
cgucauaaauuugaauaagcagaacauacugu

SEQ ID NO: 311124 - RNA, 32 nt, Homo Sapiens
gucugccauuacugaggcuugauuaggcaguu

SEQ ID NO: 311125 - RNA, 32 nt, Homo Sapiens
aggaaagccucaucagugucuuucuccacgau

SEQ ID NO: 311126 - RNA, 32 nt, Homo Sapiens
gcugguggugcucgcugcugcugcugagagga

SEQ ID NO: 311127 - RNA, 32 nt, Homo Sapiens
ggccuuuaggggcacguucgccugcugaccgg

SEQ ID NO: 311128 - RNA, 32 nt, Homo Sapiens
uuucagcuuuuguaucauguuuaauuguuuaa

SEQ ID NO: 311129 - RNA, 32 nt, Homo Sapiens
caccagcccggccccaggggugcccugggcuc

SEQ ID NO: 311130 - RNA, 32 nt, Homo Sapiens
agauuauuuuauguggaaauaaagaaacccau

SEQ ID NO: 311131 - RNA, 32 nt, Homo Sapiens
uuuuugcagacacugucaucucucaaguaccc

SEQ ID NO: 311132 - RNA, 32 nt, Homo Sapiens
aauauuauuuuuccuuuaacaaaaugaagaga

SEQ ID NO: 311133 - RNA, 32 nt, Homo Sapiens
agaugaaauggcagaugcuaguaauucacaga

SEQ ID NO: 311134 - RNA, 29 nt, Homo Sapiens
ucucaauaaaguucacgguuucauuacca

SEQ ID NO: 311135 - RNA, 32 nt, Homo Sapiens
gguguucggccgcgaucaccuuugugugucuu

SEQ ID NO: 311136 - RNA, 32 nt, Homo Sapiens
aagagugagcgcggggugggggagggauguga

SEQ ID NO: 311137 - RNA, 32 nt, Homo Sapiens
ccagggaggauugaaacuagguccugccuuuc

SEQ ID NO: 311138 - RNA, 30 nt, Homo Sapiens
aacccagccaggcgcggugccccuuccucu

SEQ ID NO: 311139 - RNA, 32 nt, Homo Sapiens
uaacggggcccagccccggugucccgugcugu

SEQ ID NO: 311140 - RNA, 32 nt, Homo Sapiens
aacguauuugccaguuacgaaguuccacugaa

SEQ ID NO: 311141 - RNA, 32 nt, Homo Sapiens
caccauugacauuauucacaaaauuagaaaaa

SEQ ID NO: 311142 - RNA, 32 nt, Homo Sapiens
gggacuguucuuccagauccgccacuccccau

SEQ ID NO: 311143 - RNA, 32 nt, Homo Sapiens
uagcauuuuaaacuuagugacuauuuaguuca

SEQ ID NO: 311144 - RNA, 32 nt, Homo Sapiens
cuccagcugauccuuaucaaggcagcuaguuc

SEQ ID NO: 311145 - RNA, 32 nt, Homo Sapiens
uauauauugguuucuuuuuccaacuuaauagg

SEQ ID NO: 311146 - RNA, 32 nt, Homo Sapiens
gccagcaaagccccuccacaccccucaaacuc

SEQ ID NO: 311147 - RNA, 32 nt, Homo Sapiens
cagcugacccucggggcucccccggcagcgga

SEQ ID NO: 311148 - RNA, 32 nt, Homo Sapiens
auuguucuagaauagccuuucagcuacaagag

SEQ ID NO: 311149 - RNA, 32 nt, Homo Sapiens
gggcagagucagcucugugcugagccuccugg

SEQ ID NO: 311150 - RNA, 32 nt, Homo Sapiens
uaaauagaugaccccuucagaucaucugugcc

SEQ ID NO: 311151 - RNA, 32 nt, Homo Sapiens
caauguauauaaauaaaccaagcauuggggcu

SEQ ID NO: 311152 - RNA, 32 nt, Homo Sapiens
ggaucccccucuagcuccugcucacccacgcc

SEQ ID NO: 311153 - RNA, 32 nt, Homo Sapiens
aaggauaaggcacaauaaauaggcacauagag

SEQ ID NO: 311154 - RNA, 32 nt, Homo Sapiens
cuacaguugcugucacugaucccuguuuugcu

SEQ ID NO: 311155 - RNA, 32 nt, Homo Sapiens
ucuggccugugcugcgugggagccacuggucu

SEQ ID NO: 311156 - RNA, 32 nt, Homo Sapiens
uagguugauucaaugucuuugcuauugugaau

SEQ ID NO: 311157 - RNA, 32 nt, Homo Sapiens
ugacccgcuucccagacucuaugcugggggcc

SEQ ID NO: 311158 - RNA, 32 nt, Homo Sapiens
cagcaguaucuaggagaccacgaaggaauacc

SEQ ID NO: 311159 - RNA, 32 nt, Homo Sapiens
guaugccugggccaagggauuuuuacauccuu

SEQ ID NO: 311160 - RNA, 32 nt, Homo Sapiens
caucacuuauaaccccacaggccagaggagag

SEQ ID NO: 311161 - RNA, 32 nt, Homo Sapiens
ggaaaaggggaagagaggcugagugucaccaa

SEQ ID NO: 311162 - RNA, 32 nt, Homo Sapiens
gggaaaaaauuugaaaggcauccuuacgacag

SEQ ID NO: 311163 - RNA, 32 nt, Homo Sapiens
agaauauugaggcugggugcaaugcaucacac

SEQ ID NO: 311164 - RNA, 30 nt, Homo Sapiens
aaauggagcaagcuugaaggaguuagaauc

SEQ ID NO: 311165 - RNA, 32 nt, Homo Sapiens
gacaauuucuuacuuccucuuaauaacuuacc

SEQ ID NO: 311166 - RNA, 32 nt, Homo Sapiens
ggaguucgagaccaugcugcuguucugccccg

SEQ ID NO: 311167 - RNA, 32 nt, Homo Sapiens
aucugacauaucugcauuauaauaauaggaga

SEQ ID NO: 311168 - RNA, 32 nt, Homo Sapiens
gcuucugagaaaccaaaauaauccaaagagaa

SEQ ID NO: 311169 - RNA, 32 nt, Homo Sapiens
acaguuuuauuacccucagaagaaauucuacg

SEQ ID NO: 311170 - RNA, 32 nt, Homo Sapiens
gguggccgggcgccagcucccaggccgcagaa

SEQ ID NO: 311171 - RNA, 32 nt, Homo Sapiens
ccaggacagcgcugcuuuuuuauuaucuacaa

SEQ ID NO: 311172 - RNA, 32 nt, Homo Sapiens
cauuugucuagugaaucagaaaggcuuagcca

SEQ ID NO: 311173 - RNA, 30 nt, Homo Sapiens
cagugugugaagacucuugagucugguucu

SEQ ID NO: 311174 - RNA, 32 nt, Homo Sapiens
cuuaacugaggaguaacaaacaugguaaaaca

SEQ ID NO: 311175 - RNA, 32 nt, Homo Sapiens
gccuucuggugcccauaguccccuggacugag

SEQ ID NO: 311176 - RNA, 32 nt, Homo Sapiens
ggaacggaucaucaauuuguuugaauacacau

SEQ ID NO: 311177 - RNA, 32 nt, Homo Sapiens
acuuucgguccugggggagcuaggccggcggc

SEQ ID NO: 311178 - RNA, 32 nt, Homo Sapiens
gccuggcccuccccaggggccuccuuuccuau

SEQ ID NO: 311179 - RNA, 32 nt, Homo Sapiens
guggugcugcugggugugcagcugccacagac

SEQ ID NO: 311180 - RNA, 32 nt, Homo Sapiens
agcugaggccuaugcagacaucucuggagcca

SEQ ID NO: 311181 - RNA, 32 nt, Homo Sapiens
uaccuccagcacagagacgugccaggcggugu

SEQ ID NO: 311182 - RNA, 32 nt, Homo Sapiens
cccaggacugggccggggacugucccaaaggg

SEQ ID NO: 311183 - RNA, 32 nt, Homo Sapiens
caugggggauauauuuuuugcuauaacguaaa

SEQ ID NO: 311184 - RNA, 32 nt, Homo Sapiens
aaggaaguucuaucuugugauacggaaacaau

SEQ ID NO: 311185 - RNA, 32 nt, Homo Sapiens
gugcuaaaaugaaaaccucugcacuuuaauuu

SEQ ID NO: 311186 - RNA, 32 nt, Homo Sapiens
ugagcgaaagaaggaaggacagacggaccugu

SEQ ID NO: 311187 - RNA, 28 nt, Homo Sapiens
accugagagauuuaacauuaucuaguuc

SEQ ID NO: 311188 - RNA, 32 nt, Homo Sapiens
ggaggacgguggagcccggcccaggccguucu

SEQ ID NO: 311189 - RNA, 32 nt, Homo Sapiens
gggagaagauggaguuauuguugauuaccacg

SEQ ID NO: 311190 - RNA, 32 nt, Homo Sapiens
cugcuuacacugguuuuuauccucuggacaac

SEQ ID NO: 311191 - RNA, 32 nt, Homo Sapiens
cagucguugucauggcgacauguuguuuagca

SEQ ID NO: 311192 - RNA, 32 nt, Homo Sapiens
cucuaagaugccucucuccagcccugucucaa

SEQ ID NO: 311193 - RNA, 32 nt, Homo Sapiens
uggggcucagggaccaggccugcccucccagu

SEQ ID NO: 311194 - RNA, 32 nt, Homo Sapiens
aaacucauucacuuuugucuuauuuucuuuua

SEQ ID NO: 311195 - RNA, 32 nt, Homo Sapiens
accacauccuucugccuggguggccucuccaa

SEQ ID NO: 311196 - RNA, 32 nt, Homo Sapiens
cuucccacauauauuuacuaagaugauuaaga

SEQ ID NO: 311197 - RNA, 32 nt, Homo Sapiens
aucggcgggccgggccggcgggucggugagcg

SEQ ID NO: 311198 - RNA, 32 nt, Homo Sapiens
agcgaaucaagacuccacgaccugccagcugu

SEQ ID NO: 311199 - RNA, 32 nt, Homo Sapiens
agacauuuucauaaugguggcuccaucuuccc

SEQ ID NO: 311200 - RNA, 32 nt, Homo Sapiens
guauauuaguagguuuuuuuuauuuguuugag

SEQ ID NO: 311201 - RNA, 32 nt, Homo Sapiens
guggugggggucggcuggaauuuggccaccau

SEQ ID NO: 311202 - RNA, 32 nt, Homo Sapiens
ugggcagugugcuggccgggcugcugggaagc

SEQ ID NO: 311203 - RNA, 32 nt, Homo Sapiens
ucccccuggggugggcgggcgggccuggggca

SEQ ID NO: 311204 - RNA, 32 nt, Homo Sapiens
aaucaguuuccacagccucgcucuguagguuu

SEQ ID NO: 311205 - RNA, 31 nt, Homo Sapiens
cuggcucccccaucugcuccaagggagcgug

SEQ ID NO: 311206 - RNA, 32 nt, Homo Sapiens
cugagauuacaggugcacaccaccacaucugg

SEQ ID NO: 311207 - RNA, 32 nt, Homo Sapiens
ucuuggagcaggcaggaugcccaccgcugcuu

SEQ ID NO: 311208 - RNA, 32 nt, Homo Sapiens
cacuuuguuaaaaauauuuucugaauuauuau

SEQ ID NO: 311209 - RNA, 32 nt, Homo Sapiens
uguggcagcugcccuuuggggcgugggcagca

SEQ ID NO: 311210 - RNA, 32 nt, Homo Sapiens
aaaucugggcuccucagcucauuugguccuca

SEQ ID NO: 311211 - RNA, 32 nt, Homo Sapiens
ccggcgcugcccacaguccccauggugggcag

SEQ ID NO: 311212 - RNA, 32 nt, Homo Sapiens
gcuccauugaggcuggagugacugcuauucgg

SEQ ID NO: 311213 - RNA, 32 nt, Homo Sapiens
gaucucggcucacugcgagcuccaccucucgg

SEQ ID NO: 311214 - RNA, 32 nt, Homo Sapiens
cccugcugcccccaagacacuccaaaggcaaa

SEQ ID NO: 311215 - RNA, 32 nt, Homo Sapiens
ccuugaagaaugcccuucaguggcccucacca

SEQ ID NO: 311216 - RNA, 32 nt, Homo Sapiens
ggaaaaugccaaauagcucuguucuguggcuu

SEQ ID NO: 311217 - RNA, 32 nt, Homo Sapiens
ggaccccgggaccugccccccuccccccgcag

SEQ ID NO: 311218 - RNA, 32 nt, Homo Sapiens
gugaaugaaccacugucauuuucuguugaguc

SEQ ID NO: 311219 - RNA, 32 nt, Homo Sapiens
uggugugcaccuguaaucccagcuacucggga

SEQ ID NO: 311220 - RNA, 32 nt, Homo Sapiens
ucggauaagagccugcuuggugcauucaggga

SEQ ID NO: 311221 - RNA, 32 nt, Homo Sapiens
aagauguaucuguaccuucucauuugauguau

SEQ ID NO: 311222 - RNA, 32 nt, Homo Sapiens
ccuuggggagacgcgggucccaguccugcggc

SEQ ID NO: 311223 - RNA, 32 nt, Homo Sapiens
gugccaggagaugcaggaauggcauuauggag

SEQ ID NO: 311224 - RNA, 32 nt, Homo Sapiens
uuuuguaaacuguaccaaaucuguauauguug

SEQ ID NO: 311225 - RNA, 32 nt, Homo Sapiens
gcacuuuagaaaaagccugaugugggucuuac

SEQ ID NO: 311226 - RNA, 32 nt, Homo Sapiens
guguuuccaaaaacaauuuaauuucaaacaac

SEQ ID NO: 311227 - RNA, 32 nt, Homo Sapiens
aagaggauacagguggucagguccuggcuggc

SEQ ID NO: 311228 - RNA, 32 nt, Homo Sapiens
cucagccccuccccuccggcccguccugggca

SEQ ID NO: 311229 - RNA, 32 nt, Homo Sapiens
ggccugccccucuucucagaccucugaccugu

SEQ ID NO: 311230 - RNA, 32 nt, Homo Sapiens
ggccccacccccagcccgcguccggcaucgga

SEQ ID NO: 311231 - RNA, 32 nt, Homo Sapiens
cgugagagccagcagacagccaggccagggua

SEQ ID NO: 311232 - RNA, 31 nt, Homo Sapiens
gagaaauaaaugaauguauguauuuuggugc

SEQ ID NO: 311233 - RNA, 32 nt, Homo Sapiens
uccugcacugccagccccuucuccucucccca

SEQ ID NO: 311234 - RNA, 32 nt, Homo Sapiens
aaauucacaagaagagaggaaauacugaggag

SEQ ID NO: 311235 - RNA, 32 nt, Homo Sapiens
ggaacaggcuggcccagcaucauuugucauca

SEQ ID NO: 311236 - RNA, 32 nt, Homo Sapiens
aaagcaccaaagggaaggcuuccuaucugugu

SEQ ID NO: 311237 - RNA, 32 nt, Homo Sapiens
uggguggcccuuccauuaaaagggaagccagc

SEQ ID NO: 311238 - RNA, 32 nt, Homo Sapiens
aauacaaaaauuagccagacaugguggcauuc

SEQ ID NO: 311239 - RNA, 32 nt, Homo Sapiens
uuuucccacgguuagacuuucuccaggccugg

SEQ ID NO: 311240 - RNA, 32 nt, Homo Sapiens
ucauuuccauagccucaaccacugucuacccg

SEQ ID NO: 311241 - RNA, 32 nt, Homo Sapiens
ggcaggagggagaggagggaaaguauuucuaa

SEQ ID NO: 311242 - RNA, 32 nt, Homo Sapiens
gcucuuguucugugccugagaauggcgaaacc

SEQ ID NO: 311243 - RNA, 32 nt, Homo Sapiens
uuuccagccccggccccggccccugcagccgc

SEQ ID NO: 311244 - RNA, 32 nt, Homo Sapiens
uucuccagcugccccaguggcuccauccagug

SEQ ID NO: 311245 - RNA, 32 nt, Homo Sapiens
uaacaaaagcauguauauguauuuucaaaagu

SEQ ID NO: 311246 - RNA, 32 nt, Homo Sapiens
aaaggcuuucauucuuuccccucauggcucgu

SEQ ID NO: 311247 - RNA, 32 nt, Homo Sapiens
cuuuaguagagaugggguuuugccauguuggc

SEQ ID NO: 311248 - RNA, 32 nt, Homo Sapiens
aguuuaaaaugaaguauauugaauguuugccu

SEQ ID NO: 311249 - RNA, 31 nt, Homo Sapiens
cauuuggaauaaaaauucaauuucacugaaa

SEQ ID NO: 311250 - RNA, 32 nt, Homo Sapiens
cuaaacuuucccuguucagagcaccagaugaa

SEQ ID NO: 311251 - RNA, 32 nt, Homo Sapiens
cacaauuugccuuuuuguggguguacguuuug

SEQ ID NO: 311252 - RNA, 32 nt, Homo Sapiens
auuaaguaaaaauaaagcugaauugugucaaa

SEQ ID NO: 311253 - RNA, 32 nt, Homo Sapiens
ugugaauaauuuccgauccucuggcuugcuau

SEQ ID NO: 311254 - RNA, 32 nt, Homo Sapiens
agccccuccuaagucuuaaugcugagauuucu

SEQ ID NO: 311255 - RNA, 32 nt, Homo Sapiens
uuuacugagagaaacuaaauauuggcauacgu

SEQ ID NO: 311256 - RNA, 32 nt, Homo Sapiens
uauauucuaaucuugaauauucuaccauauuu

SEQ ID NO: 311257 - RNA, 32 nt, Homo Sapiens
uuuuuuacagaaaaugagcaaugaagagauuu

SEQ ID NO: 311258 - RNA, 32 nt, Homo Sapiens
cgcccccauggcgcccgggguccccgcugcac

SEQ ID NO: 311259 - RNA, 32 nt, Homo Sapiens
cuauugaguuuaggaauugcggcacgaagaau

SEQ ID NO: 311260 - RNA, 32 nt, Homo Sapiens
agaccagccugggcgacacggugaaaccccgu

SEQ ID NO: 311261 - RNA, 32 nt, Homo Sapiens
cuaagauuguucagauauuaauccacuuaaga

SEQ ID NO: 311262 - RNA, 32 nt, Homo Sapiens
auauugcagugcuauuuuuucuuaaucagaaa

SEQ ID NO: 311263 - RNA, 32 nt, Homo Sapiens
ccauggagacguggugggacuccagcucgugu

SEQ ID NO: 311264 - RNA, 32 nt, Homo Sapiens
uaauaaaaccaccuuuauuuuaaaggaaaaaa

SEQ ID NO: 311265 - RNA, 32 nt, Homo Sapiens
ucccaaaauggacuucucugcaagccugacuc

SEQ ID NO: 311266 - RNA, 32 nt, Homo Sapiens
cgggaggacagcaccuuggccuuggcaguggg

SEQ ID NO: 311267 - RNA, 32 nt, Homo Sapiens
acgaaguccggaacuggucuucugugauuuuc

SEQ ID NO: 311268 - RNA, 32 nt, Homo Sapiens
ugaccagacaccuguuugauaaauaguuuacu

SEQ ID NO: 311269 - RNA, 32 nt, Homo Sapiens
auuuuugcagcacuagcaauggacuuuguugu

SEQ ID NO: 311270 - RNA, 32 nt, Homo Sapiens
uuuuaaaaaacaaaacaaaacaacaaaaaaaa

SEQ ID NO: 311271 - RNA, 32 nt, Homo Sapiens
gugagcccagcagucgcgggcaacaggggauu

SEQ ID NO: 311272 - RNA, 32 nt, Homo Sapiens
cacuggccuggccuucagcaguucuuuuugug

SEQ ID NO: 311273 - RNA, 32 nt, Homo Sapiens
auauucucuuauauguuauaguaauguaacgu

SEQ ID NO: 311274 - RNA, 32 nt, Homo Sapiens
agccggacuggccgggccuggacccaugccca

SEQ ID NO: 311275 - RNA, 32 nt, Homo Sapiens
auuuaguaaaagacaagugaaaaaaaugccaa

SEQ ID NO: 311276 - RNA, 32 nt, Homo Sapiens
cccugguguuugcaccgcacuuuguaaucagu

SEQ ID NO: 311277 - RNA, 32 nt, Homo Sapiens
aagaucuaccgcagagagcggcugucgaggga

SEQ ID NO: 311278 - RNA, 32 nt, Homo Sapiens
cggucuaaaggugcaaaauauguaacaaaaau

SEQ ID NO: 311279 - RNA, 32 nt, Homo Sapiens
gccacugcacuucagccugggcgacagaguga

SEQ ID NO: 311280 - RNA, 32 nt, Homo Sapiens
augagggaggagccaguuugccagggcuggga

SEQ ID NO: 311281 - RNA, 32 nt, Homo Sapiens
ccccuggcccugcugagcgugaaacagaagca

SEQ ID NO: 311282 - RNA, 32 nt, Homo Sapiens
ggggaccgccgggagcgcgcggaugucggugu

SEQ ID NO: 311283 - RNA, 29 nt, Homo Sapiens
gcagauggcggucuccacggcccucugcc

SEQ ID NO: 311284 - RNA, 32 nt, Homo Sapiens
uguugagaggauuaaaugaaacaaugcuugua

SEQ ID NO: 311285 - RNA, 32 nt, Homo Sapiens
ucagaauuugaaacaaucgcguggaguuugaa

SEQ ID NO: 311286 - RNA, 32 nt, Homo Sapiens
uccuccaacugggaaaagggauaaggaaccaa

SEQ ID NO: 311287 - RNA, 32 nt, Homo Sapiens
aguaaauucucaaagcacuuuuucaaaacacu

SEQ ID NO: 311288 - RNA, 32 nt, Homo Sapiens
ugucuggagcuuugaggagauguuuuccuuca

SEQ ID NO: 311289 - RNA, 32 nt, Homo Sapiens
ccaggcuaaggguggccagagaaggucaccau

SEQ ID NO: 311290 - RNA, 32 nt, Homo Sapiens
uaaccaagaugggaaauuucccugccagaccu

SEQ ID NO: 311291 - RNA, 32 nt, Homo Sapiens
cugguauauuucugugauuucuuucuuuuauu

SEQ ID NO: 311292 - RNA, 32 nt, Homo Sapiens
agagaugcagaaugcauagaugaacauugcau

SEQ ID NO: 311293 - RNA, 32 nt, Homo Sapiens
gauaauuucauguuccaggggcgcuuggcauc

SEQ ID NO: 311294 - RNA, 32 nt, Homo Sapiens
agaccucaggugcuagggaaggcgggaaccuu

SEQ ID NO: 311295 - RNA, 32 nt, Homo Sapiens
gaaauucaaacacagugguguuugugaaauag

SEQ ID NO: 311296 - RNA, 32 nt, Homo Sapiens
cucccuuucuccccugcccccaggacugggcc

SEQ ID NO: 311297 - RNA, 32 nt, Homo Sapiens
caacccgggaggggcguccaaggggcgucucg

SEQ ID NO: 311298 - RNA, 32 nt, Homo Sapiens
uuaugacauuuuacaauguaaguuuugaaacu

SEQ ID NO: 311299 - RNA, 32 nt, Homo Sapiens
ccagccgagcgguuugcagcgcggcggcggcg

SEQ ID NO: 311300 - RNA, 32 nt, Homo Sapiens
agccuccugaugccuuucugcacugcaacugu

SEQ ID NO: 311301 - RNA, 32 nt, Homo Sapiens
cuuuuugugacauucaagaaaaguauuuauuc

SEQ ID NO: 311302 - RNA, 32 nt, Homo Sapiens
aagaaugguauuuggaauuaaauucaagaugu

SEQ ID NO: 311303 - RNA, 32 nt, Homo Sapiens
uccaaccacugggauucaaagagaauccaagg

SEQ ID NO: 311304 - RNA, 32 nt, Homo Sapiens
ugugcagcuggacucuguuuccggaaaguaaa

SEQ ID NO: 311305 - RNA, 32 nt, Homo Sapiens
uuguuccuggaggcaggagcgccccgccaucc

SEQ ID NO: 311306 - RNA, 32 nt, Homo Sapiens
agaggacacuggugagcagcugcugccuggcc

SEQ ID NO: 311307 - RNA, 29 nt, Homo Sapiens
uuuaggaccaguuuauauauuucugcaug

SEQ ID NO: 311308 - RNA, 32 nt, Homo Sapiens
ggcaggcagcagcagugcuaguagcaaaggga

SEQ ID NO: 311309 - RNA, 32 nt, Homo Sapiens
caggaagauaaaauaacugcacaacuuacuca

SEQ ID NO: 311310 - RNA, 32 nt, Homo Sapiens
cuuuauuguauccacaagaauaucuacauggg

SEQ ID NO: 311311 - RNA, 32 nt, Homo Sapiens
uuucugcauggaaagcacuuggaacaaugccu

SEQ ID NO: 311312 - RNA, 32 nt, Homo Sapiens
ccuuagaggugguaggaggccuucuuugggau

SEQ ID NO: 311313 - RNA, 32 nt, Homo Sapiens
uuccaaaaguuuuuaauacuguauuaugugaa

SEQ ID NO: 311314 - RNA, 30 nt, Homo Sapiens
uccagaugaacagguuucucuugcuaauga

SEQ ID NO: 311315 - RNA, 32 nt, Homo Sapiens
ugucuuaaugcaguauaguuaaaauggcuucc

SEQ ID NO: 311316 - RNA, 32 nt, Homo Sapiens
ccacaggauugugagcugggcagugccuucau

SEQ ID NO: 311317 - RNA, 32 nt, Homo Sapiens
ccgaccccagaugucaaaagugccaagggcca

SEQ ID NO: 311318 - RNA, 32 nt, Homo Sapiens
ucucucuuucccuuuggcagcugcaauacaca

SEQ ID NO: 311319 - RNA, 29 nt, Homo Sapiens
ucauggugguacuccagaggcaggcagag

SEQ ID NO: 311320 - RNA, 32 nt, Homo Sapiens
uuauauaggcaauguaguacucaguaaaucag

SEQ ID NO: 311321 - RNA, 32 nt, Homo Sapiens
cuggauuccaugaacggauucucagauaaagg

SEQ ID NO: 311322 - RNA, 32 nt, Homo Sapiens
cagagcaccaccaggaccgggugagugagaag

SEQ ID NO: 311323 - RNA, 32 nt, Homo Sapiens
uaaagcaccuugaaaaagacuuggcagcuucc

SEQ ID NO: 311324 - RNA, 32 nt, Homo Sapiens
aaaggaaauguaauguggauaaaggcccgcca

SEQ ID NO: 311325 - RNA, 32 nt, Homo Sapiens
ugcugccuguggcccgggcggcugggagaagc

SEQ ID NO: 311326 - RNA, 32 nt, Homo Sapiens
cuaagcacauaaagaagccagacuaugugacg

SEQ ID NO: 311327 - RNA, 32 nt, Homo Sapiens
gcggggcacuuugaagaaucacguguguugag

SEQ ID NO: 311328 - RNA, 32 nt, Homo Sapiens
uacuuccugugcucccucagagagaaacggag

SEQ ID NO: 311329 - RNA, 32 nt, Homo Sapiens
aaugagguccucaaaagagagucuagaagcag

SEQ ID NO: 311330 - RNA, 32 nt, Homo Sapiens
agcggcauggaguacagccucccgccagccac

SEQ ID NO: 311331 - RNA, 32 nt, Homo Sapiens
cucgcagcccgcggccccgaccucugacccgc

SEQ ID NO: 311332 - RNA, 30 nt, Homo Sapiens
aggccaccagcccucccccaucuucuucuu

SEQ ID NO: 311333 - RNA, 32 nt, Homo Sapiens
ggagguggugaccgcgcuggggacgccaggac

SEQ ID NO: 311334 - RNA, 32 nt, Homo Sapiens
gaucacagcaaccuaaauaaaccagauaccuu

SEQ ID NO: 311335 - RNA, 32 nt, Homo Sapiens
gccagggaacauuuuuaacagcuucugccggc

SEQ ID NO: 311336 - RNA, 32 nt, Homo Sapiens
caagaaauaaaacaaauacauaaaagcauauu

SEQ ID NO: 311337 - RNA, 32 nt, Homo Sapiens
ugagccugagcaacauaaugagacccugucuc

SEQ ID NO: 311338 - RNA, 32 nt, Homo Sapiens
acaaggcagccugguccucucugaaccagugg

SEQ ID NO: 311339 - RNA, 30 nt, Homo Sapiens
cguuuaggagguggcugcguugugggaaaa

SEQ ID NO: 311340 - RNA, 32 nt, Homo Sapiens
cacugccugggguguaggaagaggaacagaga

SEQ ID NO: 311341 - RNA, 32 nt, Homo Sapiens
gcuugccccucgcugccucagugaggcacuag

SEQ ID NO: 311342 - RNA, 32 nt, Homo Sapiens
ucuuucggccccauggaguccucacccauccc

SEQ ID NO: 311343 - RNA, 32 nt, Homo Sapiens
aacaucgagaaggagagggaacgaugacuaca

SEQ ID NO: 311344 - RNA, 32 nt, Homo Sapiens
gcuaugaagaucuggagcccgucucggaggau

SEQ ID NO: 311345 - RNA, 32 nt, Homo Sapiens
gaguuuacaacuccaaauucaagcauuucauc

SEQ ID NO: 311346 - RNA, 30 nt, Homo Sapiens
ugguaaggcaggcaggucuugagcccccac

SEQ ID NO: 311347 - RNA, 32 nt, Homo Sapiens
accagccuggccaaaauagugaaacucacguu

SEQ ID NO: 311348 - RNA, 32 nt, Homo Sapiens
uuugcuugacuucaguuauugguggaaucuuu

SEQ ID NO: 311349 - RNA, 32 nt, Homo Sapiens
gaauaaaugaugcucgcugacuacccguggcc

SEQ ID NO: 311350 - RNA, 32 nt, Homo Sapiens
ggaccagggcugaccacaccaguguccaugcc

SEQ ID NO: 311351 - RNA, 32 nt, Homo Sapiens
aacaauaaucuggguggggaaaauggcacugc

SEQ ID NO: 311352 - RNA, 31 nt, Homo Sapiens
ccuagugguuugacuuuaaaaauaaauaagg

SEQ ID NO: 311353 - RNA, 32 nt, Homo Sapiens
ucgcgucccagccccagccagggggccggccu

SEQ ID NO: 311354 - RNA, 32 nt, Homo Sapiens
auugcagaauuucaaguucuguuuauaguaaa

SEQ ID NO: 311355 - RNA, 32 nt, Homo Sapiens
ccgccuaagagcaacaaugccugugagcauaa

SEQ ID NO: 311356 - RNA, 32 nt, Homo Sapiens
gagccaggguggcacuguucacuggcgcuggg

SEQ ID NO: 311357 - RNA, 32 nt, Homo Sapiens
cugacugaaagcuagaggcauugaggagccug

SEQ ID NO: 311358 - RNA, 32 nt, Homo Sapiens
cccuuucccauaauucaugacaucaaaacacc

SEQ ID NO: 311359 - RNA, 32 nt, Homo Sapiens
gccuuaauauaaaguuuccuaaaguuucuuca

SEQ ID NO: 311360 - RNA, 32 nt, Homo Sapiens
ccugguugaguggggaggagggggcaucuucu

SEQ ID NO: 311361 - RNA, 32 nt, Homo Sapiens
gcaagaauuuaaagaaauauuuuuaaagccac

SEQ ID NO: 311362 - RNA, 32 nt, Homo Sapiens
ccagccaugauggcugccccccaggcagugcu

SEQ ID NO: 311363 - RNA, 32 nt, Homo Sapiens
cucucuucuccuaagagcugccugcugccuuc

SEQ ID NO: 311364 - RNA, 32 nt, Homo Sapiens
gguggaggaagaaggucguguaagagccaugc

SEQ ID NO: 311365 - RNA, 32 nt, Homo Sapiens
ggguggugcagaggaguccggcugggcggagg

SEQ ID NO: 311366 - RNA, 32 nt, Homo Sapiens
aacagugaauagucucuugggucugaauauac

SEQ ID NO: 311367 - RNA, 32 nt, Homo Sapiens
auuucauucaggagaauuuuugaaagguaguc

SEQ ID NO: 311368 - RNA, 32 nt, Homo Sapiens
gagaaaccaacccugcaaucaccuugaucuug

SEQ ID NO: 311369 - RNA, 32 nt, Homo Sapiens
uaauuucagaguacucugcuuuucuccuccuc

SEQ ID NO: 311370 - RNA, 32 nt, Homo Sapiens
ugaacuugcuuugaauauuccagauguguuug

SEQ ID NO: 311371 - RNA, 32 nt, Homo Sapiens
cucccuggccuggguagcuacccuggagguca

SEQ ID NO: 311372 - RNA, 32 nt, Homo Sapiens
uaaccugaaugaaagaaggaaaugacuauucu

SEQ ID NO: 311373 - RNA, 32 nt, Homo Sapiens
gauaugauauaauauuguauuuccuuacuguu

SEQ ID NO: 311374 - RNA, 32 nt, Homo Sapiens
acaaugcccgucugagccccacguggcaggag

SEQ ID NO: 311375 - RNA, 32 nt, Homo Sapiens
cacugggaaauaccaccaguuuacccugaaac

SEQ ID NO: 311376 - RNA, 32 nt, Homo Sapiens
uacccagauauguuuuucuaucauuugaaacc

SEQ ID NO: 311377 - RNA, 32 nt, Homo Sapiens
uggccaccagcugaccuuuagcaagaaagcaa

SEQ ID NO: 311378 - RNA, 32 nt, Homo Sapiens
uaaauguugauuaggaacaaauuuaaggcuua

SEQ ID NO: 311379 - RNA, 32 nt, Homo Sapiens
aaagauauuccgguaaucuuuuaauacagacu

SEQ ID NO: 311380 - RNA, 32 nt, Homo Sapiens
uuucuuauccucaaaaaaggcgauggaagggc

SEQ ID NO: 311381 - RNA, 32 nt, Homo Sapiens
ucuagaauuggaaaaauugucccgucugucac

SEQ ID NO: 311382 - RNA, 32 nt, Homo Sapiens
gcugugaggaagcucaugcacugcugaagaag

SEQ ID NO: 311383 - RNA, 32 nt, Homo Sapiens
aaacagaggaccagcuccauucucaggaaaga

SEQ ID NO: 311384 - RNA, 32 nt, Homo Sapiens
ccggaguaacuguguccuugaaacacguuucu

SEQ ID NO: 311385 - RNA, 32 nt, Homo Sapiens
gacaagcagacacacucacacucguccccagc

SEQ ID NO: 311386 - RNA, 32 nt, Homo Sapiens
ccagcuggguagucccaggcuccugucuuggg

SEQ ID NO: 311387 - RNA, 32 nt, Homo Sapiens
cgggccaugcguauuucuuuggagaaaggucu

SEQ ID NO: 311388 - RNA, 32 nt, Homo Sapiens
ugcaaaagacuaauuuaaaaaauaacuaccaa

SEQ ID NO: 311389 - RNA, 32 nt, Homo Sapiens
auuggucuggguggaugugagcagaagacuau

SEQ ID NO: 311390 - RNA, 32 nt, Homo Sapiens
ucacagugcggcugccacuuugaagagacccu

SEQ ID NO: 311391 - RNA, 32 nt, Homo Sapiens
gaaugcuugaagucagcgucuuccauuccaga

SEQ ID NO: 311392 - RNA, 32 nt, Homo Sapiens
uuaaaaggguguggccccuuccccucacucuc

SEQ ID NO: 311393 - RNA, 32 nt, Homo Sapiens
auaaauuacucuaaaacaaaaaagaauccuac

SEQ ID NO: 311394 - RNA, 32 nt, Homo Sapiens
guuuccaaacuggcaauuuaugcuuuaaauuu

SEQ ID NO: 311395 - RNA, 32 nt, Homo Sapiens
cguguaaauuuguuccuacccagccgugacuu

SEQ ID NO: 311396 - RNA, 32 nt, Homo Sapiens
cucugauuguccccggcaccagcaggccuugg

SEQ ID NO: 311397 - RNA, 32 nt, Homo Sapiens
cagcgcuccucgcgcugugugcggcgcguccu

SEQ ID NO: 311398 - RNA, 32 nt, Homo Sapiens
cucuggguuuaauguauuauauuuauuugggg

SEQ ID NO: 311399 - RNA, 32 nt, Homo Sapiens
uguccggggcggggguggggggugcugcgagg

SEQ ID NO: 311400 - RNA, 32 nt, Homo Sapiens
cuucauugauuucucuguaaguuuuuaaagaa

SEQ ID NO: 311401 - RNA, 32 nt, Homo Sapiens
augagcuuucacauuccuuguuuguccuuuua

SEQ ID NO: 311402 - RNA, 32 nt, Homo Sapiens
ccugggccagacgcgccaccuuccccggucgc

SEQ ID NO: 311403 - RNA, 32 nt, Homo Sapiens
ggaggaugagagaucacauggaaugaggccac

SEQ ID NO: 311404 - RNA, 32 nt, Homo Sapiens
uucuugcauauggucauagaaaaugcaucuuu

SEQ ID NO: 311405 - RNA, 32 nt, Homo Sapiens
uugcaaaauauguauuuuuaaaguucaugauu

SEQ ID NO: 311406 - RNA, 32 nt, Homo Sapiens
ucuaauuugugccucucuuguguugggggugg

SEQ ID NO: 311407 - RNA, 32 nt, Homo Sapiens
uuaaucgggcuuccuuguuucuuucuucccug

SEQ ID NO: 311408 - RNA, 32 nt, Homo Sapiens
agauggugcugucaugaaauaaaauuacaaca

SEQ ID NO: 311409 - RNA, 32 nt, Homo Sapiens
uuuaaaggaaacaaaaugggagaaauaaguuu

SEQ ID NO: 311410 - RNA, 32 nt, Homo Sapiens
cucugcaccugccuccucugggaugugcaugu

SEQ ID NO: 311411 - RNA, 30 nt, Homo Sapiens
ccaaaauggacaagucccucuugcuggaac

SEQ ID NO: 311412 - RNA, 32 nt, Homo Sapiens
ccguugcgcgccccggauguggcgcggcugcg

SEQ ID NO: 311413 - RNA, 32 nt, Homo Sapiens
cugcuauagggagaggcagcagcacaugcggg

SEQ ID NO: 311414 - RNA, 32 nt, Homo Sapiens
uuuguuaagcugccuuuuuuuuuuuaacuucc

SEQ ID NO: 311415 - RNA, 32 nt, Homo Sapiens
ugggauuaguuggggguauuauaauaccaaau

SEQ ID NO: 311416 - RNA, 32 nt, Homo Sapiens
ugggccucagccagcccuccggaugcuggugc

SEQ ID NO: 311417 - RNA, 32 nt, Homo Sapiens
gugcuacacuguauuguaauaaguauacucug

SEQ ID NO: 311418 - RNA, 32 nt, Homo Sapiens
guggaccgagaccuucccaagggacuuccagg

SEQ ID NO: 311419 - RNA, 32 nt, Homo Sapiens
ggaaaagcaaaaauuauccuugugaaauaucu

SEQ ID NO: 311420 - RNA, 32 nt, Homo Sapiens
ccugggcggccgcuuuuuccaguuccaggugu

SEQ ID NO: 311421 - RNA, 32 nt, Homo Sapiens
cccaccccaucccacuccccuucccuccccag

SEQ ID NO: 311422 - RNA, 32 nt, Homo Sapiens
ccagaggaacaaagucacaugcagagggcugc

SEQ ID NO: 311423 - RNA, 32 nt, Homo Sapiens
cagcguagcagagaagcagagaagcugucagc

SEQ ID NO: 311424 - RNA, 32 nt, Homo Sapiens
uggggggcacugggcuuguuggggccagaaau

SEQ ID NO: 311425 - RNA, 32 nt, Homo Sapiens
ucaacuucaaagaaaguaguugagauccuugc

SEQ ID NO: 311426 - RNA, 32 nt, Homo Sapiens
cgagauggauacuauuauuauucauuuugcua

SEQ ID NO: 311427 - RNA, 32 nt, Homo Sapiens
aaggagucaaaaaacuugauuucagguccuag

SEQ ID NO: 311428 - RNA, 32 nt, Homo Sapiens
aaaugcauuguugcauuaagcuuuuucaauaa

SEQ ID NO: 311429 - RNA, 32 nt, Homo Sapiens
ccagaccaucuguggaggugcacgggaggcgu

SEQ ID NO: 311430 - RNA, 32 nt, Homo Sapiens
aaauaacaaaaauaauaccagauuuuaagccg

SEQ ID NO: 311431 - RNA, 32 nt, Homo Sapiens
ugccgccggccgccaaccggucuugcugucuc

SEQ ID NO: 311432 - RNA, 32 nt, Homo Sapiens
uguguguguacaacacuggugacuccaggaac

SEQ ID NO: 311433 - RNA, 32 nt, Homo Sapiens
aguaaucaagaaaggcuggaaaaacuacugaa

SEQ ID NO: 311434 - RNA, 32 nt, Homo Sapiens
uuguuuuguuuuaaaugauagaagugugaucu

SEQ ID NO: 311435 - RNA, 32 nt, Homo Sapiens
aaagaccccccgccagcuucccacaccucaua

SEQ ID NO: 311436 - RNA, 32 nt, Homo Sapiens
ugggucaggggagaaggaaaagaggucaacau

SEQ ID NO: 311437 - RNA, 32 nt, Homo Sapiens
ucuggggagacgggguuucgccauguuugcca

SEQ ID NO: 311438 - RNA, 32 nt, Homo Sapiens
auuucaauaaaacugccuggcuggcuccgggc

SEQ ID NO: 311439 - RNA, 32 nt, Homo Sapiens
cacacacaugcaugcacacacacacacauaug

SEQ ID NO: 311440 - RNA, 32 nt, Homo Sapiens
cucgaccugucgaugccccgcggccccgcccg

SEQ ID NO: 311441 - RNA, 32 nt, Homo Sapiens
gcacucucugucaucaguccccuccuuucuaa

SEQ ID NO: 311442 - RNA, 32 nt, Homo Sapiens
cccuggggaaaggugcuuuauguaccgugugu

SEQ ID NO: 311443 - RNA, 32 nt, Homo Sapiens
cagagacaagauacacaaugauuauaaguauu

SEQ ID NO: 311444 - RNA, 28 nt, Homo Sapiens
gcagaaaggggugagccgagguguugcc

SEQ ID NO: 311445 - RNA, 32 nt, Homo Sapiens
cggccgugguggcuccgugcguccgagcgucc

SEQ ID NO: 311446 - RNA, 32 nt, Homo Sapiens
uagcccugugcauuuuaauugcuuacuccuuu

SEQ ID NO: 311447 - RNA, 32 nt, Homo Sapiens
uuuuauuuugguguccuauuaaaggaauaaaa

SEQ ID NO: 311448 - RNA, 32 nt, Homo Sapiens
aaccugcuggagccccuucacaugguggauga

SEQ ID NO: 311449 - RNA, 32 nt, Homo Sapiens
gccggccggggaagaggagacuugcgcgccgc

SEQ ID NO: 311450 - RNA, 32 nt, Homo Sapiens
uauauuauuuaguuauuauaauucugcaaucc

SEQ ID NO: 311451 - RNA, 32 nt, Homo Sapiens
ccuccgaggacuucuauccuccccaggccuuu

SEQ ID NO: 311452 - RNA, 32 nt, Homo Sapiens
ugguaaauuucuuuuuuuuaaucuuccccaau

SEQ ID NO: 311453 - RNA, 31 nt, Homo Sapiens
uugcugcuucacugccuugugcuccaauaaa

SEQ ID NO: 311454 - RNA, 32 nt, Homo Sapiens
acaaaucucuacaagugccugcuaucccucuc

SEQ ID NO: 311455 - RNA, 32 nt, Homo Sapiens
gugcugccccauccaccuacagcccucaugcc

SEQ ID NO: 311456 - RNA, 32 nt, Homo Sapiens
cuaagcuagacaaaucaaccucgugccuaaug

SEQ ID NO: 311457 - RNA, 32 nt, Homo Sapiens
gccaccagggaaggugagccagacacaggccg

SEQ ID NO: 311458 - RNA, 32 nt, Homo Sapiens
aggucuuacaggugauuuuuuacaaugaagca

SEQ ID NO: 311459 - RNA, 32 nt, Homo Sapiens
uaauaccggcggcccgggaggggggcgcagca

SEQ ID NO: 311460 - RNA, 32 nt, Homo Sapiens
gcgcaaagaagcuacagccuggacuuaccacc

SEQ ID NO: 311461 - RNA, 32 nt, Homo Sapiens
uuugacuaauacccaaacccuaaaccucuuca

SEQ ID NO: 311462 - RNA, 31 nt, Homo Sapiens
cuucuuuauggaccaaggauaugaaaucauu

SEQ ID NO: 311463 - RNA, 32 nt, Homo Sapiens
uuaacuacaaaauaaacguuagugaucagccu

SEQ ID NO: 311464 - RNA, 32 nt, Homo Sapiens
uugcuagaaaagacauaaucauggauuauguu

SEQ ID NO: 311465 - RNA, 31 nt, Homo Sapiens
gccgcgcugccggccccacugggcucggauc

SEQ ID NO: 311466 - RNA, 32 nt, Homo Sapiens
agagacacaggagaaggagagaagggcuauuc

SEQ ID NO: 311467 - RNA, 32 nt, Homo Sapiens
uaacuuuugucaaagaaauacucucagaagag

SEQ ID NO: 311468 - RNA, 32 nt, Homo Sapiens
ccacauggcgaccgcgaagugacucccuuacc

SEQ ID NO: 311469 - RNA, 32 nt, Homo Sapiens
agggcggcgggggugcggagagacaggcggag

SEQ ID NO: 311470 - RNA, 31 nt, Homo Sapiens
cgggcgcagcgcagcacagcccggccaugga

SEQ ID NO: 311471 - RNA, 32 nt, Homo Sapiens
cagcuaagaguaugggaaauaggacucguuaa

SEQ ID NO: 311472 - RNA, 32 nt, Homo Sapiens
cucauugcaaccucggcucacuguaaccuuca

SEQ ID NO: 311473 - RNA, 28 nt, Homo Sapiens
cagacggggcggcuggccaggcggaggg

SEQ ID NO: 311474 - RNA, 30 nt, Homo Sapiens
acgggguuucaccuuguuagccaggauggu

SEQ ID NO: 311475 - RNA, 32 nt, Homo Sapiens
gcccugcuggccucccuucuccccucaacccu

SEQ ID NO: 311476 - RNA, 32 nt, Homo Sapiens
caggccccagugcgagcagguggccuggucug

SEQ ID NO: 311477 - RNA, 32 nt, Homo Sapiens
cccagaagagaggccgggcugcugcagaaccc

SEQ ID NO: 311478 - RNA, 32 nt, Homo Sapiens
ucucaucugugcccacaucagcaccuuucuga

SEQ ID NO: 311479 - RNA, 32 nt, Homo Sapiens
auugauuacuaaaauaaguuaauauuaagcaa

SEQ ID NO: 311480 - RNA, 32 nt, Homo Sapiens
aaaaggaaggauuugcacaccuuccacuuagg

SEQ ID NO: 311481 - RNA, 32 nt, Homo Sapiens
acagcuucucccuggagccucuggccaagggc

SEQ ID NO: 311482 - RNA, 32 nt, Homo Sapiens
ccuucuaauuuuauuucauuucuccaauaaau

SEQ ID NO: 311483 - RNA, 32 nt, Homo Sapiens
ggagccgccccugagcccgaccgcgaguucga

SEQ ID NO: 311484 - RNA, 32 nt, Homo Sapiens
uggccagucuguagaauuuggcaaagaugagg

SEQ ID NO: 311485 - RNA, 32 nt, Homo Sapiens
gacagaagccccaggaagggguauuuccaaca

SEQ ID NO: 311486 - RNA, 32 nt, Homo Sapiens
gggcuuggcuggggugcucagcccaauuuucc

SEQ ID NO: 311487 - RNA, 32 nt, Homo Sapiens
cagagagacuccagauuuuaaaaaauaauuug

SEQ ID NO: 311488 - RNA, 32 nt, Homo Sapiens
ucuuaagacaacacaacacuguuaguaaggca

SEQ ID NO: 311489 - RNA, 32 nt, Homo Sapiens
ucacgaagguagugaggccuaguggaaagcca

SEQ ID NO: 311490 - RNA, 32 nt, Homo Sapiens
aagcuuguaaagauguuggccuugaagcagaa

SEQ ID NO: 311491 - RNA, 32 nt, Homo Sapiens
gauucugggaggcaauggggagugacugcuaa

SEQ ID NO: 311492 - RNA, 32 nt, Homo Sapiens
gccuggccugcacccagguuccccucaccccu

SEQ ID NO: 311493 - RNA, 32 nt, Homo Sapiens
ggaaguggaggggacagggugugagcuggggu

SEQ ID NO: 311494 - RNA, 32 nt, Homo Sapiens
cucucggaagccgguggaccgagauuuccccg

SEQ ID NO: 311495 - RNA, 32 nt, Homo Sapiens
uuucuuuuucuuuuuuuuuuuacauuuuguau

SEQ ID NO: 311496 - RNA, 32 nt, Homo Sapiens
cagcaccgcacuacccaggaaauacacuagca

SEQ ID NO: 311497 - RNA, 32 nt, Homo Sapiens
aaaagaaaauaaauacauaaaaaagggacaag

SEQ ID NO: 311498 - RNA, 32 nt, Homo Sapiens
ccaucuagcgggguuccaaggcggcggcggca

SEQ ID NO: 311499 - RNA, 32 nt, Homo Sapiens
ucaaagagaaaaggcaacauccugucacaggc

SEQ ID NO: 311500 - RNA, 32 nt, Homo Sapiens
aagcuggggggagaggcugcuucgaagggcag

SEQ ID NO: 311501 - RNA, 32 nt, Homo Sapiens
aaauacacugugaguucaaugauucugcuuau

SEQ ID NO: 311502 - RNA, 32 nt, Homo Sapiens
aggccgcauuucugaccugagccccgggucuc

SEQ ID NO: 311503 - RNA, 32 nt, Homo Sapiens
aaauacucagaauaauggaucugacagagggc

SEQ ID NO: 311504 - RNA, 32 nt, Homo Sapiens
auauaggggucaaugugaugcugcuggagacg

SEQ ID NO: 311505 - RNA, 32 nt, Homo Sapiens
caucuagugcauccccacagccacuguaggau

SEQ ID NO: 311506 - RNA, 32 nt, Homo Sapiens
agugaaacacaaauucacuuaauagcaucaag

SEQ ID NO: 311507 - RNA, 32 nt, Homo Sapiens
gccuccuagaguucggggccgcggcgggcggg

SEQ ID NO: 311508 - RNA, 32 nt, Homo Sapiens
cacucccgcuggugcuggaguacgcacuggug

SEQ ID NO: 311509 - RNA, 32 nt, Homo Sapiens
ucuguguuucuuucuuuuuugaaguugucauc

SEQ ID NO: 311510 - RNA, 32 nt, Homo Sapiens
ugacugccacagcugcagacugagaggguggg

SEQ ID NO: 311511 - RNA, 28 nt, Homo Sapiens
gacaugaaccaccagcagcagcagcagc

SEQ ID NO: 311512 - RNA, 32 nt, Homo Sapiens
uaucaucuaccuaucaucugucuauuuuucua

SEQ ID NO: 311513 - RNA, 32 nt, Homo Sapiens
uggagagauugaauugacuuuaccaaaaccgu

SEQ ID NO: 311514 - RNA, 32 nt, Homo Sapiens
cauggcucggaacgcaucuccuuggugguggg

SEQ ID NO: 311515 - RNA, 32 nt, Homo Sapiens
ggaggagauuuugaacugugauugugaggcuc

SEQ ID NO: 311516 - RNA, 32 nt, Homo Sapiens
gcgcccccuccccccuccggcgcggaccccgc

SEQ ID NO: 311517 - RNA, 32 nt, Homo Sapiens
cuuuuccuaggccagcgggcgguugucugugg

SEQ ID NO: 311518 - RNA, 32 nt, Homo Sapiens
ggcccucagaggcuccucccuaucuccuggcu

SEQ ID NO: 311519 - RNA, 32 nt, Homo Sapiens
auuuucuaccaaucacuauguauuggggauau

SEQ ID NO: 311520 - RNA, 32 nt, Homo Sapiens
uuucccaccccagcugccccagcacgcgggac

SEQ ID NO: 311521 - RNA, 32 nt, Homo Sapiens
gguagggaaggggccguguggccagcagcagc

SEQ ID NO: 311522 - RNA, 32 nt, Homo Sapiens
cacagagggggaggcccgcagcugcgugggag

SEQ ID NO: 311523 - RNA, 28 nt, Homo Sapiens
ggcauggaaaauuugaagcauauuauca

SEQ ID NO: 311524 - RNA, 32 nt, Homo Sapiens
acugacaguggcagaagcucagcugacaagga

SEQ ID NO: 311525 - RNA, 32 nt, Homo Sapiens
auggauuuaaacauuagagcuggaguggggcu

SEQ ID NO: 311526 - RNA, 32 nt, Homo Sapiens
gguuuuucuucagagucuauuuuuucagcgac

SEQ ID NO: 311527 - RNA, 32 nt, Homo Sapiens
aagucuguaaauauauuuuaaaguuauauaau

SEQ ID NO: 311528 - RNA, 32 nt, Homo Sapiens
aacuccgccauccgaccuuccauccaguugcu

SEQ ID NO: 311529 - RNA, 32 nt, Homo Sapiens
uuaucucagucaugcauaaauaugcagugaua

SEQ ID NO: 311530 - RNA, 27 nt, Homo Sapiens
aauggccauuaaugucuuguaauuuau

SEQ ID NO: 311531 - RNA, 32 nt, Homo Sapiens
gcucggauccauacucggggggccucagcccu

SEQ ID NO: 311532 - RNA, 32 nt, Homo Sapiens
gucacagguuuuuccccacaccucugaacuca

SEQ ID NO: 311533 - RNA, 32 nt, Homo Sapiens
gauuuccucaugacaaauuuugauuacuggcg

SEQ ID NO: 311534 - RNA, 32 nt, Homo Sapiens
caccggccugacgcuguggccccgggacccag

SEQ ID NO: 311535 - RNA, 32 nt, Homo Sapiens
ucugugcuccacgccgaggaugcaccgucucu

SEQ ID NO: 311536 - RNA, 32 nt, Homo Sapiens
ucuccuccuugcccaucucacccaggccuggc

SEQ ID NO: 311537 - RNA, 32 nt, Homo Sapiens
ugcuguuugagugaucccucugccccaggccu

SEQ ID NO: 311538 - RNA, 32 nt, Homo Sapiens
agauuuuaaaacuaugauccuuuauaugugug

SEQ ID NO: 311539 - RNA, 32 nt, Homo Sapiens
gccuagucuugagaacauaauuuuauauaauc

SEQ ID NO: 311540 - RNA, 32 nt, Homo Sapiens
cuggcugauucagcauuuuuuaucaggcagga

SEQ ID NO: 311541 - RNA, 32 nt, Homo Sapiens
uacuucuagagaacaggaaaagagacuaggau

SEQ ID NO: 311542 - RNA, 32 nt, Homo Sapiens
gacuaugaugguuuuuucuucauucuauaauc

SEQ ID NO: 311543 - RNA, 32 nt, Homo Sapiens
cgaucucccuccccaccuccgaagucuccucc

SEQ ID NO: 311544 - RNA, 32 nt, Homo Sapiens
cagccguguucuaaccucucagagcaauguca

SEQ ID NO: 311545 - RNA, 32 nt, Homo Sapiens
aaacagcaaucuuccuuaauagcauuucaagc

SEQ ID NO: 311546 - RNA, 32 nt, Homo Sapiens
gcuaauugucuuggggaaguuauuuaaccucu

SEQ ID NO: 311547 - RNA, 32 nt, Homo Sapiens
aaugucagugcuagugucaaguguuguccuag

SEQ ID NO: 311548 - RNA, 32 nt, Homo Sapiens
aacaucccaaccccagaggaaccagugggauu

SEQ ID NO: 311549 - RNA, 32 nt, Homo Sapiens
ccucagggucagggaaugagccaggcacgggg

SEQ ID NO: 311550 - RNA, 32 nt, Homo Sapiens
gaucugcccucccaggggucuccaauuuucuu

SEQ ID NO: 311551 - RNA, 32 nt, Homo Sapiens
ccugggcggcgauucccggcgcuggcugagcg

SEQ ID NO: 311552 - RNA, 32 nt, Homo Sapiens
cacgucucagccucagggagccccacagcccc

SEQ ID NO: 311553 - RNA, 32 nt, Homo Sapiens
uuugcucauaauguuuaacauaacaacauuua

SEQ ID NO: 311554 - RNA, 32 nt, Homo Sapiens
uacaggugcgugccaccacaccuggcuuauuu

SEQ ID NO: 311555 - RNA, 32 nt, Homo Sapiens
ccggggugcugccugcaccguugggaucaaug

SEQ ID NO: 311556 - RNA, 32 nt, Homo Sapiens
cugguucacagcacuccuuacauaguuaucua

SEQ ID NO: 311557 - RNA, 32 nt, Homo Sapiens
cggcugggugcucuccagcagcugcuccugcc

SEQ ID NO: 311558 - RNA, 32 nt, Homo Sapiens
uucccagccaaguggaauuguaaguccauuac

SEQ ID NO: 311559 - RNA, 32 nt, Homo Sapiens
uaaacuuauuuuuucuaacuagaaggcucuca

SEQ ID NO: 311560 - RNA, 32 nt, Homo Sapiens
aggucuauuuuaagggaagagagagaaaaaca

SEQ ID NO: 311561 - RNA, 32 nt, Homo Sapiens
gcgguccugccagccccgacgggaugcccgca

SEQ ID NO: 311562 - RNA, 32 nt, Homo Sapiens
uuaagaaguauuuaaaaaucuuacuaggauug

SEQ ID NO: 311563 - RNA, 32 nt, Homo Sapiens
auucuauuaauagaaacagcuguguaaagaag

SEQ ID NO: 311564 - RNA, 32 nt, Homo Sapiens
accagccuggccaacauagugaaacccccucu

SEQ ID NO: 311565 - RNA, 32 nt, Homo Sapiens
ggccuucugauccacaugaacacaguagaugu

SEQ ID NO: 311566 - RNA, 32 nt, Homo Sapiens
gcuuugaaaucuuagaagagagcccacuaauu

SEQ ID NO: 311567 - RNA, 32 nt, Homo Sapiens
agucucccugccucacuccucuaggcagggga

SEQ ID NO: 311568 - RNA, 32 nt, Homo Sapiens
aaaugccacaggaaacaaacuuuaugugugug

SEQ ID NO: 311569 - RNA, 32 nt, Homo Sapiens
aagggggagcaggcacaucacaugacaaaagc

SEQ ID NO: 311570 - RNA, 32 nt, Homo Sapiens
cucagggcgggggugcgcgcggggccgagggu

SEQ ID NO: 311571 - RNA, 32 nt, Homo Sapiens
accaaaugagccaguuuauaucaucagcuauu

SEQ ID NO: 311572 - RNA, 32 nt, Homo Sapiens
cguaucugaucgagcagggaggacugcauuac

SEQ ID NO: 311573 - RNA, 32 nt, Homo Sapiens
ugcugcuuuauauaaaccuuacauuuauauag

SEQ ID NO: 311574 - RNA, 32 nt, Homo Sapiens
ucuccuuguaaauuccuggugaguagccacag

SEQ ID NO: 311575 - RNA, 30 nt, Homo Sapiens
gcaggauggacgugauggauggcugccagu

SEQ ID NO: 311576 - RNA, 32 nt, Homo Sapiens
accaaauucuaauuuuuuuuuauuacaagucu

SEQ ID NO: 311577 - RNA, 32 nt, Homo Sapiens
gggauggugcagcgcucgccgccgggcccgag

SEQ ID NO: 311578 - RNA, 32 nt, Homo Sapiens
auagcugcauuaccauagcuaaacuccucuga

SEQ ID NO: 311579 - RNA, 32 nt, Homo Sapiens
agggggcggccgggcuaccguccgccauucuc

SEQ ID NO: 311580 - RNA, 32 nt, Homo Sapiens
ucagacccauccuucagucucaucucuagaag

SEQ ID NO: 311581 - RNA, 32 nt, Homo Sapiens
guuaaguccccggccgugacccaggcccgggg

SEQ ID NO: 311582 - RNA, 32 nt, Homo Sapiens
ugguaugcaaaacaggcaugcuaguaagcagu

SEQ ID NO: 311583 - RNA, 32 nt, Homo Sapiens
caguuuuuacuuuuauacuuaaguauuguuua

SEQ ID NO: 311584 - RNA, 32 nt, Homo Sapiens
cccggccaccccagccgcccuggcgccucucg

SEQ ID NO: 311585 - RNA, 32 nt, Homo Sapiens
ucuuggcaccuuuaucaaauauuauuugacua

SEQ ID NO: 311586 - RNA, 32 nt, Homo Sapiens
gccucccccaaucccggagccggcgcagauga

SEQ ID NO: 311587 - RNA, 32 nt, Homo Sapiens
ggagggggagagggcugccuuuggacuugucc

SEQ ID NO: 311588 - RNA, 32 nt, Homo Sapiens
cuggcuguuuucugccagcaacuguggugauu

SEQ ID NO: 311589 - RNA, 27 nt, Homo Sapiens
ucaggccccuccuucagccuguggcca

SEQ ID NO: 311590 - RNA, 31 nt, Homo Sapiens
ccucgccgccccuccccgccccgcgugccua

SEQ ID NO: 311591 - RNA, 32 nt, Homo Sapiens
ccagcguccucgcgcggcuguugccgcugcug

SEQ ID NO: 311592 - RNA, 32 nt, Homo Sapiens
ucugaagacuggcaggaaugugccuccuggcc

SEQ ID NO: 311593 - RNA, 32 nt, Homo Sapiens
ucaugaucccagggcccuccccagcugugccc

SEQ ID NO: 311594 - RNA, 32 nt, Homo Sapiens
ccacccacaccgccuauauuaaguggaagccg

SEQ ID NO: 311595 - RNA, 32 nt, Homo Sapiens
gcuggcgagggagagaugggugggccauggac

SEQ ID NO: 311596 - RNA, 32 nt, Homo Sapiens
ucaauuauauugcaucuuggguccauaaaccc

SEQ ID NO: 311597 - RNA, 32 nt, Homo Sapiens
aucuguuuccuagguaaaccagcaaauuuggc

SEQ ID NO: 311598 - RNA, 32 nt, Homo Sapiens
uaguagucagaaccucuuugagauguuuuuag

SEQ ID NO: 311599 - RNA, 32 nt, Homo Sapiens
gucagucauaugagaccugaucaauaaauauc

SEQ ID NO: 311600 - RNA, 32 nt, Homo Sapiens
gggcugcugcugucacucccucuccacuucag

SEQ ID NO: 311601 - RNA, 32 nt, Homo Sapiens
caguucaaaauauauaucagauuaauacacug

SEQ ID NO: 311602 - RNA, 32 nt, Homo Sapiens
gugaaugcaccauuuugaugaucaugaaacgc

SEQ ID NO: 311603 - RNA, 32 nt, Homo Sapiens
cuuagaaauguguaaaagauauuauuuugauu

SEQ ID NO: 311604 - RNA, 32 nt, Homo Sapiens
aggguuuuaagcugugcagugcacuaagcucu

SEQ ID NO: 311605 - RNA, 32 nt, Homo Sapiens
auauuguuguuuuuucuuaaugugucaaaauu

SEQ ID NO: 311606 - RNA, 32 nt, Homo Sapiens
aaauggacaguggagaugaagccuagaauaug

SEQ ID NO: 311607 - RNA, 32 nt, Homo Sapiens
caguauuucauauuuauaaauaugcguuuauu

SEQ ID NO: 311608 - RNA, 32 nt, Homo Sapiens
cucagagcauauagagggaauuaaauaaacac

SEQ ID NO: 311609 - RNA, 32 nt, Homo Sapiens
ggaaauuacagcacagugugguggguguuacg

SEQ ID NO: 311610 - RNA, 32 nt, Homo Sapiens
cugccaacauuucccuucuuccaguugcacua

SEQ ID NO: 311611 - RNA, 32 nt, Homo Sapiens
caauuuauugaaaaauguuaaguuuuaccagc

SEQ ID NO: 311612 - RNA, 32 nt, Homo Sapiens
guccggugcccgaggggcgggcggcggugucu

SEQ ID NO: 311613 - RNA, 32 nt, Homo Sapiens
uugguuaauaauaaaucucaaagucaauugua

SEQ ID NO: 311614 - RNA, 32 nt, Homo Sapiens
cuuuauuuaacccuggacuccguuuacacaga

SEQ ID NO: 311615 - RNA, 32 nt, Homo Sapiens
gccuggcggucagggccccgggugcugugucc

SEQ ID NO: 311616 - RNA, 32 nt, Homo Sapiens
gauucuuuagaaugcccagucgucugcggguc

SEQ ID NO: 311617 - RNA, 32 nt, Homo Sapiens
ggcuguucaguccauuuucucucauuuaugac

SEQ ID NO: 311618 - RNA, 26 nt, Homo Sapiens
cauggcccucccagcccugggccugg

SEQ ID NO: 311619 - RNA, 32 nt, Homo Sapiens
cgaacacagacauggcuauuucugggaacaga

SEQ ID NO: 311620 - RNA, 32 nt, Homo Sapiens
gacgcaggcuuccggcgagacauggcagggca

SEQ ID NO: 311621 - RNA, 32 nt, Homo Sapiens
acccuggucugugccuuguggguggaggcggg

SEQ ID NO: 311622 - RNA, 32 nt, Homo Sapiens
guuagguucccaucucuccuucugccucacuc

SEQ ID NO: 311623 - RNA, 32 nt, Homo Sapiens
cgggagcgcuccccggaaugagccgccccacc

SEQ ID NO: 311624 - RNA, 32 nt, Homo Sapiens
cacagcgacugcaucaccauggagccgagggc

SEQ ID NO: 311625 - RNA, 32 nt, Homo Sapiens
ccuugacagcauuuccucuuauccaccugaau

SEQ ID NO: 311626 - RNA, 32 nt, Homo Sapiens
aauaaaacuguuaugaaauggauuuucaaggu

SEQ ID NO: 311627 - RNA, 32 nt, Homo Sapiens
acccuccauucauccuucucgccuaacacugg

SEQ ID NO: 311628 - RNA, 32 nt, Homo Sapiens
gaaagccagggugaugcucagacagugugcca

SEQ ID NO: 311629 - RNA, 32 nt, Homo Sapiens
guagacgcaggcggcagaggugcuggaccaca

SEQ ID NO: 311630 - RNA, 32 nt, Homo Sapiens
caguggggccccuggggugcccucggcagcuu

SEQ ID NO: 311631 - RNA, 32 nt, Homo Sapiens
ccaccgcucugcugugaguauaugaguacuuc

SEQ ID NO: 311632 - RNA, 32 nt, Homo Sapiens
uagguagaaaucauaccaugcuacuuuguaca

SEQ ID NO: 311633 - RNA, 32 nt, Homo Sapiens
gccaccucuuguuauuccugcccugcuuuccu

SEQ ID NO: 311634 - RNA, 31 nt, Homo Sapiens
uauuugauguuuccaaguucaguaaagacuu

SEQ ID NO: 311635 - RNA, 30 nt, Homo Sapiens
gcagcuggggcugggcagccggcgcaaggc

SEQ ID NO: 311636 - RNA, 32 nt, Homo Sapiens
guugcuguauauauauuccgggcaauauauga

SEQ ID NO: 311637 - RNA, 32 nt, Homo Sapiens
acuugaggucaggaguuugagagcagccuggc

SEQ ID NO: 311638 - RNA, 32 nt, Homo Sapiens
gagagcacacucuggaggaagaggagagaacg

SEQ ID NO: 311639 - RNA, 32 nt, Homo Sapiens
cccgcucccucuccaggcaaccccacccacca

SEQ ID NO: 311640 - RNA, 32 nt, Homo Sapiens
uaauuagcagcguuaaauuuuguuuguauuaa

SEQ ID NO: 311641 - RNA, 32 nt, Homo Sapiens
gaguugaaagaguuaagaaugcucgauaaaau

SEQ ID NO: 311642 - RNA, 32 nt, Homo Sapiens
aaccccaaauuugaguguuaguuagggagccu

SEQ ID NO: 311643 - RNA, 32 nt, Homo Sapiens
aaaaauauauauauuuuuggaaauguagcauu

SEQ ID NO: 311644 - RNA, 30 nt, Homo Sapiens
ugggugggggugccagagggucccgagugg

SEQ ID NO: 311645 - RNA, 32 nt, Homo Sapiens
cggccugcacccagccccugcccacaaaaccc

SEQ ID NO: 311646 - RNA, 32 nt, Homo Sapiens
agaggacucgggggagggcaggcggccggccc

SEQ ID NO: 311647 - RNA, 32 nt, Homo Sapiens
cccccagaucaugcuuuaauucuuucuuuucu

SEQ ID NO: 311648 - RNA, 32 nt, Homo Sapiens
cacuugugguauaguauuaguggaaagugauu

SEQ ID NO: 311649 - RNA, 32 nt, Homo Sapiens
aguaguucaucuucuuuuugagcaaagacuag

SEQ ID NO: 311650 - RNA, 32 nt, Homo Sapiens
ccaguggggucgggggcccacccccagcuggg

SEQ ID NO: 311651 - RNA, 32 nt, Homo Sapiens
uaauaacugggaaaauacaaaucaaaaucaua

SEQ ID NO: 311652 - RNA, 32 nt, Homo Sapiens
ccucacacaccuggucuccacggcagugagga

SEQ ID NO: 311653 - RNA, 32 nt, Homo Sapiens
ccgugugagcagcagcagcggcuggucuguca

SEQ ID NO: 311654 - RNA, 32 nt, Homo Sapiens
cggcaaacuacacaucccaaagggcagcgccg

SEQ ID NO: 311655 - RNA, 32 nt, Homo Sapiens
cuaccugcacucuguguuuauauccugugccc

SEQ ID NO: 311656 - RNA, 32 nt, Homo Sapiens
gcccaaagaacaaauacuuaacgugggagugg

SEQ ID NO: 311657 - RNA, 32 nt, Homo Sapiens
cucagagaugcccggagcugccucuuagacuc

SEQ ID NO: 311658 - RNA, 32 nt, Homo Sapiens
aucccauagccccaugaguccggagagcauca

SEQ ID NO: 311659 - RNA, 32 nt, Homo Sapiens
caagguauuuuguuuuuuauuaauucgcgcuu

SEQ ID NO: 311660 - RNA, 32 nt, Homo Sapiens
ucuccacgcaguggcuggccccguggccgggg

SEQ ID NO: 311661 - RNA, 32 nt, Homo Sapiens
gggcggcgggugggaccgcgaguuacagccgg

SEQ ID NO: 311662 - RNA, 32 nt, Homo Sapiens
auuaaaaugaugaaacaaaaguuugacaguga

SEQ ID NO: 311663 - RNA, 32 nt, Homo Sapiens
ucugugacaauguuuguaaaucuagccaauag

SEQ ID NO: 311664 - RNA, 32 nt, Homo Sapiens
ugccaauguacaagaaggcagcauuguaggau

SEQ ID NO: 311665 - RNA, 32 nt, Homo Sapiens
ugugcuuagcgauggccuggaaauccggcggc

SEQ ID NO: 311666 - RNA, 32 nt, Homo Sapiens
gugacuuguggauuuauguuucaguguacugg

SEQ ID NO: 311667 - RNA, 32 nt, Homo Sapiens
cugcuuccuuggagccaguguggaugguuaca

SEQ ID NO: 311668 - RNA, 31 nt, Homo Sapiens
aaaccccagugugcccugccccaugccuuuc

SEQ ID NO: 311669 - RNA, 32 nt, Homo Sapiens
uguaugucuucagaugccuuucugccucuguc

SEQ ID NO: 311670 - RNA, 32 nt, Homo Sapiens
gcagccacuaaccgcuuucuuaucugacacuu

SEQ ID NO: 311671 - RNA, 32 nt, Homo Sapiens
ccgcgccgccgacgacccagcagccgccaugc

SEQ ID NO: 311672 - RNA, 32 nt, Homo Sapiens
acaaggaagggagagguacccugggucaggcg

SEQ ID NO: 311673 - RNA, 32 nt, Homo Sapiens
cccucuccaggucgcccucccggggcccgauu

SEQ ID NO: 311674 - RNA, 32 nt, Homo Sapiens
gcuguucaggugggaccauggugcucuuuaag

SEQ ID NO: 311675 - RNA, 32 nt, Homo Sapiens
aaaaugauuuguagagcuaacaugugaaauuc

SEQ ID NO: 311676 - RNA, 32 nt, Homo Sapiens
cuguuguguggacuuugagcacacuuuacaca

SEQ ID NO: 311677 - RNA, 32 nt, Homo Sapiens
aaggucagcccacacucugguccaugaggcag

SEQ ID NO: 311678 - RNA, 32 nt, Homo Sapiens
uuuuacuggagaaaaaggaugccugaacacgc

SEQ ID NO: 311679 - RNA, 32 nt, Homo Sapiens
aauguggacaugagaauuuacaauuaagaaaa

SEQ ID NO: 311680 - RNA, 32 nt, Homo Sapiens
agaggcagcuggaagaucaggguugugguuga

SEQ ID NO: 311681 - RNA, 32 nt, Homo Sapiens
cgucguccgcagccggccgggagccgccccag

SEQ ID NO: 311682 - RNA, 32 nt, Homo Sapiens
cccagccccagccccaggggcgucucagggag

SEQ ID NO: 311683 - RNA, 32 nt, Homo Sapiens
auguuuaccccauugaccaaacuuggcuccag

SEQ ID NO: 311684 - RNA, 32 nt, Homo Sapiens
gcucuugccgauuaaugagaagagagcagcuc

SEQ ID NO: 311685 - RNA, 32 nt, Homo Sapiens
ugauugguacaguagguuuauaaacagaaguu

SEQ ID NO: 311686 - RNA, 32 nt, Homo Sapiens
uuaacuuuucuuuuggacuuuuggguaguugu

SEQ ID NO: 311687 - RNA, 32 nt, Homo Sapiens
uggaccccagguuuccuuuacaugagauccca

SEQ ID NO: 311688 - RNA, 32 nt, Homo Sapiens
guuacacaagaacacaucauuagguuguaucc

SEQ ID NO: 311689 - RNA, 32 nt, Homo Sapiens
aauacaaaaaucagccaggcguggugggcacc

SEQ ID NO: 311690 - RNA, 32 nt, Homo Sapiens
gaugcagaauuaggagcaagcauuccgagggg

SEQ ID NO: 311691 - RNA, 32 nt, Homo Sapiens
agcacuugguaguucuuccucugcucugcuuc

SEQ ID NO: 311692 - RNA, 32 nt, Homo Sapiens
uuggccaaguuuguuucuuuucauuauaguuu

SEQ ID NO: 311693 - RNA, 32 nt, Homo Sapiens
gccuucagacauuugguguuaguauuucacac

SEQ ID NO: 311694 - RNA, 32 nt, Homo Sapiens
ugugacuuucccacccacauggcuguugguga

SEQ ID NO: 311695 - RNA, 32 nt, Homo Sapiens
uuugaaaguuuaaagaaacuugaccaaaagac

SEQ ID NO: 311696 - RNA, 32 nt, Homo Sapiens
ugucacacugagauugcugaaugucguggcug

SEQ ID NO: 311697 - RNA, 32 nt, Homo Sapiens
cuuugccuccugcagaacuuugaaaagcuggg

SEQ ID NO: 311698 - RNA, 32 nt, Homo Sapiens
acauuugcagggaagggagaugucugauucua

SEQ ID NO: 311699 - RNA, 32 nt, Homo Sapiens
aucugccauuuucugucccugagugagucucu

SEQ ID NO: 311700 - RNA, 32 nt, Homo Sapiens
aggaucugaaacaaaaucuuucuaaaacauug

SEQ ID NO: 311701 - RNA, 32 nt, Homo Sapiens
cuuuaauaggucccaauagauaccaaauauuu

SEQ ID NO: 311702 - RNA, 32 nt, Homo Sapiens
acaccaaagcaugagcaacaaaaggaagaaua

SEQ ID NO: 311703 - RNA, 32 nt, Homo Sapiens
cucccagccccggcccauuccuccccugcagu

SEQ ID NO: 311704 - RNA, 32 nt, Homo Sapiens
uuccggcugcaccaccccggcccgcugcugug

SEQ ID NO: 311705 - RNA, 32 nt, Homo Sapiens
cccagcuggcaguugagcugccugagccaaug

SEQ ID NO: 311706 - RNA, 32 nt, Homo Sapiens
ggauuuagggucacaugcugcaggcagggcug

SEQ ID NO: 311707 - RNA, 32 nt, Homo Sapiens
gggacuuuguucaggaagaaauccgugucucc

SEQ ID NO: 311708 - RNA, 32 nt, Homo Sapiens
gugcuucaaugagagcaguccuguuucauuca

SEQ ID NO: 311709 - RNA, 32 nt, Homo Sapiens
agguuaaaaaauacucagauuacuauuucuau

SEQ ID NO: 311710 - RNA, 32 nt, Homo Sapiens
ccuuuuuugccauuuuaauuuuccauuuaauu

SEQ ID NO: 311711 - RNA, 32 nt, Homo Sapiens
ggaauuugaguuuaggaucugaaucuuguaca

SEQ ID NO: 311712 - RNA, 32 nt, Homo Sapiens
aaaaaucuggcagggagcugccccacccacag

SEQ ID NO: 311713 - RNA, 32 nt, Homo Sapiens
ccauaaaauggcagcuauguuaugacauguca

SEQ ID NO: 311714 - RNA, 32 nt, Homo Sapiens
auauauuugcacaguagaugcuauggaucauu

SEQ ID NO: 311715 - RNA, 32 nt, Homo Sapiens
uggccccgcgguucugugcacucggggagagg

SEQ ID NO: 311716 - RNA, 30 nt, Homo Sapiens
ggguuugguugcagcggcggcggaggccag

SEQ ID NO: 311717 - RNA, 32 nt, Homo Sapiens
cugagaggagucagaauuagcauuuuucauga

SEQ ID NO: 311718 - RNA, 32 nt, Homo Sapiens
ugugagcucagcccucucggccugcgugucgg

SEQ ID NO: 311719 - RNA, 32 nt, Homo Sapiens
cacguuuccaaagugcagcagugucucuuuca

SEQ ID NO: 311720 - RNA, 32 nt, Homo Sapiens
gagacugccccgagcacacaggcccagcaacc

SEQ ID NO: 311721 - RNA, 32 nt, Homo Sapiens
uucucugucaucccagaggaacauaggcauca

SEQ ID NO: 311722 - RNA, 32 nt, Homo Sapiens
acucuaggaaagauugaauaaaaucuguuuac

SEQ ID NO: 311723 - RNA, 32 nt, Homo Sapiens
gagcugcccuuucuccuuccuggcccugugua

SEQ ID NO: 311724 - RNA, 32 nt, Homo Sapiens
ucugaauuaaacaaaaagcugcccgacuugca

SEQ ID NO: 311725 - RNA, 32 nt, Homo Sapiens
uugagagacagaggcaccccggacagagacgu

SEQ ID NO: 311726 - RNA, 32 nt, Homo Sapiens
auuuuaauaaaauaaacuugacaaaggaaaaa

SEQ ID NO: 311727 - RNA, 32 nt, Homo Sapiens
cccagggccuggauuuauccugcacaaaauga

SEQ ID NO: 311728 - RNA, 32 nt, Homo Sapiens
agucagagaaacaugaggaauaaggucacaug

SEQ ID NO: 311729 - RNA, 32 nt, Homo Sapiens
cuauaaauauaaaauucacacuggauuuugaa

SEQ ID NO: 311730 - RNA, 32 nt, Homo Sapiens
augcagauuaguagaacuuucaaguaaauaaa

SEQ ID NO: 311731 - RNA, 32 nt, Homo Sapiens
agaagaaaauucuccugauaaaacaacagcuc

SEQ ID NO: 311732 - RNA, 32 nt, Homo Sapiens
acuauuuuugguuuuuugugagaucuaaucaa

SEQ ID NO: 311733 - RNA, 32 nt, Homo Sapiens
aaaacaaguucaaagacuuuuacuuacagauc

SEQ ID NO: 311734 - RNA, 32 nt, Homo Sapiens
ccagaagaaucccuucuagaaagcauuuuagg

SEQ ID NO: 311735 - RNA, 32 nt, Homo Sapiens
ccaagccacacugggugccgcugcuggagaug

SEQ ID NO: 311736 - RNA, 32 nt, Homo Sapiens
cauaaagcaaaauaauuguauuauuuaagcac

SEQ ID NO: 311737 - RNA, 32 nt, Homo Sapiens
uuuacauuucacaaagauaucugccacuccgu

SEQ ID NO: 311738 - RNA, 32 nt, Homo Sapiens
aaagcacuuauguuuaaauuuguuacagugac

SEQ ID NO: 311739 - RNA, 32 nt, Homo Sapiens
aucgcagugagucccgguggugcuggaagaca

SEQ ID NO: 311740 - RNA, 30 nt, Homo Sapiens
ggcagcggcaggcgcggcccggaccuacgg

SEQ ID NO: 311741 - RNA, 32 nt, Homo Sapiens
ccgcaagcucuuugaucucuuggaugugcugg

SEQ ID NO: 311742 - RNA, 32 nt, Homo Sapiens
ccaacuuacucaggggacccuggaggcucauc

SEQ ID NO: 311743 - RNA, 32 nt, Homo Sapiens
cccgcccaccucugcugcccacggccacccac

SEQ ID NO: 311744 - RNA, 32 nt, Homo Sapiens
ucucuuggaugagguguggcccugcacccucg

SEQ ID NO: 311745 - RNA, 32 nt, Homo Sapiens
acauucaugagcauaaccuuuguuacauuguu

SEQ ID NO: 311746 - RNA, 32 nt, Homo Sapiens
gcucuuaaccuucaagcuuucagcccaucaaa

SEQ ID NO: 311747 - RNA, 32 nt, Homo Sapiens
ggggacuggggcaaccgggcaguuuucaccau

SEQ ID NO: 311748 - RNA, 32 nt, Homo Sapiens
gggcaccccccgccagccugccucccucccgc

SEQ ID NO: 311749 - RNA, 32 nt, Homo Sapiens
caggucucgggggcuccgggaggugcugccug

SEQ ID NO: 311750 - RNA, 32 nt, Homo Sapiens
augcagucuaauguguagauaaauauuucaac

SEQ ID NO: 311751 - RNA, 32 nt, Homo Sapiens
caucuaaacaaaugcauaugauauguaaacca

SEQ ID NO: 311752 - RNA, 31 nt, Homo Sapiens
uauuuccguugcagccaaauggauuuuauuu

SEQ ID NO: 311753 - RNA, 32 nt, Homo Sapiens
gggagagccgacggccgcggcggcgccugagg

SEQ ID NO: 311754 - RNA, 32 nt, Homo Sapiens
uguguaauuuauguaaaaauguguguacagac

SEQ ID NO: 311755 - RNA, 32 nt, Homo Sapiens
uuaggucagucaucuucaguauuacuuccuca

SEQ ID NO: 311756 - RNA, 32 nt, Homo Sapiens
cgcggcaggaggaggggaaagagcugcuggcg

SEQ ID NO: 311757 - RNA, 32 nt, Homo Sapiens
guuuagaagauuucaagguacugcugacagua

SEQ ID NO: 311758 - RNA, 32 nt, Homo Sapiens
uuuuguggcggaucuagcuucuccucgccuuc

SEQ ID NO: 311759 - RNA, 32 nt, Homo Sapiens
uuucauaucuuacauauuuauuugagcugaac

SEQ ID NO: 311760 - RNA, 32 nt, Homo Sapiens
gccagcggcgcggcgggccgcugcaaggacgc

SEQ ID NO: 311761 - RNA, 32 nt, Homo Sapiens
ggaggguuggagaaaagcccggacccuguagc

SEQ ID NO: 311762 - RNA, 32 nt, Homo Sapiens
gauuuuaggugacaccugguuaugacagucag

SEQ ID NO: 311763 - RNA, 32 nt, Homo Sapiens
ucaacuguaugaaaauucuagguaaagcuaag

SEQ ID NO: 311764 - RNA, 28 nt, Homo Sapiens
cgugcagggauuguacauuugauugccu

SEQ ID NO: 311765 - RNA, 32 nt, Homo Sapiens
cauggacauccuggucccacuccugcagcugc

SEQ ID NO: 311766 - RNA, 32 nt, Homo Sapiens
cugccacccacccaccugggccagagcugguu

SEQ ID NO: 311767 - RNA, 32 nt, Homo Sapiens
guacugggauaggcaagcauguguguuuacug

SEQ ID NO: 311768 - RNA, 32 nt, Homo Sapiens
uccuuugguccuggugcugccgagggcuggcc

SEQ ID NO: 311769 - RNA, 32 nt, Homo Sapiens
ugucaccgagggugugugcgcgcucgcggcgg

SEQ ID NO: 311770 - RNA, 32 nt, Homo Sapiens
uauuucaguucaacuggaugaaauguuaaaua

SEQ ID NO: 311771 - RNA, 32 nt, Homo Sapiens
uauacuuugcaguugcagacgucugugccuag

SEQ ID NO: 311772 - RNA, 32 nt, Homo Sapiens
gaagaugagaccacuagagaaaaguuagugaa

SEQ ID NO: 311773 - RNA, 32 nt, Homo Sapiens
ggccugggcgcgucccugcagcguggcgggac

SEQ ID NO: 311774 - RNA, 32 nt, Homo Sapiens
gggagagggacgagacccccuguccugcccug

SEQ ID NO: 311775 - RNA, 32 nt, Homo Sapiens
gacccgugggcacuuuuccuuuuguggugggg

SEQ ID NO: 311776 - RNA, 32 nt, Homo Sapiens
ucauuaguuaauuauuuucuucauauuguaga

SEQ ID NO: 311777 - RNA, 32 nt, Homo Sapiens
agucggucgugggucugagagucacuggagcu

SEQ ID NO: 311778 - RNA, 32 nt, Homo Sapiens
aaaaggaaaaagcagcccgcaucaagcaagcc

SEQ ID NO: 311779 - RNA, 32 nt, Homo Sapiens
cugcucuuaucuuuguaauaaauguuaaagcc

SEQ ID NO: 311780 - RNA, 32 nt, Homo Sapiens
ggcaagggcgagcggcggggacuggggaaggg

SEQ ID NO: 311781 - RNA, 32 nt, Homo Sapiens
gacaguuuucuuuugccucuugacauaauagg

SEQ ID NO: 311782 - RNA, 32 nt, Homo Sapiens
gguggggcggggggcggugauagggucucgcu

SEQ ID NO: 311783 - RNA, 32 nt, Homo Sapiens
guuggaagggaccauggaugacccaaagcaga

SEQ ID NO: 311784 - RNA, 32 nt, Homo Sapiens
cuuacauguaaccuaugcacauccucagguau

SEQ ID NO: 311785 - RNA, 32 nt, Homo Sapiens
cugcgcgcacgauggggcgcguggaggggcgc

SEQ ID NO: 311786 - RNA, 32 nt, Homo Sapiens
uggauuacaguuuaauuaauuauucuuagugc

SEQ ID NO: 311787 - RNA, 32 nt, Homo Sapiens
uccuccacauaaauaauugcuagcuuauuaag

SEQ ID NO: 311788 - RNA, 32 nt, Homo Sapiens
accugcauauugugauuuuaauuugaccagaa

SEQ ID NO: 311789 - RNA, 32 nt, Homo Sapiens
cuaugggacaggcaaguuaacaacaauugacu

SEQ ID NO: 311790 - RNA, 32 nt, Homo Sapiens
ggcggcaggaggaggguucggagggugggggc

SEQ ID NO: 311791 - RNA, 32 nt, Homo Sapiens
ccuggcccuggccagacguuuucuuugauuuu

SEQ ID NO: 311792 - RNA, 32 nt, Homo Sapiens
ggcuggggcgcgcgccaugggccgccugcacu

SEQ ID NO: 311793 - RNA, 32 nt, Homo Sapiens
cacgccugccccacccccugccucuuuugguu

SEQ ID NO: 311794 - RNA, 32 nt, Homo Sapiens
auguuauaaccuggucccuugugaacuuuuga

SEQ ID NO: 311795 - RNA, 32 nt, Homo Sapiens
ccagagcucaggugcugggacagguggcaccc

SEQ ID NO: 311796 - RNA, 32 nt, Homo Sapiens
gaaauacuuuaauuuuuuuucuuaauagugua

SEQ ID NO: 311797 - RNA, 32 nt, Homo Sapiens
gccuaccaggggugacaaagcagugcaguugg

SEQ ID NO: 311798 - RNA, 32 nt, Homo Sapiens
cgcgccccaucccuuccgccgccuccuuuccc

SEQ ID NO: 311799 - RNA, 32 nt, Homo Sapiens
guuauuuaaggaagguauuaguggcaaauuau

SEQ ID NO: 311800 - RNA, 32 nt, Homo Sapiens
gacaccucccugcuuugcauuaacucaucagc

SEQ ID NO: 311801 - RNA, 32 nt, Homo Sapiens
cacugggcgcuuggguguucguugcgguacca

SEQ ID NO: 311802 - RNA, 32 nt, Homo Sapiens
ugacuuuucuucauauuuugcaaagagaaauu

SEQ ID NO: 311803 - RNA, 32 nt, Homo Sapiens
uaggaaauuuuuucuuguugugagguagggaa

SEQ ID NO: 311804 - RNA, 32 nt, Homo Sapiens
gccauugcacuccagccugggcgacagugcaa

SEQ ID NO: 311805 - RNA, 32 nt, Homo Sapiens
cacccaggaaaggggaaaugcggcccgcuccc

SEQ ID NO: 311806 - RNA, 32 nt, Homo Sapiens
ucagccccuggccuguccuucucucugugcug

SEQ ID NO: 311807 - RNA, 32 nt, Homo Sapiens
cggggccggcaccagcagcgcccgggcggaug

SEQ ID NO: 311808 - RNA, 32 nt, Homo Sapiens
cgaaggcgccgcgugaccacaugggcagcucu

SEQ ID NO: 311809 - RNA, 32 nt, Homo Sapiens
auaauugaacugaguuaacauucuugguaaac

SEQ ID NO: 311810 - RNA, 32 nt, Homo Sapiens
uaaaaguguaaaucuaaacauaaaagaacaau

SEQ ID NO: 311811 - RNA, 32 nt, Homo Sapiens
uuccugccuauccccacccccaucguucaaaa

SEQ ID NO: 311812 - RNA, 32 nt, Homo Sapiens
cgacuaggagcugagccuucuaccucgacggu

SEQ ID NO: 311813 - RNA, 32 nt, Homo Sapiens
ggcuggggggaggcagugggggugcaucuacg

SEQ ID NO: 311814 - RNA, 32 nt, Homo Sapiens
uuuagcucugggcaccuccagcuccugcucgc

SEQ ID NO: 311815 - RNA, 32 nt, Homo Sapiens
acaugcaauauuuggcuguuucugcguuaauu

SEQ ID NO: 311816 - RNA, 32 nt, Homo Sapiens
uuaaguccuuggcuugccauuuuucaaaaagu

SEQ ID NO: 311817 - RNA, 32 nt, Homo Sapiens
gaaaccaagggauaaaacuguucauggaugca

SEQ ID NO: 311818 - RNA, 32 nt, Homo Sapiens
ucacaggagucuuuguaaugcuuguacaguug

SEQ ID NO: 311819 - RNA, 32 nt, Homo Sapiens
uacggccaauuaagcgcgaaaagcagaaauau

SEQ ID NO: 311820 - RNA, 32 nt, Homo Sapiens
ccacuccugccagcccggcucggcccagcacc

SEQ ID NO: 311821 - RNA, 32 nt, Homo Sapiens
uacguaaacaaauugaagaauugucugaaaga

SEQ ID NO: 311822 - RNA, 32 nt, Homo Sapiens
cgcgggugucgcgggcccaaccccaggaugcu

SEQ ID NO: 311823 - RNA, 32 nt, Homo Sapiens
gcuuggcagaaucuuguacuucguguccacaa

SEQ ID NO: 311824 - RNA, 32 nt, Homo Sapiens
aaugacucccauccucuccucaucuccccuuu

SEQ ID NO: 311825 - RNA, 32 nt, Homo Sapiens
aacgaugaaaccuuauagagugagauuaucau

SEQ ID NO: 311826 - RNA, 32 nt, Homo Sapiens
ccaauaccagacacugcccagcccccugauag

SEQ ID NO: 311827 - RNA, 32 nt, Homo Sapiens
gggcgcccgcugcccgcggaguccggagccga

SEQ ID NO: 311828 - RNA, 32 nt, Homo Sapiens
ugcgugcgcugguuccgccaggcgcugcaggg

SEQ ID NO: 311829 - RNA, 32 nt, Homo Sapiens
ccuccagcucugagcccucccucuccuaggag

SEQ ID NO: 311830 - RNA, 32 nt, Homo Sapiens
auucgagcgcgugugaacugaacgcugaucag

SEQ ID NO: 311831 - RNA, 32 nt, Homo Sapiens
gucuuguuuauuuuauaaaauuuuacaucuaa

SEQ ID NO: 311832 - RNA, 32 nt, Homo Sapiens
gcggagcgccaguggaaggccgaguuccaccg

SEQ ID NO: 311833 - RNA, 32 nt, Homo Sapiens
accaggccuggcaguugaaaucucuggaagag

SEQ ID NO: 311834 - RNA, 32 nt, Homo Sapiens
aaaacucuuuugcauuaagggaucauuccaag

SEQ ID NO: 311835 - RNA, 32 nt, Homo Sapiens
acggucagcuccccgauggccugggugagggc

SEQ ID NO: 311836 - RNA, 32 nt, Homo Sapiens
cacauucuguuguucaguuccucugcacuggg

SEQ ID NO: 311837 - RNA, 32 nt, Homo Sapiens
cuuggguugccagcugagucccgguauuaggg

SEQ ID NO: 311838 - RNA, 32 nt, Homo Sapiens
cguggcagacugccugcugaugcuggucuaca

SEQ ID NO: 311839 - RNA, 32 nt, Homo Sapiens
guccugcccgcauccuaccccauccccaccug

SEQ ID NO: 311840 - RNA, 32 nt, Homo Sapiens
gggccucccgggagggacacggcgggugucgg

SEQ ID NO: 311841 - RNA, 32 nt, Homo Sapiens
caacaacuugugacaugagauuuuuuaagggc

SEQ ID NO: 311842 - RNA, 32 nt, Homo Sapiens
cuauauuggauauacacuuguaaaguuucaaa

SEQ ID NO: 311843 - RNA, 32 nt, Homo Sapiens
ucaagauucagaagaugaacuauacaucagaa

SEQ ID NO: 311844 - RNA, 32 nt, Homo Sapiens
ccagccucccacugucccaccgccuccugccu

SEQ ID NO: 311845 - RNA, 32 nt, Homo Sapiens
gacugggcgaucuggaacagcacguggugggg

SEQ ID NO: 311846 - RNA, 32 nt, Homo Sapiens
accgugccuggccagauuuuucuuuuauucuu

SEQ ID NO: 311847 - RNA, 32 nt, Homo Sapiens
cuuuugagggcggugacggcgccgggccggcc

SEQ ID NO: 311848 - RNA, 32 nt, Homo Sapiens
uucacccucacaugccucccccaucccugcug

SEQ ID NO: 311849 - RNA, 32 nt, Homo Sapiens
aagucuuacugauaacauaaacagucaauuaa

SEQ ID NO: 311850 - RNA, 32 nt, Homo Sapiens
gaucuuuuaaaaaacuaaugccugauucccau

SEQ ID NO: 311851 - RNA, 32 nt, Homo Sapiens
gugugacuucuuaucaccuggauucagagagu

SEQ ID NO: 311852 - RNA, 32 nt, Homo Sapiens
gccaaggaaacacugauuuugcugcugaagag

SEQ ID NO: 311853 - RNA, 32 nt, Homo Sapiens
ucacugucucccacccaccccaucuuugcugg

SEQ ID NO: 311854 - RNA, 32 nt, Homo Sapiens
uuuucuacaucaugucgagaaugauucaaugu

SEQ ID NO: 311855 - RNA, 32 nt, Homo Sapiens
uagaggugucauugugugcugagugcucaggu

SEQ ID NO: 311856 - RNA, 32 nt, Homo Sapiens
gcguucccggcagcugcgggcuccgaggccag

SEQ ID NO: 311857 - RNA, 32 nt, Homo Sapiens
cgucucuauuaaaaauacaaaaauuagacugg

SEQ ID NO: 311858 - RNA, 32 nt, Homo Sapiens
uccgggaggucuuugggcaucgcggucugggg

SEQ ID NO: 311859 - RNA, 32 nt, Homo Sapiens
guguucuucccgcuccuuacgcauccgcgguc

SEQ ID NO: 311860 - RNA, 32 nt, Homo Sapiens
acaccaguguguggauuuuuaacaucaccgug

SEQ ID NO: 311861 - RNA, 32 nt, Homo Sapiens
ccaggugggaggaggggcuguccuggcucuga

SEQ ID NO: 311862 - RNA, 32 nt, Homo Sapiens
gagcaaccgggagcgcugggcuggggugcaaa

SEQ ID NO: 311863 - RNA, 32 nt, Homo Sapiens
cgcagcugggagcggcugcuuccuccgggguc

SEQ ID NO: 311864 - RNA, 32 nt, Homo Sapiens
cgcucggcucgcugacucgccggagcgcucug

SEQ ID NO: 311865 - RNA, 32 nt, Homo Sapiens
cauuguugaacuucagcuccagugucucucca

SEQ ID NO: 311866 - RNA, 32 nt, Homo Sapiens
gugacgguguugcgcugccucuugagcagccu

SEQ ID NO: 311867 - RNA, 32 nt, Homo Sapiens
uuugauaauucugaaaucaaguauagcuucua

SEQ ID NO: 311868 - RNA, 32 nt, Homo Sapiens
cccaggagcucugcgccaggcagagcugaggg

SEQ ID NO: 311869 - RNA, 32 nt, Homo Sapiens
caugccauggagcucacgacgugugaccauuu

SEQ ID NO: 311870 - RNA, 32 nt, Homo Sapiens
uacucggcccuccgagacccagcccgagcgca

SEQ ID NO: 311871 - RNA, 32 nt, Homo Sapiens
acuggucccacuugggggucuagaccaggauu

SEQ ID NO: 311872 - RNA, 32 nt, Homo Sapiens
uguugauauauccuguacaugacagugugaga

SEQ ID NO: 311873 - RNA, 32 nt, Homo Sapiens
caguauuugccagcucauuggacauucucacu

SEQ ID NO: 311874 - RNA, 32 nt, Homo Sapiens
gcgauuucaguagaaucacuuacucauccuaa

SEQ ID NO: 311875 - RNA, 32 nt, Homo Sapiens
ucguggaauaaucaaagcaaaucaauggcagc

SEQ ID NO: 311876 - RNA, 32 nt, Homo Sapiens
auugcccuaggggaucuuuagauucuuguuua

SEQ ID NO: 311877 - RNA, 32 nt, Homo Sapiens
uugcuaggucuuacaggugauuuuuuacaaug

SEQ ID NO: 311878 - RNA, 32 nt, Homo Sapiens
acaaguucaggagaucgagaccauccuggcua

SEQ ID NO: 311879 - RNA, 32 nt, Homo Sapiens
aagccaaacaguaaaaacuaccaagagaacac

SEQ ID NO: 311880 - RNA, 32 nt, Homo Sapiens
uggggcaacgcaccagcuccucgaagacgcuc

SEQ ID NO: 311881 - RNA, 32 nt, Homo Sapiens
cccagagcuuggagucugggccccacacccag

SEQ ID NO: 311882 - RNA, 32 nt, Homo Sapiens
gaagaaaagcuuggaguagagcagaagggagg

SEQ ID NO: 311883 - RNA, 32 nt, Homo Sapiens
agacuauguauuuaaugaaaugcucucuuuga

SEQ ID NO: 311884 - RNA, 32 nt, Homo Sapiens
cugcuccccccuccugugaggcuagauagaug

SEQ ID NO: 311885 - RNA, 32 nt, Homo Sapiens
ucuagggguggauguuuacagcuccugaagcc

SEQ ID NO: 311886 - RNA, 32 nt, Homo Sapiens
auggaccuuaauuauuaaauguuuauaaggug

SEQ ID NO: 311887 - RNA, 32 nt, Homo Sapiens
agaggccgaguggacaggauuggucagggagc

SEQ ID NO: 311888 - RNA, 32 nt, Homo Sapiens
ugugagguuaccauuaugugauguuacuauaa

SEQ ID NO: 311889 - RNA, 32 nt, Homo Sapiens
gacauaagauuugggguccccuggauauaaga

SEQ ID NO: 311890 - RNA, 32 nt, Homo Sapiens
uaacaaaauggcaagaguaaguccuuacugau

SEQ ID NO: 311891 - RNA, 27 nt, Homo Sapiens
agaaguuuccacuucagccuuuuguuu

SEQ ID NO: 311892 - RNA, 32 nt, Homo Sapiens
accaacaauauuuccaucuuccuccaguuggc

SEQ ID NO: 311893 - RNA, 31 nt, Homo Sapiens
cuccccgagcacugcccggccggccgccaug

SEQ ID NO: 311894 - RNA, 32 nt, Homo Sapiens
cugcaaucuguacacaagagaaagagggagag

SEQ ID NO: 311895 - RNA, 32 nt, Homo Sapiens
agcugggugggaaguucaggaggugggaacuu

SEQ ID NO: 311896 - RNA, 32 nt, Homo Sapiens
aaggcucugcugucugaaggggugagaauugu

SEQ ID NO: 311897 - RNA, 32 nt, Homo Sapiens
uuauuucccguauuccugguuauuuucaucau

SEQ ID NO: 311898 - RNA, 32 nt, Homo Sapiens
cacugcucuuuccuccuccccagcugaaccuc

SEQ ID NO: 311899 - RNA, 32 nt, Homo Sapiens
uugguccugauuuuucuuuuuacaauuaccaa

SEQ ID NO: 311900 - RNA, 32 nt, Homo Sapiens
ccggcagggccagaagcagagacggcggcugg

SEQ ID NO: 311901 - RNA, 32 nt, Homo Sapiens
auucacuuuacuaugugauagaaguagcaugu

SEQ ID NO: 311902 - RNA, 32 nt, Homo Sapiens
acaaacuguuugguguuuuaaauuuaagugua

SEQ ID NO: 311903 - RNA, 32 nt, Homo Sapiens
ggauaggagacacacgcgcacacacacacaca

SEQ ID NO: 311904 - RNA, 32 nt, Homo Sapiens
gccgcgagguuacaaugcugaacgcaugagau

SEQ ID NO: 311905 - RNA, 32 nt, Homo Sapiens
gaagccgugggcucgggcgggagccggcugag

SEQ ID NO: 311906 - RNA, 32 nt, Homo Sapiens
agugauccccaccccaggauccuaaaucauga

SEQ ID NO: 311907 - RNA, 32 nt, Homo Sapiens
acaccaacgcguagucgaacugcccgcgcucg

SEQ ID NO: 311908 - RNA, 32 nt, Homo Sapiens
cacggcuccucccguccuccccgaagccccgc

SEQ ID NO: 311909 - RNA, 32 nt, Homo Sapiens
caggccauuaggggguuuuagagcagaccgac

SEQ ID NO: 311910 - RNA, 32 nt, Homo Sapiens
cugucuugcuccuggaugaaccaucuacgggc

SEQ ID NO: 311911 - RNA, 32 nt, Homo Sapiens
ucaaggccaaugaauauuaaggugauugcuuc

SEQ ID NO: 311912 - RNA, 32 nt, Homo Sapiens
uuuaaagcucacggccgcggucugcgucuucg

SEQ ID NO: 311913 - RNA, 32 nt, Homo Sapiens
cugucaagcccuauccuucucugccucuuaac

SEQ ID NO: 311914 - RNA, 32 nt, Homo Sapiens
ugugucuuguguguuucuuuuauauuaaagga

SEQ ID NO: 311915 - RNA, 32 nt, Homo Sapiens
aaaaaauaaaaauaaacggauaccuguuuucc

SEQ ID NO: 311916 - RNA, 32 nt, Homo Sapiens
aaacaaaaacaaaacagggaacuagcuaaauu

SEQ ID NO: 311917 - RNA, 32 nt, Homo Sapiens
ucacauauuccauauugauuuugacgcucugu

SEQ ID NO: 311918 - RNA, 32 nt, Homo Sapiens
auaacccauugaaauuucugcugugcgagggu

SEQ ID NO: 311919 - RNA, 32 nt, Homo Sapiens
cucagccuuuggauguuaauccgcugggccag

SEQ ID NO: 311920 - RNA, 32 nt, Homo Sapiens
gcgcugcagccugggcaacacagugagacccu

SEQ ID NO: 311921 - RNA, 32 nt, Homo Sapiens
aauccuaacaaggacugauccugccugggaga

SEQ ID NO: 311922 - RNA, 32 nt, Homo Sapiens
caaauauguggacuuuaaacaaugaaacuuuu

SEQ ID NO: 311923 - RNA, 32 nt, Homo Sapiens
gccuuugagguggucagagugccaccuucagc

SEQ ID NO: 311924 - RNA, 32 nt, Homo Sapiens
ccucugaacaaaugccugagugcuggggcacu

SEQ ID NO: 311925 - RNA, 32 nt, Homo Sapiens
cccagggcuguggccgucuccucccucagcuc

SEQ ID NO: 311926 - RNA, 32 nt, Homo Sapiens
accacuagacuggggaggaaagguaggggugg

SEQ ID NO: 311927 - RNA, 32 nt, Homo Sapiens
ccugucuggugccccuuugcccgccuccugca

SEQ ID NO: 311928 - RNA, 32 nt, Homo Sapiens
gggggagaauggggaaaggacacacacaggau

SEQ ID NO: 311929 - RNA, 32 nt, Homo Sapiens
ucccucuccuugcuccuccuccugcaaugcau

SEQ ID NO: 311930 - RNA, 32 nt, Homo Sapiens
cgcccucggcccggccucccagcucucuacuu

SEQ ID NO: 311931 - RNA, 32 nt, Homo Sapiens
auggaugucacagagugucaugugucugaugc

SEQ ID NO: 311932 - RNA, 32 nt, Homo Sapiens
gaccaaauuaagaugguaagaccucugagacc

SEQ ID NO: 311933 - RNA, 32 nt, Homo Sapiens
cagucaucuccugguaggcacaaaauaaucac

SEQ ID NO: 311934 - RNA, 31 nt, Homo Sapiens
ccguagcuaccggucgcgucgccgugggcga

SEQ ID NO: 311935 - RNA, 32 nt, Homo Sapiens
cccacggccccggccccgcaccgggacacaug

SEQ ID NO: 311936 - RNA, 32 nt, Homo Sapiens
agaagaaaauacugagauccguauuauccuuc

SEQ ID NO: 311937 - RNA, 32 nt, Homo Sapiens
caagcaucuauuucuuuauucuucugggcuuc

SEQ ID NO: 311938 - RNA, 32 nt, Homo Sapiens
guguggguggcggcguuugcugugaaccaugc

SEQ ID NO: 311939 - RNA, 32 nt, Homo Sapiens
ggcccuuacugggaugcagagaggagaaguga

SEQ ID NO: 311940 - RNA, 32 nt, Homo Sapiens
cucugcucaggucaaggcugcagcgagccaug

SEQ ID NO: 311941 - RNA, 32 nt, Homo Sapiens
cuuaucaaucccaaacucuggguguaaaagau

SEQ ID NO: 311942 - RNA, 32 nt, Homo Sapiens
augagaguguuuuguuauuuugaaagaguuuc

SEQ ID NO: 311943 - RNA, 32 nt, Homo Sapiens
gucuuagaacaaaaacaagucgguaguuauua

SEQ ID NO: 311944 - RNA, 32 nt, Homo Sapiens
cagagggucucuccguccucaugcuccucagu

SEQ ID NO: 311945 - RNA, 30 nt, Homo Sapiens
ucucaagggugugagcaccaggagacuggg

SEQ ID NO: 311946 - RNA, 32 nt, Homo Sapiens
ggcgacgucuacacugagucggaggcgaagga

SEQ ID NO: 311947 - RNA, 32 nt, Homo Sapiens
ccuggaggccccaguacuuucugagcccagag

SEQ ID NO: 311948 - RNA, 32 nt, Homo Sapiens
uuuguugucuguguaaaauagaauuaauguau

SEQ ID NO: 311949 - RNA, 32 nt, Homo Sapiens
gugccgcccagcuguccauggcccgugcagag

SEQ ID NO: 311950 - RNA, 32 nt, Homo Sapiens
uggguauaauuuccuggcugccucccuuccuc

SEQ ID NO: 311951 - RNA, 32 nt, Homo Sapiens
uccacucaaaauuuauaugaacaccacuagau

SEQ ID NO: 311952 - RNA, 32 nt, Homo Sapiens
aguaccaaggccgcucgcuggaugccaacagu

SEQ ID NO: 311953 - RNA, 32 nt, Homo Sapiens
gaaaauuaaacacaaaguguauacauguaaaa

SEQ ID NO: 311954 - RNA, 32 nt, Homo Sapiens
uuucccugacccaauucagagauucuuuaugc

SEQ ID NO: 311955 - RNA, 32 nt, Homo Sapiens
cucacuaaucuuuuuuuuuuuaguccaaaagc

SEQ ID NO: 311956 - RNA, 32 nt, Homo Sapiens
aaacauggugccgaagacaagacucagaccau

SEQ ID NO: 311957 - RNA, 32 nt, Homo Sapiens
auuuugauuauuaauugugcaagcuuuuccua

SEQ ID NO: 311958 - RNA, 32 nt, Homo Sapiens
ucuggcggccccuccccuccccugcccuuaac

SEQ ID NO: 311959 - RNA, 32 nt, Homo Sapiens
ugagaaggaccgaggaggaggauuuggguugu

SEQ ID NO: 311960 - RNA, 32 nt, Homo Sapiens
ggaacucgcaccuucgcucccccuccccugcc

SEQ ID NO: 311961 - RNA, 32 nt, Homo Sapiens
agguggguggaucaccugaggucagcaguucg

SEQ ID NO: 311962 - RNA, 32 nt, Homo Sapiens
uuaauuuggcauuuaaaguaguaaaucaggaa

SEQ ID NO: 311963 - RNA, 30 nt, Homo Sapiens
cugcugcuggacuguaccagacgucugucc

SEQ ID NO: 311964 - RNA, 32 nt, Homo Sapiens
ccaaucccacuuuggcacgauguuagccaaca

SEQ ID NO: 311965 - RNA, 32 nt, Homo Sapiens
gggagcugugggcggcagcugcgucuccugcc

SEQ ID NO: 311966 - RNA, 32 nt, Homo Sapiens
uggaccucagcauggaggaagagguggucauc

SEQ ID NO: 311967 - RNA, 32 nt, Homo Sapiens
ugugagcuaugcaaacaaaauccaagauucug

SEQ ID NO: 311968 - RNA, 32 nt, Homo Sapiens
ggcagacugagcuggaggaagaugucagaaau

SEQ ID NO: 311969 - RNA, 32 nt, Homo Sapiens
aauuuuguaucuauuucuuauuaaaaagaaac

SEQ ID NO: 311970 - RNA, 32 nt, Homo Sapiens
cauguuaggauagucucgaucuccggaccuca

SEQ ID NO: 311971 - RNA, 32 nt, Homo Sapiens
ucugggccagcagagcgagcugacagcagcaa

SEQ ID NO: 311972 - RNA, 32 nt, Homo Sapiens
aucaguaugggcuuauggauucuuauuuuauu

SEQ ID NO: 311973 - RNA, 32 nt, Homo Sapiens
aauugauauauuccauauuggauucucaaaga

SEQ ID NO: 311974 - RNA, 32 nt, Homo Sapiens
ccuauauuguuuugaaagcauacucuauauau

SEQ ID NO: 311975 - RNA, 32 nt, Homo Sapiens
cugccaccgaggcgcgcguggggccacugccg

SEQ ID NO: 311976 - RNA, 32 nt, Homo Sapiens
uaugugcagggcccgggcgggugaagggucag

SEQ ID NO: 311977 - RNA, 32 nt, Homo Sapiens
cugccaucagggaucacuaaauuuaaggcuuc

SEQ ID NO: 311978 - RNA, 32 nt, Homo Sapiens
uuaaggacaaggaaaccucuggacagugguau

SEQ ID NO: 311979 - RNA, 32 nt, Homo Sapiens
ucagaaauuggaacagaauguuuuacugugaa

SEQ ID NO: 311980 - RNA, 32 nt, Homo Sapiens
gacccgguaggccugagccucaacucuucaga

SEQ ID NO: 311981 - RNA, 32 nt, Homo Sapiens
cguggacaagcccagggcugccggcgagucau

SEQ ID NO: 311982 - RNA, 32 nt, Homo Sapiens
gaccugccuucucaucuuuauagugccacgau

SEQ ID NO: 311983 - RNA, 32 nt, Homo Sapiens
augguggagaucuggcaugccaggcuuaggug

SEQ ID NO: 311984 - RNA, 32 nt, Homo Sapiens
ccuuagccauauauucuuaugucaagguugcu

SEQ ID NO: 311985 - RNA, 32 nt, Homo Sapiens
uaugacugguguuccuuauaagagaagauagg

SEQ ID NO: 311986 - RNA, 32 nt, Homo Sapiens
aacucacuggccagcucucaccagcggugucu

SEQ ID NO: 311987 - RNA, 32 nt, Homo Sapiens
ccugaguaauuucccuuggcaaaauucccagu

SEQ ID NO: 311988 - RNA, 31 nt, Homo Sapiens
cccggucaguccacccugccccguccacuuu

SEQ ID NO: 311989 - RNA, 32 nt, Homo Sapiens
cgcgggccggaaggaggcgcccccgccccgcc

SEQ ID NO: 311990 - RNA, 32 nt, Homo Sapiens
gcucugcacacaggcgauggccuuggagacac

SEQ ID NO: 311991 - RNA, 32 nt, Homo Sapiens
caagagauuauuaacuuuuaucagguguuaac

SEQ ID NO: 311992 - RNA, 32 nt, Homo Sapiens
gcggaggagcagccacuuccuggggccgccgg

SEQ ID NO: 311993 - RNA, 32 nt, Homo Sapiens
acuggggcugccugaggaugaggcugcaucuc

SEQ ID NO: 311994 - RNA, 32 nt, Homo Sapiens
gugugaaugcccuugaaucacuuggagagcuu

SEQ ID NO: 311995 - RNA, 32 nt, Homo Sapiens
uguauuuuuguacagagcagugcacucuaacc

SEQ ID NO: 311996 - RNA, 32 nt, Homo Sapiens
uuacagaagaaccaguggaagaauuuaaauuu

SEQ ID NO: 311997 - RNA, 32 nt, Homo Sapiens
uuuuauguuuggauugugcuguaauaagagcc

SEQ ID NO: 311998 - RNA, 32 nt, Homo Sapiens
aggcgcgcggugccaaccauggagcgggccgg

SEQ ID NO: 311999 - RNA, 32 nt, Homo Sapiens
caggaucauugagaucacuggcaacauuauag

SEQ ID NO: 312000 - RNA, 32 nt, Homo Sapiens
gaugguccaggcucuaugugaccuccagagca

SEQ ID NO: 312001 - RNA, 32 nt, Homo Sapiens
gacacagccauggacacaccccugcccagacc

SEQ ID NO: 312002 - RNA, 32 nt, Homo Sapiens
uuauguauauuuuuauaucucugugguuuuga

SEQ ID NO: 312003 - RNA, 32 nt, Homo Sapiens
ccuuguaaggccaguucaguugggucaugcca

SEQ ID NO: 312004 - RNA, 32 nt, Homo Sapiens
uuuaaaugcaagaugacgcuuacguucuguaa

SEQ ID NO: 312005 - RNA, 32 nt, Homo Sapiens
auguaugucaguuggacauuguagaagguaug

SEQ ID NO: 312006 - RNA, 32 nt, Homo Sapiens
uuagacagcuggagaugcagagcacuauggag

SEQ ID NO: 312007 - RNA, 32 nt, Homo Sapiens
ggcccccuaacccucagccuccaggugguguc

SEQ ID NO: 312008 - RNA, 32 nt, Homo Sapiens
gaauaaauauuuuuugucacuucauuuuucau

SEQ ID NO: 312009 - RNA, 32 nt, Homo Sapiens
auuggagauugugaauccugcugucugugcag

SEQ ID NO: 312010 - RNA, 32 nt, Homo Sapiens
ugcuugggagggucugugcugcugugagaacc

SEQ ID NO: 312011 - RNA, 32 nt, Homo Sapiens
ucuuccuuucccuucucccaccuucuacuggg

SEQ ID NO: 312012 - RNA, 32 nt, Homo Sapiens
uugucaaaaugccauacccaaauacacagcaa

SEQ ID NO: 312013 - RNA, 32 nt, Homo Sapiens
gugucaucaacuuauccuaguaccucaguguu

SEQ ID NO: 312014 - RNA, 32 nt, Homo Sapiens
auaugaccaugaugauaaucaucacuaucauc

SEQ ID NO: 312015 - RNA, 32 nt, Homo Sapiens
aucacuauucuuaagcacuuugaaaauauuuc

SEQ ID NO: 312016 - RNA, 32 nt, Homo Sapiens
caggcgugguggcgcauaccuguaaucucugc

SEQ ID NO: 312017 - RNA, 32 nt, Homo Sapiens
ugggcaugguggcucacgcuuguaaucccagc

SEQ ID NO: 312018 - RNA, 32 nt, Homo Sapiens
gugggggcaugggaaaccuuuucaucuccaag

SEQ ID NO: 312019 - RNA, 32 nt, Homo Sapiens
gcagagguggggggcaggaggggggugcucac

SEQ ID NO: 312020 - RNA, 32 nt, Homo Sapiens
acuuauacugcauaacaagcuaaccaaacugg

SEQ ID NO: 312021 - RNA, 32 nt, Homo Sapiens
cacaacacacccugcugccauccacuucuguu

SEQ ID NO: 312022 - RNA, 32 nt, Homo Sapiens
ccucuuccgucagugucuuuugcuucgacucc

SEQ ID NO: 312023 - RNA, 32 nt, Homo Sapiens
ccgggucgccagggcugcugcggccauucccg

SEQ ID NO: 312024 - RNA, 32 nt, Homo Sapiens
cuugagcccucccuggcugcuuccucucgcuc

SEQ ID NO: 312025 - RNA, 32 nt, Homo Sapiens
uaaaugcacaugcccuguugauuggagaucag

SEQ ID NO: 312026 - RNA, 32 nt, Homo Sapiens
agccuugaucauaaugauuucauuagcagugu

SEQ ID NO: 312027 - RNA, 32 nt, Homo Sapiens
uaagccucauucuccuuuuguucauuuuggua

SEQ ID NO: 312028 - RNA, 32 nt, Homo Sapiens
agaugauaaaaauaaugagaccaagaagacug

SEQ ID NO: 312029 - RNA, 32 nt, Homo Sapiens
aucaguuuggaauauguuuuuauuuuccauua

SEQ ID NO: 312030 - RNA, 32 nt, Homo Sapiens
ucuuuuccaguucuccuuccucuaggagccau

SEQ ID NO: 312031 - RNA, 32 nt, Homo Sapiens
aaagccacucucacaagaaagggcaccaggac

SEQ ID NO: 312032 - RNA, 32 nt, Homo Sapiens
uuccugagcgccccggccccucccuccgccgc

SEQ ID NO: 312033 - RNA, 32 nt, Homo Sapiens
accacacagaaagccaggauugaagcggugcu

SEQ ID NO: 312034 - RNA, 32 nt, Homo Sapiens
gucugauuucuccaaccgaguugaaauuucca

SEQ ID NO: 312035 - RNA, 32 nt, Homo Sapiens
cauaguaaugaaaaggaacauaaaagcccagc

SEQ ID NO: 312036 - RNA, 32 nt, Homo Sapiens
caaccgguuguugcugccuugguuucccgaca

SEQ ID NO: 312037 - RNA, 32 nt, Homo Sapiens
uuuuuaugugccuccccuaagaauaauuagca

SEQ ID NO: 312038 - RNA, 32 nt, Homo Sapiens
aguguuuugaauagagaugacucauuacacau

SEQ ID NO: 312039 - RNA, 32 nt, Homo Sapiens
accuagauugagauuuuuuaaucuuuccucua

SEQ ID NO: 312040 - RNA, 32 nt, Homo Sapiens
agaauuuguuacauuccaauuauuuuuccagc

SEQ ID NO: 312041 - RNA, 32 nt, Homo Sapiens
auccugugugcuuaguuuuaagaucaaccaau

SEQ ID NO: 312042 - RNA, 32 nt, Homo Sapiens
agaggccgcccggcggggcccgcaggcgaugc

SEQ ID NO: 312043 - RNA, 32 nt, Homo Sapiens
ggagcaaggagagagggaagaaggaccccguc

SEQ ID NO: 312044 - RNA, 32 nt, Homo Sapiens
cuggaagcgggcccgcgaccagcgcgggagca

SEQ ID NO: 312045 - RNA, 32 nt, Homo Sapiens
cacccaggaggagaggcguggcugagggccca

SEQ ID NO: 312046 - RNA, 32 nt, Homo Sapiens
uacagaaguauuuuucaaagcagcauuaaaau

SEQ ID NO: 312047 - RNA, 32 nt, Homo Sapiens
uucucuuuaagugcuccucuagacuagacuga

SEQ ID NO: 312048 - RNA, 32 nt, Homo Sapiens
ccccgcaccccuuuccccaucccggcuccguc

SEQ ID NO: 312049 - RNA, 32 nt, Homo Sapiens
uggcagcccuccccgccccucuccuucaagga

SEQ ID NO: 312050 - RNA, 32 nt, Homo Sapiens
aauuauuguaaauaugucuacucuucaaauga

SEQ ID NO: 312051 - RNA, 32 nt, Homo Sapiens
gccacugcacuccagccugggcgacagcaaga

SEQ ID NO: 312052 - RNA, 32 nt, Homo Sapiens
cuuguuuucccuuguuauggcucuucuaauuc

SEQ ID NO: 312053 - RNA, 32 nt, Homo Sapiens
uuguagcagacaccacaugcccuugagccuaa

SEQ ID NO: 312054 - RNA, 32 nt, Homo Sapiens
cagcucccacgcugccccuaguccugggcaug

SEQ ID NO: 312055 - RNA, 32 nt, Homo Sapiens
cccaucaacuguauugggccuuuuggauaugc

SEQ ID NO: 312056 - RNA, 32 nt, Homo Sapiens
cugggcagcgcauuuuaacuuuuacuagacuc

SEQ ID NO: 312057 - RNA, 32 nt, Homo Sapiens
acucuuagaaaagaaacuuaggaauacagagu

SEQ ID NO: 312058 - RNA, 32 nt, Homo Sapiens
cuauaaacauggagcaaucacuguauaauuuu

SEQ ID NO: 312059 - RNA, 32 nt, Homo Sapiens
agcccagauucuuccccuauuccuccuuuucc

SEQ ID NO: 312060 - RNA, 32 nt, Homo Sapiens
gauacaucaaaauauaaauggaauguaauuag

SEQ ID NO: 312061 - RNA, 32 nt, Homo Sapiens
agaaaagagauuuuaaugcuguagugacuuag

SEQ ID NO: 312062 - RNA, 32 nt, Homo Sapiens
uggggucccacuuuuuguucuuacauuuacug

SEQ ID NO: 312063 - RNA, 32 nt, Homo Sapiens
gguguauaccuggccucccucugaggcuggug

SEQ ID NO: 312064 - RNA, 32 nt, Homo Sapiens
aacagacccagggcuacgagccagguaaccag

SEQ ID NO: 312065 - RNA, 32 nt, Homo Sapiens
agcaaauaauuuccuggugugaagguccugcu

SEQ ID NO: 312066 - RNA, 32 nt, Homo Sapiens
caccuguuuuguuuuucuuaaguucaacauac

SEQ ID NO: 312067 - RNA, 32 nt, Homo Sapiens
cugccaacuuugcugcagagccacugccgccc

SEQ ID NO: 312068 - RNA, 32 nt, Homo Sapiens
cauucugaucuucucuguaccauuccaguuuu

SEQ ID NO: 312069 - RNA, 30 nt, Homo Sapiens
uccuucggagagacaaggauaugcaugauu

SEQ ID NO: 312070 - RNA, 32 nt, Homo Sapiens
caggagcccuacagcccucggaccccgagccc

SEQ ID NO: 312071 - RNA, 32 nt, Homo Sapiens
ugagaaaauggauagcuucuguguuaugauac

SEQ ID NO: 312072 - RNA, 32 nt, Homo Sapiens
cuagaaacuaaauuagagacauuguguuuggg

SEQ ID NO: 312073 - RNA, 32 nt, Homo Sapiens
ugaaacagauuuuuaaagagcauauuaagaaa

SEQ ID NO: 312074 - RNA, 32 nt, Homo Sapiens
cugugacuuucaccucuuucugaaugcaucua

SEQ ID NO: 312075 - RNA, 32 nt, Homo Sapiens
agaugacugaggaggacgcagaugaagccucc

SEQ ID NO: 312076 - RNA, 32 nt, Homo Sapiens
aaaagagauuguggucaacuucucccaaacug

SEQ ID NO: 312077 - RNA, 32 nt, Homo Sapiens
aguagagaccacaacuaacucagcacguaggg

SEQ ID NO: 312078 - RNA, 32 nt, Homo Sapiens
ucccuuagggcuuccuggccuacugcauccuu

SEQ ID NO: 312079 - RNA, 32 nt, Homo Sapiens
ucagcugacaccaugauguggcagcagagagg

SEQ ID NO: 312080 - RNA, 28 nt, Homo Sapiens
cgagcacgaacuagaccaagcgaagggc

SEQ ID NO: 312081 - RNA, 32 nt, Homo Sapiens
ucuugcccggcggcugccgcuggaaaaugucu

SEQ ID NO: 312082 - RNA, 32 nt, Homo Sapiens
ccagcagagggccccaggaucuccaagguccc

SEQ ID NO: 312083 - RNA, 32 nt, Homo Sapiens
aacaggacuaugaauugaaauguuggcauacu

SEQ ID NO: 312084 - RNA, 32 nt, Homo Sapiens
auuuuagaaaccguaaauuuaacuuaaggauu

SEQ ID NO: 312085 - RNA, 32 nt, Homo Sapiens
gcucggcugguggcgccgugggcuuggagucc

SEQ ID NO: 312086 - RNA, 32 nt, Homo Sapiens
caaauuagguuuggagggaacuuugaucuucc

SEQ ID NO: 312087 - RNA, 32 nt, Homo Sapiens
ugccuguaggaggugagguagcaggaggugag

SEQ ID NO: 312088 - RNA, 32 nt, Homo Sapiens
aauauauauuuauauuugauguaauauggaca

SEQ ID NO: 312089 - RNA, 32 nt, Homo Sapiens
agguugacgagacgaggcucuucugaccgucc

SEQ ID NO: 312090 - RNA, 32 nt, Homo Sapiens
aaaauacaaaaauuagccaggugugguggugu

SEQ ID NO: 312091 - RNA, 32 nt, Homo Sapiens
aggaccucaccuccccgaaagcaucggccaga

SEQ ID NO: 312092 - RNA, 32 nt, Homo Sapiens
uccugaccuccuucuacuucugcaucgucacc

SEQ ID NO: 312093 - RNA, 32 nt, Homo Sapiens
cuaagagcccaauuuaauuauauucccaauag

SEQ ID NO: 312094 - RNA, 32 nt, Homo Sapiens
cagcaggauuggauguuguguauugugguuua

SEQ ID NO: 312095 - RNA, 32 nt, Homo Sapiens
ucucuagccccucuccugcucucagaggugga

SEQ ID NO: 312096 - RNA, 32 nt, Homo Sapiens
cuaucaucacagguacaaacaucgcuugaagu

SEQ ID NO: 312097 - RNA, 32 nt, Homo Sapiens
cugucauaauucaugauucggggcugggaaaa

SEQ ID NO: 312098 - RNA, 32 nt, Homo Sapiens
uagccacuucagccuucagucuuuggaguguc

SEQ ID NO: 312099 - RNA, 32 nt, Homo Sapiens
cguuugccccaguucccuccccaggccuccug

SEQ ID NO: 312100 - RNA, 32 nt, Homo Sapiens
auugagagacaauuagaaauguuguaauuguc

SEQ ID NO: 312101 - RNA, 32 nt, Homo Sapiens
ccugcagcaugaaggagagcucugcucccaga

SEQ ID NO: 312102 - RNA, 32 nt, Homo Sapiens
uuucaacagcuauuuacugaaugccuacuaga

SEQ ID NO: 312103 - RNA, 32 nt, Homo Sapiens
aguaacauugauauuucuugugaaggagaagu

SEQ ID NO: 312104 - RNA, 32 nt, Homo Sapiens
guagcuacaauuguguaauguacaauauuaga

SEQ ID NO: 312105 - RNA, 30 nt, Homo Sapiens
cagcagcacaggcgcgggucccgggaggcc

SEQ ID NO: 312106 - RNA, 32 nt, Homo Sapiens
acauuuagagguggcagugucuggaucuaccu

SEQ ID NO: 312107 - RNA, 32 nt, Homo Sapiens
uaccaucaagccuaauuuuaaaauguuuugua

SEQ ID NO: 312108 - RNA, 32 nt, Homo Sapiens
gagccucccgagaccccuggugcugggcagag

SEQ ID NO: 312109 - RNA, 32 nt, Homo Sapiens
uuuaauuggaagcucugugauuuacauaauca

SEQ ID NO: 312110 - RNA, 30 nt, Homo Sapiens
uccaggaucuucggcggaucuucggcggau

SEQ ID NO: 312111 - RNA, 32 nt, Homo Sapiens
ucaccucuuuugcuagcaagguuugagaugcu

SEQ ID NO: 312112 - RNA, 32 nt, Homo Sapiens
uguuuauugagcacuuacuuggaccaagcacu

SEQ ID NO: 312113 - RNA, 32 nt, Homo Sapiens
agcugggaauggggaaggugcaucccaacaca

SEQ ID NO: 312114 - RNA, 32 nt, Homo Sapiens
acgcgcgcuccucuggccgccccucccuccga

SEQ ID NO: 312115 - RNA, 32 nt, Homo Sapiens
gccugggcggccgcgccgcugggcaggugcug

SEQ ID NO: 312116 - RNA, 32 nt, Homo Sapiens
gcuuucugacuucauagauguccagaggccac

SEQ ID NO: 312117 - RNA, 32 nt, Homo Sapiens
aaaccaaagauuuccaggauccucgggcucug

SEQ ID NO: 312118 - RNA, 32 nt, Homo Sapiens
acguaaacuagaucagggaacaaaauccucuc

SEQ ID NO: 312119 - RNA, 32 nt, Homo Sapiens
aaccagcucugcuuaccguagugagaucacuu

SEQ ID NO: 312120 - RNA, 32 nt, Homo Sapiens
cuugucuuagacaguagugaaaauaguuaagg

SEQ ID NO: 312121 - RNA, 29 nt, Homo Sapiens
gaccagccuggcaaacauggcaaaacugu

SEQ ID NO: 312122 - RNA, 32 nt, Homo Sapiens
aggacaugguggccacagcggaggacuggcug

SEQ ID NO: 312123 - RNA, 32 nt, Homo Sapiens
ucaaaaauuuaaaaucuuaaauguguaaguca

SEQ ID NO: 312124 - RNA, 32 nt, Homo Sapiens
guauuuguuugugaaugcauuaugggacauga

SEQ ID NO: 312125 - RNA, 32 nt, Homo Sapiens
ucaggcucacuuucaagugcuucguggacugc

SEQ ID NO: 312126 - RNA, 32 nt, Homo Sapiens
gagacacagaaccuggaggggugugcacgcug

SEQ ID NO: 312127 - RNA, 32 nt, Homo Sapiens
auccugcuucacaggcuccgcggccuccggcc

SEQ ID NO: 312128 - RNA, 32 nt, Homo Sapiens
agcccuacuuuggccaacauccugcuuauuuc

SEQ ID NO: 312129 - RNA, 32 nt, Homo Sapiens
gaauuuauaguccagcuugaggaggcggcguc

SEQ ID NO: 312130 - RNA, 32 nt, Homo Sapiens
uugcagugagccgagaucccgccacugcacgc

SEQ ID NO: 312131 - RNA, 32 nt, Homo Sapiens
uaccaaauaaugaauugguauaccauauccgg

SEQ ID NO: 312132 - RNA, 32 nt, Homo Sapiens
gguaaaggccgcggccgggccaugcagugucc

SEQ ID NO: 312133 - RNA, 32 nt, Homo Sapiens
gccagggccccggaggagggguuccccgcuac

SEQ ID NO: 312134 - RNA, 32 nt, Homo Sapiens
ugagaggaaggggagcggcuccugugcauuuu

SEQ ID NO: 312135 - RNA, 32 nt, Homo Sapiens
guguaaauaaaaauaaauuuugguuuugcuca

SEQ ID NO: 312136 - RNA, 32 nt, Homo Sapiens
uuacagaauaacuaccagacaacauuuguuaa

SEQ ID NO: 312137 - RNA, 32 nt, Homo Sapiens
augcaucccuggggagggggcuggggugcaga

SEQ ID NO: 312138 - RNA, 32 nt, Homo Sapiens
cugacuguacguuccuucuacucuggcaccac

SEQ ID NO: 312139 - RNA, 32 nt, Homo Sapiens
caaauugaaaauaaauuuuauccuguuucaug

SEQ ID NO: 312140 - RNA, 32 nt, Homo Sapiens
caucaaaaggagaauaaaaauaaagugguuua

SEQ ID NO: 312141 - RNA, 32 nt, Homo Sapiens
ccgggccaucuuggaggucuugcagagcuagg

SEQ ID NO: 312142 - RNA, 32 nt, Homo Sapiens
gaaaguuuugguuuccuuuuuuguuugauggg

SEQ ID NO: 312143 - RNA, 32 nt, Homo Sapiens
cuugcauguuaacaacaaaaccuuuuagagga

SEQ ID NO: 312144 - RNA, 32 nt, Homo Sapiens
agagccaaguguuccugcagaggcugucuaug

SEQ ID NO: 312145 - RNA, 32 nt, Homo Sapiens
cuuacgauuuugauugugauaauuuggaacug

SEQ ID NO: 312146 - RNA, 32 nt, Homo Sapiens
gauguaagcaaaugcuuuugguuacugguaca

SEQ ID NO: 312147 - RNA, 32 nt, Homo Sapiens
gaaaauagcucuuuaaaagaaugucuuuguau

SEQ ID NO: 312148 - RNA, 32 nt, Homo Sapiens
uacaggcacgcgcugccacacccagguaauuu

SEQ ID NO: 312149 - RNA, 32 nt, Homo Sapiens
guuugaagggaaggucugaauaagcuuaccug

SEQ ID NO: 312150 - RNA, 32 nt, Homo Sapiens
aaaacuccauaacaguuuuaugcugaugauaa

SEQ ID NO: 312151 - RNA, 32 nt, Homo Sapiens
ugaaaggagccuuuuuacgguucaggauaaau

SEQ ID NO: 312152 - RNA, 32 nt, Homo Sapiens
uuaaccacagacuuaaauuucaggaggaagua

SEQ ID NO: 312153 - RNA, 32 nt, Homo Sapiens
cgagagagaugaaagacgucgaggggacgauu

SEQ ID NO: 312154 - RNA, 32 nt, Homo Sapiens
uguggccguccggaaaacacccggggaguuag

SEQ ID NO: 312155 - RNA, 32 nt, Homo Sapiens
uuuuuauggugcuguuaacaugggagucacac

SEQ ID NO: 312156 - RNA, 32 nt, Homo Sapiens
gccccuuuccaccagccgccaagccccuccag

SEQ ID NO: 312157 - RNA, 32 nt, Homo Sapiens
uaccacuuccugaaucaguuauuauuucuuca

SEQ ID NO: 312158 - RNA, 32 nt, Homo Sapiens
uucugacucaccuuuaguaaagaccuuagcaa

SEQ ID NO: 312159 - RNA, 32 nt, Homo Sapiens
ucuccucucacccacaccccuggccauggcua

SEQ ID NO: 312160 - RNA, 32 nt, Homo Sapiens
caaggcgaccgacugcgcugagcugcuuauuu

SEQ ID NO: 312161 - RNA, 32 nt, Homo Sapiens
ggagaagguuuauauuuaaauuuuauauuacc

SEQ ID NO: 312162 - RNA, 32 nt, Homo Sapiens
uuucuuuggccagcugcccaguggcauugaau

SEQ ID NO: 312163 - RNA, 32 nt, Homo Sapiens
aaguacuacagcccugggggugucacaccgcu

SEQ ID NO: 312164 - RNA, 32 nt, Homo Sapiens
gucuguccuuguucuccuccagguggagcugc

SEQ ID NO: 312165 - RNA, 32 nt, Homo Sapiens
ccugcaguaggcggcccggggccacaccgcgg

SEQ ID NO: 312166 - RNA, 32 nt, Homo Sapiens
aguaacucucagcuuuuuccuuagcaccagag

SEQ ID NO: 312167 - RNA, 32 nt, Homo Sapiens
aaguuugaggucgggcugaagcagggucacug

SEQ ID NO: 312168 - RNA, 32 nt, Homo Sapiens
gcuuuucuccccccauaucugcgugcacuucc

SEQ ID NO: 312169 - RNA, 32 nt, Homo Sapiens
gauaagagaaucaacauuucucaauaauuucc

SEQ ID NO: 312170 - RNA, 32 nt, Homo Sapiens
uccgccggggccgccgggccucauggaagccc

SEQ ID NO: 312171 - RNA, 32 nt, Homo Sapiens
uaugaccgagucuaguuuuucuuuaaaaggau

SEQ ID NO: 312172 - RNA, 32 nt, Homo Sapiens
ucauccuccaguggcgccggcgcgguccuucc

SEQ ID NO: 312173 - RNA, 32 nt, Homo Sapiens
cggaagagggccugggccccguggagccucag

SEQ ID NO: 312174 - RNA, 32 nt, Homo Sapiens
aaacuguguuuguggaucagagaaggcuuuau

SEQ ID NO: 312175 - RNA, 32 nt, Homo Sapiens
aucuugaaaguggaacccucaugaugagauua

SEQ ID NO: 312176 - RNA, 32 nt, Homo Sapiens
cuuggugccgugcuuuaauguggcaugguaca

SEQ ID NO: 312177 - RNA, 32 nt, Homo Sapiens
agccacaugcccucugcaggggaguaguugcc

SEQ ID NO: 312178 - RNA, 32 nt, Homo Sapiens
ccgucgcggggcggggcgggaaaggaagguuc

SEQ ID NO: 312179 - RNA, 32 nt, Homo Sapiens
gcaaagaggcacaccacacacacacacacaca

SEQ ID NO: 312180 - RNA, 32 nt, Homo Sapiens
cgccaaugcggcccagcccccggagagucagg

SEQ ID NO: 312181 - RNA, 32 nt, Homo Sapiens
ucagcuccuuucuagucacgggcuccucucac

SEQ ID NO: 312182 - RNA, 32 nt, Homo Sapiens
uuuucagaaauagaaauugauucaggacuaaa

SEQ ID NO: 312183 - RNA, 27 nt, Homo Sapiens
uugucauuguucuucaguucuuugggu

SEQ ID NO: 312184 - RNA, 32 nt, Homo Sapiens
cacccuggcacugcccggaucccgugcacccu

SEQ ID NO: 312185 - RNA, 32 nt, Homo Sapiens
auuuuacuuuagaacaugagaauagcaguuuu

SEQ ID NO: 312186 - RNA, 32 nt, Homo Sapiens
agccagaauguggggguggggguggguagagg

SEQ ID NO: 312187 - RNA, 32 nt, Homo Sapiens
ccaguccuuccaugcccuucuaucccagauua

SEQ ID NO: 312188 - RNA, 32 nt, Homo Sapiens
gcucauccaaggauuaaaucuggucagcaggu

SEQ ID NO: 312189 - RNA, 32 nt, Homo Sapiens
uccccucgccgcggucccauggaggaggaggc

SEQ ID NO: 312190 - RNA, 32 nt, Homo Sapiens
cugccggggagcgggcggcggcugcggcuucu

SEQ ID NO: 312191 - RNA, 32 nt, Homo Sapiens
agagugagaagcugagauacugggcacagggu

SEQ ID NO: 312192 - RNA, 32 nt, Homo Sapiens
auauacauauauauacguggccaacugccuca

SEQ ID NO: 312193 - RNA, 32 nt, Homo Sapiens
uauggcucauuguaggagcuaaacauaaggau

SEQ ID NO: 312194 - RNA, 32 nt, Homo Sapiens
ccacuaacauuuagguuuuuuauaucuuggca

SEQ ID NO: 312195 - RNA, 32 nt, Homo Sapiens
uacugccccccgcucauuaaacagccuccccc

SEQ ID NO: 312196 - RNA, 32 nt, Homo Sapiens
ugcuauauuuccccccaucgauuuguaauggc

SEQ ID NO: 312197 - RNA, 32 nt, Homo Sapiens
cauggggagagaaauccuaaguuaugauuaau

SEQ ID NO: 312198 - RNA, 32 nt, Homo Sapiens
ccuucucuccuaccccgcacagcugccaacug

SEQ ID NO: 312199 - RNA, 32 nt, Homo Sapiens
ccaggaagggaaggggggucagaagagagggu

SEQ ID NO: 312200 - RNA, 32 nt, Homo Sapiens
cauugacguggaccccuucaccuaccagagca

SEQ ID NO: 312201 - RNA, 32 nt, Homo Sapiens
ccagucccgaugcaggcgcccggccgggggcc

SEQ ID NO: 312202 - RNA, 32 nt, Homo Sapiens
aacaucuccaugugcacucucaucucuugcag

SEQ ID NO: 312203 - RNA, 32 nt, Homo Sapiens
gucguuccccguguguccccagcccggucccu

SEQ ID NO: 312204 - RNA, 32 nt, Homo Sapiens
agccuucagguggagggguuuaccaccuuccu

SEQ ID NO: 312205 - RNA, 32 nt, Homo Sapiens
cuccaucccugagcucucggcuccuccuccgu

SEQ ID NO: 312206 - RNA, 32 nt, Homo Sapiens
gagcgcaggcagagcucugugugccguguaca

SEQ ID NO: 312207 - RNA, 32 nt, Homo Sapiens
cagccagacuucuggaggaauugguuguauag

SEQ ID NO: 312208 - RNA, 32 nt, Homo Sapiens
ggccugagaaggaagggaccuccacgacaggu

SEQ ID NO: 312209 - RNA, 30 nt, Homo Sapiens
uuucucacucaugccacccgucuacugagg

SEQ ID NO: 312210 - RNA, 32 nt, Homo Sapiens
gaaucaauauauauguugauaucaugaguuaa

SEQ ID NO: 312211 - RNA, 32 nt, Homo Sapiens
gucuguucauauccuucacccauuuuuugaag

SEQ ID NO: 312212 - RNA, 32 nt, Homo Sapiens
aaaugggaggagccuuccuccacccugauccu

SEQ ID NO: 312213 - RNA, 32 nt, Homo Sapiens
cagaggcaaggccuuacugcugcaacuacgag

SEQ ID NO: 312214 - RNA, 32 nt, Homo Sapiens
cacuagggaaaagaagaaggggcgaacugcuu

SEQ ID NO: 312215 - RNA, 32 nt, Homo Sapiens
ucuacugaaacauuaugugguuuaacguuuau

SEQ ID NO: 312216 - RNA, 32 nt, Homo Sapiens
aagaaauuaauguaugaugacaucucacaggu

SEQ ID NO: 312217 - RNA, 32 nt, Homo Sapiens
gggugccagaaagugucugcugauauuugugg

SEQ ID NO: 312218 - RNA, 32 nt, Homo Sapiens
uggcuaccaacccacccaagcuuucuucucca

SEQ ID NO: 312219 - RNA, 32 nt, Homo Sapiens
guguccuugguacagaaccauccacuugaccu

SEQ ID NO: 312220 - RNA, 32 nt, Homo Sapiens
cgcuugcuggaacccaucagacaccugguccc

SEQ ID NO: 312221 - RNA, 32 nt, Homo Sapiens
ggacugggaaaggaucuguuccaggcuucccu

SEQ ID NO: 312222 - RNA, 32 nt, Homo Sapiens
gucgccccaagccucccaauuucucgcagccc

SEQ ID NO: 312223 - RNA, 32 nt, Homo Sapiens
ucgcagcaaaggaaacaaguuucugacucugg

SEQ ID NO: 312224 - RNA, 32 nt, Homo Sapiens
aaucacacuggugugugaugggcuugcccauc

SEQ ID NO: 312225 - RNA, 32 nt, Homo Sapiens
ggcagugcuggcuuggccauuaaauggaaacc

SEQ ID NO: 312226 - RNA, 32 nt, Homo Sapiens
gucguaagugaacaauuugguucuuuagcuca

SEQ ID NO: 312227 - RNA, 32 nt, Homo Sapiens
cuguuggaguaauguaaauuguaauuauaaau

SEQ ID NO: 312228 - RNA, 32 nt, Homo Sapiens
uuggagggaggaagaaagggagccggcguuca

SEQ ID NO: 312229 - RNA, 32 nt, Homo Sapiens
aauaauuuuuaaaaauuguucaucaacuucuu

SEQ ID NO: 312230 - RNA, 32 nt, Homo Sapiens
ucuaaaaugcuuaaugccuuugaaauuuugua

SEQ ID NO: 312231 - RNA, 32 nt, Homo Sapiens
aaauuagcugggugugguggcauacgccugua

SEQ ID NO: 312232 - RNA, 32 nt, Homo Sapiens
aaauuagcuggguguaguggcaugcgccugua

SEQ ID NO: 312233 - RNA, 32 nt, Homo Sapiens
ucacuuaaugaaauuauugcaacaggaaucuu

SEQ ID NO: 312234 - RNA, 32 nt, Homo Sapiens
cccaggucuucagacaauugugaacucaacca

SEQ ID NO: 312235 - RNA, 32 nt, Homo Sapiens
gugguccguggcggcgcgcuccacccggcacg

SEQ ID NO: 312236 - RNA, 32 nt, Homo Sapiens
aaugguacagcuucuggagcagaacuuuccag

SEQ ID NO: 312237 - RNA, 32 nt, Homo Sapiens
caacauuggaaauucagaaguuaauguuuuuu

SEQ ID NO: 312238 - RNA, 32 nt, Homo Sapiens
acagugauauauuaaacccaaaaggaaucauc

SEQ ID NO: 312239 - RNA, 32 nt, Homo Sapiens
cgagcccucagcugcuggcccugagccccagc

SEQ ID NO: 312240 - RNA, 32 nt, Homo Sapiens
agcucugcauuugucuauucuccagcugaccc

SEQ ID NO: 312241 - RNA, 32 nt, Homo Sapiens
aacuuucugauaucaugauacaauggcugaag

SEQ ID NO: 312242 - RNA, 32 nt, Homo Sapiens
uaaaaccguggcuuaaauuugccaaggauaag

SEQ ID NO: 312243 - RNA, 32 nt, Homo Sapiens
acaguaacuugaaagcacuugcuauucuggaa

SEQ ID NO: 312244 - RNA, 32 nt, Homo Sapiens
uaaagggacaaaggcauggacaccaucauguu

SEQ ID NO: 312245 - RNA, 32 nt, Homo Sapiens
aguccaagauggugugaaauugguucuuuuua

SEQ ID NO: 312246 - RNA, 32 nt, Homo Sapiens
caccuccccgcaccgcccgcgcugcgcgcccg

SEQ ID NO: 312247 - RNA, 32 nt, Homo Sapiens
aaucuuucuugaauuucugauagagaaguaaa

SEQ ID NO: 312248 - RNA, 32 nt, Homo Sapiens
ugacaggcggccuggcugcagaaacguugcac

SEQ ID NO: 312249 - RNA, 32 nt, Homo Sapiens
uuaugauccaaauuaaaaugguuuuucuuguu

SEQ ID NO: 312250 - RNA, 32 nt, Homo Sapiens
cucuccaggacacagcgcucccaacucugagu

SEQ ID NO: 312251 - RNA, 32 nt, Homo Sapiens
gcgagcgggcgcgggcgccgcgcagauggccu

SEQ ID NO: 312252 - RNA, 32 nt, Homo Sapiens
uggggaguauccacagagucaaaggaacacua

SEQ ID NO: 312253 - RNA, 32 nt, Homo Sapiens
aaagugcagaaagagcagguaaaaaguuagcc

SEQ ID NO: 312254 - RNA, 32 nt, Homo Sapiens
cuagagggccauuggagcuugcagcucagacc

SEQ ID NO: 312255 - RNA, 30 nt, Homo Sapiens
cuccgucggcagcugggggaagggucugag

SEQ ID NO: 312256 - RNA, 32 nt, Homo Sapiens
gaacucaccaaaauguucaacaccauaacaac

SEQ ID NO: 312257 - RNA, 32 nt, Homo Sapiens
ugcagucugauccaggaggccggggccgggua

SEQ ID NO: 312258 - RNA, 32 nt, Homo Sapiens
gcucucgcguccuuugcuggguccagacaccg

SEQ ID NO: 312259 - RNA, 32 nt, Homo Sapiens
aaguuauguaagguuuuuuuuaucuuuaaaua

SEQ ID NO: 312260 - RNA, 32 nt, Homo Sapiens
ccaggggaggccuggguuucaggaacagguaa

SEQ ID NO: 312261 - RNA, 32 nt, Homo Sapiens
caugaaagcacuuuaaggcacugauuuuaaga

SEQ ID NO: 312262 - RNA, 32 nt, Homo Sapiens
acauucgggcuugucuuccucuuccauguccc

SEQ ID NO: 312263 - RNA, 32 nt, Homo Sapiens
aucauggaggggguacaggaagagacugacac

SEQ ID NO: 312264 - RNA, 32 nt, Homo Sapiens
ggccuggacagccuccuucagcccuucuguac

SEQ ID NO: 312265 - RNA, 32 nt, Homo Sapiens
cgcggucugcggcccauggaagaggaggagga

SEQ ID NO: 312266 - RNA, 32 nt, Homo Sapiens
agcuuggccggguguucuggcucagggucuuu

SEQ ID NO: 312267 - RNA, 32 nt, Homo Sapiens
acaaaauauuuuauuauauaaaaccagguuag

SEQ ID NO: 312268 - RNA, 32 nt, Homo Sapiens
ggcggcgcccuggacucccgggcccgcgcauc

SEQ ID NO: 312269 - RNA, 32 nt, Homo Sapiens
aauucccucccucccccaaacacaugauuuuu

SEQ ID NO: 312270 - RNA, 32 nt, Homo Sapiens
uccccacccugccuccucccugcugcuuugca

SEQ ID NO: 312271 - RNA, 32 nt, Homo Sapiens
ugggagcagaacugcgucuuguaucaccuggc

SEQ ID NO: 312272 - RNA, 32 nt, Homo Sapiens
cucuaagauugguauuugauauucacuuuacu

SEQ ID NO: 312273 - RNA, 32 nt, Homo Sapiens
gccgacacuggccaggacacagcccucucucu

SEQ ID NO: 312274 - RNA, 32 nt, Homo Sapiens
aggcggaggaggaggagcaugucggacgguuu

SEQ ID NO: 312275 - RNA, 32 nt, Homo Sapiens
acaggcaccagcaaaacaacggaugaauguag

SEQ ID NO: 312276 - RNA, 32 nt, Homo Sapiens
cucugccucccucuccaacgcccggaugaucu

SEQ ID NO: 312277 - RNA, 32 nt, Homo Sapiens
ggagggcggcggcggcggcugcggucgaagaa

SEQ ID NO: 312278 - RNA, 32 nt, Homo Sapiens
gugaggggaaagggugggguguucuuugugua

SEQ ID NO: 312279 - RNA, 32 nt, Homo Sapiens
gaacgugagucuuuuuagcauuccuuucugcu

SEQ ID NO: 312280 - RNA, 32 nt, Homo Sapiens
cugguggcaucugaguuccccauccuaccacu

SEQ ID NO: 312281 - RNA, 32 nt, Homo Sapiens
aagaugucagagccccgaagcagcuaauguaa

SEQ ID NO: 312282 - RNA, 32 nt, Homo Sapiens
ggccuucuagaagcugaaguugugcccucaag

SEQ ID NO: 312283 - RNA, 32 nt, Homo Sapiens
guuguuuagacuauuauuuuuguucgacucua

SEQ ID NO: 312284 - RNA, 32 nt, Homo Sapiens
uccaaaaauauuuugauagcaaugcaaaacuu

SEQ ID NO: 312285 - RNA, 32 nt, Homo Sapiens
ggaaguggcagugaaaaauauguugaguguuc

SEQ ID NO: 312286 - RNA, 32 nt, Homo Sapiens
aaaccaucuuucuggccaaaucucuaacacgu

SEQ ID NO: 312287 - RNA, 32 nt, Homo Sapiens
accacggacguuugccuucauguguagaauuu

SEQ ID NO: 312288 - RNA, 32 nt, Homo Sapiens
acgcgcggcccggcuucuguccucgcggcgcu

SEQ ID NO: 312289 - RNA, 32 nt, Homo Sapiens
uuuaaugcuuugcugcgguuuccugaaagagc

SEQ ID NO: 312290 - RNA, 32 nt, Homo Sapiens
ccugccugggcucccaggauucgggucugaga

SEQ ID NO: 312291 - RNA, 32 nt, Homo Sapiens
caauuugucuuuuccuuuuuuauuaaaauuau

SEQ ID NO: 312292 - RNA, 32 nt, Homo Sapiens
aaacuuuagaaaacaguugcuccacuuuagga

SEQ ID NO: 312293 - RNA, 32 nt, Homo Sapiens
agucuguacaccuuuauuauuaguuuuugagu

SEQ ID NO: 312294 - RNA, 32 nt, Homo Sapiens
cgggcacugggcgacucugugccucgcugagg

SEQ ID NO: 312295 - RNA, 32 nt, Homo Sapiens
caaaaaacuuguuuucacauggaccaaaagau

SEQ ID NO: 312296 - RNA, 32 nt, Homo Sapiens
uuugauucugaaaucuuucuaccuguugcacc

SEQ ID NO: 312297 - RNA, 32 nt, Homo Sapiens
gugacuuggauacaccaauuagaaauuaaaua

SEQ ID NO: 312298 - RNA, 32 nt, Homo Sapiens
cuaagggcuuguuuuucuucagcauuuacuug

SEQ ID NO: 312299 - RNA, 32 nt, Homo Sapiens
auccaccaauaaauaaagcuucugcagaauca

SEQ ID NO: 312300 - RNA, 32 nt, Homo Sapiens
ugggccacaugcagggcaccccugccccgucc

SEQ ID NO: 312301 - RNA, 32 nt, Homo Sapiens
aaaucuugcauucuauuuauucuuucaacuaa

SEQ ID NO: 312302 - RNA, 32 nt, Homo Sapiens
ccuggugaagagaggguggaaaggcccuucag

SEQ ID NO: 312303 - RNA, 32 nt, Homo Sapiens
auugggaaauauuuaaagcaacagacaggcuu

SEQ ID NO: 312304 - RNA, 32 nt, Homo Sapiens
cucaucuuguaaauaaugcuuaacauaaacuu

SEQ ID NO: 312305 - RNA, 32 nt, Homo Sapiens
caggcgccauguccggccgcgaagguggcaag

SEQ ID NO: 312306 - RNA, 32 nt, Homo Sapiens
agaagaggccgaaguuugccgcggccgugagu

SEQ ID NO: 312307 - RNA, 32 nt, Homo Sapiens
cuccaucugcccguagcuugccaggucuccua

SEQ ID NO: 312308 - RNA, 32 nt, Homo Sapiens
auccgcuggcugccuccugucagcugggcagg

SEQ ID NO: 312309 - RNA, 32 nt, Homo Sapiens
uggccacuuuuguauguugccagcauauuuug

SEQ ID NO: 312310 - RNA, 32 nt, Homo Sapiens
ggcccucauuuucucugggaauguucugagcu

SEQ ID NO: 312311 - RNA, 32 nt, Homo Sapiens
agggacuguccuuuccucuccuaccccacccc

SEQ ID NO: 312312 - RNA, 32 nt, Homo Sapiens
caaaaauguguaagaacaacuaccugagcuaa

SEQ ID NO: 312313 - RNA, 32 nt, Homo Sapiens
uuaguguuuuuaaagcugcucauuucauuuug

SEQ ID NO: 312314 - RNA, 32 nt, Homo Sapiens
uuugguuuuacuauuuuaaagugggcguuagg

SEQ ID NO: 312315 - RNA, 27 nt, Homo Sapiens
ucauggaggugguaacauuuggcgaug

SEQ ID NO: 312316 - RNA, 32 nt, Homo Sapiens
ccagcuuuucccuuugguggcuucuccaggcc

SEQ ID NO: 312317 - RNA, 30 nt, Homo Sapiens
acuuaagggccagugggggaaggcugucaa

SEQ ID NO: 312318 - RNA, 32 nt, Homo Sapiens
accauuacacuccagccugggcgacaagagca

SEQ ID NO: 312319 - RNA, 30 nt, Homo Sapiens
gccccguagcuucggccgccggcacuggca

SEQ ID NO: 312320 - RNA, 32 nt, Homo Sapiens
caugggauccuguggcucucccguugcagagg

SEQ ID NO: 312321 - RNA, 32 nt, Homo Sapiens
uuagcaggugugcuuagcucuugauagugaac

SEQ ID NO: 312322 - RNA, 32 nt, Homo Sapiens
ugggaaccgcgguggcuuccgcggagguuucg

SEQ ID NO: 312323 - RNA, 32 nt, Homo Sapiens
aaccugccuggagucaaaacacugcuggcgag

SEQ ID NO: 312324 - RNA, 32 nt, Homo Sapiens
gggccugucuccuggggccauggccgggcuca

SEQ ID NO: 312325 - RNA, 32 nt, Homo Sapiens
acgaaaaucaaccaucaugacaaaaucaaugg

SEQ ID NO: 312326 - RNA, 32 nt, Homo Sapiens
caagacucacaccagcagcggacugcaggccu

SEQ ID NO: 312327 - RNA, 32 nt, Homo Sapiens
cauagccuacaacuggcucaccacaggcccuc

SEQ ID NO: 312328 - RNA, 32 nt, Homo Sapiens
auaauggguugaugucugaaguagcaaaucuu

SEQ ID NO: 312329 - RNA, 32 nt, Homo Sapiens
gcagaaguuacaguagacugugaggcacccca

SEQ ID NO: 312330 - RNA, 32 nt, Homo Sapiens
uaaauacaguuacccaauauuccuguuuguuc

SEQ ID NO: 312331 - RNA, 32 nt, Homo Sapiens
cacaggagcugcugaccacccugcgggacgcc

SEQ ID NO: 312332 - RNA, 32 nt, Homo Sapiens
uacuaauuauauaauuugaaagcaaaaagaag

SEQ ID NO: 312333 - RNA, 32 nt, Homo Sapiens
cacgcgcgcccucucccgugccauggccugca

SEQ ID NO: 312334 - RNA, 32 nt, Homo Sapiens
cuuuucccauucuucagugguccugcucugug

SEQ ID NO: 312335 - RNA, 29 nt, Homo Sapiens
uuuugguggcaucucaguucaggauguuc

SEQ ID NO: 312336 - RNA, 32 nt, Homo Sapiens
cucuguucuugcccuuuccagcagcugcagcu

SEQ ID NO: 312337 - RNA, 32 nt, Homo Sapiens
ccaggggugugcugcguacagccccgaugacc

SEQ ID NO: 312338 - RNA, 32 nt, Homo Sapiens
uggaagaugguaaacaaucacuuuuuaaaacc

SEQ ID NO: 312339 - RNA, 32 nt, Homo Sapiens
aaauucaggaggaaggaguccagcguggauug

SEQ ID NO: 312340 - RNA, 32 nt, Homo Sapiens
caugaagcgcucucgucugacauuuguuugga

SEQ ID NO: 312341 - RNA, 30 nt, Homo Sapiens
accccuuuucucccugccugauucucugag

SEQ ID NO: 312342 - RNA, 32 nt, Homo Sapiens
uccgcggcggccugggggccugcuuggaggaa

SEQ ID NO: 312343 - RNA, 32 nt, Homo Sapiens
agaaguggaaaacucuuugccuucuccuuacc

SEQ ID NO: 312344 - RNA, 32 nt, Homo Sapiens
cuaaagguucccucuccacccguucugccuca

SEQ ID NO: 312345 - RNA, 32 nt, Homo Sapiens
ccugccuuuccacaggaagcacucacaggcac

SEQ ID NO: 312346 - RNA, 32 nt, Homo Sapiens
ugcauugagagggaguugugggaaauaagaag

SEQ ID NO: 312347 - RNA, 32 nt, Homo Sapiens
uuuaagaauaaauguguuugauacaaaaaaaa

SEQ ID NO: 312348 - RNA, 32 nt, Homo Sapiens
uaauuguacuugucuuuuuuuacuuuaagagc

SEQ ID NO: 312349 - RNA, 32 nt, Homo Sapiens
gaguggguuaacuaacagcuuuauugagaugu

SEQ ID NO: 312350 - RNA, 32 nt, Homo Sapiens
guugggaguuugcggugggcagggggagggag

SEQ ID NO: 312351 - RNA, 32 nt, Homo Sapiens
ccucugaccccggccugggcuucagccgcuuc

SEQ ID NO: 312352 - RNA, 32 nt, Homo Sapiens
cauagccucagccccaggccucuguccugccg

SEQ ID NO: 312353 - RNA, 32 nt, Homo Sapiens
gaccgaggccgcgccagggcgcuguugcugcc

SEQ ID NO: 312354 - RNA, 32 nt, Homo Sapiens
cuuuucccacaugaaccuccagcaaauagcaa

SEQ ID NO: 312355 - RNA, 32 nt, Homo Sapiens
ugaaaggaaaucuuguuucaauguuuauuaua

SEQ ID NO: 312356 - RNA, 32 nt, Homo Sapiens
cccuauggacgaacccccuccccccgggcucu

SEQ ID NO: 312357 - RNA, 32 nt, Homo Sapiens
gccgccggcgcuggguacucggcggccaccgg

SEQ ID NO: 312358 - RNA, 32 nt, Homo Sapiens
auaggcagcuuaggccacucuuggaucuugag

SEQ ID NO: 312359 - RNA, 32 nt, Homo Sapiens
cggcugcugggccccaggugcgcacggauggu

SEQ ID NO: 312360 - RNA, 32 nt, Homo Sapiens
ccccgacuuuugcugaagcagguuucuacucc

SEQ ID NO: 312361 - RNA, 32 nt, Homo Sapiens
gaacgagcauaaauaaauguagcaaaauuucu

SEQ ID NO: 312362 - RNA, 32 nt, Homo Sapiens
uucaaucaugguuauuugauggcaaaaucgac

SEQ ID NO: 312363 - RNA, 32 nt, Homo Sapiens
uagaaauauuuuuuauuuuuccccaagaauug

SEQ ID NO: 312364 - RNA, 32 nt, Homo Sapiens
ugcaucucugccucaccccauccacugccaca

SEQ ID NO: 312365 - RNA, 32 nt, Homo Sapiens
gugcuuugcccuccccacugugagugaggggc

SEQ ID NO: 312366 - RNA, 31 nt, Homo Sapiens
ccagaucuguuacguagcugaguuaauuuca

SEQ ID NO: 312367 - RNA, 32 nt, Homo Sapiens
uuuuaaacuuucugaagugcugauguacauac

SEQ ID NO: 312368 - RNA, 32 nt, Homo Sapiens
gcuugcccggccgacccuccccuccccaccuc

SEQ ID NO: 312369 - RNA, 32 nt, Homo Sapiens
gcaauuuuucuuucuccaccccaaaccugugc

SEQ ID NO: 312370 - RNA, 32 nt, Homo Sapiens
ggcgcuuggugcccucuggacuuucccacuuc

SEQ ID NO: 312371 - RNA, 32 nt, Homo Sapiens
aaaauccaagacacuaugccaaugcaaccgug

SEQ ID NO: 312372 - RNA, 32 nt, Homo Sapiens
cggagccccgcccugacauccuggacaugccu

SEQ ID NO: 312373 - RNA, 32 nt, Homo Sapiens
auuaguuuuuaaaaucaguacuuuuuaaugga

SEQ ID NO: 312374 - RNA, 32 nt, Homo Sapiens
agccaagauugugacacugcacuccagccugg

SEQ ID NO: 312375 - RNA, 32 nt, Homo Sapiens
cuccaccgcggaccugccccagccccgcaucc

SEQ ID NO: 312376 - RNA, 32 nt, Homo Sapiens
uuacauccaaaaaauaagugagaauaugcaac

SEQ ID NO: 312377 - RNA, 32 nt, Homo Sapiens
uucuacugagaugauccaagaccaaaaguguu

SEQ ID NO: 312378 - RNA, 32 nt, Homo Sapiens
caacuuauuaaacuuuuauauagauagaggaa

SEQ ID NO: 312379 - RNA, 32 nt, Homo Sapiens
guaaacgcaccaaucagugcucucugucuacu

SEQ ID NO: 312380 - RNA, 30 nt, Homo Sapiens
aaccugggagguggaggcagugagcugaga

SEQ ID NO: 312381 - RNA, 32 nt, Homo Sapiens
auuuuuugcuaagguaaaugccuugccaucuu

SEQ ID NO: 312382 - RNA, 32 nt, Homo Sapiens
gaucauuuaggucucuugcauccuuuauuuua

SEQ ID NO: 312383 - RNA, 32 nt, Homo Sapiens
aauucagaaaauuuaauuuucauaguaggcca

SEQ ID NO: 312384 - RNA, 30 nt, Homo Sapiens
guagguuauuacugcaucuguucaggggag

SEQ ID NO: 312385 - RNA, 32 nt, Homo Sapiens
gagaucugaaauaguuuucuuccacuacauug

SEQ ID NO: 312386 - RNA, 32 nt, Homo Sapiens
gcaauuguaaaauggacgucuagaauuggucu

SEQ ID NO: 312387 - RNA, 32 nt, Homo Sapiens
gucuuaagauauauuuuuuaaacuuuuuauac

SEQ ID NO: 312388 - RNA, 29 nt, Homo Sapiens
aucauaagguuguuauauuuuaagacaua

SEQ ID NO: 312389 - RNA, 32 nt, Homo Sapiens
guguagugaauguuucuucaguuucuuguuca

SEQ ID NO: 312390 - RNA, 32 nt, Homo Sapiens
cgucuggcugcauucggaggaagaccuggggc

SEQ ID NO: 312391 - RNA, 32 nt, Homo Sapiens
gccugaagaaccacucuuggggccuuccccag

SEQ ID NO: 312392 - RNA, 32 nt, Homo Sapiens
cuugggguucauaggggcagguccuagucggg

SEQ ID NO: 312393 - RNA, 32 nt, Homo Sapiens
aagucauuuuuauagacagucuaaacaaaaaa

SEQ ID NO: 312394 - RNA, 32 nt, Homo Sapiens
acucucccauggcuuaaugcuucuuucauuuu

SEQ ID NO: 312395 - RNA, 32 nt, Homo Sapiens
gcaugaaggccgccagcucccgccagccgcuc

SEQ ID NO: 312396 - RNA, 32 nt, Homo Sapiens
gccgaagcguggggcgcgcgugcggaggacca

SEQ ID NO: 312397 - RNA, 32 nt, Homo Sapiens
ccucuuugcguggaaucagaccucuuuugcag

SEQ ID NO: 312398 - RNA, 32 nt, Homo Sapiens
augguggcuagauuagugggagcaguucaccu

SEQ ID NO: 312399 - RNA, 32 nt, Homo Sapiens
gugccccgcccggccccugcccccuccaaccc

SEQ ID NO: 312400 - RNA, 32 nt, Homo Sapiens
agcaagugaugaugaagaagcugcaucaaguu

SEQ ID NO: 312401 - RNA, 32 nt, Homo Sapiens
ccucuguccuggcugccucagggcgcccugaa

SEQ ID NO: 312402 - RNA, 32 nt, Homo Sapiens
cuucagaaggcaccucacuucucagacuuaaa

SEQ ID NO: 312403 - RNA, 32 nt, Homo Sapiens
acagaccgagggugggaguugaggacuuugau

SEQ ID NO: 312404 - RNA, 32 nt, Homo Sapiens
aaaagaauccgaaaaaccacaaagaaacacca

SEQ ID NO: 312405 - RNA, 32 nt, Homo Sapiens
acuggucugugcccucacagcaccgcacaucg

SEQ ID NO: 312406 - RNA, 32 nt, Homo Sapiens
augcaugucucucucacccccauguccaauca

SEQ ID NO: 312407 - RNA, 32 nt, Homo Sapiens
uucauccggcuuagcuuggggcuggcugcauu

SEQ ID NO: 312408 - RNA, 31 nt, Homo Sapiens
gguacuaagccccaggaccaaugguagacaa

SEQ ID NO: 312409 - RNA, 32 nt, Homo Sapiens
acaaggcaacacuuauuauccaaagggcaaca

SEQ ID NO: 312410 - RNA, 32 nt, Homo Sapiens
caaauaguauacauuguaccuaguaaauacuu

SEQ ID NO: 312411 - RNA, 32 nt, Homo Sapiens
acucccuguccuagucggucuaucuggacuug

SEQ ID NO: 312412 - RNA, 32 nt, Homo Sapiens
ugauaaaacuuuucuuuuuucuuuuuuuuuuu

SEQ ID NO: 312413 - RNA, 32 nt, Homo Sapiens
uuuuacuucuaagauuugcauuuacaucauaa

SEQ ID NO: 312414 - RNA, 32 nt, Homo Sapiens
acuugcugcgggcugcuuuguauuuuaaaaca

SEQ ID NO: 312415 - RNA, 32 nt, Homo Sapiens
gagccugagucucugagccguccccagcaaac

SEQ ID NO: 312416 - RNA, 32 nt, Homo Sapiens
gcagucagcagaggagagcgccaggacgcuac

SEQ ID NO: 312417 - RNA, 32 nt, Homo Sapiens
cagccugccagagcagagagccacccgcuggc

SEQ ID NO: 312418 - RNA, 32 nt, Homo Sapiens
ucugaaaacacacuggcaggugcuccucuccu

SEQ ID NO: 312419 - RNA, 32 nt, Homo Sapiens
ccgggaagcccggcuccccgagcgcuccggcc

SEQ ID NO: 312420 - RNA, 32 nt, Homo Sapiens
uguauagaacagaagcuugcccucuuucugaa

SEQ ID NO: 312421 - RNA, 32 nt, Homo Sapiens
aguaggaugacaguuuugaguauacucugcac

SEQ ID NO: 312422 - RNA, 32 nt, Homo Sapiens
agcagaggcugugcgugucaguucuucuugca

SEQ ID NO: 312423 - RNA, 32 nt, Homo Sapiens
uuucaccauggaugaaacuauaacuuaaagaa

SEQ ID NO: 312424 - RNA, 32 nt, Homo Sapiens
acuugugcacaccagcacaugcaugcacacca

SEQ ID NO: 312425 - RNA, 32 nt, Homo Sapiens
ccuaaaggaaaagaggcgacagcggagcagcg

SEQ ID NO: 312426 - RNA, 32 nt, Homo Sapiens
uggaacuagcagaauaaaacaucuauuuuaaa

SEQ ID NO: 312427 - RNA, 32 nt, Homo Sapiens
ccuauucuuuacucagacauugauguagacuu

SEQ ID NO: 312428 - RNA, 32 nt, Homo Sapiens
ucuaguuaugguuuaaauuuucuuaguaguau

SEQ ID NO: 312429 - RNA, 32 nt, Homo Sapiens
uacugauauaaaaucaucaagauggaaguuaa

SEQ ID NO: 312430 - RNA, 32 nt, Homo Sapiens
acucgggugcgguggcacacgucuguaguccc

SEQ ID NO: 312431 - RNA, 32 nt, Homo Sapiens
ccaagaucuaaauauaagagcugaaacuauaa

SEQ ID NO: 312432 - RNA, 32 nt, Homo Sapiens
gcaaccaccagcccagguuaauccccagaggc

SEQ ID NO: 312433 - RNA, 32 nt, Homo Sapiens
guauauuuaaacaauaauacuaucuuuuauag

SEQ ID NO: 312434 - RNA, 32 nt, Homo Sapiens
cuuuucuguuuagugcauuuaaguuaaguuaa

SEQ ID NO: 312435 - RNA, 32 nt, Homo Sapiens
ugugaguaaaaagaacaggaaaaaauugcuuc

SEQ ID NO: 312436 - RNA, 32 nt, Homo Sapiens
aagaaaaaaugaugaaguugcaaauggcagug

SEQ ID NO: 312437 - RNA, 32 nt, Homo Sapiens
uagcacgucaaauuagucucuccguuucagag

SEQ ID NO: 312438 - RNA, 32 nt, Homo Sapiens
acauccuuuacauucaguuaagaucaaaccuc

SEQ ID NO: 312439 - RNA, 32 nt, Homo Sapiens
cuuuaaaacaauuuccaaauuuugcagaccau

SEQ ID NO: 312440 - RNA, 32 nt, Homo Sapiens
gacaaaaucuguguaacaggagggagaauagc

SEQ ID NO: 312441 - RNA, 32 nt, Homo Sapiens
aaagucccugucaucccuucagauuccagagc

SEQ ID NO: 312442 - RNA, 32 nt, Homo Sapiens
ccccuucgcucccagggccaugcuuugccugu

SEQ ID NO: 312443 - RNA, 32 nt, Homo Sapiens
uguaugagaaaguuggccuuuggacuuaggau

SEQ ID NO: 312444 - RNA, 30 nt, Homo Sapiens
uggcaauggaacaaacaaaauugaacacua

SEQ ID NO: 312445 - RNA, 32 nt, Homo Sapiens
gcucuggugaaugguaagaggcagauggucuc

SEQ ID NO: 312446 - RNA, 32 nt, Homo Sapiens
guauacuaauaaauauacacuaauauauaaca

SEQ ID NO: 312447 - RNA, 32 nt, Homo Sapiens
aagugccucucauuucuggggaguuguuuaca

SEQ ID NO: 312448 - RNA, 32 nt, Homo Sapiens
acagaaucuccuuaggccccaggcuucacaag

SEQ ID NO: 312449 - RNA, 32 nt, Homo Sapiens
aagaucccucccugcaagacagaugggaaugu

SEQ ID NO: 312450 - RNA, 32 nt, Homo Sapiens
cugggcagaggggccuggggcugggcccagag

SEQ ID NO: 312451 - RNA, 32 nt, Homo Sapiens
aauaauaguauuucauuuuucauuccuaguga

SEQ ID NO: 312452 - RNA, 32 nt, Homo Sapiens
uagcuggcgcccccaacaccauaagccuucac

SEQ ID NO: 312453 - RNA, 32 nt, Homo Sapiens
ggcgauggggaggagccggcuccggcagugag

SEQ ID NO: 312454 - RNA, 32 nt, Homo Sapiens
cagcgcgugcgcgcgcucugcuacgucaucag

SEQ ID NO: 312455 - RNA, 32 nt, Homo Sapiens
agcugguugcaauuauuggacaagcaggaaac

SEQ ID NO: 312456 - RNA, 32 nt, Homo Sapiens
caacuugagugaucccaaaccaaacuaacagu

SEQ ID NO: 312457 - RNA, 32 nt, Homo Sapiens
aucaaggcacuguaaaucuuauaauuuuaaaa

SEQ ID NO: 312458 - RNA, 32 nt, Homo Sapiens
gccaggcaaccuggccaaauccauaagacuca

SEQ ID NO: 312459 - RNA, 32 nt, Homo Sapiens
uaugauauauaccagagaauuuuuuacucguu

SEQ ID NO: 312460 - RNA, 32 nt, Homo Sapiens
cacacaggaggagggaggagcugguagggaga

SEQ ID NO: 312461 - RNA, 32 nt, Homo Sapiens
cuacugggacccucaagaggaauaccacuuau

SEQ ID NO: 312462 - RNA, 32 nt, Homo Sapiens
ggucucccaaacgcccuuuccuccucaggcac

SEQ ID NO: 312463 - RNA, 32 nt, Homo Sapiens
cucacuauaugcauuucuuuuucuauauccuu

SEQ ID NO: 312464 - RNA, 32 nt, Homo Sapiens
gcagaagacuaucuuaaaauacaggauuuuaa

SEQ ID NO: 312465 - RNA, 32 nt, Homo Sapiens
gccagucagaggaggaggagaaggagccccuc

SEQ ID NO: 312466 - RNA, 32 nt, Homo Sapiens
uaaggacucuucagggaguccuggugggaagu

SEQ ID NO: 312467 - RNA, 32 nt, Homo Sapiens
ucuccuuucauugucagacucccccuggucua

SEQ ID NO: 312468 - RNA, 32 nt, Homo Sapiens
guggguccucccagcucggcagcccucugcug

SEQ ID NO: 312469 - RNA, 32 nt, Homo Sapiens
ucuuucucauuuccauuguuuuuauaaaaaua

SEQ ID NO: 312470 - RNA, 32 nt, Homo Sapiens
gggggcggggaggagaggcggcggcggcagug

SEQ ID NO: 312471 - RNA, 32 nt, Homo Sapiens
gaaaauucauacuuggagaaauccuacaaaug

SEQ ID NO: 312472 - RNA, 32 nt, Homo Sapiens
acaucaacccaccuuugagcuuuagaucuaag

SEQ ID NO: 312473 - RNA, 32 nt, Homo Sapiens
cuuaaaaaugacuuauccaauuucuguauuuc

SEQ ID NO: 312474 - RNA, 32 nt, Homo Sapiens
auacuuccaaauaaauuuuuaacauuguaagc

SEQ ID NO: 312475 - RNA, 32 nt, Homo Sapiens
cccuauaaccucaggccuuggcauugaguccu

SEQ ID NO: 312476 - RNA, 31 nt, Homo Sapiens
uuugggaaauaaaauaccguuguauauauuc

SEQ ID NO: 312477 - RNA, 32 nt, Homo Sapiens
caucuccgggaacccagcccaggcccugccuc

SEQ ID NO: 312478 - RNA, 32 nt, Homo Sapiens
gccuuguuucccuuuccuuucuccaguccacg

SEQ ID NO: 312479 - RNA, 32 nt, Homo Sapiens
aggaauguggcugucucacccuugcuugcaaa

SEQ ID NO: 312480 - RNA, 32 nt, Homo Sapiens
gggagauuaaauuuaaagugcuacacuagggu

SEQ ID NO: 312481 - RNA, 32 nt, Homo Sapiens
aaggaugaagaaaaacaaaauaacuacuacuu

SEQ ID NO: 312482 - RNA, 32 nt, Homo Sapiens
ucgccuugauguucugccuuauaaaugcacaa

SEQ ID NO: 312483 - RNA, 32 nt, Homo Sapiens
ugacauuuacacaacuuguaggugugcuuggu

SEQ ID NO: 312484 - RNA, 32 nt, Homo Sapiens
uuaguguuugaaaagauucuuaauagcuggcu

SEQ ID NO: 312485 - RNA, 29 nt, Homo Sapiens
gggaaagguauuuuguaccauaugggacu

SEQ ID NO: 312486 - RNA, 32 nt, Homo Sapiens
cuccucacggcucuucccggcgcucuccuggc

SEQ ID NO: 312487 - RNA, 32 nt, Homo Sapiens
gccaucaaauacugaacucugaaugauggcug

SEQ ID NO: 312488 - RNA, 32 nt, Homo Sapiens
ccccgcaccuuccuggggccuguccagcugca

SEQ ID NO: 312489 - RNA, 32 nt, Homo Sapiens
gcacgugccuuacagcccuuuccgagggaugg

SEQ ID NO: 312490 - RNA, 32 nt, Homo Sapiens
caacccccaagccuugugaccugggaggcagg

SEQ ID NO: 312491 - RNA, 32 nt, Homo Sapiens
ucugucuaugaaacaaaaauggcauuuuucaa

SEQ ID NO: 312492 - RNA, 32 nt, Homo Sapiens
ucucaggaaggugguucugugcaugccugggu

SEQ ID NO: 312493 - RNA, 32 nt, Homo Sapiens
uuaauaaaaacaaauccauuguccucuuaaaa

SEQ ID NO: 312494 - RNA, 32 nt, Homo Sapiens
uauguaacuaaaucacuguuuuauaaacuugu

SEQ ID NO: 312495 - RNA, 32 nt, Homo Sapiens
uuccacccauugggcaggccgcacgggggcgc

SEQ ID NO: 312496 - RNA, 32 nt, Homo Sapiens
cuagcagguucagacaacaagagaguaacaau

SEQ ID NO: 312497 - RNA, 32 nt, Homo Sapiens
ggauuaugucaucggggaauaaaugggaaauu

SEQ ID NO: 312498 - RNA, 32 nt, Homo Sapiens
ucuuucgcuucccgggccgccggcagccgccg

SEQ ID NO: 312499 - RNA, 32 nt, Homo Sapiens
ugugucugcuccuagccugugcucugccagca

SEQ ID NO: 312500 - RNA, 32 nt, Homo Sapiens
acuucucccuccccggccucagguuugcuuca

SEQ ID NO: 312501 - RNA, 32 nt, Homo Sapiens
auuagucaaaaauauuuaaaaggagauucaac

SEQ ID NO: 312502 - RNA, 32 nt, Homo Sapiens
gagcugagcuucugccaaauuucauuccucaa

SEQ ID NO: 312503 - RNA, 32 nt, Homo Sapiens
uuggcuuggaagcucucggauugaaggauggg

SEQ ID NO: 312504 - RNA, 32 nt, Homo Sapiens
gaaggcaaagccccuggaaaugugcuaaaguu

SEQ ID NO: 312505 - RNA, 32 nt, Homo Sapiens
ccaucauuucaaaccacaaacaaaauuaagau

SEQ ID NO: 312506 - RNA, 32 nt, Homo Sapiens
caagugcuuuugcuuacagcagauacuguuuc

SEQ ID NO: 312507 - RNA, 32 nt, Homo Sapiens
ggcagcagcgcagcgggcgcgccgcuggggag

SEQ ID NO: 312508 - RNA, 32 nt, Homo Sapiens
uucaagcaaaagacccaccucucugcagaggc

SEQ ID NO: 312509 - RNA, 32 nt, Homo Sapiens
uuuucugcaacagccaaaauagaauggaauag

SEQ ID NO: 312510 - RNA, 32 nt, Homo Sapiens
guaggcaaguguaacauaauggucaguauuug

SEQ ID NO: 312511 - RNA, 32 nt, Homo Sapiens
ucuuaacugaauugggagccucugccaccugc

SEQ ID NO: 312512 - RNA, 32 nt, Homo Sapiens
gcugccgggaaacacaaggaaagggaaccagc

SEQ ID NO: 312513 - RNA, 32 nt, Homo Sapiens
agggcagaacagagccccaauguuucuaaaga

SEQ ID NO: 312514 - RNA, 32 nt, Homo Sapiens
acgugacaugcugcuuuuuuuaauuuuauuuu

SEQ ID NO: 312515 - RNA, 32 nt, Homo Sapiens
aagggguuuaaaccucuuucuucugcuuuuuc

SEQ ID NO: 312516 - RNA, 32 nt, Homo Sapiens
cuuacugcaaccuccgccucccagguucaagu

SEQ ID NO: 312517 - RNA, 32 nt, Homo Sapiens
cauuacccucggcuccucccacuccucgcggg

SEQ ID NO: 312518 - RNA, 32 nt, Homo Sapiens
ucuucugugccaugguucccacauucgcacuc

SEQ ID NO: 312519 - RNA, 32 nt, Homo Sapiens
ugagacuuaaaguggaaauaagacuauuuuug

SEQ ID NO: 312520 - RNA, 32 nt, Homo Sapiens
uuuggggcacugggcgagccugccggccucua

SEQ ID NO: 312521 - RNA, 32 nt, Homo Sapiens
caagaggaacuucagacacaaaaguccacuga

SEQ ID NO: 312522 - RNA, 32 nt, Homo Sapiens
ggagccuggggagaguggucccugcccuuccg

SEQ ID NO: 312523 - RNA, 32 nt, Homo Sapiens
gggcccaggcccuccaaccauaaacaguccag

SEQ ID NO: 312524 - RNA, 32 nt, Homo Sapiens
agucaacauggagcuuucagcggugggggagc

SEQ ID NO: 312525 - RNA, 32 nt, Homo Sapiens
uuggacaaagauuggcaauucuuuguaaagaa

SEQ ID NO: 312526 - RNA, 32 nt, Homo Sapiens
aaauucuuguuuuaaaucuuacaccugaaagu

SEQ ID NO: 312527 - RNA, 32 nt, Homo Sapiens
auagagagauacccuuauaagaguaaagaauu

SEQ ID NO: 312528 - RNA, 32 nt, Homo Sapiens
gugagucaccagcaucacuggcagggaccacu

SEQ ID NO: 312529 - RNA, 32 nt, Homo Sapiens
gcuuuuuuccuucuccuucuauuaaugaacag

SEQ ID NO: 312530 - RNA, 30 nt, Homo Sapiens
uuggaccggcuguugggggaaaaaaguguu

SEQ ID NO: 312531 - RNA, 32 nt, Homo Sapiens
ugaggagggggaggacggaguucagagggugu

SEQ ID NO: 312532 - RNA, 32 nt, Homo Sapiens
gaaaaacaaccugcagcguauagcugcccagc

SEQ ID NO: 312533 - RNA, 32 nt, Homo Sapiens
auuugcagcaaccuagauggaguuggagacca

SEQ ID NO: 312534 - RNA, 32 nt, Homo Sapiens
aucccauggcugaugccuggaacacaaugugg

SEQ ID NO: 312535 - RNA, 30 nt, Homo Sapiens
ccaccccacgcugaugcagaagcucccaga

SEQ ID NO: 312536 - RNA, 32 nt, Homo Sapiens
gaauaccaaaucaguauauacuguauacugua

SEQ ID NO: 312537 - RNA, 32 nt, Homo Sapiens
ugguggagaaaacaaagaguccucccucucuc

SEQ ID NO: 312538 - RNA, 32 nt, Homo Sapiens
gcgccucgggggucggcguccaggcucggagc

SEQ ID NO: 312539 - RNA, 32 nt, Homo Sapiens
gcagccgcuggccuacccggcccgcgggugag

SEQ ID NO: 312540 - RNA, 32 nt, Homo Sapiens
uaaguuguaucucuuuccuuuuuguacuucau

SEQ ID NO: 312541 - RNA, 32 nt, Homo Sapiens
ggcggugagaggcucgcacgccuccagcccgg

SEQ ID NO: 312542 - RNA, 32 nt, Homo Sapiens
cccagaccucauuauuucuugcucuaucauuc

SEQ ID NO: 312543 - RNA, 32 nt, Homo Sapiens
aggggucgcugucgccugcugcuggcuccuca

SEQ ID NO: 312544 - RNA, 32 nt, Homo Sapiens
aacauuucagcaggccaccuccccucaucuuc

SEQ ID NO: 312545 - RNA, 32 nt, Homo Sapiens
aucacucuguacacacugggauagaugaauga

SEQ ID NO: 312546 - RNA, 32 nt, Homo Sapiens
cucuggugcagcugggguggaaucuggccagg

SEQ ID NO: 312547 - RNA, 32 nt, Homo Sapiens
cuaagcagucaugggacuuuggacuugaugag

SEQ ID NO: 312548 - RNA, 32 nt, Homo Sapiens
acgcccucugcccaccucccccgcuguguguc

SEQ ID NO: 312549 - RNA, 32 nt, Homo Sapiens
gaaugguuuucauuuuaaucugcaaugucuca

SEQ ID NO: 312550 - RNA, 32 nt, Homo Sapiens
ugcagaggacauuuuuggagagcucuuuacuc

SEQ ID NO: 312551 - RNA, 32 nt, Homo Sapiens
ggugugugcgucuuugugcucuuccaaaucga

SEQ ID NO: 312552 - RNA, 32 nt, Homo Sapiens
aacuuuuuuccauuuuauguuggagccaaauc

SEQ ID NO: 312553 - RNA, 32 nt, Homo Sapiens
accgggcuaggcgugucagcuugggggcggug

SEQ ID NO: 312554 - RNA, 32 nt, Homo Sapiens
cauugugaucaagauaaauguggaguauuaaa

SEQ ID NO: 312555 - RNA, 32 nt, Homo Sapiens
augacgcccccggcccgugcucaacaccgccu

SEQ ID NO: 312556 - RNA, 28 nt, Homo Sapiens
gggugggauauugaucauuugaacauau

SEQ ID NO: 312557 - RNA, 32 nt, Homo Sapiens
agugccuucagcgcccgacccgggcccccacc

SEQ ID NO: 312558 - RNA, 32 nt, Homo Sapiens
cugugcugggggugggguggccccaggcagcu

SEQ ID NO: 312559 - RNA, 31 nt, Homo Sapiens
agccaccagcgcagcgcugccauggagccca

SEQ ID NO: 312560 - RNA, 29 nt, Homo Sapiens
aagguguuuagucuuucuauaaaaacaga

SEQ ID NO: 312561 - RNA, 32 nt, Homo Sapiens
ugggcagagacaaauauucaaauuauaucuua

SEQ ID NO: 312562 - RNA, 32 nt, Homo Sapiens
aacuucuccuucccuuccccucagccuuuggu

SEQ ID NO: 312563 - RNA, 32 nt, Homo Sapiens
aggagagaccucugaggugggucuuggagagg

SEQ ID NO: 312564 - RNA, 32 nt, Homo Sapiens
agauauagauaauaaacuuaugaacagcaacu

SEQ ID NO: 312565 - RNA, 32 nt, Homo Sapiens
uagucuaaauuauuaauuuucuuaauaaaaua

SEQ ID NO: 312566 - RNA, 32 nt, Homo Sapiens
uauaacaugcuucgugcucauggucauugccu

SEQ ID NO: 312567 - RNA, 32 nt, Homo Sapiens
cauuuggauugauaccauuuaggucagucaau

SEQ ID NO: 312568 - RNA, 32 nt, Homo Sapiens
uggcgcgcagagugcaccuuccugagcucgag

SEQ ID NO: 312569 - RNA, 32 nt, Homo Sapiens
gaagggauuuccccucaacaacuucuguccca

SEQ ID NO: 312570 - RNA, 30 nt, Homo Sapiens
agccacauuccugccacccuucuucuucuu

SEQ ID NO: 312571 - RNA, 29 nt, Homo Sapiens
aacaguucaaaauauaucugacuguauuu

SEQ ID NO: 312572 - RNA, 32 nt, Homo Sapiens
gccgugaugcaccuggaccacagugaccccau

SEQ ID NO: 312573 - RNA, 32 nt, Homo Sapiens
gaagugagcagagacuccacagacacccuaaa

SEQ ID NO: 312574 - RNA, 32 nt, Homo Sapiens
cagcaaggcaagugaggugcugccgucaucca

SEQ ID NO: 312575 - RNA, 32 nt, Homo Sapiens
uaaucacaaaucuauuuauauagauauaaaua

SEQ ID NO: 312576 - RNA, 32 nt, Homo Sapiens
auaaucccgccucauucuaugacuugcuauaa

SEQ ID NO: 312577 - RNA, 32 nt, Homo Sapiens
gcugccugacuucaaacuauacuacaaggcua

SEQ ID NO: 312578 - RNA, 32 nt, Homo Sapiens
agacuuuggaauaaguuucuuuuaaaaauaug

SEQ ID NO: 312579 - RNA, 32 nt, Homo Sapiens
aaggcacaugcaucugguuucuuucuucuuuu

SEQ ID NO: 312580 - RNA, 30 nt, Homo Sapiens
ggccugccucagcagcaccaguugacugcu

SEQ ID NO: 312581 - RNA, 32 nt, Homo Sapiens
uaaauuugcuuuucuuuuuuuuaacugaguug

SEQ ID NO: 312582 - RNA, 32 nt, Homo Sapiens
gcagaugugccagggagagcugcgggugagau

SEQ ID NO: 312583 - RNA, 32 nt, Homo Sapiens
ggucaugcaaggccagcucuggggucucggca

SEQ ID NO: 312584 - RNA, 32 nt, Homo Sapiens
cucggcaucuugagauggaagagcagccuugu

SEQ ID NO: 312585 - RNA, 32 nt, Homo Sapiens
uggggcaccuugcuccuccuucugcugcugcc

SEQ ID NO: 312586 - RNA, 32 nt, Homo Sapiens
ccccucagugguuuccucggcccuccuggguu

SEQ ID NO: 312587 - RNA, 32 nt, Homo Sapiens
gggcauguucuauuucccaggaaugauugaca

SEQ ID NO: 312588 - RNA, 28 nt, Homo Sapiens
gggcuguggcggccgcggcgggcgacau

SEQ ID NO: 312589 - RNA, 32 nt, Homo Sapiens
uggauucggggcuggacgcagcaagcggggcg

SEQ ID NO: 312590 - RNA, 32 nt, Homo Sapiens
cccaucccugucaccagucccagcuccacuuc

SEQ ID NO: 312591 - RNA, 32 nt, Homo Sapiens
cugcuggcgagggagagaugggugggccaugg

SEQ ID NO: 312592 - RNA, 32 nt, Homo Sapiens
cguuuuuagaggguggugugucugacaccaug

SEQ ID NO: 312593 - RNA, 32 nt, Homo Sapiens
ccuccucaugaccuucugcccuggacaagccc

SEQ ID NO: 312594 - RNA, 32 nt, Homo Sapiens
uggccuggcagucuggcugcugcagaagaguu

SEQ ID NO: 312595 - RNA, 32 nt, Homo Sapiens
ucuuccgcccccagcccacucucaugguccac

SEQ ID NO: 312596 - RNA, 32 nt, Homo Sapiens
uuacuuauaauucuuuccgguuacuggggcua

SEQ ID NO: 312597 - RNA, 32 nt, Homo Sapiens
guucaguccucccagacuaccugcccucagcu

SEQ ID NO: 312598 - RNA, 32 nt, Homo Sapiens
aaaggucucagccuguagcuuaaacuuauaga

SEQ ID NO: 312599 - RNA, 32 nt, Homo Sapiens
ucauaaagacuaaaaguugaccuguuaaaacg

SEQ ID NO: 312600 - RNA, 32 nt, Homo Sapiens
gcucgacccccacuuccuuucuugugcuucgu

SEQ ID NO: 312601 - RNA, 32 nt, Homo Sapiens
uggacgcccuucccucuggucgguuguggggc

SEQ ID NO: 312602 - RNA, 32 nt, Homo Sapiens
uuuaaggaacuacuccaaaaagcuuuccuuuu

SEQ ID NO: 312603 - RNA, 32 nt, Homo Sapiens
uguagccccggcuccccgggcggccgcggagg

SEQ ID NO: 312604 - RNA, 32 nt, Homo Sapiens
ugauuucugugcucuucacuguuugcaauugc

SEQ ID NO: 312605 - RNA, 31 nt, Homo Sapiens
aagaagaggagcccucucagagcucaagagc

SEQ ID NO: 312606 - RNA, 32 nt, Homo Sapiens
caggggcugcgcugcuggccgccuggcuuuaa

SEQ ID NO: 312607 - RNA, 32 nt, Homo Sapiens
cuuggagaaaaagaaauugaauuagagguaaa

SEQ ID NO: 312608 - RNA, 32 nt, Homo Sapiens
ugcagauguggaaaaaucauuaccaaaaagaa

SEQ ID NO: 312609 - RNA, 32 nt, Homo Sapiens
ggccaggugcgguggcucaagccuguacuccc

SEQ ID NO: 312610 - RNA, 32 nt, Homo Sapiens
ggccaggugcgguggcucacgccuguaauccc

SEQ ID NO: 312611 - RNA, 32 nt, Homo Sapiens
ggccaggcgcgguggcucacgccuguaauccu

SEQ ID NO: 312612 - RNA, 32 nt, Homo Sapiens
cuggaaaaucaucaucccucaucacccacagu

SEQ ID NO: 312613 - RNA, 32 nt, Homo Sapiens
auaauaugucauuguacauguugaaagguuuc

SEQ ID NO: 312614 - RNA, 32 nt, Homo Sapiens
cgcuggccuccauggagacuccaggcagccgg

SEQ ID NO: 312615 - RNA, 32 nt, Homo Sapiens
caggcacccacgagcaugcccggcuaauuuuu

SEQ ID NO: 312616 - RNA, 32 nt, Homo Sapiens
uccgaggucugggauuguuuugucuacaauaa

SEQ ID NO: 312617 - RNA, 32 nt, Homo Sapiens
cugcugugguuggacagugcugacuguuagac

SEQ ID NO: 312618 - RNA, 32 nt, Homo Sapiens
auguguuuuguacagcugucauuugauaaaga

SEQ ID NO: 312619 - RNA, 32 nt, Homo Sapiens
uggccccagcucaucccuacugagagaacaga

SEQ ID NO: 312620 - RNA, 30 nt, Homo Sapiens
acuuugggagguggaggcagguggaucacg

SEQ ID NO: 312621 - RNA, 32 nt, Homo Sapiens
guuugugaaaauaaagaacucuguagcucacc

SEQ ID NO: 312622 - RNA, 32 nt, Homo Sapiens
guugccggccccaggcggugcuucuccccacc

SEQ ID NO: 312623 - RNA, 32 nt, Homo Sapiens
gcggccgcggcaugaaaggcggcgaggagagg

SEQ ID NO: 312624 - RNA, 32 nt, Homo Sapiens
cuugcucugaguuuuucucuuguuuucuuuuu

SEQ ID NO: 312625 - RNA, 32 nt, Homo Sapiens
uuucuguuuuaaucauagaugaaucuuggaca

SEQ ID NO: 312626 - RNA, 32 nt, Homo Sapiens
acacacacggcaaugugcuaucuuucacaugu

SEQ ID NO: 312627 - RNA, 32 nt, Homo Sapiens
ccacugcccucccuuccccccucccugucugg

SEQ ID NO: 312628 - RNA, 32 nt, Homo Sapiens
aguaaagcaggccuguaaaguacucuaaagua

SEQ ID NO: 312629 - RNA, 32 nt, Homo Sapiens
aagguuauaacaaaauacauuuaacauugcuu

SEQ ID NO: 312630 - RNA, 32 nt, Homo Sapiens
aagauggcauguauaaacuacugcauuuuaag

SEQ ID NO: 312631 - RNA, 32 nt, Homo Sapiens
ccucaaggauuguuuaccuaaaacagaacuau

SEQ ID NO: 312632 - RNA, 32 nt, Homo Sapiens
cagauguuuuaauuagacauuguuauuaacag

SEQ ID NO: 312633 - RNA, 32 nt, Homo Sapiens
cggaaggcggaggccaaucggcggcgguugcg

SEQ ID NO: 312634 - RNA, 32 nt, Homo Sapiens
gaaacugcacaaaauuauuguuuucagccccc

SEQ ID NO: 312635 - RNA, 32 nt, Homo Sapiens
aaagaagaaaaaauuuaaaggguguacuuaua

SEQ ID NO: 312636 - RNA, 32 nt, Homo Sapiens
gagccccgccccauggccccgccccucccaag

SEQ ID NO: 312637 - RNA, 31 nt, Homo Sapiens
uagugcagacaggucggaggaguccuucaaa

SEQ ID NO: 312638 - RNA, 32 nt, Homo Sapiens
gguaguuuauuagauaaaauagauaaugaaca

SEQ ID NO: 312639 - RNA, 32 nt, Homo Sapiens
gaaauugguacaacccuauuuaccaaaauuua

SEQ ID NO: 312640 - RNA, 32 nt, Homo Sapiens
cuuccagagggauggguggagaaggacaugag

SEQ ID NO: 312641 - RNA, 32 nt, Homo Sapiens
cugcuauacauaggaaaagacacacauccacc

SEQ ID NO: 312642 - RNA, 32 nt, Homo Sapiens
cuuagaaacaacugaggcagaguagagugcug

SEQ ID NO: 312643 - RNA, 32 nt, Homo Sapiens
aguauuggagucaucuuaucuauuacuccaaa

SEQ ID NO: 312644 - RNA, 32 nt, Homo Sapiens
cagcugcuuggggcucccaggcugggugugcc

SEQ ID NO: 312645 - RNA, 32 nt, Homo Sapiens
caggcauguggcagggguuagagcaggacuga

SEQ ID NO: 312646 - RNA, 32 nt, Homo Sapiens
cucuuccucaaauuauuuuaaaacacacagua

SEQ ID NO: 312647 - RNA, 32 nt, Homo Sapiens
ugcuucguggcaaauggcuguacuggauaucc

SEQ ID NO: 312648 - RNA, 32 nt, Homo Sapiens
cgccaggagcggggccgagguacggcggcacg

SEQ ID NO: 312649 - RNA, 32 nt, Homo Sapiens
aggggacaggucggggcaguauuugggggaag

SEQ ID NO: 312650 - RNA, 32 nt, Homo Sapiens
cagagagaugaccuuugccaagaguacagccg

SEQ ID NO: 312651 - RNA, 32 nt, Homo Sapiens
auuuuugaagucuuucuuuguacuuuaauguu

SEQ ID NO: 312652 - RNA, 32 nt, Homo Sapiens
acacaucagggaacguaugaacacaucagguu

SEQ ID NO: 312653 - RNA, 32 nt, Homo Sapiens
uaaaacugggaagaggcuggaagaagauuuag

SEQ ID NO: 312654 - RNA, 32 nt, Homo Sapiens
cuugaauuauguaaaauauauuuuacaguaua

SEQ ID NO: 312655 - RNA, 32 nt, Homo Sapiens
gauccaggaacacaugcacacacacacacaca

SEQ ID NO: 312656 - RNA, 32 nt, Homo Sapiens
cagcaguuucaguucauguuucucuucaguaa

SEQ ID NO: 312657 - RNA, 30 nt, Homo Sapiens
ucuuaguuuucuaguggggaaacauuauug

SEQ ID NO: 312658 - RNA, 28 nt, Homo Sapiens
acugugauagauuaacuguagaauucuu

SEQ ID NO: 312659 - RNA, 32 nt, Homo Sapiens
acccuacaguuugcuaacuccuugaagcuauc

SEQ ID NO: 312660 - RNA, 32 nt, Homo Sapiens
agagaugccaggggggcguguaugcucuaccc

SEQ ID NO: 312661 - RNA, 32 nt, Homo Sapiens
cgccucuccgcauugccuauugauacacuuua

SEQ ID NO: 312662 - RNA, 32 nt, Homo Sapiens
aaaagacuaaaaugagggggaacagaguucac

SEQ ID NO: 312663 - RNA, 32 nt, Homo Sapiens
gaaaaugugaaugacgggcaagaagguggucu

SEQ ID NO: 312664 - RNA, 32 nt, Homo Sapiens
uuuaagaugaagcaagaugucuguagcgguaa

SEQ ID NO: 312665 - RNA, 32 nt, Homo Sapiens
aguuaacuucauguuuuggaagggcaggucgu

SEQ ID NO: 312666 - RNA, 32 nt, Homo Sapiens
agggacaguauucucagugcucuccuacccca

SEQ ID NO: 312667 - RNA, 32 nt, Homo Sapiens
ugugaaggccauugagaaaugcccagugugcc

SEQ ID NO: 312668 - RNA, 32 nt, Homo Sapiens
acagaaccucaauaaacucugacuugguacug

SEQ ID NO: 312669 - RNA, 32 nt, Homo Sapiens
agugccgcugugggcagugggcggcggcagcg

SEQ ID NO: 312670 - RNA, 32 nt, Homo Sapiens
gcccacucuuccagcccuugcuuggucacagg

SEQ ID NO: 312671 - RNA, 32 nt, Homo Sapiens
ggggcuagaacaaaaauuaagacauguuuggc

SEQ ID NO: 312672 - RNA, 32 nt, Homo Sapiens
auuucggagaccuggaggaaguggcccauuua

SEQ ID NO: 312673 - RNA, 32 nt, Homo Sapiens
uagggauuuuuaggagacaauuagauaaaaau

SEQ ID NO: 312674 - RNA, 32 nt, Homo Sapiens
augugcuaaggguaacaccuucaugaugacaa

SEQ ID NO: 312675 - RNA, 32 nt, Homo Sapiens
ccagccucuagggaccccuccucccuuuuucc

SEQ ID NO: 312676 - RNA, 32 nt, Homo Sapiens
uugucuauuguuaaauuuugagauucauacac

SEQ ID NO: 312677 - RNA, 32 nt, Homo Sapiens
cugacaccuccagaacgcaggugcuggcgccc

SEQ ID NO: 312678 - RNA, 32 nt, Homo Sapiens
auuuuaguugauuuucaguacuauuuacauag

SEQ ID NO: 312679 - RNA, 32 nt, Homo Sapiens
acuugaguguugcauuuguuuugugggcauuu

SEQ ID NO: 312680 - RNA, 32 nt, Homo Sapiens
caacuaccauucuucaguaguuucauaaauga

SEQ ID NO: 312681 - RNA, 32 nt, Homo Sapiens
cuagcgggcaugguggugggcgccuguaauuc

SEQ ID NO: 312682 - RNA, 32 nt, Homo Sapiens
acuuaagaugacuagauauuaaucauuccuau

SEQ ID NO: 312683 - RNA, 32 nt, Homo Sapiens
cugugaagggguggagcaggcaguggccagcu

SEQ ID NO: 312684 - RNA, 32 nt, Homo Sapiens
uaacaaaccugcacauucugcacauauauccc

SEQ ID NO: 312685 - RNA, 32 nt, Homo Sapiens
aacacggacccauauaucccuaccucccacca

SEQ ID NO: 312686 - RNA, 32 nt, Homo Sapiens
aaguggccaucccaugcccaccugugccaugg

SEQ ID NO: 312687 - RNA, 32 nt, Homo Sapiens
ggacaccaggcaggcccggccgggugcgcggc

SEQ ID NO: 312688 - RNA, 32 nt, Homo Sapiens
gcauuuucauaguuuuauuugauaaaauucca

SEQ ID NO: 312689 - RNA, 32 nt, Homo Sapiens
cauuuuuauuacugaaagaaauaugggcauuu

SEQ ID NO: 312690 - RNA, 32 nt, Homo Sapiens
aauuuccuaaaaucagaagaauuggaagaucc

SEQ ID NO: 312691 - RNA, 32 nt, Homo Sapiens
agccaagagaacccaaaccaauaaaguuuaug

SEQ ID NO: 312692 - RNA, 32 nt, Homo Sapiens
cugggaccaugggcggacauguucccgauuug

SEQ ID NO: 312693 - RNA, 32 nt, Homo Sapiens
uuggagguaggcauagagggagcccuaccccu

SEQ ID NO: 312694 - RNA, 32 nt, Homo Sapiens
ugcugcccggagcccacacacugacugucccc

SEQ ID NO: 312695 - RNA, 32 nt, Homo Sapiens
ccugcugucuggacuuuuucugucccacugag

SEQ ID NO: 312696 - RNA, 32 nt, Homo Sapiens
agcccauccuggccucagaacaugcugagcac

SEQ ID NO: 312697 - RNA, 32 nt, Homo Sapiens
uggcuuagugauugaguaucauguaauaauua

SEQ ID NO: 312698 - RNA, 32 nt, Homo Sapiens
gagaaaaagcauuuucuguuuucccaccaggc

SEQ ID NO: 312699 - RNA, 32 nt, Homo Sapiens
augcaagaaaauuuaauauuuugacuaacaug

SEQ ID NO: 312700 - RNA, 32 nt, Homo Sapiens
uucuuuagucucaaaacaagagacuaggaaag

SEQ ID NO: 312701 - RNA, 32 nt, Homo Sapiens
aacuacccucagcaaacacuagcuguucugcu

SEQ ID NO: 312702 - RNA, 32 nt, Homo Sapiens
gaaauaaguuguugccuauucaguguuacaga

SEQ ID NO: 312703 - RNA, 32 nt, Homo Sapiens
guuuugcccacccgggccccagcguucccaga

SEQ ID NO: 312704 - RNA, 32 nt, Homo Sapiens
aagagacaauauauaugaauucuuaugaaagu

SEQ ID NO: 312705 - RNA, 32 nt, Homo Sapiens
uuacauuugagaagcuguuuuuaacauuauuu

SEQ ID NO: 312706 - RNA, 32 nt, Homo Sapiens
ugagcuguugccgcagaaugggcugcuggcuc

SEQ ID NO: 312707 - RNA, 32 nt, Homo Sapiens
uuggcgaccccucugucugucuccagcccugu

SEQ ID NO: 312708 - RNA, 32 nt, Homo Sapiens
uaucuacaucaaauaaaauaaaaaugagugaa

SEQ ID NO: 312709 - RNA, 32 nt, Homo Sapiens
gauguuagaaacaaaaucauguuaugauggac

SEQ ID NO: 312710 - RNA, 32 nt, Homo Sapiens
aacugaaguaaggagagcagugaaugucaaac

SEQ ID NO: 312711 - RNA, 32 nt, Homo Sapiens
aauaacaugaguuuccucuucccucuuugaac

SEQ ID NO: 312712 - RNA, 30 nt, Homo Sapiens
gaugggggagguggugcugcuggacugagc

SEQ ID NO: 312713 - RNA, 32 nt, Homo Sapiens
auuaaaaagagaugacagugaguuugugagaa

SEQ ID NO: 312714 - RNA, 32 nt, Homo Sapiens
ugaguuauuuaaaaucugugaucugagaagcu

SEQ ID NO: 312715 - RNA, 32 nt, Homo Sapiens
acacagcggauauuucagaaaucccuaagugc

SEQ ID NO: 312716 - RNA, 32 nt, Homo Sapiens
gcaugaguucuuccgccuccuuucccuguguc

SEQ ID NO: 312717 - RNA, 32 nt, Homo Sapiens
cguccgcccauggccgccgccgggcagcugug

SEQ ID NO: 312718 - RNA, 32 nt, Homo Sapiens
ucugcuugcccggcugcagagcagagaugugc

SEQ ID NO: 312719 - RNA, 32 nt, Homo Sapiens
agugagcugugacugcaccacugcacagucug

SEQ ID NO: 312720 - RNA, 32 nt, Homo Sapiens
acucugacauaggaauuuacuucuuuuccuug

SEQ ID NO: 312721 - RNA, 32 nt, Homo Sapiens
cugugggcugcugcagugaaaagcaggaagaa

SEQ ID NO: 312722 - RNA, 32 nt, Homo Sapiens
agaagaaaaauauuuuuacauuaaaccuuuuc

SEQ ID NO: 312723 - RNA, 32 nt, Homo Sapiens
caagcaugggagaggggcugagggggagccaa

SEQ ID NO: 312724 - RNA, 32 nt, Homo Sapiens
cauucacaggagaggacaugaugugcgcccau

SEQ ID NO: 312725 - RNA, 32 nt, Homo Sapiens
uuuuacaugugcaaaucagaauauauuuaaaa

SEQ ID NO: 312726 - RNA, 32 nt, Homo Sapiens
gacacggucugcacccugcccgcggccacgga

SEQ ID NO: 312727 - RNA, 32 nt, Homo Sapiens
ccccguccgccccgccgcucugcgggaguguc

SEQ ID NO: 312728 - RNA, 32 nt, Homo Sapiens
gcuggcccugucacccucucgcugugacgcca

SEQ ID NO: 312729 - RNA, 32 nt, Homo Sapiens
cggagguugccgagccgagauagcggcauugc

SEQ ID NO: 312730 - RNA, 32 nt, Homo Sapiens
ucauggguucaguaacuuuucauuuuauaaca

SEQ ID NO: 312731 - RNA, 32 nt, Homo Sapiens
uuucaaacuuggauuuugaacugcagaccugu

SEQ ID NO: 312732 - RNA, 32 nt, Homo Sapiens
uuacacguggggggugggaggggaaggagggu

SEQ ID NO: 312733 - RNA, 32 nt, Homo Sapiens
acggccagcgccagcccuguccccaacagguc

SEQ ID NO: 312734 - RNA, 32 nt, Homo Sapiens
uugcagcugguaucugguuaugcugguggauu

SEQ ID NO: 312735 - RNA, 32 nt, Homo Sapiens
ucgggcgaagagcggcuuagggccucaccgcg

SEQ ID NO: 312736 - RNA, 32 nt, Homo Sapiens
acccaacugcaaacagcaguuaggaguagaau

SEQ ID NO: 312737 - RNA, 32 nt, Homo Sapiens
uccaaccucccacuccuucucaaugccguuuc

SEQ ID NO: 312738 - RNA, 32 nt, Homo Sapiens
cugacugacuguccuaguuguuguguguuugu

SEQ ID NO: 312739 - RNA, 32 nt, Homo Sapiens
uuguugcauguauccuaggguuuaauguuggu

SEQ ID NO: 312740 - RNA, 32 nt, Homo Sapiens
cccaaccccggaaaugugugggaaaaagaaaa

SEQ ID NO: 312741 - RNA, 32 nt, Homo Sapiens
uuccggguguggaaugccuguuggucccagcu

SEQ ID NO: 312742 - RNA, 32 nt, Homo Sapiens
gcagcacccgcacuguggcuccuucgcacuga

SEQ ID NO: 312743 - RNA, 32 nt, Homo Sapiens
ggcgcuuuccuccgcccgggguggggccccua

SEQ ID NO: 312744 - RNA, 32 nt, Homo Sapiens
gcuccuuucuuuucuuuuuuucuguuuuuuua

SEQ ID NO: 312745 - RNA, 32 nt, Homo Sapiens
gccggguggaaggucucccaccccagggcugc

SEQ ID NO: 312746 - RNA, 32 nt, Homo Sapiens
ggaaguucagucaguccuguggaaugaaacca

SEQ ID NO: 312747 - RNA, 32 nt, Homo Sapiens
uggguucuuggucucaccgacuucaagaauga

SEQ ID NO: 312748 - RNA, 32 nt, Homo Sapiens
cugacaacaggugcccgagguggcuggggaua

SEQ ID NO: 312749 - RNA, 32 nt, Homo Sapiens
cuguccuggugcccugguugaggggaggaagc

SEQ ID NO: 312750 - RNA, 32 nt, Homo Sapiens
ucuggccucccuccccugcggggccgcgggga

SEQ ID NO: 312751 - RNA, 32 nt, Homo Sapiens
cauuuuuuaagugcaaaacgucuagguaaaaa

SEQ ID NO: 312752 - RNA, 32 nt, Homo Sapiens
cccacgcugcagugcggccgggcccccucccc

SEQ ID NO: 312753 - RNA, 32 nt, Homo Sapiens
uuugcccauuuacccuucuccccggaucccaa

SEQ ID NO: 312754 - RNA, 32 nt, Homo Sapiens
ggugauuggaaaguacugcaauugagcuaaaa

SEQ ID NO: 312755 - RNA, 32 nt, Homo Sapiens
gccacgaagaacugaaguaugugguaauuuuu

SEQ ID NO: 312756 - RNA, 32 nt, Homo Sapiens
ucaaugaagauaauuuggaacaggcucagucc

SEQ ID NO: 312757 - RNA, 31 nt, Homo Sapiens
cagagagugugccugccagugcuguuuucac

SEQ ID NO: 312758 - RNA, 32 nt, Homo Sapiens
ucauuggcccucauuccaagcacuuuacgcug

SEQ ID NO: 312759 - RNA, 32 nt, Homo Sapiens
gcccaagggccucccaccagagacugggaugg

SEQ ID NO: 312760 - RNA, 32 nt, Homo Sapiens
ccagcgggugggggauucugcugcucgcucac

SEQ ID NO: 312761 - RNA, 32 nt, Homo Sapiens
aaaugaaggggagaaaguagccauacaggagu

SEQ ID NO: 312762 - RNA, 32 nt, Homo Sapiens
agccaggggccuccaccccaaccccggcucag

SEQ ID NO: 312763 - RNA, 32 nt, Homo Sapiens
aagccagcugccgaccagagccccacacggag

SEQ ID NO: 312764 - RNA, 32 nt, Homo Sapiens
ugucugagauaaaaucccucacauuuacucaa

SEQ ID NO: 312765 - RNA, 32 nt, Homo Sapiens
cagaccaaguagaggccuuggugcugguuggg

SEQ ID NO: 312766 - RNA, 32 nt, Homo Sapiens
ccugcugcaggauuugugucauuuuccugccu

SEQ ID NO: 312767 - RNA, 32 nt, Homo Sapiens
caucuuguucauccucauaggacucacaccag

SEQ ID NO: 312768 - RNA, 32 nt, Homo Sapiens
cucauggcugucucuccuuucauugucagacu

SEQ ID NO: 312769 - RNA, 32 nt, Homo Sapiens
agaugaugacacuaaguugugaaaauauguug

SEQ ID NO: 312770 - RNA, 32 nt, Homo Sapiens
caacgugguguuggaggcuccaccuugaaaag

SEQ ID NO: 312771 - RNA, 32 nt, Homo Sapiens
ggagguggggaacacgaggccugggccucugg

SEQ ID NO: 312772 - RNA, 32 nt, Homo Sapiens
aucacagccggccagagcugcugccuuugaca

SEQ ID NO: 312773 - RNA, 32 nt, Homo Sapiens
ccguacuguguugggggaagauccucaaauuc

SEQ ID NO: 312774 - RNA, 32 nt, Homo Sapiens
cuccccaccccagggcuccccccgugcugagg

SEQ ID NO: 312775 - RNA, 32 nt, Homo Sapiens
caaagagaacaacaacugcaagggcagggcac

SEQ ID NO: 312776 - RNA, 32 nt, Homo Sapiens
uuugggcuuggaccagaucuaacaucuugaau

SEQ ID NO: 312777 - RNA, 32 nt, Homo Sapiens
cccaggcuagagugcaguggcuauucacaggu

SEQ ID NO: 312778 - RNA, 32 nt, Homo Sapiens
ucaccuccauucucuaccucccaugcagcaug

SEQ ID NO: 312779 - RNA, 32 nt, Homo Sapiens
gccccgcagccacugcauuuuguuuaaacaca

SEQ ID NO: 312780 - RNA, 32 nt, Homo Sapiens
gcaguacuuuuuacugccucauugucuucugu

SEQ ID NO: 312781 - RNA, 32 nt, Homo Sapiens
agaggaaggggagagucggcggucggagcggg

SEQ ID NO: 312782 - RNA, 32 nt, Homo Sapiens
caaaggaaggcacccuugacuguugggauaga

SEQ ID NO: 312783 - RNA, 32 nt, Homo Sapiens
cuguccgcgccucacaucuccccuuccucucg

SEQ ID NO: 312784 - RNA, 32 nt, Homo Sapiens
caugaccuggaccucaccuacccaggcaaacu

SEQ ID NO: 312785 - RNA, 32 nt, Homo Sapiens
cccaauuuuuaaaauaacuguuuauuugaugu

SEQ ID NO: 312786 - RNA, 32 nt, Homo Sapiens
gccaucagauucugcccuugguuaguuuuuug

SEQ ID NO: 312787 - RNA, 32 nt, Homo Sapiens
uuagggauuauuacagcggaugucaacugguu

SEQ ID NO: 312788 - RNA, 32 nt, Homo Sapiens
agaaacuuucccucucuacuggcuucucuccc

SEQ ID NO: 312789 - RNA, 32 nt, Homo Sapiens
uaacucagcuuggguucugugcuccuccucuc

SEQ ID NO: 312790 - RNA, 32 nt, Homo Sapiens
ccucuccccuguaucaaaaccauccaucugug

SEQ ID NO: 312791 - RNA, 32 nt, Homo Sapiens
cacugcugcccccgaggaacuccggcugcuuc

SEQ ID NO: 312792 - RNA, 32 nt, Homo Sapiens
gugcuggggcucgggacccaccccccugcuug

SEQ ID NO: 312793 - RNA, 32 nt, Homo Sapiens
aauguuauuuuugaacuuuaucgaagaacaug

SEQ ID NO: 312794 - RNA, 32 nt, Homo Sapiens
ccauaacaaccugggcauuccuugggacucag

SEQ ID NO: 312795 - RNA, 32 nt, Homo Sapiens
aguuugcaaucucuggauaccuucaaauccua

SEQ ID NO: 312796 - RNA, 32 nt, Homo Sapiens
aaauacuugguaguuuugacaucucugcuuaa

SEQ ID NO: 312797 - RNA, 32 nt, Homo Sapiens
aucaaauuuggguauaugcaguaugcuaccca

SEQ ID NO: 312798 - RNA, 32 nt, Homo Sapiens
uaaaugugaaaccaagaaauguaaucaagcag

SEQ ID NO: 312799 - RNA, 32 nt, Homo Sapiens
uggaugcuuuugucgcauuuugcuucacugug

SEQ ID NO: 312800 - RNA, 32 nt, Homo Sapiens
ccguggccuuccaguucacggugaccccagac

SEQ ID NO: 312801 - RNA, 32 nt, Homo Sapiens
gauuaauagugucaugguagcuaaaggagaaa

SEQ ID NO: 312802 - RNA, 32 nt, Homo Sapiens
auaaagcggaaagcgggcacgcgcagcgcccg

SEQ ID NO: 312803 - RNA, 32 nt, Homo Sapiens
cacuucccucuggcucuccccggagcagggcu

SEQ ID NO: 312804 - RNA, 32 nt, Homo Sapiens
ccggagcccggugccagugccgcccgcagccc

SEQ ID NO: 312805 - RNA, 32 nt, Homo Sapiens
auuuacauuugaaaauacagauuuuuaccaac

SEQ ID NO: 312806 - RNA, 32 nt, Homo Sapiens
gacaguugacugugcuuuacacaguaacuagc

SEQ ID NO: 312807 - RNA, 32 nt, Homo Sapiens
cacucaagggaagaaagggcacuggaguuuau

SEQ ID NO: 312808 - RNA, 32 nt, Homo Sapiens
cuguuccccgugcacagcguggccacacccau

SEQ ID NO: 312809 - RNA, 32 nt, Homo Sapiens
gguauuugagaccgaccaacccuccugaugaa

SEQ ID NO: 312810 - RNA, 32 nt, Homo Sapiens
ugaaugaaguauuuguuguagauaguaccccc

SEQ ID NO: 312811 - RNA, 32 nt, Homo Sapiens
ggcaagggguugagcagaggcuuuucagugcu

SEQ ID NO: 312812 - RNA, 32 nt, Homo Sapiens
agcacuuucugcaccaucuaauuuagcccuca

SEQ ID NO: 312813 - RNA, 32 nt, Homo Sapiens
agccugaccaacauggaaaaaccccgucucua

SEQ ID NO: 312814 - RNA, 32 nt, Homo Sapiens
gcucucaaugaaaacaauggaagaauaagaca

SEQ ID NO: 312815 - RNA, 32 nt, Homo Sapiens
gcauccgaggggagccgccggauguggaagaa

SEQ ID NO: 312816 - RNA, 32 nt, Homo Sapiens
ccuaagaaaaggaaaacccuuugcacgagccc

SEQ ID NO: 312817 - RNA, 32 nt, Homo Sapiens
caccaccgcgcccagcuaauucuuguauuuuu

SEQ ID NO: 312818 - RNA, 32 nt, Homo Sapiens
ugacugugguucaacaguauugcguugucaga

SEQ ID NO: 312819 - RNA, 32 nt, Homo Sapiens
auaauggugucuucauuuuuacuguauuuaac

SEQ ID NO: 312820 - RNA, 32 nt, Homo Sapiens
gaucuucagagugcuggaaacacacuccugca

SEQ ID NO: 312821 - RNA, 32 nt, Homo Sapiens
uucucaggccugggguggggccccgggugggu

SEQ ID NO: 312822 - RNA, 32 nt, Homo Sapiens
aggaugccagaggaucaagaaaaggaucacag

SEQ ID NO: 312823 - RNA, 32 nt, Homo Sapiens
gggcgcacucggaaguggccgccccgcaugag

SEQ ID NO: 312824 - RNA, 32 nt, Homo Sapiens
ucuggcccgggagagggaacggggacaggagc

SEQ ID NO: 312825 - RNA, 32 nt, Homo Sapiens
acaaugacaaugagauaaauguuaggaagggg

SEQ ID NO: 312826 - RNA, 32 nt, Homo Sapiens
uccuggcuauuuuugugucauuuauucaagua

SEQ ID NO: 312827 - RNA, 32 nt, Homo Sapiens
agaaaucaacaguuauacuagaauauauuuuu

SEQ ID NO: 312828 - RNA, 32 nt, Homo Sapiens
ucacaugaagaagaaaacuuguugacauccag

SEQ ID NO: 312829 - RNA, 32 nt, Homo Sapiens
cuagugaggggcggggcaggcggcgcgguggg

SEQ ID NO: 312830 - RNA, 32 nt, Homo Sapiens
cucuggagccucagccagaaguaccauuaggu

SEQ ID NO: 312831 - RNA, 32 nt, Homo Sapiens
ugaaggguccagagacccuggugcucaccuua

SEQ ID NO: 312832 - RNA, 32 nt, Homo Sapiens
ccuccccucacccgcugcccagcccucccagc

SEQ ID NO: 312833 - RNA, 32 nt, Homo Sapiens
uugccuguugaacuucuuucuguuaugagagg

SEQ ID NO: 312834 - RNA, 32 nt, Homo Sapiens
uuucagugauuuuccauuuaucuuuaauucgc

SEQ ID NO: 312835 - RNA, 32 nt, Homo Sapiens
gcccggaaacucagucuauuuauucuucagcu

SEQ ID NO: 312836 - RNA, 32 nt, Homo Sapiens
ugugcccagagaucaugcauuuagauuuauau

SEQ ID NO: 312837 - RNA, 32 nt, Homo Sapiens
gggccagacuuccaggcugauuugccaaaugc

SEQ ID NO: 312838 - RNA, 32 nt, Homo Sapiens
cauuagagauauuuugauagauaccuuuucag

SEQ ID NO: 312839 - RNA, 32 nt, Homo Sapiens
uguacaguacuacaggugcauacucuggucau

SEQ ID NO: 312840 - RNA, 32 nt, Homo Sapiens
ccgagucggucucgagccgccggccggccgug

SEQ ID NO: 312841 - RNA, 30 nt, Homo Sapiens
ugcaggggagguggaggccagaggacaggg

SEQ ID NO: 312842 - RNA, 32 nt, Homo Sapiens
gaccaggacaagaggcugggggugucagcauu

SEQ ID NO: 312843 - RNA, 32 nt, Homo Sapiens
cgccccccgcggccuagagguccagcgcccgc

SEQ ID NO: 312844 - RNA, 32 nt, Homo Sapiens
agcuccugggccccuccucccuucaaggauug

SEQ ID NO: 312845 - RNA, 31 nt, Homo Sapiens
ucuggaauguccacucccagagccugcccca

SEQ ID NO: 312846 - RNA, 32 nt, Homo Sapiens
uucuaauugggaaaaaauuccuauuaaucacu

SEQ ID NO: 312847 - RNA, 32 nt, Homo Sapiens
auagacaggaggaggaggucaccaccaugauc

SEQ ID NO: 312848 - RNA, 32 nt, Homo Sapiens
cuaucuagaagcaaaaaaguugguuuuaaaaa

SEQ ID NO: 312849 - RNA, 32 nt, Homo Sapiens
ggacuuccuggugaugagaggagguggaaauu

SEQ ID NO: 312850 - RNA, 32 nt, Homo Sapiens
gcauaauuuagaaaaacaaaacaaaggcuguu

SEQ ID NO: 312851 - RNA, 32 nt, Homo Sapiens
aagagcaucacagggcauaguuucacaaaagc

SEQ ID NO: 312852 - RNA, 32 nt, Homo Sapiens
ggcuaucuucucugccuucaaucuucagggac

SEQ ID NO: 312853 - RNA, 32 nt, Homo Sapiens
ucuaucuaguauaagaaauauucacagaaauu

SEQ ID NO: 312854 - RNA, 32 nt, Homo Sapiens
cagcuguggccucggcggucacagugucagaa

SEQ ID NO: 312855 - RNA, 32 nt, Homo Sapiens
uuuuucccuaaaacuaaacaucaaucauugca

SEQ ID NO: 312856 - RNA, 32 nt, Homo Sapiens
ccgggagcccgccccgcuucccccagagccug

SEQ ID NO: 312857 - RNA, 32 nt, Homo Sapiens
auguaaaaauugaaguuaagagcugucacaag

SEQ ID NO: 312858 - RNA, 32 nt, Homo Sapiens
caagauauaucaauauaaaaacaagguauaua

SEQ ID NO: 312859 - RNA, 32 nt, Homo Sapiens
ugguaauaagcauaucaucuauuguuaaguaa

SEQ ID NO: 312860 - RNA, 32 nt, Homo Sapiens
cagggcacaacaaccguuucuggagagaaugg

SEQ ID NO: 312861 - RNA, 32 nt, Homo Sapiens
gcaucugugcucccagcuccucacgaggcuga

SEQ ID NO: 312862 - RNA, 32 nt, Homo Sapiens
uaaauaaauaauguuauguaucagugugccug

SEQ ID NO: 312863 - RNA, 30 nt, Homo Sapiens
gcgcagggcgcgcagcccaggcugagaucc

SEQ ID NO: 312864 - RNA, 32 nt, Homo Sapiens
ggaaaauucuaggccaccuccuccucagcaua

SEQ ID NO: 312865 - RNA, 32 nt, Homo Sapiens
gguaggccacaguccugaacugcacaacuggu

SEQ ID NO: 312866 - RNA, 32 nt, Homo Sapiens
cagacccccuccccuccugugucccuuguaaa

SEQ ID NO: 312867 - RNA, 28 nt, Homo Sapiens
agaguggagcggccgccggagaugccug

SEQ ID NO: 312868 - RNA, 32 nt, Homo Sapiens
aguuuuuuaaacauucugacaagguccagcca

SEQ ID NO: 312869 - RNA, 32 nt, Homo Sapiens
aaaaagccgggcguggugggcgccuguaaucc

SEQ ID NO: 312870 - RNA, 32 nt, Homo Sapiens
aaauuuuuauuacucaaaguaaaauaaaugga

SEQ ID NO: 312871 - RNA, 32 nt, Homo Sapiens
uauugauuuguacagauccacuuagucauuuu

SEQ ID NO: 312872 - RNA, 32 nt, Homo Sapiens
uugcuaauuauuuuaaacacuuuaauguuggu

SEQ ID NO: 312873 - RNA, 32 nt, Homo Sapiens
ccagcccagcuggccuggcccccagcuucacc

SEQ ID NO: 312874 - RNA, 32 nt, Homo Sapiens
cuguccugccaugcaagaacucaucacugugg

SEQ ID NO: 312875 - RNA, 32 nt, Homo Sapiens
aggcagugauauuguggaagauugaaauccac

SEQ ID NO: 312876 - RNA, 32 nt, Homo Sapiens
uuuucuuagauauuuaguuugcugguauauuc

SEQ ID NO: 312877 - RNA, 32 nt, Homo Sapiens
auuugggaagagaaucugugcuaugcaauguu

SEQ ID NO: 312878 - RNA, 32 nt, Homo Sapiens
caaagcucacuuaugaaagauggauuuccaag

SEQ ID NO: 312879 - RNA, 32 nt, Homo Sapiens
accaccucugggacacggcaccccccugggcc

SEQ ID NO: 312880 - RNA, 32 nt, Homo Sapiens
ccucucugcugcuggcauguugguagagucau

SEQ ID NO: 312881 - RNA, 32 nt, Homo Sapiens
uauuuucuuuucuuucuuccaagugcaugugu

SEQ ID NO: 312882 - RNA, 32 nt, Homo Sapiens
uuaagugucuccuugcucugguaaaagauaga

SEQ ID NO: 312883 - RNA, 32 nt, Homo Sapiens
uccuuuacaauuuuaaacaaguuuccucauua

SEQ ID NO: 312884 - RNA, 32 nt, Homo Sapiens
aguuucuccuuccccaucagcugaagcacucu

SEQ ID NO: 312885 - RNA, 32 nt, Homo Sapiens
ggcucagcgacucuguuucucaucuuuccaau

SEQ ID NO: 312886 - RNA, 32 nt, Homo Sapiens
acucuugcuugugucagcaccuuguucuucac

SEQ ID NO: 312887 - RNA, 32 nt, Homo Sapiens
uacaucgccuuggugacgugcucccugaccuc

SEQ ID NO: 312888 - RNA, 32 nt, Homo Sapiens
aggucggagucuuuuuaggaguagauuuggac

SEQ ID NO: 312889 - RNA, 32 nt, Homo Sapiens
uguaugucaggaggccacagggagcggaggag

SEQ ID NO: 312890 - RNA, 32 nt, Homo Sapiens
gccuuugccuucacucucuccccuccccuguc

SEQ ID NO: 312891 - RNA, 32 nt, Homo Sapiens
augcuucaaugcaaaaucaugaauauuuuuaa

SEQ ID NO: 312892 - RNA, 32 nt, Homo Sapiens
auuauuuuuuaaagucuucuuucauguaagua

SEQ ID NO: 312893 - RNA, 32 nt, Homo Sapiens
ggcugggugcgguggcucacgucuguaauccc

SEQ ID NO: 312894 - RNA, 32 nt, Homo Sapiens
caaaacagagcucugucuccaaugccagcaca

SEQ ID NO: 312895 - RNA, 32 nt, Homo Sapiens
aaaacaugucaaaaucaugaccucuuugaaug

SEQ ID NO: 312896 - RNA, 32 nt, Homo Sapiens
ggcccaucggaucgugccgcggcggccgagcg

SEQ ID NO: 312897 - RNA, 32 nt, Homo Sapiens
uugcauuuccaaagccaccaauccauuuugug

SEQ ID NO: 312898 - RNA, 32 nt, Homo Sapiens
cuguugucugcgccugaaaagggcggaagagu

SEQ ID NO: 312899 - RNA, 32 nt, Homo Sapiens
uuuuuuacacgagauuucuuuuuuaugugaug

SEQ ID NO: 312900 - RNA, 32 nt, Homo Sapiens
cgcugucucaucagugcccggugcugggucag

SEQ ID NO: 312901 - RNA, 32 nt, Homo Sapiens
cucccugaacauugcuguuauccuguucuuuu

SEQ ID NO: 312902 - RNA, 32 nt, Homo Sapiens
gggaggacuugaaaaugguguucgggcgacuc

SEQ ID NO: 312903 - RNA, 32 nt, Homo Sapiens
gggcggagcggaggggaggccgugccaggcag

SEQ ID NO: 312904 - RNA, 32 nt, Homo Sapiens
uggagccuagggcaucggcaggagagugugug

SEQ ID NO: 312905 - RNA, 32 nt, Homo Sapiens
ccauggugaacaugugaccugcagaucuggca

SEQ ID NO: 312906 - RNA, 32 nt, Homo Sapiens
cuugaccuggaaagaaucuucugcugacucuc

SEQ ID NO: 312907 - RNA, 32 nt, Homo Sapiens
gccgggagcugcugagccuaccgccgccagag

SEQ ID NO: 312908 - RNA, 32 nt, Homo Sapiens
accuuaccaauauaugacauuaagugagagug

SEQ ID NO: 312909 - RNA, 32 nt, Homo Sapiens
ccagaagccaggaaggcugugcaggacgucuc

SEQ ID NO: 312910 - RNA, 32 nt, Homo Sapiens
ucagcaacacugugucccuucgccccaccguu

SEQ ID NO: 312911 - RNA, 32 nt, Homo Sapiens
cagucagacaguguuguguaaaaaugaucauu

SEQ ID NO: 312912 - RNA, 32 nt, Homo Sapiens
uuccggaacugcccaccuuccacacugaggua

SEQ ID NO: 312913 - RNA, 32 nt, Homo Sapiens
uggagcaaagaaggauuuuaugcuguugucau

SEQ ID NO: 312914 - RNA, 32 nt, Homo Sapiens
cccccguucuggccgcgccccacugcccaccu

SEQ ID NO: 312915 - RNA, 32 nt, Homo Sapiens
uggccaaauaccauccacagugaggguuauua

SEQ ID NO: 312916 - RNA, 32 nt, Homo Sapiens
gugcucccuuucugccagcaguucugguucuu

SEQ ID NO: 312917 - RNA, 32 nt, Homo Sapiens
aggccaggcucuaugcuucucauuuaggccuc

SEQ ID NO: 312918 - RNA, 32 nt, Homo Sapiens
aucuauauauacauuugugaagcaagaaacaa

SEQ ID NO: 312919 - RNA, 32 nt, Homo Sapiens
accacaguccccaagauugcagcuucaucccc

SEQ ID NO: 312920 - RNA, 32 nt, Homo Sapiens
ccgccaaaccgcauagagaacguggcagcaag

SEQ ID NO: 312921 - RNA, 32 nt, Homo Sapiens
auuaacugagagauuaaaggaacagcagcacu

SEQ ID NO: 312922 - RNA, 32 nt, Homo Sapiens
uugcuuucacagucaucguaugcugacauggg

SEQ ID NO: 312923 - RNA, 31 nt, Homo Sapiens
gccauuuguuugacuuuguuuggugaaaugu

SEQ ID NO: 312924 - RNA, 32 nt, Homo Sapiens
uccgccugggcccgcgcgacaggagcgcgguc

SEQ ID NO: 312925 - RNA, 32 nt, Homo Sapiens
aggauugccucccagcugccuggccagcccac

SEQ ID NO: 312926 - RNA, 32 nt, Homo Sapiens
gugggaggaaggacauuaaaauacugcagaag

SEQ ID NO: 312927 - RNA, 32 nt, Homo Sapiens
ugagugaccaagaagaauuugcuugaggcaaa

SEQ ID NO: 312928 - RNA, 32 nt, Homo Sapiens
aaugaggugggacgaguccacuggcagggcgg

SEQ ID NO: 312929 - RNA, 32 nt, Homo Sapiens
auccaucucugcaagcucccuguguuuccuug

SEQ ID NO: 312930 - RNA, 32 nt, Homo Sapiens
acaggaggaagcugggacagguccccuugggu

SEQ ID NO: 312931 - RNA, 32 nt, Homo Sapiens
cucugggugucuuggucuuuuauuuuuuguaa

SEQ ID NO: 312932 - RNA, 32 nt, Homo Sapiens
aagugugaaaaacauggcaaagccuuuaagaa

SEQ ID NO: 312933 - RNA, 32 nt, Homo Sapiens
ccaucgugccagucagagggcaucaucucagc

SEQ ID NO: 312934 - RNA, 32 nt, Homo Sapiens
gacugaagauaacuuugugucuggaagagccc

SEQ ID NO: 312935 - RNA, 32 nt, Homo Sapiens
uucuuuuacacguuuaaaaacuucuuaaagca

SEQ ID NO: 312936 - RNA, 32 nt, Homo Sapiens
cugcgguaguacggguuacggaaucacugucg

SEQ ID NO: 312937 - RNA, 32 nt, Homo Sapiens
gcggggaggaggaggaggacaaggacuccuga

SEQ ID NO: 312938 - RNA, 32 nt, Homo Sapiens
cagugucuguugucgggacucgcaagugcccu

SEQ ID NO: 312939 - RNA, 32 nt, Homo Sapiens
aaugcuguaaugguggaggugugggcagagga

SEQ ID NO: 312940 - RNA, 32 nt, Homo Sapiens
auguuugaaaauacuauguuuacucguucuug

SEQ ID NO: 312941 - RNA, 32 nt, Homo Sapiens
ggcagccuugucccggcccagugugugugacc

SEQ ID NO: 312942 - RNA, 32 nt, Homo Sapiens
ccucgcugccuucuccucccuaacuggcaccc

SEQ ID NO: 312943 - RNA, 32 nt, Homo Sapiens
uuauuguguguuaaguuuuucaucugugcauc

SEQ ID NO: 312944 - RNA, 32 nt, Homo Sapiens
aggauuugaugcucugauccuuucucaugccu

SEQ ID NO: 312945 - RNA, 32 nt, Homo Sapiens
gagggugcuucaguuuuacucccuuugagagg

SEQ ID NO: 312946 - RNA, 32 nt, Homo Sapiens
gaggaaggacccugaaauguugccagaaaugu

SEQ ID NO: 312947 - RNA, 32 nt, Homo Sapiens
gacaggagggugggagcaggacagagaaacuu

SEQ ID NO: 312948 - RNA, 32 nt, Homo Sapiens
ccgucagcccucgcucgcauugguggcgcuga

SEQ ID NO: 312949 - RNA, 32 nt, Homo Sapiens
aaguauuguaaauuauauuugugcuauaguau

SEQ ID NO: 312950 - RNA, 32 nt, Homo Sapiens
cugcugcugcugcacaugccacagcaggcggu

SEQ ID NO: 312951 - RNA, 32 nt, Homo Sapiens
gccuugguguauuuuucuuuucuuuuuuuaau

SEQ ID NO: 312952 - RNA, 32 nt, Homo Sapiens
auggagaggaggaggaggcugaguuuggggua

SEQ ID NO: 312953 - RNA, 32 nt, Homo Sapiens
ccaccaaacacuacgugacgagcuacgccacg

SEQ ID NO: 312954 - RNA, 32 nt, Homo Sapiens
ugaaauaucuuucaauaaaguuuauaauuuuc

SEQ ID NO: 312955 - RNA, 32 nt, Homo Sapiens
caucauauuuuacauuuuuuuaucaucuuuua

SEQ ID NO: 312956 - RNA, 30 nt, Homo Sapiens
cacaaccccgccgcgccgccggcccgcacu

SEQ ID NO: 312957 - RNA, 32 nt, Homo Sapiens
uguugcauuguacagcacugaaagggcuuuau

SEQ ID NO: 312958 - RNA, 32 nt, Homo Sapiens
uaauauuauaugcuuguaauaaaagcaaaaga

SEQ ID NO: 312959 - RNA, 32 nt, Homo Sapiens
augauaaaguuccuuaagcuggugauuccuaa

SEQ ID NO: 312960 - RNA, 30 nt, Homo Sapiens
aauggggguuucucugcagaagcucucuuu

SEQ ID NO: 312961 - RNA, 32 nt, Homo Sapiens
ucuguuucuacaaaagauuguaaaacccuuuu

SEQ ID NO: 312962 - RNA, 32 nt, Homo Sapiens
ucuuuagcugggugcagaaggcggcuccgcgg

SEQ ID NO: 312963 - RNA, 32 nt, Homo Sapiens
aucagaacauucaagggauggugauauggaug

SEQ ID NO: 312964 - RNA, 32 nt, Homo Sapiens
agaaggcagugccagcagcuggagucuguuaa

SEQ ID NO: 312965 - RNA, 32 nt, Homo Sapiens
cggggcaggggcggggcuugugggaggggcgg

SEQ ID NO: 312966 - RNA, 32 nt, Homo Sapiens
caaaaauguucccuugaccauuggcugcgcua

SEQ ID NO: 312967 - RNA, 32 nt, Homo Sapiens
accgccggggguauccggggggucgcuuaccg

SEQ ID NO: 312968 - RNA, 32 nt, Homo Sapiens
aaacaugcaugugucaguggcuuuggagcagg

SEQ ID NO: 312969 - RNA, 32 nt, Homo Sapiens
acgccccgucagggcccggcguguguguuccc

SEQ ID NO: 312970 - RNA, 32 nt, Homo Sapiens
ucccccgggucggagccccccggagcugcgcg

SEQ ID NO: 312971 - RNA, 32 nt, Homo Sapiens
gccacagaauuaaacguguugccacaccugcc

SEQ ID NO: 312972 - RNA, 32 nt, Homo Sapiens
cccuacccgugccccgagugcggccgccgcuu

SEQ ID NO: 312973 - RNA, 32 nt, Homo Sapiens
ucagcucugugccaccucccaagagggcuccu

SEQ ID NO: 312974 - RNA, 32 nt, Homo Sapiens
agaaugugauuuuuauuccuuuuuauuucucu

SEQ ID NO: 312975 - RNA, 32 nt, Homo Sapiens
uuucggcaguuccgcuaccaggaggcagcugg

SEQ ID NO: 312976 - RNA, 32 nt, Homo Sapiens
agagaacacacacaggagaaaaaccuuaugaa

SEQ ID NO: 312977 - RNA, 32 nt, Homo Sapiens
acacuaaaagcaugcaucuaaucuaauagucc

SEQ ID NO: 312978 - RNA, 32 nt, Homo Sapiens
aguugugaacaagcaccaaauuaaaagaccua

SEQ ID NO: 312979 - RNA, 32 nt, Homo Sapiens
caguagauaauuaaguguaauauggauuacuu

SEQ ID NO: 312980 - RNA, 32 nt, Homo Sapiens
gcggauuuaaacagucaaguaaaaucaagcug

SEQ ID NO: 312981 - RNA, 32 nt, Homo Sapiens
caugcaacccgaagguuauggucaaucccaaa

SEQ ID NO: 312982 - RNA, 32 nt, Homo Sapiens
cccccaggggcuccugggggccccgcuugucu

SEQ ID NO: 312983 - RNA, 32 nt, Homo Sapiens
aaggucugccagccaggaaggagcacucuuau

SEQ ID NO: 312984 - RNA, 31 nt, Homo Sapiens
cuaaaaauuaaaagagaucgauauuaaaaaa

SEQ ID NO: 312985 - RNA, 32 nt, Homo Sapiens
cagacaugggugauaagccagaugaagucaua

SEQ ID NO: 312986 - RNA, 32 nt, Homo Sapiens
ccucggcguggccuagcgaguuauggcgacga

SEQ ID NO: 312987 - RNA, 32 nt, Homo Sapiens
aggaaggagcagcuuaccgacugcggguguuc

SEQ ID NO: 312988 - RNA, 32 nt, Homo Sapiens
cauggguacagaggggacaacaaugaaucaga

SEQ ID NO: 312989 - RNA, 32 nt, Homo Sapiens
ccaagguuacuuugaaaucuauguauauagcu

SEQ ID NO: 312990 - RNA, 32 nt, Homo Sapiens
auaauagccuacuuguauuuugaaguaacuga

SEQ ID NO: 312991 - RNA, 32 nt, Homo Sapiens
gaggagggguucuggguccaucacugccuuac

SEQ ID NO: 312992 - RNA, 32 nt, Homo Sapiens
gguccgcgcgcccagcggaaccugcuuccccu

SEQ ID NO: 312993 - RNA, 30 nt, Homo Sapiens
cgucugccaaugaugggggaggacucugcu

SEQ ID NO: 312994 - RNA, 32 nt, Homo Sapiens
ccugggccucacgcacccguguaggagaggcc

SEQ ID NO: 312995 - RNA, 32 nt, Homo Sapiens
caucauguuuacauuguauguauaaagauuau

SEQ ID NO: 312996 - RNA, 32 nt, Homo Sapiens
caggcgcuugcucuccggggccgcccggcggg

SEQ ID NO: 312997 - RNA, 32 nt, Homo Sapiens
uguuauguugauggaucagaagaaauuggaag

SEQ ID NO: 312998 - RNA, 32 nt, Homo Sapiens
uaauuagaauauuuucaacauaaagaaaagac

SEQ ID NO: 312999 - RNA, 32 nt, Homo Sapiens
gacaaagagaccaagcuggugagguugcccca

SEQ ID NO: 313000 - RNA, 32 nt, Homo Sapiens
ucucaaacagaaaaagaaugagccuggaauga

SEQ ID NO: 313001 - RNA, 32 nt, Homo Sapiens
gagaacucuuggagccauucucuuuuuugagc

SEQ ID NO: 313002 - RNA, 32 nt, Homo Sapiens
uugucaggagacggcucuucuuugaaaugagg

SEQ ID NO: 313003 - RNA, 32 nt, Homo Sapiens
aguuauauaugaucugcauuuucuugaacuga

SEQ ID NO: 313004 - RNA, 32 nt, Homo Sapiens
ccuuccugcuccacgugcucaagcccccacag

SEQ ID NO: 313005 - RNA, 32 nt, Homo Sapiens
ggaguaaucuucagcucacugcuguucucugg

SEQ ID NO: 313006 - RNA, 32 nt, Homo Sapiens
ucaucuccacccaagaagugcuggcaccgaug

SEQ ID NO: 313007 - RNA, 32 nt, Homo Sapiens
cuuuuugaaauaacagggaccagcagcaguuu

SEQ ID NO: 313008 - RNA, 31 nt, Homo Sapiens
uucauuuugugcuuuuccuuguguuuucaug

SEQ ID NO: 313009 - RNA, 32 nt, Homo Sapiens
aggaggaggaggaggagagcgcgggcuggcgc

SEQ ID NO: 313010 - RNA, 32 nt, Homo Sapiens
gggguccccggcucaacaaggaucucauguuu

SEQ ID NO: 313011 - RNA, 32 nt, Homo Sapiens
ccacccagccaucagcagcaugcaggguaaac

SEQ ID NO: 313012 - RNA, 32 nt, Homo Sapiens
cuggcagggcugccgcugguguuucaugcauc

SEQ ID NO: 313013 - RNA, 32 nt, Homo Sapiens
gcucucccuguccuccuccccccgacaucugc

SEQ ID NO: 313014 - RNA, 32 nt, Homo Sapiens
aguguuuucccacuagaagcucugcucugcuc

SEQ ID NO: 313015 - RNA, 32 nt, Homo Sapiens
caccccuccgguccuggagcucccacagcuaa

SEQ ID NO: 313016 - RNA, 32 nt, Homo Sapiens
gaaaaauauauuccuucagacuucugaacuuu

SEQ ID NO: 313017 - RNA, 32 nt, Homo Sapiens
auaguagaauacuuauuucucagugcuuaaaa

SEQ ID NO: 313018 - RNA, 32 nt, Homo Sapiens
ugccauuguaaauuguuaguguucgccaaagg

SEQ ID NO: 313019 - RNA, 32 nt, Homo Sapiens
ucggaggaguggggcggggcgggggaggggca

SEQ ID NO: 313020 - RNA, 32 nt, Homo Sapiens
uugagguacggagaaacugaacugagaaggua

SEQ ID NO: 313021 - RNA, 32 nt, Homo Sapiens
aaagaauacguauaaaagauagagaggcauaa

SEQ ID NO: 313022 - RNA, 32 nt, Homo Sapiens
auggauccaaaaaugacgagcuguaucaacua

SEQ ID NO: 313023 - RNA, 32 nt, Homo Sapiens
cacgcagcaggauggcaagggcuccgcuuggg

SEQ ID NO: 313024 - RNA, 32 nt, Homo Sapiens
gauccgggccccaggcugcugccgcuuuuuau

SEQ ID NO: 313025 - RNA, 32 nt, Homo Sapiens
auaaauuaaaacaaguuacuuuuuucaaaugu

SEQ ID NO: 313026 - RNA, 32 nt, Homo Sapiens
caacccaaaugcccaucaaugauagacuggau

SEQ ID NO: 313027 - RNA, 32 nt, Homo Sapiens
guauuuuaaaauguucucaaaauaaaacuugu

SEQ ID NO: 313028 - RNA, 32 nt, Homo Sapiens
uuaguaagggugaaggcuggagggauuuguug

SEQ ID NO: 313029 - RNA, 30 nt, Homo Sapiens
augaacgccgccucggcgccggcggugcac

SEQ ID NO: 313030 - RNA, 32 nt, Homo Sapiens
gucccaaaacaaaaguagagaagccgauagug

SEQ ID NO: 313031 - RNA, 29 nt, Homo Sapiens
cgguauggcauuggcguccgggcccgcaa

SEQ ID NO: 313032 - RNA, 32 nt, Homo Sapiens
uaggggaggguggggcaauggggagaggcaaa

SEQ ID NO: 313033 - RNA, 32 nt, Homo Sapiens
cugaggccucgaggggccucccggggcccagg

SEQ ID NO: 313034 - RNA, 32 nt, Homo Sapiens
ucucagcggcugccaacagaucaugagccauc

SEQ ID NO: 313035 - RNA, 32 nt, Homo Sapiens
cacaucaaaaaggggagggaaucuacaaugga

SEQ ID NO: 313036 - RNA, 32 nt, Homo Sapiens
ucggcucaucacaaccucugcuuccuggguuc

SEQ ID NO: 313037 - RNA, 32 nt, Homo Sapiens
gcgccaaaagcuuuuucaguuccugcaggcug

SEQ ID NO: 313038 - RNA, 32 nt, Homo Sapiens
auggugaaaauauuugacaggcuuauggaagg

SEQ ID NO: 313039 - RNA, 32 nt, Homo Sapiens
gaagagaaaaugcuaaauaaaaaggauguuug

SEQ ID NO: 313040 - RNA, 32 nt, Homo Sapiens
accccuacagaaaaaaugggagcaagaacuug

SEQ ID NO: 313041 - RNA, 32 nt, Homo Sapiens
gggaggggagagaguugggcgagggagagccc

SEQ ID NO: 313042 - RNA, 32 nt, Homo Sapiens
guggagggcacgccagggugucugaagcugag

SEQ ID NO: 313043 - RNA, 32 nt, Homo Sapiens
aaccaauuagaauugauaccagugaaauuuuu

SEQ ID NO: 313044 - RNA, 32 nt, Homo Sapiens
cucugucacccgagacaguaagagccaccccu

SEQ ID NO: 313045 - RNA, 32 nt, Homo Sapiens
gggcugcagcggggcccucgggccgaaagucc

SEQ ID NO: 313046 - RNA, 32 nt, Homo Sapiens
gccaggaucccggcaggcugaucccguccucc

SEQ ID NO: 313047 - RNA, 32 nt, Homo Sapiens
uuuacggauauuuuaaacucuguuagagagca

SEQ ID NO: 313048 - RNA, 32 nt, Homo Sapiens
guguaccaaacaugcauacaaaggacacacag

SEQ ID NO: 313049 - RNA, 32 nt, Homo Sapiens
agcagagaccccccgaggcaucugcagacaga

SEQ ID NO: 313050 - RNA, 32 nt, Homo Sapiens
aacaaggaaaauuuagcaacuucauuaccuuc

SEQ ID NO: 313051 - RNA, 32 nt, Homo Sapiens
cgccaggagcuugugggccgucccuagaucag

SEQ ID NO: 313052 - RNA, 32 nt, Homo Sapiens
gaauaaagaaaccaaaucaugaaaauuaugga

SEQ ID NO: 313053 - RNA, 32 nt, Homo Sapiens
uuuuagcugauccaucuuuaacgcaggaggga

SEQ ID NO: 313054 - RNA, 32 nt, Homo Sapiens
accaccaaaaauucaaauugggauuuuccgga

SEQ ID NO: 313055 - RNA, 32 nt, Homo Sapiens
auguguguuuucugccuugaguacugggacug

SEQ ID NO: 313056 - RNA, 32 nt, Homo Sapiens
uuuauuucccccuggaugguuguugggaggga

SEQ ID NO: 313057 - RNA, 32 nt, Homo Sapiens
ugcaggaggcuuccagaagcaguuguuguaau

SEQ ID NO: 313058 - RNA, 32 nt, Homo Sapiens
uuuaacuuguuuagauuuugucuuaaacacca

SEQ ID NO: 313059 - RNA, 32 nt, Homo Sapiens
augccgugguauaauauagggaagaauggaug

SEQ ID NO: 313060 - RNA, 32 nt, Homo Sapiens
ugaugauauuaaccauguauuauuuucaguau

SEQ ID NO: 313061 - RNA, 32 nt, Homo Sapiens
ugacaaggucagcaucauuugcucuccugaau

SEQ ID NO: 313062 - RNA, 32 nt, Homo Sapiens
uccuacauuucccacgguauucuuucuuugca

SEQ ID NO: 313063 - RNA, 32 nt, Homo Sapiens
auaauucuggaggaagauaagaaugauuccug

SEQ ID NO: 313064 - RNA, 32 nt, Homo Sapiens
gaacaccaggacuuuaaucuuaugcuuaaaau

SEQ ID NO: 313065 - RNA, 32 nt, Homo Sapiens
aggagaguuucuuugucacaacaaacaagggg

SEQ ID NO: 313066 - RNA, 32 nt, Homo Sapiens
uaacaaaaaucucauuguacuacaaaauuaug

SEQ ID NO: 313067 - RNA, 32 nt, Homo Sapiens
cgcgggggcgggcuacugggccugcgcugccg

SEQ ID NO: 313068 - RNA, 32 nt, Homo Sapiens
auggagggguacugaggaagcaucugaaugca

SEQ ID NO: 313069 - RNA, 32 nt, Homo Sapiens
auacuuccugcgccugccuucuccuugaaacc

SEQ ID NO: 313070 - RNA, 32 nt, Homo Sapiens
ucuggagaaagaccuuauaauauaagauauau

SEQ ID NO: 313071 - RNA, 32 nt, Homo Sapiens
ggcugagggauauuuguacauguaugggaugc

SEQ ID NO: 313072 - RNA, 32 nt, Homo Sapiens
aggcuggaguacaguggcauaaucacagcuca

SEQ ID NO: 313073 - RNA, 32 nt, Homo Sapiens
ugcccugaagacgcgccacgcccccuccccua

SEQ ID NO: 313074 - RNA, 32 nt, Homo Sapiens
ccagugaccucagggcacuuugggcuuggcua

SEQ ID NO: 313075 - RNA, 29 nt, Homo Sapiens
cgugugggucucugggcacagugggccug

SEQ ID NO: 313076 - RNA, 32 nt, Homo Sapiens
ugcugucuggggcggucugugcuuccugagca

SEQ ID NO: 313077 - RNA, 32 nt, Homo Sapiens
gccgcuucuguccucggacccauuccaacaau

SEQ ID NO: 313078 - RNA, 32 nt, Homo Sapiens
cuaccagaacuaagcacuuuguuaauuugggg

SEQ ID NO: 313079 - RNA, 32 nt, Homo Sapiens
acauucagcacccaccaccucccucuuucgca

SEQ ID NO: 313080 - RNA, 32 nt, Homo Sapiens
uugugggggaagggcgugcaaaaacuaacauu

SEQ ID NO: 313081 - RNA, 32 nt, Homo Sapiens
gacucccgcgcgccccaacccugcuuaucccu

SEQ ID NO: 313082 - RNA, 32 nt, Homo Sapiens
cuggugugugcauucugagaccucuuguauuc

SEQ ID NO: 313083 - RNA, 32 nt, Homo Sapiens
ugggguuauguaucagaagagaggggaagaaa

SEQ ID NO: 313084 - RNA, 32 nt, Homo Sapiens
ggaguccccuccccggcccuaccagcgcccgc

SEQ ID NO: 313085 - RNA, 32 nt, Homo Sapiens
uugguacuuggaaaaauggacaaggauuguga

SEQ ID NO: 313086 - RNA, 32 nt, Homo Sapiens
aggcacugacuucaauaaaguuuauuuauacg

SEQ ID NO: 313087 - RNA, 32 nt, Homo Sapiens
acaacugcagcuuuuccuuggagucuguacca

SEQ ID NO: 313088 - RNA, 32 nt, Homo Sapiens
aaaaugcaaaaauaaaaaauauaguacucaag

SEQ ID NO: 313089 - RNA, 32 nt, Homo Sapiens
uagcuggugucuucauuuuacauugugacaaa

SEQ ID NO: 313090 - RNA, 32 nt, Homo Sapiens
ugcacucuagccgccgcgcccggagccggggc

SEQ ID NO: 313091 - RNA, 32 nt, Homo Sapiens
ucacccuucagauuccaccccauccccacagg

SEQ ID NO: 313092 - RNA, 32 nt, Homo Sapiens
gucagccuggcuccugagacgcccaggcccgg

SEQ ID NO: 313093 - RNA, 32 nt, Homo Sapiens
cgugcacuuaggaguauguaauuauuaugguu

SEQ ID NO: 313094 - RNA, 32 nt, Homo Sapiens
ccuucagucaggguuugucagaggaacaaacc

SEQ ID NO: 313095 - RNA, 32 nt, Homo Sapiens
gugcaacgccuccgaccccgcggccuacgcgc

SEQ ID NO: 313096 - RNA, 32 nt, Homo Sapiens
ugaggcugggggugggggaacagcagguauaa

SEQ ID NO: 313097 - RNA, 32 nt, Homo Sapiens
ccggcgcguggccuaccacugggacuuugggg

SEQ ID NO: 313098 - RNA, 32 nt, Homo Sapiens
cuuuauuaaaauuuauaauugguaauuggacc

SEQ ID NO: 313099 - RNA, 32 nt, Homo Sapiens
ccucuugcauuugaguuuuucagaauuaaacu

SEQ ID NO: 313100 - RNA, 32 nt, Homo Sapiens
gcuggucacguggcuggcccgcggcggugcgc

SEQ ID NO: 313101 - RNA, 32 nt, Homo Sapiens
uugaagcuaucaaaaagcuaacaugcaaggac

SEQ ID NO: 313102 - RNA, 29 nt, Homo Sapiens
ugccauggugcuuucaguuuaaugcugug

SEQ ID NO: 313103 - RNA, 32 nt, Homo Sapiens
gcccgcugugucuccgcccugcccccaggcgc

SEQ ID NO: 313104 - RNA, 32 nt, Homo Sapiens
cacagcaaguuuuaaccuuuuaaacuuuucac

SEQ ID NO: 313105 - RNA, 32 nt, Homo Sapiens
cgcuggccagggugcuggacaagacgggcccg

SEQ ID NO: 313106 - RNA, 32 nt, Homo Sapiens
cauccaccguccugcccacgccgccucagccu

SEQ ID NO: 313107 - RNA, 32 nt, Homo Sapiens
aucaggauauauauuuucauacagucucaggu

SEQ ID NO: 313108 - RNA, 32 nt, Homo Sapiens
acauaaaacacuucuugagauuuugauuggga

SEQ ID NO: 313109 - RNA, 32 nt, Homo Sapiens
gaucacuuuggaaucacuuuguuguaacaaaa

SEQ ID NO: 313110 - RNA, 32 nt, Homo Sapiens
cuagagcgcggcgcgaccggacgcugcgggcg

SEQ ID NO: 313111 - RNA, 32 nt, Homo Sapiens
cugggugccccuuuuccuccccugggaagggc

SEQ ID NO: 313112 - RNA, 30 nt, Homo Sapiens
guggcacuaccccaaacccaucuuuuguuc

SEQ ID NO: 313113 - RNA, 32 nt, Homo Sapiens
aguagcccaucccgcaguuuucuugggggcag

SEQ ID NO: 313114 - RNA, 32 nt, Homo Sapiens
ucccagaaaugucuccugugggacaugcgaug

SEQ ID NO: 313115 - RNA, 32 nt, Homo Sapiens
acuccaaaccaucagguggacacaguccuagg

SEQ ID NO: 313116 - RNA, 32 nt, Homo Sapiens
gucuacugccuccucagccagcagguccagaa

SEQ ID NO: 313117 - RNA, 32 nt, Homo Sapiens
ccaagccuguuguucaucucuuaaguggucuu

SEQ ID NO: 313118 - RNA, 32 nt, Homo Sapiens
gugugcucuuccaugauguugauaggugacca

SEQ ID NO: 313119 - RNA, 32 nt, Homo Sapiens
uuagaaaaauuuggauguguaaaaagaacucu

SEQ ID NO: 313120 - RNA, 32 nt, Homo Sapiens
cccugggaaugggggguacucacgcaccccgc

SEQ ID NO: 313121 - RNA, 32 nt, Homo Sapiens
uugggagugucuauccuucaauggcugaauag

SEQ ID NO: 313122 - RNA, 32 nt, Homo Sapiens
ucaugggacaaaggcauucugcaagaaguaga

SEQ ID NO: 313123 - RNA, 32 nt, Homo Sapiens
gcugcucauccuauuuucuccucuccaagucu

SEQ ID NO: 313124 - RNA, 32 nt, Homo Sapiens
gccugaucagcagcugcagcgcucaccuccgg

SEQ ID NO: 313125 - RNA, 32 nt, Homo Sapiens
caggggugcauuuguguuguguucggguuggg

SEQ ID NO: 313126 - RNA, 32 nt, Homo Sapiens
ugggaaagguuggaugcugccuuacauccccu

SEQ ID NO: 313127 - RNA, 30 nt, Homo Sapiens
gaaaagcuggacugccccaggcugggagga

SEQ ID NO: 313128 - RNA, 32 nt, Homo Sapiens
auuuacuaauuauguaacuucacaucucugag

SEQ ID NO: 313129 - RNA, 32 nt, Homo Sapiens
auuauuuccaaauauuguuugucugaugacuu

SEQ ID NO: 313130 - RNA, 32 nt, Homo Sapiens
gcucgcggcucggucgcccuggcggggccaag

SEQ ID NO: 313131 - RNA, 32 nt, Homo Sapiens
gggcaguuuuauucuuucucucuacucguuca

SEQ ID NO: 313132 - RNA, 32 nt, Homo Sapiens
gaagcaggaaauuuuuaaaggaucagagucau

SEQ ID NO: 313133 - RNA, 32 nt, Homo Sapiens
uuuccuccacacuaggguggcugagagggguc

SEQ ID NO: 313134 - RNA, 32 nt, Homo Sapiens
uugaaucuugccuguccuuuccaaguggaguc

SEQ ID NO: 313135 - RNA, 32 nt, Homo Sapiens
agaauuucaauccuaguauauaguaccuagua

SEQ ID NO: 313136 - RNA, 32 nt, Homo Sapiens
uugauuuggguuaaauauagguuuuuaaaacu

SEQ ID NO: 313137 - RNA, 32 nt, Homo Sapiens
gagcggaggggaggccgugccaggcagggccg

SEQ ID NO: 313138 - RNA, 32 nt, Homo Sapiens
agcacaccucguuccccguggcacucaugccc

SEQ ID NO: 313139 - RNA, 32 nt, Homo Sapiens
cggcgcgagccgggcgcugaggacaagggccg

SEQ ID NO: 313140 - RNA, 32 nt, Homo Sapiens
cgcccuugacuugaggaccaugaaccgcagcc

SEQ ID NO: 313141 - RNA, 32 nt, Homo Sapiens
augaacaggaguacuacugagaccuguacuga

SEQ ID NO: 313142 - RNA, 32 nt, Homo Sapiens
uccuuuguuaaaacuuuucuugacucucucuc

SEQ ID NO: 313143 - RNA, 32 nt, Homo Sapiens
gcucccuggaggaguccuccccggccggugcu

SEQ ID NO: 313144 - RNA, 32 nt, Homo Sapiens
gcggucaauuccaggugcuguaaagccgacua

SEQ ID NO: 313145 - RNA, 32 nt, Homo Sapiens
cugccccaccucucuuucuccccuuuuaagcc

SEQ ID NO: 313146 - RNA, 32 nt, Homo Sapiens
ucaggcagcaacauggcaagaagguggugggc

SEQ ID NO: 313147 - RNA, 32 nt, Homo Sapiens
cgacuccaguucuggcugcccgcgggccucuu

SEQ ID NO: 313148 - RNA, 32 nt, Homo Sapiens
gagccgcacgcggcgauauggaagaggagggc

SEQ ID NO: 313149 - RNA, 32 nt, Homo Sapiens
agucaacaacgcuuuguccuucagugccuggc

SEQ ID NO: 313150 - RNA, 32 nt, Homo Sapiens
ccauuuacacuucucagcaaauguaguugcaa

SEQ ID NO: 313151 - RNA, 32 nt, Homo Sapiens
ccuuguuuugucuucacccauguaauaaaggu

SEQ ID NO: 313152 - RNA, 32 nt, Homo Sapiens
uaaagacggaacaaguaauuuaccaguucuac

SEQ ID NO: 313153 - RNA, 32 nt, Homo Sapiens
gaucaugggaggccuauuugacuccaagguag

SEQ ID NO: 313154 - RNA, 32 nt, Homo Sapiens
guauuuguuuuaaaguagaaucugaauauacu

SEQ ID NO: 313155 - RNA, 32 nt, Homo Sapiens
uaucacauguauagagaaauaauuauaucaga

SEQ ID NO: 313156 - RNA, 32 nt, Homo Sapiens
cuguacuauguccuuaaagagaauuugguaau

SEQ ID NO: 313157 - RNA, 32 nt, Homo Sapiens
auucuguuaauauggacuuggacuaauaaccu

SEQ ID NO: 313158 - RNA, 32 nt, Homo Sapiens
guauccuugggguuuguacaccuacuuucacc

SEQ ID NO: 313159 - RNA, 32 nt, Homo Sapiens
cggccgggcuccugcgcggcgcggcucggcuc

SEQ ID NO: 313160 - RNA, 32 nt, Homo Sapiens
acgagaacccacugaucucaccacuggggcaa

SEQ ID NO: 313161 - RNA, 32 nt, Homo Sapiens
uccugucauucuuuccucuaccugagcugaca

SEQ ID NO: 313162 - RNA, 32 nt, Homo Sapiens
aagaaaucuaguugagcaugaagauaggaucu

SEQ ID NO: 313163 - RNA, 32 nt, Homo Sapiens
acagguucauauccagaggaauggcagaucug

SEQ ID NO: 313164 - RNA, 32 nt, Homo Sapiens
cucaaaaaacaaaaacaagacaugugagcuug

SEQ ID NO: 313165 - RNA, 32 nt, Homo Sapiens
cugggugccugccuggggcuuggggcucugua

SEQ ID NO: 313166 - RNA, 32 nt, Homo Sapiens
uguccccugccagcuccacaagcccuggacuu

SEQ ID NO: 313167 - RNA, 32 nt, Homo Sapiens
cucugcccagaggcuccugggccuggcuuggc

SEQ ID NO: 313168 - RNA, 32 nt, Homo Sapiens
aagggugugaagggguccccuugcggcuaggc

SEQ ID NO: 313169 - RNA, 32 nt, Homo Sapiens
gaggaggacagcacuguccacccagggagagu

SEQ ID NO: 313170 - RNA, 32 nt, Homo Sapiens
uccuugaauucugcacuugggacaaauaccug

SEQ ID NO: 313171 - RNA, 32 nt, Homo Sapiens
gaacauggcagaggggcaccccggcccggaaa

SEQ ID NO: 313172 - RNA, 32 nt, Homo Sapiens
gggaauacaaaauugccaaaaaauagucucaa

SEQ ID NO: 313173 - RNA, 32 nt, Homo Sapiens
uuaugugugucugugucuucuccuuaaacacu

SEQ ID NO: 313174 - RNA, 32 nt, Homo Sapiens
acaggguagagaaucagaggcuuguagauguc

SEQ ID NO: 313175 - RNA, 32 nt, Homo Sapiens
cccaggcccucccacuucccgaguugucugcc

SEQ ID NO: 313176 - RNA, 32 nt, Homo Sapiens
ccgagggugaucccagaggaaggcgccaucag

SEQ ID NO: 313177 - RNA, 32 nt, Homo Sapiens
caggcggaggggcugcuuuucugcccuuccuc

SEQ ID NO: 313178 - RNA, 32 nt, Homo Sapiens
uguggccgcgccguccgccgcgcccgagcugc

SEQ ID NO: 313179 - RNA, 32 nt, Homo Sapiens
cugagaacaucccacccucaacucauuccaac

SEQ ID NO: 313180 - RNA, 32 nt, Homo Sapiens
caucagcacuagcaccucacuccaucggcccc

SEQ ID NO: 313181 - RNA, 32 nt, Homo Sapiens
caccccagccuccucagcccccggcccuuccu

SEQ ID NO: 313182 - RNA, 32 nt, Homo Sapiens
cggcggcgcucccuaggaagggccguacgagg

SEQ ID NO: 313183 - RNA, 32 nt, Homo Sapiens
cacacgcucgcgcuccagcuccccuccugcgc

SEQ ID NO: 313184 - RNA, 26 nt, Homo Sapiens
caugucuugcucgucucgcgccuccu

SEQ ID NO: 313185 - RNA, 32 nt, Homo Sapiens
cgaggaggaggugccaccugggccccacgcau

SEQ ID NO: 313186 - RNA, 32 nt, Homo Sapiens
uguaugggucauuucaaagagggcuuaugagg

SEQ ID NO: 313187 - RNA, 32 nt, Homo Sapiens
cucuugugagcuccgcggccugcggcuccgga

SEQ ID NO: 313188 - RNA, 32 nt, Homo Sapiens
ccaggcggugcaaacaauccacuucuucaagc

SEQ ID NO: 313189 - RNA, 32 nt, Homo Sapiens
gcugcuguggcaggaagcugcccugaagcuga

SEQ ID NO: 313190 - RNA, 32 nt, Homo Sapiens
uucucucuucuuuuccucagguaggacagcuc

SEQ ID NO: 313191 - RNA, 32 nt, Homo Sapiens
gggggaaaagacugcuggaagacuucaucucc

SEQ ID NO: 313192 - RNA, 32 nt, Homo Sapiens
aauucaaggcagcacggacaugugcccaucag

SEQ ID NO: 313193 - RNA, 31 nt, Homo Sapiens
uuuuaaacaaauugguuaguuauuuggauau

SEQ ID NO: 313194 - RNA, 32 nt, Homo Sapiens
agaaacacccucaaagacacagugagaaauaa

SEQ ID NO: 313195 - RNA, 32 nt, Homo Sapiens
uauuuucggagggagcagauuacuucucccag

SEQ ID NO: 313196 - RNA, 32 nt, Homo Sapiens
cccuggagucuccucccagaccacgcgacucc

SEQ ID NO: 313197 - RNA, 32 nt, Homo Sapiens
guggaccguaggccucuuucuaguugaaugac

SEQ ID NO: 313198 - RNA, 32 nt, Homo Sapiens
ccugugggggccugggcaccgcaggaagacug

SEQ ID NO: 313199 - RNA, 32 nt, Homo Sapiens
gcaccuucauucuccguugucauugacuucaa

SEQ ID NO: 313200 - RNA, 32 nt, Homo Sapiens
gggaucccaucagagacaagccaggcagacac

SEQ ID NO: 313201 - RNA, 32 nt, Homo Sapiens
cuugggcacaucugcugguggguggcccagag

SEQ ID NO: 313202 - RNA, 29 nt, Homo Sapiens
agagaugcgcgagcagcugggcucggccg

SEQ ID NO: 313203 - RNA, 32 nt, Homo Sapiens
uuuaacaaaaauauagagaaugauuugcuuua

SEQ ID NO: 313204 - RNA, 32 nt, Homo Sapiens
ugacccgagcgcgcccccuucgugcucucggc

SEQ ID NO: 313205 - RNA, 32 nt, Homo Sapiens
uccuguuugccacuucauuucauuuccuugag

SEQ ID NO: 313206 - RNA, 32 nt, Homo Sapiens
cugaauaugccuucuuuuuuaauuagaaauau

SEQ ID NO: 313207 - RNA, 32 nt, Homo Sapiens
uauuuuuaaaaauuauauucaaaaugagccaa

SEQ ID NO: 313208 - RNA, 32 nt, Homo Sapiens
guuagauuguugaugcauucuaaccaacucac

SEQ ID NO: 313209 - RNA, 32 nt, Homo Sapiens
accauuccagccagggacgcugccggguagac

SEQ ID NO: 313210 - RNA, 32 nt, Homo Sapiens
ugauauacaugaaaacaaaaauauaauugugu

SEQ ID NO: 313211 - RNA, 30 nt, Homo Sapiens
ccuuuagagaagcauaaugaugguacuggu

SEQ ID NO: 313212 - RNA, 32 nt, Homo Sapiens
uaaaccuguauuaugaauuacauauuacaaag

SEQ ID NO: 313213 - RNA, 32 nt, Homo Sapiens
gugguaucucuggccacauuuguucuaauguc

SEQ ID NO: 313214 - RNA, 32 nt, Homo Sapiens
gaauuuuuucuuucuuuuuuuuuuuugagaca

SEQ ID NO: 313215 - RNA, 32 nt, Homo Sapiens
aguuuucaguguucugggacacacuucugucc

SEQ ID NO: 313216 - RNA, 32 nt, Homo Sapiens
cggugcguggaggcuaugggccugcuggccag

SEQ ID NO: 313217 - RNA, 32 nt, Homo Sapiens
guaguucucagguugugcuagagcagcacuuu

SEQ ID NO: 313218 - RNA, 32 nt, Homo Sapiens
aaaauuucccgggccgggagcgcugggccugc

SEQ ID NO: 313219 - RNA, 32 nt, Homo Sapiens
auuuguuuuuaaagguugaauaaucuuuuguu

SEQ ID NO: 313220 - RNA, 32 nt, Homo Sapiens
uuuuuuaaaauaauacugauauuuuccccacc

SEQ ID NO: 313221 - RNA, 32 nt, Homo Sapiens
gagucagaucuauugcuucucuguauuaccca

SEQ ID NO: 313222 - RNA, 32 nt, Homo Sapiens
aaguguuaggacuugucacagauuucuaacuc

SEQ ID NO: 313223 - RNA, 32 nt, Homo Sapiens
agagagccgagcugcgcgcggcgcgccugacg

SEQ ID NO: 313224 - RNA, 32 nt, Homo Sapiens
guggucuccugccgccaccuggaccggggaca

SEQ ID NO: 313225 - RNA, 32 nt, Homo Sapiens
agcuguugucagccaaugacaaagcauaguga

SEQ ID NO: 313226 - RNA, 32 nt, Homo Sapiens
aucaucacuguaaagacaaauaaaugauuaua

SEQ ID NO: 313227 - RNA, 32 nt, Homo Sapiens
gcauuuuagugcaacagggaagcaaguagaag

SEQ ID NO: 313228 - RNA, 32 nt, Homo Sapiens
cgccacccgcggccacaccgcagggacccucg

SEQ ID NO: 313229 - RNA, 32 nt, Homo Sapiens
augcauguguuuuuuccugucaaacauguaua

SEQ ID NO: 313230 - RNA, 32 nt, Homo Sapiens
ucuaaucucaggugggacuuggcgcucucucu

SEQ ID NO: 313231 - RNA, 32 nt, Homo Sapiens
gaaccguugcagagguuuauugagaucauuaa

SEQ ID NO: 313232 - RNA, 32 nt, Homo Sapiens
gcgugucuggaaacgcaaacuaucauuaauuu

SEQ ID NO: 313233 - RNA, 32 nt, Homo Sapiens
cagaccccauccccgcccugcgccaccuucgu

SEQ ID NO: 313234 - RNA, 32 nt, Homo Sapiens
uuuugaaugaauagauugguuuccuguggcuc

SEQ ID NO: 313235 - RNA, 32 nt, Homo Sapiens
auggagggcuacuaggguuacuucuacuuuac

SEQ ID NO: 313236 - RNA, 32 nt, Homo Sapiens
auguuuuuaaauaaaaucaugucagaacucuu

SEQ ID NO: 313237 - RNA, 32 nt, Homo Sapiens
uaucccuuugucaaaccuuguuucccaaauuc

SEQ ID NO: 313238 - RNA, 32 nt, Homo Sapiens
uuuccucucgggccggccgggugcgauccggg

SEQ ID NO: 313239 - RNA, 32 nt, Homo Sapiens
ucggagggcugagacgcggcggcggcggcgcg

SEQ ID NO: 313240 - RNA, 32 nt, Homo Sapiens
cuugugcgcuugcgcgcguccaggcgcucccg

SEQ ID NO: 313241 - RNA, 32 nt, Homo Sapiens
uaucuaaauauuauuuuauuauauugccuaag

SEQ ID NO: 313242 - RNA, 32 nt, Homo Sapiens
uuuaaaauguuuuguucauauucuuguuuuau

SEQ ID NO: 313243 - RNA, 32 nt, Homo Sapiens
uagguccuuuuggaggguggaaguuaggagca

SEQ ID NO: 313244 - RNA, 32 nt, Homo Sapiens
aguuuacaaaaaugccuuaaauguuauuuuuc

SEQ ID NO: 313245 - RNA, 32 nt, Homo Sapiens
cucagugaccuacacucucuuuucucaaaaaa

SEQ ID NO: 313246 - RNA, 32 nt, Homo Sapiens
ucuaaugauacuuuuuucauuagauuggucuu

SEQ ID NO: 313247 - RNA, 32 nt, Homo Sapiens
accagcaguuuaggugugaugagagaauucag

SEQ ID NO: 313248 - RNA, 32 nt, Homo Sapiens
gcaccuggaugcaugaaaagaugaauaaguga

SEQ ID NO: 313249 - RNA, 32 nt, Homo Sapiens
agcacugaaaauacauguuugguguuucgccu

SEQ ID NO: 313250 - RNA, 32 nt, Homo Sapiens
guuccaggaauauuguuauuguuaucuuccuc

SEQ ID NO: 313251 - RNA, 32 nt, Homo Sapiens
agaaaacguuuacuuacccagcugaaacaggu

SEQ ID NO: 313252 - RNA, 32 nt, Homo Sapiens
caaagggaauggggguauggaccugggccuau

SEQ ID NO: 313253 - RNA, 32 nt, Homo Sapiens
cuaucaacagagcugaaugagugccaggaagc

SEQ ID NO: 313254 - RNA, 32 nt, Homo Sapiens
ccgcggagaaaagaagcagucaagcccaugaa

SEQ ID NO: 313255 - RNA, 32 nt, Homo Sapiens
ucccaccgccgggcccugccccgcaucccggc

SEQ ID NO: 313256 - RNA, 32 nt, Homo Sapiens
uucaagugacaagcaaaguaaauguauauauu

SEQ ID NO: 313257 - RNA, 32 nt, Homo Sapiens
caccaugaaccucagggucagggaaugagcca

SEQ ID NO: 313258 - RNA, 32 nt, Homo Sapiens
gaaccugggaaauugaugacuuccucaugaug

SEQ ID NO: 313259 - RNA, 32 nt, Homo Sapiens
gccuaggagagccgaaucaguguuugugaaga

SEQ ID NO: 313260 - RNA, 32 nt, Homo Sapiens
ccaacgcggcgcgcugccccaugagcgugcug

SEQ ID NO: 313261 - RNA, 32 nt, Homo Sapiens
ugugcuagguaguggcgugcaucugaucugag

SEQ ID NO: 313262 - RNA, 32 nt, Homo Sapiens
cuguaucuuaagaauggaaauauuuuguucag

SEQ ID NO: 313263 - RNA, 32 nt, Homo Sapiens
ccacgaaggucccaggguggccauuuauacaa

SEQ ID NO: 313264 - RNA, 32 nt, Homo Sapiens
ucuaacuaguaaauuugcuccuaagugucauu

SEQ ID NO: 313265 - RNA, 32 nt, Homo Sapiens
agagggcuacaacuuccauauaagguagguuu

SEQ ID NO: 313266 - RNA, 32 nt, Homo Sapiens
uuaccagucuuuaaaggcccagccccuagaaa

SEQ ID NO: 313267 - RNA, 32 nt, Homo Sapiens
ccuccacggcccagcccccacugucuuaccaa

SEQ ID NO: 313268 - RNA, 32 nt, Homo Sapiens
agcccccugucacaaugaccuccccaucccac

SEQ ID NO: 313269 - RNA, 32 nt, Homo Sapiens
gauggcugucuccuccuugugucuucacaugg

SEQ ID NO: 313270 - RNA, 32 nt, Homo Sapiens
accagcucuucagccgcagcugaaggcgggag

SEQ ID NO: 313271 - RNA, 32 nt, Homo Sapiens
cacucacuacaugaaguccugaaaauaacaga

SEQ ID NO: 313272 - RNA, 32 nt, Homo Sapiens
ggagagaaggucgguugcuugggggacgugaa

SEQ ID NO: 313273 - RNA, 32 nt, Homo Sapiens
aguacuuuauuacaucacugaacuaaaauaug

SEQ ID NO: 313274 - RNA, 29 nt, Homo Sapiens
gugcucuuguguuucaggaccaugcugau

SEQ ID NO: 313275 - RNA, 32 nt, Homo Sapiens
ugcgcugcagccauccuggcccggcccccacc

SEQ ID NO: 313276 - RNA, 32 nt, Homo Sapiens
ggcacaaacuuuccucccgggacggaacacgc

SEQ ID NO: 313277 - RNA, 32 nt, Homo Sapiens
aauaguaggcaauuuuaauuuucauguaguug

SEQ ID NO: 313278 - RNA, 32 nt, Homo Sapiens
uuaccuuucuguaaguuuuucauuuuugcugu

SEQ ID NO: 313279 - RNA, 32 nt, Homo Sapiens
agaccugugaccccggcgggacccccaugucc

SEQ ID NO: 313280 - RNA, 32 nt, Homo Sapiens
gccuaaccaggagaggggagaagugaaaaacc

SEQ ID NO: 313281 - RNA, 32 nt, Homo Sapiens
ggggcccuggccugauggggcccccaugggga

SEQ ID NO: 313282 - RNA, 32 nt, Homo Sapiens
ccacaucgcuccccuuuuuuuaaaaaggacug

SEQ ID NO: 313283 - RNA, 32 nt, Homo Sapiens
guucaacuuugaccgugggcugucuggcccca

SEQ ID NO: 313284 - RNA, 32 nt, Homo Sapiens
cugcuggugcugcugcugcugcugcugcccac

SEQ ID NO: 313285 - RNA, 32 nt, Homo Sapiens
uacucugagaaaggaaaacaaaaggaaauuuu

SEQ ID NO: 313286 - RNA, 32 nt, Homo Sapiens
cgggcgggcagaaugagucugcaggucuuaaa

SEQ ID NO: 313287 - RNA, 32 nt, Homo Sapiens
ccuuagagcugauggcagaaucugcucaucuc

SEQ ID NO: 313288 - RNA, 32 nt, Homo Sapiens
auaaaacucugcaagaguuaucaauagauggu

SEQ ID NO: 313289 - RNA, 31 nt, Homo Sapiens
aagaccaaggccaccacugugggcccuccuu

SEQ ID NO: 313290 - RNA, 32 nt, Homo Sapiens
gauggggcuaucaucuuuucuugaauagggcu

SEQ ID NO: 313291 - RNA, 32 nt, Homo Sapiens
aaaguguuaugaacaucugauugguauuuguc

SEQ ID NO: 313292 - RNA, 32 nt, Homo Sapiens
gaaaagcagaccauggugaauccgggcagcag

SEQ ID NO: 313293 - RNA, 32 nt, Homo Sapiens
gcagaaauucucaaaacaguuuugcaaugaga

SEQ ID NO: 313294 - RNA, 32 nt, Homo Sapiens
ggggccagcagugaaucuguaugcggagaguu

SEQ ID NO: 313295 - RNA, 32 nt, Homo Sapiens
cgcaggcucgggccucccgcucgccgcugcgu

SEQ ID NO: 313296 - RNA, 32 nt, Homo Sapiens
aacacccgagcgcgcgcagccaggugcgcucc

SEQ ID NO: 313297 - RNA, 32 nt, Homo Sapiens
cuuccugucagcuccacgcccgggccccugga

SEQ ID NO: 313298 - RNA, 32 nt, Homo Sapiens
auaguuugcauucuuuuuucauaugaaaucuu

SEQ ID NO: 313299 - RNA, 32 nt, Homo Sapiens
gagaaacaaagggaaugaucuauuggagcccu

SEQ ID NO: 313300 - RNA, 32 nt, Homo Sapiens
gaaauguguaucuauuuauauaucauaguaua

SEQ ID NO: 313301 - RNA, 32 nt, Homo Sapiens
uugaugcccaagcccuuccaucuuuaauuuua

SEQ ID NO: 313302 - RNA, 32 nt, Homo Sapiens
auuaccuuuacauauauagucacuggcauacu

SEQ ID NO: 313303 - RNA, 32 nt, Homo Sapiens
ccaccucggcccguggagccggggcguccggg

SEQ ID NO: 313304 - RNA, 32 nt, Homo Sapiens
cgcgugggucugcgggcgccccagaccccaga

SEQ ID NO: 313305 - RNA, 32 nt, Homo Sapiens
ucaagccgagaggaggcccacuaugcccccgu

SEQ ID NO: 313306 - RNA, 32 nt, Homo Sapiens
agaggcgcacccgggcggccagcugggcucgg

SEQ ID NO: 313307 - RNA, 29 nt, Homo Sapiens
guucaagugauuuuccugccucagcuccc

SEQ ID NO: 313308 - RNA, 32 nt, Homo Sapiens
guggaaagggaaggaaaggaagcuguauagga

SEQ ID NO: 313309 - RNA, 32 nt, Homo Sapiens
cauuccacuccagccugagcaacacagugaga

SEQ ID NO: 313310 - RNA, 32 nt, Homo Sapiens
acgcugaugggacuggagggagcccacccuuc

SEQ ID NO: 313311 - RNA, 32 nt, Homo Sapiens
gcuugccucggcuccauggggugucugcuggg

SEQ ID NO: 313312 - RNA, 32 nt, Homo Sapiens
gaucacaggccuugcuuuuguaacaaugauga

SEQ ID NO: 313313 - RNA, 32 nt, Homo Sapiens
ggagcccacagcugugggaggggcugcuacug

SEQ ID NO: 313314 - RNA, 32 nt, Homo Sapiens
uaugauucuaagugugagacaccuuauaaaug

SEQ ID NO: 313315 - RNA, 32 nt, Homo Sapiens
cgugcgcggacacgcacccgucccccuugguc

SEQ ID NO: 313316 - RNA, 32 nt, Homo Sapiens
aacauagaccuugcagcguuccugcuuccaug

SEQ ID NO: 313317 - RNA, 32 nt, Homo Sapiens
acuguaguuuuugaaaauuaugcaaaagcagc

SEQ ID NO: 313318 - RNA, 32 nt, Homo Sapiens
aggcucccuacacaguccugcugcugccgcug

SEQ ID NO: 313319 - RNA, 32 nt, Homo Sapiens
acccccggaagccccagcaauccucagggaag

SEQ ID NO: 313320 - RNA, 32 nt, Homo Sapiens
cccagacagcucagaaggcuaaaugauauuau

SEQ ID NO: 313321 - RNA, 32 nt, Homo Sapiens
uggacuuggcggugggagccggagccugcuug

SEQ ID NO: 313322 - RNA, 32 nt, Homo Sapiens
gagucuguggauggaaauaggaagcgugggag

SEQ ID NO: 313323 - RNA, 32 nt, Homo Sapiens
cauguucuguuuuuuauucaguauuuuccuuu

SEQ ID NO: 313324 - RNA, 32 nt, Homo Sapiens
ucucagggggaauggggaaaagaaucuuucaa

SEQ ID NO: 313325 - RNA, 32 nt, Homo Sapiens
gcucuuaccacugucuccuuccggguucccag

SEQ ID NO: 313326 - RNA, 32 nt, Homo Sapiens
ugcucugggcagacgaugcugaagaugcucuc

SEQ ID NO: 313327 - RNA, 32 nt, Homo Sapiens
ccugaagagucuuuuuccugugucugccuugu

SEQ ID NO: 313328 - RNA, 32 nt, Homo Sapiens
cugaagggaucuaauccaggauguugaauggg

SEQ ID NO: 313329 - RNA, 32 nt, Homo Sapiens
uuacuuugcucuauucccccaacauacacaca

SEQ ID NO: 313330 - RNA, 32 nt, Homo Sapiens
ggaaauaacugccaucucugguagaucagaga

SEQ ID NO: 313331 - RNA, 32 nt, Homo Sapiens
cugcggggugagacugugucagagauacacug

SEQ ID NO: 313332 - RNA, 32 nt, Homo Sapiens
gacauuaccguaaaauuaaaacgcacaaauuu

SEQ ID NO: 313333 - RNA, 32 nt, Homo Sapiens
uuaauccaguucugcaaaaaugaccuauaaau

SEQ ID NO: 313334 - RNA, 32 nt, Homo Sapiens
uugacuucuaaagacuugguacgugaggaaaa

SEQ ID NO: 313335 - RNA, 32 nt, Homo Sapiens
cucucuucucccugccgucaugucuaagucag

SEQ ID NO: 313336 - RNA, 32 nt, Homo Sapiens
auuccuggguucuaaucgcagguccaucacug

SEQ ID NO: 313337 - RNA, 32 nt, Homo Sapiens
gcuagauauguugaccguuuccaggucuuuua

SEQ ID NO: 313338 - RNA, 32 nt, Homo Sapiens
ccacaguguacuuuaagauugucuuaagaaau

SEQ ID NO: 313339 - RNA, 32 nt, Homo Sapiens
ccucuggaauaaaagagucgcagaacagagaa

SEQ ID NO: 313340 - RNA, 32 nt, Homo Sapiens
uuuaauuuuuuggagcuauaaauacauguagu

SEQ ID NO: 313341 - RNA, 32 nt, Homo Sapiens
auuuguuuaaaauaaacugaauguauuuaaug

SEQ ID NO: 313342 - RNA, 32 nt, Homo Sapiens
cuuggggucaggguuugagaccagccuggcca

SEQ ID NO: 313343 - RNA, 32 nt, Homo Sapiens
cacauuuaguguauggaaauacaagacagcua

SEQ ID NO: 313344 - RNA, 32 nt, Homo Sapiens
ugucaaaugaaggacauugaaaaaauguacac

SEQ ID NO: 313345 - RNA, 32 nt, Homo Sapiens
caagacaugccaauuugagacacacggucuuc

SEQ ID NO: 313346 - RNA, 32 nt, Homo Sapiens
uaggaggagggagggggaaaaggugucuagcu

SEQ ID NO: 313347 - RNA, 32 nt, Homo Sapiens
ggcaaaauguuacagaaucuaacugguggaca

SEQ ID NO: 313348 - RNA, 32 nt, Homo Sapiens
gugugcccgugugcuccuggcgcacggcgcag

SEQ ID NO: 313349 - RNA, 32 nt, Homo Sapiens
cuuauaguagguguucaauaaauauuuguuga

SEQ ID NO: 313350 - RNA, 32 nt, Homo Sapiens
aucucagaaaugucaauucuuaaacacugugg

SEQ ID NO: 313351 - RNA, 32 nt, Homo Sapiens
ugagacuuuguugaguucuuucugggacuugg

SEQ ID NO: 313352 - RNA, 32 nt, Homo Sapiens
uuaaaauauuuaacuuuuuuuuauggcguuuu

SEQ ID NO: 313353 - RNA, 32 nt, Homo Sapiens
ggagguggcagcccagcucccaguucuuuccc

SEQ ID NO: 313354 - RNA, 32 nt, Homo Sapiens
auuugcauaaaauuauuuuucauaacaguccu

SEQ ID NO: 313355 - RNA, 32 nt, Homo Sapiens
cccgcgcccaccccgcgcccgccauguccgag

SEQ ID NO: 313356 - RNA, 32 nt, Homo Sapiens
ccaccccccaccggggacccauggcacugcag

SEQ ID NO: 313357 - RNA, 32 nt, Homo Sapiens
uugugauugaaauuauuuuggccuccacaaga

SEQ ID NO: 313358 - RNA, 32 nt, Homo Sapiens
cccgggcaggggcacaguugcaaccaaggcaa

SEQ ID NO: 313359 - RNA, 32 nt, Homo Sapiens
cgagauccggcccucgccuccucccucggugg

SEQ ID NO: 313360 - RNA, 32 nt, Homo Sapiens
aucaccaaucauaacugucugcucuuacagcu

SEQ ID NO: 313361 - RNA, 32 nt, Homo Sapiens
gacaauuaacaaugagauaauuaacaagagac

SEQ ID NO: 313362 - RNA, 32 nt, Homo Sapiens
caguuaacagaaaaagcaaucaaggagaagaa

SEQ ID NO: 313363 - RNA, 32 nt, Homo Sapiens
ugguuauaaaaacaguacaauaaaauauuguu

SEQ ID NO: 313364 - RNA, 32 nt, Homo Sapiens
caugcauauuggaaguacacuaaauauauuac

SEQ ID NO: 313365 - RNA, 32 nt, Homo Sapiens
uaaagcccccacagcccuccagguccuccagc

SEQ ID NO: 313366 - RNA, 32 nt, Homo Sapiens
uauuugcuguauaugcugaaauuuuuguaugc

SEQ ID NO: 313367 - RNA, 32 nt, Homo Sapiens
gcccgucuccaucggaccccagccccuaucuc

SEQ ID NO: 313368 - RNA, 32 nt, Homo Sapiens
uuuguggcccgcuauggcggcgguguugaggu

SEQ ID NO: 313369 - RNA, 32 nt, Homo Sapiens
gacuggucccaguucgguucucucccacagcc

SEQ ID NO: 313370 - RNA, 32 nt, Homo Sapiens
gcuuguuuaaacugccaggaaaauagcaaagg

SEQ ID NO: 313371 - RNA, 32 nt, Homo Sapiens
ucaacgcaaguuuaaucaaugggauccuuguu

SEQ ID NO: 313372 - RNA, 32 nt, Homo Sapiens
ggacaugaacacccaaccaccugccggugaca

SEQ ID NO: 313373 - RNA, 32 nt, Homo Sapiens
accaacaauuuaaauuauauugauguuauuua

SEQ ID NO: 313374 - RNA, 32 nt, Homo Sapiens
acauuccaucuaucacaggguuuucaaagaga

SEQ ID NO: 313375 - RNA, 32 nt, Homo Sapiens
ucacacugaaugcauccugaaaacacgaaauu

SEQ ID NO: 313376 - RNA, 32 nt, Homo Sapiens
ugcuauggcacuuuucuauaaccuuuucauuc

SEQ ID NO: 313377 - RNA, 32 nt, Homo Sapiens
ugauuuuguuuuauuauaacauggaaauaugg

SEQ ID NO: 313378 - RNA, 32 nt, Homo Sapiens
ucucuguuacacgucauugaaacuacacuuuu

SEQ ID NO: 313379 - RNA, 32 nt, Homo Sapiens
acuuuuuaaaauguauaugcuaagaaaaagug

SEQ ID NO: 313380 - RNA, 32 nt, Homo Sapiens
ucuuugaccaacaggugcuauuggagugcaaa

SEQ ID NO: 313381 - RNA, 32 nt, Homo Sapiens
gcagaucuuggcacauuuuucagacuuuguuu

SEQ ID NO: 313382 - RNA, 32 nt, Homo Sapiens
gaaaggugguggcggggcguccacuagguuuc

SEQ ID NO: 313383 - RNA, 32 nt, Homo Sapiens
cagaaaugcaagauaugugggaaagccuuugg

SEQ ID NO: 313384 - RNA, 32 nt, Homo Sapiens
acagcauuauuauaauguagguauggucaaug

SEQ ID NO: 313385 - RNA, 32 nt, Homo Sapiens
gcagugacagcacgcuccuuugaagaggaagg

SEQ ID NO: 313386 - RNA, 32 nt, Homo Sapiens
aucuguguuaacaaaaaauuguauaaucauua

SEQ ID NO: 313387 - RNA, 32 nt, Homo Sapiens
uucccuuugagaugaagugcuguucuuuugcc

SEQ ID NO: 313388 - RNA, 32 nt, Homo Sapiens
caaugcaagaaaauccaaaaaauguuacaaga

SEQ ID NO: 313389 - RNA, 32 nt, Homo Sapiens
caugccucauuucuaggaaauaaaagagguga

SEQ ID NO: 313390 - RNA, 32 nt, Homo Sapiens
cagcggggagcuugcagugaccaagagggugu

SEQ ID NO: 313391 - RNA, 32 nt, Homo Sapiens
gcugugugacaagauauaucaauauaaaaaca

SEQ ID NO: 313392 - RNA, 30 nt, Homo Sapiens
agauccagaggcggcggcggcggcggcagc

SEQ ID NO: 313393 - RNA, 32 nt, Homo Sapiens
aguuucuguugcauuucuuuuaugaugacugu

SEQ ID NO: 313394 - RNA, 32 nt, Homo Sapiens
uucauaugucauugaaaguuaaauugguucau

SEQ ID NO: 313395 - RNA, 32 nt, Homo Sapiens
ggcgggcgggccucgggugccacgcggcgugc

SEQ ID NO: 313396 - RNA, 32 nt, Homo Sapiens
uugagggcagagggggacuuagucuuucauau

SEQ ID NO: 313397 - RNA, 32 nt, Homo Sapiens
augcaguuugcaacaaauguauucucaugcuu

SEQ ID NO: 313398 - RNA, 32 nt, Homo Sapiens
uagaaaucaggagaggagggagguaggaggug

SEQ ID NO: 313399 - RNA, 32 nt, Homo Sapiens
ucacagggggcacccauccuguugucaacaga

SEQ ID NO: 313400 - RNA, 32 nt, Homo Sapiens
uucuuuuucuuugcuacacacuuugguaccua

SEQ ID NO: 313401 - RNA, 32 nt, Homo Sapiens
cacugaaaaccagagucgauuuuucuccuaaa

SEQ ID NO: 313402 - RNA, 32 nt, Homo Sapiens
uaaggauuucuucccaucguacccuuccccac

SEQ ID NO: 313403 - RNA, 32 nt, Homo Sapiens
gaacuucagggagaggguuuuguguuccggcu

SEQ ID NO: 313404 - RNA, 32 nt, Homo Sapiens
uggcuguaaaacuuauuccagguauuaaaggu

SEQ ID NO: 313405 - RNA, 32 nt, Homo Sapiens
ucucagccucccaaccccagggcccccacagg

SEQ ID NO: 313406 - RNA, 32 nt, Homo Sapiens
gcacagucucacucuaggaucccacuccagac

SEQ ID NO: 313407 - RNA, 32 nt, Homo Sapiens
acccaccauggacccaauaauaaaccuggccc

SEQ ID NO: 313408 - RNA, 32 nt, Homo Sapiens
auaacaguucucaugagaacuugguaguaagc

SEQ ID NO: 313409 - RNA, 30 nt, Homo Sapiens
gggguggggcugacucugcaaaaugggggu

SEQ ID NO: 313410 - RNA, 32 nt, Homo Sapiens
auacauagcauuaaaucccaaauccuauuuaa

SEQ ID NO: 313411 - RNA, 32 nt, Homo Sapiens
ggcuuauuucuuaaauaaaggaugcauuucuu

SEQ ID NO: 313412 - RNA, 32 nt, Homo Sapiens
gucacugcaagagauauucaaguucuacaauc

SEQ ID NO: 313413 - RNA, 32 nt, Homo Sapiens
uggaguagugggucccuggucuccuacaaauc

SEQ ID NO: 313414 - RNA, 32 nt, Homo Sapiens
auucauguuucauuauuacacugacucucuuu

SEQ ID NO: 313415 - RNA, 32 nt, Homo Sapiens
ccuagagaaaaaauagacuuguuucugcucuc

SEQ ID NO: 313416 - RNA, 32 nt, Homo Sapiens
uuucuguguaaaucauuaaguauaagaggaaa

SEQ ID NO: 313417 - RNA, 32 nt, Homo Sapiens
gcgcugcgcgcccggcccgugcugccauggcc

SEQ ID NO: 313418 - RNA, 32 nt, Homo Sapiens
gucgaagggagccgcucggccacccccgacgu

SEQ ID NO: 313419 - RNA, 32 nt, Homo Sapiens
acgcccagugcccgcccggccggccuucugcc

SEQ ID NO: 313420 - RNA, 32 nt, Homo Sapiens
cacaauggcaaagggagaacuggggggcuggc

SEQ ID NO: 313421 - RNA, 32 nt, Homo Sapiens
uggguuccaaacugcagugcugccaugcuggg

SEQ ID NO: 313422 - RNA, 32 nt, Homo Sapiens
gcguguaccugacuuccgcugugucgucaucc

SEQ ID NO: 313423 - RNA, 32 nt, Homo Sapiens
cuuggcaagguguggagaugacugcuguuccc

SEQ ID NO: 313424 - RNA, 32 nt, Homo Sapiens
gaauccuguucccccaucccuucucccaccuc

SEQ ID NO: 313425 - RNA, 32 nt, Homo Sapiens
auuacuuuauucaauuucagacccucagaagc

SEQ ID NO: 313426 - RNA, 32 nt, Homo Sapiens
aguccaaaaugcaaaggauuuaccacaaugca

SEQ ID NO: 313427 - RNA, 32 nt, Homo Sapiens
cagagcgguccacagucaggagcgguuccaug

SEQ ID NO: 313428 - RNA, 32 nt, Homo Sapiens
agaaaaugucauuauagagcuugcucaauaau

SEQ ID NO: 313429 - RNA, 32 nt, Homo Sapiens
acagagccgcagggcugagaccacguccaugc

SEQ ID NO: 313430 - RNA, 32 nt, Homo Sapiens
uuccuucuugacauuuaucaccucugauggcu

SEQ ID NO: 313431 - RNA, 32 nt, Homo Sapiens
uaaagggaccuucgggaaauuucgcuggauac

SEQ ID NO: 313432 - RNA, 32 nt, Homo Sapiens
agccauccuggcccggcccccaccucaggaag

SEQ ID NO: 313433 - RNA, 32 nt, Homo Sapiens
caaaaccugcuuccuucaguuuguaaagucgg

SEQ ID NO: 313434 - RNA, 32 nt, Homo Sapiens
gcuugaggaacuuuuccaaaugugugugucug

SEQ ID NO: 313435 - RNA, 32 nt, Homo Sapiens
uauuaaaaauauauuuuauuucuuuuuuuggu

SEQ ID NO: 313436 - RNA, 32 nt, Homo Sapiens
ugggaucugcgguucaaaaguacgaucacuca

SEQ ID NO: 313437 - RNA, 32 nt, Homo Sapiens
ugggcgcggccccaaaauugccuucaaaacaa

SEQ ID NO: 313438 - RNA, 32 nt, Homo Sapiens
gcauuuccuccaccacccagaagcaucuccaa

SEQ ID NO: 313439 - RNA, 32 nt, Homo Sapiens
acuuuuuuaaaguuucagaugaacucccauaa

SEQ ID NO: 313440 - RNA, 32 nt, Homo Sapiens
ccucuccauaacuauuugauuuuuacuuuauc

SEQ ID NO: 313441 - RNA, 32 nt, Homo Sapiens
agaaaaaaguuucacaaucaauuuauaaucua

SEQ ID NO: 313442 - RNA, 32 nt, Homo Sapiens
aauauauaguuaauucgaaauaaaauccauug

SEQ ID NO: 313443 - RNA, 32 nt, Homo Sapiens
augcauacuuuuuucuaaugaagaguaguuca

SEQ ID NO: 313444 - RNA, 32 nt, Homo Sapiens
ugagcuucugcugcccucugcugucugcugag

SEQ ID NO: 313445 - RNA, 32 nt, Homo Sapiens
gcuucacugagcgcucgccgccgcccagccuc

SEQ ID NO: 313446 - RNA, 32 nt, Homo Sapiens
cagcggccggagcccuggugggcggccugagg

SEQ ID NO: 313447 - RNA, 32 nt, Homo Sapiens
guucccuaaauugugguauauucauacagccu

SEQ ID NO: 313448 - RNA, 32 nt, Homo Sapiens
uucauuuuucuuuugauuuaaaggauuagaga

SEQ ID NO: 313449 - RNA, 32 nt, Homo Sapiens
agugauucuggagcugacgugaggcacccgcc

SEQ ID NO: 313450 - RNA, 32 nt, Homo Sapiens
ggagucagcuggaguugcccaggcccugugag

SEQ ID NO: 313451 - RNA, 32 nt, Homo Sapiens
uuugugauggaugcuuccuucuggcuccagga

SEQ ID NO: 313452 - RNA, 32 nt, Homo Sapiens
agucaccccgucccgccagcgucugccagucc

SEQ ID NO: 313453 - RNA, 32 nt, Homo Sapiens
guugcuugcuugccugugcgcgcgugcgcgga

SEQ ID NO: 313454 - RNA, 32 nt, Homo Sapiens
caggccuggugcccuccuggaccgccugcacg

SEQ ID NO: 313455 - RNA, 32 nt, Homo Sapiens
auaauggugugauugcguggacaccguggcuc

SEQ ID NO: 313456 - RNA, 32 nt, Homo Sapiens
uuagcuugucuccucuccugucacccuaagag

SEQ ID NO: 313457 - RNA, 32 nt, Homo Sapiens
ggcucgggagagagggacgcgggcugcaggcg

SEQ ID NO: 313458 - RNA, 32 nt, Homo Sapiens
gaacugaucuuauuggucugauaaccaaucuu

SEQ ID NO: 313459 - RNA, 32 nt, Homo Sapiens
guuaaauaacaaaacuaugcagaugcucuuaa

SEQ ID NO: 313460 - RNA, 32 nt, Homo Sapiens
agcuggauauuguuauucacagcugaaagcac

SEQ ID NO: 313461 - RNA, 32 nt, Homo Sapiens
gaaugcuggcuucuggucaaguaaauuagucc

SEQ ID NO: 313462 - RNA, 32 nt, Homo Sapiens
aaucuccggcgcccacgucauccgcgcgcccg

SEQ ID NO: 313463 - RNA, 32 nt, Homo Sapiens
ccaggacgaaguuucagaauuggcugaugguc

SEQ ID NO: 313464 - RNA, 32 nt, Homo Sapiens
aagagcuaaaggaaaccauggacagagaacaa

SEQ ID NO: 313465 - RNA, 32 nt, Homo Sapiens
uugugaaaaaauaaagaaaaugaacugcccac

SEQ ID NO: 313466 - RNA, 32 nt, Homo Sapiens
cuuccuggacggguggugggaaggcaggagcc

SEQ ID NO: 313467 - RNA, 32 nt, Homo Sapiens
caacaggccuggcccuggcccagcugggguga

SEQ ID NO: 313468 - RNA, 32 nt, Homo Sapiens
uacagucccucaacuggacuaaagcaauaaag

SEQ ID NO: 313469 - RNA, 32 nt, Homo Sapiens
caguuuuguaaauauguaaauaugucauaaau

SEQ ID NO: 313470 - RNA, 30 nt, Homo Sapiens
ugccgccaugcucgacuucuucaccauuuu

SEQ ID NO: 313471 - RNA, 32 nt, Homo Sapiens
ggugcauacuucugcccuccccagccccagcu

SEQ ID NO: 313472 - RNA, 32 nt, Homo Sapiens
aaccaacuucuguauauagaggcugccgcaaa

SEQ ID NO: 313473 - RNA, 32 nt, Homo Sapiens
aacucagccaucugcggaggucaaggugugag

SEQ ID NO: 313474 - RNA, 32 nt, Homo Sapiens
ugcugagugugacguggaaucuucuuauuuua

SEQ ID NO: 313475 - RNA, 31 nt, Homo Sapiens
ccaaacuguaauguacaaggauaugugugau

SEQ ID NO: 313476 - RNA, 32 nt, Homo Sapiens
cccuuuauuucauccguauuuaaacuucucua

SEQ ID NO: 313477 - RNA, 32 nt, Homo Sapiens
uagcugcccuccccuccggacuggugcccucc

SEQ ID NO: 313478 - RNA, 32 nt, Homo Sapiens
uggaauguacuauuuuguaaugucuuuuuuca

SEQ ID NO: 313479 - RNA, 32 nt, Homo Sapiens
acucuauguauuucuuuuuuuucuuuuuuuug

SEQ ID NO: 313480 - RNA, 32 nt, Homo Sapiens
ugguuucccagcuguuaugccugucuugcuug

SEQ ID NO: 313481 - RNA, 32 nt, Homo Sapiens
cacgccagaaagacaugugacuaagccugagu

SEQ ID NO: 313482 - RNA, 32 nt, Homo Sapiens
aggaggcguccacagcauuguucucgccucug

SEQ ID NO: 313483 - RNA, 30 nt, Homo Sapiens
auaccaagugucccugccucuccugccucc

SEQ ID NO: 313484 - RNA, 32 nt, Homo Sapiens
ccaggggcucccuccgcccccagguaggggcc

SEQ ID NO: 313485 - RNA, 32 nt, Homo Sapiens
uaauuuuuguaacgugagggaaaagcccacau

SEQ ID NO: 313486 - RNA, 32 nt, Homo Sapiens
uuuaguuacuagaugaacaaauccacagaaug

SEQ ID NO: 313487 - RNA, 32 nt, Homo Sapiens
ggcgcccggcacccucgagggccggcuagggc

SEQ ID NO: 313488 - RNA, 32 nt, Homo Sapiens
aucugagucauuucuuacauaauuacucuuuc

SEQ ID NO: 313489 - RNA, 32 nt, Homo Sapiens
ggacgcagagcccggcccgacgccgccaugag

SEQ ID NO: 313490 - RNA, 32 nt, Homo Sapiens
gggggccgacgccuuccugccggcgcugaccg

SEQ ID NO: 313491 - RNA, 32 nt, Homo Sapiens
uugucuaauugugauuuuuuuauugauguuua

SEQ ID NO: 313492 - RNA, 32 nt, Homo Sapiens
aaagguguauauauuuccccucaauaaaguug

SEQ ID NO: 313493 - RNA, 32 nt, Homo Sapiens
ugccuggugaacacagaugugcuugggaugac

SEQ ID NO: 313494 - RNA, 32 nt, Homo Sapiens
cuaucucuaaucuauugagauagucacauucc

SEQ ID NO: 313495 - RNA, 32 nt, Homo Sapiens
accagcacuauaaccaguuuugcguggguucu

SEQ ID NO: 313496 - RNA, 32 nt, Homo Sapiens
guggcuucaugccucccuucucccagcucagg

SEQ ID NO: 313497 - RNA, 32 nt, Homo Sapiens
ccggccuccuucaccuuucucaucuccagagc

SEQ ID NO: 313498 - RNA, 32 nt, Homo Sapiens
acaggguacgcacacgcagagccccgccugug

SEQ ID NO: 313499 - RNA, 32 nt, Homo Sapiens
uucacucuggggauucuggcaggcugguuucc

SEQ ID NO: 313500 - RNA, 32 nt, Homo Sapiens
gggaacaguacaaaacagcaaaacugucaccu

SEQ ID NO: 313501 - RNA, 32 nt, Homo Sapiens
agcugagauggagaggcccacagcccucagca

SEQ ID NO: 313502 - RNA, 32 nt, Homo Sapiens
cuccuugcccuggcagacccagcacuggcugc

SEQ ID NO: 313503 - RNA, 32 nt, Homo Sapiens
ccuccuuccaggugcccggccugggcucugcc

SEQ ID NO: 313504 - RNA, 31 nt, Homo Sapiens
caagcgucccggagaaagccaagcccucggg

SEQ ID NO: 313505 - RNA, 32 nt, Homo Sapiens
ucuucuggaguuuaaccagauccuccccaccc

SEQ ID NO: 313506 - RNA, 32 nt, Homo Sapiens
auugcuguuuaacuguuuguuaucauaguugg

SEQ ID NO: 313507 - RNA, 32 nt, Homo Sapiens
cauuaccugccacugggaccagcaggugaagc

SEQ ID NO: 313508 - RNA, 32 nt, Homo Sapiens
augcgccuggaaggccacccugcugcacagca

SEQ ID NO: 313509 - RNA, 32 nt, Homo Sapiens
uuucugauguaccuuuuuucucuucuucuuug

SEQ ID NO: 313510 - RNA, 32 nt, Homo Sapiens
ggcgugagucaagggcgggcggugggcggggc

SEQ ID NO: 313511 - RNA, 32 nt, Homo Sapiens
gacugucaaaaauaagugauggugauaaguag

SEQ ID NO: 313512 - RNA, 32 nt, Homo Sapiens
aagagaugcaagcaggaaaaagaaauuaaacc

SEQ ID NO: 313513 - RNA, 32 nt, Homo Sapiens
cccccgcguggccuuuggggcaggcuggcauc

SEQ ID NO: 313514 - RNA, 32 nt, Homo Sapiens
uauuaucuuucaaugguuaccuugacuuaacc

SEQ ID NO: 313515 - RNA, 32 nt, Homo Sapiens
uuucuuuuucaaaaguuuuuaauuauuuaggg

SEQ ID NO: 313516 - RNA, 32 nt, Homo Sapiens
uuaaauuugauucuuuucuuugcaaugcuauc

SEQ ID NO: 313517 - RNA, 32 nt, Homo Sapiens
uuuguuaaacuuuagcaaaagauccagucaug

SEQ ID NO: 313518 - RNA, 32 nt, Homo Sapiens
aguaacgggacgucgccgcggagcuucuuccc

SEQ ID NO: 313519 - RNA, 32 nt, Homo Sapiens
acgcgguagcuaaacugcagccaacuuugguu

SEQ ID NO: 313520 - RNA, 32 nt, Homo Sapiens
cuugccucguacccuuuccuuguuuuucucca

SEQ ID NO: 313521 - RNA, 32 nt, Homo Sapiens
gucacugcaccaagucucacuggcugucagua

SEQ ID NO: 313522 - RNA, 32 nt, Homo Sapiens
ggguagcgggcacucuuaucagagcggcugga

SEQ ID NO: 313523 - RNA, 32 nt, Homo Sapiens
cccuucuaacaacuauuugaccaagagaggca

SEQ ID NO: 313524 - RNA, 32 nt, Homo Sapiens
caaauaaaggauuauuuaacugucugaaaaaa

SEQ ID NO: 313525 - RNA, 32 nt, Homo Sapiens
cugcagaagcaucuugugaguugugggagggg

SEQ ID NO: 313526 - RNA, 32 nt, Homo Sapiens
uucccuaauguuuaguuauguugaucaucuuu

SEQ ID NO: 313527 - RNA, 32 nt, Homo Sapiens
accccaggcccauguggccuccuccuugcuug

SEQ ID NO: 313528 - RNA, 32 nt, Homo Sapiens
uuguuuuuuacauuuuaagaguuguagaaguu

SEQ ID NO: 313529 - RNA, 32 nt, Homo Sapiens
ugacgcuagugucacgcugacgcuggccgaua

SEQ ID NO: 313530 - RNA, 32 nt, Homo Sapiens
accaacgauaagggcauuuggaacagugcuau

SEQ ID NO: 313531 - RNA, 29 nt, Homo Sapiens
uuaaaugagaaguaaaauuuucuaaguua

SEQ ID NO: 313532 - RNA, 32 nt, Homo Sapiens
uucccuucaaggaguaugucauaugucacaaa

SEQ ID NO: 313533 - RNA, 32 nt, Homo Sapiens
ccccagccugaacacaguuuucaggacucugg

SEQ ID NO: 313534 - RNA, 32 nt, Homo Sapiens
uuacccagaaauaagauaacuccaucucgccc

SEQ ID NO: 313535 - RNA, 32 nt, Homo Sapiens
ugccccgagcgcgccgggcgcggaggcaaagg

SEQ ID NO: 313536 - RNA, 32 nt, Homo Sapiens
cagggcaggcaccagccccaggcggccagucg

SEQ ID NO: 313537 - RNA, 32 nt, Homo Sapiens
acuuccacaaugauuuugaagccuccccagca

SEQ ID NO: 313538 - RNA, 32 nt, Homo Sapiens
aacccuggcucuuaagaugacccggcaagacc

SEQ ID NO: 313539 - RNA, 32 nt, Homo Sapiens
ucacgugugcuauguguguuaagccugcaugc

SEQ ID NO: 313540 - RNA, 32 nt, Homo Sapiens
gcaucaguuuauggugaauccaaaucaauguc

SEQ ID NO: 313541 - RNA, 32 nt, Homo Sapiens
cuuuuuccuacuuguuaugguuguuuggaccg

SEQ ID NO: 313542 - RNA, 32 nt, Homo Sapiens
gaguccucccaggugaccucagcccucccaag

SEQ ID NO: 313543 - RNA, 27 nt, Homo Sapiens
ccauggggaagcugcgccggcgcuaca

SEQ ID NO: 313544 - RNA, 32 nt, Homo Sapiens
agggcugugcgugggggagaugaggauauaua

SEQ ID NO: 313545 - RNA, 32 nt, Homo Sapiens
caauuccuuggucucacagccauguagacaag

SEQ ID NO: 313546 - RNA, 32 nt, Homo Sapiens
cuggcccacuucccuccuccccagggaugcca

SEQ ID NO: 313547 - RNA, 32 nt, Homo Sapiens
ggggguugcuuuuuucuggggucuuugagcuc

SEQ ID NO: 313548 - RNA, 32 nt, Homo Sapiens
cuguugacauucgggugauccuguucugcgcu

SEQ ID NO: 313549 - RNA, 32 nt, Homo Sapiens
uucaauccuugggagggugccauccacauuuu

SEQ ID NO: 313550 - RNA, 32 nt, Homo Sapiens
aguuucaggagccagcagccucggagaggcgg

SEQ ID NO: 313551 - RNA, 32 nt, Homo Sapiens
acuccauaaccaauuggaaacuucacauuggu

SEQ ID NO: 313552 - RNA, 32 nt, Homo Sapiens
uaaaacugauuugguaaugguguuuugguaug

SEQ ID NO: 313553 - RNA, 32 nt, Homo Sapiens
agccaccugccagacccguggcucugggagag

SEQ ID NO: 313554 - RNA, 32 nt, Homo Sapiens
uuauuuacugaauaaauacaaagcaaacaaac

SEQ ID NO: 313555 - RNA, 32 nt, Homo Sapiens
cuccagcgggcggaucucacugugcugaugcc

SEQ ID NO: 313556 - RNA, 32 nt, Homo Sapiens
ggugcgcggguauggcggccagccuguggaug

SEQ ID NO: 313557 - RNA, 32 nt, Homo Sapiens
cugcuuccagcaugcuuuuaauaugcugggug

SEQ ID NO: 313558 - RNA, 31 nt, Homo Sapiens
cucaggcagcgcaggugugaugggcacagua

SEQ ID NO: 313559 - RNA, 32 nt, Homo Sapiens
ggcugaucuugaacucgugaccucaggugauc

SEQ ID NO: 313560 - RNA, 32 nt, Homo Sapiens
cucuuaaggaaaccacuguacaaaugacacug

SEQ ID NO: 313561 - RNA, 32 nt, Homo Sapiens
cccucgccgggagcgggcaccauggugcuguc

SEQ ID NO: 313562 - RNA, 32 nt, Homo Sapiens
uguauguaacaauaaagagaaaaaauaaaaaa

SEQ ID NO: 313563 - RNA, 32 nt, Homo Sapiens
ccaucacaaccugagcagcacagguuccaguu

SEQ ID NO: 313564 - RNA, 32 nt, Homo Sapiens
cuuccuucacccaccacccccaucaucaccga

SEQ ID NO: 313565 - RNA, 32 nt, Homo Sapiens
cacugcaugucagagcacuuuaaaaacaggcc

SEQ ID NO: 313566 - RNA, 32 nt, Homo Sapiens
ugugggucucugcggcacucuucugccuggug

SEQ ID NO: 313567 - RNA, 32 nt, Homo Sapiens
ugacuguccagagccuggaacugugcccacac

SEQ ID NO: 313568 - RNA, 32 nt, Homo Sapiens
ggauacuaaaauaaauauaguuaucauugcuu

SEQ ID NO: 313569 - RNA, 32 nt, Homo Sapiens
acccuccgccccacuccagccaguguggggag

SEQ ID NO: 313570 - RNA, 32 nt, Homo Sapiens
gggcccgcaggccugggaauuuccguccccca

SEQ ID NO: 313571 - RNA, 32 nt, Homo Sapiens
auacacauauauauuuugcacuacacaaacga

SEQ ID NO: 313572 - RNA, 32 nt, Homo Sapiens
caggcccaagagucgcgugcgcggccccuugc

SEQ ID NO: 313573 - RNA, 32 nt, Homo Sapiens
gccuggagcaccauggggguccugguuuaguc

SEQ ID NO: 313574 - RNA, 32 nt, Homo Sapiens
ugggagugcugggaauaacauaaauacaaaaa

SEQ ID NO: 313575 - RNA, 32 nt, Homo Sapiens
accaaagggaggcuagggacaggaaagccauc

SEQ ID NO: 313576 - RNA, 32 nt, Homo Sapiens
guucaugccacuuuuucagaguaugaugauau

SEQ ID NO: 313577 - RNA, 32 nt, Homo Sapiens
gaguguaugaauuugucacauguaucaccccc

SEQ ID NO: 313578 - RNA, 32 nt, Homo Sapiens
cuaccucugcaggccucuuugcucuccccucu

SEQ ID NO: 313579 - RNA, 32 nt, Homo Sapiens
cgcgccuucgguagggggcgcccggggcccag

SEQ ID NO: 313580 - RNA, 32 nt, Homo Sapiens
gugccagacggcggagcuccgcggccggaccc

SEQ ID NO: 313581 - RNA, 32 nt, Homo Sapiens
aagauauguggcauuuaaauuaaaauggaaau

SEQ ID NO: 313582 - RNA, 28 nt, Homo Sapiens
cucgacuucucggggccaagcgauccuc

SEQ ID NO: 313583 - RNA, 30 nt, Homo Sapiens
gaaaauaggcuugccacuuucucuuauuuu

SEQ ID NO: 313584 - RNA, 32 nt, Homo Sapiens
gcaaaaagauaaagcuuggguggaauaucauu

SEQ ID NO: 313585 - RNA, 32 nt, Homo Sapiens
ugacagaauuauagauguaauuuuaagaguug

SEQ ID NO: 313586 - RNA, 32 nt, Homo Sapiens
gugagugauguucagucaugcugcugggacac

SEQ ID NO: 313587 - RNA, 32 nt, Homo Sapiens
cuguccaggaaaugagcagagauucacaagac

SEQ ID NO: 313588 - RNA, 32 nt, Homo Sapiens
uacugggccugaacucauucucuucuugcuau

SEQ ID NO: 313589 - RNA, 32 nt, Homo Sapiens
guccuggcccccagcccuaagggauccgcccc

SEQ ID NO: 313590 - RNA, 32 nt, Homo Sapiens
cuuuccuguagaguaauagcuacuucaugauu

SEQ ID NO: 313591 - RNA, 32 nt, Homo Sapiens
gaccuuuggggcaagaggaagaaugugggggu

SEQ ID NO: 313592 - RNA, 32 nt, Homo Sapiens
ucuuugacuguaaauuuaggaauuaagaugca

SEQ ID NO: 313593 - RNA, 32 nt, Homo Sapiens
acaguuuucagagauggcguggcacugcaucc

SEQ ID NO: 313594 - RNA, 32 nt, Homo Sapiens
ggagacuaugucagcagcaauacuuuaggauc

SEQ ID NO: 313595 - RNA, 32 nt, Homo Sapiens
aauguuucuauugucuuccauucauaaucaga

SEQ ID NO: 313596 - RNA, 32 nt, Homo Sapiens
ggcucugcuuugcgucuaaccuuuguggggga

SEQ ID NO: 313597 - RNA, 32 nt, Homo Sapiens
ggaaaugguuuuuagugcguauauuauacugc

SEQ ID NO: 313598 - RNA, 32 nt, Homo Sapiens
ggcuagguagagagggcccaggcaggcggccu

SEQ ID NO: 313599 - RNA, 32 nt, Homo Sapiens
auuauuuugaugucacaucucuugucagguca

SEQ ID NO: 313600 - RNA, 32 nt, Homo Sapiens
agcacguugcuagugggcgcggcuggcggggc

SEQ ID NO: 313601 - RNA, 32 nt, Homo Sapiens
guucaaggcauguuuacccaguagagcauguu

SEQ ID NO: 313602 - RNA, 32 nt, Homo Sapiens
gcagccaagagaaaguuaaaagaauauuggca

SEQ ID NO: 313603 - RNA, 32 nt, Homo Sapiens
gcacgugcacacacauacacacacauccauua

SEQ ID NO: 313604 - RNA, 32 nt, Homo Sapiens
cugcaaaugcuguuuagguccaucaccucuuc

SEQ ID NO: 313605 - RNA, 32 nt, Homo Sapiens
cacggccccccggcugcccguggucaaacugg

SEQ ID NO: 313606 - RNA, 32 nt, Homo Sapiens
guucugaaggggcagaugggggugugaguagu

SEQ ID NO: 313607 - RNA, 32 nt, Homo Sapiens
uccugagccggggccacgggaagcugggccag

SEQ ID NO: 313608 - RNA, 32 nt, Homo Sapiens
augugcaucucuuuucagagguguguuaguaa

SEQ ID NO: 313609 - RNA, 32 nt, Homo Sapiens
caguagaaggaccccuggagccagaggguuuu

SEQ ID NO: 313610 - RNA, 32 nt, Homo Sapiens
ugaaaauguacaaaauaucuaucacuacugau

SEQ ID NO: 313611 - RNA, 32 nt, Homo Sapiens
cuucacauaagcucagaauccaagugaacacu

SEQ ID NO: 313612 - RNA, 32 nt, Homo Sapiens
auucauauccuuaaauuguauuuugaacuucu

SEQ ID NO: 313613 - RNA, 32 nt, Homo Sapiens
cgggagcugccgcuuccuucccggccccgcug

SEQ ID NO: 313614 - RNA, 32 nt, Homo Sapiens
gcaucccgggaacggcgggcggugagcauucc

SEQ ID NO: 313615 - RNA, 32 nt, Homo Sapiens
guuuguuuucuuuccaaaucauguagaauuga

SEQ ID NO: 313616 - RNA, 30 nt, Homo Sapiens
ggagcgcgggcgcgcgguggcgggaauuuc

SEQ ID NO: 313617 - RNA, 32 nt, Homo Sapiens
gaccaggcgugguggcucaugccuguaaucgc

SEQ ID NO: 313618 - RNA, 32 nt, Homo Sapiens
cagcccuugacuguccuccugugagggccuga

SEQ ID NO: 313619 - RNA, 32 nt, Homo Sapiens
ugcuauauuuuuaacagcacuccagcauuuuu

SEQ ID NO: 313620 - RNA, 32 nt, Homo Sapiens
gagcuugggagcccugcgucagggcccagagc

SEQ ID NO: 313621 - RNA, 32 nt, Homo Sapiens
gccgagguagccacgcagccccugugcgccuc

SEQ ID NO: 313622 - RNA, 32 nt, Homo Sapiens
uggaaaaaagauucugucuuauaggguaaaaa

SEQ ID NO: 313623 - RNA, 32 nt, Homo Sapiens
accuggacaaucucgugcuaccuacauacugc

SEQ ID NO: 313624 - RNA, 32 nt, Homo Sapiens
ggaggccuggaaacguuuggaagcuuugcuaa

SEQ ID NO: 313625 - RNA, 32 nt, Homo Sapiens
ucgaagauguacacucagaaccucuuuuccga

SEQ ID NO: 313626 - RNA, 32 nt, Homo Sapiens
cuaaauuaucccauuauguaauucuuggucag

SEQ ID NO: 313627 - RNA, 32 nt, Homo Sapiens
agacagaaaagauaagaugcucccaagucccu

SEQ ID NO: 313628 - RNA, 32 nt, Homo Sapiens
uaccgacugaccccuuuacugugccccgggau

SEQ ID NO: 313629 - RNA, 32 nt, Homo Sapiens
aaggcggcgggcccgucgugcggggcugcagg

SEQ ID NO: 313630 - RNA, 32 nt, Homo Sapiens
uaacccgugaggaggcggcggcggcggcagcg

SEQ ID NO: 313631 - RNA, 32 nt, Homo Sapiens
cuugcugcugcugaauccuuucuggggacuuu

SEQ ID NO: 313632 - RNA, 32 nt, Homo Sapiens
ccgcugcccaggauuagggucugugguguguu

SEQ ID NO: 313633 - RNA, 32 nt, Homo Sapiens
cgaucccguggugcuccgcggcgcggccuugc

SEQ ID NO: 313634 - RNA, 32 nt, Homo Sapiens
aguaucaccguaaaccugcguuaaaaugugga

SEQ ID NO: 313635 - RNA, 32 nt, Homo Sapiens
cucugccuccagccccaccuuccccgggagaa

SEQ ID NO: 313636 - RNA, 32 nt, Homo Sapiens
gagcccccacggcgaggcgcugcgccggcggu

SEQ ID NO: 313637 - RNA, 32 nt, Homo Sapiens
uuccaugacaauaugcccuuucuggggagaua

SEQ ID NO: 313638 - RNA, 32 nt, Homo Sapiens
guagauucaaacaaagaugcucuguagacaag

SEQ ID NO: 313639 - RNA, 28 nt, Homo Sapiens
gcaugucuaaaauaaaaguauugcauau

SEQ ID NO: 313640 - RNA, 32 nt, Homo Sapiens
gcgguaagaagcugcgcgguagcgcggugagg

SEQ ID NO: 313641 - RNA, 32 nt, Homo Sapiens
ucgcccgcuccgcgugcgccuacgccuucugc

SEQ ID NO: 313642 - RNA, 31 nt, Homo Sapiens
agaagcguaccaguaccucucacuuucauau

SEQ ID NO: 313643 - RNA, 32 nt, Homo Sapiens
aaucaucuuuacggaauguggugcugagagac

SEQ ID NO: 313644 - RNA, 32 nt, Homo Sapiens
acucuggccucccagauccccagcugccucac

SEQ ID NO: 313645 - RNA, 32 nt, Homo Sapiens
gcuuuucuauaacuuuuaaauaaaccuugggg

SEQ ID NO: 313646 - RNA, 32 nt, Homo Sapiens
agcguguguguaauugcuggacuagaugaaag

SEQ ID NO: 313647 - RNA, 32 nt, Homo Sapiens
ccucacucagguaaaugugucuggggaugccu

SEQ ID NO: 313648 - RNA, 32 nt, Homo Sapiens
aagaugguguuaguccccuucuccagggcaca

SEQ ID NO: 313649 - RNA, 32 nt, Homo Sapiens
cagacaccccgauccucccacaauaaggcuuc

SEQ ID NO: 313650 - RNA, 32 nt, Homo Sapiens
ucauuaugucauuauacuuaggcuuaucuguu

SEQ ID NO: 313651 - RNA, 27 nt, Homo Sapiens
ugaugccccuucugccuuucucucacu

SEQ ID NO: 313652 - RNA, 32 nt, Homo Sapiens
gccccgggcacgcucggcggcgcccaacgaug

SEQ ID NO: 313653 - RNA, 28 nt, Homo Sapiens
agcacggggcggcugccgccuccgccuc

SEQ ID NO: 313654 - RNA, 32 nt, Homo Sapiens
ugucucuacaaaaaauacuuuccguacauuag

SEQ ID NO: 313655 - RNA, 32 nt, Homo Sapiens
cacugauuuaccauugccauaaaguagacugg

SEQ ID NO: 313656 - RNA, 32 nt, Homo Sapiens
ccugacuuuuuggaguuugcacagcaaacauu

SEQ ID NO: 313657 - RNA, 32 nt, Homo Sapiens
agaggugugggaaggaucugaacagaggagau

SEQ ID NO: 313658 - RNA, 32 nt, Homo Sapiens
auacuauguucccuauuugggugauggguucg

SEQ ID NO: 313659 - RNA, 32 nt, Homo Sapiens
ugccaggggaggccccgcacccgggaagccca

SEQ ID NO: 313660 - RNA, 32 nt, Homo Sapiens
ugagcuauauuuuguuugggguuguggcuggu

SEQ ID NO: 313661 - RNA, 32 nt, Homo Sapiens
aguuucuugauugguaaaaugaaaauaauacu

SEQ ID NO: 313662 - RNA, 32 nt, Homo Sapiens
cuccaggaacagagcugcugcucuacaagcag

SEQ ID NO: 313663 - RNA, 32 nt, Homo Sapiens
cccucuuggagcuguucccuggguagagcuag

SEQ ID NO: 313664 - RNA, 32 nt, Homo Sapiens
ggcuccccuggucuccuccccguagccacucu

SEQ ID NO: 313665 - RNA, 32 nt, Homo Sapiens
cccaguugaguuauuuagaauuuuaucucaag

SEQ ID NO: 313666 - RNA, 32 nt, Homo Sapiens
ccgcgccuggccuaguucccucuucuuagaug

SEQ ID NO: 313667 - RNA, 32 nt, Homo Sapiens
uccccggacaacaugaaacaggugaggucagg

SEQ ID NO: 313668 - RNA, 32 nt, Homo Sapiens
gauuuauaaacaagagugauauuuugcuaggg

SEQ ID NO: 313669 - RNA, 32 nt, Homo Sapiens
cgccagcccaggcuugccauggacuggcuccu

SEQ ID NO: 313670 - RNA, 32 nt, Homo Sapiens
uuuucucauuuucuccuggucccucaucuuca

SEQ ID NO: 313671 - RNA, 32 nt, Homo Sapiens
cugcaaauaaacguaaaaauacuguuaaagug

SEQ ID NO: 313672 - RNA, 32 nt, Homo Sapiens
gauugaaauaaaauauaaugggaaauaaucug

SEQ ID NO: 313673 - RNA, 32 nt, Homo Sapiens
gugcuaagacaaggcagacaucuguguguucu

SEQ ID NO: 313674 - RNA, 32 nt, Homo Sapiens
cacaacgaauguuugucucucucuuucauaug

SEQ ID NO: 313675 - RNA, 32 nt, Homo Sapiens
gucaaagacagagagggcugaagccuugucag

SEQ ID NO: 313676 - RNA, 32 nt, Homo Sapiens
gguguuuuuuucugaggcuguguugacagcug

SEQ ID NO: 313677 - RNA, 32 nt, Homo Sapiens
cuugccaagaaucuugggauuuaucuuucuau

SEQ ID NO: 313678 - RNA, 32 nt, Homo Sapiens
ccucucccaagccuggcaggggcacuggcccg

SEQ ID NO: 313679 - RNA, 32 nt, Homo Sapiens
agcuccaaccucagccagcaccagcgcaucca

SEQ ID NO: 313680 - RNA, 32 nt, Homo Sapiens
cuccaagcuuggaacuguuuugaaagauaaca

SEQ ID NO: 313681 - RNA, 27 nt, Homo Sapiens
ugaugugccggggacaccagggugaau

SEQ ID NO: 313682 - RNA, 32 nt, Homo Sapiens
uugaggcuuaguggagaugggcaccacugcca

SEQ ID NO: 313683 - RNA, 32 nt, Homo Sapiens
gcagccuugcagaggacaaggcuggaggcauu

SEQ ID NO: 313684 - RNA, 32 nt, Homo Sapiens
aauguaacaaaguauuuaaaugguugucacac

SEQ ID NO: 313685 - RNA, 32 nt, Homo Sapiens
gaucaccacgcauugaaauauuuucauaucaa

SEQ ID NO: 313686 - RNA, 32 nt, Homo Sapiens
uuuuuucuaaucucagccccuaagaaaccuaa

SEQ ID NO: 313687 - RNA, 32 nt, Homo Sapiens
guagucuuucccuuuauaguuucucuauaaaa

SEQ ID NO: 313688 - RNA, 30 nt, Homo Sapiens
gccacauugucuuccccagaagcucaaacu

SEQ ID NO: 313689 - RNA, 32 nt, Homo Sapiens
uuggccaggccuccucggagaagcuugucccc

SEQ ID NO: 313690 - RNA, 32 nt, Homo Sapiens
aauaggugaaaagccagauccugaccaaacau

SEQ ID NO: 313691 - RNA, 32 nt, Homo Sapiens
ucaacaguuggcuccuggcagcugcugugagc

SEQ ID NO: 313692 - RNA, 32 nt, Homo Sapiens
aguuaaaagagaugaaaaccuuuucagcauaa

SEQ ID NO: 313693 - RNA, 32 nt, Homo Sapiens
ccaaaaauauuuugcuauuucuuucuuuguau

SEQ ID NO: 313694 - RNA, 32 nt, Homo Sapiens
uaguuaauauuugucuuuuuaagaugacugua

SEQ ID NO: 313695 - RNA, 32 nt, Homo Sapiens
cgcgggcccaggguggggaugcaccgccgcgg

SEQ ID NO: 313696 - RNA, 32 nt, Homo Sapiens
aguagcaucugagacuguuggaggcacuaggg

SEQ ID NO: 313697 - RNA, 32 nt, Homo Sapiens
uuaucuugucuuccuaaaacacuauuaagcuu

SEQ ID NO: 313698 - RNA, 32 nt, Homo Sapiens
guucuauauaggaugcuggauuaguuccuuug

SEQ ID NO: 313699 - RNA, 32 nt, Homo Sapiens
agagaagcugucagcagccuacccaggccccg

SEQ ID NO: 313700 - RNA, 32 nt, Homo Sapiens
acucacccuccggcuuccugucggggcuuucu

SEQ ID NO: 313701 - RNA, 32 nt, Homo Sapiens
gagccggcggguguuaguggagcuuggauggg

SEQ ID NO: 313702 - RNA, 32 nt, Homo Sapiens
cccgccucgggccauggugcucucccaggagg

SEQ ID NO: 313703 - RNA, 30 nt, Homo Sapiens
uaauauaaucagauagagauaugcaugcag

SEQ ID NO: 313704 - RNA, 32 nt, Homo Sapiens
acuggaauauaaaacagucauggccugagaug

SEQ ID NO: 313705 - RNA, 30 nt, Homo Sapiens
guccauuaauucaugggggaaccaguaaga

SEQ ID NO: 313706 - RNA, 32 nt, Homo Sapiens
uuuuccgugugggugguuaauaaucgucaguc

SEQ ID NO: 313707 - RNA, 32 nt, Homo Sapiens
auaaaacaugucccaaaccaaaucccacccgu

SEQ ID NO: 313708 - RNA, 32 nt, Homo Sapiens
uuuccgggucauaauuuuaaauuaaagacaua

SEQ ID NO: 313709 - RNA, 32 nt, Homo Sapiens
ucaguaaagaauuuuccaacccaaaauaucau

SEQ ID NO: 313710 - RNA, 32 nt, Homo Sapiens
acugagcucaaggacucuuaugcucguuggcu

SEQ ID NO: 313711 - RNA, 32 nt, Homo Sapiens
cccaaagggaaaaagggaaaagcugaugcugg

SEQ ID NO: 313712 - RNA, 32 nt, Homo Sapiens
ucuggaggaagaguaugacacccacuugugau

SEQ ID NO: 313713 - RNA, 32 nt, Homo Sapiens
augauaaaacugacuguaaauuaauuugggga

SEQ ID NO: 313714 - RNA, 32 nt, Homo Sapiens
caucucagcgccagcucuaccaguucucguuu

SEQ ID NO: 313715 - RNA, 32 nt, Homo Sapiens
uuaucuugaugaauucaucuggcauugcuuug

SEQ ID NO: 313716 - RNA, 32 nt, Homo Sapiens
accucugaacugaaaugugucagaggcaacua

SEQ ID NO: 313717 - RNA, 27 nt, Homo Sapiens
gacgaggacuucuucagccucauucag

SEQ ID NO: 313718 - RNA, 32 nt, Homo Sapiens
cguuuaaaacaaaauauuaacuuauauuacau

SEQ ID NO: 313719 - RNA, 32 nt, Homo Sapiens
caguacggugcagcugaacgugcagcgcgcag

SEQ ID NO: 313720 - RNA, 32 nt, Homo Sapiens
cagcccugcuccugccucuccuccucauaguc

SEQ ID NO: 313721 - RNA, 32 nt, Homo Sapiens
agggaaaagcuaccauguacauucaccccaag

SEQ ID NO: 313722 - RNA, 32 nt, Homo Sapiens
uucccccuucuuuuauacaaguuucuuguuca

SEQ ID NO: 313723 - RNA, 32 nt, Homo Sapiens
gauaaaaauaaucgauguauguuacgggcgcu

SEQ ID NO: 313724 - RNA, 32 nt, Homo Sapiens
acacuugcuggcaaccggcagaagcugagaga

SEQ ID NO: 313725 - RNA, 32 nt, Homo Sapiens
aauguaucuaauguaagugaaaaucuggauuu

SEQ ID NO: 313726 - RNA, 32 nt, Homo Sapiens
cguccugauugacgacuuugccugcagcuucu

SEQ ID NO: 313727 - RNA, 32 nt, Homo Sapiens
cuuuaugugggaagagagaaaaaacuugguga

SEQ ID NO: 313728 - RNA, 32 nt, Homo Sapiens
ucacccauacccauuucuuacaaaauaaguua

SEQ ID NO: 313729 - RNA, 32 nt, Homo Sapiens
ggccuuauuuacuguaauacaaacugguuaaa

SEQ ID NO: 313730 - RNA, 32 nt, Homo Sapiens
cagguaaguauuuaaaauguauuuaauccuuu

SEQ ID NO: 313731 - RNA, 32 nt, Homo Sapiens
agggacuccgaguugugaaaauuagcugggga

SEQ ID NO: 313732 - RNA, 32 nt, Homo Sapiens
uaaggagaugugcaaugcugaaguuagaaaca

SEQ ID NO: 313733 - RNA, 32 nt, Homo Sapiens
guuuguccuuuuuuuucuuaauguggauuuca

SEQ ID NO: 313734 - RNA, 32 nt, Homo Sapiens
gcacacguuugcgaaucagagcugcccggggu

SEQ ID NO: 313735 - RNA, 32 nt, Homo Sapiens
cgcggcaggaggaggggaaagagcugcuggug

SEQ ID NO: 313736 - RNA, 32 nt, Homo Sapiens
cggggaacaugggaaacuucuauaccuuccuc

SEQ ID NO: 313737 - RNA, 32 nt, Homo Sapiens
aggccuagguuaacauuuucaggcgucuuagc

SEQ ID NO: 313738 - RNA, 32 nt, Homo Sapiens
gguucgggagaugcuuccuucuguaacaccag

SEQ ID NO: 313739 - RNA, 32 nt, Homo Sapiens
ggacugcuguauggacaacauacucugcagua

SEQ ID NO: 313740 - RNA, 32 nt, Homo Sapiens
agcuuccuccaccucgcuuccacugcacaggc

SEQ ID NO: 313741 - RNA, 32 nt, Homo Sapiens
uuugcuggucccacuucagaggaggcagaaau

SEQ ID NO: 313742 - RNA, 32 nt, Homo Sapiens
ggaauacuggccaugccuggagacauaucacu

SEQ ID NO: 313743 - RNA, 32 nt, Homo Sapiens
uugagaagauucugaggccuuggucuacuauc

SEQ ID NO: 313744 - RNA, 32 nt, Homo Sapiens
accccgcgcugggcguggcgcgcgaggaggcc

SEQ ID NO: 313745 - RNA, 32 nt, Homo Sapiens
guuuguagugaugggaaguguauuuuacucug

SEQ ID NO: 313746 - RNA, 32 nt, Homo Sapiens
uugauuugaagaacaugugagagguuugacua

SEQ ID NO: 313747 - RNA, 32 nt, Homo Sapiens
accuugccuugacugaggcacuucaugagcuc

SEQ ID NO: 313748 - RNA, 32 nt, Homo Sapiens
aaacaggcucagagacacggaacuuacggagg

SEQ ID NO: 313749 - RNA, 32 nt, Homo Sapiens
aaggaacaaaaauauuauuucuauguaauuua

SEQ ID NO: 313750 - RNA, 32 nt, Homo Sapiens
acccaaaugcaaauuaguccaaaauuaaauag

SEQ ID NO: 313751 - RNA, 32 nt, Homo Sapiens
agguggagucaggucuugggggugucaugucg

SEQ ID NO: 313752 - RNA, 32 nt, Homo Sapiens
gagcgcccggggagggggcgcccggcuuggaa

SEQ ID NO: 313753 - RNA, 32 nt, Homo Sapiens
caacuggaaacacuugaaaggggaccccaggg

SEQ ID NO: 313754 - RNA, 32 nt, Homo Sapiens
gucucagauuuaauuucuuuuaugggucuguu

SEQ ID NO: 313755 - RNA, 32 nt, Homo Sapiens
gccuugcucggggcccaccacccccucaagcc

SEQ ID NO: 313756 - RNA, 32 nt, Homo Sapiens
gcugugccuagacaagugucuuucuguaagag

SEQ ID NO: 313757 - RNA, 32 nt, Homo Sapiens
uaccagucagcuugccugucuuggaguugaaa

SEQ ID NO: 313758 - RNA, 32 nt, Homo Sapiens
cucugcugucuccuuacccugcuccccuacac

SEQ ID NO: 313759 - RNA, 32 nt, Homo Sapiens
ccagccccgggcggccccgcuccagcauccca

SEQ ID NO: 313760 - RNA, 32 nt, Homo Sapiens
ucccgccgcgcgcgaaucgcggucgcgagcca

SEQ ID NO: 313761 - RNA, 32 nt, Homo Sapiens
cgucaaccagagcgugccuccgggccagcuuc

SEQ ID NO: 313762 - RNA, 32 nt, Homo Sapiens
cuaaaagcauauaagagcuugucaauagagca

SEQ ID NO: 313763 - RNA, 32 nt, Homo Sapiens
ucuucuuaaaauguuuacugcugaaagaugag

SEQ ID NO: 313764 - RNA, 32 nt, Homo Sapiens
gcuuuccagacacuaaccaaggcuuccaggcc

SEQ ID NO: 313765 - RNA, 32 nt, Homo Sapiens
uugaguauauuuugaagucuuaaaagacuuag

SEQ ID NO: 313766 - RNA, 32 nt, Homo Sapiens
uagugucucgagcuggacagugaggcaaggcc

SEQ ID NO: 313767 - RNA, 32 nt, Homo Sapiens
aaccuaagucucuucacuuugcuggcaccugc

SEQ ID NO: 313768 - RNA, 32 nt, Homo Sapiens
cacugcacuccagcccgggugacagagcgaga

SEQ ID NO: 313769 - RNA, 32 nt, Homo Sapiens
aaaagucuauguuugcagaaauacagauccaa

SEQ ID NO: 313770 - RNA, 32 nt, Homo Sapiens
ccucgagucuggguaauuuauaaagaaaagag

SEQ ID NO: 313771 - RNA, 32 nt, Homo Sapiens
gggguugggagaaagguggcggugcuuucgga

SEQ ID NO: 313772 - RNA, 32 nt, Homo Sapiens
aauauuucauuuguccacuggaugucacuauu

SEQ ID NO: 313773 - RNA, 32 nt, Homo Sapiens
gccaaccggcccuacuggggcccccaggucug

SEQ ID NO: 313774 - RNA, 32 nt, Homo Sapiens
gaaugaggaacucgguaugugcauguguagac

SEQ ID NO: 313775 - RNA, 32 nt, Homo Sapiens
auacacauauauauguauauauacacauauau

SEQ ID NO: 313776 - RNA, 32 nt, Homo Sapiens
auuuagaaccucagcccuaucuccauuucccu

SEQ ID NO: 313777 - RNA, 32 nt, Homo Sapiens
gagggagggcuucaggacggggcgucagaggg

SEQ ID NO: 313778 - RNA, 32 nt, Homo Sapiens
ugcccguaaucccagcacuuugguaggccaag

SEQ ID NO: 313779 - RNA, 32 nt, Homo Sapiens
uuaaaucagauaccaaauauuuuuuaggaaag

SEQ ID NO: 313780 - RNA, 32 nt, Homo Sapiens
ggacccccgcaugugcauguacucccccagag

SEQ ID NO: 313781 - RNA, 32 nt, Homo Sapiens
cucacggccgcggucugcgucuucguucuuga

SEQ ID NO: 313782 - RNA, 32 nt, Homo Sapiens
ugggcuggaagacggcaauguccgccaccugg

SEQ ID NO: 313783 - RNA, 32 nt, Homo Sapiens
agccgggcgcgguggcgggcgccugugguccc

SEQ ID NO: 313784 - RNA, 32 nt, Homo Sapiens
cucuugcccucuccagugauggaacuguacga

SEQ ID NO: 313785 - RNA, 32 nt, Homo Sapiens
cauucugggccuggcaaggcuacuucagaaug

SEQ ID NO: 313786 - RNA, 32 nt, Homo Sapiens
aaucauuucuucauugaaguggcuuuuuauca

SEQ ID NO: 313787 - RNA, 32 nt, Homo Sapiens
agaaaaagaaagugaagaagucgucaguugug

SEQ ID NO: 313788 - RNA, 32 nt, Homo Sapiens
cacaagcaggguugggggaggggggugugagg

SEQ ID NO: 313789 - RNA, 32 nt, Homo Sapiens
ggggacuuggagaacuuuuaugucuagccaga

SEQ ID NO: 313790 - RNA, 32 nt, Homo Sapiens
ggaagaaaaugaugaugaugccuauuuaaacu

SEQ ID NO: 313791 - RNA, 32 nt, Homo Sapiens
gcgggcucagaccagcagccccaagccccccu

SEQ ID NO: 313792 - RNA, 32 nt, Homo Sapiens
gggggaggggagcccacaggccugcagcccau

SEQ ID NO: 313793 - RNA, 32 nt, Homo Sapiens
ggccccucccacggcucccaauaaaaauguga

SEQ ID NO: 313794 - RNA, 32 nt, Homo Sapiens
auuuuggcugcugguaacuggauguaucccaa

SEQ ID NO: 313795 - RNA, 32 nt, Homo Sapiens
uguggucugagccaaagagaaugccauucucu

SEQ ID NO: 313796 - RNA, 32 nt, Homo Sapiens
augaagaugaugaaugggaugacugguggcug

SEQ ID NO: 313797 - RNA, 32 nt, Homo Sapiens
gacauaggauaaagggaaaauaugucuguuuu

SEQ ID NO: 313798 - RNA, 32 nt, Homo Sapiens
acgauuacagcgcgggcuacagccgcaccgcc

SEQ ID NO: 313799 - RNA, 32 nt, Homo Sapiens
accaaaccaaccccgaaucaucgcucucgcca

SEQ ID NO: 313800 - RNA, 32 nt, Homo Sapiens
cauuccauuauguauugauugucaagaaggaa

SEQ ID NO: 313801 - RNA, 32 nt, Homo Sapiens
uguacacaaucagcagacauagauaaagaagg

SEQ ID NO: 313802 - RNA, 32 nt, Homo Sapiens
ggaggcccugcgugggggccagucaggcugca

SEQ ID NO: 313803 - RNA, 32 nt, Homo Sapiens
uacuuuugcuguuuauacuugagaccaacuuu

SEQ ID NO: 313804 - RNA, 29 nt, Homo Sapiens
uggauuucuguccggguggucacaggugc

SEQ ID NO: 313805 - RNA, 32 nt, Homo Sapiens
ggccccugcuggcucugaccgcccuccuaucc

SEQ ID NO: 313806 - RNA, 32 nt, Homo Sapiens
auagaggugaaaggaaauuauuaaacuauauu

SEQ ID NO: 313807 - RNA, 32 nt, Homo Sapiens
ccuagcugcgcggccccggcccgggagcugcc

SEQ ID NO: 313808 - RNA, 32 nt, Homo Sapiens
aauuaaaugaugcacaaaauaaauggcuguug

SEQ ID NO: 313809 - RNA, 32 nt, Homo Sapiens
ucccagccugucaucaccuuccuccauacgcu

SEQ ID NO: 313810 - RNA, 32 nt, Homo Sapiens
gcauguaaagaauaauuuaacuuuuaacauua

SEQ ID NO: 313811 - RNA, 32 nt, Homo Sapiens
uaacuggaacccagccucuccuccuacaccgg

SEQ ID NO: 313812 - RNA, 32 nt, Homo Sapiens
uuuuguauacacauuacccagcaucucuuuug

SEQ ID NO: 313813 - RNA, 32 nt, Homo Sapiens
cuuuuacuucgggugagcagagggggaugugu

SEQ ID NO: 313814 - RNA, 32 nt, Homo Sapiens
gucggggcguccccaggcccugggucggccgc

SEQ ID NO: 313815 - RNA, 32 nt, Homo Sapiens
acaggccuggccuucaucgucuucaccgaggc

SEQ ID NO: 313816 - RNA, 32 nt, Homo Sapiens
ugcggggaaaauugcacuaaaacagaaccuuu

SEQ ID NO: 313817 - RNA, 32 nt, Homo Sapiens
acagaacuguccagcuccgagaacuggggucc

SEQ ID NO: 313818 - RNA, 32 nt, Homo Sapiens
ccccucucccuucuccuucccggccccaccaa

SEQ ID NO: 313819 - RNA, 32 nt, Homo Sapiens
agcgaggacucggggggcgcgucgggccgcag

SEQ ID NO: 313820 - RNA, 32 nt, Homo Sapiens
cuuguauuuuccugguccaauagugcacuaaa

SEQ ID NO: 313821 - RNA, 32 nt, Homo Sapiens
aucuauuacauaaaauaaagguccaggcauag

SEQ ID NO: 313822 - RNA, 32 nt, Homo Sapiens
uucaguauuuaauucugacagaucugcauccc

SEQ ID NO: 313823 - RNA, 28 nt, Homo Sapiens
cacgaggggcggccuggcccgggaccug

SEQ ID NO: 313824 - RNA, 32 nt, Homo Sapiens
agggccgccuccccggaccgaggcaggaccuc

SEQ ID NO: 313825 - RNA, 32 nt, Homo Sapiens
ccgaacugcacgugggacuaguucuugggaau

SEQ ID NO: 313826 - RNA, 32 nt, Homo Sapiens
gcugcagcgcugagacccccagcccgcccccu

SEQ ID NO: 313827 - RNA, 32 nt, Homo Sapiens
ucuauuuaacuccucagagacaugcacaaacu

SEQ ID NO: 313828 - RNA, 32 nt, Homo Sapiens
aauauuauuucaaagaaauauuacaacuuaac

SEQ ID NO: 313829 - RNA, 32 nt, Homo Sapiens
cuccuggggcagaggaggaaagcaagaggaca

SEQ ID NO: 313830 - RNA, 32 nt, Homo Sapiens
gcagaccgccccacccuccccggcugggaggg

SEQ ID NO: 313831 - RNA, 32 nt, Homo Sapiens
cauugucugguugacaccagguccugguuuug

SEQ ID NO: 313832 - RNA, 32 nt, Homo Sapiens
ugcagguaugcaccaccacaccuggcuaauuu

SEQ ID NO: 313833 - RNA, 31 nt, Homo Sapiens
ggcuuugacauaggaaagguauauuuaaaaa

SEQ ID NO: 313834 - RNA, 32 nt, Homo Sapiens
ugucugcccucccgccgccagcuccugccucg

SEQ ID NO: 313835 - RNA, 32 nt, Homo Sapiens
ucuucuggucuggcggcugugcaucaguggga

SEQ ID NO: 313836 - RNA, 32 nt, Homo Sapiens
uucacuauucuuguuuuccuuugauugauaua

SEQ ID NO: 313837 - RNA, 32 nt, Homo Sapiens
aagauggcggcgcccagaggcugcugaggcgc

SEQ ID NO: 313838 - RNA, 31 nt, Homo Sapiens
gcaccagcggcggucgcuccccgugggcggg

SEQ ID NO: 313839 - RNA, 32 nt, Homo Sapiens
cucgggggccacuguagcgucugccugcuccc

SEQ ID NO: 313840 - RNA, 32 nt, Homo Sapiens
gccaccuccgccucuucagucuccuggucuuc

SEQ ID NO: 313841 - RNA, 32 nt, Homo Sapiens
ucuccucaguuccccugugcagaugggcugug

SEQ ID NO: 313842 - RNA, 30 nt, Homo Sapiens
ucgggaugucggggcugcucacggacccgg

SEQ ID NO: 313843 - RNA, 32 nt, Homo Sapiens
aggggugaaacccuuugaauauggaaaaaguu

SEQ ID NO: 313844 - RNA, 32 nt, Homo Sapiens
gaaacugcaucaggagaauaacaaagaugaga

SEQ ID NO: 313845 - RNA, 32 nt, Homo Sapiens
uggccgggccuggccuguggauaguggggcca

SEQ ID NO: 313846 - RNA, 32 nt, Homo Sapiens
agcccgccgccagccccacgggcagccucggc

SEQ ID NO: 313847 - RNA, 32 nt, Homo Sapiens
gagcccgcaugcauuuguggcuccacaacuac

SEQ ID NO: 313848 - RNA, 32 nt, Homo Sapiens
gaguuuuuucuuucuuucuuuuaaauuaaaua

SEQ ID NO: 313849 - RNA, 32 nt, Homo Sapiens
acugggcacaagccaccugccaaauacaggag

SEQ ID NO: 313850 - RNA, 32 nt, Homo Sapiens
gacacagccacgaaccagacaagcagacaauc

SEQ ID NO: 313851 - RNA, 29 nt, Homo Sapiens
cagagcgccggcgggguacggucuuagga

SEQ ID NO: 313852 - RNA, 32 nt, Homo Sapiens
guugguccacacucagaggcccuuggcgccaa

SEQ ID NO: 313853 - RNA, 32 nt, Homo Sapiens
cagaugugaacagucaagucucugccauccac

SEQ ID NO: 313854 - RNA, 32 nt, Homo Sapiens
cuccgccccucccccucccccucgaacaaaug

SEQ ID NO: 313855 - RNA, 32 nt, Homo Sapiens
aaagaccuccaaggguacuucuuuggaaauga

SEQ ID NO: 313856 - RNA, 32 nt, Homo Sapiens
ucuggccuguugugcuggccuuuggucuaagu

SEQ ID NO: 313857 - RNA, 32 nt, Homo Sapiens
gccacggacuucugcccuucaucugcucucuc

SEQ ID NO: 313858 - RNA, 32 nt, Homo Sapiens
gaaaauguguagccagacacacacagacauug

SEQ ID NO: 313859 - RNA, 32 nt, Homo Sapiens
aucugggguucucagguucacucauugacaug

SEQ ID NO: 313860 - RNA, 32 nt, Homo Sapiens
uaacuaauaaaguggaauauauauuucaaaaa

SEQ ID NO: 313861 - RNA, 32 nt, Homo Sapiens
uaauaagccaauuuuuguguauuguuacaguu

SEQ ID NO: 313862 - RNA, 32 nt, Homo Sapiens
ugcucggggaugcacacgcagcucgcggccgg

SEQ ID NO: 313863 - RNA, 32 nt, Homo Sapiens
aaggaggagcuggaauaggaccaagaaugucc

SEQ ID NO: 313864 - RNA, 32 nt, Homo Sapiens
caggccugacagagcccggcagccaugagugc

SEQ ID NO: 313865 - RNA, 32 nt, Homo Sapiens
cacuguggccgcugcgccggggccuggcuucu

SEQ ID NO: 313866 - RNA, 32 nt, Homo Sapiens
acagcaccaucccagccccgaagcccgggcca

SEQ ID NO: 313867 - RNA, 32 nt, Homo Sapiens
cuagagggauucugaggccaccugccuacccc

SEQ ID NO: 313868 - RNA, 32 nt, Homo Sapiens
ucugccugauccaccuccuccucccaccacaa

SEQ ID NO: 313869 - RNA, 32 nt, Homo Sapiens
aacagaaacaucuuuaggauauuuuugucuga

SEQ ID NO: 313870 - RNA, 32 nt, Homo Sapiens
cucuguugcagggcucaacguggggauauguc

SEQ ID NO: 313871 - RNA, 32 nt, Homo Sapiens
acgugcugccgggucucaggauggaggaguga

SEQ ID NO: 313872 - RNA, 32 nt, Homo Sapiens
ggacccccgagcuugagccccggagccggcgg

SEQ ID NO: 313873 - RNA, 32 nt, Homo Sapiens
acauucccuucccuguuccccagagagcccac

SEQ ID NO: 313874 - RNA, 32 nt, Homo Sapiens
uucacaaauuuuagaauaaaucaaauauucca

SEQ ID NO: 313875 - RNA, 32 nt, Homo Sapiens
aaguuauuacuuuggucauuauuggaauauuu

SEQ ID NO: 313876 - RNA, 32 nt, Homo Sapiens
guccgccccgucccacacuacgcccccgcccc

SEQ ID NO: 313877 - RNA, 32 nt, Homo Sapiens
uauuuaucucaaaacucuuaauauaugcagac

SEQ ID NO: 313878 - RNA, 32 nt, Homo Sapiens
ccccgugggccauggcaauuuuuacacaaacc

SEQ ID NO: 313879 - RNA, 32 nt, Homo Sapiens
uauaauguauuuucuuuuuauuuugcacucug

SEQ ID NO: 313880 - RNA, 32 nt, Homo Sapiens
uggccucgcccuccccgccaggcaccuggcuu

SEQ ID NO: 313881 - RNA, 32 nt, Homo Sapiens
ugaaaaggaaauggauuccaaucucuuccaac

SEQ ID NO: 313882 - RNA, 32 nt, Homo Sapiens
aaauaaguucccucugagcaaccagaacaugc

SEQ ID NO: 313883 - RNA, 32 nt, Homo Sapiens
cggcauuggucccaggcagcaguuagcccgcc

SEQ ID NO: 313884 - RNA, 32 nt, Homo Sapiens
ggauggggggcuuggagaagggcggagcccac

SEQ ID NO: 313885 - RNA, 32 nt, Homo Sapiens
cgacauggugucgccuccucccggggcggcgg

SEQ ID NO: 313886 - RNA, 32 nt, Homo Sapiens
caacucuugaggaaacaagugcaaaggaggau

SEQ ID NO: 313887 - RNA, 32 nt, Homo Sapiens
gagggcaagagugagcaagagauggaaguugc

SEQ ID NO: 313888 - RNA, 32 nt, Homo Sapiens
aggccgggaggaagagacccagacgggggcug

SEQ ID NO: 313889 - RNA, 32 nt, Homo Sapiens
aagaaaaaacaaaaacuuuaacuuuguguaaa

SEQ ID NO: 313890 - RNA, 32 nt, Homo Sapiens
acuagcuauuuuuucuuuaauuagggcuggaa

SEQ ID NO: 313891 - RNA, 32 nt, Homo Sapiens
gccggacacugacugcccagaguccguccagc

SEQ ID NO: 313892 - RNA, 32 nt, Homo Sapiens
cagaugcuuuuauuuccaaaccuuuuuuucac

SEQ ID NO: 313893 - RNA, 32 nt, Homo Sapiens
aaacaaaaacaaacagagcgagaagggccaga

SEQ ID NO: 313894 - RNA, 32 nt, Homo Sapiens
aagcaggaaaggaaagguuggcugaacaggga

SEQ ID NO: 313895 - RNA, 32 nt, Homo Sapiens
guugauguaauugcuuuguuugcaauagcaca

SEQ ID NO: 313896 - RNA, 32 nt, Homo Sapiens
agauugcaaccuggccugcaucccagcuccuu

SEQ ID NO: 313897 - RNA, 32 nt, Homo Sapiens
uuuccuuaucuaaaaagugugguuaauaauaa

SEQ ID NO: 313898 - RNA, 32 nt, Homo Sapiens
ggcggcggugcugggccaggggaaggaaggga

SEQ ID NO: 313899 - RNA, 32 nt, Homo Sapiens
cauuaucagaaauuaaagaaauuucugaauaa

SEQ ID NO: 313900 - RNA, 32 nt, Homo Sapiens
accccagaauauauuucuuugacauauuuuga

SEQ ID NO: 313901 - RNA, 32 nt, Homo Sapiens
acaucaacagagcaaccagaaagacauugggc

SEQ ID NO: 313902 - RNA, 32 nt, Homo Sapiens
cacgugccauugcucccaaguggcagcuccug

SEQ ID NO: 313903 - RNA, 32 nt, Homo Sapiens
gggcguuugggcugcggugcugcgucauuuuu

SEQ ID NO: 313904 - RNA, 32 nt, Homo Sapiens
cccucuaaccucgcccucuccuuuguucccgg

SEQ ID NO: 313905 - RNA, 30 nt, Homo Sapiens
ugaggcaagaggauccuugagucugggaga

SEQ ID NO: 313906 - RNA, 32 nt, Homo Sapiens
cuuuaggccauggcugggagggggucucuggc

SEQ ID NO: 313907 - RNA, 32 nt, Homo Sapiens
ggagccaaaguaggguguuguauuuuaggggg

SEQ ID NO: 313908 - RNA, 32 nt, Homo Sapiens
gcugcuugguuuuauagguauuagggcucaug

SEQ ID NO: 313909 - RNA, 32 nt, Homo Sapiens
cauaguccuguaauucauuuugcuuaaacgag

SEQ ID NO: 313910 - RNA, 32 nt, Homo Sapiens
gcuguggaggagggacugcugcagcuagagcu

SEQ ID NO: 313911 - RNA, 31 nt, Homo Sapiens
aaguuucauuugaucugaauaguauuaaaau

SEQ ID NO: 313912 - RNA, 32 nt, Homo Sapiens
uggucuggcuuucacaucaucuuugagaggcu

SEQ ID NO: 313913 - RNA, 32 nt, Homo Sapiens
cuaggacgccgggacccccuggaagccuagaa

SEQ ID NO: 313914 - RNA, 32 nt, Homo Sapiens
uggggaagcuucacaaucauggcggaagguga

SEQ ID NO: 313915 - RNA, 32 nt, Homo Sapiens
agaucggaaguuaagagagcucccuccgaaga

SEQ ID NO: 313916 - RNA, 32 nt, Homo Sapiens
gcauuuggaaaacuguugaaaucaauuccuuu

SEQ ID NO: 313917 - RNA, 32 nt, Homo Sapiens
uaaauuucaaggaaauaugaaggcacuuccuu

SEQ ID NO: 313918 - RNA, 32 nt, Homo Sapiens
aauccuggauacugccacggacuacaauucua

SEQ ID NO: 313919 - RNA, 32 nt, Homo Sapiens
ccuguggccauguaaaaagagaauuaaacucu

SEQ ID NO: 313920 - RNA, 32 nt, Homo Sapiens
gcuccaccgcacaccucccgggcccgcugcuc

SEQ ID NO: 313921 - RNA, 32 nt, Homo Sapiens
gacaagucaggauugugccuccagucagaagg

SEQ ID NO: 313922 - RNA, 32 nt, Homo Sapiens
cuacaaauuugaggacaagauaccaaggcaaa

SEQ ID NO: 313923 - RNA, 32 nt, Homo Sapiens
cccuuccugggagaggcuguuaacacggggga

SEQ ID NO: 313924 - RNA, 32 nt, Homo Sapiens
cccucagugucaucuguccacagugauaccug

SEQ ID NO: 313925 - RNA, 32 nt, Homo Sapiens
uucucuugcuucagccucccaaguagcugaga

SEQ ID NO: 313926 - RNA, 32 nt, Homo Sapiens
cugagggauguggucagcaguccccaccagcu

SEQ ID NO: 313927 - RNA, 32 nt, Homo Sapiens
auggcuuuaaaauaaugaauauguaaaaguga

SEQ ID NO: 313928 - RNA, 32 nt, Homo Sapiens
ccugcaguggccugggcaacccuccggacucu

SEQ ID NO: 313929 - RNA, 32 nt, Homo Sapiens
cugacaaagacagugugacaaguucugagccc

SEQ ID NO: 313930 - RNA, 32 nt, Homo Sapiens
ggagcuguucuucuucagccaucuugcccgcu

SEQ ID NO: 313931 - RNA, 32 nt, Homo Sapiens
aucggguuauacggauggaagaacucccuuug

SEQ ID NO: 313932 - RNA, 32 nt, Homo Sapiens
ggucacaaggaccccuuugccuagcccaaagc

SEQ ID NO: 313933 - RNA, 32 nt, Homo Sapiens
agggaguaaggcuggacuccaauggcccauuc

SEQ ID NO: 313934 - RNA, 32 nt, Homo Sapiens
auucccacgaccagcugcccuucuggccgccc

SEQ ID NO: 313935 - RNA, 32 nt, Homo Sapiens
ucuuauugaucuuuaaagaugugcuaaaugac

SEQ ID NO: 313936 - RNA, 32 nt, Homo Sapiens
cucuuguuuaaagaagcccagggagggauaga

SEQ ID NO: 313937 - RNA, 32 nt, Homo Sapiens
gccuuggauaguauggcuuguuuuuggaaaga

SEQ ID NO: 313938 - RNA, 32 nt, Homo Sapiens
aguggcugagaccgaccacgguucuugacuua

SEQ ID NO: 313939 - RNA, 32 nt, Homo Sapiens
ggugcccauuagauuucuuuaguacagaaccu

SEQ ID NO: 313940 - RNA, 32 nt, Homo Sapiens
cugaggcccaccuuaucccaaccccggaguua

SEQ ID NO: 313941 - RNA, 32 nt, Homo Sapiens
gaaugaggcugcagagauggggaccagaagcc

SEQ ID NO: 313942 - RNA, 32 nt, Homo Sapiens
gacagugccucacucugucacccaggcuggag

SEQ ID NO: 313943 - RNA, 32 nt, Homo Sapiens
cauguuauguaguggauagccaaagaugauaa

SEQ ID NO: 313944 - RNA, 32 nt, Homo Sapiens
uagaaaucugacagauuugaccaagauuugga

SEQ ID NO: 313945 - RNA, 31 nt, Homo Sapiens
ggauuuacaaagaaauaggaaauguuuauca

SEQ ID NO: 313946 - RNA, 32 nt, Homo Sapiens
gccaaagccagaccacugggguuuccugcugc

SEQ ID NO: 313947 - RNA, 32 nt, Homo Sapiens
ugcuuugucacugaagguuagaucugaaccca

SEQ ID NO: 313948 - RNA, 32 nt, Homo Sapiens
cugacccagcuggccucggcccggggcaccuu

SEQ ID NO: 313949 - RNA, 32 nt, Homo Sapiens
ccgucucgccuggggccagcgggagucccggg

SEQ ID NO: 313950 - RNA, 32 nt, Homo Sapiens
uuucagagggcugccuaaaauauuuuauuucu

SEQ ID NO: 313951 - RNA, 32 nt, Homo Sapiens
uguuggugcuagaggcagcugcagggucucgc

SEQ ID NO: 313952 - RNA, 32 nt, Homo Sapiens
auaguccuucaccccugaaaccccguauuuac

SEQ ID NO: 313953 - RNA, 32 nt, Homo Sapiens
accagacaguucuuaaauuagcaagccuucaa

SEQ ID NO: 313954 - RNA, 32 nt, Homo Sapiens
cuuuucuuucuuucuuuuuuuuaaccucuaca

SEQ ID NO: 313955 - RNA, 32 nt, Homo Sapiens
acugcuaguggagucacagacacacucugcca

SEQ ID NO: 313956 - RNA, 32 nt, Homo Sapiens
uggaugucgcaauaauacaaaccaacguaccu

SEQ ID NO: 313957 - RNA, 32 nt, Homo Sapiens
uuauaagauauguagaagaaaacauccaucag

SEQ ID NO: 313958 - RNA, 32 nt, Homo Sapiens
ucgacuucucgcacgggcuggcgcucuacgag

SEQ ID NO: 313959 - RNA, 32 nt, Homo Sapiens
caaaugcaagggaauuaauguauaacauauau

SEQ ID NO: 313960 - RNA, 32 nt, Homo Sapiens
uguggcuuuccacgugagguuuuguuuagagg

SEQ ID NO: 313961 - RNA, 30 nt, Homo Sapiens
acggcugucuguggcuuaagggcuuuugga

SEQ ID NO: 313962 - RNA, 32 nt, Homo Sapiens
gcucucaaacuccccgaugcaaugccuucuga

SEQ ID NO: 313963 - RNA, 32 nt, Homo Sapiens
uucacuucuugccuucuguggauuuugucuga

SEQ ID NO: 313964 - RNA, 32 nt, Homo Sapiens
uuuuccuuuuuuucuuuuuuuuuucuuuuuuu

SEQ ID NO: 313965 - RNA, 32 nt, Homo Sapiens
uuccuucccucuucuuucuucuuuucucuccc

SEQ ID NO: 313966 - RNA, 32 nt, Homo Sapiens
aggagaucgagaccguccuggccgacauggug

SEQ ID NO: 313967 - RNA, 27 nt, Homo Sapiens
ucaugagugaauggaugaagaaaggcc

SEQ ID NO: 313968 - RNA, 32 nt, Homo Sapiens
caccccugccagccucccuggacaccaccgac

SEQ ID NO: 313969 - RNA, 32 nt, Homo Sapiens
uugccuucaacuauauauauuuguuauauuca

SEQ ID NO: 313970 - RNA, 32 nt, Homo Sapiens
cccacagccagccccagaugcuucugacagaa

SEQ ID NO: 313971 - RNA, 32 nt, Homo Sapiens
uucccaaaacaaugugucagauucuauuguau

SEQ ID NO: 313972 - RNA, 32 nt, Homo Sapiens
uccagcuuuccacacaguuguugcugccuauu

SEQ ID NO: 313973 - RNA, 32 nt, Homo Sapiens
uuaauaaagccacaggcaggcaucguagcucc

SEQ ID NO: 313974 - RNA, 32 nt, Homo Sapiens
cccagcacugcaggcagcggcgcaggaagcgg

SEQ ID NO: 313975 - RNA, 32 nt, Homo Sapiens
ugagugugauagggaagaaguagcacugcugu

SEQ ID NO: 313976 - RNA, 30 nt, Homo Sapiens
auuugaugucugcuguacuaagaucggaaa

SEQ ID NO: 313977 - RNA, 32 nt, Homo Sapiens
gcccggccucaucgugccggcuucgcgcgcga

SEQ ID NO: 313978 - RNA, 32 nt, Homo Sapiens
gaguauaugcacuuuccaaauuggggacaagg

SEQ ID NO: 313979 - RNA, 31 nt, Homo Sapiens
ccccaucagcucagccaaccauagcagaucc

SEQ ID NO: 313980 - RNA, 32 nt, Homo Sapiens
ccgcuggccccggggccccggcugggguugag

SEQ ID NO: 313981 - RNA, 32 nt, Homo Sapiens
uugguuuuugaacacguaaacaacacagacuu

SEQ ID NO: 313982 - RNA, 32 nt, Homo Sapiens
gccucagcgugcuaaucaauggcugcagaaac

SEQ ID NO: 313983 - RNA, 32 nt, Homo Sapiens
cccaaccccucgcgcccgcgcguucgcggauc

SEQ ID NO: 313984 - RNA, 32 nt, Homo Sapiens
ugcucucccuggacgaccggccucgaggcaac

SEQ ID NO: 313985 - RNA, 32 nt, Homo Sapiens
gcagaucccucuuuuccaguucuccuuccucu

SEQ ID NO: 313986 - RNA, 32 nt, Homo Sapiens
uggcugguccugggaaagaaagugggaaaagc

SEQ ID NO: 313987 - RNA, 32 nt, Homo Sapiens
auaucucuauagacaaaugugauaaugacaug

SEQ ID NO: 313988 - RNA, 32 nt, Homo Sapiens
guauuuuguuaaguacagauaaaagcuauugu

SEQ ID NO: 313989 - RNA, 32 nt, Homo Sapiens
uggaguggcagcuggggugauggccagggcag

SEQ ID NO: 313990 - RNA, 32 nt, Homo Sapiens
gaugaggauauuauuggaccaaugccugcaaa

SEQ ID NO: 313991 - RNA, 32 nt, Homo Sapiens
accccucguccucaguucugcggagacagagu

SEQ ID NO: 313992 - RNA, 32 nt, Homo Sapiens
uggaaaacuuggcucuuaauucgggugccgac

SEQ ID NO: 313993 - RNA, 32 nt, Homo Sapiens
aauguuaacauggacaugaucuucuuuauaau

SEQ ID NO: 313994 - RNA, 32 nt, Homo Sapiens
gcuggcaggagagaagcagggugggcugcugg

SEQ ID NO: 313995 - RNA, 32 nt, Homo Sapiens
cugcccgccucggccucccaaagugcuggaac

SEQ ID NO: 313996 - RNA, 32 nt, Homo Sapiens
gaauguaaguugcucaguuauacuguucuucu

SEQ ID NO: 313997 - RNA, 32 nt, Homo Sapiens
gggguuucccccugugcccugacagccgcucc

SEQ ID NO: 313998 - RNA, 32 nt, Homo Sapiens
acgcccagcuaauuuuuuguauuuucauuaga

SEQ ID NO: 313999 - RNA, 32 nt, Homo Sapiens
gggagcugugcagcugaccuguaucgacaccc

SEQ ID NO: 314000 - RNA, 32 nt, Homo Sapiens
cacagggugguuucacucuccucucuccuucu

SEQ ID NO: 314001 - RNA, 32 nt, Homo Sapiens
aaguuaagcugauauacgaugauaauaacugc

SEQ ID NO: 314002 - RNA, 28 nt, Homo Sapiens
gccaugacgacgggugacugcugccacc

SEQ ID NO: 314003 - RNA, 32 nt, Homo Sapiens
cuagcugcaaaauaaacuuguugcugaccugc

SEQ ID NO: 314004 - RNA, 32 nt, Homo Sapiens
ucagcuugaugaugauauugauggugagacua

SEQ ID NO: 314005 - RNA, 32 nt, Homo Sapiens
aggucauaauuuccucggagaccuguuuaaca

SEQ ID NO: 314006 - RNA, 32 nt, Homo Sapiens
gagccccuggacgaggcccacggagccgcucg

SEQ ID NO: 314007 - RNA, 32 nt, Homo Sapiens
auugguuugucaacaagaauguuaacugauga

SEQ ID NO: 314008 - RNA, 32 nt, Homo Sapiens
agauacuucccauuuuggaaguuuucaggacu

SEQ ID NO: 314009 - RNA, 32 nt, Homo Sapiens
ccuugauucuucaacagaguccagauuuaaau

SEQ ID NO: 314010 - RNA, 32 nt, Homo Sapiens
uggugcauauauauuacaucuuggugaauuuu

SEQ ID NO: 314011 - RNA, 32 nt, Homo Sapiens
uugucagaggugguggccgcugaaacaggcaa

SEQ ID NO: 314012 - RNA, 32 nt, Homo Sapiens
ucaugugagauccuacgggaaaaggauucuau

SEQ ID NO: 314013 - RNA, 32 nt, Homo Sapiens
gaugauucaggagaguguauaugaaugaauaa

SEQ ID NO: 314014 - RNA, 32 nt, Homo Sapiens
cuggaguuuggcagaccugaaacgcccacaac

SEQ ID NO: 314015 - RNA, 32 nt, Homo Sapiens
augaggcccagcugagagcagcucagcucggu

SEQ ID NO: 314016 - RNA, 32 nt, Homo Sapiens
ggagcagcugcgcucccggcgcugugcucguc

SEQ ID NO: 314017 - RNA, 32 nt, Homo Sapiens
caggaaggcucuuuuccaccuguggcuucacu

SEQ ID NO: 314018 - RNA, 32 nt, Homo Sapiens
acuugagcggagcccgauauucucccugaccu

SEQ ID NO: 314019 - RNA, 32 nt, Homo Sapiens
aaaaaaaaaaagcccaauacuuagagucccaa

SEQ ID NO: 314020 - RNA, 32 nt, Homo Sapiens
ggaggagcacgcgucccgcucgggcgcacucu

SEQ ID NO: 314021 - RNA, 32 nt, Homo Sapiens
gccccgggaaucuggaggggccguggggcgga

SEQ ID NO: 314022 - RNA, 32 nt, Homo Sapiens
ugaaggaaggguggagguggggggagggccgg

SEQ ID NO: 314023 - RNA, 32 nt, Homo Sapiens
cgcucuuacccccacuguaguggccuuuggag

SEQ ID NO: 314024 - RNA, 32 nt, Homo Sapiens
caccagugggaaaacuccuagaguaacugcca

SEQ ID NO: 314025 - RNA, 32 nt, Homo Sapiens
uuguugauguuuauuucagaaucuugugugau

SEQ ID NO: 314026 - RNA, 32 nt, Homo Sapiens
caugccgcugccuggggucuugcucgaacgca

SEQ ID NO: 314027 - RNA, 32 nt, Homo Sapiens
ggcugcucgcuaaccuguggcugauccuugac

SEQ ID NO: 314028 - RNA, 32 nt, Homo Sapiens
ucccacccgcuuggcagccgggacugcucucc

SEQ ID NO: 314029 - RNA, 32 nt, Homo Sapiens
gcuuuuuaaauagaaaaauguauaaaauuaga

SEQ ID NO: 314030 - RNA, 32 nt, Homo Sapiens
auguaaaauuucaaguugacaacuauaguagu

SEQ ID NO: 314031 - RNA, 32 nt, Homo Sapiens
cuagauccugguguuucuauguucuuuuuuaa

SEQ ID NO: 314032 - RNA, 32 nt, Homo Sapiens
gcauuuuuaaguguuucauguagacagauuaa

SEQ ID NO: 314033 - RNA, 32 nt, Homo Sapiens
ucuaaaggcaauuuaaaaaucaugucaagcuc

SEQ ID NO: 314034 - RNA, 32 nt, Homo Sapiens
uuggaauuagauguuauaucaaaugagcaucu

SEQ ID NO: 314035 - RNA, 32 nt, Homo Sapiens
uggaggauaaccucaugaaaggugccguuuuc

SEQ ID NO: 314036 - RNA, 29 nt, Homo Sapiens
ucgggcucggcagaagggacgccggauca

SEQ ID NO: 314037 - RNA, 32 nt, Homo Sapiens
caguuuggccuggccugacacuggcugcccca

SEQ ID NO: 314038 - RNA, 30 nt, Homo Sapiens
uugugugcaaauauaaacuauuauaaaucu

SEQ ID NO: 314039 - RNA, 32 nt, Homo Sapiens
ugauggugaugaugaugaaagcaguaaugaac

SEQ ID NO: 314040 - RNA, 32 nt, Homo Sapiens
ucuggaagggcuauccugggggugaacuugaa

SEQ ID NO: 314041 - RNA, 32 nt, Homo Sapiens
cgccgccgccaccucgucuccuccccgucccc

SEQ ID NO: 314042 - RNA, 32 nt, Homo Sapiens
aagauggcuacuuaggaccauauggauguugu

SEQ ID NO: 314043 - RNA, 32 nt, Homo Sapiens
cucagcccauccccaggccucuccuccuaugc

SEQ ID NO: 314044 - RNA, 32 nt, Homo Sapiens
aguuuuuucuucauuuguauuuuaguuaauac

SEQ ID NO: 314045 - RNA, 32 nt, Homo Sapiens
gaaauuuaccccacaagaggccuauucucacc

SEQ ID NO: 314046 - RNA, 32 nt, Homo Sapiens
ccugagaggagcuucugcuacucugcaucacu

SEQ ID NO: 314047 - RNA, 32 nt, Homo Sapiens
cuccccgccggcuguccgcaaccuccgccagc

SEQ ID NO: 314048 - RNA, 32 nt, Homo Sapiens
cuuccacuuuuacuuuucguccaaauaaaaug

SEQ ID NO: 314049 - RNA, 32 nt, Homo Sapiens
gagcucauuucccugggucccuuuuccuuagc

SEQ ID NO: 314050 - RNA, 32 nt, Homo Sapiens
ucccagcgccugggcuggcccagagcugucag

SEQ ID NO: 314051 - RNA, 32 nt, Homo Sapiens
cgggagcagccggaggacucgcggcggcgccg

SEQ ID NO: 314052 - RNA, 32 nt, Homo Sapiens
agaggcugaaaagaaagcagaggagaacccag

SEQ ID NO: 314053 - RNA, 32 nt, Homo Sapiens
ccagugacauucaaauguugauguaucugguu

SEQ ID NO: 314054 - RNA, 32 nt, Homo Sapiens
ccucaugcuguauguuuagauuugugauuuua

SEQ ID NO: 314055 - RNA, 32 nt, Homo Sapiens
gcugguagggguggagcagguaggaaacagca

SEQ ID NO: 314056 - RNA, 32 nt, Homo Sapiens
caucuccucauccucccccagcccuugaauag

SEQ ID NO: 314057 - RNA, 32 nt, Homo Sapiens
gucaugaacucauccuuuuuuauggcugcgua

SEQ ID NO: 314058 - RNA, 32 nt, Homo Sapiens
acauguagucgccuccaccucccugccugaac

SEQ ID NO: 314059 - RNA, 32 nt, Homo Sapiens
cugcauugaggguggggguaauugucucuugg
